(19) United States
(12) Patent Application Publication
(10) Pub. No.: US 2024/0309344 A1
(43) Pub. Date: Sep. 19, 2024

(54) COMPOSITIONS AND METHODS FOR THE TARGETING OF C9orf72

(71) Applicant: Scribe Therapeutics Inc., Alameda, CA (US)

(72) Inventors: Benjamin OAKES, El Cerrito, CA (US); Hannah SPINNER, Boston, MA (US); Sarah DENNY, San Francisco, CA (US); Brett T. STAAHL, Tiburon, CA (US); Kian TAYLOR, Atlanta, GA (US); Katherine BANEY, Berkeley, CA (US); Isabel COLIN, Oakland, CA (US); Maroof ADIL, Davis, CA (US); Cole URNES, Los Angeles, CA (US); Sean HIGGINS, Alameda, CA (US)

(21) Appl. No.: 17/932,798

(22) Filed: Sep. 16, 2022

Related U.S. Application Data
(63) Continuation of application No. PCT/US21/22840, filed on Mar. 17, 2021.
(60) Provisional application No. 62/991,403, filed on Mar. 18, 2020.

(51) Int. Cl. C12N 9/22; C12N 15/11; C12N 15/86

(52) U.S. Cl. CPC C12N 9/22; C12N 15/111; C12N 15/86; C07K 2319/09; C12N 2310/531; C12N 2750/14141

(57) ABSTRACT

Provided herein are Class 2 Type V systems comprising nucleases, guide nucleic acids (gNA), and optionally donor template nucleic acids useful in the modification of a C9orf72 gene. The systems are also useful for introduction into cells, for example eukaryotic cells having mutations or duplications in the C9orf72 gene. Also provided are methods of using such systems to modify cells having such mutations or duplications.

### CROSS REFERENCE TO RELATED APPLICATIONS

[0001] This application claims priority to U.S. provisional patent application No. 62/991,403 filed on Mar. 18, 2020, the contents of which are incorporated by reference in their entirety herein.

### INCORPORATION BY REFERENCE OF SEQUENCE LISTING

[0002] The contents of the text file submitted electronically herewith are incorporated herein by reference in their entirety: A computer readable format copy of the Sequence Listing (filename: SCRB-025-01WO_SeqList_ST25.txt; date recorded: Mar. 12, 2021; file size: 5.61 Megabytes).

### BACKGROUND

[0003] Amyotrophic lateral sclerosis (ALS) and frontotemporal dementia (FTD) are forms of progressive neurological diseases with devastating outcomes. ALS is a fatal neurodegenerative disease characterized clinically by progressive paralysis leading to death from respiratory failure, typically within two to three years of symptom onset, and is the third most common neurodegenerative disease in the Western world (Rowland and Shneider, N. Engl. J. Med., 2001, 344, 1688-1700; Hirtz et al., Neurology, 2007, 68, 326-337). FTD is the second most common cause of pre-senile dementia in which degeneration of the frontal and temporal lobes of the brain results in progressive changes in personality, behavior, and language with relative preservation of perception and memory (Graff-Radford, N and Woodruff, B. Frontotemporal dementia. Semin. Neurol. 27(1):48 (2007)).

[0004] Chromosome 9 open reading frame 72 protein is a protein encoded by the C9orf72 gene (sometimes also referred to as C9orf72-SMCR8 complex subunit). Forms of disease related to mutations or abnormalities in the C9orf72 gene include FTD and ALS. The protein is found in many regions of the brain, including the cytoplasm of neurons, as well as in presynaptic terminals. In particular, the relevant mutation in the C9orf72 gene in connection with FTD and ALS is a hexanucleotide repeat expansion of the six letter string of nucleotides GGGGCC that occurs is located either in intron 1, between two 5′-untranslated region (5′-UTR) exons, or in the promoter region of the C9orf72 gene (DeJesus-Hernandez, M., et al. Expanded GGGGCC hexanucleotide repeat in noncoding region of C9ORF72 causes chromosome 9p-linked FTD and ALS. Neuron 72: 245 (2011); Niblock, M., et al. Retention of hexanucleotide repeat-containing intron in C9orf72 mRNA: implications for the pathogenesis of ALS/FTD. Acta Neuropathologica Communications 4:18 (2016)). Accordingly, the presence of the hexanucleotide repeat sequence (HRS) expansion does not alter the coding sequence of the resulting C9orf72 protein. In healthy individuals, there are few repeats of this hexanucleotide, typically 30 or less, but in people with the diseased phenotype, the repeat units range from approximately 700 to 1600 (Mori K., et al. The C9orf72 GGGGCC repeat is translated into aggregating dipeptide-repeat proteins in FTLD/ALS. Science. 339:1335 (2013)). It is believed that the repeat hexanucleotide expansion leads to the loss of one alternatively spliced C9orf72 transcript and to formation and the accumulation of insoluble dipeptide repeat protein aggregates by repeat-associated non-AUG-initiated (RAN) translation, most containing poly-(Gly-Ala) and, to a lesser extent, poly-(Gly-Pro) and poly-(Gly-Arg) dipeptide-repeat proteins (DPR) that are extremely hydrophobic and could be pathogenic in FTD-ALS patients (Mori K., et al. 2013; Niblock, M., et al. 2016). Furthermore, three main disease mechanisms have been proposed: loss of function of the C9orf72 protein, toxic gain of function from C9orf72 repeat RNA through accumulation in the frontal cortex and spinal cord of RNA transcripts containing the repeat as well as the antisense GGCCCC RNA, or from accumulation of DPR produced by repeat-associated non-ATG translation (Balendra R, Isaacs A M. C9orf72-mediated ALS and FTD: multiple pathways to disease. Nat Rev Neurol. 14:544 (2018)). The inheritance of the C9orf72 mutation is autosomal dominant (Iyer et al. C9orf72, a protein associated with amyotrophic lateral sclerosis (ALS) is a guanine nucleotide exchange factor. PeerJ 6:e5815 (2018)).

[0005] The advent of CRISPR/Cas systems and the programmable nature of these minimal systems has facilitated their use as a versatile technology for genomic manipulation and engineering. However, efforts to correct C9orf72-related diseases such as FTD and ALS by genetic engineering have received limited attention. Thus, there is a need for compositions and methods to regulate C9orf72 in subjects with C9orf72-related diseases. Provided herein are compositions and methods for targeting the C9orf72 gene to the address this need.

### SUMMARY

[0006] The present disclosure provides compositions of modified Class 2, Type V CRISPR proteins and guide nucleic acids used in the editing of chromosome 9 open reading frame 72 (C9orf72) gene target nucleic acid sequences. The Class 2 Type V CRISPR proteins and guide nucleic acids are modified for passive entry into target cells. The Class 2 Type V CRISPR proteins and guide nucleic acids are useful in a variety of methods for target nucleic acid modification of C9orf72-related diseases, which methods are also provided.

[0007] In one aspect, the present disclosure relates to CasX:guide nucleic acid systems (CasX:gNA system) and methods used to alter a target nucleic acid comprising the C9orf72 gene with one or more mutations or that comprises the hexanucleotide repeat sequence expansion (HRS) in cells. In some embodiments of the disclosure, the CasX:gNA system has utility in knocking-down or knocking-out a C9orf72 gene with one or more mutations or that comprises the hexanucleotide repeat sequence expansion (HRS), in order to reduce or eliminate expression of the C9orf72 gene product, accumulation of the RNA from the HRS, and/or the DPR in subjects having a C9orf72-related disease. In other embodiments, the CasX:gNA system has utility in correcting the C9orf72 gene comprising the HRS.

[0008] In some embodiments of the system, the gNA is a gRNA, or a gDNA, or a chimera of RNA and DNA, and may be a single-molecule gNA or a dual-molecule gNA. In other embodiments, the CasX:gNA system gNA has a targeting sequence complementary to a target nucleic acid sequence comprising a region within the C9orf72 gene. In some embodiments, the targeting sequence of the gNA is selected from the group consisting of SEQ ID NOS: 309-343, 363-2100, 2295-2185, or a sequence having at least about 65%, at least about 75%, at least about 85%, or at least about 95% identity thereto. The gNA can comprise a targeting sequence comprising 14 to 30 consecutive nucleotides. In some embodiments, the targeting sequence of the gNA consists of 21 nucleotides. In other embodiments, the targeting sequence of the gNA consists of 20 nucleotides. In other embodiments, the targeting sequence consists of 19 nucleotides, the targeting sequence of the gNA having a sequence selected from the group consisting of SEQ ID NOS: 309-343, 363-2100, 2295-2185 with a single nucleotide removed from the 3′ end of the sequence. In other embodiments, the targeting sequence consists of 18 nucleotides, having a sequence selected from the group consisting of SEQ ID NOS: 309-343, 363-2100, 2295-2185 with two nucleotides removed from the 3′ end of the sequence. In other embodiments, the targeting sequence consists of 17 nucleotides, having a sequence selected from the group consisting of SEQ ID NOS: 309-343, 363-2100, 2295-2185 with three nucleotides removed from the 3′ end of the sequence. In other embodiments, the targeting sequence consists of 16 nucleotides, having a sequence selected from the group consisting of SEQ ID NOS: 309-343, 363-2100, 2295-2185 with four nucleotides removed from the 3′ end of the sequence. In other embodiments, the targeting sequence consists of 15 nucleotides, having a sequence selected from the group consisting of SEQ ID NOS: 309-343, 363-2100, 2295-2185 with five nucleotides removed from the 3′ end of the sequence.

[0009] In some embodiments of the system, the gNA has a scaffold comprising a sequence selected from the group consisting of SEQ ID NOS: 4-16 and 2101-2294, or a sequence having at least about 50%, at least about 60%, at least about 70%, at least about 80%, at least about 90%, at least about 95%, at least about 95%, at least about 96%, at least about 97%, at least about 98%, or at least about 99% sequence identity thereto.

[0010] In some embodiments of the system, the Class 2, Type V CRISPR protein comprises a reference CasX protein having a sequence of any one of SEQ ID NOS: 1-3, a CasX variant protein having a sequence selected from the group consisting of SEQ ID NOS: 49-150, 233-235, 238-239, 240-242, and 272-281, or a sequence having at least about 50%, at least about 60%, at least about 70%, at least about 80%, at least about 90%, at least about 95%, at least about 96%, at least about 97%, at least about 98%, or at least about 99% sequence identity thereto. In these embodiments, a CasX variant exhibits one or more improved characteristics relative to the reference CasX protein. In some embodiments, the CasX protein has binding affinity for a protospacer adjacent motif (PAM) sequence selected from the group consisting of TTC, ATC, GTC, and CTC. In some embodiments, the CasX protein has binding affinity for the PAM sequence that is at least 1.5-fold greater compared to the binding affinity of any one of the CasX proteins of SEQ ID NOS: 1-3 for the PAM sequences selected from the group consisting of TTC, ATC, GTC, and CTC.

[0011] In some embodiments of the system, the CasX molecule and the gNA molecule are associated together in a ribonuclear protein complex (RNP). In a particular embodiment, the RNP comprising the CasX variant and the gNA variant exhibits greater editing efficiency and/or binding of a target sequence in the target DNA when any one of the PAM sequences TTC, ATC, GTC, or CTC is located 1 nucleotide 5′ to the non-target strand sequence having identity with the targeting sequence of the gNA in a cellular assay system compared to the editing efficiency and/or binding of an RNP comprising a reference CasX protein and a reference gNA in a comparable assay system.

[0012] In some embodiments, the system further comprises a donor template comprising a nucleic acid comprising at least a portion of a C9orf72 gene, wherein the C9orf72 gene portion is selected from the group consisting of a C9orf72 exon, a C9orf72 intron, a C9orf72 intron-exon junction, a C9orf72 regulatory element, or combinations thereof, wherein the donor template is used to knock down or knock out the C9orf72 gene or is used to correct the mutation in the C9orf72 gene. In some embodiments, the donor template comprises a hexanucleotide repeat of a GGGGCC sequence wherein the number of repeats ranges from 10 to about 30 repeats and is utilized to replace the hexanucleotide repeat expansion of the mutant C9orf72 gene. In some cases, the donor sequence is a single-stranded DNA template or a single stranded RNA template. In other cases, the donor template is a double-stranded DNA template.

[0013] In other embodiments, the disclosure relates to nucleic acids encoding the systems of any of the embodiments described herein, as well as vectors comprising the nucleic acids. In some embodiments, the vector is selected from the group consisting of a retroviral vector, a lentiviral vector, an adenoviral vector, an adeno-associated viral (AAV) vector, a herpes simplex virus (HSV) vector, a plasmid, a minicircle, a nanoplasmid, and an RNA vector. In other embodiments, the vector is a virus-like particle (VLP) comprising an RNP of a CasX and gNA of any of the embodiments described herein and, optionally, a donor template nucleic acid and a targeting moiety such as a viral-derived glycoprotein.

[0014] In other embodiments, the disclosure provides a method of modifying a C9orf72 target nucleic acid sequence of cells of a population, wherein said method comprises introducing into the cell: a) CasX:gNA system of any of the embodiments disclosed herein; b) the nucleic acid of any of the embodiments disclosed herein; c) the vector of any of the embodiments disclosed herein; d) the VLP of any of the embodiments disclosed herein; or e) a combination of the foregoing, wherein the C9orf72 gene target nucleic acid sequence of the cells targeted by the first gNA is modified by the CasX protein, introducing a single- or double-stranded break in the target nucleic acid sequence. In some embodiments of the method, the method further comprises a second gNA or a nucleic acid encoding the second gNA, wherein the second gNA has a targeting sequence complementary to a different portion of the target nucleic acid sequence. In some embodiments of the method, the modifying comprises introducing an insertion, deletion, substitution, duplication, or inversion of one or more nucleotides in the target nucleic acid sequence as compared to the wild-type sequence. In some cases, the method further comprises contacting the target nucleic acid with a donor template nucleic acid of any of the embodiments disclosed herein. In some embodiments, the target C9orf72 gene for modification comprises more than 30, more than 100, more than 500, more than 700, more than 1000, or more than 1600 copies of a hexanucleotide repeat sequence GGGGCC. In some embodiments of the method, the donor template comprises a nucleic acid comprising at least a portion of a C9orf72 gene for correcting (by knocking in) the mutation of the C9orf72 gene, or comprises a sequence comprising a mutation or heterologous sequence for knocking-down or knocking out the mutant C9orf72 such that expression of the HRS or the DPR by the cells of the population is reduced by at least about 10%, at least about 20%, at least about 30%, at least about 40%, at least about 50%, at least about 60%, at least about 70%, at least about 80%, or at least about 90% in comparison to a cell where the that has not been modified. In some cases, the modifying of the target nucleic acid sequence occurs in vivo. In some embodiments, the cell is a eukaryotic cell selected from the group consisting of a rodent cell, a mouse cell, a rat cell, a primate cell, a and a non-human primate cell. In some embodiments, the cell is a human cell. In some embodiments, the cell is a selected from the group consisting of a Purkinje cell, frontal cortex neuron, motor cortex neuron, hippocampus neuron, cerebellum neuron, upper motor neuron, spinal cord neuron, spinal cord motor neuron, glial cell, and astrocytes.

[0015] In other embodiments, the disclosure provides methods of modifying a C9orf72 target nucleic acid in a population of cells of a subject wherein the target cells are contacted using vectors encoding the CasX protein and one or more gNAs comprising a targeting sequence complementary to the C9orf72 gene, and optionally further comprising a donor template. In some cases, the vector is an Adeno-Associated Viral (AAV) vector selected from AAV1, AAV2, AAV3, AAV4, AAV5, AAV6, AAV7, AAV8, AAV9, AAV10, AAV11, AAV12, AAV 44.9, AAV-Rh74, or AAVRh10. In other cases, the vector is a lentiviral vector. In other embodiments, the disclosure provides methods wherein the target cells are contacted using a vector wherein the vector is a virus-like particle (VLP) comprising an RNP of a CasX and gNA of any of the embodiments described herein and, optionally, a donor template nucleic acid. In some embodiments of the method, the vector is administered to a subject at a therapeutically effective dose. The subject can be a mouse, rat, pig, non-human primate, or a human. The dose can be administered by a route of administration selected from the group consisting of subcutaneous, intradermal, intraneural, intranodal, intramedullary, intramuscular, intralumbar, intrathecal, subarachnoid, intraventricular, intracapsular, intravenous, intralymphatic, or intraperitoneal routes, wherein the administering method is injection, transfusion, or implantation.

[0016] In other embodiments, the disclosure provides a method of treating a C9orf72-related disorder in a subject, comprising modifying a gene encoding C9orf72 gene in cells of the subject, the modifying comprising contacting said cells with: a) CasX:gNA system of any of the embodiments disclosed herein; b) the nucleic acid of any of the embodiments disclosed herein; c) the vector of any of the embodiments disclosed herein; d) the VLP of any of the embodiments disclosed herein; or e) a combination of the foregoing wherein the C9orf72 gene of the cells targeted by the first gNA is modified by the CasX protein. In some embodiments, the subject is selected from the group consisting of mouse, rat, pig, non-human primate, and human. In some embodiments, the C9orf72-related disorder is ALS or FTD. In some cases, the methods of treating a subject with a C9orf72-related disease result in improvement in at least one clinically-relevant parameter. In other cases, the methods of treating a subject with a C9orf72-related disease result in improvement in at least two clinically-relevant parameters.

[0017] In other embodiments, the disclosure provides compositions for use in a method of treating a C9orf72-related disorder in a subject. In some embodiments, the method comprises modifying a gene encoding C9orf72 gene in cells of the subject, the modifying comprising contacting said cells with compositions selected from: a) CasX:gNA system of any of the embodiments disclosed herein; b) the nucleic acid of any of the embodiments disclosed herein; c) the vector of any of the embodiments disclosed herein; d) the VLP of any of the embodiments disclosed herein; or e) a combination of the foregoing wherein the C9orf72 gene of the cells targeted by the first gNA is modified by the CasX protein. In some embodiments, the subject is selected from the group consisting of mouse, rat, pig, non-human primate, and human. In some embodiments, the C9orf72-related disorder is ALS or FTD. In some cases, the methods of treating a subject with a C9orf72-related disease result in improvement in at least one clinically-relevant parameter. In other cases, the methods of treating a subject with a C9orf72-related disease result in improvement in at least two clinically-relevant parameters.

### INCORPORATION BY REFERENCE

[0018] All publications, patents, and patent applications mentioned in this specification are herein incorporated by reference to the same extent as if each individual publication, patent, or patent application was specifically and individually indicated to be incorporated by reference. The contents of WO 2020/247882, filed on Jun. 5, 2020, and U.S. provisional applications 63/121,196 filed Dec. 3, 2020, and 63/162,346 filed on Mar. 17, 2021, which disclose CasX variants and gNA variants, are hereby incorporated by reference in their entireties.

### BRIEF DESCRIPTION OF THE DRAWINGS

[0019] The novel features of the disclosure are set forth with particularity in the appended claims. A better understanding of the features and advantages of the present disclosure will be obtained by reference to the following detailed description that sets forth illustrative embodiments, in which the principles of the disclosure are utilized, and the accompanying drawings of which:

[0020] FIG. 1 shows an SDS-PAGE gel of CasX StX2 purification fractions visualized bycolloidal Coomassie staining, as described in Example 1.

[0021] FIG. 2 shows a chromatogram from a size exclusion chromatography assay of the CasX StX2, using of Superdex 200 16/600 pg Gel Filtration, as described in Example 1.

[0022] FIG. 3 shows an SDS-PAGE gel of CasX StX2 purification fractions visualized by colloidal Coomassie staining, as described in Example 1.

[0023] FIG. 4 is a schematic showing the organization of the components in the pSTX34 plasmid used to assemble the CasX constructs, as described in Example 2.

[0024] FIG. 5 is a schematic showing the steps of generating the pSTX34 plasmid with a CasX 119 variant, as described in Example 2.

[0025] FIG. 6 shows an SDS-PAGE gel of purification samples, visualized on a Bio-Rad Stain-Free™ gel, as described in Example 2.

[0026] FIG. 7 shows the chromatogram of Superdex 200 16/600 pg Gel Filtration, as described in Example 2.

[0027] FIG. 8 shows an SDS-PAGE gel of gel filtration samples, stained with colloidal Coomassie, as described in Example 2.

[0028] FIG. 9 is a graph of the results of an assay for the quantification of active fractions of RNP formed by sgRNA174 and the CasX variants 119, 457, 488 and 491, as described in Example 13. Equimolar amounts of RNP and target were co-incubated and the amount of cleaved target was determined at the indicated timepoints. Mean and standard deviation of three independent replicates are shown for each timepoint. The biphasic fit of the combined replicates is shown. “2” refers to the reference CasX protein of SEQ ID NO: 2.

[0029] FIG. 10 shows the quantification of active fractions of RNP formed by CasX2 (reference CasX protein of SEQ ID NO:2) and the modified sgRNAs, as described in Example 13. Equimolar amounts of RNP and target were co-incubated and the amount of cleaved target was determined at the indicated timepoints. Mean and standard deviation of three independent replicates are shown for each timepoint. The biphasic fit of the combined replicates is shown.

[0030] FIG. 11 shows the quantification of active fractions of RNP formed by CasX 491 and the modified sgRNAs under guide-limiting conditions, as described in Example 13. Equimolar amounts of RNP and target were co-incubated and the amount of cleaved target was determined at the indicated timepoints. The biphasic fit of the data is shown.

[0031] FIG. 12 shows the quantification of cleavage rates of RNP formed by sgRNA174 and the CasX variants, as described in Example 13. Target DNA was incubated with a 20-fold excess of the indicated RNP and the amount of cleaved target was determined at the indicated time points. Mean and standard deviation of three independent replicates are shown for each timepoint, except for 488 and 491 where a single replicate is shown. The monophasic fit of the combined replicates is shown.

[0032] FIG. 13 shows the quantification of cleavage rates of RNP formed by CasX2 and the sgRNA variants, as described in Example 13. Target DNA was incubated with a 20-fold excess of the indicated RNP and the amount of cleaved target was determined at the indicated time points. Mean and standard deviation of three independent replicates are shown for each timepoint. The monophasic fit of the combined replicates is shown.

[0033] FIG. 14 shows the quantification of initial velocities of RNP formed by CasX2 and the sgRNA variants, as described in Example 13. The first two time-points of the previous cleavage experiment were fit with a linear model to determine the initial cleavage velocity.

[0034] FIG. 15 shows the quantification of cleavage rates of RNP formed by CasX491 and the sgRNA variants, as described in Example 13. Target DNA was incubated with a 20-fold excess of the indicated RNP at 10° C. and the amount of cleaved target was determined at the indicated time points. The monophasic fit of the timepoints is shown.

[0035] FIGS. 16A-16D show the quantification of cleavage rates of CasX variants on NTC PAMs, as described in Example 14. Target DNA substrates with identical spacers and the indicated PAM sequence were incubated with a 20-fold excess of the indicated RNP at 37° C. and the amount of cleaved target was determined at the indicated time points. Monophasic fit of a single replicate is shown. FIG. 16A shows the results for sequences having a TTC PAM. FIG. 16B shows the results for sequences having a CTC PAM. FIG. 16C shows the results for sequences having a GTC PAM. FIG. 16D shows the results for sequences having a ATC PAM.

[0036] FIG. 17 is a schematic showing an example of CasX protein and scaffold DNA sequence for packaging in adeno-associated virus (AAV), as described in Example 23. The DNA segment between the AAV inverted terminal repeats (ITRs), comprised of a CasX-encoding DNA and its promoter, and scaffold-encoding DNA and its promoter gets packaged within an AAV capsid during AAV production.

[0037] FIG. 18 shows the results of an editing assay comparing gRNA scaffolds 229-237 to scaffold 174 in mouse neural progenitor cells (mNPC) isolated from the Ai9-tdtomato transgenic mice. Cells were nucleofected with the indicated doses of p59 plasmids encoding CasX 491, the scaffold, and spacer 11.30 (5′ AAGGGGCUCCGCACCACGCC 3′, SEQ ID NO: 361) targeting mRHO. Editing at the mRHO locus was assessed 5 days post-transfection by NGS, and show that editing with constructs with scaffolds 230, 231, 234 and 235 demonstrated greater editing compared to constructs with scaffold 174 at both doses.

[0038] FIG. 19 shows the results of an editing assay comparing gRNA scaffolds 229-237 to scaffold 174 in mNPC cells. Cells were nucleofected with the indicated doses of p59 plasmids encoding CasX 491, the scaffold, and spacer 12.7 (5′ CUGCAUUCUAGUUGUGGUUU 3′, SEQ ID NO: 362) targeting repeat elements preventing expression of the tdtomato fluorescent protein. Editing was assessed 5 days post-transfection by FACS, to quantify the fraction of tdTomato positive cells. Cells nucleofected with scaffolds 231-235 displayed approximately 35% greater editing compared to constructs with scaffold 174 at the high dose, and approximately 25% greater editing at the low dose.

[0039] FIG. 20 shows the results of an editing assay comparing CasX nucleases 2, 119, 491, 515, 527, 528, 529, 530, and 531 in a custom HEK293 cell line, PASS_V1.01. Cells were lipofected with 2 μg of p67 plasmid encoding the indicated CasX protein. After five days, cell genomic DNA was extracted. PCR amplification and Next-Generation Sequencing was performed to isolate and quantify the fraction of edited cells at custom designed on-target editing sites. For each sample, editing was evaluated at target sites (individual points) consisting of the following PAM sequences: 48 TTC, 14 ATC, 22 CTC, 11 GTC individual sites, and percent editing was normalized to a vehicle control. Cells lipofected with any nuclease displayed higher mean editing at TTC PAM target sites (horizontal bar) than that of the wild-type nuclease CasX 2, except CasX 528. The relative preference of any given nuclease for the four different PAM sequences is also represented by the violin plots. In particular, CasX nucleases 527, 528, and 529 exhibit substantially different PAM preferences than that of the wild-type nuclease CasX 2.

[0040] FIG. 21 shows the results of an editing assay comparing improved CasX nuclease 491 to improved nucleases 532 and 533 in a custom HEK293 cell line, PASS_V1.01. Cells were lipofected, in duplicate, with 2 μg of p67 plasmid encoding the indicated CasX protein and a puromycin resistance gene, and grown under puromycin selection. After three days, cell genomic DNA was extracted. PCR amplification and Next-Generation Sequencing was performed to isolate and quantify the fraction of edited cells at custom designed on-target editing sites. For each sample, editing was evaluated at target sites consisting of the following PAM sequences: 48 TTC, 14 ATC, 22 CTC, 11 GTC individual sites, and fraction editing was normalized to a vehicle control. Cells lipofected with CasX 532 or 533 displayed higher mean editing than Cas 491 at each of the PAM sequences, with the exception of CasX 533 at TTC PAM target sites. Error bars represent standard error of the mean for n=2 biological samples.

[0041] FIG. 22 is a schematic of a portion of the 5′ region of the C9orf72 locus. The top diagram shows the relative locations of the exon 1a and exon 1b, which flank the hexanucleotide repeat element (HRE) while the open boxes indicate downstream exons. The lower diagram shows the regions of the locus that are targeted by (complementary to) the targeting segments (spacers) of the guide RNA of Table 15, as described in Example 18.

[0042] FIG. 23 is a graph showing results of a single cut experiment using targeting sequence 164 to introduce edits in Exon 1a, as described in Example 18. The black deletion trace indicates for every position in the amplicon and the fraction of reads that have a deletion at that position. Gray bars at the bottom of the graph indicate the sgRNA binding site position. Quantification window indicates region used for quantification of deletions. Predicted cleavage position is the location of CasX induced double-stranded break. The deletion traces illustrate rates and extent of genetic deletions generated by the single guides delivered, resulting in an overall deletion efficiency of 65.4%. The data are representative of the results observed for single cuts (Table 15).

[0043] FIG. 24 is a graph showing results of a double cut experiment using targeting sequences (spacers) 138 and 151, which targeting sequences that flank the hexanucleotide repeat element (HRE, also sometimes referred to herein as the hexanucleotide repeat sequence expansion, or HRS) at positions 193-248 in the reference amplicon, as described in Example 18. The black deletion trace indicates for every position in the amplicon the fraction of reads that have a deletion at that position. Gray bars at the bottom of the graph indicate the sgRNA binding site position. The quantification window indicates the region used for quantification of deletions. The predicted cleavage position is the location of CasX induced double-stranded break. In this experiment, the overall deletion efficiency was 45.4%, and was representative of the results observed for double cuts (Table 16), supporting that, under the conditions of the experiment, the HRE can be deleted using the double-cut design.

[0044] FIG. 25 is a pair of graphs of an experiment testing the effects of spacer length on ability to edits target nucleic acid in Jurkat cells, as described in Example 26. The results demonstrate that shorter spacers of 18 or 19 support increased activity compared to a spacer of 20 bases in ex vivo editing by RNP.

### DETAILED DESCRIPTION

[0045] While exemplary embodiments have been shown and described herein, it will be obvious to those skilled in the art that such embodiments are provided by way of example only. Numerous variations, changes, and substitutions will now occur to those skilled in the art without departing from the inventions claimed herein. It should be understood that various alternatives to the embodiments described herein may be employed in practicing the embodiments of the disclosure. It is intended that the claims define the scope of the invention and that methods and structures within the scope of these claims and their equivalents be covered thereby.

[0046] Unless otherwise defined, all technical and scientific terms used herein have the same meaning as commonly understood by one of ordinary skill in the art to which this invention belongs. Although methods and materials similar or equivalent to those described herein can be used in the practice or testing of the present embodiments, suitable methods and materials are described below. In case of conflict, the patent specification, including definitions, will control. In addition, the materials, methods, and examples are illustrative only and not intended to be limiting. Numerous variations, changes, and substitutions will now occur to those skilled in the art without departing from the invention.

### Definitions

[0047] The terms “polynucleotide” and “nucleic acid,” used interchangeably herein, refer to a polymeric form of nucleotides of any length, either ribonucleotides or deoxyribonucleotides. Thus, terms “polynucleotide” and “nucleic acid” encompass single-stranded DNA; double-stranded DNA; multi-stranded DNA; single-stranded RNA; double-stranded RNA; multi-stranded RNA; genomic DNA; cDNA; DNA-RNA hybrids; and a polymer comprising purine and pyrimidine bases or other natural, chemically or biochemically modified, non-natural, or derivatized nucleotide bases.

[0048] “Hybridizable” or “complementary” are used interchangeably to mean that a nucleic acid (e.g., RNA, DNA) comprises a sequence of nucleotides that enables it to non-covalently bind, i.e., form Watson-Crick base pairs and/or G/U base pairs, “anneal”, or “hybridize,” to another nucleic acid in a sequence-specific, antiparallel, manner (i.e., a nucleic acid specifically binds to a complementary nucleic acid) under the appropriate in vitro and/or in vivo conditions of temperature and solution ionic strength. It is understood that the sequence of a polynucleotide need not be 100% complementary to that of its target nucleic acid sequence to be specifically hybridizable; it can have at least about 70%, at least about 80%, or at least about 90%, or at least about 95% sequence identity and still hybridize to the target nucleic acid sequence. Moreover, a polynucleotide may hybridize over one or more segments such that intervening or adjacent segments are not involved in the hybridization event (e.g., a loop structure or hairpin structure, a ‘bulge’, ‘bubble’ and the like).

[0049] A “gene,” for the purposes of the present disclosure, includes a DNA region encoding a gene product (e.g., a protein, RNA), as well as all DNA regions which regulate the production of the gene product, whether or not such regulatory sequences are adjacent to coding and/or transcribed sequences. Accordingly, a gene may include regulatory element sequences including, but not necessarily limited to, promoter sequences, terminators, translational regulatory sequences such as ribosome binding sites and internal ribosome entry sites, enhancers, silencers, insulators, boundary elements, replication origins, matrix attachment sites and locus control regions. Coding sequences encode a gene product upon transcription or transcription and translation; the coding sequences of the disclosure may comprise fragments and need not contain a full-length open reading frame. A gene can include both the strand that is transcribed as well as the complementary strand containing the anticodons.

[0050] The term “downstream” refers to a nucleotide sequence that is located 3′ to a reference nucleotide sequence. In certain embodiments, downstream nucleotide sequences relate to sequences that follow the starting point of transcription. For example, the translation initiation codon of a gene is located downstream of the start site of transcription.

[0051] The term “upstream” refers to a nucleotide sequence that is located 5′ to a reference nucleotide sequence. In certain embodiments, upstream nucleotide sequences relate to sequences that are located on the 5′ side of a coding region or starting point of transcription. For example, most promoters are located upstream of the start site of transcription.

[0052] The term “regulatory element” is used interchangeably herein with the term “regulatory sequence,” and is intended to include promoters, enhancers, and other expression regulatory elements (e.g. transcription termination signals, such as polyadenylation signals and poly-U sequences). Exemplary regulatory elements include a transcription promoter such as, but not limited to, CMV, CMV+intron A, SV40, RSV, HIV-Ltr, elongation factor 1 alpha (EF1α), MMLV-ltr, internal ribosome entry site (IRES) or P2A peptide to permit translation of multiple genes from a single transcript, metallothionein, a transcription enhancer element, a transcription termination signal, polyadenylation sequences, sequences for optimization of initiation of translation, and translation termination sequences. In the case of systems utilized for exon skipping, regulatory elements include exonic splicing enhancers. It will be understood that the choice of the appropriate regulatory element will depend on the encoded component to be expressed (e.g., protein or RNA) or whether the nucleic acid comprises multiple components that require different polymerases or are not intended to be expressed as a fusion protein.

[0053] The term “promoter” refers to a DNA sequence that contains an RNA polymerase binding site, transcription start site, TATA box, and/or B recognition element and assists or promotes the transcription and expression of an associated transcribable polynucleotide sequence and/or gene (or transgene). A promoter can be synthetically produced or can be derived from a known or naturally occurring promoter sequence or another promoter sequence. A promoter can be proximal or distal to the gene to be transcribed. A promoter can also include a chimeric promoter comprising a combination of two or more heterologous sequences to confer certain properties. A promoter of the present disclosure can include variants of promoter sequences that are similar in composition, but not identical to, other promoter sequence(s) known or provided herein. A promoter can be classified according to criteria relating to the pattern of expression of an associated coding or transcribable sequence or gene operably linked to the promoter, such as constitutive, developmental, tissue-specific, inducible, etc.

[0054] The term “enhancer” refers to regulatory DNA sequences that, when bound by specific proteins called transcription factors, regulate the expression of an associated gene. Enhancers may be located in the intron of the gene, or 5′ or 3′ of the coding sequence of the gene. Enhancers may be proximal to the gene (i.e., within a few tens or hundreds of base pairs (bp) of the promoter), or may be located distal to the gene (i.e., thousands of bp, hundreds of thousands of bp, or even millions of bp away from the promoter). A single gene may be regulated by more than one enhancer, all of which are envisaged as within the scope of the instant disclosure.

[0055] “Recombinant,” as used herein, means that a particular nucleic acid (DNA or RNA) is the product of various combinations of cloning, restriction, and/or ligation steps resulting in a construct having a structural coding or non-coding sequence distinguishable from endogenous nucleic acids found in natural systems. Generally, DNA sequences encoding the structural coding sequence can be assembled from cDNA fragments and short oligonucleotide linkers, or from a series of synthetic oligonucleotides, to provide a synthetic nucleic acid which is capable of being expressed from a recombinant transcriptional unit contained in a cell or in a cell-free transcription and translation system. Such sequences can be provided in the form of an open reading frame uninterrupted by internal non-translated sequences, or introns, which are typically present in eukaryotic genes. Genomic DNA comprising the relevant sequences can also be used in the formation of a recombinant gene or transcriptional unit. Sequences of non-translated DNA may be present 5′ or 3′ from the open reading frame, where such sequences do not interfere with manipulation or expression of the coding regions, and may indeed act to modulate production of a desired product by various mechanisms (see “enhancers” and “promoters”, above).

[0056] The term “recombinant polynucleotide” or “recombinant nucleic acid” refers to one which is not naturally occurring, e.g., is made by the artificial combination of two otherwise separated segments of sequence through human intervention. This artificial combination is often accomplished by either chemical synthesis means, or by the artificial manipulation of isolated segments of nucleic acids, e.g., by genetic engineering techniques. Such is usually done to replace a codon with a redundant codon encoding the same or a conservative amino acid, while typically introducing or removing a sequence recognition site. Alternatively, it is performed to join together nucleic acid segments of desired functions to generate a desired combination of functions. This artificial combination is often accomplished by either chemical synthesis means, or by the artificial manipulation of isolated segments of nucleic acids, e.g., by genetic engineering techniques.

[0057] Similarly, the term “recombinant polypeptide” or “recombinant protein” refers to a polypeptide or protein which is not naturally occurring, e.g., is made by the artificial combination of two otherwise separated segments of amino sequence through human intervention. Thus, e.g., a protein that comprises a heterologous amino acid sequence is recombinant.

[0058] As used herein, the term “contacting” means establishing a physical connection between two or more entities. For example, contacting a target nucleic acid sequence with a guide nucleic acid means that the target nucleic acid sequence and the guide nucleic acid are made to share a physical connection; e.g., can hybridize if the sequences share sequence similarity.

[0059] “Dissociation constant”, or “K_{d}”, are used interchangeably and mean the affinity between a ligand “L” and a protein “P”; i.e., how tightly a ligand binds to a particular protein. It can be calculated using the formula K_{d}=[L][P]/[LP], where [P], [L] and [LP] represent molar concentrations of the protein, ligand and complex, respectively.

[0060] The disclosure provides compositions and methods useful for editing a target nucleic acid sequence. As used herein “editing” is used interchangeably with “modifying” and includes but is not limited to cleaving, nicking, deleting, knocking in, knocking out, and the like.

[0061] The term “knock-out” refers to the elimination of a gene or the expression of a gene. For example, a gene can be knocked out by either a deletion or an addition of a nucleotide sequence that leads to a disruption of the reading frame. As another example, a gene may be knocked out by replacing a part of the gene with an irrelevant sequence. The term “knock-down” as used herein refers to reduction in the expression of a gene or its gene product(s). As a result of a gene knock-down, the protein activity or function may be attenuated or the protein levels may be reduced or eliminated.

[0062] As used herein, “homology-directed repair” (HDR) refers to the form of DNA repair that takes place during repair of double-strand breaks in cells. This process requires nucleotide sequence homology, and uses a donor template to repair or knock-out a target DNA, and leads to the transfer of genetic information from the donor (e.g., such as the donor template) to the target, resulting in a transgene of interest. Homology-directed repair can result in an alteration of the sequence of the target nucleic acid sequence by insertion, deletion, or mutation if the donor template differs from the target DNA sequence and part or all of the sequence of the donor template is incorporated into the target DNA.

[0063] As used herein, “non-homologous end joining” (NHEJ) refers to the repair of double-strand breaks in DNA by direct ligation of the break ends to one another without the need for a homologous template (in contrast to homology-directed repair, which requires a homologous sequence to guide repair). NHEJ often results in the loss (deletion) of nucleotide sequence near the site of the double-strand break.

[0064] As used herein “micro-homology mediated end joining” (MMEJ) refers to a mutagenic DSB repair mechanism, which always associates with deletions flanking the break sites without the need for a homologous template (in contrast to homology-directed repair, which requires a homologous sequence to guide repair). MMEJ often results in the loss (deletion) of nucleotide sequence near the site of the double-strand break.

[0065] A polynucleotide or polypeptide (or protein) has a certain percent “sequence similarity” or “sequence identity” to another polynucleotide or polypeptide, meaning that, when aligned, that percentage of bases or amino acids are the same, and in the same relative position, when comparing the two sequences. Sequence similarity (interchangeably referred to as percent similarity, percent identity, or homology) can be determined in a number of different manners. To determine sequence similarity, sequences can be aligned using the methods and computer programs that are known in the art, including BLAST, available over the world wide web at ncbi.nlm.nih.gov/BLAST. Percent complementarity between particular stretches of nucleic acid sequences within nucleic acids can be determined using any convenient method. Example methods include BLAST programs (basic local alignment search tools) and PowerBLAST programs (Altschul et al., J. Mol. Biol., 1990, 215, 403-410; Zhang and Madden, Genome Res., 1997, 7, 649-656) or by using the Gap program (Wisconsin Sequence Analysis Package, Version 8 for Unix, Genetics Computer Group, University Research Park, Madison Wis.), e.g., using default settings, which uses the algorithm of Smith and Waterman (Adv. Appl. Math., 1981, 2, 482-489).

[0066] The terms “polypeptide,” and “protein” are used interchangeably herein, and refer to a polymeric form of amino acids of any length, which can include coded and non-coded amino acids, chemically or biochemically modified or derivatized amino acids, and polypeptides having modified peptide backbones. The term includes fusion proteins, including, but not limited to, fusion proteins with a heterologous amino acid sequence.

[0067] A “vector” or “expression vector” is a replicon, such as plasmid, phage, virus, virus-like particle, or cosmid, to which another DNA segment, i.e., an “insert”, may be attached so as to bring about the replication or expression of the attached segment in a cell.

[0068] The term “naturally-occurring” or “unmodified” or “wild-type” as used herein as applied to a nucleic acid, a polypeptide, a cell, or an organism, refers to a nucleic acid, polypeptide, cell, or organism that is found in nature. Thus, “wild-type” can refer to more than one naturally occurring variants of a nucleic acid, polypeptide, cell or organism. With respect to genes, “wild-type” can also be used to refer to naturally-occurring, non-disease causing variants of the gene.

[0069] As used herein, a “mutation” refers to an insertion, deletion, substitution, duplication, or inversion of one or more amino acids or nucleotides as compared to a wild-type or reference amino acid sequence or to a wild-type or reference nucleotide sequence.

[0070] As used herein the term “isolated” is meant to describe a polynucleotide, a polypeptide, or a cell that is in an environment different from that in which the polynucleotide, the polypeptide, or the cell naturally occurs. An isolated genetically modified host cell may be present in a mixed population of genetically modified host cells.

[0071] A “host cell,” as used herein, denotes a eukaryotic cell, a prokaryotic cell, or a cell from a multicellular organism (e.g., a cell line) cultured as a unicellular entity, which eukaryotic or prokaryotic cells are used as recipients for a nucleic acid (e.g., an expression vector), and include the progeny of the original cell which has been genetically modified by the nucleic acid. It is understood that the progeny of a single cell may not necessarily be completely identical in morphology or in genomic or total DNA complement as the original parent, due to natural, accidental, or deliberate mutation. A “recombinant host cell” (also referred to as a “genetically modified host cell”) is a host cell into which has been introduced a heterologous nucleic acid, e.g., an expression vector.

[0072] The term “conservative amino acid substitution” refers to the interchangeability in proteins of amino acid residues having similar side chains. For example, a group of amino acids having aliphatic side chains consists of glycine, alanine, valine, leucine, and isoleucine; a group of amino acids having aliphatic-hydroxyl side chains consists of serine and threonine; a group of amino acids having amide-containing side chains consists of asparagine and glutamine; a group of amino acids having aromatic side chains consists of phenylalanine, tyrosine, and tryptophan; a group of amino acids having basic side chains consists of lysine, arginine, and histidine; and a group of amino acids having sulfur-containing side chains consists of cysteine and methionine. Exemplary conservative amino acid substitution groups are: valine-leucine-isoleucine, phenylalanine-tyrosine, lysine-arginine, alanine-valine, and asparagine-glutamine.

[0073] As used herein, “treatment” or “treating,” are used interchangeably herein and refer to an approach for obtaining beneficial or desired results, including but not limited to a therapeutic benefit and/or a prophylactic benefit. By therapeutic benefit is meant eradication or amelioration of the underlying disorder or disease being treated. A therapeutic benefit can also be achieved with the eradication or amelioration of one or more of the symptoms or an improvement in one or more clinical parameters associated with the underlying disease such that an improvement is observed in the subject, notwithstanding that the subject may still be afflicted with the underlying disease.

[0074] The terms “therapeutically effective amount” and “therapeutically effective dose”, as used herein, refer to an amount of a drug or a biologic, alone or as a part of a composition, that is capable of having any detectable, beneficial effect on any symptom, aspect, measured parameter or characteristics of a disease state or condition when administered in one or repeated doses to a subject such as a human or an experimental animal. Such effect need not be absolute to be beneficial.

[0075] As used herein, “administering” is meant as a method of giving a dosage of a compound (e.g., a composition of the disclosure) or a composition (e.g., a pharmaceutical composition) to a subject.

[0076] A “subject” is a mammal. Mammals include, but are not limited to, domesticated animals, non-human primates, humans, rabbits, mice, rats and other rodents.

### I. General Methods

[0077] The practice of the present invention employs, unless otherwise indicated, conventional techniques of immunology, biochemistry, chemistry, molecular biology, microbiology, cell biology, genomics and recombinant DNA, which can be found in such standard textbooks as Molecular Cloning: A Laboratory Manual, 3rd Ed. (Sambrook et al., HaRBor Laboratory Press 2001); Short Protocols in Molecular Biology, 4th Ed. (Ausubel et al. eds., John Wiley & Sons 1999); Protein Methods (Bollag et al., John Wiley & Sons 1996); Nonviral Vectors for Gene Therapy (Wagner et al. eds., Academic Press 1999); Viral Vectors (Kaplift & Loewy eds., Academic Press 1995); Immunology Methods Manual (I. Lefkovits ed., Academic Press 1997); and Cell and Tissue Culture: Laboratory Procedures in Biotechnology (Doyle & Griffiths, John Wiley & Sons 1998), the disclosures of which are incorporated herein by reference.

[0078] Where a range of values is provided, it is understood that endpoints are included and that each intervening value, to the tenth of the unit of the lower limit unless the context clearly dictates otherwise, between the upper and lower limit of that range and any other stated or intervening value in that stated range, is encompassed. The upper and lower limits of these smaller ranges may independently be included in the smaller ranges, and are also encompassed, subject to any specifically excluded limit in the stated range. Where the stated range includes one or both of the limits, ranges excluding either or both of those included limits are also included.

[0079] Unless defined otherwise, all technical and scientific terms used herein have the same meaning as commonly understood by one of ordinary skill in the art to which this invention belongs. All publications mentioned herein are incorporated herein by reference to disclose and describe the methods and/or materials in connection with which the publications are cited.

[0080] It must be noted that as used herein and in the appended claims, the singular forms “a,” “an,” and “the” include plural referents unless the context clearly dictates otherwise.

[0081] It will be appreciated that certain features of the disclosure, which are, for clarity, described in the context of separate embodiments, may also be provided in combination in a single embodiment. In other cases, various features of the disclosure, which are, for brevity, described in the context of a single embodiment, may also be provided separately or in any suitable sub-combination. It is intended that all combinations of the embodiments pertaining to the disclosure are specifically embraced by the present disclosure and are disclosed herein just as if each and every combination was individually and explicitly disclosed. In addition, all sub-combinations of the various embodiments and elements thereof are also specifically embraced by the present disclosure and are disclosed herein just as if each and every such sub-combination was individually and explicitly disclosed herein.

### II. Systems for Genetic Editing of C9orf72 Genes

[0082] In a first aspect, the present disclosure provides systems comprising a Class 2, Type V CRISPR nuclease protein and one or more guide nucleic acids (gNA) for use in modifying a C9orf72 gene with one or more mutations or that comprises the HRS, in order to reduce or eliminate expression of the C9orf72 gene product, the RNA from the transcription of the HRS, and/or the DPR (collectively referred to herein as the “target nucleic acid”, inclusive of coding and non-coding regions).

[0083] The human C9orf72 gene (HGNC:28337) encodes a protein (Q01453) having the sequence [sequence omitted] FLANHTLNGEILRNAESGAIDVKFFVLSEKGVIIVSLIFDGNWNGDRSTYGLSIILPQTELS FYLPLHRVCVDRLTHIIRKGRIWMHKERQENVQKIILEGTERMEDQGQ SIIPMLTGEVIP VMELLSSMKSHSVPEEIDIADTVLNDDDIGDSCHEGFLLNAISSHLQTCGCSVVVGSSAE KVNKIVRTLCLFLTPAERKCSRLCEAESSFKYESGLFVQGLLKDSTGSFVLPFRQVMYAP YPTTHIDVDVNTVKQMPPCHEHIYNQRRYMRSELTAFWRATSEEDMAQDTIIYTDESFT PDLNIFQDVLHRDTLVKAFLDQVFQLKPGLSLRSTFLAQFLLVLHRKALTLIKYIEDDTQ KGKKPFKSLRNLKIDLDLTAEGDLNIIMALAEKIKPGLHSFIFGRPFYTSVQERDVLMTF (SEQ ID NO: 227). The C9orf72 gene is defined as the sequence that spans chr9: 27,546,546-27,573,866 of the human genome on chromosome 9 (Homo sapiens Updated Annotation Release 109.20191205, GRCh38.p13 (NCBI). The human C9orf72 gene is described in part in the NCBI database (ncbi.nlm.nih.gov) as Reference Sequence NC_000009.12, which is incorporated by reference herein. The C9orf72 locus contains 12 exons, including 2 alternate noncoding first exons (exons 1a and 1b) (DeJesus-Hernandez, M., et al. 2011). In the case of the hexanucleotide repeats, the translated DPR proteins include poly-(Gly-Ala) and, to a lesser extent, poly-(Gly-Pro) and poly-(Gly-Arg). A shorter isoform b (NP_659442.2) has the sequence

(SEQ ID NO: 228)
MSTLCPPPSPAVAKTEIALSGKSPLLAATFAYWDNILGPRVRHIWAPKTE
QVLLSDGEITFLANHTLNGEILRNAESGAIDVKFFVLSEKGVIIVSLIFD
GNWNGDRSTYGLSIILPQTELSFYLPLHRVCVDRLTHIIRKGRIWMHKER
QENVQKIILEGTERMEDQGQSIIPMLTGEVIPVMELLSSMKSHSVPEEID
IADTVLNDDDIGDSCHEGFLLK.

[0084] In some embodiments, the disclosure provides systems specifically designed to modify the C9orf72 gene in eukaryotic cells. In some cases the systems are designed to knock-down or knock-out the C9orf72 gene. In other cases, the systems are designed to correct one or more mutations in the C9orf72 gene. In some embodiments, the systems are designed to excise the hexanucleotide repeat sequence and restore the ability of the cell to express a functional C9orf72 protein. In some embodiments, the systems are designed to correct the hexanucleotide repeat sequence GGGGCC mutation of the C9orf72 gene that encodes the RNA transcripts of the HRS and/or the DPR and restore the ability of the cell to express a functional C9orf72 protein.

[0085] Generally, any portion of the C9orf72 gene can be targeted using the programmable compositions and methods provided herein. In some embodiments, the CRISPR nuclease is a Class 2, Type V nuclease. In some embodiments, the Class 2, Type V nuclease is selected from the group consisting of Cas12a, Cas12b, Cas12c, Cas12d (CasY), Cas12J, and CasX. In some embodiments, the Class 2, Type V nuclease is a CasX. In some embodiments, the disclosure provides systems comprising one or more CasX proteins and one or more guide nucleic acids (gNA) as a CasX:gNA system and, optionally, one or more donor template nucleic acids. Each of these components and their use in the editing of the C9orf72 gene is described herein, below.

[0086] In some embodiments, the disclosure provides gene editing pairs of a CasX and a gNA of any of the embodiments described herein that are capable of being bound together prior to their use for gene editing and, thus, are “pre-complexed” as a ribonuclear protein complex (RNP). The use of a pre-complexed RNP confers advantages in the delivery of the system components to a cell or target nucleic acid sequence for editing of the target nucleic acid sequence. In some embodiments, the functional RNP can be delivered ex vivo to a cell by electrophoresis or by chemical means. In other embodiments, the functional RNP can be delivered either ex vivo or in vivo by a vector in their functional form, or are expressed and then complex together as the RNP. The gNA can provide target specificity to the complex by including a targeting sequence (or “spacer”) having a nucleotide sequence that is complementary to a sequence of the target nucleic acid sequence while the CasX protein of the pre-complexed CasX:gNA provides the site-specific activity such as cleavage or nicking of the target sequence that is guided to a target site (e.g., stabilized at a target site) within a target nucleic acid sequence (e.g., a C9orf72 gene to be modified) by virtue of its association with the gNA. The CasX proteins and gNA components of the CasX:gNA systems and their sequences, features and functions are described more fully, below.

[0087] In some embodiments, the CasX:gNA systems utilized in the editing of the C9orf72 gene can optionally further comprise a donor template comprising all or at least a portion of a gene encoding a C9orf72 protein, a non-coding region, or a C9orf72 regulatory element wherein the donor template comprises one or more mutations compared to a wild-type C9orf72 gene utilized for insertion for either knocking out or knocking down (described more fully, below) the target nucleic acid sequence with one or more mutations or the HRS. In other cases, the CasX:gNA systems can optionally further comprise a donor template for the introduction (or knocking in) of all or a portion of gene encoding the physiologically-normal number of hexanucleotide repeats, or a sequence for the production of a wild-type C9orf72 protein (SEQ ID NO:227 or 228), or a sequence for the production of physiologically-normal levels of C9orf72 in the target cell. In some embodiments, the donor template comprises at least about 20, at least about 50, at least about 100, at least about 200, at least about 300, at least about 400, at least about 500, at least about 600, at least about 700, at least about 800, at least about 900, at least about 1000, at least about 10,000, at least 15,000, or at least 25,000 nucleotides of a wild-type C9orf72 gene, wherein the C9orf72 gene portion is selected from the group consisting of a C9orf72 exon, a C9orf72 intron, a C9orf72 intron-exon junction, a C9orf72 regulatory element, a C9orf72 coding region, a C9orf72 non-coding region, or the entirety of the C9orf72 gene. In some embodiments, the C9orf72 gene portion comprises a combination of any of a C9orf72 exon sequence, a C9orf72 intron sequence, a C9orf72 intron-exon junction sequence, a C9orf72 non-coding region, or a C9orf72 regulatory element sequence. In particular embodiments, the donor template comprises a sequence having a physiologically-normal number of hexanucleotide repeats of the GGGGCC sequence wherein upon insertion of the donor template, the hexanucleotide repeat sequence expansion of the C9orf72 gene is replaced. In other embodiments, the donor polynucleotide comprises at least about 10 to about 15,000 nucleotides, at least about 100 to about 10,000 nucleotides, at least about 400 to about 6000 nucleotides, at least about 600 to about 4000 nucleotides, or at least about 1000 to about 2000 nucleotides of a wild-type C9orf72 gene. In some embodiments, the donor template is a single stranded DNA template or a single stranded RNA template. In other embodiments, the donor template is a double stranded DNA template.

### III. Guide Nucleic Acids of the Systems for Genetic Editing

[0088] In another aspect, the disclosure relates to guide nucleic acids (gNA) comprising a targeting sequence complementary to a target nucleic acid sequence of a C9orf72 gene, wherein the gNA is capable of forming a complex with a CRISPR protein that has specificity to a protospacer adjacent motif (PAM) sequence comprising a TC motif in the complementary non-target strand, and wherein the PAM sequence is located 1 nucleotide 5′ of the sequence in the non-target strand that is complementary to the target nucleic acid sequence in the target strand of the target nucleic acid. In some embodiments, the gNA is capable of forming a complex with a Class 2, Type V CRISPR nuclease. In a particular embodiment, the gNA is capable of forming a complex with a CasX nuclease.

[0089] In some embodiments, the disclosure provides gNAs utilized in the CasX:gNA systems that have utility in genome editing in a cell that have utility in editing of the C9orf72 gene. The present disclosure provides specifically-designed guide nucleic acids (“gNAs”) with targeting sequences that are complementary to (and are therefore able to hybridize with) the C9orf72 gene as a component of the gene editing CasX:gNA systems. Representative, but non-limiting examples of targeting sequences to the C9orf72 target nucleic acid that can be utilized in the gNA of the embodiments are presented as SEQ ID NOS: 309-343, 363-2100 and 2295-21835. In some embodiments, the gNA is a deoxyribonucleic acid molecule (“gDNA”); in some embodiments, the gNA is a ribonucleic acid molecule (“gRNA”); and in other embodiments, the gNA is a chimera, and comprises both DNA and RNA. As used herein, the terms gNA, gRNA, and gDNA cover naturally-occurring molecules, as well as sequence variants.

[0090] It is envisioned that in some embodiments, multiple gNAs (e.g., multiple gRNAs) are delivered in the CasX:gNA system for the modification of a gene encoding one or more regions of a C9orf72 protein, a non-coding region of the C9orf72 gene, or a C9orf72 regulatory element. For example, when a deletion of a regulatory element or the HRS of the gene is desired, a pair of gNAs with targeting sequences to different or overlapping regions of the target nucleic acid sequence can be used in order to bind and cleave at two different or overlapping sites within the gene. In other cases, wherein the hexanucleotide repeat region is to be deleted, a pair of gNAs can be used in order to bind and cleave at two different sites 5′ and 3′ of the hexanucleotide repeats within the C9orf72 gene, resulting in the excision of the HRS that is then edited by non-homologous end joining (NHEJ), homology-directed repair (HDR), homology-independent targeted integration (HITI), micro-homology mediated end joining (MMEJ), single strand annealing (SSA) or base excision repair (BER). Exemplary pairs of gNAs that can be used to edit the HRS are shown in Table 16, below, and exemplary methods to effect the editing are described in Example 18, below.

a. Reference gNA and gNA Variants.

[0091] In some embodiments, a gNA of the present disclosure comprises a sequence of a naturally-occurring gNA (a “reference gNA”). In other cases, a reference gNA of the disclosure may be subjected to one or more mutagenesis methods, such as the mutagenesis methods described herein, which may include Deep Mutational Evolution (DME), deep mutational scanning (DMS), error prone PCR, cassette mutagenesis, random mutagenesis, staggered extension PCR, gene shuffling, or domain swapping, in order to generate one or more gNA variants with enhanced or varied properties relative to the reference gNA. gNA variants also include variants comprising one or more exogenous sequences, for example fused to either the 5′ or 3′ end, or inserted internally. The activity of reference gNAs may be used as a benchmark against which the activity of gNA variants are compared, thereby measuring improvements in function or other characteristics of the gNA variants. In other embodiments, a reference gNA may be subjected to one or more deliberate, specifically-targeted mutations in order to produce a gNA variant, for example a rationally designed variant.

[0092] The gNAs of the disclosure comprise two segments: a targeting sequence and a protein-binding segment. The targeting segment of a gNA includes a nucleotide sequence (referred to interchangeably as a guide sequence, a spacer, a targeter, or a targeting sequence) that is complementary to (and therefore hybridizes with) a specific sequence (a target site) within the target nucleic acid sequence (e.g., a target ssRNA, a target ssDNA, a strand of a double stranded target DNA, etc.), described more fully below. The targeting sequence of a gNA is capable of binding to a target nucleic acid sequence, including a coding sequence, a complement of a coding sequence, a non-coding sequence, and to regulatory elements. The protein-binding segment (or “activator” or “protein-binding sequence”) interacts with (e.g., binds to) a CasX protein as a complex, forming an RNP (described more fully, below).

[0093] In the case of a dual guide RNA (dgRNA), the targeter and the activator portions each have a duplex-forming segment, where the duplex forming segment of the targeter and the duplex-forming segment of the activator have complementarity with one another and hybridize to one another to form a double stranded duplex (dsRNA duplex for a gRNA). When the gNA is a gRNA, the term “targeter” or “targeter RNA” is used herein to refer to a crRNA-like molecule (crRNA: “CRISPR RNA”) of a CasX dual guide RNA (and therefore of a CasX single guide RNA when the “activator” and the “targeter” are linked together, e.g., by intervening nucleotides). The crRNA has a 5′ region that anneals with the tracrRNA followed by the nucleotides of the targeting sequence. Thus, for example, a guide RNA (dgRNA or sgRNA) comprises a guide sequence and a duplex-forming segment of a crRNA, which can also be referred to as a crRNA repeat. A corresponding tracrRNA-like molecule (activator) also comprises a duplex-forming stretch of nucleotides that forms the other half of the dsRNA duplex of the protein-binding segment of the guide RNA. Thus, a targeter and an activator, as a corresponding pair, hybridize to form a dual guide NA, referred to herein as a “dual guide NA”, a “dual-molecule gNA”, a “dgNA”, a “double-molecule guide NA”, or a “two-molecule guide NA”. Site-specific binding and/or cleavage of a target nucleic acid sequence (e.g., genomic DNA) by the CasX protein can occur at one or more locations (e.g., a sequence of a target nucleic acid) determined by base-pairing complementarity between the targeting sequence of the gNA and the target nucleic acid sequence. Thus, for example, the gNA of the disclosure have sequences complementarity to and therefore can hybridize with the target nucleic acid that is adjacent to a sequence complementary to a TC PAM motif or a PAM sequence, such as ATC, CTC, GTC, or TTC. Because the targeting sequence of a guide sequence hybridizes with a sequence of a target nucleic acid sequence, a targeter can be modified by a user to hybridize with a specific target nucleic acid sequence, so long as the location of the PAM sequence is considered. Thus, in some cases, the sequence of a targeter may be a non-naturally occurring sequence. In other cases, the sequence of a targeter may be a naturally-occurring sequence, derived from the gene to be edited. In other embodiments, the activator and targeter of the gNA are covalently linked to one another (rather than hybridizing to one another) and comprise a single molecule, referred to herein as a “single-molecule gNA,” “one-molecule guide NA,” “single guide NA”, “single guide RNA”, a “single-molecule guide RNA,” a “one-molecule guide RNA”, a “single guide DNA”, a “single-molecule DNA”, or a “one-molecule guide DNA”, (“sgNA”, “sgRNA”, or a “sgDNA”). In some embodiments, the sgNA includes an “activator” or a “targeter” and thus can be an “activator-RNA” and a “targeter-RNA,” respectively.

[0094] Collectively, the assembled gNAs of the disclosure comprise four distinct regions, or domains: the RNA triplex, the scaffold stem, the extended stem, and the targeting sequence that, in the embodiments of the disclosure is specific for a target nucleic acid and is located on the 3′ end of the gNA. The RNA triplex, the scaffold stem, and the extended stem, together, are referred to as the “scaffold” of the gNA.

b. RNA Triplex

[0095] In some embodiments of the guide NAs provided herein (including reference sgNAs), there is a RNA-triplex, and the RNA triplex comprises the sequence of a UUU-nX(˜4-15)-UUU stem loop (SEQ ID NO: 19) that ends with an AAAG after 2 intervening stem loops (the scaffold stem loop and the extended stem loop), forming a pseudoknot that may also extend past the triplex into a duplex pseudoknot. The UU-UUU-AAA sequence of the triplex forms as a nexus between the spacer, scaffold stem, and extended stem. In exemplary reference CasX sgNAs, the UUU-loop-UUU region is coded for first, then the scaffold stem loop, and then the extended stem loop, which is linked by the tetraloop, and then an AAAG closes off the triplex before becoming the spacer.

c. Scaffold Stem Loop

[0096] In some embodiments of sgNAs of the disclosure, the triplex region is followed by the scaffold stem loop. The scaffold stem loop is a region of the gNA that is bound by CasX protein (such as a reference or CasX variant protein). In some embodiments, the scaffold stem loop is a fairly short and stable stem loop. In some cases, the scaffold stem loop does not tolerate many changes, and requires some form of an RNA bubble. In some embodiments, the scaffold stem is necessary for CasX sgNA function. While it is perhaps analogous to the nexus stem of Cas9 as being a critical stem loop, the scaffold stem of a CasX sgNA, in some embodiments, has a necessary bulge (RNA bubble) that is different from many other stem loops found in CRISPR/Cas systems. In some embodiments, the presence of this bulge is conserved across sgNA that interact with different CasX proteins. An exemplary sequence of a scaffold stem loop sequence of a gNA comprises the sequence CCAGCGACUAUGUCGUAUGG (SEQ ID NO: 20). In other embodiments, the disclosure provides gNA variants wherein the scaffold stem loop is replaced with an RNA stem loop sequence from a heterologous RNA source with proximal 5′ and 3′ ends, such as, but not limited to stem loop sequences selected from MS2, Q β, U1 hairpin II, Uvsx, or PP7 stem loops. In some cases, the heterologous RNA stem loop of the gNA is capable of binding a protein, an RNA structure, a DNA sequence, or a small molecule.

d. Extended Stem Loop

[0097] In some embodiments of the CasX sgNAs of the disclosure, the scaffold stem loop is followed by the extended stem loop. In some embodiments, the extended stem comprises a synthetic tracr and crRNA fusion that is largely unbound by the CasX protein. In some embodiments, the extended stem loop can be highly malleable. In some embodiments, a single guide gRNA is made with a GAAA tetraloop linker or a GAGAAA linker between the tracr and crRNA in the extended stem loop. In some cases, the targeter and activator of a CasX sgNA are linked to one another by intervening nucleotides and the linker can have a length of from 3 to 20 nucleotides. In some embodiments of the CasX sgNAs of the disclosure, the extended stem is a large 32-bp loop that sits outside of the CasX protein in the ribonucleoprotein complex. An exemplary sequence of an extended stem loop sequence of a sgNA comprises the sequence GCGCUUAUUUAUCGGAGAGAAAUCCGAUAAAUAAGAAGC (SEQ ID NO: 21). In some embodiments, the extended stem loop comprises a GAGAAA spacer sequence. In some embodiments, the disclosure provides gNA variants wherein the extended stem loop is replaced with an RNA stem loop sequence from a heterologous RNA source with proximal 5′ and 3′ ends, such as, but not limited to stem loop sequences selected from MS2, Qβ, U1 hairpin II, Uvsx, or PP7 stem loops. In such cases, the heterologous RNA stem loop increases the stability of the gNA. In other embodiments, the disclosure provides gNA variants having an extended stem loop region comprising at least 10, at least 100, at least 500, at least 1000, or at least 10,000 nucleotides, or at least 10-10,000, at least 10-1000, or at least 10-100 nucleotides.

e. Targeting Sequence

[0098] In some embodiments of the gNAs of the disclosure, the extended stem loop is followed by a region that forms part of the triplex, and then the targeting sequence. The targeting sequence targets the CasX ribonucleoprotein holo complex to a specific region of the target nucleic acid sequence of the C9orf72 gene. Thus, for example, CasX gNA targeting sequences of the disclosure have sequences complementarity to, and therefore can hybridize to, a portion of the C9orf72 gene in a nucleic acid in a eukaryotic cell (e.g., a eukaryotic chromosome, chromosomal sequence, a eukaryotic RNA, etc.) as a component of the RNP when the TC PAM motif or any one of the PAM sequences TTC, ATC, GTC, or CTC is located 1 nucleotide 5′ to the non-target strand sequence complementary to the target sequence. The targeting sequence of a gNA can be modified so that the gNA can target a desired sequence of any desired target nucleic acid sequence, so long as the PAM sequence location is taken into consideration. In some embodiments, the gNA scaffold is 5′ of the targeting sequence, with the targeting sequence on the 3′ end of the gNA. In some embodiments, the PAM motif sequence recognized by the nuclease of the RNP is TC. In other embodiments, the PAM sequence recognized by the nuclease of the RNP is NTC.

[0099] In some embodiments, the targeting sequence of the gNA is specific for a portion of a gene encoding a C9orf72 protein comprising one or more mutations. In some embodiments, the targeting sequence of a gNA is specific for a C9orf72 exon. In some embodiments, the targeting sequence of a gNA is specific for a C9orf72 intron. In some embodiments, the targeting sequence of the gNA is specific for a C9orf72 intron-exon junction. In some embodiments, the targeting sequence of the gNA has a sequence that hybridizes with a C9orf72 regulatory element, a C9orf72 coding region, a C9orf72 non-coding region, or combinations thereof. In particular embodiments, the targeting sequence of the gNA hybridizes with a sequence that is 5′ to the HRS. In some embodiments, wherein two or more gNA are used, the first gNA targeting sequence of the gNA hybridizes with a sequence that is 5′ to the HRS and the second gNA hybridizes with a sequence that is 3′ to the HRS. In some embodiments, the targeting sequence of the gNA is complementary to a sequence comprising one or more single nucleotide polymorphisms (SNPs) of the C9orf72 gene or its complement. SNPs that are within C9orf72 coding sequence or within C9orf72 non-coding sequence are both within the scope of the instant disclosure. In other embodiments, the targeting sequence of the gNA is complementary to a sequence of an intergenic region of the C9orf72 gene or a sequence complementary to an intergenic region of the C9orf72 gene.

[0100] In some embodiments, the targeting sequence of a gNA is specific for a regulatory element that regulates expression of C9orf72. Such C9orf72 regulatory elements include, but are not limited to promoter regions, enhancer regions, intergenic regions, 5′ untranslated regions (5′ UTR), 3′ untranslated regions (3′ UTR), intergenic regions, gene enhancer elements, conserved elements, and regions comprising cis-regulatory elements. The promoter region is intended to encompass nucleotides within 100 kb of the C9orf72 initiation point or, in the case of gene enhancer elements or conserved elements, can be 1 Mb or more distal to the C9orf72 gene. In some embodiments, the disclosure provides a gNA with a targeting sequence that hybridizes with a C9orf72 regulatory element. In the foregoing, the targets are those in which the encoding gene of the target is intended to be knocked out or knocked down such that the C9orf72 protein comprising mutations or the hexanucleotide duplication of the C9orf72 gene product is not expressed or is expressed at a lower level in a cell. In some embodiments, the disclosure provides a CasX:gNA system wherein the targeting sequence (or spacer) of the gNA is complementary to a nucleic acid sequence encoding C9orf72, a portion of the C9orf72 protein, a portion of a C9orf72 regulatory element, or the complement of a portion of the C9orf72 gene. In some embodiments, the targeting sequence of the gNA has between 14 and 35 consecutive nucleotides. In some embodiments, the targeting sequence has 14, 15, 16, 18, 18, 19, 20, 21, 22, 23, 24, 25, 26, 27, 28, 29, 30, 31, 32, 33, 34 or 35 consecutive nucleotides. In some embodiments, the targeting sequence consists of 21 consecutive nucleotides. In some embodiments, the targeting sequence consists of 20 consecutive nucleotides. In some embodiments, the targeting sequence consists of 19 consecutive nucleotides. In some embodiments, the targeting sequence consists of 18 consecutive nucleotides. In some embodiments, the targeting sequence consists of 17 consecutive nucleotides. In some embodiments, the targeting sequence consists of 16 consecutive nucleotides. In some embodiments, the targeting sequence consists of 15 consecutive nucleotides. In some embodiments, the targeting sequence has 14, 15, 16, 17, 18, 19, 20, or 21 consecutive nucleotides and the targeting sequence can comprise 0 to 5, 0 to 4, 0 to 3, or 0 to 2 mismatches relative to the target nucleic acid sequence and retain sufficient binding specificity such that the RNP comprising the gNA comprising the targeting sequence can form a complementary bond with respect to the target nucleic acid.

[0101] Representative, but non-limiting examples of targeting sequences to wild-type C9orf72 nucleic acid are presented in Tables 3 and 15 as SEQ ID NOS: 309-343, 363-2100 and 2295-21835. In some embodiments, the disclosure provides targeting sequences comprising a sequence that is at least 50% identical, at least 55% identical, at least 60% identical, at least 65% identical, at least 70% identical, at least 75% identical, at least 80% identical, at least 85% identical, at least 90% identical, at least 95% identical, or 100% identical to a sequence in Tables 3 and 15 as SEQ ID NOS: 309-343, 363-2100 and 2295-21835. In some embodiments, the targeting sequence of the gNA comprises a sequence of SEQ ID NOS: 2281-159093 with a single nucleotide removed from the 3′ end of the sequence. In other embodiments, the targeting sequence of the gNA comprises a sequence of SEQ ID NOS: 309-343, 363-2100 and 2295-21835 with two nucleotides removed from the 3′ end of the sequence. In other embodiments, the targeting sequence of the gNA comprises a sequence of SEQ ID NOS: 309-343, 363-2100 and 2295-21835 with three nucleotides removed from the 3′ end of the sequence. In other embodiments, the targeting sequence of the gNA comprises a sequence of SEQ ID NOS: 309-343, 363-2100 and 2295-21835 with four nucleotides removed from the 3′ end of the sequence. In other embodiments, the targeting sequence of the gNA comprises a sequence of SEQ ID NOS: 309-343, 363-2100 and 2295-21835 with five nucleotides removed from the 3′ end of the sequence. In the foregoing embodiments of the paragraph, thymine (T) nucleotides can be substituted for one or more or all of the uracil (U) nucleotides in any of the targeting sequences such that the gNA can be a gDNA or a gRNA, or a chimera of RNA and DNA, or in those cases where the encoding sequence for the spacer is incorporated into an expression vector. In some embodiments, a targeting sequence of SEQ ID NOS: 309-343, 363-2100 and 2295-21835 has at least 1, 2, 3, 4, 5, or 6 or more thymine nucleotides substituted for uracil nucleotides. In other embodiments, a gNA, gRNA, or gDNA of the disclosure comprises 1, 2, 3 or more targeting sequences of SEQ ID NOS: 309-343, 363-2100 and 2295-21835, or targeting sequences that are at least 50% identical, at least 55% identical, at least 60% identical, at least 65% identical, at least 70% identical, at least 75% identical, at least 80% identical, at least 85% identical, at least 90% identical, at least 95% identical, or 100% identical to one or more sequences of SEQ ID NOS: 309-343, 363-2100 and 2295-21835.

[0102] In some embodiments, the targeting sequence is complementary to a nucleic acid sequence encoding a mutation of the C9orf72 protein of SEQ ID NO: 227 or 228 or hexanucleotide duplications that disrupt the function or expression of the C9orf72 protein.

[0103] In some embodiments, the CasX:gNA system comprises a first gNA and further comprises a second (and optionally a third, fourth or fifth) gNA, wherein the second gNA or additional gNA has a targeting sequence complementary a different portion of the target nucleic acid sequence or its complement compared to the targeting sequence of the first gNA; e.g., the first gNA targets 5′ to the hexanucleotide repeat and the second gNA targets 3′ to the hexanucleotide repeat. By selection of the targeting sequences of the gNA, defined regions of the target nucleic acid sequence can be modified or edited using the CasX:gNA systems described herein.

### f. gNA Scaffolds

[0104] In some embodiments, a CasX reference gRNA comprises a sequence isolated or derived from Deltaproteobacter. In some embodiments, the sequence is a CasX tracrRNA sequence. Exemplary CasX reference tracrRNA sequences isolated or derived from Deltaproteobacter may include: ACAUCUGGCGCGUUUAUUCCAUUACUUUGGAGCCAGUCCCAGCGACUAUGUCGU AUGGACGAAGCGCUUAUUUAUCGGAGA (SEQ ID NO: 22) and ACAUCUGGCGCGUUUAUUCCAUUACUUUGGAGCCAGUCCCAGCGACUAUGUCGU AUGGACGAAGCGCUUAUUUAUCGG (SEQ ID NO: 23). Exemplary crRNA sequences isolated or derived from Deltaproteobacter may comprise a sequence of CCGAUAAGUAAAACGCAUCAAAG (SEQ ID NO: 24). In some embodiments, a CasX reference gNA comprises a sequence at least 60% identical, at least 65% identical, at least 70% identical, at least 75% identical, at least 80% identical, at least 81% identical, at least 82% identical, at least 83% identical, at least 84% identical, at least 85% identical, at least 86% identical, at least 86% identical, at least 87% identical, at least 88% identical, at least 89% identical, at least 89% identical, at least 90% identical, at least 91% identical, at least 92% identical, at least 93% identical, at least 94% identical, at least 95% identical, at least 96% identical, at least 97% identical, at least 98% identical, at least 99% identical, at least 99.5% identical or 100% identical to a sequence isolated or derived from Deltaproteobacter.

[0105] In some embodiments, a CasX reference guide RNA comprises a sequence isolated or derived from Planctomycetes. In some embodiments, the sequence is a CasX tracrRNA sequence. Exemplary CasX reference tracrRNA sequences isolated or derived from Planctomycetes may include: UACUGGCGCUUUUAUCUCAUUACUUUGAGAGCCAUCACCAGCGACUAUGUCGUA UGGGUAAAGCGCUUAUUUAUCGGAGA (SEQ ID NO: 25) and UACUGGCGCUUUUAUCUCAUUACUUUGAGAGCCAUCACCAGCGACUAUGUCGUA UGGGUAAAGCGCUUAUUUAUCGG (SEQ ID NO: 26). Exemplary crRNA sequences isolated or derived from Planctomycetes may comprise a sequence of UCUCCGAUAAAUAAGAAGCAUCAAAG (SEQ ID NO: 27). In some embodiments, a CasX reference gNA comprises a sequence at least 60% identical, at least 65% identical, at least 70% identical, at least 75% identical, at least 80% identical, at least 81% identical, at least 82% identical, at least 83% identical, at least 84% identical, at least 85% identical, at least 86% identical, at least 86% identical, at least 87% identical, at least 88% identical, at least 89% identical, at least 89% identical, at least 90% identical, at least 91% identical, at least 92% identical, at least 93% identical, at least 94% identical, at least 95% identical, at least 96% identical, at least 97% identical, at least 98% identical, at least 99% identical, at least 99.5% identical or 100% identical to a sequence isolated or derived from Planctomycetes.

[0106] In some embodiments, a CasX reference gNA comprises a sequence isolated or derived from Candidatus sungbacteria. In some embodiments, the sequence is a CasX tracrRNA sequence. Exemplary CasX reference tracrRNA sequences isolated or derived from Candidatus sungbacteria may comprise sequences of: GUUUACACACUCCCUCUCAUAGGGU (SEQ ID NO: 28), GUUUACACACUCCCUCUCAUGAGGU (SEQ ID NO: 29), UUUUACAUACCCCCUCUCAUGGGAU (SEQ ID NO: 30) and GUUUACACACUCCCUCUCAUGGGGG (SEQ ID NO: 31). In some embodiments, a CasX reference guide RNA comprises a sequence at least 60% identical, at least 65% identical, at least 70% identical, at least 75% identical, at least 80% identical, at least 81% identical, at least 82% identical, at least 83% identical, at least 84% identical, at least 85% identical, at least 86% identical, at least 86% identical, at least 87% identical, at least 88% identical, at least 89% identical, at least 89% identical, at least 90% identical, at least 91% identical, at least 92% identical, at least 93% identical, at least 94% identical, at least 95% identical, at least 96% identical, at least 97% identical, at least 98% identical, at least 99% identical, at least 99.5% identical or 100% identical to a sequence isolated or derived from Candidatus sungbacteria.

[0107] Table 1 provides the sequences of reference gRNAs tracr and scaffold sequences. In some embodiments, the disclosure provides gNA sequences wherein the gNA has a scaffold comprising a sequence having at least one nucleotide modification relative to a reference gNA sequence having a sequence of any one of SEQ ID NOS:4-16 of Table 1. It will be understood that in those embodiments wherein a vector comprises a DNA encoding sequence for a gNA, or where a gNA is a gDNA or a chimera of RNA and DNA, that thymine (T) bases can be substituted for the uracil (U) bases of any of the gNA sequence embodiments described herein, including the sequences of Table 1 and Table 2.

TABLE 1
Reference gRNA tracr and scaffold sequences

| SEQ | |
|---|---|
| ID | |
| NO. | Nucleotide Sequence |
| 4 | ACAUCUGGCGCGUUUAUUCCAUUACUUUGGAGCCAGUCCCAGCG |
| | ACUAUGUCGUAUGGACGAAGCGCUUAUUUAUCGGAGAGAAACCG |
| | AUAAGUAAAACGCAUCAAAG |
| 5 | UACUGGCGCUUUUAUCUCAUUACUUUGAGAGCCAUCACCAGCGA |
| | CUAUGUCGUAUGGGUAAAGCGCUUAUUUAUCGGAGAGAAAUCCG |
| | AUAAAUAAGAAGCAUCAAAG |
| 6 | ACAUCUGGCGCGUUUAUUCCAUUACUUUGGAGCCAGUCCCAGCG |
| | ACUAUGUCGUAUGGACGAAGCGCUUAUUUAUCGGAGA |
| 7 | ACAUCUGGCGCGUUUAUUCCAUUACUUUGGAGCCAGUCCCAGCG |
| | ACUAUGUCGUAUGGACGAAGCGCUUAUUUAUCGG |
| 8 | UACUGGCGCUUUUAUCUCAUUACUUUGAGAGCCAUCACCAGCGA |
| | CUAUGUCGUAUGGGUAAAGCGCUUAUUUAUCGGAGA |
| 9 | UACUGGCGCUUUUAUCUCAUUACUUUGAGAGCCAUCACCAGCGA |
| | CUAUGUCGUAUGGGUAAAGCGCUUAUUUAUCGG |
| 10 | GUUUACACACUCCCUCUCAUAGGGU |
| 11 | GUUUACACACUCCCUCUCAUGAGGU |
| 12 | UUUUACAUACCCCCUCUCAUGGGAU |
| 13 | GUUUACACACUCCCUCUCAUGGGGG |
| 14 | CCAGCGACUAUGUCGUAUGG |
| 15 | GCGCUUAUUUAUCGGAGAGAAAUCCGAUAAAUAAGAAGC |
| 16 | GGCGCUUUUAUCUCAUUACUUUGAGAGCCAUCACCAGCGACUAU |
| | GUCGUAUGGGUAAAGCGCUUAUUUAUCGGA |

### g. gNA Variants

[0108] In another aspect, the disclosure relates to guide nucleic acid variants (referred to herein alternatively as “gNA variant” or “gRNA variant”), which comprise one or more modifications relative to a reference gRNA scaffold. As used herein, “scaffold” refers to all parts to the gNA necessary for gNA function with the exception of the spacer sequence.

[0109] In some embodiments, a gNA variant comprises one or more nucleotide substitutions, insertions, deletions, or swapped or replaced regions relative to a reference gRNA sequence of the disclosure. In some embodiments, a mutation can occur in any region of a reference gRNA to produce a gNA variant. In some embodiments, the scaffold of the gNA variant sequence has at least 20%, at least 30%, at least 40%, at least 50%, at least 60%, or at least 70%, at least 80%, at least 85%, at least about 90%, at least about 95%, at least about 96%, at least about 97%, at least about 98%, or at least about 99% identity to the sequence of SEQ ID NO:4 or SEQ ID NO:5.

[0110] In some embodiments, a gNA variant comprises one or more nucleotide changes within one or more regions of the reference gRNA that improve a characteristic of the reference gRNA. Exemplary regions include the RNA triplex, the pseudoknot, the scaffold stem loop, and the extended stem loop. In some cases, the variant scaffold stem further comprises a bubble. In other cases, the variant scaffold further comprises a triplex loop region. In still other cases, the variant scaffold further comprises a 5′ unstructured region. In one embodiment, the gNA variant scaffold comprises a scaffold stem loop having at least 60% sequence identity to SEQ ID NO:14. In another embodiment, the gNA variant comprises a scaffold stem loop having the sequence of CCAGCGACUAUGUCGUAGUGG (SEQ ID NO: 32). In another embodiment, the disclosure provides a gNA scaffold comprising, relative to SEQ ID NO:5, a C18G substitution, a G55 insertion, a U1 deletion, and a modified extended stem loop in which the original 6 nt loop and 13 most-loop-proximal base pairs (32 nucleotides total) are replaced by a Uvsx hairpin (4 nt loop and 5 loop-proximal base pairs; 14 nucleotides total) and the loop-distal base of the extended stem was converted to a fully base-paired stem contiguous with the new Uvsx hairpin by deletion of the A99 and substitution of G64U. In the foregoing embodiment, the gNA scaffold comprises the sequence

(SEQ ID NO: 33)
ACUGGCGCUUUUAUCUGAUUACUUUGAGAGCCAUCACCAGCGACUAUGUC
GUAGUGGGUAAAGCUCCCUCUUCGGAGGGAGCAUCAAAG.

[0111] All gNA variants that have one or more improved functions or characteristics, or add one or more new functions when the variant gNA is compared to a reference gRNA described herein, are envisaged as within the scope of the disclosure. A representative example of such a gNA variant is guide 174 (SEQ ID NO:2238), the design of which is described in the Examples. In some embodiments, the gNA variant adds a new function to the RNP comprising the gNA variant. In some embodiments, the gNA variant has an improved characteristic selected from: improved stability; improved solubility; improved transcription of the gNA; improved resistance to nuclease activity; increased folding rate of the gNA; decreased side product formation during folding; increased productive folding; improved binding affinity to a CasX protein; improved binding affinity to a target DNA when complexed with a CasX protein; improved gene editing when complexed with a CasX protein; improved specificity of editing when complexed with a CasX protein; and improved ability to utilize a greater spectrum of one or more PAM sequences, including ATC, CTC, GTC, or TTC, in the editing of target DNA when complexed with a CasX protein, or any combination thereof. In some cases, the one or more of the improved characteristics of the gNA variant is at least about 1.1 to about 100,000-fold improved relative to the reference gNA of SEQ ID NO:4 or SEQ ID NO:5. In other cases, the one or more improved characteristics of the gNA variant is at least about 1.1, at least about 10, at least about 100, at least about 1000, at least about 10,000, at least about 100,000-fold or more improved relative to the reference gNA of SEQ ID NO:4 or SEQ ID NO:5. In other cases, the one or more of the improved characteristics of the gNA variant is about 1.1 to 100,00-fold, about 1.1 to 10,00-fold, about 1.1 to 1,000-fold, about 1.1 to 500-fold, about 1.1 to 100-fold, about 1.1 to 50-fold, about 1.1 to 20-fold, about 10 to 100,00-fold, about 10 to 10,00-fold, about 10 to 1,000-fold, about 10 to 500-fold, about 10 to 100-fold, about 10 to 50-fold, about 10 to 20-fold, about 2 to 70-fold, about 2 to 50-fold, about 2 to 30-fold, about 2 to 20-fold, about 2 to 10-fold, about 5 to 50-fold, about 5 to 30-fold, about 5 to 10-fold, about 100 to 100,00-fold, about 100 to 10,00-fold, about 100 to 1,000-fold, about 100 to 500-fold, about 500 to 100,00-fold, about 500 to 10,00-fold, about 500 to 1,000-fold, about 500 to 750-fold, about 1,000 to 100,00-fold, about 10,000 to 100,00-fold, about 20 to 500-fold, about 20 to 250-fold, about 20 to 200-fold, about 20 to 100-fold, about 20 to 50-fold, about 50 to 10,000-fold, about 50 to 1,000-fold, about 50 to 500-fold, about 50 to 200-fold, or about 50 to 100-fold, improved relative to the reference gNA of SEQ ID NO:4 or SEQ ID NO:5. In other cases, the one or more improved characteristics of the gNA variant is about 1.1-fold, 1.2-fold, 1.3-fold, 1.4-fold, 1.5-fold, 1.6-fold, 1.7-fold, 1.8-fold, 1.9-fold, 2-fold, 3-fold, 4-fold, 5-fold, 6-fold, 7-fold, 8-fold, 9-fold, 10-fold, 11-fold, 12-fold, 13-fold, 14-fold, 15-fold, 16-fold, 17-fold, 18-fold, 19-fold, 20-fold, 25-fold, 30-fold, 40-fold, 45-fold, 50-fold, 55-fold, 60-fold, 70-fold, 80-fold, 90-fold, 100-fold, 110-fold, 120-fold, 130-fold, 140-fold, 150-fold, 160-fold, 170-fold, 180-fold, 190-fold, 200-fold, 210-fold, 220-fold, 230-fold, 240-fold, 250-fold, 260-fold, 270-fold, 280-fold, 290-fold, 300-fold, 310-fold, 320-fold, 330-fold, 340-fold, 350-fold, 360-fold, 370-fold, 380-fold, 390-fold, 400-fold, 425-fold, 450-fold, 475-fold, or 500-fold improved relative to the reference gNA of SEQ ID NO:4 or SEQ ID NO:5.

[0112] In some embodiments, a gNA variant can be created by subjecting a reference gRNA to a one or more mutagenesis methods, such as the mutagenesis methods described herein, below, which may include Deep Mutational Evolution (DME), deep mutational scanning (DMS), error prone PCR, cassette mutagenesis, random mutagenesis, staggered extension PCR, gene shuffling, or domain swapping, in order to generate the gNA variants of the disclosure. The activity of reference gRNAs may be used as a benchmark against which the activity of gNA variants are compared, thereby measuring improvements in function of gNA variants. In other embodiments, a reference gRNA may be subjected to one or more deliberate, targeted mutations, substitutions, or domain swaps in order to produce a gNA variant, for example a rationally designed variant. Exemplary gRNA variants produced by such methods are described in the Examples and representative sequences of gNA scaffolds are presented in Table 2.

[0113] In some embodiments, the gNA variant comprises one or more modifications compared to a reference guide nucleic acid scaffold sequence, wherein the one or more modification is selected from: at least one nucleotide substitution in a region of the gNA variant; at least one nucleotide deletion in a region of the gNA variant; at least one nucleotide insertion in a region of the gNA variant; a substitution of all or a portion of a region of the gNA variant; a deletion of all or a portion of a region of the gNA variant; or any combination of the foregoing. In some cases, the modification is a substitution of 1 to 15 consecutive or non-consecutive nucleotides in the gNA variant in one or more regions. In other cases, the modification is a deletion of 1 to 10 consecutive or non-consecutive nucleotides in the gNA variant in one or more regions. In other cases, the modification is an insertion of 1 to 10 consecutive or non-consecutive nucleotides in the gNA variant in one or more regions. In other cases, the modification is a substitution of the scaffold stem loop or the extended stem loop with an RNA stem loop sequence from a heterologous RNA source with proximal 5′ and 3′ ends. In some cases, a gNA variant of the disclosure comprises two or more modifications in one region. In other cases, a gNA variant of the disclosure comprises modifications in two or more regions. In other cases, a gNA variant comprises any combination of the foregoing modifications described in this paragraph.

[0114] In some embodiments, a 5′ G is added to a gNA variant sequence for expression in vivo, as transcription from a U6 promoter is more efficient and more consistent with regard to the start site when the +1 nucleotide is a G. In other embodiments, two 5′ Gs are added to a gNA variant sequence for in vitro transcription to increase production efficiency, as T7 polymerase strongly prefers a G in the +1 position and a purine in the +2 position. In some cases, the 5′ G bases are added to the reference scaffolds of Table 1. In other cases, the 5′ G bases are added to the variant scaffolds of Table 2.

[0115] Table 2 provides exemplary gNA variant scaffold sequences. In Table 2, (−) indicates a deletion at the specified position(s) relative to the reference sequence of SEQ ID NO:5, (+) indicates an insertion of the specified base(s) at the position indicated relative to SEQ ID NO:5, (:) indicates the range of bases at the specified start:stop coordinates of a deletion or substitution relative to SEQ ID NO:5, and multiple insertions, deletions or substitutions are separated by commas; e.g., A14C, U17G. In some embodiments, the gNA variant scaffold comprises any one of the sequences listed in Table 2 as SEQ ID NOS:2101-2294, or a sequence having at least about 50%, at least about 60%, at least about 70%, at least about 80%, at least about 90%, at least about 95%, at least about 95%, at least about 96%, at least about 97%, at least about 98%, at least about 99% sequence identity thereto. It will be understood that in those embodiments wherein a vector comprises a DNA encoding sequence for a gNA, or where a gNA is a gDNA or a chimera of RNA and DNA, that thymine (T) bases can be substituted for the uracil (U) bases of any of the gNA sequence embodiments described herein.

TABLE 2
Exemplary gNA Scaffold Sequences

| SEQ | | |
|---|---|---|
| ID | NAME or | |
| NO: | Modification | NUCLEOTIDE SEQUENCE |
| 2101 | phage | UACUGGCGCUUUUAUCUCAUUACUUUGAGAGCCAUCACCAGCGACUA |
| | replication | UGUCGUAUGGGUAAAGCGCAGGUGGGACGACCUCUCGGUCGUCCUAU |
| | stable | CUGAAGCAUCAAAG |
| 2102 | Kissing | UACUGGCGCUUUUAUCUCAUUACUUUGAGAGCCAUCACCAGCGACUA |
| | loop_b1 | UGUCGUAUGGGUAAAGCGCUGCUCGACGCGUCCUCGAGCAGAAGCAU |
| | | CAAAG |
| 2103 | Kissing | UACUGGCGCUUUUAUCUCAUUACUUUGAGAGCCAUCACCAGCGACUA |
| | loop_a | UGUCGUAUGGGUAAAGCGCUGCUCGCUCCGUUCGAGCAGAAGCAUCA |
| | | AAG |
| 2104 | 32: uvsX | GUACUGGCGCUUUUAUCUCAUUACUUUGAGAGCCAUCACCAGCGACU |
| | hairpin | AUGUCGUAUGGGUAAAGCGCCCUCUUCGGAGGGAAGCAUCAAAG |
| 2105 | PP7 | UACUGGCGCUUUUAUCUCAUUACUUUGAGAGCCAUCACCAGCGACUA |
| | | UGUCGUAUGGGUAAAGCGCAGGAGUUUCUAUGGAAACCCUGAAGCAU |
| | | CAAAG |
| 2106 | 64: trip mut, | GUACUGGCGCCUUUAUCUCAUUACUUUGAGAGCCAUCACCAGCGACU |
| | extended stem | AUGUCGUAUGGGUAAAGCGCUUACGGACUUCGGUCCGUAAGAAGCAU |
| | truncation | CAAAG |
| 2107 | hyperstable | UACUGGCGCUUUUAUCUCAUUACUUUGAGAGCCAUCACCAGCGACUA |
| | tetraloop | UGUCGUAUGGGUAAAGCGCUGCGCUUGCGCAGAAGCAUCAAAG |
| 2108 | C18G | UACUGGCGCUUUUAUCUGAUUACUUUGAGAGCCAUCACCAGCGACUA |
| | | UGUCGUAUGGGUAAAGCGCUUAUUUAUCGGAGAGAAAUCCGAUAAAU |
| | | AAGAAGCAUCAAAG |
| 2109 | U17G | UACUGGCGCUUUUAUCGCAUUACUUUGAGAGCCAUCACCAGCGACUA |
| | | UGUCGUAUGGGUAAAGCGCUUAUUUAUCGGAGAGAAAUCCGAUAAAU |
| | | AAGAAGCAUCAAAG |
| 2110 | CUUCGG | UACUGGCGCUUUUAUCUCAUUACUUUGAGAGCCAUCACCAGCGACUA |
| | loop | UGUCGUAUGGGUAAAGCGCUUAUUUAUCGGAGACUUCGGUCCGAUAA |
| | | AUAAGAAGCAUCAAAG |
| 2111 | MS2 | UACUGGCGCUUUUAUCUCAUUACUUUGAGAGCCAUCACCAGCGACUA |
| | | UGUCGUAUGGGUAAAGCGCACAUGAGGAUUACCCAUGUGAAGCAUCA |
| | | AAG |
| 2112 | −1, A2G, −78, | GCUGGCGCUUUUAUCUCAUUACUUUGAGAGCCAUCACCAGCGACUAU |
| | G77U | GUCGUAUGGGUAAAGCGCUUAUUUAUCGUGAGAAAUCCGAUAAAUAA |
| | | GAAGCAUCAAAG |
| 2113 | QB | UACUGGCGCUUUUAUCUCAUUACUUUGAGAGCCAUCACCAGCGACUA |
| | | UGUCGUAUGGGUAAAGCGCUGCAUGUCUAAGACAGCAGAAGCAUCAA |
| | | AG |
| 2114 | 45, 44 hairpin | UACUGGCGCUUUUAUCUCAUUACUUUGAGAGCCAUCACCAGCGACUA |
| | | UGUCGUAUGGGUAAAGCGCAGGGCUUCGGCCGAAGCAUCAAAG |
| 2115 | U1A | UACUGGCGCUUUUAUCUCAUUACUUUGAGAGCCAUCACCAGCGACUA |
| | | UGUCGUAUGGGUAAAGCGCAAUCCAUUGCACUCCGGAUUGAAGCAUC |
| | | AAAG |
| 2116 | A14C, U17G | UACUGGCGCUUUUCUCGCAUUACUUUGAGAGCCAUCACCAGCGACUA |
| | | UGUCGUAUGGGUAAAGCGCUUAUUUAUCGGAGAGAAAUCCGAUAAAU |
| | | AAGAAGCAUCAAAG |
| 2117 | CUUCGG | UACUGGCGCUUUUAUCUCAUUACUUUGAGAGCCAUCACCAGCGACUA |
| | loop modified | UGUCGUAUGGGUAAAGCGCUUAUUUAUCGGACUUCGGUCCGAUAAAU |
| | | AAGAAGCAUCAAAG |
| 2118 | Kissing | UACUGGCGCUUUUAUCUCAUUACUUUGAGAGCCAUCACCAGCGACUA |
| | loop_b2 | UGUCGUAUGGGUAAAGCGCUGCUCGUUUGCGGCUACGAGCAGAAGCA |
| | | UCAAAG |
| 2119 | −76:78, −83:87 | UACUGGCGCUUUUAUCUCAUUACUUUGAGAGCCAUCACCAGCGACUA |
| | | UGUCGUAUGGGUAAAGCGCUUAUUUAUCGAGAGAUAAAUAAGAAGCA |
| | | UCAAAG |
| 2120 | −4 | UACGGCGCUUUUAUCUCAUUACUUUGAGAGCCAUCACCAGCGACUAU |
| | | GUCGUAUGGGUAAAGCGCUUAUUUAUCGGAGAGAAAUCCGAUAAAUA |
| | | AGAAGCAUCAAAG |
| 2121 | extended stem | UACUGGCGCCUUUUAUCUCAUUACUUUGAGAGCCAUCACCAGCGACU |
| | truncation | AUGUCGUAUGGGUAAAGCGCUUACGGACUUCGGUCCGUAAGAAGCAU |
| | | CAAAG |
| 2122 | C55 | UACUGGCGCUUUUAUCUCAUUACUUUGAGAGCCAUCACCAGCGACUA |
| | | UGUCGUAUCGGUAAAGCGCUUAUUUAUCGGAGAGAAAUCCGAUAAAU |
| | | AAGAAGCAUCAAAG |
| 2123 | trip mut | UACUGGCGCCUUUAUCUCAUUACUUUGAGAGCCAUCACCAGCGACUA |
| | | UGUCGUAUGGGUAAAGCGCUUAUUUAUCGGACUUCGGUCCGAUAAAU |
| | | AAGAAGCAUCAAAG |
| 2124 | −76:78 | UACUGGCGCUUUUAUCUCAUUACUUUGAGAGCCAUCACCAGCGACUA |
| | | UGUCGUAUGGGUAAAGCGCUUAUUUAUCGAGAAAUCCGAUAAAUAAG |
| | | AAGCAUCAAAG |
| 2125 | −1:5 | GCGCUUUUAUCUCAUUACUUUGAGAGCCAUCACCAGCGACUAUGUCG |
| | | UAUGGGUAAAGCGCUUAUUUAUCGGAGAGAAAUCCGAUAAAUAAGAA |
| | | GCAUCAAAG |
| 2126 | −83:87 | UACUGGCGCUUUUAUCUCAUUACUUUGAGAGCCAUCACCAGCGACUA |
| | | UGUCGUAUGGGUAAAGCGCUUAUUUAUCGGAGAGAGAUAAAUAAGAA |
| | | GCAUCAAAG |
| 2127 | =+G28, | UACUGGCGCUUUUAUCUCAUUACUUUGGAGAGCCAUCACCAGCGACU |
| | A82U, −84, | AUGUCGUAUGGGUAAAGCGCUUAUUUAUCGGAGAGUAUCCGAUAAAU |
| | | AAGAAGCAUCAAAG |
| 2128 | =+51U | UACUGGCGCUUUUAUCUCAUUACUUUGAGAGCCAUCACCAGCGACUA |
| | | UGUUCGUAUGGGUAAAGCGCUUAUUUAUCGGAGAGAAAUCCGAUAAA |
| | | UAAGAAGCAUCAAAG |
| 2129 | −1: 4, +G5A, | AGCGCUUUUAUCUCAUUACUUUGAGAGCCAUCACCAGCGACUAUGUC |
| | +G86, | GUAUGGGUAAAGCGCUUAUUUAUCGGAGAGAAAUGCCGAUAAAUAAG |
| | | AAGCAUCAAAG |
| 2130 | =+A94 | UACUGGCGCUUUUAUCUCAUUACUUUGAGAGCCAUCACCAGCGACUA |
| | | UGUCGUAUGGGUAAAGCGCUUAUUUAUCGGAGAGAAAUCCGAUAAAA |
| | | UAAGAAGCAUCAAAG |
| 2131 | =+G72 | UACUGGCGCUUUUAUCUCAUUACUUUGAGAGCCAUCACCAGCGACUA |
| | | UGUCGUAUGGGUAAAGCGCUUAUUGUAUCGGAGAGAAAUCCGAUAAA |
| | | UAAGAAGCAUCAAAG |
| 2132 | shorten front, | GCGCUUUUAUCUCAUUACUUUGAGAGCCAUCACCAGCGACUAUGUCG |
| | CUUCGG | UAUGGGUAAAGCGCUUAUUUAUCGGACUUCGGUCCGAUAAAUAAGCG |
| | loop modified. | CAUCAAAG |
| | extend | |
| | extended | |
| 2133 | A14C | UACUGGCGCUUUUCUCUCAUUACUUUGAGAGCCAUCACCAGCGACUA |
| | | UGUCGUAUGGGUAAAGCGCUUAUUUAUCGGAGAGAAAUCCGAUAAAU |
| | | AAGAAGCAUCAAAG |
| 2134 | −1: 3, +G3 | GUGGCGCUUUUAUCUCAUUACUUUGAGAGCCAUCACCAGCGACUAUG |
| | | UCGUAUGGGUAAAGCGCUUAUUUAUCGGAGAGAAAUCCGAUAAAUAA |
| | | GAAGCAUCAAAG |
| 2135 | =+C45, +U46 | UACUGGCGCUUUUAUCUCAUUACUUUGAGAGCCAUCACCAGCGACCU |
| | | UAUGUCGUAUGGGUAAAGCGCUUAUUUAUCGGAGAGAAAUCCGAUAA |
| | | AUAAGAAGCAUCAAAG |
| 2136 | CUUCGG | GAUGGCGCUUUUAUCUCAUUACUUUGAGAGCCAUCACCAGCGACUAU |
| | loop modified, | GUCGUAUGGGUAAAGCGCUUAUUUAUCGGACUUCGGUCCGAUAAAUA |
| | fun start | AGAAGCAUCAAAG |
| 2137 | −93: 94 | UACUGGCGCUUUUAUCUCAUUACUUUGAGAGCCAUCACCAGCGACUA |
| | | UGUCGUAUGGGUAAAGCGCUUAUUUAUCGGAGAGAAAUCCGAUAAAA |
| | | GAAGCAUCAAAG |
| 2138 | =+U45 | UACUGGCGCUUUUAUCUCAUUACUUUGAGAGCCAUCACCAGCGAUCU |
| | | AUGUCGUAUGGGUAAAGCGCUUAUUUAUCGGAGAGAAAUCCGAUAAA |
| | | UAAGAAGCAUCAAAG |
| 2139 | −69, −94 | UACUGGCGCUUUUAUCUCAUUACUUUGAGAGCCAUCACCAGCGACUA |
| | | UGUCGUAUGGGUAAAGGCUUAUUUAUCGGAGAGAAAUCCGAUAAAAA |
| | | GAAGCAUCAAAG |
| 2140 | -94 | UACUGGCGCUUUUAUCUCAUUACUUUGAGAGCCAUCACCAGCGACUA |
| | | UGUCGUAUGGGUAAAGCGCUUAUUUAUCGGAGAGAAAUCCGAUAAAA |
| | | AGAAGCAUCAAAG |
| 2141 | modified | UACUGGCGCUUUAUCUCAUUACUUUGAGAGCCAUCACCAGCGACUAU |
| | CUUCGG, | GUCGUAUGGGUAAAGCGCUUAUUUAUCGGACUUCGGUCCGAUAAAUA |
| | minus U in 1st | AGAAGCAUCAAAG |
| | triplex | |
| 2142 | −1: 4, +C4, | CGGCGCUUUUCUCGCAUUACUUUGAGAGCCAUCACCAGCGACUAUGU |
| | A14C, U17G, | CGUAUGGGUAAAGCGCUUAUUGUAUCGAGAGAUAAAUAAGAAGCAUC |
| | +G72, −76:78, | AAAG |
| | −83:87 | |
| 2143 | U1C, −73 | CACUGGCGCUUUUAUCUCAUUACUUUGAGAGCCAUCACCAGCGACUA |
| | | UGUCGUAUGGGUAAAGCGCUUAUUUUCGGAGAGAAAUCCGAUAAAUA |
| | | AGAAGCAUCAAAG |
| 2144 | Scaffold | UACUGGCGCUUUAUCUCAUUACUUUGAGAGCCAUCACCAGCGACUUC |
| | uuCG, stem | GGUCGUAUGGGUAAAGCGCUUAUGUAUCGGCUUCGGCCGAUACAUAA |
| | uuCG. Stem | GAAGCAUCAAAG |
| | swap, t | |
| | shorten | |
| 2145 | Scaffold | UACUGGCGCUUUUAUCUCAUUACUUUGAGAGCCAUCACCAGCGACUU |
| | uuCG, stem | CGGUCGUAUGGGUAAAGCGCUUAUGUAUCGGCUUCGGCCGAUACAUA |
| | uuCG. Stem | AGAAGCAUCAAAG |
| | swap | |
| 2146 | =+G60 | UACUGGCGCUUUUAUCUCAUUACUUUGAGAGCCAUCACCAGCGACUA |
| | | UGUCGUAUGGGUGAAAGCGCUUAUUUAUCGGAGAGAAAUCCGAUAAA |
| | | UAAGAAGCAUCAAAG |
| 2147 | no stem | UACUGGCGCUUUUAUCUCAUUACUUUGAGAGCCAUCACCAGCGACUU |
| | Scaffold | CGGUCGUAUGGGUAAAG |
| | uuCG | |
| 2148 | no stem | GAUGGGCUUUUAUCUCAUUACUUUGAGAGCCAUCACCAGCGACUUCG |
| | Scaffold | GUCGUAUGGGUAAAG |
| | uuCG, fun | |
| | start | |
| 2149 | Scaffold | GAUGGGCUUUUAUCUCAUUACUUUGAGAGCCAUCACCAGCGACUUCG |
| | uuCG, stem | GUCGUAUGGGUAAAGCGCUUAUUUAUCGGCUUCGGCCGAUAAAUAAG |
| | uuCG, fun | AAGCAUCAAAG |
| | start | |
| 2150 | Pseudoknots | UACUGGCGCUUUUAUCUCAUUACUUUGAGAGCCAUCACCAGCGACUA |
| | | UGUCGUAUGGGUAAAGCGCUACACUGGGAUCGCUGAAUUAGAGAUCG |
| | | GCGUCCUUUCAUUCUAUAUACUUUGGAGUUUUAAAAUGUCUCUAAGU |
| | | ACAGAAGCAUCAAAG |
| 2151 | Scaffold | GGCGCUUUUAUCUCAUUACUUUGAGAGCCAUCACCAGCGACUUCGGU |
| | uuCG, stem | CGUAUGGGUAAAGCGCUUAUUUAUCGGCUUCGGCCGAUAAAUAAGAA |
| | uuCG | GCAUCAAAG |
| 2152 | Scaffold | GCUGGCGCUUUUAUCUCAUUACUUUGAGAGCCAUCACCAGCGACUUC |
| | uuCG, stem | GGUCGUAUGGGUAAAGCGCUUAUUUAUCGGCUUCGGCCGAUAAAUAA |
| | uuCG, no start | GAAGCAUCAAAG |
| 2153 | Scaffold | UACUGGCGCUUUUAUCUCAUUACUUUGAGAGCCAUCACCAGCGACUU |
| | uuCG | CGGUCGUAUGGGUAAAGCGCUUAUUUAUCGGAGAGAAAUCCGAUAAA |
| | | UAAGAAGCAUCAAAG |
| 2154 | =+GCUC36 | UACUGGCGCUUUUAUCUCAUUACUUUGAGAGCCAUGCUCCACCAGCG |
| | | ACUAUGUCGUAUGGGUAAAGCGCUUAUUUAUCGGAGAGAAAUCCGAU |
| | | AAAUAAGAAGCAUCAAAG |
| 2155 | G quadriplex | UACUGGCGCUUUUAUCUCAUUACUUUGAGAGCCAUCACCAGCGACUA |
| | telomere | UGUCGUAUGGGUAAAGCGGGGUUAGGGUUAGGGUUAGGGAAGCAUCA |
| | basket + ends | AAG |
| 2156 | G quadriplex | UACUGGCGCUUUUAUCUCAUUACUUUGAGAGCCAUCACCAGCGACUA |
| | M3q | UGUCGUAUGGGUAAAGCGGAGGGAGGGAGGGAGAGGGAAAGCAUCAA |
| | | AG |
| 2157 | G quadriplex | UACUGGCGCUUUUAUCUCAUUACUUUGAGAGCCAUCACCAGCGACUA |
| | telomere | UGUCGUAUGGGUAAAGCGUUGGGUUAGGGUUAGGGUUAGGGAAAAGC |
| | basket no ends | AUCAAAG |
| 2158 | 45, 44 hairpin | UACUGGCGCUUUUAUCUCAUUACUUUGAGAGCCAUCACCAGCGACUA |
| | (old version) | UGUCGUAUGGGUAAAGCGC--------AGGGCUUCGGCCG------- |
| | | --GAAGCAUCAAAG |
| 2159 | Sarcin-ricin | UACUGGCGCUUUUAUCUCAUUACUUUGAGAGCCAUCACCAGCGACUA |
| | loop | UGUCGUAUGGGUAAAGCGCCUGCUCAGUACGAGAGGAACCGCAGGAA |
| | | GCAUCAAAG |
| 2160 | uvsX, C18G | UACUGGCGCUUUUAUCUGAUUACUUUGAGAGCCAUCACCAGCGACUA |
| | | UGUCGUAUGGGUAAAGCGCCCUCUUCGGAGGGAAGCAUCAAAG |
| 2161 | truncated stem | UACUGGCGCCUUUAUCUGAUUACUUUGAGAGCCAUCACCAGCGACUA |
| | loop, C18G, | UGUCGUAUGGGUAAAGCGCUUACGGACUUCGGUCCGUAAGAAGCAUC |
| | trip mut | AAAG |
| | (U10C) | |
| 2162 | short phage | UACUGGCGCUUUUAUCUGAUUACUUUGAGAGCCAUCACCAGCGACUA |
| | rep, C18G | UGUCGUAUGGGUAAAGCGCGGACGACCUCUCGGUCGUCCGAAGCAUC |
| | | AAAG |
| 2163 | phage rep | UACUGGCGCUUUUAUCUGAUUACUUUGAGAGCCAUCACCAGCGACUA |
| | loop, C18G | UGUCGUAUGGGUAAAGCGCAGGUGGGACGACCUCUCGGUCGUCCUAU |
| | | CUGAAGCAUCAAAG |
| 2164 | =+G18, | UACUGGCGCCUUUAUCUGCAUUACUUUGAGAGCCAUCACCAGCGACU |
| | stacked onto | AUGUCGUAUGGGUAAAGCGCUUACGGACUUCGGUCCGUAAGAAGCAU |
| | 64 | CAAAG |
| 2165 | truncated stem | GCUGGCGCUUUUAUCUGAUUACUUUGAGAGCCAUCACCAGCGACUAU |
| | loop, C18G, | GUCGUAUGGGUAAAGCGCUUACGGACUUCGGUCCGUAAGAAGCAUCA |
| | −1 A2G | AAG |
| 2166 | phage rep | UACUGGCGCCUUUAUCUGAUUACUUUGAGAGCCAUCACCAGCGACUA |
| | loop, C18G, | UGUCGUAUGGGUAAAGCGCAGGUGGGACGACCUCUCGGUCGUCCUAU |
| | trip mut | CUGAAGCAUCAAAG |
| | (U10C) | |
| 2167 | short phage | UACUGGCGCCUUUAUCUGAUUACUUUGAGAGCCAUCACCAGCGACUA |
| | rep, C18G, | UGUCGUAUGGGUAAAGCGCGGACGACCUCUCGGUCGUCCGAAGCAUC |
| | trip mut | AAAG |
| | (U10C) | |
| 2168 | uvsX, trip mut | UACUGGCGCCUUUAUCUCAUUACUUUGAGAGCCAUCACCAGCGACUA |
| | (U10C) | UGUCGUAUGGGUAAAGCGCCCUCUUCGGAGGGAAGCAUCAAAG |
| 2169 | truncated stem | UACUGGCGCUUUUAUCUCAUUACUUUGAGAGCCAUCACCAGCGACUA |
| | loop | UGUCGUAUGGGUAAAGCGCUUACGGACUUCGGUCCGUAAGAAGCAUC |
| | | AAAG |
| 2170 | =+A17, | UACUGGCGCCUUUAUCAUCAUUACUUUGAGAGCCAUCACCAGCGACU |
| | stacked onto | AUGUCGUAUGGGUAAAGCGCUUACGGACUUCGGUCCGUAAGAAGCAU |
| | 64 | CAAAG |
| 2171 | 3′ HDV | UACUGGCGCUUUUAUCUCAUUACUUUGAGAGCCAUCACCAGCGACUA |
| | genomic | UGUCGUAUGGGUAAAGCGCUUAUUUAUCGGAGAGAAAUCCGAUAAAU |
| | ribozyme | AAGAAGCAUCAAAGGGCCGGCAUGGUCCCAGCCUCCUCGCUGGCGCC |
| | | GGCUGGGCAACAUUCCGAGGGGACCGUCCCCUCGGUAAUGGCGAAUG |
| | | GGACCC |
| 2172 | phage rep | UACUGGCGCCUUUAUCUCAUUACUUUGAGAGCCAUCACCAGCGACUA |
| | loop, trip mut | UGUCGUAUGGGUAAAGCGCAGGUGGGACGACCUCUCGGUCGUCCUAU |
| | (U10C) | CUGAAGCAUCAAAG |
| 2173 | -79:80 | UACUGGCGCUUUUAUCUCAUUACUUUGAGAGCCAUCACCAGCGACUA |
| | | UGUCGUAUGGGUAAAGCGCUUAUUUAUCGGAGAAAUCCGAUAAAUAA |
| | | GAAGCAUCAAAG |
| 2174 | short phage | UACUGGCGCCUUUAUCUCAUUACUUUGAGAGCCAUCACCAGCGACUA |
| | rep, trip mut | UGUCGUAUGGGUAAAGCGCGGACGACCUCUCGGUCGUCCGAAGCAUC |
| | (U10C) | AAAG |
| 2175 | extra | UACUGGCGCUUUUAUCUCAUUACUUUGAGAGCCAUCACCAGCGACUA |
| | truncated stem | UGUCGUAUGGGUAAAGCGCCGGACUUCGGUCCGGAAGCAUCAAAG |
| | loop | |
| 2176 | U17G, C18G | UACUGGCGCUUUUAUCGGAUUACUUUGAGAGCCAUCACCAGCGACUA |
| | | UGUCGUAUGGGUAAAGCGCUUAUUUAUCGGAGAGAAAUCCGAUAAAU |
| | | AAGAAGCAUCAAAG |
| 2177 | short phage | UACUGGCGCUUUUAUCUCAUUACUUUGAGAGCCAUCACCAGCGACUA |
| | rep | UGUCGUAUGGGUAAAGCGCGGACGACCUCUCGGUCGUCCGAAGCAUC |
| | | AAAG |
| 2178 | uvsX, C18G, | GCUGGCGCUUUUAUCUGAUUACUUUGAGAGCCAUCACCAGCGACUAU |
| | −1 A2G | GUCGUAUGGGUAAAGCGCCCUCUUCGGAGGGAAGCAUCAAAG |
| 2179 | uvsX, C18G, | GCUGGCGCCUUUAUCUGAUUACUUUGAGAGCCAUCACCAGCGACUAU |
| | trip mut | GUCGUAUGGGUAAAGCUCCCUCUUCGGAGGGAGCAUCAAAG |
| | (U10C), −1 | |
| | A2G, HDV | |
| | −99 G65U | |
| 2180 | 3′ HDV | UACUGGCGCUUUUAUCUCAUUACUUUGAGAGCCAUCACCAGCGACUA |
| | antigenomic | UGUCGUAUGGGUAAAGCGCUUAUUUAUCGGAGAGAAAUCCGAUAAAU |
| | ribozyme | AAGAAGCAUCAAAGGGGUCGGCAUGGCAUCUCCACCUCCUCGCGGUC |
| | | CGACCUGGGCAUCCGAAGGAGGACGCACGUCCACUCGGAUGGCUAAG |
| | | GGAGAGCCA |
| 2181 | uvsX, C18G, | GCUGGCGCCUUUAUCUGAUUACUUUGAGAGCCAUCACCAGCGACUAU |
| | trip mut | GUCGUAUGGGUAAAGCGCCCUCUUCGGAGGGCGCAUCAAAG |
| | (U10C), −1 | |
| | A2G, HDV | |
| | AA(98: 99)C | |
| 2182 | 3′ HDV | UACUGGCGCUUUUAUCUCAUUACUUUGAGAGCCAUCACCAGCGACUA |
| | ribozyme | UGUCGUAUGGGUAAAGCGCUUAUUUAUCGGAGAGAAAUCCGAUAAAU |
| | (Lior Nissim, | AAGAAGCAUCAAAGUUUUGGCCGGCAUGGUCCCAGCCUCCUCGCUGG |
| | Timothy Lu) | CGCCGGCUGGGCAACAUGCUUCGGCAUGGCGAAUGGGACCCCGGG |
| 2183 | TAC(1: 3)GA, | GAUGGCGCCUUUAUCUCAUUACUUUGAGAGCCAUCACCAGCGACUAU |
| | stacked onto | GUCGUAUGGGUAAAGCGCUUACGGACUUCGGUCCGUAAGAAGCAUCA |
| | 64 | AAG |
| 2184 | uvsX, −1 A2G | GCUGGCGCUUUUAUCUCAUUACUUUGAGAGCCAUCACCAGCGACUAU |
| | | GUCGUAUGGGUAAAGCGCCCUCUUCGGAGGGAAGCAUCAAAG |
| 2185 | truncated stem | GCUGGCGCCUUUAUCUGAUUACUUUGAGAGCCAUCACCAGCGACUAU |
| | loop, C18G, | GUCGUAUGGGUAAAGCUCUUACGGACUUCGGUCCGUAAGAGCAUCAA |
| | trip mut | AG |
| | (U10C), −1 | |
| | A2G, HDV | |
| | −99 G65U | |
| 2186 | short phage | GCUGGCGCCUUUAUCUGAUUACUUUGAGAGCCAUCACCAGCGACUAU |
| | rep, C18G, | GUCGUAUGGGUAAAGCUCGGACGACCUCUCGGUCGUCCGAGCAUCAA |
| | trip mut | AG |
| | (U10C), −1 | |
| | A2G, HDV | |
| | −99 G65U | |
| 2187 | 3′ sTRSV WT | UACUGGCGCUUUUAUCUCAUUACUUUGAGAGCCAUCACCAGCGACUA |
| | viral | UGUCGUAUGGGUAAAGCGCUUAUUUAUCGGAGAGAAAUCCGAUAAAU |
| | Hammerhead | AAGAAGCAUCAAAGCCUGUCACCGGAUGUGCUUUCCGGUCUGAUGAG |
| | ribozyme | UCCGUGAGGACGAAACAGG |
| 2188 | short phage | GCUGGCGCUUUUAUCUGAUUACUUUGAGAGCCAUCACCAGCGACUAU |
| | rep, C18G, −1 | GUCGUAUGGGUAAAGCGCGGACGACCUCUCGGUCGUCCGAAGCAUCA |
| | A2G | AAG |
| 2189 | short phage | GCUGGCGCCUUUAUCUGAUUACUUUGAGAGCCAUCACCAGCGACUAU |
| | rep, C18G, | GUCGUAUGGGUAAAGCGCGGACGACCUCUCGGUCGUCCGAAGCAUCA |
| | trip mut | AAG |
| | (U10C), −1 | |
| | A2G, 3′ | |
| | genomic HDV | |
| 2190 | phage rep | GCUGGCGCCUUUAUCUGAUUACUUUGAGAGCCAUCACCAGCGACUAU |
| | loop, C18G, | GUCGUAUGGGUAAAGCUCAGGUGGGACGACCUCUCGGUCGUCCUAUC |
| | trip mut | UGAGCAUCAAAG |
| | (U10C), −1 | |
| | A2G, HDV | |
| | −99 G65U | |
| 2191 | 3′ HDV | UACUGGCGCUUUUAUCUCAUUACUUUGAGAGCCAUCACCAGCGACUA |
| | ribozyme | UGUCGUAUGGGUAAAGCGCUUAUUUAUCGGAGAGAAAUCCGAUAAAU |
| | (Owen Ryan, | AAGAAGCAUCAAAGGAUGGCCGGCAUGGUCCCAGCCUCCUCGCUGGC |
| | Jamie Cate) | GCCGGCUGGGCAACACCUUCGGGUGGCGAAUGGGAC |
| 2192 | phage rep | GCUGGCGCUUUUAUCUGAUUACUUUGAGAGCCAUCACCAGCGACUAU |
| | loop, C18G, | GUCGUAUGGGUAAAGCGCAGGUGGGACGACCUCUCGGUCGUCCUAUC |
| | −1 A2G | UGAAGCAUCAAAG |
| 2193 | 0.14 | UACUGGCGCUUUUAUCUCAUUACUUUGAGAGCCAUCACCAGCGACUA |
| | | UGUCGUACUGGGUAAAGCGCUUAUUUAUCGGAGAGAAAUCCGAUAAA |
| | | UAAGAAGCAUCAAAG |
| 2194 | −78, G77U | UACUGGCGCUUUUAUCUCAUUACUUUGAGAGCCAUCACCAGCGACUA |
| | | UGUCGUAUGGGUAAAGCGCUUAUUUAUCGUGAGAAAUCCGAUAAAUA |
| | | AGAAGCAUCAAAG |
| 2195 | | GUACUGGCGCUUUUAUCUCAUUACUUUGAGAGCCAUCACCAGCGACU |
| | | AUGUCGUAUGGGUAAAGCGCUUAUUUAUCGGAGAGAAAUCCGAUAAA |
| | | UAAGAAGCAUCAAAG |
| 2196 | short phage | GCUGGCGCUUUUAUCUCAUUACUUUGAGAGCCAUCACCAGCGACUAU |
| | rep, −1 A2G | GUCGUAUGGGUAAAGCGCGGACGACCUCUCGGUCGUCCGAAGCAUCA |
| | | AAG |
| 2197 | truncated stem | GCUGGCGCCUUUAUCUGAUUACUUUGAGAGCCAUCACCAGCGACUAU |
| | loop, C18G, | GUCGUAUGGGUAAAGCGCUUACGGACUUCGGUCCGUAAGAAGCAUCA |
| | trip mut | AAG |
| | (U10C), −1 | |
| | A2G | |
| 2198 | −1, A2G | GCUGGCGCUUUUAUCUCAUUACUUUGAGAGCCAUCACCAGCGACUAU |
| | | GUCGUAUGGGUAAAGCGCUUAUUUAUCGGAGAGAAAUCCGAUAAAUA |
| | | AGAAGCAUCAAAG |
| 2199 | truncated stem | GCUGGCGCCUUUAUCUCAUUACUUUGAGAGCCAUCACCAGCGACUAU |
| | loop, trip mut | GUCGUAUGGGUAAAGCGCUUACGGACUUCGGUCCGUAAGAAGCAUCA |
| | (U10C), −1 | AAG |
| | A2G | |
| 2200 | uvsX, C18G, | GCUGGCGCCUUUAUCUGAUUACUUUGAGAGCCAUCACCAGCGACUAU |
| | trip mut | GUCGUAUGGGUAAAGCGCCCUCUUCGGAGGGAAGCAUCAAAG |
| | (U10C), −1 | |
| | A2G | |
| 2201 | phage rep | GCUGGCGCUUUUAUCUCAUUACUUUGAGAGCCAUCACCAGCGACUAU |
| | loop, −1 A2G | GUCGUAUGGGUAAAGCGCAGGUGGGACGACCUCUCGGUCGUCCUAUC |
| | | UGAAGCAUCAAAG |
| 2202 | phage rep | GCUGGCGCCUUUAUCUCAUUACUUUGAGAGCCAUCACCAGCGACUAU |
| | loop, trip mut | GUCGUAUGGGUAAAGCGCAGGUGGGACGACCUCUCGGUCGUCCUAUC |
| | (U10C), −1 | UGAAGCAUCAAAG |
| | A2G | |
| 2203 | phage rep | GCUGGCGCCUUUAUCUGAUUACUUUGAGAGCCAUCACCAGCGACUAU |
| | loop, C18G, | GUCGUAUGGGUAAAGCGCAGGUGGGACGACCUCUCGGUCGUCCUAUC |
| | trip mut | UGAAGCAUCAAAG |
| | (U10C), −1 | |
| | A2G | |
| 2204 | truncated stem | UACUGGCGCUUUUAUCUGAUUACUUUGAGAGCCAUCACCAGCGACUA |
| | loop, C18G | UGUCGUAUGGGUAAAGCGCUUACGGACUUCGGUCCGUAAGAAGCAUC |
| | | AAAG |
| 2205 | uvsX, trip mut | GCUGGCGCCUUUAUCUCAUUACUUUGAGAGCCAUCACCAGCGACUAU |
| | (U10C), −1 | GUCGUAUGGGUAAAGCGCCCUCUUCGGAGGGAAGCAUCAAAG |
| | A2G | |
| 2206 | truncated stem | GCUGGCGCUUUUAUCUCAUUACUUUGAGAGCCAUCACCAGCGACUAU |
| | loop, −1 A2G | GUCGUAUGGGUAAAGCGCUUACGGACUUCGGUCCGUAAGAAGCAUCA |
| | | AAG |
| 2207 | short phage | GCUGGCGCCUUUAUCUCAUUACUUUGAGAGCCAUCACCAGCGACUAU |
| | rep, trip mut | GUCGUAUGGGUAAAGCGCGGACGACCUCUCGGUCGUCCGAAGCAUCA |
| | (U10C), −1 | AAG |
| | A2G | |
| 2208 | 5′HDV | GAUGGCCGGCAUGGUCCCAGCCUCCUCGCUGGCGCCGGCUGGGCAAC |
| | ribozyme | ACCUUCGGGUGGCGAAUGGGACUACUGGCGCUUUUAUCUCAUUACUU |
| | (Owen Ryan, | UGAGAGCCAUCACCAGCGACUAUGUCGUAUGGGUAAAGCGCUUAUUU |
| | Jamie Cate) | AUCGGAGAGAAAUCCGAUAAAUAAGAAGCAUCAAAG |
| 2209 | 5′HDV | GGCCGGCAUGGUCCCAGCCUCCUCGCUGGCGCCGGCUGGGCAACAUU |
| | genomic | CCGAGGGGACCGUCCCCUCGGUAAUGGCGAAUGGGACCCUACUGGCG |
| | ribozyme | CUUUUAUCUCAUUACUUUGAGAGCCAUCACCAGCGACUAUGUCGUAU |
| | | GGGUAAAGCGCUUAUUUAUCGGAGAGAAAUCCGAUAAAUAAGAAGCA |
| | | UCAAAG |
| 2210 | truncated stem | GCUGGCGCCUUUAUCUGAUUACUUUGAGAGCCAUCACCAGCGACUAU |
| | loop, C18G, | GUCGUAUGGGUAAAGCGCUUACGGACUUCGGUCCGUAAGCGCAUCAA |
| | trip mut | AG |
| | (U10C), −1 | |
| | A2G, HDV | |
| | AA(98: 99)C | |
| 2211 | 5′env25 pistol | CGUGGUUAGGGCCACGUUAAAUAGUUGCUUAAGCCCUAAGCGUUGAU |
| | ribozyme | CUUCGGAUCAGGUGCAAUACUGGCGCUUUUAUCUCAUUACUUUGAGA |
| | (with an added | GCCAUCACCAGCGACUAUGUCGUAUGGGUAAAGCGCUUAUUUAUCGG |
| | CUUCGG | AGAGAAAUCCGAUAAAUAAGAAGCAUCAAAG |
| | loop) | |
| 2212 | 5′HDV | GGGUCGGCAUGGCAUCUCCACCUCCUCGCGGUCCGACCUGGGCAUCC |
| | antigenomic | GAAGGAGGACGCACGUCCACUCGGAUGGCUAAGGGAGAGCCAUACUG |
| | ribozyme | GCGCUUUUAUCUCAUUACUUUGAGAGCCAUCACCAGCGACUAUGUCG |
| | | UAUGGGUAAAGCGCUUAUUUAUCGGAGAGAAAUCCGAUAAAUAAGAA |
| | | GCAUCAAAG |
| 2213 | 3′ | UACUGGCGCUUUUAUCUCAUUACUUUGAGAGCCAUCACCAGCGACUA |
| | Hammerhead | UGUCGUAUGGGUAAAGCGCUUAUUUAUCGGAGAGAAAUCCGAUAAAU |
| | ribozyme | AAGAAGCAUCAAAGCCAGUACUGAUGAGUCCGUGAGGACGAAACGAG |
| | (Lior Nissim, | UAAGCUCGUCUACUGGCGCUUUUAUCUCAU |
| | Timothy Lu) | |
| | guide scaffold | |
| | scar | |
| 2214 | =+A27, | UACUGGCGCCUUUAUCUCAUUACUUUAGAGAGCCAUCACCAGCGACU |
| | stacked onto | AUGUCGUAUGGGUAAAGCGCUUACGGACUUCGGUCCGUAAGAAGCAU |
| | 64 | CAAAG |
| 2215 | 5′Hammerhead | CGACUACUGAUGAGUCCGUGAGGACGAAACGAGUAAGCUCGUCUAGU |
| | ribozyme | CGUACUGGCGCUUUUAUCUCAUUACUUUGAGAGCCAUCACCAGCGAC |
| | (Lior Nissim, | UAUGUCGUAUGGGUAAAGCGCUUAUUUAUCGGAGAGAAAUCCGAUAA |
| | Timothy Lu) | AUAAGAAGCAUCAAAG |
| | smaller scar | |
| 2216 | phage rep | GCUGGCGCCUUUAUCUGAUUACUUUGAGAGCCAUCACCAGCGACUAU |
| | loop, C18G, | GUCGUAUGGGUAAAGCGCAGGUGGGACGACCUCUCGGUCGUCCUAUC |
| | trip mut | UGCGCAUCAAAG |
| | (U10C), −1 | |
| | A2G, HDV | |
| | AA(98: 99)C | |
| 2217 | −27, stacked | UACUGGCGCCUUUAUCUCAUUACUUUAGAGCCAUCACCAGCGACUAU |
| | onto 64 | GUCGUAUGGGUAAAGCGCUUACGGACUUCGGUCCGUAAGAAGCAUCA |
| | | AAG |
| 2218 | 3′ Hatchet | UACUGGCGCUUUUAUCUCAUUACUUUGAGAGCCAUCACCAGCGACUA |
| | | UGUCGUAUGGGUAAAGCGCUUAUUUAUCGGAGAGAAAUCCGAUAAAU |
| | | AAGAAGCAUCAAAGCAUUCCUCAGAAAAUGACAAACCUGUGGGGCGU |
| | | AAGUAGAUCUUCGGAUCUAUGAUCGUGCAGACGUUAAAAUCAGGU |
| 2219 | 3′ | UACUGGCGCUUUUAUCUCAUUACUUUGAGAGCCAUCACCAGCGACUA |
| | Hammerhead | UGUCGUAUGGGUAAAGCGCUUAUUUAUCGGAGAGAAAUCCGAUAAAU |
| | ribozyme | AAGAAGCAUCAAAGCGACUACUGAUGAGUCCGUGAGGACGAAACGAG |
| | (Lior Nissim, | UAAGCUCGUCUAGUCGCGUGUAGCGAAGCA |
| | Timothy Lu) | |
| 2220 | 5′ Hatchet | CAUUCCUCAGAAAAUGACAAACCUGUGGGGCGUAAGUAGAUCUUCGG |
| | | AUCUAUGAUCGUGCAGACGUUAAAAUCAGGUUACUGGCGCUUUUAUC |
| | | UCAUUACUUUGAGAGCCAUCACCAGCGACUAUGUCGUAUGGGUAAAG |
| | | CGCUUAUUUAUCGGAGAGAAAUCCGAUAAAUAAGAAGCAUCAAAG |
| 2221 | 5′ HDV | UUUUGGCCGGCAUGGUCCCAGCCUCCUCGCUGGCGCCGGCUGGGCAA |
| | ribozyme | CAUGCUUCGGCAUGGCGAAUGGGACCCCGGGUACUGGCGCUUUUAUC |
| | (Lior Nissim, | UCAUUACUUUGAGAGCCAUCACCAGCGACUAUGUCGUAUGGGUAAAG |
| | Timothy Lu) | CGCUUAUUUAUCGGAGAGAAAUCCGAUAAAUAAGAAGCAUCAAAG |
| 2222 | 5′ | CGACUACUGAUGAGUCCGUGAGGACGAAACGAGUAAGCUCGUCUAGU |
| | Hammerhead | CGCGUGUAGCGAAGCAUACUGGCGCUUUUAUCUCAUUACUUUGAGAG |
| | ribozyme | CCAUCACCAGCGACUAUGUCGUAUGGGUAAAGCGCUUAUUUAUCGGA |
| | (Lior Nissim, | GAGAAAUCCGAUAAAUAAGAAGCAUCAAAG |
| | Timothy Lu) | |
| 2223 | 3′ HH15 | UACUGGCGCUUUUAUCUCAUUACUUUGAGAGCCAUCACCAGCGACUA |
| | Minimal | UGUCGUAUGGGUAAAGCGCUUAUUUAUCGGAGAGAAAUCCGAUAAAU |
| | Hammerhead | AAGAAGCAUCAAAGGGGAGCCCCGCUGAUGAGGUCGGGGAGACCGAA |
| | ribozyme | AGGGACUUCGGUCCCUACGGGGCUCCC |
| 2224 | 5′ RBMX | CCACCCCCACCACCACCCCCACCCCCACCACCACCCUACUGGCGCUU |
| | recruiting | UUAUCUCAUUACUUUGAGAGCCAUCACCAGCGACUAUGUCGUAUGGG |
| | motif | UAAAGCGCUUAUUUAUCGGAGAGAAAUCCGAUAAAUAAGAAGCAUCA |
| | | AAG |
| 2225 | 3′ | UACUGGCGCUUUUAUCUCAUUACUUUGAGAGCCAUCACCAGCGACUA |
| | Hammerhead | UGUCGUAUGGGUAAAGCGCUUAUUUAUCGGAGAGAAAUCCGAUAAAU |
| | ribozyme | AAGAAGCAUCAAAGCGACUACUGAUGAGUCCGUGAGGACGAAACGAG |
| | (Lior Nissim, | UAAGCUCGUCUAGUCG |
| | Timothy Lu) | |
| | smaller scar | |
| 2226 | 3′ env25 pistol | UACUGGCGCUUUUAUCUCAUUACUUUGAGAGCCAUCACCAGCGACUA |
| | ribozyme | UGUCGUAUGGGUAAAGCGCUUAUUUAUCGGAGAGAAAUCCGAUAAAU |
| | (with an added | AAGAAGCAUCAAAGCGUGGUUAGGGCCACGUUAAAUAGUUGCUUAAG |
| | CUUCGG | CCCUAAGCGUUGAUCUUCGGAUCAGGUGCAA |
| | loop) | |
| 2227 | 3′ Env-9 | UACUGGCGCUUUUAUCUCAUUACUUUGAGAGCCAUCACCAGCGACUA |
| | Twister | UGUCGUAUGGGUAAAGCGCUUAUUUAUCGGAGAGAAAUCCGAUAAAU |
| | | AAGAAGCAUCAAAGGGCAAUAAAGCGGUUACAAGCCCGCAAAAAUAG |
| | | CAGAGUAAUGUCGCGAUAGCGCGGCAUUAAUGCAGCUUUAUUG |
| 2228 | =+AUUAUC | UACUGGCGCUUUUAUCUCAUUACUAUUAUCUCAUUACUUUGAGAGCC |
| | UCAUUACU | AUCACCAGCGACUAUGUCGUAUGGGUAAAGCGCUUAUUUAUCGGAGA |
| | 25 | GAAAUCCGAUAAAUAAGAAGCAUCAAAG |
| 2229 | 5′ Env-9 | GGCAAUAAAGCGGUUACAAGCCCGCAAAAAUAGCAGAGUAAUGUCGC |
| | Twister | GAUAGCGCGGCAUUAAUGCAGCUUUAUUGUACUGGCGCUUUUAUCUC |
| | | AUUACUUUGAGAGCCAUCACCAGCGACUAUGUCGUAUGGGUAAAGCG |
| | | CUUAUUUAUCGGAGAGAAAUCCGAUAAAUAAGAAGCAUCAAAG |
| 2230 | 3′ Twisted | UACUGGCGCUUUUAUCUCAUUACUUUGAGAGCCAUCACCAGCGACUA |
| | Sister 1 | UGUCGUAUGGGUAAAGCGCUUAUUUAUCGGAGAGAAAUCCGAUAAAU |
| | | AAGAAGCAUCAAAGACCCGCAAGGCCGACGGCAUCCGCCGCCGCUGG |
| | | UGCAAGUCCAGCCGCCCCUUCGGGGGCGGGCGCUCAUGGGUAAC |
| 2231 | no stem | UACUGGCGCUUUUAUCUCAUUACUUUGAGAGCCAUCACCAGCGACUA |
| | | UGUCGUAUGGGUAAAG |
| 2232 | 5′ HH15 | GGGAGCCCCGCUGAUGAGGUCGGGGAGACCGAAAGGGACUUCGGUCC |
| | Minimal | CUACGGGGCUCCCUACUGGCGCUUUUAUCUCAUUACUUUGAGAGCCA |
| | Hammerhead | UCACCAGCGACUAUGUCGUAUGGGUAAAGCGCUUAUUUAUCGGAGAG |
| | ribozyme | AAAUCCGAUAAAUAAGAAGCAUCAAAG |
| 2233 | 5′ | CCAGUACUGAUGAGUCCGUGAGGACGAAACGAGUAAGCUCGUCUACU |
| | Hammerhead | GGCGCUUUUAUCUCAUUACUGGCGCUUUUAUCUCAUUACUUUGAGAG |
| | ribozyme | CCAUCACCAGCGACUAUGUCGUAUGGGUAAAGCGCUUAUUUAUCGGA |
| | (Lior Nissim, | GAGAAAUCCGAUAAAUAAGAAGCAUCAAAG |
| | Timothy Lu) | |
| | guide scaffold | |
| | scar | |
| 2234 | 5′ Twisted | ACCCGCAAGGCCGACGGCAUCCGCCGCCGCUGGUGCAAGUCCAGCCG |
| | Sister 1 | CCCCUUCGGGGGCGGGCGCUCAUGGGUAACUACUGGCGCUUUUAUCU |
| | | CAUUACUUUGAGAGCCAUCACCAGCGACUAUGUCGUAUGGGUAAAGC |
| | | GCUUAUUUAUCGGAGAGAAAUCCGAUAAAUAAGAAGCAUCAAAG |
| 2235 | 5′ sTRSV WT | CCUGUCACCGGAUGUGCUUUCCGGUCUGAUGAGUCCGUGAGGACGAA |
| | viral | ACAGGUACUGGCGCUUUUAUCUCAUUACUUUGAGAGCCAUCACCAGC |
| | Hammerhead | GACUAUGUCGUAUGGGUAAAGCGCUUAUUUAUCGGAGAGAAAUCCGA |
| | ribozyme | UAAAUAAGAAGCAUCAAAG |
| 2236 | 148: =+G55, | GUACUGGCGCCUUUAUCUCAUUACUUUGAGAGCCAUCACCAGCGACU |
| | stacked onto | AUGUCGUAGUGGGUAAAGCGCUUACGGACUUCGGUCCGUAAGAAGCA |
| | 64 | UCAAAG |
| 2237 | 158: | GUACUGGCGCUUUUAUCUGAUUACUUUGAGAGCCAUCACCAGCGACU |
| | 103 + 148(+G55) | AUGUCGUAGUGGGUAAAGCUCCCUCUUCGGAGGGAGCAUCAAAG |
| | −99, G65U | |
| 2238 | 174: Uvsx | ACUGGCGCUUUUAUCUGAUUACUUUGAGAGCCAUCACCAGCGACUAU |
| | Extended stem | GUCGUAGUGGGUAAAGCUCCCUCUUCGGAGGGAGCAUCAAAG |
| | with [A99] | |
| | G65U), | |
| | C18G, \hat{ }G55, | |
| | [GU−1] | |
| 2239 | 175: extended | ACUGGCGCCUUUAUCUCAUUACUUUGAGAGCCAUCACCAGCGACUAU |
| | stem | GUCGUAUGGGUAAAGCGCUUACGGACUUCGGUCCGUAAGAAGCAUCA |
| | truncation, | AAG |
| | U10C, [GU−1] | |
| 2240 | 176: 174 with | GCUGGCGCUUUUAUCUGAUUACUUUGAGAGCCAUCACCAGCGACUAU |
| | A1G | GUCGUAGUGGGUAAAGCUCCCUCUUCGGAGGGAGCAUCAAAG |
| | substitution | |
| | for T7 | |
| | transcription | |
| 2241 | 177: 174 with | ACUGGCGCUUUUAUCUGAUUACUUUGAGAGCCAUCACCAGCGACUAU |
| | bubble (+G55) | GUCGUAUGGGUAAAGCUCCCUCUUCGGAGGGAGCAUCAAAG |
| | removed | |
| 2242 | 181: stem 42 | ACUGGCGCCUUUAUCUGAUUACUUUGAGAGCCAUCACCAGCGACUAU |
| | (truncated | GUCGUAUGGGUAAAGCGCUUACGGACUUCGGUCCGUAAGAAGCAUCA |
| | stem loop); | AAG |
| | U10C,C18G, | |
| | [GU−1] | |
| | (95 + [GU−1]) | |
| 2243 | 182: stem 42 | ACUGGCGCUUUUAUCUGAUUACUUUGAGAGCCAUCACCAGCGACUAU |
| | (truncated | GUCGUAUGGGUAAAGCGCUUACGGACUUCGGUCCGUAAGAAGCAUCA |
| | stem loop); | AAG |
| | C18G, [GU−1] | |
| 2244 | 183: stem 42 | ACUGGCGCUUUUAUCUGAUUACUUUGAGAGCCAUCACCAGCGACUAU |
| | (truncated | GUCGUAGUGGGUAAAGCGCUUACGGACUUCGGUCCGUAAGAAGCAUC |
| | stem loop); | AAAG |
| | C18G, \hat{ }G55, | |
| | [GU−1] | |
| 2245 | 184: stem 48 | ACUGGCGCUUUUAUCUGAUUACUUUGAGAGCCAUCACCAGCGACUAU |
| | (uvsx, −99 | GUCGUAUUGGGUAAAGCUCCCUCUUCGGAGGGAGCAUCAAAG |
| | g65t); | |
| | C18G, \hat{ }T55, | |
| | [GU−1] | |
| 2246 | 185: stem 42 | ACUGGCGCUUUUAUCUGAUUACUUUGAGAGCCAUCACCAGCGACUAU |
| | (truncated | GUCGUAUUGGGUAAAGCGCUUACGGACUUCGGUCCGUAAGAAGCAUC |
| | stem loop); | AAAG |
| | C18G, \hat{ }U55, | |
| | [GU−1] | |
| 2247 | 186: stem 42 | ACUGGCGCCUUUAUCAUCAUUACUUUGAGAGCCAUCACCAGCGACUA |
| | (truncated | UGUCGUAUGGGUAAAGCGCUUACGGACUUCGGUCCGUAAGAAGCAUC |
| | stem loop); | AAAG |
| | U10C, \hat{ }A17, | |
| | [GU−1] | |
| 2248 | 187: stem 46 | ACUGGCGCUUUUAUCUGAUUACUUUGAGAGCCAUCACCAGCGACUAU |
| | (uvsx); | GUCGUAGUGGGUAAAGCGCCCUCUUCGGAGGGAAGCAUCAAAG |
| | C18G, \hat{ }G55, | |
| | [GU−1] | |
| 2249 | 188: stem 50 | ACUGGCGCUUUUAUCUGAUUACUUUGAGAGCCAUCACCAGCGACUAU |
| | (ms2 U15C, | GUCGUAGUGGGUAAAGCUCACAUGAGGAUCACCCAUGUGAGCAUCAA |
| | −99, g65t); | AG |
| | C18G, \hat{ }G55, | |
| | [GU−1] | |
| 2250 | 189: 174 + | ACUGGCACUUUUACCUGAUUACUUUGAGAGCCAACACCAGCGACUAU |
| | G8A; U15C; | GUCGUAGUGGGUAAAGCUCCCUCUUCGGAGGGAGCAUCAAAG |
| | U35A | |
| 2251 | 190: 174 + | ACUGGCACUUUUAUCUGAUUACUUUGAGAGCCAUCACCAGCGACUAU |
| | G8A | GUCGUAGUGGGUAAAGCUCCCUCUUCGGAGGGAGCAUCAAAG |
| 2252 | 191: 174 + | ACUGGCCCUUUUAUCUGAUUACUUUGAGAGCCAUCACCAGCGACUAU |
| | G8C | GUCGUAGUGGGUAAAGCUCCCUCUUCGGAGGGAGCAUCAAAG |
| 2253 | 192: 174 + | ACUGGCGCUUUUACCUGAUUACUUUGAGAGCCAUCACCAGCGACUAU |
| | U15C | GUCGUAGUGGGUAAAGCUCCCUCUUCGGAGGGAGCAUCAAAG |
| 2254 | 193, 174 + | ACUGGCGCUUUUAUCUGAUUACUUUGAGAGCCAACACCAGCGACUAU |
| | U35A | GUCGUAGUGGGUAAAGCUCCCUCUUCGGAGGGAGCAUCAAAG |
| 2255 | 195: 175 + | ACUGGCACCUUUACCUGAUUACUUUGAGAGCCAACACCAGCGACUAU |
| | C18G + | GUCGUAUGGGUAAAGCGCUUACGGACUUCGGUCCGUAAGAAGCAUCA |
| | G8A; U15C; | AAG |
| | U35A | |
| 2256 | 196: 175 + | ACUGGCACCUUUAUCUGAUUACUUUGAGAGCCAUCACCAGCGACUAU |
| | C18G + G8A | GUCGUAUGGGUAAAGCGCUUACGGACUUCGGUCCGUAAGAAGCAUCA |
| | | AAG |
| 2257 | 197: 175 + | ACUGGCCCCUUUAUCUGAUUACUUUGAGAGCCAUCACCAGCGACUAU |
| | C18G + G8C | GUCGUAUGGGUAAAGCGCUUACGGACUUCGGUCCGUAAGAAGCAUCA |
| | | AAG |
| 2258 | 198: 175 + | ACUGGCGCCUUUAUCUGAUUACUUUGAGAGCCAACACCAGCGACUAU |
| | C18G + U35A | GUCGUAUGGGUAAAGCGCUUACGGACUUCGGUCCGUAAGAAGCAUCA |
| | | AAG |
| 2259 | 199: 174 + | GCUGGCGCUUUUAUCUGAUUACUUUGAGAGCCAUCACCAGCGACUAU |
| | A2G (test G | GUCGUAGUGGGUAAAGCUCCCUCUUCGGAGGGAGCAUCAAAG |
| | transcription | |
| | at start; | |
| | ccGCT . . .) | |
| 2260 | 200: 174 + | GACUGGCGCUUUUAUCUGAUUACUUUGAGAGCCAUCACCAGCGACUA |
| | \hat{ }G1 | UGUCGUAGUGGGUAAAGCUCCCUCUUCGGAGGGAGCAUCAAAG |
| | (ccGACU . . .) | |
| 2261 | 201: 174 + | ACUGGCGCCUUUAUCUGAUUACUUUGGAGAGCCAUCACCAGCGACUA |
| | U10C; \hat{ }G28 | UGUCGUAGUGGGUAAAGCUCCCUCUUCGGAGGGAGCAUCAAAG |
| 2262 | 202: 174 + | ACUGGCGCAUUUAUCUGAUUACUUUGUGAGCCAUCACCAGCGACUAU |
| | U10A; A28U | GUCGUAGUGGGUAAAGCUCCCUCUUCGGAGGGAGCAUCAAAG |
| 2263 | 203: 174 + | ACUGGCGCCUUUAUCUGAUUACUUUGAGAGCCAUCACCAGCGACUAU |
| | U10C | GUCGUAGUGGGUAAAGCUCCCUCUUCGGAGGGAGCAUCAAAG |
| 2264 | 204: 174 + | ACUGGCGCUUUUAUCUGAUUACUUUGGAGAGCCAUCACCAGCGACUA |
| | \hat{ }G28 | UGUCGUAGUGGGUAAAGCUCCCUCUUCGGAGGGAGCAUCAAAG |
| 2265 | 205: 174 + | ACUGGCGCAUUUAUCUGAUUACUUUGAGAGCCAUCACCAGCGACUAU |
| | U10A | GUCGUAGUGGGUAAAGCUCCCUCUUCGGAGGGAGCAUCAAAG |
| 2266 | 206, 174 + | ACUGGCGCUUUUAUCUGAUUACUUUGUGAGCCAUCACCAGCGACUAU |
| | A28U | GUCGUAGUGGGUAAAGCUCCCUCUUCGGAGGGAGCAUCAAAG |
| 2267 | 207: 174 + | ACUGGCGCUUUUAUUCUGAUUACUUUGAGAGCCAUCACCAGCGACUA |
| | \hat{ }U15 | UGUCGUAGUGGGUAAAGCUCCCUCUUCGGAGGGAGCAUCAAAG |
| 2268 | 208: 174 + | ACGGCGCUUUUAUCUGAUUACUUUGAGAGCCAUCACCAGCGACUAUG |
| | [U4] | UCGUAGUGGGUAAAGCUCCCUCUUCGGAGGGAGCAUCAAAG |
| 2269 | 209: 174 + | ACUGGCGCUUUUAUAUGAUUACUUUGAGAGCCAUCACCAGCGACUAU |
| | C16A | GUCGUAGUGGGUAAAGCUCCCUCUUCGGAGGGAGCAUCAAAG |
| 2270 | 210: 174 + | ACUGGCGCUUUUAUCUUGAUUACUUUGAGAGCCAUCACCAGCGACUA |
| | \hat{ }U17 | UGUCGUAGUGGGUAAAGCUCCCUCUUCGGAGGGAGCAUCAAAG |
| 2271 | 211: 174 + | ACUGGCGCUUUUAUCUGAUUACUUUGAGAGCCAGCACCAGCGACUAU |
| | U35G | GUCGUAGUGGGUAAAGCUCCCUCUUCGGAGGGAGCAUCAAAG |
| | (compare with | |
| | 174 + U35A | |
| | above) | |
| 2272 | 212: 174 + | ACUGGCGCUGUUAUCUGAUUACUUCGAGAGCCAUCACCAGCGACUAU |
| | U11G, | GUCGUAGUGGGUAAAGCUCCCUCUUCGGAGGGAGCAUCGAAG |
| | A105G | |
| | (A86G), | |
| | U26C | |
| 2273 | 213: 174 + | ACUGGCGCUCUUAUCUGAUUACUUCGAGAGCCAUCACCAGCGACUAU |
| | U11C, | GUCGUAGUGGGUAAAGCUCCCUCUUCGGAGGGAGCAUCGAAG |
| | A105G | |
| | (A86G), | |
| | U26C | |
| 2274 | 214: | ACUGGCGCUUGUAUCUGAUUACUCUGAGAGCCAUCACCAGCGACUAU |
| | 174 + U12G; | GUCGUAGUGGGUAAAGCUCCCUCUUCGGAGGGAGCAUCAGAG |
| | A106G | |
| | (A87G), | |
| | U25C | |
| 2275 | 215: | ACUGGCGCUUCUAUCUGAUUACUCUGAGAGCCAUCACCAGCGACUAU |
| | 174 + U12C; | GUCGUAGUGGGUAAAGCUCCCUCUUCGGAGGGAGCAUCAGAG |
| | A106G | |
| | (A87G), | |
| | U25C | |
| 2276 | 216: | ACUGGCGCUUUGAUCUGAUUACCUUGAGAGCCAUCACCAGCGACUAU |
| | 174_tx_11.G, | GUCGUAGUGGGUAAAGCUCCCUCUUCGGAGGGAGCAUCAAGG |
| | 87.G, 22.C | |
| 2277 | 217: | ACUGGCGCUUUCAUCUGAUUACCUUGAGAGCCAUCACCAGCGACUAU |
| | 174_tx_11.C, | GUCGUAGUGGGUAAAGCUCCCUCUUCGGAGGGAGCAUCAAGG |
| | 87.G, 22.C | |
| 2278 | 218: 174 + | ACUGGCGCUGUUAUCUGAUUACUUUGAGAGCCAUCACCAGCGACUAU |
| | U11G | GUCGUAGUGGGUAAAGCUCCCUCUUCGGAGGGAGCAUCAAAG |
| 2279 | 219: 174 + | ACUGGCGCUUUUAUCUGAUUACUUUGAGAGCCAUCACCAGCGACUAU |
| | A105G | GUCGUAGUGGGUAAAGCUCCCUCUUCGGAGGGAGCAUCGAAG |
| | (A86G) | |
| 2280 | 220: 174 + | ACUGGCGCUUUUAUCUGAUUACUUCGAGAGCCAUCACCAGCGACUAU |
| | U26C | GUCGUAGUGGGUAAAGCUCCCUCUUCGGAGGGAGCAUCAAAG |
| 2281 | 221: 182: + | ACUGGCACUUCUAUCUGAUUACUCUGAGAGCCAUCACCAGCGACUAU |
| | G7A, T11C, | GUCGUAUGGGUAAAGCCGCUUACGGACUUCGGUCCGUAAGAGGCAUC |
| | T24C, A95G + | AGAG |
| | \hat{ }C63, A88G | |
| 2282 | 222: 174: + | ACUGGCACUUCUAUCUGAUUACUCUGAGAGCCAUCACCAGCGACUAU |
| | G7A, T11C, | GUCGUAGUGGGUAAAGCUCCCUCUUCGGAGGGAGCAUCAGAG |
| | T24C, A87G | |
| 2283 | 223: 175: + | ACUGGCACCUUUAUCUGAUUACUUUGAGAGCCAUCACCAGCGACUAU |
| | G7A, C17G + | GUCGUAUGGGUAAAGCCGCUUACGGACUUCGGUCCGUAAGAGGCAUC |
| | \hat{ }C63, A88G | AAAG |
| 2284 | 224: 182: + | ACUGGCACUUGUAUCUGAUUACUCUGAGAGCCAUCACCAGCGACUAU |
| | G7A, T11G, | GUCGUAUGGGUAAAGCCGCUUACGGACUUCGGUCCGUAAGAGGCAUC |
| | T24C, A95G + | AGAG |
| | \hat{ }C63, A88G | |
| 2285 | 225: 174: + | ACUGGCACUUGUAUCUGAUUACUCUGAGAGCCAUCACCAGCGACUAU |
| | G7A, T11G, | GUCGUAGUGGGUAAAGCUCCCUCUUCGGAGGGAGCAUCAGAG |
| | T24C, A87G | |
| 2286 | 229: 196 + | ACUGGCACUUUUAUCUGAUUACUUUGAGAGCCAUCACCAGCGACUAU |
| | C9T | GUCGUAUGGGUAAAGCGCUUACGGACUUCGGUCCGUAAGAAGCAUCA |
| | | AAG |
| 2287 | 230: 221 + | ACUGGCACUUCUAUCUGAUUACUCUGAGAGCCAUCACCAGCGACUAU |
| | [C64], G89A | GUCGUAUGGGUAAAGCGCUUACGGACUUCGGUCCGUAAGAAGCAUCA |
| | | GAG |
| 2288 | 231: 221 + | ACUGGCGCUUCUAUCUGAUUACUCUGAGAGCCAUCACCAGCGACUAU |
| | A7G | GUCGUAUGGGUAAAGCCGCUUACGGACUUCGGUCCGUAAGAGGCAUC |
| | | AGAG |
| 2289 | 232: 221 + | ACUGGCACUUCUAUCUGAUUACUCUGAGCGCCAUCACCAGCGACUAU |
| | A29C | GUCGUAUGGGUAAAGCCGCUUACGGACUUCGGUCCGUAAGAGGCAUC |
| | | AGAG |
| 2290 | 233: 221 + | ACUGGCGCUUCUAUCUGAUUACUCUGAGCGCCAUCACCAGCGACUAU |
| | A7G, A29C | GUCGUAUGGGUAAAGCCGCUUACGGACUUCGGUCCGUAAGAGGCAUC |
| | | AGAG |
| 2291 | 234: 221 + | ACUGGCGCUUCUAUCUGAUUACUCUGAGCGCCAUCACCAGCGACUAU |
| | A7G,A29C + | GUCGUAUGGGUAAAGCGCCUUACGGACUUCGGUCCGUAAGGAGCAUC |
| | CG64GC, | AGAG |
| | AG88GA | |
| 2292 | 235: 221 + | ACUGGCGCUUCUAUCUGAUUACUCUGAGCGCCAUCACCAGCGACUAU |
| | A7G, A29C, | GUCGUAGUGGGUAAAGCCGCUUACGGACUUCGGUCCGUAAGAGGCAU |
| | \hat{ }G54 | CAGAG |
| 2293 | 236: 221 + | ACGGGACUUUCUAUCUGAUUACUCUGAAGUCCCUCACCAGCGACUAU |
| | pseudoknot | GUCGUAUGGGUAAAGCCGCUUACGGACUUCGGUCCGUAAGAGGCAUC |
| | GGGACT_A | AGAG |
| | AGTCCC | |
| 2294 | 237: 221 + | ACCUGUAGUUCUAUCUGAUUACUCUGACUACAGUCACCAGCGACUAU |
| | pseudoknot | GUCGUAUGGGUAAAGCCGCUUACGGACUUCGGUCCGUAAGAGGCAUC |
| | CTGTAG_ | AGAG |
| | CTACAG | |

[0116] In some embodiments, the gNA variant comprises a tracrRNA stem loop comprising the sequence -UUU-N4-25-UUU- (SEQ ID NO: 34). For example, the gNA variant comprises a scaffold stem loop or a replacement thereof, flanked by two triplet U motifs that contribute to the triplex region. In some embodiments, the scaffold stem loop or replacement thereof comprises at least 4 nucleotides, at least 5 nucleotides, at least 6 nucleotides, at least 7 nucleotides, at least 7 nucleotides, at least 8 nucleotides, at least 9 nucleotides, at least 10 nucleotides, at least 11 nucleotides, at least 12 nucleotides, at least 13 nucleotides, at least 14 nucleotides, at least 15 nucleotides, at least 16 nucleotides, at least 17 nucleotides, at least 18 nucleotides, at least 19 nucleotides, at least 20 nucleotides, at least 21 nucleotides, at least 22 nucleotides, at least 23 nucleotides, at least 24 nucleotides, or at least 25 nucleotides.

[0117] In some embodiments, the gNA variant comprises a crRNA sequence with -AAAG- in a location 5′ to the spacer region. In some embodiments, the -AAAG- sequence is immediately 5′ to the spacer region.

[0118] In some embodiments, the at least one nucleotide modification to a reference gNA to produce a gNA variant comprises at least one nucleotide deletion in the CasX variant gNA relative to the reference gRNA. In some embodiments, a gNA variant comprises a deletion of 1, 2, 3, 4, 5, 6, 7, 8, 9, 10, 11, 12, 13, 14, 15, 16, 17, 18, 19 or 20 consecutive or non-consecutive nucleotides relative to a reference gNA. In some embodiments, the at least one deletion comprises a deletion of 1, 2, 3, 4, 5, 6, 7, 8, 9, 10, 11, 12, 13, 14, 15, 16, 17, 18, 19 or 20 or more consecutive nucleotides relative to a reference gNA. In some embodiments, the gNA variant comprises 2, 3, 4, 5, 6, 7, 8, 9, 10, 11, 12, 13, 14, 15, 16, 17, 18, 19 or 20 or more nucleotide deletions relative to the reference gNA, and the deletions are not in consecutive nucleotides. In those embodiments where there are two or more non-consecutive deletions in the gNA variant relative to the reference gRNA, any length of deletions, and any combination of lengths of deletions, as described herein, are contemplated as within the scope of the disclosure. In some embodiments, a gNA variant comprises at least two deletions in different regions of the reference gRNA. In some embodiments, a gNA variant comprises at least two deletions in the same region of the reference gRNA. For example, the regions may be the extended stem loop, scaffold stem loop, scaffold stem bubble, triplex loop, pseudoknot, triplex, or a 5′ end of the gNA variant. The deletion of any nucleotide in a reference gRNA is contemplated as within the scope of the disclosure.

[0119] In some embodiments, the at least one nucleotide modification of a reference gRNA to generate a gNA variant comprises at least one nucleotide insertion. In some embodiments, a gNA variant comprises an insertion of 1, 2, 3, 4, 5, 6, 7, 8, 9 or 10 consecutive or non-consecutive nucleotides relative to a reference gRNA. In some embodiments, the at least one nucleotide insertion comprises an insertion of 1, 2, 3, 4, 5, 6, 7, 8, 9, 10, 11, 12, 13, 14, 15, 16, 17, 18, 19 or 20 or more consecutive nucleotides relative to a reference gRNA. In some embodiments, the gNA variant comprises 2 or more insertions relative to the reference gRNA, and the insertions are not consecutive. In those embodiments where there are two or more non-consecutive insertions in the gNA variant relative to the reference gRNA, any length of insertions, and any combination of lengths of insertions, as described herein, are contemplated as within the scope of the disclosure. For example, in some embodiments, a gNA variant may comprise a first insertion of one nucleotide, and a second insertion of two nucleotides and the two insertions are not consecutive. In some embodiments, a gNA variant comprises at least two insertions in different regions of the reference gRNA. In some embodiments, a gNA variant comprises at least two insertions in the same region of the reference gRNA. For example, the regions may be the extended stem loop, scaffold stem loop, scaffold stem bubble, triplex loop, pseudoknot, triplex, or a 5′ end of the gNA variant. Any insertion of A, G, C, U (or T, in the corresponding DNA) or combinations thereof at any location in the reference gRNA is contemplated as within the scope of the disclosure.

[0120] In some embodiments, the at least one nucleotide modification of a reference gRNA to generate a gNA variant comprises at least one nucleic acid substitution. In some embodiments, a gNA variant comprises 1, 2, 3, 4, 5, 6, 7, 8, 9, 10, 11, 12, 13, 14, 15, 16, 17, 18, 19 or 20 or more consecutive or non-consecutive substituted nucleotides relative to a reference gRNA. In some embodiments, a gNA variant comprises 1-4 nucleotide substitutions relative to a reference gRNA. In some embodiments, the at least one substitution comprises a substitution of 1, 2, 3, 4, 5, 6, 7, 8, 9, 10, 11, 12, 13, 14, 15, 16, 17, 18, 19 or 20 or more consecutive nucleotides relative to a reference gRNA. In some embodiments, the gNA variant comprises 2 or more substitutions relative to the reference gRNA, and the substitutions are not consecutive. In those embodiments where there are two or more non-consecutive substitutions in the gNA variant relative to the reference gRNA, any length of substituted nucleotides, and any combination of lengths of substituted nucleotides, as described herein, are contemplated as within the scope of the disclosure. For example, in some embodiments, a gNA variant may comprise a first substitution of one nucleotide, and a second substitution of two nucleotides and the two substitutions are not consecutive. In some embodiments, a gNA variant comprises at least two substitutions in different regions of the reference gRNA. In some embodiments, a gNA variant comprises at least two substitutions in the same region of the reference gRNA. For example, the regions may be the triplex, the extended stem loop, scaffold stem loop, scaffold stem bubble, triplex loop, pseudoknot, triplex, or a 5′ end of the gNA variant. Any substitution of A, G, C, U (or T, in the corresponding DNA) or combinations thereof at any location in the reference gRNA is contemplated as within the scope of the disclosure.

[0121] Any of the substitutions, insertions and deletions described herein can be combined to generate a gNA variant of the disclosure. For example, a gNA variant can comprise at least one substitution and at least one deletion relative to a reference gRNA, at least one substitution and at least one insertion relative to a reference gRNA, at least one insertion and at least one deletion relative to a reference gRNA, or at least one substitution, one insertion and one deletion relative to a reference gRNA.

[0122] In some embodiments, the gNA variant comprises a scaffold region at least 20% identical, at least 30% identical, at least 40% identical, at least 50% identical, at least 60% identical, at least 65% identical, at least 70% identical, at least 75% identical, at least 80% identical, at least 85% identical, at least 90% identical, at least 91% identical, at least 92% identical, at least 93% identical, at least 94% identical, at least 95% identical, at least 96% identical, at least 97% identical, at least 98% identical, or at least 99% identical to any one of SEQ ID NOS:4-16. In some embodiments, the gNA variant comprises a scaffold region at least 60% homologous (or identical) to any one of SEQ ID NOS:4-16.

[0123] In some embodiments, the gNA variant comprises a tracr stem loop at least 60% identical, at least 65% identical, at least 70% identical, at least 75% identical, at least 80% identical, at least 85% identical, at least 90% identical, or at least 95% identical to SEQ ID NO:14. In some embodiments, the gNA variant comprises a tracr stem loop at least 60% homologous (or identical) to SEQ ID NO: 14.

[0124] In some embodiments, the gNA variant comprises an extended stem loop at least 60% identical, at least 65% identical, at least 70% identical, at least 75% identical, at least 80% identical, at least 85% identical, at least 90% identical, or at least 95% identical to SEQ ID NO:15. In some embodiments, the gNA variant comprises an extended stem loop at least 60% homologous (or identical) to SEQ ID NO: 15.

[0125] In some embodiments, the gNA variant comprises an exogenous extended stem loop, with such differences from a reference gNA described as follows. In some embodiments, an exogenous extended stem loop has little or no identity to the reference stem loop regions disclosed herein (e.g., SEQ ID NO:15). In some embodiments, an exogenous stem loop is at least 10 bp, at least 20 bp, at least 30 bp, at least 40 bp, at least 50 bp, at least 60 bp, at least 70 bp, at least 80 bp, at least 90 bp, at least 100 bp, at least 200 bp, at least 300 bp, at least 400 bp, at least 500 bp, at least 600 bp, at least 700 bp, at least 800 bp, at least 900 bp, at least 1,000 bp, at least 2,000 bp, at least 3,000 bp, at least 4,000 bp, at least 5,000 bp, at least 6,000 bp, at least 7,000 bp, at least 8,000 bp, at least 9,000 bp, at least 10,000 bp, at least 12,000 bp, at least 15,000 bp or at least 20,000 bp. In some embodiments, the gNA variant comprises an extended stem loop region comprising at least 10, at least 100, at least 500, at least 1000, or at least 10,000 nucleotides. In some embodiments, the heterologous stem loop increases the stability of the gNA. In some embodiments, the heterologous RNA stem loop is capable of binding a protein, an RNA structure, a DNA sequence, or a small molecule. In some embodiments, an exogenous stem loop region replacing the stem loop comprises an RNA stem loop or hairpin in which the resulting gNA has increased stability and, depending on the choice of loop, can interact with certain cellular proteins or RNA. Such exogenous extended stem loops can comprise, for example a thermostable RNA such as MS2 (ACAUGAGGAUCACCCAUGU (SEQ ID NO: 35)), Qβ (UGCAUGUCUAAGACAGCA (SEQ ID NO: 36)), U1 hairpin II (AAUCCAUUGCACUCCGGAUU (SEQ ID NO: 37)), Uvsx (CCUCUUCGGAGG (SEQ ID NO: 38)), PP7 (AGGAGUUUCUAUGGAAACCCU (SEQ ID NO: 39)), Phage replication loop (AGGUGGGACGACCUCUCGGUCGUCCUAUCU (SEQ ID NO: 40)), Kissing loop_a (UGCUCGCUCCGUUCGAGCA (SEQ ID NO: 41)), Kissing loop_b1 (UGCUCGACGCGUCCUCGAGCA (SEQ ID NO: 42)), Kissing loop_b2 (UGCUCGUUUGCGGCUACGAGCA (SEQ ID NO: 43)), G quadriplex M3q (AGGGAGGGAGGGAGAGG (SEQ ID NO: 44)), G quadriplex telomere basket (GGUUAGGGUUAGGGUUAGG (SEQ ID NO: 45)), Sarcin-ricin loop (CUGCUCAGUACGAGAGGAACCGCAG (SEQ ID NO: 46)) or Pseudoknots (UACACUGGGAUCGCUGAAUUAGAGAUCGGCGUCCUUUCAUUCUAUAUACUUUGG AGUUUUAAAAUGUCUCUAAGUACA (SEQ ID NO: 47)). In some embodiments, an exogenous stem loop comprises a long non-coding RNA (lncRNA). As used herein, a lncRNA refers to a non-coding RNA that is longer than approximately 200 bp in length. In some embodiments, the 5′ and 3′ ends of the exogenous stem loop are base paired; i.e., interact to form a region of duplex RNA. In some embodiments, the 5′ and 3′ ends of the exogenous stem loop are base paired, and one or more regions between the 5′ and 3′ ends of the exogenous stem loop are not base paired. In some embodiments, the at least one nucleotide modification comprises: (a) substitution of 1 to 15 consecutive or non-consecutive nucleotides in the gNA variant in one or more regions; (b) a deletion of 1 to 10 consecutive or non-consecutive nucleotides in the gNA variant in one or more regions; (c) an insertion of 1 to 10 consecutive or non-consecutive nucleotides in the gNA variant in one or more regions; (d) a substitution of the scaffold stem loop or the extended stem loop with an RNA stem loop sequence from a heterologous RNA source with proximal 5′ and 3′ ends; or any combination of (a)-(d).

[0126] In some embodiments, the gNA variant comprises a scaffold stem loop sequence of CCAGCGACUAUGUCGUAGUGG (SEQ ID NO: 32). In some embodiments, the gNA variant comprises a scaffold stem loop sequence of CCAGCGACUAUGUCGUAGUGG (SEQ ID NO: 32) with at least 1, 2, 3, 4, or 5 mismatches thereto.

[0127] In some embodiments, the gNA variant comprises an extended stem loop region comprising less than 32 nucleotides, less than 31 nucleotides, less than 30 nucleotides, less than 29 nucleotides, less than 28 nucleotides, less than 27 nucleotides, less than 26 nucleotides, less than 25 nucleotides, less than 24 nucleotides, less than 23 nucleotides, less than 22 nucleotides, less than 21 nucleotides, or less than 20 nucleotides. In some embodiments, the gNA variant comprises an extended stem loop region comprising less than 32 nucleotides. In some embodiments, the gNA variant further comprises a thermostable stem loop.

[0128] In some embodiments, a sgRNA variant comprises a sequence of SEQ ID NOS:2104, SEQ ID NO:2106, SEQ ID NO:2163, SEQ ID NO:2107, SEQ ID NO:2164, SEQ ID NO:2165, SEQ ID NO:2166, SEQ ID NO:2103, SEQ ID NO:2167, SEQ ID NO:2105, SEQ ID NO:2108, SEQ ID NO:2112, SEQ ID NO:2160, SEQ ID NO:2170, SEQ ID NO:2114, SEQ ID NO:2171, SEQ ID NO:2112, SEQ ID NO:2173, SEQ ID NO:2102, SEQ ID NO:2174, SEQ ID NO:2175, SEQ ID NO:2109, SEQ ID NO:2176, SEQ ID NO:2238, SEQ ID NO:2239, SEQ ID NO:2240, SEQ ID NO:2241, SEQ ID NO:2256, SEQ ID NO:2274, SEQ ID NO:2275, SEQ ID NO:2279, or SEQ ID NO:2281. In some embodiments, a sgRNA variant comprises a sequence of SEQ ID NOS: 2238, 2246, 2256, 2274 or 2275.

[0129] In some embodiments, the gNA variant comprises the sequence of any one of SEQ ID NOS: 2236, 2237, 2238, 2241, 2244, 2248, 2249, 2256, or 2259-2294, or having at least about 80%, at least about 90%, at least about 95%, at least about 96%, at least about 97%, at least about 98%, at least about 99% identity thereto. In some embodiments, the gNA variant comprises one or more additional changes to a sequence of any one of SEQ ID NOs: 2201-2294. In some embodiments, the gNA variant comprises the sequence of any one of SEQ ID NOS:2236, 2237, 2238, 2241, 2244, 2248, 2249, or 2259-2294.

[0130] In some embodiments, a sgRNA variant comprises one or more additional changes to a sequence of SEQ ID NO:2104, SEQ ID NO:2163, SEQ ID NO:2107, SEQ ID NO:2164, SEQ ID NO:2165, SEQ ID NO:2166, SEQ ID NO:2103, SEQ ID NO:2167, SEQ ID NO:2105, SEQ ID NO:2108, SEQ ID NO:2112, SEQ ID NO:2160, SEQ ID NO:2170, SEQ ID NO:2114, SEQ ID NO:2171, SEQ ID NO:2112, SEQ ID NO:2173, SEQ ID NO:2102, SEQ ID NO:2174, SEQ ID NO:2175, SEQ ID NO:2109, SEQ ID NO:2176, SEQ ID NO:2238, SEQ ID NO:2239, SEQ ID NO:2240, SEQ ID NO:2241, SEQ ID NO:2243, SEQ ID NO:2256, SEQ ID NO:2274, SEQ ID NO:2275, SEQ ID NO:2279, or SEQ ID NO:2281.

[0131] In some embodiments of the gNA variants of the disclosure, the gNA variant comprises at least one modification, wherein the at least one modification compared to the reference guide scaffold of SEQ ID NO:5 is selected from one or more of: (a) a C18G substitution in the triplex loop; (b) a G55 insertion in the stem bubble; (c) a U1 deletion; (d) a modification of the extended stem loop wherein (i) a 6 nt loop and 13 loop-proximal base pairs are replaced by a Uvsx hairpin; and (ii) a deletion of A99 and a substitution of G65U that results in a loop-distal base that is fully base-paired. In such embodiments, the gNA variant comprises the sequence of any one of SEQ ID NOS:2236, 2237, 2238, 2241, 2244, 2248, 2249, 2256 or 2259-2294.

[0132] In the embodiments of the gNA variants, the gNA variant further comprises a spacer (or targeting sequence) region located at the 3′ end of the gNA, specific to a C9orf72 sequence. Exemplary spacers, and their cognate PAM sequences, are shown in Table 3 below.

TABLE 3
gNA Targeting Sequences for the C9orf72 Gene

| PAM Sequence | SEQ ID NO |
|---|---|
| ATC | 363-2100, 2295-5426 |
| TTC | 5427-12893 |
| GTC | 12894-16202 |
| CTC | 16203-21835 |

[0133] In the embodiments of the gNA variants, the gNA variant further comprises a spacer (or targeting sequence) region located at the 3′ end of the gNA, described more fully, supra, which comprises at least 14 to about 35 nucleotides wherein the spacer is designed with a sequence that is complementary to a target nucleic acid. In some embodiments, the gNA variant comprises a targeting sequence of at least 10 to 30 nucleotides complementary to a target nucleic acid. In some embodiments, the targeting sequence has 14, 15, 16, 17, 18, 19, 20, 21, 22, 23, 24, 25, 26, 27, 28, 29, 30, 31, 32, 33, 34 or 35 nucleotides. In some embodiments, the gNA variant comprises a targeting sequence having 20 nucleotides. In some embodiments, the targeting sequence has 25 nucleotides. In some embodiments, the targeting sequence has 24 nucleotides. In some embodiments, the targeting sequence has 23 nucleotides. In some embodiments, the targeting sequence has 22 nucleotides. In some embodiments, the targeting sequence has 21 nucleotides. In some embodiments, the targeting sequence has 19 nucleotides. In some embodiments, the targeting sequence has 18 nucleotides. In some embodiments, the targeting sequence has 17 nucleotides. In some embodiments, the targeting sequence has 16 nucleotides. In some embodiments, the targeting sequence has 15 nucleotides. In some embodiments, the targeting sequence has 14 nucleotides. In some embodiments, the disclosure provides targeting sequences for inclusion in the gNA variants of the disclosure comprising a sequence that is at least 50% identical, at least 55% identical, at least 60% identical, at least 65% identical, at least 70% identical, at least 75% identical, at least 80% identical, at least 85% identical, at least 90% identical, at least 95% identical, or 100% identical to a sequence of SEQ ID NOs: 309-343, 363-2100 and 2295-21835. In some embodiments, the targeting sequence of the gNA variant comprises a sequence a sequence of SEQ ID NOs: 309-343, 363-2100 and 2295-21835 with a single nucleotide removed from the 3′ end of the sequence. In other embodiments, the targeting sequence of the gNA variant comprises a sequence a sequence of SEQ ID NOs: 309-343, 363-2100 and 2295-21835 with two nucleotides removed from the 3′ end of the sequence. In other embodiments, the targeting sequence of the gNA variant comprises a sequence a sequence of SEQ ID NOs: 309-343, 363-2100 and 2295-21835 with three nucleotides removed from the 3′ end of the sequence. In other embodiments, the targeting sequence of the gNA variant comprises a sequence a sequence of SEQ ID NOs: 309-343, 363-2100 and 2295-21835 with four nucleotides removed from the 3′ end of the sequence. In other embodiments, the targeting sequence of the gNA variant comprises a sequence a sequence of SEQ ID NOs: 309-343, 363-2100 and 2295-21835 with five nucleotides removed from the 3′ end of the sequence.

[0134] In some embodiments, the gNA variant further comprises a spacer (targeting) region located at the 3′ end of the gNA, wherein the spacer is designed with a sequence that is complementary to a target nucleic acid. In some embodiments, the target nucleic acid comprises a PAM sequence located 5′ of the spacer with at least a single nucleotide separating the PAM from the first nucleotide of the spacer. In some embodiments, the PAM is located on the non-targeted strand of the target region, i.e. the strand that is complementary to the target nucleic acid. In some embodiments, the PAM sequence is ATC. In some embodiments, the targeting sequence for an ATC PAM comprises SEQ ID NOs: 363-2100 or 2295-5426, or a sequence that is at least 50% identical, at least 55% identical, at least 60% identical, at least 65% identical, at least 70% identical, at least 75% identical, at least 80% identical, at least 85% identical, at least 90% identical, at least 95% identical, or at least 99% identical to SEQ ID NOs: 363-2100 or 2295-5426. In some embodiments, the targeting sequence for an ATC PAM is selected from the group consisting of SEQ ID NOs: 363-2100 or 2295-5426. In some embodiments, the PAM sequence is CTC. In some embodiments, the targeting sequence for a CTC PAM comprises SEQ ID NOs: 16203-21835, or a sequence that is at least 50% identical, at least 55% identical, at least 60% identical, at least 65% identical, at least 70% identical, at least 75% identical, at least 80% identical, at least 85% identical, at least 90% identical, at least 95% identical, or at least 99% identical to SEQ ID NOs: 16203-21835. In some embodiments, the targeting sequence for a CTC PAM is selected from the group consisting of SEQ ID NOs: 16203-21835. In some embodiments, the PAM sequence is GTC. In some embodiments, the targeting sequences for a GTC PAM comprises SEQ ID NOs: 12894-16202 or a sequence that is at least 50% identical, at least 55% identical, at least 60% identical, at least 65% identical, at least 70% identical, at least 75% identical, at least 80% identical, at least 85% identical, at least 90% identical, at least 95% identical, or at least 99% identical to SEQ ID NOs: 12894-16202. In some embodiments, the targeting sequence for a GTC PAM is selected from the group consisting of SEQ ID NOs: 12894-16202. In some embodiments, the PAM sequence is TTC. In some embodiments, a targeting sequences for a TTC PAM comprises SEQ ID NOs: 5427-12893, or a sequence that is at least 50% identical, at least 55% identical, at least 60% identical, at least 65% identical, at least 70% identical, at least 75% identical, at least 80% identical, at least 85% identical, at least 90% identical, at least 95% identical, or at least 99% identical to SEQ ID NOs: 5427-12893. In some embodiments, a targeting sequence for a TTC PAM is selected from the group consisting of SEQ ID NOs: 5427-12893.

[0135] In some embodiments, the scaffold of the gNA variant is part of an RNP with a reference CasX protein comprising SEQ ID NO:1, SEQ ID NO:2, or SEQ ID NO:3. In other embodiments, the scaffold of the gNA variant is part of an RNP with a CasX variant protein comprising any one of the sequences of Tables 4, 6, 7, 8, or 10 or a sequence having at least about 50%, at least about 60%, at least about 70%, at least about 80%, at least about 85%, at least about 90%, at least about 91%, at least about 92%, at least about 93%, at least about 94%, at least about 95%, at least about 96%, at least about 97%, at least about 98%, or at least about 99% identity thereto. In the foregoing embodiments, the gNA further comprises a spacer sequence.

[0136] In some embodiments, the scaffold of the gNA variant is a variant comprising one or more additional changes to a sequence of a reference gRNA that comprises SEQ ID NO:4 or SEQ ID NO:5. In those embodiments where the scaffold of the reference gRNA is derived from SEQ ID NO:4 or SEQ ID NO:5, the one or more improved or added characteristics of the gNA variant are improved compared to the same characteristic in SEQ ID NO:4 or SEQ ID NO:5.

m. Complex Formation with CasX Protein

[0137] In some embodiments, a gNA variant has an improved ability to form a complex with a CasX protein (such as a reference CasX or a CasX variant protein) when compared to a reference gRNA. In some embodiments, a gNA variant has an improved affinity for a CasX protein (such as a reference or variant protein) when compared to a reference gRNA, thereby improving its ability to form a ribonucleoprotein (RNP) complex with the CasX protein, as described in the Examples. Improving ribonucleoprotein complex formation may, in some embodiments, improve the efficiency with which functional RNPs are assembled. In some embodiments, greater than 90%, greater than 93%, greater than 95%, greater than 96%, greater than 97%, greater than 98% or greater than 99% of RNPs comprising a gNA variant and its spacer are competent for gene editing of a target nucleic acid.

h. Complex Formation with CasX Protein

[0138] In some embodiments, a gNA variant has an improved ability to form a complex with a CasX protein (such as a reference CasX or a CasX variant protein) when compared to a reference gRNA. In some embodiments, a gNA variant has an improved affinity for a CasX protein (such as a reference or variant protein) when compared to a reference gRNA, thereby improving its ability to form a ribonucleoprotein (RNP) complex with the CasX protein, as described in the Examples. Improving ribonucleoprotein complex formation may, in some embodiments, improve the efficiency with which functional RNPs are assembled. In some embodiments, greater than 90%, greater than 93%, greater than 95%, greater than 96%, greater than 97%, greater than 98% or greater than 99% of RNPs comprising a gNA variant and its spacer are competent for gene editing of a target nucleic acid.

[0139] Exemplary nucleotide changes that can improve the ability of gNA variants to form a complex with CasX protein may, in some embodiments, include replacing the scaffold stem with a thermostable stem loop. Without wishing to be bound by any theory, replacing the scaffold stem with a thermostable stem loop could increase the overall binding stability of the gNA variant with the CasX protein. Alternatively, or in addition, removing a large section of the stem loop could change the gNA variant folding kinetics and make a functional folded gNA easier and quicker to structurally-assemble, for example by lessening the degree to which the gNA variant can get “tangled” in itself. In some embodiments, choice of scaffold stem loop sequence could change with different spacers that are utilized for the gNA. In some embodiments, scaffold sequence can be tailored to the spacer and therefore the target sequence. Biochemical assays can be used to evaluate the binding affinity of CasX protein for the gNA variant to form the RNP, including the assays of the Examples. For example, a person of ordinary skill can measure changes in the amount of a fluorescently tagged gNA that is bound to an immobilized CasX protein, as a response to increasing concentrations of an additional unlabeled “cold competitor” gNA. Alternatively, or in addition, fluorescence signal can be monitored to or seeing how it changes as different amounts of fluorescently labeled gNA are flowed over immobilized CasX protein. Alternatively, the ability to form an RNP can be assessed using in vitro cleavage assays against a defined target nucleic acid sequence.

### i. gNA Stability

[0140] In some embodiments, a gNA variant has improved stability when compared to a reference gRNA. Increased stability and efficient folding may, in some embodiments, increase the extent to which a gNA variant persists inside a target cell, which may thereby increase the chance of forming a functional RNP capable of carrying out CasX functions such as gene editing. Increased stability of gNA variants may also, in some embodiments, allow for a similar outcome with a lower amount of gNA delivered to a cell, which may in turn reduce the chance of off-target effects during gene editing. Guide RNA stability can be assessed in a variety of ways, including for example in vitro by assembling the guide, incubating for varying periods of time in a solution that mimics the intracellular environment, and then measuring functional activity via the in vitro cleavage assays described herein. Alternatively, or in addition, gNAs can be harvested from cells at varying time points after initial transfection/transduction of the gNA to determine how long gNA variants persist relative to reference gRNAs.

j. Solubility

[0141] In some embodiments, a gNA variant has improved solubility when compared to a reference gRNA. In some embodiments, a gNA variant has improved solubility of the CasX protein:gNA RNP when compared to a reference gRNA. In some embodiments, solubility of the CasX protein:gNA RNP is improved by the addition of a ribozyme sequence to a 5′ or 3′ end of the gNA variant, for example the 5′ or 3′ of a reference sgRNA. Some ribozymes, such as the M1 ribozyme, can increase solubility of proteins through RNA mediated protein folding. Increased solubility of CasX RNPs comprising a gNA variant as described herein can be evaluated through a variety of means known to one of skill in the art, such as by taking densitometry readings on a gel of the soluble fraction of lysed E. coli in which the CasX and gNA variants are expressed.

k. Resistance to Nuclease Activity

[0142] In some embodiments, a gNA variant has improved resistance to nuclease activity compared to a reference gRNA that may, for example, increase the persistence of a variant gNA in an intracellular environment, thereby improving gene editing. Resistance to nuclease activity may be evaluated through a variety of methods known to one of skill in the art. For example, in vitro methods of measuring resistance to nuclease activity may include for example contacting reference gNA and variants with one or more exemplary RNA nucleases and measuring degradation. Alternatively, or in addition, measuring persistence of a gNA variant in a cellular environment using the methods described herein can indicate the degree to which the gNA variant is nuclease resistant.

l. Binding Affinity to a Target DNA

[0143] In some embodiments, a gNA variant has improved affinity for the target DNA relative to a reference gRNA. In certain embodiments, a ribonucleoprotein complex comprising a gNA variant has improved affinity for the target DNA, relative to the affinity of an RNP comprising a reference gRNA. In some embodiments, the improved affinity of the RNP for the target DNA comprises improved affinity for the target sequence, improved affinity for the PAM sequence, improved ability of the RNP to search DNA for the target sequence, or any combinations thereof. In some embodiments, the improved affinity for the target DNA is the result of increased overall DNA binding affinity.

[0144] Without wishing to be bound by theory, it is possible that nucleotide changes in the gNA variant that affect the function of the OBD in the CasX protein may increase the affinity of CasX variant protein binding to the protospacer adjacent motif (PAM), as well as the ability to bind or utilize an increased spectrum of PAM sequences other than the canonical TTC PAM recognized by the reference CasX protein of SEQ ID NO:2, including PAM sequences selected from the group consisting of TTC, ATC, GTC, and CTC, thereby increasing the affinity and diversity of the CasX variant protein for target DNA sequences, resulting in a substantial increase in the target nucleic acid sequences that can be edited and/or bound, compared to a reference CasX. As described more fully, below, increasing the sequences of the target nucleic acid that can be edited, compared to a reference CasX, refers to both the PAM and the protospacer sequence and their directionality according to the orientation of the non-target strand. This does not imply that the PAM sequence of the non-target strand, rather than the target strand, is determinative of cleavage or mechanistically involved in target recognition. For example, when reference is to a TTC PAM, it may in fact be the complementary GAA sequence that is required for target cleavage, or it may be some combination of nucleotides from both strands. In the case of the CasX proteins disclosed herein, the PAM is located 5′ of the protospacer with at least a single nucleotide separating the PAM from the first nucleotide of the protospacer. Alternatively, or in addition, changes in the gNA that affect function of the helical I and/or helical II domains that increase the affinity of the CasX variant protein for the target DNA strand can increase the affinity of the CasX RNP comprising the variant gNA for target DNA.

m. Adding or Changing gNA Function

[0145] In some embodiments, gNA variants can comprise larger structural changes that change the topology of the gNA variant with respect to the reference gRNA, thereby allowing for different gNA functionality. For example, in some embodiments a gNA variant has swapped an endogenous stem loop of the reference gRNA scaffold with a previously identified stable RNA structure or a stem loop that can interact with a protein or RNA binding partner to recruit additional moieties to the CasX or to recruit CasX to a specific location, such as the inside of a viral capsid, that has the binding partner to the said RNA structure. In other scenarios the RNAs may be recruited to each other, as in Kissing loops, such that two CasX proteins can be co-localized for more effective gene editing at the target DNA sequence. Such RNA structures may include MS2, Qβ, U1 hairpin II, Uvsx, PP7, Phage replication loop, Kissing loop_a, Kissing loop_b1, Kissing loop_b2, G quadriplex M3q, G quadriplex telomere basket, Sarcin-ricin loop, or a Pseudoknot.

[0146] In some embodiments, a gNA variant comprises a terminal fusion partner. Exemplary terminal fusions may include fusion of the gRNA to a self-cleaving ribozyme or protein binding motif. As used herein, a “ribozyme” refers to an RNA or segment thereof with one or more catalytic activities similar to a protein enzyme. Exemplary ribozyme catalytic activities may include, for example, cleavage and/or ligation of RNA, cleavage and/or ligation of DNA, or peptide bond formation. In some embodiments, such fusions could either improve scaffold folding or recruit DNA repair machinery. For example, a gRNA may in some embodiments be fused to a hepatitis delta virus (HDV) antigenomic ribozyme, HDV genomic ribozyme, hatchet ribozyme (from metagenomic data), env25 pistol ribozyme (representative from Aliistipes putredinis), HH15 Minimal Hammerhead ribozyme, tobacco ringspot virus (TRSV) ribozyme, WT viral Hammerhead ribozyme (and rational variants), or Twisted Sister 1 or RBMX recruiting motif. Hammerhead ribozymes are RNA motifs that catalyze reversible cleavage and ligation reactions at a specific site within an RNA molecule. Hammerhead ribozymes include type I, type II and type III hammerhead ribozymes. The HDV, pistol, and hatchet ribozymes have self-cleaving activities. gNA variants comprising one or more ribozymes may allow for expanded gNA function as compared to a gRNA reference. For example, gNAs comprising self-cleaving ribozymes can, in some embodiments, be transcribed and processed into mature gNAs as part of polycistronic transcripts. Such fusions may occur at either the 5′ or the 3′ end of the gNA. In some embodiments, a gNA variant comprises a fusion at both the 5′ and the 3′ end, wherein each fusion is independently as described herein. In some embodiments, a gNA variant comprises a phage replication loop or a tetraloop. In some embodiments, a gNA comprises a hairpin loop that is capable of binding a protein. For example, in some embodiments the hairpin loop is an MS2, Qβ, U1 hairpin II, Uvsx, or PP7 hairpin loop.

[0147] In some embodiments, a gNA variant comprises one or more RNA aptamers. As used herein, an “RNA aptamer” refers to an RNA molecule that binds a target with high affinity and high specificity. In some embodiments, a gNA variant comprises one or more riboswitches. As used herein, a “riboswitch” refers to an RNA molecule that changes state upon binding a small molecule. In some embodiments, the gNA variant further comprises one or more protein binding motifs. Adding protein binding motifs to a reference gRNA or gNA variant of the disclosure may, in some embodiments, allow a CasX RNP to associate with additional proteins, which can, for example, add the functionality of those proteins to the CasX RNP.

n. Chemically Modified gNA

[0148] In some embodiments, the disclosure relates to chemically-modified gNA. In some embodiments, the present disclosure provides a chemically-modified gNA that has guide RNA functionality and has reduced susceptibility to cleavage by a nuclease. A gNA that comprises any nucleotide other than the four canonical ribonucleotides A, C, G, and U, or a deoxynucleotide, is a chemically modified gNA. In some cases, a chemically-modified gNA comprises any backbone or internucleotide linkage other than a natural phosphodiester internucleotide linkage. In certain embodiments, the retained functionality includes the ability of the modified gNA to bind to a CasX of any of the embodiments described herein. In certain embodiments, the retained functionality includes the ability of the modified gNA to bind to a C9orf72 target nucleic acid sequence. In certain embodiments, the retained functionality includes targeting a CasX protein or the ability of a pre-complexed CasX protein-gNA to bind to a target nucleic acid sequence. In certain embodiments, the retained functionality includes the ability to nick a target polynucleotide by a CasX-gNA. In certain embodiments, the retained functionality includes the ability to cleave a target nucleic acid sequence by a CasX-gNA. In certain embodiments, the retained functionality is any other known function of a gNA in a CasX system with a CasX protein of the embodiments of the disclosure.

[0149] In some embodiments, the disclosure provides a chemically-modified gNA in which a nucleotide sugar modification is incorporated into the gNA selected from the group consisting of 2′-OC₁₋₄alkyl such as 2′-O-methyl (2′-OMe), 2′-deoxy (2′-H), 2′-OC₁₋₃alkyl-O—C₁₋₃alkyl such as 2′-methoxyethyl (“2′-MOE”), 2′-fluoro (“2′-F”), 2′-amino (“2′-NH₂”), 2′-arabinosyl (“2′-arabino”) nucleotide, 2′-F-arabinosyl (“2′-F-arabino”) nucleotide, 2′-locked nucleic acid (“LNA”) nucleotide, 2′-unlocked nucleic acid (“ULNA”) nucleotide, a sugar in L form (“L-sugar”), and 4′-thioribosyl nucleotide. In other embodiments, an internucleotide linkage modification incorporated into the guide RNA is selected from the group consisting of: phosphorothioate “P(S)” (P(S)), phosphonocarboxylate (P(CH₂)COOR) such as phosphonoacetate “PACE” (P(CH₂COO⁻)), thiophosphonocarboxylate ((S)P(CH₂)ₙCOOR) such as thiophosphonoacetate “thioPACE” ((S)P(CH₂)ₙCOO⁻)), alkylphosphonate (P(C₁₋₃alkyl) such as methylphosphonate —P(CH₃), boranophosphonate (P(BH₃)), and phosphorodithioate (P(S)₂).

[0150] In certain embodiments, the disclosure provides a chemically-modified gNA in which a nucleobase (“base”) modification is incorporated into the gNA selected from the group consisting of: 2-thiouracil (“2-thioU”), 2-thiocytosine (“2-thioC”), 4-thiouracil (“4-thioU”), 6-thioguanine (“6-thioG”), 2-aminoadenine (“2-aminoA”), 2-aminopurine, pseudouracil, hypoxanthine, 7-deazaguanine, 7-deaza-8-azaguanine, 7-deazaadenine, 7-deaza-8-azaadenine, 5-methylcytosine (“5-methylC”), 5-methyluracil (“5-methylU”), 5-hydroxymethylcytosine, 5-hydroxymethyluracil, 5,6-dehydrouracil, 5-propynylcytosine, 5-propynyluracil, 5-ethynylcytosine, 5-ethynyluracil, 5-allyluracil (“5-allylU”), 5-allylcytosine (“5-allylC”), 5-aminoallyluracil (“5-aminoallylU”), 5-aminoallyl-cytosine (“5-aminoallylC”), an abasic nucleotide, Z base, P base, Unstructured Nucleic Acid (“UNA”), isoguanine (“isoG”), isocytosine (“isoC”), 5-methyl-2-pyrimidine, x(A,G,C,T) and y(A,G,C,T).

[0151] In other embodiments, the disclosure provides a chemically-modified gNA in which one or more isotopic modifications are introduced on the nucleotide sugar, the nucleobase, the phosphodiester linkage and/or the nucleotide phosphates, including nucleotides comprising one or more ¹⁵N, ¹³C, ¹⁴C, deuterium, ³H, ³²P, ¹²⁵I, ¹³¹I atoms or other atoms or elements used as tracers.

[0152] In some embodiments, an “end” modification incorporated into the gNA is selected from the group consisting of: PEG (polyethyleneglycol), hydrocarbon linkers (including: heteroatom (O,S,N)-substituted hydrocarbon spacers; halo-substituted hydrocarbon spacers; keto-, carboxyl-, amido-, thionyl-, carbamoyl-, thionocarbamaoyl-containing hydrocarbon spacers), spermine linkers, dyes including fluorescent dyes (for example fluoresceins, rhodamines, cyanines) attached to linkers such as, for example, 6-fluorescein-hexyl, quenchers (for example dabcyl, BHQ) and other labels (for example biotin, digoxigenin, acridine, streptavidin, avidin, peptides and/or proteins). In some embodiments, an “end” modification comprises a conjugation (or ligation) of the gNA to another molecule comprising an oligonucleotide of deoxynucleotides and/or ribonucleotides, a peptide, a protein, a sugar, an oligosaccharide, a steroid, a lipid, a folic acid, a vitamin and/or other molecule. In certain embodiments, the disclosure provides a chemically-modified gNA in which an “end” modification (described above) is located internally in the gNA sequence via a linker such as, for example, a 2-(4-butylamidofluorescein)propane-1,3-diol bis(phosphodiester) linker, which is incorporated as a phosphodiester linkage and can be incorporated anywhere between two nucleotides in the gNA.

[0153] In some embodiments, the disclosure provides a chemically-modified gNA having an end modification comprising a terminal functional group such as an amine, a thiol (or sulfhydryl), a hydroxyl, a carboxyl, carbonyl, thionyl, thiocarbonyl, a carbamoyl, a thiocarbamoyl, a phoshoryl, an alkene, an alkyne, an halogen or a functional group-terminated linker that can be subsequently conjugated to a desired moiety selected from the group consisting of a fluorescent dye, a non-fluorescent label, a tag (for ¹⁴C, example biotin, avidin, streptavidin, or moiety containing an isotopic label such as ¹⁵N, ¹³C, deuterium, ³H, ³²P, ¹²⁵I and the like), an oligonucleotide (comprising deoxynucleotides and/or ribonucleotides, including an aptamer), an amino acid, a peptide, a protein, a sugar, an oligosaccharide, a steroid, a lipid, a folic acid, and a vitamin. The conjugation employs standard chemistry well-known in the art, including but not limited to coupling via N-hydroxysuccinimide, isothiocyanate, DCC (or DCI), and/or any other standard method as described in “Bioconjugate Techniques” by Greg T. Hermanson, Publisher Eslsevier Science, 3^{rd} ed. (2013), the contents of which are incorporated herein by reference in its entirety.

### IV. Proteins for Modifying a Target Nucleic Acid

[0154] The present disclosure provides systems comprising a CRISPR nuclease that have utility in genome editing of eukaryotic cells. In some embodiments, the CRISPR nuclease employed in the genome editing systems is a Class 2 Type V nuclease. Although members of Class 2 Type V CRISPR-Cas systems have differences, they share some common characteristics that distinguish them from the Cas9 systems. Firstly, the Type V nucleases possess a single RNA-guided RuvC domain-containing effector but no HNH domain, and they recognize T-rich PAM 5′ upstream to the target region on the non-targeted strand, which is different from Cas9 systems which rely on G-rich PAM at 3′ side of target sequences. Type V nucleases generate staggered double-stranded breaks distal to the PAM sequence, unlike Cas9, which generates a blunt end in the proximal site close to the PAM. In addition, Type V nucleases degrade ssDNA in trans when activated by target dsDNA or ssDNA binding in cis. In some embodiments, the Type V nucleases of the embodiments recognize a 5′-TC PAM motif and produce staggered ends cleaved solely by the RuvC domain. In some embodiments, the Type V nuclease is selected from the group consisting of Cas12a, Cas12b, Cas12c, Cas12d (CasY), and CasX. In some embodiments, the Type V nuclease is a CasX nuclease. In some embodiments, the present disclosure provides systems comprising a CasX protein and one or more gNA acids (CasX:gNA system) that are specifically designed to modify a target nucleic acid sequence in eukaryotic cells.

[0155] The term “CasX protein”, as used herein, refers to a family of proteins, and encompasses all naturally occurring CasX proteins, proteins that share at least 50% identity to naturally occurring CasX proteins, as well as CasX variants exhibiting one or more improved characteristics relative to a naturally-occurring reference CasX protein.

[0156] Exemplary improved characteristics of the CasX variant embodiments include, but are not limited to improved folding of the variant, improved binding affinity to the gNA, improved binding affinity to the target nucleic acid, improved ability to utilize a greater spectrum of PAM sequences in the editing and/or binding of target DNA, improved unwinding of the target DNA, increased editing activity, improved editing efficiency, improved editing specificity, increased percentage of a eukaryotic genome that can be efficiently edited, increased activity of the nuclease, increased target strand loading for double strand cleavage, decreased target strand loading for single strand nicking, decreased off-target cleavage, improved binding of the non-target strand of DNA, improved protein stability, improved protein:gNA (RNP) complex stability, improved protein solubility, improved protein:gNA (RNP) complex solubility, improved protein yield, improved protein expression, and improved fusion characteristics, as described more fully, below. In some embodiments, the RNP of the CasX variant and the gNA variant exhibit one or more of the improved characteristics that are at least about 1.1 to about 100,000-fold improved relative to an RNP of the reference CasX protein of SEQ ID NO:1, SEQ ID NO:2, or SEQ ID NO:3 and the gNA of Table 1, when assayed in a comparable fashion. In other cases, the one or more improved characteristics of an RNP of the CasX variant and the gNA variant are at least about 1.1, at least about 10, at least about 100, at least about 1000, at least about 10,000, at least about 100,000-fold or more improved relative to an RNP of the reference CasX protein of SEQ ID NO:1, SEQ ID NO:2, or SEQ ID NO:3 and the gNA of Table 1. In other cases, the one or more of the improved characteristics of an RNP of the CasX variant and the gNA variant are about 1.1 to 100,00-fold, about 1.1 to 10,00-fold, about 1.1 to 1,000-fold, about 1.1 to 500-fold, about 1.1 to 100-fold, about 1.1 to 50-fold, about 1.1 to 20-fold, about 10 to 100,00-fold, about 10 to 10,00-fold, about 10 to 1,000-fold, about 10 to 500-fold, about 10 to 100-fold, about 10 to 50-fold, about 10 to 20-fold, about 2 to 70-fold, about 2 to 50-fold, about 2 to 30-fold, about 2 to 20-fold, about 2 to 10-fold, about 5 to 50-fold, about 5 to 30-fold, about 5 to 10-fold, about 100 to 100,00-fold, about 100 to 10,00-fold, about 100 to 1,000-fold, about 100 to 500-fold, about 500 to 100,00-fold, about 500 to 10,00-fold, about 500 to 1,000-fold, about 500 to 750-fold, about 1,000 to 100,00-fold, about 10,000 to 100,00-fold, about 20 to 500-fold, about 20 to 250-fold, about 20 to 200-fold, about 20 to 100-fold, about 20 to 50-fold, about 50 to 10,000-fold, about 50 to 1,000-fold, about 50 to 500-fold, about 50 to 200-fold, or about 50 to 100-fold, improved relative to an RNP of the reference CasX protein of SEQ ID NO:1, SEQ ID NO:2, or SEQ ID NO:3 and the gNA of Table 1, when assayed in a comparable fashion. In other cases, the one or more improved characteristics of an RNP of the CasX variant and the gNA variant are about 1.1-fold, 1.2-fold, 1.3-fold, 1.4-fold, 1.5-fold, 1.6-fold, 1.7-fold, 1.8-fold, 1.9-fold, 2-fold, 3-fold, 4-fold, 5-fold, 6-fold, 7-fold, 8-fold, 9-fold, 10-fold, 11-fold, 12-fold, 13-fold, 14-fold, 15-fold, 16-fold, 17-fold, 18-fold, 19-fold, 20-fold, 25-fold, 30-fold, 40-fold, 45-fold, 50-fold, 55-fold, 60-fold, 70-fold, 80-fold, 90-fold, 100-fold, 110-fold, 120-fold, 130-fold, 140-fold, 150-fold, 160-fold, 170-fold, 180-fold, 190-fold, 200-fold, 210-fold, 220-fold, 230-fold, 240-fold, 250-fold, 260-fold, 270-fold, 280-fold, 290-fold, 300-fold, 310-fold, 320-fold, 330-fold, 340-fold, 350-fold, 360-fold, 370-fold, 380-fold, 390-fold, 400-fold, 425-fold, 450-fold, 475-fold, or 500-fold improved relative to an RNP of the reference CasX protein of SEQ ID NO:1, SEQ ID NO:2, or SEQ ID NO:3 and the gNA of Table 1, when assayed in a comparable fashion.

[0157] The term “CasX variant” is inclusive of variants that are fusion proteins; i.e., the CasX is “fused to” a heterologous sequence. This includes CasX variants comprising CasX variant sequences and N-terminal, C-terminal, or internal fusions of the CasX to a heterologous protein or domain thereof.

[0158] CasX proteins of the disclosure comprise at least one of the following domains: a non-target strand binding (NTSB) domain, a target strand loading (TSL) domain, a helical I domain, a helical II domain, an oligonucleotide binding domain (OBD), and a RuvC DNA cleavage domain (the last of which may be modified or deleted in a catalytically dead CasX variant), described more fully, below. Additionally, the CasX variant proteins of the disclosure have an enhanced ability to efficiently edit and/or bind target DNA, when complexed with a gNA as an RNP, utilizing PAM TC motif, including PAM sequences selected from TTC, ATC, GTC, or CTC, compared to an RNP of a reference CasX protein and reference gNA. In the foregoing, the PAM sequence is located at least 1 nucleotide 5′ to the non-target strand of the protospacer having identity with the targeting sequence of the gNA in a assay system compared to the editing efficiency and/or binding of an RNP comprising a reference CasX protein and reference gNA in a comparable assay system. In one embodiment, an RNP of a CasX variant and gNA variant exhibits greater editing efficiency and/or binding of a target sequence in the target DNA compared to an RNP comprising a reference CasX protein and a reference gNA in a comparable assay system, wherein the PAM sequence of the target DNA is TTC. In another embodiment, an RNP of a CasX variant and gNA variant exhibits greater editing efficiency and/or binding of a target sequence in the target DNA compared to an RNP comprising a reference CasX protein and a reference gNA in a comparable assay system, wherein the PAM sequence of the target DNA is ATC. In another embodiment, an RNP of a CasX variant and gNA variant exhibits greater editing efficiency and/or binding of a target sequence in the target DNA compared to an RNP comprising a reference CasX protein and a reference gNA in a comparable assay system, wherein the PAM sequence of the target DNA is CTC. In another embodiment, an RNP of a CasX variant and gNA variant exhibits greater editing efficiency and/or binding of a target sequence in the target DNA compared to an RNP comprising a reference CasX protein and a reference gNA in a comparable assay system, wherein the PAM sequence of the target DNA is GTC. In the foregoing embodiments, the increased editing efficiency and/or binding affinity for the one or more PAM sequences is at least 1.5-fold greater or more compared to the editing efficiency and/or binding affinity of an RNP of any one of the CasX proteins of SEQ ID NOS:1-3 and the gNA of Table 1 for the PAM sequences.

[0159] In some embodiments, a CasX protein can bind and/or modify (e.g., cleave, nick, methylate, demethylate, etc.) a target nucleic acid and/or a polypeptide associated with target nucleic acid (e.g., methylation or acetylation of a histone tail). In some embodiments, the CasX protein is catalytically dead (dCasX) but retains the ability to bind a target nucleic acid. An exemplary catalytically dead CasX protein comprises one or more mutations in the active site of the RuvC domain of the CasX protein. In some embodiments, a catalytically dead CasX protein comprises substitutions at residues 672, 769 and/or 935 of SEQ ID NO:1. In one embodiment, a catalytically dead CasX protein comprises substitutions of D672A, E769A and/or D935A in a reference CasX protein of SEQ ID NO:1. In other embodiments, a catalytically dead CasX protein comprises substitutions at amino acids 659, 756 and/or 922 in a reference CasX protein of SEQ ID NO:2. In some embodiments, a catalytically dead CasX protein comprises D659A, E756A and/or D922A substitutions in a reference CasX protein of SEQ ID NO:2. In further embodiments, a catalytically dead CasX protein comprises deletions of all or part of the RuvC domain of the CasX protein. It will be understood that the same foregoing substitutions can similarly be introduced into the CasX variants of the disclosure, resulting in a dCasX variant. In one embodiment, all or a portion of the RuvC domain is deleted from the CasX variant, resulting in a dCasX variant. Catalytically inactive dCasX variant proteins can, in some embodiments, be used for base editing or epigenetic modifications. With a higher affinity for DNA, in some embodiments, catalytically inactive dCasX variant proteins can, relative to catalytically active CasX, find their target nucleic acid faster, remain bound to target nucleic acid for longer periods of time, bind target nucleic acid in a more stable fashion, or a combination thereof, thereby improving these functions of the catalytically dead CasX variant protein compared to a CasX variant that retains its cleavage capability.

a. Non-Target Strand Binding Domain

[0160] The reference CasX proteins of the disclosure comprise a non-target strand binding domain (NTSBD). The NTSBD is a domain not previously found in any Cas proteins; for example this domain is not present in Cas proteins such as Cas9, Cas12a/Cpf1, Cas13, Cas14, CASCADE, CSM, or CSY. Without being bound to theory or mechanism, a NTSBD in a CasX allows for binding to the non-target DNA strand and may aid in unwinding of the non-target and target strands. The NTSBD is presumed to be responsible for the unwinding, or the capture, of a non-target DNA strand in the unwound state. The NTSBD is in direct contact with the non-target strand in CryoEM model structures derived to date and may contain a non-canonical zinc finger domain. The NTSBD may also play a role in stabilizing DNA during unwinding, guide RNA invasion and R-loop formation. In some embodiments, an exemplary NTSBD comprises amino acids 101-191 of SEQ ID NO:1 or amino acids 103-192 of SEQ ID NO:2. In some embodiments, the NTSBD of a reference CasX protein comprises a four-stranded beta sheet.

b. Target Strand Loading Domain

[0161] The reference CasX proteins of the disclosure comprise a Target Strand Loading (TSL) domain. The TSL domain is a domain not found in certain Cas proteins such as Cas9, CASCADE, CSM, or CSY. Without wishing to be bound by theory or mechanism, it is thought that the TSL domain is responsible for aiding the loading of the target DNA strand into the RuvC active site of a CasX protein. In some embodiments, the TSL acts to place or capture the target-strand in a folded state that places the scissile phosphate of the target strand DNA backbone in the RuvC active site. The TSL comprises a cys4 (CXXC, CXXC zinc finger/ribbon domain (SEQ ID NO: 48) that is separated by the bulk of the TSL. In some embodiments, an exemplary TSL comprises amino acids 825-934 of SEQ ID NO:1 or amino acids 813-921 of SEQ ID NO:2.

c. Helical I Domain

[0162] The reference CasX proteins of the disclosure comprise a helical I domain. Certain Cas proteins other than CasX have domains that may be named in a similar way. However, in some embodiments, the helical I domain of a CasX protein comprises one or more unique structural features, or comprises a unique sequence, or a combination thereof, compared to non-CasX proteins. For example, in some embodiments, the helical I domain of a CasX protein comprises one or more unique secondary structures compared to domains in other Cas proteins that may have a similar name. For example, in some embodiments the helical I domain in a CasX protein comprises one or more alpha helices of unique structure and sequence in arrangement, number and length compared to other CRISPR proteins. In certain embodiments, the helical I domain is responsible for interacting with the bound DNA and spacer of the guide RNA. Without wishing to be bound by theory, it is thought that in some cases the helical I domain may contribute to binding of the protospacer adjacent motif (PAM). In some embodiments, an exemplary helical I domain comprises amino acids 57-100 and 192-332 of SEQ ID NO:1, or amino acids 59-102 and 193-333 of SEQ ID NO:2. In some embodiments, the helical I domain of a reference CasX protein comprises one or more alpha helices.

d. Helical II Domain

[0163] The reference CasX proteins of the disclosure comprise a helical II domain. Certain Cas proteins other than CasX have domains that may be named in a similar way. However, in some embodiments, the helical II domain of a CasX protein comprises one or more unique structural features, or a unique sequence, or a combination thereof, compared to domains in other Cas proteins that may have a similar name. For example, in some embodiments, the helical II domain comprises one or more unique structural alpha helical bundles that align along the target DNA:guide RNA channel. In some embodiments, in a CasX comprising a helical II domain, the target strand and guide RNA interact with helical II (and the helical I domain, in some embodiments) to allow RuvC domain access to the target DNA. The helical II domain is responsible for binding to the guide RNA scaffold stem loop as well as the bound DNA. In some embodiments, an exemplary helical II domain comprises amino acids 333-509 of SEQ ID NO:1, or amino acids 334-501 of SEQ ID NO:2.

e. Oligonucleotide Binding Domain

[0164] The reference CasX proteins of the disclosure comprise an Oligonucleotide Binding Domain (OBD). Certain Cas proteins other than CasX have domains that may be named in a similar way. However, in some embodiments, the OBD comprises one or more unique functional features, or comprises a sequence unique to a CasX protein, or a combination thereof. For example, in some embodiments the bridged helix (BH), helical I domain, helical II domain, and Oligonucleotide Binding Domain (OBD) together are responsible for binding of a CasX protein to the guide RNA. Thus, for example, in some embodiments the OBD is unique to a CasX protein in that it interacts functionally with a helical I domain, or a helical II domain, or both, each of which may be unique to a CasX protein as described herein. Specifically, in CasX the OBD largely binds the RNA triplex of the guide RNA scaffold. The OBD may also be responsible for binding to the protospacer adjacent motif (PAM). An exemplary OBD domain comprises amino acids 1-56 and 510-660 of SEQ ID NO:1, or amino acids 1-58 and 502-647 of SEQ ID NO:2.

f. RuvC DNA Cleavage Domain

[0165] The reference CasX proteins of the disclosure comprise a RuvC domain, that includes 2 partial RuvC domains (RuvC-I and RuvC-II). The RuvC domain is the ancestral domain of all type 12 CRISPR proteins. The RuvC domain originates from a TNPB (transposase B) like transposase. Similar to other RuvC domains, the CasX RuvC domain has a DED catalytic triad that is responsible for coordinating a magnesium (Mg) ion and cleaving DNA. In some embodiments, the RuvC has a DED motif active site that is responsible for cleaving both strands of DNA (one by one, most likely the non-target strand first at 11-14 nucleotides (nt) into the targeted sequence and then the target strand next at 2-4 nucleotides after the target sequence). Specifically in CasX, the RuvC domain is unique in that it is also responsible for binding the guide RNA scaffold stem loop that is critical for CasX function. An exemplary RuvC domain comprises amino acids 661-824 and 935-986 of SEQ ID NO:1, or amino acids 648-812 and 922-978 of SEQ ID NO:2.

g. Reference CasX Proteins

[0166] The disclosure provides naturally-occurring CasX proteins (referred to herein as a “reference CasX protein”) that function as an endonuclease that catalyzes a double strand break at a specific sequence in a targeted double-stranded DNA (dsDNA). The sequence specificity is provided by the targeting sequence of the associated gNA to which it is complexed, which hybridizes to a target sequence within the target nucleic acid. For example, reference CasX proteins can be isolated from naturally occurring prokaryotes, such as Deltaproteobacteria, Planctomycetes, or Candidatus sungbacteria species. A reference CasX protein (sometimes referred to herein as a reference CasX protein) is a Type V CRISPR/Cas endonuclease belonging to the CasX (sometimes referred to as Cas12e) family of proteins that is capable of interacting with a guide NA to form a ribonucleoprotein (RNP) complex. In some embodiments, the RNP complex comprising the reference CasX protein can be targeted to a particular site in a target nucleic acid via base pairing between the targeting sequence (or spacer) of the gNA and a target sequence in the target nucleic acid. In some embodiments, the RNP comprising the reference CasX protein is capable of cleaving target DNA. In some embodiments, the RNP comprising the reference CasX protein is capable of nicking target DNA. In some embodiments, the RNP comprising the reference CasX protein is capable of editing target DNA, for example in those embodiments where the reference CasX protein is capable of cleaving or nicking DNA, followed by non-homologous end joining (NHEJ), homology-directed repair (HDR), homology-independent targeted integration (HITI), micro-homology mediated end joining (MMEJ), single strand annealing (SSA) or base excision repair (BER). In some embodiments, the RNP comprising the CasX protein is a catalytically dead (is catalytically inactive or has substantially no cleavage activity) CasX protein (dCasX), but retains the ability to bind the target DNA, described more fully, supra.

[0167] In some cases, a reference CasX protein is isolated or derived from Deltaproteobacter. In some embodiments, a CasX protein comprises a sequence at least 50% identical, at least 60% identical, at least 65% identical, at least 70% identical, at least 75% identical, at least 80% identical, at least 81% identical, at least 82% identical, at least 83% identical, at least 84% identical, at least 85% identical, at least 86% identical, at least 86% identical, at least 87% identical, at least 88% identical, at least 89% identical, at least 89% identical, at least 90% identical, at least 91% identical, at least 92% identical, at least 93% identical, at least 94% identical, at least 95% identical, at least 96% identical, at least 97% identical, at least 98% identical, at least 99% identical, at least 99.5% identical or 100% identical to a sequence of:

(SEQ ID NO: 1)

| | |
|---|---|
| 1 | MEKRINKIRK KLSADNATKP VSRSGPMKTL LVRVMTDDLK |
| | KRLEKRRKKP EVMPQVISNN |
| 61 | AANNLRMLLD DYTKMKEAIL QVYWQEFKDD HVGLMCKFAQ |
| | PASKKIDQNK LKPEMDEKGN |
| 121 | LTTAGFACSQ TNYFGRCNVA EQVSEKGKAY TNYFGRCNVA |
| | EHEKLILLAQ LKPEKDSDEA |
| 181 | VTYSLGKFGQ RALDFYSIHV TKESTHPVKP LAQIAGNRYA |
| | SGPVGKALSD ACMGTIASFL |
| 241 | SKYQDIIIEH QKVVKGNQKR LESLRELAGK ENLEYPSVTL |
| | PPQPHTKEGV DAYNEVIARV |
| 301 | RMWVNLNLWQ KLKLSRDDAK PLLRLKGFPS FPVVERRENE |
| | VDWWNTINEV KKLIDAKRDM |
| 361 | GRVFWSGVTA EKRNTILEGY NYLPNENDHK KREGSLENPK |
| | KPAKRQFGDL LLYLEKKYAG |
| 421 | DWGKVFDEAW ERIDKKIAGL TSHIEREEAR NAEDAQSKAV |
| | LTDWLRAKAS FVLERLKEMD |
| 481 | EKEFYACEIQ LQKWYGDLRG NPFAVEAENR VVDISGFSIG |
| | SDGHSIQYRN LLAWKYLENG |
| 541 | KREFYLLMNY GKKGRIRFTD GTDIKKSGKW QGLLYGGGKA |
| | KVIDLTFDPD DEQLIILPLA |
| 601 | FGTRQGREFI WNDLLSLETG LIKLANGRVI EKTIYNKKIG |
| | RDEPALFVAL TFERREVVDP |
| 661 | SNIKPVNLIG VDRGENIPAV IALTDPEGCP LPEFKDSSGG |
| | PTDILRIGEG YKEKQRAIQA |
| 721 | AKEVEQRRAG GYSRKFASKS RNLADDMVRN SARDLFYHAV |
| | THDAVLVFEN LSRGFGRQGK |
| 781 | RTFMTERQYT KMEDWLTAKL AYEGLTSKTY LSKTLAQYTS |
| | KTCSNCGFTI TTADYDGMLV |
| 841 | RLKKTSDGWA TTLNNKELKA EGQITYYNRY KRQTVEKELS |
| | AELDRLSEES GNNDISKWTK |
| 901 | GRRDEALFLL KKRFSHRPVQ EQFVCLDCGH EVHADEQAAL |
| | NIARSWLFLN SNSTEFKSYK |
| 961 | SGKQPFVGAW QAFYKRRLKE VWKPNA. |

[0168] In some cases, a reference CasX protein is isolated or derived from Planctomycetes. In some embodiments, a CasX protein comprises a sequence at least 50% identical, at least 60% identical, at least 65% identical, at least 70% identical, at least 75% identical, at least 80% identical, at least 81% identical, at least 82% identical, at least 83% identical, at least 84% identical, at least 85% identical, at least 86% identical, at least 86% identical, at least 87% identical, at least 88% identical, at least 89% identical, at least 89% identical, at least 90% identical, at least 91% identical, at least 92% identical, at least 93% identical, at least 94% identical, at least 95% identical, at least 96% identical, at least 97% identical, at least 98% identical, at least 99% identical, at least 99.5% identical or 100% identical to a sequence of:

(SEQ ID NO: 2)

| | |
|---|---|
| 1 | MQEIKRINKI RRRLVKDSNT KKAGKTGPMK TLLVRVMTPD |
| | LRERLENLRK KPENIPQPIS |
| 61 | NTSRANLNKL LTDYTEMKKA ILHVYWEEFQ KDPVGLMSRV |
| | AQPAPKNIDQ RKLIPVKDGN |
| 121 | ERLTSSGFAC SQCCQPLYVY KLEQVNDKGK PHTNYFGRCN |
| | VSEHERLILL SPHKPEANDE |
| 181 | LVTYSLGKFG QRALDFYSIH VTRESNHPVK PLEQIGGNSC |
| | ASGPVGKALS DACMGAVASF |
| 241 | LTKYQDIILE HQKVIKKNEK RLANLKDIAS ANGLAFPKIT |
| | LPPQPHTKEG IEAYNNVVAQ |
| 301 | IVIWVNLNLW QKLKIGRDEA KPLQRLKGFP SFPLVERQAN |
| | EVDWWDMVCN VKKLINEKKE |
| 361 | DGKVFWQNLA GYKRQEALLP YLSSEEDRKK GKKFARYQFG |
| | DLLLHLEKKH GEDWGKVYDE |
| 421 | AWERIDKKVE GLSKHIKLEE ERRSEDAQSK AALTDWLRAK |
| | ASFVIEGLKE ADKDEFCRCE |
| 481 | LKLQKWYGDL RGKPFAIEAE NSILDISGFS KQYNCAFIWQ |
| | KDGVKKLNLY LIINYFKGGK |
| 541 | LRFKKIKPEA FEANRFYTVI NKKSGEIVPM EVNFNFDDPN |
| | LIILPLAFGK RQGREFIWND |
| 601 | LLSLETGSLK LANGRVIEKT LYNRRTRQDE PALFVALTFE |
| | RREVLDSSNI KPMNLIGIDR |
| 661 | GENIPAVIAL TDPEGCPLSR FKDSLGNPTH ILRIGESYKE |
| | KQRTIQAAKE VEQRRAGGYS |
| 721 | RKYASKAKNL ADDMVRNTAR DLLYYAVTQD AMLIFENLSR |
| | GFGRQGKRTF MAERQYTRME |
| 781 | DWLTAKLAYE GLPSKTYLSK TLAQYTSKTC SNCGFTITSA |
| | DYDRVLEKLK KTATGWMTTI |
| 841 | NGKELKVEGQ ITYYNRYKRQ NVVKDLSVEL DRLSEESVNN |
| | DISSWTKGRS GEALSLLKKR |
| 901 | FSHRPVQEKF VCLNCGFETH ADEQAALNIA RSWLFLRSQE |
| | YKKYQTNKTT GNTDKRAFVE |
| 961 | TWQSFYRKKLKEVWKPAV. |

[0169] In some embodiments, the CasX protein comprises the sequence of SEQ ID NO: 2, or at least 60% similarity thereto. In some embodiments, the CasX protein comprises the sequence of SEQ ID NO: 2, or at least 80% similarity thereto. In some embodiments, the CasX protein comprises the sequence of SEQ ID NO: 2, or at least 90% similarity thereto. In some embodiments, the CasX protein comprises the sequence of SEQ ID NO: 2, or at least 95% similarity thereto. In some embodiments, the CasX protein consists of the sequence of SEQ ID NO: 2. In some embodiments, the CasX protein comprises or consists of a sequence that has at least 1, at least 2, at least 3, at least 4, at least 5, at least 6, at least 7, at least 8, at least 9, at least 10, at least 20, at least 30, at least 40 or at least 50 mutations relative to the sequence of SEQ ID NO: 2. These mutations can be insertions, deletions, amino acid substitutions, or any combinations thereof.

[0170] In some cases, a reference CasX protein is isolated or derived from Candidatus sungbacteria. In some embodiments, a CasX protein comprises a sequence at least 50% identical, at least 60% identical, at least 65% identical, at least 70% identical, at least 75% identical, at least 80% identical, at least 81% identical, at least 82% identical, at least 83% identical, at least 84% identical, at least 85% identical, at least 86% identical, at least 86% identical, at least 87% identical, at least 88% identical, at least 89% identical, at least 89% identical, at least 90% identical, at least 91% identical, at least 92% identical, at least 93% identical, at least 94% identical, at least 95% identical, at least 96% identical, at least 97% identical, at least 98% identical, at least 99% identical, at least 99.5% identical or 100% identical to a sequence of

(SEQ ID NO: 3)

| | |
|---|---|
| 1 | MDNANKPSTK SLVNTTRISD HFGVTPGQVT RVFSFGIIPT |
| | KRQYAIIERW FAAVEAARER |
| 61 | LYGMLYAHFQ ENPPAYLKEK FSYETFFKGR PVLNGLRDID |
| | PTIMTSAVFT ALRHKAEGAM |
| 121 | AAFHTNHRRL FEEARKKMRE YAECLKANEA LLRGAADIDW |
| | DKIVNALRTR LNTCLAPEYD |
| 181 | AVIADFGALC AFRALIAETN ALKGAYNHAL NQMLPALVKV |
| | DEPEEAEESP RLRFFNGRIN |
| 241 | DLPKFPVAER ETPPDTETII RQLEDMARVI PDTAEILGYI |
| | HRIRHKAARR KPGSAVPLPQ |
| 301 | RVALYCAIRM ERNPEEDPST VAGHFLGEID RVCEKRRQGL |
| | VRTPFDSQIR ARYMDIISFR |
| 361 | ATLAHPDRWT EIQFLRSNAA SRRVRAETIS APFEGFSWTS |
| | NRTNPAPQYG MALAKDANAP |
| 421 | ADAPELCICL SPSSAAFSVR EKGGDLIYMR PTGGRRGKDN |
| | PGKEITWVPG SFDEYPASGV |
| 481 | ALKLRLYFGR SQARRMLTNK TWGLLSDNPR VFAANAELVG |
| | KKRNPQDRWK LFFHMVISGP |
| 541 | PPVEYLDFSS DVRSRARTVI GINRGEVNPL AYAVVSVEDG |
| | QVLEEGLLGK KEYIDQLIET |
| 601 | RRRISEYQSR EQTPPRDLRQ RVRHLQDTVL GSARAKIHSL |
| | IAFWKGILAI ERLDDQFHGR |
| 661 | EQKIIPKKTY LANKTGFMNA LSFSGAVRVD KKGNPWGGMI |
| | EIYPGGISRT CTQCGTVWLA |
| 721 | RRPKNPGHRD AMVVIPDIVD DAAATGFDNV DCDAGTVDYG |
| | ELFTLSREWV RLTPRYSRVM |
| 781 | RGTLGDLERA IRQGDDRKSR QMLELALEPQ PQWGQFFCHR |
| | CGFNGQSDVL AATNLARRAI |
| 841 | SLIRRLPDTD TPPTP. |

[0171] In some embodiments, the CasX protein comprises the sequence of SEQ ID NO: 3, or at least 60% similarity thereto. In some embodiments, the CasX protein comprises the sequence of SEQ ID NO: 3, or at least 80% similarity thereto. In some embodiments, the CasX protein comprises the sequence of SEQ ID NO: 3, or at least 90% similarity thereto. In some embodiments, the CasX protein comprises the sequence of SEQ ID NO: 3, or at least 95% similarity thereto. In some embodiments, the CasX protein consists of the sequence of SEQ ID NO: 3. In some embodiments, the CasX protein comprises or consists of a sequence that has at least 1, at least 2, at least 3, at least 4, at least 5, at least 6, at least 7, at least 8, at least 9, at least 10, at least 20, at least 30, at least 40 or at least 50 mutations relative to the sequence of SEQ ID NO: 3. These mutations can be insertions, deletions, amino acid substitutions, or any combinations thereof.

h. CasX Variant Proteins

[0172] The present disclosure provides variants of a reference CasX protein (interchangeably referred to herein as “CasX variant” or “CasX variant protein”), wherein the CasX variants comprise at least one modification in at least one domain of the reference CasX protein, including the sequences of SEQ ID NOS:1-3. In some embodiments, the CasX variant exhibits at least one improved characteristic compared to the reference CasX protein. All variants that improve one or more functions or characteristics of the CasX variant protein when compared to a reference CasX protein described herein are envisaged as being within the scope of the disclosure. In some embodiments, the modification is a mutation in one or more amino acids of the reference CasX. In other embodiments, the modification is a substitution of one or more domains of the reference CasX with one or more domains from a different CasX. In some embodiments, insertion includes the insertion of a part or all of a domain from a different CasX protein. Mutations can occur in any one or more domains of the reference CasX protein, and may include, for example, deletion of part or all of one or more domains, or one or more amino acid substitutions, deletions, or insertions in any domain of the reference CasX protein. The domains of CasX proteins include the non-target strand binding (NTSB) domain, the target strand loading (TSL) domain, the helical I domain, the helical II domain, the oligonucleotide binding domain (OBD), and the RuvC DNA cleavage domain. Any change in amino acid sequence of a reference CasX protein that leads to an improved characteristic of the CasX protein is considered a CasX variant protein of the disclosure. For example, CasX variants can comprise one or more amino acid substitutions, insertions, deletions, or swapped domains, or any combinations thereof, relative to a reference CasX protein sequence.

[0173] In some embodiments, the CasX variant protein comprises at least one modification in at least each of two domains of the reference CasX protein, including the sequences of SEQ ID NOS:1-3. In some embodiments, the CasX variant protein comprises at least one modification in at least 2 domains, in at least 3 domains, at least 4 domains or at least 5 domains of the reference CasX protein. In some embodiments, the CasX variant protein comprises two or more modifications in at least one domain of the reference CasX protein. In some embodiments, the CasX variant protein comprises at least two modifications in at least one domain of the reference CasX protein, at least three modifications in at least one domain of the reference CasX protein or at least four modifications in at least one domain of the reference CasX protein. In some embodiments, wherein the CasX variant comprises two or more modifications compared to a reference CasX protein, each modification is made in a domain independently selected from the group consisting of a NTSBD, TSLD, Helical I domain, Helical II domain, OBD, and RuvC DNA cleavage domain.

[0174] In some embodiments, the at least one modification of the CasX variant protein comprises a deletion of at least a portion of one domain of the reference CasX protein, including the sequences of SEQ ID NOS:1-3. In some embodiments, the deletion is in the NTSBD, TSLD, Helical I domain, Helical II domain, OBD, or RuvC DNA cleavage domain.

[0175] Suitable mutagenesis methods for generating CasX variant proteins of the disclosure may include, for example, Deep Mutational Evolution (DME), deep mutational scanning (DMS), error prone PCR, cassette mutagenesis, random mutagenesis, staggered extension PCR, gene shuffling, or domain swapping. In some embodiments, the CasX variants are designed, for example by selecting one or more desired mutations in a reference CasX. In certain embodiments, the activity of a reference CasX protein is used as a benchmark against which the activity of one or more CasX variants are compared, thereby measuring improvements in function of the CasX variants. Exemplary improvements of CasX variants include, but are not limited to, improved folding of the variant, improved binding affinity to the gNA, improved binding affinity to the target DNA, altered binding affinity to one or more PAM sequences, improved unwinding of the target DNA, increased activity, improved editing efficiency, improved editing specificity, increased activity of the nuclease, increased target strand loading for double strand cleavage, decreased target strand loading for single strand nicking, decreased off-target cleavage, improved binding of the non-target strand of DNA, improved protein stability, improved protein:gNA complex stability, improved protein solubility, improved protein:gNA complex solubility, improved protein yield, improved protein expression, and improved fusion characteristics, as described more fully, below.

[0176] In some embodiments of the CasX variants described herein, the at least one modification comprises: (a) a substitution of 1 to 100 consecutive or non-consecutive amino acids in the CasX variant compared to a reference CasX of SEQ ID NO:1, SEQ ID NO:2, or SEQ ID NO:3; (b) a deletion of 1 to 100 consecutive or non-consecutive amino acids in the CasX variant compared to a reference CasX; (c) an insertion of 1 to 100 consecutive or non-consecutive amino acids in the CasX compared to a reference CasX; or (d) any combination of (a)-(c). In some embodiments, the at least one modification comprises: (a) a substitution of 5-10 consecutive or non-consecutive amino acids in the CasX variant compared to a reference CasX of SEQ ID NO:1, SEQ ID NO:2, or SEQ ID NO:3; (b) a deletion of 1-5 consecutive or non-consecutive amino acids in the CasX variant compared to a reference CasX; (c) an insertion of 1-5 consecutive or non-consecutive amino acids in the CasX compared to a reference CasX; or (d) any combination of (a)-(c).

[0177] In some embodiments, the CasX variant protein comprises or consists of a sequence that has at least 1, at least 2, at least 3, at least 4, at least 5, at least 6, at least 7, at least 8, at least 9, at least 10, at least 20, at least 30, at least 40 or at least 50 mutations relative to the sequence of SEQ ID NO:1, SEQ ID NO:2, or SEQ ID NO:3. These mutations can be insertions, deletions, amino acid substitutions, or any combinations thereof.

[0178] In some embodiments, the CasX variant protein comprises at least one amino acid substitution in at least one domain of a reference CasX protein. In some embodiments, the CasX variant protein comprises at least about 1-4 amino acid substitutions, 1-10 amino acid substitutions, 1-20 amino acid substitutions, 1-30 amino acid substitutions, 1-40 amino acid substitutions, 1-50 amino acid substitutions, 1-60 amino acid substitutions, 1-70 amino acid substitutions, 1-80 amino acid substitutions, 1-90 amino acid substitutions, 1-100 amino acid substitutions, 2-10 amino acid substitutions, 2-20 amino acid substitutions, 2-30 amino acid substitutions, 3-10 amino acid substitutions, 3-20 amino acid substitutions, 3-30 amino acid substitutions, 4-10 amino acid substitutions, 4-20 amino acid substitutions, 3-300 amino acid substitutions, 5-10 amino acid substitutions, 5-20 amino acid substitutions, 5-30 amino acid substitutions, 10-50 amino acid substitutions, or 20-50 amino acid substitutions, relative to a reference CasX protein, which can be consecutive or non-consecutive, or in different domains. As used herein “consecutive amino acids” refer to amino acids that are contiguous in the primary sequence of a polypeptide. In some embodiments, the CasX variant protein comprises at least about 100 or more amino acid substitutions relative to a reference CasX protein. In some embodiments, the amino acid substitutions are conservative substitutions. In other embodiments, the substitutions are non-conservative; e.g., a polar amino acid is substituted for a non-polar amino acid, or vice versa.

[0179] Any amino acid can be substituted for any other amino acid in the substitutions described herein. The substitution can be a conservative substitution (e.g., a basic amino acid is substituted for another basic amino acid). The substitution can be a non-conservative substitution (e.g., a basic amino acid is substituted for an acidic amino acid or vice versa). For example, a proline in a reference CasX protein can be substituted for any of arginine, histidine, lysine, aspartic acid, glutamic acid, serine, threonine, asparagine, glutamine, cysteine, glycine, alanine, isoleucine, leucine, methionine, phenylalanine, tryptophan, tyrosine or valine to generate a CasX variant protein of the disclosure.

[0180] In some embodiments, a CasX variant protein comprises at least one amino acid deletion relative to a reference CasX protein. In some embodiments, a CasX variant protein comprises a deletion of 1-4 amino acids, 1-10 amino acids, 1-20 amino acids, 1-30 amino acids, 1-40 amino acids, 1-50 amino acids, 1-60 amino acids, 1-70 amino acids, 1-80 amino acids, 1-90 amino acids, 1-100 amino acids, 2-10 amino acids, 2-20 amino acids, 2-30 amino acids, 3-10 amino acids, 3-20 amino acids, 3-30 amino acids, 4-10 amino acids, 4-20 amino acids, 3-300 amino acids, 5-10 amino acids, 5-20 amino acids, 5-30 amino acids, 10-50 amino acids or 20-50 amino acids relative to a reference CasX protein. In some embodiments, a CasX protein comprises a deletion of at least about 100 consecutive amino acids relative to a reference CasX protein. In some embodiments, a CasX variant protein comprises a deletion of at least 1, 2, 3, 4, 5, 6, 7, 8, 9, 10, 20, 30, 40, 50 or 100 consecutive amino acids relative to a reference CasX protein. In some embodiments, a CasX variant protein comprises a deletion of 1, 2, 3, 4, 5, 6, 7, 8, 9 or 10 consecutive amino acids.

[0181] In some embodiments, a CasX variant protein comprises two or more deletions relative to a reference CasX protein, and the two or more deletions are not consecutive amino acids. For example, a first deletion may be in a first domain of the reference CasX protein, and a second deletion may be in a second domain of the reference CasX protein. In some embodiments, a CasX variant protein comprises 2, 3, 4, 5, 6, 7, 8, 9, 10, 11, 12, 13, 14, 15, 16, 17, 18, 19 or 20 non-consecutive deletions relative to a reference CasX protein. In some embodiments, a CasX variant protein comprises at least 20 non-consecutive deletions relative to a reference CasX protein. Each non-consecutive deletion may be of any length of amino acids described herein, e.g., 1-4 amino acids, 1-10 amino acids, and the like.

[0182] In some embodiments, the CasX variant protein comprises one or more amino acid insertions relative to the sequence of SEQ ID NOS:1, 2, or 3. In some embodiments, a CasX variant protein comprises an insertion of 1 amino acid, an insertion of 2-3 consecutive or non-consecutive amino acids, 2-4 consecutive or non-consecutive amino acids, 2-5 consecutive or non-consecutive amino acids, 2-6 consecutive or non-consecutive amino acids, 2-7 consecutive or non-consecutive amino acids, 2-8 consecutive or non-consecutive amino acids, 2-9 consecutive or non-consecutive amino acids, 2-10 consecutive or non-consecutive amino acids, 2-20 consecutive or non-consecutive amino acids, 2-30 consecutive or non-consecutive amino acids, 2-40 consecutive or non-consecutive amino acids, 2-50 consecutive or non-consecutive amino acids, 2-60 consecutive or non-consecutive amino acids, 2-70 consecutive or non-consecutive amino acids, 2-80 consecutive or non-consecutive amino acids, 2-90 consecutive or non-consecutive amino acids, 2-100 consecutive or non-consecutive amino acids, 3-10 consecutive or non-consecutive amino acids, 3-20 consecutive or non-consecutive amino acids, 3-30 consecutive or non-consecutive amino acids, 4-10 consecutive or non-consecutive amino acids, 4-20 consecutive or non-consecutive amino acids, 3-300 consecutive or non-consecutive amino acids, 5-10 consecutive or non-consecutive amino acids, 5-20 consecutive or non-consecutive amino acids, 5-30 consecutive or non-consecutive amino acids, 10-50 consecutive or non-consecutive amino acids or 20-50 consecutive or non-consecutive amino acids relative to a reference CasX protein. In some embodiments, the CasX variant protein comprises an insertion of 2, 3, 4, 5, 6, 7, 8, 9, 10, 11, 12, 13, 14, 15, 16, 17, 18, 19 or 20 consecutive or non-consecutive amino acids. In some embodiments, a CasX variant protein comprises an insertion of at least about 100 consecutive or non-consecutive amino acids. Any amino acid, or combination of amino acids, can be inserted in the insertions described herein to generate a CasX variant protein.

[0183] Any permutation of the substitution, insertion and deletion embodiments described herein can be combined to generate a CasX variant protein of the disclosure. For example, a CasX variant protein can comprise at least one substitution and at least one deletion relative to a reference CasX protein sequence, at least one substitution and at least one insertion relative to a reference CasX protein sequence, at least one insertion and at least one deletion relative to a reference CasX protein sequence, or at least one substitution, one insertion and one deletion relative to a reference CasX protein sequence.

[0184] In some embodiments, the CasX variant protein has at least about 60% sequence similarity to SEQ ID NO:2 or a portion thereof. In some embodiments, the CasX variant protein comprises a substitution of Y789T of SEQ ID NO:2, a deletion of P793 of SEQ ID NO:2, a substitution of Y789D of SEQ ID NO:2, a substitution of T72S of SEQ ID NO:2, a substitution of I546V of SEQ ID NO:2, a substitution of E552A of SEQ ID NO:2, a substitution of A636D of SEQ ID NO:2, a substitution of F536S of SEQ ID NO:2, a substitution of A708K of SEQ ID NO:2, a substitution of Y797L of SEQ ID NO:2, a substitution of L792G SEQ ID NO:2, a substitution of A739V of SEQ ID NO:2, a substitution of G791M of SEQ ID NO:2, an insertion of A at position 661 of SEQ ID NO:2, a substitution of A788W of SEQ ID NO:2, a substitution of K390R of SEQ ID NO:2, a substitution of A751S of SEQ ID NO:2, a substitution of E385A of SEQ ID NO:2, an insertion of P at position 696 of SEQ ID NO:2, an insertion of M at position 773 of SEQ ID NO:2, a substitution of G695H of SEQ ID NO:2, an insertion of AS at position 793 of SEQ ID NO:2, an insertion of AS at position 795 of SEQ ID NO:2, a substitution of C477R of SEQ ID NO:2, a substitution of C477K of SEQ ID NO:2, a substitution of C479A of SEQ ID NO:2, a substitution of C479L of SEQ ID NO:2, a substitution of I55F of SEQ ID NO:2, a substitution of K210R of SEQ ID NO:2, a substitution of C233S of SEQ ID NO:2, a substitution of D231N of SEQ ID NO:2, a substitution of Q338E of SEQ ID NO:2, a substitution of Q338R of SEQ ID NO:2, a substitution of L379R of SEQ ID NO:2, a substitution of K390R of SEQ ID NO:2, a substitution of L481Q of SEQ ID NO:2, a substitution of F495S of SEQ ID NO:2, a substitution of D600N of SEQ ID NO:2, a substitution of T886K of SEQ ID NO:2, a substitution of A739V of SEQ ID NO:2, a substitution of K460N of SEQ ID NO:2, a substitution of I199F of SEQ ID NO:2, a substitution of G492P of SEQ ID NO:2, a substitution of T153I of SEQ ID NO:2, a substitution of R591I of SEQ ID NO:2, an insertion of AS at position 795 of SEQ ID NO:2, an insertion of AS at position 796 of SEQ ID NO:2, an insertion of L at position 889 of SEQ ID NO:2, a substitution of E121D of SEQ ID NO:2, a substitution of S270W of SEQ ID NO:2, a substitution of E712Q of SEQ ID NO:2, a substitution of K942Q of SEQ ID NO:2, a substitution of E552K of SEQ ID NO:2, a substitution of K25Q of SEQ ID NO:2, a substitution of N47D of SEQ ID NO:2, an insertion of T at position 696 of SEQ ID NO:2, a substitution of L685I of SEQ ID NO:2, a substitution of N880D of SEQ ID NO:2, a substitution of Q102R of SEQ ID NO:2, a substitution of M734K of SEQ ID NO:2, a substitution of A724S of SEQ ID NO:2, a substitution of T704K of SEQ ID NO:2, a substitution of P224K of SEQ ID NO:2, a substitution of K25R of SEQ ID NO:2, a substitution of M29E of SEQ ID NO:2, a substitution of H152D of SEQ ID NO:2, a substitution of S219R of SEQ ID NO:2, a substitution of E475K of SEQ ID NO:2, a substitution of G226R of SEQ ID NO:2, a substitution of A377K of SEQ ID NO:2, a substitution of E480K of SEQ ID NO:2, a substitution of K416E of SEQ ID NO:2, a substitution of H164R of SEQ ID NO:2, a substitution of K767R of SEQ ID NO:2, a substitution of I7F of SEQ ID NO:2, a substitution of M29R of SEQ ID NO:2, a substitution of H435R of SEQ ID NO:2, a substitution of E385Q of SEQ ID NO:2, a substitution of E385K of SEQ ID NO:2, a substitution of I279F of SEQ ID NO:2, a substitution of D489S of SEQ ID NO:2, a substitution of D732N of SEQ ID NO:2, a substitution of A739T of SEQ ID NO:2, a substitution of W885R of SEQ ID NO:2, a substitution of E53K of SEQ ID NO:2, a substitution of A238T of SEQ ID NO:2, a substitution of P283Q of SEQ ID NO:2, a substitution of E292K of SEQ ID NO:2, a substitution of Q628E of SEQ ID NO:2, a substitution of R388Q of SEQ ID NO:2, a substitution of G791M of SEQ ID NO:2, a substitution of L792K of SEQ ID NO:2, a substitution of L792E of SEQ ID NO:2, a substitution of M779N of SEQ ID NO:2, a substitution of G27D of SEQ ID NO:2, a substitution of K955R of SEQ ID NO:2, a substitution of S867R of SEQ ID NO:2, a substitution of R693I of SEQ ID NO:2, a substitution of F189Y of SEQ ID NO:2, a substitution of V635M of SEQ ID NO:2, a substitution of F399L of SEQ ID NO:2, a substitution of E498K of SEQ ID NO:2, a substitution of E386R of SEQ ID NO:2, a substitution of V254G of SEQ ID NO:2, a substitution of P793S of SEQ ID NO:2, a substitution of K188E of SEQ ID NO:2, a substitution of QT945KI of SEQ ID NO:2, a substitution of T620P of SEQ ID NO:2, a substitution of T946P of SEQ ID NO:2, a substitution of TT949PP of SEQ ID NO:2, a substitution of N952T of SEQ ID NO:2, a substitution of K682E of SEQ ID NO:2, a substitution of K975R of SEQ ID NO:2, a substitution of L212P of SEQ ID NO:2, a substitution of E292R of SEQ ID NO:2, a substitution of 1303K of SEQ ID NO:2, a substitution of C349E of SEQ ID NO:2, a substitution of E385P of SEQ ID NO:2, a substitution of E386N of SEQ ID NO:2, a substitution of D387K of SEQ ID NO:2, a substitution of L404K of SEQ ID NO:2, a substitution of E466H of SEQ ID NO:2, a substitution of C477Q of SEQ ID NO:2, a substitution of C477H of SEQ ID NO:2, a substitution of C479A of SEQ ID NO:2, a substitution of D659H of SEQ ID NO:2, a substitution of T806V of SEQ ID NO:2, a substitution of K808S of SEQ ID NO:2, an insertion of AS at position 797 of SEQ ID NO:2, a substitution of V959M of SEQ ID NO:2, a substitution of K975Q of SEQ ID NO:2, a substitution of W974G of SEQ ID NO:2, a substitution of A708Q of SEQ ID NO:2, a substitution of V711K of SEQ ID NO:2, a substitution of D733T of SEQ ID NO:2, a substitution of L742W of SEQ ID NO:2, a substitution of V747K of SEQ ID NO:2, a substitution of F755M of SEQ ID NO:2, a substitution of M771A of SEQ ID NO:2, a substitution of M771Q of SEQ ID NO:2, a substitution of W782Q of SEQ ID NO:2, a substitution of G791F, of SEQ ID NO:2 a substitution of L792D of SEQ ID NO:2, a substitution of L792K of SEQ ID NO:2, a substitution of P793Q of SEQ ID NO:2, a substitution of P793G of SEQ ID NO:2, a substitution of Q804A of SEQ ID NO:2, a substitution of Y966N of SEQ ID NO:2, a substitution of Y723N of SEQ ID NO:2, a substitution of Y857R of SEQ ID NO:2, a substitution of S890R of SEQ ID NO:2, a substitution of S932M of SEQ ID NO:2, a substitution of L897M of SEQ ID NO:2, a substitution of R624G of SEQ ID NO:2, a substitution of S603G of SEQ ID NO:2, a substitution of N737S of SEQ ID NO:2, a substitution of L307K of SEQ ID NO:2, a substitution of 1658V of SEQ ID NO:2, an insertion of PT at position 688 of SEQ ID NO:2, an insertion of SA at position 794 of SEQ ID NO:2, a substitution of S877R of SEQ ID NO:2, a substitution of N580T of SEQ ID NO:2, a substitution of V335G of SEQ ID NO:2, a substitution of T620S of SEQ ID NO:2, a substitution of W345G of SEQ ID NO:2, a substitution of T280S of SEQ ID NO:2, a substitution of L406P of SEQ ID NO:2, a substitution of A612D of SEQ ID NO:2, a substitution of A751S of SEQ ID NO:2, a substitution of E386R of SEQ ID NO:2, a substitution of V351M of SEQ ID NO:2, a substitution of K210N of SEQ ID NO:2, a substitution of D40A of SEQ ID NO:2, a substitution of E773G of SEQ ID NO:2, a substitution of H207L of SEQ ID NO:2, a substitution of T62A SEQ ID NO:2, a substitution of T287P of SEQ ID NO:2, a substitution of T832A of SEQ ID NO:2, a substitution of A893S of SEQ ID NO:2, an insertion of V at position 14 of SEQ ID NO:2, an insertion of AG at position 13 of SEQ ID NO:2, a substitution of RI V of SEQ ID NO:2, a substitution of R12N of SEQ ID NO:2, a substitution of R13H of SEQ ID NO:2, an insertion of Y at position 13 of SEQ ID NO:2, a substitution of R12L of SEQ ID NO:2, an insertion of Q at position 13 of SEQ ID NO:2, an substitution of V15S of SEQ ID NO:2, an insertion of D at position 17 of SEQ ID NO:2 or a combination thereof.

[0185] In some embodiments, the CasX variant comprises at least one modification in the NTSB domain.

[0186] In some embodiments, the CasX variant comprises at least one modification in the TSL domain. In some embodiments, the at least one modification in the TSL domain comprises an amino acid substitution of one or more of amino acids Y857, S890, or S932 of SEQ ID NO:2.

[0187] In some embodiments, the CasX variant comprises at least one modification in the helical I domain. In some embodiments, the at least one modification in the helical I domain comprises an amino acid substitution of one or more of amino acids S219, L249, E259, Q252, E292, L307, or D318 of SEQ ID NO:2.

[0188] In some embodiments, the CasX variant comprises at least one modification in the helical II domain. In some embodiments, the at least one modification in the helical II domain comprises an amino acid substitution of one or more of amino acids D361, L379, E385, E386, D387, F399, L404, R458, C477, or D489 of SEQ ID NO:2.

[0189] In some embodiments, the CasX variant comprises at least one modification in the OBD domain. In some embodiments, the at least one modification in the OBD comprises an amino acid substitution of one or more of amino acids F536, E552, T620, or 1658 of SEQ ID NO:2.

[0190] In some embodiments, the CasX variant comprises at least one modification in the RuvC DNA cleavage domain. In some embodiments, the at least one modification in the RuvC DNA cleavage domain comprises an amino acid substitution of one or more of amino acids K682, G695, A708, V711, D732, A739, D733, L742, V747, F755, M771, M779, W782, A788, G791, L792, P793, Y797, M799, Q804, 5819, or Y857 or a deletion of amino acid P793 of SEQ ID NO:2.

[0191] In some embodiments, the CasX variant comprises at least one modification compared to the reference CasX sequence of SEQ ID NO:2 is selected from one or more of: (a) an amino acid substitution of L379R; (b) an amino acid substitution of A708K; (c) an amino acid substitution of T620P; (d) an amino acid substitution of E385P; (e) an amino acid substitution of Y857R; (f) an amino acid substitution of I658V; (g) an amino acid substitution of F399L; (h) an amino acid substitution of Q252K; (i) an amino acid substitution of L404K; and (j) an amino acid deletion of P793.

[0192] In some embodiments, a CasX variant comprises at least two amino acid changes to the sequence of a reference CasX variant protein selected from the group consisting of: a substitution of Y789T of SEQ ID NO:2, a deletion of P793 of SEQ ID NO:2, a substitution of Y789D of SEQ ID NO:2, a substitution of T72S of SEQ ID NO:2, a substitution of I546V of SEQ ID NO:2, a substitution of E552A of SEQ ID NO:2, a substitution of A636D of SEQ ID NO:2, a substitution of F536S of SEQ ID NO:2, a substitution of A708K of SEQ ID NO:2, a substitution of Y797L of SEQ ID NO:2, a substitution of L792G SEQ ID NO:2, a substitution of A739V of SEQ ID NO:2, a substitution of G791M of SEQ ID NO:2, an insertion of A at position 661 of SEQ ID NO:2, a substitution of A788W of SEQ ID NO:2, a substitution of K390R of SEQ ID NO:2, a substitution of A751S of SEQ ID NO:2, a substitution of E385A of SEQ ID NO:2, an insertion of P at position 696 of SEQ ID NO:2, an insertion of M at position 773 of SEQ ID NO:2, a substitution of G695H of SEQ ID NO:2, an insertion of AS at position 793 of SEQ ID NO:2, an insertion of AS at position 795 of SEQ ID NO:2, a substitution of C477R of SEQ ID NO:2, a substitution of C477K of SEQ ID NO:2, a substitution of C479A of SEQ ID NO:2, a substitution of C479L of SEQ ID NO:2, a substitution of I55F of SEQ ID NO:2, a substitution of K210R of SEQ ID NO:2, a substitution of C233S of SEQ ID NO:2, a substitution of D231N of SEQ ID NO:2, a substitution of Q338E of SEQ ID NO:2, a substitution of Q338R of SEQ ID NO:2, a substitution of L379R of SEQ ID NO:2, a substitution of K390R of SEQ ID NO:2, a substitution of L481Q of SEQ ID NO:2, a substitution of F495S of SEQ ID NO:2, a substitution of D600N of SEQ ID NO:2, a substitution of T886K of SEQ ID NO:2, a substitution of A739V of SEQ ID NO:2, a substitution of K460N of SEQ ID NO:2, a substitution of I199F of SEQ ID NO:2, a substitution of G492P of SEQ ID NO:2, a substitution of T153I of SEQ ID NO:2, a substitution of R591I of SEQ ID NO:2, an insertion of AS at position 795 of SEQ ID NO:2, an insertion of AS at position 796 of SEQ ID NO:2, an insertion of L at position 889 of SEQ ID NO:2, a substitution of E121D of SEQ ID NO:2, a substitution of S270W of SEQ ID NO:2, a substitution of E712Q of SEQ ID NO:2, a substitution of K942Q of SEQ ID NO:2, a substitution of E552K of SEQ ID NO:2, a substitution of K25Q of SEQ ID NO:2, a substitution of N47D of SEQ ID NO:2, an insertion of T at position 696 of SEQ ID NO:2, a substitution of L685I of SEQ ID NO:2, a substitution of N880D of SEQ ID NO:2, a substitution of Q102R of SEQ ID NO:2, a substitution of M734K of SEQ ID NO:2, a substitution of A724S of SEQ ID NO:2, a substitution of T704K of SEQ ID NO:2, a substitution of P224K of SEQ ID NO:2, a substitution of K25R of SEQ ID NO:2, a substitution of M29E of SEQ ID NO:2, a substitution of H152D of SEQ ID NO:2, a substitution of S219R of SEQ ID NO:2, a substitution of E475K of SEQ ID NO:2, a substitution of G226R of SEQ ID NO:2, a substitution of A377K of SEQ ID NO:2, a substitution of E480K of SEQ ID NO:2, a substitution of K416E of SEQ ID NO:2, a substitution of H164R of SEQ ID NO:2, a substitution of K767R of SEQ ID NO:2, a substitution of I7F of SEQ ID NO:2, a substitution of M29R of SEQ ID NO:2, a substitution of H435R of SEQ ID NO:2, a substitution of E385Q of SEQ ID NO:2, a substitution of E385K of SEQ ID NO:2, a substitution of I279F of SEQ ID NO:2, a substitution of D489S of SEQ ID NO:2, a substitution of D732N of SEQ ID NO:2, a substitution of A739T of SEQ ID NO:2, a substitution of W885R of SEQ ID NO:2, a substitution of E53K of SEQ ID NO:2, a substitution of A238T of SEQ ID NO:2, a substitution of P283Q of SEQ ID NO:2, a substitution of E292K of SEQ ID NO:2, a substitution of Q628E of SEQ ID NO:2, a substitution of R388Q of SEQ ID NO:2, a substitution of G791M of SEQ ID NO:2, a substitution of L792K of SEQ ID NO:2, a substitution of L792E of SEQ ID NO:2, a substitution of M779N of SEQ ID NO:2, a substitution of G27D of SEQ ID NO:2, a substitution of K955R of SEQ ID NO:2, a substitution of S867R of SEQ ID NO:2, a substitution of R693I of SEQ ID NO:2, a substitution of F189Y of SEQ ID NO:2, a substitution of V635M of SEQ ID NO:2, a substitution of F399L of SEQ ID NO:2, a substitution of E498K of SEQ ID NO:2, a substitution of E386R of SEQ ID NO:2, a substitution of V254G of SEQ ID NO:2, a substitution of P793S of SEQ ID NO:2, a substitution of K188E of SEQ ID NO:2, a substitution of QT945KI of SEQ ID NO:2, a substitution of T620P of SEQ ID NO:2, a substitution of T946P of SEQ ID NO:2, a substitution of TT949PP of SEQ ID NO:2, a substitution of N952T of SEQ ID NO:2, a substitution of K682E of SEQ ID NO:2, a substitution of K975R of SEQ ID NO:2, a substitution of L212P of SEQ ID NO:2, a substitution of E292R of SEQ ID NO:2, a substitution of 1303K of SEQ ID NO:2, a substitution of C349E of SEQ ID NO:2, a substitution of E385P of SEQ ID NO:2, a substitution of E386N of SEQ ID NO:2, a substitution of D387K of SEQ ID NO:2, a substitution of L404K of SEQ ID NO:2, a substitution of E466H of SEQ ID NO:2, a substitution of C477Q of SEQ ID NO:2, a substitution of C477H of SEQ ID NO:2, a substitution of C479A of SEQ ID NO:2, a substitution of D659H of SEQ ID NO:2, a substitution of T806V of SEQ ID NO:2, a substitution of K808S of SEQ ID NO:2, an insertion of AS at position 797 of SEQ ID NO:2, a substitution of V959M of SEQ ID NO:2, a substitution of K975Q of SEQ ID NO:2, a substitution of W974G of SEQ ID NO:2, a substitution of A708Q of SEQ ID NO:2, a substitution of V711K of SEQ ID NO:2, a substitution of D733T of SEQ ID NO:2, a substitution of L742W of SEQ ID NO:2, a substitution of V747K of SEQ ID NO:2, a substitution of F755M of SEQ ID NO:2, a substitution of M771A of SEQ ID NO:2, a substitution of M771Q of SEQ ID NO:2, a substitution of W782Q of SEQ ID NO:2, a substitution of G791F, of SEQ ID NO:2 a substitution of L792D of SEQ ID NO:2, a substitution of L792K of SEQ ID NO:2, a substitution of P793Q of SEQ ID NO:2, a substitution of P793G of SEQ ID NO:2, a substitution of Q804A of SEQ ID NO:2, a substitution of Y966N of SEQ ID NO:2, a substitution of Y723N of SEQ ID NO:2, a substitution of Y857R of SEQ ID NO:2, a substitution of S890R of SEQ ID NO:2, a substitution of S932M of SEQ ID NO:2, a substitution of L897M of SEQ ID NO:2, a substitution of R624G of SEQ ID NO:2, a substitution of S603G of SEQ ID NO:2, a substitution of N737S of SEQ ID NO:2, a substitution of L307K of SEQ ID NO:2, a substitution of I658V of SEQ ID NO:2, an insertion of PT at position 688 of SEQ ID NO:2, an insertion of SA at position 794 of SEQ ID NO:2, a substitution of S877R of SEQ ID NO:2, a substitution of N580T of SEQ ID NO:2, a substitution of V335G of SEQ ID NO:2, a substitution of T620S of SEQ ID NO:2, a substitution of W345G of SEQ ID NO:2, a substitution of T280S of SEQ ID NO:2, a substitution of L406P of SEQ ID NO:2, a substitution of A612D of SEQ ID NO:2, a substitution of A751S of SEQ ID NO:2, a substitution of E386R of SEQ ID NO:2, a substitution of V351M of SEQ ID NO:2, a substitution of K210N of SEQ ID NO:2, a substitution of D40A of SEQ ID NO:2, a substitution of E773G of SEQ ID NO:2, a substitution of H207L of SEQ ID NO:2, a substitution of T62A SEQ ID NO:2, a substitution of T287P of SEQ ID NO:2, a substitution of T832A of SEQ ID NO:2, a substitution of A893S of SEQ ID NO:2, an insertion of V at position 14 of SEQ ID NO:2, an insertion of AG at position 13 of SEQ ID NO:2, a substitution of R11V of SEQ ID NO:2, a substitution of R12N of SEQ ID NO:2, a substitution of R13H of SEQ ID NO:2, an insertion of Y at position 13 of SEQ ID NO:2, a substitution of R12L of SEQ ID NO:2, an insertion of Q at position 13 of SEQ ID NO:2, an substitution of V15S of SEQ ID NO:2 and an insertion of D at position 17 of SEQ ID NO:2. In some embodiments, the at least two amino acid changes to a reference CasX protein are selected from the amino acid changes disclosed in the sequences of SEQ ID NOS: 49-150 as set forth in Table 4. In some embodiments, a CasX variant comprises any combination of the foregoing embodiments of this paragraph.

[0193] In some embodiments, a CasX variant protein comprises more than one substitution, insertion and/or deletion of a reference CasX protein amino acid sequence. In some embodiments, a CasX variant protein comprises a substitution of S794R and a substitution of Y797L of SEQ ID NO:2. In some embodiments, a CasX variant protein comprises a substitution of K416E and a substitution of A708K of SEQ ID NO:2. In some embodiments, a CasX variant protein comprises a substitution of A708K and a deletion of P793 of SEQ ID NO:2. In some embodiments, a CasX variant protein comprises a deletion of P793 and an insertion of AS at position 795 SEQ ID NO:2. In some embodiments, a CasX variant protein comprises a substitution of Q367K and a substitution of I425S of SEQ ID NO:2. In some embodiments, a CasX variant protein comprises a substitution of A708K, a deletion of P position 793 and a substitution A793V of SEQ ID NO:2. In some embodiments, a CasX variant protein comprises a substitution of Q338R and a substitution of A339E of SEQ ID NO:2. In some embodiments, a CasX variant protein comprises a substitution of Q338R and a substitution of A339K of SEQ ID NO:2. In some embodiments, a CasX variant protein comprises a substitution of S507G and a substitution of G508R of SEQ ID NO:2. In some embodiments, a CasX variant protein comprises a substitution of L379R, a substitution of A708K and a deletion of P at position 793 of SEQ ID NO:2. In some embodiments, a CasX variant protein comprises a substitution of C477K, a substitution of A708K and a deletion of P at position 793 of SEQ ID NO:2. In some embodiments, a CasX variant protein comprises a substitution of L379R, a substitution of C477K, a substitution of A708K and a deletion of P at position of 793 of SEQ ID NO:2. In some embodiments, a CasX variant protein comprises a substitution of L379R, a substitution of A708K, a deletion of P at position 793 and a substitution A739V of SEQ ID NO:2. In some embodiments, a CasX variant protein comprises a substitution of C477K, a substitution of A708K, a deletion of P at position 793 and a substitution of A739V of SEQ ID NO:2. In some embodiments, a CasX variant protein comprises a substitution of L379R, a substitution of C477K, a substitution of A708K, a deletion of P at position 793 and a substitution of A739V of SEQ ID NO:2. In some embodiments, a CasX variant protein comprises a substitution of L379R, a substitution of A708K, a deletion of P at position 793 and a substitution of M779N of SEQ ID NO:2. In some embodiments, a CasX variant protein comprises a substitution of L379R, a substitution of A708K, a deletion of P at position 793 and a substitution of M771N of SEQ ID NO:2. In some embodiments, a CasX variant protein comprises a substitution of L379R, a substitution of 708K, a deletion of P at position 793 and a substitution of D489S of SEQ ID NO:2. In some embodiments, a CasX variant protein comprises a substitution of L379R, a substitution of A708K, a deletion of P at position 793 and a substitution of A739T of SEQ ID NO:2. In some embodiments, a CasX variant protein comprises a substitution of L379R, a substitution of A708K, a deletion of P at position 793 and a substitution of D732N of SEQ ID NO:2. In some embodiments, a CasX variant protein comprises a substitution of L379R, a substitution of A708K, a deletion of P at position 793 and a substitution of G791M of SEQ ID NO:2. In some embodiments, a CasX variant protein comprises a substitution of L379R, a substitution of 708K, a deletion of P at position 793 and a substitution of Y797L of SEQ ID NO:2. In some embodiments, a CasX variant protein comprises a substitution of L379R, a substitution of C477K, a substitution of A708K, a deletion of P at position 793 and a substitution of M779N of SEQ ID NO:2. In some embodiments, a CasX variant protein comprises a substitution of L379R, a substitution of C477K, a substitution of A708K, a deletion of P at position 793 and a substitution of M771N of SEQ ID NO:2. In some embodiments, a CasX variant protein comprises a substitution of L379R, a substitution of C477K, a substitution of A708K, a deletion of P at position 793 and a substitution of D489S of SEQ ID NO:2. In some embodiments, a CasX variant protein comprises a substitution of L379R, a substitution of C477K, a substitution of A708K, a deletion of P at position 793 and a substitution of A739T of SEQ ID NO:2. In some embodiments, a CasX variant protein comprises a substitution of L379R, a substitution of C477K, a substitution of A708K, a deletion of P at position 793 and a substitution of D732N of SEQ ID NO:2. In some embodiments, a CasX variant protein comprises a substitution of L379R, a substitution of C477K, a substitution of A708K, a deletion of P at position 793 and a substitution of G791M of SEQ ID NO:2. In some embodiments, a CasX variant protein comprises a substitution of L379R, a substitution of C477K, a substitution of A708K, a deletion of P at position 793 and a substitution of Y797L of SEQ ID NO:2. In some embodiments, a CasX variant protein comprises a substitution of L379R, a substitution of C477K, a substitution of A708K, a deletion of P at position 793 and a substitution of T620P of SEQ ID NO:2. In some embodiments, a CasX variant protein comprises a substitution of A708K, a deletion of P at position 793 and a substitution of E386S of SEQ ID NO:2. In some embodiments, a CasX variant protein comprises a substitution of E386R, a substitution of F399L and a deletion of P at position 793 of SEQ ID NO:2. In some embodiments, a CasX variant protein comprises a substitution of R581I and A739V of SEQ ID NO:2. In some embodiments, a CasX variant comprises any combination of the foregoing embodiments of this paragraph.

[0194] In some embodiments, a CasX variant protein comprises more than one substitution, insertion and/or deletion of a reference CasX protein amino acid sequence. In some embodiments, a CasX variant protein comprises a substitution of A708K, a deletion of P at position 793 and a substitution of A739V of SEQ ID NO:2. In some embodiments, a CasX variant protein comprises a substitution of L379R, a substitution of A708K and a deletion of P at position 793 of SEQ ID NO:2. In some embodiments, a CasX variant protein comprises a substitution of C477K, a substitution of A708K and a deletion of P at position 793 of SEQ ID NO:2. In some embodiments, a CasX variant protein comprises a substitution of L379R, a substitution of C477K, a substitution of A708K and a deletion of P at position 793 of SEQ ID NO:2. In some embodiments, a CasX variant protein comprises a substitution of L379R, a substitution of A708K, a deletion of P at position 793 and a substitution of A739V of SEQ ID NO:2. In some embodiments, a CasX variant protein comprises a substitution of C477K, a substitution of A708K, a deletion of P at position 793 and a substitution of A739 of SEQ ID NO:2. In some embodiments, a CasX variant protein comprises a substitution of L379R, a substitution of C477K, a substitution of A708K, a deletion of P at position 793 and a substitution of A739V of SEQ ID NO:2. In some embodiments, a CasX variant protein comprises a substitution of L379R, a substitution of C477K, a substitution of A708K, a deletion of P at position 793 and a substitution of T620P of SEQ ID NO:2. In some embodiments, a CasX variant protein comprises a substitution of M771A of SEQ ID NO:2. In some embodiments, a CasX variant protein comprises a substitution of L379R, a substitution of A708K, a deletion of P at position 793 and a substitution of D732N of SEQ ID NO:2. In some embodiments, a CasX variant comprises any combination of the foregoing embodiments of this paragraph.

[0195] In some embodiments, a CasX variant protein comprises a substitution of W782Q of SEQ ID NO:2. In some embodiments, a CasX variant protein comprises a substitution of M771Q of SEQ ID NO:2. In some embodiments, a CasX variant protein comprises a substitution of R458I and a substitution of A739V of SEQ ID NO:2. In some embodiments, a CasX variant protein comprises a substitution of L379R, a substitution of A708K, a deletion of P at position 793 and a substitution of M771N of SEQ ID NO:2. In some embodiments, a CasX variant protein comprises a substitution of L379R, a substitution of A708K, a deletion of P at position 793 and a substitution of A739T of SEQ ID NO:2. In some embodiments, a CasX variant protein comprises a substitution of L379R, a substitution of C477K, a substitution of A708K, a deletion of P at position 793 and a substitution of D489S of SEQ ID NO:2. In some embodiments, a CasX variant protein comprises a substitution of L379R, a substitution of C477K, a substitution of A708K, a deletion of P at position 793 and a substitution of D732N of SEQ ID NO:2. In some embodiments, a CasX variant protein comprises a substitution of V711K of SEQ ID NO:2. In some embodiments, a CasX variant protein comprises a substitution of L379R, a substitution of C477K, a substitution of A708K, a deletion of P at position 793 and a substitution of Y797L of SEQ ID NO:2. In some embodiments, a CasX variant protein comprises a substitution of L379R, a substitution of A708K and a deletion of P at position 793 of SEQ ID NO:2. In some embodiments, a CasX variant protein comprises a substitution of L379R, a substitution of C477K, a substitution of A708K, a deletion of P at position 793 and a substitution of M771N of SEQ ID NO:2. In some embodiments, a CasX variant protein comprises a substitution of A708K, a substitution of P at position 793 and a substitution of E386S of SEQ ID NO:2. In some embodiments, a CasX variant protein comprises a substitution of L379R, a substitution of C477K, a substitution of A708K and a deletion of P at position 793 of SEQ ID NO:2. In some embodiments, a CasX variant protein comprises a substitution of L792D of SEQ ID NO:2. In some embodiments, a CasX variant protein comprises a substitution of G791F of SEQ ID NO:2. In some embodiments, a CasX variant protein comprises a substitution of A708K, a deletion of P at position 793 and a substitution of A739V of SEQ ID NO:2. In some embodiments, a CasX variant protein comprises a substitution of L379R, a substitution of A708K, a deletion of P at position 793 and a substitution of A739V of SEQ ID NO:2. In some embodiments, a CasX variant protein comprises a substitution of C477K, a substitution of A708K and a substitution of P at position 793 of SEQ ID NO:2. In some embodiments, a CasX variant protein comprises a substitution of L249I and a substitution of M771N of SEQ ID NO:2. In some embodiments, a CasX variant protein comprises a substitution of V747K of SEQ ID NO:2. In some embodiments, a CasX variant protein comprises a substitution of L379R, a substitution of C477, a substitution of A708K, a deletion of P at position 793 and a substitution of M779N of SEQ ID NO:2. In some embodiments, a CasX variant protein comprises a substitution of F755M. In some embodiments, a CasX variant comprises any combination of the foregoing embodiments of this paragraph.

[0196] In some embodiments, a CasX variant protein comprises at least one modification compared to the reference CasX sequence of SEQ ID NO:2, wherein the at least one modification is selected from one or more of: an amino acid substitution of L379R; an amino acid substitution of A708K; an amino acid substitution of T620P; an amino acid substitution of E385P; an amino acid substitution of Y857R; an amino acid substitution of I658V; an amino acid substitution of F399L; an amino acid substitution of Q252K; and an amino acid deletion of [P793]. In some embodiments, a CasX variant protein comprises at least one modification compared to the reference CasX sequence of SEQ ID NO:2, wherein the at least one modification is selected from one or more of: an amino acid substitution of L379R; an amino acid substitution of A708K; an amino acid substitution of T620P; an amino acid substitution of E385P; an amino acid substitution of Y857R; an amino acid substitution of I658V; an amino acid substitution of F399L; an amino acid substitution of Q252K; an amino acid substitution of L404K; and an amino acid deletion of [P793]. In other embodiments, a CasX variant protein comprises any combination of the foregoing substitutions or deletions compared to the reference CasX sequence of SEQ ID NO:2. In other embodiments, the CasX variant protein can, in addition to the foregoing substitutions or deletions, further comprise a substitution of an NTSB and/or a helical 1b domain from the reference CasX of SEQ ID NO:1.

[0197] In some embodiments, the CasX variant protein comprises between 400 and 2000 amino acids, between 500 and 1500 amino acids, between 700 and 1200 amino acids, between 800 and 1100 amino acids, or between 900 and 1000 amino acids.

[0198] In some embodiments, the CasX variant protein comprises one or more modifications in a region of non-contiguous residues that form a channel in which gNA:target DNA complexing occurs. In some embodiments, the CasX variant protein comprises one or more modifications comprising a region of non-contiguous residues that form an interface which binds with the gNA. For example, in some embodiments of a reference CasX protein, the helical I, helical II and OBD domains all contact or are in proximity to the gNA:target DNA complex, and one or more modifications to non-contiguous residues within any of these domains may improve function of the CasX variant protein.

[0199] In some embodiments, the CasX variant protein comprises one or more modifications in a region of non-contiguous residues that form a channel which binds with the non-target strand DNA. For example, a CasX variant protein can comprise one or more modifications to non-contiguous residues of the NTSBD. In some embodiments, the CasX variant protein comprises one or more modifications in a region of non-contiguous residues that form an interface which binds with the PAM. For example, a CasX variant protein can comprise one or more modifications to non-contiguous residues of the helical I domain or OBD. In some embodiments, the CasX variant protein comprises one or more modifications comprising a region of non-contiguous surface-exposed residues. As used herein, “surface-exposed residues” refers to amino acids on the surface of the CasX protein, or amino acids in which at least a portion of the amino acid, such as the backbone or a part of the side chain is on the surface of the protein. Surface exposed residues of cellular proteins such as CasX, which are exposed to an aqueous intracellular environment, are frequently selected from positively charged hydrophilic amino acids, for example arginine, asparagine, aspartate, glutamine, glutamate, histidine, lysine, serine, and threonine. Thus, for example, in some embodiments of the variants provided herein, a region of surface exposed residues comprises one or more insertions, deletions, or substitutions compared to a reference CasX protein. In some embodiments, one or more positively charged residues are substituted for one or more other positively charged residues, or negatively charged residues, or uncharged residues, or any combinations thereof. In some embodiments, one or more amino acids residues for substitution are near bound nucleic acid, for example residues in the RuvC domain or helical I domain that contact target DNA, or residues in the OBD or helical II domain that bind the gNA, can be substituted for one or more positively charged or polar amino acids.

[0200] In some embodiments, the CasX variant protein comprises one or more modifications in a region of non-contiguous residues that form a core through hydrophobic packing in a domain of the reference CasX protein. Without wishing to be bound by any theory, regions that form cores through hydrophobic packing are rich in hydrophobic amino acids such as valine, isoleucine, leucine, methionine, phenylalanine, tryptophan, and cysteine. For example, in some reference CasX proteins, RuvC domains comprise a hydrophobic pocket adjacent to the active site. In some embodiments, between 2 to 15 residues of the region are charged, polar, or base-stacking. Charged amino acids (sometimes referred to herein as residues) may include, for example, arginine, lysine, aspartic acid, and glutamic acid, and the side chains of these amino acids may form salt bridges provided a bridge partner is also present. Polar amino acids may include, for example, glutamine, asparagine, histidine, serine, threonine, tyrosine, and cysteine. Polar amino acids can, in some embodiments, form hydrogen bonds as proton donors or acceptors, depending on the identity of their side chains. As used herein, “base-stacking” includes the interaction of aromatic side chains of an amino acid residue (such as tryptophan, tyrosine, phenylalanine, or histidine) with stacked nucleotide bases in a nucleic acid. Any modification to a region of non-contiguous amino acids that are in close spatial proximity to form a functional part of the CasX variant protein is envisaged as within the scope of the disclosure.

i. CasX Variant Proteins with Domains from Multiple Source Proteins

[0201] In certain embodiments, the disclosure provides a chimeric CasX protein comprising protein domains from two or more different CasX proteins, such as two or more reference CasX proteins, or two or more CasX variant protein sequences as described herein. As used herein, a “chimeric CasX protein” refers to a CasX containing at least two domains isolated or derived from different sources, such as two naturally occurring proteins, which may, in some embodiments, be isolated from different species. For example, in some embodiments, a chimeric CasX protein comprises a first domain from a first CasX protein and a second domain from a second, different CasX protein. In some embodiments, the first domain can be selected from the group consisting of the NTSB, TSL, Helical I, Helical II, OBD and RuvC domains. In some embodiments, the second domain is selected from the group consisting of the NTSB, TSL, Helical I, Helical II, OBD and RuvC domains with the second domain being different from the foregoing first domain. For example, a chimeric CasX protein may comprise an NTSB, TSL, Helical I, Helical II, OBD domains from a CasX protein of SEQ ID NO:2, and a RuvC domain from a CasX protein of SEQ ID NO:1, or vice versa. As a further example, a chimeric CasX protein may comprise an NTSB, TSL, Helical II, OBD and RuvC domain from CasX protein of SEQ ID NO:2, and a Helical I domain from a CasX protein of SEQ ID NO:1, or vice versa. Thus, in certain embodiments, a chimeric CasX protein may comprise an NTSB, TSL, Helical II, OBD and RuvC domain from a first CasX protein, and a Helical I domain from a second CasX protein. In some embodiments of the chimeric CasX proteins, the domains of the first CasX protein are derived from the sequences of SEQ ID NO:1, SEQ ID NO:2 or SEQ ID NO:3, and the domains of the second CasX protein are derived from the sequences of SEQ ID NO:1, SEQ ID NO:2 or SEQ ID NO:3, and the first and second CasX proteins are not the same. In some embodiments, domains of the first CasX protein comprise sequences derived from SEQ ID NO:1 and domains of the second CasX protein comprise sequences derived from SEQ ID NO:2. In some embodiments, domains of the first CasX protein comprise sequences derived from SEQ ID NO:1 and domains of the second CasX protein comprise sequences derived from SEQ ID NO:3. In some embodiments, domains of the first CasX protein comprise sequences derived from SEQ ID NO:2 and domains of the second CasX protein comprise sequences derived from SEQ ID NO:3. In some embodiments, the CasX variant comprises SEQ ID NOS: 130-138 or 141-144 the sequences of which are set forth in Table 4. In some embodiments, the CasX variant comprises a sequence of SEQ ID NOS: 72, 94, 113, 135, 138, 144, 239, 277, or 280. In some embodiments, the CasX variant comprises a sequence of SEQ ID NOS: 94, 72, 138, 144 or 280. In some embodiments, a CasX variant protein comprises at least one chimeric domain comprising a first part from a first CasX protein and a second part from a second, different CasX protein. As used herein, a “chimeric domain” refers to a domain containing at least two parts isolated or derived from different sources, such as two naturally occurring proteins or portions of domains from two reference CasX proteins. The at least one chimeric domain can be any of the NTSB, TSL, helical I, helical II, OBD or RuvC domains as described herein. In some embodiments, the first portion of a CasX domain comprises a sequence of SEQ ID NO:1 and the second portion of a CasX domain comprises a sequence of SEQ ID NO:2. In some embodiments, the first portion of the CasX domain comprises a sequence of SEQ ID NO:1 and the second portion of the CasX domain comprises a sequence of SEQ ID NO:3. In some embodiments, the first portion of the CasX domain comprises a sequence of SEQ ID NO:2 and the second portion of the CasX domain comprises a sequence of SEQ ID NO:3. In some embodiments, the at least one chimeric domain comprises a chimeric RuvC domain. As an example of the foregoing, the chimeric RuvC domain comprises amino acids 661 to 824 of SEQ ID NO:1 and amino acids 922 to 978 of SEQ ID NO:2. As an alternative example of the foregoing, a chimeric RuvC domain comprises amino acids 648 to 812 of SEQ ID NO:2 and amino acids 935 to 986 of SEQ ID NO:1. In some embodiments, a CasX protein comprises a first domain from a first CasX protein and a second domain from a second CasX protein, and at least one chimeric domain comprising at least two parts isolated from different CasX proteins using the approach of the embodiments described in this paragraph. In the foregoing embodiments, the chimeric CasX proteins having domains or portions of domains derived from SEQ ID NOS:1, 2 and 3, can further comprise amino acid insertions, deletions, or substitutions of any of the embodiments disclosed herein.

[0202] In some embodiments, a CasX variant protein comprises a sequence set forth in Tables 4, 6, 7, 8, or 10. In some embodiments, a CasX variant protein consists of a sequence set forth in Table 4. In other embodiments, a CasX variant protein comprises a sequence at least 60% identical, at least 65% identical, at least 70% identical, at least 75% identical, at least 80% identical, at least 81% identical, at least 82% identical, at least 83% identical, at least 84% identical, at least 85% identical, at least 86% identical, at least 86% identical, at least 87% identical, at least 88% identical, at least 89% identical, at least 89% identical, at least 90% identical, at least 91% identical, at least 92% identical, at least 93% identical, at least 94% identical, at least 95% identical, at least 96% identical, at least 97% identical, at least 98% identical, at least 99% identical, at least 99.5% identical to a sequence of SEQ ID NOS: 49-150, 233-235, 238-252, or 272-281 as set forth in Tables 4, 6, 7, 8, or 10. In other embodiments, a CasX variant protein comprises a sequence of SEQ ID NOS: 49-150 as set forth in Table 4, and further comprises one or more NLS disclosed herein at or near either the N-terminus, the C-terminus, or both. It will be understood that in some cases, the N-terminal methionine of the CasX variants of the Tables is removed from the expressed CasX variant during post-translational modification.

TABLE 4
CasX Variant Sequences

| Description* | Amino Acid Sequence |
|---|---|
| TSL, | MQEIKRINKIRRRLVKDSNTKKAGKTGPMKTLLVRVMTPDLRERLENLRKKPENI |
| Helical I, | PQPISNTSRANLNKLLTDYTEMKKAILHVYWEEFQKDPVGLMSRVAQPASKKIDQ |
| Helical II, | NKLKPEMDEKGNLTTAGFACSQCGQPLFVYKLEQVSEKGKAYTNYFGRCNVAEHE |
| OBD and | KLILLAQLKPEKDSDEAVTYSLGKFGQRALDFYSIHVTRESNHPVKPLEQIGGNS |
| RuvC | CASGPVGKALSDACMGAVASFLTKYQDIILEHQKVIKKNEKRLANLKDIASANGL |
| domains | AFPKITLPPQPHTKEGIEAYNNVVAQIVIWVNLNLWQKLKIGRDEAKPLQRLKGF |
| from SEQ | PSFPLVERQANEVDWWDMVCNVKKLINEKKEDGKVFWQNLAGYKRQEALRPYLSS |
| ID NO: 2 | EEDRKKGKKFARYQFGDLLLHLEKKHGEDWGKVYDEAWERIDKKVEGLSKHIKLE |
| and an | EERRSEDAQSKAALTDWLRAKASFVIEGLKEADKDEFCRCELKLQKWYGDLRGKP |
| NTSB | FAIEAENSILDISGFSKQYNCAFIWQKDGVKKLNLYLIINYFKGGKLRFKKIKPE |
| domain | AFEANRFYTVINKKSGEIVPMEVNFNFDDPNLIILPLAFGKRQGREFIWNDLLSL |
| from SEQ | ETGSLKLANGRVIEKTLYNRRTRQDEPALFVALTFERREVLDSSNIKPMNLIGID |
| ID NO: 1 | RGENIPAVIALTDPEGCPLSRFKDSLGNPTHILRIGESYKEKQRTIQAKKEVEQR |
| | RAGGYSRKYASKAKNLADDMVRNTARDLLYYAVTQDAMLIFENLSRGFGRQGKRT |
| | FMAERQYTRMEDWLTAKLAYEGLSKTYLSKTLAQYTSKTCSNCGFTITSADYDRV |
| | LEKLKKTATGWMITINGKELKVEGQITYYNRYKRQNVVKDLSVELDRLSEESVNN |
| | DISSWTKGRSGEALSLLKKRFSHRPVQEKFVCLNCGFETHADEQAALNIARSWLF |
| | LRSQEYKKYQTNKTTGNTDKRAFVETWQSFYRKKLKEVWKPAV (SEQ ID NO: |
| | 49) |
| NTSB, | MQEIKRINKIRRRLVKDSNTKKAGKTGPMKTLLVRVMTPDLRERLENLRKKPENI |
| Helical I, | PQPISNTSRANLNKLLTDYTEMKKAILHVYWEEFQKDPVGLMSRVAQPAPKNIDQ |
| Helical II, | RKLIPVKDGNERLTSSGFACSQCCQPLYVYKLEQVNDKGKPHTNYFGRCNVSEHE |
| OBD and | RLILLSPHKPEANDELVTYSLGKFGQRALDFYSIHVTRESNHPVKPLEQIGGNSC |
| RuvC | ASGPVGKALSDACMGAVASFLTKYQDIILEHQKVIKKNEKRLANLKDIASANGLA |
| domains | FPKITLPPQPHTKEGIEAYNNVVAQIVIWVNLNLWQKLKIGRDEAKPLQRLKGFP |
| from SEQ | SFPLVERQANEVDWWDMVCNVKKLINEKKEDGKVFWQNLAGYKRQEALRPYLSSE |
| ID NO: 2 | EDRKKGKKFARYQFGDLLLHLEKKHGEDWGKVYDEAWERIDKKVEGLSKHIKLEE |
| and a TSL | ERRSEDAQSKAALTDWLRAKASFVIEGLKEADKDEFCRCELKLQKWYGDLRGKPF |
| domain | AIEAENSILDISGFSKQYNCAFIWQKDGVKKLNLYLIINYFKGGKLRFKKIKPEA |
| from SEQ | FEANRFYTVINKKSGEIVPMEVNFNFDDPNLIILPLAFGKRQGREFIWNDLLSLE |
| ID NO: 1. | TGSLKLANGRVIEKTLYNRRTRQDEPALFVALTFERREVLDSSNIKPMNLIGIDR |
| | GENIPAVIALTDPEGCPLSRFKDSLGNPTHILRIGESYKEKQRTIQAKKEVEQRR |
| | AGGYSRKYASKAKNLADDMVRNTARDLLYYAVTQDAMLIFENLSRGFGRQGKRTF |
| | MAERQYTRMEDWLTAKLAYEGLSKTYLSKTLAQYTSKTCSNCGFTITTADYDGML |
| | VRLKKTSDGWATTLNNKELKAEGQITYYNRYKRQTVEKELSAELDRLSEESGNND |
| | ISKWTKGRRDEALFLLKKRFSHRPVQEQFVCLDCGHEVHADEQAALNIARSWLFL |
| | RSQEYKKYQTNKTTGNTDKRAFVETWQSFYRKKLKEVWKPAV (SEQ ID NO: |
| | 50) |
| TSL, | MEKRINKIRKKLSADNATKPVSRSGPMKTLLVRVMTDDLKKRLEKRRKKPEVMPQ |
| Helical I, | VISNNAANNLRMLLDDYTKMKEAILQVYWQEFKDDHVGLMCKFAQPAPKNIDQRK |
| Helical II, | LIPVKDGNERLTSSGFACSQCCQPLYVYKLEQVNDKGKPHTNYFGRCNVSEHERL |
| OBD and | ILLSPHKPEANDELVTYSLGKFGQRALDFYSIHVTKESTHPVKPLAQIAGNRYAS |
| RuvC | GPVGKALSDACMGTIASFLSKYQDIIIEHQKVVKGNQKRLESLRELAGKENLEYP |
| domains | SVTLPPQPHTKEGVDAYNEVIARVRMWVNLNLWQKLKLSRDDAKPLLRLKGFPSF |
| from SEQ | PVVERRENEVDWWNTINEVKKLIDAKRDMGRVFWSGVTAEKRNTILEGYNYLPNE |
| ID NO: 1 | NDHKKREGSLENPKKPAKRQFGDLLLYLEKKYAGDWGKVFDEAWERIDKKIAGLT |
| and an | SHIEREEARNAEDAQSKAVLTDWLRAKASFVLERLKEMDEKEFYACEIQLQKWYG |
| NTSB | DLRGNPFAVEAENRVVDISGFSIGSDGHSIQYRNLLAWKYLENGKREFYLLMNYG |
| domain | KKGRIRFTDGTDIKKSGKWQGLLYGGGKAKVIDLTFDPDDEQLIILPLAFGTRQG |
| from SEQ | REFIWNDLLSLETGLIKLANGRVIEKTIYNKKIGRDEPALFVALTFERREVVDPS |
| ID NO: 2 | NIKPVNLIGVDRGENIPAVIALTDPEGCPLPEFKDSSGGPTDILRIGEGYKEKQR |
| | AIQAAKEVEQRRAGGYSRKFASKSRNLADDMVRNSARDLFYHAVTHDAVLVFENL |
| | SRGFGRQGKRTFMTERQYTKMEDWLTAKLAYEGLTSKTYLSKTLAQYTSKTCSNC |
| | GFTITTADYDGMLVRLKKTSDGWATTLNNKELKAEGQITYYNRYKRQTVEKELSA |
| | ELDRLSEESGNNDISKWIKGRRDEALFLLKKRFSHRPVQEQFVCLDCGHEVHADE |
| | QAALNIARSWLFLNSNSTEFKSYKSGKQPFVGAWQAFYKRRLKEVWKPNA (SEQ |
| | ID NO: 51) |
| NTSB, | MEKRINKIRKKLSADNATKPVSRSGPMKTLLVRVMTDDLKKRLEKRRKKPEVMPQ |
| Helical I, | VISNNAANNLRMLLDDYTKMKEAILQVYWQEFKDDHVGLMCKFAQPASKKIDQNK |
| Helical II, | LKPEMDEKGNLTTAGFACSQCGQPLFVYKLEQVSEKGKAYTNYFGRCNVAEHEKL |
| OBD and | ILLAQLKPEKDSDEAVTYSLGKFGQRALDFYSIHVTKESTHPVKPLAQIAGNRYA |
| RuvC | SGPVGKALSDACMGTIASFLSKYQDIIIEHQKVVKGNQKRLESLRELAGKENLEY |
| domains | PSVTLPPQPHTKEGVDAYNEVIARVRMWVNLNLWQKLKLSRDDAKPLLRLKGFPS |
| from SEQ | FPVVERRENEVDWWNTINEVKKLIDAKRDMGRVFWSGVTAEKRNTILEGYNYLPN |
| ID NO: 1 | ENDHKKREGSLENPKKPAKRQFGDLLLYLEKKYAGDWGKVFDEAWERIDKKIAGL |
| and an TSL | TSHIEREEARNAEDAQSKAVLTDWLRAKASFVLERLKEMDEKEFYACEIQLQKWY |
| domain | GDLRGNPFAVEAENRVVDISGFSIGSDGHSIQYRNLLAWKYLENGKREFYLLMNY |
| from SEQ | GKKGRIRFTDGTDIKKSGKWQGLLYGGGKAKVIDLTFDPDDEQLIILPLAFGTRQ |
| ID NO: 2. | GREFIWNDLLSLETGLIKLANGRVIEKTIYNKKIGRDEPALFVALTFERREVVDP |
| | SNIKPVNLIGVDRGENIPAVIALTDPEGCPLPEFKDSSGGPTDILRIGEGYKEKQ |
| | RAIQAAKEVEQRRAGGYSRKFASKSRNLADDMVRNSARDLFYHAVTHDAVLVFEN |
| | LSRGFGRQGKRTFMTERQYTKMEDWLTAKLAYEGLTSKTYLSKTLAQYTSKTCSN |
| | CGFTITSADYDRVLEKLKKTATGWMTTINGKELKVEGQITYYNRYKRQNVVKDLS |
| | VELDRLSEESVNNDISSWTKGRSGEALSLLKKRFSHRPVQEKFVCLNCGFETHAD |
| | EQAALNIARSWLFLNSNSTEFKSYKSGKQPFVGAWQAFYKRRLKEVWKPNA |
| | (SEQ ID NO: 52) |
| NTSB, | MQEIKRINKIRRRLVKDSNTKKAGKTGPMKTLLVRVMTPDLRERLENLRKKPENI |
| TSL, | PQPISNTSRANLNKLLTDYTEMKKAILHVYWEEFQKDPVGLMSRVAQPAPKNIDQ |
| Helical I, | RKLIPVKDGNERLTSSGFACSQCCQPLYVYKLEQVNDKGKPHTNYFGRCNVSEHE |
| Helical II | RLILLSPHKPEANDELVTYSLGKFGQRALDFYSIHVTRESNHPVKPLEQIGGNSC |
| and OBD | ASGPVGKALSDACMGAVASFLTKYQDIILEHQKVIKKNEKRLANLKDIASANGLA |
| domains | FPKITLPPQPHTKEGIEAYNNVVAQIVIWVNLNLWQKLKIGRDEAKPLQRLKGFP |
| SEQ ID | SFPLVERQANEVDWWDMVCNVKKLINEKKEDGKVFWQNLAGYKRQEALRPYLSSE |
| NO: 2 and | EDRKKGKKFARYQFGDLLLHLEKKHGEDWGKVYDEAWERIDKKVEGLSKHIKLEE |
| an | ERRSEDAQSKAALTDWLRAKASFVIEGLKEADKDEFCRCELKLQKWYGDLRGKPF |
| exogenous | AIEAENSILDISGFSKQYNCAFIWQKDGVKKLNLYLIINYFKGGKLRFKKIKPEA |
| RuvC | FEANRFYTVINKKSGEIVPMEVNFNFDDPNLIILPLAFGKRQGREFIWNDLLSLE |
| domain or a | TGSLKLANGRVIEKTLYNRRTRQDEPALFVALTFERREVLDSSNIKPVNLIGVDR |
| portion | GENIPAVIALTDPEGCPLPEFKDSSGGPTDILRIGEGYKEKQRAIQAAKEVEQRR |
| thereof | AGGYSRKFASKSRNLADDMVRNSARDLFYHAVTHDAVLVFENLSRGFGRQGKRTF |
| from a | MTERQYTKMEDWLTAKLAYEGLTSKTYLSKTLAQYTSKTCSNCGFTITSADYDRV |
| second | LEKLKKTATGWMTTINGKELKVEGQITYYNRYKRQNVVKDLSVELDRLSEESVNN |
| CasX | DISSWTKGRSGEALSLLKKRFSHRPVQEKFVCLNCGFETHA (SEQ ID NO: |
| protein. | 53) |
| | MQEIKRINKIRRRLVKDSNTKKAGKTGPMKTLLVRVMTPDLRERLENLRKKPENI |
| | PQPISNTSRANLNKLLTDYTEMKKAILHVYWEEFQKDPVGLMSRVAQPAPKNIDQ |
| | RKLIPVKDGNERLTSSGFACSQCCQPLYVYKLEQVNDKGKPHTNYFGRCNVSEHE |
| | RLILLSPHKPEANDELVTYSLGKFGQRALDFYSIHVTRESNHPVKPLEQIGGNSC |
| | ASGPVGKALSDACMGAVASFLTKYQDIILEHQKVIKKNEKRLANLKDIASANGLA |
| | FPKITLPPQPHTKEGIEAYNNVVAQIVIWVNLNLWQKLKIGRDEAKPLQRLKGFP |
| | SFPLVERQANEVDWWDMVCNVKKLINEKKEDGKVFWQNLAGYKRQEALRPYLSSE |
| | EDRKKGKKFARYQFGDLLLHLEKKHGEDWGKVYDEAWERIDKKVEGLSKHIKLEE |
| | ERRSEDAQSKAALTDWLRAKASFVIEGLKEADKDEFCRCELKLQKWYGDLRGKPF |
| | AIEAENSILDISGFSKQYNCAFIWQKDGVKKLNLYLIINYFKGGKLRFKKIKPEA |
| | FEANRFYTVINKKSGEIVPMEVNFNFDDPNLIILPLAFGKRQGREFIWNDLLSLE |
| | TGSLKLANGRVIEKTLYNRRTRQDEPALFVALTFERREVLDSSNIKPMNLIGIDR |
| | GENIPAVIALTDPEGCPLSRFKDSLGNPTHILRIGESYKEKQRTIQAKKEVEQRR |
| | AGGYSRKYASKAKNLADDMVRNTARDLLYYAVTQDAMLIFENLSRGFGRQGKRTF |
| | MAERQYTRMEDWLTAKLAYEGLSKTYLSKTLAQYTSKTCSNCGFTITSADYDRVL |
| | EKLKKTATGWMTTINGKELKVEGQITYYNRYKRQNVVKDLSVELDRLSEESVNND |
| | ISSWTKGRSGEALSLLKKRFSHRPVQEKFVCLNCGFETHA (SEQ ID NO: |
| | 54) |
| NTSB, | MQEIKRINKIRRRLVKDSNTKKAGKTGPMKTLLVRVMTPDLRERLENLRKKPENI |
| TSL, | PQPISNNAANNLRMLLDDYTKMKEAILQVYWQEFKDDHVGLMCKFAQPAPKNIDQ |
| Helical II, | RKLIPVKDGNERLTSSGFACSQCCQPLYVYKLEQVNDKGKPHTNYFGRCNVSEHE |
| OBD and | RLILLSPHKPEANDELVTYSLGKFGQRALDFYSIHVTKESTHPVKPLAQIAGNRY |
| RuvC | ASGPVGKALSDACMGTIASFLSKYQDIIIEHQKVVKGNQKRLESLRELAGKENLE |
| domains | YPSVTLPPQPHTKEGVDAYNEVIARVRMWVNLNLWQKLKLSRDDAKPLLRLKGFP |
| from SEQ | SFPLVERQANEVDWWDMVCNVKKLINEKKEDGKVFWQNLAGYKRQEALRPYLSSE |
| ID NO: 2 | EDRKKGKKFARYQFGDLLLHLEKKHGEDWGKVYDEAWERIDKKVEGLSKHIKLEE |
| and a | ERRSEDAQSKAALTDWLRAKASFVIEGLKEADKDEFCRCELKLQKWYGDLRGKPF |
| Helical I | AIEAENSILDISGFSKQYNCAFIWQKDGVKKLNLYLIINYFKGGKLRFKKIKPEA |
| domain | FEANRFYTVINKKSGEIVPMEVNFNFDDPNLIILPLAFGKRQGREFIWNDLLSLE |
| from SEQ | TGSLKLANGRVIEKTLYNRRTRQDEPALFVALTFERREVLDSSNIKPMNLIGIDR |
| ID NO: 1 | GENIPAVIALTDPEGCPLSRFKDSLGNPTHILRIGESYKEKQRTIQAKKEVEQRR |
| | AGGYSRKYASKAKNLADDMVRNTARDLLYYAVTQDAMLIFENLSRGFGRQGKRTF |
| | MAERQYTRMEDWLTAKLAYEGLSKTYLSKTLAQYTSKTCSNCGFTITSADYDRVL |
| | EKLKKTATGWMTTINGKELKVEGQITYYNRYKRQNVVKDLSVELDRLSEESVNND |
| | ISSWTKGRSGEALSLLKKRFSHRPVQEKFVCLNCGFETHADEQAALNIARSWLFL |
| | RSQEYKKYQTNKTTGNTDKRAFVETWQSFYRKKLKEVWKPAV (SEQ ID NO: |
| | 55) |
| NTSB, | MQEIKRINKIRRRLVKDSNTKKAGKTGPMKTLLVRVMTPDLRERLENLRKKPENI |
| TSL, | PQPISNTSRANLNKLLTDYTEMKKAILHVYWEEFQKDPVGLMSRVAQPAPKNIDQ |
| Helical I, | RKLIPVKDGNERLTSSGFACSQCCQPLYVYKLEQVNDKGKPHTNYFGRCNVSEHE |
| OBD and | RLILLSPHKPEANDELVTYSLGKFGQRALDFYSIHVTRESNHPVKPLEQIGGNSC |
| RuvC | ASGPVGKALSDACMGAVASFLTKYQDIILEHQKVIKKNEKRLANLKDIASANGLA |
| domains | FPKITLPPQPHTKEGIEAYNNVVAQIVIWVNLNLWQKLKIGRDEAKPLQRLKGFP |
| from SEQ | SFPVVERRENEVDWWNTINEVKKLIDAKRDMGRVFWSGVTAEKRNTILEGYNYLP |
| ID NO: 2 | NENDHKKREGSLENPKKPAKRQFGDLLLYLEKKYAGDWGKVFDEAWERIDKKIAG |
| and a | LTSHIEREEARNAEDAQSKAVLTDWLRAKASFVLERLKEMDEKEFYACEIQLQKW |
| Helical II | YGDLRGNPFAVEAENSILDISGFSKQYNCAFIWQKDGVKKLNLYLIINYFKGGKL |
| domain | RFKKIKPEAFEANRFYTVINKKSGEIVPMEVNFNFDDPNLIILPLAFGKRQGREF |
| from SEQ | IWNDLLSLETGSLKLANGRVIEKTLYNRRTRQDEPALFVALTFERREVLDSSNIK |
| ID NO: 1 | PMNLIGIDRGENIPAVIALTDPEGCPLSRFKDSLGNPTHILRIGESYKEKQRTIQ |
| | AKKEVEQRRAGGYSRKYASKAKNLADDMVRNTARDLLYYAVTQDAMLIFENLSRG |
| | FGRQGKRTEMAERQYTRMEDWLTAKLAYEGLSKTYLSKTLAQYTSKTCSNCGFTI |
| | TSADYDRVLEKLKKTATGWMTTINGKELKVEGQITYYNRYKRQNVVKDLSVELDR |
| | LSEESVNNDISSWTKGRSGEALSLLKKRFSHRPVQEKFVCLNCGFETHADEQAAL |
| | NIARSWLFLRSQEYKKYQTNKTTGNTDKRAFVETWQSFYRKKLKEVWKPAV |
| | (SEQ ID NO: 56) |
| NTSB, | MISNTSRANLNKLLTDYTEMKKAILHVYWEEFQKDPVGLMSRVAQPAPKNIDQRK |
| TSL, | LIPVKDGNERLTSSGFACSQCCQPLYVYKLEQVNDKGKPHTNYFGRCNVSEHERL |
| Helical I, | ILLSPHKPEANDELVTYSLGKFGQRALDFYSIHVTRESNHPVKPLEQIGGNSCAS |
| Helical II | GPVGKALSDACMGAVASFLTKYQDIILEHQKVIKKNEKRLANLKDIASANGLAFP |
| and RuvC | KITLPPQPHTKEGIEAYNNVVAQIVIWVNLNLWQKLKIGRDEAKPLQRLKGFPSF |
| domains | PLVERQANEVDWWDMVCNVKKLINEKKEDGKVFWQNLAGYKRQEALRPYLSSEED |
| from a first | RKKGKKFARYQFGDLLLHLEKKHGEDWGKVYDEAWERIDKKVEGLSKHIKLEEER |
| CasX | RSEDAQSKAALTDWLRAKASFVIEGLKEADKDEFCRCELKLQKWYGDLRGKPFAI |
| protein and | EAENRVVDISGFSIGSDGHSIQYRNLLAWKYLENGKREFYLLMNYGKKGRIRFTD |
| an | GTDIKKSGKWQGLLYGGGKAKVIDLTFDPDDEQLIILPLAFGTRQGREFIWNDLL |
| exogenous | SLETGLIKLANGRVIEKTIYNKKIGRDEPALFVALTFERREVVDPSNIKPMNLIG |
| OBD or a | IDRGENIPAVIALTDPEGCPLSRFKDSLGNPTHILRIGESYKEKQRTIQAKKEVE |
| part thereof | QRRAGGYSRKYASKAKNLADDMVRNTARDLLYYAVTQDAMLIFENLSRGFGRQGK |
| from a | RTFMAERQYTRMEDWLTAKLAYEGLSKTYLSKTLAQYTSKTCSNCGFTITSADYD |
| second | RVLEKLKKTATGWMTTINGKELKVEGQITYYNRYKRQNVVKDLSVELDRLSEESV |
| CasX | NNDISSWTKGRSGEALSLLKKRFSHRPVQEKFVCLNCGFETHADEQAALNIARSW |
| protein | LFLRSQEYKKYQTNKTTGNTDKRAFVETWQSFYRKKLKEVWKPAV (SEQ ID |
| | NO: 57) |
| | MEKRINKIRKKLSADNATKPVSRSGPMKTLLVRVMTDDLKKRLEKRRKKPEVMPQ |
| | VISNTSRANLNKLLTDYTEMKKAILHVYWEEFQKDPVGLMSRVAQPAPKNIDQRK |
| | LIPVKDGNERLTSSGFACSQCCQPLYVYKLEQVNDKGKPHTNYFGRCNVSEHERL |
| | ILLSPHKPEANDELVTYSLGKFGQRALDFYSIHVTRESNHPVKPLEQIGGNSCAS |
| | GPVGKALSDACMGAVASFLTKYQDIILEHQKVIKKNEKRLANLKDIASANGLAFP |
| | KITLPPQPHTKEGIEAYNNVVAQIVIWVNLNLWQKLKIGRDEAKPLQRLKGFPSF |
| | PLVERQANEVDWWDMVCNVKKLINEKKEDGKVFWQNLAGYKRQEALRPYLSSEED |
| | RKKGKKFARYQFGDLLLHLEKKHGEDWGKVYDEAWERIDKKVEGLSKHIKLEEER |
| | RSEDAQSKAALTDWLRAKASFVIEGLKEADKDEFCRCELKLQKWYGDLRGKPFAI |
| | EAENSILDISGFSKQYNCAFIWQKDGVKKLNLYLIINYFKGGKLRFKKIKPEAFE |
| | ANRFYTVINKKSGEIVPMEVNFNFDDPNLIILPLAFGKRQGREFIWNDLLSLETG |
| | SLKLANGRVIEKTLYNRRTRQDEPALFVALTFERREVLDSSNIKPMNLIGIDRGE |
| | NIPAVIALTDPEGCPLSRFKDSLGNPTHILRIGESYKEKQRTIQAKKEVEQRRAG |
| | GYSRKYASKAKNLADDMVRNTARDLLYYAVTQDAMLIFENLSRGFGRQGKRTEMA |
| | ERQYTRMEDWLTAKLAYEGLSKTYLSKTLAQYTSKTCSNCGFTITSADYDRVLEK |
| | LKKTATGWMTTINGKELKVEGQITYYNRYKRQNVVKDLSVELDRLSEESVNNDIS |
| | SWTKGRSGEALSLLKKRFSHRPVQEKFVCLNCGFETHADEQAALNIARSWLFLRS |
| | QEYKKYQTNKTTGNTDKRAFVETWQSFYRKKLKEVWKPAV (SEQ ID NO: |
| | 58) |
| | MQEIKRINKIRRRLVKDSNTKKAGKTGPMKTLLVRVMTPDLRERLENLRKKPENI |
| | PQPISNTSRANLNKLLTDYTEMKKAILHVYWEEFQKDPVGLMSRVAQPAPKNIDQ |
| | RKLIPVKDGNERLTSSGFACSQCCQPLYVYKLEQVNDKGKPHTNYFGRCNVSEHE |
| | RLILLSPHKPEANDELVTYSLGKFGQRALDFYSIHVTRESNHPVKPLEQIGGNSC |
| | ASGPVGKALSDACMGAVASFLTKYQDIILEHQKVIKKNEKRLANLKDIASANGLA |
| | FPKITLPPQPHTKEGIEAYNNVVAQIVIWVNLNLWQKLKIGRDEAKPLQRLKGFP |
| | SFPLVERQANEVDWWDMVCNVKKLINEKKEDGKVFWQNLAGYKRQEALRPYLSSE |
| | EDRKKGKKFARYQFGDLLLHLEKKHGEDWGKVYDEAWERIDKKVEGLSKHIKLEE |
| | ERRSEDAQSKAALTDWLRAKASFVIEGLKEADKDEFCRCELKLQKWYGDLRGKPF |
| | AIEAENRVVDISGFSIGSDGHSIQYRNLLAWKYLENGKREFYLLMNYGKKGRIRF |
| | TDGTDIKKSGKWQGLLYGGGKAKVIDLTFDPDDEQLIILPLAFGTRQGREFIWND |
| | LLSLETGLIKLANGRVIEKTIYNKKIGRDEPALFVALTFERREVVDPSNIKPMNL |
| | IGIDRGENIPAVIALTDPEGCPLSRFKDSLGNPTHILRIGESYKEKQRTIQAKKE |
| | VEQRRAGGYSRKYASKAKNLADDMVRNTARDLLYYAVTQDAMLIFENLSRGFGRQ |
| | GKRTFMAERQYTRMEDWLTAKLAYEGLSKTYLSKTLAQYTSKTCSNCGFTITSAD |
| | YDRVLEKLKKTATGWMTTINGKELKVEGQITYYNRYKRQNVVKDLSVELDRLSEE |
| | SVNNDISSWTKGRSGEALSLLKKRFSHRPVQEKFVCLNCGFETHADEQAALNIAR |
| | SWLFLRSQEYKKYQTNKTTGNTDKRAFVETWQSFYRKKLKEVWKPAV (SEQ ID |
| | NO: 59) |
| substitution | MQEIKRINKIRRRLVKDSNTKKAGKTGPMKTLLVRVMTPDLRERLENLRKKPENI |
| of L379R, | PQPISNTSRANLNKLLTDYTEMKKAILHVYWEEFQKDPVGLMSRVAQPAPKNIDQ |
| a | RKLIPVKDGNERLTSSGFACSQCCQPLYVYKLEQVNDKGKPHTNYFGRCNVSEHE |
| substitution | RLILLSPHKPEANDELVTYSLGKFGQRALDFYSIHVTRESNHPVKPLEQIGGNSC |
| of C477K, | ASGPVGKALSDACMGAVASFLTKYQDIILEHQKVIKKNEKRLANLKDIASANGLA |
| a | FPKITLPPQPHTKEGIEAYNNVVAQIVIWVNLNLWQKLKIGRDEAKPLQRLKGFP |
| substitution | SFPLVERQANEVDWWDMVCNVKKLINEKKEDGKVFWQNLAGYKRQEALRPYLSSE |
| of A708K, | EDRKKGKKFARYQFGDLLLHLEKKHGEDWGKVYDEAWERIDKKVEGLSKHIKLEE |
| a deletion | ERRSEDAQSKAALTDWLRAKASFVIEGLKEADKDEFKRCELKLQKWYGDLRGKPF |
| of P at | AIEAENSILDISGFSKQYNCAFIWQKDGVKKLNLYLIINYFKGGKLRFKKIKPEA |
| position | FEANRFYTVINKKSGEIVPMEVNFNFDDPNLIILPLAFGKRQGREFIWNDLLSLE |
| 793 and a | TGSLKLANGRVIEKPLYNRRTRQDEPALFVALTFERREVLDSSNIKPMNLIGIDR |
| substitution | GENIPAVIALTDPEGCPLSRFKDSLGNPTHILRIGESYKEKQRTIQAKKEVEQRR |
| of T620P | AGGYSRKYASKAKNLADDMVRNTARDLLYYAVTQDAMLIFENLSRGFGRQGKRTF |
| of SEQ ID | MAERQYTRMEDWLTAKLAYEGLSKTYLSKTLAQYTSKTCSNCGFTITSADYDRVL |
| NO: 2 | EKLKKTATGWMTTINGKELKVEGQITYYNRYKRQNVVKDLSVELDRLSEESVNND |
| | ISSWTKGRSGEALSLLKKRFSHRPVQEKFVCLNCGFETHADEQAALNIARSWLFL |
| | RSQEYKKYQTNKTTGNTDKRAFVETWQSFYRKKLKEVWKPAV (SEQ ID NO: |
| | 60) |
| substitution | MQEIKRINKIRRRLVKDSNTKKAGKTGPMKTLLVRVMTPDLRERLENLRKKPENI |
| of M771A | PQPISNTSRANLNKLLTDYTEMKKAILHVYWEEFQKDPVGLMSRVAQPAPKNIDQ |
| of SEQ ID | RKLIPVKDGNERLTSSGFACSQCCQPLYVYKLEQVNDKGKPHTNYFGRCNVSEHE |
| NO: 2. | RLILLSPHKPEANDELVTYSLGKFGQRALDFYSIHVTRESNHPVKPLEQIGGNSC |
| | ASGPVGKALSDACMGAVASFLTKYQDIILEHQKVIKKNEKRLANLKDIASANGLA |
| | FPKITLPPQPHTKEGIEAYNNVVAQIVIWVNLNLWQKLKIGRDEAKPLQRLKGFP |
| | SFPLVERQANEVDWWDMVCNVKKLINEKKEDGKVFWQNLAGYKRQEALLPYLSSE |
| | EDRKKGKKFARYQFGDLLLHLEKKHGEDWGKVYDEAWERIDKKVEGLSKHIKLEE |
| | ERRSEDAQSKAALTDWLRAKASFVIEGLKEADKDEFCRCELKLQKWYGDLRGKPF |
| | AIEAENSILDISGFSKQYNCAFIWQKDGVKKLNLYLIINYFKGGKLRFKKIKPEA |
| | FEANRFYTVINKKSGEIVPMEVNFNFDDPNLIILPLAFGKRQGREFIWNDLLSLE |
| | TGSLKLANGRVIEKTLYNRRTRQDEPALFVALTFERREVLDSSNIKPMNLIGIDR |
| | GENIPAVIALTDPEGCPLSRFKDSLGNPTHILRIGESYKEKQRTIQAAKEVEQRR |
| | AGGYSRKYASKAKNLADDMVRNTARDLLYYAVTQDAMLIFENLSRGFGRQGKRTF |
| | AAERQYTRMEDWLTAKLAYEGLPSKTYLSKTLAQYTSKTCSNCGFTITSADYDRV |
| | LEKLKKTATGWMTTINGKELKVEGQITYYNRYKRQNVVKDLSVELDRLSEESVNN |
| | DISSWTKGRSGEALSLLKKRFSHRPVQEKFVCLNCGFETHADEQAALNIARSWLF |
| | LRSQEYKKYQTNKTTGNTDKRAFVETWQSFYRKKLKEVWKPA (SEQ ID NO: |
| | 61) |
| substitution | MQEIKRINKIRRRLVKDSNTKKAGKTGPMKTLLVRVMTPDLRERLENLRKKPENI |
| of L379R, | PQPISNTSRANLNKLLTDYTEMKKAILHVYWEEFQKDPVGLMSRVAQPAPKNIDQ |
| a | RKLIPVKDGNERLTSSGFACSQCCQPLYVYKLEQVNDKGKPHTNYFGRCNVSEHE |
| substitution | RLILLSPHKPEANDELVTYSLGKFGQRALDFYSIHVTRESNHPVKPLEQIGGNSC |
| of A708K, | ASGPVGKALSDACMGAVASFLTKYQDIILEHQKVIKKNEKRLANLKDIASANGLA |
| a deletion | FPKITLPPQPHTKEGIEAYNNVVAQIVIWVNLNLWQKLKIGRDEAKPLQRLKGFP |
| of P at | SFPLVERQANEVDWWDMVCNVKKLINEKKEDGKVFWQNLAGYKRQEALRPYLSSE |
| position | EDRKKGKKFARYQFGDLLLHLEKKHGEDWGKVYDEAWERIDKKVEGLSKHIKLEE |
| 793 and a | ERRSEDAQSKAALTDWLRAKASFVIEGLKEADKDEFCRCELKLQKWYGDLRGKPF |
| substitution | AIEAENSILDISGFSKQYNCAFIWQKDGVKKLNLYLIINYFKGGKLRFKKIKPEA |
| of D732N | FEANRFYTVINKKSGEIVPMEVNFNFDDPNLIILPLAFGKRQGREFIWNDLLSLE |
| of SEQ ID | TGSLKLANGRVIEKTLYNRRTRQDEPALFVALTFERREVLDSSNIKPMNLIGIDR |
| NO: 2. | GENIPAVIALTDPEGCPLSRFKDSLGNPTHILRIGESYKEKQRTIQAKKEVEQRR |
| | AGGYSRKYASKAKNLANDMVRNTARDLLYYAVTQDAMLIFENLSRGFGRQGKRTF |
| | MAERQYTRMEDWLTAKLAYEGLSKTYLSKTLAQYTSKTCSNCGFTITSADYDRVL |
| | EKLKKTATGWMTTINGKELKVEGQITYYNRYKRQNVVKDLSVELDRLSEESVNND |
| | ISSWTKGRSGEALSLLKKRFSHRPVQEKFVCLNCGFETHADEQAALNIARSWLFL |
| | RSQEYKKYQTNKTTGNTDKRAFVETWQSFYRKKLKEVWKPAV (SEQ ID NO: |
| | 62) |
| substitution | MQEIKRINKIRRRLVKDSNTKKAGKTGPMKTLLVRVMTPDLRERLENLRKKPENI |
| of W782Q | PQPISNTSRANLNKLLTDYTEMKKAILHVYWEEFQKDPVGLMSRVAQPAPKNIDQ |
| of SEQ ID | RKLIPVKDGNERLTSSGFACSQCCQPLYVYKLEQVNDKGKPHTNYFGRCNVSEHE |
| NO: 2. | RLILLSPHKPEANDELVTYSLGKFGQRALDFYSIHVTRESNHPVKPLEQIGGNSC |
| | ASGPVGKALSDACMGAVASFLTKYQDIILEHQKVIKKNEKRLANLKDIASANGLA |
| | FPKITLPPQPHTKEGIEAYNNVVAQIVIWVNLNLWQKLKIGRDEAKPLQRLKGFP |
| | SFPLVERQANEVDWWDMVCNVKKLINEKKEDGKVFWQNLAGYKRQEALLPYLSSE |
| | EDRKKGKKFARYQFGDLLLHLEKKHGEDWGKVYDEAWERIDKKVEGLSKHIKLEE |
| | ERRSEDAQSKAALTDWLRAKASFVIEGLKEADKDEFCRCELKLQKWYGDLRGKPF |
| | AIEAENSILDISGFSKQYNCAFIWQKDGVKKLNLYLIINYFKGGKLRFKKIKPEA |
| | FEANRFYTVINKKSGEIVPMEVNFNFDDPNLIILPLAFGKRQGREFIWNDLLSLE |
| | TGSLKLANGRVIEKTLYNRRTRQDEPALFVALTFERREVLDSSNIKPMNLIGIDR |
| | GENIPAVIALTDPEGCPLSRFKDSLGNPTHILRIGESYKEKQRTIQAAKEVEQRR |
| | AGGYSRKYASKAKNLADDMVRNTARDLLYYAVTQDAMLIFENLSRGFGRQGKRTF |
| | MAERQYTRMEDQLTAKLAYEGLPSKTYLSKTLAQYTSKTCSNCGFTITSADYDRV |
| | LEKLKKTATGWMTTINGKELKVEGQITYYNRYKRQNVVKDLSVELDRLSEESVNN |
| | DISSWTKGRSGEALSLLKKRFSHRPVQEKFVCLNCGFETHADEQAALNIARSWLF |
| | LRSQEYKKYQTNKTTGNTDKRAFVETWQSFYRKKLKEVWKPAV (SEQ ID NO: |
| | 63) |
| substitution | MQEIKRINKIRRRLVKDSNTKKAGKTGPMKTLLVRVMTPDLRERLENLRKKPENI |
| of M771Q | PQPISNTSRANLNKLLTDYTEMKKAILHVYWEEFQKDPVGLMSRVAQPAPKNIDQ |
| of SEQ ID | RKLIPVKDGNERLTSSGFACSQCCQPLYVYKLEQVNDKGKPHTNYFGRCNVSEHE |
| NO: 2 | RLILLSPHKPEANDELVTYSLGKFGQRALDFYSIHVTRESNHPVKPLEQIGGNSC |
| | ASGPVGKALSDACMGAVASFLTKYQDIILEHQKVIKKNEKRLANLKDIASANGLA |
| | FPKITLPPQPHTKEGIEAYNNVVAQIVIWVNLNLWQKLKIGRDEAKPLQRLKGFP |
| | SFPLVERQANEVDWWDMVCNVKKLINEKKEDGKVFWQNLAGYKRQEALLPYLSSE |
| | EDRKKGKKFARYQFGDLLLHLEKKHGEDWGKVYDEAWERIDKKVEGLSKHIKLEE |
| | ERRSEDAQSKAALTDWLRAKASFVIEGLKEADKDEFCRCELKLQKWYGDLRGKPF |
| | AIEAENSILDISGFSKQYNCAFIWQKDGVKKLNLYLIINYFKGGKLRFKKIKPEA |
| | FEANRFYTVINKKSGEIVPMEVNFNFDDPNLIILPLAFGKRQGREFIWNDLLSLE |
| | TGSLKLANGRVIEKTLYNRRTRQDEPALFVALTFERREVLDSSNIKPMNLIGIDR |
| | GENIPAVIALTDPEGCPLSRFKDSLGNPTHILRIGESYKEKQRTIQAAKEVEQRR |
| | AGGYSRKYASKAKNLADDMVRNTARDLLYYAVTQDAMLIFENLSRGFGRQGKRTF |
| | QAERQYTRMEDWLTAKLAYEGLPSKTYLSKTLAQYTSKTCSNCGFTITSADYDRV |
| | LEKLKKTATGWMTTINGKELKVEGQITYYNRYKRQNVVKDLSVELDRLSEESVNN |
| | DISSWTKGRSGEALSLLKKRFSHRPVQEKFVCLNCGFETHADEQAALNIARSWLF |
| | LRSQEYKKYQTNKTTGNTDKRAFVETWQSFYRKKLKEVWKPAV (SEQ ID NO: |
| | 64) |
| substitution | MQEIKRINKIRRRLVKDSNTKKAGKTGPMKTLLVRVMTPDLRERLENLRKKPENI |
| of R458I | PQPISNTSRANLNKLLTDYTEMKKAILHVYWEEFQKDPVGLMSRVAQPAPKNIDQ |
| and a | RKLIPVKDGNERLTSSGFACSQCCQPLYVYKLEQVNDKGKPHTNYFGRCNVSEHE |
| substitution | RLILLSPHKPEANDELVTYSLGKFGQRALDFYSIHVTRESNHPVKPLEQIGGNSC |
| of A739V | ASGPVGKALSDACMGAVASFLTKYQDIILEHQKVIKKNEKRLANLKDIASANGLA |
| of SEQ ID | FPKITLPPQPHTKEGIEAYNNVVAQIVIWVNLNLWQKLKIGRDEAKPLQRLKGFP |
| NO: 2. | SFPLVERQANEVDWWDMVCNVKKLINEKKEDGKVFWQNLAGYKRQEALLPYLSSE |
| | EDRKKGKKFARYQFGDLLLHLEKKHGEDWGKVYDEAWERIDKKVEGLSKHIKLEE |
| | ERRSEDAQSKAALTDWLIAKASFVIEGLKEADKDEFCRCELKLQKWYGDLRGKPF |
| | AIEAENSILDISGFSKQYNCAFIWQKDGVKKLNLYLIINYFKGGKLRFKKIKPEA |
| | FEANRFYTVINKKSGEIVPMEVNFNFDDPNLIILPLAFGKRQGREFIWNDLLSLE |
| | TGSLKLANGRVIEKTLYNRRTRQDEPALFVALTFERREVLDSSNIKPMNLIGIDR |
| | GENIPAVIALTDPEGCPLSRFKDSLGNPTHILRIGESYKEKQRTIQAAKEVEQRR |
| | AGGYSRKYASKAKNLADDMVRNTVRDLLYYAVTQDAMLIFENLSRGFGRQGKRTF |
| | MAERQYTRMEDWLTAKLAYEGLPSKTYLSKTLAQYTSKTCSNCGFTITSADYDRV |
| | LEKLKKTATGWMTTINGKELKVEGQITYYNRYKRQNVVKDLSVELDRLSEESVNN |
| | DISSWTKGRSGEALSLLKKRFSHRPVQEKFVCLNCGFETHADEQAALNIARSWLF |
| | LRSQEYKKYQTNKTTGNTDKRAFVETWQSFYRKKLKEVWKPAV (SEQ ID NO: |
| | 65) |
| L379R, a | MQEIKRINKIRRRLVKDSNTKKAGKTGPMKTLLVRVMTPDLRERLENLRKKPENI |
| substitution | PQPISNTSRANLNKLLTDYTEMKKAILHVYWEEFQKDPVGLMSRVAQPAPKNIDQ |
| of A708K, | RKLIPVKDGNERLTSSGFACSQCCQPLYVYKLEQVNDKGKPHTNYFGRCNVSEHE |
| a deletion | RLILLSPHKPEANDELVTYSLGKFGQRALDFYSIHVTRESNHPVKPLEQIGGNSC |
| of P at | ASGPVGKALSDACMGAVASFLTKYQDIILEHQKVIKKNEKRLANLKDIASANGLA |
| position | FPKITLPPQPHTKEGIEAYNNVVAQIVIWVNLNLWQKLKIGRDEAKPLQRLKGFP |
| 793 and a | SFPLVERQANEVDWWDMVCNVKKLINEKKEDGKVFWQNLAGYKRQEALRPYLSSE |
| substitution | EDRKKGKKFARYQFGDLLLHLEKKHGEDWGKVYDEAWERIDKKVEGLSKHIKLEE |
| of M771N | ERRSEDAQSKAALTDWLRAKASFVIEGLKEADKDEFCRCELKLQKWYGDLRGKPF |
| of SEQ ID | AIEAENSILDISGFSKQYNCAFIWQKDGVKKLNLYLIINYFKGGKLRFKKIKPEA |
| NO: 2 | FEANRFYTVINKKSGEIVPMEVNFNFDDPNLIILPLAFGKRQGREFIWNDLLSLE |
| | TGSLKLANGRVIEKTLYNRRTRQDEPALFVALTFERREVLDSSNIKPMNLIGIDR |
| | GENIPAVIALTDPEGCPLSRFKDSLGNPTHILRIGESYKEKQRTIQAKKEVEQRR |
| | AGGYSRKYASKAKNLADDMVRNTARDLLYYAVTQDAMLIFENLSRGFGRQGKRTF |
| | NAERQYTRMEDWLTAKLAYEGLSKTYLSKTLAQYTSKTCSNCGFTITSADYDRVL |
| | EKLKKTATGWMTTINGKELKVEGQITYYNRYKRQNVVKDLSVELDRLSEESVNND |
| | ISSWTKGRSGEALSLLKKRFSHRPVQEKFVCLNCGFETHADEQAALNIARSWLFL |
| | RSQEYKKYQTNKTTGNTDKRAFVETWQSFYRKKLKEVWKPAV (SEQ ID NO: |
| | 66) |
| substitution | MQEIKRINKIRRRLVKDSNTKKAGKTGPMKTLLVRVMTPDLRERLENLRKKPENI |
| of L379R, | PQPISNTSRANLNKLLTDYTEMKKAILHVYWEEFQKDPVGLMSRVAQPAPKNIDQ |
| a | RKLIPVKDGNERLTSSGFACSQCCQPLYVYKLEQVNDKGKPHTNYFGRCNVSEHE |
| substitution | RLILLSPHKPEANDELVTYSLGKFGQRALDFYSIHVTRESNHPVKPLEQIGGNSC |
| of A708K, | ASGPVGKALSDACMGAVASFLTKYQDIILEHQKVIKKNEKRLANLKDIASANGLA |
| a deletion | FPKITLPPQPHTKEGIEAYNNVVAQIVIWVNLNLWQKLKIGRDEAKPLQRLKGFP |
| of P at | SFPLVERQANEVDWWDMVCNVKKLINEKKEDGKVFWQNLAGYKRQEALRPYLSSE |
| position | EDRKKGKKFARYQFGDLLLHLEKKHGEDWGKVYDEAWERIDKKVEGLSKHIKLEE |
| 793 and a | ERRSEDAQSKAALTDWLRAKASFVIEGLKEADKDEFCRCELKLQKWYGDLRGKPF |
| substitution | AIEAENSILDISGFSKQYNCAFIWQKDGVKKLNLYLIINYFKGGKLRFKKIKPEA |
| of A739T | FEANRFYTVINKKSGEIVPMEVNFNFDDPNLIILPLAFGKRQGREFIWNDLLSLE |
| of SEQ ID | TGSLKLANGRVIEKTLYNRRTRQDEPALFVALTFERREVLDSSNIKPMNLIGIDR |
| NO: 2 | GENIPAVIALTDPEGCPLSRFKDSLGNPTHILRIGESYKEKQRTIQAKKEVEQRR |
| | AGGYSRKYASKAKNLADDMVRNTTRDLLYYAVTQDAMLIFENLSRGFGRQGKRTF |
| | MAERQYTRMEDWLTAKLAYEGLSKTYLSKTLAQYTSKTCSNCGFTITSADYDRVL |
| | EKLKKTATGWMTTINGKELKVEGQITYYNRYKRQNVVKDLSVELDRLSEESVNND |
| | ISSWTKGRSGEALSLLKKRFSHRPVQEKFVCLNCGFETHADEQAALNIARSWLFL |
| | RSQEYKKYQTNKTTGNTDKRAFVETWQSFYRKKLKEVWKPAV (SEQ ID NO: |
| | 67) |
| substitution | MQEIKRINKIRRRLVKDSNTKKAGKTGPMKTLLVRVMTPDLRERLENLRKKPENI |
| of L379R, | PQPISNTSRANLNKLLTDYTEMKKAILHVYWEEFQKDPVGLMSRVAQPAPKNIDQ |
| a | RKLIPVKDGNERLTSSGFACSQCCQPLYVYKLEQVNDKGKPHTNYFGRCNVSEHE |
| substitution | RLILLSPHKPEANDELVTYSLGKFGQRALDFYSIHVTRESNHPVKPLEQIGGNSC |
| of C477K, | ASGPVGKALSDACMGAVASFLTKYQDIILEHQKVIKKNEKRLANLKDIASANGLA |
| a | FPKITLPPQPHTKEGIEAYNNVVAQIVIWVNLNLWQKLKIGRDEAKPLQRLKGFP |
| substitution | SFPLVERQANEVDWWDMVCNVKKLINEKKEDGKVFWQNLAGYKRQEALRPYLSSE |
| of A708K, | EDRKKGKKFARYQFGDLLLHLEKKHGEDWGKVYDEAWERIDKKVEGLSKHIKLEE |
| a deletion | ERRSEDAQSKAALTDWLRAKASFVIEGLKEADKDEFKRCELKLQKWYGSLRGKPF |
| of P at | AIEAENSILDISGFSKQYNCAFIWQKDGVKKLNLYLIINYFKGGKLRFKKIKPEA |
| position | FEANRFYTVINKKSGEIVPMEVNFNFDDPNLIILPLAFGKRQGREFIWNDLLSLE |
| 793 and a | TGSLKLANGRVIEKTLYNRRTRQDEPALFVALTFERREVLDSSNIKPMNLIGIDR |
| substitution | GENIPAVIALTDPEGCPLSRFKDSLGNPTHILRIGESYKEKQRTIQAKKEVEQRR |
| of D489S | AGGYSRKYASKAKNLADDMVRNTARDLLYYAVTQDAMLIFENLSRGFGRQGKRTF |
| of SEQ ID | MAERQYTRMEDWLTAKLAYEGLSKTYLSKTLAQYTSKTCSNCGFTITSADYDRVL |
| NO: 2. | EKLKKTATGWMTTINGKELKVEGQITYYNRYKRQNVVKDLSVELDRLSEESVNND |
| | ISSWTKGRSGEALSLLKKRFSHRPVQEKFVCLNCGFETHADEQAALNIARSWLFL |
| | RSQEYKKYQTNKTTGNTDKRAFVETWQSFYRKKLKEVWKPAV (SEQ ID NO: |
| | 68) |
| substitution | MQEIKRINKIRRRLVKDSNTKKAGKTGPMKTLLVRVMTPDLRERLENLRKKPENI |
| of L379R, | PQPISNTSRANLNKLLTDYTEMKKAILHVYWEEFQKDPVGLMSRVAQPAPKNIDQ |
| a | RKLIPVKDGNERLTSSGFACSQCCQPLYVYKLEQVNDKGKPHTNYFGRCNVSEHE |
| substitution | RLILLSPHKPEANDELVTYSLGKFGQRALDFYSIHVTRESNHPVKPLEQIGGNSC |
| of C477K, | ASGPVGKALSDACMGAVASFLTKYQDIILEHQKVIKKNEKRLANLKDIASANGLA |
| a | FPKITLPPQPHTKEGIEAYNNVVAQIVIWVNLNLWQKLKIGRDEAKPLQRLKGFP |
| substitution | SFPLVERQANEVDWWDMVCNVKKLINEKKEDGKVFWQNLAGYKRQEALRPYLSSE |
| of A708K, | EDRKKGKKFARYQFGDLLLHLEKKHGEDWGKVYDEAWERIDKKVEGLSKHIKLEE |
| a deletion | ERRSEDAQSKAALTDWLRAKASFVIEGLKEADKDEFKRCELKLQKWYGDLRGKPF |
| of P at | AIEAENSILDISGFSKQYNCAFIWQKDGVKKLNLYLIINYFKGGKLRFKKIKPEA |
| position | FEANRFYTVINKKSGEIVPMEVNFNFDDPNLIILPLAFGKRQGREFIWNDLLSLE |
| 793 and a | TGSLKLANGRVIEKTLYNRRTRQDEPALFVALTFERREVLDSSNIKPMNLIGIDR |
| substitution | GENIPAVIALTDPEGCPLSRFKDSLGNPTHILRIGESYKEKQRTIQAKKEVEQRR |
| of D732N | AGGYSRKYASKAKNLANDMVRNTARDLLYYAVTQDAMLIFENLSRGFGRQGKRTF |
| of SEQ ID | MAERQYTRMEDWLTAKLAYEGLSKTYLSKTLAQYTSKTCSNCGFTITSADYDRVL |
| NO: 2. | EKLKKTATGWMTTINGKELKVEGQITYYNRYKRQNVVKDLSVELDRLSEESVNND |
| | ISSWTKGRSGEALSLLKKRFSHRPVQEKFVCLNCGFETHADEQAALNIARSWLFL |
| | RSQEYKKYQTNKTTGNTDKRAFVETWQSFYRKKLKEVWKPAV (SEQ ID NO: |
| | 69) |
| substitution | MQEIKRINKIRRRLVKDSNTKKAGKTGPMKTLLVRVMTPDLRERLENLRKKPENI |
| of V711K | PQPISNTSRANLNKLLTDYTEMKKAILHVYWEEFQKDPVGLMSRVAQPAPKNIDQ |
| of SEQ ID | RKLIPVKDGNERLTSSGFACSQCCQPLYVYKLEQVNDKGKPHTNYFGRCNVSEHE |
| NO: 2. | RLILLSPHKPEANDELVTYSLGKFGQRALDFYSIHVTRESNHPVKPLEQIGGNSC |
| | ASGPVGKALSDACMGAVASFLTKYQDIILEHQKVIKKNEKRLANLKDIASANGLA |
| | FPKITLPPQPHTKEGIEAYNNVVAQIVIWVNLNLWQKLKIGRDEAKPLQRLKGFP |
| | SFPLVERQANEVDWWDMVCNVKKLINEKKEDGKVFWQNLAGYKRQEALLPYLSSE |
| | EDRKKGKKFARYQFGDLLLHLEKKHGEDWGKVYDEAWERIDKKVEGLSKHIKLEE |
| | ERRSEDAQSKAALTDWLRAKASFVIEGLKEADKDEFCRCELKLQKWYGDLRGKPF |
| | AIEAENSILDISGFSKQYNCAFIWQKDGVKKLNLYLIINYFKGGKLRFKKIKPEA |
| | FEANRFYTVINKKSGEIVPMEVNFNFDDPNLIILPLAFGKRQGREFIWNDLLSLE |
| | TGSLKLANGRVIEKTLYNRRTRQDEPALFVALTFERREVLDSSNIKPMNLIGIDR |
| | GENIPAVIALTDPEGCPLSRFKDSLGNPTHILRIGESYKEKQRTIQAAKEKEQRR |
| | AGGYSRKYASKAKNLADDMVRNTARDLLYYAVTQDAMLIFENLSRGFGRQGKRTF |
| | MAERQYTRMEDWLTAKLAYEGLPSKTYLSKTLAQYTSKTCSNCGFTITSADYDRV |
| | LEKLKKTATGWMTTINGKELKVEGQITYYNRYKRQNVVKDLSVELDRLSEESVNN |
| | DISSWTKGRSGEALSLLKKRFSHRPVQEKFVCLNCGFETHADEQAALNIARSWLF |
| | LRSQEYKKYQTNKTTGNTDKRAFVETWQSFYRKKLKEVWKPAV (SEQ ID NO: |
| | 70) |
| substitution | MQEIKRINKIRRRLVKDSNTKKAGKTGPMKTLLVRVMTPDLRERLENLRKKPENI |
| of L379R, | PQPISNTSRANLNKLLTDYTEMKKAILHVYWEEFQKDPVGLMSRVAQPAPKNIDQ |
| a | RKLIPVKDGNERLTSSGFACSQCCQPLYVYKLEQVNDKGKPHTNYFGRCNVSEHE |
| substitution | RLILLSPHKPEANDELVTYSLGKFGQRALDFYSIHVTRESNHPVKPLEQIGGNSC |
| of C477K, | ASGPVGKALSDACMGAVASFLTKYQDIILEHQKVIKKNEKRLANLKDIASANGLA |
| a | FPKITLPPQPHTKEGIEAYNNVVAQIVIWVNLNLWQKLKIGRDEAKPLQRLKGFP |
| substitution | SFPLVERQANEVDWWDMVCNVKKLINEKKEDGKVFWQNLAGYKRQEALRPYLSSE |
| of A708K, | EDRKKGKKFARYQFGDLLLHLEKKHGEDWGKVYDEAWERIDKKVEGLSKHIKLEE |
| a deletion | ERRSEDAQSKAALTDWLRAKASFVIEGLKEADKDEFKRCELKLQKWYGDLRGKPF |
| of P at | AIEAENSILDISGFSKQYNCAFIWQKDGVKKLNLYLIINYFKGGKLRFKKIKPEA |
| position | FEANRFYTVINKKSGEIVPMEVNFNFDDPNLIILPLAFGKRQGREFIWNDLLSLE |
| 793 and a | TGSLKLANGRVIEKTLYNRRTRQDEPALFVALTFERREVLDSSNIKPMNLIGIDR |
| substitution | GENIPAVIALTDPEGCPLSRFKDSLGNPTHILRIGESYKEKQRTIQAKKEVEQRR |
| of Y797L | AGGYSRKYASKAKNLADDMVRNTARDLLYYAVTQDAMLIFENLSRGFGRQGKRTF |
| of SEQ ID | MAERQYTRMEDWLTAKLAYEGLSKILLSKTLAQYTSKTCSNCGFTITSADYDRVL |
| NO: 2. | EKLKKTATGWMTTINGKELKVEGQITYYNRYKRQNVVKDLSVELDRLSEESVNND |
| | ISSWTKGRSGEALSLLKKRFSHRPVQEKFVCLNCGFETHADEQAALNIARSWLFL |
| | RSQEYKKYQTNKTTGNTDKRAFVETWQSFYRKKLKEVWKPAV (SEQ ID NO: |
| | 71) |
| 119: | MQEIKRINKIRRRLVKDSNTKKAGKTGPMKTLLVRVMTPDLRERLENLRKKPENI |
| substitution | PQPISNTSRANLNKLLTDYTEMKKAILHVYWEEFQKDPVGLMSRVAQPAPKNIDQ |
| of L379R, | RKLIPVKDGNERLTSSGFACSQCCQPLYVYKLEQVNDKGKPHTNYFGRCNVSEHE |
| a | RLILLSPHKPEANDELVTYSLGKFGQRALDFYSIHVTRESNHPVKPLEQIGGNSC |
| substitution | ASGPVGKALSDACMGAVASFLTKYQDIILEHQKVIKKNEKRLANLKDIASANGLA |
| of A708K | FPKITLPPQPHTKEGIEAYNNVVAQIVIWVNLNLWQKLKIGRDEAKPLQRLKGFP |
| and a | SFPLVERQANEVDWWDMVCNVKKLINEKKEDGKVFWQNLAGYKRQEALRPYLSSE |
| deletion of | EDRKKGKKFARYQFGDLLLHLEKKHGEDWGKVYDEAWERIDKKVEGLSKHIKLEE |
| P at | ERRSEDAQSKAALTDWLRAKASFVIEGLKEADKDEFCRCELKLQKWYGDLRGKPF |
| position | AIEAENSILDISGFSKQYNCAFIWQKDGVKKLNLYLIINYFKGGKLRFKKIKPEA |
| 793 of SEQ | FEANRFYTVINKKSGEIVPMEVNFNFDDPNLIILPLAFGKRQGREFIWNDLLSLE |
| ID NO: 2. | TGSLKLANGRVIEKTLYNRRTRQDEPALFVALTFERREVLDSSNIKPMNLIGIDR |
| | GENIPAVIALTDPEGCPLSRFKDSLGNPTHILRIGESYKEKQRTIQAKKEVEQRR |
| | AGGYSRKYASKAKNLADDMVRNTARDLLYYAVTQDAMLIFENLSRGFGRQGKRTF |
| | MAERQYTRMEDWLTAKLAYEGLSKTYLSKTLAQYTSKTCSNCGFTITSADYDRVL |
| | EKLKKTATGWMTTINGKELKVEGQITYYNRYKRQNVVKDLSVELDRLSEESVNND |
| | ISSWTKGRSGEALSLLKKRFSHRPVQEKFVCLNCGFETHADEQAALNIARSWLFL |
| | RSQEYKKYQTNKTTGNTDKRAFVETWQSFYRKKLKEVWKPAV (SEQ ID NO: |
| | 72) |
| substitution | MQEIKRINKIRRRLVKDSNTKKAGKTGPMKTLLVRVMTPDLRERLENLRKKPENI |
| of L379R, | PQPISNTSRANLNKLLTDYTEMKKAILHVYWEEFQKDPVGLMSRVAQPAPKNIDQ |
| a | RKLIPVKDGNERLTSSGFACSQCCQPLYVYKLEQVNDKGKPHTNYFGRCNVSEHE |
| substitution | RLILLSPHKPEANDELVTYSLGKFGQRALDFYSIHVTRESNHPVKPLEQIGGNSC |
| of C477K, | ASGPVGKALSDACMGAVASFLTKYQDIILEHQKVIKKNEKRLANLKDIASANGLA |
| a | FPKITLPPQPHTKEGIEAYNNVVAQIVIWVNLNLWQKLKIGRDEAKPLQRLKGFP |
| substitution | SFPLVERQANEVDWWDMVCNVKKLINEKKEDGKVFWQNLAGYKRQEALRPYLSSE |
| of A708K, | EDRKKGKKFARYQFGDLLLHLEKKHGEDWGKVYDEAWERIDKKVEGLSKHIKLEE |
| a deletion | ERRSEDAQSKAALTDWLRAKASFVIEGLKEADKDEFKRCELKLQKWYGDLRGKPF |
| of P at | AIEAENSILDISGFSKQYNCAFIWQKDGVKKLNLYLIINYFKGGKLRFKKIKPEA |
| position | FEANRFYTVINKKSGEIVPMEVNFNFDDPNLIILPLAFGKRQGREFIWNDLLSLE |
| 793 and a | TGSLKLANGRVIEKTLYNRRTRQDEPALFVALTFERREVLDSSNIKPMNLIGIDR |
| substitution | GENIPAVIALTDPEGCPLSRFKDSLGNPTHILRIGESYKEKQRTIQAKKEVEQRR |
| of M771N | AGGYSRKYASKAKNLADDMVRNTARDLLYYAVTQDAMLIFENLSRGFGRQGKRTF |
| of SEQ ID | NAERQYTRMEDWLTAKLAYEGLSKTYLSKTLAQYTSKTCSNCGFTITSADYDRVL |
| NO: 2. | EKLKKTATGWMTTINGKELKVEGQITYYNRYKRQNVVKDLSVELDRLSEESVNND |
| | ISSWTKGRSGEALSLLKKRFSHRPVQEKFVCLNCGFETHADEQAALNIARSWLFL |
| | RSQEYKKYQTNKTTGNTDKRAFVETWQSFYRKKLKEVWKPAV (SEQ ID NO: |
| | 73) |
| substitution | MQEIKRINKIRRRLVKDSNTKKAGKTGPMKTLLVRVMTPDLRERLENLRKKPENI |
| of A708K, | PQPISNTSRANLNKLLTDYTEMKKAILHVYWEEFQKDPVGLMSRVAQPAPKNIDQ |
| a deletion | RKLIPVKDGNERLTSSGFACSQCCQPLYVYKLEQVNDKGKPHTNYFGRCNVSEHE |
| of P at | RLILLSPHKPEANDELVTYSLGKFGQRALDFYSIHVTRESNHPVKPLEQIGGNSC |
| position | ASGPVGKALSDACMGAVASFLTKYQDIILEHQKVIKKNEKRLANLKDIASANGLA |
| 793 and a | FPKITLPPQPHTKEGIEAYNNVVAQIVIWVNLNLWQKLKIGRDEAKPLQRLKGFP |
| substitution | SFPLVERQANEVDWWDMVCNVKKLINEKKEDGKVFWQNLAGYKRQEALLPYLSSE |
| of E386S | EDRKKGKKFARYQFGDLLLHLEKKHGEDWGKVYDEAWERIDKKVEGLSKHIKLEE |
| of SEQ ID | ERRSEDAQSKAALTDWLRAKASFVIEGLKEADKDEFCRCELKLQKWYGDLRGKPF |
| NO: 2. | AIEAENSILDISGFSKQYNCAFIWQKDGVKKLNLYLIINYFKGGKLRFKKIKPEA |
| | FEANRFYTVINKKSGEIVPMEVNFNFDDPNLIILPLAFGKRQGREFIWNDLLSLE |
| | TGSLKLANGRVIEKTLYNRRTRQDEPALFVALTFERREVLDSSNIKPMNLIGIDR |
| | GENIPAVIALTDPEGCPLSRFKDSLGNPTHILRIGESYKEKQRTIQAKKEVEQRR |
| | AGGYSRKYASKAKNLADDMVRNTARDLLYYAVTQDAMLIFENLSRGFGRQGKRTF |
| | MAERQYTRMEDWLTAKLAYEGLSKTYLSKTLAQYTSKTCSNCGFTITSADYDRVL |
| | EKLKKTATGWMTTINGKELKVEGQITYYNRYKRQNVVKDLSVELDRLSEESVNND |
| | ISSWTKGRSGEALSLLKKRFSHRPVQEKFVCLNCGFETHADEQAALNIARSWLFL |
| | RSQEYKKYQTNKTTGNTDKRAFVETWQSFYRKKLKEVWKPAV (SEQ ID NO: |
| | 74) |
| substitution | MQEIKRINKIRRRLVKDSNTKKAGKTGPMKTLLVRVMTPDLRERLENLRKKPENI |
| of L379R, | PQPISNTSRANLNKLLTDYTEMKKAILHVYWEEFQKDPVGLMSRVAQPAPKNIDQ |
| a | RKLIPVKDGNERLTSSGFACSQCCQPLYVYKLEQVNDKGKPHTNYFGRCNVSEHE |
| substitution | RLILLSPHKPEANDELVTYSLGKFGQRALDFYSIHVTRESNHPVKPLEQIGGNSC |
| of C477K, | ASGPVGKALSDACMGAVASFLTKYQDIILEHQKVIKKNEKRLANLKDIASANGLA |
| a | FPKITLPPQPHTKEGIEAYNNVVAQIVIWVNLNLWQKLKIGRDEAKPLQRLKGFP |
| substitution | SFPLVERQANEVDWWDMVCNVKKLINEKKEDGKVFWQNLAGYKRQEALRPYLSSE |
| of A708K | EDRKKGKKFARYQFGDLLLHLEKKHGEDWGKVYDEAWERIDKKVEGLSKHIKLEE |
| and a | ERRSEDAQSKAALTDWLRAKASFVIEGLKEADKDEFKRCELKLQKWYGDLRGKPF |
| deletion of | AIEAENSILDISGFSKQYNCAFIWQKDGVKKLNLYLIINYFKGGKLRFKKIKPEA |
| P at | FEANRFYTVINKKSGEIVPMEVNFNFDDPNLIILPLAFGKRQGREFIWNDLLSLE |
| position | TGSLKLANGRVIEKTLYNRRTRQDEPALFVALTFERREVLDSSNIKPMNLIGIDR |
| 793 of SEQ | GENIPAVIALTDPEGCPLSRFKDSLGNPTHILRIGESYKEKQRTIQAKKEVEQRR |
| ID NO: 2. | AGGYSRKYASKAKNLADDMVRNTARDLLYYAVTQDAMLIFENLSRGFGRQGKRTF |
| | MAERQYTRMEDWLTAKLAYEGLSKTYLSKTLAQYTSKTCSNCGFTITSADYDRVL |
| | EKLKKTATGWMTTINGKELKVEGQITYYNRYKRQNVVKDLSVELDRLSEESVNND |
| | ISSWTKGRSGEALSLLKKRFSHRPVQEKFVCLNCGFETHADEQAALNIARSWLFL |
| | RSQEYKKYQTNKTTGNTDKRAFVETWQSFYRKKLKEVWKPAV (SEQ ID NO: |
| | 75) |
| substitution | MQEIKRINKIRRRLVKDSNTKKAGKTGPMKTLLVRVMTPDLRERLENLRKKPENI |
| of L792D | PQPISNTSRANLNKLLTDYTEMKKAILHVYWEEFQKDPVGLMSRVAQPAPKNIDQ |
| of SEQ ID | RKLIPVKDGNERLTSSGFACSQCCQPLYVYKLEQVNDKGKPHTNYFGRCNVSEHE |
| NO: 2. | RLILLSPHKPEANDELVTYSLGKFGQRALDFYSIHVTRESNHPVKPLEQIGGNSC |
| | ASGPVGKALSDACMGAVASFLTKYQDIILEHQKVIKKNEKRLANLKDIASANGLA |
| | FPKITLPPQPHTKEGIEAYNNVVAQIVIWVNLNLWQKLKIGRDEAKPLQRLKGFP |
| | SFPLVERQANEVDWWDMVCNVKKLINEKKEDGKVFWQNLAGYKRQEALLPYLSSE |
| | EDRKKGKKFARYQFGDLLLHLEKKHGEDWGKVYDEAWERIDKKVEGLSKHIKLEE |
| | ERRSEDAQSKAALTDWLRAKASFVIEGLKEADKDEFCRCELKLQKWYGDLRGKPF |
| | AIEAENSILDISGFSKQYNCAFIWQKDGVKKLNLYLIINYFKGGKLRFKKIKPEA |
| | FEANRFYTVINKKSGEIVPMEVNFNFDDPNLIILPLAFGKRQGREFIWNDLLSLE |
| | TGSLKLANGRVIEKTLYNRRTRQDEPALFVALTFERREVLDSSNIKPMNLIGIDR |
| | GENIPAVIALTDPEGCPLSRFKDSLGNPTHILRIGESYKEKQRTIQAAKEVEQRR |
| | AGGYSRKYASKAKNLADDMVRNTARDLLYYAVTQDAMLIFENLSRGFGRQGKRTF |
| | MAERQYTRMEDWLTAKLAYEGDPSKTYLSKTLAQYTSKTCSNCGFTITSADYDRV |
| | LEKLKKTATGWMTTINGKELKVEGQITYYNRYKRQNVVKDLSVELDRLSEESVNN |
| | DISSWTKGRSGEALSLLKKRFSHRPVQEKFVCLNCGFETHADEQAALNIARSWLF |
| | LRSQEYKKYQTNKTTGNTDKRAFVETWQSFYRKKLKEVWKPAV (SEQ ID NO: |
| | 76) |
| substitution | MQEIKRINKIRRRLVKDSNTKKAGKTGPMKTLLVRVMTPDLRERLENLRKKPENI |
| of G791F | PQPISNTSRANLNKLLTDYTEMKKAILHVYWEEFQKDPVGLMSRVAQPAPKNIDQ |
| of SEQ ID | RKLIPVKDGNERLTSSGFACSQCCQPLYVYKLEQVNDKGKPHTNYFGRCNVSEHE |
| NO: 2. | RLILLSPHKPEANDELVTYSLGKFGQRALDFYSIHVTRESNHPVKPLEQIGGNSC |
| | ASGPVGKALSDACMGAVASFLTKYQDIILEHQKVIKKNEKRLANLKDIASANGLA |
| | FPKITLPPQPHTKEGIEAYNNVVAQIVIWVNLNLWQKLKIGRDEAKPLQRLKGFP |
| | SFPLVERQANEVDWWDMVCNVKKLINEKKEDGKVFWQNLAGYKRQEALLPYLSSE |
| | EDRKKGKKFARYQFGDLLLHLEKKHGEDWGKVYDEAWERIDKKVEGLSKHIKLEE |
| | ERRSEDAQSKAALTDWLRAKASFVIEGLKEADKDEFCRCELKLQKWYGDLRGKPF |
| | AIEAENSILDISGFSKQYNCAFIWQKDGVKKLNLYLIINYFKGGKLRFKKIKPEA |
| | FEANRFYTVINKKSGEIVPMEVNFNFDDPNLIILPLAFGKRQGREFIWNDLLSLE |
| | TGSLKLANGRVIEKTLYNRRTRQDEPALFVALTFERREVLDSSNIKPMNLIGIDR |
| | GENIPAVIALTDPEGCPLSRFKDSLGNPTHILRIGESYKEKQRTIQAAKEVEQRR |
| | AGGYSRKYASKAKNLADDMVRNTARDLLYYAVTQDAMLIFENLSRGFGRQGKRTF |
| | MAERQYTRMEDWLTAKLAYEFLPSKTYLSKTLAQYTSKTCSNCGFTITSADYDRV |
| | LEKLKKTATGWMTTINGKELKVEGQITYYNRYKRQNVVKDLSVELDRLSEESVNN |
| | DISSWTKGRSGEALSLLKKRFSHRPVQEKFVCLNCGFETHADEQAALNIARSWLF |
| | LRSQEYKKYQTNKTTGNTDKRAFVETWQSFYRKKLKEVWKPAV (SEQ ID NO: |
| | 77) |
| substitution | MQEIKRINKIRRRLVKDSNTKKAGKTGPMKTLLVRVMTPDLRERLENLRKKPENI |
| of A708K, | PQPISNTSRANLNKLLTDYTEMKKAILHVYWEEFQKDPVGLMSRVAQPAPKNIDQ |
| a deletion | RKLIPVKDGNERLTSSGFACSQCCQPLYVYKLEQVNDKGKPHTNYFGRCNVSEHE |
| of P at | RLILLSPHKPEANDELVTYSLGKFGQRALDFYSIHVTRESNHPVKPLEQIGGNSC |
| position | ASGPVGKALSDACMGAVASFLTKYQDIILEHQKVIKKNEKRLANLKDIASANGLA |
| 793 and a | FPKITLPPQPHTKEGIEAYNNVVAQIVIWVNLNLWQKLKIGRDEAKPLQRLKGFP |
| substitution | SFPLVERQANEVDWWDMVCNVKKLINEKKEDGKVFWQNLAGYKRQEALLPYLSSE |
| of A739V | EDRKKGKKFARYQFGDLLLHLEKKHGEDWGKVYDEAWERIDKKVEGLSKHIKLEE |
| of SEQ ID | ERRSEDAQSKAALTDWLRAKASFVIEGLKEADKDEFCRCELKLQKWYGDLRGKPF |
| NO: 2. | AIEAENSILDISGFSKQYNCAFIWQKDGVKKLNLYLIINYFKGGKLRFKKIKPEA |
| | FEANRFYTVINKKSGEIVPMEVNFNFDDPNLIILPLAFGKRQGREFIWNDLLSLE |
| | TGSLKLANGRVIEKTLYNRRTRQDEPALFVALTFERREVLDSSNIKPMNLIGIDR |
| | GENIPAVIALTDPEGCPLSRFKDSLGNPTHILRIGESYKEKQRTIQAKKEVEQRR |
| | AGGYSRKYASKAKNLADDMVRNTVRDLLYYAVTQDAMLIFENLSRGFGRQGKRTF |
| | MAERQYTRMEDWLTAKLAYEGLSKTYLSKTLAQYTSKTCSNCGFTITSADYDRVL |
| | EKLKKTATGWMTTINGKELKVEGQITYYNRYKRQNVVKDLSVELDRLSEESVNND |
| | ISSWTKGRSGEALSLLKKRFSHRPVQEKFVCLNCGFETHADEQAALNIARSWLFL |
| | RSQEYKKYQTNKTTGNTDKRAFVETWQSFYRKKLKEVWKPAV (SEQ ID NO: |
| | 78) |
| substitution | MQEIKRINKIRRRLVKDSNTKKAGKTGPMKTLLVRVMTPDLRERLENLRKKPENI |
| of L379R, | PQPISNTSRANLNKLLTDYTEMKKAILHVYWEEFQKDPVGLMSRVAQPAPKNIDQ |
| a | RKLIPVKDGNERLTSSGFACSQCCQPLYVYKLEQVNDKGKPHTNYFGRCNVSEHE |
| substitution | RLILLSPHKPEANDELVTYSLGKFGQRALDFYSIHVTRESNHPVKPLEQIGGNSC |
| of A708K, | ASGPVGKALSDACMGAVASFLTKYQDIILEHQKVIKKNEKRLANLKDIASANGLA |
| a deletion | FPKITLPPQPHTKEGIEAYNNVVAQIVIWVNLNLWQKLKIGRDEAKPLQRLKGFP |
| of P at | SFPLVERQANEVDWWDMVCNVKKLINEKKEDGKVFWQNLAGYKRQEALRPYLSSE |
| position | EDRKKGKKFARYQFGDLLLHLEKKHGEDWGKVYDEAWERIDKKVEGLSKHIKLEE |
| 793 and a | ERRSEDAQSKAALTDWLRAKASFVIEGLKEADKDEFCRCELKLQKWYGDLRGKPF |
| substitution | AIEAENSILDISGFSKQYNCAFIWQKDGVKKLNLYLIINYFKGGKLRFKKIKPEA |
| of A739V | FEANRFYTVINKKSGEIVPMEVNFNFDDPNLIILPLAFGKRQGREFIWNDLLSLE |
| of SEQ ID | TGSLKLANGRVIEKTLYNRRTRQDEPALFVALTFERREVLDSSNIKPMNLIGIDR |
| NO: 2. | GENIPAVIALTDPEGCPLSRFKDSLGNPTHILRIGESYKEKQRTIQAKKEVEQRR |
| | AGGYSRKYASKAKNLADDMVRNTVRDLLYYAVTQDAMLIFENLSRGFGRQGKRTF |
| | MAERQYTRMEDWLTAKLAYEGLSKTYLSKTLAQYTSKTCSNCGFTITSADYDRVL |
| | EKLKKTATGWMTTINGKELKVEGQITYYNRYKRQNVVKDLSVELDRLSEESVNND |
| | ISSWTKGRSGEALSLLKKRFSHRPVQEKFVCLNCGFETHADEQAALNIARSWLFL |
| | RSQEYKKYQTNKTTGNTDKRAFVETWQSFYRKKLKEVWKPAV (SEQ ID NO: |
| | 79) |
| substitution | MQEIKRINKIRRRLVKDSNTKKAGKTGPMKTLLVRVMTPDLRERLENLRKKPENI |
| of C477K, | PQPISNTSRANLNKLLTDYTEMKKAILHVYWEEFQKDPVGLMSRVAQPAPKNIDQ |
| a | RKLIPVKDGNERLTSSGFACSQCCQPLYVYKLEQVNDKGKPHTNYFGRCNVSEHE |
| substitution | RLILLSPHKPEANDELVTYSLGKFGQRALDFYSIHVTRESNHPVKPLEQIGGNSC |
| of A708K | ASGPVGKALSDACMGAVASFLTKYQDIILEHQKVIKKNEKRLANLKDIASANGLA |
| and a | FPKITLPPQPHTKEGIEAYNNVVAQIVIWVNLNLWQKLKIGRDEAKPLQRLKGFP |
| deletion of | SFPLVERQANEVDWWDMVCNVKKLINEKKEDGKVFWQNLAGYKRQEALLPYLSSE |
| P at | EDRKKGKKFARYQFGDLLLHLEKKHGEDWGKVYDEAWERIDKKVEGLSKHIKLEE |
| position | ERRSEDAQSKAALTDWLRAKASFVIEGLKEADKDEFKRCELKLQKWYGDLRGKPF |
| 793 of SEQ | AIEAENSILDISGFSKQYNCAFIWQKDGVKKLNLYLIINYFKGGKLRFKKIKPEA |
| ID NO: 2. | FEANRFYTVINKKSGEIVPMEVNFNFDDPNLIILPLAFGKRQGREFIWNDLLSLE |
| | TGSLKLANGRVIEKTLYNRRTRQDEPALFVALTFERREVLDSSNIKPMNLIGIDR |
| | GENIPAVIALTDPEGCPLSRFKDSLGNPTHILRIGESYKEKQRTIQAKKEVEQRR |
| | AGGYSRKYASKAKNLADDMVRNTARDLLYYAVTQDAMLIFENLSRGFGRQGKRTF |
| | MAERQYTRMEDWLTAKLAYEGLSKTYLSKTLAQYTSKTCSNCGFTITSADYDRVL |
| | EKLKKTATGWMTTINGKELKVEGQITYYNRYKRQNVVKDLSVELDRLSEESVNND |
| | ISSWTKGRSGEALSLLKKRFSHRPVQEKFVCLNCGFETHADEQAALNIARSWLFL |
| | RSQEYKKYQTNKTTGNTDKRAFVETWQSFYRKKLKEVWKPAV (SEQ ID NO: |
| | 80) |
| substitution | MQEIKRINKIRRRLVKDSNTKKAGKTGPMKTLLVRVMTPDLRERLENLRKKPENI |
| of L249I | PQPISNTSRANLNKLLTDYTEMKKAILHVYWEEFQKDPVGLMSRVAQPAPKNIDQ |
| and a | RKLIPVKDGNERLTSSGFACSQCCQPLYVYKLEQVNDKGKPHTNYFGRCNVSEHE |
| substitution | RLILLSPHKPEANDELVTYSLGKFGQRALDFYSIHVTRESNHPVKPLEQIGGNSC |
| of M771N | ASGPVGKALSDACMGAVASFLTKYQDIIIEHQKVIKKNEKRLANLKDIASANGLA |
| of SEQ ID | FPKITLPPQPHTKEGIEAYNNVVAQIVIWVNLNLWQKLKIGRDEAKPLQRLKGFP |
| NO: 2. | SFPLVERQANEVDWWDMVCNVKKLINEKKEDGKVFWQNLAGYKRQEALLPYLSSE |
| | EDRKKGKKFARYQFGDLLLHLEKKHGEDWGKVYDEAWERIDKKVEGLSKHIKLEE |
| | ERRSEDAQSKAALTDWLRAKASFVIEGLKEADKDEFCRCELKLQKWYGDLRGKPF |
| | AIEAENSILDISGESKQYNCAFIWQKDGVKKLNLYLIINYFKGGKLRFKKIKPEA |
| | FEANRFYTVINKKSGEIVPMEVNFNFDDPNLIILPLAFGKRQGREFIWNDLLSLE |
| | TGSLKLANGRVIEKTLYNRRTRQDEPALFVALTFERREVLDSSNIKPMNLIGIDR |
| | GENIPAVIALTDPEGCPLSRFKDSLGNPTHILRIGESYKEKQRTIQAAKEVEQRR |
| | AGGYSRKYASKAKNLADDMVRNTARDLLYYAVTQDAMLIFENLSRGFGRQGKRTF |
| | NAERQYTRMEDWLTAKLAYEGLPSKTYLSKTLAQYTSKTCSNCGFTITSADYDRV |
| | LEKLKKTATGWMTTINGKELKVEGQITYYNRYKRQNVVKDLSVELDRLSEESVNN |
| | DISSWTKGRSGEALSLLKKRFSHRPVQEKFVCLNCGFETHADEQAALNIARSWLF |
| | LRSQEYKKYQTNKTTGNTDKRAFVETWQSFYRKKLKEVWKPAV (SEQ ID NO: |
| | 81) |
| substitution | MQEIKRINKIRRRLVKDSNTKKAGKTGPMKTLLVRVMTPDLRERLENLRKKPENI |
| of V747K | PQPISNTSRANLNKLLTDYTEMKKAILHVYWEEFQKDPVGLMSRVAQPAPKNIDQ |
| of SEQ ID | RKLIPVKDGNERLTSSGFACSQCCQPLYVYKLEQVNDKGKPHTNYFGRCNVSEHE |
| NO: 2. | RLILLSPHKPEANDELVTYSLGKFGQRALDFYSIHVTRESNHPVKPLEQIGGNSC |
| | ASGPVGKALSDACMGAVASFLTKYQDIILEHQKVIKKNEKRLANLKDIASANGLA |
| | FPKITLPPQPHTKEGIEAYNNVVAQIVIWVNLNLWQKLKIGRDEAKPLQRLKGFP |
| | SFPLVERQANEVDWWDMVCNVKKLINEKKEDGKVFWQNLAGYKRQEALLPYLSSE |
| | EDRKKGKKFARYQFGDLLLHLEKKHGEDWGKVYDEAWERIDKKVEGLSKHIKLEE |
| | ERRSEDAQSKAALTDWLRAKASFVIEGLKEADKDEFCRCELKLQKWYGDLRGKPF |
| | AIEAENSILDISGFSKQYNCAFIWQKDGVKKLNLYLIINYFKGGKLRFKKIKPEA |
| | FEANRFYTVINKKSGEIVPMEVNFNFDDPNLIILPLAFGKRQGREFIWNDLLSLE |
| | TGSLKLANGRVIEKTLYNRRTRQDEPALFVALTFERREVLDSSNIKPMNLIGIDR |
| | GENIPAVIALTDPEGCPLSRFKDSLGNPTHILRIGESYKEKQRTIQAAKEVEQRR |
| | AGGYSRKYASKAKNLADDMVRNTARDLLYYAKTQDAMLIFENLSRGFGRQGKRTF |
| | MAERQYTRMEDWLTAKLAYEGLPSKTYLSKTLAQYTSKTCSNCGFTITSADYDRV |
| | LEKLKKTATGWMTTINGKELKVEGQITYYNRYKRQNVVKDLSVELDRLSEESVNN |
| | DISSWTKGRSGEALSLLKKRFSHRPVQEKFVCLNCGFETHADEQAALNIARSWLF |
| | LRSQEYKKYQTNKTTGNTDKRAFVETWQSFYRKKLKEVWKPAV (SEQ ID NO: |
| | 82) |
| substitution | MQEIKRINKIRRRLVKDSNTKKAGKTGPMKTLLVRVMTPDLRERLENLRKKPENI |
| of L379R, | PQPISNTSRANLNKLLTDYTEMKKAILHVYWEEFQKDPVGLMSRVAQPAPKNIDQ |
| a | RKLIPVKDGNERLTSSGFACSQCCQPLYVYKLEQVNDKGKPHTNYFGRCNVSEHE |
| substitution | RLILLSPHKPEANDELVTYSLGKFGQRALDFYSIHVTRESNHPVKPLEQIGGNSC |
| of C477K, | ASGPVGKALSDACMGAVASFLTKYQDIILEHQKVIKKNEKRLANLKDIASANGLA |
| a | FPKITLPPQPHTKEGIEAYNNVVAQIVIWVNLNLWQKLKIGRDEAKPLQRLKGFP |
| substitution | SFPLVERQANEVDWWDMVCNVKKLINEKKEDGKVFWQNLAGYKRQEALRPYLSSE |
| of A708K, | EDRKKGKKFARYQFGDLLLHLEKKHGEDWGKVYDEAWERIDKKVEGLSKHIKLEE |
| a deletion | ERRSEDAQSKAALTDWLRAKASFVIEGLKEADKDEFKRCELKLQKWYGDLRGKPF |
| of P at | AIEAENSILDISGFSKQYNCAFIWQKDGVKKLNLYLIINYFKGGKLRFKKIKPEA |
| position | FEANRFYTVINKKSGEIVPMEVNFNFDDPNLIILPLAFGKRQGREFIWNDLLSLE |
| 793 and a | TGSLKLANGRVIEKTLYNRRTRQDEPALFVALTFERREVLDSSNIKPMNLIGIDR |
| substitution | GENIPAVIALTDPEGCPLSRFKDSLGNPTHILRIGESYKEKQRTIQAKKEVEQRR |
| of M779N | AGGYSRKYASKAKNLADDMVRNTARDLLYYAVTQDAMLIFENLSRGFGRQGKRTF |
| of SEQ ID | MAERQYTRNEDWLTAKLAYEGLSKTYLSKTLAQYTSKTCSNCGFTITSADYDRVL |
| NO: 2. | EKLKKTATGWMTTINGKELKVEGQITYYNRYKRQNVVKDLSVELDRLSEESVNND |
| | ISSWTKGRSGEALSLLKKRFSHRPVQEKFVCLNCGFETHADEQAALNIARSWLFL |
| | RSQEYKKYQTNKTTGNTDKRAFVETWQSFYRKKLKEVWKPAV (SEQ ID NO: |
| | 83) |
| L379R, | MQEIKRINKIRRRLVKDSNTKKAGKTGPMKTLLVRVMTPDLRERLENLRKKPENI |
| F755M | PQPISNTSRANLNKLLTDYTEMKKAILHVYWEEFQKDPVGLMSRVAQPAPKNIDQ |
| | RKLIPVKDGNERLTSSGFACSQCCQPLYVYKLEQVNDKGKPHTNYFGRCNVSEHE |
| | RLILLSPHKPEANDELVTYSLGKFGQRALDFYSIHVTRESNHPVKPLEQIGGNSC |
| | ASGPVGKALSDACMGAVASFLTKYQDIILEHQKVIKKNEKRLANLKDIASANGLA |
| | FPKITLPPQPHTKEGIEAYNNVVAQIVIWVNLNLWQKLKIGRDEAKPLQRLKGFP |
| | SFPLVERQANEVDWWDMVCNVKKLINEKKEDGKVFWQNLAGYKRQEALLPYLSSE |
| | EDRKKGKKFARYQFGDLLLHLEKKHGEDWGKVYDEAWERIDKKVEGLSKHIKLEE |
| | ERRSEDAQSKAALTDWLRAKASFVIEGLKEADKDEFCRCELKLQKWYGDLRGKPF |
| | AIEAENSILDISGFSKQYNCAFIWQKDGVKKLNLYLIINYFKGGKLRFKKIKPEA |
| | FEANRFYTVINKKSGEIVPMEVNFNFDDPNLIILPLAFGKRQGREFIWNDLLSLE |
| | TGSLKLANGRVIEKTLYNRRTRQDEPALFVALTFERREVLDSSNIKPMNLIGIDR |
| | GENIPAVIALTDPEGCPLSRFKDSLGNPTHILRIGESYKEKQRTIQAAKEVEQRR |
| | AGGYSRKYASKAKNLADDMVRNTARDLLYYAVTQDAMLIMENLSRGFGRQGKRTF |
| | MAERQYTRMEDWLTAKLAYEGLPSKTYLSKTLAQYTSKTCSNCGFTITSADYDRV |
| | LEKLKKTATGWMTTINGKELKVEGQITYYNRYKRQNVVKDLSVELDRLSEESVNN |
| | DISSWTKGRSGEALSLLKKRFSHRPVQEKFVCLNCGFETHADEQAALNIARSWLF |
| | LRSQEYKKYQTNKTTGNTDKRAFVETWQSFYRKKLKEVWKPAV (SEQ ID NO: |
| | 84) |
| 429: | MQEIKRINKIRRRLVKDSNTKKAGKTGPMKTLLVRVMTPDLRERLENLRKKPENI |
| L379R, | PQPISNTSRANLNKLLTDYTEMKKAILHVYWEEFQKDPVGLMSRVAQPAPKNIDQ |
| A708K, | RKLIPVKDGNERLTSSGFACSQCCQPLYVYKLEQVNDKGKPHTNYFGRCNVSEHE |
| P793_, | RLILLSPHKPEANDELVTYSLGKFGQRALDFYSIHVTRESNHPVKPLEQIGGNSC |
| Y857R | ASGPVGKALSDACMGAVASFLTKYQDIILEHQKVIKKNEKRLANLKDIASANGLA |
| | FPKITLPPQPHTKEGIEAYNNVVAQIVIWVNLNLWQKLKIGRDEAKPLQRLKGFP |
| | SFPLVERQANEVDWWDMVCNVKKLINEKKEDGKVFWQNLAGYKRQEALRPYLSSE |
| | EDRKKGKKFARYQFGDLLLHLEKKHGEDWGKVYDEAWERIDKKVEGLSKHIKLEE |
| | ERRSEDAQSKAALTDWLRAKASFVIEGLKEADKDEFCRCELKLQKWYGDLRGKPF |
| | AIEAENSILDISGFSKQYNCAFIWQKDGVKKLNLYLIINYFKGGKLRFKKIKPEA |
| | FEANRFYTVINKKSGEIVPMEVNFNFDDPNLIILPLAFGKRQGREFIWNDLLSLE |
| | TGSLKLANGRVIEKTLYNRRTRQDEPALFVALTFERREVLDSSNIKPMNLIGIDR |
| | GENIPAVIALTDPEGCPLSRFKDSLGNPTHILRIGESYKEKQRTIQAKKEVEQRR |
| | AGGYSRKYASKAKNLADDMVRNTARDLLYYAVTQDAMLIFENLSRGFGRQGKRTF |
| | MAERQYTRMEDWLTAKLAYEGLSKTYLSKTLAQYTSKTCSNCGFTITSADYDRVL |
| | EKLKKTATGWMTTINGKELKVEGQITYYNRRKRQNVVKDLSVELDRLSEESVNND |
| | ISSWTKGRSGEALSLLKKRFSHRPVQEKFVCLNCGFETHADEQAALNIARSWLFL |
| | RSQEYKKYQTNKTTGNTDKRAFVETWQSFYRKKLKEVWKPAV (SEQ ID NO: |
| | 85) |
| 430: | MQEIKRINKIRRRLVKDSNTKKAGKTGPMKTLLVRVMTPDLRERLENLRKKPENI |
| L379R, | PQPISNTSRANLNKLLTDYTEMKKAILHVYWEEFQKDPVGLMSRVAQPAPKNIDQ |
| A708K, | RKLIPVKDGNERLTSSGFACSQCCQPLYVYKLEQVNDKGKPHTNYFGRCNVSEHE |
| P793_, | RLILLSPHKPEANDELVTYSLGKFGQRALDFYSIHVTRESNHPVKPLEQIGGNSC |
| Y857R, | ASGPVGKALSDACMGAVASFLTKYQDIILEHQKVIKKNEKRLANLKDIASANGLA |
| I658V | FPKITLPPQPHTKEGIEAYNNVVAQIVIWVNLNLWQKLKIGRDEAKPLQRLKGFP |
| | SFPLVERQANEVDWWDMVCNVKKLINEKKEDGKVFWQNLAGYKRQEALRPYLSSE |
| | EDRKKGKKFARYQFGDLLLHLEKKHGEDWGKVYDEAWERIDKKVEGLSKHIKLEE |
| | ERRSEDAQSKAALTDWLRAKASFVIEGLKEADKDEFCRCELKLQKWYGDLRGKPF |
| | AIEAENSILDISGFSKQYNCAFIWQKDGVKKLNLYLIINYFKGGKLRFKKIKPEA |
| | FEANRFYTVINKKSGEIVPMEVNFNFDDPNLIILPLAFGKRQGREFIWNDLLSLE |
| | TGSLKLANGRVIEKTLYNRRTRQDEPALFVALTFERREVLDSSNIKPMNLIGVDR |
| | GENIPAVIALTDPEGCPLSRFKDSLGNPTHILRIGESYKEKQRTIQAKKEVEQRR |
| | AGGYSRKYASKAKNLADDMVRNTARDLLYYAVTQDAMLIFENLSRGFGRQGKRTF |
| | MAERQYTRMEDWLTAKLAYEGLSKTYLSKTLAQYTSKTCSNCGFTITSADYDRVL |
| | EKLKKTATGWMTTINGKELKVEGQITYYNRRKRQNVVKDLSVELDRLSEESVNND |
| | ISSWTKGRSGEALSLLKKRFSHRPVQEKFVCLNCGFETHADEQAALNIARSWLFL |
| | RSQEYKKYQTNKTTGNTDKRAFVETWQSFYRKKLKEVWKPAV (SEQ ID NO: |
| | 86) |
| 431: | MQEIKRINKIRRRLVKDSNTKKAGKTGPMKTLLVRVMTPDLRERLENLRKKPENI |
| L379R, | PQPISNTSRANLNKLLTDYTEMKKAILHVYWEEFQKDPVGLMSRVAQPAPKNIDQ |
| A708K, | RKLIPVKDGNERLTSSGFACSQCCQPLYVYKLEQVNDKGKPHTNYFGRCNVSEHE |
| P793_, | RLILLSPHKPEANDELVTYSLGKFGQRALDFYSIHVTRESNHPVKPLEQIGGNSC |
| Y857R, | ASGPVGKALSDACMGAVASFLTKYQDIILEHQKVIKKNEKRLANLKDIASANGLA |
| I658V, | FPKITLPPQPHTKEGIEAYNNVVAQIVIWVNLNLWQKLKIGRDEAKPLQRLKGFP |
| E386N | SFPLVERQANEVDWWDMVCNVKKLINEKKEDGKVFWQNLAGYKRQEALRPYLSSE |
| | NDRKKGKKFARYQFGDLLLHLEKKHGEDWGKVYDEAWERIDKKVEGLSKHIKLEE |
| | ERRSEDAQSKAALTDWLRAKASFVIEGLKEADKDEFCRCELKLQKWYGDLRGKPF |
| | AIEAENSILDISGFSKQYNCAFIWQKDGVKKLNLYLIINYFKGGKLRFKKIKPEA |
| | FEANRFYTVINKKSGEIVPMEVNFNFDDPNLIILPLAFGKRQGREFIWNDLLSLE |
| | TGSLKLANGRVIEKTLYNRRTRQDEPALFVALTFERREVLDSSNIKPMNLIGVDR |
| | GENIPAVIALTDPEGCPLSRFKDSLGNPTHILRIGESYKEKQRTIQAKKEVEQRR |
| | AGGYSRKYASKAKNLADDMVRNTARDLLYYAVTQDAMLIFENLSRGFGRQGKRTF |
| | MAERQYTRMEDWLTAKLAYEGLSKTYLSKTLAQYTSKTCSNCGFTITSADYDRVL |
| | EKLKKTATGWMTTINGKELKVEGQITYYNRRKRQNVVKDLSVELDRLSEESVNND |
| | ISSWTKGRSGEALSLLKKRFSHRPVQEKFVCLNCGFETHADEQAALNIARSWLFL |
| | RSQEYKKYQTNKTTGNTDKRAFVETWQSFYRKKLKEVWKPAV (SEQ ID NO: |
| | 87) |
| 432: | MQEIKRINKIRRRLVKDSNTKKAGKTGPMKTLLVRVMTPDLRERLENLRKKPENI |
| L379R, | PQPISNTSRANLNKLLTDYTEMKKAILHVYWEEFQKDPVGLMSRVAQPAPKNIDQ |
| A708K, | RKLIPVKDGNERLTSSGFACSQCCQPLYVYKLEQVNDKGKPHTNYFGRCNVSEHE |
| P793_, | RLILLSPHKPEANDELVTYSLGKFGQRALDFYSIHVTRESNHPVKPLEQIGGNSC |
| Y857R, | ASGPVGKALSDACMGAVASFLTKYQDIILEHQKVIKKNEKRLANLKDIASANGLA |
| I658V, | FPKITLPPQPHTKEGIEAYNNVVAQIVIWVNLNLWQKLKIGRDEAKPLQRLKGFP |
| L404K | SFPLVERQANEVDWWDMVCNVKKLINEKKEDGKVFWQNLAGYKRQEALRPYLSSE |
| | EDRKKGKKFARYQFGDLLKHLEKKHGEDWGKVYDEAWERIDKKVEGLSKHIKLEE |
| | ERRSEDAQSKAALTDWLRAKASFVIEGLKEADKDEFCRCELKLQKWYGDLRGKPF |
| | AIEAENSILDISGFSKQYNCAFIWQKDGVKKLNLYLIINYFKGGKLRFKKIKPEA |
| | FEANRFYTVINKKSGEIVPMEVNFNFDDPNLIILPLAFGKRQGREFIWNDLLSLE |
| | TGSLKLANGRVIEKTLYNRRTRQDEPALFVALTFERREVLDSSNIKPMNLIGVDR |
| | GENIPAVIALTDPEGCPLSRFKDSLGNPTHILRIGESYKEKQRTIQAKKEVEQRR |
| | AGGYSRKYASKAKNLADDMVRNTARDLLYYAVTQDAMLIFENLSRGFGRQGKRTF |
| | MAERQYTRMEDWLTAKLAYEGLSKTYLSKTLAQYTSKTCSNCGFTITSADYDRVL |
| | EKLKKTATGWMTTINGKELKVEGQITYYNRRKRQNVVKDLSVELDRLSEESVNND |
| | ISSWTKGRSGEALSLLKKRFSHRPVQEKFVCLNCGFETHADEQAALNIARSWLFL |
| | RSQEYKKYQTNKTTGNTDKRAFVETWQSFYRKKLKEVWKPAV (SEQ ID NO: |
| | 88) |
| 433: | MQEIKRINKIRRRLVKDSNTKKAGKTGPMKTLLVRVMTPDLRERLENLRKKPENI |
| L379R, | PQPISNTSRANLNKLLTDYTEMKKAILHVYWEEFQKDPVGLMSRVAQPAPKNIDQ |
| A708K, | RKLIPVKDGNERLTSSGFACSQCCQPLYVYKLEQVNDKGKPHTNYFGRCNVSEHE |
| P793_, | RLILLSPHKPEANDELVTYSLGKFGQVRALDFYSIHVTRESNHPVKPLEQIGGNS |
| Y857R, | CASGPVGKALSDACMGAVASFLTKYQDIILEHQKVIKKNEKRLANLKDIASANGL |
| I658V, | AFPKITLPPQPHTKEGIEAYNNVVAQIVIWVNLNLWQKLKIGRDEAKPLQRLKGF |
| ?V192 | PSFPLVERQANEVDWWDMVCNVKKLINEKKEDGKVFWQNLAGYKRQEALRPYLSS |
| | EEDRKKGKKFARYQFGDLLLHLEKKHGEDWGKVYDEAWERIDKKVEGLSKHIKLE |
| | EERRSEDAQSKAALTDWLRAKASFVIEGLKEADKDEFCRCELKLQKWYGDLRGKP |
| | FAIEAENSILDISGFSKQYNCAFIWQKDGVKKLNLYLIINYFKGGKLRFKKIKPE |
| | AFEANRFYTVINKKSGEIVPMEVNFNFDDPNLIILPLAFGKRQGREFIWNDLLSL |
| | ETGSLKLANGRVIEKTLYNRRTRQDEPALFVALTFERREVLDSSNIKPMNLIGVD |
| | RGENIPAVIALTDPEGCPLSRFKDSLGNPTHILRIGESYKEKQRTIQAKKEVEQR |
| | RAGGYSRKYASKAKNLADDMVRNTARDLLYYAVTQDAMLIFENLSRGFGRQGKRT |
| | FMAERQYTRMEDWLTAKLAYEGLSKTYLSKTLAQYTSKTCSNCGFTITSADYDRV |
| | LEKLKKTATGWMTTINGKELKVEGQITYYNRRKRQNVVKDLSVELDRLSEESVNN |
| | DISSWTKGRSGEALSLLKKRFSHRPVQEKFVCLNCGFETHADEQAALNIARSWLF |
| | LRSQEYKKYQTNKTTGNTDKRAFVETWQSFYRKKLKEVWKPAV (SEQ ID NO: |
| | 89) |
| 434: | MQEIKRINKIRRRLVKDSNTKKAGKTGPMKTLLVRVMTPDLRERLENLRKKPENI |
| L379R, | PQPISNTSRANLNKLLTDYTEMKKAILHVYWEEFQKDPVGLMSRVAQPAPKNIDQ |
| A708K, | RKLIPVKDGNERLTSSGFACSQCCQPLYVYKLEQVNDKGKPHTNYFGRCNVSEHE |
| P793_, | RLILLSPHKPEANDELVTYSLGKFGQRALDFYSIHVTRESNHPVKPLEQIGGNSC |
| Y857R, | ASGPVGKALSDACMGAVASFLTKYQDIILEHQKVIKKNEKRLANLKDIASANGLA |
| I658V, | FPKITLPPQPHTKEGIEAYNNVVAQIVIWVNLNLWQKLKIGRDEAKPLQRLKGFP |
| L404K, | SFPLVERQANEVDWWDMVCNVKKLINEKKEDGKVFWQNLAGYKRQEALRPYLSSE |
| E386N | NDRKKGKKFARYQFGDLLKHLEKKHGEDWGKVYDEAWERIDKKVEGLSKHIKLEE |
| | ERRSEDAQSKAALTDWLRAKASFVIEGLKEADKDEFCRCELKLQKWYGDLRGKPF |
| | AIEAENSILDISGFSKQYNCAFIWQKDGVKKLNLYLIINYFKGGKLRFKKIKPEA |
| | FEANRFYTVINKKSGEIVPMEVNFNFDDPNLIILPLAFGKRQGREFIWNDLLSLE |
| | TGSLKLANGRVIEKTLYNRRTRQDEPALFVALTFERREVLDSSNIKPMNLIGVDR |
| | GENIPAVIALTDPEGCPLSRFKDSLGNPTHILRIGESYKEKQRTIQAKKEVEQRR |
| | AGGYSRKYASKAKNLADDMVRNTARDLLYYAVTQDAMLIFENLSRGFGRQGKRTF |
| | MAERQYTRMEDWLTAKLAYEGLSKTYLSKTLAQYTSKTCSNCGFTITSADYDRVL |
| | EKLKKTATGWMTTINGKELKVEGQITYYNRRKRQNVVKDLSVELDRLSEESVNND |
| | ISSWTKGRSGEALSLLKKRFSHRPVQEKFVCLNCGFETHADEQAALNIARSWLFL |
| | RSQEYKKYQTNKTTGNTDKRAFVETWQSFYRKKLKEVWKPAV (SEQ ID NO: |
| | 90) |
| 435: | MQEIKRINKIRRRLVKDSNTKKAGKTGPMKTLLVRVMTPDLRERLENLRKKPENI |
| L379R, | PQPISNTSRANLNKLLTDYTEMKKAILHVYWEEFQKDPVGLMSRVAQPAPKNIDQ |
| A708K, | RKLIPVKDGNERLTSSGFACSQCCQPLYVYKLEQVNDKGKPHTNYFGRCNVSEHE |
| P793_, | RLILLSPHKPEANDELVTYSLGKFGQRALDFYSIHVTRESNHPVKPLEQIGGNSC |
| Y857R, | ASGPVGKALSDACMGAVASFLTKYQDIILEHQKVIKKNEKRLANLKDIASANGLA |
| I658V, | FPKITLPPQPHTKEGIEAYNNVVAQIVIWVNLNLWQKLKIGRDEAKPLQRLKGFP |
| F399L | SFPLVERQANEVDWWDMVCNVKKLINEKKEDGKVFWQNLAGYKRQEALRPYLSSE |
| | EDRKKGKKFARYQLGDLLLHLEKKHGEDWGKVYDEAWERIDKKVEGLSKHIKLEE |
| | ERRSEDAQSKAALTDWLRAKASFVIEGLKEADKDEFCRCELKLQKWYGDLRGKPF |
| | AIEAENSILDISGFSKQYNCAFIWQKDGVKKLNLYLIINYFKGGKLRFKKIKPEA |
| | FEANRFYTVINKKSGEIVPMEVNFNFDDPNLIILPLAFGKRQGREFIWNDLLSLE |
| | TGSLKLANGRVIEKTLYNRRTRQDEPALFVALTFERREVLDSSNIKPMNLIGVDR |
| | GENIPAVIALTDPEGCPLSRFKDSLGNPTHILRIGESYKEKQRTIQAKKEVEQRR |
| | AGGYSRKYASKAKNLADDMVRNTARDLLYYAVTQDAMLIFENLSRGFGRQGKRTF |
| | MAERQYTRMEDWLTAKLAYEGLSKTYLSKTLAQYTSKTCSNCGFTITSADYDRVL |
| | EKLKKTATGWMTTINGKELKVEGQITYYNRRKRQNVVKDLSVELDRLSEESVNND |
| | ISSWTKGRSGEALSLLKKRFSHRPVQEKFVCLNCGFETHADEQAALNIARSWLFL |
| | RSQEYKKYQTNKTTGNTDKRAFVETWQSFYRKKLKEVWKPAV (SEQ ID NO: |
| | 91) |
| 436: | MQEIKRINKIRRRLVKDSNTKKAGKTGPMKTLLVRVMTPDLRERLENLRKKPENI |
| L379R, | PQPISNTSRANLNKLLTDYTEMKKAILHVYWEEFQKDPVGLMSRVAQPAPKNIDQ |
| A708K, | RKLIPVKDGNERLTSSGFACSQCCQPLYVYKLEQVNDKGKPHTNYFGRCNVSEHE |
| P793_, | RLILLSPHKPEANDELVTYSLGKFGQRALDFYSIHVTRESNHPVKPLEQIGGNSC |
| Y857R, | ASGPVGKALSDACMGAVASFLTKYQDIILEHQKVIKKNEKRLANLKDIASANGLA |
| I658V, | FPKITLPPQPHTKEGIEAYNNVVAQIVIWVNLNLWQKLKIGRDEAKPLQRLKGFP |
| F399L, | SFPLVERQANEVDWWDMVCNVKKLINEKKEDGKVFWQNLAGYKRQEALRPYLSSE |
| E386N | NDRKKGKKFARYQLGDLLLHLEKKHGEDWGKVYDEAWERIDKKVEGLSKHIKLEE |
| | ERRSEDAQSKAALTDWLRAKASFVIEGLKEADKDEFCRCELKLQKWYGDLRGKPF |
| | AIEAENSILDISGFSKQYNCAFIWQKDGVKKLNLYLIINYFKGGKLRFKKIKPEA |
| | FEANRFYTVINKKSGEIVPMEVNFNFDDPNLIILPLAFGKRQGREFIWNDLLSLE |
| | TGSLKLANGRVIEKTLYNRRTRQDEPALFVALTFERREVLDSSNIKPMNLIGVDR |
| | GENIPAVIALTDPEGCPLSRFKDSLGNPTHILRIGESYKEKQRTIQAKKEVEQRR |
| | AGGYSRKYASKAKNLADDMVRNTARDLLYYAVTQDAMLIFENLSRGFGRQGKRTF |
| | MAERQYTRMEDWLTAKLAYEGLSKTYLSKTLAQYTSKTCSNCGFTITSADYDRVL |
| | EKLKKTATGWMTTINGKELKVEGQITYYNRRKRQNVVKDLSVELDRLSEESVNND |
| | ISSWTKGRSGEALSLLKKRFSHRPVQEKFVCLNCGFETHADEQAALNIARSWLFL |
| | RSQEYKKYQTNKTTGNTDKRAFVETWQSFYRKKLKEVWKPAV (SEQ ID NO: |
| | 92) |
| 437: | MQEIKRINKIRRRLVKDSNTKKAGKTGPMKTLLVRVMTPDLRERLENLRKKPENI |
| L379R, | PQPISNTSRANLNKLLTDYTEMKKAILHVYWEEFQKDPVGLMSRVAQPAPKNIDQ |
| A708K, | RKLIPVKDGNERLTSSGFACSQCCQPLYVYKLEQVNDKGKPHTNYFGRCNVSEHE |
| P793_, | RLILLSPHKPEANDELVTYSLGKFGQRALDFYSIHVTRESNHPVKPLEQIGGNSC |
| Y857R, | ASGPVGKALSDACMGAVASFLTKYQDIILEHQKVIKKNEKRLANLKDIASANGLA |
| I658V, | FPKITLPPQPHTKEGIEAYNNVVAQIVIWVNLNLWQKLKIGRDEAKPLQRLKGFP |
| F399L, | SFPLVERQANEVDWWDMVCNVKKLINEKKEDGKVFWQNLAGYKRQEALRPYLSSE |
| C477S | EDRKKGKKFARYQLGDLLLHLEKKHGEDWGKVYDEAWERIDKKVEGLSKHIKLEE |
| | ERRSEDAQSKAALTDWLRAKASFVIEGLKEADKDEFSRCELKLQKWYGDLRGKPF |
| | AIEAENSILDISGFSKQYNCAFIWQKDGVKKLNLYLIINYFKGGKLRFKKIKPEA |
| | FEANRFYTVINKKSGEIVPMEVNFNFDDPNLIILPLAFGKRQGREFIWNDLLSLE |
| | TGSLKLANGRVIEKTLYNRRTRQDEPALFVALTFERREVLDSSNIKPMNLIGVDR |
| | GENIPAVIALTDPEGCPLSRFKDSLGNPTHILRIGESYKEKQRTIQAKKEVEQRR |
| | AGGYSRKYASKAKNLADDMVRNTARDLLYYAVTQDAMLIFENLSRGFGRQGKRTF |
| | MAERQYTRMEDWLTAKLAYEGLSKTYLSKTLAQYTSKTCSNCGFTITSADYDRVL |
| | EKLKKTATGWMTTINGKELKVEGQITYYNRRKRQNVVKDLSVELDRLSEESVNND |
| | ISSWTKGRSGEALSLLKKRFSHRPVQEKFVCLNCGFETHADEQAALNIARSWLFL |
| | RSQEYKKYQTNKTTGNTDKRAFVETWQSFYRKKLKEVWKPAV (SEQ ID NO: |
| | 93) |
| 438: | MQEIKRINKIRRRLVKDSNTKKAGKTGPMKTLLVRVMTPDLRERLENLRKKPENI |
| L379R, | PQPISNTSRANLNKLLTDYTEMKKAILHVYWEEFQKDPVGLMSRVAQPAPKNIDQ |
| A708K, | RKLIPVKDGNERLTSSGFACSQCCQPLYVYKLEQVNDKGKPHTNYFGRCNVSEHE |
| P793_, | RLILLSPHKPEANDELVTYSLGKFGQRALDFYSIHVTRESNHPVKPLEQIGGNSC |
| Y857R, | ASGPVGKALSDACMGAVASFLTKYQDIILEHQKVIKKNEKRLANLKDIASANGLA |
| I658V, | FPKITLPPQPHTKEGIEAYNNVVAQIVIWVNLNLWQKLKIGRDEAKPLQRLKGFP |
| F399L, | SFPLVERQANEVDWWDMVCNVKKLINEKKEDGKVFWQNLAGYKRQEALRPYLSSE |
| L404K | EDRKKGKKFARYQLGDLLKHLEKKHGEDWGKVYDEAWERIDKKVEGLSKHIKLEE |
| | ERRSEDAQSKAALTDWLRAKASFVIEGLKEADKDEFCRCELKLQKWYGDLRGKPF |
| | AIEAENSILDISGFSKQYNCAFIWQKDGVKKLNLYLIINYFKGGKLRFKKIKPEA |
| | FEANRFYTVINKKSGEIVPMEVNFNFDDPNLIILPLAFGKRQGREFIWNDLLSLE |
| | TGSLKLANGRVIEKTLYNRRTRQDEPALFVALTFERREVLDSSNIKPMNLIGVDR |
| | GENIPAVIALTDPEGCPLSRFKDSLGNPTHILRIGESYKEKQRTIQAKKEVEQRR |
| | AGGYSRKYASKAKNLADDMVRNTARDLLYYAVTQDAMLIFENLSRGFGRQGKRTF |
| | MAERQYTRMEDWLTAKLAYEGLSKTYLSKTLAQYTSKTCSNCGFTITSADYDRVL |
| | EKLKKTATGWMTTINGKELKVEGQITYYNRRKRQNVVKDLSVELDRLSEESVNND |
| | ISSWTKGRSGEALSLLKKRFSHRPVQEKFVCLNCGFETHADEQAALNIARSWLFL |
| | RSQEYKKYQTNKTTGNTDKRAFVETWQSFYRKKLKEVWKPAV (SEQ ID NO: |
| | 94) |
| 439: | MQEIKRINKIRRRLVKDSNTKKAGKTGPMKTLLVRVMTPDLRERLENLRKKPENI |
| L379R, | PQPISNTSRANLNKLLTDYTEMKKAILHVYWEEFQKDPVGLMSRVAQPAPKNIDQ |
| A708K, | RKLIPVKDGNERLTSSGFACSQCCQPLYVYKLEQVNDKGKPHTNYFGRCNVSEHE |
| P793_, | RLILLSPHKPEANDELVTYSLGKFGQRALDFYSIHVTRESNHPVKPLEQIGGNSC |
| Y857R, | ASGPVGKALSDACMGAVASFLTKYQDIILEHQKVIKKNEKRLANLKDIASANGLA |
| I658V, | FPKITLPPQPHTKEGIEAYNNVVAQIVIWVNLNLWQKLKIGRDEAKPLQRLKGFP |
| F399L, | SFPLVERQANEVDWWDMVCNVKKLINEKKEDGKVFWQNLAGYKRQEALRPYLSSE |
| E386N, | NDRKKGKKFARYQLGDLLKHLEKKHGEDWGKVYDEAWERIDKKVEGLSKHIKLEE |
| C477S, | ERRSEDAQSKAALTDWLRAKASFVIEGLKEADKDEFSRCELKLQKWYGDLRGKPF |
| L404K | AIEAENSILDISGFSKQYNCAFIWQKDGVKKLNLYLIINYFKGGKLRFKKIKPEA |
| | FEANRFYTVINKKSGEIVPMEVNFNFDDPNLIILPLAFGKRQGREFIWNDLLSLE |
| | TGSLKLANGRVIEKTLYNRRTRQDEPALFVALTFERREVLDSSNIKPMNLIGVDR |
| | GENIPAVIALTDPEGCPLSRFKDSLGNPTHILRIGESYKEKQRTIQAKKEVEQRR |
| | AGGYSRKYASKAKNLADDMVRNTARDLLYYAVTQDAMLIFENLSRGFGRQGKRTF |
| | MAERQYTRMEDWLTAKLAYEGLSKTYLSKTLAQYTSKTCSNCGFTITSADYDRVL |
| | EKLKKTATGWMTTINGKELKVEGQITYYNRRKRQNVVKDLSVELDRLSEESVNND |
| | ISSWTKGRSGEALSLLKKRFSHRPVQEKFVCLNCGFETHADEQAALNIARSWLFL |
| | RSQEYKKYQTNKTTGNTDKRAFVETWQSFYRKKLKEVWKPAV (SEQ ID NO: |
| | 95) |
| 440: | MQEIKRINKIRRRLVKDSNTKKAGKTGPMKTLLVRVMTPDLRERLENLRKKPENI |
| L379R, | PQPISNTSRANLNKLLTDYTEMKKAILHVYWEEFQKDPVGLMSRVAQPAPKNIDQ |
| A708K, | RKLIPVKDGNERLTSSGFACSQCCQPLYVYKLEQVNDKGKPHTNYFGRCNVSEHE |
| P793_, | RLILLSPHKPEANDELVTYSLGKFGQRALDFYSIHVTRESNHPVKPLEQIGGNSC |
| Y857R, | ASGPVGKALSDACMGAVASFLTKYQDIILEHQKVIKKNEKRLANLKDIASANGLA |
| I658V, | FPKITLPPQPHTKEGIEAYNNVVAQIVIWVNLNLWQKLKIGRDEAKPLQRLKGFP |
| F399L, | SFPLVERQANEVDWWDMVCNVKKLINEKKEDGKVFWQNLAGYKRQEALRPYLSSE |
| Y797L | EDRKKGKKFARYQLGDLLLHLEKKHGEDWGKVYDEAWERIDKKVEGLSKHIKLEE |
| | ERRSEDAQSKAALTDWLRAKASFVIEGLKEADKDEFCRCELKLQKWYGDLRGKPF |
| | AIEAENSILDISGESKQYNCAFIWQKDGVKKLNLYLIINYFKGGKLRFKKIKPEA |
| | FEANRFYTVINKKSGEIVPMEVNFNFDDPNLIILPLAFGKRQGREFIWNDLLSLE |
| | TGSLKLANGRVIEKTLYNRRTRQDEPALFVALTFERREVLDSSNIKPMNLIGVDR |
| | GENIPAVIALTDPEGCPLSRFKDSLGNPTHILRIGESYKEKQRTIQAKKEVEQRR |
| | AGGYSRKYASKAKNLADDMVRNTARDLLYYAVTQDAMLIFENLSRGFGRQGKRTF |
| | MAERQYTRMEDWLTAKLAYEGLSKILLSKTLAQYTSKTCSNCGFTITSADYDRVL |
| | EKLKKTATGWMTTINGKELKVEGQITYYNRRKRQNVVKDLSVELDRLSEESVNND |
| | ISSWTKGRSGEALSLLKKRFSHRPVQEKFVCLNCGFETHADEQAALNIARSWLFL |
| | RSQEYKKYQTNKTTGNTDKRAFVETWQSFYRKKLKEVWKPAV (SEQ ID NO: |
| | 96) |
| 441: | MQEIKRINKIRRRLVKDSNTKKAGKTGPMKTLLVRVMTPDLRERLENLRKKPENI |
| L379R, | PQPISNTSRANLNKLLTDYTEMKKAILHVYWEEFQKDPVGLMSRVAQPAPKNIDQ |
| A708K, | RKLIPVKDGNERLTSSGFACSQCCQPLYVYKLEQVNDKGKPHTNYFGRCNVSEHE |
| P793_, | RLILLSPHKPEANDELVTYSLGKFGQRALDFYSIHVTRESNHPVKPLEQIGGNSC |
| Y857R, | ASGPVGKALSDACMGAVASFLTKYQDIILEHQKVIKKNEKRLANLKDIASANGLA |
| I658V, | FPKITLPPQPHTKEGIEAYNNVVAQIVIWVNLNLWQKLKIGRDEAKPLQRLKGFP |
| F399L, | SFPLVERQANEVDWWDMVCNVKKLINEKKEDGKVFWQNLAGYKRQEALRPYLSSE |
| Y797L, | NDRKKGKKFARYQLGDLLLHLEKKHGEDWGKVYDEAWERIDKKVEGLSKHIKLEE |
| E386N | ERRSEDAQSKAALTDWLRAKASFVIEGLKEADKDEFCRCELKLQKWYGDLRGKPF |
| | AIEAENSILDISGFSKQYNCAFIWQKDGVKKLNLYLIINYFKGGKLRFKKIKPEA |
| | FEANRFYTVINKKSGEIVPMEVNFNFDDPNLIILPLAFGKRQGREFIWNDLLSLE |
| | TGSLKLANGRVIEKTLYNRRTRQDEPALFVALTFERREVLDSSNIKPMNLIGVDR |
| | GENIPAVIALTDPEGCPLSRFKDSLGNPTHILRIGESYKEKQRTIQAKKEVEQRR |
| | AGGYSRKYASKAKNLADDMVRNTARDLLYYAVTQDAMLIFENLSRGFGRQGKRTF |
| | MAERQYTRMEDWLTAKLAYEGLSKTLLSKTLAQYTSKTCSNCGFTITSADYDRVL |
| | EKLKKTATGWMTTINGKELKVEGQITYYNRRKRQNVVKDLSVELDRLSEESVNND |
| | ISSWTKGRSGEALSLLKKRFSHRPVQEKFVCLNCGFETHADEQAALNIARSWLFL |
| | RSQEYKKYQTNKTTGNTDKRAFVETWQSFYRKKLKEVWKPAV (SEQ ID NO: |
| | 97) |
| 442: | MQEIKRINKIRRRLVKDSNTKKAGKTGPMKTLLVRVMTPDLRERLENLRKKPENI |
| L379R, | PQPISNTSRANLNKLLTDYTEMKKAILHVYWEEFQKDPVGLMSRVAQPAPKNIDQ |
| A708K, | RKLIPVKDGNERLTSSGFACSQCCQPLYVYKLEQVNDKGKPHTNYFGRCNVSEHE |
| P793_, | RLILLSPHKPEANDELVTYSLGKFGQRALDFYSIHVTRESNHPVKPLEQIGGNSC |
| Y857R, | ASGPVGKALSDACMGAVASFLTKYQDIILEHQKVIKKNEKRLANLKDIASANGLA |
| I658V, | FPKITLPPQPHTKEGIEAYNNVVAQIVIWVNLNLWQKLKIGRDEAKPLQRLKGFP |
| F399L, | SFPLVERQANEVDWWDMVCNVKKLINEKKEDGKVFWQNLAGYKRQEALRPYLSSE |
| Y797L, | NDRKKGKKFARYQLGDLLKHLEKKHGEDWGKVYDEAWERIDKKVEGLSKHIKLEE |
| E386N, | ERRSEDAQSKAALTDWLRAKASFVIEGLKEADKDEFSRCELKLQKWYGDLRGKPF |
| C477S, | AIEAENSILDISGFSKQYNCAFIWQKDGVKKLNLYLIINYFKGGKLRFKKIKPEA |
| L404K | FEANRFYTVINKKSGEIVPMEVNENEDDPNLIILPLAFGKRQGREFIWNDLLSLE |
| | TGSLKLANGRVIEKTLYNRRTRQDEPALFVALTFERREVLDSSNIKPMNLIGVDR |
| | GENIPAVIALTDPEGCPLSRFKDSLGNPTHILRIGESYKEKQRTIQAKKEVEQRR |
| | AGGYSRKYASKAKNLADDMVRNTARDLLYYAVTQDAMLIFENLSRGFGRQGKRTF |
| | MAERQYTRMEDWLTAKLAYEGLSKILLSKTLAQYTSKTCSNCGFTITSADYDRVL |
| | EKLKKTATGWMITINGKELKVEGQITYYNRRKRQNVVKDLSVELDRLSEESVNND |
| | ISSWTKGRSGEALSLLKKRFSHRPVQEKFVCLNCGFETHADEQAALNIARSWLFL |
| | RSQEYKKYQTNKTTGNTDKRAFVETWQSFYRKKLKEVWKPAV (SEQ ID NO: |
| | 98) |
| 443: | MQEIKRINKIRRRLVKDSNTKKAGKTGPMKTLLVRVMTPDLRERLENLRKKPENI |
| L379R, | PQPISNTSRANLNKLLTDYTEMKKAILHVYWEEFQKDPVGLMSRVAQPAPKNIDQ |
| A708K, | RKLIPVKDGNERLTSSGFACSQCCQPLYVYKLEQVNDKGKPHTNYFGRCNVSEHE |
| P793_, | RLILLSPHKPEANDELVTYSLGKFGQRALDFYSIHVTRESNHPVKPLEQIGGNSC |
| Y857R, | ASGPVGKALSDACMGAVASFLTKYQDIILEHQKVIKKNEKRLANLKDIASANGLA |
| I658V, | FPKITLPPQPHTKEGIEAYNNVVAQIVIWVNLNLWQKLKIGRDEAKPLQRLKGFP |
| Y797L | SFPLVERQANEVDWWDMVCNVKKLINEKKEDGKVFWQNLAGYKRQEALRPYLSSE |
| | EDRKKGKKFARYQFGDLLLHLEKKHGEDWGKVYDEAWERIDKKVEGLSKHIKLEE |
| | ERRSEDAQSKAALTDWLRAKASFVIEGLKEADKDEFCRCELKLQKWYGDLRGKPF |
| | AIEAENSILDISGFSKQYNCAFIWQKDGVKKLNLYLIINYFKGGKLRFKKIKPEA |
| | FEANRFYTVINKKSGEIVPMEVNFNFDDPNLIILPLAFGKRQGREFIWNDLLSLE |
| | TGSLKLANGRVIEKTLYNRRTRQDEPALFVALTFERREVLDSSNIKPMNLIGVDR |
| | GENIPAVIALTDPEGCPLSRFKDSLGNPTHILRIGESYKEKQRTIQAKKEVEQRR |
| | AGGYSRKYASKAKNLADDMVRNTARDLLYYAVTQDAMLIFENLSRGFGRQGKRTF |
| | MAERQYTRMEDWLTAKLAYEGLSKILLSKTLAQYTSKTCSNCGFTITSADYDRVL |
| | EKLKKTATGWMTTINGKELKVEGQITYYNRRKRQNVVKDLSVELDRLSEESVNND |
| | ISSWTKGRSGEALSLLKKRFSHRPVQEKFVCLNCGFETHADEQAALNIARSWLFL |
| | RSQEYKKYQTNKTTGNTDKRAFVETWQSFYRKKLKEVWKPAV (SEQ ID NO: |
| | 99) |
| 444: | MQEIKRINKIRRRLVKDSNTKKAGKTGPMKTLLVRVMTPDLRERLENLRKKPENI |
| L379R, | PQPISNTSRANLNKLLTDYTEMKKAILHVYWEEFQKDPVGLMSRVAQPAPKNIDQ |
| A708K, | RKLIPVKDGNERLTSSGFACSQCCQPLYVYKLEQVNDKGKPHTNYFGRCNVSEHE |
| P793_, | RLILLSPHKPEANDELVTYSLGKFGQRALDFYSIHVTRESNHPVKPLEQIGGNSC |
| Y857R, | ASGPVGKALSDACMGAVASFLTKYQDIILEHQKVIKKNEKRLANLKDIASANGLA |
| I658V, | FPKITLPPQPHTKEGIEAYNNVVAQIVIWVNLNLWQKLKIGRDEAKPLQRLKGFP |
| Y797L, | SFPLVERQANEVDWWDMVCNVKKLINEKKEDGKVFWQNLAGYKRQEALRPYLSSE |
| L404K | EDRKKGKKFARYQFGDLLKHLEKKHGEDWGKVYDEAWERIDKKVEGLSKHIKLEE |
| | ERRSEDAQSKAALTDWLRAKASFVIEGLKEADKDEFCRCELKLQKWYGDLRGKPF |
| | AIEAENSILDISGFSKQYNCAFIWQKDGVKKLNLYLIINYFKGGKLRFKKIKPEA |
| | FEANRFYTVINKKSGEIVPMEVNFNFDDPNLIILPLAFGKRQGREFIWNDLLSLE |
| | TGSLKLANGRVIEKTLYNRRTRQDEPALFVALTFERREVLDSSNIKPMNLIGVDR |
| | GENIPAVIALTDPEGCPLSRFKDSLGNPTHILRIGESYKEKQRTIQAKKEVEQRR |
| | AGGYSRKYASKAKNLADDMVRNTARDLLYYAVTQDAMLIFENLSRGFGRQGKRTF |
| | MAERQYTRMEDWLTAKLAYEGLSKTLLSKTLAQYTSKTCSNCGFTITSADYDRVL |
| | EKLKKTATGWMTTINGKELKVEGQITYYNRRKRQNVVKDLSVELDRLSEESVNND |
| | ISSWTKGRSGEALSLLKKRFSHRPVQEKFVCLNCGFETHADEQAALNIARSWLFL |
| | RSQEYKKYQTNKTTGNTDKRAFVETWQSFYRKKLKEVWKPAV (SEQ ID NO: |
| | 100) |
| 445: | MQEIKRINKIRRRLVKDSNTKKAGKTGPMKTLLVRVMTPDLRERLENLRKKPENI |
| L379R, | PQPISNTSRANLNKLLTDYTEMKKAILHVYWEEFQKDPVGLMSRVAQPAPKNIDQ |
| A708K, | RKLIPVKDGNERLTSSGFACSQCCQPLYVYKLEQVNDKGKPHTNYFGRCNVSEHE |
| P793_, | RLILLSPHKPEANDELVTYSLGKFGQRALDFYSIHVTRESNHPVKPLEQIGGNSC |
| Y857R, | ASGPVGKALSDACMGAVASFLTKYQDIILEHQKVIKKNEKRLANLKDIASANGLA |
| I658V, | FPKITLPPQPHTKEGIEAYNNVVAQIVIWVNLNLWQKLKIGRDEAKPLQRLKGFP |
| Y797L, | SFPLVERQANEVDWWDMVCNVKKLINEKKEDGKVFWQNLAGYKRQEALRPYLSSE |
| E386N | NDRKKGKKFARYQFGDLLLHLEKKHGEDWGKVYDEAWERIDKKVEGLSKHIKLEE |
| | ERRSEDAQSKAALTDWLRAKASFVIEGLKEADKDEFCRCELKLQKWYGDLRGKPF |
| | AIEAENSILDISGFSKQYNCAFIWQKDGVKKLNLYLIINYFKGGKLRFKKIKPEA |
| | FEANRFYTVINKKSGEIVPMEVNFNFDDPNLIILPLAFGKRQGREFIWNDLLSLE |
| | TGSLKLANGRVIEKTLYNRRTRQDEPALFVALTFERREVLDSSNIKPMNLIGVDR |
| | GENIPAVIALTDPEGCPLSRFKDSLGNPTHILRIGESYKEKQRTIQAKKEVEQRR |
| | AGGYSRKYASKAKNLADDMVRNTARDLLYYAVTQDAMLIFENLSRGFGRQGKRTF |
| | MAERQYTRMEDWLTAKLAYEGLSKILLSKTLAQYTSKTCSNCGFTITSADYDRVL |
| | EKLKKTATGWMTTINGKELKVEGQITYYNRRKRQNVVKDLSVELDRLSEESVNND |
| | ISSWTKGRSGEALSLLKKRFSHRPVQEKFVCLNCGFETHADEQAALNIARSWLFL |
| | RSQEYKKYQTNKTTGNTDKRAFVETWQSFYRKKLKEVWKPAV (SEQ ID NO: |
| | 101) |
| 446: | MQEIKRINKIRRRLVKDSNTKKAGKTGPMKTLLVRVMTPDLRERLENLRKKPENI |
| L379R, | PQPISNTSRANLNKLLTDYTEMKKAILHVYWEEFQKDPVGLMSRVAQPAPKNIDQ |
| A708K, | RKLIPVKDGNERLTSSGFACSQCCQPLYVYKLEQVNDKGKPHTNYFGRCNVSEHE |
| P793_, | RLILLSPHKPEANDELVTYSLGKFGQRALDFYSIHVTRESNHPVKPLEQIGGNSC |
| Y857R, | ASGPVGKALSDACMGAVASFLTKYQDIILEHQKVIKKNEKRLANLKDIASANGLA |
| I658V, | FPKITLPPQPHTKEGIEAYNNVVAQIVIWVNLNLWQKLKIGRDEAKPLQRLKGFP |
| Y797L, | SFPLVERQANEVDWWDMVCNVKKLINEKKEDGKVFWQNLAGYKRQEALRPYLSSE |
| E386N, | NDRKKGKKFARYQFGDLLKHLEKKHGEDWGKVYDEAWERIDKKVEGLSKHIKLEE |
| C477S, | ERRSEDAQSKAALTDWLRAKASFVIEGLKEADKDEFSRCELKLQKWYGDLRGKPF |
| L404K | AIEAENSILDISGFSKQYNCAFIWQKDGVKKLNLYLIINYFKGGKLRFKKIKPEA |
| | FEANRFYTVINKKSGEIVPMEVNFNFDDPNLIILPLAFGKRQGREFIWNDLLSLE |
| | TGSLKLANGRVIEKTLYNRRTRQDEPALFVALTFERREVLDSSNIKPMNLIGVDR |
| | GENIPAVIALTDPEGCPLSRFKDSLGNPTHILRIGESYKEKQRTIQAKKEVEQRR |
| | AGGYSRKYASKAKNLADDMVRNTARDLLYYAVTQDAMLIFENLSRGFGRQGKRTF |
| | MAERQYTRMEDWLTAKLAYEGLSKILLSKTLAQYTSKTCSNCGFTITSADYDRVL |
| | EKLKKTATGWMTTINGKELKVEGQITYYNRRKRQNVVKDLSVELDRLSEESVNND |
| | ISSWTKGRSGEALSLLKKRFSHRPVQEKFVCLNCGFETHADEQAALNIARSWLFL |
| | RSQEYKKYQTNKTTGNTDKRAFVETWQSFYRKKLKEVWKPAV (SEQ ID NO: |
| | 102) |
| 447: | MQEIKRINKIRRRLVKDSNTKKAGKTGPMKTLLVRVMTPDLRERLENLRKKPENI |
| L379R, | PQPISNTSRANLNKLLTDYTEMKKAILHVYWEEFQKDPVGLMSRVAQPAPKNIDQ |
| A708K, | RKLIPVKDGNERLTSSGFACSQCCQPLYVYKLEQVNDKGKPHTNYFGRCNVSEHE |
| P793_, | RLILLSPHKPEANDELVTYSLGKFGQRALDFYSIHVTRESNHPVKPLEQIGGNSC |
| Y857R, | ASGPVGKALSDACMGAVASFLTKYQDIILEHQKVIKKNEKRLANLKDIASANGLA |
| E386N | FPKITLPPQPHTKEGIEAYNNVVAQIVIWVNLNLWQKLKIGRDEAKPLQRLKGFP |
| | SFPLVERQANEVDWWDMVCNVKKLINEKKEDGKVFWQNLAGYKRQEALRPYLSSE |
| | NDRKKGKKFARYQFGDLLLHLEKKHGEDWGKVYDEAWERIDKKVEGLSKHIKLEE |
| | ERRSEDAQSKAALTDWLRAKASFVIEGLKEADKDEFCRCELKLQKWYGDLRGKPF |
| | AIEAENSILDISGFSKQYNCAFIWQKDGVKKLNLYLIINYFKGGKLRFKKIKPEA |
| | FEANRFYTVINKKSGEIVPMEVNFNFDDPNLIILPLAFGKRQGREFIWNDLLSLE |
| | TGSLKLANGRVIEKTLYNRRTRQDEPALFVALTFERREVLDSSNIKPMNLIGIDR |
| | GENIPAVIALTDPEGCPLSRFKDSLGNPTHILRIGESYKEKQRTIQAKKEVEQRR |
| | AGGYSRKYASKAKNLADDMVRNTARDLLYYAVTQDAMLIFENLSRGFGRQGKRTF |
| | MAERQYTRMEDWLTAKLAYEGLSKTYLSKTLAQYTSKTCSNCGFTITSADYDRVL |
| | EKLKKTATGWMTTINGKELKVEGQITYYNRRKRQNVVKDLSVELDRLSEESVNND |
| | ISSWTKGRSGEALSLLKKRFSHRPVQEKFVCLNCGFETHADEQAALNIARSWLFL |
| | RSQEYKKYQTNKTTGNTDKRAFVETWQSFYRKKLKEVWKPAV (SEQ ID NO: |
| | 103) |
| 448: | MQEIKRINKIRRRLVKDSNTKKAGKTGPMKTLLVRVMTPDLRERLENLRKKPENI |
| L379R, | PQPISNTSRANLNKLLTDYTEMKKAILHVYWEEFQKDPVGLMSRVAQPAPKNIDQ |
| A708K, | RKLIPVKDGNERLTSSGFACSQCCQPLYVYKLEQVNDKGKPHTNYFGRCNVSEHE |
| P793_, | RLILLSPHKPEANDELVTYSLGKFGQRALDFYSIHVTRESNHPVKPLEQIGGNSC |
| Y857R, | ASGPVGKALSDACMGAVASFLTKYQDIILEHQKVIKKNEKRLANLKDIASANGLA |
| E386N, | FPKITLPPQPHTKEGIEAYNNVVAQIVIWVNLNLWQKLKIGRDEAKPLQRLKGFP |
| L404K | SFPLVERQANEVDWWDMVCNVKKLINEKKEDGKVFWQNLAGYKRQEALRPYLSSE |
| | NDRKKGKKFARYQFGDLLKHLEKKHGEDWGKVYDEAWERIDKKVEGLSKHIKLEE |
| | ERRSEDAQSKAALTDWLRAKASFVIEGLKEADKDEFCRCELKLQKWYGDLRGKPF |
| | AIEAENSILDISGFSKQYNCAFIWQKDGVKKLNLYLIINYFKGGKLRFKKIKPEA |
| | FEANRFYTVINKKSGEIVPMEVNFNFDDPNLIILPLAFGKRQGREFIWNDLLSLE |
| | TGSLKLANGRVIEKTLYNRRTRQDEPALFVALTFERREVLDSSNIKPMNLIGIDR |
| | GENIPAVIALTDPEGCPLSRFKDSLGNPTHILRIGESYKEKQRTIQAKKEVEQRR |
| | AGGYSRKYASKAKNLADDMVRNTARDLLYYAVTQDAMLIFENLSRGFGRQGKRTF |
| | MAERQYTRMEDWLTAKLAYEGLSKTYLSKTLAQYTSKTCSNCGFTITSADYDRVL |
| | EKLKKTATGWMTTINGKELKVEGQITYYNRRKRQNVVKDLSVELDRLSEESVNND |
| | ISSWTKGRSGEALSLLKKRFSHRPVQEKFVCLNCGFETHADEQAALNIARSWLFL |
| | RSQEYKKYQTNKTTGNTDKRAFVETWQSFYRKKLKEVWKPAV (SEQ ID NO: |
| | 104) |
| 449: | MQEIKRINKIRRRLVKDSNTKKAGKTGPMKTLLVRVMTPDLRERLENLRKKPENI |
| L379R, | PQPISNTSRANLNKLLTDYTEMKKAILHVYWEEFQKDPVGLMSRVAQPAPKNIDQ |
| A708K, | RKLIPVKDGNERLTSSGFACSQCCQPLYVYKLEQVNDKGKPHTNYFGRCNVSEHE |
| P793_, | RLILLSPHKPEANDELVTYSLGKFGQRALDFYSIHVTRESNHPVKPLEQIGGNSC |
| D732N, | ASGPVGKALSDACMGAVASFLTKYQDIILEHQKVIKKNEKRLANLKDIASANGLA |
| E385P, | FPKITLPPQPHTKEGIEAYNNVVAQIVIWVNLNLWQKLKIGRDEAKPLQRLKGFP |
| Y857R | SFPLVERQANEVDWWDMVCNVKKLINEKKEDGKVFWQNLAGYKRQEALRPYLSSP |
| | EDRKKGKKFARYQFGDLLLHLEKKHGEDWGKVYDEAWERIDKKVEGLSKHIKLEE |
| | ERRSEDAQSKAALTDWLRAKASFVIEGLKEADKDEFCRCELKLQKWYGDLRGKPF |
| | AIEAENSILDISGFSKQYNCAFIWQKDGVKKLNLYLIINYFKGGKLRFKKIKPEA |
| | FEANRFYTVINKKSGEIVPMEVNFNFDDPNLIILPLAFGKRQGREFIWNDLLSLE |
| | TGSLKLANGRVIEKTLYNRRTRQDEPALFVALTFERREVLDSSNIKPMNLIGIDR |
| | GENIPAVIALTDPEGCPLSRFKDSLGNPTHILRIGESYKEKQRTIQAKKEVEQRR |
| | AGGYSRKYASKAKNLANDMVRNTARDLLYYAVTQDAMLIFENLSRGFGRQGKRTF |
| | MAERQYTRMEDWLTAKLAYEGLSKTYLSKTLAQYTSKTCSNCGFTITSADYDRVL |
| | EKLKKTATGWMTTINGKELKVEGQITYYNRRKRQNVVKDLSVELDRLSEESVNND |
| | ISSWTKGRSGEALSLLKKRFSHRPVQEKFVCLNCGFETHADEQAALNIARSWLFL |
| | RSQEYKKYQTNKTTGNTDKRAFVETWQSFYRKKLKEVWKPAV (SEQ ID NO: |
| | 105) |
| 450: | MQEIKRINKIRRRLVKDSNTKKAGKTGPMKTLLVRVMTPDLRERLENLRKKPENI |
| L379R, | PQPISNTSRANLNKLLTDYTEMKKAILHVYWEEFQKDPVGLMSRVAQPAPKNIDQ |
| A708K, | RKLIPVKDGNERLTSSGFACSQCCQPLYVYKLEQVNDKGKPHTNYFGRCNVSEHE |
| P793_, | RLILLSPHKPEANDELVTYSLGKFGQRALDFYSIHVTRESNHPVKPLEQIGGNSC |
| D732N, | ASGPVGKALSDACMGAVASFLTKYQDIILEHQKVIKKNEKRLANLKDIASANGLA |
| E385P, | FPKITLPPQPHTKEGIEAYNNVVAQIVIWVNLNLWQKLKIGRDEAKPLQRLKGFP |
| Y857R, | SFPLVERQANEVDWWDMVCNVKKLINEKKEDGKVFWQNLAGYKRQEALRPYLSSP |
| I658V | EDRKKGKKFARYQFGDLLLHLEKKHGEDWGKVYDEAWERIDKKVEGLSKHIKLEE |
| | ERRSEDAQSKAALTDWLRAKASFVIEGLKEADKDEFCRCELKLQKWYGDLRGKPF |
| | AIEAENSILDISGFSKQYNCAFIWQKDGVKKLNLYLIINYFKGGKLRFKKIKPEA |
| | FEANRFYTVINKKSGEIVPMEVNFNFDDPNLIILPLAFGKRQGREFIWNDLLSLE |
| | TGSLKLANGRVIEKTLYNRRTRQDEPALFVALTFERREVLDSSNIKPMNLIGVDR |
| | GENIPAVIALTDPEGCPLSRFKDSLGNPTHILRIGESYKEKQRTIQAKKEVEQRR |
| | AGGYSRKYASKAKNLANDMVRNTARDLLYYAVTQDAMLIFENLSRGFGRQGKRTF |
| | MAERQYTRMEDWLTAKLAYEGLSKTYLSKTLAQYTSKTCSNCGFTITSADYDRVL |
| | EKLKKTATGWMTTINGKELKVEGQITYYNRRKRQNVVKDLSVELDRLSEESVNND |
| | ISSWTKGRSGEALSLLKKRFSHRPVQEKFVCLNCGFETHADEQAALNIARSWLFL |
| | RSQEYKKYQTNKTTGNTDKRAFVETWQSFYRKKLKEVWKPAV (SEQ ID NO: |
| | 106) |
| 451: | MQEIKRINKIRRRLVKDSNTKKAGKTGPMKTLLVRVMTPDLRERLENLRKKPENI |
| L379R, | PQPISNTSRANLNKLLTDYTEMKKAILHVYWEEFQKDPVGLMSRVAQPAPKNIDQ |
| A708K, | RKLIPVKDGNERLTSSGFACSQCCQPLYVYKLEQVNDKGKPHTNYFGRCNVSEHE |
| P793_, | RLILLSPHKPEANDELVTYSLGKFGQRALDFYSIHVTRESNHPVKPLEQIGGNSC |
| D732N, | ASGPVGKALSDACMGAVASFLTKYQDIILEHQKVIKKNEKRLANLKDIASANGLA |
| E385P, | FPKITLPPQPHTKEGIEAYNNVVAQIVIWVNLNLWQKLKIGRDEAKPLQRLKGFP |
| Y857R, | SFPLVERQANEVDWWDMVCNVKKLINEKKEDGKVFWQNLAGYKRQEALRPYLSSP |
| I658V, | EDRKKGKKFARYQLGDLLLHLEKKHGEDWGKVYDEAWERIDKKVEGLSKHIKLEE |
| F399L | ERRSEDAQSKAALTDWLRAKASFVIEGLKEADKDEFCRCELKLQKWYGDLRGKPF |
| | AIEAENSILDISGFSKQYNCAFIWQKDGVKKLNLYLIINYFKGGKLRFKKIKPEA |
| | FEANRFYTVINKKSGEIVPMEVNFNFDDPNLIILPLAFGKRQGREFIWNDLLSLE |
| | TGSLKLANGRVIEKTLYNRRTRQDEPALFVALTFERREVLDSSNIKPMNLIGVDR |
| | GENIPAVIALTDPEGCPLSRFKDSLGNPTHILRIGESYKEKQRTIQAKKEVEQRR |
| | AGGYSRKYASKAKNLANDMVRNTARDLLYYAVTQDAMLIFENLSRGFGRQGKRTF |
| | MAERQYTRMEDWLTAKLAYEGLSKTYLSKTLAQYTSKTCSNCGFTITSADYDRVL |
| | EKLKKTATGWMTTINGKELKVEGQITYYNRRKRQNVVKDLSVELDRLSEESVNND |
| | ISSWTKGRSGEALSLLKKRFSHRPVQEKFVCLNCGFETHADEQAALNIARSWLFL |
| | RSQEYKKYQTNKTTGNTDKRAFVETWQSFYRKKLKEVWKPAV (SEQ ID NO: |
| | 107) |
| 452: | MQEIKRINKIRRRLVKDSNTKKAGKTGPMKTLLVRVMTPDLRERLENLRKKPENI |
| L379R, | PQPISNTSRANLNKLLTDYTEMKKAILHVYWEEFQKDPVGLMSRVAQPAPKNIDQ |
| A708K, | RKLIPVKDGNERLTSSGFACSQCCQPLYVYKLEQVNDKGKPHTNYFGRCNVSEHE |
| P793_, | RLILLSPHKPEANDELVTYSLGKFGQRALDFYSIHVTRESNHPVKPLEQIGGNSC |
| D732N, | ASGPVGKALSDACMGAVASFLTKYQDIILEHQKVIKKNEKRLANLKDIASANGLA |
| E385P, | FPKITLPPQPHTKEGIEAYNNVVAQIVIWVNLNLWQKLKIGRDEAKPLQRLKGFP |
| Y857R, | SFPLVERQANEVDWWDMVCNVKKLINEKKEDGKVFWQNLAGYKRQEALRPYLSSP |
| I658V, | NDRKKGKKFARYQFGDLLLHLEKKHGEDWGKVYDEAWERIDKKVEGLSKHIKLEE |
| E386N | ERRSEDAQSKAALTDWLRAKASFVIEGLKEADKDEFCRCELKLQKWYGDLRGKPF |
| | AIEAENSILDISGFSKQYNCAFIWQKDGVKKLNLYLIINYFKGGKLRFKKIKPEA |
| | FEANRFYTVINKKSGEIVPMEVNFNFDDPNLIILPLAFGKRQGREFIWNDLLSLE |
| | TGSLKLANGRVIEKTLYNRRTRQDEPALFVALTFERREVLDSSNIKPMNLIGVDR |
| | GENIPAVIALTDPEGCPLSRFKDSLGNPTHILRIGESYKEKQRTIQAKKEVEQRR |
| | AGGYSRKYASKAKNLANDMVRNTARDLLYYAVTQDAMLIFENLSRGFGRQGKRTF |
| | MAERQYTRMEDWLTAKLAYEGLSKTYLSKTLAQYTSKTCSNCGFTITSADYDRVL |
| | EKLKKTATGWMTTINGKELKVEGQITYYNRRKRQNVVKDLSVELDRLSEESVNND |
| | ISSWTKGRSGEALSLLKKRFSHRPVQEKFVCLNCGFETHADEQAALNIARSWLFL |
| | RSQEYKKYQTNKTTGNTDKRAFVETWQSFYRKKLKEVWKPAV (SEQ ID NO: |
| | 108) |
| 453: | MQEIKRINKIRRRLVKDSNTKKAGKTGPMKTLLVRVMTPDLRERLENLRKKPENI |
| L379R, | PQPISNTSRANLNKLLTDYTEMKKAILHVYWEEFQKDPVGLMSRVAQPAPKNIDQ |
| A708K, | RKLIPVKDGNERLTSSGFACSQCCQPLYVYKLEQVNDKGKPHTNYFGRCNVSEHE |
| P793_, | RLILLSPHKPEANDELVTYSLGKFGQRALDFYSIHVTRESNHPVKPLEQIGGNSC |
| D732N, | ASGPVGKALSDACMGAVASFLTKYQDIILEHQKVIKKNEKRLANLKDIASANGLA |
| E385P, | FPKITLPPQPHTKEGIEAYNNVVAQIVIWVNLNLWQKLKIGRDEAKPLQRLKGFP |
| Y857R, | SFPLVERQANEVDWWDMVCNVKKLINEKKEDGKVFWQNLAGYKRQEALRPYLSSP |
| I658V, | EDRKKGKKFARYQFGDLLKHLEKKHGEDWGKVYDEAWERIDKKVEGLSKHIKLEE |
| L404K | ERRSEDAQSKAALTDWLRAKASFVIEGLKEADKDEFCRCELKLQKWYGDLRGKPF |
| | AIEAENSILDISGFSKQYNCAFIWQKDGVKKLNLYLIINYFKGGKLRFKKIKPEA |
| | FEANRFYTVINKKSGEIVPMEVNFNFDDPNLIILPLAFGKRQGREFIWNDLLSLE |
| | TGSLKLANGRVIEKTLYNRRTRQDEPALFVALTFERREVLDSSNIKPMNLIGVDR |
| | GENIPAVIALTDPEGCPLSRFKDSLGNPTHILRIGESYKEKQRTIQAKKEVEQRR |
| | AGGYSRKYASKAKNLANDMVRNTARDLLYYAVTQDAMLIFENLSRGFGRQGKRTF |
| | MAERQYTRMEDWLTAKLAYEGLSKTYLSKTLAQYTSKTCSNCGFTITSADYDRVL |
| | EKLKKTATGWMTTINGKELKVEGQITYYNRRKRQNVVKDLSVELDRLSEESVNND |
| | ISSWTKGRSGEALSLLKKRFSHRPVQEKFVCLNCGFETHADEQAALNIARSWLFL |
| | RSQEYKKYQTNKTTGNTDKRAFVETWQSFYRKKLKEVWKPAV (SEQ ID NO: |
| | 109) |
| 454: | MQEIKRINKIRRRLVKDSNTKKAGKTGPMKTLLVRVMTPDLRERLENLRKKPENI |
| L379R, | PQPISNTSRANLNKLLTDYTEMKKAILHVYWEEFQKDPVGLMSRVAQPAPKNIDQ |
| A708K, | RKLIPVKDGNERLTSSGFACSQCCQPLYVYKLEQVNDKGKPHTNYFGRCNVSEHE |
| P793_, | RLILLSPHKPEANDELVTYSLGKFGQRALDFYSIHVTRESNHPVKPLEQIGGNSC |
| T620P, | ASGPVGKALSDACMGAVASFLTKYQDIILEHKKVIKKNEKRLANLKDIASANGLA |
| E385P, | FPKITLPPQPHTKEGIEAYNNVVAQIVIWVNLNLWQKLKIGRDEAKPLQRLKGFP |
| Y857R, | SFPLVERQANEVDWWDMVCNVKKLINEKKEDGKVFWQNLAGYKRQEALRPYLSSP |
| Q252K | EDRKKGKKFARYQFGDLLLHLEKKHGEDWGKVYDEAWERIDKKVEGLSKHIKLEE |
| | ERRSEDAQSKAALTDWLRAKASFVIEGLKEADKDEFCRCELKLQKWYGDLRGKPF |
| | AIEAENSILDISGFSKQYNCAFIWQKDGVKKLNLYLIINYFKGGKLRFKKIKPEA |
| | FEANRFYTVINKKSGEIVPMEVNFNFDDPNLIILPLAFGKRQGREFIWNDLLSLE |
| | TGSLKLANGRVIEKPLYNRRTRQDEPALFVALTFERREVLDSSNIKPMNLIGIDR |
| | GENIPAVIALTDPEGCPLSRFKDSLGNPTHILRIGESYKEKQRTIQAKKEVEQRR |
| | AGGYSRKYASKAKNLADDMVRNTARDLLYYAVTQDAMLIFENLSRGFGRQGKRTF |
| | MAERQYTRMEDWLTAKLAYEGLSKTYLSKTLAQYTSKTCSNCGFTITSADYDRVL |
| | EKLKKTATGWMTTINGKELKVEGQITYYNRRKRQNVVKDLSVELDRLSEESVNND |
| | ISSWTKGRSGEALSLLKKRFSHRPVQEKFVCLNCGFETHADEQAALNIARSWLFL |
| | RSQEYKKYQTNKTTGNTDKRAFVETWQSFYRKKLKEVWKPAV (SEQ ID NO: |
| | 110) |
| 455: | MQEIKRINKIRRRLVKDSNTKKAGKTGPMKTLLVRVMTPDLRERLENLRKKPENI |
| L379R, | PQPISNTSRANLNKLLTDYTEMKKAILHVYWEEFQKDPVGLMSRVAQPAPKNIDQ |
| A708K, | RKLIPVKDGNERLTSSGFACSQCCQPLYVYKLEQVNDKGKPHTNYFGRCNVSEHE |
| P793_, | RLILLSPHKPEANDELVTYSLGKFGQRALDFYSIHVTRESNHPVKPLEQIGGNSC |
| T620P, | ASGPVGKALSDACMGAVASFLTKYQDIILEHKKVIKKNEKRLANLKDIASANGLA |
| E385P, | FPKITLPPQPHTKEGIEAYNNVVAQIVIWVNLNLWQKLKIGRDEAKPLQRLKGFP |
| Y857R, | SFPLVERQANEVDWWDMVCNVKKLINEKKEDGKVFWQNLAGYKRQEALRPYLSSP |
| I658V, | EDRKKGKKFARYQFGDLLLHLEKKHGEDWGKVYDEAWERIDKKVEGLSKHIKLEE |
| Q252K | ERRSEDAQSKAALTDWLRAKASFVIEGLKEADKDEFCRCELKLQKWYGDLRGKPF |
| | AIEAENSILDISGFSKQYNCAFIWQKDGVKKLNLYLIINYFKGGKLRFKKIKPEA |
| | FEANRFYTVINKKSGEIVPMEVNFNFDDPNLIILPLAFGKRQGREFIWNDLLSLE |
| | TGSLKLANGRVIEKPLYNRRTRQDEPALFVALTFERREVLDSSNIKPMNLIGVDR |
| | GENIPAVIALTDPEGCPLSRFKDSLGNPTHILRIGESYKEKQRTIQAKKEVEQRR |
| | AGGYSRKYASKAKNLADDMVRNTARDLLYYAVTQDAMLIFENLSRGFGRQGKRTF |
| | MAERQYTRMEDWLTAKLAYEGLSKTYLSKTLAQYTSKTCSNCGFTITSADYDRVL |
| | EKLKKTATGWMTTINGKELKVEGQITYYNRRKRQNVVKDLSVELDRLSEESVNND |
| | ISSWTKGRSGEALSLLKKRFSHRPVQEKFVCLNCGFETHADEQAALNIARSWLFL |
| | RSQEYKKYQTNKTTGNTDKRAFVETWQSFYRKKLKEVWKPAV (SEQ ID NO: |
| | 111) |
| 456: | MQEIKRINKIRRRLVKDSNTKKAGKTGPMKTLLVRVMTPDLRERLENLRKKPENI |
| L379R, | PQPISNTSRANLNKLLTDYTEMKKAILHVYWEEFQKDPVGLMSRVAQPAPKNIDQ |
| A708K, | RKLIPVKDGNERLTSSGFACSQCCQPLYVYKLEQVNDKGKPHTNYFGRCNVSEHE |
| P793_, | RLILLSPHKPEANDELVTYSLGKFGQRALDFYSIHVTRESNHPVKPLEQIGGNSC |
| T620P, | ASGPVGKALSDACMGAVASFLTKYQDIILEHKKVIKKNEKRLANLKDIASANGLA |
| E385P, | FPKITLPPQPHTKEGIEAYNNVVAQIVIWVNLNLWQKLKIGRDEAKPLQRLKGFP |
| Y857R, | SFPLVERQANEVDWWDMVCNVKKLINEKKEDGKVFWQNLAGYKRQEALRPYLSSP |
| I658V, | NDRKKGKKFARYQFGDLLLHLEKKHGEDWGKVYDEAWERIDKKVEGLSKHIKLEE |
| E386N, | ERRSEDAQSKAALTDWLRAKASFVIEGLKEADKDEFCRCELKLQKWYGDLRGKPF |
| Q252K | AIEAENSILDISGFSKQYNCAFIWQKDGVKKLNLYLIINYFKGGKLRFKKIKPEA |
| | FEANRFYTVINKKSGEIVPMEVNFNFDDPNLIILPLAFGKRQGREFIWNDLLSLE |
| | TGSLKLANGRVIEKPLYNRRTRQDEPALFVALTFERREVLDSSNIKPMNLIGVDR |
| | GENIPAVIALTDPEGCPLSRFKDSLGNPTHILRIGESYKEKQRTIQAKKEVEQRR |
| | AGGYSRKYASKAKNLADDMVRNTARDLLYYAVTQDAMLIFENLSRGFGRQGKRTF |
| | MAERQYTRMEDWLTAKLAYEGLSKTYLSKTLAQYTSKTCSNCGFTITSADYDRVL |
| | EKLKKTATGWMTTINGKELKVEGQITYYNRRKRQNVVKDLSVELDRLSEESVNND |
| | ISSWTKGRSGEALSLLKKRFSHRPVQEKFVCLNCGFETHADEQAALNIARSWLFL |
| | RSQEYKKYQTNKTTGNTDKRAFVETWQSFYRKKLKEVWKPAV (SEQ ID NO: |
| | 112) |
| 457: | MQEIKRINKIRRRLVKDSNTKKAGKTGPMKTLLVRVMTPDLRERLENLRKKPENI |
| L379R, | PQPISNTSRANLNKLLTDYTEMKKAILHVYWEEFQKDPVGLMSRVAQPAPKNIDQ |
| A708K, | RKLIPVKDGNERLTSSGFACSQCCQPLYVYKLEQVNDKGKPHTNYFGRCNVSEHE |
| P793_, | RLILLSPHKPEANDELVTYSLGKFGQRALDFYSIHVTRESNHPVKPLEQIGGNSC |
| T620P, | ASGPVGKALSDACMGAVASFLTKYQDIILEHKKVIKKNEKRLANLKDIASANGLA |
| E385P, | FPKITLPPQPHTKEGIEAYNNVVAQIVIWVNLNLWQKLKIGRDEAKPLQRLKGFP |
| Y857R, | SFPLVERQANEVDWWDMVCNVKKLINEKKEDGKVFWQNLAGYKRQEALRPYLSSP |
| I658V, | EDRKKGKKFARYQLGDLLLHLEKKHGEDWGKVYDEAWERIDKKVEGLSKHIKLEE |
| F399L, | ERRSEDAQSKAALTDWLRAKASFVIEGLKEADKDEFCRCELKLQKWYGDLRGKPF |
| Q252K | AIEAENSILDISGFSKQYNCAFIWQKDGVKKLNLYLIINYFKGGKLRFKKIKPEA |
| | FEANRFYTVINKKSGEIVPMEVNFNFDDPNLIILPLAFGKRQGREFIWNDLLSLE |
| | TGSLKLANGRVIEKPLYNRRTRQDEPALFVALTFERREVLDSSNIKPMNLIGVDR |
| | GENIPAVIALTDPEGCPLSRFKDSLGNPTHILRIGESYKEKQRTIQAKKEVEQRR |
| | AGGYSRKYASKAKNLADDMVRNTARDLLYYAVTQDAMLIFENLSRGFGRQGKRTF |
| | MAERQYTRMEDWLTAKLAYEGLSKTYLSKTLAQYTSKTCSNCGFTITSADYDRVL |
| | EKLKKTATGWMTTINGKELKVEGQITYYNRRKRQNVVKDLSVELDRLSEESVNND |
| | ISSWTKGRSGEALSLLKKRFSHRPVQEKFVCLNCGFETHADEQAALNIARSWLFL |
| | RSQEYKKYQTNKTTGNTDKRAFVETWQSFYRKKLKEVWKPAV (SEQ ID NO: |
| | 113) |
| 458: | MQEIKRINKIRRRLVKDSNTKKAGKTGPMKTLLVRVMTPDLRERLENLRKKPENI |
| L379R, | PQPISNTSRANLNKLLTDYTEMKKAILHVYWEEFQKDPVGLMSRVAQPAPKNIDQ |
| A708K, | RKLIPVKDGNERLTSSGFACSQCCQPLYVYKLEQVNDKGKPHTNYFGRCNVSEHE |
| P793_, | RLILLSPHKPEANDELVTYSLGKFGQRALDFYSIHVTRESNHPVKPLEQIGGNSC |
| T620P, | ASGPVGKALSDACMGAVASFLTKYQDIILEHKKVIKKNEKRLANLKDIASANGLA |
| E385P, | FPKITLPPQPHTKEGIEAYNNVVAQIVIWVNLNLWQKLKIGRDEAKPLQRLKGFP |
| Y857R, | SFPLVERQANEVDWWDMVCNVKKLINEKKEDGKVFWQNLAGYKRQEALRPYLSSP |
| I658V, | EDRKKGKKFARYQFGDLLKHLEKKHGEDWGKVYDEAWERIDKKVEGLSKHIKLEE |
| L404K, | ERRSEDAQSKAALTDWLRAKASFVIEGLKEADKDEFCRCELKLQKWYGDLRGKPF |
| Q252K | AIEAENSILDISGFSKQYNCAFIWQKDGVKKLNLYLIINYFKGGKLRFKKIKPEA |
| | FEANRFYTVINKKSGEIVPMEVNFNFDDPNLIILPLAFGKRQGREFIWNDLLSLE |
| | TGSLKLANGRVIEKPLYNRRTRQDEPALFVALTFERREVLDSSNIKPMNLIGVDR |
| | GENIPAVIALTDPEGCPLSRFKDSLGNPTHILRIGESYKEKQRTIQAKKEVEQRR |
| | AGGYSRKYASKAKNLADDMVRNTARDLLYYAVTQDAMLIFENLSRGFGRQGKRTF |
| | MAERQYTRMEDWLTAKLAYEGLSKTYLSKTLAQYTSKTCSNCGFTITSADYDRVL |
| | EKLKKTATGWMTTINGKELKVEGQITYYNRRKRQNVVKDLSVELDRLSEESVNND |
| | ISSWTKGRSGEALSLLKKRFSHRPVQEKFVCLNCGFETHADEQAALNIARSWLFL |
| | RSQEYKKYQTNKTTGNTDKRAFVETWQSFYRKKLKEVWKPAV (SEQ ID NO: |
| | 114) |
| 459: | MQEIKRINKIRRRLVKDSNTKKAGKTGPMKTLLVRVMTPDLRERLENLRKKPENI |
| L379R, | PQPISNTSRANLNKLLTDYTEMKKAILHVYWEEFQKDPVGLMSRVAQPAPKNIDQ |
| A708K, | RKLIPVKDGNERLTSSGFACSQCCQPLYVYKLEQVNDKGKPHTNYFGRCNVSEHE |
| P793_, | RLILLSPHKPEANDELVTYSLGKFGQRALDFYSIHVTRESNHPVKPLEQIGGNSC |
| T620P, | ASGPVGKALSDACMGAVASFLTKYQDIILEHQKVIKKNEKRLANLKDIASANGLA |
| Y857R, | FPKITLPPQPHTKEGIEAYNNVVAQIVIWVNLNLWQKLKIGRDEAKPLQRLKGFP |
| I658V, | SFPLVERQANEVDWWDMVCNVKKLINEKKEDGKVFWQNLAGYKRQEALRPYLSSE |
| E386N | NDRKKGKKFARYQFGDLLLHLEKKHGEDWGKVYDEAWERIDKKVEGLSKHIKLEE |
| | ERRSEDAQSKAALTDWLRAKASFVIEGLKEADKDEFCRCELKLQKWYGDLRGKPF |
| | AIEAENSILDISGFSKQYNCAFIWQKDGVKKLNLYLIINYFKGGKLRFKKIKPEA |
| | FEANRFYTVINKKSGEIVPMEVNFNFDDPNLIILPLAFGKRQGREFIWNDLLSLE |
| | TGSLKLANGRVIEKPLYNRRTRQDEPALFVALTFERREVLDSSNIKPMNLIGVDR |
| | GENIPAVIALTDPEGCPLSRFKDSLGNPTHILRIGESYKEKQRTIQAKKEVEQRR |
| | AGGYSRKYASKAKNLADDMVRNTARDLLYYAVTQDAMLIFENLSRGFGRQGKRTF |
| | MAERQYTRMEDWLTAKLAYEGLSKTYLSKTLAQYTSKTCSNCGFTITSADYDRVL |
| | EKLKKTATGWMTTINGKELKVEGQITYYNRRKRQNVVKDLSVELDRLSEESVNND |
| | ISSWTKGRSGEALSLLKKRFSHRPVQEKFVCLNCGFETHADEQAALNIARSWLFL |
| | RSQEYKKYQTNKTTGNTDKRAFVETWQSFYRKKLKEVWKPAV (SEQ ID NO: |
| | 115) |
| 460: | MQEIKRINKIRRRLVKDSNTKKAGKTGPMKTLLVRVMTPDLRERLENLRKKPENI |
| L379R, | PQPISNTSRANLNKLLTDYTEMKKAILHVYWEEFQKDPVGLMSRVAQPAPKNIDQ |
| A708K, | RKLIPVKDGNERLTSSGFACSQCCQPLYVYKLEQVNDKGKPHTNYFGRCNVSEHE |
| P793_, | RLILLSPHKPEANDELVTYSLGKFGQRALDFYSIHVTRESNHPVKPLEQIGGNSC |
| T620P, | ASGPVGKALSDACMGAVASFLTKYQDIILEHKKVIKKNEKRLANLKDIASANGLA |
| E385P, | FPKITLPPQPHTKEGIEAYNNVVAQIVIWVNLNLWQKLKIGRDEAKPLQRLKGFP |
| Q252K | SFPLVERQANEVDWWDMVCNVKKLINEKKEDGKVFWQNLAGYKRQEALRPYLSSP |
| | EDRKKGKKFARYQFGDLLLHLEKKHGEDWGKVYDEAWERIDKKVEGLSKHIKLEE |
| | ERRSEDAQSKAALTDWLRAKASFVIEGLKEADKDEFCRCELKLQKWYGDLRGKPF |
| | AIEAENSILDISGFSKQYNCAFIWQKDGVKKLNLYLIINYFKGGKLRFKKIKPEA |
| | FEANRFYTVINKKSGEIVPMEVNFNFDDPNLIILPLAFGKRQGREFIWNDLLSLE |
| | TGSLKLANGRVIEKPLYNRRTRQDEPALFVALTFERREVLDSSNIKPMNLIGIDR |
| | GENIPAVIALTDPEGCPLSRFKDSLGNPTHILRIGESYKEKQRTIQAKKEVEQRR |
| | AGGYSRKYASKAKNLADDMVRNTARDLLYYAVTQDAMLIFENLSRGFGRQGKRTF |
| | MAERQYTRMEDWLTAKLAYEGLSKTYLSKTLAQYTSKTCSNCGFTITSADYDRVL |
| | EKLKKTATGWMTTINGKELKVEGQITYYNRYKRQNVVKDLSVELDRLSEESVNND |
| | ISSWTKGRSGEALSLLKKRFSHRPVQEKFVCLNCGFETHADEQAALNIARSWLFL |
| | RSQEYKKYQTNKTTGNTDKRAFVETWQSFYRKKLKEVWKPAV (SEQ ID NO: |
| | 116) |
| 278 | QEIKRINKIRRRLVKDSNTKKAGKTGPMKTLLVRVMTPDLRERLENLRKKPENIP |
| | QPISNTSRANLNKLLTDYTEMKKAILHVYWEEFQKDPVGLMSRVAQPAPKNIDQR |
| | KLIPVKDGNERLTSSGFACSQCCQPLYVYKLEQVNDKGKPHTNYFGRCNVSEHER |
| | LILLSPHKPEANDELVTYSLGKFGQRALDFYSIHVTRESNHPVKPLEQIGGNSCA |
| | SGPVGKALSDACMGAVASFLTKYQDIILEHQKVIKKNEKRLANLKDIASANGLAF |
| | PKITLPPQPHTKEGIEAYNNVVAQIVIWVNLNLWQKLKIGRDEAKPLQRLKGFPS |
| | FPLVERQANEVDWWDMVCNVKKLINEKKEDGKVFWQNLAGYKRQEALRPYLSSEE |
| | DRKKGKKFARYQFGDLLLHLEKKHGEDWGKVYDEAWERIDKKVEGLSKHIKLEEE |
| | RRSEDAQSKAALTDWLRAKASFVIEGLKEADKDEFCRCELKLQKWYGDLRGKPFA |
| | IEAENSILDISGFSKQYNCAFIWQKDGVKKLNLYLIINYFKGGKLRFKKIKPEAF |
| | EANRFYTVINKKSGEIVPMEVNFNFDDPNLIILPLAFGKRQGREFIWNDLLSLET |
| | GSLKLANGRVIEKTLYNRRTRQDEPALFVALTFERREVLDSSNIKPMNLIGIDRG |
| | ENIPAVIALTDPEGCPLSRFKDSLGNPTHILRIGESYKEKQRTIQAKKEVEQRRA |
| | GGYSRKYASKAKNLADDMVRNTARDLLYYAVTQDAMLIFENLSRGFGRQGKRTFM |
| | AERQYTRMEDWLTAKLAYEGLSKTYLSKTLAQYTSKTCSNCGFTITSADYDRVLE |
| | KLKKTATGWMITINGKELKVEGQITYYNRYKRQNVVKDLSVELDRLSEESVNNDI |
| | SSWTKGRSGEALSLLKKRFSHRPVQEKFVCLNCGFETHADEQAALNIARSWLFLR |
| | SQEYKKYQTNKTTGNTDKRAFVETWQSFYRKKLKEVWKPAV (SEQ ID NO: |
| | 117) |
| 279 | MQEIKRINKIRRRLVKDSNTKKAGKTGPMKTLLVRVMTPDLRERLENLRKKPENI |
| | PQPISNTSRANLNKLLTDYTEMKKAILHVYWEEFQKDPVGLMSRVAQPAPKNIDQ |
| | RKLIPVKDGNERLTSSGFACSQCCQPLYVYKLEQVNDKGKPHTNYFGRCNVSEHE |
| | RLILLSPHKPEANDELVTYSLGKFGQRALDFYSIHVTRESNHPVKPLEQIGGNSC |
| | ASGPVGKALSDACMGAVASFLTKYQDIILEHQKVIKKNEKRLANLKDIASANGLA |
| | FPKITLPPQPHTKEGIEAYNNVVAQIVIWVNLNLWQKLKIGRDEAKPLQRLKGFP |
| | SFPLVERQANEVDWWDMVCNVKKLINEKKEDGKVFWQNLAGYKRQEALRPYLSSE |
| | EDRKKGKKFARYQFGDLLLHLEKKHGEDWGKVYDEAWERIDKKVEGLSKHIKLEE |
| | ERRSEDAQSKAALTDWLRAKASFVIEGLKEADKDEFCRCELKLQKWYGDLRGKPF |
| | AIEAENSILDISGFSKQYNCAFIWQKDGVKKLNLYLIINYFKGGKLRFKKIKPEA |
| | FEANRFYTVINKKSGEIVPMEVNFNFDDPNLIILPLAFGKRQGREFIWNDLLSLE |
| | TGSLKLANGRVIEKTLYNRRTRQDEPALFVALTFERREVLDSSNIKPMNLIGIDR |
| | GENIPAVIALTDPEGCPLSRFKDSLGNPTHILRIGESYKEKQRTIQAKKEVEQRR |
| | AGGYSRKYASKAKNLADDMVRNTARDLLYYAVTQDAMLIFENLSRGFGRQGKRTF |
| | MAERQYTRMEDWLTAKLAYEGLSKTYLSKTLAQYTSKTCSNCGFTITSADYDRVL |
| | EKLKKTATGWMTTINGKELKVEGQITYYNRYKRQNVVKDLSVELDRLSEESVNND |
| | ISSWTKGRSGEALSLLKKRFSHRPVQEKFVCLNCGFETHADEQAALNIARSWLFL |
| | RSQEYKKYQTNKTTGNTDKRAFVETWQSFYRKKLKEVWKPAV (SEQ ID NO: |
| | 118) |
| 280 | MQEIKRINKIRRRLVKDSNTKKAGKTGPMKTLLVRVMTPDLRERLENLRKKPENI |
| | PQPISNTSRANLNKLLTDYTEMKKAILHVYWEEFQKDPVGLMSRVAQPAPKNIDQ |
| | RKLIPVKDGNERLTSSGFACSQCCQPLYVYKLEQVNDKGKPHTNYFGRCNVSEHE |
| | RLILLSPHKPEANDELVTYSLGKFGQRALDFYSIHVTRESNHPVKPLEQIGGNSC |
| | ASGPVGKALSDACMGAVASFLTKYQDIILEHQKVIKKNEKRLANLKDIASANGLA |
| | FPKITLPPQPHTKEGIEAYNNVVAQIVIWVNLNLWQKLKIGRDEAKPLQRLKGFP |
| | SFPLVERQANEVDWWDMVCNVKKLINEKKEDGKVFWQNLAGYKRQEALRPYLSSE |
| | EDRKKGKKFARYQFGDLLLHLEKKHGEDWGKVYDEAWERIDKKVEGLSKHIKLEE |
| | ERRSEDAQSKAALTDWLRAKASFVIEGLKEADKDEFCRCELKLQKWYGDLRGKPF |
| | AIEAENSILDISGESKQYNCAFIWQKDGVKKLNLYLIINYFKGGKLRFKKIKPEA |
| | FEANRFYTVINKKSGEIVPMEVNFNFDDPNLIILPLAFGKRQGREFIWNDLLSLE |
| | TGSLKLANGRVIEKTLYNRRTRQDEPALFVALTFERREVLDSSNIKPMNLIGIDR |
| | GENIPAVIALTDPEGCPLSRFKDSLGNPTHILRIGESYKEKQRTIQAKKEVEQRR |
| | AGGYSRKYASKAKNLADDMVRNTARDLLYYAVTQDAMLIFENLSRGFGRQGKRTF |
| | MAERQYTRMEDWLTAKLAYEGLSKTYLSKTLAQYTSKTCSNCGFTITSADYDRVL |
| | EKLKKTATGWMTTINGKELKVEGQITYYNRYKRQNVVKDLSVELDRLSEESVNND |
| | ISSWTKGRSGEALSLLKKRFSHRPVQEKFVCLNCGFETHADEQAALNIARSWLFL |
| | RSQEYKKYQTNKTTGNTDKRAFVETWQSFYRKKLKEVWKPAV (SEQ ID NO: |
| | 119) |
| 285 | MQEIKRINKIRRRLVKDSNTKKAGKTGPMKTLLVRVMTPDLRERLENLRKKPENI |
| | PQPISNTSRANLNKLLTDYTEMKKAILHVYWEEFQKDPVGLMSRVAQPAPKNIDQ |
| | RKLIPVKDGNERLTSSGFACSQCCQPLYVYKLEQVNDKGKPHTNYFGRCNVSEHE |
| | RLILLSPHKPEANDELVTYSLGKFGQRALDFYSIHVTRESNHPVKPLEQIGGNSC |
| | ASGPVGKALSDACMGAVASFLTKYQDIILEHQKVIKKNEKRLANLKDIASANGLA |
| | FPKITLPPQPHTKEGIEAYNNVVAQIVIWVNLNLWQKLKIGRDEAKPLQRLKGFP |
| | SFPLVERQANEVDWWDMVCNVKKLINEKKEDGKVFWQNLAGYKRQEALRPYLSSE |
| | EDRKKGKKFARYQFGDLLLHLEKKHGEDWGKVYDEAWERIDKKVEGLSKHIKLEE |
| | ERRSEDAQSKAALTDWLRAKASFVIEGLKEADKDEFCRCELKLQKWYGDLRGKPF |
| | AIEAENSILDISGFSKQYNCAFIWQKDGVKKLNLYLIINYFKGGKLRFKKIKPEA |
| | FEANRFYTVINKKSGEIVPMEVNFNFDDPNLIILPLAFGKRQGREFIWNDLLSLE |
| | TGSLKLANGRVIEKTLYNRRTRQDEPALFVALTFERREVLDSSNIKPMNLIGIDR |
| | GENIPAVIALTDPEGCPLSRFKDSLGNPTHILRIGESYKEKQRTIQAKKEVEQRR |
| | AGGYSRKYASKAKNLADDMVRNTARDLLYYAVTQDAMLIFENLSRGFGRQGKRTF |
| | MAERQYTRMEDWLTAKLAYEGLSKTYLSKTLAQYTSKTCSNCGFTITSADYDRVL |
| | EKLKKTATGWMTTINGKELKVEGQITYYNRYKRQNVVKDLSVELDRLSEESVNND |
| | ISSWTKGRSGEALSLLKKRFSHRPVQEKFVCLNCGFETHADEQAALNIARSWLFL |
| | RSQEYKKYQTNKTTGNTDKRAFVETWQSFYRKKLKEVWKPAV (SEQ ID NO: |
| | 120) |
| 286 | MQEIKRINKIRRRLVKDSNTKKAGKTGPMKTLLVRVMTPDLRERLENLRKKPENI |
| | PQPISNTSRANLNKLLTDYTEMKKAILHVYWEEFQKDPVGLMSRVAQPAPKNIDQ |
| | RKLIPVKDGNERLTSSGFACSQCCQPLYVYKLEQVNDKGKPHTNYFGRCNVSEHE |
| | RLILLSPHKPEANDELVTYSLGKFGQRALDFYSIHVTRESNHPVKPLEQIGGNSC |
| | ASGPVGKALSDACMGAVASFLTKYQDIILEHQKVIKKNEKRLANLKDIASANGLA |
| | FPKITLPPQPHTKEGIEAYNNVVAQIVIWVNLNLWQKLKIGRDEAKPLQRLKGFP |
| | SFPLVERQANEVDWWDMVCNVKKLINEKKEDGKVFWQNLAGYKRQEALRPYLSSE |
| | EDRKKGKKFARYQFGDLLLHLEKKHGEDWGKVYDEAWERIDKKVEGLSKHIKLEE |
| | ERRSEDAQSKAALTDWLRAKASFVIEGLKEADKDEFCRCELKLQKWYGDLRGKPF |
| | AIEAENSILDISGFSKQYNCAFIWQKDGVKKLNLYLIINYFKGGKLRFKKIKPEA |
| | FEANRFYTVINKKSGEIVPMEVNFNFDDPNLIILPLAFGKRQGREFIWNDLLSLE |
| | TGSLKLANGRVIEKTLYNRRTRQDEPALFVALTFERREVLDSSNIKPMNLIGIDR |
| | GENIPAVIALTDPEGCPLSRFKDSLGNPTHILRIGESYKEKQRTIQAKKEVEQRR |
| | AGGYSRKYASKAKNLADDMVRNTARDLLYYAVTQDAMLIFENLSRGFGRQGKRTF |
| | MAERQYTRMEDWLTAKLAYEGLSKTYLSKTLAQYTSKTCSNCGFTITSADYDRVL |
| | EKLKKTATGWMTTINGKELKVEGQITYYNRYKRQNVVKDLSVELDRLSEESVNND |
| | ISSWTKGRSGEALSLLKKRFSHRPVQEKFVCLNCGFETHADEQAALNIARSWLFL |
| | RSQEYKKYQTNKTTGNTDKRAFVETWQSFYRKKLKEVWKPAV (SEQ ID NO: |
| | 121) |
| 287 | MQEIKRINKIRRRLVKDSNTKKAGKTGPMKTLLVRVMTPDLRERLENLRKKPENI |
| | PQPISNTSRANLNKLLTDYTEMKKAILHVYWEEFQKDPVGLMSRVAQPAPKNIDQ |
| | RKLIPVKDGNERLTSSGFACSQCCQPLYVYKLEQVNDKGKPHTNYFGRCNVSEHE |
| | RLILLSPHKPEANDELVTYSLGKFGQRALDFYSIHVTRESNHPVKPLEQIGGNSC |
| | ASGPVGKALSDACMGAVASFLTKYQDIILEHQKVIKKNEKRLANLKDIASANGLA |
| | FPKITLPPQPHTKEGIEAYNNVVAQIVIWVNLNLWQKLKIGRDEAKPLQRLKGFP |
| | SFPLVERQANEVDWWDMVCNVKKLINEKKEDGKVFWQNLAGYKRQEALRPYLSSE |
| | EDRKKGKKFARYQFGDLLLHLEKKHGEDWGKVYDEAWERIDKKVEGLSKHIKLEE |
| | ERRSEDAQSKAALTDWLRAKASFVIEGLKEADKDEFCRCELKLQKWYGDLRGKPF |
| | AIEAENSILDISGFSKQYNCAFIWQKDGVKKLNLYLIINYFKGGKLRFKKIKPEA |
| | FEANRFYTVINKKSGEIVPMEVNFNFDDPNLIILPLAFGKRQGREFIWNDLLSLE |
| | TGSLKLANGRVIEKTLYNRRTRQDEPALFVALTFERREVLDSSNIKPMNLIGIDR |
| | GENIPAVIALTDPEGCPLSRFKDSLGNPTHILRIGESYKEKQRTIQAKKEVEQRR |
| | AGGYSRKYASKAKNLADDMVRNTARDLLYYAVTQDAMLIFENLSRGFGRQGKRTF |
| | MAERQYTRMEDWLTAKLAYEGLSKTYLSKTLAQYTSKTCSNCGFTITSADYDRVL |
| | EKLKKTATGWMTTINGKELKVEGQITYYNRYKRQNVVKDLSVELDRLSEESVNND |
| | ISSWTKGRSGEALSLLKKRFSHRPVQEKFVCLNCGFETHADEQAALNIARSWLFL |
| | RSQEYKKYQTNKTTGNTDKRAFVETWQSFYRKKLKEVWKPAV (SEQ ID NO: |
| | 122) |
| 288 | MQEIKRINKIRRRLVKDSNTKKAGKTGPMKTLLVRVMTPDLRERLENLRKKPENI |
| | PQPISNTSRANLNKLLTDYTEMKKAILHVYWEEFQKDPVGLMSRVAQPAPKNIDQ |
| | RKLIPVKDGNERLTMSSGFACSQCCQPLYVYKLEQVNDKGKPHTNYFGRCNVSEH |
| | ERLILLSPHKPEANDELVTYSLGKFGQRALDFYSIHVTRESNHPVKPLEQIGGNS |
| | CASGPVGKALSDACMGAVASFLTKYQDIILEHQKVIKKNEKRLANLKDIASANGL |
| | AFPKITLPPQPHTKEGIEAYNNVVAQIVIWVNLNLWQKLKIGRDEAKPLQRLKGF |
| | PSFPLVERQANEVDWWDMVCNVKKLINEKKEDGKVFWQNLAGYKRQEALRPYLSS |
| | EEDRKKGKKFARYQFGDLLLHLEKKHGEDWGKVYDEAWERIDKKVEGLSKHIKLE |
| | EERRSEDAQSKAALTDWLRAKASFVIEGLKEADKDEFCRCELKLQKWYGDLRGKP |
| | FAIEAENSILDISGFSKQYNCAFIWQKDGVKKLNLYLIINYFKGGKLRFKKIKPE |
| | AFEANRFYTVINKKSGEIVPMEVNFNFDDPNLIILPLAFGKRQGREFIWNDLLSL |
| | ETGSLKLANGRVIEKTLYNRRTRQDEPALFVALTFERREVLDSSNIKPMNLIGID |
| | RGENIPAVIALTDPEGCPLSRFKDSLGNPTHILRIGESYKEKQRTIQAKKEVEQR |
| | RAGGYSRKYASKAKNLADDMVRNTARDLLYYAVTQDAMLIFENLSRGFGRQGKRT |
| | FMAERQYTRMEDWLTAKLAYEGLSKTYLSKTLAQYTSKTCSNCGFTITSADYDRV |
| | LEKLKKTATGWMTTINGKELKVEGQITYYNRYKRQNVVKDLSVELDRLSEESVNN |
| | DISSWTKGRSGEALSLLKKRFSHRPVQEKFVCLNCGFETHADEQAALNIARSWLF |
| | LRSQEYKKYQTNKTTGNTDKRAFVETWQSFYRKKLKEVWKPAV (SEQ ID NO: |
| | 123) |
| 290 | MQEIKRINKIRRRLVKDSNTKKAGKTGPMKTLLVRVMTPDLRERLENLRKKPENI |
| | PQPISNTSRANLNKLLTDYTEMKKAILHVYWEEFQKDPVGLMSRVAQPAPKNIDQ |
| | RKLIPVKDGNERLTSSGFACSQCCQPLYVYKLEQVNDKGKPHTNYFGRCNVSEHE |
| | RLILLSPHKPEANDELVTYSLGKFGQRALDFYSIHVTRESNHPVKPLEQIGGNSC |
| | ASGPVGKALSDACMGAVASFLTKYQDIILEHQKVIKKNEKRLANLKDIASANGLA |
| | FPKITLPPQPHTKEGIEAYNNVVAQIVIWVNLNLWQKLKIGRDEAKPLQRLKGFP |
| | SFPLVERQANEVDWWDMVCNVKKLINEKKEDGKVFWQNLAGYKRQEALRPYLSSE |
| | EDRKKGKKFARYQFGDLLLHLEKKHGEDWGKVYDEAWERIDKKVEGLSKHIKLEE |
| | ERRSEDAQSKAALTDWLRAKASFVIEGLKEADKDEFCRCELKLQKWYGDLRGKPF |
| | AIEAENSILDISGFSKQYNCAFIWQKDGVKKLNLYLIINYFKGGKLRFKKIKPEA |
| | FEANRFYTVINKKSGEIVPMEVNFNFDDPNLIILPLAFGKRQGREFIWNDLLSLE |
| | TGSLKLANGRVIEKTLYNRRTRQDEPALFVALTFERREVLDSSNIKPMNLIGIDR |
| | GENIPAVIALTDPEGCPLSRFKDSLGNPTHILRIGESYKEKQRTIQAKKEVEQRR |
| | AGGYSRKYASKAKNLADDMVRNTARDLLYYAVTQDAMLIFENLSRGFGRQGKRTF |
| | MAERQYTRMEDWLTAKLAYEGLSKTYLSKTLAQYTSKTCSNCGFTITSADYDRVL |
| | EKLKKTATGWMTTINGKELKVEGQITYYNRYKRQNVVKDLSVELDRLSEESVNND |
| | ISSWTKGRSGEALSLLKKRFSHRPVQEKFVCLNCGFETHADEQAALNIARSWLFL |
| | RSQEYKKYQTNKTTGNTDKRAFVETWQSFYRKKLKEVWKPAV (SEQ ID NO: |
| | 124) |
| 291 | MQEIKRINKIRRRLVKDSNTKKAGKTGPMKTLLVRVMTPDLRERLENLRKKPENI |
| | PQPISNTSRANLNKLLTDYTEMKKAILHVYWEEFQKDPVGLMSRVAQPAPKNIDQ |
| | RKLIPVKDGNERLTSSGFACSQCCQPLYVYKLEQVNDKGKPHTNYFGRCNVSEHE |
| | RLILLSPHKPEANDELVTYSLGKFGQRALDFYSIHVTRESNHPVKPLEQIGGNSC |
| | ASGPVGKALSDACMGAVASFLTKYQDIILEHQKVIKKNEKRLANLKDIASANGLA |
| | FPKITLPPQPHTKEGIEAYNNVVAQIVIWVNLNLWQKLKIGRDEAKPLQRLKGFP |
| | SFPLVERQANEVDWWDMVCNVKKLINEKKEDGKVFWQNLAGYKRQEALRPYLSSE |
| | EDRKKGKKFARYQFGDLLLHLEKKHGEDWGKVYDEAWERIDKKVEGLSKHIKLEE |
| | ERRSEDAQSKAALTDWLRAKASFVIEGLKEADKDEFCRCELKLQKWYGDLRGKPF |
| | AIEAENSILDISGFSKQYNCAFIWQKDGVKKLNLYLIINYFKGGKLRFKKIKPEA |
| | FEANRFYTVINKKSGEIVPMEVNFNFDDPNLIILPLAFGKRQGREFIWNDLLSLE |
| | TGSLKLANGRVIEKTLYNRRTRQDEPALFVALTFERREVLDSSNIKPMNLIGIDR |
| | GENIPAVIALTDPEGCPLSRFKDSLGNPTHILRIGESYKEKQRTIQAKKEVEQRR |
| | AGGYSRKYASKAKNLADDMVRNTARDLLYYAVTQDAMLIFENLSRGFGRQGKRTF |
| | MAERQYTRMEDWLTAKLAYEGLSKTYLSKTLAQYTSKTCSNCGFTITSADYDRVL |
| | EKLKKTATGWMTTINGKELKVEGQITYYNRYKRQNVVKDLSVELDRLSEESVNND |
| | ISSWTKGRSGEALSLLKKRFSHRPVQEKFVCLNCGFETHADEQAALNIARSWLFL |
| | RSQEYKKYQTNKTTGNTDKRAFVETWQSFYRKKLKEVWKPAV (SEQ ID NO: |
| | 125) |
| 293 | MQEIKRINKIRRRLVKDSNTKKAGKTGPMKTLLVRVMTPDLRERLENLRKKPENI |
| | PQPISNTSRANLNKLLTDYTEMKKAILHVYWEEFQKDPVGLMSRVAQPAPKNIDQ |
| | RKLIPVKDGNERLTSSGFACSQCCQPLYVYKLEQVNDKGKPHTNYFGRCNVSEHE |
| | RLILLSPHKPEANDELVTYSLGKFGQRALDFYSIHVTRESNHPVKPLEQIGGNSC |
| | ASGPVGKALSDACMGAVASFLTKYQDIILEHQKVIKKNEKRLANLKDIASANGLA |
| | FPKITLPPQPHTKEGIEAYNNVVAQIVIWVNLNLWQKLKIGRDEAKPLQRLKGFP |
| | SFPLVERQANEVDWWDMVCNVKKLINEKKEDGKVFWQNLAGYKRQEALRPYLSSE |
| | EDRKKGKKFARYQFGDLLLHLEKKHGEDWGKVYDEAWERIDKKVEGLSKHIKLEE |
| | ERRSEDAQSKAALTDWLRAKASFVIEGLKEADKDEFCRCELKLQKWYGDLRGKPF |
| | AIEAENSILDISGFSKQYNCAFIWQKDGVKKLNLYLIINYFKGGKLRFKKIKPEA |
| | FEANRFYTVINKKSGEIVPMEVNFNFDDPNLIILPLAFGKRQGREFIWNDLLSLE |
| | TGSLKLANGRVIEKTLYNRRTRQDEPALFVALTFERREVLDSSNIKPMNLIGIDR |
| | GENIPAVIALTDPEGCPLSRFKDSLGNPTHILRIGESYKEKQRTIQAKKEVEQRR |
| | AGGYSRKYASKAKNLADDMVRNTARDLLYYAVTQDAMLIFENLSRGFGRQGKRTF |
| | MAERQYTRMEDWLTAKLAYEGLSKTYLSKTLAQYTSKTCSNCGFTITSADYDRVL |
| | EKLKKTATGWMTTINGKELKVEGQITYYNRYKRQNVVKDLSVELDRLSEESVNND |
| | ISSWTKGRSGEALSLLKKRFSHRPVQEKFVCLNCGFETHADEQAALNIARSWLFL |
| | RSQEYKKYQTNKTTGNTDKRAFVETWQSFYRKKLKEVWKPAV (SEQ ID NO: |
| | 126) |
| 300 | MQEIKRINKIRRRLVKDSNTKKAGKTGPMKTLLVRVMTPDLRERLENLRKKPENI |
| | PQPISNTSRANLNKLLTDYTEMKKAILHVYWEEFQKDPVGLMSRVAQPAPKNIDQ |
| | RKLIPVKDGNERLTSSGFACSQCCQPLYVYKLEQVNDKGKPHTNYFGRCNVSEHE |
| | RLILLSPHKPEANDELVTYSLGKFGQRALDFYSIHVTRESNHPVKPLEQIGGNSC |
| | ASGPVGKALSDACMGAVASFLTKYQDIILEHQKVIKKNEKRLANLKDIASANGLA |
| | FPKITLPPQPHTKEGIEAYNNVVAQIVIWVNLNLWQKLKIGRDEAKPLQRLKGFP |
| | SFPLVERQANEVDWWDMVCNVKKLINEKKEDGKVFWQNLAGYKRQEALRPYLSSE |
| | EDRKKGKKFARYQFGDLLLHLEKKHGEDWGKVYDEAWERIDKKVEGLSKHIKLEE |
| | ERRSEDAQSKAALTDWLRAKASFVIEGLKEADKDEFCRCELKLQKWYGDLRGKPF |
| | AIEAENSILDISGFSKQYNCAFIWQKDGVKKLNLYLIINYFKGGKLRFKKIKPEA |
| | FEANRFYTVINKKSGEIVPMEVNFNFDDPNLIILPLAFGKRQGREFIWNDLLSLE |
| | TGSLKLANGRVIEKTLYNRRTRQDEPALFVALTFERREVLDSSNIKPMNLIGIDR |
| | GENIPAVIALTDPEGCPLSRFKDSLGNPTHILRIGESYKEKQRTIQAKKEVEQRR |
| | AGGYSRKYASKAKNLADDMVRNTARDLLYYAVTQDAMLIFENLSRGFGRQGKRTF |
| | MAERQYTRMEDWLTAKLAYEGLSKTYLSKTLAQYTSKTCSNCGFTITSADYDRVL |
| | EKLKKTATGWMTTINGKELKVEGQITYYNRYKRQNVVKDLSVELDRLSEESVNND |
| | ISSWTKGRSGEALSLLKKRFSHRPVQEKFVCLNCGFETHADEQAALNIARSWLFL |
| | RSQEYKKYQTNKTTGNTDKRAFVETWQSFYRKKLKEVWKPAV (SEQ ID NO: |
| | 127) |
| 492 | MQEIKRINKIRRRLVKDSNTKKAGKTGPMKTLLVRVMTPDLRERLENLRKKPENI |
| | PQPISNTSRANLNKLLTDYTEMKKAILHVYWEEFQKDPVGLMSRVAQPAPKNIDQ |
| | RKLIPVKDGNERLTSSGFACSQCCQPLYVYKLEQVNDKGKPHTNYFGRCNVSEHE |
| | RLILLSPHKPEANDELVTYSLGKFGQRALDFYSIHVTRESNHPVKPLEQIGGNSC |
| | ASGPVGKALSDACMGAVASFLTKYQDIILEHQKVIKKNEKRLANLKDIASANGLA |
| | FPKITLPPQPHTKEGIEAYNNVVAQIVIWVNLNLWQKLKIGRDEAKPLQRLKGFP |
| | SFPLVERQANEVDWWDMVCNVKKLINEKKEDGKVFWQNLAGYKRQEALRPYLSSE |
| | EDRKKGKKFARYQFGDLLLHLEKKHGEDWGKVYDEAWERIDKKVEGLSKHIKLEE |
| | ERRSEDAQSKAALTDWLRAKASFVIEGLKEADKDEFCRCELKLQKWYGDLRGKPF |
| | AIEAENSILDISGFSKQYNCAFIWQKDGVKKLNLYLIINYFKGGKLRFKKIKPEA |
| | FEANRFYTVINKKSGEIVPMEVNFNFDDPNLIILPLAFGKRQGREFIWNDLLSLE |
| | TGSLKLANGRVIEKTLYNRRTRQDEPALFVALTFERREVLDSSNIKPMNLIGIDR |
| | GENIPAVIALTDPEGCPLSRFKDSLGNPTHILRIGESYKEKQRTIQAKKEVEQRR |
| | AGGYSRKYASKAKNLADDMVRNTARDLLYYAVTQDAMLIFENLSRGFGRQGKRTF |
| | MAERQYTRMEDWLTAKLAYEGLSKTYLSKTLAQYTSKTCSNCGFTITSADYDRVL |
| | EKLKKTATGWMTTINGKELKVEGQITYYNRYKRQNVVKDLSVELDRLSEESVNND |
| | ISSWTKGRSGEALSLLKKRFSHRPVQEKFVCLNCGFETHADEQAALNIARSWLFL |
| | RSQEYKKYQTNKTTGNTDKRAFVETWQSFYRKKLKEVWKPAV (SEQ ID NO: |
| | 128) |
| 493 | MQEIKRINKIRRRLVKDSNTKKAGKTGPMKTLLVRVMTPDLRERLENLRKKPENI |
| | PQPISNTSRANLNKLLTDYTEMKKAILHVYWEEFQKDPVGLMSRVAQPAPKNIDQ |
| | RKLIPVKDGNERLTSSGFACSQCCQPLYVYKLEQVNDKGKPHTNYFGRCNVSEHE |
| | RLILLSPHKPEANDELVTYSLGKFGQRALDFYSIHVTRESNHPVKPLEQIGGNSC |
| | ASGPVGKALSDACMGAVASFLTKYQDIILEHQKVIKKNEKRLANLKDIASANGLA |
| | FPKITLPPQPHTKEGIEAYNNVVAQIVIWVNLNLWQKLKIGRDEAKPLQRLKGFP |
| | SFPLVERQANEVDWWDMVCNVKKLINEKKEDGKVFWQNLAGYKRQEALRPYLSSE |
| | EDRKKGKKFARYQFGDLLLHLEKKHGEDWGKVYDEAWERIDKKVEGLSKHIKLEE |
| | ERRSEDAQSKAALTDWLRAKASFVIEGLKEADKDEFCRCELKLQKWYGDLRGKPF |
| | AIEAENSILDISGFSKQYNCAFIWQKDGVKKLNLYLIINYFKGGKLRFKKIKPEA |
| | FEANRFYTVINKKSGEIVPMEVNFNFDDPNLIILPLAFGKRQGREFIWNDLLSLE |
| | TGSLKLANGRVIEKTLYNRRTRQDEPALFVALTFERREVLDSSNIKPMNLIGIDR |
| | GENIPAVIALTDPEGCPLSRFKDSLGNPTHILRIGESYKEKQRTIQAKKEVEQRR |
| | AGGYSRKYASKAKNLADDMVRNTARDLLYYAVTQDAMLIFENLSRGFGRQGKRTF |
| | MAERQYTRMEDWLTAKLAYEGLSKTYLSKTLAQYTSKTCSNCGFTITSADYDRVL |
| | EKLKKTATGWMTTINGKELKVEGQITYYNRYKRQNVVKDLSVELDRLSEESVNND |
| | ISSWTKGRSGEALSLLKKRFSHRPVQEKFVCLNCGFETHADEQAALNIARSWLFL |
| | RSQEYKKYQTNKTTGNTDKRAFVETWQSFYRKKLKEVWKPAV (SEQ ID NO: |
| | 129) |
| 387: | QEIKRINKIRRRLVKDSNTKKAGKTGPMKTLLVRVMTPDLRERLENLRKKPENIP |
| NTSB | QPISNTSRANLNKLLTDYTEMKKAILHVYWEEFQKDPVGLMSRVAQPASKKIDQN |
| swap from | KLKPEMDEKGNLTTAGFACSQCGQPLFVYKLEQVSEKGKAYTNYFGRCNVAEHEK |
| SEQ ID | LILLAQLKPEKDSDEAVTYSLGKFGQRALDFYSIHVTRESNHPVKPLEQIGGNSC |
| NO: 1 | ASGPVGKALSDACMGAVASFLTKYQDIILEHQKVIKKNEKRLANLKDIASANGLA |
| | FPKITLPPQPHTKEGIEAYNNVVAQIVIWVNLNLWQKLKIGRDEAKPLQRLKGFP |
| | SFPLVERQANEVDWWDMVCNVKKLINEKKEDGKVFWQNLAGYKRQEALRPYLSSE |
| | EDRKKGKKFARYQFGDLLLHLEKKHGEDWGKVYDEAWERIDKKVEGLSKHIKLEE |
| | ERRSEDAQSKAALTDWLRAKASFVIEGLKEADKDEFCRCELKLQKWYGDLRGKPF |
| | AIEAENSILDISGFSKQYNCAFIWQKDGVKKLNLYLIINYFKGGKLRFKKIKPEA |
| | FEANRFYTVINKKSGEIVPMEVNFNFDDPNLIILPLAFGKRQGREFIWNDLLSLE |
| | TGSLKLANGRVIEKTLYNRRTRQDEPALFVALTFERREVLDSSNIKPMNLIGIDR |
| | GENIPAVIALTDPEGCPLSRFKDSLGNPTHILRIGESYKEKQRTIQAKKEVEQRR |
| | AGGYSRKYASKAKNLADDMVRNTARDLLYYAVTQDAMLIFENLSRGFGRQGKRTF |
| | MAERQYTRMEDWLTAKLAYEGLSKTYLSKTLAQYTSKTCSNCGFTITSADYDRVL |
| | EKLKKTATGWMTTINGKELKVEGQITYYNRYKRQNVVKDLSVELDRLSEESVNND |
| | ISSWTKGRSGEALSLLKKRFSHRPVQEKFVCLNCGFETHADEQAALNIARSWLFL |
| | RSQEYKKYQTNKTTGNTDKRAFVETWQSFYRKKLKEVWKPAV (SEQ ID NO: |
| | 130) |
| 395: | QEIKRINKIRRRLVKDSNTKKAGKTGPMKTLLVRVMTPDLRERLENLRKKPENIP |
| Helical 1B | QPISNTSRANLNKLLTDYTEMKKAILHVYWEEFQKDPVGLMSRVAQPAPKNIDQR |
| swap from | KLIPVKDGNERLTSSGFACSQCCQPLYVYKLEQVNDKGKPHTNYFGRCNVSEHER |
| SEQ ID | LILLSPHKPEANDELVTYSLGKFGQRALDFYSIHVTKESTHPVKPLAQIAGNRYA |
| NO: 1 | SGPVGKALSDACMGTIASFLSKYQDIIIEHQKVVKGNQKRLESLRELAGKENLEY |
| | PSVTLPPQPHTKEGVDAYNEVIARVRMWVNLNLWQKLKLSRDDAKPLLRLKGFPS |
| | FPLVERQANEVDWWDMVCNVKKLINEKKEDGKVFWQNLAGYKRQEALRPYLSSEE |
| | DRKKGKKFARYQFGDLLLHLEKKHGEDWGKVYDEAWERIDKKVEGLSKHIKLEEE |
| | RRSEDAQSKAALTDWLRAKASFVIEGLKEADKDEFCRCELKLQKWYGDLRGKPFA |
| | IEAENSILDISGESKQYNCAFIWQKDGVKKLNLYLIINYFKGGKLRFKKIKPEAF |
| | EANRFYTVINKKSGEIVPMEVNFNFDDPNLIILPLAFGKRQGREFIWNDLLSLET |
| | GSLKLANGRVIEKTLYNRRTRQDEPALFVALTFERREVLDSSNIKPMNLIGIDRG |
| | ENIPAVIALTDPEGCPLSRFKDSLGNPTHILRIGESYKEKQRTIQAKKEVEQRRA |
| | GGYSRKYASKAKNLADDMVRNTARDLLYYAVTQDAMLIFENLSRGFGRQGKRTFM |
| | AERQYTRMEDWLTAKLAYEGLSKTYLSKTLAQYTSKTCSNCGFTITSADYDRVLE |
| | KLKKTATGWMTTINGKELKVEGQITYYNRYKRQNVVKDLSVELDRLSEESVNNDI |
| | SSWTKGRSGEALSLLKKRFSHRPVQEKFVCLNCGFETHADEQAALNIARSWLFLR |
| | SQEYKKYQTNKTTGNTDKRAFVETWQSFYRKKLKEVWKPAV (SEQ ID NO: |
| | 131) |
| 485: | QEIKRINKIRRRLVKDSNTKKAGKTGPMKTLLVRVMTPDLRERLENLRKKPENIP |
| Helical 1B | QPISNTSRANLNKLLTDYTEMKKAILHVYWEEFQKDPVGLMSRVAQPAPKNIDQR |
| swap from | KLIPVKDGNERLTSSGFACSQCCQPLYVYKLEQVNDKGKPHTNYFGRCNVSEHER |
| SEQ ID | LILLSPHKPEANDELVTYSLGKFGQRALDFYSIHVTKESTHPVKPLAQIAGNRYA |
| NO: 1 | SGPVGKALSDACMGTIASFLSKYQDIIIEHQKVVKGNQKRLESLRELAGKENLEY |
| | PSVTLPPQPHTKEGVDAYNEVIARVRMWVNLNLWQKLKLSRDDAKPLLRLKGFPS |
| | FPLVERQANEVDWWDMVCNVKKLINEKKEDGKVFWQNLAGYKRQEALRPYLSSEE |
| | DRKKGKKFARYQLGDLLLHLEKKHGEDWGKVYDEAWERIDKKVEGLSKHIKLEEE |
| | RRSEDAQSKAALTDWLRAKASFVIEGLKEADKDEFCRCELKLQKWYGDLRGKPFA |
| | IEAENSILDISGFSKQYNCAFIWQKDGVKKLNLYLIINYFKGGKLRFKKIKPEAF |
| | EANRFYTVINKKSGEIVPMEVNFNFDDPNLIILPLAFGKRQGREFIWNDLLSLET |
| | GSLKLANGRVIEKTLYNRRTRQDEPALFVALTFERREVLDSSNIKPMNLIGVDRG |
| | ENIPAVIALTDPEGCPLSRFKDSLGNPTHILRIGESYKEKQRTIQAKKEVEQRRA |
| | GGYSRKYASKAKNLADDMVRNTARDLLYYAVTQDAMLIFENLSRGFGRQGKRTFM |
| | AERQYTRMEDWLTAKLAYEGLSKTYLSKTLAQYTSKTCSNCGFTITSADYDRVLE |
| | KLKKTATGWMTTINGKELKVEGQITYYNRRKRQNVVKDLSVELDRLSEESVNNDI |
| | SSWTKGRSGEALSLLKKRFSHRPVQEKFVCLNCGFETHADEQAALNIARSWLFLR |
| | SQEYKKYQTNKTTGNTDKRAFVETWQSFYRKKLKEVWKPAV (SEQ ID NO: |
| | 132) |
| 486: | QEIKRINKIRRRLVKDSNTKKAGKTGPMKTLLVRVMTPDLRERLENLRKKPENIP |
| Helical 1B | QPISNTSRANLNKLLTDYTEMKKAILHVYWEEFQKDPVGLMSRVAQPAPKNIDQR |
| swap from | KLIPVKDGNERLTSSGFACSQCCQPLYVYKLEQVNDKGKPHTNYFGRCNVSEHER |
| SEQ ID | LILLSPHKPEANDELVTYSLGKFGQRALDFYSIHVTKESTHPVKPLAQIAGNRYA |
| NO: 1 | SGPVGKALSDACMGTIASFLSKYQDIIIEHQKVVKGNQKRLESLRELAGKENLEY |
| | PSVTLPPQPHTKEGVDAYNEVIARVRMWVNLNLWQKLKLSRDDAKPLLRLKGFPS |
| | FPLVERQANEVDWWDMVCNVKKLINEKKEDGKVFWQNLAGYKRQEALRPYLSSEE |
| | DRKKGKKFARYQLGDLLKHLEKKHGEDWGKVYDEAWERIDKKVEGLSKHIKLEEE |
| | RRSEDAQSKAALTDWLRAKASFVIEGLKEADKDEFCRCELKLQKWYGDLRGKPFA |
| | IEAENSILDISGFSKQYNCAFIWQKDGVKKLNLYLIINYFKGGKLRFKKIKPEAF |
| | EANRFYTVINKKSGEIVPMEVNFNFDDPNLIILPLAFGKRQGREFIWNDLLSLET |
| | GSLKLANGRVIEKTLYNRRTRQDEPALFVALTFERREVLDSSNIKPMNLIGVDRG |
| | ENIPAVIALTDPEGCPLSRFKDSLGNPTHILRIGESYKEKQRTIQAKKEVEQRRA |
| | GGYSRKYASKAKNLADDMVRNTARDLLYYAVTQDAMLIFENLSRGFGRQGKRTFM |
| | AERQYTRMEDWLTAKLAYEGLSKTYLSKTLAQYTSKTCSNCGFTITSADYDRVLE |
| | KLKKTATGWMTTINGKELKVEGQITYYNRRKRQNVVKDLSVELDRLSEESVNNDI |
| | SSWTKGRSGEALSLLKKRFSHRPVQEKFVCLNCGFETHADEQAALNIARSWLFLR |
| | SQEYKKYQTNKTTGNTDKRAFVETWQSFYRKKLKEVWKPAV (SEQ ID NO: |
| | 133) |
| 487: | QEIKRINKIRRRLVKDSNTKKAGKTGPMKTLLVRVMTPDLRERLENLRKKPENIP |
| Helical 1B | QPISNTSRANLNKLLTDYTEMKKAILHVYWEEFQKDPVGLMSRVAQPAPKNIDQR |
| swap from | KLIPVKDGNERLTSSGFACSQCCQPLYVYKLEQVNDKGKPHTNYFGRCNVSEHER |
| SEQ ID | LILLSPHKPEANDELVTYSLGKFGQRALDFYSIHVTKESTHPVKPLAQIAGNRYA |
| NO: 1 | SGPVGKALSDACMGTIASFLSKYQDIIIEHQKVVKGNQKRLESLRELAGKENLEY |
| | PSVTLPPQPHTKEGVDAYNEVIARVRMWVNLNLWQKLKLSRDDAKPLLRLKGFPS |
| | FPLVERQANEVDWWDMVCNVKKLINEKKEDGKVFWQNLAGYKRQEALRPYLSSEE |
| | DRKKGKKFARYQLGDLLLHLEKKHGEDWGKVYDEAWERIDKKVEGLSKHIKLEEE |
| | RRSEDAQSKAALTDWLRAKASFVIEGLKEADKDEFCRCELKLQKWYGDLRGKPFA |
| | IEAENSILDISGFSKQYNCAFIWQKDGVKKLNLYLIINYFKGGKLRFKKIKPEAF |
| | EANRFYTVINKKSGEIVPMEVNENEDDPNLIILPLAFGKRQGREFIWNDLLSLET |
| | GSLKLANGRVIEKTLYNRRTRQDEPALFVALTFERREVLDSSNIKPMNLIGVDRG |
| | ENIPAVIALTDPEGCPLSRFKDSLGNPTHILRIGESYKEKQRTIQAKKEVEQRRA |
| | GGYSRKYASKAKNLADDMVRNTARDLLYYAVTQDAMLIFENLSRGFGRQGKRTFM |
| | AERQYTRMEDWLTAKLAYEGLSKTYLSKTLAQYTSKTCSNCGFTITSADYDRVLE |
| | KLKKTATGWMTTINGKELKVEGQITYYNRYKRQNVVKDLSVELDRLSEESVNNDI |
| | SSWTKGRSGEALSLLKKRFSHRPVQEKFVCLNCGFETHADEQAALNIARSWLFLR |
| | SQEYKKYQTNKTTGNTDKRAFVETWQSFYRKKLKEVWKPAV (SEQ ID NO: |
| | 134) |
| 488: | QEIKRINKIRRRLVKDSNTKKAGKTGPMKTLLVRVMTPDLRERLENLRKKPENIP |
| NTSB and | QPISNTSRANLNKLLTDYTEMKKAILHVYWEEFQKDPVGLMSRVAQPASKKIDQN |
| Helical 1B | KLKPEMDEKGNLTTAGFACSQCGQPLFVYKLEQVSEKGKAYTNYFGRCNVAEHEK |
| swap from | LILLAQLKPEKDSDEAVTYSLGKFGQRALDFYSIHVTKESTHPVKPLAQIAGNRY |
| SEQ ID | ASGPVGKALSDACMGTIASFLSKYQDIIIEHQKVVKGNQKRLESLRELAGKENLE |
| NO: 1 | YPSVTLPPQPHTKEGVDAYNEVIARVRMWVNLNLWQKLKLSRDDAKPLLRLKGFP |
| | SFPLVERQANEVDWWDMVCNVKKLINEKKEDGKVFWQNLAGYKRQEALRPYLSSE |
| | EDRKKGKKFARYQFGDLLLHLEKKHGEDWGKVYDEAWERIDKKVEGLSKHIKLEE |
| | ERRSEDAQSKAALTDWLRAKASFVIEGLKEADKDEFCRCELKLQKWYGDLRGKPF |
| | AIEAENSILDISGFSKQYNCAFIWQKDGVKKLNLYLIINYFKGGKLRFKKIKPEA |
| | FEANRFYTVINKKSGEIVPMEVNFNFDDPNLIILPLAFGKRQGREFIWNDLLSLE |
| | TGSLKLANGRVIEKTLYNRRTRQDEPALFVALTFERREVLDSSNIKPMNLIGIDR |
| | GENIPAVIALTDPEGCPLSRFKDSLGNPTHILRIGESYKEKQRTIQAKKEVEQRR |
| | AGGYSRKYASKAKNLADDMVRNTARDLLYYAVTQDAMLIFENLSRGFGRQGKRTF |
| | MAERQYTRMEDWLTAKLAYEGLSKTYLSKTLAQYTSKTCSNCGFTITSADYDRVL |
| | EKLKKTATGWMTTINGKELKVEGQITYYNRYKRQNVVKDLSVELDRLSEESVNND |
| | ISSWTKGRSGEALSLLKKRFSHRPVQEKFVCLNCGFETHADEQAALNIARSWLFL |
| | RSQEYKKYQTNKTTGNTDKRAFVETWQSFYRKKLKEVWKPAV (SEQ ID NO: |
| | 135) |
| 489: | QEIKRINKIRRRLVKDSNTKKAGKTGPMKTLLVRVMTPDLRERLENLRKKPENIP |
| NTSB and | QPISNTSRANLNKLLTDYTEMKKAILHVYWEEFQKDPVGLMSRVAQPASKKIDQN |
| Helical 1B | KLKPEMDEKGNLTTAGFACSQCGQPLFVYKLEQVSEKGKAYTNYFGRCNVAEHEK |
| swap from | LILLAQLKPEKDSDEAVTYSLGKFGQRALDFYSIHVTKESTHPVKPLAQIAGNRY |
| SEQ ID | ASGPVGKALSDACMGTIASFLSKYQDIIIEHQKVVKGNQKRLESLRELAGKENLE |
| NO: 1 | YPSVTLPPQPHTKEGVDAYNEVIARVRMWVNLNLWQKLKLSRDDAKPLLRLKGFP |
| | SFPLVERQANEVDWWDMVCNVKKLINEKKEDGKVFWQNLAGYKRQEALRPYLSSE |
| | EDRKKGKKFARYQLGDLLLHLEKKHGEDWGKVYDEAWERIDKKVEGLSKHIKLEE |
| | ERRSEDAQSKAALTDWLRAKASFVIEGLKEADKDEFCRCELKLQKWYGDLRGKPF |
| | AIEAENSILDISGFSKQYNCAFIWQKDGVKKLNLYLIINYFKGGKLRFKKIKPEA |
| | FEANRFYTVINKKSGEIVPMEVNFNFDDPNLIILPLAFGKRQGREFIWNDLLSLE |
| | TGSLKLANGRVIEKTLYNRRTRQDEPALFVALTFERREVLDSSNIKPMNLIGVDR |
| | GENIPAVIALTDPEGCPLSRFKDSLGNPTHILRIGESYKEKQRTIQAKKEVEQRR |
| | AGGYSRKYASKAKNLADDMVRNTARDLLYYAVTQDAMLIFENLSRGFGRQGKRTF |
| | MAERQYTRMEDWLTAKLAYEGLSKTYLSKTLAQYTSKTCSNCGFTITSADYDRVL |
| | EKLKKTATGWMTTINGKELKVEGQITYYNRRKRQNVVKDLSVELDRLSEESVNND |
| | ISSWTKGRSGEALSLLKKRFSHRPVQEKFVCLNCGFETHADEQAALNIARSWLFL |
| | RSQEYKKYQTNKTTGNTDKRAFVETWQSFYRKKLKEVWKPAV (SEQ ID NO: |
| | 136) |
| 490: | QEIKRINKIRRRLVKDSNTKKAGKTGPMKTLLVRVMTPDLRERLENLRKKPENIP |
| NTSB and | QPISNTSRANLNKLLTDYTEMKKAILHVYWEEFQKDPVGLMSRVAQPASKKIDQN |
| Helical 1B | KLKPEMDEKGNLTTAGFACSQCGQPLFVYKLEQVSEKGKAYTNYFGRCNVAEHEK |
| swap from | LILLAQLKPEKDSDEAVTYSLGKFGQRALDFYSIHVTKESTHPVKPLAQIAGNRY |
| SEQ ID | ASGPVGKALSDACMGTIASFLSKYQDIIIEHQKVVKGNQKRLESLRELAGKENLE |
| NO: 1 | YPSVTLPPQPHTKEGVDAYNEVIARVRMWVNLNLWQKLKLSRDDAKPLLRLKGFP |
| | SFPLVERQANEVDWWDMVCNVKKLINEKKEDGKVFWQNLAGYKRQEALRPYLSSE |
| | EDRKKGKKFARYQLGDLLKHLEKKHGEDWGKVYDEAWERIDKKVEGLSKHIKLEE |
| | ERRSEDAQSKAALTDWLRAKASFVIEGLKEADKDEFCRCELKLQKWYGDLRGKPF |
| | AIEAENSILDISGFSKQYNCAFIWQKDGVKKLNLYLIINYFKGGKLRFKKIKPEA |
| | FEANRFYTVINKKSGEIVPMEVNFNFDDPNLIILPLAFGKRQGREFIWNDLLSLE |
| | TGSLKLANGRVIEKTLYNRRTRQDEPALFVALTFERREVLDSSNIKPMNLIGVDR |
| | GENIPAVIALTDPEGCPLSRFKDSLGNPTHILRIGESYKEKQRTIQAKKEVEQRR |
| | AGGYSRKYASKAKNLADDMVRNTARDLLYYAVTQDAMLIFENLSRGFGRQGKRTF |
| | MAERQYTRMEDWLTAKLAYEGLSKTYLSKTLAQYTSKTCSNCGFTITSADYDRVL |
| | EKLKKTATGWMTTINGKELKVEGQITYYNRRKRQNVVKDLSVELDRLSEESVNND |
| | ISSWTKGRSGEALSLLKKRFSHRPVQEKFVCLNCGFETHADEQAALNIARSWLFL |
| | RSQEYKKYQTNKTTGNTDKRAFVETWQSFYRKKLKEVWKPAV (SEQ ID NO: |
| | 137) |
| 491: | QEIKRINKIRRRLVKDSNTKKAGKTGPMKTLLVRVMTPDLRERLENLRKKPENIP |
| NTSB and | QPISNTSRANLNKLLTDYTEMKKAILHVYWEEFQKDPVGLMSRVAQPASKKIDQN |
| Helical 1B | KLKPEMDEKGNLTTAGFACSQCGQPLFVYKLEQVSEKGKAYTNYFGRCNVAEHEK |
| swap from | LILLAQLKPEKDSDEAVTYSLGKFGQRALDFYSIHVTKESTHPVKPLAQIAGNRY |
| SEQ ID | ASGPVGKALSDACMGTIASFLSKYQDIIIEHQKVVKGNQKRLESLRELAGKENLE |
| NO: 1 | YPSVTLPPQPHTKEGVDAYNEVIARVRMWVNLNLWQKLKLSRDDAKPLLRLKGFP |
| | SFPLVERQANEVDWWDMVCNVKKLINEKKEDGKVFWQNLAGYKRQEALRPYLSSE |
| | EDRKKGKKFARYQLGDLLLHLEKKHGEDWGKVYDEAWERIDKKVEGLSKHIKLEE |
| | ERRSEDAQSKAALTDWLRAKASFVIEGLKEADKDEFCRCELKLQKWYGDLRGKPF |
| | AIEAENSILDISGFSKQYNCAFIWQKDGVKKLNLYLIINYFKGGKLRFKKIKPEA |
| | FEANRFYTVINKKSGEIVPMEVNFNFDDPNLIILPLAFGKRQGREFIWNDLLSLE |
| | TGSLKLANGRVIEKTLYNRRTRQDEPALFVALTFERREVLDSSNIKPMNLIGVDR |
| | GENIPAVIALTDPEGCPLSRFKDSLGNPTHILRIGESYKEKQRTIQAKKEVEQRR |
| | AGGYSRKYASKAKNLADDMVRNTARDLLYYAVTQDAMLIFENLSRGFGRQGKRTF |
| | MAERQYTRMEDWLTAKLAYEGLSKTYLSKTLAQYTSKTCSNCGFTITSADYDRVL |
| | EKLKKTATGWMTTINGKELKVEGQITYYNRYKRQNVVKDLSVELDRLSEESVNND |
| | ISSWTKGRSGEALSLLKKRFSHRPVQEKFVCLNCGFETHADEQAALNIARSWLFL |
| | RSQEYKKYQTNKTTGNTDKRAFVETWQSFYRKKLKEVWKPAV (SEQ ID NO: |
| | 138) |
| 494: | QEIKRINKIRRRLVKDSNTKKAGKTGPMKTLLVRVMTPDLRERLENLRKKPENIP |
| NTSB | QPISNTSRANLNKLLTDYTEMKKAILHVYWEEFQKDPVGLMSRVAQPASKKIDQN |
| swap from | KLKPEMDEKGNLTTAGFACSQCGQPLFVYKLEQVSEKGKAYTNYFGRCNVAEHEK |
| SEQ ID | LILLAQLKPEKDSDEAVTYSLGKFGQRALDFYSIHVTRESNHPVKPLEQIGGNSC |
| NO: 1 | ASGPVGKALSDACMGAVASFLTKYQDIILEHQKVIKKNEKRLANLKDIASANGLA |
| | FPKITLPPQPHTKEGIEAYNNVVAQIVIWVNLNLWQKLKIGRDEAKPLQRLKGFP |
| | SFPLVERQANEVDWWDMVCNVKKLINEKKEDGKVFWQNLAGYKRQEALRPYLSSE |
| | EDRKKGKKFARYQLGDLLLHLEKKHGEDWGKVYDEAWERIDKKVEGLSKHIKLEE |
| | ERRSEDAQSKAALTDWLRAKASFVIEGLKEADKDEFCRCELKLQKWYGDLRGKPF |
| | AIEAENSILDISGFSKQYNCAFIWQKDGVKKLNLYLIINYFKGGKLRFKKIKPEA |
| | FEANRFYTVINKKSGEIVPMEVNFNFDDPNLIILPLAFGKRQGREFIWNDLLSLE |
| | TGSLKLANGRVIEKTLYNRRTRQDEPALFVALTFERREVLDSSNIKPMNLIGVDR |
| | GENIPAVIALTDPEGCPLSRFKDSLGNPTHILRIGESYKEKQRTIQAKKEVEQRR |
| | AGGYSRKYASKAKNLADDMVRNTARDLLYYAVTQDAMLIFENLSRGFGRQGKRTF |
| | MAERQYTRMEDWLTAKLAYEGLSKTYLSKTLAQYTSKTCSNCGFTITSADYDRVL |
| | EKLKKTATGWMITINGKELKVEGQITYYNRYKRQNVVKDLSVELDRLSEESVNND |
| | ISSWTKGRSGEALSLLKKRFSHRPVQEKFVCLNCGFETHADEQAALNIARSWLFL |
| | RSQEYKKYQTNKTTGNTDKRAFVETWQSFYRKKLKEVWKPAV (SEQ ID NO: |
| | 139) |
| 328: | MQEIKRINKIRRRLVKDSNTKKAGKTGPMKTLLVRVMTPDLRERLENLRKKPENI |
| S867G | PQPISNTSRANLNKLLTDYTEMKKAILHVYWEEFQKDPVGLMSRVAQPAPKNIDQ |
| | RKLIPVKDGNERLTSSGFACSQCCQPLYVYKLEQVNDKGKPHTNYFGRCNVSEHE |
| | RLILLSPHKPEANDELVTYSLGKFGQRALDFYSIHVTRESNHPVKPLEQIGGNSC |
| | ASGPVGKALSDACMGAVASFLTKYQDIILEHQKVIKKNEKRLANLKDIASANGLA |
| | FPKITLPPQPHTKEGIEAYNNVVAQIVIWVNLNLWQKLKIGRDEAKPLQRLKGFP |
| | SFPLVERQANEVDWWDMVCNVKKLINEKKEDGKVFWQNLAGYKRQEALLPYLSSE |
| | EDRKKGKKFARYQFGDLLLHLEKKHGEDWGKVYDEAWERIDKKVEGLSKHIKLEE |
| | ERRSEDAQSKAALTDWLRAKASFVIEGLKEADKDEFCRCELKLQKWYGDLRGKPF |
| | AIEAENSILDISGFSKQYNCAFIWQKDGVKKLNLYLIINYFKGGKLRFKKIKPEA |
| | FEANRFYTVINKKSGEIVPMEVNFNFDDPNLIILPLAFGKRQGREFIWNDLLSLE |
| | TGSLKLANGRVIEKTLYNRRTRQDEPALFVALTFERREVLDSSNIKPMNLIGIDR |
| | GENIPAVIALTDPEGCPLSRFKDSLGNPTHILRIGESYKEKQRTIQAAKEVEQRR |
| | AGGYSRKYASKAKNLADDMVRNTARDLLYYAVTQDAMLIFENLSRGFGRQGKRTF |
| | MAERQYTRMEDWLTAKLAYEGLPSKTYLSKTLAQYTSKTCSNCGFTITSADYDRV |
| | LEKLKKTATGWMTTINGKELKVEGQITYYNRYKRQNVVKDLGVELDRLSEESVNN |
| | DISSWTKGRSGEALSLLKKRFSHRPVQEKFVCLNCGFETHADEQAALNIARSWLF |
| | LRSQEYKKYQTNKTTGNTDKRAFVETWQSFYRKKLKEVWKPAV (SEQ ID NO: |
| | 140) |
| 388: | MQEIKRINKIRRRLVKDSNTKKAGKTGPMKTLLVRVMTPDLRERLENLRKKPENI |
| L379R + | PQPISNTSRANLNKLLTDYTEMKKAILHVYWEEFQKDPVGLMSRVAQPAPKNIDQ |
| A708K + | RKLIPVKDGNERLTSSGFACSQCCQPLYVYKLEQVNDKGKPHTNYFGRCNVSEHE |
| [P793] + | RLILLSPHKPEANDELVTYSLGKFGQRALDFYSIHVTRESNHPVKPLEQIGGNSC |
| X1 | ASGPVGKALSDACMGAVASFLTKYQDIILEHQKVIKKNEKRLANLKDIASANGLA |
| Helical2 | FPKITLPPQPHTKEGIEAYNNVVAQIVIWVNLNLWQKLKIGRDEAKPLQRLKGFP |
| swap | SFPVVERRENEVDWWNTINEVKKLIDAKRDMGRVFWSGVTAEKRNTILEGYNYLP |
| | NENDHKKREGSLENPKKPAKRQFGDLLLYLEKKYAGDWGKVEDEAWERIDKKIAG |
| | LTSHIEREEARNAEDAQSKAVLTDWLRAKASFVLERLKEMDEKEFYACEIQLQKW |
| | YGDLRGNPFAVEAENSILDISGFSKQYNCAFIWQKDGVKKLNLYLIINYFKGGKL |
| | RFKKIKPEAFEANRFYTVINKKSGEIVPMEVNFNEDDPNLIILPLAFGKRQGREF |
| | IWNDLLSLETGSLKLANGRVIEKTLYNRRTRQDEPALFVALTFERREVLDSSNIK |
| | PMNLIGIDRGENIPAVIALTDPEGCPLSRFKDSLGNPTHILRIGESYKEKQRTIQ |
| | AKKEVEQRRAGGYSRKYASKAKNLADDMVRNTARDLLYYAVTQDAMLIFENLSRG |
| | FGRQGKRTFMAERQYTRMEDWLTAKLAYEGLSKTYLSKTLAQYTSKTCSNCGFTI |
| | TSADYDRVLEKLKKTATGWMTTINGKELKVEGQITYYNRYKRQNVVKDLSVELDR |
| | LSEESVNNDISSWTKGRSGEALSLLKKRFSHRPVQEKFVCLNCGFETHADEQAAL |
| | NIARSWLFLRSQEYKKYQTNKTTGNTDKRAFVETWQSFYRKKLKEVWKPAV |
| | (SEQ ID NO: 141) |
| 389: | MQEIKRINKIRRRLVKDSNTKKAGKTGPMKTLLVRVMTPDLRERLENLRKKPENI |
| L379R + | PQPISNTSRANLNKLLTDYTEMKKAILHVYWEEFQKDPVGLMSRVAQPAPKNIDQ |
| A708K + | RKLIPVKDGNERLTSSGFACSQCCQPLYVYKLEQVNDKGKPHTNYFGRCNVSEHE |
| [P793] + | RLILLSPHKPEANDELVTYSLGKFGQRALDFYSIHVTRESNHPVKPLEQIGGNSC |
| X1 RuvC1 | ASGPVGKALSDACMGAVASFLTKYQDIILEHQKVIKKNEKRLANLKDIASANGLA |
| swap | FPKITLPPQPHTKEGIEAYNNVVAQIVIWVNLNLWQKLKIGRDEAKPLQRLKGFP |
| | SFPLVERQANEVDWWDMVCNVKKLINEKKEDGKVFWQNLAGYKRQEALRPYLSSE |
| | EDRKKGKKFARYQFGDLLLHLEKKHGEDWGKVYDEAWERIDKKVEGLSKHIKLEE |
| | ERRSEDAQSKAALTDWLRAKASFVIEGLKEADKDEFCRCELKLQKWYGDLRGKPF |
| | AIEAENSILDISGFSKQYNCAFIWQKDGVKKLNLYLIINYFKGGKLRFKKIKPEA |
| | FEANRFYTVINKKSGEIVPMEVNFNFDDPNLIILPLAFGKRQGREFIWNDLLSLE |
| | TGSLKLANGRVIEKTLYNRRTRQDEPALFVALTFERREVLDSSNIKPVNLIGVDR |
| | GENIPAVIALTDPEGCPLPEFKDSSGGPTDILRIGEGYKEKQRAIQAAKEVEQRR |
| | AGGYSRKFASKSRNLADDMVRNSARDLFYHAVTHDAVLVFENLSRGFGRQGKRTF |
| | MTERQYTKMEDWLTAKLAYEGLTSKTYLSKTLAQYTSKTCSNCGFTITSADYDRV |
| | LEKLKKTATGWMTTINGKELKVEGQITYYNRYKRQNVVKDLSVELDRLSEESVNN |
| | DISSWTKGRSGEALSLLKKRFSHRPVQEKFVCLNCGFETHADEQAALNIARSWLF |
| | LRSQEYKKYQTNKTTGNTDKRAFVETWQSFYRKKLKEVWKPAV (SEQ ID NO: |
| | 142) |
| 390: | MQEIKRINKIRRRLVKDSNTKKAGKTGPMKTLLVRVMTPDLRERLENLRKKPENI |
| L379R + | PQPISNTSRANLNKLLTDYTEMKKAILHVYWEEFQKDPVGLMSRVAQPAPKNIDQ |
| A708K + | RKLIPVKDGNERLTSSGFACSQCCQPLYVYKLEQVNDKGKPHTNYFGRCNVSEHE |
| [P793] + | RLILLSPHKPEANDELVTYSLGKFGQRALDFYSIHVTRESNHPVKPLEQIGGNSC |
| X1 RuvC2 | ASGPVGKALSDACMGAVASFLTKYQDIILEHQKVIKKNEKRLANLKDIASANGLA |
| swap | FPKITLPPQPHTKEGIEAYNNVVAQIVIWVNLNLWQKLKIGRDEAKPLQRLKGFP |
| | SFPLVERQANEVDWWDMVCNVKKLINEKKEDGKVFWQNLAGYKRQEALRPYLSSE |
| | EDRKKGKKFARYQFGDLLLHLEKKHGEDWGKVYDEAWERIDKKVEGLSKHIKLEE |
| | ERRSEDAQSKAALTDWLRAKASFVIEGLKEADKDEFCRCELKLQKWYGDLRGKPF |
| | AIEAENSILDISGFSKQYNCAFIWQKDGVKKLNLYLIINYFKGGKLRFKKIKPEA |
| | FEANRFYTVINKKSGEIVPMEVNFNFDDPNLIILPLAFGKRQGREFIWNDLLSLE |
| | TGSLKLANGRVIEKTLYNRRTRQDEPALFVALTFERREVLDSSNIKPMNLIGIDR |
| | GENIPAVIALTDPEGCPLSRFKDSLGNPTHILRIGESYKEKQRTIQAKKEVEQRR |
| | AGGYSRKYASKAKNLADDMVRNTARDLLYYAVTQDAMLIFENLSRGFGRQGKRTF |
| | MAERQYTRMEDWLTAKLAYEGLSKTYLSKTLAQYTSKTCSNCGFTITSADYDRVL |
| | EKLKKTATGWMTTINGKELKVEGQITYYNRYKRQNVVKDLSVELDRLSEESVNND |
| | ISSWTKGRSGEALSLLKKRFSHRPVQEKFVCLNCGFETHADEQAALNIARSWLFL |
| | NSNSTEFKSYKSGKQPFVGAWQAFYKRRLKEVWKPNA (SEQ ID NO: 143) |
| 527: | QEIKRINKIRRRLVKDSNTKKAGKTRGPMKTLLVRVMTPDLRERLENLRKKPENI |
| ^R26 in | PQPISNTSRANLNKLLTDYTEMKKAILHVYWEEFQKDPVGLMSRVAQPASKKIDQ |
| 491 | NKLKPEMDEKGNLTTAGFACSQCGQPLFVYKLEQVSEKGKAYTNYFGRCNVAEHE |
| | KLILLAQLKPEKDSDEAVTYSLGKFGQRALDFYSIHVTKESTHPVKPLAQIAGNR |
| | YASGPVGKALSDACMGTIASFLSKYQDIIIEHQKVVKGNQKRLESLRELAGKENL |
| | EYPSVTLPPQPHTKEGVDAYNEVIARVRMWVNLNLWQKLKLSRDDAKPLLRLKGF |
| | PSFPLVERQANEVDWWDMVCNVKKLINEKKEDGKVFWQNLAGYKRQEALRPYLSS |
| | EEDRKKGKKFARYQLGDLLLHLEKKHGEDWGKVYDEAWERIDKKVEGLSKHIKLE |
| | EERRSEDAQSKAALTDWLRAKASFVIEGLKEADKDEFCRCELKLQKWYGDLRGKP |
| | FAIEAENSILDISGFSKQYNCAFIWQKDGVKKLNLYLIINYFKGGKLRFKKIKPE |
| | AFEANRFYTVINKKSGEIVPMEVNFNFDDPNLIILPLAFGKRQGREFIWNDLLSL |
| | ETGSLKLANGRVIEKTLYNRRTRQDEPALFVALTFERREVLDSSNIKPMNLIGVD |
| | RGENIPAVIALTDPEGCPLSRFKDSLGNPTHILRIGESYKEKQRTIQAKKEVEQR |
| | RAGGYSRKYASKAKNLADDMVRNTARDLLYYAVTQDAMLIFENLSRGFGRQGKRT |
| | FMAERQYTRMEDWLTAKLAYEGLSKTYLSKTLAQYTSKTCSNCGFTITSADYDRV |
| | LEKLKKTATGWMTTINGKELKVEGQITYYNRYKRQNVVKDLSVELDRLSEESVNN |
| | DISSWTKGRSGEALSLLKKRFSHRPVQEKFVCLNCGFETHADEQAALNIARSWLF |
| | LRSQEYKKYQTNKTTGNTDKRAFVETWQSFYRKKLKEVWKPAV (SEQ ID |
| | NO: 144) |
| 528: | QEIKRINKIRRRLVKDSNTKKAGKTGPMKTLLVRVMTPDLRERLENLRKKPENIP |
| G223 Y in | QPISNTSRANLNKLLTDYTEMKKAILHVYWEEFQKDPVGLMSRVAQPASKKIDQN |
| 515 | KLKPEMDEKGNLTTAGFACSQCGQPLFVYKLEQVSEKGKAYTNYFGRCNVAEHEK |
| | LILLAQLKPEKDSDEAVTYSLGKFGQRALDFYSIHVTKESTHPVKPLAQIAGNRY |
| | ASYPVGKALSDACMGTIASFLSKYQDIIIEHQKVVKGNQKRLESLRELAGKENLE |
| | YPSVTLPPQPHTKEGVDAYNEVIARVRMWVNLNLWQKLKLSRDDAKPLLRLKGFP |
| | SFPLVERQANEVDWWDMVCNVKKLINEKKEDGKVFWQNLAGYKRQEALRPYLSSE |
| | EDRKKGKKFARYQLGDLLLHLEKKHGEDWGKVYDEAWERIDKKVEGLSKHIKLEE |
| | ERRSEDAQSKAALTDWLRAKASFVIEGLKEADKDEFCRCELKLQKWYGDLRGKPF |
| | AIEAENSILDISGFSKQYNCAFIWQKDGVKKLNLYLIINYFKGGKLRFKKIKPEA |
| | FEANRFYTVINKKSGEIVPMEVNFNFDDPNLIILPLAFGKRQGREFIWNDLLSLE |
| | TGSLKLANGRVIEKTLYNRRTRQDEPALFVALTFERREVLDSSNIKPMNLIGVDR |
| | GENIPAVIALTDPEGCPLSRFKDSLGNPTHILRIGESYKEKQRTIQAKKEVEQRR |
| | AGGYSRKYASKAKNLADDMVRNTARDLLYYAVTQDAMLIFENLSRGFGRQGKRTF |
| | MAERQYTRMEDWLTAKLAYEGLPSKTYLSKTLAQYTSKTCSNCGFTITSADYDRV |
| | LEKLKKTATGWMTTINGKELKVEGQITYYNRYKRQNVVKDLSVELDRLSEESVNN |
| | DISSWTKGRSGEALSLLKKRFSHRPVQEKFVCLNCGFETHADEQAALNIARSWLF |
| | LRSQEYKKYQTNKTTGNTDKRAFVETWQSFYRKKLKEVWKPAV (SEQ ID NO: |
| | 145) |
| 529: | QEIKRINKIRRRLVKDSNTKKAGKTGPMKTLLVRVMTPDLRERLENLRKKPENIP |
| G223N in | QPISNTSRANLNKLLTDYTEMKKAILHVYWEEFQKDPVGLMSRVAQPASKKIDQN |
| 515 | KLKPEMDEKGNLTTAGFACSQCGQPLFVYKLEQVSEKGKAYTNYFGRCNVAEHEK |
| | LILLAQLKPEKDSDEAVTYSLGKFGQRALDFYSIHVTKESTHPVKPLAQIAGNRY |
| | ASNPVGKALSDACMGTIASFLSKYQDIIIEHQKVVKGNQKRLESLRELAGKENLE |
| | YPSVTLPPQPHTKEGVDAYNEVIARVRMWVNLNLWQKLKLSRDDAKPLLRLKGFP |
| | SFPLVERQANEVDWWDMVCNVKKLINEKKEDGKVFWQNLAGYKRQEALRPYLSSE |
| | EDRKKGKKFARYQLGDLLLHLEKKHGEDWGKVYDEAWERIDKKVEGLSKHIKLEE |
| | ERRSEDAQSKAALTDWLRAKASFVIEGLKEADKDEFCRCELKLQKWYGDLRGKPF |
| | AIEAENSILDISGFSKQYNCAFIWQKDGVKKLNLYLIINYFKGGKLRFKKIKPEA |
| | FEANRFYTVINKKSGEIVPMEVNFNFDDPNLIILPLAFGKRQGREFIWNDLLSLE |
| | TGSLKLANGRVIEKTLYNRRTRQDEPALFVALTFERREVLDSSNIKPMNLIGVDR |
| | GENIPAVIALTDPEGCPLSRFKDSLGNPTHILRIGESYKEKQRTIQAKKEVEQRR |
| | AGGYSRKYASKAKNLADDMVRNTARDLLYYAVTQDAMLIFENLSRGFGRQGKRTF |
| | MAERQYTRMEDWLTAKLAYEGLPSKTYLSKTLAQYTSKTCSNCGFTITSADYDRV |
| | LEKLKKTATGWMTTINGKELKVEGQITYYNRYKRQNVVKDLSVELDRLSEESVNN |
| | DISSWTKGRSGEALSLLKKRFSHRPVQEKFVCLNCGFETHADEQAALNIARSWLF |
| | LRSQEYKKYQTNKTTGNTDKRAFVETWQSFYRKKLKEVWKPAV (SEQ ID |
| | NO: 146) |
| 530: | QEIKRINKIRRRLVKDSNTKKAGKTGPMKTLLVRVMTPDLRERLENLRKKPENIP |
| ^W539 in | QPISNTSRANLNKLLTDYTEMKKAILHVYWEEFQKDPVGLMSRVAQPASKKIDQN |
| 515 | KLKPEMDEKGNLTTAGFACSQCGQPLFVYKLEQVSEKGKAYTNYFGRCNVAEHEK |
| | LILLAQLKPEKDSDEAVTYSLGKFGQRALDFYSIHVTKESTHPVKPLAQIAGNRY |
| | ASGPVGKALSDACMGTIASFLSKYQDIIIEHQKVVKGNQKRLESLRELAGKENLE |
| | YPSVTLPPQPHTKEGVDAYNEVIARVRMWVNLNLWQKLKLSRDDAKPLLRLKGFP |
| | SFPLVERQANEVDWWDMVCNVKKLINEKKEDGKVFWQNLAGYKRQEALRPYLSSE |
| | EDRKKGKKFARYQLGDLLLHLEKKHGEDWGKVYDEAWERIDKKVEGLSKHIKLEE |
| | ERRSEDAQSKAALTDWLRAKASFVIEGLKEADKDEFCRCELKLQKWYGDLRGKPF |
| | AIEAENSILDISGFSKQYNCAFIWQKDGVKKLNLYLIINYFKGWGKLRFKKIKPE |
| | AFEANRFYTVINKKSGEIVPMEVNFNFDDPNLIILPLAFGKRQGREFIWNDLLSL |
| | ETGSLKLANGRVIEKTLYNRRTRQDEPALFVALTFERREVLDSSNIKPMNLIGVD |
| | RGENIPAVIALTDPEGCPLSRFKDSLGNPTHILRIGESYKEKQRTIQAKKEVEQR |
| | RAGGYSRKYASKAKNLADDMVRNTARDLLYYAVTQDAMLIFENLSRGFGRQGKRT |
| | FMAERQYTRMEDWLTAKLAYEGLPSKTYLSKTLAQYTSKTCSNCGFTITSADYDR |
| | VLEKLKKTATGWMTTINGKELKVEGQITYYNRYKRQNVVKDLSVELDRLSEESVN |
| | NDISSWTKGRSGEALSLLKKRFSHRPVQEKFVCLNCGFETHADEQAALNIARSWL |
| | FLRSQEYKKYQTNKTTGNTDKRAFVETWQSFYRKKLKEVWKPAV (SEQ ID |
| | NO: 147) |
| 531: | QEIKRINKIRRRLVKDSNTKKAGKTGPMKTLLVRVMTPDLRERLENLRKKPENIP |
| ^Y539 in | QPISNTSRANLNKLLTDYTEMKKAILHVYWEEFQKDPVGLMSRVAQPASKKIDQN |
| 515 | KLKPEMDEKGNLTTAGFACSQCGQPLFVYKLEQVSEKGKAYTNYFGRCNVAEHEK |
| | LILLAQLKPEKDSDEAVTYSLGKFGQRALDFYSIHVTKESTHPVKPLAQIAGNRY |
| | ASGPVGKALSDACMGTIASFLSKYQDIIIEHQKVVKGNQKRLESLRELAGKENLE |
| | YPSVTLPPQPHTKEGVDAYNEVIARVRMWVNLNLWQKLKLSRDDAKPLLRLKGFP |
| | SFPLVERQANEVDWWDMVCNVKKLINEKKEDGKVFWQNLAGYKRQEALRPYLSSE |
| | EDRKKGKKFARYQLGDLLLHLEKKHGEDWGKVYDEAWERIDKKVEGLSKHIKLEE |
| | ERRSEDAQSKAALTDWLRAKASFVIEGLKEADKDEFCRCELKLQKWYGDLRGKPF |
| | AIEAENSILDISGFSKQYNCAFIWQKDGVKKLNLYLIINYFKGYGKLRFKKIKPE |
| | AFEANRFYTVINKKSGEIVPMEVNFNFDDPNLIILPLAFGKRQGREFIWNDLLSL |
| | ETGSLKLANGRVIEKTLYNRRTRQDEPALFVALTFERREVLDSSNIKPMNLIGVD |
| | RGENIPAVIALTDPEGCPLSRFKDSLGNPTHILRIGESYKEKQRTIQAKKEVEQR |
| | RAGGYSRKYASKAKNLADDMVRNTARDLLYYAVTQDAMLIFENLSRGFGRQGKRT |
| | FMAERQYTRMEDWLTAKLAYEGLPSKTYLSKTLAQYTSKTCSNCGFTITSADYDR |
| | VLEKLKKTATGWMTTINGKELKVEGQITYYNRYKRQNVVKDLSVELDRLSEESVN |
| | NDISSWTKGRSGEALSLLKKRFSHRPVQEKFVCLNCGFETHADEQAALNIARSWL |
| | FLRSQEYKKYQTNKTTGNTDKRAFVETWQSFYRKKLKEVWKPAV (SEQ ID |
| | NO: 147) |
| 532: | QEIKRINKIRRRLVKDSNTKKAGKTRGPMKTLLVRVMTPDLRERLENLRKKPENI |
| ^R26 in | PQPISNTSRANLNKLLTDYTEMKKAILHVYWEEFQKDPVGLMSRVAQPASKKIDQ |
| 515 | NKLKPEMDEKGNLTTAGFACSQCGQPLFVYKLEQVSEKGKAYTNYFGRCNVAEHE |
| | KLILLAQLKPEKDSDEAVTYSLGKFGQRALDFYSIHVTKESTHPVKPLAQIAGNR |
| | YASGPVGKALSDACMGTIASFLSKYQDIIIEHQKVVKGNQKRLESLRELAGKENL |
| | EYPSVTLPPQPHTKEGVDAYNEVIARVRMWVNLNLWQKLKLSRDDAKPLLRLKGF |
| | PSFPLVERQANEVDWWDMVCNVKKLINEKKEDGKVFWQNLAGYKRQEALRPYLSS |
| | EEDRKKGKKFARYQLGDLLLHLEKKHGEDWGKVYDEAWERIDKKVEGLSKHIKLE |
| | EERRSEDAQSKAALTDWLRAKASFVIEGLKEADKDEFCRCELKLQKWYGDLRGKP |
| | FAIEAENSILDISGFSKQYNCAFIWQKDGVKKLNLYLIINYFKGGKLRFKKIKPE |
| | AFEANRFYTVINKKSGEIVPMEVNFNFDDPNLIILPLAFGKRQGREFIWNDLLSL |
| | ETGSLKLANGRVIEKTLYNRRTRQDEPALFVALTFERREVLDSSNIKPMNLIGVD |
| | RGENIPAVIALTDPEGCPLSRFKDSLGNPTHILRIGESYKEKQRTIQAKKEVEQR |
| | RAGGYSRKYASKAKNLADDMVRNTARDLLYYAVTQDAMLIFENLSRGFGRQGKRT |
| | FMAERQYTRMEDWLTAKLAYEGLPSKTYLSKTLAQYTSKTCSNCGFTITSADYDR |
| | VLEKLKKTATGWMTTINGKELKVEGQITYYNRYKRQNVVKDLSVELDRLSEESVN |
| | NDISSWTKGRSGEALSLLKKRFSHRPVQEKFVCLNCGFETHADEQAALNIARSWL |
| | FLRSQEYKKYQTNKTTGNTDKRAFVETWQSFYRKKLKEVWKPAV (SEQ ID |
| | NO: 149) |
| 533: | QEIKRINKIRRRLVKDSNTKKAGKTRGPMKTLLVRVMTPDLRERLENLRKKPENI |
| ^R26 and | PQPISNTSRANLNKLLTDYTEMKKAILHVYWEEFQKDPVGLMSRVAQPASKKIDQ |
| G223 Yin | NKLKPEMDEKGNLTTAGFACSQCGQPLFVYKLEQVSEKGKAYTNYFGRCNVAEHE |
| 515 | KLILLAQLKPEKDSDEAVTYSLGKFGQRALDFYSIHVTKESTHPVKPLAQIAGNR |
| | YASYPVGKALSDACMGTIASFLSKYQDIIIEHQKVVKGNQKRLESLRELAGKENL |
| | EYPSVTLPPQPHTKEGVDAYNEVIARVRMWVNLNLWQKLKLSRDDAKPLLRLKGF |
| | PSFPLVERQANEVDWWDMVCNVKKLINEKKEDGKVFWQNLAGYKRQEALRPYLSS |
| | EEDRKKGKKFARYQLGDLLLHLEKKHGEDWGKVYDEAWERIDKKVEGLSKHIKLE |
| | EERRSEDAQSKAALTDWLRAKASFVIEGLKEADKDEFCRCELKLQKWYGDLRGKP |
| | FAIEAENSILDISGFSKQYNCAFIWQKDGVKKLNLYLIINYFKGGKLRFKKIKPE |
| | AFEANRFYTVINKKSGEIVPMEVNFNFDDPNLIILPLAFGKRQGREFIWNDLLSL |
| | ETGSLKLANGRVIEKTLYNRRTRQDEPALFVALTFERREVLDSSNIKPMNLIGVD |
| | RGENIPAVIALTDPEGCPLSRFKDSLGNPTHILRIGESYKEKQRTIQAKKEVEQR |
| | RAGGYSRKYASKAKNLADDMVRNTARDLLYYAVTQDAMLIFENLSRGFGRQGKRT |
| | FMAERQYTRMEDWLTAKLAYEGLPSKTYLSKTLAQYTSKTCSNCGFTITSADYDR |
| | VLEKLKKTATGWMTTINGKELKVEGQITYYNRYKRQNVVKDLSVELDRLSEESVN |
| | NDISSWTKGRSGEALSLLKKRFSHRPVQEKFVCLNCGFETHADEQAALNIARSWL |
| | FLRSQEYKKYQTNKTTGNTDKRAFVETWQSFYRKKLKEVWKPAV (SEQ ID |
| | NO: 150) |

[0203] In some embodiments, the CasX variant protein comprises a sequence selected from the group consisting of SEQ ID NOs: 49-150, 233-235, 238-252, 272-281.

[0204] In some embodiments, the CasX variant protein has one or more improved characteristic of the CasX protein when compared to a reference CasX protein, for example a reference protein of SEQ ID NO:1, SEQ ID NO:2 or SEQ ID NO:3. In some embodiments, the at least one improved characteristic of the CasX variant is at least about 1.1 to about 100,000-fold improved relative to the reference protein. In some embodiments, the at least one improved characteristic of the CasX variant is at least about 1.1 to about 10,000-fold improved, at least about 1.1 to about 1,000-fold improved, at least about 1.1 to about 500-fold improved, at least about 1.1 to about 400-fold improved, at least about 1.1 to about 300-fold improved, at least about 1.1 to about 200-fold improved, at least about 1.1 to about 100-fold improved, at least about 1.1 to about 50-fold improved, at least about 1.1 to about 40-fold improved, at least about 1.1 to about 30-fold improved, at least about 1.1 to about 20-fold improved, at least about 1.1 to about 10-fold improved, at least about 1.1 to about 9-fold improved, at least about 1.1 to about 8-fold improved, at least about 1.1 to about 7-fold improved, at least about 1.1 to about 6-fold improved, at least about 1.1 to about 5-fold improved, at least about 1.1 to about 4-fold improved, at least about 1.1 to about 3-fold improved, at least about 1.1 to about 2-fold improved, at least about 1.1 to about 1.5-fold improved, at least about 1.5 to about 3-fold improved, at least about 1.5 to about 4-fold improved, at least about 1.5 to about 5-fold improved, at least about 1.5 to about 10-fold improved, at least about 5 to about 10-fold improved, at least about 10 to about 20-fold improved, at least 10 to about 30-fold improved, at least 10 to about 50-fold improved or at least 10 to about 100-fold improved than the reference CasX protein. In some embodiments, the at least one improved characteristic of the CasX variant is at least about 10 to about 1000-fold improved relative to the reference CasX protein.

[0205] In some embodiments, the one or more improved characteristics of the CasX variant protein is at least about 1.1, at least about 5, at least about 10, at least about 20, at least about 30, at least about 40, at least about 50, at least about 60, at least about 70, at least about 80, at least about 90, at least about 100, at least about 250, at least about 500, or at least about 1000, at least about 5,000, at least about 10,000, or at least about 100,000-fold improved relative to a reference CasX protein of SEQ ID NO:1, SEQ ID NO:2 or SEQ ID NO:3. In other cases, the one or more improved characteristics of the CasX variant is about 1.1 to 100,00-fold, about 1.1 to 10,00-fold, about 1.1 to 1,000-fold, about 1.1 to 500-fold, about 1.1 to 100-fold, about 1.1 to 50-fold, about 1.1 to 20-fold, about 10 to 100,00-fold, about 10 to 10,00-fold, about 10 to 1,000-fold, about 10 to 500-fold, about 10 to 100-fold, about 10 to 50-fold, about 10 to 20-fold, about 2 to 70-fold, about 2 to 50-fold, about 2 to 30-fold, about 2 to 20-fold, about 2 to 10-fold, about 5 to 50-fold, about 5 to 30-fold, about 5 to 10-fold, about 100 to 100,00-fold, about 100 to 10,00-fold, about 100 to 1,000-fold, about 100 to 500-fold, about 500 to 100,00-fold, about 500 to 10,00-fold, about 500 to 1,000-fold, about 500 to 750-fold, about 1,000 to 100,00-fold, about 10,000 to 100,00-fold, about 20 to 500-fold, about 20 to 250-fold, about 20 to 200-fold, about 20 to 100-fold, about 20 to 50-fold, about 50 to 10,000-fold, about 50 to 1,000-fold, about 50 to 500-fold, about 50 to 200-fold, or about 50 to 100-fold, improved relative to the reference CasX of SEQ ID NO:1, SEQ ID NO:2 or SEQ ID NO:3.

[0206] Exemplary characteristics that can be improved in CasX variant proteins relative to the same characteristics in reference CasX proteins include, but are not limited to, improved folding of the variant, improved binding affinity to the gNA, improved binding affinity for a wider spectrum of PAM sequences, improved unwinding of the target DNA, increased activity, improved editing efficiency, improved editing specificity, increased activity of the nuclease, increased target strand loading for double strand cleavage, decreased target strand loading for single strand nicking, decreased off-target cleavage, improved binding of the non-target strand of DNA, improved protein stability, improved protein:gNA complex stability, improved protein solubility, improved protein:gNA complex solubility, improved protein yield, improved protein expression, and improved fusion characteristics. In some embodiments, the variant comprises at least one improved characteristic. In other embodiments, the variant comprises at least two improved characteristics. In further embodiments, the variant comprises at least three improved characteristics. In some embodiments, the variant comprises at least four improved characteristics. In still further embodiments, the variant comprises at least five, at least six, at least seven, at least eight, at least nine, at least ten, at least eleven, at least twelve, at least thirteen, or more improved characteristics. These improved characteristics are described in more detail below.

j. Protein Stability

[0207] In some embodiments, the disclosure provides a CasX variant protein with improved stability relative to a reference CasX protein. In some embodiments, improved stability of the CasX variant protein results in expression of a higher steady state of protein, which improves editing efficiency. In some embodiments, improved stability of the CasX variant protein results in a larger fraction of CasX protein that remains folded in a functional conformation and improves editing efficiency or improves purifiability for manufacturing purposes. As used herein, a “functional conformation” refers to a CasX protein that is in a conformation where the protein is capable of binding a gNA and target DNA. In embodiments wherein the CasX variant does not carry one or more mutations rendering it catalytically dead, the CasX variant is capable of cleaving, nicking, or otherwise modifying the target DNA. For example, a functional CasX variant can, in some embodiments, be used for gene-editing, and a functional conformation refers to an “editing-competent” conformation. In some exemplary embodiments, including those embodiments where the CasX variant protein results in a larger fraction of CasX protein that remains folded in a functional conformation, a lower concentration of CasX variant is needed for applications such as gene editing compared to a reference CasX protein. Thus, in some embodiments, the CasX variant with improved stability has improved efficiency compared to a reference CasX in one or more gene editing contexts.

[0208] In some embodiments, the disclosure provides a CasX variant protein having improved thermostability relative to a reference CasX protein. In some embodiments, the CasX variant protein has improved thermostability of the CasX variant protein at a particular temperature range. Without wishing to be bound by any theory, some reference CasX proteins natively function in organisms with niches in groundwater and sediment; thus, some reference CasX proteins may have evolved to exhibit optimal function at lower or higher temperatures that may be desirable for certain applications. For example, one application of CasX variant proteins is gene editing of mammalian cells, which is typically carried out at about 37° C. In some embodiments, a CasX variant protein as described herein has improved thermostability compared to a reference CasX protein at a temperature of at least 16° C., at least 18° C., at least 20° C., at least 22° C., at least 24° C., at least 26° C., at least 28° C., at least 30° C., at least 32° C., at least 34° C., at least 35° C., at least 36° C., at least 37° C., at least 38° C., at least 39° C., at least 40° C., at least 41° C., at least 42° C., at least 44° C., at least 46° C., at least 48° C., at least 50° C., at least 52° C., or greater. In some embodiments, a CasX variant protein has improved thermostability and functionality compared to a reference CasX protein that results in improved gene editing functionality, such as mammalian gene editing applications, which may include human gene editing applications. Improved thermostability of the nuclease may be evaluated through a variety of methods known to one of skill in the art.

[0209] In some embodiments, the disclosure provides a CasX variant protein having improved stability of the CasX variant protein:gNA complex relative to the reference CasX protein:gNA complex such that the RNP remains in a functional form. Stability improvements can include increased thermostability, resistance to proteolytic degradation, enhanced pharmacokinetic properties, stability across a range of pH conditions, salt conditions, and tonicity. Improved stability of the complex may, in some embodiments, lead to improved editing efficiency. In some embodiments, the RNP of the CasX variant and gNA variant has at least a 5%, at least a 10%, at least a 15%, or at least a 20%, or at least a 5-20% higher percentage of cleavage-competent RNP compared to an RNP of the reference CasX of SEQ ID NOS: 1-3 and the gNA of any one of SEQ ID NOS:4-16 of Table 1. Exemplary data of increased cleavage-competent RNP are provided in the Examples.

[0210] In some embodiments, the disclosure provides a CasX variant protein having improved thermostability of the CasX variant protein:gNA complex relative to the reference CasX protein:gNA complex. In some embodiments, a CasX variant protein has improved thermostability relative to a reference CasX protein. In some embodiments, the CasX variant protein:gNA complex has improved thermostability relative to a complex comprising a reference CasX protein at temperatures of at least 16° C., at least 18° C., at least 20° C., at least 22° C., at least 24° C., at least 26° C., at least 28° C., at least 30° C., at least 32° C., at least 34° C., at least 35° C., at least 36° C., at least 37° C., at least 38° C., at least 39° C., at least 40° C., at least 41° C., at least 42° C., at least 44° C., at least 46° C., at least 48° C., at least 50° C., at least 52° C., or greater. In some embodiments, a CasX variant protein has improved thermostability of the CasX variant protein:gNA complex compared to a reference CasX protein:gNA complex, which results in improved function for gene editing applications, such as mammalian gene editing applications, which may include human gene editing applications. Improved thermostability of the RNP may be evaluated through a variety of methods known to one of skill in the art.

[0211] In some embodiments, the improved stability and/or thermostability of the CasX variant protein comprises faster folding kinetics of the CasX variant protein relative to a reference CasX protein, slower unfolding kinetics of the CasX variant protein relative to a reference CasX protein, a larger free energy release upon folding of the CasX variant protein relative to a reference CasX protein, a higher temperature at which 50% of the CasX variant protein is unfolded (Tm) relative to a reference CasX protein, or any combination thereof. These characteristics may be improved by a wide range of values; for example, at least 1.1, at least 1.5, at least 10, at least 50, at least 100, at least 500, at least 1,000, at least 5,000, or at least a 10,000-fold improved, as compared to a reference CasX protein. In some embodiments, improved thermostability of the CasX variant protein comprises a higher Tm of the CasX variant protein relative to a reference CasX protein. In some embodiments, the Tm of the CasX variant protein is between about 20° C. to about 30° C., between about 30° C. to about 40° C., between about 40° C. to about 50° C., between about 50° C. to about 60° C., between about 60° C. to about 70° C., between about 70° C. to about 80° C., between about 80° C. to about 90° C. or between about 90° C. to about 100° C. Thermal stability is determined by measuring the “melting temperature” (Tₘ), which is defined as the temperature at which half of the molecules are denatured. Methods of measuring characteristics of protein stability such as Tm and the free energy of unfolding are known to persons of ordinary skill in the art, and can be measured using standard biochemical techniques in vitro. For example, Tm may be measured using Differential Scanning Calorimetry, a thermo-analytical technique in which the difference in the amount of heat required to increase the temperature of a sample and a reference is measured as a function of temperature (Chen et al (2003) Pharm Res 20:1952-60; Ghirlando et al (1999) Immunol Lett 68:47-52). Alternatively, or in addition, CasX variant protein Tm may be measured using commercially available methods such as the ThermoFisher Protein Thermal Shift system. Alternatively, or in addition, circular dichroism may be used to measure the kinetics of folding and unfolding, as well as the Tm (Murray et al. (2002) J. Chromatogr Sci 40:343-9). Circular dichroism (CD) relies on the unequal absorption of left-handed and right-handed circularly polarized light by asymmetric molecules such as proteins. Certain structures of proteins, for example alpha-helices and beta-sheets, have characteristic CD spectra. Accordingly, in some embodiments, CD may be used to determine the secondary structure of a CasX variant protein.

[0212] In some embodiments, improved stability and/or thermostability of the CasX variant protein comprises improved folding kinetics of the CasX variant protein relative to a reference CasX protein. In some embodiments, folding kinetics of the CasX variant protein are improved relative to a reference CasX protein by at least about 5, at least about 10, at least about 50, at least about 100, at least about 500, at least about 1,000, at least about 2,000, at least about 3,000, at least about 4,000, at least about 5,000, or at least about a 10,000-fold improvement. In some embodiments, folding kinetics of the CasX variant protein are improved relative to a reference CasX protein by at least about 1 kJ/mol, at least about 5 kJ/mol, at least about 10 kJ/mol, at least about 20 kJ/mol, at least about 30 kJ/mol, at least about 40 kJ/mol, at least about 50 kJ/mol, at least about 60 kJ/mol, at least about 70 kJ/mol, at least about 80 kJ/mol, at least about 90 kJ/mol, at least about 100 kJ/mol, at least about 150 kJ/mol, at least about 200 kJ/mol, at least about 250 kJ/mol, at least about 300 kJ/mol, at least about 350 kJ/mol, at least about 400 kJ/mol, at least about 450 kJ/mol, or at least about 500 kJ/mol.

[0213] Exemplary amino acid changes that can increase the stability of a CasX variant protein relative to a reference CasX protein may include, but are not limited to, amino acid changes that increase the number of hydrogen bonds within the CasX variant protein, increase the number of disulfide bridges within the CasX variant protein, increase the number of salt bridges within the CasX variant protein, strengthen interactions between parts of the CasX variant protein, increase the buried hydrophobic surface area of the CasX variant protein, or any combinations thereof.

k. Protein Yield

[0214] In some embodiments, the disclosure provides a CasX variant protein having improved yield during expression and purification relative to a reference CasX protein. In some embodiments, the yield of CasX variant proteins purified from bacterial or eukaryotic host cells is improved relative to a reference CasX protein. In some embodiments, the bacterial host cells are Escherichia coli cells. In some embodiments, the eukaryotic cells are yeast, plant (e.g. tobacco), insect (e.g. Spodoptera frugiperda sf9 cells), mouse, rat, hamster, guinea pig, monkey, or human cells. In some embodiments, the eukaryotic host cells are mammalian cells, including, but not limited to human embryonic kidney 293 (HEK293) cells, HEK292T cells, baby hamster kidney (BHK) cells, NS0 cells, SP2/0 cells, YO myeloma cells, P3X63 mouse myeloma cells, PER cells, PER.C6 cells, hybridoma cells, NIH3T3 cells, COS, HeLa, or Chinese hamster ovary (CHO) cells.

[0215] In some embodiments, improved yield of the CasX variant protein is achieved through codon optimization. Cells use 64 different codons, 61 of which encode the 20 standard amino acids, while another 3 function as stop codons. In some cases, a single amino acid is encoded by more than one codon. Different organisms exhibit bias towards use of different codons for the same naturally occurring amino acid. Therefore, the choice of codons in a protein coding sequence, and matching codon choice to the organism in which the protein will be expressed, can, in some cases, significantly affect protein translation and therefore protein expression levels. In some embodiments, the CasX variant protein is encoded by a nucleic acid that has been codon optimized. In some embodiments, the nucleic acid encoding the CasX variant protein has been codon optimized for expression in a bacterial cell, a yeast cell, an insect cell, a plant cell, or a mammalian cell. In some embodiments, the mammal cell is a mouse, a rat, a hamster, a guinea pig, a monkey, or a human. In some embodiments, the CasX variant protein is encoded by a nucleic acid that has been codon optimized for expression in a human cell. In some embodiments, the CasX variant protein is encoded by a nucleic acid from which nucleotide sequences that reduce translation rates in prokaryotes and eukaryotes have been removed. For example, runs of greater than three thymine residues in a row can reduce translation rates in certain organisms or internal polyadenylation signals can reduce translation.

[0216] In some embodiments, improvements in solubility and stability, as described herein, result in improved yield of the CasX variant protein relative to a reference CasX protein.

[0217] Improved protein yield during expression and purification can be evaluated by methods known in the art. For example, the amount of CasX variant protein can be determined by running the protein on an SDS-page gel, and comparing the CasX variant protein to a either a control whose amount or concentration is known in advance to determine an absolute level of protein. Alternatively, or in addition, a purified CasX variant protein can be run on an SDS-page gel next to a reference CasX protein undergoing the same purification process to determine relative improvements in CasX variant protein yield. Alternatively, or in addition, levels of protein can be measured using immunohistochemical methods such as Western blot or ELISA with an antibody to CasX, or by HPLC. For proteins in solution, concentration can be determined by measuring of the protein's intrinsic UV absorbance, or by methods which use protein-dependent color changes such as the Lowry assay, the Smith copper/bicinchoninic assay or the Bradford dye assay. Such methods can be used to calculate the total protein (such as, for example, total soluble protein) yield obtained by expression under certain conditions. This can be compared, for example, to the protein yield of a reference CasX protein under similar expression conditions.

### 1. Protein Solubility

[0218] In some embodiments, a CasX variant protein has improved solubility relative to a reference CasX protein. In some embodiments, a CasX variant protein has improved solubility of the CasX:gNA ribonucleoprotein complex variant relative to a ribonucleoprotein complex comprising a reference CasX protein.

[0219] In some embodiments, an improvement in protein solubility leads to higher yield of protein from protein purification techniques such as purification from E. coli. Improved solubility of CasX variant proteins may, in some embodiments, enable more efficient activity in cells, as a more soluble protein may be less likely to aggregate in cells. Protein aggregates can in certain embodiments be toxic or burdensome on cells, and, without wishing to be bound by any theory, increased solubility of a CasX variant protein may ameliorate this result of protein aggregation. Further, improved solubility of CasX variant proteins may allow for enhanced formulations permitting the delivery of a higher effective dose of functional protein, for example in a desired gene editing application. In some embodiments, improved solubility of a CasX variant protein relative to a reference CasX protein results in improved yield of the CasX variant protein during purification of at least about 5, at least about 10, at least about 20, at least about 30, at least about 40, at least about 50, at least about 60, at least about 70, at least about 80, at least about 90, at least about 100, at least about 250, at least about 500, or at least about 1000-fold greater yield. In some embodiments, improved solubility of a CasX variant protein relative to a reference CasX protein improves activity of the CasX variant protein in cells by at least about 1.1, at least about 1.2, at least about 1.3, at least about 1.4, at least about 1.5, at least about 1.6, at least about 1.7, at least about 1.8, at least about 1.9, at least about 2, at least about 2.1, at least about 2.2, at least about 2.3, at least about 2.4, at least about 2.5, at least about 2.6, at least about 2.7, at least about 2.8, at least about 2.9, at least about 3, at least about 3.5, at least about 4, at least about 4.5, at least about 5, at least about 5.5, at least about 6, at least about 6.5, at least about 7.0, at least about 7.5, at least about 8, at least about 8.5, at least about 9, at least about 9.5, at least about 10, at least about 11, at least about 12, at least about 13, at least about 14, or at least about 15-fold greater activity. Improved solubility of the nuclease may be evaluated through a variety of methods known to one of skill in the art, including by taking densitometry readings on a gel of the soluble fraction of lysed E. coli. Alternatively, or addition, improvements in CasX variant protein solubility can be measured by measuring the maintenance of soluble protein product through the course of a full protein purification. For example, soluble protein product can be measured at one or more steps of gel affinity purification, tag cleavage, cation exchange purification, running the protein on a sizing column. In some embodiments, the densitometry of every band of protein on a gel is read after each step in the purification process. CasX variant proteins with improved solubility may, in some embodiments, maintain a higher concentration at one or more steps in the protein purification process when compared to the reference CasX protein, while an insoluble protein variant may be lost at one or more steps due to buffer exchanges, filtration steps, interactions with a purification column, and the like.

[0220] In some embodiments, improving the solubility of CasX variant proteins results in a higher yield in terms of mg/L of protein during protein purification when compared to a reference CasX protein.

[0221] In some embodiments, improving the solubility of CasX variant proteins enables a greater amount of editing events compared to a less soluble protein when assessed in editing assays such as the EGFP disruption assays described herein.

m. Protein Affinity for the gNA

[0222] In some embodiments, a CasX variant protein has improved affinity for the gNA relative to a reference CasX protein, leading to the formation of the ribonucleoprotein complex. Increased affinity of the CasX variant protein for the gNA may, for example, result in a lower K_{d} for the generation of a RNP complex, which can, in some cases, result in a more stable ribonucleoprotein complex formation. In some embodiments, increased affinity of the CasX variant protein for the gNA results in increased stability of the ribonucleoprotein complex when delivered to human cells. This increased stability can affect the function and utility of the complex in the cells of a subject, as well as result in improved pharmacokinetic properties in blood, when delivered to a subject. In some embodiments, increased affinity of the CasX variant protein, and the resulting increased stability of the ribonucleoprotein complex, allows for a lower dose of the CasX variant protein to be delivered to the subject or cells while still having the desired activity, for example in vivo or in vitro gene editing.

[0223] In some embodiments, a higher affinity (tighter binding) of a CasX variant protein to a gNA allows for a greater amount of editing events when both the CasX variant protein and the gNA remain in an RNP complex. Increased editing events can be assessed using editing assays such as the EGFP disruption assay described herein.

[0224] In some embodiments, the K_{d} of a CasX variant protein for a gNA is increased relative to a reference CasX protein by a factor of at least about 1.1, at least about 1.2, at least about 1.3, at least about 1.4, at least about 1.5, at least about 1.6, at least about 1.7, at least about 1.8, at least about 1.9, at least about 2, at least about 3, at least about 4, at least about 5, at least about 6, at least about 7, at least about 8, at least about 9, at least about 10, at least about 15, at least about 20, at least about 25, at least about 30, at least about 35, at least about 40, at least about 45, at least about 50, at least about 60, at least about 70, at least about 80, at least about 90, or at least about 100. In some embodiments, the CasX variant has about 1.1 to about 10-fold increased binding affinity to the gNA compared to the reference CasX protein of SEQ ID NO: 2.

[0225] Without wishing to be bound by theory, in some embodiments amino acid changes in the Helical I domain can increase the binding affinity of the CasX variant protein with the gNA targeting sequence, while changes in the Helical II domain can increase the binding affinity of the CasX variant protein with the gNA scaffold stem loop, and changes in the oligonucleotide binding domain (OBD) increase the binding affinity of the CasX variant protein with the gRNA triplex.

[0226] Methods of measuring CasX protein binding affinity for a CasX gNA include in vitro methods using purified CasX protein and gNA. The binding affinity for reference CasX and variant proteins can be measured by fluorescence polarization if the gNA or CasX protein is tagged with a fluorophore. Alternatively, or in addition, binding affinity can be measured by biolayer interferometry, electrophoretic mobility shift assays (EMSAs), or filter binding. Additional standard techniques to quantify absolute affinities of RNA binding proteins such as the reference CasX and variant proteins of the disclosure for specific gNAs such as reference gNAs and variants thereof include, but are not limited to, isothermal calorimetry (ITC), and surface plasmon resonance (SPR), as well as the methods of the Examples.

n. Affinity for Target Nucleic Acid

[0227] In some embodiments, a CasX variant protein has improved binding affinity for a target nucleic acid sequence relative to the affinity of a reference CasX protein for a target nucleic acid sequence. In some embodiments, the improved affinity for the target nucleic acid sequence comprises improved affinity for the target nucleic acid sequence, improved binding affinity to a wider spectrum of PAM sequences, an improved ability to search DNA for the target nucleic acid sequence, or any combinations thereof. Without wishing to be bound by theory, it is thought that CRISPR/Cas system proteins such as CasX may find their target nucleic acid sequences by one-dimension diffusion along a DNA molecule. The process is thought to include (1) binding of the ribonucleoprotein to the DNA molecule followed by (2) stalling at the target nucleic acid sequence, either of which may be, in some embodiments, affected by improved affinity of CasX proteins for a target nucleic acid sequence, thereby improving function of the CasX variant protein compared to a reference CasX protein.

[0228] In some embodiments, a CasX variant protein with improved target nucleic acid sequence affinity has increased overall affinity for DNA. In some embodiments, a CasX variant protein with improved target nucleic acid affinity has increased affinity for specific PAM sequences other than the canonical TTC PAM recognized by the reference CasX proteins of SEQ ID NOS: 1 or 2, including binding affinity for PAM sequences selected from the group consisting of TTC, ATC, GTC, and CTC. Without wishing to be bound by theory, it is possible that these protein variants will interact more strongly with DNA overall and will have an increased ability to access and edit sequences within the target DNA due to the ability to bind additional PAM sequences beyond those of wild-type Cas X, thereby allowing for a more efficient search process of the CasX protein for the target sequence. A higher overall affinity for DNA also, in some embodiments, can increase the frequency at which a CasX protein can effectively start and finish a binding and unwinding step, thereby facilitating target strand invasion and R-loop formation, and ultimately the cleavage of a target nucleic acid sequence.

[0229] Without wishing to be bound by theory, it is possible that amino acid changes in the NTSBD that increase the efficiency of unwinding, or capture, of a non-target DNA strand in the unwound state, can increase the affinity of CasX variant proteins for target DNA. Alternatively, or in addition, amino acid changes in the NTSBD that increase the ability of the NTSBD to stabilize DNA during unwinding can increase the affinity of CasX variant proteins for target DNA. Alternatively, or in addition, amino acid changes in the OBD may increase the affinity of CasX variant protein binding to the protospacer adjacent motif (PAM), thereby increasing affinity of the CasX variant protein for the target nucleic acid sequence. Alternatively, or in addition, amino acid changes in the Helical I and/or II, RuvC and TSL domains that increase the affinity of the CasX variant protein for the target nucleic acid strand can increase the affinity of the CasX variant protein for the target nucleic acid sequence.

[0230] In some embodiments, the CasX variant protein has increased binding affinity to the target nucleic acid sequence compared to the reference protein of SEQ ID NO: 1, SEQ ID NO: 2, or SEQ ID NO: 3. In some embodiments, affinity of a CasX variant protein of the disclosure for a target nucleic acid molecule is increased relative to a reference CasX protein by a factor of at least about 1.1, at least about 1.2, at least about 1.3, at least about 1.4, at least about 1.5, at least about 1.6, at least about 1.7, at least about 1.8, at least about 1.9, at least about 2, at least about 3, at least about 4, at least about 5, at least about 6, at least about 7, at least about 8, at least about 9, at least about 10, at least about 15, at least about 20, at least about 25, at least about 30, at least about 35, at least about 40, at least about 45, at least about 50, at least about 60, at least about 70, at least about 80, at least about 90, or at least about 100.

[0231] In some embodiments, a CasX variant protein has improved binding affinity for the non-target strand of the target nucleic acid. As used herein, the term “non-target strand” refers to the strand of the DNA target nucleic acid sequence that does not form Watson and Crick base pairs with the targeting sequence in the gNA, and is complementary to the target strand.

[0232] Methods of measuring CasX protein (such as reference or variant) affinity for a target nucleic acid molecule may include electrophoretic mobility shift assays (EMSAs), filter binding, isothermal calorimetry (ITC), and surface plasmon resonance (SPR), fluorescence polarization and biolayer interferometry (BLI). Further methods of measuring CasX protein affinity for a target include in vitro biochemical assays that measure DNA cleavage events over time.

[0233] CasX variant proteins with higher affinity for their target nucleic acid sequence may, in some embodiments, cleave the target nucleic acid sequence more rapidly than a reference CasX protein that does not have increased affinity for the target nucleic acid sequence.

[0234] In some embodiments, the CasX variant protein is catalytically dead (dCasX). In some embodiments, the disclosure provides RNP comprising a catalytically-dead CasX protein that retains the ability to bind target DNA. An exemplary catalytically-dead CasX variant protein comprises one or more mutations in the active site of the RuvC domain of the CasX protein. In some embodiments, a catalytically-dead CasX variant protein comprises substitutions at residues 672, 769 and/or 935 of SEQ ID NO: 1. In some embodiments, a catalytically-dead CasX variant protein comprises substitutions of D672A, E769A and/or D935A in the reference CasX protein of SEQ ID NO: 1. In some embodiments, a catalytically-dead CasX protein comprises substitutions at amino acids 659, 765 and/or 922 of SEQ ID NO: 2. In some embodiments, a catalytically-dead CasX protein comprises D659A, E756A and/or D922A substitutions in a reference CasX protein of SEQ ID NO: 2. In further embodiments, a catalytically-dead reference CasX protein comprises deletions of all or part of the RuvC domain of the reference CasX protein.

[0235] In some embodiments, improved affinity for DNA of a CasX variant protein also improves the function of catalytically inactive versions of the CasX variant protein. In some embodiments, the catalytically inactive version of the CasX variant protein comprises one or mutations in the DED motif in the RuvC. Catalytically dead CasX variant proteins can, in some embodiments, be used for base editing or epigenetic modifications. With a higher affinity for DNA, in some embodiments, catalytically-dead CasX variant proteins can, relative to catalytically active CasX, find their target DNA faster, remain bound to target DNA for longer periods of time, bind target DNA in a more stable fashion, or a combination thereof, thereby improving the function of the catalytically-dead CasX variant protein.

o. Improved Specificity for a Target Site

[0236] In some embodiments, a CasX variant protein has improved specificity for a target nucleic acid sequence relative to a reference CasX protein. As used herein, “specificity,” interchangeably referred to as “target specificity,” refers to the degree to which a CRISPR/Cas system ribonucleoprotein complex cleaves off-target sequences that are similar, but not identical to the target nucleic acid sequence; e.g., a CasX variant RNP with a higher degree of specificity would exhibit reduced off-target cleavage of sequences relative to a reference CasX protein. The specificity, and the reduction of potentially deleterious off-target effects, of CRISPR/Cas system proteins can be vitally important in order to achieve an acceptable therapeutic index for use in mammalian subjects.

[0237] In some embodiments, a CasX variant protein has improved specificity for a target site within the target nucleic acid sequence that is complementary to the targeting sequence of the gNA.

[0238] Without wishing to be bound by theory, it is possible that amino acid changes in the Helical I and II domains that increase the specificity of the CasX variant protein for the target nucleic acid strand can increase the specificity of the CasX variant protein for the target nucleic acid sequence overall. In some embodiments, amino acid changes that increase specificity of CasX variant proteins for target nucleic acid sequence may also result in decreased affinity of CasX variant proteins for DNA.

[0239] Methods of testing CasX protein (such as variant or reference) target specificity may include guide and Circularization for In vitro Reporting of Cleavage Effects by Sequencing (CIRCLE-seq), or similar methods. In brief, in CIRCLE-seq techniques, genomic DNA is sheared and circularized by ligation of stem-loop adapters, which are nicked in the stem-loop regions to expose 4 nucleotide palindromic overhangs. This is followed by intramolecular ligation and degradation of remaining linear DNA. Circular DNA molecules containing a CasX cleavage site are subsequently linearized with CasX, and adapter adapters are ligated to the exposed ends followed by high-throughput sequencing to generate paired end reads that contain information about the off-target site. Additional assays that can be used to detect off-target events, and therefore CasX protein specificity include assays used to detect and quantify indels (insertions and deletions) formed at those selected off-target sites such as mismatch-detection nuclease assays and next generation sequencing (NGS). Exemplary mismatch-detection assays include nuclease assays, in which genomic DNA from cells treated with CasX and sgRNA is PCR amplified, denatured and rehybridized to form hetero-duplex DNA, containing one wild type strand and one strand with an indel. Mismatches are recognized and cleaved by mismatch detection nucleases, such as Surveyor nuclease or T7 endonuclease I.

p. Unwinding of DNA

[0240] In some embodiments, a CasX variant protein has improved ability of unwinding DNA relative to a reference CasX protein. Poor dsDNA unwinding has been shown previously to impair or prevent the ability of CRISPR/Cas system proteins AnaCas9 or Cas14s to cleave DNA. Therefore, without wishing to be bound by any theory, it is likely that increased DNA cleavage activity by some CasX variant proteins of the disclosure is due, at least in part, to an increased ability to find and unwind the dsDNA at a target site.

[0241] Without wishing to be bound by theory, it is thought that amino acid changes in the NTSB domain may produce CasX variant proteins with increased DNA unwinding characteristics. Alternatively, or in addition, amino acid changes in the OBD or the helical domain regions that interact with the PAM may also produce CasX variant proteins with increased DNA unwinding characteristics.

[0242] Methods of measuring the ability of CasX proteins (such as variant or reference) to unwind DNA include, but are not limited to, in vitro assays that observe increased on rates of dsDNA targets in fluorescence polarization or biolayer interferometry.

q. Catalytic Activity

[0243] The ribonucleoprotein complex of the CasX:gNA systems disclosed herein comprise a reference CasX protein or variant thereof that bind to a target nucleic acid sequence and cleaves the target nucleic acid sequence. In some embodiments, a CasX variant protein has improved catalytic activity relative to a reference CasX protein. Without wishing to be bound by theory, it is thought that in some cases cleavage of the target strand can be a limiting factor for Cas12-like molecules in creating a dsDNA break. In some embodiments, CasX variant proteins improve bending of the target strand of DNA and cleavage of this strand, resulting in an improvement in the overall efficiency of dsDNA cleavage by the CasX ribonucleoprotein complex.

[0244] In some embodiments, a CasX variant protein has increased nuclease activity compared to a reference CasX protein. Variants with increased nuclease activity can be generated, for example, through amino acid changes in the RuvC nuclease domain. In some embodiments, the CasX variant comprises a nuclease domain having nickase activity. In the foregoing, the CasX nickase of a CasX:gNA system generates a single-stranded break within 10-18 nucleotides 3′ of a PAM site in the non-target strand. In other embodiments, the CasX variant comprises a nuclease domain having double-stranded cleavage activity. In the foregoing, the CasX of the CasX:gNA system generates a double-stranded break within 18-26 nucleotides 5′ of a PAM site on the target strand and 10-18 nucleotides 3′ on the non-target strand. Nuclease activity can be assayed by a variety of methods, including those of the Examples. In some embodiments, a CasX variant has a K_{cleave} constant that is at least 2-fold, or at least 3-fold, or at least 4-fold, or at least 5-fold, or at least 6-fold, or at least 7-fold, or at least 8-fold, or at least 9-fold, or at least 10-fold greater compared to a reference CasX.

[0245] In some embodiments, a CasX variant protein has increased target strand loading for double strand cleavage compared to a reference CasX. Variants with increased target strand loading activity can be generated, for example, through amino acid changes in the TLS domain.

[0246] Without wishing to be bound by theory, amino acid changes in the TSL domain may result in CasX variant proteins with improved catalytic activity. Alternatively, or in addition, amino acid changes around the binding channel for the RNA:DNA duplex may also improve catalytic activity of the CasX variant protein.

[0247] In some embodiments, a CasX variant protein has increased collateral cleavage activity compared to a reference CasX protein. As used herein, “collateral cleavage activity” refers to additional, non-targeted cleavage of nucleic acids following recognition and cleavage of a target nucleic acid sequence. In some embodiments, a CasX variant protein has decreased collateral cleavage activity compared to a reference CasX protein.

[0248] In some embodiments, for example those embodiments encompassing applications where cleavage of the target nucleic acid sequence is not a desired outcome, improving the catalytic activity of a CasX variant protein comprises altering, reducing, or abolishing the catalytic activity of the CasX variant protein. In some embodiments, a ribonucleoprotein complex comprising a dCasX variant protein binds to a target nucleic acid sequence and does not cleave the target nucleic acid.

[0249] In some embodiments, the CasX ribonucleoprotein complex comprising a CasX variant protein binds a target DNA but generates a single stranded nick in the target DNA. In some embodiments, particularly those embodiments wherein the CasX protein is a nickase, a CasX variant protein has decreased target strand loading for single strand nicking. Variants with decreased target strand loading may be generated, for example, through amino acid changes in the TSL domain.

[0250] Exemplary methods for characterizing the catalytic activity of CasX proteins may include, but are not limited to, in vitro cleavage assays, including those of the Examples, below. In some embodiments, electrophoresis of DNA products on agarose gels can interrogate the kinetics of strand cleavage.

r. Affinity for C9orf72 Target DNA and RNA

[0251] In some embodiments, a ribonucleoprotein complex comprising a reference CasX protein or a CasX variant protein binds to a target C9orf72 DNA and cleaves the target nucleic acid sequence. In some embodiments, the ribonucleoprotein complex creates a double-stranded break in the target nucleic acid. In other embodiments, the ribonucleoprotein complex creates a single-stranded break in the target nucleic acid. In some embodiments, variants of a reference CasX protein increase the specificity of the CasX variant protein for a target C9orf72 RNA, and increase the activity of the CasX variant protein with respect to a target RNA when compared to the reference CasX protein. For example, CasX variant proteins can display increased binding affinity for target RNAs, or increased cleavage of target RNAs, when compared to reference CasX proteins. In some embodiments, a ribonucleoprotein complex comprising a CasX variant protein binds to a target RNA and/or cleaves the target RNA. In some embodiments, a CasX variant has at least about two-fold to about 10-fold increased binding affinity to the C9orf72 target RNA compared to the reference protein of SEQ ID NO: 1, SEQ ID NO: 2, or SEQ ID NO: 3.

s. Combinations of Mutations

[0252] The present disclosure provides Cas X variants that are a combination of mutations from separate CasX variant proteins. In some embodiments, any variant to any domain described herein can be combined with other variants described herein. In some embodiments, any variant within any domain described herein can be combined with other variants described herein, in the same domain. Combinations of different amino acid changes may in some embodiments produce new optimized variants whose function is further improved by the combination of amino acid changes. In some embodiments, the effect of combining amino acid changes on CasX protein function is linear. As used herein, a combination that is linear refers to a combination whose effect on function is equal to the sum of the effects of each individual amino acid change when assayed in isolation. In some embodiments, the effect of combining amino acid changes on CasX protein function is synergistic. As used herein, a combination of variants that is synergistic refers to a combination whose effect on function is greater than the sum of the effects of each individual amino acid change when assayed in isolation. In some embodiments, combining amino acid changes produces CasX variant proteins in which more than one function of the CasX protein has been improved relative to the reference CasX protein.

t. CasX Fusion Proteins

[0253] In some embodiments, the disclosure provides CasX proteins comprising a heterologous protein fused to the CasX. In some cases, the CasX is a reference CasX protein. In other cases, the CasX is a CasX variant of any of the embodiments described herein.

[0254] In some embodiments, the CasX variant protein is fused to one or more proteins or domains thereof that has a different activity of interest, resulting in a fusion protein. For example, in some embodiments, the CasX variant protein is fused to a protein (or domain thereof) that inhibits transcription, modifies a target nucleic acid sequence, or modifies a polypeptide associated with a nucleic acid (e.g., histone modification).

[0255] In some embodiments, a heterologous polypeptide (or heterologous amino acid such as a cysteine residue or a non-natural amino acid) can be inserted at one or more positions within a CasX protein to generate a CasX fusion protein. In other embodiments, a cysteine residue can be inserted at one or more positions within a CasX protein followed by conjugation of a heterologous polypeptide described below. In some alternative embodiments, a heterologous polypeptide or heterologous amino acid can be added at the N- or C-terminus of the reference or CasX variant protein. In other embodiments, a heterologous polypeptide or heterologous amino acid can be inserted internally within the sequence of the CasX protein.

[0256] In some embodiments, the reference CasX or variant fusion protein retains RNA-guided sequence specific target nucleic acid binding and cleavage activity. In some cases, the reference CasX or variant fusion protein has (retains) 50% or more of the activity (e.g., cleavage and/or binding activity) of the corresponding reference CasX or variant protein that does not have the insertion of the heterologous protein. In some cases, the reference CasX fusion or CasX variant fusion protein retains at least about 60%, or at least about 70% or more, at least about 80%, or at least about 90%, or at least about 92%, or at least about 95%, or at least about 98%, or at least about 100% of the activity (e.g., cleavage and/or binding activity) of the corresponding CasX protein that does not have the insertion of the heterologous protein.

[0257] In some cases, the reference CasX or variant fusion protein retains (has) target nucleic acid binding activity relative to the activity of the CasX protein without the inserted heterologous amino acid or heterologous polypeptide. In some cases, the reference CasX or variant fusion protein retains at least about 60%, or at least about 70% or more, at least about 80%, or at least about 90%, or at least about 92%, or at least about 95%, or at least about 98%, or at least about 100% of the binding activity of the corresponding CasX protein that does not have the insertion of the heterologous protein.

[0258] In some cases, the reference CasX or variant fusion protein retains (has) target nucleic acid binding and/or cleavage activity relative to the activity of the parent CasX protein without the inserted heterologous amino acid or heterologous polypeptide. For example, in some cases, the reference CasX or variant fusion protein has (retains) 50% or more of the binding and/or cleavage activity of the corresponding parent CasX protein (the CasX protein that does not have the insertion). For example, in some cases, the reference CasX or variant fusion protein has (retains) 60% or more (70% or more, 80% or more, 90% or more, 92% or more, 95% or more, 98% or more, or 100%) of the binding and/or cleavage activity of the corresponding CasX parent protein (the CasX protein that does not have the insertion). Methods of measuring cleaving and/or binding activity of a CasX protein and/or a CasX fusion protein will be known to one of ordinary skill in the art and any convenient method can be used.

[0259] A variety of heterologous polypeptides are suitable for inclusion in a reference CasX or CasX variant fusion protein of the disclosure. In some cases, the fusion partner can modulate transcription (e.g., inhibit transcription, increase transcription) of a target DNA. For example, in some cases the fusion partner is a protein (or a domain from a protein) that inhibits transcription (e.g., a transcriptional repressor, a protein that functions via recruitment of transcription inhibitor proteins, modification of target DNA such as methylation, recruitment of a DNA modifier, modulation of histones associated with target DNA, recruitment of a histone modifier such as those that modify acetylation and/or methylation of histones, and the like). In some cases the fusion partner is a protein (or a domain from a protein) that increases transcription (e.g., a transcription activator, a protein that acts via recruitment of transcription activator proteins, modification of target DNA such as demethylation, recruitment of a DNA modifier, modulation of histones associated with target DNA, recruitment of a histone modifier such as those that modify acetylation and/or methylation of histones, and the like).

[0260] In some cases, a fusion partner has enzymatic activity that modifies a target nucleic acid sequence; e.g., nuclease activity, methyltransferase activity, demethylase activity, DNA repair activity, DNA damage activity, deamination activity, dismutase activity, alkylation activity, depurination activity, oxidation activity, pyrimidine dimer forming activity, integrase activity, transposase activity, recombinase activity, polymerase activity, ligase activity, helicase activity, photolyase activity or glycosylase activity.

[0261] In some cases, a fusion partner has enzymatic activity that modifies a polypeptide (e.g., a histone) associated with a target nucleic acid (e.g., methyltransferase activity, demethylase activity, acetyltransferase activity, deacetylase activity, kinase activity, phosphatase activity, ubiquitin ligase activity, deubiquitinating activity, adenylation activity, deadenylation activity, SUMOylating activity, deSUMOylating activity, ribosylation activity, deribosylation activity, myristoylation activity or demyristoylation activity).

[0262] Examples of proteins (or fragments thereof) that can be used as a fusion partner to increase transcription include but are not limited to: transcriptional activators such as VP16, VP64, VP48, VP160, p65 subdomain (e.g., from NFkB), and activation domain of EDLL and/or TAL activation domain (e.g., for activity in plants); histone lysine methyltransferases such as SET domain containing 1A, histone lysine methyltransferase (SET1A), SET domain containing 1B, histone lysine methyltransferase (SET1B), lysine methyltransferase 2A (MLL1 to 5, ASCL1 (ASH1) achaete-scute family bHLH transcription factor 1 (ASH1), SET and MYND domain containing 2 (SYMD2), nuclear receptor binding SET domain protein 1 (NSD1), and the like; histone lysine demethylases such as lysine demethylase 3A (JHDM2a)/Lysine-specific demethylase 3B (JHDM2b), lysine demethylase 6A (UTX), lysine demethylase 6B (JMJD3), and the like; histone acetyltransferases such as lysine acetyltransferase 2A (GCN5), lysine acetyltransferase 2B (PCAF), CREB binding protein (CBP), ElA binding protein p300 (p300), TATA-box binding protein associated factor 1 (TAF1), lysine acetyltransferase 5 (TIP60/PLIP), lysine acetyltransferase 6A (MOZ/MYST3), lysine acetyltransferase 6B (MORF/MYST4), SRC proto-oncogene, non-receptor tyrosine kinase (SRC1), nuclear receptor coactivator 3 (ACTR), MYB binding protein 1a (P160), clock circadian regulator (CLOCK), and the like; and DNA demethylases such as Ten-Eleven Translocation (TET) dioxygenase 1 (TET1CD), tet methylcytosine dioxygenase 1 (TET1), demeter (DME), demeter-like 1 (DML1), demeter-like 2 (DML2), protein ROS1 (ROS1), and the like.

[0263] Examples of proteins (or fragments thereof) that can be used as a fusion partner to decrease transcription include but are not limited to: transcriptional repressors such as the Kruppel associated box (KRAB or SKD); KOX1 repression domain; the Mad mSIN3 interaction domain (SID); the ERF repressor domain (ERD), the SRDX repression domain (e.g., for repression in plants), and the like; histone lysine methyltransferases such as PR/SET domain containing protein (Pr-SET7/8), lysine methyltransferase 5B (SUV4-20H1), PR/SET domain 2 (RIZ1), and the like; histone lysine demethylases such as lysine demethylase 4A (JMJD2A/JHDM3A), lysine demethylase 4B (JMJD2B), lysine demethylase 4C (JMJD2C/GASC1), lysine demethylase 4D (JMJD2D), lysine demethylase 5A (JARID1A/RBP2), lysine demethylase 5B (JARID1B/PLU-1), lysine demethylase 5C (JARID 1C/SMCX), lysine demethylase 5D (JARID1D/SMCY), and the like; histone lysine deacetylases such as histone deacetylase 1 (HDAC1), HDAC2, HDAC3, HDAC8, HDAC4, HDAC5, HDAC7, HDAC9, sirtuin 1 (SIRT1), SIRT2, HDAC11, and the like; DNA methylases such as HhaI DNA m5c-methyltransferase (M.HhaI), DNA methyltransferase 1 (DNMT1), DNA methyltransferase 3a (DNMT3a), DNA methyltransferase 3b (DNMT3b), methyltransferase 1 (MET1), S-adenosyl-L-methionine-dependent methyltransferases superfamily protein (DRM3) (plants), DNA cytosine methyltransferase MET2a (ZMET2), chromomethylase 1 (CMT1), chromomethylase 2 (CMT2) (plants), and the like; and periphery recruitment elements such as Lamin A, Lamin B, and the like.

[0264] In some cases the fusion partner has enzymatic activity that modifies the target nucleic acid sequence (e.g., ssRNA, dsRNA, ssDNA, dsDNA). Examples of enzymatic activity that can be provided by the fusion partner include but are not limited to: nuclease activity such as that provided by a restriction enzyme (e.g., FokI nuclease), methyltransferase activity such as that provided by a methyltransferase (e.g., HhaI DNA m5c-methyltransferase (M.HhaI), DNA methyltransferase 1 (DNMT1), DNA methyltransferase 3a (DNMT3a), DNA methyltransferase 3b (DNMT3b), METI, DRM3 (plants), ZMET2, CMT1, CMT2 (plants), and the like); demethylase activity such as that provided by a demethylase (e.g., Ten-Eleven Translocation (TET) dioxygenase 1 (TET 1 CD), TET1, DME, DML1, DML2, ROS1, and the like), DNA repair activity, DNA damage activity, deamination activity such as that provided by a deaminase (e.g., a cytosine deaminase enzyme, e.g., an APOBEC protein such as rat APOBECl), dismutase activity, alkylation activity, depurination activity, oxidation activity, pyrimidine dimer forming activity, integrase activity such as that provided by an integrase and/or resolvase (e.g., Gin invertase such as the hyperactive mutant of the Gin invertase, GinH106Y; human immunodeficiency virus type 1 integrase (IN); Tn3 resolvase; and the like), transposase activity, recombinase activity such as that provided by a recombinase (e.g., catalytic domain of Gin recombinase), polymerase activity, ligase activity, helicase activity, photolyase activity, and glycosylase activity).

[0265] In some cases, a reference CasX or CasX variant protein of the present disclosure is fused to a polypeptide selected from a domain for increasing transcription (e.g., a VP16 domain, a VP64 domain), a domain for decreasing transcription (e.g., a KRAB domain, e.g., from the Kox1 protein), a core catalytic domain of a histone acetyltransferase (e.g., histone acetyltransferase p300), a protein/domain that provides a detectable signal (e.g., a fluorescent protein such as GFP), a nuclease domain (e.g., a Fokl nuclease), or a base editor (e.g., cytidine deaminase such as APOBEC1).

[0266] In some cases, the fusion partner has enzymatic activity that modifies a protein associated with the target nucleic acid (e.g., ssRNA, dsRNA, ssDNA, dsDNA) (e.g., a histone, an RNA binding protein, a DNA binding protein, and the like). Examples of enzymatic activity (that modifies a protein associated with a target nucleic acid) that can be provided by the fusion partner include but are not limited to: methyltransferase activity such as that provided by a histone methyltransferase (HMT) (e.g., suppressor of variegation 3-9 homolog 1 (SUV39H1, also known as KMT1A), euchromatic histone lysine methyltransferase 2 (G9A, also known as KMT1C and EHMT2), SUV39H2, ESET/SETDB 1, and the like, SET1A, SET1B, MLL1 to 5, ASH1, SYMD2, NSD1, DOT1L, Pr-SET7/8, SUV4-20H1, EZH2, RIZ1), demethylase activity such as that provided by a histone demethylase (e.g., Lysine Demethylase 1A (KDM1A also known as LSD1), JHDM2a/b, JMJD2A/JHDM3A, JMJD2B, JMJD2C/GASC1, JMJD2D, JARID1A/RBP2, JARID1B/PLU-1, JARIDlC/SMCX, JARID1D/SMCY, UTX, JMJD3, and the like), acetyltransferase activity such as that provided by a histone acetylase transferase (e.g., catalytic core/fragment of the human acetyltransferase p300, GCN5, PCAF, CBP, TAF1, TIP60/PLIP, MOZ/MYST3, MORF/MYST4, HBO1/MYST2, HMOF/MYST1, SRC1, ACTR, P160, CLOCK, and the like), deacetylase activity such as that provided by a histone deacetylase (e.g., HDAC1, HDAC2, HDAC3, HDAC8, HDAC4, HDAC5, HDAC7, HDAC9, SIRT1, SIRT2, HDAC11, and the like), kinase activity, phosphatase activity, ubiquitin ligase activity, deubiquitinating activity, adenylation activity, deadenylation activity, SUMOylating activity, deSUMOylating activity, ribosylation activity, deribosylation activity, myristoylation activity, and demyristoylation activity.

[0267] Additional examples of suitable fusion partners are (i) a dihydrofolate reductase (DHFR) destabilization domain (e.g., to generate a chemically controllable subject RNA-guided polypeptide or a conditionally active RNA-guided polypeptide), and (ii) a chloroplast transit peptide.

[0268] Suitable chloroplast transit peptides include, but are not limited to:

(SEQ ID NO: 151)
MASMISSSAVTTVSRASRGQSAAMAPFGGLKSMTGFPVRKVNTDITSIT
SNGGRVKCMQVWPPIGKKKFETLSYLPPLTRDSRA;
(SEQ ID NO: 152)
MASMISSSAVTTVSRASRGQSAAMAPFGGLKSMTGFPVRKVNTDITSIT
SNGGRVKS;
(SEQ ID NO: 153)
MASSMLSSATMVASPAQATMVAPENGLKSSAAFPATRKANNDITSITSN
GGRVNCMQVWPPIEKKKFETLSYLPDLTDSGGRVNC;
(SEQ ID NO: 154)
MAQVSRICNGVQNPSLISNLSKSSQRKSPLSVSLKTQQHPRAYPISSSW
GLKKSGMTLIGSELRPLKVMSSVSTAC;
(SEQ ID NO: 155)
MAQVSRICNGVWNPSLISNLSKSSQRKSPLSVSLKTQQHPRAYPISSSW
GLKKSGMTLIGSELRPLKVMSSVSTAC;
(SEQ ID NO: 156)
MAQINNMAQGIQTLNPNSNFHKPQVPKSSSFLVFGSKKLKNSANSMLVL
KKDSIFMQLFCSFRISASVAAC;
(SEQ ID NO: 157)
MAALVTSQLATSGTVLSVTDRFRRPGFQGLRPRNPADAALGMRTVGASA
APKQSRKPHRFDRRCLSMVV;
(SEQ ID NO: 158)
MAALTTSQLATSATGFGIADRSAPSSLLRHGFQGLKPRSPAGGDATSLS
VTTSARATPKQQRSVQRGSRRFPSVVVC;
(SEQ ID NO: 159)
MASSVLSSAAVATRSNVAQANMVAPFTGLKSAASFPVSRKQNLDITSIA
SNGGRVQC;
(SEQ ID NO: 160)
MESLAATSVFAPSRVAVPAARALVRAGTVVPTRRTSSTSGTSGVKCSAA
VTPQASPVISRSAAAA;
and
(SEQ ID NO: 161)
MGAAATSMQSLKFSNRLVPPSRRLSPVPNNVTCNNLPKSAAPVRTVKCC
ASSWNSTINGAAATTNGASAASS.

[0269] In some cases, a reference CasX or variant polypeptide of the present disclosure can include an endosomal escape peptide. In some cases, an endosomal escape polypeptide comprises the amino acid sequence GLFXALLXLLXSLWXLLLXA (SEQ ID NO: 162), wherein each X is independently selected from lysine, histidine, and arginine. In some cases, an endosomal escape polypeptide comprises the amino acid sequence GLFHALLHLLHSLWHLLLHA (SEQ ID NO: 163), or HHHHHHHHHH (SEQ ID NO: 164).

[0270] Non-limiting examples of fusion partners for use when targeting ssRNA target nucleic acid sequences include (but are not limited to): splicing factors (e.g., RS domains); protein translation components (e.g., translation initiation, elongation, and/or release factors; e.g., eIF4G); RNA methylases; RNA editing enzymes (e.g., RNA deaminases, e.g., adenosine deaminase acting on RNA (ADAR), including A to I and/or C to U editing enzymes); helicases; RNA-binding proteins; and the like. It is understood that a heterologous polypeptide can include the entire protein or in some cases can include a fragment of the protein (e.g., a functional domain).

[0271] A fusion partner can be any domain capable of interacting with ssRNA (which, for the purposes of this disclosure, includes intramolecular and/or intermolecular secondary structures, e.g., double-stranded RNA duplexes such as hairpins, stem-loops, etc.), whether transiently or irreversibly, directly or indirectly, including but not limited to an effector domain selected from the group comprising; Endonucleases (for example RNase III, the CRR22 DYW domain, Dicer, and PIN (PilT N-terminus) domains from proteins such as SMG5 and SMG6); proteins and protein domains responsible for stimulating RNA cleavage (for example CPSF, CstF, CFIm and CFIIm); Exonucleases (for example XRN-1 or Exonuclease T); Deadenylases (for example HNT3); proteins and protein domains responsible for nonsense mediated RNA decay (for example UPF1, UPF2, UPF3, UPF3b, RNP SI, Y14, DEK, REF2, and SRm160); proteins and protein domains responsible for stabilizing RNA (for example PABP); proteins and protein domains responsible for repressing translation (for example Ago2 and Ago4); proteins and protein domains responsible for stimulating translation (for example Staufen); proteins and protein domains responsible for (e.g., capable of) modulating translation (e.g., translation factors such as initiation factors, elongation factors, release factors, etc., e.g., eIF4G); proteins and protein domains responsible for polyadenylation of RNA (for example PAP1, GLD-2, and Star-PAP); proteins and protein domains responsible for polyuridinylation of RNA (for example CI Dl and terminal uridylate transferase); proteins and protein domains responsible for RNA localization (for example from IMP1, ZBP1, She2p, She3p, and Bicaudal-D); proteins and protein domains responsible for nuclear retention of RNA (for example Rrp6); proteins and protein domains responsible for nuclear export of RNA (for example TAP, NXF1, THO, TREX, REF, and Aly); proteins and protein domains responsible for repression of RNA splicing (for example PTB, Sam68, and hnRNP Al); proteins and protein domains responsible for stimulation of RNA splicing (for example Serine/Arginine-rich (SR) domains); proteins and protein domains responsible for reducing the efficiency of transcription (for example FUS (TLS)); and proteins and protein domains responsible for stimulating transcription (for example CDK7 and HIV Tat). Alternatively, the effector domain may be selected from the group comprising Endonucleases; proteins and protein domains capable of stimulating RNA cleavage; Exonucleases; Deadenylases; proteins and protein domains having nonsense mediated RNA decay activity; proteins and protein domains capable of stabilizing RNA; proteins and protein domains capable of repressing translation; proteins and protein domains capable of stimulating translation; proteins and protein domains capable of modulating translation (e.g., translation factors such as initiation factors, elongation factors, release factors, etc., e.g., eIF4G); proteins and protein domains capable of polyadenylation of RNA; proteins and protein domains capable of polyuridinylation of RNA; proteins and protein domains having RNA localization activity; proteins and protein domains capable of nuclear retention of RNA; proteins and protein domains having RNA nuclear export activity; proteins and protein domains capable of repression of RNA splicing; proteins and protein domains capable of stimulation of RNA splicing; proteins and protein domains capable of reducing the efficiency of transcription; and proteins and protein domains capable of stimulating transcription. Another suitable heterologous polypeptide is a PUF RNA-binding domain, which is described in more detail in WO2012068627, which is hereby incorporated by reference in its entirety.

[0272] Some RNA splicing factors that can be used (in whole or as fragments thereof) as a fusion partner have modular organization, with separate sequence-specific RNA binding modules and splicing effector domains. For example, members of the serine/arginine-rich (SR) protein family contain N-terminal RNA recognition motifs (RRMs) that bind to exonic splicing enhancers (ESEs) in pre-mRNAs and C-terminal RS domains that promote exon inclusion. As another example, the hnRNP protein hnRNP Al binds to exonic splicing silencers (ESSs) through its RRM domains and inhibits exon inclusion through a C-terminal Glycine-rich domain. Some splicing factors can regulate alternative use of splice site (ss) by binding to regulatory sequences between the two alternative sites. For example, ASF/SF2 can recognize ESEs and promote the use of intron proximal sites, whereas hnRNP Al can bind to ESSs and shift splicing towards the use of intron distal sites. One application for such factors is to generate ESFs that modulate alternative splicing of endogenous genes, particularly disease associated genes. For example, Bcl-x pre-mRNA produces two splicing isoforms with two alternative 5′ splice sites to encode proteins of opposite functions. The long splicing isoform Bcl-xL is a potent apoptosis inhibitor expressed in long-lived post mitotic cells and is up-regulated in many cancer cells, protecting cells against apoptotic signals. The short isoform Bcl-xS is a pro-apoptotic isoform and expressed at high levels in cells with a high turnover rate (e.g., developing lymphocytes). The ratio of the two Bcl-x splicing isoforms is regulated by multiple cc-elements that are located in either the core exon region or the exon extension region (i.e., between the two alternative 5′ splice sites). For more examples, see WO2010075303, which is hereby incorporated by reference in its entirety.

[0273] Further suitable fusion partners include, but are not limited to proteins (or fragments thereof) that are boundary elements (e.g., CTCF), proteins and fragments thereof that provide periphery recruitment (e.g., Lamin A, Lamin B, etc.), protein docking elements (e.g., FKBP/FRB, Pill/Abyl, etc.).

[0274] In some cases, a heterologous polypeptide (a fusion partner) provides for subcellular localization, i.e., the heterologous polypeptide contains a subcellular localization sequence (e.g., a nuclear localization signal (NLS) for targeting to the nucleus, a sequence to keep the fusion protein out of the nucleus, e.g., a nuclear export sequence (NES), a sequence to keep the fusion protein retained in the cytoplasm, a mitochondrial localization signal for targeting to the mitochondria, a chloroplast localization signal for targeting to a chloroplast, an ER retention signal, and the like). In some embodiments, a subject RNA-guided polypeptide or a conditionally active RNA-guided polypeptide and/or subject CasX fusion polypeptide does not include a NLS so that the protein is not targeted to the nucleus (which can be advantageous, e.g., when the target nucleic acid sequence is an RNA that is present in the cytosol). In some embodiments, a fusion partner can provide a tag (i.e., the heterologous polypeptide is a detectable label) for ease of tracking and/or purification (e.g., a fluorescent protein, e.g., green fluorescent protein (GFP), yellow fluorescent protein (YFP), red fluorescent protein (RFP), cyan fluorescent protein (CFP), mCherry, tdTomato, and the like; a histidine tag, e.g., a 6×His tag; a hemagglutinin (HA) tag; a FLAG tag; a Myc tag; and the like).

[0275] In some cases a reference or CasX variant polypeptide includes (is fused to) a nuclear localization signal (NLS) (e.g., in some cases 2 or more, 3 or more, 4 or more, or 5 or more 6 or more, 7 or more, 8 or more NLSs). Thus, in some cases, a reference or CasX variant polypeptide includes one or more NLSs (e.g., 2 or more, 3 or more, 4 or more, or 5 or more NLSs). In some cases, one or more NLSs (2 or more, 3 or more, 4 or more, or 5 or more NLSs) are positioned at or near (e.g., within 50 amino acids of) the N-terminus and/or the C-terminus. In some cases, one or more NLSs (2 or more, 3 or more, 4 or more, or 5 or more NLSs) are positioned at or near (e.g., within 50 amino acids of) the N-terminus. In some cases, one or more NLSs (2 or more, 3 or more, 4 or more, or 5 or more NLSs) are positioned at or near (e.g., within 50 amino acids of) the C-terminus. In some cases, one or more NLSs (3 or more, 4 or more, or 5 or more NLSs) are positioned at or near (e.g., within 50 amino acids of) both the N-terminus and the C-terminus. In some cases, an NLS is positioned at the N-terminus and an NLS is positioned at the C-terminus. In some cases a reference or CasX variant polypeptide includes (is fused to) between 1 and 10 NLSs (e.g., 1-9, 1-8, 1-7, 1-6, 1-5, 2-10, 2-9, 2-8, 2-7, 2-6, or 2-5 NLSs). In some cases a reference or CasX variant polypeptide includes (is fused to) between 2 and 5 NLSs (e.g., 2-4, or 2-3 NLSs).

[0276] Non-limiting examples of NLSs include sequences derived from: the NLS of the SV40 virus large T-antigen, having the amino acid sequence PKKKRKV (SEQ ID NO: 165); the NLS from nucleoplasmin (e.g., the nucleoplasmin bipartite NLS with the sequence KRPAATKKAGQAKKKK (SEQ ID NO: 166); the c-myc NLS having the amino acid sequence PAAKRVKLD (SEQ ID NO: 167) or RQRRNELKRSP (SEQ ID NO: 168); the hRNPAl M9 NLS having the sequence NQSSNFGPMKGGNFGGRSSGPYGGGGQYFAKPRNQGGY (SEQ ID NO: 169); the sequence RMRIZFKNKGKDTAELRRRRVEVSVELRKAKKDEQILKRRNV (SEQ ID NO: 170) of the IBB domain from importin-alpha; the sequences VSRKRPRP (SEQ ID NO: 171) and PPKKARED (SEQ ID NO: 172) of the myoma T protein; the sequence PQPKKKPL (SEQ ID NO: 173) of human p53; the sequence SALIKKKKKMAP (SEQ ID NO: 174) of mouse c-abl IV; the sequences DRLRR (SEQ ID NO: 175) and PKQKKRK (SEQ ID NO: 176) of the influenza virus NS1; the sequence RKLKKKIKKL (SEQ ID NO: 177) of the Hepatitis virus delta antigen; the sequence REKKKFLKRR (SEQ ID NO: 178) of the mouse Mxl protein; the sequence KRKGDEVDGVDEVAKKKSKK (SEQ ID NO: 179) of the human poly(ADP-ribose) polymerase; the sequence RKCLQAGMNLEARKTKK (SEQ ID NO: 180) of the steroid hormone receptors (human) glucocorticoid; the sequence PRPRKIPR (SEQ ID NO: 181) of Borna disease virus P protein (BDV-P1); the sequence PPRKKRTVV (SEQ ID NO: 182) of hepatitis C virus nonstructural protein (HCV-NS5A); the sequence NLSKKKKRKREK (SEQ ID NO: 183) of LEF1; the sequence RRPSRPFRKP (SEQ ID NO: 184) of ORF57 simirae; the sequence KRPRSPSS (SEQ ID NO: 185) of EBV LANA; the sequence KRGINDRNFWRGENERKTR (SEQ ID NO: 186) of Influenza A protein; the sequence PRPPKMARYDN (SEQ ID NO: 187) of human RNA helicase A (RHA); the sequence KRSFSKAF (SEQ ID NO: 188) of nucleolar RNA helicase II; the sequence KLKIKRPVK (SEQ ID NO: 189) of TUS-protein; the sequence PKKKRKVPPPPAAKRVKLD (SEQ ID NO: 190) associated with importin-alpha; the sequence PKTRRRPRRSQRKRPPT (SEQ ID NO: 191) from the Rex protein in HTLV-1; the sequence MSRRRKANPTKLSENAKKLAKEVEN (SEQ ID NO: 192) from the EGL-13 protein of Caenorhabditis elegans; and the sequences KTRRRPRRSQRKRPPT (SEQ ID NO: 193), RRKKRRPRRKKRR (SEQ ID NO: 194), PKKKSRKPKKKSRK (SEQ ID NO: 195), HKKKHPDASVNFSEFSK (SEQ ID NO: 196), QRPGPYDRPQRPGPYDRP (SEQ ID NO: 197), LSPSLSPLLSPSLSPL (SEQ ID NO: 198), RGKGGKGLGKGGAKRHRK (SEQ ID NO: 199), PKRGRGRPKRGRGR (SEQ ID NO: 200), PKKKRKVPPPPAAKRVKLD (SEQ ID NO: 190), PKKKRKVPPPPKKKRKV (SEQ ID NO: 201), the sequence PAKRARRGYKC (SEQ ID NO: 202) from CPV, the sequence KLGPRKATGRW (SEQ ID NO: 203) from B19, and the sequence PRRKREE (SEQ ID NO: 204) from hBOV. In general, NLS (or multiple NLSs) are of sufficient strength to drive accumulation of a reference or CasX variant fusion protein in the nucleus of a eukaryotic cell. Detection of accumulation in the nucleus may be performed by any suitable technique. For example, a detectable marker may be fused to a reference or CasX variant fusion protein such that location within a cell may be visualized. Cell nuclei may also be isolated from cells, the contents of which may then be analyzed by any suitable process for detecting protein, such as immunohistochemistry, Western blot, or enzyme activity assay. Accumulation in the nucleus may also be determined.

[0277] In some cases, a reference or CasX variant fusion protein includes a “Protein Transduction Domain” or PTD (also known as a CPP—cell penetrating peptide), which refers to a protein, polynucleotide, carbohydrate, or organic or inorganic compound that facilitates traversing a lipid bilayer, micelle, cell membrane, organelle membrane, or vesicle membrane. A PTD attached to another molecule, which can range from a small polar molecule to a large macromolecule and/or a nanoparticle, facilitates the molecule traversing a membrane, for example going from an extracellular space to an intracellular space, or from the cytosol to within an organelle. In some embodiments, a PTD is covalently linked to the amino terminus of a reference or CasX variant fusion protein. In some embodiments, a PTD is covalently linked to the carboxyl terminus of a reference or CasX variant fusion protein. In some cases, the PTD is inserted internally in the sequence of a reference or CasX variant fusion protein at a suitable insertion site. In some cases, a reference or CasX variant fusion protein includes (is conjugated to, is fused to) one or more PTDs (e.g., two or more, three or more, four or more PTDs). In some cases, a PTD includes one or more nuclear localization signals (NLS). Examples of PTDs include but are not limited to peptide transduction domain of HIV TAT comprising YGRKKRRQRRR (SEQ ID NO: 205), RKKRRQRR (SEQ ID NO: 206); YARAAARQARA (SEQ ID NO: 207); THRLPRRRRRR (SEQ ID NO: 208); and GGRRARRRRRR (SEQ ID NO: 209); a polyarginine sequence comprising a number of arginines sufficient to direct entry into a cell (e.g., 3, 4, 5, 6, 7, 8, 9, 10, or 10-50 arginines (SEQ ID NO: 210)); a VP22 domain (Zender et al. (2002) Cancer Gene Ther. 9(6):489-96); an Drosophila Antennapedia protein transduction domain (Noguchi et al. (2003) Diabetes 52(7): 1732-1737); a truncated human calcitonin peptide (Trehin et al. (2004) Pharm. Research 21:1248-1256); polylysine (Wender et al. (2000) Proc. Natl. Acad. Sci. USA 97: 13003-13008); RRQRRTSKLMKR (SEQ ID NO: 211); Transportan GWTLNSAGYLLGKINLKALAALAKKIL (SEQ ID NO: 212); KALAWEAKLAKALAKALAKHLAKALAKALKCEA (SEQ ID NO: 213); and RQIKIWFQNRRMKWKK (SEQ ID NO: 214). In some embodiments, the PTD is an activatable CPP (ACPP) (Aguilera et al. (2009) Integr Biol (Camb) June; 1(5-6): 371-381). ACPPs comprise a polycationic CPP (e.g., Arg9 or “R9”) connected via a cleavable linker to a matching polyanion (e.g., Glu9 or “E9”), which reduces the net charge to nearly zero and thereby inhibits adhesion and uptake into cells. Upon cleavage of the linker, the polyanion is released, locally unmasking the polyarginine and its inherent adhesiveness, thus “activating” the ACPP to traverse the membrane.

[0278] In some embodiments, a reference or CasX variant fusion protein can include a CasX protein that is linked to an internally inserted heterologous amino acid or heterologous polypeptide (a heterologous amino acid sequence) via a linker polypeptide (e.g., one or more linker polypeptides). In some embodiments, a reference or CasX variant fusion protein can be linked at the C-terminal and/or N-terminal end to a heterologous polypeptide (fusion partner) via a linker polypeptide (e.g., one or more linker polypeptides) The linker polypeptide may have any of a variety of amino acid sequences. Proteins can be joined by a spacer peptide, generally of a flexible nature, although other chemical linkages are not excluded. Suitable linkers include polypeptides of between 4 amino acids and 40 amino acids in length, or between 4 amino acids and 25 amino acids in length. These linkers are generally produced by using synthetic, linker-encoding oligonucleotides to couple the proteins. Peptide linkers with a degree of flexibility can be used. The linking peptides may have virtually any amino acid sequence, bearing in mind that the preferred linkers will have a sequence that results in a generally flexible peptide. The use of small amino acids, such as glycine and alanine, are of use in creating a flexible peptide. The creation of such sequences is routine to those of skill in the art. A variety of different linkers are commercially available and are considered suitable for use. Example linker polypeptides include glycine polymers (G)n, glycine-serine polymer (including, for example, (GS)n, GSGGSn (SEQ ID NO: 215), GGSGGSn (SEQ ID NO: 216), and GGGSn (SEQ ID NO: 217), where n is an integer of at least one), glycine-alanine polymers, alanine-serine polymers, glycine-proline polymers, proline polymers and proline-alanine polymers. Example linkers can comprise amino acid sequences including, but not limited to, GGSG (SEQ ID NO: 218), GGSGG (SEQ ID NO: 219), GSGSG (SEQ ID NO: 220), GSGGG (SEQ ID NO: 221), GGGSG (SEQ ID NO: 222), GSSSG (SEQ ID NO: 223), GPGP (SEQ ID NO: 224), GGP, PPP, PPAPPA (SEQ ID NO: 225), PPPGPPP (SEQ ID NO: 226) and the like. The ordinarily skilled artisan will recognize that design of a peptide conjugated to any elements described above can include linkers that are all or partially flexible, such that the linker can include a flexible linker as well as one or more portions that confer less flexible structure.

### V. CasX:gNA Systems and Methods for Modification of C9orf72 Genes

[0279] The CasX proteins, guide nucleic acids, and variants thereof provided herein are useful for various applications, including as therapeutics, diagnostics, and for research. To effect the methods of the disclosure for gene editing, provided herein are programmable CasX:gNA systems. The programmable nature of the CasX:gNA system provided herein allows for the precise targeting to achieve the desired effect (nicking, cleaving, etc.) at one or more regions of predetermined interest in the target nucleic acid sequence encoding the C9orf72 protein, C9orf72 regulatory element, a non-coding region of the C9orf72 gene, or both. In some embodiments, the CasX:gNA systems provided herein comprise a CasX variant of any one of SEQ ID NOS: 49-150, 233-235, 238-252 or 272-281 as set forth in Tables 4, 6, 7, 8, or 10 or a variant sequence at least 60% identical, at least 70% identical, at least 80% identical, at least 81% identical, at least 82% identical, at least 83% identical, at least 84% identical, at least 85% identical, at least 86% identical, at least 86% identical, at least 87% identical, at least 88% identical, at least 89% identical, at least 89% identical, at least 90% identical, at least 91% identical, at least 92% identical, at least 93% identical, at least 94% identical, at least 95% identical, at least 96% identical, at least 97% identical, at least 98% identical, at least 99% identical, or at least 99.5% identical thereto, the gNA scaffold comprises a sequence of any one of SEQ ID NOS: 2101-2294 as set forth in Table 2 or a sequence at least 65% identical, at least 70% identical, at least 75% identical, at least 80% identical, at least 81% identical, at least 82% identical, at least 83% identical, at least 84% identical, at least 85% identical, at least 86% identical, at least 86% identical, at least 87% identical, at least 88% identical, at least 89% identical, at least 89% identical, at least 90% identical, at least 91% identical, at least 92% identical, at least 93% identical, at least 94% identical, at least 95% identical, at least 96% identical, at least 97% identical, at least 98% identical, at least 99% identical, at least 99.5% identical thereto, and the gNA comprises a targeting sequence of any one of SEQ ID NOs: 309-343, 363-2100 or 2295-21835 or a sequence at least 65% identical, at least 70% identical, at least 75% identical, at least 80% identical, at least 85% identical, at least 90% identical, or at least 95% identical thereto and having between 15 and 30 nucleotides. In some embodiments, the targeting sequence of the gNA hybridizes to a target nucleic acid sequence that encodes one or more mutations of the C9orf72 protein of SEQ ID NO: 227 or 228, or one or more mutations that disrupt the function or expression of the C9orf72 protein. In another embodiment, the targeting sequence of the gNA hybridizes to a target nucleic acid sequence comprising a sequence that is 5′ or 3′ to the hexanucleotide repeat GGGGCC or its complement. In other embodiment, the targeting sequence of the gNA hybridizes to a target nucleic acid sequence comprising a regulatory element of the C9orf72 gene. In some embodiments, the targeting sequence of the gNA has a sequence that hybridizes with a C9orf72 exon sequence. In some embodiments, the targeting sequence of the gNA has a sequence that hybridizes with a C9orf72 intron sequence. In some embodiments, the targeting sequence of the gNA has a sequence that hybridizes with the intron 1 of the C9orf72 gene. In some embodiments, the targeting sequences of the plurality of gNAs have sequences that hybridize with a C9orf72 intron-exon junction sequence, a C9orf72 regulatory element, a C9orf72 coding region, a C9orf72 non-coding region, or combinations thereof. In some embodiments of the method, the gNA is chemically modified. In other embodiments, the disclosure provides one or more polynucleotides encoding the foregoing CasX variant proteins and gNAs. In some cases, the CasX:gNA system further comprises a donor template nucleic acid, wherein the donor template can be inserted by HDR or HITI repair mechanisms of the host cell to knock-down or knock-out the C9orf72 gene or, in other cases, to correct the mutation(s); e.g. by deletion of the mutant HRS repeat and insertion of an HRS having between 10 and 30 repeats of the GGGGCC sequence.

[0280] In some embodiments, the CasX:gNA systems provided herein comprise a CasX protein and a gNA, or one or more polynucleotides encoding a CasX protein and a gNA, wherein the targeting sequence of the gNA is complementary to, and therefore is capable of hybridizing with, a target nucleic acid sequence encoding the C9orf72 protein, C9orf72 regulatory element, a non-coding region of the C9orf72 gene (e.g., intron 1), sequences that abridge these regions, or is capable or hybridizing with a sequence complementary thereto. In particular embodiments, the targeting sequence of the gNA is complementary to, and therefore is capable of hybridizing with, a sequence within the HRS or a region that is 5′ or 3′ to the HRS. In another particular embodiment, the targeting sequence of the gNA is complementary to, and therefore is capable of hybridizing with a sequence within the promoter of the C9orf72. Exemplary, but non-limiting targeting sequences that can be used to target the C9orf72 HRS include SEQ ID NOS: 309-343 as set forth in Table 15. In some embodiments, the targeting sequence comprises a sequence of SEQ ID NOS: 309-343. In some embodiments, the CasX:gNA system comprises two targeting sequences selected from SEQ ID NOS: 309-343, and the two targeting sequences are not the same. In some embodiments, the CasX:gNA system comprises two targeting sequences, wherein the first targeting sequence comprises SEQ ID NO: 310 and the second targeting sequence is selected from the group consisting of SEQ ID NOS: 321-324. In some embodiments, the CasX:gNA system comprises two targeting sequences, wherein the first targeting sequence comprises SEQ ID NO: 319 and the second targeting sequence is selected from the group consisting of SEQ ID NOS: 321-325. In some embodiments, the CasX:gNA system comprises two targeting sequences, wherein the first targeting sequence comprises SEQ ID NO: 320 and the second targeting sequence is selected from the group consisting of SEQ ID NOS: 321-325. In some embodiments, the two targeting sequences comprise SEQ ID NOS: 310 and 321, SEQ ID NOS: 310 and 322, SEQ ID NOS: 310 and 323, SEQ ID NOS: 310 and 324, SEQ ID NOS: 319 and 321, SEQ ID NOS: 319 and 322, SEQ ID NOS: 319 and 323, SEQ ID NOS: 319 and 324, SEQ ID NOS: 319 and 325, SEQ ID NOS: 320 and 321, SEQ ID NOS: 320 and 322, SEQ ID NOS: 320 and 323, SEQ ID NOS: 320 and 324, or SEQ ID NOS: 320 and 325.

[0281] Introducing recombinant expression vectors comprising sequences encoding the CasX:gNA systems (and, optionally, the donor template sequences) of the disclosure into cells under in vitro conditions can occur in any suitable culture media and under any suitable culture conditions that promote the survival of the cells and production of the CasX:gNA. Introducing recombinant expression vectors into a target cell can be carried out in vivo, in vitro or ex vivo. In some embodiments of the method, vectors may be provided directly to a target host cell. For example, cells may be contacted with vectors having nucleic acids encoding the CasX and gNA of any of the embodiments described herein and, optionally, having a donor template sequence such that the vectors are taken up by the cells. Methods for contacting cells with nucleic acid vectors that are plasmids include electroporation, calcium chloride transfection, microinjection, transduction and lipofection are well known in the art. For viral vector delivery, cells can be contacted with viral particles comprising the subject viral expression vectors and the nucleic acid encoding the CasX and gNA and, optionally, the donor template. In some embodiments, the vector is an Adeno-Associated Viral (AAV) vector, wherein the AAV is selected from AAV1, AAV2, AAV3, AAV4, AAV5, AAV6, AAV7, AAV8, AAV9, AAV10, AAV11, AAV12, AAV 44.9, AAV-Rh74, or AAVRh10. Embodiments of AAV vectors are described more fully, below. In other embodiments, the vector is a lentiviral vector. Retroviruses, for example, lentiviruses, may be suitable for use in methods of the present disclosure. Commonly used retroviral vectors are “defective”, e.g., are unable to produce viral proteins required for productive infection, and are commonly referred to as virus-like particles. Rather, replication of the vector requires growth in a packaging cell line. Embodiments of retroviral vectors are described more fully, below.

[0282] In other embodiments, the disclosure provides methods of modifying target nucleic acid sequences using the CasX:gNA systems of any of the embodiments described herein, and the methods further comprise contacting the target nucleic acid sequence with an additional CRISPR protein, or a polynucleotide encoding the additional CRISPR protein. In some embodiments, the additional CRISPR protein is a CasX protein having a sequence different from the CasX of the CasX:gNA system. In some embodiments, the additional CRISPR protein is not a CasX protein; e.g., the additional CRISPR protein can be Cpf1, Cas9, Cas12a, or Cas13a.

[0283] In some embodiments, it may be desirable to knock-down or knock-out expression of the C9orf72 gene in the subject comprising mutations or duplications, for example dominant mutations or duplications leading to amyotrophic lateral sclerosis (ALS) and frontotemporal dementia (FTD). The term “knock-out” refers to the elimination of a gene or the expression of a gene. For example, a gene can be knocked out by either a deletion or an addition of a nucleotide sequence that leads to a disruption of the reading frame. As another example, a gene may be knocked out by replacing a part of the gene with an irrelevant or heterologous sequence. The term “knock-down” as used herein refers to reduction in the expression of a gene or its gene product(s). As a result of a gene knock-down, the protein activity or function may be attenuated or the protein levels may be reduced or eliminated. In such embodiments, gNAs having targeting sequences specific for a portion of the gene encoding the C9orf72 protein or the C9orf72 regulatory elements may be used. Depending on the CasX protein and gNA used, the event may be a cleavage event, allowing for knock-down/knock-out of expression. In some embodiments, C9orf72 gene expression may be disrupted or eliminated by introducing random insertions or deletions (indels), for example by utilizing the imprecise non-homologous DNA end joining (NHEJ) repair pathway. In such embodiments, the targeted region of the C9orf72 includes coding sequences (exons) of the C9orf72 gene, as inserting or deleting nucleotides within coding sequences can generate a frame shift mutation. This approach can also be used in non-coding regions such as introns, or regulatory elements to disturb expression of the C9orf72 gene. Thus, in some embodiments, the disclosure provides a CasX:gNA system utilized in methods of altering one or more target nucleic acid sequences of a cell, the methods comprising contacting said cell with the CasX:gNA system comprising a CasX protein and a gNA of the embodiments described herein, wherein the gRNA comprises a targeting sequence to a genomic target complementary to, and therefore capable of hybridizing with a sequence encoding C9orf72 protein, a sequence that is 5′ or 3′ to the HRS, the C9orf72 regulatory elements, or the complement of these sequences. In other embodiments, the disclosure provides methods of altering a target nucleic acid sequence of a cell, comprising contacting said cell with a nucleic acid encoding a CasX:gNA system comprising a CasX protein and a gNA of the embodiments described herein, wherein the gRNA comprises a targeting sequence to a genomic target complementary to, and therefore capable of hybridizing with a sequence encoding the C9orf72 protein, a sequence that is 5′ or 3′ to the HRS, a C9orf72 regulatory element, or the complement of these sequences. In other embodiments, the disclosure provides methods of altering a target nucleic acid sequence of a cell, comprising contacting said cell with a vector of the embodiments described herein comprising a nucleic acid encoding a CasX:gNA system comprising a CasX protein and a gNA, wherein the gNA comprises a targeting sequence complementary to, and therefore capable of hybridizing with, a sequence encoding C9orf72 protein, a sequence that is 5′ or 3′ to the HRS, a C9orf72 regulatory element, or the complement of these sequences. In some embodiments, the disclosure provides methods and CasX:gNA systems to knock-down or knock-out cellular expression of both C9orf72 alleles. In some embodiments, the disclosure provides methods and CasX:gNA systems to knock-down or knock-out cellular expression of a single C9orf72 allele. In other embodiments of the methods, the CasX:gNA system further comprises a donor template nucleic acid corresponding to all or at least a portion of a C9orf72 gene, wherein said donor template nucleic acid comprises a heterologous sequence, or a deletion, insertion, or mutation of one or more nucleotides in comparison to a genomic nucleic acid sequence encoding said portion of C9orf72, wherein the contacting results in the knock-down or knock-out of C9orf72. In the foregoing, the cell has been modified such that expression of the HRS is reduced by at least about 10%, at least about 20%, at least about 30%, at least about 40%, at least about 50%, at least about 60%, at least about 70%, at least about 80%, or at least about 90% in comparison to a cell that has not been modified. In other embodiments of the methods, the cell has been modified such that the cell does not express a detectable level of the HRS RNA or the DPR protein. In still other embodiments of the method, the donor template nucleic acid comprises a corrective sequence that upon insertion in the target nucleic acid by the CasX:gNA system, functional C9orf72 protein or physiologically-normal levels of C9orf72 can be expressed.

[0284] Thus, the CasX:gNA systems and methods described herein can be used, in combination with conventional molecular biology methods, to modify populations of cells (examples of which are described more fully, below) to produce cells having the capacity to produce a functional C9orf72 protein. This approach, therefore, could be used to generate populations of cells that can be administered to a subject with a disease such as ALS or FTD. In other embodiments, the CasX:gNA systems and methods described herein can be used to treat a subject by administration of components of the system or vectors encoding the CasX:gNA components to modify the C9orf72 gene of the target cells of the subject.

### VI. Polynucleotides and Vectors

[0285] In other embodiments, the present disclosure provides polynucleotides encoding the Type V nuclease proteins and the polynucleotides of the gNAs described herein. In some embodiments, the disclosure provides polynucleotides encoding the CasX proteins and the polynucleotides of the gNAs (e.g., the gDNAs and gRNAs) of any of the CasX:gNA system embodiments described herein, as well as sequences complementary to polynucleotides encoding the CasX proteins and the gNAs embodiments. In additional embodiments, the disclosure provides donor template polynucleotides encoding portions or all of a C9orf72 gene. In some cases, the C9orf72 gene of the donor template comprises a mutation or a heterologous sequence for knocking down or knocking out the C9orf72 gene in the target nucleic acid. In other cases, the donor template comprises a corrective sequence for knocking in a functional C9orf72 gene or portion thereof. In yet further embodiments, the disclosure relates to vectors comprising polynucleotides encoding the CasX proteins and the CasX gNAs described herein. In yet further embodiments, the disclosure relates to vectors comprising polynucleotides comprising the donor templates described herein.

[0286] In some embodiments, the disclosure provides polynucleotide sequences encoding the reference CasX of SEQ ID NOS: 1-3. In other embodiments, the disclosure provides polynucleotide sequences encoding the CasX variants of any of the embodiments described herein, including the CasX protein variants of SEQ ID NOS: 49-150, 233-235, 238-252, 272-281 as set forth in Tables 4 6-8 and 10, or sequences having at least about 50%, at least about 60%, at least about 70%, at least about 80%, at least about 90%, at least about 95%, at least about 96%, at least about 97%, at least about 98%, or at least about 99% sequence identity to a sequence of Table 4, or the complement of the polynucleotide sequences encoding the variants. In some embodiments, the disclosure provides an isolated polynucleotide sequence encoding a gNA sequence of any of the embodiments described herein, including scaffold the sequences of Table 1 and 2, or a sequence having at least about 50%, at least about 60%, at least about 70%, at least about 80%, at least about 90%, at least about 95%, at least about 96%, at least about 97%, at least about 98%, at least about 99% sequence identity thereto. In some embodiments, the polynucleotide encodes a gNA scaffold sequence selected from the group consisting of SEQ ID NOS:2101-2294, or a sequence having at least about 50%, at least about 60%, at least about 70%, at least about 80%, at least about 90%, at least about 95%, at least about 96%, at least about 97%, at least about 98%, at least about 99% sequence identity thereto.

[0287] In some embodiments, the disclosure provides polynucleotides encoding gNA scaffolds and further comprising a targeting sequence polynucleotide linked 3′ to the scaffold having a sequence of SEQ ID NOs: 309-343, 363-2100 or 2295-21835, or a sequence with at least about 65%, at least about 75%, at least about 85%, or at least about 95% identity to a sequence thereto that is complementary to, and therefore hybridizes with, the C9orf72 gene. In other embodiments, the disclosure provides a targeting polynucleotide having 15 nucleotides, 16 nucleotides, 17, nucleotides, 18 nucleotides, 19 nucleotides, 20 nucleotides, or 21 nucleotides. In some cases, the polynucleotide sequence encodes a gNA comprising a targeting sequence that hybridizes with a C9orf72 exon. In other cases, the polynucleotide sequence encodes a gNA comprising a targeting sequence that hybridizes with a C9orf72 intron. In other cases, the polynucleotide sequence encodes a gNA comprising a targeting sequence that hybridizes with a C9orf72 intron-exon junction. In other cases, the polynucleotide sequence encodes a gNA comprising a targeting sequence that hybridizes with an intergenic region of the C9orf72 gene. In other cases, the polynucleotide sequence encodes a gNA comprising a targeting sequence that hybridizes with a sequence located 5′ to the HRS. In other cases, the polynucleotide sequence encodes a gNA comprising a targeting sequence that hybridizes with a sequence located 3′ to the HRS. In other embodiments, the disclosure provides polynucleotide sequences encoding two or more gNAs, each having a scaffold and targeting sequence, that collectively hybridize with a sequence located 5′ and a sequence located 3′ to the HRS. In other embodiments, the polynucleotide sequence encodes a gNA comprising a targeting sequence that hybridizes with a C9orf72 regulatory element. In some cases, the C9orf72 regulatory element is a C9orf72 promoter or enhancer. In some cases, the C9orf72 regulatory element is located 5′ of the C9orf72 transcription start site, 3′ of the C9orf72 transcription start, or in a C9orf72 intron. In some cases, the C9orf72 regulatory element is in an intron of the C9orf72 gene. In other cases, the C9orf72 regulatory element comprises the 5′ UTR of the C9orf72 gene. In still other cases, the C9orf72 regulatory element comprises the 3′UTR of the C9orf72 gene.

[0288] In other embodiments, the disclosure provides donor template nucleic acids, wherein the donor template comprises a nucleotide sequence having homology to a C9orf72 target nucleic acid sequence but not complete identity to the target sequence of the target nucleic acid for which gene editing is intended. In some embodiments, the C9orf72 donor template is intended for gene editing and comprises all or at least a portion of a C9orf72 gene. In some embodiments, the C9orf72 donor template comprises a sequence that hybridizes with the C9orf72 gene. In other embodiments, the C9orf72 donor sequence comprises a sequence that encodes at least a portion of a C9orf72 exon. In other embodiments, the C9orf72 donor template has a sequence that encodes at least a portion of a C9orf72 intron. In other embodiments, the C9orf72 donor template has a sequence that encodes at least a portion of a C9orf72 intron-exon junction. In other embodiments, the C9orf72 donor template has a sequence that encodes at least a portion of an intergenic region of the C9orf72 gene. In other embodiments, the C9orf72 donor template has a sequence that encodes at least a portion of a C9orf72 regulatory element. In some cases, the C9orf72 donor template is a wild-type sequence that encodes all or a portion of SEQ ID NO: 227 or 228. In other cases, the C9orf72 donor template sequence comprises one or more mutations relative to a wild-type C9orf72 gene and may contain one or more single base changes, insertions, deletions, inversions or rearrangements with respect to the genomic sequence, provided that there is sufficient homology with the target sequence to support homology-directed repair, or the donor template has homologous arms, whereupon insertion can result in splicing out of regions comprising, for example, the hexanucleotide repeat such that a functional C9orf72 protein can be expressed. In a particular embodiment, the C9orf72 donor template sequence comprises from 10 to about 30 copies of the hexanucleotide repeat GGGGCC. In the foregoing embodiments, the donor template can range in size from 10-10,000 nucleotides. In some embodiments, the donor template is a single-stranded DNA template. In other embodiments, the donor template is a single stranded RNA template. In other embodiments, the donor template is a double-stranded DNA template.

[0289] In some embodiments, the disclosure relates to methods to produce polynucleotide sequences encoding the reference CasX, the CasX variants, or the gNA of any of the embodiments described herein, including variants thereof, as well as methods to express the proteins expressed or RNA transcribed by the polynucleotide sequences. In general, the methods include producing a polynucleotide sequence coding for the reference CasX, the CasX variants, or the gNA of any of the embodiments described herein and incorporating the encoding gene into an expression vector appropriate for a host cell. For production of the encoded reference CasX, the CasX variants, or the gNA of any of the embodiments described herein, the method includes transforming an appropriate host cell with an expression vector comprising the encoding polynucleotide, and culturing the host cell under conditions causing or permitting the resulting reference CasX, the CasX variants, or the gNA of any of the embodiments described herein to be expressed or transcribed in the transformed host cell, thereby producing the reference CasX, the CasX variants, or the gNA, which is recovered by methods described herein or by standard purification methods known in the art, including the methods of the Examples. Standard recombinant techniques in molecular biology are used to make the polynucleotides and expression vectors of the present disclosure.

[0290] In accordance with the disclosure, polynucleotide sequences that encode the reference CasX, the CasX variants, or the gNA of any of the embodiments described herein are used to generate recombinant DNA molecules that direct the expression in appropriate host cells. Several cloning strategies are suitable for performing the present disclosure, many of which are used to generate a construct that comprises a gene coding for a composition of the present disclosure, or its complement. In some embodiments, the cloning strategy is used to create a gene that encodes a construct that comprises nucleotides encoding the reference CasX, the CasX variants, or the gNA that is used to transform a host cell for expression of the composition.

[0291] In one approach, a construct is first prepared containing the DNA sequence encoding a reference CasX, a CasX variant, or a gNA. Exemplary methods for the preparation of such constructs are described in the Examples. The construct is then used to create an expression vector suitable for transforming a host cell, such as a prokaryotic or eukaryotic host cell for the expression and recovery of the polypeptide construct. Where desired, the host cell is an E. coli cell. In other embodiments, the host cell is selected from BHK cells, HEK293 cells, HEK293T cells, Lenti-X HEK293 cells, NS0 cells, SP2/0 cells, YO myeloma cells, P3X63 mouse myeloma cells, PER cells, PER.C6 cells, hybridoma cells, NIH3T3 cells, COS, HeLa, CHO, or yeast cells. Exemplary methods for the creation of expression vectors, the transformation of host cells and the expression and recovery of reference CasX, the CasX variants, or the gNA are described in the Examples.

[0292] The gene or genes encoding for the reference CasX, the CasX variants, or the gNA constructs can be made in one or more steps, either fully synthetically or by synthesis combined with enzymatic processes, such as restriction enzyme-mediated cloning, PCR and overlap extension, including methods more fully described in the Examples. The methods disclosed herein can be used, for example, to ligate sequences of polynucleotides encoding the various components (e.g., CasX and gNA) genes of a desired sequence. Genes encoding polypeptide compositions are assembled from oligonucleotides using standard techniques of gene synthesis.

[0293] In some embodiments, the nucleotide sequence encoding a CasX protein is codon optimized. This type of optimization can entail a mutation of an encoding nucleotide sequence to mimic the codon preferences of the intended host organism or cell while encoding the same CasX protein. Thus, the codons can be changed, but the encoded protein remains unchanged. For example, if the intended target cell of the CasX protein was a human cell, a human codon-optimized CasX-encoding nucleotide sequence could be used. As another non-limiting example, if the intended host cell were a mouse cell, then a mouse codon-optimized CasX-encoding nucleotide sequence could be generated. As another non-limiting example, if the intended host cell were a plant cell, then a plant codon-optimized CasX protein variant-encoding nucleotide sequence could be generated. As another non-limiting example, if the intended host cell were an insect cell, then an insect codon-optimized CasX protein-encoding nucleotide sequence could be generated. The gene design can be performed using algorithms that optimize codon usage and amino acid composition appropriate for the host cell utilized in the production of the reference CasX, the CasX variants, or the gNA. In one method of the disclosure, a library of polynucleotides encoding the components of the constructs is created and then assembled, as described above. The resulting genes are then assembled and the resulting genes used to transform a host cell and produce and recover the reference CasX, the CasX variants, or the gNA compositions for evaluation of its properties, as described herein.

[0294] In some embodiments, a nucleotide sequence encoding a gNA is operably linked to a control element, e.g., a transcriptional control element, such as a promoter. In some embodiments, a nucleotide sequence encoding a CasX protein is operably linked to a control element, e.g., a transcriptional control element, such as a promoter.

[0295] The transcriptional control element can be a promoter. In some cases, the promoter is a constitutively active promoter. In some cases, the promoter is a regulatable promoter. In some cases, the promoter is an inducible promoter. In some cases, the promoter is a tissue-specific promoter. In some cases, the promoter is a cell type-specific promoter. In some cases, the transcriptional control element (e.g., the promoter) is functional in a targeted cell type or targeted cell population. For example, in some cases, the transcriptional control element can be functional in eukaryotic cells, e.g., the cell is selected from the group consisting of Purkinje cell, frontal cortex neuron, motor cortex neuron, hippocampus neuron, cerebellum neuron, upper motor neuron, spinal cord neuron, spinal cord motor neuron, glial cell, and astrocytes.

[0296] Non-limiting examples of eukaryotic promoters (promoters functional in a eukaryotic cell) include EF1alpha, EF1alpha core promoter, those from cytomegalovirus (CMV) immediate early, herpes simplex virus (HSV) thymidine kinase, early and late SV40, long terminal repeats (LTRs) from retrovirus, and mouse metallothionein-I. Further non-limiting examples of eukaryotic promoters include the CMV promoter full-length promoter, the minimal CMV promoter, the chicken β-actin promoter, the hPGK promoter, the HSV TK promoter, the Mini-TK promoter, the human synapsin I promoter which confers neuron-specific expression, the Mecp2 promoter for selective expression in neurons, the minimal IL-2 promoter, the Rous sarcoma virus enhancer/promoter (single), the spleen focus-forming virus long terminal repeat (LTR) promoter, the SV40 promoter, the SV40 enhancer and early promoter, the TBG promoter: promoter from the human thyroxine-binding globulin gene (Liver specific), the PGK promoter, the human ubiquitin C promoter, the UCOE promoter (Promoter of HNRPA2B1-CBX3), the Histone H2 promoter, the Histone H3 promoter, the U1a1 small nuclear RNA promoter (226 nt), the U1b2 small nuclear RNA promoter (246 nt) 26, the TTR minimal enhancer/promoter, the b-kinesin promoter, the human eIF4A1 promoter, the ROSA26 promoter and the glyceraldehyde 3-phosphate dehydrogenase (GAPDH) promoter.

[0297] Selection of the appropriate vector and promoter is well within the level of ordinary skill in the art, as it related to controlling expression, e.g., for modifying a protein involved in antigen processing, antigen presentation, antigen recognition, and/or antigen response and/or its regulatory element. The expression vector may also contain a ribosome binding site for translation initiation and a transcription terminator. The expression vector may also include appropriate sequences for amplifying expression. The expression vector may also include nucleotide sequences encoding protein tags (e.g., 6×His tag, hemagglutinin tag, FLAG tag, fluorescent protein, etc.) that can be fused to the CasX protein, thus resulting in a chimeric CasX protein that are used for purification or detection.

[0298] In some embodiments, a nucleotide sequence encoding each of a gNA variant or a CasX protein is operably linked to an inducible promoter, a constitutively active promoter, a spatially restricted promoter (i.e., transcriptional control element, enhancer, tissue specific promoter, cell type specific promoter, etc.), or a temporally restricted promoter. In other embodiments, individual nucleotide sequences encoding the gNA or the CasX are linked to one of the foregoing categories of promoters, which are then introduced into the cells to be modified by conventional methods, described below.

[0299] In certain embodiments, suitable promoters can be derived from viruses and can therefore be referred to as viral promoters, or they can be derived from any organism, including prokaryotic or eukaryotic organisms. Suitable promoters can be used to drive expression by any RNA polymerase (e.g., pol I, pol II, pol III). Exemplary promoters include, but are not limited to the SV40 early promoter, mouse mammary tumor virus long terminal repeat (LTR) promoter; adenovirus major late promoter (Ad MLP); a herpes simplex virus (HSV) promoter, a cytomegalovirus (CMV) promoter such as the CMV immediate early promoter region (CMVIE), a rous sarcoma virus (RSV) promoter, a human U6 small nuclear promoter (U6), an enhanced U6 promoter, a human H1 promoter (H1), a POL1 promoter, a 7SK promoter, tRNA promoters and the like.

[0300] In some embodiments, one or more nucleotide sequences encoding a CasX and gNA and, optionally, comprising a donor template, are each operably linked to (under the control of) a promoter operable in a eukaryotic cell. Examples of inducible promoters may include, but are not limited to, T7 RNA polymerase promoter, T3 RNA polymerase promoter, isopropyl-beta-D-thiogalactopyranoside (IPTG)-regulated promoter, lactose induced promoter, heat shock promoter, tetracycline-regulated promoter, steroid-regulated promoter, metal-regulated promoter, estrogen receptor-regulated promoter, etc. Inducible promoters can therefore, in some embodiments, be regulated by molecules including, but not limited to, doxycycline; estrogen and/or an estrogen analog; IPTG; etc.

[0301] In certain embodiments, inducible promoters suitable for use may include any inducible promoter described herein or known to one of ordinary skill in the art. Examples of inducible promoters include, without limitation, chemically/biochemically-regulated and physically-regulated promoters such as alcohol-regulated promoters, tetracycline-regulated promoters (e.g., anhydrotetracycline (aTc)-responsive promoters and other tetracycline-responsive promoter systems, which include a tetracycline repressor protein (tetR), a tetracycline operator sequence (tetO) and a tetracycline transactivator fusion protein (tTA), steroid-regulated promoters (e.g., promoters based on the rat glucocorticoid receptor, human estrogen receptor, moth ecdysone receptors, and promoters from the steroid/retinoid/thyroid receptor superfamily), metal-regulated promoters (e.g., promoters derived from metallothionein (proteins that bind and sequester metal ions) genes from yeast, mouse and human), pathogenesis-regulated promoters (e.g., induced by salicylic acid, ethylene or benzothiadiazole (BTH)), temperature/heat-inducible promoters (e.g., heat shock promoters), and light-regulated promoters (e.g., light responsive promoters from plant cells).

[0302] In some cases, the promoter is a spatially restricted promoter (i.e., cell type specific promoter, tissue specific promoter, etc.) such that in a multi-cellular organism, the promoter is active (i.e., “ON”) in a subset of specific cells. Spatially restricted promoters may also be referred to as enhancers, transcriptional control elements, control sequences, etc. Any convenient spatially restricted promoter may be used as long as the promoter is functional in the targeted host cell (e.g., eukaryotic cell; prokaryotic cell).

[0303] In some cases, the promoter is a reversible promoter. Suitable reversible promoters, including reversible inducible promoters are known in the art. Such reversible promoters may be isolated and derived from many organisms, e.g., eukaryotes and prokaryotes. Modification of reversible promoters derived from a first organism for use in a second organism, e.g., a first prokaryote and a second a eukaryote, a first eukaryote and a second a prokaryote, etc., is well known in the art. Such reversible promoters, and systems based on such reversible promoters but also comprising additional control proteins, include, but are not limited to, alcohol regulated promoters (e.g., alcohol dehydrogenase I (alcA) gene promoter, promoters responsive to alcohol transactivator proteins (AlcR, etc.), tetracycline regulated promoters, (e.g., promoter systems including Tet Activators, TetON, TetOFF, etc.), steroid regulated promoters (e.g., rat glucocorticoid receptor promoter systems, human estrogen receptor promoter systems, retinoid promoter systems, thyroid promoter systems, ecdysone promoter systems, mifepristone promoter systems, etc.), metal regulated promoters (e.g., metallothionein promoter systems, etc.), pathogenesis-related regulated promoters (e.g., salicylic acid regulated promoters, ethylene regulated promoters, benzothiadiazole regulated promoters, etc.), temperature regulated promoters (e.g., heat shock inducible promoters (e.g., HSP-70, HSP-90, soybean heat shock promoter, etc.), light regulated promoters, synthetic inducible promoters, and the like.

[0304] Recombinant expression vectors of the disclosure can also comprise elements that facilitate robust expression of CasX proteins and the gNAs of the disclosure. For example, recombinant expression vectors can include one or more of a polyadenylation signal (PolyA), an intronic sequence or a post-transcriptional regulatory element such as a woodchuck hepatitis post-transcriptional regulatory element (WPRE). Exemplary polyA sequences include hGH poly(A) signal (short), HSV TK poly(A) signal, synthetic polyadenylation signals, SV40 poly(A) signal, β-globin poly(A) signal and the like. A person of ordinary skill in the art will be able to select suitable elements to include in the recombinant expression vectors described herein.

[0305] The polynucleotides encoding the reference CasX, the CasX variants, and the gNA sequences can then be individually cloned into one or more expression vectors. In some embodiments, the present disclosure provides vectors comprising the polynucleotides selected from the group consisting of a retroviral vector, a lentiviral vector, an adenoviral vector, an adeno-associated viral (AAV) vector, a virus-like particle (VLP), a herpes simplex virus (HSV) vector, a plasmid, a minicircle, a nanoplasmid, a DNA vector, and an RNA vector. In some embodiments, the vector is a recombinant expression vector that comprises a nucleotide sequence encoding a CasX protein. In other embodiments, the disclosure provides a recombinant expression vector comprising a nucleotide sequence encoding a CasX protein and a nucleotide sequence encoding a gNA. In some cases, the nucleotide sequence encoding the CasX protein variant and/or the nucleotide sequence encoding the gNA are operably linked to a promoter that is operable in a cell type of choice. In other embodiments, the nucleotide sequence encoding the CasX protein variant and the nucleotide sequence encoding the gNA are provided in separate vectors operably linked to a promoter.

[0306] In some embodiments, provided herein are one or more recombinant expression vectors comprising one or more of: (i) a nucleotide sequence of a donor template nucleic acid where the donor template comprises a nucleotide sequence having homology to a target sequence of a target nucleic acid (e.g., a target genome); (ii) a nucleotide sequence that encodes a gNA that hybridizes to a target sequence of the locus of the targeted genome (e.g., configured as a single or dual guide RNA) operably linked to a promoter that is operable in a target cell such as a eukaryotic cell; and (iii) a nucleotide sequence encoding a CasX protein operably linked to a promoter that is operable in a target cell such as a eukaryotic cell. In some embodiments, the sequences encoding the donor template, the gNA and the CasX protein are in different recombinant expression vectors, and in other embodiments one or more polynucleotide sequences (for the donor template, CasX, and the gNA) are in the same recombinant expression vector. In other cases, the CasX and gNA are delivered to the target cell as an RNP (e.g., by electroporation or chemical means) and the donor template is delivered by a vector.

[0307] The polynucleotide sequence(s) are inserted into the vector by a variety of procedures. In general, DNA is inserted into an appropriate restriction endonuclease site(s) using techniques known in the art. Vector components generally include, but are not limited to, one or more of a signal sequence, an origin of replication, one or more marker genes, an enhancer element, a promoter, and a transcription termination sequence. Construction of suitable vectors containing one or more of these components employs standard ligation techniques which are known to the skilled artisan. Such techniques are well known in the art and well described in the scientific and patent literature. Various vectors are publicly available. The vector may, for example, be in the form of a plasmid, cosmid, viral particle, or phage that may conveniently be subjected to recombinant DNA procedures, and the choice of vector will often depend on the host cell into which it is to be introduced. Thus, the vector may be an autonomously replicating vector, i.e., a vector, which exists as an extrachromosomal entity, the replication of which is independent of chromosomal replication, e.g., a plasmid. Alternatively, the vector may be one which, when introduced into a host cell, is integrated into the host cell genome and replicated together with the chromosome(s) into which it has been integrated. Once introduced into a suitable host cell, expression of the protein involved in antigen processing, antigen presentation, antigen recognition, and/or antigen response can be determined using any nucleic acid or protein assay known in the art. For example, the presence of transcribed mRNA of reference CasX or the CasX variants can be detected and/or quantified by conventional hybridization assays (e.g., Northern blot analysis), amplification procedures (e.g. RT-PCR), SAGE (U.S. Pat. No. 5,695,937), and array-based technologies (see e.g., U.S. Pat. Nos. 5,405,783, 5,412,087 and 5,445,934), using probes complementary to any region of the polynucleotide.

[0308] The disclosure provides for the use of plasmid expression vectors containing replication and control sequences that are compatible with and recognized by the host cell and are operably linked to the gene encoding the polypeptide for controlled expression of the polypeptide or transcription of the RNA. Such vector sequences are well known for a variety of bacteria, yeast, and viruses. Useful expression vectors that can be used include, for example, segments of chromosomal, non-chromosomal and synthetic DNA sequences. “Expression vector” refers to a DNA construct containing a DNA sequence that is operably linked to a suitable control sequence capable of effecting the expression of the DNA encoding the polypeptide in a suitable host. The requirements are that the vectors are replicable and viable in the host cell of choice. Low- or high-copy number vectors may be used as desired. The control sequences of the vector include a promoter to effect transcription, an optional operator sequence to control such transcription, a sequence encoding suitable mRNA ribosome binding sites, and sequences that control termination of transcription and translation. The promoter may be any DNA sequence, which shows transcriptional activity in the host cell of choice and may be derived from genes encoding proteins either homologous or heterologous to the host cell.

[0309] The polynucleotides and recombinant expression vectors can be delivered to the target host cells by a variety of methods. Such methods include, but are not limited to, viral infection, transfection, lipofection, electroporation, calcium phosphate precipitation, polyethyleneimine (PEI)-mediated transfection, DEAE-dextran mediated transfection, microinjection, liposome-mediated transfection, particle gun technology, nucleofection, direct addition by cell penetrating CasX proteins that are fused to or recruit donor DNA, cell squeezing, calcium phosphate precipitation, direct microinjection, nanoparticle-mediated nucleic acid delivery, and using the commercially available TransMessenger® reagents from Qiagen, Stemfect™ RNA Transfection Kit from Stemgent, and TransIT®-mRNA Transfection Kit from Mirus Bio LLC, Lonza nucleofection, Maxagen electroporation and the like.

[0310] In accordance with the disclosure, nucleic acid sequences that encode the reference CasX, the CasX variants, or the gNA of any of the embodiments described herein (or their complement) are used to generate recombinant DNA molecules that direct the expression in appropriate host cells. Several cloning strategies are suitable for performing the present disclosure, many of which are used to generate a construct that comprises a gene coding for a composition of the present disclosure, or its complement. In some embodiments, the cloning strategy is used to create a gene that encodes a construct that comprises nucleotides encoding the reference CasX, the CasX variants, or the gNA that is used to transform a host cell for expression of the composition.

[0311] In one approach, a construct is first prepared containing the DNA sequence encoding a reference CasX, a CasX variant, or a gNA. Exemplary methods for the preparation of such constructs are described in the Examples. The construct is then used to create an expression vector suitable for transforming a host cell, such as a prokaryotic or eukaryotic host cell for the expression and recovery of the polypeptide construct. Where desired, the host cell is an E. coli cell. In other embodiments, the host cell is selected from BHK cells, HEK293 cells, HEK293T cells, Lenti-X HEK293 cells, NS0 cells, SP2/0 cells, YO myeloma cells, P3X63 mouse myeloma cells, PER cells, PER.C6 cells, hybridoma cells, NIH3T3 cells, COS, HeLa, CHO, or yeast cells. Exemplary methods for the creation of expression vectors, the transformation of host cells and the expression and recovery of reference CasX, the CasX variants, or the gNA are described in the Examples.

[0312] The gene or genes encoding for the reference CasX, the CasX variants, or the gNA constructs can be made in one or more steps, either fully synthetically or by synthesis combined with enzymatic processes, such as restriction enzyme-mediated cloning, PCR and overlap extension, including methods more fully described in the Examples. The methods disclosed herein can be used, for example, to ligate sequences of polynucleotides encoding the various components (e.g., CasX and gNA) genes of a desired sequence. Genes encoding polypeptide compositions are assembled from oligonucleotides using standard techniques of gene synthesis.

[0313] In some embodiments, the nucleotide sequence encoding a CasX protein is codon optimized. This type of optimization can entail a mutation of an encoding nucleotide sequence to mimic the codon preferences of the intended host organism or cell while encoding the same CasX protein. Thus, the codons can be changed, but the encoded protein remains unchanged. For example, if the intended target cell of the CasX protein was a human cell, a human codon-optimized CasX-encoding nucleotide sequence could be used. As another non-limiting example, if the intended host cell were a mouse cell, then a mouse codon-optimized CasX-encoding nucleotide sequence could be generated. As another non-limiting example, if the intended host cell were a plant cell, then a plant codon-optimized CasX protein variant-encoding nucleotide sequence could be generated. As another non-limiting example, if the intended host cell were an insect cell, then an insect codon-optimized CasX protein-encoding nucleotide sequence could be generated. The gene design can be performed using algorithms that optimize codon usage and amino acid composition appropriate for the host cell utilized in the production of the reference CasX, the CasX variants, or the gNA. In one method of the disclosure, a library of polynucleotides encoding the components of the constructs is created and then assembled, as described above. The resulting genes are then assembled and the resulting genes used to transform a host cell and produce and recover the reference CasX, the CasX variants, or the gNA compositions for evaluation of its properties, as described herein.

[0314] In some embodiments, a nucleotide sequence encoding a gNA is operably linked to a control element, e.g., a transcriptional control element, such as a promoter. In some embodiments, a nucleotide sequence encoding a CasX protein is operably linked to a control element, e.g., a transcriptional control element, such as a promoter.

[0315] The transcriptional control element can be a promoter. In some cases, the promoter is a constitutively active promoter. In some cases, the promoter is a regulatable promoter. In some cases, the promoter is an inducible promoter. In some cases, the promoter is a tissue-specific promoter. In some cases, the promoter is a cell type-specific promoter. In some cases, the transcriptional control element (e.g., the promoter) is functional in a targeted cell type or targeted cell population. For example, in some cases, the transcriptional control element can be functional in eukaryotic cells, e.g., the cell is selected from the group consisting of Purkinje cell, frontal cortex neuron, motor cortex neuron, hippocampus neuron, cerebellum neuron, upper motor neuron, spinal cord neuron, spinal cord motor neuron, glial cell, and astrocytes.

[0316] Non-limiting examples of eukaryotic promoters (promoters functional in a eukaryotic cell) include EF1alpha, EF1alpha core promoter, those from cytomegalovirus (CMV) immediate early, herpes simplex virus (HSV) thymidine kinase, early and late SV40, long terminal repeats (LTRs) from retrovirus, and mouse metallothionein-I. Further non-limiting examples of eukaryotic promoters include the CMV promoter full-length promoter, the minimal CMV promoter, the chicken 3-actin promoter, the RSV promoter, the HIV-Ltr promoter, the hPGK promoter, the HSV TK promoter, the Mini-TK promoter, the human synapsin I promoter which confers neuron-specific expression, the Mecp2 promoter for selective expression in neurons, the minimal IL-2 promoter, the Rous sarcoma virus enhancer/promoter (single), the spleen focus-forming virus long terminal repeat (LTR) promoter, the SV40 promoter, the SV40 enhancer and early promoter, the TBG promoter: promoter from the human thyroxine-binding globulin gene (Liver specific), the PGK promoter, the human ubiquitin C promoter, the UCOE promoter (Promoter of HNRPA2B1-CBX3), the Histone H2 promoter, the Histone H3 promoter, the U1a1 small nuclear RNA promoter (226 nt), the U1b2 small nuclear RNA promoter (246 nt) 26, the TTR minimal enhancer/promoter, the b-kinesin promoter, the human eIF4A1 promoter, the ROSA26 promoter and the glyceraldehyde 3-phosphate dehydrogenase (GAPDH) promoter. In some embodiments, the promoter used in the gNA construct is U6 (Kunkel, G R et al. U6 small nuclear RNA is transcribed by RNA polymerase III. Proc Natl Acad Sci USA. 83(22):8575 (1986)).

[0317] Selection of the appropriate vector and promoter is well within the level of ordinary skill in the art, as it related to controlling expression, e.g., for modifying a C9orf72 gene. The expression vector may also contain a ribosome binding site for translation initiation and a transcription terminator. The expression vector may also include appropriate sequences for amplifying expression. The expression vector may also include nucleotide sequences encoding protein tags (e.g., 6×His tag, hemagglutinin tag, fluorescent protein, etc.) that can be fused to the CasX protein, thus resulting in a chimeric CasX protein that are used for purification or detection.

[0318] In some embodiments, a nucleotide sequence encoding each of a gNA variant or a CasX protein is operably linked to an inducible promoter, a constitutively active promoter, a spatially restricted promoter (i.e., transcriptional control element, enhancer, tissue specific promoter, cell type specific promoter, etc.), or a temporally restricted promoter. In other embodiments, individual nucleotide sequences encoding the gNA or the CasX are linked to one of the foregoing categories of promoters, which are then introduced into the cells to be modified by conventional methods, described below.

[0319] In certain embodiments, suitable promoters can be derived from viruses and can therefore be referred to as viral promoters, or they can be derived from any organism, including prokaryotic or eukaryotic organisms. Suitable promoters can be used to drive expression by any RNA polymerase (e.g., pol I, pol II, pol III). Exemplary promoters include, but are not limited to the SV40 early promoter, mouse mammary tumor virus long terminal repeat (LTR) promoter; adenovirus major late promoter (Ad MLP); a herpes simplex virus (HSV) promoter, a cytomegalovirus (CMV) promoter such as the CMV immediate early promoter region (CMVIE), a rous sarcoma virus (RSV) promoter, a human U6 small nuclear promoter (U6), an enhanced U6 promoter, a human H1 promoter (H1), a POL1 promoter, a 7SK promoter, tRNA promoters and the like.

[0320] In some embodiments, one or more nucleotide sequences encoding a CasX and gNA and, optionally, comprising a donor template, are each operably linked to (under the control of) a promoter operable in a eukaryotic cell. Examples of inducible promoters may include, but are not limited to, T7 RNA polymerase promoter, T3 RNA polymerase promoter, isopropyl-beta-D-thiogalactopyranoside (IPTG)-regulated promoter, lactose induced promoter, heat shock promoter, tetracycline-regulated promoter, steroid-regulated promoter, metal-regulated promoter, estrogen receptor-regulated promoter, etc. Inducible promoters can therefore, in some embodiments, be regulated by molecules including, but not limited to, doxycycline; estrogen and/or an estrogen analog; IPTG; etc.

[0321] In certain embodiments, inducible promoters suitable for use may include any inducible promoter described herein or known to one of ordinary skill in the art. Examples of inducible promoters include, without limitation, chemically/biochemically-regulated and physically-regulated promoters such as alcohol-regulated promoters, tetracycline-regulated promoters (e.g., anhydrotetracycline (aTc)-responsive promoters and other tetracycline-responsive promoter systems, which include a tetracycline repressor protein (tetR), a tetracycline operator sequence (tetO) and a tetracycline transactivator fusion protein (tTA), steroid-regulated promoters (e.g., promoters based on the rat glucocorticoid receptor, human estrogen receptor, moth ecdysone receptors, and promoters from the steroid/retinoid/thyroid receptor superfamily), metal-regulated promoters (e.g., promoters derived from metallothionein (proteins that bind and sequester metal ions) genes from yeast, mouse and human), pathogenesis-regulated promoters (e.g., induced by salicylic acid, ethylene or benzothiadiazole (BTH)), temperature/heat-inducible promoters (e.g., heat shock promoters), and light-regulated promoters (e.g., light responsive promoters from plant cells).

[0322] In some cases, the promoter is a spatially restricted promoter (i.e., cell type specific promoter, tissue specific promoter, etc.) such that in a multi-cellular organism, the promoter is active (i.e., “ON”) in a subset of specific cells. Spatially restricted promoters may also be referred to as enhancers, transcriptional control elements, control sequences, etc. Any convenient spatially restricted promoter may be used as long as the promoter is functional in the targeted host cell (e.g., eukaryotic cell; prokaryotic cell).

[0323] In some cases, the promoter is a reversible promoter. Suitable reversible promoters, including reversible inducible promoters are known in the art. Such reversible promoters may be isolated and derived from many organisms, e.g., eukaryotes and prokaryotes. Modification of reversible promoters derived from a first organism for use in a second organism, e.g., a first prokaryote and a second a eukaryote, a first eukaryote and a second a prokaryote, etc., is well known in the art. Such reversible promoters, and systems based on such reversible promoters but also comprising additional control proteins, include, but are not limited to, alcohol regulated promoters (e.g., alcohol dehydrogenase I (alcA) gene promoter, promoters responsive to alcohol transactivator proteins (AlcR, etc.), tetracycline regulated promoters, (e.g., promoter systems including Tet Activators, TetON, TetOFF, etc.), steroid regulated promoters (e.g., rat glucocorticoid receptor promoter systems, human estrogen receptor promoter systems, retinoid promoter systems, thyroid promoter systems, ecdysone promoter systems, mifepristone promoter systems, etc.), metal regulated promoters (e.g., metallothionein promoter systems, etc.), pathogenesis-related regulated promoters (e.g., salicylic acid regulated promoters, ethylene regulated promoters, benzothiadiazole regulated promoters, etc.), temperature regulated promoters (e.g., heat shock inducible promoters (e.g., HSP-70, HSP-90, soybean heat shock promoter, etc.), light regulated promoters, synthetic inducible promoters, and the like.

[0324] Recombinant expression vectors of the disclosure can also comprise elements that facilitate robust expression of CasX proteins and the gNAs of the disclosure. For example, recombinant expression vectors can include one or more of a polyadenylation signal (PolyA), an intronic sequence or a post-transcriptional regulatory element such as a woodchuck hepatitis post-transcriptional regulatory element (WPRE). Exemplary polyA sequences include hGH poly(A) signal (short), HSV TK poly(A) signal, synthetic polyadenylation signals, SV40 poly(A) signal, β-globin poly(A) signal and the like. A person of ordinary skill in the art will be able to select suitable elements to include in the recombinant expression vectors described herein.

[0325] The polynucleotides encoding the reference CasX, the CasX variants, and the gNA sequences can then be individually cloned into one or more expression vectors. In some embodiments, the present disclosure provides vectors comprising the polynucleotides selected from the group consisting of a retroviral vector, a lentiviral vector, an adenoviral vector, an adeno-associated viral (AAV) vector, a virus-like particle (VLP), a herpes simplex virus (HSV) vector, a plasmid, a minicircle, a nanoplasmid, a DNA vector, and an RNA vector. In some embodiments, the vector is a recombinant expression vector that comprises a nucleotide sequence encoding a CasX protein. In other embodiments, the disclosure provides a recombinant expression vector comprising a nucleotide sequence encoding a CasX protein and a nucleotide sequence encoding a gNA. In some cases, the nucleotide sequence encoding the CasX protein variant and/or the nucleotide sequence encoding the gNA are operably linked to a promoter that is operable in a cell type of choice. In other embodiments, the nucleotide sequence encoding the CasX protein variant and the nucleotide sequence encoding the gNA are provided in separate vectors operably linked to a promoter.

[0326] In some embodiments, provided herein are one or more recombinant expression vectors comprising one or more of: (i) a nucleotide sequence of a donor template nucleic acid where the donor template comprises a nucleotide sequence having homology to a target sequence of a target nucleic acid (e.g., a target genome); (ii) a nucleotide sequence that encodes a gNA that hybridizes to a target sequence of the locus of the targeted genome (e.g., configured as a single or dual guide RNA) operably linked to a promoter that is operable in a target cell such as a eukaryotic cell; and (iii) a nucleotide sequence encoding a CasX protein operably linked to a promoter that is operable in a target cell such as a eukaryotic cell. In some embodiments, the sequences encoding the donor template, the gNA and the CasX protein are in different recombinant expression vectors, and in other embodiments one or more polynucleotide sequences (for the donor template, CasX, and the gNA) are in the same recombinant expression vector. In other cases, the CasX and gNA are delivered to the target cell as an RNP (e.g., by electroporation or chemical means) and the donor template is delivered by a vector.

[0327] The polynucleotide sequence(s) are inserted into the vector by a variety of procedures. In general, DNA is inserted into an appropriate restriction endonuclease site(s) using techniques known in the art. Vector components generally include, but are not limited to, one or more of a signal sequence, an origin of replication, one or more marker genes, an enhancer element, a promoter, and a transcription termination sequence. Construction of suitable vectors containing one or more of these components employs standard ligation techniques which are known to the skilled artisan. Such techniques are well known in the art and well described in the scientific and patent literature. Various vectors are publicly available. The vector may, for example, be in the form of a plasmid, cosmid, viral particle, or phage that may conveniently be subjected to recombinant DNA procedures, and the choice of vector will often depend on the host cell into which it is to be introduced. Thus, the vector may be an autonomously replicating vector, i.e., a vector, which exists as an extrachromosomal entity, the replication of which is independent of chromosomal replication, e.g., a plasmid. Alternatively, the vector may be one which, when introduced into a host cell, is integrated into the host cell genome and replicated together with the chromosome(s) into which it has been integrated. Once introduced into a suitable host cell, expression of the protein involved in antigen processing, antigen presentation, antigen recognition, and/or antigen response can be determined using any nucleic acid or protein assay known in the art. For example, the presence of transcribed mRNA of reference CasX or the CasX variants can be detected and/or quantified by conventional hybridization assays (e.g., Northern blot analysis), amplification procedures (e.g. RT-PCR), SAGE (U.S. Pat. No. 5,695,937), and array-based technologies (see e.g., U.S. Pat. Nos. 5,405,783, 5,412,087 and 5,445,934), using probes complementary to any region of the polynucleotide.

[0328] The disclosure provides for the use of plasmid expression vectors containing replication and control sequences that are compatible with and recognized by the host cell and are operably linked to the gene encoding the polypeptide for controlled expression of the polypeptide or transcription of the RNA. Such vector sequences are well known for a variety of bacteria, yeast, and viruses. Useful expression vectors that can be used include, for example, segments of chromosomal, non-chromosomal and synthetic DNA sequences. “Expression vector” refers to a DNA construct containing a DNA sequence that is operably linked to a suitable control sequence capable of effecting the expression of the DNA encoding the polypeptide in a suitable host. The requirements are that the vectors are replicable and viable in the host cell of choice. Low- or high-copy number vectors may be used as desired. The control sequences of the vector include a promoter to effect transcription, an optional operator sequence to control such transcription, a sequence encoding suitable mRNA ribosome binding sites, and sequences that control termination of transcription and translation. The promoter may be any DNA sequence, which shows transcriptional activity in the host cell of choice and may be derived from genes encoding proteins either homologous or heterologous to the host cell.

[0329] The polynucleotides and recombinant expression vectors can be delivered to the target host cells by a variety of methods. Such methods include, but are not limited to, viral infection, transfection, lipofection, electroporation, calcium phosphate precipitation, polyethyleneimine (PEI)-mediated transfection, DEAE-dextran mediated transfection, microinjection, liposome-mediated transfection, particle gun technology, nucleofection, direct addition by cell penetrating CasX proteins that are fused to or recruit donor DNA, cell squeezing, calcium phosphate precipitation, direct microinjection, nanoparticle-mediated nucleic acid delivery, and using the commercially available TransMessenger® reagents from Qiagen, Stemfect™ RNA Transfection Kit from Stemgent, and TransIT®-mRNA Transfection Kit from Mirus Bio LLC, Lonza nucleofection, Maxagen electroporation and the like.

[0330] A recombinant expression vector sequence can be packaged into a virus or virus-like particle (also referred to herein as a “VLP” or “virion”) for subsequent infection and transformation of a cell, ex vivo, in vitro or in vivo. Such VLP or virions will typically include proteins that encapsidate or package the vector genome. Suitable expression vectors may include viral expression vectors based on vaccinia virus; poliovirus; adenovirus; a retroviral vector (e.g., Murine Leukemia Virus), spleen necrosis virus, and vectors derived from retroviruses such as Rous Sarcoma Virus, Harvey Sarcoma Virus, avian leukosis virus, retrovirus, a lentivirus, human immunodeficiency virus, myeloproliferative sarcoma virus, and mammary tumor virus; and the like.

[0331] In some embodiments, a recombinant expression vector of the present disclosure is a recombinant adeno-associated virus (AAV) vector. In a particular embodiment, a recombinant expression vector of the present disclosure is a recombinant retrovirus vector. In another particular embodiment, a recombinant expression vector of the present disclosure is a recombinant lentivirus vector.

[0332] AAV is a small (20 nm), nonpathogenic virus that is useful in treating human diseases in situations that employ a viral vector for delivery to a cell such as a eukaryotic cell, either in vivo or ex vivo for cells to be prepared for administration to a subject. A construct is generated, for example, encoding any of the CasX proteins and gNA embodiments as described herein, and optionally a donor template, and can be flanked with AAV inverted terminal repeat (ITR) sequences, thereby enabling packaging of the AAV vector into an AAV viral particle.

[0333] An “AAV” vector may refer to the naturally occurring wild-type virus itself or derivatives thereof. The term covers all subtypes, serotypes and pseudotypes, and both naturally occurring and recombinant forms, except where required otherwise. As used herein, the term “serotype” refers to an AAV which is identified by and distinguished from other AAVs based on capsid protein reactivity with defined antisera, e.g., there are many known serotypes of primate AAVs. In some embodiments, the AAV vector is selected from AAV1, AAV2, AAV3, AAV4, AAV5, AAV6, AAV7, AAV8, AAV9, AAV 10, AAV-Rh74 (Rhesus macaque-derived AAV), and AAVRh10, and modified capsids of these serotypes. For example, serotype AAV-2 is used to refer to an AAV which contains capsid proteins encoded from the cap gene of AAV-2 and a genome containing 5′ and 3′ ITR sequences from the same AAV-2 serotype. Pseudotyped AAV refers to an AAV that contains capsid proteins from one serotype and a viral genome including 5′-3′ ITRs of a second serotype. Pseudotyped rAAV would be expected to have cell surface binding properties of the capsid serotype and genetic properties consistent with the ITR serotype. Pseudotyped recombinant AAV (rAAV) are produced using standard techniques described in the art. As used herein, for example, rAAV1 may be used to refer an AAV having both capsid proteins and 5′-3′ ITRs from the same serotype or it may refer to an AAV having capsid proteins from serotype 1 and 5′-3′ ITRs from a different AAV serotype, e.g., AAV serotype 2. For each example illustrated herein the description of the vector design and production describes the serotype of the capsid and 5′-3′ ITR sequences.

[0334] An “AAV virus” or “AAV viral particle” refers to a viral particle composed of at least one AAV capsid protein (preferably by all of the capsid proteins of a wild-type AAV) and an encapsidated polynucleotide. If the particle additionally comprises a heterologous polynucleotide (i.e., a polynucleotide other than a wild-type AAV genome to be delivered to a mammalian cell), it is typically referred to as “rAAV”. An exemplary heterologous polynucleotide is a polynucleotide comprising a CasX protein and/or sgNA and, optionally, a donor template of any of the embodiments described herein.

[0335] By “adeno-associated virus inverted terminal repeats” or “AAV ITRs” is meant the art recognized regions found at each end of the AAV genome which function together in cis as origins of DNA replication and as packaging signals for the virus. AAV ITRs, together with the AAV rep coding region, provide for the efficient excision and rescue from, and integration of a nucleotide sequence interposed between two flanking ITRs into a mammalian cell genome.

[0336] The nucleotide sequences of AAV ITR regions are known. See, for example Kotin, R. M. (1994) Human Gene Therapy 5:793-801; Berns, K. I. “Parvoviridae and their Replication” in Fundamental Virology, 2^{nd} Edition, (B. N. Fields and D. M. Knipe, eds.). As used herein, an AAV ITR need not have the wild-type nucleotide sequence depicted, but may be altered, e.g., by the insertion, deletion or substitution of nucleotides. Additionally, the AAV ITR may be derived from any of several AAV serotypes, including without limitation, AAV1, AAV2, AAV3, AAV4, AAV5, AAV6, AAV7, AAV8, AAV9, AAV10, AAV-Rh74, and AAVRh10, and modified capsids of these serotypes. Furthermore, 5′ and 3′ ITRs which flank a selected nucleotide sequence in an AAV vector need not necessarily be identical or derived from the same AAV serotype or isolate, so long as they function as intended, i.e., to allow for excision and rescue of the sequence of interest from a host cell genome or vector, and to allow integration of the heterologous sequence into the recipient cell genome when AAV Rep gene products are present in the cell. Use of AAV serotypes for integration of heterologous sequences into a host cell is known in the art (see, e.g., WO2018195555A1 and US20180258424A1, incorporated by reference herein.)

[0337] By “AAV rep coding region” is meant the region of the AAV genome which encodes the replication proteins Rep 78, Rep 68, Rep 52 and Rep 40. These Rep expression products have been shown to possess many functions, including recognition, binding and nicking of the AAV origin of DNA replication, DNA helicase activity and modulation of transcription from AAV (or other heterologous) promoters. The Rep expression products are collectively required for replicating the AAV genome.

[0338] By “AAV cap coding region” is meant the region of the AAV genome which encodes the capsid proteins VP1, VP2, and VP3, or functional homologues thereof. These Cap expression products supply the packaging functions which are collectively required for packaging the viral genome.

[0339] In some embodiments, AAV capsids utilized for delivery of the CasX, gNA, and, optionally, donor template nucleotides, to a host cell can be derived from any of several AAV serotypes, including without limitation, AAV1, AAV2, AAV3, AAV4, AAV5, AAV6, AAV7, AAV8, AAV9, AAV10, AAV-Rh74 (Rhesus macaque-derived AAV), and AAVRh10, and the AAV ITRs are derived from AAV serotype 2. In a particular embodiment, AAV1, AAV7, AAV6, AAV8, or AAV9 are utilized for delivery of the CasX, gNA, and, optionally, donor template nucleotides, to a host muscle cell.

[0340] In order to produce rAAV viral particles, an AAV expression vector is introduced into a suitable host cell using known techniques, such as by transfection. Packaging cells are typically used to form virus particles; such cells include HEK293 or HEK293T cells (and other cells described herein or known in the art), which package adenovirus. A number of transfection techniques are generally known in the art; see, e.g., Sambrook et al. (1989) Molecular Cloning, a laboratory manual, Cold Spring Harbor Laboratories, New York. Particularly suitable transfection methods include calcium phosphate co-precipitation, direct microinjection into cultured cells, electroporation, liposome mediated gene transfer, lipid-mediated transduction, and nucleic acid delivery using high-velocity microprojectiles.

[0341] In some embodiments, host cells transfected with the above-described AAV expression vectors are rendered capable of providing AAV helper functions in order to replicate and encapsidate the nucleotide sequences flanked by the AAV ITRs to produce rAAV viral particles. AAV helper functions are generally AAV-derived coding sequences which can be expressed to provide AAV gene products that, in turn, function in trans for productive AAV replication. AAV helper functions are used herein to complement necessary AAV functions that are missing from the AAV expression vectors. Thus, AAV helper functions include one, or both of the major AAV ORFs (open reading frames), encoding the rep and cap coding regions, or functional homologues thereof. Accessory functions can be introduced into and then expressed in host cells using methods known to those of skill in the art. Commonly, accessory functions are provided by infection of the host cells with an unrelated helper virus. In some embodiments, accessory functions are provided using an accessory function vector. Depending on the host/vector system utilized, any of a number of suitable transcription and translation control elements, including constitutive and inducible promoters, transcription enhancer elements, transcription terminators, etc., may be used in the expression vector. In some embodiments, the disclosure provides host cells comprising the AAV vectors of the embodiments disclosed herein.

[0342] In other embodiments, suitable vectors may include virus-like particles (VLP). Virus-like particles (VLPs) are particles that closely resemble viruses, but do not contain viral genetic material and are therefore non-infectious. In some embodiments, VLPs comprise a polynucleotide encoding a transgene of interest, for example any of the CasX protein and/or a gNA embodiments, and, optionally, donor template polynucleotides described herein, packaged with one or more viral structural proteins.

[0343] In other embodiments, the disclosure provides VLPs produced in vitro that comprise a CasX:gNA RNP complex and, optionally, a donor template. Combinations of structural proteins from different viruses can be used to create VLPs, including components from virus families including Parvoviridae (e.g., adeno-associated virus), Retroviridae (e.g., alpharetrovirus, a betaretrovirus, a gammaretrovirus, a deltaretrovirus, a epsilonretrovirus, or a lentivirus), Flaviviridae (e.g., Hepatitis C virus), Paramyxoviridae (e.g., Nipah) and bacteriophages (e.g., Qβ, AP205). In some embodiments, the disclosure provides VLP systems designed using components of retrovirus, including lentiviruses (such as HIV) and alpharetrovirus, betaretrovirus, gammaretrovirus, deltaretrovirus, epsilonretrovirus, in which individual plasmids comprising polynucleotides encoding the various components are introduced into a packaging cell that, in turn, produce the VLP. In some embodiments, the disclosure provides VLP comprising one or more components of i) protease, ii) a protease cleavage site, iii) one or more components of a gag polyprotein selected from a matrix protein (MA), a nucleocapsid protein (NC), a capsid protein (CA), a p1 peptide, a p6 peptide, a P2A peptide, a P2B peptide, a P10 peptide, a p12 peptide, a PP21/24 peptide, a P12/P3/P8 peptide, and a P20 peptide; v) CasX; vi) gNA, and vi) targeting glycoproteins or antibody fragments wherein the resulting VLP particle encapsidates a CasX:gNA RNP. The targeting glycoproteins or antibody fragments on the surface that provides tropism of the VLP to the target cell, wherein upon administration and entry into the target cell, the RNP molecule is free to be transported into the nucleus of the cell. In other embodiments, the disclosure provides VLP of the foregoing and further comprises one or more components of a pol polyprotein (e.g. a protease), and, optionally, a second CasX or a donor template. The foregoing offers advantages over other vectors in the art in that viral transduction to dividing and non-dividing cells is efficient and that the VLP delivers potent and short-lived RNP that escape a subject's immune surveillance mechanisms that would otherwise detect a foreign protein.

[0344] In some embodiments, the disclosure provides host cells comprising polynucleotides or vectors encoding one or more components selected from i) one or more components of a gag polyprotein (the components of which are listed, supra); ii) a CasX protein of any of the embodiments described herein; iii) a protease cleavage site; iv) a protease; v) a guide RNA of any of the embodiments described herein; vi) a pol polyprotein or portions thereof (e.g., a protease); vii) a pseudotyping glycoprotein or antibody fragment that provides for binding and fusion of the VLP to a target cell; and viii) a donor template. The disclosure contemplates multiple configurations of the arrangement of the encoded components, including duplicates of some of the encoded components. The envelope glycoprotein can be derived from any enveloped viruses known in the art to confer tropism to VLP, including but not limited to the group consisting of Argentine hemorrhagic fever virus, Australian bat virus, Autographa californica multiple nucleopolyhedrovirus, Avian leukosis virus, baboon endogenous virus, Bolivian hemorrhagic fever virus, Borna disease virus, Breda virus, Bunyamwera virus, Chandipura virus, Chikungunya virus, Crimean-Congo hemorrhagic fever virus, Dengue fever virus, Duvenhage virus, Eastern equine encephalitis virus, Ebola hemorrhagic fever virus, Ebola Zaire virus, enteric adenovirus, Ephemerovirus, Epstein-Bar virus (EBV), European bat virus 1, European bat virus 2, Fug Synthetic gP Fusion, Gibbon ape leukemia virus, Hantavirus, Hendra virus, hepatitis A virus, hepatitis B virus, hepatitis C virus, hepatitis D virus, hepatitis E virus, hepatitis G Virus (GB virus C), herpes simplex virus type 1, herpes simplex virus type 2, human cytomegalovirus (HHV5), human foamy virus, human herpesvirus (HHV), human Herpesvirus 7, human herpesvirus type 6, human herpesvirus type 8, human immunodeficiency virus 1 (HIV-1), human metapneumovirus, human T-lymphotro pic virus 1, influenza A, influenza B, influenza C virus, Japanese encephalitis virus, Kaposi's sarcoma-associated herpesvirus (HHV8), Kaysanur Forest disease virus, La Crosse virus, Lagos bat virus, Lassa fever virus, lymphocytic choriomeningitis virus (LCMV), Machupo virus, Marburg hemorrhagic fever virus, measles virus, Middle eastern respiratory syndrome-related coronavirus, Mokola virus, Moloney murine leukemia virus, monkey pox, mouse mammary tumor virus, mumps virus, murine gammaherpesvirus, Newcastle disease virus, Nipah virus, Nipah virus, Norwalk virus, Omsk hemorrhagic fever virus, papilloma virus, parvovirus, pseudorabies virus, Quaranfil virus, rabies virus, RD114 Endogenous Feline Retrovirus, respiratory syncytial virus (RSV), Rift Valley fever virus, Ross River virus, rRotavirus, Rous sarcoma virus, rubella virus, Sabia-associated hemorrhagic fever virus, SARS-associated coronavirus (SARS-CoV), Sendai virus, Tacaribe virus, Thogotovirus, tick-borne encephalitis causing virus, varicella zoster virus (HHV3), varicella zoster virus (HHV3), variola major virus, variola minor virus, Venezuelan equine encephalitis virus, Venezuelan hemorrhagic fever virus, vesicular stomatitis virus (VSV), VSV-G, Vesiculovirus, West Nile virus, western equine encephalitis virus, and Zika Virus. In some embodiments, the packaging cell used for the production of VLP is selected from the group consisting of HEK293 cells, Lenti-X HEK293T cells, BHK cells, HepG2 cells, Saos-2 cells, HuH7 cells, NS0 cells, SP2/0 cells, YO myeloma cells, A549 cells, P3X63 mouse myeloma cells, PER cells, PER.C6 cells, hybridoma cells, VERO cells, NIH3T3 cells, COS cells, WI38 cells, MRC5 cells, A549 cells, HeLa cells, CHO cells, or HT1080 cells.

[0345] Upon production and recovery of the VLP comprising the CasX:gNA RNP of any of the embodiments described herein, the VLP can be used in methods to edit target cells of subjects by the administering of such VLP, as described more fully, below.

### VII. Cells

[0346] In still further aspects, provided herein are cells comprising a C9orf72 gene modified by any of the CasX:gNA systems embodiments described herein. In some cases, cells that have been genetically modified in this way may be administered to a subject for purposes such as gene therapy, e.g., to treat a disease associated with a defect in the C9orf72 gene. In other cases, the cells are modified in vivo in a subject with a C9orf72-related disease. In some embodiments, the present disclosure provides a population of cells that has been modified to excise the hexanucleotide repeat expansion region of the C9orf72 gene such that a functional C9orf72 protein is expressed. In some cases of the foregoing, the cell to be modified comprises one or more mutations in the C9orf72 gene that disrupt the function or expression of the C9orf72 protein. In other cases of the foregoing, the cell to be modified comprises a HRS expansion in the C9orf72 gene such that excess RNA or DPR protein is produced and incorporated into the cell. In other cases of the foregoing, the cell to be modified comprises one or more mutations or truncations of the C9orf72 protein of SEQ ID NO: 227 or 228.

[0347] In some embodiments, the population of cells are modified by a Type V Cas nuclease and one or more guides targeted to sequences proximal to the associated with the hexanucleotide repeat expansion region of the C9orf72 target nucleic acid. In some embodiments, the disclosure provides methods and populations of cells modified by introducing into each cell of the population: i) a CasX:gNA system comprising a CasX and a gNA of any one of the embodiments described herein; ii) a CasX:gNA system comprising a CasX, a gNA, and a donor template of any one of the embodiments described herein; iii) a nucleic acid encoding the CasX and the gNA, and optionally comprising the donor template; iv) a vector selected from the group consisting of a retroviral vector, a lentiviral vector, an adenoviral vector, an adeno-associated viral (AAV) vector, and a herpes simplex virus (HSV) vector and comprising the nucleic acid of (iii), above; v) a VLP comprising the CasX:gNA system of any one of the embodiments described herein; or vi) combinations of two or more of (i) to (v), wherein the target nucleic acid sequence of the cells targeted by the gNA is modified by the CasX protein and, optionally, the donor template. In the foregoing, the donor template comprises at least a portion of a C9orf72 gene, wherein the C9orf72 gene portion is selected from a C9orf72 exon, a C9orf72 intron, a C9orf72 intron-exon junction, a C9orf72 regulatory element (e.g., a promoter), a C9orf72 coding region, a C9orf72 non-coding region, or combinations thereof or the entirety of the C9orf72 gene, and the modification of the cell results in the correction of the mutation to a wild-type sequence, the replacement of all or a portion of the hexanucleotide repeat expansion region or the knocking-down or knocking-out of the C9orf72 gene. In some cases, the donor template can comprise a nucleic acid encoding all or a portion of the sequence of SEQ ID NO: 227 or 228 or comprises a polynucleotide sequence that spans all or a portion of chr9: 27,546,546 to 27,573,866 of the human genome (GRCh37/hg19) (the notation refers to the chromosome 4 (chr4), starting at the 27,546,546 bp of that chromosome, and extending to the 27,573,866 bp of that chromosome) or a portion thereof. In other cases, the donor template can comprise a heterologous sequence compared to a wild-type C9orf72 gene in order to knock down or knock out the gene. In still other cases, the donor template comprises a hexanucleotide repeat of a GGGGCC sequence wherein the number of repeats ranges from 10 to about 30 repeats. In the foregoing, the donor template would be used to replace the defective sequence of the cell having hundreds to thousands of the hexanucleotide repeats. The donor template would further comprise homologous arms that are 5′ and 3′ to the cleavage sites introduced by the nuclease to facilitate its insertion by HDR. The donor template can range in size from 10-30,000 nucleotides, or 20-10,000 nucleotides, or 100-1000 nucleotides. In some cases, the donor template is a single-stranded DNA template or a single stranded RNA template. In other cases, the donor template is a double-stranded DNA template. In some cases, the cell is contacted with a CasX and at least a first gNA wherein the gNA is a guide RNA (gRNA). In some cases, the cell is contacted with a CasX and at least a first and a second gNA wherein the gNA is a guide RNA (gRNA). In other cases, the cell is contacted with a CasX and a gNA wherein the gNA is a guide DNA (gDNA). In other cases, the cell is contacted with a CasX and a gNA wherein the gNA is a chimera comprising DNA and RNA. As described herein, in embodiments of any of the combinations, each of said gNA molecules (a combination of the scaffold and targeting sequence, which can be configured as a sgRNA or a dgRNA) can be provided as an RNP with a CasX embodiment described herein for incorporation into the cells of the embodiments. In some embodiments, the cells of the population are contacted with an RNP of a CasX comprising a sequence of SEQ ID NOS: 49-150, 233-235, 238-252, or 272-281 as set forth in Tables 4, 6-8 and 10, or a sequence at least 65% identical, at least 70% identical, at least 75% identical, at least 80% identical, at least 81% identical, at least 82% identical, at least 83% identical, at least 84% identical, at least 85% identical, at least 86% identical, at least 86% identical, at least 87% identical, at least 88% identical, at least 89% identical, at least 89% identical, at least 90% identical, at least 91% identical, at least 92% identical, at least 93% identical, at least 94% identical, at least 95% identical, at least 96% identical, at least 97% identical, at least 98% identical, at least 99% identical, or at least 99.5% identical thereto, the gNA scaffold comprises a sequence of SEQ ID NOS: 2101-2294 as set forth in Table 2 or a sequence at least 65% identical, at least 70% identical, at least 75% identical, at least 80% identical, at least 81% identical, at least 82% identical, at least 83% identical, at least 84% identical, at least 85% identical, at least 86% identical, at least 86% identical, at least 87% identical, at least 88% identical, at least 89% identical, at least 89% identical, at least 90% identical, at least 91% identical, at least 92% identical, at least 93% identical, at least 94% identical, at least 95% identical, at least 96% identical, at least 97% identical, at least 98% identical, at least 99% identical, at least 99.5% identical thereto, and the gNA comprises a targeting sequence of SEQ ID NOs: 309-343, 363-2100 and 2295-21835 or a sequence at least 65% identical, at least 70% identical, at least 75% identical, at least 80% identical, at least 85% identical, at least 90% identical, or at least 95% identical thereto and having between 15 and 21 amino acids.

[0348] In some embodiments, the modified C9orf72 gene of the modified cell comprises a single-stranded break, resulting in a mutation, an insertion, or a deletion by the repair mechanisms of the cell. In other embodiments, the modified C9orf72 gene of the cell comprises a double-stranded break, resulting in a mutation, an insertion, or a deletion by the repair mechanisms of the cell. For example, the CasX:gNA system can introduce into the cell an indel, e.g., a frameshift mutation, at or near the initiation point of the C9orf72 gene. In some embodiments, the cell is modified by contact with a CasX and a first gNA targeting the target nucleic acid 5′ to the hexanucleotide repeat expansion region and a second gNA targeting the target nucleic acid 3′ to the hexanucleotide repeat expansion region wherein the hexanucleotide repeat expansion region is excised from the C9orf72 gene, wherein the modification results in the cells ability to produce a wild-type or a functional C9orf72 protein. In some embodiments, the population of cells have been modified such that expression of the hexanucleotide transcript RNA or the DPR is reduced by at least about 10%, at least about 20%, at least about 30%, at least about 40%, at least about 50%, at least about 60%, at least about 70%, at least about 80%, at least about 90%, or at least about 95% in comparison to a cell that has not been modified. In other embodiments, at least 30%, at least 40%, at least 50%, at least 60%, at least 05%, at least 75%, at least 80%, at least 85%, at least 90%, or at least 95% of the modified cells do not express a detectable level of the hexanucleotide transcript RNA or the DPR. In some embodiments, the first gNA targeting sequence is selected from the group consisting of SEQ ID NOS: 310 and 319-320, and the second gNA targeting sequence is selected from the group consisting of SEQ ID NOS: 321-325. Reduced or eliminated expression of a hexanucleotide transcript RNA or the DPR can be measured by ELISA or electrochemiluminescence assays, sense G4C2-repeat transcripts can be analyzed by RNA fluorescence in situ hybridization (FISH) assay (Batra, R and Lee, C. Mouse Models of C9orf72 Hexanucleotide Repeat Expansion in Amyotrophic Lateral Sclerosis/Frontotemporal Dementia. Frontiers Cell. Neurosci. 11:196 (2017)) or other methods know in the art, or as described in the Examples. In some embodiments, the disclosure provides a population of cells modified such that expression of a functional C9orf72 protein is increased by at least about 10%, at least about 20%, at least about 30%, at least about 40%, at least about 50%, at least about 60%, at least about 70%, at least about 80%, or at least about 90% in comparison to a cell that has not been modified.

[0349] In some cases, the modification of a cell's C9orf72 gene that comprises one or more mutations or duplications occurs in vitro. In such cases, a population of the modified cell can then be administered to a subject. An RNP can be introduced into the cells to be modified via any suitable method, including via electroporation, injection, nucleofection, delivery via liposomes, delivery by nanoparticles, or using a protein transduction domain (PTD) conjugated to one or more components of the CasX:gNA. In other cases, the CasX and the one or more gNA are introduced into the population of cells as encoding polynucleotides using a vector; embodiments of which are described herein. Additional methods of modification of the cells using the CasX:gNA system components include viral infection, transfection, conjugation, protoplast fusion, particle gun technology, calcium phosphate precipitation, direct microinjection, and the like. The choice of method is generally dependent on the type of cell being transformed and the circumstances under which the transformation is taking place; e.g., in vitro, ex vivo, or in vivo. A general discussion of these methods can be found in Ausubel, et al, Short Protocols in Molecular Biology, 3rd ed., Wiley & Sons, 1995.

[0350] In other cases, the modification of a cell's C9orf72 gene that comprises one or more mutations or duplications occurs in vivo. In such cases, the CasX and gNA, and, optionally, the donor template are administered to the subject. In other cases, the CasX and gNA, and, optionally, the donor template are administered to a subject within a vector that encodes the CasX and one or more gNA and, optionally, contains the donor template. In still other cases, the CasX and gNA, and, optionally, the donor template are administered to a subject within a vector such as a VLP that encapsidates the RNP and, optionally, contains the donor template. In the foregoing, the modification corrects the one or more mutations or, in the alternative, the modification is the inhibition or suppression of the expression of the hexanucleotide transcript RNA or the DPR, the expression of a functional C9orf72 protein, or the expression of the wild-type or a functional C9orf72 protein.

[0351] A cell that can serve as a recipient for a CasX protein and/or gNA of the present disclosure and/or a nucleic acid comprising a nucleotide sequence encoding a CasX protein and/or a CasX gNA variant and, optionally, a donor template, can be any of a variety of cells, including, e.g., in vitro cells; in vivo cells; ex vivo cells; primary cells; cancer cells; animal cells; etc. A cell can be a recipient of a CasX RNP of the present disclosure. A cell can be a recipient of a single component of a CasX system of the present disclosure. In certain embodiments, as provided herein, a cell can be an in vitro cell (e.g., established cultured cell line including, but not limited to HEK293 cells, HEK293-F cells, BHK cells, NS0 cells, SP2/0 cells, YO myeloma cells, P3X63 mouse myeloma cells, PER cells, PER.C6 cells, hybridoma cells, NIH3T3 cells, COS, HeLa, or CHO cells). A cell can be an ex vivo cell (cultured cell from an individual). A cell can be an in vivo cell (e.g., a cell in an individual). A cell can be an isolated cell. A cell can be a cell inside of an organism. A cell can be an organism. A cell can be a cell in a cell culture (e.g., in vitro cell culture). A cell can be one of a collection of cells. A cell can be an animal cell or derived from an animal cell. A cell can be a vertebrate cell or derived from a vertebrate cell. A cell can be a mammalian cell or derived from a mammalian cell. A cell can be a rodent cell or derived from a rodent cell. A cell can be a non-human primate cell or derived from a non-human primate cell. A cell can be a human cell or derived from a human cell.

[0352] In some embodiments, the modified cell is a eukaryotic cell, wherein the eukaryotic cell is selected from the group consisting of a rodent cell, a mouse cell, a rat cell, a primate cell, a non-human primate cell, and a human cell. In some embodiments, the modified cell is a human cell. In other embodiments, the cells are autologous with respect to a subject to be administered the cell. In other embodiments, the cells are allogeneic with respect to a subject to be administered the cell. In some embodiments, the modified cell is a cell of the central nervous system (CNS). In some embodiments, the modified cell is selected from the group consisting of Purkinje cell, frontal cortex neuron, motor cortex neuron, hippocampus neuron, cerebellum neuron, upper motor neuron, spinal cord neuron, spinal cord motor neuron, glial cell, and astrocytes. In the foregoing, the populations of cells have utility in the treatment of a C9orf72-related disease, wherein the population of cells are administered to a subject having a C9orf72-related disease. In some cases of the foregoing, the cell to be modified comprises one or more mutations in the C9orf72 gene that disrupt the function or expression of the C9orf72 protein. In other cases of the foregoing, the cell to be modified comprises a HRS expansion in the C9orf72 gene such that excess RNA or DPR protein is produced and incorporated into the cell. In other cases of the foregoing, the cell to be modified comprises one or more mutations or truncations of the C9orf72 protein of SEQ ID NO: 227 or 228.

[0353] In other embodiments, the disclosure provides populations of modified cells for use in in a subject with a C9orf72-related disease. In some embodiments, the disclosure provides a method of treating a subject having a C9orf72-related disease, the method comprising administering to the subject an effective amount of a plurality of modified cells of any one of the embodiments described herein wherein the modified cells express physiologically-normal levels of C9orf72. In some embodiments, the C9orf72-related disease is selected from the group consisting of amyotrophic lateral sclerosis (ALS) and frontotemporal dementia (FTD).

### VIII. Applications

[0354] The CasX:gNA systems comprising CasX proteins, guides, and variants thereof provided herein are useful in methods for modifying the C9orf72 target nucleic acid sequence in various applications, including therapeutics, diagnostics, and research.

[0355] In the methods of modifying a C9orf72 target nucleic acid sequence in a cell described herein, the methods utilize any of the embodiments of the CasX:gNA system described herein, and optionally include a donor template described herein. In some cases, the methods knock-down the expression of the mutant C9orf72. In other cases, the methods knock-out the expression of the mutant C9orf72. In still other cases, the methods result in the expression of functional C9orf72 protein.

[0356] In some embodiments, the methods comprise contacting the target nucleic acid sequence with a CasX protein and a guide nucleic acid (gNA) comprising a targeting sequence, wherein said contacting results in modification of the target nucleic acid sequence by the CasX protein. In some embodiments, the methods comprise introducing into a cell the CasX protein or a nucleic acid encoding the CasX protein and the gNA or the nucleic acid encoding the gNA, wherein the target nucleic acid sequence comprises a C9orf72 gene and wherein the targeting sequence comprises a sequence complementary to a portion of the C9orf72 gene encoding the C9orf72 protein, a C9orf72 regulatory element, or both the C9orf72 encoding sequence and a C9orf72 regulatory element, wherein the contacting results in the modification of the C9orf72 gene. In some embodiments, the targeting sequence of the gNA comprises a sequence of SEQ ID NOS: 309-343, 363-2100 and 2295-21835, or a sequence having at least about 65%, at least about 75%, at least about 85%, or at least about 95% identity thereto. In some embodiments, the scaffold of the gNA comprises a sequence of SEQ ID NOS: 4, 5 or 2101-2294, or a sequence having at least about 50%, at least about 60%, at least about 70%, at least about 80%, at least about 90%, at least about 95%, at least about 95%, at least about 96%, at least about 97%, at least about 98%, at least about 99%, or 100% sequence identity thereto. In some embodiments, the CasX protein is a CasX variant protein of any of the embodiments described herein, or a reference CasX protein SEQ ID NO: 1, SEQ ID NO: 2, or SEQ ID NO: 3.

[0357] In some embodiments, the modified C9orf72 gene of the modified cell comprises a single-stranded break, resulting in a mutation, an insertion, or a deletion by the repair mechanisms of the cell. In other embodiments, the modified C9orf72 gene of the modified cell comprises a double-stranded break, resulting in a mutation, an insertion, or a deletion by the repair mechanisms of the cell. For example, the CasX:gNA system can introduce into the cell an indel, e.g., a frameshift mutation, at or near the initiation point of the C9orf72 gene. In other embodiments, the modified C9orf72 gene of the cell has been modified by the insertion of the donor template wherein the C9orf72 gene has been knocked down or knocked out. In the foregoing, the cells have been modified such that expression of the HRS or the DPR protein is reduced by at least about 10%, at least about 20%, at least about 30%, at least about 40%, at least about 50%, at least about 60%, at least about 70%, at least about 80%, or at least about 90% in comparison to a cell that has not been modified. In other embodiments, at least 70%, at least 75%, at least 80%, at least 85%, at least 90%, or at least 95% of the modified cells do not express a detectable level of HRS RNA or DPR. Reduced or eliminated expression of a HRS RNA or DPR protein can be measured by ELISA or electrochemiluminescence assays (Mcdonald, D., et al. Quantification Assays for Total and Polyglutamine-Expanded Huntingtin Proteins. PLoS ONE 9(5): e96854 (2014)) or other methods know in the art, or as described in the Examples.

[0358] In some embodiments of the methods of modifying a C9orf72 target nucleic acid sequence, the target nucleic acid sequence comprises a C9orf72 gene having one or more mutations or duplications, and the targeting sequence of the gNA has a sequence that is complementary to, and therefore can hybridize with the C9orf72 gene. In some cases, the C9orf72 gene has a wild-type nucleic acid sequence. In other embodiments, the method comprises contacting the target nucleic acid sequence with a plurality (e.g., two or more) of gNAs targeted to different or overlapping regions of the C9orf72 gene with one or more mutations or duplications. In some embodiments of the method, the target nucleic acid is a DNA. In some embodiments of the method, the target nucleic acid is an RNA. In some embodiments, the gNA is a guide RNA (gRNA). In some embodiments, the gNA is a guide DNA (gDNA). In some embodiments, the gNA is a single-molecule gNA (sgNA). In other embodiments, the gNA is a dual-molecule gNA (dgNA). In some embodiments, the gNA is a chimeric gRNA-gDNA. In some embodiments, the method comprises contacting the target nucleic acid sequence with a pre-complexed CasX protein-gNA (i.e., an RNP). In some embodiments, the C9orf72 gene comprises a mutation or duplication and the modifying comprises introducing a single-stranded break in the target nucleic acid. In other embodiments, the C9orf72 gene comprises a mutation or duplication and the modifying comprises introducing a double-stranded break in the target nucleic acid. In the foregoing, the resulting modification can be an insertion, deletion, substitution, duplication, or inversion of one or more nucleotides as compared to the wild-type sequence. In some embodiments, the modification corrects a gain of function mutation. In other embodiments, the modification corrects a loss of function mutation. The mutations to be modified can comprise one or more mutations or duplications that disrupt the function or expression of the C9orf72 protein.

[0359] In some embodiments, the methods of modifying a target nucleic acid sequence comprise contacting a C9orf72 gene with a CasX protein and gNA pair and a donor template comprising a corrective sequence that can be inserted or knocked-in at the break site introduced by the CasX. For example, an exogenous donor template which may comprise a corrective sequence (or a deletion or insertion to knock-out the defective sequence) to be integrated is flanked by an upstream sequence and a downstream sequence (e.g., homologous arms) with homology to the target nucleic acid sequence to facilitate its introduction into a cell. In some embodiments, the donor template ranges in size from 10-10,000 nucleotides. In other embodiments, the donor template ranges in size from 100-1,000 nucleotides. In some embodiments, the donor template is a single-stranded DNA template or a single stranded RNA template. In other embodiments, the donor template is a double-stranded DNA template.

[0360] In some embodiments of the methods, the CasX is a catalytically inactive CasX (dCasX) protein that retains the ability to bind to the gNA and the target nucleic acid sequence comprising the mutation, thereby interfering with transcription of mutant C9orf72. In some embodiments, the methods comprise contacting a C9orf72 gene with a CasX protein and gNA and does not comprise contacting the target nucleic acid sequence with a donor template polynucleotide, and the target nucleic acid sequence is cleaved by the CasX nuclease and is modified such that nucleotides within the target nucleic acid sequence are deleted or inserted according to the cells own repair pathways. In some embodiments, the editing occurs in vivo inside of a cell, for example in a cell in an organism or subject. In some embodiments, the cell is a eukaryotic cell. Exemplary eukaryotic cells may include cells selected from the group consisting of a rodent cell, a mouse cell, a rat cell, a primate cell, a non-human primate cell, and a human cell. In some embodiments, the cell is a human cell. In some embodiments, the cell is a non-human primate cell. In some embodiments of the method, the cell is a selected from the group consisting of Purkinje cell, frontal cortex neuron, motor cortex neuron, hippocampus neuron, cerebellum neuron, upper motor neuron, spinal cord neuron, spinal cord motor neuron, glial cell, and astrocytes.

[0361] Methods of introducing a nucleic acid (e.g., a nucleic acid comprising a donor polynucleotide sequence, one or more nucleic acids encoding a CasX protein and/or gNA) into a cell are known in the art, and any convenient method can be used to introduce a nucleic acid (e.g., an expression construct) into a cell. Suitable methods include; e.g., viral infection or contact with a virus-like particle (VLP) with tropism for the target cell. Retroviruses, for example, lentiviruses, may be suitable for use in methods of the present disclosure. Commonly used retroviral vectors are “defective”, e.g., are unable to produce viral proteins required for productive infection. Rather, replication of the vector requires growth in a packaging cell line. To generate viral particles comprising nucleic acids of interest, the retroviral nucleic acids comprising the nucleic acid are packaged into viral capsids by a packaging cell line. Different packaging cell lines provide a different envelope protein (ecotropic, amphotropic or xenotropic) to be incorporated into the capsid, and this envelope protein determines the specificity of the viral particle for the cells (ecotropic for murine and rat; amphotropic for most mammalian cell types including human, dog and mouse; and xenotropic for most mammalian cell types except murine cells). The appropriate packaging cell line may be used to ensure that the cells are targeted by the packaged viral particles. Methods of introducing subject vector expression vectors into packaging cell lines and of collecting the viral particles that are generated by the packaging lines are well known in the art, including U.S. Pat. No. 5,173,414; Tratschin et al., Mol. Cell. Biol. 5:3251-3260 (1985); Tratschin, et al., Mol. Cell. Biol. 4:2072-2081 (1984); Hermonat & Muzyczka, PNAS 81:6466-6470 (1984); and Samulski et al., J. Virol. 63:03822-3828 (1989). Nucleic acids can also be introduced by direct micro-injection (e.g., injection of RNA).

[0362] In other embodiments, the disclosure relates to methods to produce CasX proteins and nucleic acids encoding the CasX compositions of any of the embodiments described herein, or sequences complementary to the polynucleotide sequences, including homologous variants thereof, as well as methods to express the CasX proteins expressed by the polynucleotide sequences. A CasX protein of the present disclosure may be produced in vitro by eukaryotic cells or by prokaryotic cells. For production by host cells, in general, the methods include producing a polynucleotide sequence coding for the CasX proteins of any of the embodiments described herein and incorporating the encoding gene into an expression vector appropriate for a host cell. For production of the encoded CasX proteins of any of the embodiments described herein, the method includes transforming an appropriate host cell with an expression vector, and culturing the host cell under conditions causing or permitting the resulting CasX protein to be expressed in the transformed host cell, thereby producing the CasX protein, which is recovered by methods described herein or by standard protein purification methods known in the art. Standard recombinant techniques in molecular biology are used to make the polynucleotides and expression vectors of the present disclosure.

[0363] In some embodiments of the methods of altering a C9orf72 target nucleic acid sequence of a cell, or to induce cleavage of a target nucleic acid sequence, the CasX gNA and/or the CasX protein of the present disclosure and/or the donor template sequence, whether they be introduced as nucleic acids or polypeptides, are provided to the cells by a vector or particle of the embodiments described herein. Providing the vector or particle to the cells may be repeated with a frequency of about every day to about every 4 days, e.g., every 1.5 days, every 2 days, every 3 days, or any other frequency from about every day to about every four days, or weekly, or monthly. The agent(s) may be provided to the subject cells one or more times, e.g., one time, twice, three times, or more than three times.

[0364] In embodiments in which two or more different targeting complexes are provided to the cell (e.g., two CasX gNAs with different targeting sequences), the complexes may be provided simultaneously (e.g., as two polypeptides and/or nucleic acids), or delivered simultaneously. Alternatively, they may be provided consecutively, e.g., the targeting complex being provided first, followed by the second targeting complex, etc. or vice versa.

[0365] To improve the delivery of a DNA vector into a target cell, the DNA can be protected from damage and its entry into the cell facilitated, for example, by using lipoplexes and polyplexes. Thus, in some cases, a nucleic acid of the present disclosure (e.g., a recombinant expression vector of the present disclosure) can be covered with lipids in an organized structure like a micelle or a liposome. When the organized structure is complexed with DNA it is called a lipoplex. There are three types of lipids, anionic (negatively-charged), neutral, or cationic (positively-charged). Lipoplexes that utilize cationic lipids have proven utility for gene transfer. Cationic lipids, due to their positive charge, naturally complex with the negatively charged DNA. Also, as a result of their charge, they interact with the cell membrane. Endocytosis of the lipoplex then occurs, and the DNA is released into the cytoplasm. The cationic lipids also protect against degradation of the DNA by the cell.

[0366] Complexes of polymers with DNA are referred to as polyplexes. Most polyplexes consist of cationic polymers and their production is regulated by ionic interactions. One large difference between the methods of action of polyplexes and lipoplexes is that polyplexes cannot release their DNA load into the cytoplasm, so to this end, co-transfection with endosome-lytic agents (to lyse the endosome that is made during endocytosis) such as inactivated adenovirus must occur. However, this is not always the case; polymers such as polyethylenimine have their own method of endosome disruption as does chitosan and trimethylchitosan.

[0367] Dendrimers, a highly branched macromolecule with a spherical shape, may be also be used to genetically modify stem cells. The surface of the dendrimer particle may be functionalized to alter its properties. In particular, it is possible to construct a cationic dendrimer (i.e., one with a positive surface charge). When in the presence of genetic material such as a DNA plasmid, charge complementarity leads to a temporary association of the nucleic acid with the cationic dendrimer. On reaching its destination, the dendrimer-nucleic acid complex can be taken up into a cell by endocytosis.

### IX. Therapeutic Methods

[0368] The present disclosure provides methods of treating a C9orf72-related disease in a subject in need thereof, including but not limited to amyotrophic lateral sclerosis (ALS) and frontotemporal dementia (FTD). In some embodiments, the methods of the disclosure can prevent, treat and/or ameliorate a C9orf72-related disease of a subject by the administering to the subject of a composition of the disclosure. A number of therapeutic strategies have been used to design the compositions for use in the methods of treatment of a subject with a C9orf72-related disease. Additionally, the methods can be used to treat a subject in advance of any symptom of a C9orf72-related disease. Accordingly, the prophylactic administration of a modified cell population or a therapeutically effective amount of the CasX:gNA system composition(s) or the polynucleic acids encoding the CasX:gNA systems of the embodiments can serve to prevent a C9orf72-related disease. In some embodiments, the composition administered to the subject further comprises pharmaceutically acceptable carrier, diluent or excipient.

[0369] In some cases, one of the alleles of the C9orf72 gene of the subject comprises an HRS. In some cases, one or both alleles of the C9orf72 gene of the subject comprises a mutation. In other cases, one or both alleles of the C9orf72 gene of the subject comprises a duplication of at least a portion of the C9orf72 gene. In other cases, one or both alleles of the C9orf72 gene of the subject comprises a duplication of the C9orf72 gene. In other cases, the C9orf72 gene encodes a mutation that alters the function or expression of the C9orf72 protein such as, but not limited to, substitutions, deletions or insertions of one or more nucleotides as compared to the wild-type sequence.

[0370] In some embodiments, the disclosure provides methods of treating a C9orf72 or related disease in a subject in need thereof comprising modifying a C9orf72 gene in a cell of the subject, the modifying comprising contacting said cells with a therapeutically effective dose of i) a composition comprising a CasX and a gNA of any of the embodiments described herein; ii) a composition comprising a CasX, a gNA, and a donor template of any of the embodiments described herein; iii) one or more nucleic acids encoding or comprising the compositions of (i) or (ii); iv) a vector selected from the group consisting of a retroviral vector, a lentiviral vector, an adenoviral vector, an adeno-associated viral (AAV) vector, a herpes simplex virus (HSV) vector and comprising the nucleic acids of (iii); v) a VLP comprising the composition of (i) or (ii); or vi) combinations of two or more of (i)-(v), wherein the C9orf72 gene of the cells is modified by the CasX protein and, optionally, the donor template such that a wild-type or a functional C9orf72 protein is expressed. In some embodiments of the method of treating a C9orf72-related disease in a subject, a second gNA is utilized, wherein the second gNA has a targeting sequence complementary to a different or overlapping portion of the target nucleic acid compared to the first gNA (e.g., 5′ and 3′ to the hexanucleotide repeat expansion), resulting in an additional break in the C9orf72 target nucleic acid of the cells of the subject. In the foregoing, the gene can be modified by the NHEJ host repair mechanisms, or utilized in conjunction with a donor template that is inserted by HDR or HITI mechanisms to either excise, correct, or compensate for the mutation, such that expression of a wild-type or functional C9orf72 protein in modified cells is increased by at least about 50%, at least about 60%, at least about 70%, at least about 80%, at least about 90%, or at least about 95% in comparison to a cell that has not been modified. In some embodiments, the method of treatment by administration of the modalities of (i)-(v), above, results in a knocking-down or knocking out of the C9orf72 gene such that expression of the HRS RNA and/or the DPR in modified cells is reduced by at least about 10%, at least about 20%, at least about 30%, at least about 40%, at least about 50%, at least about 60%, at least about 70%, at least about 80%, or at least about 90% in comparison to cells that have not been modified. In the embodiments of method of treatment, the C9orf72-related disease includes all diseases occurring due to expression of the HRS RNA and/or the DPR, the mutation of C9orf72, the duplication of the C9orf72 gene, or the abnormal expression of C9orf72 in the subject. The embodiments of the paragraph are more fully detailed, below.

[0371] In some embodiments, the method comprises administration of the vector comprising or encoding a CasX and a plurality of gNAs targeted to different locations in the C9orf72 gene, wherein the contacting of the cells of the subject with the CasX:gNA complexes results in modification of the target nucleic acid of the cells.

[0372] In some embodiments, the vector of the embodiments are administered to the subject at a therapeutically effective dose. In one particular embodiment, the vector is an AAV of the embodiments described herein, encoding components of the CasX:gNA system and, optionally, the donor template. In the foregoing, the AAV vector is selected from AAV1, AAV2, AAV3, AAV4, AAV5, AAV6, AAV7, AAV8, AAV9, AAV10, AAV11, AAV12, AAV 44.9, AAV-Rh74, or AAVRh10. In some embodiments, the AAV vector is administered to the subject at a dose of at least about 1×10⁵ vector genomes/kg (vg/kg), at least about 1×10⁶ vg/kg, at least about 1×10⁷ vg/kg, at least about 1×10⁸ vg/kg, at least about 1×10⁹ vg/kg, at least about 1×10¹⁰ vg/kg, at least about 1×10¹¹ vg/kg, at least about 1×10¹² vg/kg, at least about 1×10¹³ vg/kg, at least about 1×10¹⁴ vg/kg, at least about 1×10¹⁵ vg/kg, or at least about 1×10¹⁶ vg/kg. In some embodiments, the AAV vector is administered to the subject at a dose of at least about 1×10⁵ vg/kg to about 1×10¹⁶ vg/kg, at least about 1×10⁶ vg/kg to about 1×10¹⁵ vg/kg, or at least about 1×10⁷ vg/kg to about 1×10¹⁴ vg/kg. In other embodiments, the method comprises administering a therapeutically effective dose of a VLP of the embodiments described herein to the subject, comprising components of the CasX:gNA system and, optionally, the donor template. In some embodiments, the VLP is administered to the subject at a dose of at least about 1×10⁵ particles/kg, at least about 1×10⁶ particles/kg, at least about 1×10⁷ particles/kg at least about 1×10⁸ particles/kg, at least about 1×10⁹ particles/kg, at least about 1×10¹⁰ particles/kg, at least about 1×10¹¹ particles/kg, at least about 1×10¹² particles/kg, at least about 1×10¹³ particles/kg, at least about 1×10¹⁴ particles/kg, at least about 1×10¹⁵ particles/kg, or at least about 1×10¹⁶ particles/kg. In some embodiments, the VLP is administered to the subject at a dose of at least about 1×10⁵ particles/kg to about 1×10¹⁶ particles/kg, or at least about 1×10⁶ particles/kg to about 1×10¹⁵ particles/kg, or at least about 1×10⁷ particles/kg to about 1×10¹⁴ particles/kg. The vector or VLP can be administered according to any of the treatment regimens disclosed herein, below.

[0373] In some embodiments, administering the C9orf72-targeting vector compositions of the disclosure to a subject delivers the CasX:gNA compositions to a cell of the subject, resulting in the editing of the C9orf72 target nucleic acid in said cell. The modified cell of the treated subject can be a eukaryotic cell selected from the group consisting of a rodent cell, a mouse cell, a rat cell, a primate cell, a non-human primate cell, and a human cell. In some embodiments, the eukaryotic cell of the treated subject is a human cell. In some embodiments, the cell is a cell selected from the group consisting of Purkinje cell, frontal cortex neuron, motor cortex neuron, hippocampus neuron, cerebellum neuron, upper motor neuron, spinal cord neuron, spinal cord motor neuron, glial cell, and astrocytes. In some embodiments, the cell comprises at least one modified allele of a C9orf72 gene in a cell wherein the modification is used to correct or compensate for a mutation or a duplication of a portion of the C9orf72 gene in the subject; e.g., the HRS. In other embodiments, the cell comprises at least one modified allele of a C9orf72 gene in a cell wherein the modification is used to knock-down or knock out the C9orf72 gene in the subject.

[0374] In other embodiments of the methods of treatment, the methods comprises further administering an additional CRISPR protein, or a polynucleotide encoding the additional CRISPR protein to the subject. In the foregoing embodiment, the additional CRISPR protein has a sequence different from the first CasX protein of the method. In some embodiments, the additional CRISPR protein is not a CasX protein; i.e., is a Cpf1, Cas9, Cas10, Cas12a, or Cas13a. In some cases, the gNA used in the method of treatment is a single-molecule gNA (sgNA). In other cases, the gNA is a dual-molecule gNA (dgNA). In still other cases, the method comprises contacting the target nucleic acid sequence with a plurality of gNAs targeted to different or overlapping sequences of the C9orf72 gene.

[0375] In some embodiments, the method of treatment comprises administering to the subject the CasX:gNA compositions or vectors via an administration route selected from the group consisting of subcutaneous, intradermal, intraneural, intranodal, intramedullary, intramuscular, intralumbar, intrathecal, subarachnoid, intraventricular, intracapsular, intravenous, intralymphatic, or intraperitoneal routes, wherein the administering method comprises injection, transfusion, or implantation. In some embodiments of the methods of treating a C9orf72-related disease in a subject, the subject is selected from the group consisting of mouse, rat, pig, non-human primate, and human. In particular embodiments, the subject is a human. In some embodiments, the cell of the subject to be modified by the methods of disclosure is a cell is selected from the group consisting of a Purkinje cell, frontal cortex neuron, motor cortex neuron, hippocampus neuron, cerebellum neuron, upper motor neuron, spinal cord neuron, spinal cord motor neuron, glial cell, and astrocytes.

[0376] A number of therapeutic strategies have been used to design the compositions for use in the methods of treatment of a subject with a C9orf72-related disease. In some embodiments, the invention provides a method of treatment of a subject having a C9orf72-related disease, the method comprising administering to the subject a CasX:gNA composition or a vector of any of the embodiments disclosed herein according to a treatment regimen comprising one or more consecutive doses using a therapeutically effective dose. In some embodiments of the treatment regimen, the therapeutically effective dose of the composition or vector is administered as a single dose. In other embodiments of the treatment regimen, the therapeutically effective dose is administered to the subject as two or more doses over a period of at least two weeks, or at least one month, or at least two months, or at least three months, or at least four months, or at least five months, or at least six months. In some embodiments of the treatment regiment, the effective doses are administered by a route selected from the group consisting of subcutaneous, intradermal, intraneural, intranodal, intramedullary, intramuscular, intralumbar, intrathecal, subarachnoid, intraventricular, intracapsular, intravenous, intralymphatic, or intraperitoneal routes, wherein the administering method is injection, transfusion, or implantation.

[0377] In some embodiments, the administering of the therapeutically effective amount of a CasX:gNA modality or a vector comprising a polynucleotide encoding a CasX protein and a guide nucleic acid disclosed herein, to knock down or knock out expression of C9orf72 in a subject with a C9orf72-related disease, wherein the modification leads to the prevention or amelioration of the underlying C9orf72-related disease such that an improvement is observed in the subject, notwithstanding that the subject may still be afflicted with the underlying disease. In other embodiments, the administering to the subject with a C9orf72-related disease of the therapeutically effective amount of a CasX:gNA modality or a vector comprising a polynucleotide encoding a CasX protein and a guide nucleic acid disclosed herein, corrects or compensates for the mutations such that expression of a wild-type or functional C9orf72 protein leads to the prevention or amelioration of the underlying C9orf72-related disease such that an improvement is observed in the subject, notwithstanding that the subject may still be afflicted with the underlying disease. In some embodiments, the administration of the therapeutically effective amount of the CasX-gNA modality leads to an improvement in at least one clinically-relevant parameter for a C9orf72-related disease, including, but not limited to neuronal cell death, neuroinflammation, TDP-43 related pathology, axonal and neuromuscular junction (NMJ) abnormalities, dendritic spine density changes at prefrontal cortex, electrophysiological deficits in neonatal cortical neurons, change from baseline in percent of predicted slow vital capacity (SVC), change from baseline in muscle strength, change from baseline in bulbar strength, ALS Functional Rating Scale (ALSFRS-(R)), combined assessment of function and survival, duration of response, time to death, time to tracheostomy, time to persistent assisted ventilation (DTP), forced vital capacity (% FVC); manual muscle test, maximum voluntary isometric contraction, duration of response, progression-free survival, time to progression of disease, and time-to-treatment failure. In some embodiments, the administration of the therapeutically effective amount of the CasX-gNA modality leads to an improvement in at least two clinically-relevant parameters for treatment of a C9orf72-related disease. The C9orf72-related disease can be FTD, ALS, or both. In some embodiments of the methods of treatment, the subject is selected from mouse, rat, pig, dog, non-human primate, and human.

[0378] In some embodiments, the method of treatment comprises administering a therapeutically-effective dose of a population of cells modified to correct or compensate for the mutation of the C9orf72 gene. Methods for modification of such populations of cells are described herein, supra. By the method of treatment, the administration of the modified cells results in the expression of wild-type or a functional C9orf72 protein in the subject. In some embodiments of the method of treatment, the dose of total cells is within a range of between at or about 10⁴ and at or about 10⁹ cells/kilograms (kg) body weight, such as between 10⁵ and 10⁶ cells/kg body weight, for example, at or about 1×10⁵ cells/kg, 1.5×10⁵ cells/kg, 2×10⁵ cells/kg, or 1×10⁶ cells/kg body weight. For example, in some embodiments, the cells are administered at, or within a certain range of error of, between at or about 10⁴ and at or about 10⁹ cells/kilograms (kg) body weight, such as between 10⁵ and 10⁶ cells/kg body weight, for example, at or about 1×10⁵ cells/kg, 1.5×10⁵ cells/kg, 2×10⁵ cells/kg, or 1×10⁶ cells/kg body weight. In one embodiment, the cells are autologous with respect to the subject to be administered the cells. In another embodiment, the cells are allogeneic with respect to the subject to be administered the cells.

[0379] In some embodiments, the methods of treatment further comprise administering a chemotherapeutic agent wherein the agent is effective in improving the signs or symptoms associated with a C9orf72-related disease, including but not limited to riluzole, ranolazine, radicava, and dextromethorphan HBr in combination with quinidine sulfate.

[0380] Methods of obtaining samples from treated subjects for analysis to determine the effectiveness of the treatment, such as body fluids or tissues, and methods of preparation of the samples to allow for analysis are well known to those skilled in the art. Methods for analysis of RNA and protein levels are discussed above and are well known to those skilled in the art. The effects of treatment can also be assessed by measuring biomarkers associated with the target gene expression in the aforementioned fluids, tissues or organs, collected from an animal contacted with one or more compounds of the invention, by routine clinical methods known in the art. Biomarkers of C9orf72 diseases include, but are not limited to, C9orf72 levels, C9orf72 RNA, GGGGCC repeat-containing RNA species (as well as the antisense GGCCCC RNA), polyadenylated C9orf72 RNA species retaining the hexanucleotide repeat-containing intron, DPR levels, and DPR RNA levels.

[0381] Several mouse models of C9orf72 hexanucleotide repeat expansion exist, and are suitable for evaluating the methods of treatment of the embodiments (Batra R, and Lee C W. Mouse Models of C9orf72 Hexanucleotide Repeat Expansion in Amyotrophic Lateral Sclerosis/Frontotemporal Dementia. Front Cell Neurosci. 2017; 11:196 (2017)).

### X. Kits and Articles of Manufacture

[0382] In other embodiments, provided herein are kits comprising a CasX protein, one or a plurality of CasX gNA of any of the embodiments of the disclosure comprising a targeting sequence specific for a C9orf72 gene, and a suitable container (for example a tube, vial or plate).

[0383] In some embodiments, the kit further comprises a buffer, a nuclease inhibitor, a protease inhibitor, a liposome, a therapeutic agent, a label, a label visualization reagent, or any combination of the foregoing. In some embodiments, the kit further comprises a pharmaceutically acceptable carrier, diluent or excipient.

[0384] In some embodiments, the kit comprises appropriate control compositions for gene modifying applications, and instructions for use.

[0385] In some embodiments, the kit comprises a vector comprising a sequence encoding a CasX protein of the disclosure, a CasX gNA of the disclosure, optionally a donor template, or a combination thereof, and the kit further comprises a pharmaceutically acceptable carrier, diluent or excipient.

[0386] The present description sets forth numerous exemplary configurations, methods, parameters, and the like. It should be recognized, however, that such description is not intended as a limitation on the scope of the present disclosure, but is instead provided as a description of exemplary embodiments.

### Illustrative Embodiments

[0387] The invention can be understood with reference to the following illustrated, enumerated embodiments:

[0388] 1. A CasX:gNA system comprising a CasX protein and a guide nucleic acid (gNA), wherein the gNA comprises a targeting sequence complementary to a target nucleic acid sequence comprising a chromosome 9 open reading frame 72 (C9orf72) gene.

[0389] 2. The CasX:gNA system of embodiment 1, wherein the C9orf72 gene comprises one or more mutations.

[0390] 3. The CasX:gNA system of embodiment 1, wherein the C9orf72 gene mutation comprises more than 30, more than 100, more than 500, more than 700, more than 1000, or more than 1600 copies of a hexanucleotide repeat sequence (HRS) GGGGCC.

[0391] 4. The CasX:gNA system of embodiment 2 or embodiment 3, wherein the mutation is a loss-of-function mutation.

[0392] 5. The CasX:gNA system of embodiment 2 or embodiment 3, wherein the mutation is a gain-of-function mutation.

[0393] 6. The CasX:gNA system of any one of the preceding embodiments, wherein the gNA is a guide RNA (gRNA).

[0394] 7. The CasX:gNA system of any one of embodiments 1-5, wherein the gNA is a guide DNA (gDNA).

[0395] 8. The CasX:gNA system of any one of embodiments 1-5, wherein the gNA is a chimera comprising DNA and RNA.

[0396] 9. The CasX:gNA system of any one of embodiments 1-8, wherein the gNA is a single-molecule gNA (sgNA).

[0397] 10. The CasX:gNA system of any one of embodiments 1-8, wherein the gNA is a dual-molecule gNA (dgNA).

[0398] 11. The CasX:gNA system of any one of embodiments 1-10, wherein the targeting sequence of the gNA is complementary to a sequence comprising one or more single nucleotide polymorphisms (SNPs) of the C9orf72 gene.

[0399] 12. The CasX:gNA system of any one of embodiments 1-10, wherein the targeting sequence of the gNA comprises a sequence selected from the group consisting of sequences set forth in Table 3.

[0400] 13. The CasX:gNA system of any one of embodiments 1-10, wherein the targeting sequence of the gNA comprises a sequence of Table 3 with a single nucleotide removed from the 3′ end of the sequence.

[0401] 14. The CasX:gNA system of any one of embodiments 1-10, wherein the targeting sequence of the gNA comprises a sequence of Table 3 with two nucleotides removed from the 3′ end of the sequence.

[0402] 15. The CasX:gNA system of any one of embodiments 1-10, wherein the targeting sequence of the gNA comprises a sequence of Table 3 with three nucleotides removed from the 3′ end of the sequence.

[0403] 16. The CasX:gNA system of any one of embodiments 1-10, wherein the targeting sequence of the gNA comprises a sequence of Table 3 with four nucleotides removed from the 3′ end of the sequence.

[0404] 17. The CasX:gNA system of any one of embodiments 1-10, wherein the targeting sequence of the gNA comprises a sequence of Table 3 with five nucleotides removed from the 3′ end of the sequence.

[0405] 18. The CasX:gNA system of any one of embodiments 1-10, wherein the targeting sequence of the gNA comprises a sequence having at least about 65%, at least about 75%, at least about 85%, or at least about 95% identity to a sequence selected from the group consisting of sequences set forth in Table 3.

[0406] 19. The CasX:gNA system of any one of embodiments 1-10, wherein the targeting sequence of the gNA comprises a sequence having one or more single nucleotide polymorphisms (SNP) relative to a sequence provided in Table 3.

[0407] 20. The CasX:gNA system of any one of embodiments 1-19, wherein the targeting sequence of the gNA is complementary to a non-coding region of the C9orf72 gene.

[0408] 21. The CasX:gNA system of any one of embodiments 1-19, wherein the targeting sequence of the gNA is complementary to a coding region of the C9orf72 gene.

[0409] 22. The CasX:gNA system of any one of embodiments 1-19, wherein the targeting sequence of the gNA is complementary to a sequence of a C9orf72 exon.

[0410] 23. The CasX:gNA system of any one of embodiments 1-19, wherein the targeting sequence of the gNA is complementary to a sequence of a C9orf72 intron.

[0411] 24. The CasX:gNA system of any one of embodiments 1-19, wherein the targeting sequence of the gNA is complementary to a sequence of a C9orf72 intron-exon junction.

[0412] 25. The CasX:gNA system of any one of embodiments 1-19, wherein the targeting sequence of the gNA is complementary to a sequence of a C9orf72 regulatory element.

[0413] 26. The CasX:gNA system of any one of embodiments 1-19, wherein the targeting sequence of the gNA is complementary to a sequence of an intergenic region of the C9orf72 gene.

[0414] 27. The CasX:gNA system of any one of embodiments 1-19, wherein the targeting sequence of the gNA is complementary to a sequence that is 5′ to the HRS.

[0415] 28. The CasX:gNA system of embodiment 27, wherein the targeting sequence of the gNA is complementary to a sequence of intron 1 or a promoter of the C9orf72 gene.

[0416] 29. The CasX:gNA system of any one of embodiments 1-28, further comprising a second gNA, wherein the second gNA has a targeting sequence complementary to a different or overlapping portion of the target nucleic acid sequence compared to the targeting sequence of the gNA of any one of the preceding embodiments.

[0417] 30. The CasX:gNA system of embodiment 28, wherein the targeting sequence of the second gNA gNA is complementary to a sequence that is 5′ or 3′ to the HRS.

[0418] 31. The CasX:gNA system of embodiment 30, wherein the targeting sequence of the gNA is complementary to a sequence of intron 1 of the C9orf72 gene.

[0419] 32. The CasX:gNA system of any one of embodiments 1-31, wherein the gNA has a scaffold comprising a sequence selected from the group consisting of sequences set forth in Table 1 and Table 2, or a sequence having at least about 50%, at least about 60%, at least about 70%, at least about 80%, at least about 90%, at least about 95%, at least about 95%, at least about 96%, at least about 97%, at least about 98%, or at least about 99% sequence identity thereto.

[0420] 33. The CasX:gNA system of any one of embodiments 1-31, wherein the gNA has a scaffold comprising a sequence having at least one modification relative to a reference gNA sequence selected from the group consisting of the sequences of SEQ ID NOS: 4-16.

[0421] 34. The CasX:gNA system of embodiment 33, wherein the at least one modification of the reference gNA comprises at least one substitution, deletion, or insertion of a nucleotide of the gNA sequence.

[0422] 35. The CasX:gNA system of any one of embodiments 1-34, wherein the gNA is chemically modified.

[0423] 36. The CasX:gNA system of any one of embodiments 1-35, wherein the CasX protein comprises a reference CasX protein having a sequence of any one of SEQ ID NOS: 1-3, a CasX variant protein having a sequence of Table 4, or a sequence having at least about 50%, at least about 60%, at least about 70%, at least about 80%, at least about 90%, at least about 95%, at least about 96%, at least about 97%, at least about 98%, or at least about 99% sequence identity thereto.

[0424] 37. The CasX:gNA system of embodiment 36, wherein the CasX variant protein comprises at least one modification relative to a reference CasX protein having a sequence selected from SEQ ID NOS:1-3.

[0425] 38. The CasX:gNA system of embodiment 37, wherein the at least one modification comprises at least one amino acid substitution, deletion, or insertion in a domain of the CasX variant protein relative to the reference CasX protein.

[0426] 39. The CasX:gNA system of embodiment 38, wherein the domain is selected from the group consisting of a non-target strand binding (NTSB) domain, a target strand loading (TSL) domain, a helical I domain, a helical II domain, an oligonucleotide binding domain (OBD), and a RuvC DNA cleavage domain.

[0427] 40. The CasX:gNA system of any one of embodiments 36-39, wherein the CasX protein further comprises one or more nuclear localization signals (NLS).

[0428] 41. The CasX:gNA system of embodiment 40, wherein the one or more NLS are selected from the group of sequences consisting of PKKKRKV (SEQ ID NO: 165), KRPAATKKAGQAKKKK (SEQ ID NO: 166), PAAKRVKLD (SEQ ID NO: 167), RQRRNELKRSP (SEQ ID NO: 168), NQSSNFGPMKGGNFGGRSSGPYGGGGQYFAKPRNQGGY (SEQ ID NO: 169), RMRIZFKNKGKDTAELRRRRVEVSVELRKAKKDEQILKRRNV (SEQ ID NO: 170), VSRKRPRP (SEQ ID NO: 171), PPKKARED (SEQ ID NO: 172), PQPKKKPL (SEQ ID NO: 173), SALIKKKKKMAP (SEQ ID NO: 174), DRLRR (SEQ ID NO:175), PKQKKRK (SEQ ID NO: 176), RKLKKKIKKL (SEQ ID NO: 177), REKKKFLKRR (SEQ ID NO: 178), KRKGDEVDGVDEVAKKKSKK (SEQ ID NO: 179), RKCLQAGMNLEARKTKK (SEQ ID NO: 180), PRPRKIPR (SEQ ID NO: 181), PPRKKRTVV (SEQ ID NO: 182), NLSKKKKRKREK (SEQ ID NO: 183), RRPSRPFRKP (SEQ ID NO: 184), KRPRSPSS (SEQ ID NO: 185), KRGINDRNFWRGENERKTR (SEQID NO: 186), PRPPKMARYDN (SEQ ID NO: 187), KRSFSKAF (SEQ ID NO: 188), KLKIKRPVK (SEQ ID NO: 189), PKTRRRPRRSQRKRPPT (SEQ ID NO: 191), RRKKRRPRRKKRR (SEQ ID NO: 194), PKKKSRKPKKKSRK (SEQ ID NO: 195), HKKKHPDASVNFSEFSK (SEQ ID NO: 196), QRPGPYDRPQRPGPYDRP (SEQ ID NO: 197), LSPSLSPLLSPSLSPL (SEQ ID NO: 198), RGKGGKGLGKGGAKRHRK (SEQ ID NO: 199), PKRGRGRPKRGRGR (SEQ ID NO: 200), MSRRRKANPTKLSENAKKLAKEVEN (SEQ ID NO: 192), PKKKRKVPPPPAAKRVKLD (SEQ ID NO: 190), and PKKKRKVPPPPKKKRKV (SEQ ID NO: 201).

[0429] 42. The CasX:gNA system of embodiment 40 or embodiment 41, wherein the one or more NLS are at the C-terminus of the CasX protein.

[0430] 43. The CasX:gNA system of embodiment 40 or embodiment 41, wherein the one or more NLS are at the N-terminus of the CasX protein.

[0431] 44. The CasX:gNA system of embodiment 40 or embodiment 41, wherein the one or more NLS are at the N-terminus and C-terminus of the CasX protein.

[0432] 45. The CasX:gNA system of any one of embodiments 36-44, wherein the CasX variant protein and the gNA exhibit at least one or more improved characteristics as compared to a reference CasX protein and the gNA of Table 1.

[0433] 46. The CasX:gNA system of embodiment 45, wherein the improved characteristic is selected from the group consisting of improved folding of the CasX protein, improved binding affinity of the CasX protein to the gNA, improved ribonuclear protein complex (RNP) formation, higher percentage of cleavage-competent RNP, improved binding affinity to the target nucleic acid sequence, improved binding affinity for a PAM sequence, improved unwinding of the target nucleic acid sequence, increased activity, increased target nucleic acid sequence cleavage rate, improved editing efficiency, improved editing specificity, increased activity of the nuclease, increased target strand loading for double strand cleavage, decreased target strand loading for single strand nicking, decreased off-target cleavage, improved binding of the non-target strand of DNA, improved CasX protein stability, improved protein:guide RNA complex stability, improved protein solubility, improved protein:gNA complex solubility, improved protein yield, improved protein expression, and improved fusion characteristics.

[0434] 47. The CasX:gNA system of embodiment 45 or embodiment 46, wherein the improved characteristic of the CasX variant protein is at least about 1.1 to about 100,000-fold improved relative to the reference CasX protein of SEQ ID NO: 1, SEQ ID NO: 2, or SEQ ID NO: 3.

[0435] 48. The CasX:gNA system of embodiment 45 or embodiment 46, wherein the improved characteristic of the CasX variant protein is at least about 10-fold, at least about 100-fold, at least about 1,000-fold, or at least about 10,000-fold improved relative to the reference CasX protein of SEQ ID NO: 1, SEQ ID NO: 2, or SEQ ID NO: 3.

[0436] 49. The CasX:gNA system of any one of embodiments 46-48, wherein the improved characteristic is improved binding affinity to the target nucleic acid sequence.

[0437] 50. The CasX:gNA system of any one of embodiments 46-48, wherein the improved characteristic is increased target nucleic acid sequence cleavage rate.

[0438] 51. The CasX:gNA system of any one of embodiments 46-48, wherein the improved characteristic is increased binding affinity to one or more PAM sequences wherein the one or more PAM sequences are selected from the group consisting of TTC, ATC, GTC, and CTC.

[0439] 52. The CasX:gNA system of embodiment 51, wherein the increased binding affinity for the one or more PAM sequences is at least 1.5-fold greater compared to the binding affinity of any one of the CasX proteins of SEQ ID NOS: 1-3 for the PAM sequences.

[0440] 53. The CasX:gNA system of any one of the preceding embodiments, wherein the CasX variant protein and the gNA are associated together in an RNP.

[0441] 54. The CasX:gNA system of embodiment 52, wherein the RNP has at least a 5%, at least a 10%, at least a 15%, or at least a 20% higher percentage of cleavage-competent RNP compared to an RNP of a reference CasX and the gNA of Table 1.

[0442] 55. The CasX:gNA system of any one of embodiments 39-54, wherein the CasX variant protein comprises a nuclease domain having nickase activity.

[0443] 56. The CasX:gNA system of embodiment 55, wherein the CasX variant can cleave only one strand of a double-stranded target nucleic acid molecule.

[0444] 57. The CasX:gNA system of any one of embodiments 1-54, wherein the CasX variant protein comprises a nuclease domain having double-stranded cleavage activity.

[0445] 58. The CasX:gNA system of any one of embodiments 1-44, wherein the CasX protein is a catalytically inactive CasX (dCasX) protein, and wherein the dCasX and the gNA retain the ability to bind to the target nucleic acid sequence.

[0446] 59. The CasX:gNA system of embodiment 58, wherein the dCasX comprises a mutation at residues:
[0447] a. D672, E769, and/or D935 corresponding to the reference CasX protein of SEQ ID NO:1; or
[0448] b. D659, E756 and/or D922 corresponding to the reference CasX protein of SEQ ID NO: 2.

[0449] 60. The CasX:gNA system of embodiment 59, wherein the mutation is a substitution of alanine for the residue.

[0450] 61. The CasX:gNA system of any one of embodiments 1-57, further comprising a donor template nucleic acid.

[0451] 62. The CasX:gNA system of embodiment 61, wherein the donor template comprises a nucleic acid comprising at least a portion of the C9orf72 gene, wherein the C9orf72 gene portion is selected from the group consisting of a C9orf72 exon, a C9orf72 intron, a C9orf72 intron-exon junction, a C9orf72 regulatory element, or a combination thereof.

[0452] 63. The CasX:gNA system of embodiment 61 or embodiment 62, wherein the donor template comprises homologous arms complementary to sequences flanking a cleavage site in the target nucleic acid.

[0453] 64. The CasX:gNA system of embodiment 61-63, wherein the donor template ranges in size from 10-15,000 nucleotides.

[0454] 65. The CasX:gNA system of any one of embodiments 61-64, wherein the donor template is a single-stranded DNA template or a single stranded RNA template.

[0455] 66. The CasX:gNA system of any one of embodiments 61-64, wherein the donor template is a double-stranded DNA template.

[0456] 67. The CasX:gNA system of any one of embodiments 61-66, wherein the donor template comprises one or more mutations compared to a wild-type C9orf72 gene.

[0457] 68. The CasX:gNA system of any one of embodiments 61-66, wherein the donor template comprises a heterologous sequence compared to a wild-type C9orf72 gene.

[0458] 69. The CasX:gNA system of any one of embodiments 61-66, wherein the donor template comprises all or a portion of a wild-type C9orf72 gene.

[0459] 70. A nucleic acid comprising a sequence that encodes the CasX:gNA system of any one of embodiments 1-60.

[0460] 71. The nucleic acid of embodiment 70, wherein the sequences encoding the CasX protein and gNA are codon optimized for expression in a eukaryotic cell.

[0461] 72. A vector comprising the nucleic acid of embodiment 70 or embodiment 71.

[0462] 73. The vector of embodiment 72, wherein the vector further comprises a promoter.

[0463] 74. A vector comprising a donor template, wherein the donor template comprises a nucleic acid comprising at least a portion of a C9orf72 gene, wherein the C9orf72 gene portion is selected from the group consisting of a C9orf72 exon, a C9orf72 intron, a C9orf72 intron-exon junction, and a C9orf72 regulatory element.

[0464] 75. The vector of embodiment 74, wherein the donor template comprises one or more mutations compared to a wild-type C9orf72 gene or comprises a heterologous sequence flanked by two homologous arms complementary to sequences that are 5′ and 3′ to a cleavage site in the C9orf72 target nucleic acid.

[0465] 76. The vector of embodiment 74 or embodiment 75, further comprising the nucleic acid of embodiment 70 or embodiment 71.

[0466] 77. The vector of any one of embodiments 72-76, wherein the vector is selected from the group consisting of a retroviral vector, a lentiviral vector, an adenoviral vector, an adeno-associated viral (AAV) vector, a herpes simplex virus (HSV) vector, a virus-like particle (VLP), a plasmid, a minicircle, a nanoplasmid, and an RNA vector.

[0467] 78. The vector of embodiment 77, wherein the vector is an AAV vector.

[0468] 79. The vector of embodiment 78, wherein the AAV vector is selected from AAV1, AAV2, AAV3, AAV4, AAV5, AAV6, AAV7, AAV8, AAV9, AAV10, AAV-Rh74, or AAVRh10.

[0469] 80. The vector of embodiment 77, wherein the vector is a retroviral vector.

[0470] 81. The vector of embodiment 77, wherein the vector encoding the VLP comprises one or more nucleic acids encoding a gag polyprotein, the CasX protein of any one of embodiments 36-60, and the gNA of any one of embodiments 1-35.

[0471] 82. A virus-like particle (VLP) comprising the CasX protein of any one of embodiments 36-60, and the gNA of any one of embodiments 1-35.

[0472] 83. The VLP of embodiment 82, wherein the CasX protein and the gNA are associated together in an RNP.

[0473] 84. The VLP of embodiment 82 or embodiment 83, further comprising a pseudotyping viral envelope glycoprotein or antibody fragment that provides for binding and fusion of the VLP to a target cell.

[0474] 85. A method of modifying a C9orf72 target nucleic acid sequence, the method comprising contacting the target nucleic acid sequence with a CasX protein and a guide nucleic acid (gNA) comprising a targeting sequence wherein said contacting comprises introducing into a cell:
[0475] a. the CasX:gNA system of any one of embodiments 1-69;
[0476] b. the nucleic acid of embodiment 70 or embodiment 71;
[0477] c. the vector as in any one of embodiments 72-81;
[0478] d. the VLP of any one of embodiments 82-84; or
[0479] e. combinations thereof,
[0480] wherein said contacting results in modification of the C9orf72 target nucleic acid sequence by the CasX protein.

[0481] 86. The method of embodiment 85, wherein the CasX protein and the gNA are associated together in a ribonuclear protein complex (RNP).

[0482] 87. The method of embodiment 85 or embodiment 86, further comprising a second gNA or a nucleic acid encoding the second gNA, wherein the second gNA has a targeting sequence complementary to a different portion of the target nucleic acid sequence or its complement compared to the guide of embodiment 85.

[0483] 88. The method any one of embodiments 85-87, wherein the C9orf72 gene comprises a mutation.

[0484] 89. The method of embodiment 88, wherein the mutation is a gain-of-function mutation.

[0485] 90. The method of embodiment 88, wherein the mutation is a loss-of-function mutation.

[0486] 91. The method of embodiment 88, wherein the C9orf72 gene mutation comprises more than 30, more than 100, more than 500, more than 700, more than 1000, or more than 1600 copies of a hexanucleotide repeat sequence GGGGCC.

[0487] 92. The method of any one of embodiments 85-90, wherein the modifying comprises introducing a single-stranded break in the target nucleic acid sequence.

[0488] 93. The method of any one of embodiments 85-90, wherein the modifying comprises introducing a double-stranded break in the target nucleic acid sequence.

[0489] 94. The method of any one of embodiments 85-93, wherein the modifying comprises introducing an insertion, deletion, substitution, duplication, or inversion of one or more nucleotides in the target nucleic acid sequence.

[0490] 95. The method of any one of embodiments 85-94, wherein the modifying of the target nucleic acid sequence occurs in vitro or ex vivo.

[0491] 96. The method of any one of embodiments 85-95, wherein the modifying of the target nucleic acid sequence occurs inside of a cell.

[0492] 97. The method of any one of embodiments 85-95, wherein the modifying of the target nucleic acid sequence occurs in vivo.

[0493] 98. The method of any one of embodiments 85-97, wherein the cell is a eukaryotic cell.

[0494] 99. The method of embodiment 98, wherein the eukaryotic cell is selected from the group consisting of a rodent cell, a mouse cell, a rat cell, a pig cell, a primate cell, and a non-human primate cell.

[0495] 100. The method of embodiment 98, wherein the eukaryotic cell is a human cell.

[0496] 101. The method of any one of embodiments 85-100, wherein the cell is selected from the group consisting of Purkinje cell, frontal cortex neuron, motor cortex neuron, hippocampus neuron, cerebellum neuron, upper motor neuron, spinal cord neuron, spinal cord motor neuron, glial cell, and astrocytes.

[0497] 102. The method of any one of embodiments 85-101, wherein the method further comprises contacting the target nucleic acid sequence with a donor template comprising homologous arms complementary to sequences flanking a cleavage site in the target nucleic acid targeted by the CasX:gNA system of any one of embodiments 1-57.

[0498] 103. The method of embodiment 102, wherein the donor template comprises one or more mutations compared to the wild-type C9orf72 gene sequence, and wherein the insertion results in a knock-down or knock-out of the C9orf72 gene.

[0499] 104. The method of embodiment 102, wherein insertion of the donor template replaces some or all of the HRS of the C9orf72 gene.

[0500] 105. The method of embodiment 102, wherein the donor template comprises all or a portion of a wild-type C9orf72 gene sequence, wherein the insertion corrects one or more mutation(s) of the C9orf72 gene.

[0501] 106. The method of any one of embodiments 102-104, wherein the donor template ranges in size from 10-15,000 nucleotides.

[0502] 107. The method of any one of embodiments 102-104, wherein the donor template ranges in size from 100-1,000 nucleotides.

[0503] 108. The method of any one of embodiments 102-107, wherein the donor template is a single-stranded DNA template or a single stranded RNA template.

[0504] 109. The method of any one of embodiments 102-107, wherein the donor template is a double-stranded DNA template.

[0505] 110. The method of any one of embodiments 102-109, wherein the donor template is inserted by homology directed repair (HDR).

[0506] 111. The method of any one of embodiments 85-110, wherein the target nucleic acid has been modified such that expression of the HRS or the DPR is reduced by at least about 10%, at least about 20%, at least about 30%, at least about 40%, at least about 50%, at least about 60%, at least about 70%, at least about 80%, or at least about 90% in comparison to target nucleic acid that has not been modified.

[0507] 112. The method of any one of embodiments 85-111, wherein the vector is administered to a subject at a therapeutically effective dose.

[0508] 113. The method of embodiment 112, wherein the subject is selected from the group consisting of mouse, rat, pig, and non-human primate.

[0509] 114. The method of embodiment 112, wherein the subject is a human.

[0510] 115. The method of any one of embodiments 85-114, wherein the vector is administered at a dose of at least about 1×108 vector genomes (vg), at least about 1×10⁹ vg, at least about 1×10¹⁰ vg at least about 1×10¹¹ vg, or at least about 1×10¹² vg, or at least about 1×10¹³ vg, or at least about 1×10¹⁴ vg, or at least about 1×10¹⁵ vg, or at least about 1×10¹⁶ vg.

[0511] 116. The method of any one of embodiments 111-115, wherein the vector is administered by a route of administration selected from the group consisting of subcutaneous, intradermal, intraneural, intranodal, intramedullary, intramuscular, intralumbar, intrathecal, subarachnoid, intraventricular, intracapsular, intravenous, intralymphatic, or intraperitoneal routes, wherein the administering method is injection, transfusion, or implantation.

[0512] 117. The method of any one of embodiments 85-116, comprising further contacting the target nucleic acid sequence with an additional CRISPR nuclease, or a polynucleotide encoding the additional CRISPR nuclease.

[0513] 118. The method of embodiment 117, wherein the additional CRISPR nuclease is a CasX protein having a sequence different from the CasX protein of any of the preceding embodiments.

[0514] 119. The method of embodiment 117, wherein the additional CRISPR nuclease is not a CasX protein.

[0515] 120. A method of altering a C9orf72 target nucleic acid sequence of a cell, comprising contacting said cell with:
[0516] a) the CasX:gNA system of any one of embodiments 1-69;
[0517] b) the nucleic acid of embodiment 70 or embodiment 71;
[0518] c) the vector of any one of embodiments 72-81;
[0519] d) the VLP of any one of embodiments 82-84; or
[0520] e) combinations thereof,
[0521] wherein said contacting results in modification of the C9orf72 target nucleic acid sequence by the CasX protein.

[0522] 121. The method of embodiment 120, wherein the cell has been modified such that expression of the HRS and/or the DPR is reduced by at least about 10%, at least about 20%, at least about 30%, at least about 40%, at least about 50%, at least about 60%, at least about 70%, at least about 80%, or at least about 90% in comparison to a cell that has not been modified.

[0523] 122. The method of embodiment 120 or embodiment 121, wherein the cell has been modified such that the cell does not express a detectable level of a dipeptide repeat protein (DPR).

[0524] 123. A population of cells modified by the method of embodiment 120 or embodiment 121, wherein the cells have been modified such that at least 10%, at least about 20%, at least about 30%, at least about 40%, at least about 50%, at least about 60%, at least about 70%, at least about 80%, or at least about 90% of the modified cells do not express a detectable level of DPR.

[0525] 124. The population of cells of embodiment 123, wherein the cell is a non-primate mammalian cell, a non-human primate cell, or a human cell.

[0526] 125. The population of cells of embodiment 123 or embodiment 124, wherein the cells are selected from the group consisting of Purkinje cell, frontal cortex neuron, motor cortex neuron, hippocampus neuron, cerebellum neuron, upper motor neuron, spinal cord neuron, spinal cord motor neuron, glial cell, and astrocytes.

[0527] 126. A method of treating a C9orf72-related disorder in a subject in need thereof, comprising modifying a C9orf72 gene in a cell of the subject, the modifying comprising contacting said cell with;
[0528] a. CasX:gNA system of any one of embodiments 1-69;
[0529] b. the nucleic acid of embodiment 70 or embodiment 71;
[0530] c. the vector as in any one of embodiments 72-81;
[0531] d. the VLP of any one of embodiments 82-84; or
[0532] e. combinations thereof,
[0533] wherein said contacting results in modification of the C9orf72 target nucleic acid sequence by the CasX protein.

[0534] 127. The method of embodiment 126, wherein the C9orf72-related disorder is amyotrophic lateral sclerosis (ALS) or frontotemporal dementia (FTD).

[0535] 128. The CasX:gNA system of embodiment 126, wherein the targeting sequence of the gNA is complementary to a sequence that is 5′ to the HRS of the C9orf72 gene.

[0536] 129. The method of any one of embodiments 126-128, further comprising a second gNA or a nucleic acid encoding the second gNA, wherein the second gNA has a targeting sequence complementary to a different or overlapping portion of the target nucleic acid sequence compared to the gNA of embodiment 126.

[0537] 130. The CasX:gNA system of embodiment 129, wherein the targeting sequence of the second gNA is complementary to a sequence in intron 1 and is 3′ to the HRS of the C9orf72 gene.

[0538] 131. The method of any one of embodiments 126-130, wherein the modifying introduces one or more mutations in the C9orf72 gene, or wherein expression of the HRS and/or the DPR is reduced by at least about 10%, at least about 20%, at least about 30%, at least about 40%, at least about 50%, at least about 60%, at least about 70%, at least about 80%, or at least about 90% in comparison to a cell that has not been modified.

[0539] 132. The method of any one of embodiments 126-130, wherein the method comprises contacting the cell with the donor template of any one of embodiments 61-69.

[0540] 133. The method of any one of embodiments 126-132, wherein the cell is selected from the group consisting of a Purkinje cell, frontal cortex neuron, motor cortex neuron, hippocampus neuron, cerebellum neuron, upper motor neuron, spinal cord neuron, spinal cord motor neuron, glial cell, and astrocytes.

[0541] 134. The method of any one of embodiments 126-133, wherein the subject is selected from the group consisting of mouse, rat, pig, non-human primate, and human.

[0542] 135. The method of embodiment 134, wherein the subject is a human.

[0543] 136. The method of any one of embodiments 126-135, wherein the vector is administered to a subject at a therapeutically effective dose.

[0544] 137. The method of any one of embodiments 126-136, wherein the vector is administered to the subject at a dose of at least about 1×10¹⁰ vector genomes (vg), or at least about 1×10¹¹ vg, or at least about 1×10¹² vg, or at least about 1×10¹³ vg, or at least about 1×10¹⁴ vg, or at least about 1×10¹⁵ vg, or at least about 1×10¹⁶ vg.

[0545] 138. The method of any one of embodiments 126-136, wherein the vector is administered by a route of administration selected from the group consisting of subcutaneous, intradermal, intraneural, intranodal, intramedullary, intramuscular, intralumbar, intrathecal, subarachnoid, intraventricular, intracapsular, intravenous, intralymphatic, or intraperitoneal routes, wherein the administering method is injection, transfusion, or implantation.

[0546] 139. The method of any one of embodiments 126-138, comprising further contacting the target nucleic acid sequence with an additional CRISPR nuclease, or a polynucleotide encoding the additional CRISPR protein.

[0547] 140. The method of embodiment 139, wherein the additional CRISPR nuclease is a CasX protein having a sequence different from the CasX of any of the preceding embodiments.

[0548] 141. The method of embodiment 140, wherein the additional CRISPR nuclease is not a CasX protein.

[0549] 142. The method of any one of embodiments 126-141, wherein the method further comprises administering a chemotherapeutic agent.

[0550] 143. The method of any one of embodiments 126-142, wherein the method results in improvement in at least one clinically-relevant parameter selected from the group consisting of neuronal cell death, neuroinflammation, TDP-43 related pathology, axonal and neuromuscular junction (NMJ) abnormalities, dendritic spine density changes at prefrontal cortex, electrophysiological deficits in neonatal cortical neurons, change from baseline in percent of predicted slow vital capacity (SVC), change from baseline in muscle strength, change from baseline in bulbar strength, ALS Functional Rating Scale (ALSFRS-(R)), combined assessment of function and survival, duration of response, time to death, time to tracheostomy, time to persistent assisted ventilation (DTP), forced vital capacity (% FVC); manual muscle test, maximum voluntary isometric contraction, duration of response, progression-free survival, time to progression of disease, and time-to-treatment failure.

[0551] 144. The method of any one of embodiments 126-142, wherein the method results in improvement in at least two clinically-relevant parameters selected from the group consisting of neuronal cell death, neuroinflammation, TDP-43 related pathology, axonal and neuromuscular junction (NMJ) abnormalities, dendritic spine density changes at prefrontal cortex, electrophysiological deficits in neonatal cortical neurons, change from baseline in percent of predicted slow vital capacity (SVC), change from baseline in muscle strength, change from baseline in bulbar strength, ALS Functional Rating Scale (ALSFRS-(R)), combined assessment of function and survival, duration of response, time to death, time to tracheostomy, time to persistent assisted ventilation (DTP), forced vital capacity (% FVC); manual muscle test, maximum voluntary isometric contraction, duration of response, progression-free survival, time to progression of disease, and time-to-treatment failure.

### EXAMPLES

### Example 1: Creation, Expression and Purification of CasX Stx2

### 1. Growth and Expression

[0552] An expression construct for CasX Stx2 (also referred to herein as CasX2), derived from Planctomycetes (having the CasX amino acid sequence of SEQ ID NO: 2 and encoded by the sequence in Table 5, below), was constructed from gene fragments (Twist Biosciences) that were codon optimized for E. coli. The assembled construct contains a TEV-cleavable, C-terminal, TwinStrep tag and was cloned into a pBR322-derivative plasmid backbone containing an ampicillin resistance gene. The expression construct was transformed into chemically competent BL21* (DE3) E. coli and a starter culture was grown overnight in LB broth supplemented with carbenicillin at 37° C., 200 RPM, in UltraYield Flasks (Thomson Instrument Company). The following day, this culture was used to seed expression cultures at a 1:100 ratio (starter culture:expression culture). Expression cultures were Terrific Broth (Novagen) supplemented with carbenicillin and grown in UltraYield flasks at 37° C., 200 RPM. Once the cultures reached an optical density (OD) of 2, they were chilled to 16° C. and IPTG (isopropyl β-D-1-thiogalactopyranoside) was added to a final concentration of 1 mM, from a 1 M stock. The cultures were induced at 16° C., 200 RPM for 20 hours before being harvested by centrifugation at 4,000×g for 15 minutes, 4° C. The cell paste was weighed and resuspended in lysis buffer (50 mM HEPES-NaOH, 250 mM NaCl, 5 mM MgCl₂, 1 mM TCEP, 1 mM benzamidine-HCL, 1 mM PMSF, 0.5% CHAPS, 10% glycerol, pH 8) at a ratio of 5 mL of lysis buffer per gram of cell paste. Once resuspended, the sample was frozen at −80° C. until purification.

TABLE 5
DNA sequence of CasX Stx2 construct

| Construct | DNA Sequence |
|---|---|
| SV40 NLS-CasX- | ATGGCTCCGAAGAAGAAGCGAAAGGTCAGCCAGGAAATTAAACGCATCA |
| SV40 NLS-TEV | ACAAGATCCGCCGTCGTCTGGTAAAAGACAGCAATACGAAAAAAGCCGG |
| cleavage site- | AAAAACCGGTCCGATGAAAACGCTGCTGGTGCGCGTGATGACGCCGGAT |
| TwinStrep tag | CTCCGCGAACGTCTTGAGAATTTGCGTAAGAAACCTGAAAATATTCCGC |
| | AACCGATTTCTAACACCTCGCGCGCCAATCTGAATAAACTGCTGACCGA |
| | TTACACCGAAATGAAGAAAGCGATTCTGCACGTTTACTGGGAAGAGTTC |
| | CAGAAAGACCCGGTCGGTCTGATGAGCCGCGTTGCGCAACCTGCGCCGA |
| | AAAATATCGATCAGCGCAAGTTAATCCCGGTTAAAGATGGTAATGAACG |
| | TTTAACCTCCAGCGGCTTTGCCTGCAGTCAGTGCTGCCAGCCACTTTAT |
| | GTTTATAAACTTGAACAGGTTAACGATAAAGGGAAACCCCATACCAATT |
| | ATTTCGGCCGCTGCAATGTCAGCGAACATGAACGCCTGATTTTGTTAAG |
| | CCCGCATAAACCGGAAGCGAATGACGAACTGGTGACCTATTCCCTGGGT |
| | AAATTTGGTCAGCGGGCGCTGGATTTTTACAGCATTCATGTGACGCGGG |
| | AAAGTAACCATCCGGTAAAGCCACTGGAACAAATCGGCGGTAACAGCTG |
| | CGCCTCTGGCCCGGTTGGCAAAGCGCTTAGCGATGCCTGTATGGGCGCG |
| | GTGGCGAGCTTTCTGACAAAATACCAGGATATTATCCTGGAGCATCAGA |
| | AGGTGATCAAAAAGAACGAGAAACGTCTGGCAAATTTAAAGGATATTGC |
| | CTCCGCTAACGGCCTGGCGTTCCCGAAGATTACCTTACCGCCGCAGCCG |
| | CACACCAAAGAAGGTATCGAAGCGTATAACAACGTTGTTGCCCAGATCG |
| | TCATCTGGGTGAATCTCAACCTGTGGCAAAAACTGAAAATTGGTCGTGA |
| | TGAAGCAAAACCGTTGCAGCGACTGAAAGGATTCCCGTCGTTTCCGCTG |
| | GTTGAACGACAGGCGAACGAAGTGGATTGGTGGGATATGGTTTGTAACG |
| | TCAAAAAATTGATCAACGAAAAAAAGGAAGATGGCAAAGTTTTCTGGCA |
| | AAATCTGGCGGGTTACAAACGTCAGGAGGCGTTGCTTCCGTATCTCTCT |
| | TCAGAAGAAGATCGCAAAAAAGGCAAGAAGTTTGCTCGCTATCAGTTTG |
| | GCGATTTATTACTGCATCTGGAAAAAAAACACGGCGAAGACTGGGGCAA |
| | AGTGTACGATGAAGCCTGGGAGCGTATCGACAAAAAAGTGGAAGGTTTG |
| | TCGAAACATATTAAACTCGAAGAAGAGCGCCGCAGTGAAGATGCGCAGT |
| | CAAAAGCAGCGCTGACGGACTGGTTACGTGCGAAAGCCAGTTTTGTGAT |
| | TGAAGGATTAAAAGAAGCTGATAAAGATGAATTTTGCCGTTGCGAACTG |
| | AAACTGCAAAAATGGTATGGCGACCTGCGCGGCAAACCGTTCGCCATTG |
| | AGGCAGAAAATAGCATCCTTGATATCTCCGGTTTCAGCAAACAATATAA |
| | CTGCGCGTTTATTTGGCAGAAAGACGGCGTGAAAAAGCTTAACCTGTAT |
| | CTGATCATTAACTATTTTAAAGGCGGGAAACTGCGTTTCAAGAAAATCA |
| | AGCCGGAAGCATTTGAAGCCAATCGTTTTTATACCGTTATTAATAAAAA |
| | AAGCGGTGAAATCGTGCCGATGGAAGTTAATTTTAACTTTGATGATCCG |
| | AACTTGATTATTCTGCCGCTGGCATTCGGTAAACGGCAGGGCCGTGAGT |
| | TTATCTGGAACGACCTGTTATCGCTGGAAACGGGCAGCCTGAAATTAGC |
| | CAACGGTCGCGTCATTGAAAAAACGCTCTACAACCGCCGCACCCGCCAG |
| | GATGAGCCGGCACTGTTTGTCGCGCTGACCTTTGAACGGCGTGAAGTCC |
| | TCGATAGCAGCAACATCAAACCAATGAACCTTATCGGTATTGATCGTGG |
| | TGAAAACATTCCTGCCGTTATCGCCCTGACTGATCCAGAAGGCTGCCCG |
| | CTTTCTCGCTTCAAAGATTCACTGGGCAACCCGACCCATATCCTCCGTA |
| | TTGGCGAGAGCTACAAAGAGAAACAGCGTACCATTCAGGCAGCCAAAGA |
| | AGTGGAGCAGCGTCGCGCGGGCGGCTATAGCCGTAAATATGCCAGCAAA |
| | GCTAAAAACCTGGCGGATGACATGGTGCGTAACACGGCGCGCGATTTGC |
| | TGTACTACGCCGTCACCCAGGACGCGATGCTGATTTTTGAGAACCTCTC |
| | CCGCGGTTTTGGGCGTCAGGGTAAACGCACGTTTATGGCGGAACGCCAG |
| | TATACGCGTATGGAGGACTGGCTGACCGCGAAGCTGGCCTATGAAGGCT |
| | TGCCGTCTAAAACTTACCTGAGCAAGACCCTGGCTCAGTACACCAGTAA |
| | AACCTGTAGTAATTGCGGCTTTACCATCACCAGCGCCGATTATGACCGC |
| | GTGCTGGAAAAGCTGAAGAAAACCGCCACCGGCTGGATGACCACCATCA |
| | ATGGTAAAGAGCTTAAAGTCGAAGGGCAGATTACTTATTACAACCGTTA |
| | TAAGCGGCAAAACGTGGTGAAAGATCTGTCGGTTGAGCTGGACCGTTTG |
| | TCTGAAGAAAGCGTGAACAATGATATCAGCTCCTGGACCAAAGGTCGTT |
| | CCGGCGAAGCGTTAAGTCTGTTGAAAAAGCGCTTTAGCCATCGCCCGGT |
| | GCAGGAAAAATTCGTTTGCCTGAACTGTGGCTTCGAAACCCACGCCGAC |
| | GAGCAAGCGGCGCTCAATATTGCGCGTAGCTGGCTGTTCCTGCGCAGCC |
| | AGGAATATAAAAAATATCAAACCAACAAAACAACTGGCAATACCGACAA |
| | GCGTGCCTTTGTTGAAACCTGGCAGAGCTTCTATCGCAAAAAACTGAAA |
| | GAGGTCTGGAAACCGGCGGTAGCGCCAAAGAAAAAACGCAAAGTGAGCG |
| | AAAATCTTTATTTTCAAGGTAGCGCATGGAGTCATCCTCAATTCGAGAA |
| | AGGTGGAGGTTCTGGCGGTGGATCGGGAGGTTCAGCGTGGAGCCACCCG |
| | CAGTTCGAAAAAGGAAGGGGATCCGGCTGCTAA (SEQ ID NO: |
| | 229) |

### 2. Purification

[0553] Frozen samples were thawed overnight at 4° C. with magnetic stirring. The viscosity of the resulting lysate was reduced by sonication and lysis was completed by homogenization in three passes at 17 k PSI using an Emulsiflex C3 (Avestin). Lysate was clarified by centrifugation at 50,000×g, 4° C., for 30 minutes and the supernatant was collected. The clarified supernatant was applied to a Heparin 6 Fast Flow column (GE Life Sciences) by gravity flow. The column was washed with 5 CV of Heparin Buffer A (50 mM HEPES-NaOH, 250 mM NaCl, 5 mM MgCl₂, 1 mM TCEP, 10% glycerol, pH 8), then with 5 CV of Heparin Buffer B (Buffer A with the NaCl concentration adjusted to 500 mM). Protein was eluted with 5 CV of Heparin Buffer C (Buffer A with the NaCl concentration adjusted to 1 M), collected in fractions. Fractions were assayed for protein by Bradford Assay and protein-containing fractions were pooled. The pooled heparin eluate was applied to a Strep-Tactin XT Superflow column (IBA Life Sciences) by gravity flow. The column was washed with 5 CV of Strep Buffer (50 mM HEPES-NaOH, 500 mM NaCl, 5 mM MgCl₂, 1 mM TCEP, 10% glycerol, pH 8). Protein was eluted from the column using 5 CV of Strep Buffer with 50 mM D-Biotin added and collected in fractions. CasX-containing fractions were pooled, concentrated at 4° C. using a 30 kDa cut-off spin concentrator, and purified by size exclusion chromatography on a Superdex 200 pg column (GE Life Sciences). The column was equilibrated with SEC Buffer (25 mM sodium phosphate, 300 mM NaCl, 1 mM TCEP, 10% glycerol, pH 7.25) operated by an AKTA Pure FPLC system (GE Life Sciences). CasX-containing fractions that eluted at the appropriate molecular weight were pooled, concentrated at 4° C. using a 30 kDa cut-off spin concentrator, aliquoted, and snap-frozen in liquid nitrogen before being stored at −80° C.

### 3. Results

[0554] Samples from throughout the purification were resolved by SDS-PAGE and visualized by colloidal Coomassie staining, as shown in FIG. 1 and FIG. 3. In FIG. 1, the lanes, from left to right, are: molecular weight standards, Pellet: insoluble portion following cell lysis, Lysate: soluble portion following cell lysis, Flow Thru: protein that did not bind the Heparin column, Wash: protein that eluted from the column in wash buffer, Elution: protein eluted from the heparin column with elution buffer, Flow Thru: Protein that did not bind the StrepTactinXT column, Elution: protein eluted from the StrepTactin XT column with elution buffer, Injection: concentrated protein injected onto the s200 gel filtration column, Frozen: pooled fractions from the s200 elution that have been concentrated and frozen. In FIG. 3, the lanes from right to left, are the injection (sample of protein injected onto the gel filtration column) molecular weight markers, lanes 3-9 are samples from the indicated elution volumes. Results from the gel filtration are shown in FIG. 2. The 68.36 mL peak corresponds to the apparent molecular weight of CasX and contained the majority of CasX protein. The average yield was 0.75 mg of purified CasX protein per liter of culture, with 75% purity, as evaluated by colloidal Coomassie staining.

### Example 2: CasX Construct 119, 438 and 457

[0555] In order to generate the CasX 119, 438, and 457 constructs (sequences in Table 6), the codon-optimized CasX 37 construct (based on the CasX Stx2 construct of Example 1, encoding Planctomycetes CasX SEQ ID NO:2, with a A708K substitution and a [P793] deletion with fused NLS, and linked guide and non-targeting sequences) was cloned into a mammalian expression plasmid (pStX; see FIG. 4) using standard cloning methods. To build CasX 119, the CasX 37 construct DNA was PCR amplified in two reactions using Q5 DNA polymerase (New England BioLabs Cat #M0491L) according to the manufacturer's protocol, using primers oIC539 and oIC88 as well as oIC87 and oIC540 respectively (see FIG. 5). To build CasX 457, the CasX 365 construct DNA was PCR amplified in four reactions using Q5 DNA polymerase using primers oIC539 and oIC212, oIC211 and oIC376, oIC375 and oIC551, and oIC550 and oIC540 respectively. To build CasX 438, the CasX 119 construct DNA was PCR amplified in four reactions using Q5 DNA polymerase using primers oIC539 and oIC689, oIC688 and oIC376, oIC375 and oIC551, and oIC550 and oIC540 respectively. The resulting PCR amplification products were then purified using Zymoclean DNA clean and concentrator (Zymo Research Cat #4014) according to the manufacturer's protocol. The pStX backbone was digested using XbaI and SpeI in order to remove the 2931 base pair fragment of DNA between the two sites in plasmid pStx34. The digested backbone fragment was purified by gel extraction from a 1% agarose gel (Gold Bio Cat #A-201-500) using Zymoclean Gel DNA Recovery Kit (Zymo Research Cat #D4002) according to the manufacturer's protocol. The three fragments were then pieced together using Gibson assembly (New England BioLabs Cat #E2621S) following the manufacturer's protocol. Assembled products in the pStx34 were transformed into chemically-competent or electro-competent Turbo Competent E. coli bacterial cells, plated on LB-Agar plates (LB: Teknova Cat #L9315, Agar: Quartzy Cat #214510) containing carbenicillin. Individual colonies were picked and miniprepped using Qiagen Qiaprep spin Miniprep Kit (Qiagen Cat #27104) following the manufacturer's protocol. The resultant plasmids were sequenced using Sanger sequencing to ensure correct assembly. pStX34 includes an EF-1α promoter for the protein as well as a selection marker for both puromycin and carbenicillin. Sequences encoding the targeting sequences that target the gene of interest were designed based on CasX PAM locations. Targeting sequence DNA was ordered as single-stranded DNA (ssDNA) oligos (Integrated DNA Technologies) consisting of the targeting sequence and the reverse complement of this sequence. These two oligos were annealed together and cloned into pStX individually or in bulk by Golden Gate assembly using T4 DNA Ligase (New England BioLabs Cat #M0202L) and an appropriate restriction enzyme for the plasmid. Golden Gate products were transformed into chemically or electro-competent cells such as NEB Turbo competent E. coli (NEB Cat #C2984I), plated on LB-Agar plates containing carbenicillin. Individual colonies were picked and miniprepped using Qiagen Qiaprep spin Miniprep Kit (Qiagen Cat #27104) and following the manufacturer's protocol. The resultant plasmids were sequenced using Sanger sequencing to ensure correct ligation. SaCas9 and SpyCas9 control plasmids were prepared similarly to pStX plasmids described above, with the protein and guide regions of pStX exchanged for the respective protein and guide. Targeting sequences for SaCas9 and SpyCas9 were either obtained from the literature or were rationally designed according to established methods. The expression and recovery of the CasX 119 and 457 proteins was performed using the general methodologies of Example 1 (however the DNA sequences were codon optimized for expression in E. coli). The results of analytical assays for CasX 119 are shown in FIGS. 6-8. The average yield of the CasX 119 was 1.56 mg of purified CasX protein per liter of culture at 75% purity, as evaluated by colloidal Coomassie staining. FIG. 6 shows an SDS-PAGE gel of purification samples, visualized on a Bio-Rad Stain-Free™ gel, as described. The lanes, from left to right, are: Pellet: insoluble portion following cell lysis, Lysate: soluble portion following cell lysis, Flow Thru: protein that did not bind the Heparin column, Wash: protein that eluted from the column in wash buffer, Elution: protein eluted from the heparin column with elution buffer, Flow Thru: Protein that did not bind the StrepTactinXT column, Elution: protein eluted from the StrepTactin XT column with elution buffer, Injection: concentrated protein injected onto the s200 gel filtration column, Frozen: pooled fractions from the s200 elution that have been concentrated and frozen.

[0556] FIG. 7 shows the chromatogram of Superdex 200 16/600 pg Gel Filtration, as described. Gel filtration run of CasX variant 119 protein plotted as 280 nm absorbance against elution volume. The 65.77 mL peak corresponds to the apparent molecular weight of CasX variant 119 and contained the majority of CasX variant 119 protein. FIG. 8 shows an SDS-PAGE gel of gel filtration samples, stained with colloidal Coomassie, as described. Samples from the indicated fractions were resolved by SDS-PAGE and stained with colloidal Coomassie. From right to left, Injection: sample of protein injected onto the gel filtration column, molecular weight markers, lanes 3-10: samples from the indicated elution volumes.

TABLE 6
Sequences of CasX 119, 438 and 457

| | DNA | |
|---|---|---|
| Construct | Sequence | Amino Acid Sequence |
| CasX | (SEQ ID | QEIKRINKIRRRLVKDSNTKKAGKTGPMKTLLVRVMTPDLRERLEN |
| 119 | NO: 230) | LRKKPENIPQPISNTSRANLNKLLTDYTEMKKAILHVYWEEFQKDP |
| | | VGLMSRVAQPAPKNIDQRKLIPVKDGNERLTSSGFACSQCCQPLYV |
| | | YKLEQVNDKGKPHTNYFGRCNVSEHERLILLSPHKPEANDELVTYS |
| | | LGKFGQRALDFYSIHVTRESNHPVKPLEQIGGNSCASGPVGKALSD |
| | | ACMGAVASFLTKYQDIILEHQKVIKKNEKRLANLKDIASANGLAFP |
| | | KITLPPQPHTKEGIEAYNNVVAQIVIWVNLNLWQKLKIGRDEAKPL |
| | | QRLKGFPSFPLVERQANEVDWWDMVCNVKKLINEKKEDGKVFWQNL |
| | | AGYKRQEALRPYLSSEEDRKKGKKFARYQFGDLLLHLEKKHGEDWG |
| | | KVYDEAWERIDKKVEGLSKHIKLEEERRSEDAQSKAALTDWLRAKA |
| | | SFVIEGLKEADKDEFCRCELKLQKWYGDLRGKPFAIEAENSILDIS |
| | | GFSKQYNCAFIWQKDGVKKLNLYLIINYFKGGKLRFKKIKPEAFEA |
| | | NRFYTVINKKSGEIVPMEVNENFDDPNLIILPLAFGKRQGREFIWN |
| | | DLLSLETGSLKLANGRVIEKTLYNRRTRQDEPALFVALTFERREVL |
| | | DSSNIKPMNLIGIDRGENIPAVIALTDPEGCPLSRFKDSLGNPTHI |
| | | LRIGESYKEKQRTIQAKKEVEQRRAGGYSRKYASKAKNLADDMVRN |
| | | TARDLLYYAVTQDAMLIFENLSRGFGRQGKRTEMAERQYTRMEDWL |
| | | TAKLAYEGLSKTYLSKTLAQYTSKTCSNCGFTITSADYDRVLEKLK |
| | | KTATGWMTTINGKELKVEGQITYYNRYKRQNVVKDLSVELDRLSEE |
| | | SVNNDISSWTKGRSGEALSLLKKRFSHRPVQEKFVCLNCGFETHAD |
| | | EQAALNIARSWLFLRSQEYKKYQTNKTTGNTDKRAFVETWQSFYRK |
| | | KLKEVWKPAV (SEQ ID NO: 233) |
| CasX | (SEQ ID | QEIKRINKIRRRLVKDSNTKKAGKTGPMKTLLVRVMTPDLRERLEN |
| 457 | NO: 231) | LRKKPENIPQPISNTSRANLNKLLTDYTEMKKAILHVYWEEFQKDP |
| | | VGLMSRVAQPAPKNIDQRKLIPVKDGNERLTSSGFACSQCCQPLYV |
| | | YKLEQVNDKGKPHTNYFGRCNVSEHERLILLSPHKPEANDELVTYS |
| | | LGKFGQRALDFYSIHVTRESNHPVKPLEQIGGNSCASGPVGKALSD |
| | | ACMGAVASFLTKYQDIILEHKKVIKKNEKRLANLKDIASANGLAFP |
| | | KITLPPQPHTKEGIEAYNNVVAQIVIWVNLNLWQKLKIGRDEAKPL |
| | | QRLKGFPSFPLVERQANEVDWWDMVCNVKKLINEKKEDGKVFWQNL |
| | | AGYKRQEALRPYLSSPEDRKKGKKFARYQLGDLLLHLEKKHGEDWG |
| | | KVYDEAWERIDKKVEGLSKHIKLEEERRSEDAQSKAALTDWLRAKA |
| | | SFVIEGLKEADKDEFCRCELKLQKWYGDLRGKPFAIEAENSILDIS |
| | | GFSKQYNCAFIWQKDGVKKLNLYLIINYFKGGKLRFKKIKPEAFEA |
| | | NRFYTVINKKSGEIVPMEVNENFDDPNLIILPLAFGKRQGREFIWN |
| | | DLLSLETGSLKLANGRVIEKPLYNRRTRQDEPALFVALTFERREVL |
| | | DSSNIKPMNLIGVDRGENIPAVIALTDPEGCPLSRFKDSLGNPTHI |
| | | LRIGESYKEKQRTIQAKKEVEQRRAGGYSRKYASKAKNLADDMVRN |
| | | TARDLLYYAVTQDAMLIFENLSRGFGRQGKRTFMAERQYTRMEDWL |
| | | TAKLAYEGLSKTYLSKTLAQYTSKTCSNCGFTITSADYDRVLEKLK |
| | | KTATGWMTTINGKELKVEGQITYYNRRKRQNVVKDLSVELDRLSEE |
| | | SVNNDISSWTKGRSGEALSLLKKRFSHRPVQEKFVCLNCGFETHAD |
| | | EQAALNIARSWLFLRSQEYKKYQTNKTTGNTDKRAFVETWQSFYRK |
| | | KLKEVWKPAV (SEQ ID NO: 234) |
| CasX | (SEQ ID | QEIKRINKIRRRLVKDSNTKKAGKTGPMKTLLVRVMTPDLRERLEN |
| 438 | NO: 232) | LRKKPENIPQPISNTSRANLNKLLTDYTEMKKAILHVYWEEFQKDP |
| | | VGLMSRVAQPAPKNIDQRKLIPVKDGNERLTSSGFACSQCCQPLYV |
| | | YKLEQVNDKGKPHTNYFGRCNVSEHERLILLSPHKPEANDELVTYS |
| | | LGKFGQRALDFYSIHVTRESNHPVKPLEQIGGNSCASGPVGKALSD |
| | | ACMGAVASFLTKYQDIILEHQKVIKKNEKRLANLKDIASANGLAFP |
| | | KITLPPQPHTKEGIEAYNNVVAQIVIWVNLNLWQKLKIGRDEAKPL |
| | | QRLKGFPSFPLVERQANEVDWWDMVCNVKKLINEKKEDGKVFWQNL |
| | | AGYKRQEALRPYLSSEEDRKKGKKFARYQLGDLLKHLEKKHGEDWG |
| | | KVYDEAWERIDKKVEGLSKHIKLEEERRSEDAQSKAALTDWLRAKA |
| | | SFVIEGLKEADKDEFCRCELKLQKWYGDLRGKPFAIEAENSILDIS |
| | | GFSKQYNCAFIWQKDGVKKLNLYLIINYFKGGKLRFKKIKPEAFEA |
| | | NRFYTVINKKSGEIVPMEVNENFDDPNLIILPLAFGKRQGREFIWN |
| | | DLLSLETGSLKLANGRVIEKTLYNRRTRQDEPALFVALTFERREVL |
| | | DSSNIKPMNLIGVDRGENIPAVIALTDPEGCPLSRFKDSLGNPTHI |
| | | LRIGESYKEKQRTIQAKKEVEQRRAGGYSRKYASKAKNLADDMVRN |
| | | TARDLLYYAVTQDAMLIFENLSRGFGRQGKRTEMAERQYTRMEDWL |
| | | TAKLAYEGLSKTYLSKTLAQYTSKTCSNCGFTITSADYDRVLEKLK |
| | | KTATGWMTTINGKELKVEGQITYYNRRKRQNVVKDLSVELDRLSEE |
| | | SVNNDISSWTKGRSGEALSLLKKRFSHRPVQEKFVCLNCGFETHAD |
| | | EQAALNIARSWLFLRSQEYKKYQTNKTTGNTDKRAFVETWQSFYRK |
| | | KLKEVWKPAV (SEQ ID NO: 235) |

### Example 3: CasX Construct 488 and 491

[0557] In order to generate the CasX 488 construct (sequences in Table 7), the codon-optimized CasX 119 construct (based on the CasX Stx2 construct of Example 1, encoding Planctomycetes CasX SEQ ID NO:2, with a A708K substitution, a L379R substitution, and a [P793] deletion with fused NLS, and linked guide and non-targeting sequences) was cloned into a mammalian expression plasmid (pStX; see FIG. 4) using standard cloning methods. Construct CasX 1 (based on the CasX Stx1 construct of Example 1, encoding CasX SEQ TD NO: 1) was cloned into a destination vector using standard cloning methods. To build CasX 488, the CasX 119 construct DNA was PCR amplified using Q5 DNA polymerase using primers oIC765 and oIC762 (see FIG. 5). The CasX 1 construct was PCR amplified using Q5 DNA polymerase using primers oIC766 and oIC784. The PCR products were purified by gel extraction from a 1% agarose gel using Zymoclean Gel DNA Recovery Kit. The two fragments were then pieced together using Gibson assembly. Assembled products in pStx1 were transformed into chemically-competent Turbo Competent E. coli bacterial cells, plated on LB-Agar plates containing kanamycin. Individual colonies were picked and miniprepped using Qiagen Qiaprep spin Miniprep Kit. The resultant plasmids were sequenced using Sanger sequencing to ensure correct assembly. The correct clones were then subcloned into the mammalian expression vector pStx34 using restriction enzyme cloning. The pStx34 backbone and the CasX 488 clone in pStx1 were digested with XbaI and BamHI respectively. The digested backbone and insert fragments were purified by gel extraction from a 1% agarose gel using Zymoclean Gel DNA Recovery Kit. The clean backbone and insert were then ligated together using T4 Ligase (New England Biolabs Cat #M0202L) according to the manufacturer's protocol. The ligated product was transformed into chemically-competent Turbo Competent E. coli bacterial cells, plated on LB-Agar plates containing carbenicillin. Individual colonies were picked and miniprepped using Qiagen Qiaprep spin Miniprep Kit. The resultant plasmids were sequenced using Sanger sequencing to ensure correct assembly.

[0558] In order to generate CasX 491 (sequences in Table 7), the CasX 484 construct DNA was PCR amplified using Q5 DNA polymerase using primers oIC765 and oIC762 (see FIG. 5). The CasX 1 construct was PCR amplified using Q5 DNA polymerase using primers oIC766 and oIC784. The PCR products were purified by gel extraction from a 1% agarose gel using Zymoclean Gel DNA Recovery Kit. The two fragments were then pieced together using Gibson assembly. Assembled products in pStx1 were transformed into chemically-competent Turbo Competent E. coli bacterial cells, plated on LB-Agar plates containing kanamycin. Individual colonies were picked and miniprepped using Qiagen Qiaprep spin Miniprep Kit. The resultant plasmids were sequenced using Sanger sequencing to ensure correct assembly. The correct clones were then subcloned into the mammalian expression vector pStx34 using restriction enzyme cloning. The pStx34 backbone and the CasX 491 clone in pStx1 were digested with XbaI and BamHI respectively. The digested backbone and insert fragments were purified by gel extraction from a 1% agarose gel using Zymoclean Gel DNA Recovery Kit. The clean backbone and insert were then ligated together using T4 Ligase (New England Biolabs Cat #M0202L) according to the manufacturer's protocol. The ligated product was transformed into chemically-competent Turbo Competent E. coli bacterial cells, plated on LB-Agar plates containing carbenicillin. Individual colonies were picked and miniprepped using Qiagen Qiaprep spin Miniprep Kit. The resultant plasmids were sequenced using Sanger sequencing to ensure correct assembly. pStX34 includes an EF-1α promoter for the protein as well as a selection marker for both puromycin and carbenicillin. Sequences encoding the targeting sequences that target the gene of interest were designed based on CasX PAM locations. Targeting sequence DNA was ordered as single-stranded DNA (ssDNA) oligos (Integrated DNA Technologies) consisting of the targeting sequence and the reverse complement of this sequence. These two oligos were annealed together and cloned into pStX individually or in bulk by Golden Gate assembly using T4 DNA Ligase and an appropriate restriction enzyme for the plasmid. Golden Gate products were transformed into chemically or electro-competent cells such as NEB Turbo competent E. coli, plated on LB-Agar plates containing carbenicillin. Individual colonies were picked and miniprepped using Qiagen Qiaprep spin Miniprep Kit. The resultant plasmids were sequenced using Sanger sequencing to ensure correct ligation. SaCas9 and SpyCas9 control plasmids were prepared similarly to pStX plasmids described above, with the protein and guide regions of pStX exchanged for the respective protein and guide. Targeting sequences for SaCas9 and SpyCas9 were either obtained from the literature or were rationally designed according to established methods. The expression and recovery of the CasX constructs was performed using the general methodologies of Example 1 and Example 2, with similar results obtained.

TABLE 7
Sequences of CasX 488 and 491

| | DNA | |
|---|---|---|
| Construct | Sequence | Amino Acid Sequence |
| CasX 488 | (SEQ ID | QEIKRINKIRRRLVKDSNTKKAGKTGPMKTLLVRVMTPDLRERLE |
| | NO: 236) | NLRKKPENIPQPISNTSRANLNKLLTDYTEMKKAILHVYWEEFQK |
| | | DPVGLMSRVAQPASKKIDQNKLKPEMDEKGNLTTAGFACSQCGQP |
| | | LFVYKLEQVSEKGKAYTNYFGRCNVAEHEKLILLAQLKPEKDSDE |
| | | AVTYSLGKFGQRALDFYSIHVTKESTHPVKPLAQIAGNRYASGPV |
| | | GKALSDACMGTIASFLSKYQDIIIEHQKVVKGNQKRLESLRELAG |
| | | KENLEYPSVTLPPQPHTKEGVDAYNEVIARVRMWVNLNLWQKLKL |
| | | SRDDAKPLLRLKGFPSFPLVERQANEVDWWDMVCNVKKLINEKKE |
| | | DGKVFWQNLAGYKRQEALRPYLSSEEDRKKGKKFARYQFGDLLLH |
| | | LEKKHGEDWGKVYDEAWERIDKKVEGLSKHIKLEEERRSEDAQSK |
| | | AALTDWLRAKASFVIEGLKEADKDEFCRCELKLQKWYGDLRGKPF |
| | | AIEAENSILDISGFSKQYNCAFIWQKDGVKKLNLYLIINYFKGGK |
| | | LRFKKIKPEAFEANRFYTVINKKSGEIVPMEVNENFDDPNLIILP |
| | | LAFGKRQGREFIWNDLLSLETGSLKLANGRVIEKTLYNRRTRQDE |
| | | PALFVALTFERREVLDSSNIKPMNLIGIDRGENIPAVIALTDPEG |
| | | CPLSRFKDSLGNPTHILRIGESYKEKQRTIQAKKEVEQRRAGGYS |
| | | RKYASKAKNLADDMVRNTARDLLYYAVTQDAMLIFENLSRGFGRQ |
| | | GKRTFMAERQYTRMEDWLTAKLAYEGLSKTYLSKTLAQYTSKTCS |
| | | NCGFTITSADYDRVLEKLKKTATGWMTTINGKELKVEGQITYYNR |
| | | YKRQNVVKDLSVELDRLSEESVNNDISSWTKGRSGEALSLLKKRF |
| | | SHRPVQEKFVCLNCGFETHADEQAALNIARSWLFLRSQEYKKYQT |
| | | NKTTGNTDKRAFVETWQSFYRKKLKEVWKPAV (SEQ ID NO: |
| | | 238) |
| CasX 491 | (SEQ ID | QEIKRINKIRRRLVKDSNTKKAGKTGPMKTLLVRVMTPDLRERLE |
| | NO: 237) | NLRKKPENIPQPISNTSRANLNKLLTDYTEMKKAILHVYWEEFQK |
| | | DPVGLMSRVAQPASKKIDQNKLKPEMDEKGNLTTAGFACSQCGQP |
| | | LFVYKLEQVSEKGKAYTNYFGRCNVAEHEKLILLAQLKPEKDSDE |
| | | AVTYSLGKFGQRALDFYSIHVTKESTHPVKPLAQIAGNRYASGPV |
| | | GKALSDACMGTIASFLSKYQDIIIEHQKVVKGNQKRLESLRELAG |
| | | KENLEYPSVTLPPQPHTKEGVDAYNEVIARVRMWVNLNLWQKLKL |
| | | SRDDAKPLLRLKGFPSFPLVERQANEVDWWDMVCNVKKLINEKKE |
| | | DGKVFWQNLAGYKRQEALRPYLSSEEDRKKGKKFARYQLGDLLLH |
| | | LEKKHGEDWGKVYDEAWERIDKKVEGLSKHIKLEEERRSEDAQSK |
| | | AALTDWLRAKASFVIEGLKEADKDEFCRCELKLQKWYGDLRGKPF |
| | | AIEAENSILDISGESKQYNCAFIWQKDGVKKLNLYLIINYFKGGK |
| | | LRFKKIKPEAFEANRFYTVINKKSGEIVPMEVNENFDDPNLIILP |
| | | LAFGKRQGREFIWNDLLSLETGSLKLANGRVIEKTLYNRRTRQDE |
| | | PALFVALTFERREVLDSSNIKPMNLIGVDRGENIPAVIALTDPEG |
| | | CPLSRFKDSLGNPTHILRIGESYKEKQRTIQAKKEVEQRRAGGYS |
| | | RKYASKAKNLADDMVRNTARDLLYYAVTQDAMLIFENLSRGFGRQ |
| | | GKRTEMAERQYTRMEDWLTAKLAYEGLSKTYLSKTLAQYTSKTCS |
| | | NCGFTITSADYDRVLEKLKKTATGWMITINGKELKVEGQITYYNR |
| | | YKRQNVVKDLSVELDRLSEESVNNDISSWTKGRSGEALSLLKKRF |
| | | SHRPVQEKFVCLNCGFETHADEQAALNIARSWLELRSQEYKKYQT |
| | | NKTTGNTDKRAFVETWQSFYRKKLKEVWKPAV (SEQ ID NO: |
| | | 239) |

### Example 4: Design and Generation of CasX Constructs 278-280, 285-288, 290, 291, 293, 300, 492, and 493

[0559] In order to generate the CasX 278-280, 285-288, 290, 291, 293, 300, 492, and 493 constructs (sequences in Table 8), the N- and C-termini of the codon-optimized CasX 119 construct (based on the CasX Stx37 construct of Example 2, encoding Planctomycetes CasX SEQ TD NO:2, with a A708K substitution and a [P793] deletion with fused NLS, and linked guide and non-targeting sequences) in a mammalian expression vector were manipulated to delete or add NLS sequences (sequences in Table 9). Constructs 278, 279, and 280 were manipulations of the N- and C-termini using only an SV40 NLS sequence. Construct 280 had no NLS on the N-terminus and added two SV40 NLS' on the C-terminus with a triple proline linker in between the two SV40 NLS sequences. Constructs 278, 279, and 280 were made by amplifying pStx34.119.174.NT with Q5 DNA polymerase using primers oIC527 and oIC528, oIC730 and oIC522, and oIC730 and oIC530 for the first fragments each and using oIC529 and oIC520, oIC519 and oIC731, and oIC529 and oIC731 to create the second fragments each. These fragments were purified by gel extraction from a 1% agarose gel using Zymoclean Gel DNA Recovery Kit. The respective fragments were cloned together using Gibson assembly. Assembled products in the pStx34 were transformed into chemically-competent Turbo Competent E. coli bacterial cells, plated on LB-Agar plates containing carbenicillin and incubated at 37° C. Individual colonies were picked and miniprepped using Qiagen Qiaprep spin Miniprep Kit. The resultant plasmids were sequenced using Sanger sequencing to ensure correct assembly. Sequences encoding the targeting sequences that target the gene of interest were designed based on CasX PAM locations. Targeting sequence DNA was ordered as single-stranded DNA (ssDNA) oligos (Integrated DNA Technologies) consisting of the targeting sequence and the reverse complement of this sequence. These two oligos were annealed together and cloned into pStX individually or in bulk by Golden Gate assembly using T4 DNA Ligase and an appropriate restriction enzyme for the plasmid. Golden Gate products were transformed into chemically- or electro-competent cells such as NEB Turbo competent E. coli, plated on LB-Agar plates containing carbenicillin and incubated at 37° C. Individual colonies were picked and miniprepped using Qiagen Qiaprep spin Miniprep Kit. The resultant plasmids were sequenced using Sanger sequencing to ensure correct ligation.

[0560] In order to generate constructs 285-288, 290, 291, 293, and 300, a nested PCR method was used for cloning. The backbone vector and PCR template used was construct pStx34 279.119.174.NT, having the CasX 119, guide 174, and non-targeting spacer. Construct 278 has the configuration SV40NLS-CasX119. Construct 279 has the configuration CasX119-SV40NLS. Construct 280 has the configuration CasX119-SV40NLS-PPP linker-SV40NLS. Construct 285 has the configuration CasX119-SV40NLS-PPP linker-SynthNLS3. Construct 286 has the configuration CasX119-SV40NLS-PPP linker-SynthNLS4. Construct 287 has the configuration CasX119-SV40NLS-PPP linker-SynthNLS5. Construct 288 has the configuration CasX119-SV40NLS-PPP linker-SynthNLS6. Constrict 290 has the configuration CasX119-SV40NLS-PPP linker-EGL-13 NLS. Construct 291 has the configuration CasX119-SV40NLS-PPP linker-c-Myc NLS. Construct 293 has the configuration CasX119-SV40NLS-PPP linker-Nucleolar RNA Helicase II NLS. Construct 300 has the configuration CasX119-SV40NLS-PPP linker-Influenza A protein NLS. Construct 492 has the configuration SV40NLS-CasX119-SV40NLS-PPP linker-SV40NLS. Construct 493 has the configuration SV40NLS-CasX119-SV40NLS-PPP linker-c-Myc NLS. Each variant had a set of three PCRs; two of which were nested, were purified by gel extraction, digested, and then ligated into the digested and purified backbone. Assembled products in the pStx34 were transformed into chemically-competent Turbo Competent E. coli bacterial cells, plated on LB-Agar plates containing carbenicillin and incubated at 37° C. Individual colonies were picked and miniprepped using Qiagen Qiaprep spin Miniprep Kit. The resultant plasmids were sequenced using Sanger sequencing to ensure correct assembly. Sequences encoding the targeting sequences that target the gene of interest were designed based on CasX PAM locations. Targeting sequence DNA was ordered as single-stranded DNA (ssDNA) oligos (Integrated DNA Technologies) consisting of the targeting sequence and the reverse complement of this sequence. These two oligos were annealed together and cloned into the resulting pStX individually or in bulk by Golden Gate assembly using T4 DNA Ligase and an appropriate restriction enzyme for the plasmid. Golden Gate products were transformed into chemically- or electro-competent cells such as NEB Turbo competent E. coli, plated on LB-Agar plates containing carbenicillin and incubated at 37° C. Individual colonies were picked and miniprepped using Qiagen Qiaprep spin Miniprep Kit. The resultant plasmids were sequenced using Sanger sequencing to ensure correct ligation.

[0561] In order to generate constructs 492 and 493, constructs 280 and 291 were digested using XbaI and BamHI (NEB #R0145S and NEB #R3136S) according to the manufacturer's protocol. Next, they were purified by gel extraction from a 1% agarose gel using Zymoclean Gel DNA Recovery Kit. Finally, they were ligated using T4 DNA ligase (NEB #M0202S) according to the manufacturer's protocol into the digested and purified pStx34.119.174.NT using XbaI and BamHI and Zymoclean Gel DNA Recovery Kit. Assembled products in the pStx34 were transformed into chemically-competent Turbo Competent E. coli bacterial cells, plated on LB-Agar plates containing carbenicillin and incubated at 37° C. Individual colonies were picked and miniprepped using Qiagen Qiaprep spin Miniprep Kit. The resultant plasmids were sequenced using Sanger sequencing to ensure correct assembly. Sequences encoding the targeting spacer sequences that target the gene of interest were designed based on CasX PAM locations. Targeting sequence DNA was ordered as single-stranded DNA (ssDNA) oligos (Integrated DNA Technologies) consisting of the targeting spacer sequence and the reverse complement of this sequence. These two oligos were annealed together and cloned into each pStX individually or in bulk by Golden Gate assembly using T4 DNA Ligase and an appropriate restriction enzyme for the respective plasmids. Golden Gate products were transformed into chemically- or electro-competent cells such as NEB Turbo competent E. coli plated on LB-Agar plates containing carbenicillin and incubated at 37° C. Individual colonies were picked and miniprepped using Qiagen Qiaprep spin Miniprep Kit. The resultant plasmids were sequenced using Sanger sequencing to ensure correct ligation. The plasmids were used to produce and recover CasX protein utilizing the general methodologies of Examples 1 and 2.

TABLE 8
CasX 278-280, 285-288, 290, 291, 293, 300, 492, and 493 sequences

| Construct | Amino Acid Sequence |
|---|---|
| 278 | MAPKKKRKVSRQEIKRINKIRRRLVKDSNTKKAGKTGPMKTLLVRVMTPDLRERL |
| | ENLRKKPENIPQPISNTSRANLNKLLTDYTEMKKAILHVYWEEFQKDPVGLMSRV |
| | AQPAPKNIDQRKLIPVKDGNERLTSSGFACSQCCQPLYVYKLEQVNDKGKPHTNY |
| | FGRCNVSEHERLILLSPHKPEANDELVTYSLGKFGQRALDFYSIHVTRESNHPVK |
| | PLEQIGGNSCASGPVGKALSDACMGAVASFLTKYQDIILEHQKVIKKNEKRLANL |
| | KDIASANGLAFPKITLPPQPHTKEGIEAYNNVVAQIVIWVNLNLWQKLKIGRDEA |
| | KPLQRLKGFPSFPLVERQANEVDWWDMVCNVKKLINEKKEDGKVFWQNLAGYKRQ |
| | EALRPYLSSEEDRKKGKKFARYQFGDLLLHLEKKHGEDWGKVYDEAWERIDKKVE |
| | GLSKHIKLEEERRSEDAQSKAALTDWLRAKASFVIEGLKEADKDEFCRCELKLQK |
| | WYGDLRGKPFAIEAENSILDISGFSKQYNCAFIWQKDGVKKLNLYLIINYFKGGK |
| | LRFKKIKPEAFEANRFYTVINKKSGEIVPMEVNFNEDDPNLIILPLAFGKRQGRE |
| | FIWNDLLSLETGSLKLANGRVIEKTLYNRRTRQDEPALFVALTFERREVLDSSNI |
| | KPMNLIGIDRGENIPAVIALTDPEGCPLSRFKDSLGNPTHILRIGESYKEKQRTI |
| | QAKKEVEQRRAGGYSRKYASKAKNLADDMVRNTARDLLYYAVTQDAMLIFENLSR |
| | GFGRQGKRTFMAERQYTRMEDWLTAKLAYEGLSKTYLSKTLAQYTSKTCSNCGFT |
| | ITSADYDRVLEKLKKTATGWMTTINGKELKVEGQITYYNRYKRQNVVKDLSVELD |
| | RLSEESVNNDISSWTKGRSGEALSLLKKRFSHRPVQEKFVCLNCGFETHADEQAA |
| | LNIARSWLFLRSQEYKKYQTNKTTGNTDKRAFVETWQSFYRKKLKEVWKPAV |
| | (SEQ ID NO: 240) |
| 279 | MQEIKRINKIRRRLVKDSNTKKAGKTGPMKTLLVRVMTPDLRERLENLRKKPENI |
| | PQPISNTSRANLNKLLTDYTEMKKAILHVYWEEFQKDPVGLMSRVAQPAPKNIDQ |
| | RKLIPVKDGNERLTSSGFACSQCCQPLYVYKLEQVNDKGKPHTNYFGRCNVSEHE |
| | RLILLSPHKPEANDELVTYSLGKFGQRALDFYSIHVTRESNHPVKPLEQIGGNSC |
| | ASGPVGKALSDACMGAVASFLTKYQDIILEHQKVIKKNEKRLANLKDIASANGLA |
| | FPKITLPPQPHTKEGIEAYNNVVAQIVIWVNLNLWQKLKIGRDEAKPLQRLKGFP |
| | SFPLVERQANEVDWWDMVCNVKKLINEKKEDGKVFWQNLAGYKRQEALRPYLSSE |
| | EDRKKGKKFARYQFGDLLLHLEKKHGEDWGKVYDEAWERIDKKVEGLSKHIKLEE |
| | ERRSEDAQSKAALTDWLRAKASFVIEGLKEADKDEFCRCELKLQKWYGDLRGKPF |
| | AIEAENSILDISGFSKQYNCAFIWQKDGVKKLNLYLIINYFKGGKLRFKKIKPEA |
| | FEANRFYTVINKKSGEIVPMEVNENFDDPNLIILPLAFGKRQGREFIWNDLLSLE |
| | TGSLKLANGRVIEKTLYNRRTRQDEPALFVALTFERREVLDSSNIKPMNLIGIDR |
| | GENIPAVIALTDPEGCPLSRFKDSLGNPTHILRIGESYKEKQRTIQAKKEVEQRR |
| | AGGYSRKYASKAKNLADDMVRNTARDLLYYAVTQDAMLIFENLSRGFGRQGKRTF |
| | MAERQYTRMEDWLTAKLAYEGLSKTYLSKTLAQYTSKTCSNCGFTITSADYDRVL |
| | EKLKKTATGWMTTINGKELKVEGQITYYNRYKRQNVVKDLSVELDRLSEESVNND |
| | ISSWTKGRSGEALSLLKKRFSHRPVQEKFVCLNCGFETHADEQAALNIARSWLFL |
| | RSQEYKKYQTNKTTGNTDKRAFVETWQSFYRKKLKEVWKPAVTSPKKKRKV |
| | (SEQ ID NO: 241) |
| 280 | MQEIKRINKIRRRLVKDSNTKKAGKTGPMKTLLVRVMTPDLRERLENLRKKPENI |
| | PQPISNTSRANLNKLLTDYTEMKKAILHVYWEEFQKDPVGLMSRVAQPAPKNIDQ |
| | RKLIPVKDGNERLTSSGFACSQCCQPLYVYKLEQVNDKGKPHTNYFGRCNVSEHE |
| | RLILLSPHKPEANDELVTYSLGKFGQRALDFYSIHVTRESNHPVKPLEQIGGNSC |
| | ASGPVGKALSDACMGAVASFLTKYQDIILEHQKVIKKNEKRLANLKDIASANGLA |
| | FPKITLPPQPHTKEGIEAYNNVVAQIVIWVNLNLWQKLKIGRDEAKPLQRLKGFP |
| | SFPLVERQANEVDWWDMVCNVKKLINEKKEDGKVEWQNLAGYKRQEALRPYLSSE |
| | EDRKKGKKFARYQFGDLLLHLEKKHGEDWGKVYDEAWERIDKKVEGLSKHIKLEE |
| | ERRSEDAQSKAALTDWLRAKASFVIEGLKEADKDEFCRCELKLQKWYGDLRGKPF |
| | AIEAENSILDISGFSKQYNCAFIWQKDGVKKLNLYLIINYFKGGKLRFKKIKPEA |
| | FEANRFYTVINKKSGEIVPMEVNENFDDPNLIILPLAFGKRQGREFIWNDLLSLE |
| | TGSLKLANGRVIEKTLYNRRTRQDEPALFVALTFERREVLDSSNIKPMNLIGIDR |
| | GENIPAVIALTDPEGCPLSRFKDSLGNPTHILRIGESYKEKQRTIQAKKEVEQRR |
| | AGGYSRKYASKAKNLADDMVRNTARDLLYYAVTQDAMLIFENLSRGFGRQGKRTF |
| | MAERQYTRMEDWLTAKLAYEGLSKTYLSKTLAQYTSKTCSNCGFTITSADYDRVL |
| | EKLKKTATGWMTTINGKELKVEGQITYYNRYKRQNVVKDLSVELDRLSEESVNND |
| | ISSWTKGRSGEALSLLKKRFSHRPVQEKFVCLNCGFETHADEQAALNIARSWLEL |
| | RSQEYKKYQTNKTTGNTDKRAFVETWQSFYRKKLKEVWKPAVTSPKKKRKVPPPP |
| | KKKRKV (SEQ ID NO: 242) |
| 285 | MQEIKRINKIRRRLVKDSNTKKAGKTGPMKTLLVRVMTPDLRERLENLRKKPENI |
| | PQPISNTSRANLNKLLTDYTEMKKAILHVYWEEFQKDPVGLMSRVAQPAPKNIDQ |
| | RKLIPVKDGNERLTSSGFACSQCCQPLYVYKLEQVNDKGKPHTNYFGRCNVSEHE |
| | RLILLSPHKPEANDELVTYSLGKFGQRALDFYSIHVTRESNHPVKPLEQIGGNSC |
| | ASGPVGKALSDACMGAVASFLTKYQDIILEHQKVIKKNEKRLANLKDIASANGLA |
| | FPKITLPPQPHTKEGIEAYNNVVAQIVIWVNLNLWQKLKIGRDEAKPLQRLKGFP |
| | SFPLVERQANEVDWWDMVCNVKKLINEKKEDGKVFWQNLAGYKRQEALRPYLSSE |
| | EDRKKGKKFARYQFGDLLLHLEKKHGEDWGKVYDEAWERIDKKVEGLSKHIKLEE |
| | ERRSEDAQSKAALTDWLRAKASFVIEGLKEADKDEFCRCELKLQKWYGDLRGKPF |
| | AIEAENSILDISGFSKQYNCAFIWQKDGVKKLNLYLIINYFKGGKLRFKKIKPEA |
| | FEANRFYTVINKKSGEIVPMEVNENFDDPNLIILPLAFGKRQGREFIWNDLLSLE |
| | TGSLKLANGRVIEKTLYNRRTRQDEPALFVALTFERREVLDSSNIKPMNLIGIDR |
| | GENIPAVIALTDPEGCPLSRFKDSLGNPTHILRIGESYKEKQRTIQAKKEVEQRR |
| | AGGYSRKYASKAKNLADDMVRNTARDLLYYAVTQDAMLIFENLSRGFGRQGKRTF |
| | MAERQYTRMEDWLTAKLAYEGLSKTYLSKTLAQYTSKTCSNCGFTITSADYDRVL |
| | EKLKKTATGWMTTINGKELKVEGQITYYNRYKRQNVVKDLSVELDRLSEESVNND |
| | ISSWTKGRSGEALSLLKKRFSHRPVQEKFVCLNCGFETHADEQAALNIARSWLFL |
| | RSQEYKKYQTNKTTGNTDKRAFVETWQSFYRKKLKEVWKPAVTSPKKKRKVPPPH |
| | KKKHPDASVNFSEFSK (SEQ ID NO: 243) |
| 286 | MQEIKRINKIRRRLVKDSNTKKAGKTGPMKTLLVRVMTPDLRERLENLRKKPENI |
| | PQPISNTSRANLNKLLTDYTEMKKAILHVYWEEFQKDPVGLMSRVAQPAPKNIDQ |
| | RKLIPVKDGNERLTSSGFACSQCCQPLYVYKLEQVNDKGKPHTNYFGRCNVSEHE |
| | RLILLSPHKPEANDELVTYSLGKFGQRALDFYSIHVTRESNHPVKPLEQIGGNSC |
| | ASGPVGKALSDACMGAVASFLTKYQDIILEHQKVIKKNEKRLANLKDIASANGLA |
| | FPKITLPPQPHTKEGIEAYNNVVAQIVIWVNLNLWQKLKIGRDEAKPLQRLKGFP |
| | SFPLVERQANEVDWWDMVCNVKKLINEKKEDGKVFWQNLAGYKRQEALRPYLSSE |
| | EDRKKGKKFARYQFGDLLLHLEKKHGEDWGKVYDEAWERIDKKVEGLSKHIKLEE |
| | ERRSEDAQSKAALTDWLRAKASFVIEGLKEADKDEFCRCELKLQKWYGDLRGKPF |
| | AIEAENSILDISGFSKQYNCAFIWQKDGVKKLNLYLIINYFKGGKLRFKKIKPEA |
| | FEANRFYTVINKKSGEIVPMEVNENFDDPNLIILPLAFGKRQGREFIWNDLLSLE |
| | TGSLKLANGRVIEKTLYNRRTRQDEPALFVALTFERREVLDSSNIKPMNLIGIDR |
| | GENIPAVIALTDPEGCPLSRFKDSLGNPTHILRIGESYKEKQRTIQAKKEVEQRR |
| | AGGYSRKYASKAKNLADDMVRNTARDLLYYAVTQDAMLIFENLSRGFGRQGKRTF |
| | MAERQYTRMEDWLTAKLAYEGLSKTYLSKTLAQYTSKTCSNCGFTITSADYDRVL |
| | EKLKKTATGWMTTINGKELKVEGQITYYNRYKRQNVVKDLSVELDRLSEESVNND |
| | ISSWTKGRSGEALSLLKKRFSHRPVQEKFVCLNCGFETHADEQAALNIARSWLEL |
| | RSQEYKKYQTNKTTGNTDKRAFVETWQSFYRKKLKEVWKPAVTSPKKKRKVPPPQ |
| | RPGPYDRPORPGPYDRP (SEQ ID NO: 244) |
| 287 | MQEIKRINKIRRRLVKDSNTKKAGKTGPMKTLLVRVMTPDLRERLENLRKKPENI |
| | PQPISNTSRANLNKLLTDYTEMKKAILHVYWEEFQKDPVGLMSRVAQPAPKNIDQ |
| | RKLIPVKDGNERLTSSGFACSQCCQPLYVYKLEQVNDKGKPHTNYFGRCNVSEHE |
| | RLILLSPHKPEANDELVTYSLGKFGQRALDFYSIHVTRESNHPVKPLEQIGGNSC |
| | ASGPVGKALSDACMGAVASFLTKYQDIILEHQKVIKKNEKRLANLKDIASANGLA |
| | FPKITLPPQPHTKEGIEAYNNVVAQIVIWVNLNLWQKLKIGRDEAKPLQRLKGFP |
| | SFPLVERQANEVDWWDMVCNVKKLINEKKEDGKVFWQNLAGYKRQEALRPYLSSE |
| | EDRKKGKKFARYQFGDLLLHLEKKHGEDWGKVYDEAWERIDKKVEGLSKHIKLEE |
| | ERRSEDAQSKAALTDWLRAKASFVIEGLKEADKDEFCRCELKLQKWYGDLRGKPF |
| | AIEAENSILDISGFSKQYNCAFIWQKDGVKKLNLYLIINYFKGGKLRFKKIKPEA |
| | FEANRFYTVINKKSGEIVPMEVNENFDDPNLIILPLAFGKRQGREFIWNDLLSLE |
| | TGSLKLANGRVIEKTLYNRRTRQDEPALFVALTFERREVLDSSNIKPMNLIGIDR |
| | GENIPAVIALTDPEGCPLSRFKDSLGNPTHILRIGESYKEKQRTIQAKKEVEQRR |
| | AGGYSRKYASKAKNLADDMVRNTARDLLYYAVTQDAMLIFENLSRGFGRQGKRTF |
| | MAERQYTRMEDWLTAKLAYEGLSKTYLSKTLAQYTSKTCSNCGFTITSADYDRVL |
| | EKLKKTATGWMTTINGKELKVEGQITYYNRYKRQNVVKDLSVELDRLSEESVNND |
| | ISSWTKGRSGEALSLLKKRFSHRPVQEKFVCLNCGFETHADEQAALNIARSWLEL |
| | RSQEYKKYQTNKTTGNTDKRAFVETWQSFYRKKLKEVWKPAVTSPKKKRKVPPPL |
| | SPSLSPLLSPSLSPL (SEQ ID NO: 245) |
| 288 | MQEIKRINKIRRRLVKDSNTKKAGKTGPMKTLLVRVMTPDLRERLENLRKKPENI |
| | PQPISNTSRANLNKLLTDYTEMKKAILHVYWEEFQKDPVGLMSRVAQPAPKNIDQ |
| | RKLIPVKDGNERLTMSSGFACSQCCQPLYVYKLEQVNDKGKPHTNYFGRCNVSEH |
| | ERLILLSPHKPEANDELVTYSLGKFGQRALDFYSIHVTRESNHPVKPLEQIGGNS |
| | CASGPVGKALSDACMGAVASFLTKYQDIILEHQKVIKKNEKRLANLKDIASANGL |
| | AFPKITLPPQPHTKEGIEAYNNVVAQIVIWVNLNLWQKLKIGRDEAKPLQRLKGF |
| | PSFPLVERQANEVDWWDMVCNVKKLINEKKEDGKVFWQNLAGYKRQEALRPYLSS |
| | EEDRKKGKKFARYQFGDLLLHLEKKHGEDWGKVYDEAWERIDKKVEGLSKHIKLE |
| | EERRSEDAQSKAALTDWLRAKASFVIEGLKEADKDEFCRCELKLQKWYGDLRGKP |
| | FAIEAENSILDISGFSKQYNCAFIWQKDGVKKLNLYLIINYFKGGKLRFKKIKPE |
| | AFEANRFYTVINKKSGEIVPMEVNENFDDPNLIILPLAFGKRQGREFIWNDLLSL |
| | ETGSLKLANGRVIEKTLYNRRTRQDEPALFVALTFERREVLDSSNIKPMNLIGID |
| | RGENIPAVIALTDPEGCPLSRFKDSLGNPTHILRIGESYKEKQRTIQAKKEVEQR |
| | RAGGYSRKYASKAKNLADDMVRNTARDLLYYAVTQDAMLIFENLSRGFGRQGKRT |
| | FMAERQYTRMEDWLTAKLAYEGLSKTYLSKTLAQYTSKTCSNCGFTITSADYDRV |
| | LEKLKKTATGWMTTINGKELKVEGQITYYNRYKRQNVVKDLSVELDRLSEESVNN |
| | DISSWTKGRSGEALSLLKKRFSHRPVQEKFVCLNCGFETHADEQAALNIARSWLE |
| | LRSQEYKKYQTNKTTGNTDKRAFVETWQSFYRKKLKEVWKPAVTSPKKKRKVPPP |
| | RGKGGKGLGKGGAKRHRK (SEQ ID NO: 246) |
| 290 | MQEIKRINKIRRRLVKDSNTKKAGKTGPMKTLLVRVMTPDLRERLENLRKKPENI |
| | PQPISNTSRANLNKLLTDYTEMKKAILHVYWEEFQKDPVGLMSRVAQPAPKNIDQ |
| | RKLIPVKDGNERLTSSGFACSQCCQPLYVYKLEQVNDKGKPHTNYFGRCNVSEHE |
| | RLILLSPHKPEANDELVTYSLGKFGQRALDFYSIHVTRESNHPVKPLEQIGGNSC |
| | ASGPVGKALSDACMGAVASFLTKYQDIILEHQKVIKKNEKRLANLKDIASANGLA |
| | FPKITLPPQPHTKEGIEAYNNVVAQIVIWVNLNLWQKLKIGRDEAKPLQRLKGFP |
| | SFPLVERQANEVDWWDMVCNVKKLINEKKEDGKVFWQNLAGYKRQEALRPYLSSE |
| | EDRKKGKKFARYQFGDLLLHLEKKHGEDWGKVYDEAWERIDKKVEGLSKHIKLEE |
| | ERRSEDAQSKAALTDWLRAKASFVIEGLKEADKDEFCRCELKLQKWYGDLRGKPF |
| | AIEAENSILDISGFSKQYNCAFIWQKDGVKKLNLYLIINYFKGGKLRFKKIKPEA |
| | FEANRFYTVINKKSGEIVPMEVNENFDDPNLIILPLAFGKRQGREFIWNDLLSLE |
| | TGSLKLANGRVIEKTLYNRRTRQDEPALFVALTFERREVLDSSNIKPMNLIGIDR |
| | GENIPAVIALTDPEGCPLSRFKDSLGNPTHILRIGESYKEKQRTIQAKKEVEQRR |
| | AGGYSRKYASKAKNLADDMVRNTARDLLYYAVTQDAMLIFENLSRGFGRQGKRTF |
| | MAERQYTRMEDWLTAKLAYEGLSKTYLSKTLAQYTSKTCSNCGFTITSADYDRVL |
| | EKLKKTATGWMTTINGKELKVEGQITYYNRYKRQNVVKDLSVELDRLSEESVNND |
| | ISSWTKGRSGEALSLLKKRFSHRPVQEKFVCLNCGFETHADEQAALNIARSWLFL |
| | RSQEYKKYQTNKTTGNTDKRAFVETWQSFYRKKLKEVWKPAVTSPKKKRKVPPPS |
| | RRRKANPTKLSENAKKLAKEVEN (SEQ ID NO: 247) |
| 291 | MQEIKRINKIRRRLVKDSNTKKAGKTGPMKTLLVRVMTPDLRERLENLRKKPENI |
| | PQPISNTSRANLNKLLTDYTEMKKAILHVYWEEFQKDPVGLMSRVAQPAPKNIDQ |
| | RKLIPVKDGNERLTSSGFACSQCCQPLYVYKLEQVNDKGKPHTNYFGRCNVSEHE |
| | RLILLSPHKPEANDELVTYSLGKFGQRALDFYSIHVTRESNHPVKPLEQIGGNSC |
| | ASGPVGKALSDACMGAVASFLTKYQDIILEHQKVIKKNEKRLANLKDIASANGLA |
| | FPKITLPPQPHTKEGIEAYNNVVAQIVIWVNLNLWQKLKIGRDEAKPLQRLKGFP |
| | SFPLVERQANEVDWWDMVCNVKKLINEKKEDGKVFWQNLAGYKRQEALRPYLSSE |
| | EDRKKGKKFARYQFGDLLLHLEKKHGEDWGKVYDEAWERIDKKVEGLSKHIKLEE |
| | ERRSEDAQSKAALTDWLRAKASFVIEGLKEADKDEFCRCELKLQKWYGDLRGKPF |
| | AIEAENSILDISGFSKQYNCAFIWQKDGVKKLNLYLIINYFKGGKLRFKKIKPEA |
| | FEANRFYTVINKKSGEIVPMEVNENFDDPNLIILPLAFGKRQGREFIWNDLLSLE |
| | TGSLKLANGRVIEKTLYNRRTRQDEPALFVALTFERREVLDSSNIKPMNLIGIDR |
| | GENIPAVIALTDPEGCPLSRFKDSLGNPTHILRIGESYKEKQRTIQAKKEVEQRR |
| | AGGYSRKYASKAKNLADDMVRNTARDLLYYAVTQDAMLIFENLSRGFGRQGKRTF |
| | MAERQYTRMEDWLTAKLAYEGLSKTYLSKTLAQYTSKTCSNCGFTITSADYDRVL |
| | EKLKKTATGWMTTINGKELKVEGQITYYNRYKRQNVVKDLSVELDRLSEESVNND |
| | ISSWTKGRSGEALSLLKKRFSHRPVQEKFVCLNCGFETHADEQAALNIARSWLEL |
| | RSQEYKKYQTNKTTGNTDKRAFVETWQSFYRKKLKEVWKPAVTSPKKKRKVPPPP |
| | AAKRVKLD (SEQ ID NO: 248) |
| 293 | MQEIKRINKIRRRLVKDSNTKKAGKTGPMKTLLVRVMTPDLRERLENLRKKPENI |
| | PQPISNTSRANLNKLLTDYTEMKKAILHVYWEEFQKDPVGLMSRVAQPAPKNIDQ |
| | RKLIPVKDGNERLTSSGFACSQCCQPLYVYKLEQVNDKGKPHTNYFGRCNVSEHE |
| | RLILLSPHKPEANDELVTYSLGKFGQRALDFYSIHVTRESNHPVKPLEQIGGNSC |
| | ASGPVGKALSDACMGAVASFLTKYQDIILEHQKVIKKNEKRLANLKDIASANGLA |
| | FPKITLPPQPHTKEGIEAYNNVVAQIVIWVNLNLWQKLKIGRDEAKPLQRLKGFP |
| | SFPLVERQANEVDWWDMVCNVKKLINEKKEDGKVFWQNLAGYKRQEALRPYLSSE |
| | EDRKKGKKFARYQFGDLLLHLEKKHGEDWGKVYDEAWERIDKKVEGLSKHIKLEE |
| | ERRSEDAQSKAALTDWLRAKASFVIEGLKEADKDEFCRCELKLQKWYGDLRGKPF |
| | AIEAENSILDISGFSKQYNCAFIWQKDGVKKLNLYLIINYFKGGKLRFKKIKPEA |
| | FEANRFYTVINKKSGEIVPMEVNENFDDPNLIILPLAFGKRQGREFIWNDLLSLE |
| | TGSLKLANGRVIEKTLYNRRTRQDEPALFVALTFERREVLDSSNIKPMNLIGIDR |
| | GENIPAVIALTDPEGCPLSRFKDSLGNPTHILRIGESYKEKQRTIQAKKEVEQRR |
| | AGGYSRKYASKAKNLADDMVRNTARDLLYYAVTQDAMLIFENLSRGFGRQGKRTF |
| | MAERQYTRMEDWLTAKLAYEGLSKTYLSKTLAQYTSKTCSNCGFTITSADYDRVL |
| | EKLKKTATGWMTTINGKELKVEGQITYYNRYKRQNVVKDLSVELDRLSEESVNND |
| | ISSWTKGRSGEALSLLKKRFSHRPVQEKFVCLNCGFETHADEQAALNIARSWLEL |
| | RSQEYKKYQTNKTTGNTDKRAFVETWQSFYRKKLKEVWKPAVTSPKKKRKVPPPK |
| | RSFSKAF (SEQ ID NO: 249) |
| 300 | MQEIKRINKIRRRLVKDSNTKKAGKTGPMKTLLVRVMTPDLRERLENLRKKPENI |
| | PQPISNTSRANLNKLLTDYTEMKKAILHVYWEEFQKDPVGLMSRVAQPAPKNIDQ |
| | RKLIPVKDGNERLTSSGFACSQCCQPLYVYKLEQVNDKGKPHTNYFGRCNVSEHE |
| | RLILLSPHKPEANDELVTYSLGKFGQRALDFYSIHVTRESNHPVKPLEQIGGNSC |
| | ASGPVGKALSDACMGAVASFLTKYQDIILEHQKVIKKNEKRLANLKDIASANGLA |
| | FPKITLPPQPHTKEGIEAYNNVVAQIVIWVNLNLWQKLKIGRDEAKPLQRLKGFP |
| | SFPLVERQANEVDWWDMVCNVKKLINEKKEDGKVFWQNLAGYKRQEALRPYLSSE |
| | EDRKKGKKFARYQFGDLLLHLEKKHGEDWGKVYDEAWERIDKKVEGLSKHIKLEE |
| | ERRSEDAQSKAALTDWLRAKASFVIEGLKEADKDEFCRCELKLQKWYGDLRGKPF |
| | AIEAENSILDISGFSKQYNCAFIWQKDGVKKLNLYLIINYFKGGKLRFKKIKPEA |
| | FEANRFYTVINKKSGEIVPMEVNENFDDPNLIILPLAFGKRQGREFIWNDLLSLE |
| | TGSLKLANGRVIEKTLYNRRTRQDEPALFVALTFERREVLDSSNIKPMNLIGIDR |
| | GENIPAVIALTDPEGCPLSRFKDSLGNPTHILRIGESYKEKQRTIQAKKEVEQRR |
| | AGGYSRKYASKAKNLADDMVRNTARDLLYYAVTQDAMLIFENLSRGFGRQGKRTF |
| | MAERQYTRMEDWLTAKLAYEGLSKTYLSKTLAQYTSKTCSNCGFTITSADYDRVL |
| | EKLKKTATGWMTTINGKELKVEGQITYYNRYKRQNVVKDLSVELDRLSEESVNND |
| | ISSWTKGRSGEALSLLKKRFSHRPVQEKFVCLNCGFETHADEQAALNIARSWLEL |
| | RSQEYKKYQTNKTTGNTDKRAFVETWQSFYRKKLKEVWKPAVTSPKKKRKVPPPK |
| | RGINDRNFWRGENERKTR (SEQ ID NO: 250) |
| 492 | MAPKKKRKVSRMQEIKRINKIRRRLVKDSNTKKAGKTGPMKTLLVRVMTPDLRER |
| | LENLRKKPENIPQPISNTSRANLNKLLTDYTEMKKAILHVYWEEFQKDPVGLMSR |
| | VAQPAPKNIDQRKLIPVKDGNERLTSSGFACSQCCQPLYVYKLEQVNDKGKPHTN |
| | YFGRCNVSEHERLILLSPHKPEANDELVTYSLGKFGQRALDFYSIHVTRESNHPV |
| | KPLEQIGGNSCASGPVGKALSDACMGAVASFLTKYQDIILEHQKVIKKNEKRLAN |
| | LKDIASANGLAFPKITLPPQPHTKEGIEAYNNVVAQIVIWVNLNLWQKLKIGRDE |
| | AKPLQRLKGFPSFPLVERQANEVDWWDMVCNVKKLINEKKEDGKVFWQNLAGYKR |
| | QEALRPYLSSEEDRKKGKKFARYQFGDLLLHLEKKHGEDWGKVYDEAWERIDKKV |
| | EGLSKHIKLEEERRSEDAQSKAALTDWLRAKASFVIEGLKEADKDEFCRCELKLQ |
| | KWYGDLRGKPFAIEAENSILDISGFSKQYNCAFIWQKDGVKKLNLYLIINYFKGG |
| | KLRFKKIKPEAFEANRFYTVINKKSGEIVPMEVNENFDDPNLIILPLAFGKRQGR |
| | EFIWNDLLSLETGSLKLANGRVIEKTLYNRRTRQDEPALFVALTFERREVLDSSN |
| | IKPMNLIGIDRGENIPAVIALTDPEGCPLSRFKDSLGNPTHILRIGESYKEKQRT |
| | IQAKKEVEQRRAGGYSRKYASKAKNLADDMVRNTARDLLYYAVTQDAMLIFENLS |
| | RGFGRQGKRTFMAERQYTRMEDWLTAKLAYEGLSKTYLSKTLAQYTSKTCSNCGF |
| | TITSADYDRVLEKLKKTATGWMTTINGKELKVEGQITYYNRYKRQNVVKDLSVEL |
| | DRLSEESVNNDISSWTKGRSGEALSLLKKRFSHRPVQEKFVCLNCGFETHADEQA |
| | ALNIARSWLFLRSQEYKKYQTNKTTGNTDKRAFVETWQSFYRKKLKEVWKPAVTS |
| | PKKKRKVPPPPKKKRKV (SEQ ID NO: 251) |
| 493 | MAPKKKRKVSRMQEIKRINKIRRRLVKDSNTKKAGKTGPMKTLLVRVMTPDLRER |
| | LENLRKKPENIPQPISNTSRANLNKLLTDYTEMKKAILHVYWEEFQKDPVGLMSR |
| | VAQPAPKNIDQRKLIPVKDGNERLTSSGFACSQCCQPLYVYKLEQVNDKGKPHTN |
| | YFGRCNVSEHERLILLSPHKPEANDELVTYSLGKFGQRALDFYSIHVTRESNHPV |
| | KPLEQIGGNSCASGPVGKALSDACMGAVASFLTKYQDIILEHQKVIKKNEKRLAN |
| | LKDIASANGLAFPKITLPPQPHTKEGIEAYNNVVAQIVIWVNLNLWQKLKIGRDE |
| | AKPLQRLKGFPSFPLVERQANEVDWWDMVCNVKKLINEKKEDGKVFWQNLAGYKR |
| | QEALRPYLSSEEDRKKGKKFARYQFGDLLLHLEKKHGEDWGKVYDEAWERIDKKV |
| | EGLSKHIKLEEERRSEDAQSKAALTDWLRAKASFVIEGLKEADKDEFCRCELKLQ |
| | KWYGDLRGKPFAIEAENSILDISGFSKQYNCAFIWQKDGVKKLNLYLIINYFKGG |
| | KLRFKKIKPEAFEANRFYTVINKKSGEIVPMEVNENFDDPNLIILPLAFGKRQGR |
| | EFIWNDLLSLETGSLKLANGRVIEKTLYNRRTRQDEPALFVALTFERREVLDSSN |
| | IKPMNLIGIDRGENIPAVIALTDPEGCPLSRFKDSLGNPTHILRIGESYKEKQRT |
| | IQAKKEVEQRRAGGYSRKYASKAKNLADDMVRNTARDLLYYAVTQDAMLIFENLS |
| | RGFGRQGKRTEMAERQYTRMEDWLTAKLAYEGLSKTYLSKTLAQYTSKTCSNCGF |
| | TITSADYDRVLEKLKKTATGWMTTINGKELKVEGQITYYNRYKRQNVVKDLSVEL |
| | DRLSEESVNNDISSWTKGRSGEALSLLKKRFSHRPVQEKFVCLNCGFETHADEQA |
| | ALNIARSWLFLRSQEYKKYQTNKTTGNTDKRAFVETWQSFYRKKLKEVWKPAVTS |
| | PKKKRKVPPPPAAKRVKLD (SEQ ID NO: 252) |

TABLE 9
Nuclear localization sequence list

| CasX | NLS | DNA Sequence | Amino Acid Sequence |
|---|---|---|---|
| 278, 279, | SV40 | CCAAAGAAGAAGCGGAAGGTC | PKKKRKV (SEQ ID |
| 280, 492, | | (SEQ ID NO: 253) | NO: 165) |
| 493 | | | |
| 285 | SynthNLS3 | CACAAGAAGAAACATCCAGACGC | HKKKHPDASVNFSEF |
| | | ATCAGTCAACTTTAGCGAGTTCA | SK (SEQ ID NO: |
| | | GTAAA (SEQ ID NO: 254) | 196) |
| 286 | SynthNLS4 | CAGCGCCCTGGGCCTTACGATAG | QRPGPYDRPQRPGPY |
| | | GCCGCAAAGACCCGGACCGTATG | DRP (SEQ ID NO: |
| | | ATCGCCCT (SEQ ID NO: | 197) |
| | | 255) | |
| 287 | SynthNLS5 | CTCAGCCCGAGTCTTAGTCCACT | LSPSLSPLLSPSLSP |
| | | GCTTTCCCCGTCCCTGTCTCCAC | L (SEQ ID NO: |
| | | TG (SEQ ID NO: 256) | 198) |
| 288 | SynthNLS6 | CGGGGCAAGGGTGGCAAGGGGCT | RGKGGKGLGKGGAKR |
| | | TGGCAAGGGGGGGGCAAAGAGGC | HRK (SEQ ID NO: |
| | | ACAGGAAG (SEQ ID NO: | 199) |
| | | 257) | |
| 290 | EGL-13 | AGCCGCCGCAGAAAAGCCAATCC | SRRRKANPTKLSENA |
| | | TACAAAACTGTCAGAAAATGCGA | KKLAKEVEN (SEQ |
| | | AAAAACTTGCTAAGGAGGTGGAA | ID NO: 192) |
| | | AAC (SEQ ID NO: 258) | |
| 291 | c-Myc | CCTGCCGCAAAGCGAGTGAAATT | PAAKRVKLD (SEQ |
| | | GGAC (SEQ ID NO: 259) | ID NO: 167) |
| 293 | Nucleolar RNA | AAGCGGTCCTTCAGTAAGGCCTT | KRSESKAF (SEQ |
| | Helicase II | T (SEQ ID NO: 260) | ID NO: 188) |
| 300 | Influenza A | AAACGGGGAATAAACGACCGGAA | KRGINDRNFWRGENE |
| | protein | CTTCTGGCGCGGGGAAAACGAGC | RKTR (SEQ ID |
| | | GCAAAACCCGA (SEQ ID NO: | NO: 186) |
| | | 261) | |

### Example 5: Design and Generation of CasX Constructs 387, 395, 485-491, and 494

[0562] In order to generate CasX 395, CasX 485, CasX 486, CasX 487, the codon optimized CasX 119 (based on the CasX 37 construct of Example 2, encoding Planctomycetes CasX SEQ ID NO: 2, with a A708K substitution and a [P793] deletion with fused NLS, and linked guide and non-targeting sequences), CasX 435, CasX 438, and CasX 484 (each based on CasX 119 construct of Example 2 encoding Planctomycetes CasX SEQ ID NO: 2, with a L379R substitution, a A708K substitution, and a [P793] deletion with fused NLS, and linked guide and non-targeting sequences) were cloned respectively into a 4 kb staging vector comprising a KanR marker, colE1 ori, and CasX with fused NLS (pStx1) using standard cloning methods. Gibson primers were designed to amplify the CasX SEQ ID NO: 1 Helical I domain from amino acid 192-331 in its own vector to replace this corresponding region (aa 193-332) on CasX 119, CasX 435, CasX 438, and CasX 484 in pStx1 respectively. The Helical I domain from CasX SEQ ID NO: 1 was amplified with primers oIC768 and oIC784 using Q5 DNA polymerase according to the manufacturer's protocol. The destination vector containing the desired CasX variant was amplified with primers oIC765 and oIC764 using Q5 DNA polymerase according to the manufacturer's protocol. The two fragments were purified by gel extraction from a 1% agarose gel using Zymoclean Gel DNA Recovery Kit. The insert and backbone fragments were then pieced together using Gibson assembly. Assembled products in the pStx1 staging vector were transformed into chemically-competent Turbo Competent E. coli bacterial cells, plated on LB-Agar plates containing kanamycin and incubated at 37° C. Individual colonies were picked and miniprepped using Qiagen Qiaprep spin Miniprep Kit. The resultant plasmids were sequenced using Sanger sequencing to ensure correct assembly. Correct clones were then cut and pasted into a mammalian expression plasmid (see FIG. 5) using standard cloning methods. The resultant plasmids were sequenced using Sanger sequencing to ensure correct assembly. Sequences encoding the targeting spacer sequences that target the gene of interest were designed based on CasX PAM locations. Targeting spacer sequence DNA was ordered as single-stranded DNA (ssDNA) oligos (Integrated DNA Technologies) consisting of the targeting sequence and the reverse complement of this sequence. These two oligos were annealed together and cloned into pStX individually or in bulk by Golden Gate assembly using T4 DNA Ligase and an appropriate restriction enzyme for the plasmid. Golden Gate products were transformed into chemically or electro-competent cells such as NEB Turbo competent E. coli plated on LB-Agar plates containing carbenicillin and incubated at 37° C. Individual colonies were picked and miniprepped using Qiagen Qiaprep spin Miniprep Kit. The resultant plasmids were sequenced using Sanger sequencing to ensure correct ligation.

[0563] In order to generate CasX 488, CasX 489, CasX 490, and CasX 491 (sequences in Table 10), the codon optimized CasX 119 (based on the CasX 37 construct of Example 2, encoding Planctomycetes CasX SEQ ID NO: 2, with a A708K substitution and a [P793] deletion with fused NLS, and linked guide and non-targeting sequences), CasX 435, CasX 438, and CasX 484 (each based on CasX119 construct of Example 2 encoding Planctomycetes CasX SEQ ID NO: 2, with a L379R substitution, a A708K substitution, and a [P793] deletion with fused NLS, and linked guide and non-targeting sequences) were cloned respectively into a 4 kb staging vector that was made up of a KanR marker, colE1 ori, and STX with fused NLS (pStx1) using standard cloning methods. Gibson primers were designed to amplify the CasX Stx1 NTSB domain from amino acid 101-191 and Helical I domain from amino acid 192-331 in its own vector to replace this similar region (aa 103-332) on CasX 119, CasX 435, CasX 438, and CasX 484 in pStx1 respectively. The NTSB and Helical I domain from CasX SEQ ID NO: 1 were amplified with primers oIC766 and oIC784 using Q5 DNA polymerase according to the manufacturer's protocol. The destination vector containing the desired CasX variant was amplified with primers oIC762 and oIC765 using Q5 DNA polymerase according to the manufacturer's protocol. The two fragments were purified by gel extraction from a 1% agarose gel using Zymoclean Gel DNA Recovery Kit. The insert and backbone fragments were then pieced together using Gibson assembly. Assembled products in the pStx1 staging vector were transformed into chemically-competent Turbo Competent E. coli bacterial cells, plated on LB-Agar plates containing kanamycin and incubated at 37° C. Individual colonies were picked and miniprepped using Qiagen Qiaprep spin Miniprep Kit. The resultant plasmids were sequenced using Sanger sequencing to ensure correct assembly. Correct clones were then cut and pasted into a mammalian expression plasmid (see FIG. 5) using standard cloning methods. The resultant plasmids were sequenced using Sanger sequencing to ensure correct assembly. Sequences encoding the targeting spacer sequences that target the gene of interest were designed based on CasX PAM locations. Targeting spacer sequence DNA was ordered as single-stranded DNA (ssDNA) oligos (Integrated DNA Technologies) consisting of the targeting sequence and the reverse complement of this sequence. These two oligos were annealed together and cloned into pStX individually or in bulk by Golden Gate assembly using T4 DNA Ligase and an appropriate restriction enzyme for the plasmid. Golden Gate products were transformed into chemically or electro-competent cells such as NEB Turbo competent E. coli plated on LB-Agar plates containing carbenicillin and incubated at 37° C. Individual colonies were picked and miniprepped using Qiagen Qiaprep spin Miniprep Kit. The resultant plasmids were sequenced using Sanger sequencing to ensure correct ligation.

[0564] In order to generate CasX 387 and CasX 494 (sequences in Table 10), the codon optimized CasX 119 (based on the CasX 37 construct of Example 2, encoding Planctomycetes CasX SEQ ID NO:2, with a A708K substitution and a [P793] deletion with fused NLS, and linked guide and non-targeting sequences) and CasX 484 (based on CasX119 construct of Example 2 encoding Planctomycetes CasX SEQ ID NO: 2, with a L379R substitution, a A708K substitution, and a [P793] deletion with fused NLS, and linked guide and non-targeting sequences) were cloned respectively into a 4 kb staging vector that was made up of a KanR marker, colE1 ori, and STX with fused NLS (pStx1) using standard cloning methods. Gibson primers were designed to amplify the CasX Stx1 NTSB domain from amino acid 101-191 in its own vector to replace this similar region (aa 103-192) on CasX 119 and CasX 484 in pStx1 respectively. The NTSB domain from CasX Stx1 was amplified with primers oIC766 and oIC767 using Q5 DNA polymerase according to the manufacturer's protocol. The destination vector containing the desired CasX variant was amplified with primers oIC763 and oIC762 using Q5 DNA polymerase according to the manufacturer's protocol. The two fragments were purified by gel extraction from a 1% agarose gel using Zymoclean Gel DNA Recovery Kit. The insert and backbone fragments were then pieced together using Gibson assembly. Assembled products in the pStx1 staging vector were transformed into chemically-competent Turbo Competent E. coli bacterial cells, plated on LB-Agar plates containing kanamycin and incubated at 37° C. Individual colonies were picked and miniprepped using Qiagen Qiaprep spin Miniprep Kit. The resultant plasmids were sequenced using Sanger sequencing to ensure correct assembly. Correct clones were then cut and pasted into a mammalian expression plasmid (see FIG. 5) using standard cloning methods. The resultant plasmids were sequenced using Sanger sequencing to ensure correct assembly. Sequences encoding the targeting sequences that target the gene of interest were designed based on CasX PAM locations. Targeting sequence DNA was ordered as single-stranded DNA (ssDNA) oligos (Integrated DNA Technologies) consisting of the targeting sequence and the reverse complement of this sequence. These two oligos were annealed together and cloned into pStX individually or in bulk by Golden Gate assembly using T4 DNA Ligase and an appropriate restriction enzyme for the plasmid. Golden Gate products were transformed into chemically or electro-competent cells such as NEB Turbo competent E. coli, plated on LB-Agar plates containing carbenicillin and incubated at 37° C. Individual colonies were picked and miniprepped using Qiagen Qiaprep spin Miniprep Kit. The resultant plasmids were sequenced using Sanger sequencing to ensure correct ligation. Sequences of the resulting constructs are listed in Table 10.

TABLE 10
Sequences of CasX 395 and 485-491

| | DNA | |
|---|---|---|
| Construct | Sequence | Amino Acid Sequence |
| CasX 387 | (SEQ | MAPKKKRKVSRQEIKRINKIRRRLVKDSNTKKAGKTGPMKTLLVRV |
| | ID NO: 262) | MTPDLRERLENLRKKPENIPQPISNTSRANLNKLLTDYTEMKKAIL |
| | | HVYWEEFQKDPVGLMSRVAQPASKKIDQNKLKPEMDEKGNLTTAGE |
| | | ACSQCGQPLFVYKLEQVSEKGKAYTNYFGRCNVAEHEKLILLAQLK |
| | | PEKDSDEAVTYSLGKFGQRALDFYSIHVTRESNHPVKPLEQIGGNS |
| | | CASGPVGKALSDACMGAVASFLTKYQDIILEHQKVIKKNEKRLANL |
| | | KDIASANGLAFPKITLPPQPHTKEGIEAYNNVVAQIVIWVNLNLWQ |
| | | KLKIGRDEAKPLQRLKGFPSFPLVERQANEVDWWDMVCNVKKLINE |
| | | KKEDGKVFWQNLAGYKRQEALRPYLSSEEDRKKGKKFARYQFGDLL |
| | | LHLEKKHGEDWGKVYDEAWERIDKKVEGLSKHIKLEEERRSEDAQS |
| | | KAALTDWLRAKASFVIEGLKEADKDEFCRCELKLQKWYGDLRGKPF |
| | | AIEAENSILDISGFSKQYNCAFIWQKDGVKKLNLYLIINYFKGGKL |
| | | RFKKIKPEAFEANRFYTVINKKSGEIVPMEVNFNFDDPNLIILPLA |
| | | FGKRQGREFIWNDLLSLETGSLKLANGRVIEKTLYNRRTRQDEPAL |
| | | FVALTFERREVLDSSNIKPMNLIGIDRGENIPAVIALTDPEGCPLS |
| | | RFKDSLGNPTHILRIGESYKEKQRTIQAKKEVEQRRAGGYSRKYAS |
| | | KAKNLADDMVRNTARDLLYYAVTQDAMLIFENLSRGFGRQGKRTEM |
| | | AERQYTRMEDWLTAKLAYEGLSKTYLSKTLAQYTSKTCSNCGETIT |
| | | SADYDRVLEKLKKTATGWMTTINGKELKVEGQITYYNRYKRQNVVK |
| | | DLSVELDRLSEESVNNDISSWTKGRSGEALSLLKKRFSHRPVQEKE |
| | | VCLNCGFETHADEQAALNIARSWLFLRSQEYKKYQTNKTTGNTDKR |
| | | AFVETWQSFYRKKLKEVWKPAVTSPKKKRKV (SEQ ID NO: |
| | | 272) |
| CasX 395 | (SEQ ID | MAPKKKRKVSRQEIKRINKIRRRLVKDSNTKKAGKTGPMKTLLVRV |
| | NO: 263) | MTPDLRERLENLRKKPENIPQPISNTSRANLNKLLTDYTEMKKAIL |
| | | HVYWEEFQKDPVGLMSRVAQPAPKNIDQRKLIPVKDGNERLTSSGF |
| | | ACSQCCQPLYVYKLEQVNDKGKPHTNYFGRCNVSEHERLILLSPHK |
| | | PEANDELVTYSLGKFGQRALDFYSIHVTKESTHPVKPLAQIAGNRY |
| | | ASGPVGKALSDACMGTIASFLSKYQDIIIEHQKVVKGNQKRLESLR |
| | | ELAGKENLEYPSVTLPPQPHTKEGVDAYNEVIARVRMWVNLNLWQK |
| | | LKLSRDDAKPLLRLKGFPSFPLVERQANEVDWWDMVCNVKKLINEK |
| | | KEDGKVFWQNLAGYKRQEALRPYLSSEEDRKKGKKFARYQFGDLLL |
| | | HLEKKHGEDWGKVYDEAWERIDKKVEGLSKHIKLEEERRSEDAQSK |
| | | AALTDWLRAKASFVIEGLKEADKDEFCRCELKLQKWYGDLRGKPFA |
| | | IEAENSILDISGFSKQYNCAFIWQKDGVKKLNLYLIINYFKGGKLR |
| | | FKKIKPEAFEANRFYTVINKKSGEIVPMEVNFNFDDPNLIILPLAF |
| | | GKRQGREFIWNDLLSLETGSLKLANGRVIEKTLYNRRTRQDEPALF |
| | | VALTFERREVLDSSNIKPMNLIGIDRGENIPAVIALTDPEGCPLSR |
| | | FKDSLGNPTHILRIGESYKEKQRTIQAKKEVEQRRAGGYSRKYASK |
| | | AKNLADDMVRNTARDLLYYAVTQDAMLIFENLSRGFGRQGKRTEMA |
| | | ERQYTRMEDWLTAKLAYEGLSKTYLSKTLAQYTSKTCSNCGFTITS |
| | | ADYDRVLEKLKKTATGWMTTINGKELKVEGQITYYNRYKRQNVVKD |
| | | LSVELDRLSEESVNNDISSWTKGRSGEALSLLKKRFSHRPVQEKFV |
| | | CLNCGFETHADEQAALNIARSWLFLRSQEYKKYQTNKTTGNTDKRA |
| | | FVETWQSFYRKKLKEVWKPAVTSPKKKRKVTSPKKKRKV (SEQ |
| | | ID NO: 273) |
| CasX 485 | (SEQ | MAPKKKRKVSRQEIKRINKIRRRLVKDSNTKKAGKTGPMKTLLVRV |
| | ID NO: 264) | MTPDLRERLENLRKKPENIPQPISNTSRANLNKLLTDYTEMKKAIL |
| | | HVYWEEFQKDPVGLMSRVAQPAPKNIDQRKLIPVKDGNERLTSSGF |
| | | ACSQCCQPLYVYKLEQVNDKGKPHTNYFGRCNVSEHERLILLSPHK |
| | | PEANDELVTYSLGKFGQRALDFYSIHVTKESTHPVKPLAQIAGNRY |
| | | ASGPVGKALSDACMGTIASFLSKYQDIIIEHQKVVKGNQKRLESLR |
| | | ELAGKENLEYPSVTLPPQPHTKEGVDAYNEVIARVRMWVNLNLWQK |
| | | LKLSRDDAKPLLRLKGFPSFPLVERQANEVDWWDMVCNVKKLINEK |
| | | KEDGKVFWQNLAGYKRQEALRPYLSSEEDRKKGKKFARYQLGDLLL |
| | | HLEKKHGEDWGKVYDEAWERIDKKVEGLSKHIKLEEERRSEDAQSK |
| | | AALTDWLRAKASFVIEGLKEADKDEFCRCELKLQKWYGDLRGKPFA |
| | | IEAENSILDISGFSKQYNCAFIWQKDGVKKLNLYLIINYFKGGKLR |
| | | FKKIKPEAFEANRFYTVINKKSGEIVPMEVNFNFDDPNLIILPLAF |
| | | GKRQGREFIWNDLLSLETGSLKLANGRVIEKTLYNRRTRQDEPALF |
| | | VALTFERREVLDSSNIKPMNLIGVDRGENIPAVIALTDPEGCPLSR |
| | | FKDSLGNPTHILRIGESYKEKQRTIQAKKEVEQRRAGGYSRKYASK |
| | | AKNLADDMVRNTARDLLYYAVTQDAMLIFENLSRGFGRQGKRTEMA |
| | | ERQYTRMEDWLTAKLAYEGLSKTYLSKTLAQYTSKTCSNCGFTITS |
| | | ADYDRVLEKLKKTATGWMTTINGKELKVEGQITYYNRRKRQNVVKD |
| | | LSVELDRLSEESVNNDISSWTKGRSGEALSLLKKRFSHRPVQEKFV |
| | | CLNCGFETHADEQAALNIARSWLFLRSQEYKKYQTNKTTGNTDKRA |
| | | FVETWQSFYRKKLKEVWKPAVTSPKKKRKV (SEQ ID NO: |
| | | 274) |
| CasX 486 | (SEQ ID | MAPKKKRKVSRQEIKRINKIRRRLVKDSNTKKAGKTGPMKTLLVRV |
| | NO: 265) | MTPDLRERLENLRKKPENIPQPISNTSRANLNKLLTDYTEMKKAIL |
| | | HVYWEEFQKDPVGLMSRVAQPAPKNIDQRKLIPVKDGNERLTSSGF |
| | | ACSQCCQPLYVYKLEQVNDKGKPHTNYFGRCNVSEHERLILLSPHK |
| | | PEANDELVTYSLGKFGQRALDFYSIHVTKESTHPVKPLAQIAGNRY |
| | | ASGPVGKALSDACMGTIASFLSKYQDIIIEHQKVVKGNQKRLESLR |
| | | ELAGKENLEYPSVTLPPQPHTKEGVDAYNEVIARVRMWVNLNLWQK |
| | | LKLSRDDAKPLLRLKGFPSFPLVERQANEVDWWDMVCNVKKLINEK |
| | | KEDGKVFWQNLAGYKRQEALRPYLSSEEDRKKGKKFARYQLGDLLK |
| | | HLEKKHGEDWGKVYDEAWERIDKKVEGLSKHIKLEEERRSEDAQSK |
| | | AALTDWLRAKASFVIEGLKEADKDEFCRCELKLQKWYGDLRGKPFA |
| | | IEAENSILDISGFSKQYNCAFIWQKDGVKKLNLYLIINYFKGGKLR |
| | | FKKIKPEAFEANRFYTVINKKSGEIVPMEVNFNFDDPNLIILPLAF |
| | | GKRQGREFIWNDLLSLETGSLKLANGRVIEKTLYNRRTRQDEPALF |
| | | VALTFERREVLDSSNIKPMNLIGVDRGENIPAVIALTDPEGCPLSR |
| | | FKDSLGNPTHILRIGESYKEKQRTIQAKKEVEQRRAGGYSRKYASK |
| | | AKNLADDMVRNTARDLLYYAVTQDAMLIFENLSRGFGRQGKRTEMA |
| | | ERQYTRMEDWLTAKLAYEGLSKTYLSKTLAQYTSKTCSNCGFTITS |
| | | ADYDRVLEKLKKTATGWMTTINGKELKVEGQITYYNRRKRQNVVKD |
| | | LSVELDRLSEESVNNDISSWTKGRSGEALSLLKKRFSHRPVQEKFV |
| | | CLNCGFETHADEQAALNIARSWLELRSQEYKKYQTNKTTGNTDKRA |
| | | FVETWQSFYRKKLKEVWKPAVTSPKKKRKV (SEQ ID NO: |
| | | 275) |
| CasX 487 | (SEQ | MAPKKKRKVSRQEIKRINKIRRRLVKDSNTKKAGKTGPMKTLLVRV |
| | ID NO: 266) | MTPDLRERLENLRKKPENIPQPISNTSRANLNKLLTDYTEMKKAIL |
| | | HVYWEEFQKDPVGLMSRVAQPAPKNIDQRKLIPVKDGNERLTSSGF |
| | | ACSQCCQPLYVYKLEQVNDKGKPHTNYFGRCNVSEHERLILLSPHK |
| | | PEANDELVTYSLGKFGQRALDFYSIHVTKESTHPVKPLAQIAGNRY |
| | | ASGPVGKALSDACMGTIASFLSKYQDIIIEHQKVVKGNQKRLESLR |
| | | ELAGKENLEYPSVTLPPQPHTKEGVDAYNEVIARVRMWVNLNLWQK |
| | | LKLSRDDAKPLLRLKGFPSFPLVERQANEVDWWDMVCNVKKLINEK |
| | | KEDGKVFWQNLAGYKRQEALRPYLSSEEDRKKGKKFARYQLGDLLL |
| | | HLEKKHGEDWGKVYDEAWERIDKKVEGLSKHIKLEEERRSEDAQSK |
| | | AALTDWLRAKASFVIEGLKEADKDEFCRCELKLQKWYGDLRGKPFA |
| | | IEAENSILDISGFSKQYNCAFIWQKDGVKKLNLYLIINYFKGGKLR |
| | | FKKIKPEAFEANRFYTVINKKSGEIVPMEVNFNFDDPNLIILPLAF |
| | | GKRQGREFIWNDLLSLETGSLKLANGRVIEKTLYNRRTRQDEPALF |
| | | VALTFERREVLDSSNIKPMNLIGVDRGENIPAVIALTDPEGCPLSR |
| | | FKDSLGNPTHILRIGESYKEKQRTIQAKKEVEQRRAGGYSRKYASK |
| | | AKNLADDMVRNTARDLLYYAVTQDAMLIFENLSRGFGRQGKRTEMA |
| | | ERQYTRMEDWLTAKLAYEGLSKTYLSKTLAQYTSKTCSNCGFTITS |
| | | ADYDRVLEKLKKTATGWMTTINGKELKVEGQITYYNRYKRQNVVKD |
| | | LSVELDRLSEESVNNDISSWTKGRSGEALSLLKKRFSHRPVQEKFV |
| | | CLNCGFETHADEQAALNIARSWLFLRSQEYKKYQTNKTTGNTDKRA |
| | | FVETWQSFYRKKLKEVWKPAVTSPKKKRKV (SEQ ID NO: |
| | | 276) |
| CasX 488 | (SEQ ID | MAPKKKRKVSRQEIKRINKIRRRLVKDSNTKKAGKTGPMKTLLVRV |
| | NO: 267) | MTPDLRERLENLRKKPENIPQPISNTSRANLNKLLTDYTEMKKAIL |
| | | HVYWEEFQKDPVGLMSRVAQPASKKIDQNKLKPEMDEKGNLTTAGF |
| | | ACSQCGQPLFVYKLEQVSEKGKAYTNYFGRCNVAEHEKLILLAQLK |
| | | PEKDSDEAVTYSLGKFGQRALDFYSIHVTKESTHPVKPLAQIAGNR |
| | | YASGPVGKALSDACMGTIASFLSKYQDIIIEHQKVVKGNQKRLESL |
| | | RELAGKENLEYPSVTLPPQPHTKEGVDAYNEVIARVRMWVNLNLWQ |
| | | KLKLSRDDAKPLLRLKGFPSFPLVERQANEVDWWDMVCNVKKLINE |
| | | KKEDGKVFWQNLAGYKRQEALRPYLSSEEDRKKGKKFARYQFGDLL |
| | | LHLEKKHGEDWGKVYDEAWERIDKKVEGLSKHIKLEEERRSEDAQS |
| | | KAALTDWLRAKASFVIEGLKEADKDEFCRCELKLQKWYGDLRGKPF |
| | | AIEAENSILDISGFSKQYNCAFIWQKDGVKKLNLYLIINYFKGGKL |
| | | RFKKIKPEAFEANRFYTVINKKSGEIVPMEVNFNFDDPNLIILPLA |
| | | FGKRQGREFIWNDLLSLETGSLKLANGRVIEKTLYNRRTRQDEPAL |
| | | FVALTFERREVLDSSNIKPMNLIGIDRGENIPAVIALTDPEGCPLS |
| | | RFKDSLGNPTHILRIGESYKEKQRTIQAKKEVEQRRAGGYSRKYAS |
| | | KAKNLADDMVRNTARDLLYYAVTQDAMLIFENLSRGFGRQGKRTEM |
| | | AERQYTRMEDWLTAKLAYEGLSKTYLSKTLAQYTSKTCSNCGFTIT |
| | | SADYDRVLEKLKKTATGWMTTINGKELKVEGQITYYNRYKRQNVVK |
| | | DLSVELDRLSEESVNNDISSWTKGRSGEALSLLKKRFSHRPVQEKF |
| | | VCLNCGFETHADEQAALNIARSWLFLRSQEYKKYQTNKTTGNTDKR |
| | | AFVETWQSFYRKKLKEVWKPAVTSPKKKRKV (SEQ ID NO: |
| | | 277) |
| CasX 489 | (SEQ ID | MAPKKKRKVSRQEIKRINKIRRRLVKDSNTKKAGKTGPMKTLLVRV |
| | NO: 268) | MTPDLRERLENLRKKPENIPQPISNTSRANLNKLLTDYTEMKKAIL |
| | | HVYWEEFQKDPVGLMSRVAQPASKKIDQNKLKPEMDEKGNLTTAGF |
| | | ACSQCGQPLFVYKLEQVSEKGKAYTNYFGRCNVAEHEKLILLAQLK |
| | | PEKDSDEAVTYSLGKFGQRALDFYSIHVTKESTHPVKPLAQIAGNR |
| | | YASGPVGKALSDACMGTIASFLSKYQDIIIEHQKVVKGNQKRLESL |
| | | RELAGKENLEYPSVTLPPQPHTKEGVDAYNEVIARVRMWVNLNLWQ |
| | | KLKLSRDDAKPLLRLKGFPSFPLVERQANEVDWWDMVCNVKKLINE |
| | | KKEDGKVFWQNLAGYKRQEALRPYLSSEEDRKKGKKFARYQLGDLL |
| | | LHLEKKHGEDWGKVYDEAWERIDKKVEGLSKHIKLEEERRSEDAQS |
| | | KAALTDWLRAKASFVIEGLKEADKDEFCRCELKLQKWYGDLRGKPF |
| | | AIEAENSILDISGFSKQYNCAFIWQKDGVKKLNLYLIINYFKGGKL |
| | | RFKKIKPEAFEANRFYTVINKKSGEIVPMEVNFNFDDPNLIILPLA |
| | | FGKRQGREFIWNDLLSLETGSLKLANGRVIEKTLYNRRTRQDEPAL |
| | | FVALTFERREVLDSSNIKPMNLIGVDRGENIPAVIALTDPEGCPLS |
| | | RFKDSLGNPTHILRIGESYKEKQRTIQAKKEVEQRRAGGYSRKYAS |
| | | KAKNLADDMVRNTARDLLYYAVTQDAMLIFENLSRGFGRQGKRTEM |
| | | AERQYTRMEDWLTAKLAYEGLSKTYLSKTLAQYTSKTCSNCGETIT |
| | | SADYDRVLEKLKKTATGWMTTINGKELKVEGQITYYNRRKRQNVVK |
| | | DLSVELDRLSEESVNNDISSWTKGRSGEALSLLKKRFSHRPVQEKF |
| | | VCLNCGFETHADEQAALNIARSWLFLRSQEYKKYQTNKTTGNTDKR |
| | | AFVETWQSFYRKKLKEVWKPAVTSPKKKRKV (SEQ ID NO: |
| | | 278) |
| CasX 490 | (SEQ ID | MAPKKKRKVSRQEIKRINKIRRRLVKDSNTKKAGKTGPMKTLLVRV |
| | NO: 269) | MTPDLRERLENLRKKPENIPQPISNTSRANLNKLLTDYTEMKKAIL |
| | | HVYWEEFQKDPVGLMSRVAQPASKKIDQNKLKPEMDEKGNLTTAGF |
| | | ACSQCGQPLFVYKLEQVSEKGKAYTNYFGRCNVAEHEKLILLAQLK |
| | | PEKDSDEAVTYSLGKFGQRALDFYSIHVTKESTHPVKPLAQIAGNR |
| | | YASGPVGKALSDACMGTIASFLSKYQDIIIEHQKVVKGNQKRLESL |
| | | RELAGKENLEYPSVTLPPQPHTKEGVDAYNEVIARVRMWVNLNLWQ |
| | | KLKLSRDDAKPLLRLKGFPSFPLVERQANEVDWWDMVCNVKKLINE |
| | | KKEDGKVFWQNLAGYKRQEALRPYLSSEEDRKKGKKFARYQLGDLL |
| | | KHLEKKHGEDWGKVYDEAWERIDKKVEGLSKHIKLEEERRSEDAQS |
| | | KAALTDWLRAKASFVIEGLKEADKDEFCRCELKLQKWYGDLRGKPF |
| | | AIEAENSILDISGFSKQYNCAFIWQKDGVKKLNLYLIINYFKGGKL |
| | | RFKKIKPEAFEANRFYTVINKKSGEIVPMEVNFNFDDPNLIILPLA |
| | | FGKRQGREFIWNDLLSLETGSLKLANGRVIEKTLYNRRTRQDEPAL |
| | | FVALTFERREVLDSSNIKPMNLIGVDRGENIPAVIALTDPEGCPLS |
| | | RFKDSLGNPTHILRIGESYKEKQRTIQAKKEVEQRRAGGYSRKYAS |
| | | KAKNLADDMVRNTARDLLYYAVTQDAMLIFENLSRGFGRQGKRTEM |
| | | AERQYTRMEDWLTAKLAYEGLSKTYLSKTLAQYTSKTCSNCGFTIT |
| | | SADYDRVLEKLKKTATGWMTTINGKELKVEGQITYYNRRKRQNVVK |
| | | DLSVELDRLSEESVNNDISSWTKGRSGEALSLLKKRFSHRPVQEKF |
| | | VCLNCGFETHADEQAALNIARSWLFLRSQEYKKYQTNKTTGNTDKR |
| | | AFVETWQSFYRKKLKEVWKPAVTSPKKKRKV (SEQ ID NO: |
| | | 279) |
| CasX 491 | (SEQ ID | MAPKKKRKVSRQEIKRINKIRRRLVKDSNTKKAGKTGPMKTLLVRV |
| | NO: 270) | MTPDLRERLENLRKKPENIPQPISNTSRANLNKLLTDYTEMKKAIL |
| | | HVYWEEFQKDPVGLMSRVAQPASKKIDQNKLKPEMDEKGNLTTAGF |
| | | ACSQCGQPLFVYKLEQVSEKGKAYTNYFGRCNVAEHEKLILLAQLK |
| | | PEKDSDEAVTYSLGKFGQRALDFYSIHVTKESTHPVKPLAQIAGNR |
| | | YASGPVGKALSDACMGTIASFLSKYQDIIIEHQKVVKGNQKRLESL |
| | | RELAGKENLEYPSVTLPPQPHTKEGVDAYNEVIARVRMWVNLNLWQ |
| | | KLKLSRDDAKPLLRLKGFPSFPLVERQANEVDWWDMVCNVKKLINE |
| | | KKEDGKVFWQNLAGYKRQEALRPYLSSEEDRKKGKKFARYQLGDLL |
| | | LHLEKKHGEDWGKVYDEAWERIDKKVEGLSKHIKLEEERRSEDAQS |
| | | KAALTDWLRAKASFVIEGLKEADKDEFCRCELKLQKWYGDLRGKPF |
| | | AIEAENSILDISGFSKQYNCAFIWQKDGVKKLNLYLIINYFKGGKL |
| | | RFKKIKPEAFEANRFYTVINKKSGEIVPMEVNFNFDDPNLIILPLA |
| | | FGKRQGREFIWNDLLSLETGSLKLANGRVIEKTLYNRRTRQDEPAL |
| | | FVALTFERREVLDSSNIKPMNLIGVDRGENIPAVIALTDPEGCPLS |
| | | RFKDSLGNPTHILRIGESYKEKQRTIQAKKEVEQRRAGGYSRKYAS |
| | | KAKNLADDMVRNTARDLLYYAVTQDAMLIFENLSRGFGRQGKRTEM |
| | | AERQYTRMEDWLTAKLAYEGLSKTYLSKTLAQYTSKTCSNCGFTIT |
| | | SADYDRVLEKLKKTATGWMTTINGKELKVEGQITYYNRYKRQNVVK |
| | | DLSVELDRLSEESVNNDISSWTKGRSGEALSLLKKRFSHRPVQEKF |
| | | VCLNCGFETHADEQAALNIARSWLFLRSQEYKKYQTNKTTGNTDKR |
| | | AFVETWQSFYRKKLKEVWKPAVTSPKKKRKV (SEQ ID NO: |
| | | 280) |
| CasX 494 | (SEQ | MAPKKKRKVSRQEIKRINKIRRRLVKDSNTKKAGKTGPMKTLLVRV |
| | ID NO: 271) | MTPDLRERLENLRKKPENIPQPISNTSRANLNKLLTDYTEMKKAIL |
| | | HVYWEEFQKDPVGLMSRVAQPASKKIDQNKLKPEMDEKGNLTTAGF |
| | | ACSQCGQPLFVYKLEQVSEKGKAYTNYFGRCNVAEHEKLILLAQLK |
| | | PEKDSDEAVTYSLGKFGQRALDFYSIHVTRESNHPVKPLEQIGGNS |
| | | CASGPVGKALSDACMGAVASFLTKYQDIILEHQKVIKKNEKRLANL |
| | | KDIASANGLAFPKITLPPQPHTKEGIEAYNNVVAQIVIWVNLNLWQ |
| | | KLKIGRDEAKPLQRLKGFPSFPLVERQANEVDWWDMVCNVKKLINE |
| | | KKEDGKVFWQNLAGYKRQEALRPYLSSEEDRKKGKKFARYQLGDLL |
| | | LHLEKKHGEDWGKVYDEAWERIDKKVEGLSKHIKLEEERRSEDAQS |
| | | KAALTDWLRAKASFVIEGLKEADKDEFCRCELKLQKWYGDLRGKPF |
| | | AIEAENSILDISGFSKQYNCAFIWQKDGVKKLNLYLIINYFKGGKL |
| | | RFKKIKPEAFEANRFYTVINKKSGEIVPMEVNFNFDDPNLIILPLA |
| | | FGKRQGREFIWNDLLSLETGSLKLANGRVIEKTLYNRRTRQDEPAL |
| | | FVALTFERREVLDSSNIKPMNLIGVDRGENIPAVIALTDPEGCPLS |
| | | RFKDSLGNPTHILRIGESYKEKQRTIQAKKEVEQRRAGGYSRKYAS |
| | | KAKNLADDMVRNTARDLLYYAVTQDAMLIFENLSRGFGRQGKRTEM |
| | | AERQYTRMEDWLTAKLAYEGLSKTYLSKTLAQYTSKTCSNCGETIT |
| | | SADYDRVLEKLKKTATGWMTTINGKELKVEGQITYYNRYKRQNVVK |
| | | DLSVELDRLSEESVNNDISSWTKGRSGEALSLLKKRFSHRPVQEKF |
| | | VCLNCGFETHADEQAALNIARSWLFLRSQEYKKYQTNKTTGNTDKR |
| | | AFVETWQSFYRKKLKEVWKPAVTSPKKKRKV (SEQ ID NO: |
| | | 281) |

### Example 6: Generation of RNA Guides

[0565] For the generation of RNA single guides and spacers, templates for in vitro transcription were generated by performing PCR with Q5 polymerase (NEB M0491) according to the recommended protocol, with template oligos for each backbone and amplification primers with the T7 promoter and the spacer sequence. The DNA primer sequences for the T7 promoter, guide and spacer for guides and spacers are presented in Table 11, below. The template oligos, labeled “backbone fwd” and “backbone rev” for each scaffold, were included at a final concentration of 20 nM each, and the amplification primers (T7 promoter and the unique spacer primer) were included at a final concentration of 1 uM each. The sg2, sg32, sg64, and sg174 guides correspond to SEQ ID NOS: 5, 2104, 2106, and 2238, respectively, with the exception that sg2, sg32, and sg64 were modified with an additional 5′ G to increase transcription efficiency (compare sequences in Table 11 to Table 2). The 7.37 spacer targets beta2-microglobulin (B2M). Following PCR amplification, templates were cleaned and isolated by phenol-chloroform-isoamyl alcohol extraction followed by ethanol precipitation.

[0566] In vitro transcriptions were carried out in buffer containing 50 mM Tris pH 8.0, 30 mM MgCl₂, 0.01% Triton X-100, 2 mM spermidine, 20 mM DTT, 5 mM NTPs, 0.5 μM template, and 100 μg/mL T7 RNA polymerase. Reactions were incubated at 37° C. overnight. 20 units of DNase I (Promega #M6101)) were added per 1 mL of transcription volume and incubated for one hour. RNA products were purified via denaturing PAGE, ethanol precipitated, and resuspended in 1× phosphate buffered saline. To fold the sgRNAs, samples were heated to 70° C. for 5 min and then cooled to room temperature. The reactions were supplemented to 1 mM final MgCl₂ concentration, heated to 50° C. for 5 min and then cooled to room temperature. Final RNA guide products were stored at −80° C.

TABLE 11
Sequences for generation of guide RNA

| Primer | Primer sequence | RNA product |
|---|---|---|
| T7 promoter | GAAATTAATACGACTCACTATA (SEQ ID NO: | Used for all |
| primer | 282) | |
| sg2 backbone | GAAATTAATACGACTCACTATAGGTACTGGCGCTT | GGUACUGGCGCUUUU |
| fwd | TTATCTCATTACTTTGAGAGCCATCACCAGCGACT | AUCUCAUUACUUUGA |
| | ATGTCGTATGGGTAAAG (SEQ ID NO: 283) | GAGCCAUCACCAGCG |
| sg2 backbone | CTTTGATGCTTCTTATTTATCGGATTTCTCTCCGA | ACUAUGUCGUAUGGG |
| rev | TAAATAAGCGCTTTACCCATACGACATAGTCGCTG | UAAAGCGCUUAUUUA |
| | GTGATGGC (SEQ ID NO: 284) | UCGGAGAGAAAUCCG |
| sg2.7.37 | CGGAGCGAGACATCTCGGCCCTTTGATGCTTCTTA | AUAAAUAAGAAGCAU |
| spacer primer | TTTATCGGATTTCTCTCCG (SEQ ID NO: | CAAAGGGCCGAGAUG |
| | 285) | UCUCGCUCCG (SEQ |
| | | ID NO: 295) |
| sg32 backbone | GAAATTAATACGACTCACTATAGGTACTGGCGCTT | GGUACUGGCGCUUUU |
| fwd | TTATCTCATTACTTTGAGAGCCATCACCAGCGACT | AUCUCAUUACUUUGA |
| | ATGTCGTATGGGTAAAGCGC (SEQ ID NO: | GAGCCAUCACCAGCG |
| | 286) | ACUAUGUCGUAUGGG |
| sg32 backbone | CTTTGATGCTTCCCTCCGAAGAGGGCGCTTTACCC | UAAAGCGCCCUCUUC |
| rev | ATACGACATAG (SEQ ID NO: 287) | GGAGGGAAGCAUCAA |
| sg32.7.37 | CGGAGCGAGACATCTCGGCCCTTTGATGCTTCCCT | AGGGCCGAGAUGUCU |
| spacer primer | CCGAAGAG (SEQ ID NO: 288) | CG (SEQ ID NO: |
| | | 296) |
| sg64 backbone | GAAATTAATACGACTCACTATAGGTACTGGCGCCT | GGUACUGGCGCCUUU |
| fwd | TTATCTCATTACTTTGAGAGCCATCACCAGCGACT | AUCUCAUUACUUUGA |
| | ATGTCGTATGGGTAAAGCGC (SEQ ID NO: | GAGCCAUCACCAGCG |
| | 289) | ACUAUGUCGUAUGGG |
| sg64 backbone | CTTTGATGCTTCTTACGGACCGAAGTCCGTAAGCG | UAAAGCGCUUACGGA |
| rev | CTTTACCCATACGACATAG (SEQ ID NO: | CUUCGGUCCGUAAGA |
| | 290) | AGCAUCAAAGGGCCG |
| sg64.7.37 | CGGAGCGAGACATCTCGGCCCTTTGATGCTTCTTA | AGAUGUCUCGCUCCG |
| spacer primer | CGGACCGAAG (SEQ ID NO: 291) | (SEQ ID NO: |
| | | 297) |
| sg174 | GAAATTAATACGACTCACTATAACTGGCGCTTTTA | ACUGGCGCUUUUAUC |
| backbone fwd | TCTGATTACTTTGAGAGCCATCACCAGCGACTATG | UgAUUACUUUGAGAG |
| | TCGTAGTGGGTAAAGCT (SEQ ID NO: 292) | CCAUCACCAGCGACU |
| sg174 | CTTTGATGCTCCCTCCGAAGAGGGAGCTTTACCCA | AUGUCGUAgUGGGUA |
| backbone rev | CTACGACATAGTCGC (SEQ ID NO: 293) | AAGCUCCCUCUUCGG |
| sg174.7.37 | CGGAGCGAGACATCTCGGCCCTTTGATGCTCCCTC | AGGGAGCAUCAAAGG |
| spacer primer | C (SEQ ID NO: 294) | GCCGAGAUGUCUCGC |
| | | UCCG (SEQ ID |
| | | NO: 298) |

### Example 7: RNP Assembly

[0567] Purified wild-type and RNP of CasX and single guide RNA (sgRNA) were either prepared immediately before experiments or prepared and snap-frozen in liquid nitrogen and stored at −80° C. for later use. To prepare the RNP complexes, the CasX protein was incubated with sgRNA at 1:1.2 molar ratio. Briefly, sgRNA was added to Buffer #1 (25 mM NaPi, 150 mM NaCl, 200 mM trehalose, 1 mM MgCl2), then the CasX was added to the sgRNA solution, slowly with swirling, and incubated at 37° C. for 10 min to form RNP complexes. RNP complexes were filtered before use through a 0.22 m Costar 8160 filters that were pre-wet with 200 l Buffer #1. If needed, the RNP sample was concentrated with a 0.5 ml Ultra 100-Kd cutoff filter, (Millipore part #UFC510096), until the desired volume was obtained. Formation of competent RNP was assessed as described in Example 13.

### Example 8: Assessing Binding Affinity to the Guide RNA

[0568] Purified wild-type and improved CasX will be incubated with synthetic single-guide RNA containing a 3′ Cy7.5 moiety in low-salt buffer containing magnesium chloride as well as heparin to prevent non-specific binding and aggregation. The sgRNA will be maintained at a concentration of 10 pM, while the protein will be titrated from 1 pM to 100 μM in separate binding reactions. After allowing the reaction to come to equilibrium, the samples will be run through a vacuum manifold filter-binding assay with a nitrocellulose membrane and a positively charged nylon membrane, which bind protein and nucleic acid, respectively. The membranes will be imaged to identify guide RNA, and the fraction of bound vs unbound RNA will be determined by the amount of fluorescence on the nitrocellulose vs nylon membrane for each protein concentration to calculate the dissociation constant of the protein-sgRNA complex. The experiment will also be carried out with improved variants of the sgRNA to determine if these mutations also affect the affinity of the guide for the wild-type and mutant proteins. We will also perform electromobility shift assays to qualitatively compare to the filter-binding assay and confirm that soluble binding, rather than aggregation, is the primary contributor to protein-RNA association.

### Example 9: Assessing Binding Affinity to the Target DNA

[0569] Purified wild-type and improved CasX will be complexed with single-guide RNA bearing a targeting sequence complementary to the target nucleic acid. The RNP complex will be incubated with double-stranded target DNA containing a PAM and the appropriate target nucleic acid sequence with a 5′ Cy7.5 label on the target strand in low-salt buffer containing magnesium chloride as well as heparin to prevent non-specific binding and aggregation. The target DNA will be maintained at a concentration of 1 nM, while the RNP will be titrated from 1 pM to 100 μM in separate binding reactions. After allowing the reaction to come to equilibrium, the samples will be run on a native 5% polyacrylamide gel to separate bound and unbound target DNA. The gel will be imaged to identify mobility shifts of the target DNA, and the fraction of bound vs unbound DNA will be calculated for each protein concentration to determine the dissociation constant of the RNP-target DNA ternary complex.

### Example 10: Assessing Differential PAM Recognition In Vitro

[0570] Purified wild-type and engineered CasX variants will be complexed with single-guide RNA bearing a fixed targeting sequence. The RNP complexes will be added to buffer containing MgCl2 at a final concentration of 100 nM and incubated with 5′ Cy7.5-labeled double-stranded target DNA at a concentration of 10 nM. Separate reactions will be carried out with different DNA substrates containing different PAMs adjacent to the target nucleic acid sequence. Aliquots of the reactions will be taken at fixed time points and quenched by the addition of an equal volume of 50 mM EDTA and 95% formamide. The samples will be run on a denaturing polyacrylamide gel to separate cleaved and uncleaved DNA substrates. The results will be visualized and the rate of cleavage of the non-canonical PAMs by the CasX variants will be determined.

### Example 11: Assessing Nuclease Activity for Double-Strand Cleavage

[0571] Purified wild-type and engineered CasX variants will be complexed with single-guide RNA bearing a fixed HRS targeting sequence. The RNP complexes will be added to buffer containing MgCl2 at a final concentration of 100 nM and incubated with double-stranded target DNA with a 5′ Cy7.5 label on either the target or non-target strand at a concentration of 10 nM. Aliquots of the reactions will be taken at fixed time points and quenched by the addition of an equal volume of 50 mM EDTA and 95% formamide. The samples will be run on a denaturing polyacrylamide gel to separate cleaved and uncleaved DNA substrates. The results will be visualized and the cleavage rates of the target and non-target strands by the wild-type and engineered variants will be determined. To more clearly differentiate between changes to target binding vs the rate of catalysis of the nucleolytic reaction itself, the protein concentration will be titrated over a range from 10 nM to 1 uM and cleavage rates will be determined at each concentration to generate a pseudo-Michaelis-Menten fit and determine the kcat* and KM*. Changes to KM* are indicative of altered binding, while changes to kcat* are indicative of altered catalysis.

### Example 12: Assessing Target Strand Loading for Cleavage

[0572] Purified wild-type and engineered CasX 491 will be complexed with single-guide RNA bearing a fixed HRS targeting sequence. The RNP complexes will be added to buffer containing MgCl2 at a final concentration of 100 nM and incubated with double-stranded target DNA with a 5′ Cy7.5 label on the target strand and a 5′ Cy5 label on the non-target strand at a concentration of 10 nM. Aliquots of the reactions will be taken at fixed time points and quenched by the addition of an equal volume of 50 mM EDTA and 95% formamide. The samples will be run on a denaturing polyacrylamide gel to separate cleaved and uncleaved DNA substrates. The results will be visualized and the cleavage rates of both strands by the variants will be determined. Changes to the rate of target strand cleavage but not non-target strand cleavage would be indicative of improvements to the loading of the target strand in the active site for cleavage. This activity could be further isolated by repeating the assay with a dsDNA substrate that has a gap on the non-target strand, mimicking a pre-cleaved substrate. Improved cleavage of the non-target strand in this context would give further evidence that the loading and cleavage of the target strand.

### Example 13: CasX:gNA In Vitro Cleavage Assays

### 1. Determining Cleavage-Competent Fractions for Protein Variants Compared to Wild-Type Reference CasX

[0573] The ability of CasX variants to form active RNP compared to reference CasX was determined using an in vitro cleavage assay. The beta-2 microglobulin (B2M) 7.37 target for the cleavage assay was created as follows. DNA oligos with the sequence TGAAGCTGACAGCATTCGGGCCGAGATGTCTCGCTCCGTGGCCTTAGCTGTGCTCGCGCT (non-target strand, NTS (SEQ ID NO: 299)) and TGAAGCTGACAGCATTCGGGCCGAGATGTCTCGCTCCGTGGCCTTAGCTGTGCTCGCGCT (target strand, TS (SEQ ID NO: 300)) were purchased with 5′ fluorescent labels (LI-COR TRDye 700 and 800, respectively). dsDNA targets were formed by mixing the oligos in a 1:1 ratio in 1× cleavage buffer (20 mM Tris HCl pH 7.5, 150 mM NaCl, 1 mM TCEP, 5% glycerol, 10 mM MgCl₂), heating to 95° C. for 10 minutes, and allowing the solution to cool to room temperature.

[0574] CasX RNPs were reconstituted with the indicated CasX and guides (see graphs) at a final concentration of 1 μM with 1.5-fold excess of the indicated guide unless otherwise specified in 1× cleavage buffer (20 mM Tris HCl pH 7.5, 150 mM NaCl, 1 mM TCEP, 5% glycerol, 10 mM MgCl₂) at 37° C. for 10 min before being moved to ice until ready to use. The 7.37 target was used, along with sgRNAs having spacers complementary to the 7.37 target.

[0575] Cleavage reactions were prepared with final RNP concentrations of 100 nM and a final target concentration of 100 nM. Reactions were carried out at 37° C. and initiated by the addition of the 7.37 target DNA. Aliquots were taken at 5, 10, 30, 60, and 120 minutes and quenched by adding to 95% formamide, 20 mM EDTA. Samples were denatured by heating at 95° C. for 10 minutes and run on a 10% urea-PAGE gel. The gels were either imaged with a LI-COR Odyssey CLx and quantified using the LI-COR Image Studio software or imaged with a Cytiva Typhoon and quantified using the Cytiva IQTL software. The resulting data were plotted and analyzed using Prism. We assumed that CasX acts essentially as a single-turnover enzyme under the assayed conditions, as indicated by the observation that sub-stoichiometric amounts of enzyme fail to cleave a greater-than-stoichiometric amount of target even under extended time-scales and instead approach a plateau that scales with the amount of enzyme present. Thus, the fraction of target cleaved over long time-scales by an equimolar amount of RNP is indicative of what fraction of the RNP is properly formed and active for cleavage. The cleavage traces were fit with a biphasic rate model, as the cleavage reaction clearly deviates from monophasic under this concentration regime, and the plateau was determined for each of three independent replicates. The mean and standard deviation were calculated to determine the active fraction (Table 12). The graph is shown in FIG. 9.

[0576] Apparent active (competent) fractions were determined for RNPs formed for CasX2+guide 174+7.37 spacer, CasX119+guide 174+7.37 spacer, CasX457+guide 174+7.37 spacer, CasX488+guide 174+7.37 spacer, and CasX491+guide 174+7.37 spacer. The determined active fractions are shown in Table 12. All CasX variants had higher active fractions than the wild-type CasX2, indicating that the engineered CasX variants form significantly more active and stable RNP with the identical guide under tested conditions compared to wild-type CasX. This may be due to an increased affinity for the sgRNA, increased stability or solubility in the presence of sgRNA, or greater stability of a cleavage-competent conformation of the engineered CasX:sgRNA complex. An increase in solubility of the RNP was indicated by a notable decrease in the observed precipitate formed when CasX457, CasX488, or CasX491 was added to the sgRNA compared to CasX2.

2. In Vitro Cleavage Assays—Determining k_{cleave} for CasX Variants Compared to Wild-Type Reference CasX

[0577] Cleavage-competent fractions were also determined using the same protocol for CasX2.2.7.37, CasX2.32.7.37, CasX2.64.7.37, and CasX2.174.7.37 to be 16±3%, 13±3%, 5±2%, and 22±5%, as shown in FIG. 10 and Table 12.

[0578] A second set of guides were tested under different conditions to better isolate the contribution of the guide to RNP formation. 174, 175, 185, 186, 196, 214, and 215 guides with 7.37 spacer were mixed with CasX491 at final concentrations of 1 μM for the guide and 1.5 μM for the protein, rather than with excess guide as before. Results are shown in FIG. 11 and Table 12. Many of these guides exhibited additional improvement over 174, with 185 and 196 achieving 91±4% and 91±1% competent fractions, respectively, compared with 80±9% for 174 under these guide-limiting conditions.

[0579] The data indicate that both CasX variants and sgRNA variants are able to form a higher degree of active RNP with guide RNA compare to wild-type CasX and wild-type sgRNA.

[0580] The apparent cleavage rates of CasX variants 119, 457, 488, and 491 compared to wild-type reference CasX were determined using an in vitro fluorescent assay for cleavage of the target 7.37.

[0581] CasX RNPs were reconstituted with the indicated CasX (see FIG. 12) at a final concentration of 1 μM with 1.5-fold excess of the indicated guide in 1× cleavage buffer (20 mM Tris HCl pH 7.5, 150 mM NaCl, 1 mM TCEP, 5% glycerol, 10 mM MgCl₂) at 37° C. for 10 min before being moved to ice until ready to use. Cleavage reactions were set up with a final RNP concentration of 200 nM and a final target concentration of 10 nM. Reactions were carried out at 37° C. except where otherwise noted and initiated by the addition of the target DNA. Aliquots were taken at 0.25, 0.5, 1, 2, 5, and 10 minutes and quenched by adding to 95% formamide, 20 mM EDTA. Samples were denatured by heating at 95° C. for 10 minutes and run on a 10% urea-PAGE gel. The gels were imaged with a LI-COR Odyssey CLx and quantified using the LI-COR Image Studio software or imaged with a Cytiva Typhoon and quantified using the Cytiva IQTL software. The resulting data were plotted and analyzed using Prism, and the apparent first-order rate constant of non-target strand cleavage (k_{cleave}) was determined for each CasX:sgRNA combination replicate individually. The mean and standard deviation of three replicates with independent fits are presented in Table 12, and the cleavage traces are shown in FIG. 12.

[0582] Apparent cleavage rate constants were determined for wild-type CasX2, and CasX variants 119, 457, 488, and 491 with guide 174 and spacer 7.37 utilized in each assay (see Table 12 and FIG. 12). All CasX variants had improved cleavage rates relative to the wild-type CasX2. CasX457 cleaved more slowly than 119, despite having a higher competent fraction as determined above. CasX488 and CasX491 had the highest cleavage rates by a large margin; as the target was almost entirely cleaved in the first timepoint, the true cleavage rate exceeds the resolution of this assay, and the reported k_{cleave} should be taken as a lower bound.

[0583] The data indicate that the CasX variants have a higher level of activity, with k_{cleave} rates reaching at least 30-fold higher compared to wild-type CasX2.

### 3. In Vitro Cleavage Assays: Comparison of Guide Variants to Wild-Type Guides

[0584] Cleavage assays were also performed with wild-type reference CasX2 and reference guide 2 compared to guide variants 32, 64, and 174 to determine whether the variants improved cleavage. The experiments were performed as described above. As many of the resulting RNPs did not approach full cleavage of the target in the time tested, we determined initial reaction velocities (V₀) rather than first-order rate constants. The first two timepoints (15 and 30 seconds) were fit with a line for each CasX:sgRNA combination and replicate. The mean and standard deviation of the slope for three replicates were determined (FIG. 13).

[0585] Under the assayed conditions, the V₀ for CasX2 with guides 2, 32, 64, and 174 were 20.4±1.4 nM/min, 18.4±2.4 nM/min, 7.8±1.8 nM/min, and 49.3±1.4 nM/min (see Table 12 and FIG. 13 and FIG. 14). Guide 174 showed substantial improvement in the cleavage rate of the resulting RNP (˜2.5-fold relative to 2, see FIG. 14), while guides 32 and 64 performed similar to or worse than guide 2. Notably, guide 64 supports a cleavage rate lower than that of guide 2 but performs much better in vivo (data not shown). Some of the sequence alterations to generate guide 64 likely improve in vivo transcription at the cost of a nucleotide involved in triplex formation. Improved expression of guide 64 likely explains its improved activity in vivo, while its reduced stability may lead to improper folding in vitro.

[0586] Additional experiments were carried out with guides 174, 175, 185, 186, 196, 214, and 215 with spacer 7.37 and CasX 491 to determine relative cleavage rates. To reduce cleavage kinetics to a range measurable with our assay, the cleavage reactions were incubated at 10° C. Results are in FIG. 15 and Table 12. Under these conditions, 215 was the only guide that supported a faster cleavage rate than 174.196, which exhibited the highest active fraction of RNP under guide-limiting conditions, had kinetics essentially the same as 174, again highlighting that different variants result in improvements of distinct characteristics.

[0587] The data support that, under the conditions of the assay, use of the majority of the guide variants with CasX results in RNP with a higher level of activity than one with the wild-type guide, with improvements in initial cleavage velocity ranging from ˜2-fold to >6-fold. Numbers in Table 12 indicate, from left to right, CasX variant, sgRNA scaffold, and spacer sequence of the RNP construct. In the RNP construct names in the table below, CasX protein variant, guide scaffold and spacer are indicated from left to right.

TABLE 12
Results of cleavage and RNP formation assays

| RNP | | | Competent |
|---|---|---|---|
| Construct | k_{cleave}* | Initial velocity* | fraction |
| 2.2.7.37 | | 20.4 ± 1.4 | 16 ± 3% |
| | | nM/min | |
| 2.32.7.37 | | 18.4 ± 2.4 | 13 ± 3% |
| | | nM/min | |
| 2.64.7.37 | | 7.8 ± 1.8 | 5 ± 2% |
| | | nM/min | |
| 2.174.7.37 | 0.51 ± 0.01 min⁻¹ | 49.3 ± 1.4 | 22 ± 5% |
| | | nM/min | |
| 119.174.7.37 | 6.29 ± 2.11 min⁻¹ | | 35 ± 6% |
| 457.174.7.37 | 3.01 ± 0.90 min⁻¹ | | 53 ± 7% |
| 488.174.7.37 | 15.19 min⁻¹ | | 67% |
| 491.174.7.37 | 16.59 min⁻¹/0.293 | | 83%/17% (guide- |
| | min⁻¹ (10° C.) | | limited) |
| 491.175.7.37 | 0.089 min⁻¹ (10° C.) | | 5% (guide- |
| | | | limited) |
| 491.185.7.37 | 0.227 min⁻¹ (10° C.) | | 44% (guide- |
| | | | limited) |
| 491.186.7.37 | 0.099 min⁻¹ (10° C.) | | 11% (guide- |
| | | | limited) |
| 491.196.7.37 | 0.292 min⁻¹ (10° C.) | | 46% (guide- |
| | | | limited) |
| 491.214.7.37 | 0.284 min⁻¹ (10° C.) | | 30% (guide- |
| | | | limited) |
| 491.215.7.37 | 0.398 min⁻¹ (10° C.) | | 38% (guide- |
| | | | limited) |

*Mean and standard deviation

### Example 14: Assessing Differential PAM Recognition In Vitro

[0588] In vitro cleavage assays were performed essentially as described in Example 13, using CasX2, CasX119, and CasX438 complexed with sg174.7.37. Fluorescently labeled dsDNA targets with a 7.37 spacer and either a TTC, CTC, GTC, or ATC PAM were used (sequences are in Table 13). Time points were taken at 0.25, 0.5, 1, 2, 5, 10, 30, and 60 minutes. Gels were imaged with an Cytiva Typhoon and quantified using the IQTL 8.2 software. Apparent first-order rate constants for non-target strand cleavage (k_{cleave}) were determined for each Casx:sgRNA complex on each target. Rate constants for targets with non-TTC PAM were compared to the TTC PAM target to determine whether the relative preference for each PAM was altered in a given protein variant.

[0589] For all variants, the TTC target supported the highest cleavage rate, followed by the ATC, then the CTC, and finally the GTC target (FIGS. 16A-16D, Table 14). For each combination of CasX variant and NTC PAM, the cleavage rate k_{cleave} is shown. For all non-NTC PAMs, the relative cleavage rate as compared to the TTC rate for that variant is shown in parentheses. All non-TTC PAMs exhibited substantially decreased cleavage rates (>10-fold for all). The ratio between the cleavage rate of a given non-TTC PAM and the TTC PAM for a specific variant remained generally consistent across all variants. The CTC target supported cleavage 3.5-4.3% as fast as the TTC target; the GTC target supported cleavage 1.0-1.4% as fast; and the ATC target supported cleavage 6.5-8.3% as fast. The exception is for 491, where the kinetics of cleavage at TTC PAMs are too fast to allow accurate measurement, which artificially decreases the apparent difference between TTC and non-TTC PAMs. Comparing the relative rates of 491 on GTC, CTC, and ATC PAMs, which fall within the measurable range, results in ratios comparable to those for other variants when comparing across non-TTC PAMs, consistent with the rates increasing in tandem. Overall, differences between the variants are not substantial enough to suggest that the relative preference for the various NTC PAMs have been altered. However, the higher basal cleavage rates of the variants allow targets with ATC or CTC PAMs to be cleaved nearly completely within 10 minutes, and the apparent k_{cleaves} are comparable to or greater than the k_{cleave} of CasX2 on a TTC PAM (Table 14). This increased cleavage rate may cross the threshold necessary for effective genome editing in a human cell, explaining the apparent increase in PAM flexibility for these variants.

TABLE 13
Sequences of DNA substrates used in in vitro PAM cleavage assay.

| Guide* | DNA Sequence | SEQ ID NO |
|---|---|---|
| 7.37 TTC | AGCGCGAGCACAGCTAAGGCCACGGAGCGAGACATCTCGG | 301 |
| PAM TS | CCCGAATGCTGTCAGCTTCA | |
| 7.37 TTC | TGAAGCTGACAGCATTCGGGCCGAGATGTCTCGCTCCGTG | 302 |
| PAM NTS | GCCTTAGCTGTGCTCGCGCT | |
| 7.37 CTC | AGCGCGAGCACAGCTAAGGCCACGGAGCGAGACATCTCGG | 303 |
| PAM TS | CCCGAGTGCTGTCAGCTTCA | |
| 7.37 CTC | TGAAGCTGACAGCACTCGGGCCGAGATGTCTCGCTCCGTG | 304 |
| PAM NTS | GCCTTAGCTGTGCTCGCGCT | |
| 7.37 GTC | AGCGCGAGCACAGCTAAGGCCACGGAGCGAGACATCTCGG | 305 |
| PAM TS | CCCGACTGCTGTCAGCTTCA | |
| 7.37 GTC | TGAAGCTGACAGCAGTCGGGCCGAGATGTCTCGCTCCGTG | 305 |
| PAM NTS | GCCTTAGCTGTGCTCGCGCT | |
| 7.37 ATC | AGCGCGAGCACAGCTAAGGCCACGGAGCGAGACATCTCGG | 307 |
| PAM TS | CCCGATTGCTGTCAGCTTCA | |
| 7.37 ATC | TGAAGCTGACAGCAATCGGGCCGAGATGTCTCGCTCCGTG | 308 |
| PAM NTS | GCCTTAGCTGTGCTCGCGCT | |

*The PAM sequences for each are bolded. TS-target strand. NTS-Non-target strand.

TABLE 14
Apparent cleavage rates of CasX variants against NTC PAMs.

| Variant | TTC | | CTC | GTC | ATC |
|---|---|---|---|---|---|
| 2 | 0.267 | min⁻¹ | 9.29E−3 min⁻¹ | 3.75E−3 min⁻¹ | 1.87E−2 min⁻¹ |
| | | | (0.035) | (0.014) | (0.070) |
| 119 | 8.33 | min⁻¹ | 0.303 min⁻¹ | 8.64E−2 min⁻¹ | 0.540 min⁻¹ |
| | | | (0.036) | (0.010) | (0.065) |
| 438 | 4.94 | min⁻¹ | 0.212 min⁻¹ | 1.31E−2 min⁻¹ | 0.408 min⁻¹ |
| | | | (0.043) | (0.013) | (0.083) |
| 491 | 16.42 | min⁻¹ | 8.605 min⁻¹ | 2.447 min⁻¹ | 11.33 min⁻¹ |
| | | | (0.524) | (0.149) | (0.690) |

### Example 15: Identification of Nicking Variants

[0590] Purified modified CasX variants will be complexed with single-guide RNA bearing a fixed targeting sequence. The RNP complexes will be added to buffer containing MgCl₂ at a final concentration of 100 nM and incubated with double-stranded target DNA with a 5′ fluorescein label on the target strand and a 5′ Cy5 label on the non-target strand at a concentration of 10 nM. Aliquots of the reactions will be taken at fixed time points and quenched by the addition of an equal volume of 50 mM EDTA and 9500 formamide. The samples will be run on a denaturing polyacrylamide gel to separate cleaved and uncleaved DNA substrates. Efficient cleavage of one strand but not the other would be indicative that the variant possessed single-strand nickase activity.

### Example 16: Assessing Improved Expression and Solubility Characteristics of CasX Variants for RNP Production

[0591] Wild-type and modified CasX variants will be expressed in BL21 (DE3) E. coli under identical conditions. All proteins will be under the control of an IPTG-inducible T7 promoter. Cells will be grown to an OD of 0.6 in TB media at 37° C., at which point the growth temperature will be reduced to 16° C. and expression will be induced by the addition of 0.5 mM IPTG. Cells will be harvested following 18 hours of expression. Soluble protein fractions will be extracted and analyzed on an SDS-PAGE gel. The relative levels of soluble CasX expression will be identified by Coomassie staining. The proteins will be purified in parallel according to the protocol above, and final yields of pure protein will be compared. To determine the solubility of the purified protein, the constructs will be concentrated in storage buffer until the protein begins to precipitate. Precipitated protein will be removed by centrifugation and the final concentration of soluble protein will be measured to determine the maximum solubility for each variant. Finally, the CasX variants will be complexed with single guide RNA and concentrated until precipitation begins. Precipitated RNP will be removed by centrifugation and the final concentration of soluble RNP will be measured to determine the maximum solubility of each variant when bound to guide RNA.

### Example 17: CasX:gNA Editing of C9orf72

[0592] This example sets forth the parameters to make and test compositions capable of modifying a C9orf72 locus.

### Experimental Design:

### A) C9orf72-Modifying Spacer Selection Process:

[0593] 20 bp XTC PAM spacers will be designed to target the following regions in the human genome:
[0594] (a) C9orf72 cis enhancer elements
[0595] (b) C9orf72 proximal non-coding genetic elements highly conserved across vertebrates (UCSC genome browser)
[0596] (c) C9orf72 genomic locus. The C9orf72 gene is defined as the sequence that spans chr9: 27,546,546-27,573,866 of the human genome on chromosome 9 (Homo sapiens Updated Annotation Release 109.20191205, GRCh38.p13 (NCBI). The human C9orf72 gene is described in part in the NCBI database (ncbi.nlm.nih.gov) as Reference Sequence NC_000009.12, which is incorporated by reference herein. C9orf72 targeting spacers may be similarly assembled from other genomes.

### B) Methods for Generating C9orf72 Targeting Constructs:

[0597] In order to generate C9orf72 targeting constructs, C9orf72 targeting spacers will be cloned into a base mammalian-expression plasmid construct (pStX) that is comprised of the following components: codon optimized CasX (construct CasX 491 molecule and rRNA guide 174 (491.174); see Tables for sequences)+NLS; and a mammalian selection marker, puromycin. Spacer sequence DNA will be ordered as single-stranded DNA (ssDNA) oligos from Integrated DNA Technologies (IDT) consisting of the spacer sequence and the reverse complement of this sequence. These two oligos will be annealed together and cloned into pStX individually or in bulk by Golden Gate Assembly using T4 DNA Ligase and an appropriate restriction enzyme for the plasmid. Assembled products will be transformed into chemically- or electro-competent bacterial cells, plated on Lb-Agar plates containing carbenicillin and incubated until colonies appeared. Individual colonies will be picked and miniprepped using a Qiagen Qiaprep spin Miniprep Kit (Qiagen Cat #27104), following the manufacturer's protocol. The resultant plasmids will be sequenced using Sanger sequencing to ensure correct ligation. SaCas9 and SpyCas9 control plasmids, with spacers chosen based on Cas protein-specific PAMs, will be prepared similarly to pStX plasmids described above.

### C) Methods to Generate C9orf72 Reporter Line:

[0598] A fluorescent-encoding DNA (e.g., GFP) will be knocked in at the 3′ end of the last C9orf72 exon in a HEPG2 cell line. The modified cells will be expanded by serial passage every 3-5 days and maintained in Fibroblast (FB), consisting of Dulbecco's Modified Eagle Medium (DMEM; Corning Cellgro, #10-013-CV) supplemented with 10% fetal bovine serum (FBS; Seradigm, #1500-500), or other appropriate medium, and 100 Units/ml penicillin and 100 mg/ml streptomycin (100×-Pen-Strep; GIBCO #15140-122), and can additionally include sodium pyruvate (100×, Thermofisher #11360070), non-essential amino acids (100× Thermofisher #11140050), HEPES buffer (100× Thermofisher #15630080), and 2-mercaptoethanol (1000× Thermofisher #21985023). The cells will be incubated at 37° C. and 5% CO2. After 1-2 weeks, single GFP+ cells will be sorted into FB or other appropriate medium. The reporter line clones will be expanded by serial passage every 3-5 days and maintained in FB medium in an incubator at 37° C. and 5% CO2. The lines will be characterized via genomic sequencing, and functional modification of the C9orf72 locus using a C9orf72 targeting molecule. The optimal reporter lines will be identified as ones that i) had a single copy of GFP correctly integrated at the target C9orf72 locus, ii) maintained doubling times equivalent to unmodified cells, iii) resulted in reduction in GFP fluorescence upon disruption of the C9orf72 gene when assayed using the methods described, below.

### D) Methods to Assess C9orf72 Modifying Activity in C9orf72-GFP Reporter Cell Line:

[0599] C9orf72 reporter cells will be seeded at 20-40 k cells/well in a 96 well plate in 100 μl of FB (or other appropriate) medium and cultured in a 37° C. incubator with 5% CO2. The following day, confluence of seeded cells will be checked. Ideally, cells should be at ˜75% confluence at time of transfection. If cells will be at the right confluence, transfection will be carried out.

[0600] Each CasX construct (CasX 491 and guide 174, see Tables for sequences) with appropriate spacers targeting C9orf72 will be transfected at 100-500 ng per well using Lipofectamine 3000 following the manufacturer's protocol, using 3 wells per construct as replicates. SaCas9 and SpyCas9 targeting C9orf72 will be used as benchmarking controls. For each Cas protein type, a non-targeting plasmid will be used as a negative control.

[0601] After 24-48 hours of puromycin selection at 0.3-3 μg/ml, to select for successfully transfected cells, followed by 24-48 hours of recovery in FB or other appropriate medium, fluorescence in transfected cells will be analyzed via flow cytometry. In this process, cells will be gated for the appropriate forward and side scatter, selected for single cells and then gated for reporter expression (Attune Nxt Flow Cytometer, Thermo Fisher Scientific) to quantify the expression levels of fluorophores. At least 10,000 events will be collected for each sample. The data will be used to calculate the percentage of antibody-label negative (edited) cells.

[0602] A subset of cells for each sample from the example will be lysed, and genome extracted using a Quick extract solution following the manufacturer's protocol. Editing will be analyzed using a T7E1 assay. Briefly, the genomic locus at the targeted edit site will be amplified using primers (e.g., a 500 bp region around the intended target) using a PCR program on a thermocycler. The PCR amplicon will be then hybridized following a hybridization program on a thermocycler, and then treated with T7 Endonuclease for 30 minutes at 37° C. The sample will be then analyzed on a 2% agarose gel, or on a Fragment Analyzer to visualize DNA bands.

### Example 18: Methods to Assess C9orf72 Hexanucleotide Repeat Expansion (HRE) Modifying Activity in HEK293T Cells

[0603] HEK293T (Cell Culture Facility, UC Berkeley) were seeded at 30 k cells/well in a 96 well plate in 100 μl of FB medium and cultured in a 37° C. incubator with 5% C02. The following day, confluence of seeded cells will be checked. Cells that were at least ˜75% confluence at time of transfection were used for transfection.

[0604] Plasmid p59.491,174,29.X, encoding CasX construct 491 with guide 174 and appropriate spacers targeting sequences 5′ to 3′ to the HRE region C9orf72 (Table 15, with targeting locations in the locus shown schematically in FIG. 22), were lipofected at 100 ng per well using Lipofectamine 3000 following the manufacturer's protocol, and placed into 3 wells per construct as replicates. A non-targeting plasmid was used as a negative control. Puromycin selection at 1-3 μg/ml was used to select for successfully transfected cells. After 4 days, samples were harvested for gDNA extraction and amplified for NGS analysis.

### Results:

[0605] For single cuts, the percent editing is shown in Table 15 and results for a single spacer are shown in FIG. 23. Efficient editing was observed for multiple PAMs (i.e., ATC, GTC and TTC), with the highest efficiency editing seen with TTC.

[0606] For double cuts and drop-out of the HRE region, different combinations of spacers demonstrated efficient editing, with a corresponding deletion of the intervening HRE sequence, averaging approximately 36% (Table 16). A representative graph of editing is shown in FIG. 24.

[0607] The results demonstrate that, under the conditions of the experiments, the CasX system with a single guide can be utilized to edit cis regulatory elements as well as the HRE directly, while use of two guides can be utilized to successfully excise the HRE region.

TABLE 15
C9orf72 spacers and percent editing

| Spacer | | % | SEQ |
|---|---|---|---|
| # | Spacer Sequence | Editing | ID NO |
| 137 | CUUGUCCCUGCGCCGCCGCC | 32 | 309 |
| 138 | CCACCGCCUGCGCCUCCGCC | — | 310 |
| 140 | CCUCUAGCGACUGGUGGAAU | — | 311 |
| 141 | ACCAGUCGCUAGAGGCGAAA | — | 312 |
| 142 | CUCUCAUUUCUCUGACCGAA | — | 313 |
| 143 | ACCCGCGCCUCUUCCCGGCA | 51.86 | 314 |
| 144 | GCUGCCGGGAAGAGGCGCGG | 48.05 | 315 |
| 145 | CGGCAGCCGAACCCCAAACA | 52.8 | 316 |
| 146 | UGGCGGGUGGCUGUUUGGGG | 56.23 | 317 |
| 147 | UCACUCACCCACUCGCCACC | 49.93 | 318 |
| 148 | GCCGCCGCGGGCGCAGGCAC | 36.45 | 319 |
| 149 | GGGCGGGCCCGGGGGGGGC | 20.76 | 320 |
| 151 | GGAGUCGCGCGCUAGGGGCC | 53.12 | 321 |
| 153 | UGAGUUCCAGAGCUUGCUAC | 41.34 | 322 |
| 154 | AGAGCUUGCUACAGGCUGCG | 50.55 | 323 |
| 156 | UCUGGUUAAUCUUUAUCAGG | 44.25 | 324 |
| 158 | UGUUCACCCUCAGCGAGUAC | 59.26 | 325 |
| 159 | CCCUCAGCGAGUACUGUGAG | 50.88 | 326 |
| 161 | UAAACCCACACCUGCUCUUG | 27.45 | 327 |
| 162 | UGCUAGACCCCGCCCCCAAA | — | 328 |
| 163 | CUUUUGGGGGCGGGGUCUAG | 11.03 | 329 |
| 164 | GCCCACGUAAAAGAUGACGC | 65.42 | 330 |
| 165 | UUUACGUGGGCGGAACUUGU | 12.67 | 331 |
| 166 | CUUUCCUAGCGGGACACCGU | 24.08 | 332 |
| 167 | UUCCUAGCGGGACACCGUAG | 27.93 | 333 |
| 168 | UAGCGGGACACCGUAGGUUA | 54.33 | 334 |
| 170 | AUGUGCGAUGACGUUUUCUC | — | 335 |
| 171 | CUAGCCUCGUGAGAAAACGU | — | 336 |
| 172 | CACGAGGCUAGCGAAAUGGG | — | 337 |
| 173 | UUUAUCUUAAGACCCGCUCU | — | 338 |
| 175 | UCCAGAGCGGGUCUUAAGAU | — | 339 |
| 178 | UAAGACCCGCUCUGGAGGAG | — | 340 |
| 180 | CCAGAUCCAGCAGCCUCCCC | — | 341 |
| 181 | AAACCACGAAAUCGUCUUCA | 42.86 | 342 |
| 183 | UCCACCAAUUAUGUGUUGAG | 1.2 | 343 |

TABLE 16
Deletion editing by double-cut with 2 spacers

| Spacer | % Deletion |
|---|---|
| Combinations | Editing |
| 138/151 | 45.43 |
| 138/153 | 43.88 |
| 138/154 | 33.31 |
| 138/156 | 33.87 |
| 148/151 | 32.98 |
| 148/153 | 32.94 |
| 148/154 | 26.38 |
| 148/156 | 34.7 |
| 148/158 | 40.54 |
| 149/151 | 37.94 |
| 149/153 | 31.69 |
| 149/154 | 27.83 |
| 149/156 | 37.81 |
| 149/158 | 40.15 |

### Example 19: Methods to Package C9orf72 Targeting CasX Constructs in a Lentiviral Vector

[0608] Lentiviral particles packaging C9orf72 targeting CasX:gNA constructs (e.g., CasX 491 and guide 174) targeting C9orf72 will be produced by transfecting HEK293 at a confluency of 70%-90% using polyethylenimine based transfection of transgene plasmids encoding CasX, the guide RNA, the lentiviral packaging plasmid, and the VSV-G envelope plasmids. For lentiviral particle production, media will be changed 12 hr post-transfection, and the virus will be harvested at 36-48 hr post-transfection. Viral supernatants will be filtered using 0.45 m membrane filters, and diluted in FB media (Fibroblast medium, comprised of: DMEM with Glutamax (Gibco 10566-016) supplemented with MEM-NEAA (Thermo 11140050), sodium pyruvate (Thermo 11360070), HEPES (Thermo 15630080), 2-mercaptoethanol (Gibco 21985023), penicillin/streptomycin (Thermo 15140122) with 10% volume fraction of fetal bovine serum (FBS, VWR #97068-085)), if appropriate.

### Example 20: Methods to Assess C9orf72 Modification Via a Lentiviral Screen

[0609] Lentiviral plasmids are cloned as described above and following standard cloning procedures such that each lentiviral plasmid has one spacer-guide scaffold targeting C9orf72 and one codon optimized NLS bearing CasX molecule (e.g., construct CasX 491 molecule and rRNA guide 174 (491.174) with a puromycin selection marker. The cloning is carried out such that the final titer encompasses the full library size by >100× of all possible C9orf72 spacers targeting all known PAMs and their corresponding spacer regions in the C9orf72 gene. If ˜5,000 is the library size; the libraries evaluated would be >5×10⁵.

[0610] Lentiviral particles are produced by transfecting HEK293T at a confluency of 70%-90% using polyethylenimine based transfection of plasmids containing the spacer library, the lentiviral packaging plasmid and the VSV-G envelope plasmids. For particle production, media is changed 12 hr. post-transfection, and virus harvested at 36-48 hr post-transfection.

[0611] Viral supernatants are filtered using 0.45 μm membrane filters, diluted in FB media if appropriate, and added to target cells, in this case the C9orf72-GFP reporter cell line. Supplement polyberene is added at 5-20 μg/ml to enhance transduction efficiency, if necessary. Transduced cells are selected for 24-48 hr. post-transduction using puromycin at 0.3-3 μg/ml in FB medium, and grown for 7-10 days in FB or other appropriate medium in a 37° C. incubator with 5% CO₂.

[0612] Cells are sorted on a SH-100 or MA900 SONY sorter. In this process, cells are gated for the appropriate forward and side scatter, selected for single cells and then gated for reporter expression. Different cell sorting gates are established based on fluorescence level (OFF=full KO, Med=partial disruption or knockdown (KD), High=no edit, Very High=Enhancer) to distinguish between and collect cells editing by i) highly functional C9orf72 disrupting molecules, ii) molecules that only lower expression, and iii) molecules that increase expression. This assay can also be run to identify allele specific guides if two colors are used in human patient cells. Genomic DNA are collected from each group of sorted cells using Quick Extract (Lucigen Cat #QE09050) solution following manufacturer's recommended protocol.

[0613] Spacer libraries from each collected pool are then amplified via PCR directly from the genome and collected for deep sequencing on a Miseq. Analysis of the spacers is done according to gate and abundance for a specific activity; see below for detailed methods for NGS analysis of spacer hits.

[0614] Selected guides from each sorted group are then re-cloned and individually validated in reporter cell line and in primary human cell lines for activity by flow cytometry and T7E1 assay and/or Western blotting, and indel spectrum assessed by NGS analysis. Steps followed may be similar to the description provided under Methods to assess C9orf72 modifying activity in reporter cell line.

### Methods for NGS Analysis of Spacer Hits

[0615] Provided here are methods on how to analyze the next generation sequencing (NGS) data coming from above described lentiviral screen. Spacers are each assessed for ability to disrupt a C9orf72 gene using next generation sequencing (NGS). NGS libraries are generated through specific amplification of the lentiviral backbone containing the spacer. A different library is generated for each of the sorted populations (GFP high, med, low, etc., corresponding to low, med, high C9orf72 expression), and then assessed with the Illumina Hiseq.

[0616] Sequencing reads from the Illumina Hiseq are trimmed for adapter sequences and for regions of low sequencing quality. Paired end reads are merged based on their overlap sequence to form a single consensus sequence per sequenced fragment. Consensus sequences are aligned to the designed spacer sequences using bowtie2. Reads aligning to more than one designed spacer sequence are discarded.

[0617] The ‘abundance’ of each spacer sequence is defined as the number of reads aligning to that sequence. The abundance is tabulated for each sequencing library, forming a count table giving the abundance for each spacer sequence across each of the sequencing libraries (i.e., sorted populations). Finally, the numbers of abundances are then normalized to account for the differing sequencing depth of each library by dividing by the overall read count in that library, multiplied by the mean read count across libraries. The normalized count table is used to determine the activity of each spacer in each gate (high, medium, low, etc.).

[0618] A C9orf72-GFP reporter line will be constructed by knocking in GFP at the endogenous human C9orf72 locus. A reporter (e.g., GFP reporter) coupled to a gRNA targeting sequence, complementary to the gRNA spacer, is integrated into a reporter cell line. Cells are transformed or transfected with a CasX protein and/or sgRNA variant, with the spacer motif of the sgRNA complementary to and targeting the gRNA target sequence of the reporter. The ability of the CasX:sgRNA ribonucleoprotein complex to cleave the target nucleic acid sequence is assayed by FACS. Cells that lose reporter expression indicate occurrence of CasX:sgRNA ribonucleoprotein complex-mediated cleavage and indel formation. The reporting system is based on reduced GFP fluorescence upon successful modifying (editing) of the C9orf72 locus, detected by flow cytometry.

[0619] In an initial screen, two C9orf72 spacers of the gNA will be tested. The spacers will be tested with the CasX protein (construct CasX 491 with gNA 174), using SaCas9 and SpyCas9 as controls, in the reporter cell line. The reduction in GFP fluorescence, and editing, will be evaluated in the C9orf72-GFP reporter cells, selected for successful lipofection using puromycin, and later assayed for GFP disruption via FACS. The CasX 491 and guide 174 will be expected to edit at least 5-10% of cells, demonstrating that CasX can modify the endogenous C9orf72 locus, and do so more effectively than the SaCas9 and SpyCas9 system. A T7E1 assay or Western blotting will be performed to assay gene editing in the C9orf72-GFP reporter cell line. CasX 491 and guide 174 with C9orf72 targeting spacers and non-targeting control (NT) will be lipofected into C9orf72-GFP reporter cells, selected for successful lipofection using puromycin, and later assayed for gene editing in the T7E1 assay, demonstrating successful editing of the C9orf72 locus.

### Example 21: Method to Edit the C9orf72 Gene Using CasX Using Lentivirus Construct in an Allele Specific Manner

[0620] The example shows CasX's ability to edit the C9orf72 locus. One strategy to permanently treat a C9orf72 related disease is to specifically disrupt the mutant copy of the gene while sparing the WT allele. HEK293 cells with both wild-type alleles should be editable by a WT CasX spacer, but not by a mutant CasX spacer. This example will additionally demonstrate the ability of CasX spacers to distinguish between on-target and off-target alleles that differ by a single nucleotide. HEK293 cells are seeded at 20-40 k cells/well in a 96 well plate in 100 μl of FB medium and cultured in a 37° C. incubator with 5% CO₂. The following day, confluence of seeded cells are checked to ensure that cells will be at ˜75% confluence at time of transfection. If cells are at the right confluence, transfection is carried out using the viral supernatants of Example 19 (having CasX 491 and guide 174), using 3 wells per construct as replicates. SaCas9 and SpyCas9 targeting C9orf72 are used as benchmarking controls. For each Cas protein type, a non-targeting plasmid is used as a negative control. Cells will be selected for successful transfection with puromycin at 0.3-3 μg/ml for 24-48 hours followed by 24-48 hours of recovery in FB medium. A subset of cells for each sample from the experiment will be lysed, and the genome will be extracted using a Quick extract solution following the manufacturer's protocol. Editing will be analyzed using a T7E1 assay. Briefly, the genomic locus at the targeted edit site is amplified using primers (e.g., a 500 bp region around the intended target) using a PCR program on a thermocycler. The PCR amplicon is then hybridized following a hybridization program on a thermocycler, and then treated with T7 Endonuclease for 30 minutes at 37° C. The sample is then analyzed on a 2% agarose gel, or on a Fragment Analyzer to visualize the DNA bands.

### Example 22: Method to Demonstrate Allele-Specific Editing in Autosomal Dominant C9orf72 Patient-Derived Cell Lines Bearing Hexanucleotide Repeat Expansions

[0621] Cells derived from patients with the HRS in C9orf72 will be obtained and cultured under supplier recommended conditions. Cells will be transfected with CasX construct (e.g., CasX 491 with spacer 174) using Lipofectamine 3000 following manufacturer's protocol, or nucleofected using Lonza nucleofector kit according to manufacturer's protocol, and seeded in 96 well plates for incubation and growth. Alternatively, CasX constructs may be packaged in a lentivirus, and used to transduce patient-derived cells. Cells will be selected for successful lipofection or nucleofection, or lentiviral transduction, using medium containing puromycin at 0.3-3 μg/ml for 2-4 days or longer, followed by recovery in puromycin-free medium for 2 days or longer. Editing of the C9orf72 locus may be assessed at the genomic, transcriptomic, and proteomic level. At the end of the selection and recovery period, a subset of cells for each sample from the experiment will be lysed, and genome extracted using a Quick extract (QE) solution following the manufacturer's protocol; another subset of cells will be lysed in RIPA cell lysis buffer for proteomic analysis; another subset of cells may be passaged for analysis at a later point in time. A fraction of the QE treated samples will be used to assess editing using a T7E1 assay. Briefly, the genomic locus at the targeted edit site will be amplified using primers (e.g., a 500 bp region around the intended target) using a PCR program on a thermocycler. The PCR amplicon will then be hybridized following a hybridization program on a thermocycler, and then treated with T7 Endonuclease for 30 minutes at 37° C. The sample will be then analyzed on a 2% agarose gel, or on a Fragment Analyzer to visualize DNA bands to confirm that the CasX construct can successfully edit the C9orf72 mutation. Another fraction of the QE treated samples will be used to assess editing at the C9orf72 locus using NGS.

[0622] Proteomic analysis will be performed by Western blotting. The samples lysed in RIPA buffer will first be quantified for protein content using a colorimetric protein quantification assay such as BCA (Pierce) or Bradford (BioRad) according to the manufacturer's protocol. Following quantification, dilute sample in beta-mercaptoethanol-supplemented Laemmli buffer will be used to load 2.5-20 μg of total protein per well. Samples will be heat denatured at 95-100° C. for 5-10 minutes, and then cooled to room temperature. Samples will then be loaded onto and run on a polyacrylamide gel. Once the gel has run long enough, proteins will be transferred onto a PVDF membrane, blocked for at least 1 h at room temperature, and labeled with primary antibodies against C9orf72 and an appropriate loading control. The blot will be washed three times, at five minutes per wash, with PBST (PBS supplemented with 0.1 v/v % Triton X100) on a rocker at room temperature. An appropriate reporter-conjugated secondary antibody will then be used to label the primary antibody for 1 hour at room temperature. The blot will be washed three times, at five minutes per wash, with PBST (PBS supplemented with 0.1 v/v % Triton X100) on a rocker at room temperature. Any necessary substrates will subsequently be added, quenched if required, and imaged on a gel imager. Band intensities will be quantified using appropriate software following manufacturer's protocol.

### Example 23: Method to Deliver C9orf72-Targeting Construct Via AAV: Making and Recovery of AAV with Encoded CasX System

[0623] This example describes a typical protocol followed to produce and characterize AAV vectors packaging sequences encoding CasX molecules and guide RNA.

### Materials and Methods:

[0624] For AAV production, the tri-plasmid transfection method is used and requires three essential plasmids—pTransgene carrying the CasX:gRNA targeting the C9orf72 gene of interest to be packaged in AAV, pRC, and pHelper. DNA encoding CasX and guide RNA are cloned into an AAV transgene cassette, between the ITRs to generate the pTransgene plasmid a schematic of which is shown in FIG. 17. The constructed transgene plasmid is verified via full-length plasmid sequencing, restriction digestion, and functional tests including in vitro transfection of mammalian cells. Additional plasmids required for AAV production (pRC plasmid and pHelper plasmid) are purchased from commercial suppliers (Aldevron, Takara).

[0625] For AAV production, HEK293 cells are cultured in FB medium in a 37° C. incubator with 5% CO₂. 10-40 15 cm dishes of HEK293 cells are used in a single batch of viral production. For a single 15 cm dish, 45-60 μg plasmids are mixed together at 1:1:1 molar ratio together in 4 ml of FB medium, and complexed with Polyethyleneimine (PEI) i.e., at 3 μg PEI/μg of DNA, for 10 minutes at room temperature (Note: The ratio of the three plasmids used may be varied to optimize virus production). The PEI-DNA complex is then slowly dripped onto the 15 cm plate of HEK293 cells, and the plate of transfected cells is moved back into the incubator. The next day, the medium may be changed to FB with 2% FBS (instead of 10% FBS; Fibroblast medium, comprised of: DMEM with Glutamax (Gibco 10566-016) supplemented with MEM-NEAA (Thermo 11140050), sodium pyruvate (Thermo 11360070), HEPES (Thermo 15630080), 2-mercaptoethanol (Gibco 21985023), penicillin/streptomycin (Thermo 15140122) with 10% volume fraction of fetal bovine serum (FBS, VWR #97068-085)), if appropriate). AAV may be harvested from the supernatant, or from the cell pellet, or from a combination of the supernatant and the cell pellet, at any time between 48-120 hours after initial transfection of the plasmids.

[0626] If virus is harvested after 72 hours post-transfection, the media from the cells may be collected at this time to increase virus yields. At 2-5 days post-transfection, the medium and cells are collected (Note: The timing of harvest may be varied to optimize virus yield). The cells are pelleted by centrifugation, and the medium collected from the top. Cells are lysed in a buffer with high salt content and high-salt-active nuclease for 1 h at 37° C. (Note: The cells may also be lysed using additional methods, such as sequential freeze-thaw, or chemical lysis by detergent). The medium collected at harvest, and any medium collected at earlier time points, are treated with a 1:5 dilution of a solution containing 40% PEG8000 and 2.5M NaCl, and incubated on ice for 2 h, in order to precipitate AAV (Note: The incubation may also be carried out overnight at 4° C.). The AAV precipitate from the medium is pelleted by centrifugation, resuspended in high salt content buffer with high-salt-active nuclease and combined with the lysed cell pellet. The combined cell lysate is then clarified by centrifugation and filtration through a 0.45 m filter, and purified on an AAV Poros affinity resin column (Thermofisher Scientific). The virus is eluted from the column into a neutralizing solution (Note: At this stage, the virus may be taken through additional rounds of purification to increase the quality of the virus preparation). The eluted virus is then titered via qPCR to quantify the virus yield. For titering, a sample of virus is first digested with DNAse to remove any non-packaged viral DNA, the DNAse deactivated, and then viral capsids disrupted with Proteinase K to expose the packaged viral genomes for titering.

[0627] It is expected that ˜1×10¹² viral genomes will be obtained from one batch of virus produced using the methods as described here.

### Example 24: In Vivo Evaluation of C9orf72 Editing in a Mouse Model Having HRS Expansion

[0628] The C9-BAC mouse model (O'Rourke et al. C9orf72 BAC transgenic mice display typical pathologic features of ALS/FTD. Neuron. 88:892 (2015)) carrying the human chromosome 9 open reading frame 72 gene (C9orf72) with a hexanucleotide repeat expansion (GGGGCC) in the intron between the alternatively-spliced non-coding first exons 1a and 1b will be utilized to evaluate editing of the C9orf72 gene using the CasX:gNA systems delivered as RNP or by an AAV vector.

### Methods:

[0629] For injections of AAV or RNP containing CasX and gNA with spacers targeting the C9orf72 gene or using a non-targeting gNA as a negative control, mice will be anesthetized and placed on a rodent stereotaxic apparatus followed by injection into one of their lateral ventricles, the hippocampus, corpus striatum, primary somatosensory cortex (S1), and/or primary visual cortex V1 with varying doses of either viral particles or RNP of CasX:gNA (formulated with NLS or Lipofectamine2000 for cell delivery) in 1-5 μl volumes. A separate cohort of animals will be injected with virus or RNP intrathecally. Groups of mice will be monitored for body weight, survival and for behavioral and neuromuscular changes using assays such as the rotarod test, grip strength test, balance beam test, footprint test, and open-field test (Hao, Z., et al. Motor dysfunction and neurodegeneration in a C9orf72 mouse line expressing poly-PR. Nat. Commun. 10:2906 (2019)). Additional groups of mice will be euthanized at pre-determined intervals ranging from 1-24 months and will be transcardiacally perfused with saline. Brains will be removed from the skull, with one hemisphere processed for histological analyses, and the other hemisphere dissected and snap-frozen for biochemical and genetic analyses. Similarly, spinal cords will be dissected and snap-frozen or processed for histological analyses (cervical/thoracic). The brains and spinal cord for histology will be drop-fixed in 4% paraformaldehyde for 24 hours, then transferred to 30% sucrose for 24-48 hours and frozen in liquid nitrogen for serial sectioning followed by assay/examination for polyGP (DPR) and RNA transcript foci visualization using appropriate antibody or hybridization probes.

[0630] For polyGP (DPR) quantification, brain and spinal cord samples will be homogenized in RIPA (50 mM Tris, 150 mM NaCl, 0.5% DOC, 1% NP40, 0.1% SDS and Complete™, pH 8.0), followed by centrifugation and resuspension of the pellet in 5M guanidine-HCl. PolyGP will be quantified using the polyclonal antibody AB1358 (Millipore Sigma) for both capture and detection antibody in a 96-well format assay using PolyGP standard as a control or quantified by qPCR transcript analysis. Additionally, RIPA homogenates will be utilized for expression of C9orf72 protein, with levels determined by western blotting. Briefly, proteins from RIPA extracts will be size-fractionated by 4-12% SDS-PAGE and transferred onto PVDF membranes. To detect C9orf72, the membranes will be immunoblotted using the mouse monoclonal anti-C9orf72 antibody GT779 (Gene Tex, Irvine, CA), followed by secondary dye-conjugated antibody. Visualization will be conducted using the Odyssey/Li-Cor imaging system.

### Example 25: In Vivo Evaluation of Cognitive Behavior in a C9orf72 BAC Heterozygous Mouse Model Following Editing

[0631] C9orf72 BAC mouse models with GGGGCC repeats will be evaluated for improvements in cognitive tests following editing of the C9orf72 gene using the CasX:gNA systems described in Examples 17, 18, 22, and 23.

### Methods:

[0632] Following editing in mice of the C9orf72 gene using CasX and gNA with spacers targeting the C9orf72 gene or using a non-targeting gNA as a negative editing control, plus normal untreated mice on the same background, groups of mice will be evaluated using cognitive tests at 1, 2, and 3 months post-injection. The tests will include the Barnes maze test, the radial arm maze test, the marble burying test, and the elevated plus maze test (Jiang, J., et al. Gain of Toxicity from ALS/FTD-Linked Repeat Expansions in C9ORF72 Is Alleviated by Antisense Oligonucleotides Targeting GGGGCC-Containing RNAs. Neuron 90:535 (2016).

### Example 26: Evaluation of Spacer Length on Editing in Cells when Delivered as RNP

[0633] CasX variant 491 was purified as described above. Guide RNAs with scaffold 174 were prepared by in vitro transcription (IVT). IVT templates were generated by PCR using Q5 polymerase (NEB M0491) according to the recommended protocol, template oligos for each scaffold backbone, and amplification primers with the T7 promoter and either the 15.3 (CAAACAAATGTGTCACAAAG, SEQ ID NO: 344) or 15.5 (GGAATAATGCTGTTGTTGAA, SEQ ID NO: 345) spacer at full-length (20 nucleotides) or truncated by one or two nucleotides from the 3′ end of the respective spacer (sequences in Table 18). The sequences of the primers used to generate the IVT templates are shown in Table 17. The resulting templates were then used with T7 RNA polymerase to produce RNA guides according to standard protocols. The guides were purified using denaturing polyacrylamide gel electrophoresis and refolded prior to use. Individual RNPs were assembled by mixing protein with a 1.2-fold molar excess of guide in buffer containing 25 mM sodium phosphate buffer (pH 7.25), 300 mM NaCl, 1 mM MgCl2, and 200 mM trehalose. RNPs were incubated at 37° C. for 10 minutes and then purified via size exclusion chromatography and exchanged into buffer containing 25 mM sodium phosphate buffer (pH 7.25), 150 mM NaCl, 1 mM MgCl2, and 200 mM trehalose (Buffer 1). The concentration of the RNP was determined following purification using the Pierce 660 nm protein assay.

[0634] Purified RNPs were tested for editing at the T Cell Receptor α (TCRα) locus in Jurkat cells. RNPs were delivered by electroporation using the Lonza 4-D nucleofector system. 700,000 cells were resuspended in 20 μL of Lonza buffer SE and added to RNP diluted in Buffer 1 to the appropriate concentration and a final volume of 2 μL. Cells were electroporated using the Lonza 96-well shuttle system using the protocol CL-120. Cells were recovered at 37° C. in pre-equilibrated RPMI and then each electroporation condition was split into three wells of a 96-well plate. Cells were exchanged into fresh RPMI one day after nucleofection. On day three post-nucleofection, cells were stained with Alexa Fluor 647-labeled antibody against TCRα/β (BioLegend) and assessed for loss of surface TCRα/β using an Attune Nxt flow cytometer. A fraction of Jurkat cells does not stain positive for TCRα/β in the absence of editing. To account for this and estimate the actual percentage of cells that had TCRα knocked out via editing, the formula TCR_{KO}=(TCR-_{obs}−TCR-_{neg})/(1−TCR-_{neg}) was applied, where TCR_{KO} is the estimated knockout rate of TCRα, TCR-_{obs} is the observed fraction of cells negative for TCR staining in the experimental sample, and TCR-_{neg} is the fraction of cells negative for TCR staining in the no RNP control sample. This formula assumes that cells that do and do not express TCRα/β are edited at equal rates. The corrected fraction of TCRα knockout cells were plotted against the concentration of RNP using Prism. For each spacer, the three spacer lengths were fit with dose response curves using shared parameters except for the EC50. The reported p-values are the probability that the dose curve for the 20-nt spacer and that of the compared truncated spacer can be modeled with the same EC50 parameter.

TABLE 17
Oligonucleotides used to generate IVT templates

| Construct | DNA sequence | SEQ ID NO |
|---|---|---|
| Scaffold 174 | GAAATTAATACGACTCACTATAACTGGCGCTTTTATC | 346 |
| template fwd | TGATTACTTTGAGAGCCATCACCAGCGACTATGTCGT | |
| | AGTGGGTAAAGCT | |
| Scaffold 174 | CTTTGATGCTCCCTCCGAAGAGGGAGCTTTACCCACT | 347 |
| template rev | ACGACATAGTCGC | |
| T7 | GAAATTAATACGACTCACTATA | 348 |
| amplification | | |
| primer | | |
| 15.3 20-nt | CTTTGTGACACATTTGTTTGCTTTGATGCTCCCTCC | 349 |
| spacer primer | | |
| 15.3 19-nt | TTTGTGACACATTTGTTTGCTTTGATGCTCCCTCC | 350 |
| spacer primer | | |
| 15.3 18-nt | TTGTGACACATTTGTTTGCTTTGATGCTCCCTCC | 351 |
| spacer primer | | |
| 15.5 20-nt | TTCAACAACAGCATTATTCCCTTTGATGCTCCCTCC | 352 |
| spacer primer | | |
| 15.5 19-nt | TCAACAACAGCATTATTCCCTTTGATGCTCCCTCC | 353 |
| spacer primer | | |
| 15.5 18-nt | CAACAACAGCATTATTCCCTTTGATGCTCCCTCC | 354 |
| spacer primer | | |

TABLE 18
Spacer Sequences

| | | SEQ |
|---|---|---|
| Construct | RNA sequence | ID NO |
| 15.3 20-nt spacer | CAAACAAAUGUGUCACAAAG | 355 |
| 15.3 19-nt spacer | CAAACAAAUGUGUCACAAA | 356 |
| 15.3 18-nt spacer | CAAACAAAUGUGUCACAA | 357 |
| 15.5 20-nt spacer | GGAAUAAUGCUGUUGUUGAA | 358 |
| 15.5 19-nt spacer | GGAAUAAUGCUGUUGUUGA | 359 |
| 15.5 18-nt spacer | GGAAUAAUGCUGUUGUUG | 360 |

### Results

[0635] CasX RNPs were assembled using CasX variant 491 and guides composed of scaffold 174 with either spacer 15.3 or 15.5, both of which target the constant region of the TCRα gene. Guides with full-length 20-nt spacers as well as truncated 19- and 18-nt spacers were tested to determine whether use of shorter spacers supported increased editing when pre-assembled RNPs are nucleofected for ex vivo editing. RNPs were tested at 2-fold dilutions ranging from 0.3125 μM to 2.5 μM in a 22 μL nucleofection reaction. Editing was assessed by flow cytometry three days after nucleofection. For both spacer sequences, the RNPs with truncated spacers largely edited more efficiently than those with 20-nt spacers across the dose range (FIG. 25, dose-response curves). For spacer 15.3, the 18-nt and 19-nt spacers had EC50 values of 0.225 μM and 0.299 μM, respectively, as compared to 1.414 μM for the 20-nt spacer (p<0.0001 for both truncations; extra-sum-of-squares F test). For spacer 15.5, the 18-nt spacer had an EC50 of 0.519 μM vs 0.938 μM for the 20-nt spacer (p=0.0001), while the 19-nt spacer was more similar to the 20-nt spacer, with an EC50 of 0.808 μM (p=0.0762). Despite the fact that the 19-nt 15.3 spacer had editing similar to the 18-nt spacer while the 19-nt 15.5 spacer more closely resembles the corresponding 20-nt spacer, for both spacers tested, however, the direction of the trend remained consistent and suggests that using guides with 18-nt spacers may be a generalizable strategy for increasing editing when the CasX editing molecule is delivered as a pre-assembled RNP. Additional experiments with cell-based assays will be conducted to confirm these findings.

The application's sequence listing, which the Patent Office published only in electronic form, follows.

SEQUENCE LISTING (21835 sequences)

SEQ ID NO: 1 - protein, 986 aa, unidentified
  REGION 1..986: note = Deltaproteobacteria sp.
MEKRINKIRKKLSADNATKPVSRSGPMKTLLVRVMTDDLKKRLEKRRKKPEVMPQVISNNAANNLRMLLDDYTKMKEAILQVYWQEFKDDHVGLMCKFAQPASKKIDQNKLKPEMDEKGNLTTAGFACSQCGQPLFVYKLEQVSEKGKAYTNYFGRCNVAEHEKLILLAQLKPEKDSDEAVTYSLGKFGQRALDFYSIHVTKESTHPVKPLAQIAGNRYASGPVGKALSDACMGTIASFLSKYQDIIIEHQKVVKGNQKRLESLRELAGKENLEYPSVTLPPQPHTKEGVDAYNEVIARVRMWVNLNLWQKLKLSRDDAKPLLRLKGFPSFPVVERRENEVDWWNTINEVKKLIDAKRDMGRVFWSGVTAEKRNTILEGYNYLPNENDHKKREGSLENPKKPAKRQFGDLLLYLEKKYAGDWGKVFDEAWERIDKKIAGLTSHIEREEARNAEDAQSKAVLTDWLRAKASFVLERLKEMDEKEFYACEIQLQKWYGDLRGNPFAVEAENRVVDISGFSIGSDGHSIQYRNLLAWKYLENGKREFYLLMNYGKKGRIRFTDGTDIKKSGKWQGLLYGGGKAKVIDLTFDPDDEQLIILPLAFGTRQGREFIWNDLLSLETGLIKLANGRVIEKTIYNKKIGRDEPALFVALTFERREVVDPSNIKPVNLIGVDRGENIPAVIALTDPEGCPLPEFKDSSGGPTDILRIGEGYKEKQRAIQAAKEVEQRRAGGYSRKFASKSRNLADDMVRNSARDLFYHAVTHDAVLVFENLSRGFGRQGKRTFMTERQYTKMEDWLTAKLAYEGLTSKTYLSKTLAQYTSKTCSNCGFTITTADYDGMLVRLKKTSDGWATTLNNKELKAEGQITYYNRYKRQTVEKELSAELDRLSEESGNNDISKWTKGRRDEALFLLKKRFSHRPVQEQFVCLDCGHEVHADEQAALNIARSWLFLNSNSTEFKSYKSGKQPFVGAWQAFYKRRLKEVWKPNA

SEQ ID NO: 2 - protein, 978 aa, unidentified
  REGION 1..978: note = Planctomycetes sp.
MQEIKRINKIRRRLVKDSNTKKAGKTGPMKTLLVRVMTPDLRERLENLRKKPENIPQPISNTSRANLNKLLTDYTEMKKAILHVYWEEFQKDPVGLMSRVAQPAPKNIDQRKLIPVKDGNERLTSSGFACSQCCQPLYVYKLEQVNDKGKPHTNYFGRCNVSEHERLILLSPHKPEANDELVTYSLGKFGQRALDFYSIHVTRESNHPVKPLEQIGGNSCASGPVGKALSDACMGAVASFLTKYQDIILEHQKVIKKNEKRLANLKDIASANGLAFPKITLPPQPHTKEGIEAYNNVVAQIVIWVNLNLWQKLKIGRDEAKPLQRLKGFPSFPLVERQANEVDWWDMVCNVKKLINEKKEDGKVFWQNLAGYKRQEALLPYLSSEEDRKKGKKFARYQFGDLLLHLEKKHGEDWGKVYDEAWERIDKKVEGLSKHIKLEEERRSEDAQSKAALTDWLRAKASFVIEGLKEADKDEFCRCELKLQKWYGDLRGKPFAIEAENSILDISGFSKQYNCAFIWQKDGVKKLNLYLIINYFKGGKLRFKKIKPEAFEANRFYTVINKKSGEIVPMEVNFNFDDPNLIILPLAFGKRQGREFIWNDLLSLETGSLKLANGRVIEKTLYNRRTRQDEPALFVALTFERREVLDSSNIKPMNLIGIDRGENIPAVIALTDPEGCPLSRFKDSLGNPTHILRIGESYKEKQRTIQAAKEVEQRRAGGYSRKYASKAKNLADDMVRNTARDLLYYAVTQDAMLIFENLSRGFGRQGKRTFMAERQYTRMEDWLTAKLAYEGLPSKTYLSKTLAQYTSKTCSNCGFTITSADYDRVLEKLKKTATGWMTTINGKELKVEGQITYYNRYKRQNVVKDLSVELDRLSEESVNNDISSWTKGRSGEALSLLKKRFSHRPVQEKFVCLNCGFETHADEQAALNIARSWLFLRSQEYKKYQTNKTTGNTDKRAFVETWQSFYRKKLKEVWKPAV

SEQ ID NO: 3 - protein, 855 aa, unidentified
  REGION 1..855: note = Candidatus Sungbacteria sp.
MDNANKPSTKSLVNTTRISDHFGVTPGQVTRVFSFGIIPTKRQYAIIERWFAAVEAARERLYGMLYAHFQENPPAYLKEKFSYETFFKGRPVLNGLRDIDPTIMTSAVFTALRHKAEGAMAAFHTNHRRLFEEARKKMREYAECLKANEALLRGAADIDWDKIVNALRTRLNTCLAPEYDAVIADFGALCAFRALIAETNALKGAYNHALNQMLPALVKVDEPEEAEESPRLRFFNGRINDLPKFPVAERETPPDTETIIRQLEDMARVIPDTAEILGYIHRIRHKAARRKPGSAVPLPQRVALYCAIRMERNPEEDPSTVAGHFLGEIDRVCEKRRQGLVRTPFDSQIRARYMDIISFRATLAHPDRWTEIQFLRSNAASRRVRAETISAPFEGFSWTSNRTNPAPQYGMALAKDANAPADAPELCICLSPSSAAFSVREKGGDLIYMRPTGGRRGKDNPGKEITWVPGSFDEYPASGVALKLRLYFGRSQARRMLTNKTWGLLSDNPRVFAANAELVGKKRNPQDRWKLFFHMVISGPPPVEYLDFSSDVRSRARTVIGINRGEVNPLAYAVVSVEDGQVLEEGLLGKKEYIDQLIETRRRISEYQSREQTPPRDLRQRVRHLQDTVLGSARAKIHSLIAFWKGILAIERLDDQFHGREQKIIPKKTYLANKTGFMNALSFSGAVRVDKKGNPWGGMIEIYPGGISRTCTQCGTVWLARRPKNPGHRDAMVVIPDIVDDAAATGFDNVDCDAGTVDYGELFTLSREWVRLTPRYSRVMRGTLGDLERAIRQGDDRKSRQMLELALEPQPQWGQFFCHRCGFNGQSDVLAATNLARRAISLIRRLPDTDTPPTP

SEQ ID NO: 4 - RNA, 108 nt, synthetic construct
  misc_feature 1..108: note = gRNA sequence
  source 1..108: mol_type = other RNA
acatctggcgcgtttattccattactttggagccagtcccagcgactatgtcgtatggacgaagcgcttatttatcggagagaaaccgataagtaaaacgcatcaaag

SEQ ID NO: 5 - RNA, 108 nt, synthetic construct
  misc_feature 1..108: note = gRNA sequence
  source 1..108: mol_type = other RNA
tactggcgcttttatctcattactttgagagccatcaccagcgactatgtcgtatgggtaaagcgcttatttatcggagagaaatccgataaataagaagcatcaaag

SEQ ID NO: 6 - RNA, 81 nt, synthetic construct
  misc_feature 1..81: note = gRNA sequence
  source 1..81: mol_type = other RNA
acatctggcgcgtttattccattactttggagccagtcccagcgactatgtcgtatggacgaagcgcttatttatcggaga

SEQ ID NO: 7 - RNA, 78 nt, synthetic construct
  misc_feature 1..78: note = gRNA sequence
  source 1..78: mol_type = other RNA
acatctggcgcgtttattccattactttggagccagtcccagcgactatgtcgtatggacgaagcgcttatttatcgg

SEQ ID NO: 8 - RNA, 80 nt, synthetic construct
  misc_feature 1..80: note = gRNA sequence
  source 1..80: mol_type = other RNA
tactggcgcttttatctcattactttgagagccatcaccagcgactatgtcgtatgggtaaagcgcttatttatcggaga

SEQ ID NO: 9 - RNA, 77 nt, synthetic construct
  misc_feature 1..77: note = gRNA sequence
  source 1..77: mol_type = other RNA
tactggcgcttttatctcattactttgagagccatcaccagcgactatgtcgtatgggtaaagcgcttatttatcgg

SEQ ID NO: 10 - RNA, 25 nt, synthetic construct
  misc_feature 1..25: note = gRNA sequence
  source 1..25: mol_type = other RNA
gtttacacactccctctcatagggt

SEQ ID NO: 11 - RNA, 25 nt, synthetic construct
  misc_feature 1..25: note = gRNA sequence
  source 1..25: mol_type = other RNA
gtttacacactccctctcatgaggt

SEQ ID NO: 12 - RNA, 25 nt, synthetic construct
  misc_feature 1..25: note = gRNA sequence
  source 1..25: mol_type = other RNA
ttttacataccccctctcatgggat

SEQ ID NO: 13 - RNA, 25 nt, synthetic construct
  misc_feature 1..25: note = gRNA sequence
  source 1..25: mol_type = other RNA
gtttacacactccctctcatggggg

SEQ ID NO: 14 - RNA, 20 nt, synthetic construct
  misc_feature 1..20: note = gRNA sequence
  source 1..20: mol_type = other RNA
ccagcgactatgtcgtatgg

SEQ ID NO: 15 - RNA, 39 nt, synthetic construct
  misc_feature 1..39: note = gRNA sequence
  source 1..39: mol_type = other RNA
gcgcttatttatcggagagaaatccgataaataagaagc

SEQ ID NO: 16 - RNA, 74 nt, synthetic construct
  misc_feature 1..74: note = gRNA sequence
  source 1..74: mol_type = other RNA
ggcgcttttatctcattactttgagagccatcaccagcgactatgtcgtatgggtaaagcgcttatttatcgga

SEQ ID NO: 17-19 - skipped (3 entries)

SEQ ID NO: 20 - RNA, 20 nt, synthetic construct
  misc_feature 1..20: note = gRNA sequence
  source 1..20: mol_type = other RNA
ccagcgactatgtcgtatgg

SEQ ID NO: 21 - RNA, 39 nt, synthetic construct; identical to SEQ ID NO: 15
  misc_feature 1..39: note = extended stem loop
  source 1..39: mol_type = other RNA

SEQ ID NO: 22 - RNA, 81 nt, unidentified; identical to SEQ ID NO: 6
  misc_feature 1..81: note = Deltaproteobacter sp.
  source 1..81: mol_type = other RNA

SEQ ID NO: 23 - RNA, 78 nt, unidentified; identical to SEQ ID NO: 7
  misc_feature 1..78: note = Deltaproteobacter sp.
  source 1..78: mol_type = other RNA

SEQ ID NO: 24 - RNA, 23 nt, unidentified
  misc_feature 1..23: note = Deltaproteobacter sp.
  source 1..23: mol_type = other RNA
ccgataagtaaaacgcatcaaag

SEQ ID NO: 25 - RNA, 80 nt, unidentified; identical to SEQ ID NO: 8
  misc_feature 1..80: note = Planctomycetes sp.
  source 1..80: mol_type = other RNA

SEQ ID NO: 26 - RNA, 77 nt, unidentified; identical to SEQ ID NO: 9
  misc_feature 1..77: note = Planctomycetes sp.
  source 1..77: mol_type = other RNA

SEQ ID NO: 27 - RNA, 26 nt, unidentified
  misc_feature 1..26: note = Planctomycetes sp.
  source 1..26: mol_type = other RNA
tctccgataaataagaagcatcaaag

SEQ ID NO: 28 - RNA, 25 nt, unidentified
  misc_feature 1..25: note = Candidatus Sungbacteria sp.
  source 1..25: mol_type = other RNA
gtttacacactccctctcatagggt

SEQ ID NO: 29 - RNA, 25 nt, unidentified
  misc_feature 1..25: note = Candidatus Sungbacteria sp.
  source 1..25: mol_type = other RNA
gtttacacactccctctcatgaggt

SEQ ID NO: 30 - RNA, 25 nt, unidentified
  misc_feature 1..25: note = Candidatus Sungbacteria sp.
  source 1..25: mol_type = other RNA
ttttacataccccctctcatgggat

SEQ ID NO: 31 - RNA, 25 nt, unidentified
  misc_feature 1..25: note = Candidatus Sungbacteria sp.
  source 1..25: mol_type = other RNA
gtttacacactccctctcatggggg

SEQ ID NO: 32 - RNA, 21 nt, synthetic construct
  misc_feature 1..21: note = gNA scaffold stemloop
  source 1..21: mol_type = other RNA
ccagcgactatgtcgtagtgg

SEQ ID NO: 33 - RNA, 89 nt, synthetic construct
  misc_feature 1..89: note = gNA scaffold
  source 1..89: mol_type = other RNA
actggcgcttttatctgattactttgagagccatcaccagcgactatgtcgtagtgggtaaagctccctcttcggagggagcatcaaag

SEQ ID NO: 34 - skipped

SEQ ID NO: 35 - RNA, 19 nt, unidentified
  misc_feature 1..19: note = extended stem loop region
  source 1..19: mol_type = other RNA
acatgaggattacccatgt

SEQ ID NO: 36 - RNA, 18 nt, unidentified
  misc_feature 1..18: note = extended stem loop region
  source 1..18: mol_type = other RNA
tgcatgtctaagacagca

SEQ ID NO: 37 - RNA, 20 nt, unidentified
  misc_feature 1..20: note = extended stem loop region
  source 1..20: mol_type = other RNA
aatccattgcactccggatt

SEQ ID NO: 38 - RNA, 12 nt, unidentified
  misc_feature 1..12: note = extended stem loop region
  source 1..12: mol_type = other RNA
cctcttcggagg

SEQ ID NO: 39 - RNA, 21 nt, unidentified
  misc_feature 1..21: note = extended stem loop region
  source 1..21: mol_type = other RNA
aggagtttctatggaaaccct

SEQ ID NO: 40 - RNA, 30 nt, unidentified
  misc_feature 1..30: note = extended stem loop region
  source 1..30: mol_type = other RNA
aggtgggacgacctctcggtcgtcctatct

SEQ ID NO: 41 - RNA, 19 nt, unidentified
  misc_feature 1..19: note = extended stem loop region
  source 1..19: mol_type = other RNA
tgctcgctccgttcgagca

SEQ ID NO: 42 - RNA, 21 nt, unidentified
  misc_feature 1..21: note = extended stem loop region
  source 1..21: mol_type = other RNA
tgctcgacgcgtcctcgagca

SEQ ID NO: 43 - RNA, 22 nt, unidentified
  misc_feature 1..22: note = extended stem loop region
  source 1..22: mol_type = other RNA
tgctcgtttgcggctacgagca

SEQ ID NO: 44 - RNA, 17 nt, unidentified
  misc_feature 1..17: note = extended stem loop region
  source 1..17: mol_type = other RNA
agggagggagggagagg

SEQ ID NO: 45 - RNA, 19 nt, unidentified
  misc_feature 1..19: note = extended stem loop region
  source 1..19: mol_type = other RNA
ggttagggttagggttagg

SEQ ID NO: 46 - RNA, 25 nt, unidentified
  misc_feature 1..25: note = extended stem loop region
  source 1..25: mol_type = other RNA
ctgctcagtacgagaggaaccgcag

SEQ ID NO: 47 - RNA, 78 nt, unidentified
  misc_feature 1..78: note = extended stem loop region
  source 1..78: mol_type = other RNA
tacactgggatcgctgaattagagatcggcgtcctttcattctatatactttggagttttaaaatgtctctaagtaca

SEQ ID NO: 48 - skipped

SEQ ID NO: 49 - protein, 978 aa, synthetic construct
  REGION 1..978: note = CasX variant
MQEIKRINKIRRRLVKDSNTKKAGKTGPMKTLLVRVMTPDLRERLENLRKKPENIPQPISNTSRANLNKLLTDYTEMKKAILHVYWEEFQKDPVGLMSRVAQPASKKIDQNKLKPEMDEKGNLTTAGFACSQCGQPLFVYKLEQVSEKGKAYTNYFGRCNVAEHEKLILLAQLKPEKDSDEAVTYSLGKFGQRALDFYSIHVTRESNHPVKPLEQIGGNSCASGPVGKALSDACMGAVASFLTKYQDIILEHQKVIKKNEKRLANLKDIASANGLAFPKITLPPQPHTKEGIEAYNNVVAQIVIWVNLNLWQKLKIGRDEAKPLQRLKGFPSFPLVERQANEVDWWDMVCNVKKLINEKKEDGKVFWQNLAGYKRQEALRPYLSSEEDRKKGKKFARYQFGDLLLHLEKKHGEDWGKVYDEAWERIDKKVEGLSKHIKLEEERRSEDAQSKAALTDWLRAKASFVIEGLKEADKDEFCRCELKLQKWYGDLRGKPFAIEAENSILDISGFSKQYNCAFIWQKDGVKKLNLYLIINYFKGGKLRFKKIKPEAFEANRFYTVINKKSGEIVPMEVNFNFDDPNLIILPLAFGKRQGREFIWNDLLSLETGSLKLANGRVIEKTLYNRRTRQDEPALFVALTFERREVLDSSNIKPMNLIGIDRGENIPAVIALTDPEGCPLSRFKDSLGNPTHILRIGESYKEKQRTIQAKKEVEQRRAGGYSRKYASKAKNLADDMVRNTARDLLYYAVTQDAMLIFENLSRGFGRQGKRTFMAERQYTRMEDWLTAKLAYEGLSKTYLSKTLAQYTSKTCSNCGFTITSADYDRVLEKLKKTATGWMTTINGKELKVEGQITYYNRYKRQNVVKDLSVELDRLSEESVNNDISSWTKGRSGEALSLLKKRFSHRPVQEKFVCLNCGFETHADEQAALNIARSWLFLRSQEYKKYQTNKTTGNTDKRAFVETWQSFYRKKLKEVWKPAV

SEQ ID NO: 50 - protein, 977 aa, synthetic construct
  REGION 1..977: note = CasX variant
MQEIKRINKIRRRLVKDSNTKKAGKTGPMKTLLVRVMTPDLRERLENLRKKPENIPQPISNTSRANLNKLLTDYTEMKKAILHVYWEEFQKDPVGLMSRVAQPAPKNIDQRKLIPVKDGNERLTSSGFACSQCCQPLYVYKLEQVNDKGKPHTNYFGRCNVSEHERLILLSPHKPEANDELVTYSLGKFGQRALDFYSIHVTRESNHPVKPLEQIGGNSCASGPVGKALSDACMGAVASFLTKYQDIILEHQKVIKKNEKRLANLKDIASANGLAFPKITLPPQPHTKEGIEAYNNVVAQIVIWVNLNLWQKLKIGRDEAKPLQRLKGFPSFPLVERQANEVDWWDMVCNVKKLINEKKEDGKVFWQNLAGYKRQEALRPYLSSEEDRKKGKKFARYQFGDLLLHLEKKHGEDWGKVYDEAWERIDKKVEGLSKHIKLEEERRSEDAQSKAALTDWLRAKASFVIEGLKEADKDEFCRCELKLQKWYGDLRGKPFAIEAENSILDISGFSKQYNCAFIWQKDGVKKLNLYLIINYFKGGKLRFKKIKPEAFEANRFYTVINKKSGEIVPMEVNFNFDDPNLIILPLAFGKRQGREFIWNDLLSLETGSLKLANGRVIEKTLYNRRTRQDEPALFVALTFERREVLDSSNIKPMNLIGIDRGENIPAVIALTDPEGCPLSRFKDSLGNPTHILRIGESYKEKQRTIQAKKEVEQRRAGGYSRKYASKAKNLADDMVRNTARDLLYYAVTQDAMLIFENLSRGFGRQGKRTFMAERQYTRMEDWLTAKLAYEGLSKTYLSKTLAQYTSKTCSNCGFTITTADYDGMLVRLKKTSDGWATTLNNKELKAEGQITYYNRYKRQTVEKELSAELDRLSEESGNNDISKWTKGRRDEALFLLKKRFSHRPVQEQFVCLDCGHEVHADEQAALNIARSWLFLRSQEYKKYQTNKTTGNTDKRAFVETWQSFYRKKLKEVWKPAV

SEQ ID NO: 51 - protein, 985 aa, synthetic construct
  REGION 1..985: note = CasX variant
MEKRINKIRKKLSADNATKPVSRSGPMKTLLVRVMTDDLKKRLEKRRKKPEVMPQVISNNAANNLRMLLDDYTKMKEAILQVYWQEFKDDHVGLMCKFAQPAPKNIDQRKLIPVKDGNERLTSSGFACSQCCQPLYVYKLEQVNDKGKPHTNYFGRCNVSEHERLILLSPHKPEANDELVTYSLGKFGQRALDFYSIHVTKESTHPVKPLAQIAGNRYASGPVGKALSDACMGTIASFLSKYQDIIIEHQKVVKGNQKRLESLRELAGKENLEYPSVTLPPQPHTKEGVDAYNEVIARVRMWVNLNLWQKLKLSRDDAKPLLRLKGFPSFPVVERRENEVDWWNTINEVKKLIDAKRDMGRVFWSGVTAEKRNTILEGYNYLPNENDHKKREGSLENPKKPAKRQFGDLLLYLEKKYAGDWGKVFDEAWERIDKKIAGLTSHIEREEARNAEDAQSKAVLTDWLRAKASFVLERLKEMDEKEFYACEIQLQKWYGDLRGNPFAVEAENRVVDISGFSIGSDGHSIQYRNLLAWKYLENGKREFYLLMNYGKKGRIRFTDGTDIKKSGKWQGLLYGGGKAKVIDLTFDPDDEQLIILPLAFGTRQGREFIWNDLLSLETGLIKLANGRVIEKTIYNKKIGRDEPALFVALTFERREVVDPSNIKPVNLIGVDRGENIPAVIALTDPEGCPLPEFKDSSGGPTDILRIGEGYKEKQRAIQAAKEVEQRRAGGYSRKFASKSRNLADDMVRNSARDLFYHAVTHDAVLVFENLSRGFGRQGKRTFMTERQYTKMEDWLTAKLAYEGLTSKTYLSKTLAQYTSKTCSNCGFTITTADYDGMLVRLKKTSDGWATTLNNKELKAEGQITYYNRYKRQTVEKELSAELDRLSEESGNNDISKWTKGRRDEALFLLKKRFSHRPVQEQFVCLDCGHEVHADEQAALNIARSWLFLNSNSTEFKSYKSGKQPFVGAWQAFYKRRLKEVWKPNA

SEQ ID NO: 52 - protein, 986 aa, synthetic construct
  REGION 1..986: note = CasX variant
MEKRINKIRKKLSADNATKPVSRSGPMKTLLVRVMTDDLKKRLEKRRKKPEVMPQVISNNAANNLRMLLDDYTKMKEAILQVYWQEFKDDHVGLMCKFAQPASKKIDQNKLKPEMDEKGNLTTAGFACSQCGQPLFVYKLEQVSEKGKAYTNYFGRCNVAEHEKLILLAQLKPEKDSDEAVTYSLGKFGQRALDFYSIHVTKESTHPVKPLAQIAGNRYASGPVGKALSDACMGTIASFLSKYQDIIIEHQKVVKGNQKRLESLRELAGKENLEYPSVTLPPQPHTKEGVDAYNEVIARVRMWVNLNLWQKLKLSRDDAKPLLRLKGFPSFPVVERRENEVDWWNTINEVKKLIDAKRDMGRVFWSGVTAEKRNTILEGYNYLPNENDHKKREGSLENPKKPAKRQFGDLLLYLEKKYAGDWGKVFDEAWERIDKKIAGLTSHIEREEARNAEDAQSKAVLTDWLRAKASFVLERLKEMDEKEFYACEIQLQKWYGDLRGNPFAVEAENRVVDISGFSIGSDGHSIQYRNLLAWKYLENGKREFYLLMNYGKKGRIRFTDGTDIKKSGKWQGLLYGGGKAKVIDLTFDPDDEQLIILPLAFGTRQGREFIWNDLLSLETGLIKLANGRVIEKTIYNKKIGRDEPALFVALTFERREVVDPSNIKPVNLIGVDRGENIPAVIALTDPEGCPLPEFKDSSGGPTDILRIGEGYKEKQRAIQAAKEVEQRRAGGYSRKFASKSRNLADDMVRNSARDLFYHAVTHDAVLVFENLSRGFGRQGKRTFMTERQYTKMEDWLTAKLAYEGLTSKTYLSKTLAQYTSKTCSNCGFTITSADYDRVLEKLKKTATGWMTTINGKELKVEGQITYYNRYKRQNVVKDLSVELDRLSEESVNNDISSWTKGRSGEALSLLKKRFSHRPVQEKFVCLNCGFETHADEQAALNIARSWLFLNSNSTEFKSYKSGKQPFVGAWQAFYKRRLKEVWKPNA

SEQ ID NO: 53 - protein, 921 aa, synthetic construct
  REGION 1..921: note = CasX variant
MQEIKRINKIRRRLVKDSNTKKAGKTGPMKTLLVRVMTPDLRERLENLRKKPENIPQPISNTSRANLNKLLTDYTEMKKAILHVYWEEFQKDPVGLMSRVAQPAPKNIDQRKLIPVKDGNERLTSSGFACSQCCQPLYVYKLEQVNDKGKPHTNYFGRCNVSEHERLILLSPHKPEANDELVTYSLGKFGQRALDFYSIHVTRESNHPVKPLEQIGGNSCASGPVGKALSDACMGAVASFLTKYQDIILEHQKVIKKNEKRLANLKDIASANGLAFPKITLPPQPHTKEGIEAYNNVVAQIVIWVNLNLWQKLKIGRDEAKPLQRLKGFPSFPLVERQANEVDWWDMVCNVKKLINEKKEDGKVFWQNLAGYKRQEALRPYLSSEEDRKKGKKFARYQFGDLLLHLEKKHGEDWGKVYDEAWERIDKKVEGLSKHIKLEEERRSEDAQSKAALTDWLRAKASFVIEGLKEADKDEFCRCELKLQKWYGDLRGKPFAIEAENSILDISGFSKQYNCAFIWQKDGVKKLNLYLIINYFKGGKLRFKKIKPEAFEANRFYTVINKKSGEIVPMEVNFNFDDPNLIILPLAFGKRQGREFIWNDLLSLETGSLKLANGRVIEKTLYNRRTRQDEPALFVALTFERREVLDSSNIKPVNLIGVDRGENIPAVIALTDPEGCPLPEFKDSSGGPTDILRIGEGYKEKQRAIQAAKEVEQRRAGGYSRKFASKSRNLADDMVRNSARDLFYHAVTHDAVLVFENLSRGFGRQGKRTFMTERQYTKMEDWLTAKLAYEGLTSKTYLSKTLAQYTSKTCSNCGFTITSADYDRVLEKLKKTATGWMTTINGKELKVEGQITYYNRYKRQNVVKDLSVELDRLSEESVNNDISSWTKGRSGEALSLLKKRFSHRPVQEKFVCLNCGFETHA

SEQ ID NO: 54 - protein, 920 aa, synthetic construct
  REGION 1..920: note = CasX variant
MQEIKRINKIRRRLVKDSNTKKAGKTGPMKTLLVRVMTPDLRERLENLRKKPENIPQPISNTSRANLNKLLTDYTEMKKAILHVYWEEFQKDPVGLMSRVAQPAPKNIDQRKLIPVKDGNERLTSSGFACSQCCQPLYVYKLEQVNDKGKPHTNYFGRCNVSEHERLILLSPHKPEANDELVTYSLGKFGQRALDFYSIHVTRESNHPVKPLEQIGGNSCASGPVGKALSDACMGAVASFLTKYQDIILEHQKVIKKNEKRLANLKDIASANGLAFPKITLPPQPHTKEGIEAYNNVVAQIVIWVNLNLWQKLKIGRDEAKPLQRLKGFPSFPLVERQANEVDWWDMVCNVKKLINEKKEDGKVFWQNLAGYKRQEALRPYLSSEEDRKKGKKFARYQFGDLLLHLEKKHGEDWGKVYDEAWERIDKKVEGLSKHIKLEEERRSEDAQSKAALTDWLRAKASFVIEGLKEADKDEFCRCELKLQKWYGDLRGKPFAIEAENSILDISGFSKQYNCAFIWQKDGVKKLNLYLIINYFKGGKLRFKKIKPEAFEANRFYTVINKKSGEIVPMEVNFNFDDPNLIILPLAFGKRQGREFIWNDLLSLETGSLKLANGRVIEKTLYNRRTRQDEPALFVALTFERREVLDSSNIKPMNLIGIDRGENIPAVIALTDPEGCPLSRFKDSLGNPTHILRIGESYKEKQRTIQAKKEVEQRRAGGYSRKYASKAKNLADDMVRNTARDLLYYAVTQDAMLIFENLSRGFGRQGKRTFMAERQYTRMEDWLTAKLAYEGLSKTYLSKTLAQYTSKTCSNCGFTITSADYDRVLEKLKKTATGWMTTINGKELKVEGQITYYNRYKRQNVVKDLSVELDRLSEESVNNDISSWTKGRSGEALSLLKKRFSHRPVQEKFVCLNCGFETHA

SEQ ID NO: 55 - protein, 977 aa, synthetic construct
  REGION 1..977: note = CasX variant
MQEIKRINKIRRRLVKDSNTKKAGKTGPMKTLLVRVMTPDLRERLENLRKKPENIPQPISNNAANNLRMLLDDYTKMKEAILQVYWQEFKDDHVGLMCKFAQPAPKNIDQRKLIPVKDGNERLTSSGFACSQCCQPLYVYKLEQVNDKGKPHTNYFGRCNVSEHERLILLSPHKPEANDELVTYSLGKFGQRALDFYSIHVTKESTHPVKPLAQIAGNRYASGPVGKALSDACMGTIASFLSKYQDIIIEHQKVVKGNQKRLESLRELAGKENLEYPSVTLPPQPHTKEGVDAYNEVIARVRMWVNLNLWQKLKLSRDDAKPLLRLKGFPSFPLVERQANEVDWWDMVCNVKKLINEKKEDGKVFWQNLAGYKRQEALRPYLSSEEDRKKGKKFARYQFGDLLLHLEKKHGEDWGKVYDEAWERIDKKVEGLSKHIKLEEERRSEDAQSKAALTDWLRAKASFVIEGLKEADKDEFCRCELKLQKWYGDLRGKPFAIEAENSILDISGFSKQYNCAFIWQKDGVKKLNLYLIINYFKGGKLRFKKIKPEAFEANRFYTVINKKSGEIVPMEVNFNFDDPNLIILPLAFGKRQGREFIWNDLLSLETGSLKLANGRVIEKTLYNRRTRQDEPALFVALTFERREVLDSSNIKPMNLIGIDRGENIPAVIALTDPEGCPLSRFKDSLGNPTHILRIGESYKEKQRTIQAKKEVEQRRAGGYSRKYASKAKNLADDMVRNTARDLLYYAVTQDAMLIFENLSRGFGRQGKRTFMAERQYTRMEDWLTAKLAYEGLSKTYLSKTLAQYTSKTCSNCGFTITSADYDRVLEKLKKTATGWMTTINGKELKVEGQITYYNRYKRQNVVKDLSVELDRLSEESVNNDISSWTKGRSGEALSLLKKRFSHRPVQEKFVCLNCGFETHADEQAALNIARSWLFLRSQEYKKYQTNKTTGNTDKRAFVETWQSFYRKKLKEVWKPAV

SEQ ID NO: 56 - protein, 986 aa, synthetic construct
  REGION 1..986: note = CasX variant
MQEIKRINKIRRRLVKDSNTKKAGKTGPMKTLLVRVMTPDLRERLENLRKKPENIPQPISNTSRANLNKLLTDYTEMKKAILHVYWEEFQKDPVGLMSRVAQPAPKNIDQRKLIPVKDGNERLTSSGFACSQCCQPLYVYKLEQVNDKGKPHTNYFGRCNVSEHERLILLSPHKPEANDELVTYSLGKFGQRALDFYSIHVTRESNHPVKPLEQIGGNSCASGPVGKALSDACMGAVASFLTKYQDIILEHQKVIKKNEKRLANLKDIASANGLAFPKITLPPQPHTKEGIEAYNNVVAQIVIWVNLNLWQKLKIGRDEAKPLQRLKGFPSFPVVERRENEVDWWNTINEVKKLIDAKRDMGRVFWSGVTAEKRNTILEGYNYLPNENDHKKREGSLENPKKPAKRQFGDLLLYLEKKYAGDWGKVFDEAWERIDKKIAGLTSHIEREEARNAEDAQSKAVLTDWLRAKASFVLERLKEMDEKEFYACEIQLQKWYGDLRGNPFAVEAENSILDISGFSKQYNCAFIWQKDGVKKLNLYLIINYFKGGKLRFKKIKPEAFEANRFYTVINKKSGEIVPMEVNFNFDDPNLIILPLAFGKRQGREFIWNDLLSLETGSLKLANGRVIEKTLYNRRTRQDEPALFVALTFERREVLDSSNIKPMNLIGIDRGENIPAVIALTDPEGCPLSRFKDSLGNPTHILRIGESYKEKQRTIQAKKEVEQRRAGGYSRKYASKAKNLADDMVRNTARDLLYYAVTQDAMLIFENLSRGFGRQGKRTFMAERQYTRMEDWLTAKLAYEGLSKTYLSKTLAQYTSKTCSNCGFTITSADYDRVLEKLKKTATGWMTTINGKELKVEGQITYYNRYKRQNVVKDLSVELDRLSEESVNNDISSWTKGRSGEALSLLKKRFSHRPVQEKFVCLNCGFETHADEQAALNIARSWLFLRSQEYKKYQTNKTTGNTDKRAFVETWQSFYRKKLKEVWKPAV

SEQ ID NO: 57 - protein, 925 aa, synthetic construct
  REGION 1..925: note = CasX variant
MISNTSRANLNKLLTDYTEMKKAILHVYWEEFQKDPVGLMSRVAQPAPKNIDQRKLIPVKDGNERLTSSGFACSQCCQPLYVYKLEQVNDKGKPHTNYFGRCNVSEHERLILLSPHKPEANDELVTYSLGKFGQRALDFYSIHVTRESNHPVKPLEQIGGNSCASGPVGKALSDACMGAVASFLTKYQDIILEHQKVIKKNEKRLANLKDIASANGLAFPKITLPPQPHTKEGIEAYNNVVAQIVIWVNLNLWQKLKIGRDEAKPLQRLKGFPSFPLVERQANEVDWWDMVCNVKKLINEKKEDGKVFWQNLAGYKRQEALRPYLSSEEDRKKGKKFARYQFGDLLLHLEKKHGEDWGKVYDEAWERIDKKVEGLSKHIKLEEERRSEDAQSKAALTDWLRAKASFVIEGLKEADKDEFCRCELKLQKWYGDLRGKPFAIEAENRVVDISGFSIGSDGHSIQYRNLLAWKYLENGKREFYLLMNYGKKGRIRFTDGTDIKKSGKWQGLLYGGGKAKVIDLTFDPDDEQLIILPLAFGTRQGREFIWNDLLSLETGLIKLANGRVIEKTIYNKKIGRDEPALFVALTFERREVVDPSNIKPMNLIGIDRGENIPAVIALTDPEGCPLSRFKDSLGNPTHILRIGESYKEKQRTIQAKKEVEQRRAGGYSRKYASKAKNLADDMVRNTARDLLYYAVTQDAMLIFENLSRGFGRQGKRTFMAERQYTRMEDWLTAKLAYEGLSKTYLSKTLAQYTSKTCSNCGFTITSADYDRVLEKLKKTATGWMTTINGKELKVEGQITYYNRYKRQNVVKDLSVELDRLSEESVNNDISSWTKGRSGEALSLLKKRFSHRPVQEKFVCLNCGFETHADEQAALNIARSWLFLRSQEYKKYQTNKTTGNTDKRAFVETWQSFYRKKLKEVWKPAV

SEQ ID NO: 58 - protein, 975 aa, synthetic construct
  REGION 1..975: note = CasX variant
MEKRINKIRKKLSADNATKPVSRSGPMKTLLVRVMTDDLKKRLEKRRKKPEVMPQVISNTSRANLNKLLTDYTEMKKAILHVYWEEFQKDPVGLMSRVAQPAPKNIDQRKLIPVKDGNERLTSSGFACSQCCQPLYVYKLEQVNDKGKPHTNYFGRCNVSEHERLILLSPHKPEANDELVTYSLGKFGQRALDFYSIHVTRESNHPVKPLEQIGGNSCASGPVGKALSDACMGAVASFLTKYQDIILEHQKVIKKNEKRLANLKDIASANGLAFPKITLPPQPHTKEGIEAYNNVVAQIVIWVNLNLWQKLKIGRDEAKPLQRLKGFPSFPLVERQANEVDWWDMVCNVKKLINEKKEDGKVFWQNLAGYKRQEALRPYLSSEEDRKKGKKFARYQFGDLLLHLEKKHGEDWGKVYDEAWERIDKKVEGLSKHIKLEEERRSEDAQSKAALTDWLRAKASFVIEGLKEADKDEFCRCELKLQKWYGDLRGKPFAIEAENSILDISGFSKQYNCAFIWQKDGVKKLNLYLIINYFKGGKLRFKKIKPEAFEANRFYTVINKKSGEIVPMEVNFNFDDPNLIILPLAFGKRQGREFIWNDLLSLETGSLKLANGRVIEKTLYNRRTRQDEPALFVALTFERREVLDSSNIKPMNLIGIDRGENIPAVIALTDPEGCPLSRFKDSLGNPTHILRIGESYKEKQRTIQAKKEVEQRRAGGYSRKYASKAKNLADDMVRNTARDLLYYAVTQDAMLIFENLSRGFGRQGKRTFMAERQYTRMEDWLTAKLAYEGLSKTYLSKTLAQYTSKTCSNCGFTITSADYDRVLEKLKKTATGWMTTINGKELKVEGQITYYNRYKRQNVVKDLSVELDRLSEESVNNDISSWTKGRSGEALSLLKKRFSHRPVQEKFVCLNCGFETHADEQAALNIARSWLFLRSQEYKKYQTNKTTGNTDKRAFVETWQSFYRKKLKEVWKPAV

SEQ ID NO: 59 - protein, 982 aa, synthetic construct
  REGION 1..982: note = CasX variant
MQEIKRINKIRRRLVKDSNTKKAGKTGPMKTLLVRVMTPDLRERLENLRKKPENIPQPISNTSRANLNKLLTDYTEMKKAILHVYWEEFQKDPVGLMSRVAQPAPKNIDQRKLIPVKDGNERLTSSGFACSQCCQPLYVYKLEQVNDKGKPHTNYFGRCNVSEHERLILLSPHKPEANDELVTYSLGKFGQRALDFYSIHVTRESNHPVKPLEQIGGNSCASGPVGKALSDACMGAVASFLTKYQDIILEHQKVIKKNEKRLANLKDIASANGLAFPKITLPPQPHTKEGIEAYNNVVAQIVIWVNLNLWQKLKIGRDEAKPLQRLKGFPSFPLVERQANEVDWWDMVCNVKKLINEKKEDGKVFWQNLAGYKRQEALRPYLSSEEDRKKGKKFARYQFGDLLLHLEKKHGEDWGKVYDEAWERIDKKVEGLSKHIKLEEERRSEDAQSKAALTDWLRAKASFVIEGLKEADKDEFCRCELKLQKWYGDLRGKPFAIEAENRVVDISGFSIGSDGHSIQYRNLLAWKYLENGKREFYLLMNYGKKGRIRFTDGTDIKKSGKWQGLLYGGGKAKVIDLTFDPDDEQLIILPLAFGTRQGREFIWNDLLSLETGLIKLANGRVIEKTIYNKKIGRDEPALFVALTFERREVVDPSNIKPMNLIGIDRGENIPAVIALTDPEGCPLSRFKDSLGNPTHILRIGESYKEKQRTIQAKKEVEQRRAGGYSRKYASKAKNLADDMVRNTARDLLYYAVTQDAMLIFENLSRGFGRQGKRTFMAERQYTRMEDWLTAKLAYEGLSKTYLSKTLAQYTSKTCSNCGFTITSADYDRVLEKLKKTATGWMTTINGKELKVEGQITYYNRYKRQNVVKDLSVELDRLSEESVNNDISSWTKGRSGEALSLLKKRFSHRPVQEKFVCLNCGFETHADEQAALNIARSWLFLRSQEYKKYQTNKTTGNTDKRAFVETWQSFYRKKLKEVWKPAV

SEQ ID NO: 60 - protein, 977 aa, synthetic construct
  REGION 1..977: note = CasX variant
MQEIKRINKIRRRLVKDSNTKKAGKTGPMKTLLVRVMTPDLRERLENLRKKPENIPQPISNTSRANLNKLLTDYTEMKKAILHVYWEEFQKDPVGLMSRVAQPAPKNIDQRKLIPVKDGNERLTSSGFACSQCCQPLYVYKLEQVNDKGKPHTNYFGRCNVSEHERLILLSPHKPEANDELVTYSLGKFGQRALDFYSIHVTRESNHPVKPLEQIGGNSCASGPVGKALSDACMGAVASFLTKYQDIILEHQKVIKKNEKRLANLKDIASANGLAFPKITLPPQPHTKEGIEAYNNVVAQIVIWVNLNLWQKLKIGRDEAKPLQRLKGFPSFPLVERQANEVDWWDMVCNVKKLINEKKEDGKVFWQNLAGYKRQEALRPYLSSEEDRKKGKKFARYQFGDLLLHLEKKHGEDWGKVYDEAWERIDKKVEGLSKHIKLEEERRSEDAQSKAALTDWLRAKASFVIEGLKEADKDEFKRCELKLQKWYGDLRGKPFAIEAENSILDISGFSKQYNCAFIWQKDGVKKLNLYLIINYFKGGKLRFKKIKPEAFEANRFYTVINKKSGEIVPMEVNFNFDDPNLIILPLAFGKRQGREFIWNDLLSLETGSLKLANGRVIEKPLYNRRTRQDEPALFVALTFERREVLDSSNIKPMNLIGIDRGENIPAVIALTDPEGCPLSRFKDSLGNPTHILRIGESYKEKQRTIQAKKEVEQRRAGGYSRKYASKAKNLADDMVRNTARDLLYYAVTQDAMLIFENLSRGFGRQGKRTFMAERQYTRMEDWLTAKLAYEGLSKTYLSKTLAQYTSKTCSNCGFTITSADYDRVLEKLKKTATGWMTTINGKELKVEGQITYYNRYKRQNVVKDLSVELDRLSEESVNNDISSWTKGRSGEALSLLKKRFSHRPVQEKFVCLNCGFETHADEQAALNIARSWLFLRSQEYKKYQTNKTTGNTDKRAFVETWQSFYRKKLKEVWKPAV

SEQ ID NO: 61 - protein, 977 aa, synthetic construct
  REGION 1..977: note = CasX variant
MQEIKRINKIRRRLVKDSNTKKAGKTGPMKTLLVRVMTPDLRERLENLRKKPENIPQPISNTSRANLNKLLTDYTEMKKAILHVYWEEFQKDPVGLMSRVAQPAPKNIDQRKLIPVKDGNERLTSSGFACSQCCQPLYVYKLEQVNDKGKPHTNYFGRCNVSEHERLILLSPHKPEANDELVTYSLGKFGQRALDFYSIHVTRESNHPVKPLEQIGGNSCASGPVGKALSDACMGAVASFLTKYQDIILEHQKVIKKNEKRLANLKDIASANGLAFPKITLPPQPHTKEGIEAYNNVVAQIVIWVNLNLWQKLKIGRDEAKPLQRLKGFPSFPLVERQANEVDWWDMVCNVKKLINEKKEDGKVFWQNLAGYKRQEALLPYLSSEEDRKKGKKFARYQFGDLLLHLEKKHGEDWGKVYDEAWERIDKKVEGLSKHIKLEEERRSEDAQSKAALTDWLRAKASFVIEGLKEADKDEFCRCELKLQKWYGDLRGKPFAIEAENSILDISGFSKQYNCAFIWQKDGVKKLNLYLIINYFKGGKLRFKKIKPEAFEANRFYTVINKKSGEIVPMEVNFNFDDPNLIILPLAFGKRQGREFIWNDLLSLETGSLKLANGRVIEKTLYNRRTRQDEPALFVALTFERREVLDSSNIKPMNLIGIDRGENIPAVIALTDPEGCPLSRFKDSLGNPTHILRIGESYKEKQRTIQAAKEVEQRRAGGYSRKYASKAKNLADDMVRNTARDLLYYAVTQDAMLIFENLSRGFGRQGKRTFAAERQYTRMEDWLTAKLAYEGLPSKTYLSKTLAQYTSKTCSNCGFTITSADYDRVLEKLKKTATGWMTTINGKELKVEGQITYYNRYKRQNVVKDLSVELDRLSEESVNNDISSWTKGRSGEALSLLKKRFSHRPVQEKFVCLNCGFETHADEQAALNIARSWLFLRSQEYKKYQTNKTTGNTDKRAFVETWQSFYRKKLKEVWKPA

SEQ ID NO: 62 - protein, 977 aa, synthetic construct
  REGION 1..977: note = CasX variant
MQEIKRINKIRRRLVKDSNTKKAGKTGPMKTLLVRVMTPDLRERLENLRKKPENIPQPISNTSRANLNKLLTDYTEMKKAILHVYWEEFQKDPVGLMSRVAQPAPKNIDQRKLIPVKDGNERLTSSGFACSQCCQPLYVYKLEQVNDKGKPHTNYFGRCNVSEHERLILLSPHKPEANDELVTYSLGKFGQRALDFYSIHVTRESNHPVKPLEQIGGNSCASGPVGKALSDACMGAVASFLTKYQDIILEHQKVIKKNEKRLANLKDIASANGLAFPKITLPPQPHTKEGIEAYNNVVAQIVIWVNLNLWQKLKIGRDEAKPLQRLKGFPSFPLVERQANEVDWWDMVCNVKKLINEKKEDGKVFWQNLAGYKRQEALRPYLSSEEDRKKGKKFARYQFGDLLLHLEKKHGEDWGKVYDEAWERIDKKVEGLSKHIKLEEERRSEDAQSKAALTDWLRAKASFVIEGLKEADKDEFCRCELKLQKWYGDLRGKPFAIEAENSILDISGFSKQYNCAFIWQKDGVKKLNLYLIINYFKGGKLRFKKIKPEAFEANRFYTVINKKSGEIVPMEVNFNFDDPNLIILPLAFGKRQGREFIWNDLLSLETGSLKLANGRVIEKTLYNRRTRQDEPALFVALTFERREVLDSSNIKPMNLIGIDRGENIPAVIALTDPEGCPLSRFKDSLGNPTHILRIGESYKEKQRTIQAKKEVEQRRAGGYSRKYASKAKNLANDMVRNTARDLLYYAVTQDAMLIFENLSRGFGRQGKRTFMAERQYTRMEDWLTAKLAYEGLSKTYLSKTLAQYTSKTCSNCGFTITSADYDRVLEKLKKTATGWMTTINGKELKVEGQITYYNRYKRQNVVKDLSVELDRLSEESVNNDISSWTKGRSGEALSLLKKRFSHRPVQEKFVCLNCGFETHADEQAALNIARSWLFLRSQEYKKYQTNKTTGNTDKRAFVETWQSFYRKKLKEVWKPAV

SEQ ID NO: 63 - protein, 978 aa, synthetic construct
  REGION 1..978: note = CasX variant
MQEIKRINKIRRRLVKDSNTKKAGKTGPMKTLLVRVMTPDLRERLENLRKKPENIPQPISNTSRANLNKLLTDYTEMKKAILHVYWEEFQKDPVGLMSRVAQPAPKNIDQRKLIPVKDGNERLTSSGFACSQCCQPLYVYKLEQVNDKGKPHTNYFGRCNVSEHERLILLSPHKPEANDELVTYSLGKFGQRALDFYSIHVTRESNHPVKPLEQIGGNSCASGPVGKALSDACMGAVASFLTKYQDIILEHQKVIKKNEKRLANLKDIASANGLAFPKITLPPQPHTKEGIEAYNNVVAQIVIWVNLNLWQKLKIGRDEAKPLQRLKGFPSFPLVERQANEVDWWDMVCNVKKLINEKKEDGKVFWQNLAGYKRQEALLPYLSSEEDRKKGKKFARYQFGDLLLHLEKKHGEDWGKVYDEAWERIDKKVEGLSKHIKLEEERRSEDAQSKAALTDWLRAKASFVIEGLKEADKDEFCRCELKLQKWYGDLRGKPFAIEAENSILDISGFSKQYNCAFIWQKDGVKKLNLYLIINYFKGGKLRFKKIKPEAFEANRFYTVINKKSGEIVPMEVNFNFDDPNLIILPLAFGKRQGREFIWNDLLSLETGSLKLANGRVIEKTLYNRRTRQDEPALFVALTFERREVLDSSNIKPMNLIGIDRGENIPAVIALTDPEGCPLSRFKDSLGNPTHILRIGESYKEKQRTIQAAKEVEQRRAGGYSRKYASKAKNLADDMVRNTARDLLYYAVTQDAMLIFENLSRGFGRQGKRTFMAERQYTRMEDQLTAKLAYEGLPSKTYLSKTLAQYTSKTCSNCGFTITSADYDRVLEKLKKTATGWMTTINGKELKVEGQITYYNRYKRQNVVKDLSVELDRLSEESVNNDISSWTKGRSGEALSLLKKRFSHRPVQEKFVCLNCGFETHADEQAALNIARSWLFLRSQEYKKYQTNKTTGNTDKRAFVETWQSFYRKKLKEVWKPAV

SEQ ID NO: 64 - protein, 978 aa, synthetic construct
  REGION 1..978: note = CasX variant
MQEIKRINKIRRRLVKDSNTKKAGKTGPMKTLLVRVMTPDLRERLENLRKKPENIPQPISNTSRANLNKLLTDYTEMKKAILHVYWEEFQKDPVGLMSRVAQPAPKNIDQRKLIPVKDGNERLTSSGFACSQCCQPLYVYKLEQVNDKGKPHTNYFGRCNVSEHERLILLSPHKPEANDELVTYSLGKFGQRALDFYSIHVTRESNHPVKPLEQIGGNSCASGPVGKALSDACMGAVASFLTKYQDIILEHQKVIKKNEKRLANLKDIASANGLAFPKITLPPQPHTKEGIEAYNNVVAQIVIWVNLNLWQKLKIGRDEAKPLQRLKGFPSFPLVERQANEVDWWDMVCNVKKLINEKKEDGKVFWQNLAGYKRQEALLPYLSSEEDRKKGKKFARYQFGDLLLHLEKKHGEDWGKVYDEAWERIDKKVEGLSKHIKLEEERRSEDAQSKAALTDWLRAKASFVIEGLKEADKDEFCRCELKLQKWYGDLRGKPFAIEAENSILDISGFSKQYNCAFIWQKDGVKKLNLYLIINYFKGGKLRFKKIKPEAFEANRFYTVINKKSGEIVPMEVNFNFDDPNLIILPLAFGKRQGREFIWNDLLSLETGSLKLANGRVIEKTLYNRRTRQDEPALFVALTFERREVLDSSNIKPMNLIGIDRGENIPAVIALTDPEGCPLSRFKDSLGNPTHILRIGESYKEKQRTIQAAKEVEQRRAGGYSRKYASKAKNLADDMVRNTARDLLYYAVTQDAMLIFENLSRGFGRQGKRTFQAERQYTRMEDWLTAKLAYEGLPSKTYLSKTLAQYTSKTCSNCGFTITSADYDRVLEKLKKTATGWMTTINGKELKVEGQITYYNRYKRQNVVKDLSVELDRLSEESVNNDISSWTKGRSGEALSLLKKRFSHRPVQEKFVCLNCGFETHADEQAALNIARSWLFLRSQEYKKYQTNKTTGNTDKRAFVETWQSFYRKKLKEVWKPAV

SEQ ID NO: 65 - protein, 978 aa, synthetic construct
  REGION 1..978: note = CasX variant
MQEIKRINKIRRRLVKDSNTKKAGKTGPMKTLLVRVMTPDLRERLENLRKKPENIPQPISNTSRANLNKLLTDYTEMKKAILHVYWEEFQKDPVGLMSRVAQPAPKNIDQRKLIPVKDGNERLTSSGFACSQCCQPLYVYKLEQVNDKGKPHTNYFGRCNVSEHERLILLSPHKPEANDELVTYSLGKFGQRALDFYSIHVTRESNHPVKPLEQIGGNSCASGPVGKALSDACMGAVASFLTKYQDIILEHQKVIKKNEKRLANLKDIASANGLAFPKITLPPQPHTKEGIEAYNNVVAQIVIWVNLNLWQKLKIGRDEAKPLQRLKGFPSFPLVERQANEVDWWDMVCNVKKLINEKKEDGKVFWQNLAGYKRQEALLPYLSSEEDRKKGKKFARYQFGDLLLHLEKKHGEDWGKVYDEAWERIDKKVEGLSKHIKLEEERRSEDAQSKAALTDWLIAKASFVIEGLKEADKDEFCRCELKLQKWYGDLRGKPFAIEAENSILDISGFSKQYNCAFIWQKDGVKKLNLYLIINYFKGGKLRFKKIKPEAFEANRFYTVINKKSGEIVPMEVNFNFDDPNLIILPLAFGKRQGREFIWNDLLSLETGSLKLANGRVIEKTLYNRRTRQDEPALFVALTFERREVLDSSNIKPMNLIGIDRGENIPAVIALTDPEGCPLSRFKDSLGNPTHILRIGESYKEKQRTIQAAKEVEQRRAGGYSRKYASKAKNLADDMVRNTVRDLLYYAVTQDAMLIFENLSRGFGRQGKRTFMAERQYTRMEDWLTAKLAYEGLPSKTYLSKTLAQYTSKTCSNCGFTITSADYDRVLEKLKKTATGWMTTINGKELKVEGQITYYNRYKRQNVVKDLSVELDRLSEESVNNDISSWTKGRSGEALSLLKKRFSHRPVQEKFVCLNCGFETHADEQAALNIARSWLFLRSQEYKKYQTNKTTGNTDKRAFVETWQSFYRKKLKEVWKPAV

SEQ ID NO: 66 - protein, 977 aa, synthetic construct
  REGION 1..977: note = CasX variant
MQEIKRINKIRRRLVKDSNTKKAGKTGPMKTLLVRVMTPDLRERLENLRKKPENIPQPISNTSRANLNKLLTDYTEMKKAILHVYWEEFQKDPVGLMSRVAQPAPKNIDQRKLIPVKDGNERLTSSGFACSQCCQPLYVYKLEQVNDKGKPHTNYFGRCNVSEHERLILLSPHKPEANDELVTYSLGKFGQRALDFYSIHVTRESNHPVKPLEQIGGNSCASGPVGKALSDACMGAVASFLTKYQDIILEHQKVIKKNEKRLANLKDIASANGLAFPKITLPPQPHTKEGIEAYNNVVAQIVIWVNLNLWQKLKIGRDEAKPLQRLKGFPSFPLVERQANEVDWWDMVCNVKKLINEKKEDGKVFWQNLAGYKRQEALRPYLSSEEDRKKGKKFARYQFGDLLLHLEKKHGEDWGKVYDEAWERIDKKVEGLSKHIKLEEERRSEDAQSKAALTDWLRAKASFVIEGLKEADKDEFCRCELKLQKWYGDLRGKPFAIEAENSILDISGFSKQYNCAFIWQKDGVKKLNLYLIINYFKGGKLRFKKIKPEAFEANRFYTVINKKSGEIVPMEVNFNFDDPNLIILPLAFGKRQGREFIWNDLLSLETGSLKLANGRVIEKTLYNRRTRQDEPALFVALTFERREVLDSSNIKPMNLIGIDRGENIPAVIALTDPEGCPLSRFKDSLGNPTHILRIGESYKEKQRTIQAKKEVEQRRAGGYSRKYASKAKNLADDMVRNTARDLLYYAVTQDAMLIFENLSRGFGRQGKRTFNAERQYTRMEDWLTAKLAYEGLSKTYLSKTLAQYTSKTCSNCGFTITSADYDRVLEKLKKTATGWMTTINGKELKVEGQITYYNRYKRQNVVKDLSVELDRLSEESVNNDISSWTKGRSGEALSLLKKRFSHRPVQEKFVCLNCGFETHADEQAALNIARSWLFLRSQEYKKYQTNKTTGNTDKRAFVETWQSFYRKKLKEVWKPAV

SEQ ID NO: 67 - protein, 977 aa, synthetic construct
  REGION 1..977: note = CasX variant
MQEIKRINKIRRRLVKDSNTKKAGKTGPMKTLLVRVMTPDLRERLENLRKKPENIPQPISNTSRANLNKLLTDYTEMKKAILHVYWEEFQKDPVGLMSRVAQPAPKNIDQRKLIPVKDGNERLTSSGFACSQCCQPLYVYKLEQVNDKGKPHTNYFGRCNVSEHERLILLSPHKPEANDELVTYSLGKFGQRALDFYSIHVTRESNHPVKPLEQIGGNSCASGPVGKALSDACMGAVASFLTKYQDIILEHQKVIKKNEKRLANLKDIASANGLAFPKITLPPQPHTKEGIEAYNNVVAQIVIWVNLNLWQKLKIGRDEAKPLQRLKGFPSFPLVERQANEVDWWDMVCNVKKLINEKKEDGKVFWQNLAGYKRQEALRPYLSSEEDRKKGKKFARYQFGDLLLHLEKKHGEDWGKVYDEAWERIDKKVEGLSKHIKLEEERRSEDAQSKAALTDWLRAKASFVIEGLKEADKDEFCRCELKLQKWYGDLRGKPFAIEAENSILDISGFSKQYNCAFIWQKDGVKKLNLYLIINYFKGGKLRFKKIKPEAFEANRFYTVINKKSGEIVPMEVNFNFDDPNLIILPLAFGKRQGREFIWNDLLSLETGSLKLANGRVIEKTLYNRRTRQDEPALFVALTFERREVLDSSNIKPMNLIGIDRGENIPAVIALTDPEGCPLSRFKDSLGNPTHILRIGESYKEKQRTIQAKKEVEQRRAGGYSRKYASKAKNLADDMVRNTTRDLLYYAVTQDAMLIFENLSRGFGRQGKRTFMAERQYTRMEDWLTAKLAYEGLSKTYLSKTLAQYTSKTCSNCGFTITSADYDRVLEKLKKTATGWMTTINGKELKVEGQITYYNRYKRQNVVKDLSVELDRLSEESVNNDISSWTKGRSGEALSLLKKRFSHRPVQEKFVCLNCGFETHADEQAALNIARSWLFLRSQEYKKYQTNKTTGNTDKRAFVETWQSFYRKKLKEVWKPAV

SEQ ID NO: 68 - protein, 977 aa, synthetic construct
  REGION 1..977: note = CasX variant
MQEIKRINKIRRRLVKDSNTKKAGKTGPMKTLLVRVMTPDLRERLENLRKKPENIPQPISNTSRANLNKLLTDYTEMKKAILHVYWEEFQKDPVGLMSRVAQPAPKNIDQRKLIPVKDGNERLTSSGFACSQCCQPLYVYKLEQVNDKGKPHTNYFGRCNVSEHERLILLSPHKPEANDELVTYSLGKFGQRALDFYSIHVTRESNHPVKPLEQIGGNSCASGPVGKALSDACMGAVASFLTKYQDIILEHQKVIKKNEKRLANLKDIASANGLAFPKITLPPQPHTKEGIEAYNNVVAQIVIWVNLNLWQKLKIGRDEAKPLQRLKGFPSFPLVERQANEVDWWDMVCNVKKLINEKKEDGKVFWQNLAGYKRQEALRPYLSSEEDRKKGKKFARYQFGDLLLHLEKKHGEDWGKVYDEAWERIDKKVEGLSKHIKLEEERRSEDAQSKAALTDWLRAKASFVIEGLKEADKDEFKRCELKLQKWYGSLRGKPFAIEAENSILDISGFSKQYNCAFIWQKDGVKKLNLYLIINYFKGGKLRFKKIKPEAFEANRFYTVINKKSGEIVPMEVNFNFDDPNLIILPLAFGKRQGREFIWNDLLSLETGSLKLANGRVIEKTLYNRRTRQDEPALFVALTFERREVLDSSNIKPMNLIGIDRGENIPAVIALTDPEGCPLSRFKDSLGNPTHILRIGESYKEKQRTIQAKKEVEQRRAGGYSRKYASKAKNLADDMVRNTARDLLYYAVTQDAMLIFENLSRGFGRQGKRTFMAERQYTRMEDWLTAKLAYEGLSKTYLSKTLAQYTSKTCSNCGFTITSADYDRVLEKLKKTATGWMTTINGKELKVEGQITYYNRYKRQNVVKDLSVELDRLSEESVNNDISSWTKGRSGEALSLLKKRFSHRPVQEKFVCLNCGFETHADEQAALNIARSWLFLRSQEYKKYQTNKTTGNTDKRAFVETWQSFYRKKLKEVWKPAV

SEQ ID NO: 69 - protein, 977 aa, synthetic construct
  REGION 1..977: note = CasX variant
MQEIKRINKIRRRLVKDSNTKKAGKTGPMKTLLVRVMTPDLRERLENLRKKPENIPQPISNTSRANLNKLLTDYTEMKKAILHVYWEEFQKDPVGLMSRVAQPAPKNIDQRKLIPVKDGNERLTSSGFACSQCCQPLYVYKLEQVNDKGKPHTNYFGRCNVSEHERLILLSPHKPEANDELVTYSLGKFGQRALDFYSIHVTRESNHPVKPLEQIGGNSCASGPVGKALSDACMGAVASFLTKYQDIILEHQKVIKKNEKRLANLKDIASANGLAFPKITLPPQPHTKEGIEAYNNVVAQIVIWVNLNLWQKLKIGRDEAKPLQRLKGFPSFPLVERQANEVDWWDMVCNVKKLINEKKEDGKVFWQNLAGYKRQEALRPYLSSEEDRKKGKKFARYQFGDLLLHLEKKHGEDWGKVYDEAWERIDKKVEGLSKHIKLEEERRSEDAQSKAALTDWLRAKASFVIEGLKEADKDEFKRCELKLQKWYGDLRGKPFAIEAENSILDISGFSKQYNCAFIWQKDGVKKLNLYLIINYFKGGKLRFKKIKPEAFEANRFYTVINKKSGEIVPMEVNFNFDDPNLIILPLAFGKRQGREFIWNDLLSLETGSLKLANGRVIEKTLYNRRTRQDEPALFVALTFERREVLDSSNIKPMNLIGIDRGENIPAVIALTDPEGCPLSRFKDSLGNPTHILRIGESYKEKQRTIQAKKEVEQRRAGGYSRKYASKAKNLANDMVRNTARDLLYYAVTQDAMLIFENLSRGFGRQGKRTFMAERQYTRMEDWLTAKLAYEGLSKTYLSKTLAQYTSKTCSNCGFTITSADYDRVLEKLKKTATGWMTTINGKELKVEGQITYYNRYKRQNVVKDLSVELDRLSEESVNNDISSWTKGRSGEALSLLKKRFSHRPVQEKFVCLNCGFETHADEQAALNIARSWLFLRSQEYKKYQTNKTTGNTDKRAFVETWQSFYRKKLKEVWKPAV

SEQ ID NO: 70 - protein, 978 aa, synthetic construct
  REGION 1..978: note = CasX variant
MQEIKRINKIRRRLVKDSNTKKAGKTGPMKTLLVRVMTPDLRERLENLRKKPENIPQPISNTSRANLNKLLTDYTEMKKAILHVYWEEFQKDPVGLMSRVAQPAPKNIDQRKLIPVKDGNERLTSSGFACSQCCQPLYVYKLEQVNDKGKPHTNYFGRCNVSEHERLILLSPHKPEANDELVTYSLGKFGQRALDFYSIHVTRESNHPVKPLEQIGGNSCASGPVGKALSDACMGAVASFLTKYQDIILEHQKVIKKNEKRLANLKDIASANGLAFPKITLPPQPHTKEGIEAYNNVVAQIVIWVNLNLWQKLKIGRDEAKPLQRLKGFPSFPLVERQANEVDWWDMVCNVKKLINEKKEDGKVFWQNLAGYKRQEALLPYLSSEEDRKKGKKFARYQFGDLLLHLEKKHGEDWGKVYDEAWERIDKKVEGLSKHIKLEEERRSEDAQSKAALTDWLRAKASFVIEGLKEADKDEFCRCELKLQKWYGDLRGKPFAIEAENSILDISGFSKQYNCAFIWQKDGVKKLNLYLIINYFKGGKLRFKKIKPEAFEANRFYTVINKKSGEIVPMEVNFNFDDPNLIILPLAFGKRQGREFIWNDLLSLETGSLKLANGRVIEKTLYNRRTRQDEPALFVALTFERREVLDSSNIKPMNLIGIDRGENIPAVIALTDPEGCPLSRFKDSLGNPTHILRIGESYKEKQRTIQAAKEKEQRRAGGYSRKYASKAKNLADDMVRNTARDLLYYAVTQDAMLIFENLSRGFGRQGKRTFMAERQYTRMEDWLTAKLAYEGLPSKTYLSKTLAQYTSKTCSNCGFTITSADYDRVLEKLKKTATGWMTTINGKELKVEGQITYYNRYKRQNVVKDLSVELDRLSEESVNNDISSWTKGRSGEALSLLKKRFSHRPVQEKFVCLNCGFETHADEQAALNIARSWLFLRSQEYKKYQTNKTTGNTDKRAFVETWQSFYRKKLKEVWKPAV

SEQ ID NO: 71 - protein, 977 aa, synthetic construct
  REGION 1..977: note = CasX variant
MQEIKRINKIRRRLVKDSNTKKAGKTGPMKTLLVRVMTPDLRERLENLRKKPENIPQPISNTSRANLNKLLTDYTEMKKAILHVYWEEFQKDPVGLMSRVAQPAPKNIDQRKLIPVKDGNERLTSSGFACSQCCQPLYVYKLEQVNDKGKPHTNYFGRCNVSEHERLILLSPHKPEANDELVTYSLGKFGQRALDFYSIHVTRESNHPVKPLEQIGGNSCASGPVGKALSDACMGAVASFLTKYQDIILEHQKVIKKNEKRLANLKDIASANGLAFPKITLPPQPHTKEGIEAYNNVVAQIVIWVNLNLWQKLKIGRDEAKPLQRLKGFPSFPLVERQANEVDWWDMVCNVKKLINEKKEDGKVFWQNLAGYKRQEALRPYLSSEEDRKKGKKFARYQFGDLLLHLEKKHGEDWGKVYDEAWERIDKKVEGLSKHIKLEEERRSEDAQSKAALTDWLRAKASFVIEGLKEADKDEFKRCELKLQKWYGDLRGKPFAIEAENSILDISGFSKQYNCAFIWQKDGVKKLNLYLIINYFKGGKLRFKKIKPEAFEANRFYTVINKKSGEIVPMEVNFNFDDPNLIILPLAFGKRQGREFIWNDLLSLETGSLKLANGRVIEKTLYNRRTRQDEPALFVALTFERREVLDSSNIKPMNLIGIDRGENIPAVIALTDPEGCPLSRFKDSLGNPTHILRIGESYKEKQRTIQAKKEVEQRRAGGYSRKYASKAKNLADDMVRNTARDLLYYAVTQDAMLIFENLSRGFGRQGKRTFMAERQYTRMEDWLTAKLAYEGLSKTLLSKTLAQYTSKTCSNCGFTITSADYDRVLEKLKKTATGWMTTINGKELKVEGQITYYNRYKRQNVVKDLSVELDRLSEESVNNDISSWTKGRSGEALSLLKKRFSHRPVQEKFVCLNCGFETHADEQAALNIARSWLFLRSQEYKKYQTNKTTGNTDKRAFVETWQSFYRKKLKEVWKPAV

SEQ ID NO: 72 - protein, 977 aa, synthetic construct
  REGION 1..977: note = CasX variant
MQEIKRINKIRRRLVKDSNTKKAGKTGPMKTLLVRVMTPDLRERLENLRKKPENIPQPISNTSRANLNKLLTDYTEMKKAILHVYWEEFQKDPVGLMSRVAQPAPKNIDQRKLIPVKDGNERLTSSGFACSQCCQPLYVYKLEQVNDKGKPHTNYFGRCNVSEHERLILLSPHKPEANDELVTYSLGKFGQRALDFYSIHVTRESNHPVKPLEQIGGNSCASGPVGKALSDACMGAVASFLTKYQDIILEHQKVIKKNEKRLANLKDIASANGLAFPKITLPPQPHTKEGIEAYNNVVAQIVIWVNLNLWQKLKIGRDEAKPLQRLKGFPSFPLVERQANEVDWWDMVCNVKKLINEKKEDGKVFWQNLAGYKRQEALRPYLSSEEDRKKGKKFARYQFGDLLLHLEKKHGEDWGKVYDEAWERIDKKVEGLSKHIKLEEERRSEDAQSKAALTDWLRAKASFVIEGLKEADKDEFCRCELKLQKWYGDLRGKPFAIEAENSILDISGFSKQYNCAFIWQKDGVKKLNLYLIINYFKGGKLRFKKIKPEAFEANRFYTVINKKSGEIVPMEVNFNFDDPNLIILPLAFGKRQGREFIWNDLLSLETGSLKLANGRVIEKTLYNRRTRQDEPALFVALTFERREVLDSSNIKPMNLIGIDRGENIPAVIALTDPEGCPLSRFKDSLGNPTHILRIGESYKEKQRTIQAKKEVEQRRAGGYSRKYASKAKNLADDMVRNTARDLLYYAVTQDAMLIFENLSRGFGRQGKRTFMAERQYTRMEDWLTAKLAYEGLSKTYLSKTLAQYTSKTCSNCGFTITSADYDRVLEKLKKTATGWMTTINGKELKVEGQITYYNRYKRQNVVKDLSVELDRLSEESVNNDISSWTKGRSGEALSLLKKRFSHRPVQEKFVCLNCGFETHADEQAALNIARSWLFLRSQEYKKYQTNKTTGNTDKRAFVETWQSFYRKKLKEVWKPAV

SEQ ID NO: 73 - protein, 977 aa, synthetic construct
  REGION 1..977: note = CasX variant
MQEIKRINKIRRRLVKDSNTKKAGKTGPMKTLLVRVMTPDLRERLENLRKKPENIPQPISNTSRANLNKLLTDYTEMKKAILHVYWEEFQKDPVGLMSRVAQPAPKNIDQRKLIPVKDGNERLTSSGFACSQCCQPLYVYKLEQVNDKGKPHTNYFGRCNVSEHERLILLSPHKPEANDELVTYSLGKFGQRALDFYSIHVTRESNHPVKPLEQIGGNSCASGPVGKALSDACMGAVASFLTKYQDIILEHQKVIKKNEKRLANLKDIASANGLAFPKITLPPQPHTKEGIEAYNNVVAQIVIWVNLNLWQKLKIGRDEAKPLQRLKGFPSFPLVERQANEVDWWDMVCNVKKLINEKKEDGKVFWQNLAGYKRQEALRPYLSSEEDRKKGKKFARYQFGDLLLHLEKKHGEDWGKVYDEAWERIDKKVEGLSKHIKLEEERRSEDAQSKAALTDWLRAKASFVIEGLKEADKDEFKRCELKLQKWYGDLRGKPFAIEAENSILDISGFSKQYNCAFIWQKDGVKKLNLYLIINYFKGGKLRFKKIKPEAFEANRFYTVINKKSGEIVPMEVNFNFDDPNLIILPLAFGKRQGREFIWNDLLSLETGSLKLANGRVIEKTLYNRRTRQDEPALFVALTFERREVLDSSNIKPMNLIGIDRGENIPAVIALTDPEGCPLSRFKDSLGNPTHILRIGESYKEKQRTIQAKKEVEQRRAGGYSRKYASKAKNLADDMVRNTARDLLYYAVTQDAMLIFENLSRGFGRQGKRTFNAERQYTRMEDWLTAKLAYEGLSKTYLSKTLAQYTSKTCSNCGFTITSADYDRVLEKLKKTATGWMTTINGKELKVEGQITYYNRYKRQNVVKDLSVELDRLSEESVNNDISSWTKGRSGEALSLLKKRFSHRPVQEKFVCLNCGFETHADEQAALNIARSWLFLRSQEYKKYQTNKTTGNTDKRAFVETWQSFYRKKLKEVWKPAV

SEQ ID NO: 74 - protein, 977 aa, synthetic construct
  REGION 1..977: note = CasX variant
MQEIKRINKIRRRLVKDSNTKKAGKTGPMKTLLVRVMTPDLRERLENLRKKPENIPQPISNTSRANLNKLLTDYTEMKKAILHVYWEEFQKDPVGLMSRVAQPAPKNIDQRKLIPVKDGNERLTSSGFACSQCCQPLYVYKLEQVNDKGKPHTNYFGRCNVSEHERLILLSPHKPEANDELVTYSLGKFGQRALDFYSIHVTRESNHPVKPLEQIGGNSCASGPVGKALSDACMGAVASFLTKYQDIILEHQKVIKKNEKRLANLKDIASANGLAFPKITLPPQPHTKEGIEAYNNVVAQIVIWVNLNLWQKLKIGRDEAKPLQRLKGFPSFPLVERQANEVDWWDMVCNVKKLINEKKEDGKVFWQNLAGYKRQEALLPYLSSESDRKKGKKFARYQFGDLLLHLEKKHGEDWGKVYDEAWERIDKKVEGLSKHIKLEEERRSEDAQSKAALTDWLRAKASFVIEGLKEADKDEFCRCELKLQKWYGDLRGKPFAIEAENSILDISGFSKQYNCAFIWQKDGVKKLNLYLIINYFKGGKLRFKKIKPEAFEANRFYTVINKKSGEIVPMEVNFNFDDPNLIILPLAFGKRQGREFIWNDLLSLETGSLKLANGRVIEKTLYNRRTRQDEPALFVALTFERREVLDSSNIKPMNLIGIDRGENIPAVIALTDPEGCPLSRFKDSLGNPTHILRIGESYKEKQRTIQAKKEVEQRRAGGYSRKYASKAKNLADDMVRNTARDLLYYAVTQDAMLIFENLSRGFGRQGKRTFMAERQYTRMEDWLTAKLAYEGLSKTYLSKTLAQYTSKTCSNCGFTITSADYDRVLEKLKKTATGWMTTINGKELKVEGQITYYNRYKRQNVVKDLSVELDRLSEESVNNDISSWTKGRSGEALSLLKKRFSHRPVQEKFVCLNCGFETHADEQAALNIARSWLFLRSQEYKKYQTNKTTGNTDKRAFVETWQSFYRKKLKEVWKPAV

SEQ ID NO: 75 - protein, 977 aa, synthetic construct
  REGION 1..977: note = CasX variant
MQEIKRINKIRRRLVKDSNTKKAGKTGPMKTLLVRVMTPDLRERLENLRKKPENIPQPISNTSRANLNKLLTDYTEMKKAILHVYWEEFQKDPVGLMSRVAQPAPKNIDQRKLIPVKDGNERLTSSGFACSQCCQPLYVYKLEQVNDKGKPHTNYFGRCNVSEHERLILLSPHKPEANDELVTYSLGKFGQRALDFYSIHVTRESNHPVKPLEQIGGNSCASGPVGKALSDACMGAVASFLTKYQDIILEHQKVIKKNEKRLANLKDIASANGLAFPKITLPPQPHTKEGIEAYNNVVAQIVIWVNLNLWQKLKIGRDEAKPLQRLKGFPSFPLVERQANEVDWWDMVCNVKKLINEKKEDGKVFWQNLAGYKRQEALRPYLSSEEDRKKGKKFARYQFGDLLLHLEKKHGEDWGKVYDEAWERIDKKVEGLSKHIKLEEERRSEDAQSKAALTDWLRAKASFVIEGLKEADKDEFKRCELKLQKWYGDLRGKPFAIEAENSILDISGFSKQYNCAFIWQKDGVKKLNLYLIINYFKGGKLRFKKIKPEAFEANRFYTVINKKSGEIVPMEVNFNFDDPNLIILPLAFGKRQGREFIWNDLLSLETGSLKLANGRVIEKTLYNRRTRQDEPALFVALTFERREVLDSSNIKPMNLIGIDRGENIPAVIALTDPEGCPLSRFKDSLGNPTHILRIGESYKEKQRTIQAKKEVEQRRAGGYSRKYASKAKNLADDMVRNTARDLLYYAVTQDAMLIFENLSRGFGRQGKRTFMAERQYTRMEDWLTAKLAYEGLSKTYLSKTLAQYTSKTCSNCGFTITSADYDRVLEKLKKTATGWMTTINGKELKVEGQITYYNRYKRQNVVKDLSVELDRLSEESVNNDISSWTKGRSGEALSLLKKRFSHRPVQEKFVCLNCGFETHADEQAALNIARSWLFLRSQEYKKYQTNKTTGNTDKRAFVETWQSFYRKKLKEVWKPAV

SEQ ID NO: 76 - protein, 978 aa, synthetic construct
  REGION 1..978: note = CasX variant
MQEIKRINKIRRRLVKDSNTKKAGKTGPMKTLLVRVMTPDLRERLENLRKKPENIPQPISNTSRANLNKLLTDYTEMKKAILHVYWEEFQKDPVGLMSRVAQPAPKNIDQRKLIPVKDGNERLTSSGFACSQCCQPLYVYKLEQVNDKGKPHTNYFGRCNVSEHERLILLSPHKPEANDELVTYSLGKFGQRALDFYSIHVTRESNHPVKPLEQIGGNSCASGPVGKALSDACMGAVASFLTKYQDIILEHQKVIKKNEKRLANLKDIASANGLAFPKITLPPQPHTKEGIEAYNNVVAQIVIWVNLNLWQKLKIGRDEAKPLQRLKGFPSFPLVERQANEVDWWDMVCNVKKLINEKKEDGKVFWQNLAGYKRQEALLPYLSSEEDRKKGKKFARYQFGDLLLHLEKKHGEDWGKVYDEAWERIDKKVEGLSKHIKLEEERRSEDAQSKAALTDWLRAKASFVIEGLKEADKDEFCRCELKLQKWYGDLRGKPFAIEAENSILDISGFSKQYNCAFIWQKDGVKKLNLYLIINYFKGGKLRFKKIKPEAFEANRFYTVINKKSGEIVPMEVNFNFDDPNLIILPLAFGKRQGREFIWNDLLSLETGSLKLANGRVIEKTLYNRRTRQDEPALFVALTFERREVLDSSNIKPMNLIGIDRGENIPAVIALTDPEGCPLSRFKDSLGNPTHILRIGESYKEKQRTIQAAKEVEQRRAGGYSRKYASKAKNLADDMVRNTARDLLYYAVTQDAMLIFENLSRGFGRQGKRTFMAERQYTRMEDWLTAKLAYEGDPSKTYLSKTLAQYTSKTCSNCGFTITSADYDRVLEKLKKTATGWMTTINGKELKVEGQITYYNRYKRQNVVKDLSVELDRLSEESVNNDISSWTKGRSGEALSLLKKRFSHRPVQEKFVCLNCGFETHADEQAALNIARSWLFLRSQEYKKYQTNKTTGNTDKRAFVETWQSFYRKKLKEVWKPAV

SEQ ID NO: 77 - protein, 978 aa, synthetic construct
  REGION 1..978: note = CasX variant
MQEIKRINKIRRRLVKDSNTKKAGKTGPMKTLLVRVMTPDLRERLENLRKKPENIPQPISNTSRANLNKLLTDYTEMKKAILHVYWEEFQKDPVGLMSRVAQPAPKNIDQRKLIPVKDGNERLTSSGFACSQCCQPLYVYKLEQVNDKGKPHTNYFGRCNVSEHERLILLSPHKPEANDELVTYSLGKFGQRALDFYSIHVTRESNHPVKPLEQIGGNSCASGPVGKALSDACMGAVASFLTKYQDIILEHQKVIKKNEKRLANLKDIASANGLAFPKITLPPQPHTKEGIEAYNNVVAQIVIWVNLNLWQKLKIGRDEAKPLQRLKGFPSFPLVERQANEVDWWDMVCNVKKLINEKKEDGKVFWQNLAGYKRQEALLPYLSSEEDRKKGKKFARYQFGDLLLHLEKKHGEDWGKVYDEAWERIDKKVEGLSKHIKLEEERRSEDAQSKAALTDWLRAKASFVIEGLKEADKDEFCRCELKLQKWYGDLRGKPFAIEAENSILDISGFSKQYNCAFIWQKDGVKKLNLYLIINYFKGGKLRFKKIKPEAFEANRFYTVINKKSGEIVPMEVNFNFDDPNLIILPLAFGKRQGREFIWNDLLSLETGSLKLANGRVIEKTLYNRRTRQDEPALFVALTFERREVLDSSNIKPMNLIGIDRGENIPAVIALTDPEGCPLSRFKDSLGNPTHILRIGESYKEKQRTIQAAKEVEQRRAGGYSRKYASKAKNLADDMVRNTARDLLYYAVTQDAMLIFENLSRGFGRQGKRTFMAERQYTRMEDWLTAKLAYEFLPSKTYLSKTLAQYTSKTCSNCGFTITSADYDRVLEKLKKTATGWMTTINGKELKVEGQITYYNRYKRQNVVKDLSVELDRLSEESVNNDISSWTKGRSGEALSLLKKRFSHRPVQEKFVCLNCGFETHADEQAALNIARSWLFLRSQEYKKYQTNKTTGNTDKRAFVETWQSFYRKKLKEVWKPAV

SEQ ID NO: 78 - protein, 977 aa, synthetic construct
  REGION 1..977: note = CasX variant
MQEIKRINKIRRRLVKDSNTKKAGKTGPMKTLLVRVMTPDLRERLENLRKKPENIPQPISNTSRANLNKLLTDYTEMKKAILHVYWEEFQKDPVGLMSRVAQPAPKNIDQRKLIPVKDGNERLTSSGFACSQCCQPLYVYKLEQVNDKGKPHTNYFGRCNVSEHERLILLSPHKPEANDELVTYSLGKFGQRALDFYSIHVTRESNHPVKPLEQIGGNSCASGPVGKALSDACMGAVASFLTKYQDIILEHQKVIKKNEKRLANLKDIASANGLAFPKITLPPQPHTKEGIEAYNNVVAQIVIWVNLNLWQKLKIGRDEAKPLQRLKGFPSFPLVERQANEVDWWDMVCNVKKLINEKKEDGKVFWQNLAGYKRQEALLPYLSSEEDRKKGKKFARYQFGDLLLHLEKKHGEDWGKVYDEAWERIDKKVEGLSKHIKLEEERRSEDAQSKAALTDWLRAKASFVIEGLKEADKDEFCRCELKLQKWYGDLRGKPFAIEAENSILDISGFSKQYNCAFIWQKDGVKKLNLYLIINYFKGGKLRFKKIKPEAFEANRFYTVINKKSGEIVPMEVNFNFDDPNLIILPLAFGKRQGREFIWNDLLSLETGSLKLANGRVIEKTLYNRRTRQDEPALFVALTFERREVLDSSNIKPMNLIGIDRGENIPAVIALTDPEGCPLSRFKDSLGNPTHILRIGESYKEKQRTIQAKKEVEQRRAGGYSRKYASKAKNLADDMVRNTVRDLLYYAVTQDAMLIFENLSRGFGRQGKRTFMAERQYTRMEDWLTAKLAYEGLSKTYLSKTLAQYTSKTCSNCGFTITSADYDRVLEKLKKTATGWMTTINGKELKVEGQITYYNRYKRQNVVKDLSVELDRLSEESVNNDISSWTKGRSGEALSLLKKRFSHRPVQEKFVCLNCGFETHADEQAALNIARSWLFLRSQEYKKYQTNKTTGNTDKRAFVETWQSFYRKKLKEVWKPAV

SEQ ID NO: 79 - protein, 977 aa, synthetic construct
  REGION 1..977: note = CasX variant
MQEIKRINKIRRRLVKDSNTKKAGKTGPMKTLLVRVMTPDLRERLENLRKKPENIPQPISNTSRANLNKLLTDYTEMKKAILHVYWEEFQKDPVGLMSRVAQPAPKNIDQRKLIPVKDGNERLTSSGFACSQCCQPLYVYKLEQVNDKGKPHTNYFGRCNVSEHERLILLSPHKPEANDELVTYSLGKFGQRALDFYSIHVTRESNHPVKPLEQIGGNSCASGPVGKALSDACMGAVASFLTKYQDIILEHQKVIKKNEKRLANLKDIASANGLAFPKITLPPQPHTKEGIEAYNNVVAQIVIWVNLNLWQKLKIGRDEAKPLQRLKGFPSFPLVERQANEVDWWDMVCNVKKLINEKKEDGKVFWQNLAGYKRQEALRPYLSSEEDRKKGKKFARYQFGDLLLHLEKKHGEDWGKVYDEAWERIDKKVEGLSKHIKLEEERRSEDAQSKAALTDWLRAKASFVIEGLKEADKDEFCRCELKLQKWYGDLRGKPFAIEAENSILDISGFSKQYNCAFIWQKDGVKKLNLYLIINYFKGGKLRFKKIKPEAFEANRFYTVINKKSGEIVPMEVNFNFDDPNLIILPLAFGKRQGREFIWNDLLSLETGSLKLANGRVIEKTLYNRRTRQDEPALFVALTFERREVLDSSNIKPMNLIGIDRGENIPAVIALTDPEGCPLSRFKDSLGNPTHILRIGESYKEKQRTIQAKKEVEQRRAGGYSRKYASKAKNLADDMVRNTVRDLLYYAVTQDAMLIFENLSRGFGRQGKRTFMAERQYTRMEDWLTAKLAYEGLSKTYLSKTLAQYTSKTCSNCGFTITSADYDRVLEKLKKTATGWMTTINGKELKVEGQITYYNRYKRQNVVKDLSVELDRLSEESVNNDISSWTKGRSGEALSLLKKRFSHRPVQEKFVCLNCGFETHADEQAALNIARSWLFLRSQEYKKYQTNKTTGNTDKRAFVETWQSFYRKKLKEVWKPAV

SEQ ID NO: 80 - protein, 977 aa, synthetic construct
  REGION 1..977: note = CasX variant
MQEIKRINKIRRRLVKDSNTKKAGKTGPMKTLLVRVMTPDLRERLENLRKKPENIPQPISNTSRANLNKLLTDYTEMKKAILHVYWEEFQKDPVGLMSRVAQPAPKNIDQRKLIPVKDGNERLTSSGFACSQCCQPLYVYKLEQVNDKGKPHTNYFGRCNVSEHERLILLSPHKPEANDELVTYSLGKFGQRALDFYSIHVTRESNHPVKPLEQIGGNSCASGPVGKALSDACMGAVASFLTKYQDIILEHQKVIKKNEKRLANLKDIASANGLAFPKITLPPQPHTKEGIEAYNNVVAQIVIWVNLNLWQKLKIGRDEAKPLQRLKGFPSFPLVERQANEVDWWDMVCNVKKLINEKKEDGKVFWQNLAGYKRQEALLPYLSSEEDRKKGKKFARYQFGDLLLHLEKKHGEDWGKVYDEAWERIDKKVEGLSKHIKLEEERRSEDAQSKAALTDWLRAKASFVIEGLKEADKDEFKRCELKLQKWYGDLRGKPFAIEAENSILDISGFSKQYNCAFIWQKDGVKKLNLYLIINYFKGGKLRFKKIKPEAFEANRFYTVINKKSGEIVPMEVNFNFDDPNLIILPLAFGKRQGREFIWNDLLSLETGSLKLANGRVIEKTLYNRRTRQDEPALFVALTFERREVLDSSNIKPMNLIGIDRGENIPAVIALTDPEGCPLSRFKDSLGNPTHILRIGESYKEKQRTIQAKKEVEQRRAGGYSRKYASKAKNLADDMVRNTARDLLYYAVTQDAMLIFENLSRGFGRQGKRTFMAERQYTRMEDWLTAKLAYEGLSKTYLSKTLAQYTSKTCSNCGFTITSADYDRVLEKLKKTATGWMTTINGKELKVEGQITYYNRYKRQNVVKDLSVELDRLSEESVNNDISSWTKGRSGEALSLLKKRFSHRPVQEKFVCLNCGFETHADEQAALNIARSWLFLRSQEYKKYQTNKTTGNTDKRAFVETWQSFYRKKLKEVWKPAV

SEQ ID NO: 81 - protein, 978 aa, synthetic construct
  REGION 1..978: note = CasX variant
MQEIKRINKIRRRLVKDSNTKKAGKTGPMKTLLVRVMTPDLRERLENLRKKPENIPQPISNTSRANLNKLLTDYTEMKKAILHVYWEEFQKDPVGLMSRVAQPAPKNIDQRKLIPVKDGNERLTSSGFACSQCCQPLYVYKLEQVNDKGKPHTNYFGRCNVSEHERLILLSPHKPEANDELVTYSLGKFGQRALDFYSIHVTRESNHPVKPLEQIGGNSCASGPVGKALSDACMGAVASFLTKYQDIIIEHQKVIKKNEKRLANLKDIASANGLAFPKITLPPQPHTKEGIEAYNNVVAQIVIWVNLNLWQKLKIGRDEAKPLQRLKGFPSFPLVERQANEVDWWDMVCNVKKLINEKKEDGKVFWQNLAGYKRQEALLPYLSSEEDRKKGKKFARYQFGDLLLHLEKKHGEDWGKVYDEAWERIDKKVEGLSKHIKLEEERRSEDAQSKAALTDWLRAKASFVIEGLKEADKDEFCRCELKLQKWYGDLRGKPFAIEAENSILDISGFSKQYNCAFIWQKDGVKKLNLYLIINYFKGGKLRFKKIKPEAFEANRFYTVINKKSGEIVPMEVNFNFDDPNLIILPLAFGKRQGREFIWNDLLSLETGSLKLANGRVIEKTLYNRRTRQDEPALFVALTFERREVLDSSNIKPMNLIGIDRGENIPAVIALTDPEGCPLSRFKDSLGNPTHILRIGESYKEKQRTIQAAKEVEQRRAGGYSRKYASKAKNLADDMVRNTARDLLYYAVTQDAMLIFENLSRGFGRQGKRTFNAERQYTRMEDWLTAKLAYEGLPSKTYLSKTLAQYTSKTCSNCGFTITSADYDRVLEKLKKTATGWMTTINGKELKVEGQITYYNRYKRQNVVKDLSVELDRLSEESVNNDISSWTKGRSGEALSLLKKRFSHRPVQEKFVCLNCGFETHADEQAALNIARSWLFLRSQEYKKYQTNKTTGNTDKRAFVETWQSFYRKKLKEVWKPAV

SEQ ID NO: 82 - protein, 978 aa, synthetic construct
  REGION 1..978: note = CasX variant
MQEIKRINKIRRRLVKDSNTKKAGKTGPMKTLLVRVMTPDLRERLENLRKKPENIPQPISNTSRANLNKLLTDYTEMKKAILHVYWEEFQKDPVGLMSRVAQPAPKNIDQRKLIPVKDGNERLTSSGFACSQCCQPLYVYKLEQVNDKGKPHTNYFGRCNVSEHERLILLSPHKPEANDELVTYSLGKFGQRALDFYSIHVTRESNHPVKPLEQIGGNSCASGPVGKALSDACMGAVASFLTKYQDIILEHQKVIKKNEKRLANLKDIASANGLAFPKITLPPQPHTKEGIEAYNNVVAQIVIWVNLNLWQKLKIGRDEAKPLQRLKGFPSFPLVERQANEVDWWDMVCNVKKLINEKKEDGKVFWQNLAGYKRQEALLPYLSSEEDRKKGKKFARYQFGDLLLHLEKKHGEDWGKVYDEAWERIDKKVEGLSKHIKLEEERRSEDAQSKAALTDWLRAKASFVIEGLKEADKDEFCRCELKLQKWYGDLRGKPFAIEAENSILDISGFSKQYNCAFIWQKDGVKKLNLYLIINYFKGGKLRFKKIKPEAFEANRFYTVINKKSGEIVPMEVNFNFDDPNLIILPLAFGKRQGREFIWNDLLSLETGSLKLANGRVIEKTLYNRRTRQDEPALFVALTFERREVLDSSNIKPMNLIGIDRGENIPAVIALTDPEGCPLSRFKDSLGNPTHILRIGESYKEKQRTIQAAKEVEQRRAGGYSRKYASKAKNLADDMVRNTARDLLYYAKTQDAMLIFENLSRGFGRQGKRTFMAERQYTRMEDWLTAKLAYEGLPSKTYLSKTLAQYTSKTCSNCGFTITSADYDRVLEKLKKTATGWMTTINGKELKVEGQITYYNRYKRQNVVKDLSVELDRLSEESVNNDISSWTKGRSGEALSLLKKRFSHRPVQEKFVCLNCGFETHADEQAALNIARSWLFLRSQEYKKYQTNKTTGNTDKRAFVETWQSFYRKKLKEVWKPAV

SEQ ID NO: 83 - protein, 977 aa, synthetic construct
  REGION 1..977: note = CasX variant
MQEIKRINKIRRRLVKDSNTKKAGKTGPMKTLLVRVMTPDLRERLENLRKKPENIPQPISNTSRANLNKLLTDYTEMKKAILHVYWEEFQKDPVGLMSRVAQPAPKNIDQRKLIPVKDGNERLTSSGFACSQCCQPLYVYKLEQVNDKGKPHTNYFGRCNVSEHERLILLSPHKPEANDELVTYSLGKFGQRALDFYSIHVTRESNHPVKPLEQIGGNSCASGPVGKALSDACMGAVASFLTKYQDIILEHQKVIKKNEKRLANLKDIASANGLAFPKITLPPQPHTKEGIEAYNNVVAQIVIWVNLNLWQKLKIGRDEAKPLQRLKGFPSFPLVERQANEVDWWDMVCNVKKLINEKKEDGKVFWQNLAGYKRQEALRPYLSSEEDRKKGKKFARYQFGDLLLHLEKKHGEDWGKVYDEAWERIDKKVEGLSKHIKLEEERRSEDAQSKAALTDWLRAKASFVIEGLKEADKDEFKRCELKLQKWYGDLRGKPFAIEAENSILDISGFSKQYNCAFIWQKDGVKKLNLYLIINYFKGGKLRFKKIKPEAFEANRFYTVINKKSGEIVPMEVNFNFDDPNLIILPLAFGKRQGREFIWNDLLSLETGSLKLANGRVIEKTLYNRRTRQDEPALFVALTFERREVLDSSNIKPMNLIGIDRGENIPAVIALTDPEGCPLSRFKDSLGNPTHILRIGESYKEKQRTIQAKKEVEQRRAGGYSRKYASKAKNLADDMVRNTARDLLYYAVTQDAMLIFENLSRGFGRQGKRTFMAERQYTRNEDWLTAKLAYEGLSKTYLSKTLAQYTSKTCSNCGFTITSADYDRVLEKLKKTATGWMTTINGKELKVEGQITYYNRYKRQNVVKDLSVELDRLSEESVNNDISSWTKGRSGEALSLLKKRFSHRPVQEKFVCLNCGFETHADEQAALNIARSWLFLRSQEYKKYQTNKTTGNTDKRAFVETWQSFYRKKLKEVWKPAV

SEQ ID NO: 84 - protein, 978 aa, synthetic construct
  REGION 1..978: note = CasX variant
MQEIKRINKIRRRLVKDSNTKKAGKTGPMKTLLVRVMTPDLRERLENLRKKPENIPQPISNTSRANLNKLLTDYTEMKKAILHVYWEEFQKDPVGLMSRVAQPAPKNIDQRKLIPVKDGNERLTSSGFACSQCCQPLYVYKLEQVNDKGKPHTNYFGRCNVSEHERLILLSPHKPEANDELVTYSLGKFGQRALDFYSIHVTRESNHPVKPLEQIGGNSCASGPVGKALSDACMGAVASFLTKYQDIILEHQKVIKKNEKRLANLKDIASANGLAFPKITLPPQPHTKEGIEAYNNVVAQIVIWVNLNLWQKLKIGRDEAKPLQRLKGFPSFPLVERQANEVDWWDMVCNVKKLINEKKEDGKVFWQNLAGYKRQEALLPYLSSEEDRKKGKKFARYQFGDLLLHLEKKHGEDWGKVYDEAWERIDKKVEGLSKHIKLEEERRSEDAQSKAALTDWLRAKASFVIEGLKEADKDEFCRCELKLQKWYGDLRGKPFAIEAENSILDISGFSKQYNCAFIWQKDGVKKLNLYLIINYFKGGKLRFKKIKPEAFEANRFYTVINKKSGEIVPMEVNFNFDDPNLIILPLAFGKRQGREFIWNDLLSLETGSLKLANGRVIEKTLYNRRTRQDEPALFVALTFERREVLDSSNIKPMNLIGIDRGENIPAVIALTDPEGCPLSRFKDSLGNPTHILRIGESYKEKQRTIQAAKEVEQRRAGGYSRKYASKAKNLADDMVRNTARDLLYYAVTQDAMLIMENLSRGFGRQGKRTFMAERQYTRMEDWLTAKLAYEGLPSKTYLSKTLAQYTSKTCSNCGFTITSADYDRVLEKLKKTATGWMTTINGKELKVEGQITYYNRYKRQNVVKDLSVELDRLSEESVNNDISSWTKGRSGEALSLLKKRFSHRPVQEKFVCLNCGFETHADEQAALNIARSWLFLRSQEYKKYQTNKTTGNTDKRAFVETWQSFYRKKLKEVWKPAV

SEQ ID NO: 85 - protein, 977 aa, synthetic construct
  REGION 1..977: note = CasX variant
MQEIKRINKIRRRLVKDSNTKKAGKTGPMKTLLVRVMTPDLRERLENLRKKPENIPQPISNTSRANLNKLLTDYTEMKKAILHVYWEEFQKDPVGLMSRVAQPAPKNIDQRKLIPVKDGNERLTSSGFACSQCCQPLYVYKLEQVNDKGKPHTNYFGRCNVSEHERLILLSPHKPEANDELVTYSLGKFGQRALDFYSIHVTRESNHPVKPLEQIGGNSCASGPVGKALSDACMGAVASFLTKYQDIILEHQKVIKKNEKRLANLKDIASANGLAFPKITLPPQPHTKEGIEAYNNVVAQIVIWVNLNLWQKLKIGRDEAKPLQRLKGFPSFPLVERQANEVDWWDMVCNVKKLINEKKEDGKVFWQNLAGYKRQEALRPYLSSEEDRKKGKKFARYQFGDLLLHLEKKHGEDWGKVYDEAWERIDKKVEGLSKHIKLEEERRSEDAQSKAALTDWLRAKASFVIEGLKEADKDEFCRCELKLQKWYGDLRGKPFAIEAENSILDISGFSKQYNCAFIWQKDGVKKLNLYLIINYFKGGKLRFKKIKPEAFEANRFYTVINKKSGEIVPMEVNFNFDDPNLIILPLAFGKRQGREFIWNDLLSLETGSLKLANGRVIEKTLYNRRTRQDEPALFVALTFERREVLDSSNIKPMNLIGIDRGENIPAVIALTDPEGCPLSRFKDSLGNPTHILRIGESYKEKQRTIQAKKEVEQRRAGGYSRKYASKAKNLADDMVRNTARDLLYYAVTQDAMLIFENLSRGFGRQGKRTFMAERQYTRMEDWLTAKLAYEGLSKTYLSKTLAQYTSKTCSNCGFTITSADYDRVLEKLKKTATGWMTTINGKELKVEGQITYYNRRKRQNVVKDLSVELDRLSEESVNNDISSWTKGRSGEALSLLKKRFSHRPVQEKFVCLNCGFETHADEQAALNIARSWLFLRSQEYKKYQTNKTTGNTDKRAFVETWQSFYRKKLKEVWKPAV

SEQ ID NO: 86 - protein, 977 aa, synthetic construct
  REGION 1..977: note = CasX variant
MQEIKRINKIRRRLVKDSNTKKAGKTGPMKTLLVRVMTPDLRERLENLRKKPENIPQPISNTSRANLNKLLTDYTEMKKAILHVYWEEFQKDPVGLMSRVAQPAPKNIDQRKLIPVKDGNERLTSSGFACSQCCQPLYVYKLEQVNDKGKPHTNYFGRCNVSEHERLILLSPHKPEANDELVTYSLGKFGQRALDFYSIHVTRESNHPVKPLEQIGGNSCASGPVGKALSDACMGAVASFLTKYQDIILEHQKVIKKNEKRLANLKDIASANGLAFPKITLPPQPHTKEGIEAYNNVVAQIVIWVNLNLWQKLKIGRDEAKPLQRLKGFPSFPLVERQANEVDWWDMVCNVKKLINEKKEDGKVFWQNLAGYKRQEALRPYLSSEEDRKKGKKFARYQFGDLLLHLEKKHGEDWGKVYDEAWERIDKKVEGLSKHIKLEEERRSEDAQSKAALTDWLRAKASFVIEGLKEADKDEFCRCELKLQKWYGDLRGKPFAIEAENSILDISGFSKQYNCAFIWQKDGVKKLNLYLIINYFKGGKLRFKKIKPEAFEANRFYTVINKKSGEIVPMEVNFNFDDPNLIILPLAFGKRQGREFIWNDLLSLETGSLKLANGRVIEKTLYNRRTRQDEPALFVALTFERREVLDSSNIKPMNLIGVDRGENIPAVIALTDPEGCPLSRFKDSLGNPTHILRIGESYKEKQRTIQAKKEVEQRRAGGYSRKYASKAKNLADDMVRNTARDLLYYAVTQDAMLIFENLSRGFGRQGKRTFMAERQYTRMEDWLTAKLAYEGLSKTYLSKTLAQYTSKTCSNCGFTITSADYDRVLEKLKKTATGWMTTINGKELKVEGQITYYNRRKRQNVVKDLSVELDRLSEESVNNDISSWTKGRSGEALSLLKKRFSHRPVQEKFVCLNCGFETHADEQAALNIARSWLFLRSQEYKKYQTNKTTGNTDKRAFVETWQSFYRKKLKEVWKPAV

SEQ ID NO: 87 - protein, 977 aa, synthetic construct
  REGION 1..977: note = CasX variant
MQEIKRINKIRRRLVKDSNTKKAGKTGPMKTLLVRVMTPDLRERLENLRKKPENIPQPISNTSRANLNKLLTDYTEMKKAILHVYWEEFQKDPVGLMSRVAQPAPKNIDQRKLIPVKDGNERLTSSGFACSQCCQPLYVYKLEQVNDKGKPHTNYFGRCNVSEHERLILLSPHKPEANDELVTYSLGKFGQRALDFYSIHVTRESNHPVKPLEQIGGNSCASGPVGKALSDACMGAVASFLTKYQDIILEHQKVIKKNEKRLANLKDIASANGLAFPKITLPPQPHTKEGIEAYNNVVAQIVIWVNLNLWQKLKIGRDEAKPLQRLKGFPSFPLVERQANEVDWWDMVCNVKKLINEKKEDGKVFWQNLAGYKRQEALRPYLSSENDRKKGKKFARYQFGDLLLHLEKKHGEDWGKVYDEAWERIDKKVEGLSKHIKLEEERRSEDAQSKAALTDWLRAKASFVIEGLKEADKDEFCRCELKLQKWYGDLRGKPFAIEAENSILDISGFSKQYNCAFIWQKDGVKKLNLYLIINYFKGGKLRFKKIKPEAFEANRFYTVINKKSGEIVPMEVNFNFDDPNLIILPLAFGKRQGREFIWNDLLSLETGSLKLANGRVIEKTLYNRRTRQDEPALFVALTFERREVLDSSNIKPMNLIGVDRGENIPAVIALTDPEGCPLSRFKDSLGNPTHILRIGESYKEKQRTIQAKKEVEQRRAGGYSRKYASKAKNLADDMVRNTARDLLYYAVTQDAMLIFENLSRGFGRQGKRTFMAERQYTRMEDWLTAKLAYEGLSKTYLSKTLAQYTSKTCSNCGFTITSADYDRVLEKLKKTATGWMTTINGKELKVEGQITYYNRRKRQNVVKDLSVELDRLSEESVNNDISSWTKGRSGEALSLLKKRFSHRPVQEKFVCLNCGFETHADEQAALNIARSWLFLRSQEYKKYQTNKTTGNTDKRAFVETWQSFYRKKLKEVWKPAV

SEQ ID NO: 88 - protein, 977 aa, synthetic construct
  REGION 1..977: note = CasX variant
MQEIKRINKIRRRLVKDSNTKKAGKTGPMKTLLVRVMTPDLRERLENLRKKPENIPQPISNTSRANLNKLLTDYTEMKKAILHVYWEEFQKDPVGLMSRVAQPAPKNIDQRKLIPVKDGNERLTSSGFACSQCCQPLYVYKLEQVNDKGKPHTNYFGRCNVSEHERLILLSPHKPEANDELVTYSLGKFGQRALDFYSIHVTRESNHPVKPLEQIGGNSCASGPVGKALSDACMGAVASFLTKYQDIILEHQKVIKKNEKRLANLKDIASANGLAFPKITLPPQPHTKEGIEAYNNVVAQIVIWVNLNLWQKLKIGRDEAKPLQRLKGFPSFPLVERQANEVDWWDMVCNVKKLINEKKEDGKVFWQNLAGYKRQEALRPYLSSEEDRKKGKKFARYQFGDLLKHLEKKHGEDWGKVYDEAWERIDKKVEGLSKHIKLEEERRSEDAQSKAALTDWLRAKASFVIEGLKEADKDEFCRCELKLQKWYGDLRGKPFAIEAENSILDISGFSKQYNCAFIWQKDGVKKLNLYLIINYFKGGKLRFKKIKPEAFEANRFYTVINKKSGEIVPMEVNFNFDDPNLIILPLAFGKRQGREFIWNDLLSLETGSLKLANGRVIEKTLYNRRTRQDEPALFVALTFERREVLDSSNIKPMNLIGVDRGENIPAVIALTDPEGCPLSRFKDSLGNPTHILRIGESYKEKQRTIQAKKEVEQRRAGGYSRKYASKAKNLADDMVRNTARDLLYYAVTQDAMLIFENLSRGFGRQGKRTFMAERQYTRMEDWLTAKLAYEGLSKTYLSKTLAQYTSKTCSNCGFTITSADYDRVLEKLKKTATGWMTTINGKELKVEGQITYYNRRKRQNVVKDLSVELDRLSEESVNNDISSWTKGRSGEALSLLKKRFSHRPVQEKFVCLNCGFETHADEQAALNIARSWLFLRSQEYKKYQTNKTTGNTDKRAFVETWQSFYRKKLKEVWKPAV

SEQ ID NO: 89 - protein, 978 aa, synthetic construct
  REGION 1..978: note = CasX variant
MQEIKRINKIRRRLVKDSNTKKAGKTGPMKTLLVRVMTPDLRERLENLRKKPENIPQPISNTSRANLNKLLTDYTEMKKAILHVYWEEFQKDPVGLMSRVAQPAPKNIDQRKLIPVKDGNERLTSSGFACSQCCQPLYVYKLEQVNDKGKPHTNYFGRCNVSEHERLILLSPHKPEANDELVTYSLGKFGQVRALDFYSIHVTRESNHPVKPLEQIGGNSCASGPVGKALSDACMGAVASFLTKYQDIILEHQKVIKKNEKRLANLKDIASANGLAFPKITLPPQPHTKEGIEAYNNVVAQIVIWVNLNLWQKLKIGRDEAKPLQRLKGFPSFPLVERQANEVDWWDMVCNVKKLINEKKEDGKVFWQNLAGYKRQEALRPYLSSEEDRKKGKKFARYQFGDLLLHLEKKHGEDWGKVYDEAWERIDKKVEGLSKHIKLEEERRSEDAQSKAALTDWLRAKASFVIEGLKEADKDEFCRCELKLQKWYGDLRGKPFAIEAENSILDISGFSKQYNCAFIWQKDGVKKLNLYLIINYFKGGKLRFKKIKPEAFEANRFYTVINKKSGEIVPMEVNFNFDDPNLIILPLAFGKRQGREFIWNDLLSLETGSLKLANGRVIEKTLYNRRTRQDEPALFVALTFERREVLDSSNIKPMNLIGVDRGENIPAVIALTDPEGCPLSRFKDSLGNPTHILRIGESYKEKQRTIQAKKEVEQRRAGGYSRKYASKAKNLADDMVRNTARDLLYYAVTQDAMLIFENLSRGFGRQGKRTFMAERQYTRMEDWLTAKLAYEGLSKTYLSKTLAQYTSKTCSNCGFTITSADYDRVLEKLKKTATGWMTTINGKELKVEGQITYYNRRKRQNVVKDLSVELDRLSEESVNNDISSWTKGRSGEALSLLKKRFSHRPVQEKFVCLNCGFETHADEQAALNIARSWLFLRSQEYKKYQTNKTTGNTDKRAFVETWQSFYRKKLKEVWKPAV

SEQ ID NO: 90 - protein, 977 aa, synthetic construct
  REGION 1..977: note = CasX variant
MQEIKRINKIRRRLVKDSNTKKAGKTGPMKTLLVRVMTPDLRERLENLRKKPENIPQPISNTSRANLNKLLTDYTEMKKAILHVYWEEFQKDPVGLMSRVAQPAPKNIDQRKLIPVKDGNERLTSSGFACSQCCQPLYVYKLEQVNDKGKPHTNYFGRCNVSEHERLILLSPHKPEANDELVTYSLGKFGQRALDFYSIHVTRESNHPVKPLEQIGGNSCASGPVGKALSDACMGAVASFLTKYQDIILEHQKVIKKNEKRLANLKDIASANGLAFPKITLPPQPHTKEGIEAYNNVVAQIVIWVNLNLWQKLKIGRDEAKPLQRLKGFPSFPLVERQANEVDWWDMVCNVKKLINEKKEDGKVFWQNLAGYKRQEALRPYLSSENDRKKGKKFARYQFGDLLKHLEKKHGEDWGKVYDEAWERIDKKVEGLSKHIKLEEERRSEDAQSKAALTDWLRAKASFVIEGLKEADKDEFCRCELKLQKWYGDLRGKPFAIEAENSILDISGFSKQYNCAFIWQKDGVKKLNLYLIINYFKGGKLRFKKIKPEAFEANRFYTVINKKSGEIVPMEVNFNFDDPNLIILPLAFGKRQGREFIWNDLLSLETGSLKLANGRVIEKTLYNRRTRQDEPALFVALTFERREVLDSSNIKPMNLIGVDRGENIPAVIALTDPEGCPLSRFKDSLGNPTHILRIGESYKEKQRTIQAKKEVEQRRAGGYSRKYASKAKNLADDMVRNTARDLLYYAVTQDAMLIFENLSRGFGRQGKRTFMAERQYTRMEDWLTAKLAYEGLSKTYLSKTLAQYTSKTCSNCGFTITSADYDRVLEKLKKTATGWMTTINGKELKVEGQITYYNRRKRQNVVKDLSVELDRLSEESVNNDISSWTKGRSGEALSLLKKRFSHRPVQEKFVCLNCGFETHADEQAALNIARSWLFLRSQEYKKYQTNKTTGNTDKRAFVETWQSFYRKKLKEVWKPAV

SEQ ID NO: 91 - protein, 977 aa, synthetic construct
  REGION 1..977: note = CasX variant
MQEIKRINKIRRRLVKDSNTKKAGKTGPMKTLLVRVMTPDLRERLENLRKKPENIPQPISNTSRANLNKLLTDYTEMKKAILHVYWEEFQKDPVGLMSRVAQPAPKNIDQRKLIPVKDGNERLTSSGFACSQCCQPLYVYKLEQVNDKGKPHTNYFGRCNVSEHERLILLSPHKPEANDELVTYSLGKFGQRALDFYSIHVTRESNHPVKPLEQIGGNSCASGPVGKALSDACMGAVASFLTKYQDIILEHQKVIKKNEKRLANLKDIASANGLAFPKITLPPQPHTKEGIEAYNNVVAQIVIWVNLNLWQKLKIGRDEAKPLQRLKGFPSFPLVERQANEVDWWDMVCNVKKLINEKKEDGKVFWQNLAGYKRQEALRPYLSSEEDRKKGKKFARYQLGDLLLHLEKKHGEDWGKVYDEAWERIDKKVEGLSKHIKLEEERRSEDAQSKAALTDWLRAKASFVIEGLKEADKDEFCRCELKLQKWYGDLRGKPFAIEAENSILDISGFSKQYNCAFIWQKDGVKKLNLYLIINYFKGGKLRFKKIKPEAFEANRFYTVINKKSGEIVPMEVNFNFDDPNLIILPLAFGKRQGREFIWNDLLSLETGSLKLANGRVIEKTLYNRRTRQDEPALFVALTFERREVLDSSNIKPMNLIGVDRGENIPAVIALTDPEGCPLSRFKDSLGNPTHILRIGESYKEKQRTIQAKKEVEQRRAGGYSRKYASKAKNLADDMVRNTARDLLYYAVTQDAMLIFENLSRGFGRQGKRTFMAERQYTRMEDWLTAKLAYEGLSKTYLSKTLAQYTSKTCSNCGFTITSADYDRVLEKLKKTATGWMTTINGKELKVEGQITYYNRRKRQNVVKDLSVELDRLSEESVNNDISSWTKGRSGEALSLLKKRFSHRPVQEKFVCLNCGFETHADEQAALNIARSWLFLRSQEYKKYQTNKTTGNTDKRAFVETWQSFYRKKLKEVWKPAV

SEQ ID NO: 92 - protein, 977 aa, synthetic construct
  REGION 1..977: note = CasX variant
MQEIKRINKIRRRLVKDSNTKKAGKTGPMKTLLVRVMTPDLRERLENLRKKPENIPQPISNTSRANLNKLLTDYTEMKKAILHVYWEEFQKDPVGLMSRVAQPAPKNIDQRKLIPVKDGNERLTSSGFACSQCCQPLYVYKLEQVNDKGKPHTNYFGRCNVSEHERLILLSPHKPEANDELVTYSLGKFGQRALDFYSIHVTRESNHPVKPLEQIGGNSCASGPVGKALSDACMGAVASFLTKYQDIILEHQKVIKKNEKRLANLKDIASANGLAFPKITLPPQPHTKEGIEAYNNVVAQIVIWVNLNLWQKLKIGRDEAKPLQRLKGFPSFPLVERQANEVDWWDMVCNVKKLINEKKEDGKVFWQNLAGYKRQEALRPYLSSENDRKKGKKFARYQLGDLLLHLEKKHGEDWGKVYDEAWERIDKKVEGLSKHIKLEEERRSEDAQSKAALTDWLRAKASFVIEGLKEADKDEFCRCELKLQKWYGDLRGKPFAIEAENSILDISGFSKQYNCAFIWQKDGVKKLNLYLIINYFKGGKLRFKKIKPEAFEANRFYTVINKKSGEIVPMEVNFNFDDPNLIILPLAFGKRQGREFIWNDLLSLETGSLKLANGRVIEKTLYNRRTRQDEPALFVALTFERREVLDSSNIKPMNLIGVDRGENIPAVIALTDPEGCPLSRFKDSLGNPTHILRIGESYKEKQRTIQAKKEVEQRRAGGYSRKYASKAKNLADDMVRNTARDLLYYAVTQDAMLIFENLSRGFGRQGKRTFMAERQYTRMEDWLTAKLAYEGLSKTYLSKTLAQYTSKTCSNCGFTITSADYDRVLEKLKKTATGWMTTINGKELKVEGQITYYNRRKRQNVVKDLSVELDRLSEESVNNDISSWTKGRSGEALSLLKKRFSHRPVQEKFVCLNCGFETHADEQAALNIARSWLFLRSQEYKKYQTNKTTGNTDKRAFVETWQSFYRKKLKEVWKPAV

SEQ ID NO: 93 - protein, 977 aa, synthetic construct
  REGION 1..977: note = CasX variant
MQEIKRINKIRRRLVKDSNTKKAGKTGPMKTLLVRVMTPDLRERLENLRKKPENIPQPISNTSRANLNKLLTDYTEMKKAILHVYWEEFQKDPVGLMSRVAQPAPKNIDQRKLIPVKDGNERLTSSGFACSQCCQPLYVYKLEQVNDKGKPHTNYFGRCNVSEHERLILLSPHKPEANDELVTYSLGKFGQRALDFYSIHVTRESNHPVKPLEQIGGNSCASGPVGKALSDACMGAVASFLTKYQDIILEHQKVIKKNEKRLANLKDIASANGLAFPKITLPPQPHTKEGIEAYNNVVAQIVIWVNLNLWQKLKIGRDEAKPLQRLKGFPSFPLVERQANEVDWWDMVCNVKKLINEKKEDGKVFWQNLAGYKRQEALRPYLSSEEDRKKGKKFARYQLGDLLLHLEKKHGEDWGKVYDEAWERIDKKVEGLSKHIKLEEERRSEDAQSKAALTDWLRAKASFVIEGLKEADKDEFSRCELKLQKWYGDLRGKPFAIEAENSILDISGFSKQYNCAFIWQKDGVKKLNLYLIINYFKGGKLRFKKIKPEAFEANRFYTVINKKSGEIVPMEVNFNFDDPNLIILPLAFGKRQGREFIWNDLLSLETGSLKLANGRVIEKTLYNRRTRQDEPALFVALTFERREVLDSSNIKPMNLIGVDRGENIPAVIALTDPEGCPLSRFKDSLGNPTHILRIGESYKEKQRTIQAKKEVEQRRAGGYSRKYASKAKNLADDMVRNTARDLLYYAVTQDAMLIFENLSRGFGRQGKRTFMAERQYTRMEDWLTAKLAYEGLSKTYLSKTLAQYTSKTCSNCGFTITSADYDRVLEKLKKTATGWMTTINGKELKVEGQITYYNRRKRQNVVKDLSVELDRLSEESVNNDISSWTKGRSGEALSLLKKRFSHRPVQEKFVCLNCGFETHADEQAALNIARSWLFLRSQEYKKYQTNKTTGNTDKRAFVETWQSFYRKKLKEVWKPAV

SEQ ID NO: 94 - protein, 977 aa, synthetic construct
  REGION 1..977: note = CasX variant
MQEIKRINKIRRRLVKDSNTKKAGKTGPMKTLLVRVMTPDLRERLENLRKKPENIPQPISNTSRANLNKLLTDYTEMKKAILHVYWEEFQKDPVGLMSRVAQPAPKNIDQRKLIPVKDGNERLTSSGFACSQCCQPLYVYKLEQVNDKGKPHTNYFGRCNVSEHERLILLSPHKPEANDELVTYSLGKFGQRALDFYSIHVTRESNHPVKPLEQIGGNSCASGPVGKALSDACMGAVASFLTKYQDIILEHQKVIKKNEKRLANLKDIASANGLAFPKITLPPQPHTKEGIEAYNNVVAQIVIWVNLNLWQKLKIGRDEAKPLQRLKGFPSFPLVERQANEVDWWDMVCNVKKLINEKKEDGKVFWQNLAGYKRQEALRPYLSSEEDRKKGKKFARYQLGDLLKHLEKKHGEDWGKVYDEAWERIDKKVEGLSKHIKLEEERRSEDAQSKAALTDWLRAKASFVIEGLKEADKDEFCRCELKLQKWYGDLRGKPFAIEAENSILDISGFSKQYNCAFIWQKDGVKKLNLYLIINYFKGGKLRFKKIKPEAFEANRFYTVINKKSGEIVPMEVNFNFDDPNLIILPLAFGKRQGREFIWNDLLSLETGSLKLANGRVIEKTLYNRRTRQDEPALFVALTFERREVLDSSNIKPMNLIGVDRGENIPAVIALTDPEGCPLSRFKDSLGNPTHILRIGESYKEKQRTIQAKKEVEQRRAGGYSRKYASKAKNLADDMVRNTARDLLYYAVTQDAMLIFENLSRGFGRQGKRTFMAERQYTRMEDWLTAKLAYEGLSKTYLSKTLAQYTSKTCSNCGFTITSADYDRVLEKLKKTATGWMTTINGKELKVEGQITYYNRRKRQNVVKDLSVELDRLSEESVNNDISSWTKGRSGEALSLLKKRFSHRPVQEKFVCLNCGFETHADEQAALNIARSWLFLRSQEYKKYQTNKTTGNTDKRAFVETWQSFYRKKLKEVWKPAV

SEQ ID NO: 95 - protein, 977 aa, synthetic construct
  REGION 1..977: note = CasX variant
MQEIKRINKIRRRLVKDSNTKKAGKTGPMKTLLVRVMTPDLRERLENLRKKPENIPQPISNTSRANLNKLLTDYTEMKKAILHVYWEEFQKDPVGLMSRVAQPAPKNIDQRKLIPVKDGNERLTSSGFACSQCCQPLYVYKLEQVNDKGKPHTNYFGRCNVSEHERLILLSPHKPEANDELVTYSLGKFGQRALDFYSIHVTRESNHPVKPLEQIGGNSCASGPVGKALSDACMGAVASFLTKYQDIILEHQKVIKKNEKRLANLKDIASANGLAFPKITLPPQPHTKEGIEAYNNVVAQIVIWVNLNLWQKLKIGRDEAKPLQRLKGFPSFPLVERQANEVDWWDMVCNVKKLINEKKEDGKVFWQNLAGYKRQEALRPYLSSENDRKKGKKFARYQLGDLLKHLEKKHGEDWGKVYDEAWERIDKKVEGLSKHIKLEEERRSEDAQSKAALTDWLRAKASFVIEGLKEADKDEFSRCELKLQKWYGDLRGKPFAIEAENSILDISGFSKQYNCAFIWQKDGVKKLNLYLIINYFKGGKLRFKKIKPEAFEANRFYTVINKKSGEIVPMEVNFNFDDPNLIILPLAFGKRQGREFIWNDLLSLETGSLKLANGRVIEKTLYNRRTRQDEPALFVALTFERREVLDSSNIKPMNLIGVDRGENIPAVIALTDPEGCPLSRFKDSLGNPTHILRIGESYKEKQRTIQAKKEVEQRRAGGYSRKYASKAKNLADDMVRNTARDLLYYAVTQDAMLIFENLSRGFGRQGKRTFMAERQYTRMEDWLTAKLAYEGLSKTYLSKTLAQYTSKTCSNCGFTITSADYDRVLEKLKKTATGWMTTINGKELKVEGQITYYNRRKRQNVVKDLSVELDRLSEESVNNDISSWTKGRSGEALSLLKKRFSHRPVQEKFVCLNCGFETHADEQAALNIARSWLFLRSQEYKKYQTNKTTGNTDKRAFVETWQSFYRKKLKEVWKPAV

SEQ ID NO: 96 - protein, 977 aa, synthetic construct
  REGION 1..977: note = CasX variant
MQEIKRINKIRRRLVKDSNTKKAGKTGPMKTLLVRVMTPDLRERLENLRKKPENIPQPISNTSRANLNKLLTDYTEMKKAILHVYWEEFQKDPVGLMSRVAQPAPKNIDQRKLIPVKDGNERLTSSGFACSQCCQPLYVYKLEQVNDKGKPHTNYFGRCNVSEHERLILLSPHKPEANDELVTYSLGKFGQRALDFYSIHVTRESNHPVKPLEQIGGNSCASGPVGKALSDACMGAVASFLTKYQDIILEHQKVIKKNEKRLANLKDIASANGLAFPKITLPPQPHTKEGIEAYNNVVAQIVIWVNLNLWQKLKIGRDEAKPLQRLKGFPSFPLVERQANEVDWWDMVCNVKKLINEKKEDGKVFWQNLAGYKRQEALRPYLSSEEDRKKGKKFARYQLGDLLLHLEKKHGEDWGKVYDEAWERIDKKVEGLSKHIKLEEERRSEDAQSKAALTDWLRAKASFVIEGLKEADKDEFCRCELKLQKWYGDLRGKPFAIEAENSILDISGFSKQYNCAFIWQKDGVKKLNLYLIINYFKGGKLRFKKIKPEAFEANRFYTVINKKSGEIVPMEVNFNFDDPNLIILPLAFGKRQGREFIWNDLLSLETGSLKLANGRVIEKTLYNRRTRQDEPALFVALTFERREVLDSSNIKPMNLIGVDRGENIPAVIALTDPEGCPLSRFKDSLGNPTHILRIGESYKEKQRTIQAKKEVEQRRAGGYSRKYASKAKNLADDMVRNTARDLLYYAVTQDAMLIFENLSRGFGRQGKRTFMAERQYTRMEDWLTAKLAYEGLSKTLLSKTLAQYTSKTCSNCGFTITSADYDRVLEKLKKTATGWMTTINGKELKVEGQITYYNRRKRQNVVKDLSVELDRLSEESVNNDISSWTKGRSGEALSLLKKRFSHRPVQEKFVCLNCGFETHADEQAALNIARSWLFLRSQEYKKYQTNKTTGNTDKRAFVETWQSFYRKKLKEVWKPAV

SEQ ID NO: 97 - protein, 977 aa, synthetic construct
  REGION 1..977: note = CasX variant
MQEIKRINKIRRRLVKDSNTKKAGKTGPMKTLLVRVMTPDLRERLENLRKKPENIPQPISNTSRANLNKLLTDYTEMKKAILHVYWEEFQKDPVGLMSRVAQPAPKNIDQRKLIPVKDGNERLTSSGFACSQCCQPLYVYKLEQVNDKGKPHTNYFGRCNVSEHERLILLSPHKPEANDELVTYSLGKFGQRALDFYSIHVTRESNHPVKPLEQIGGNSCASGPVGKALSDACMGAVASFLTKYQDIILEHQKVIKKNEKRLANLKDIASANGLAFPKITLPPQPHTKEGIEAYNNVVAQIVIWVNLNLWQKLKIGRDEAKPLQRLKGFPSFPLVERQANEVDWWDMVCNVKKLINEKKEDGKVFWQNLAGYKRQEALRPYLSSENDRKKGKKFARYQLGDLLLHLEKKHGEDWGKVYDEAWERIDKKVEGLSKHIKLEEERRSEDAQSKAALTDWLRAKASFVIEGLKEADKDEFCRCELKLQKWYGDLRGKPFAIEAENSILDISGFSKQYNCAFIWQKDGVKKLNLYLIINYFKGGKLRFKKIKPEAFEANRFYTVINKKSGEIVPMEVNFNFDDPNLIILPLAFGKRQGREFIWNDLLSLETGSLKLANGRVIEKTLYNRRTRQDEPALFVALTFERREVLDSSNIKPMNLIGVDRGENIPAVIALTDPEGCPLSRFKDSLGNPTHILRIGESYKEKQRTIQAKKEVEQRRAGGYSRKYASKAKNLADDMVRNTARDLLYYAVTQDAMLIFENLSRGFGRQGKRTFMAERQYTRMEDWLTAKLAYEGLSKTLLSKTLAQYTSKTCSNCGFTITSADYDRVLEKLKKTATGWMTTINGKELKVEGQITYYNRRKRQNVVKDLSVELDRLSEESVNNDISSWTKGRSGEALSLLKKRFSHRPVQEKFVCLNCGFETHADEQAALNIARSWLFLRSQEYKKYQTNKTTGNTDKRAFVETWQSFYRKKLKEVWKPAV

SEQ ID NO: 98 - protein, 977 aa, synthetic construct
  REGION 1..977: note = CasX variant
MQEIKRINKIRRRLVKDSNTKKAGKTGPMKTLLVRVMTPDLRERLENLRKKPENIPQPISNTSRANLNKLLTDYTEMKKAILHVYWEEFQKDPVGLMSRVAQPAPKNIDQRKLIPVKDGNERLTSSGFACSQCCQPLYVYKLEQVNDKGKPHTNYFGRCNVSEHERLILLSPHKPEANDELVTYSLGKFGQRALDFYSIHVTRESNHPVKPLEQIGGNSCASGPVGKALSDACMGAVASFLTKYQDIILEHQKVIKKNEKRLANLKDIASANGLAFPKITLPPQPHTKEGIEAYNNVVAQIVIWVNLNLWQKLKIGRDEAKPLQRLKGFPSFPLVERQANEVDWWDMVCNVKKLINEKKEDGKVFWQNLAGYKRQEALRPYLSSENDRKKGKKFARYQLGDLLKHLEKKHGEDWGKVYDEAWERIDKKVEGLSKHIKLEEERRSEDAQSKAALTDWLRAKASFVIEGLKEADKDEFSRCELKLQKWYGDLRGKPFAIEAENSILDISGFSKQYNCAFIWQKDGVKKLNLYLIINYFKGGKLRFKKIKPEAFEANRFYTVINKKSGEIVPMEVNFNFDDPNLIILPLAFGKRQGREFIWNDLLSLETGSLKLANGRVIEKTLYNRRTRQDEPALFVALTFERREVLDSSNIKPMNLIGVDRGENIPAVIALTDPEGCPLSRFKDSLGNPTHILRIGESYKEKQRTIQAKKEVEQRRAGGYSRKYASKAKNLADDMVRNTARDLLYYAVTQDAMLIFENLSRGFGRQGKRTFMAERQYTRMEDWLTAKLAYEGLSKTLLSKTLAQYTSKTCSNCGFTITSADYDRVLEKLKKTATGWMTTINGKELKVEGQITYYNRRKRQNVVKDLSVELDRLSEESVNNDISSWTKGRSGEALSLLKKRFSHRPVQEKFVCLNCGFETHADEQAALNIARSWLFLRSQEYKKYQTNKTTGNTDKRAFVETWQSFYRKKLKEVWKPAV

SEQ ID NO: 99 - protein, 977 aa, synthetic construct
  REGION 1..977: note = CasX variant
MQEIKRINKIRRRLVKDSNTKKAGKTGPMKTLLVRVMTPDLRERLENLRKKPENIPQPISNTSRANLNKLLTDYTEMKKAILHVYWEEFQKDPVGLMSRVAQPAPKNIDQRKLIPVKDGNERLTSSGFACSQCCQPLYVYKLEQVNDKGKPHTNYFGRCNVSEHERLILLSPHKPEANDELVTYSLGKFGQRALDFYSIHVTRESNHPVKPLEQIGGNSCASGPVGKALSDACMGAVASFLTKYQDIILEHQKVIKKNEKRLANLKDIASANGLAFPKITLPPQPHTKEGIEAYNNVVAQIVIWVNLNLWQKLKIGRDEAKPLQRLKGFPSFPLVERQANEVDWWDMVCNVKKLINEKKEDGKVFWQNLAGYKRQEALRPYLSSEEDRKKGKKFARYQFGDLLLHLEKKHGEDWGKVYDEAWERIDKKVEGLSKHIKLEEERRSEDAQSKAALTDWLRAKASFVIEGLKEADKDEFCRCELKLQKWYGDLRGKPFAIEAENSILDISGFSKQYNCAFIWQKDGVKKLNLYLIINYFKGGKLRFKKIKPEAFEANRFYTVINKKSGEIVPMEVNFNFDDPNLIILPLAFGKRQGREFIWNDLLSLETGSLKLANGRVIEKTLYNRRTRQDEPALFVALTFERREVLDSSNIKPMNLIGVDRGENIPAVIALTDPEGCPLSRFKDSLGNPTHILRIGESYKEKQRTIQAKKEVEQRRAGGYSRKYASKAKNLADDMVRNTARDLLYYAVTQDAMLIFENLSRGFGRQGKRTFMAERQYTRMEDWLTAKLAYEGLSKTLLSKTLAQYTSKTCSNCGFTITSADYDRVLEKLKKTATGWMTTINGKELKVEGQITYYNRRKRQNVVKDLSVELDRLSEESVNNDISSWTKGRSGEALSLLKKRFSHRPVQEKFVCLNCGFETHADEQAALNIARSWLFLRSQEYKKYQTNKTTGNTDKRAFVETWQSFYRKKLKEVWKPAV

SEQ ID NO: 100 - protein, 977 aa, synthetic construct
  REGION 1..977: note = CasX variant
MQEIKRINKIRRRLVKDSNTKKAGKTGPMKTLLVRVMTPDLRERLENLRKKPENIPQPISNTSRANLNKLLTDYTEMKKAILHVYWEEFQKDPVGLMSRVAQPAPKNIDQRKLIPVKDGNERLTSSGFACSQCCQPLYVYKLEQVNDKGKPHTNYFGRCNVSEHERLILLSPHKPEANDELVTYSLGKFGQRALDFYSIHVTRESNHPVKPLEQIGGNSCASGPVGKALSDACMGAVASFLTKYQDIILEHQKVIKKNEKRLANLKDIASANGLAFPKITLPPQPHTKEGIEAYNNVVAQIVIWVNLNLWQKLKIGRDEAKPLQRLKGFPSFPLVERQANEVDWWDMVCNVKKLINEKKEDGKVFWQNLAGYKRQEALRPYLSSEEDRKKGKKFARYQFGDLLKHLEKKHGEDWGKVYDEAWERIDKKVEGLSKHIKLEEERRSEDAQSKAALTDWLRAKASFVIEGLKEADKDEFCRCELKLQKWYGDLRGKPFAIEAENSILDISGFSKQYNCAFIWQKDGVKKLNLYLIINYFKGGKLRFKKIKPEAFEANRFYTVINKKSGEIVPMEVNFNFDDPNLIILPLAFGKRQGREFIWNDLLSLETGSLKLANGRVIEKTLYNRRTRQDEPALFVALTFERREVLDSSNIKPMNLIGVDRGENIPAVIALTDPEGCPLSRFKDSLGNPTHILRIGESYKEKQRTIQAKKEVEQRRAGGYSRKYASKAKNLADDMVRNTARDLLYYAVTQDAMLIFENLSRGFGRQGKRTFMAERQYTRMEDWLTAKLAYEGLSKTLLSKTLAQYTSKTCSNCGFTITSADYDRVLEKLKKTATGWMTTINGKELKVEGQITYYNRRKRQNVVKDLSVELDRLSEESVNNDISSWTKGRSGEALSLLKKRFSHRPVQEKFVCLNCGFETHADEQAALNIARSWLFLRSQEYKKYQTNKTTGNTDKRAFVETWQSFYRKKLKEVWKPAV

SEQ ID NO: 101 - protein, 977 aa, synthetic construct
  REGION 1..977: note = CasX variant
MQEIKRINKIRRRLVKDSNTKKAGKTGPMKTLLVRVMTPDLRERLENLRKKPENIPQPISNTSRANLNKLLTDYTEMKKAILHVYWEEFQKDPVGLMSRVAQPAPKNIDQRKLIPVKDGNERLTSSGFACSQCCQPLYVYKLEQVNDKGKPHTNYFGRCNVSEHERLILLSPHKPEANDELVTYSLGKFGQRALDFYSIHVTRESNHPVKPLEQIGGNSCASGPVGKALSDACMGAVASFLTKYQDIILEHQKVIKKNEKRLANLKDIASANGLAFPKITLPPQPHTKEGIEAYNNVVAQIVIWVNLNLWQKLKIGRDEAKPLQRLKGFPSFPLVERQANEVDWWDMVCNVKKLINEKKEDGKVFWQNLAGYKRQEALRPYLSSENDRKKGKKFARYQFGDLLLHLEKKHGEDWGKVYDEAWERIDKKVEGLSKHIKLEEERRSEDAQSKAALTDWLRAKASFVIEGLKEADKDEFCRCELKLQKWYGDLRGKPFAIEAENSILDISGFSKQYNCAFIWQKDGVKKLNLYLIINYFKGGKLRFKKIKPEAFEANRFYTVINKKSGEIVPMEVNFNFDDPNLIILPLAFGKRQGREFIWNDLLSLETGSLKLANGRVIEKTLYNRRTRQDEPALFVALTFERREVLDSSNIKPMNLIGVDRGENIPAVIALTDPEGCPLSRFKDSLGNPTHILRIGESYKEKQRTIQAKKEVEQRRAGGYSRKYASKAKNLADDMVRNTARDLLYYAVTQDAMLIFENLSRGFGRQGKRTFMAERQYTRMEDWLTAKLAYEGLSKTLLSKTLAQYTSKTCSNCGFTITSADYDRVLEKLKKTATGWMTTINGKELKVEGQITYYNRRKRQNVVKDLSVELDRLSEESVNNDISSWTKGRSGEALSLLKKRFSHRPVQEKFVCLNCGFETHADEQAALNIARSWLFLRSQEYKKYQTNKTTGNTDKRAFVETWQSFYRKKLKEVWKPAV

SEQ ID NO: 102 - protein, 977 aa, synthetic construct
  REGION 1..977: note = CasX variant
MQEIKRINKIRRRLVKDSNTKKAGKTGPMKTLLVRVMTPDLRERLENLRKKPENIPQPISNTSRANLNKLLTDYTEMKKAILHVYWEEFQKDPVGLMSRVAQPAPKNIDQRKLIPVKDGNERLTSSGFACSQCCQPLYVYKLEQVNDKGKPHTNYFGRCNVSEHERLILLSPHKPEANDELVTYSLGKFGQRALDFYSIHVTRESNHPVKPLEQIGGNSCASGPVGKALSDACMGAVASFLTKYQDIILEHQKVIKKNEKRLANLKDIASANGLAFPKITLPPQPHTKEGIEAYNNVVAQIVIWVNLNLWQKLKIGRDEAKPLQRLKGFPSFPLVERQANEVDWWDMVCNVKKLINEKKEDGKVFWQNLAGYKRQEALRPYLSSENDRKKGKKFARYQFGDLLKHLEKKHGEDWGKVYDEAWERIDKKVEGLSKHIKLEEERRSEDAQSKAALTDWLRAKASFVIEGLKEADKDEFSRCELKLQKWYGDLRGKPFAIEAENSILDISGFSKQYNCAFIWQKDGVKKLNLYLIINYFKGGKLRFKKIKPEAFEANRFYTVINKKSGEIVPMEVNFNFDDPNLIILPLAFGKRQGREFIWNDLLSLETGSLKLANGRVIEKTLYNRRTRQDEPALFVALTFERREVLDSSNIKPMNLIGVDRGENIPAVIALTDPEGCPLSRFKDSLGNPTHILRIGESYKEKQRTIQAKKEVEQRRAGGYSRKYASKAKNLADDMVRNTARDLLYYAVTQDAMLIFENLSRGFGRQGKRTFMAERQYTRMEDWLTAKLAYEGLSKTLLSKTLAQYTSKTCSNCGFTITSADYDRVLEKLKKTATGWMTTINGKELKVEGQITYYNRRKRQNVVKDLSVELDRLSEESVNNDISSWTKGRSGEALSLLKKRFSHRPVQEKFVCLNCGFETHADEQAALNIARSWLFLRSQEYKKYQTNKTTGNTDKRAFVETWQSFYRKKLKEVWKPAV

SEQ ID NO: 103 - protein, 977 aa, synthetic construct
  REGION 1..977: note = CasX variant
MQEIKRINKIRRRLVKDSNTKKAGKTGPMKTLLVRVMTPDLRERLENLRKKPENIPQPISNTSRANLNKLLTDYTEMKKAILHVYWEEFQKDPVGLMSRVAQPAPKNIDQRKLIPVKDGNERLTSSGFACSQCCQPLYVYKLEQVNDKGKPHTNYFGRCNVSEHERLILLSPHKPEANDELVTYSLGKFGQRALDFYSIHVTRESNHPVKPLEQIGGNSCASGPVGKALSDACMGAVASFLTKYQDIILEHQKVIKKNEKRLANLKDIASANGLAFPKITLPPQPHTKEGIEAYNNVVAQIVIWVNLNLWQKLKIGRDEAKPLQRLKGFPSFPLVERQANEVDWWDMVCNVKKLINEKKEDGKVFWQNLAGYKRQEALRPYLSSENDRKKGKKFARYQFGDLLLHLEKKHGEDWGKVYDEAWERIDKKVEGLSKHIKLEEERRSEDAQSKAALTDWLRAKASFVIEGLKEADKDEFCRCELKLQKWYGDLRGKPFAIEAENSILDISGFSKQYNCAFIWQKDGVKKLNLYLIINYFKGGKLRFKKIKPEAFEANRFYTVINKKSGEIVPMEVNFNFDDPNLIILPLAFGKRQGREFIWNDLLSLETGSLKLANGRVIEKTLYNRRTRQDEPALFVALTFERREVLDSSNIKPMNLIGIDRGENIPAVIALTDPEGCPLSRFKDSLGNPTHILRIGESYKEKQRTIQAKKEVEQRRAGGYSRKYASKAKNLADDMVRNTARDLLYYAVTQDAMLIFENLSRGFGRQGKRTFMAERQYTRMEDWLTAKLAYEGLSKTYLSKTLAQYTSKTCSNCGFTITSADYDRVLEKLKKTATGWMTTINGKELKVEGQITYYNRRKRQNVVKDLSVELDRLSEESVNNDISSWTKGRSGEALSLLKKRFSHRPVQEKFVCLNCGFETHADEQAALNIARSWLFLRSQEYKKYQTNKTTGNTDKRAFVETWQSFYRKKLKEVWKPAV

SEQ ID NO: 104 - protein, 977 aa, synthetic construct
  REGION 1..977: note = CasX variant
MQEIKRINKIRRRLVKDSNTKKAGKTGPMKTLLVRVMTPDLRERLENLRKKPENIPQPISNTSRANLNKLLTDYTEMKKAILHVYWEEFQKDPVGLMSRVAQPAPKNIDQRKLIPVKDGNERLTSSGFACSQCCQPLYVYKLEQVNDKGKPHTNYFGRCNVSEHERLILLSPHKPEANDELVTYSLGKFGQRALDFYSIHVTRESNHPVKPLEQIGGNSCASGPVGKALSDACMGAVASFLTKYQDIILEHQKVIKKNEKRLANLKDIASANGLAFPKITLPPQPHTKEGIEAYNNVVAQIVIWVNLNLWQKLKIGRDEAKPLQRLKGFPSFPLVERQANEVDWWDMVCNVKKLINEKKEDGKVFWQNLAGYKRQEALRPYLSSENDRKKGKKFARYQFGDLLKHLEKKHGEDWGKVYDEAWERIDKKVEGLSKHIKLEEERRSEDAQSKAALTDWLRAKASFVIEGLKEADKDEFCRCELKLQKWYGDLRGKPFAIEAENSILDISGFSKQYNCAFIWQKDGVKKLNLYLIINYFKGGKLRFKKIKPEAFEANRFYTVINKKSGEIVPMEVNFNFDDPNLIILPLAFGKRQGREFIWNDLLSLETGSLKLANGRVIEKTLYNRRTRQDEPALFVALTFERREVLDSSNIKPMNLIGIDRGENIPAVIALTDPEGCPLSRFKDSLGNPTHILRIGESYKEKQRTIQAKKEVEQRRAGGYSRKYASKAKNLADDMVRNTARDLLYYAVTQDAMLIFENLSRGFGRQGKRTFMAERQYTRMEDWLTAKLAYEGLSKTYLSKTLAQYTSKTCSNCGFTITSADYDRVLEKLKKTATGWMTTINGKELKVEGQITYYNRRKRQNVVKDLSVELDRLSEESVNNDISSWTKGRSGEALSLLKKRFSHRPVQEKFVCLNCGFETHADEQAALNIARSWLFLRSQEYKKYQTNKTTGNTDKRAFVETWQSFYRKKLKEVWKPAV

SEQ ID NO: 105 - protein, 977 aa, synthetic construct
  REGION 1..977: note = CasX variant
MQEIKRINKIRRRLVKDSNTKKAGKTGPMKTLLVRVMTPDLRERLENLRKKPENIPQPISNTSRANLNKLLTDYTEMKKAILHVYWEEFQKDPVGLMSRVAQPAPKNIDQRKLIPVKDGNERLTSSGFACSQCCQPLYVYKLEQVNDKGKPHTNYFGRCNVSEHERLILLSPHKPEANDELVTYSLGKFGQRALDFYSIHVTRESNHPVKPLEQIGGNSCASGPVGKALSDACMGAVASFLTKYQDIILEHQKVIKKNEKRLANLKDIASANGLAFPKITLPPQPHTKEGIEAYNNVVAQIVIWVNLNLWQKLKIGRDEAKPLQRLKGFPSFPLVERQANEVDWWDMVCNVKKLINEKKEDGKVFWQNLAGYKRQEALRPYLSSPEDRKKGKKFARYQFGDLLLHLEKKHGEDWGKVYDEAWERIDKKVEGLSKHIKLEEERRSEDAQSKAALTDWLRAKASFVIEGLKEADKDEFCRCELKLQKWYGDLRGKPFAIEAENSILDISGFSKQYNCAFIWQKDGVKKLNLYLIINYFKGGKLRFKKIKPEAFEANRFYTVINKKSGEIVPMEVNFNFDDPNLIILPLAFGKRQGREFIWNDLLSLETGSLKLANGRVIEKTLYNRRTRQDEPALFVALTFERREVLDSSNIKPMNLIGIDRGENIPAVIALTDPEGCPLSRFKDSLGNPTHILRIGESYKEKQRTIQAKKEVEQRRAGGYSRKYASKAKNLANDMVRNTARDLLYYAVTQDAMLIFENLSRGFGRQGKRTFMAERQYTRMEDWLTAKLAYEGLSKTYLSKTLAQYTSKTCSNCGFTITSADYDRVLEKLKKTATGWMTTINGKELKVEGQITYYNRRKRQNVVKDLSVELDRLSEESVNNDISSWTKGRSGEALSLLKKRFSHRPVQEKFVCLNCGFETHADEQAALNIARSWLFLRSQEYKKYQTNKTTGNTDKRAFVETWQSFYRKKLKEVWKPAV

SEQ ID NO: 106 - protein, 977 aa, synthetic construct
  REGION 1..977: note = CasX variant
MQEIKRINKIRRRLVKDSNTKKAGKTGPMKTLLVRVMTPDLRERLENLRKKPENIPQPISNTSRANLNKLLTDYTEMKKAILHVYWEEFQKDPVGLMSRVAQPAPKNIDQRKLIPVKDGNERLTSSGFACSQCCQPLYVYKLEQVNDKGKPHTNYFGRCNVSEHERLILLSPHKPEANDELVTYSLGKFGQRALDFYSIHVTRESNHPVKPLEQIGGNSCASGPVGKALSDACMGAVASFLTKYQDIILEHQKVIKKNEKRLANLKDIASANGLAFPKITLPPQPHTKEGIEAYNNVVAQIVIWVNLNLWQKLKIGRDEAKPLQRLKGFPSFPLVERQANEVDWWDMVCNVKKLINEKKEDGKVFWQNLAGYKRQEALRPYLSSPEDRKKGKKFARYQFGDLLLHLEKKHGEDWGKVYDEAWERIDKKVEGLSKHIKLEEERRSEDAQSKAALTDWLRAKASFVIEGLKEADKDEFCRCELKLQKWYGDLRGKPFAIEAENSILDISGFSKQYNCAFIWQKDGVKKLNLYLIINYFKGGKLRFKKIKPEAFEANRFYTVINKKSGEIVPMEVNFNFDDPNLIILPLAFGKRQGREFIWNDLLSLETGSLKLANGRVIEKTLYNRRTRQDEPALFVALTFERREVLDSSNIKPMNLIGVDRGENIPAVIALTDPEGCPLSRFKDSLGNPTHILRIGESYKEKQRTIQAKKEVEQRRAGGYSRKYASKAKNLANDMVRNTARDLLYYAVTQDAMLIFENLSRGFGRQGKRTFMAERQYTRMEDWLTAKLAYEGLSKTYLSKTLAQYTSKTCSNCGFTITSADYDRVLEKLKKTATGWMTTINGKELKVEGQITYYNRRKRQNVVKDLSVELDRLSEESVNNDISSWTKGRSGEALSLLKKRFSHRPVQEKFVCLNCGFETHADEQAALNIARSWLFLRSQEYKKYQTNKTTGNTDKRAFVETWQSFYRKKLKEVWKPAV

SEQ ID NO: 107 - protein, 977 aa, synthetic construct
  REGION 1..977: note = CasX variant
MQEIKRINKIRRRLVKDSNTKKAGKTGPMKTLLVRVMTPDLRERLENLRKKPENIPQPISNTSRANLNKLLTDYTEMKKAILHVYWEEFQKDPVGLMSRVAQPAPKNIDQRKLIPVKDGNERLTSSGFACSQCCQPLYVYKLEQVNDKGKPHTNYFGRCNVSEHERLILLSPHKPEANDELVTYSLGKFGQRALDFYSIHVTRESNHPVKPLEQIGGNSCASGPVGKALSDACMGAVASFLTKYQDIILEHQKVIKKNEKRLANLKDIASANGLAFPKITLPPQPHTKEGIEAYNNVVAQIVIWVNLNLWQKLKIGRDEAKPLQRLKGFPSFPLVERQANEVDWWDMVCNVKKLINEKKEDGKVFWQNLAGYKRQEALRPYLSSPEDRKKGKKFARYQLGDLLLHLEKKHGEDWGKVYDEAWERIDKKVEGLSKHIKLEEERRSEDAQSKAALTDWLRAKASFVIEGLKEADKDEFCRCELKLQKWYGDLRGKPFAIEAENSILDISGFSKQYNCAFIWQKDGVKKLNLYLIINYFKGGKLRFKKIKPEAFEANRFYTVINKKSGEIVPMEVNFNFDDPNLIILPLAFGKRQGREFIWNDLLSLETGSLKLANGRVIEKTLYNRRTRQDEPALFVALTFERREVLDSSNIKPMNLIGVDRGENIPAVIALTDPEGCPLSRFKDSLGNPTHILRIGESYKEKQRTIQAKKEVEQRRAGGYSRKYASKAKNLANDMVRNTARDLLYYAVTQDAMLIFENLSRGFGRQGKRTFMAERQYTRMEDWLTAKLAYEGLSKTYLSKTLAQYTSKTCSNCGFTITSADYDRVLEKLKKTATGWMTTINGKELKVEGQITYYNRRKRQNVVKDLSVELDRLSEESVNNDISSWTKGRSGEALSLLKKRFSHRPVQEKFVCLNCGFETHADEQAALNIARSWLFLRSQEYKKYQTNKTTGNTDKRAFVETWQSFYRKKLKEVWKPAV

SEQ ID NO: 108 - protein, 977 aa, synthetic construct
  REGION 1..977: note = CasX variant
MQEIKRINKIRRRLVKDSNTKKAGKTGPMKTLLVRVMTPDLRERLENLRKKPENIPQPISNTSRANLNKLLTDYTEMKKAILHVYWEEFQKDPVGLMSRVAQPAPKNIDQRKLIPVKDGNERLTSSGFACSQCCQPLYVYKLEQVNDKGKPHTNYFGRCNVSEHERLILLSPHKPEANDELVTYSLGKFGQRALDFYSIHVTRESNHPVKPLEQIGGNSCASGPVGKALSDACMGAVASFLTKYQDIILEHQKVIKKNEKRLANLKDIASANGLAFPKITLPPQPHTKEGIEAYNNVVAQIVIWVNLNLWQKLKIGRDEAKPLQRLKGFPSFPLVERQANEVDWWDMVCNVKKLINEKKEDGKVFWQNLAGYKRQEALRPYLSSPNDRKKGKKFARYQFGDLLLHLEKKHGEDWGKVYDEAWERIDKKVEGLSKHIKLEEERRSEDAQSKAALTDWLRAKASFVIEGLKEADKDEFCRCELKLQKWYGDLRGKPFAIEAENSILDISGFSKQYNCAFIWQKDGVKKLNLYLIINYFKGGKLRFKKIKPEAFEANRFYTVINKKSGEIVPMEVNFNFDDPNLIILPLAFGKRQGREFIWNDLLSLETGSLKLANGRVIEKTLYNRRTRQDEPALFVALTFERREVLDSSNIKPMNLIGVDRGENIPAVIALTDPEGCPLSRFKDSLGNPTHILRIGESYKEKQRTIQAKKEVEQRRAGGYSRKYASKAKNLANDMVRNTARDLLYYAVTQDAMLIFENLSRGFGRQGKRTFMAERQYTRMEDWLTAKLAYEGLSKTYLSKTLAQYTSKTCSNCGFTITSADYDRVLEKLKKTATGWMTTINGKELKVEGQITYYNRRKRQNVVKDLSVELDRLSEESVNNDISSWTKGRSGEALSLLKKRFSHRPVQEKFVCLNCGFETHADEQAALNIARSWLFLRSQEYKKYQTNKTTGNTDKRAFVETWQSFYRKKLKEVWKPAV

SEQ ID NO: 109 - protein, 977 aa, synthetic construct
  REGION 1..977: note = CasX variant
MQEIKRINKIRRRLVKDSNTKKAGKTGPMKTLLVRVMTPDLRERLENLRKKPENIPQPISNTSRANLNKLLTDYTEMKKAILHVYWEEFQKDPVGLMSRVAQPAPKNIDQRKLIPVKDGNERLTSSGFACSQCCQPLYVYKLEQVNDKGKPHTNYFGRCNVSEHERLILLSPHKPEANDELVTYSLGKFGQRALDFYSIHVTRESNHPVKPLEQIGGNSCASGPVGKALSDACMGAVASFLTKYQDIILEHQKVIKKNEKRLANLKDIASANGLAFPKITLPPQPHTKEGIEAYNNVVAQIVIWVNLNLWQKLKIGRDEAKPLQRLKGFPSFPLVERQANEVDWWDMVCNVKKLINEKKEDGKVFWQNLAGYKRQEALRPYLSSPEDRKKGKKFARYQFGDLLKHLEKKHGEDWGKVYDEAWERIDKKVEGLSKHIKLEEERRSEDAQSKAALTDWLRAKASFVIEGLKEADKDEFCRCELKLQKWYGDLRGKPFAIEAENSILDISGFSKQYNCAFIWQKDGVKKLNLYLIINYFKGGKLRFKKIKPEAFEANRFYTVINKKSGEIVPMEVNFNFDDPNLIILPLAFGKRQGREFIWNDLLSLETGSLKLANGRVIEKTLYNRRTRQDEPALFVALTFERREVLDSSNIKPMNLIGVDRGENIPAVIALTDPEGCPLSRFKDSLGNPTHILRIGESYKEKQRTIQAKKEVEQRRAGGYSRKYASKAKNLANDMVRNTARDLLYYAVTQDAMLIFENLSRGFGRQGKRTFMAERQYTRMEDWLTAKLAYEGLSKTYLSKTLAQYTSKTCSNCGFTITSADYDRVLEKLKKTATGWMTTINGKELKVEGQITYYNRRKRQNVVKDLSVELDRLSEESVNNDISSWTKGRSGEALSLLKKRFSHRPVQEKFVCLNCGFETHADEQAALNIARSWLFLRSQEYKKYQTNKTTGNTDKRAFVETWQSFYRKKLKEVWKPAV

SEQ ID NO: 110 - protein, 977 aa, synthetic construct
  REGION 1..977: note = CasX variant
MQEIKRINKIRRRLVKDSNTKKAGKTGPMKTLLVRVMTPDLRERLENLRKKPENIPQPISNTSRANLNKLLTDYTEMKKAILHVYWEEFQKDPVGLMSRVAQPAPKNIDQRKLIPVKDGNERLTSSGFACSQCCQPLYVYKLEQVNDKGKPHTNYFGRCNVSEHERLILLSPHKPEANDELVTYSLGKFGQRALDFYSIHVTRESNHPVKPLEQIGGNSCASGPVGKALSDACMGAVASFLTKYQDIILEHKKVIKKNEKRLANLKDIASANGLAFPKITLPPQPHTKEGIEAYNNVVAQIVIWVNLNLWQKLKIGRDEAKPLQRLKGFPSFPLVERQANEVDWWDMVCNVKKLINEKKEDGKVFWQNLAGYKRQEALRPYLSSPEDRKKGKKFARYQFGDLLLHLEKKHGEDWGKVYDEAWERIDKKVEGLSKHIKLEEERRSEDAQSKAALTDWLRAKASFVIEGLKEADKDEFCRCELKLQKWYGDLRGKPFAIEAENSILDISGFSKQYNCAFIWQKDGVKKLNLYLIINYFKGGKLRFKKIKPEAFEANRFYTVINKKSGEIVPMEVNFNFDDPNLIILPLAFGKRQGREFIWNDLLSLETGSLKLANGRVIEKPLYNRRTRQDEPALFVALTFERREVLDSSNIKPMNLIGIDRGENIPAVIALTDPEGCPLSRFKDSLGNPTHILRIGESYKEKQRTIQAKKEVEQRRAGGYSRKYASKAKNLADDMVRNTARDLLYYAVTQDAMLIFENLSRGFGRQGKRTFMAERQYTRMEDWLTAKLAYEGLSKTYLSKTLAQYTSKTCSNCGFTITSADYDRVLEKLKKTATGWMTTINGKELKVEGQITYYNRRKRQNVVKDLSVELDRLSEESVNNDISSWTKGRSGEALSLLKKRFSHRPVQEKFVCLNCGFETHADEQAALNIARSWLFLRSQEYKKYQTNKTTGNTDKRAFVETWQSFYRKKLKEVWKPAV

SEQ ID NO: 111 - protein, 977 aa, synthetic construct
  REGION 1..977: note = CasX variant
MQEIKRINKIRRRLVKDSNTKKAGKTGPMKTLLVRVMTPDLRERLENLRKKPENIPQPISNTSRANLNKLLTDYTEMKKAILHVYWEEFQKDPVGLMSRVAQPAPKNIDQRKLIPVKDGNERLTSSGFACSQCCQPLYVYKLEQVNDKGKPHTNYFGRCNVSEHERLILLSPHKPEANDELVTYSLGKFGQRALDFYSIHVTRESNHPVKPLEQIGGNSCASGPVGKALSDACMGAVASFLTKYQDIILEHKKVIKKNEKRLANLKDIASANGLAFPKITLPPQPHTKEGIEAYNNVVAQIVIWVNLNLWQKLKIGRDEAKPLQRLKGFPSFPLVERQANEVDWWDMVCNVKKLINEKKEDGKVFWQNLAGYKRQEALRPYLSSPEDRKKGKKFARYQFGDLLLHLEKKHGEDWGKVYDEAWERIDKKVEGLSKHIKLEEERRSEDAQSKAALTDWLRAKASFVIEGLKEADKDEFCRCELKLQKWYGDLRGKPFAIEAENSILDISGFSKQYNCAFIWQKDGVKKLNLYLIINYFKGGKLRFKKIKPEAFEANRFYTVINKKSGEIVPMEVNFNFDDPNLIILPLAFGKRQGREFIWNDLLSLETGSLKLANGRVIEKPLYNRRTRQDEPALFVALTFERREVLDSSNIKPMNLIGVDRGENIPAVIALTDPEGCPLSRFKDSLGNPTHILRIGESYKEKQRTIQAKKEVEQRRAGGYSRKYASKAKNLADDMVRNTARDLLYYAVTQDAMLIFENLSRGFGRQGKRTFMAERQYTRMEDWLTAKLAYEGLSKTYLSKTLAQYTSKTCSNCGFTITSADYDRVLEKLKKTATGWMTTINGKELKVEGQITYYNRRKRQNVVKDLSVELDRLSEESVNNDISSWTKGRSGEALSLLKKRFSHRPVQEKFVCLNCGFETHADEQAALNIARSWLFLRSQEYKKYQTNKTTGNTDKRAFVETWQSFYRKKLKEVWKPAV

SEQ ID NO: 112 - protein, 977 aa, synthetic construct
  REGION 1..977: note = CasX variant
MQEIKRINKIRRRLVKDSNTKKAGKTGPMKTLLVRVMTPDLRERLENLRKKPENIPQPISNTSRANLNKLLTDYTEMKKAILHVYWEEFQKDPVGLMSRVAQPAPKNIDQRKLIPVKDGNERLTSSGFACSQCCQPLYVYKLEQVNDKGKPHTNYFGRCNVSEHERLILLSPHKPEANDELVTYSLGKFGQRALDFYSIHVTRESNHPVKPLEQIGGNSCASGPVGKALSDACMGAVASFLTKYQDIILEHKKVIKKNEKRLANLKDIASANGLAFPKITLPPQPHTKEGIEAYNNVVAQIVIWVNLNLWQKLKIGRDEAKPLQRLKGFPSFPLVERQANEVDWWDMVCNVKKLINEKKEDGKVFWQNLAGYKRQEALRPYLSSPNDRKKGKKFARYQFGDLLLHLEKKHGEDWGKVYDEAWERIDKKVEGLSKHIKLEEERRSEDAQSKAALTDWLRAKASFVIEGLKEADKDEFCRCELKLQKWYGDLRGKPFAIEAENSILDISGFSKQYNCAFIWQKDGVKKLNLYLIINYFKGGKLRFKKIKPEAFEANRFYTVINKKSGEIVPMEVNFNFDDPNLIILPLAFGKRQGREFIWNDLLSLETGSLKLANGRVIEKPLYNRRTRQDEPALFVALTFERREVLDSSNIKPMNLIGVDRGENIPAVIALTDPEGCPLSRFKDSLGNPTHILRIGESYKEKQRTIQAKKEVEQRRAGGYSRKYASKAKNLADDMVRNTARDLLYYAVTQDAMLIFENLSRGFGRQGKRTFMAERQYTRMEDWLTAKLAYEGLSKTYLSKTLAQYTSKTCSNCGFTITSADYDRVLEKLKKTATGWMTTINGKELKVEGQITYYNRRKRQNVVKDLSVELDRLSEESVNNDISSWTKGRSGEALSLLKKRFSHRPVQEKFVCLNCGFETHADEQAALNIARSWLFLRSQEYKKYQTNKTTGNTDKRAFVETWQSFYRKKLKEVWKPAV

SEQ ID NO: 113 - protein, 977 aa, synthetic construct
  REGION 1..977: note = CasX variant
MQEIKRINKIRRRLVKDSNTKKAGKTGPMKTLLVRVMTPDLRERLENLRKKPENIPQPISNTSRANLNKLLTDYTEMKKAILHVYWEEFQKDPVGLMSRVAQPAPKNIDQRKLIPVKDGNERLTSSGFACSQCCQPLYVYKLEQVNDKGKPHTNYFGRCNVSEHERLILLSPHKPEANDELVTYSLGKFGQRALDFYSIHVTRESNHPVKPLEQIGGNSCASGPVGKALSDACMGAVASFLTKYQDIILEHKKVIKKNEKRLANLKDIASANGLAFPKITLPPQPHTKEGIEAYNNVVAQIVIWVNLNLWQKLKIGRDEAKPLQRLKGFPSFPLVERQANEVDWWDMVCNVKKLINEKKEDGKVFWQNLAGYKRQEALRPYLSSPEDRKKGKKFARYQLGDLLLHLEKKHGEDWGKVYDEAWERIDKKVEGLSKHIKLEEERRSEDAQSKAALTDWLRAKASFVIEGLKEADKDEFCRCELKLQKWYGDLRGKPFAIEAENSILDISGFSKQYNCAFIWQKDGVKKLNLYLIINYFKGGKLRFKKIKPEAFEANRFYTVINKKSGEIVPMEVNFNFDDPNLIILPLAFGKRQGREFIWNDLLSLETGSLKLANGRVIEKPLYNRRTRQDEPALFVALTFERREVLDSSNIKPMNLIGVDRGENIPAVIALTDPEGCPLSRFKDSLGNPTHILRIGESYKEKQRTIQAKKEVEQRRAGGYSRKYASKAKNLADDMVRNTARDLLYYAVTQDAMLIFENLSRGFGRQGKRTFMAERQYTRMEDWLTAKLAYEGLSKTYLSKTLAQYTSKTCSNCGFTITSADYDRVLEKLKKTATGWMTTINGKELKVEGQITYYNRRKRQNVVKDLSVELDRLSEESVNNDISSWTKGRSGEALSLLKKRFSHRPVQEKFVCLNCGFETHADEQAALNIARSWLFLRSQEYKKYQTNKTTGNTDKRAFVETWQSFYRKKLKEVWKPAV

SEQ ID NO: 114 - protein, 977 aa, synthetic construct
  REGION 1..977: note = CasX variant
MQEIKRINKIRRRLVKDSNTKKAGKTGPMKTLLVRVMTPDLRERLENLRKKPENIPQPISNTSRANLNKLLTDYTEMKKAILHVYWEEFQKDPVGLMSRVAQPAPKNIDQRKLIPVKDGNERLTSSGFACSQCCQPLYVYKLEQVNDKGKPHTNYFGRCNVSEHERLILLSPHKPEANDELVTYSLGKFGQRALDFYSIHVTRESNHPVKPLEQIGGNSCASGPVGKALSDACMGAVASFLTKYQDIILEHKKVIKKNEKRLANLKDIASANGLAFPKITLPPQPHTKEGIEAYNNVVAQIVIWVNLNLWQKLKIGRDEAKPLQRLKGFPSFPLVERQANEVDWWDMVCNVKKLINEKKEDGKVFWQNLAGYKRQEALRPYLSSPEDRKKGKKFARYQFGDLLKHLEKKHGEDWGKVYDEAWERIDKKVEGLSKHIKLEEERRSEDAQSKAALTDWLRAKASFVIEGLKEADKDEFCRCELKLQKWYGDLRGKPFAIEAENSILDISGFSKQYNCAFIWQKDGVKKLNLYLIINYFKGGKLRFKKIKPEAFEANRFYTVINKKSGEIVPMEVNFNFDDPNLIILPLAFGKRQGREFIWNDLLSLETGSLKLANGRVIEKPLYNRRTRQDEPALFVALTFERREVLDSSNIKPMNLIGVDRGENIPAVIALTDPEGCPLSRFKDSLGNPTHILRIGESYKEKQRTIQAKKEVEQRRAGGYSRKYASKAKNLADDMVRNTARDLLYYAVTQDAMLIFENLSRGFGRQGKRTFMAERQYTRMEDWLTAKLAYEGLSKTYLSKTLAQYTSKTCSNCGFTITSADYDRVLEKLKKTATGWMTTINGKELKVEGQITYYNRRKRQNVVKDLSVELDRLSEESVNNDISSWTKGRSGEALSLLKKRFSHRPVQEKFVCLNCGFETHADEQAALNIARSWLFLRSQEYKKYQTNKTTGNTDKRAFVETWQSFYRKKLKEVWKPAV

SEQ ID NO: 115 - protein, 977 aa, synthetic construct
  REGION 1..977: note = CasX variant
MQEIKRINKIRRRLVKDSNTKKAGKTGPMKTLLVRVMTPDLRERLENLRKKPENIPQPISNTSRANLNKLLTDYTEMKKAILHVYWEEFQKDPVGLMSRVAQPAPKNIDQRKLIPVKDGNERLTSSGFACSQCCQPLYVYKLEQVNDKGKPHTNYFGRCNVSEHERLILLSPHKPEANDELVTYSLGKFGQRALDFYSIHVTRESNHPVKPLEQIGGNSCASGPVGKALSDACMGAVASFLTKYQDIILEHQKVIKKNEKRLANLKDIASANGLAFPKITLPPQPHTKEGIEAYNNVVAQIVIWVNLNLWQKLKIGRDEAKPLQRLKGFPSFPLVERQANEVDWWDMVCNVKKLINEKKEDGKVFWQNLAGYKRQEALRPYLSSENDRKKGKKFARYQFGDLLLHLEKKHGEDWGKVYDEAWERIDKKVEGLSKHIKLEEERRSEDAQSKAALTDWLRAKASFVIEGLKEADKDEFCRCELKLQKWYGDLRGKPFAIEAENSILDISGFSKQYNCAFIWQKDGVKKLNLYLIINYFKGGKLRFKKIKPEAFEANRFYTVINKKSGEIVPMEVNFNFDDPNLIILPLAFGKRQGREFIWNDLLSLETGSLKLANGRVIEKPLYNRRTRQDEPALFVALTFERREVLDSSNIKPMNLIGVDRGENIPAVIALTDPEGCPLSRFKDSLGNPTHILRIGESYKEKQRTIQAKKEVEQRRAGGYSRKYASKAKNLADDMVRNTARDLLYYAVTQDAMLIFENLSRGFGRQGKRTFMAERQYTRMEDWLTAKLAYEGLSKTYLSKTLAQYTSKTCSNCGFTITSADYDRVLEKLKKTATGWMTTINGKELKVEGQITYYNRRKRQNVVKDLSVELDRLSEESVNNDISSWTKGRSGEALSLLKKRFSHRPVQEKFVCLNCGFETHADEQAALNIARSWLFLRSQEYKKYQTNKTTGNTDKRAFVETWQSFYRKKLKEVWKPAV

SEQ ID NO: 116 - protein, 977 aa, synthetic construct
  REGION 1..977: note = CasX variant
MQEIKRINKIRRRLVKDSNTKKAGKTGPMKTLLVRVMTPDLRERLENLRKKPENIPQPISNTSRANLNKLLTDYTEMKKAILHVYWEEFQKDPVGLMSRVAQPAPKNIDQRKLIPVKDGNERLTSSGFACSQCCQPLYVYKLEQVNDKGKPHTNYFGRCNVSEHERLILLSPHKPEANDELVTYSLGKFGQRALDFYSIHVTRESNHPVKPLEQIGGNSCASGPVGKALSDACMGAVASFLTKYQDIILEHKKVIKKNEKRLANLKDIASANGLAFPKITLPPQPHTKEGIEAYNNVVAQIVIWVNLNLWQKLKIGRDEAKPLQRLKGFPSFPLVERQANEVDWWDMVCNVKKLINEKKEDGKVFWQNLAGYKRQEALRPYLSSPEDRKKGKKFARYQFGDLLLHLEKKHGEDWGKVYDEAWERIDKKVEGLSKHIKLEEERRSEDAQSKAALTDWLRAKASFVIEGLKEADKDEFCRCELKLQKWYGDLRGKPFAIEAENSILDISGFSKQYNCAFIWQKDGVKKLNLYLIINYFKGGKLRFKKIKPEAFEANRFYTVINKKSGEIVPMEVNFNFDDPNLIILPLAFGKRQGREFIWNDLLSLETGSLKLANGRVIEKPLYNRRTRQDEPALFVALTFERREVLDSSNIKPMNLIGIDRGENIPAVIALTDPEGCPLSRFKDSLGNPTHILRIGESYKEKQRTIQAKKEVEQRRAGGYSRKYASKAKNLADDMVRNTARDLLYYAVTQDAMLIFENLSRGFGRQGKRTFMAERQYTRMEDWLTAKLAYEGLSKTYLSKTLAQYTSKTCSNCGFTITSADYDRVLEKLKKTATGWMTTINGKELKVEGQITYYNRYKRQNVVKDLSVELDRLSEESVNNDISSWTKGRSGEALSLLKKRFSHRPVQEKFVCLNCGFETHADEQAALNIARSWLFLRSQEYKKYQTNKTTGNTDKRAFVETWQSFYRKKLKEVWKPAV

SEQ ID NO: 117 - protein, 976 aa, synthetic construct
  REGION 1..976: note = CasX variant
QEIKRINKIRRRLVKDSNTKKAGKTGPMKTLLVRVMTPDLRERLENLRKKPENIPQPISNTSRANLNKLLTDYTEMKKAILHVYWEEFQKDPVGLMSRVAQPAPKNIDQRKLIPVKDGNERLTSSGFACSQCCQPLYVYKLEQVNDKGKPHTNYFGRCNVSEHERLILLSPHKPEANDELVTYSLGKFGQRALDFYSIHVTRESNHPVKPLEQIGGNSCASGPVGKALSDACMGAVASFLTKYQDIILEHQKVIKKNEKRLANLKDIASANGLAFPKITLPPQPHTKEGIEAYNNVVAQIVIWVNLNLWQKLKIGRDEAKPLQRLKGFPSFPLVERQANEVDWWDMVCNVKKLINEKKEDGKVFWQNLAGYKRQEALRPYLSSEEDRKKGKKFARYQFGDLLLHLEKKHGEDWGKVYDEAWERIDKKVEGLSKHIKLEEERRSEDAQSKAALTDWLRAKASFVIEGLKEADKDEFCRCELKLQKWYGDLRGKPFAIEAENSILDISGFSKQYNCAFIWQKDGVKKLNLYLIINYFKGGKLRFKKIKPEAFEANRFYTVINKKSGEIVPMEVNFNFDDPNLIILPLAFGKRQGREFIWNDLLSLETGSLKLANGRVIEKTLYNRRTRQDEPALFVALTFERREVLDSSNIKPMNLIGIDRGENIPAVIALTDPEGCPLSRFKDSLGNPTHILRIGESYKEKQRTIQAKKEVEQRRAGGYSRKYASKAKNLADDMVRNTARDLLYYAVTQDAMLIFENLSRGFGRQGKRTFMAERQYTRMEDWLTAKLAYEGLSKTYLSKTLAQYTSKTCSNCGFTITSADYDRVLEKLKKTATGWMTTINGKELKVEGQITYYNRYKRQNVVKDLSVELDRLSEESVNNDISSWTKGRSGEALSLLKKRFSHRPVQEKFVCLNCGFETHADEQAALNIARSWLFLRSQEYKKYQTNKTTGNTDKRAFVETWQSFYRKKLKEVWKPAV

SEQ ID NO: 118 - protein, 977 aa, synthetic construct; identical to SEQ ID NO: 72
  REGION 1..977: note = CasX variant

SEQ ID NO: 119 - protein, 977 aa, synthetic construct; identical to SEQ ID NO: 72
  REGION 1..977: note = CasX variant

SEQ ID NO: 120 - protein, 977 aa, synthetic construct; identical to SEQ ID NO: 72
  REGION 1..977: note = CasX variant

SEQ ID NO: 121 - protein, 977 aa, synthetic construct; identical to SEQ ID NO: 72
  REGION 1..977: note = CasX variant

SEQ ID NO: 122 - protein, 977 aa, synthetic construct; identical to SEQ ID NO: 72
  REGION 1..977: note = CasX variant

SEQ ID NO: 123 - protein, 978 aa, synthetic construct
  REGION 1..978: note = CasX variant
MQEIKRINKIRRRLVKDSNTKKAGKTGPMKTLLVRVMTPDLRERLENLRKKPENIPQPISNTSRANLNKLLTDYTEMKKAILHVYWEEFQKDPVGLMSRVAQPAPKNIDQRKLIPVKDGNERLTMSSGFACSQCCQPLYVYKLEQVNDKGKPHTNYFGRCNVSEHERLILLSPHKPEANDELVTYSLGKFGQRALDFYSIHVTRESNHPVKPLEQIGGNSCASGPVGKALSDACMGAVASFLTKYQDIILEHQKVIKKNEKRLANLKDIASANGLAFPKITLPPQPHTKEGIEAYNNVVAQIVIWVNLNLWQKLKIGRDEAKPLQRLKGFPSFPLVERQANEVDWWDMVCNVKKLINEKKEDGKVFWQNLAGYKRQEALRPYLSSEEDRKKGKKFARYQFGDLLLHLEKKHGEDWGKVYDEAWERIDKKVEGLSKHIKLEEERRSEDAQSKAALTDWLRAKASFVIEGLKEADKDEFCRCELKLQKWYGDLRGKPFAIEAENSILDISGFSKQYNCAFIWQKDGVKKLNLYLIINYFKGGKLRFKKIKPEAFEANRFYTVINKKSGEIVPMEVNFNFDDPNLIILPLAFGKRQGREFIWNDLLSLETGSLKLANGRVIEKTLYNRRTRQDEPALFVALTFERREVLDSSNIKPMNLIGIDRGENIPAVIALTDPEGCPLSRFKDSLGNPTHILRIGESYKEKQRTIQAKKEVEQRRAGGYSRKYASKAKNLADDMVRNTARDLLYYAVTQDAMLIFENLSRGFGRQGKRTFMAERQYTRMEDWLTAKLAYEGLSKTYLSKTLAQYTSKTCSNCGFTITSADYDRVLEKLKKTATGWMTTINGKELKVEGQITYYNRYKRQNVVKDLSVELDRLSEESVNNDISSWTKGRSGEALSLLKKRFSHRPVQEKFVCLNCGFETHADEQAALNIARSWLFLRSQEYKKYQTNKTTGNTDKRAFVETWQSFYRKKLKEVWKPAV

SEQ ID NO: 124 - protein, 977 aa, synthetic construct; identical to SEQ ID NO: 72
  REGION 1..977: note = CasX variant

SEQ ID NO: 125 - protein, 977 aa, synthetic construct; identical to SEQ ID NO: 72
  REGION 1..977: note = CasX variant

SEQ ID NO: 126 - protein, 977 aa, synthetic construct; identical to SEQ ID NO: 72
  REGION 1..977: note = CasX variant

SEQ ID NO: 127 - protein, 977 aa, synthetic construct; identical to SEQ ID NO: 72
  REGION 1..977: note = CasX variant

SEQ ID NO: 128 - protein, 977 aa, synthetic construct; identical to SEQ ID NO: 72
  REGION 1..977: note = CasX variant

SEQ ID NO: 129 - protein, 977 aa, synthetic construct; identical to SEQ ID NO: 72
  REGION 1..977: note = CasX variant

SEQ ID NO: 130 - protein, 977 aa, synthetic construct
  REGION 1..977: note = CasX variant
QEIKRINKIRRRLVKDSNTKKAGKTGPMKTLLVRVMTPDLRERLENLRKKPENIPQPISNTSRANLNKLLTDYTEMKKAILHVYWEEFQKDPVGLMSRVAQPASKKIDQNKLKPEMDEKGNLTTAGFACSQCGQPLFVYKLEQVSEKGKAYTNYFGRCNVAEHEKLILLAQLKPEKDSDEAVTYSLGKFGQRALDFYSIHVTRESNHPVKPLEQIGGNSCASGPVGKALSDACMGAVASFLTKYQDIILEHQKVIKKNEKRLANLKDIASANGLAFPKITLPPQPHTKEGIEAYNNVVAQIVIWVNLNLWQKLKIGRDEAKPLQRLKGFPSFPLVERQANEVDWWDMVCNVKKLINEKKEDGKVFWQNLAGYKRQEALRPYLSSEEDRKKGKKFARYQFGDLLLHLEKKHGEDWGKVYDEAWERIDKKVEGLSKHIKLEEERRSEDAQSKAALTDWLRAKASFVIEGLKEADKDEFCRCELKLQKWYGDLRGKPFAIEAENSILDISGFSKQYNCAFIWQKDGVKKLNLYLIINYFKGGKLRFKKIKPEAFEANRFYTVINKKSGEIVPMEVNFNFDDPNLIILPLAFGKRQGREFIWNDLLSLETGSLKLANGRVIEKTLYNRRTRQDEPALFVALTFERREVLDSSNIKPMNLIGIDRGENIPAVIALTDPEGCPLSRFKDSLGNPTHILRIGESYKEKQRTIQAKKEVEQRRAGGYSRKYASKAKNLADDMVRNTARDLLYYAVTQDAMLIFENLSRGFGRQGKRTFMAERQYTRMEDWLTAKLAYEGLSKTYLSKTLAQYTSKTCSNCGFTITSADYDRVLEKLKKTATGWMTTINGKELKVEGQITYYNRYKRQNVVKDLSVELDRLSEESVNNDISSWTKGRSGEALSLLKKRFSHRPVQEKFVCLNCGFETHADEQAALNIARSWLFLRSQEYKKYQTNKTTGNTDKRAFVETWQSFYRKKLKEVWKPAV

SEQ ID NO: 131 - protein, 976 aa, synthetic construct
  REGION 1..976: note = CasX variant
QEIKRINKIRRRLVKDSNTKKAGKTGPMKTLLVRVMTPDLRERLENLRKKPENIPQPISNTSRANLNKLLTDYTEMKKAILHVYWEEFQKDPVGLMSRVAQPAPKNIDQRKLIPVKDGNERLTSSGFACSQCCQPLYVYKLEQVNDKGKPHTNYFGRCNVSEHERLILLSPHKPEANDELVTYSLGKFGQRALDFYSIHVTKESTHPVKPLAQIAGNRYASGPVGKALSDACMGTIASFLSKYQDIIIEHQKVVKGNQKRLESLRELAGKENLEYPSVTLPPQPHTKEGVDAYNEVIARVRMWVNLNLWQKLKLSRDDAKPLLRLKGFPSFPLVERQANEVDWWDMVCNVKKLINEKKEDGKVFWQNLAGYKRQEALRPYLSSEEDRKKGKKFARYQFGDLLLHLEKKHGEDWGKVYDEAWERIDKKVEGLSKHIKLEEERRSEDAQSKAALTDWLRAKASFVIEGLKEADKDEFCRCELKLQKWYGDLRGKPFAIEAENSILDISGFSKQYNCAFIWQKDGVKKLNLYLIINYFKGGKLRFKKIKPEAFEANRFYTVINKKSGEIVPMEVNFNFDDPNLIILPLAFGKRQGREFIWNDLLSLETGSLKLANGRVIEKTLYNRRTRQDEPALFVALTFERREVLDSSNIKPMNLIGIDRGENIPAVIALTDPEGCPLSRFKDSLGNPTHILRIGESYKEKQRTIQAKKEVEQRRAGGYSRKYASKAKNLADDMVRNTARDLLYYAVTQDAMLIFENLSRGFGRQGKRTFMAERQYTRMEDWLTAKLAYEGLSKTYLSKTLAQYTSKTCSNCGFTITSADYDRVLEKLKKTATGWMTTINGKELKVEGQITYYNRYKRQNVVKDLSVELDRLSEESVNNDISSWTKGRSGEALSLLKKRFSHRPVQEKFVCLNCGFETHADEQAALNIARSWLFLRSQEYKKYQTNKTTGNTDKRAFVETWQSFYRKKLKEVWKPAV

SEQ ID NO: 132 - protein, 976 aa, synthetic construct
  REGION 1..976: note = CasX variant
QEIKRINKIRRRLVKDSNTKKAGKTGPMKTLLVRVMTPDLRERLENLRKKPENIPQPISNTSRANLNKLLTDYTEMKKAILHVYWEEFQKDPVGLMSRVAQPAPKNIDQRKLIPVKDGNERLTSSGFACSQCCQPLYVYKLEQVNDKGKPHTNYFGRCNVSEHERLILLSPHKPEANDELVTYSLGKFGQRALDFYSIHVTKESTHPVKPLAQIAGNRYASGPVGKALSDACMGTIASFLSKYQDIIIEHQKVVKGNQKRLESLRELAGKENLEYPSVTLPPQPHTKEGVDAYNEVIARVRMWVNLNLWQKLKLSRDDAKPLLRLKGFPSFPLVERQANEVDWWDMVCNVKKLINEKKEDGKVFWQNLAGYKRQEALRPYLSSEEDRKKGKKFARYQLGDLLLHLEKKHGEDWGKVYDEAWERIDKKVEGLSKHIKLEEERRSEDAQSKAALTDWLRAKASFVIEGLKEADKDEFCRCELKLQKWYGDLRGKPFAIEAENSILDISGFSKQYNCAFIWQKDGVKKLNLYLIINYFKGGKLRFKKIKPEAFEANRFYTVINKKSGEIVPMEVNFNFDDPNLIILPLAFGKRQGREFIWNDLLSLETGSLKLANGRVIEKTLYNRRTRQDEPALFVALTFERREVLDSSNIKPMNLIGVDRGENIPAVIALTDPEGCPLSRFKDSLGNPTHILRIGESYKEKQRTIQAKKEVEQRRAGGYSRKYASKAKNLADDMVRNTARDLLYYAVTQDAMLIFENLSRGFGRQGKRTFMAERQYTRMEDWLTAKLAYEGLSKTYLSKTLAQYTSKTCSNCGFTITSADYDRVLEKLKKTATGWMTTINGKELKVEGQITYYNRRKRQNVVKDLSVELDRLSEESVNNDISSWTKGRSGEALSLLKKRFSHRPVQEKFVCLNCGFETHADEQAALNIARSWLFLRSQEYKKYQTNKTTGNTDKRAFVETWQSFYRKKLKEVWKPAV

SEQ ID NO: 133 - protein, 976 aa, synthetic construct
  REGION 1..976: note = CasX variant
QEIKRINKIRRRLVKDSNTKKAGKTGPMKTLLVRVMTPDLRERLENLRKKPENIPQPISNTSRANLNKLLTDYTEMKKAILHVYWEEFQKDPVGLMSRVAQPAPKNIDQRKLIPVKDGNERLTSSGFACSQCCQPLYVYKLEQVNDKGKPHTNYFGRCNVSEHERLILLSPHKPEANDELVTYSLGKFGQRALDFYSIHVTKESTHPVKPLAQIAGNRYASGPVGKALSDACMGTIASFLSKYQDIIIEHQKVVKGNQKRLESLRELAGKENLEYPSVTLPPQPHTKEGVDAYNEVIARVRMWVNLNLWQKLKLSRDDAKPLLRLKGFPSFPLVERQANEVDWWDMVCNVKKLINEKKEDGKVFWQNLAGYKRQEALRPYLSSEEDRKKGKKFARYQLGDLLKHLEKKHGEDWGKVYDEAWERIDKKVEGLSKHIKLEEERRSEDAQSKAALTDWLRAKASFVIEGLKEADKDEFCRCELKLQKWYGDLRGKPFAIEAENSILDISGFSKQYNCAFIWQKDGVKKLNLYLIINYFKGGKLRFKKIKPEAFEANRFYTVINKKSGEIVPMEVNFNFDDPNLIILPLAFGKRQGREFIWNDLLSLETGSLKLANGRVIEKTLYNRRTRQDEPALFVALTFERREVLDSSNIKPMNLIGVDRGENIPAVIALTDPEGCPLSRFKDSLGNPTHILRIGESYKEKQRTIQAKKEVEQRRAGGYSRKYASKAKNLADDMVRNTARDLLYYAVTQDAMLIFENLSRGFGRQGKRTFMAERQYTRMEDWLTAKLAYEGLSKTYLSKTLAQYTSKTCSNCGFTITSADYDRVLEKLKKTATGWMTTINGKELKVEGQITYYNRRKRQNVVKDLSVELDRLSEESVNNDISSWTKGRSGEALSLLKKRFSHRPVQEKFVCLNCGFETHADEQAALNIARSWLFLRSQEYKKYQTNKTTGNTDKRAFVETWQSFYRKKLKEVWKPAV

SEQ ID NO: 134 - protein, 976 aa, synthetic construct
  REGION 1..976: note = CasX variant
QEIKRINKIRRRLVKDSNTKKAGKTGPMKTLLVRVMTPDLRERLENLRKKPENIPQPISNTSRANLNKLLTDYTEMKKAILHVYWEEFQKDPVGLMSRVAQPAPKNIDQRKLIPVKDGNERLTSSGFACSQCCQPLYVYKLEQVNDKGKPHTNYFGRCNVSEHERLILLSPHKPEANDELVTYSLGKFGQRALDFYSIHVTKESTHPVKPLAQIAGNRYASGPVGKALSDACMGTIASFLSKYQDIIIEHQKVVKGNQKRLESLRELAGKENLEYPSVTLPPQPHTKEGVDAYNEVIARVRMWVNLNLWQKLKLSRDDAKPLLRLKGFPSFPLVERQANEVDWWDMVCNVKKLINEKKEDGKVFWQNLAGYKRQEALRPYLSSEEDRKKGKKFARYQLGDLLLHLEKKHGEDWGKVYDEAWERIDKKVEGLSKHIKLEEERRSEDAQSKAALTDWLRAKASFVIEGLKEADKDEFCRCELKLQKWYGDLRGKPFAIEAENSILDISGFSKQYNCAFIWQKDGVKKLNLYLIINYFKGGKLRFKKIKPEAFEANRFYTVINKKSGEIVPMEVNFNFDDPNLIILPLAFGKRQGREFIWNDLLSLETGSLKLANGRVIEKTLYNRRTRQDEPALFVALTFERREVLDSSNIKPMNLIGVDRGENIPAVIALTDPEGCPLSRFKDSLGNPTHILRIGESYKEKQRTIQAKKEVEQRRAGGYSRKYASKAKNLADDMVRNTARDLLYYAVTQDAMLIFENLSRGFGRQGKRTFMAERQYTRMEDWLTAKLAYEGLSKTYLSKTLAQYTSKTCSNCGFTITSADYDRVLEKLKKTATGWMTTINGKELKVEGQITYYNRYKRQNVVKDLSVELDRLSEESVNNDISSWTKGRSGEALSLLKKRFSHRPVQEKFVCLNCGFETHADEQAALNIARSWLFLRSQEYKKYQTNKTTGNTDKRAFVETWQSFYRKKLKEVWKPAV

SEQ ID NO: 135 - protein, 977 aa, synthetic construct
  REGION 1..977: note = CasX variant
QEIKRINKIRRRLVKDSNTKKAGKTGPMKTLLVRVMTPDLRERLENLRKKPENIPQPISNTSRANLNKLLTDYTEMKKAILHVYWEEFQKDPVGLMSRVAQPASKKIDQNKLKPEMDEKGNLTTAGFACSQCGQPLFVYKLEQVSEKGKAYTNYFGRCNVAEHEKLILLAQLKPEKDSDEAVTYSLGKFGQRALDFYSIHVTKESTHPVKPLAQIAGNRYASGPVGKALSDACMGTIASFLSKYQDIIIEHQKVVKGNQKRLESLRELAGKENLEYPSVTLPPQPHTKEGVDAYNEVIARVRMWVNLNLWQKLKLSRDDAKPLLRLKGFPSFPLVERQANEVDWWDMVCNVKKLINEKKEDGKVFWQNLAGYKRQEALRPYLSSEEDRKKGKKFARYQFGDLLLHLEKKHGEDWGKVYDEAWERIDKKVEGLSKHIKLEEERRSEDAQSKAALTDWLRAKASFVIEGLKEADKDEFCRCELKLQKWYGDLRGKPFAIEAENSILDISGFSKQYNCAFIWQKDGVKKLNLYLIINYFKGGKLRFKKIKPEAFEANRFYTVINKKSGEIVPMEVNFNFDDPNLIILPLAFGKRQGREFIWNDLLSLETGSLKLANGRVIEKTLYNRRTRQDEPALFVALTFERREVLDSSNIKPMNLIGIDRGENIPAVIALTDPEGCPLSRFKDSLGNPTHILRIGESYKEKQRTIQAKKEVEQRRAGGYSRKYASKAKNLADDMVRNTARDLLYYAVTQDAMLIFENLSRGFGRQGKRTFMAERQYTRMEDWLTAKLAYEGLSKTYLSKTLAQYTSKTCSNCGFTITSADYDRVLEKLKKTATGWMTTINGKELKVEGQITYYNRYKRQNVVKDLSVELDRLSEESVNNDISSWTKGRSGEALSLLKKRFSHRPVQEKFVCLNCGFETHADEQAALNIARSWLFLRSQEYKKYQTNKTTGNTDKRAFVETWQSFYRKKLKEVWKPAV

SEQ ID NO: 136 - protein, 977 aa, synthetic construct
  REGION 1..977: note = CasX variant
QEIKRINKIRRRLVKDSNTKKAGKTGPMKTLLVRVMTPDLRERLENLRKKPENIPQPISNTSRANLNKLLTDYTEMKKAILHVYWEEFQKDPVGLMSRVAQPASKKIDQNKLKPEMDEKGNLTTAGFACSQCGQPLFVYKLEQVSEKGKAYTNYFGRCNVAEHEKLILLAQLKPEKDSDEAVTYSLGKFGQRALDFYSIHVTKESTHPVKPLAQIAGNRYASGPVGKALSDACMGTIASFLSKYQDIIIEHQKVVKGNQKRLESLRELAGKENLEYPSVTLPPQPHTKEGVDAYNEVIARVRMWVNLNLWQKLKLSRDDAKPLLRLKGFPSFPLVERQANEVDWWDMVCNVKKLINEKKEDGKVFWQNLAGYKRQEALRPYLSSEEDRKKGKKFARYQLGDLLLHLEKKHGEDWGKVYDEAWERIDKKVEGLSKHIKLEEERRSEDAQSKAALTDWLRAKASFVIEGLKEADKDEFCRCELKLQKWYGDLRGKPFAIEAENSILDISGFSKQYNCAFIWQKDGVKKLNLYLIINYFKGGKLRFKKIKPEAFEANRFYTVINKKSGEIVPMEVNFNFDDPNLIILPLAFGKRQGREFIWNDLLSLETGSLKLANGRVIEKTLYNRRTRQDEPALFVALTFERREVLDSSNIKPMNLIGVDRGENIPAVIALTDPEGCPLSRFKDSLGNPTHILRIGESYKEKQRTIQAKKEVEQRRAGGYSRKYASKAKNLADDMVRNTARDLLYYAVTQDAMLIFENLSRGFGRQGKRTFMAERQYTRMEDWLTAKLAYEGLSKTYLSKTLAQYTSKTCSNCGFTITSADYDRVLEKLKKTATGWMTTINGKELKVEGQITYYNRRKRQNVVKDLSVELDRLSEESVNNDISSWTKGRSGEALSLLKKRFSHRPVQEKFVCLNCGFETHADEQAALNIARSWLFLRSQEYKKYQTNKTTGNTDKRAFVETWQSFYRKKLKEVWKPAV

SEQ ID NO: 137 - protein, 977 aa, synthetic construct
  REGION 1..977: note = CasX variant
QEIKRINKIRRRLVKDSNTKKAGKTGPMKTLLVRVMTPDLRERLENLRKKPENIPQPISNTSRANLNKLLTDYTEMKKAILHVYWEEFQKDPVGLMSRVAQPASKKIDQNKLKPEMDEKGNLTTAGFACSQCGQPLFVYKLEQVSEKGKAYTNYFGRCNVAEHEKLILLAQLKPEKDSDEAVTYSLGKFGQRALDFYSIHVTKESTHPVKPLAQIAGNRYASGPVGKALSDACMGTIASFLSKYQDIIIEHQKVVKGNQKRLESLRELAGKENLEYPSVTLPPQPHTKEGVDAYNEVIARVRMWVNLNLWQKLKLSRDDAKPLLRLKGFPSFPLVERQANEVDWWDMVCNVKKLINEKKEDGKVFWQNLAGYKRQEALRPYLSSEEDRKKGKKFARYQLGDLLKHLEKKHGEDWGKVYDEAWERIDKKVEGLSKHIKLEEERRSEDAQSKAALTDWLRAKASFVIEGLKEADKDEFCRCELKLQKWYGDLRGKPFAIEAENSILDISGFSKQYNCAFIWQKDGVKKLNLYLIINYFKGGKLRFKKIKPEAFEANRFYTVINKKSGEIVPMEVNFNFDDPNLIILPLAFGKRQGREFIWNDLLSLETGSLKLANGRVIEKTLYNRRTRQDEPALFVALTFERREVLDSSNIKPMNLIGVDRGENIPAVIALTDPEGCPLSRFKDSLGNPTHILRIGESYKEKQRTIQAKKEVEQRRAGGYSRKYASKAKNLADDMVRNTARDLLYYAVTQDAMLIFENLSRGFGRQGKRTFMAERQYTRMEDWLTAKLAYEGLSKTYLSKTLAQYTSKTCSNCGFTITSADYDRVLEKLKKTATGWMTTINGKELKVEGQITYYNRRKRQNVVKDLSVELDRLSEESVNNDISSWTKGRSGEALSLLKKRFSHRPVQEKFVCLNCGFETHADEQAALNIARSWLFLRSQEYKKYQTNKTTGNTDKRAFVETWQSFYRKKLKEVWKPAV

SEQ ID NO: 138 - protein, 977 aa, synthetic construct
  REGION 1..977: note = CasX variant
QEIKRINKIRRRLVKDSNTKKAGKTGPMKTLLVRVMTPDLRERLENLRKKPENIPQPISNTSRANLNKLLTDYTEMKKAILHVYWEEFQKDPVGLMSRVAQPASKKIDQNKLKPEMDEKGNLTTAGFACSQCGQPLFVYKLEQVSEKGKAYTNYFGRCNVAEHEKLILLAQLKPEKDSDEAVTYSLGKFGQRALDFYSIHVTKESTHPVKPLAQIAGNRYASGPVGKALSDACMGTIASFLSKYQDIIIEHQKVVKGNQKRLESLRELAGKENLEYPSVTLPPQPHTKEGVDAYNEVIARVRMWVNLNLWQKLKLSRDDAKPLLRLKGFPSFPLVERQANEVDWWDMVCNVKKLINEKKEDGKVFWQNLAGYKRQEALRPYLSSEEDRKKGKKFARYQLGDLLLHLEKKHGEDWGKVYDEAWERIDKKVEGLSKHIKLEEERRSEDAQSKAALTDWLRAKASFVIEGLKEADKDEFCRCELKLQKWYGDLRGKPFAIEAENSILDISGFSKQYNCAFIWQKDGVKKLNLYLIINYFKGGKLRFKKIKPEAFEANRFYTVINKKSGEIVPMEVNFNFDDPNLIILPLAFGKRQGREFIWNDLLSLETGSLKLANGRVIEKTLYNRRTRQDEPALFVALTFERREVLDSSNIKPMNLIGVDRGENIPAVIALTDPEGCPLSRFKDSLGNPTHILRIGESYKEKQRTIQAKKEVEQRRAGGYSRKYASKAKNLADDMVRNTARDLLYYAVTQDAMLIFENLSRGFGRQGKRTFMAERQYTRMEDWLTAKLAYEGLSKTYLSKTLAQYTSKTCSNCGFTITSADYDRVLEKLKKTATGWMTTINGKELKVEGQITYYNRYKRQNVVKDLSVELDRLSEESVNNDISSWTKGRSGEALSLLKKRFSHRPVQEKFVCLNCGFETHADEQAALNIARSWLFLRSQEYKKYQTNKTTGNTDKRAFVETWQSFYRKKLKEVWKPAV

SEQ ID NO: 139 - protein, 977 aa, synthetic construct
  REGION 1..977: note = CasX variant
QEIKRINKIRRRLVKDSNTKKAGKTGPMKTLLVRVMTPDLRERLENLRKKPENIPQPISNTSRANLNKLLTDYTEMKKAILHVYWEEFQKDPVGLMSRVAQPASKKIDQNKLKPEMDEKGNLTTAGFACSQCGQPLFVYKLEQVSEKGKAYTNYFGRCNVAEHEKLILLAQLKPEKDSDEAVTYSLGKFGQRALDFYSIHVTRESNHPVKPLEQIGGNSCASGPVGKALSDACMGAVASFLTKYQDIILEHQKVIKKNEKRLANLKDIASANGLAFPKITLPPQPHTKEGIEAYNNVVAQIVIWVNLNLWQKLKIGRDEAKPLQRLKGFPSFPLVERQANEVDWWDMVCNVKKLINEKKEDGKVFWQNLAGYKRQEALRPYLSSEEDRKKGKKFARYQLGDLLLHLEKKHGEDWGKVYDEAWERIDKKVEGLSKHIKLEEERRSEDAQSKAALTDWLRAKASFVIEGLKEADKDEFCRCELKLQKWYGDLRGKPFAIEAENSILDISGFSKQYNCAFIWQKDGVKKLNLYLIINYFKGGKLRFKKIKPEAFEANRFYTVINKKSGEIVPMEVNFNFDDPNLIILPLAFGKRQGREFIWNDLLSLETGSLKLANGRVIEKTLYNRRTRQDEPALFVALTFERREVLDSSNIKPMNLIGVDRGENIPAVIALTDPEGCPLSRFKDSLGNPTHILRIGESYKEKQRTIQAKKEVEQRRAGGYSRKYASKAKNLADDMVRNTARDLLYYAVTQDAMLIFENLSRGFGRQGKRTFMAERQYTRMEDWLTAKLAYEGLSKTYLSKTLAQYTSKTCSNCGFTITSADYDRVLEKLKKTATGWMTTINGKELKVEGQITYYNRYKRQNVVKDLSVELDRLSEESVNNDISSWTKGRSGEALSLLKKRFSHRPVQEKFVCLNCGFETHADEQAALNIARSWLFLRSQEYKKYQTNKTTGNTDKRAFVETWQSFYRKKLKEVWKPAV

SEQ ID NO: 140 - protein, 978 aa, synthetic construct
  REGION 1..978: note = CasX variant
MQEIKRINKIRRRLVKDSNTKKAGKTGPMKTLLVRVMTPDLRERLENLRKKPENIPQPISNTSRANLNKLLTDYTEMKKAILHVYWEEFQKDPVGLMSRVAQPAPKNIDQRKLIPVKDGNERLTSSGFACSQCCQPLYVYKLEQVNDKGKPHTNYFGRCNVSEHERLILLSPHKPEANDELVTYSLGKFGQRALDFYSIHVTRESNHPVKPLEQIGGNSCASGPVGKALSDACMGAVASFLTKYQDIILEHQKVIKKNEKRLANLKDIASANGLAFPKITLPPQPHTKEGIEAYNNVVAQIVIWVNLNLWQKLKIGRDEAKPLQRLKGFPSFPLVERQANEVDWWDMVCNVKKLINEKKEDGKVFWQNLAGYKRQEALLPYLSSEEDRKKGKKFARYQFGDLLLHLEKKHGEDWGKVYDEAWERIDKKVEGLSKHIKLEEERRSEDAQSKAALTDWLRAKASFVIEGLKEADKDEFCRCELKLQKWYGDLRGKPFAIEAENSILDISGFSKQYNCAFIWQKDGVKKLNLYLIINYFKGGKLRFKKIKPEAFEANRFYTVINKKSGEIVPMEVNFNFDDPNLIILPLAFGKRQGREFIWNDLLSLETGSLKLANGRVIEKTLYNRRTRQDEPALFVALTFERREVLDSSNIKPMNLIGIDRGENIPAVIALTDPEGCPLSRFKDSLGNPTHILRIGESYKEKQRTIQAAKEVEQRRAGGYSRKYASKAKNLADDMVRNTARDLLYYAVTQDAMLIFENLSRGFGRQGKRTFMAERQYTRMEDWLTAKLAYEGLPSKTYLSKTLAQYTSKTCSNCGFTITSADYDRVLEKLKKTATGWMTTINGKELKVEGQITYYNRYKRQNVVKDLGVELDRLSEESVNNDISSWTKGRSGEALSLLKKRFSHRPVQEKFVCLNCGFETHADEQAALNIARSWLFLRSQEYKKYQTNKTTGNTDKRAFVETWQSFYRKKLKEVWKPAV

SEQ ID NO: 141 - protein, 986 aa, synthetic construct; identical to SEQ ID NO: 56
  REGION 1..986: note = CasX variant

SEQ ID NO: 142 - protein, 978 aa, synthetic construct
  REGION 1..978: note = CasX variant
MQEIKRINKIRRRLVKDSNTKKAGKTGPMKTLLVRVMTPDLRERLENLRKKPENIPQPISNTSRANLNKLLTDYTEMKKAILHVYWEEFQKDPVGLMSRVAQPAPKNIDQRKLIPVKDGNERLTSSGFACSQCCQPLYVYKLEQVNDKGKPHTNYFGRCNVSEHERLILLSPHKPEANDELVTYSLGKFGQRALDFYSIHVTRESNHPVKPLEQIGGNSCASGPVGKALSDACMGAVASFLTKYQDIILEHQKVIKKNEKRLANLKDIASANGLAFPKITLPPQPHTKEGIEAYNNVVAQIVIWVNLNLWQKLKIGRDEAKPLQRLKGFPSFPLVERQANEVDWWDMVCNVKKLINEKKEDGKVFWQNLAGYKRQEALRPYLSSEEDRKKGKKFARYQFGDLLLHLEKKHGEDWGKVYDEAWERIDKKVEGLSKHIKLEEERRSEDAQSKAALTDWLRAKASFVIEGLKEADKDEFCRCELKLQKWYGDLRGKPFAIEAENSILDISGFSKQYNCAFIWQKDGVKKLNLYLIINYFKGGKLRFKKIKPEAFEANRFYTVINKKSGEIVPMEVNFNFDDPNLIILPLAFGKRQGREFIWNDLLSLETGSLKLANGRVIEKTLYNRRTRQDEPALFVALTFERREVLDSSNIKPVNLIGVDRGENIPAVIALTDPEGCPLPEFKDSSGGPTDILRIGEGYKEKQRAIQAAKEVEQRRAGGYSRKFASKSRNLADDMVRNSARDLFYHAVTHDAVLVFENLSRGFGRQGKRTFMTERQYTKMEDWLTAKLAYEGLTSKTYLSKTLAQYTSKTCSNCGFTITSADYDRVLEKLKKTATGWMTTINGKELKVEGQITYYNRYKRQNVVKDLSVELDRLSEESVNNDISSWTKGRSGEALSLLKKRFSHRPVQEKFVCLNCGFETHADEQAALNIARSWLFLRSQEYKKYQTNKTTGNTDKRAFVETWQSFYRKKLKEVWKPAV

SEQ ID NO: 143 - protein, 972 aa, synthetic construct
  REGION 1..972: note = CasX variant
MQEIKRINKIRRRLVKDSNTKKAGKTGPMKTLLVRVMTPDLRERLENLRKKPENIPQPISNTSRANLNKLLTDYTEMKKAILHVYWEEFQKDPVGLMSRVAQPAPKNIDQRKLIPVKDGNERLTSSGFACSQCCQPLYVYKLEQVNDKGKPHTNYFGRCNVSEHERLILLSPHKPEANDELVTYSLGKFGQRALDFYSIHVTRESNHPVKPLEQIGGNSCASGPVGKALSDACMGAVASFLTKYQDIILEHQKVIKKNEKRLANLKDIASANGLAFPKITLPPQPHTKEGIEAYNNVVAQIVIWVNLNLWQKLKIGRDEAKPLQRLKGFPSFPLVERQANEVDWWDMVCNVKKLINEKKEDGKVFWQNLAGYKRQEALRPYLSSEEDRKKGKKFARYQFGDLLLHLEKKHGEDWGKVYDEAWERIDKKVEGLSKHIKLEEERRSEDAQSKAALTDWLRAKASFVIEGLKEADKDEFCRCELKLQKWYGDLRGKPFAIEAENSILDISGFSKQYNCAFIWQKDGVKKLNLYLIINYFKGGKLRFKKIKPEAFEANRFYTVINKKSGEIVPMEVNFNFDDPNLIILPLAFGKRQGREFIWNDLLSLETGSLKLANGRVIEKTLYNRRTRQDEPALFVALTFERREVLDSSNIKPMNLIGIDRGENIPAVIALTDPEGCPLSRFKDSLGNPTHILRIGESYKEKQRTIQAKKEVEQRRAGGYSRKYASKAKNLADDMVRNTARDLLYYAVTQDAMLIFENLSRGFGRQGKRTFMAERQYTRMEDWLTAKLAYEGLSKTYLSKTLAQYTSKTCSNCGFTITSADYDRVLEKLKKTATGWMTTINGKELKVEGQITYYNRYKRQNVVKDLSVELDRLSEESVNNDISSWTKGRSGEALSLLKKRFSHRPVQEKFVCLNCGFETHADEQAALNIARSWLFLNSNSTEFKSYKSGKQPFVGAWQAFYKRRLKEVWKPNA

SEQ ID NO: 144 - protein, 978 aa, synthetic construct
  REGION 1..978: note = CasX variant
QEIKRINKIRRRLVKDSNTKKAGKTRGPMKTLLVRVMTPDLRERLENLRKKPENIPQPISNTSRANLNKLLTDYTEMKKAILHVYWEEFQKDPVGLMSRVAQPASKKIDQNKLKPEMDEKGNLTTAGFACSQCGQPLFVYKLEQVSEKGKAYTNYFGRCNVAEHEKLILLAQLKPEKDSDEAVTYSLGKFGQRALDFYSIHVTKESTHPVKPLAQIAGNRYASGPVGKALSDACMGTIASFLSKYQDIIIEHQKVVKGNQKRLESLRELAGKENLEYPSVTLPPQPHTKEGVDAYNEVIARVRMWVNLNLWQKLKLSRDDAKPLLRLKGFPSFPLVERQANEVDWWDMVCNVKKLINEKKEDGKVFWQNLAGYKRQEALRPYLSSEEDRKKGKKFARYQLGDLLLHLEKKHGEDWGKVYDEAWERIDKKVEGLSKHIKLEEERRSEDAQSKAALTDWLRAKASFVIEGLKEADKDEFCRCELKLQKWYGDLRGKPFAIEAENSILDISGFSKQYNCAFIWQKDGVKKLNLYLIINYFKGGKLRFKKIKPEAFEANRFYTVINKKSGEIVPMEVNFNFDDPNLIILPLAFGKRQGREFIWNDLLSLETGSLKLANGRVIEKTLYNRRTRQDEPALFVALTFERREVLDSSNIKPMNLIGVDRGENIPAVIALTDPEGCPLSRFKDSLGNPTHILRIGESYKEKQRTIQAKKEVEQRRAGGYSRKYASKAKNLADDMVRNTARDLLYYAVTQDAMLIFENLSRGFGRQGKRTFMAERQYTRMEDWLTAKLAYEGLSKTYLSKTLAQYTSKTCSNCGFTITSADYDRVLEKLKKTATGWMTTINGKELKVEGQITYYNRYKRQNVVKDLSVELDRLSEESVNNDISSWTKGRSGEALSLLKKRFSHRPVQEKFVCLNCGFETHADEQAALNIARSWLFLRSQEYKKYQTNKTTGNTDKRAFVETWQSFYRKKLKEVWKPAV

SEQ ID NO: 145 - protein, 978 aa, synthetic construct
  REGION 1..978: note = CasX variant
QEIKRINKIRRRLVKDSNTKKAGKTGPMKTLLVRVMTPDLRERLENLRKKPENIPQPISNTSRANLNKLLTDYTEMKKAILHVYWEEFQKDPVGLMSRVAQPASKKIDQNKLKPEMDEKGNLTTAGFACSQCGQPLFVYKLEQVSEKGKAYTNYFGRCNVAEHEKLILLAQLKPEKDSDEAVTYSLGKFGQRALDFYSIHVTKESTHPVKPLAQIAGNRYASYPVGKALSDACMGTIASFLSKYQDIIIEHQKVVKGNQKRLESLRELAGKENLEYPSVTLPPQPHTKEGVDAYNEVIARVRMWVNLNLWQKLKLSRDDAKPLLRLKGFPSFPLVERQANEVDWWDMVCNVKKLINEKKEDGKVFWQNLAGYKRQEALRPYLSSEEDRKKGKKFARYQLGDLLLHLEKKHGEDWGKVYDEAWERIDKKVEGLSKHIKLEEERRSEDAQSKAALTDWLRAKASFVIEGLKEADKDEFCRCELKLQKWYGDLRGKPFAIEAENSILDISGFSKQYNCAFIWQKDGVKKLNLYLIINYFKGGKLRFKKIKPEAFEANRFYTVINKKSGEIVPMEVNFNFDDPNLIILPLAFGKRQGREFIWNDLLSLETGSLKLANGRVIEKTLYNRRTRQDEPALFVALTFERREVLDSSNIKPMNLIGVDRGENIPAVIALTDPEGCPLSRFKDSLGNPTHILRIGESYKEKQRTIQAKKEVEQRRAGGYSRKYASKAKNLADDMVRNTARDLLYYAVTQDAMLIFENLSRGFGRQGKRTFMAERQYTRMEDWLTAKLAYEGLPSKTYLSKTLAQYTSKTCSNCGFTITSADYDRVLEKLKKTATGWMTTINGKELKVEGQITYYNRYKRQNVVKDLSVELDRLSEESVNNDISSWTKGRSGEALSLLKKRFSHRPVQEKFVCLNCGFETHADEQAALNIARSWLFLRSQEYKKYQTNKTTGNTDKRAFVETWQSFYRKKLKEVWKPAV

SEQ ID NO: 146 - protein, 978 aa, synthetic construct
  REGION 1..978: note = CasX variant
QEIKRINKIRRRLVKDSNTKKAGKTGPMKTLLVRVMTPDLRERLENLRKKPENIPQPISNTSRANLNKLLTDYTEMKKAILHVYWEEFQKDPVGLMSRVAQPASKKIDQNKLKPEMDEKGNLTTAGFACSQCGQPLFVYKLEQVSEKGKAYTNYFGRCNVAEHEKLILLAQLKPEKDSDEAVTYSLGKFGQRALDFYSIHVTKESTHPVKPLAQIAGNRYASNPVGKALSDACMGTIASFLSKYQDIIIEHQKVVKGNQKRLESLRELAGKENLEYPSVTLPPQPHTKEGVDAYNEVIARVRMWVNLNLWQKLKLSRDDAKPLLRLKGFPSFPLVERQANEVDWWDMVCNVKKLINEKKEDGKVFWQNLAGYKRQEALRPYLSSEEDRKKGKKFARYQLGDLLLHLEKKHGEDWGKVYDEAWERIDKKVEGLSKHIKLEEERRSEDAQSKAALTDWLRAKASFVIEGLKEADKDEFCRCELKLQKWYGDLRGKPFAIEAENSILDISGFSKQYNCAFIWQKDGVKKLNLYLIINYFKGGKLRFKKIKPEAFEANRFYTVINKKSGEIVPMEVNFNFDDPNLIILPLAFGKRQGREFIWNDLLSLETGSLKLANGRVIEKTLYNRRTRQDEPALFVALTFERREVLDSSNIKPMNLIGVDRGENIPAVIALTDPEGCPLSRFKDSLGNPTHILRIGESYKEKQRTIQAKKEVEQRRAGGYSRKYASKAKNLADDMVRNTARDLLYYAVTQDAMLIFENLSRGFGRQGKRTFMAERQYTRMEDWLTAKLAYEGLPSKTYLSKTLAQYTSKTCSNCGFTITSADYDRVLEKLKKTATGWMTTINGKELKVEGQITYYNRYKRQNVVKDLSVELDRLSEESVNNDISSWTKGRSGEALSLLKKRFSHRPVQEKFVCLNCGFETHADEQAALNIARSWLFLRSQEYKKYQTNKTTGNTDKRAFVETWQSFYRKKLKEVWKPAV

SEQ ID NO: 147 - protein, 979 aa, synthetic construct
  REGION 1..979: note = CasX variant
QEIKRINKIRRRLVKDSNTKKAGKTGPMKTLLVRVMTPDLRERLENLRKKPENIPQPISNTSRANLNKLLTDYTEMKKAILHVYWEEFQKDPVGLMSRVAQPASKKIDQNKLKPEMDEKGNLTTAGFACSQCGQPLFVYKLEQVSEKGKAYTNYFGRCNVAEHEKLILLAQLKPEKDSDEAVTYSLGKFGQRALDFYSIHVTKESTHPVKPLAQIAGNRYASGPVGKALSDACMGTIASFLSKYQDIIIEHQKVVKGNQKRLESLRELAGKENLEYPSVTLPPQPHTKEGVDAYNEVIARVRMWVNLNLWQKLKLSRDDAKPLLRLKGFPSFPLVERQANEVDWWDMVCNVKKLINEKKEDGKVFWQNLAGYKRQEALRPYLSSEEDRKKGKKFARYQLGDLLLHLEKKHGEDWGKVYDEAWERIDKKVEGLSKHIKLEEERRSEDAQSKAALTDWLRAKASFVIEGLKEADKDEFCRCELKLQKWYGDLRGKPFAIEAENSILDISGFSKQYNCAFIWQKDGVKKLNLYLIINYFKGWGKLRFKKIKPEAFEANRFYTVINKKSGEIVPMEVNFNFDDPNLIILPLAFGKRQGREFIWNDLLSLETGSLKLANGRVIEKTLYNRRTRQDEPALFVALTFERREVLDSSNIKPMNLIGVDRGENIPAVIALTDPEGCPLSRFKDSLGNPTHILRIGESYKEKQRTIQAKKEVEQRRAGGYSRKYASKAKNLADDMVRNTARDLLYYAVTQDAMLIFENLSRGFGRQGKRTFMAERQYTRMEDWLTAKLAYEGLPSKTYLSKTLAQYTSKTCSNCGFTITSADYDRVLEKLKKTATGWMTTINGKELKVEGQITYYNRYKRQNVVKDLSVELDRLSEESVNNDISSWTKGRSGEALSLLKKRFSHRPVQEKFVCLNCGFETHADEQAALNIARSWLFLRSQEYKKYQTNKTTGNTDKRAFVETWQSFYRKKLKEVWKPAV

SEQ ID NO: 148 - protein, 979 aa, synthetic construct
  REGION 1..979: note = CasX variant
QEIKRINKIRRRLVKDSNTKKAGKTGPMKTLLVRVMTPDLRERLENLRKKPENIPQPISNTSRANLNKLLTDYTEMKKAILHVYWEEFQKDPVGLMSRVAQPASKKIDQNKLKPEMDEKGNLTTAGFACSQCGQPLFVYKLEQVSEKGKAYTNYFGRCNVAEHEKLILLAQLKPEKDSDEAVTYSLGKFGQRALDFYSIHVTKESTHPVKPLAQIAGNRYASGPVGKALSDACMGTIASFLSKYQDIIIEHQKVVKGNQKRLESLRELAGKENLEYPSVTLPPQPHTKEGVDAYNEVIARVRMWVNLNLWQKLKLSRDDAKPLLRLKGFPSFPLVERQANEVDWWDMVCNVKKLINEKKEDGKVFWQNLAGYKRQEALRPYLSSEEDRKKGKKFARYQLGDLLLHLEKKHGEDWGKVYDEAWERIDKKVEGLSKHIKLEEERRSEDAQSKAALTDWLRAKASFVIEGLKEADKDEFCRCELKLQKWYGDLRGKPFAIEAENSILDISGFSKQYNCAFIWQKDGVKKLNLYLIINYFKGYGKLRFKKIKPEAFEANRFYTVINKKSGEIVPMEVNFNFDDPNLIILPLAFGKRQGREFIWNDLLSLETGSLKLANGRVIEKTLYNRRTRQDEPALFVALTFERREVLDSSNIKPMNLIGVDRGENIPAVIALTDPEGCPLSRFKDSLGNPTHILRIGESYKEKQRTIQAKKEVEQRRAGGYSRKYASKAKNLADDMVRNTARDLLYYAVTQDAMLIFENLSRGFGRQGKRTFMAERQYTRMEDWLTAKLAYEGLPSKTYLSKTLAQYTSKTCSNCGFTITSADYDRVLEKLKKTATGWMTTINGKELKVEGQITYYNRYKRQNVVKDLSVELDRLSEESVNNDISSWTKGRSGEALSLLKKRFSHRPVQEKFVCLNCGFETHADEQAALNIARSWLFLRSQEYKKYQTNKTTGNTDKRAFVETWQSFYRKKLKEVWKPAV

SEQ ID NO: 149 - protein, 979 aa, synthetic construct
  REGION 1..979: note = CasX variant
QEIKRINKIRRRLVKDSNTKKAGKTRGPMKTLLVRVMTPDLRERLENLRKKPENIPQPISNTSRANLNKLLTDYTEMKKAILHVYWEEFQKDPVGLMSRVAQPASKKIDQNKLKPEMDEKGNLTTAGFACSQCGQPLFVYKLEQVSEKGKAYTNYFGRCNVAEHEKLILLAQLKPEKDSDEAVTYSLGKFGQRALDFYSIHVTKESTHPVKPLAQIAGNRYASGPVGKALSDACMGTIASFLSKYQDIIIEHQKVVKGNQKRLESLRELAGKENLEYPSVTLPPQPHTKEGVDAYNEVIARVRMWVNLNLWQKLKLSRDDAKPLLRLKGFPSFPLVERQANEVDWWDMVCNVKKLINEKKEDGKVFWQNLAGYKRQEALRPYLSSEEDRKKGKKFARYQLGDLLLHLEKKHGEDWGKVYDEAWERIDKKVEGLSKHIKLEEERRSEDAQSKAALTDWLRAKASFVIEGLKEADKDEFCRCELKLQKWYGDLRGKPFAIEAENSILDISGFSKQYNCAFIWQKDGVKKLNLYLIINYFKGGKLRFKKIKPEAFEANRFYTVINKKSGEIVPMEVNFNFDDPNLIILPLAFGKRQGREFIWNDLLSLETGSLKLANGRVIEKTLYNRRTRQDEPALFVALTFERREVLDSSNIKPMNLIGVDRGENIPAVIALTDPEGCPLSRFKDSLGNPTHILRIGESYKEKQRTIQAKKEVEQRRAGGYSRKYASKAKNLADDMVRNTARDLLYYAVTQDAMLIFENLSRGFGRQGKRTFMAERQYTRMEDWLTAKLAYEGLPSKTYLSKTLAQYTSKTCSNCGFTITSADYDRVLEKLKKTATGWMTTINGKELKVEGQITYYNRYKRQNVVKDLSVELDRLSEESVNNDISSWTKGRSGEALSLLKKRFSHRPVQEKFVCLNCGFETHADEQAALNIARSWLFLRSQEYKKYQTNKTTGNTDKRAFVETWQSFYRKKLKEVWKPAV

SEQ ID NO: 150 - protein, 979 aa, synthetic construct
  REGION 1..979: note = CasX variant
QEIKRINKIRRRLVKDSNTKKAGKTRGPMKTLLVRVMTPDLRERLENLRKKPENIPQPISNTSRANLNKLLTDYTEMKKAILHVYWEEFQKDPVGLMSRVAQPASKKIDQNKLKPEMDEKGNLTTAGFACSQCGQPLFVYKLEQVSEKGKAYTNYFGRCNVAEHEKLILLAQLKPEKDSDEAVTYSLGKFGQRALDFYSIHVTKESTHPVKPLAQIAGNRYASYPVGKALSDACMGTIASFLSKYQDIIIEHQKVVKGNQKRLESLRELAGKENLEYPSVTLPPQPHTKEGVDAYNEVIARVRMWVNLNLWQKLKLSRDDAKPLLRLKGFPSFPLVERQANEVDWWDMVCNVKKLINEKKEDGKVFWQNLAGYKRQEALRPYLSSEEDRKKGKKFARYQLGDLLLHLEKKHGEDWGKVYDEAWERIDKKVEGLSKHIKLEEERRSEDAQSKAALTDWLRAKASFVIEGLKEADKDEFCRCELKLQKWYGDLRGKPFAIEAENSILDISGFSKQYNCAFIWQKDGVKKLNLYLIINYFKGGKLRFKKIKPEAFEANRFYTVINKKSGEIVPMEVNFNFDDPNLIILPLAFGKRQGREFIWNDLLSLETGSLKLANGRVIEKTLYNRRTRQDEPALFVALTFERREVLDSSNIKPMNLIGVDRGENIPAVIALTDPEGCPLSRFKDSLGNPTHILRIGESYKEKQRTIQAKKEVEQRRAGGYSRKYASKAKNLADDMVRNTARDLLYYAVTQDAMLIFENLSRGFGRQGKRTFMAERQYTRMEDWLTAKLAYEGLPSKTYLSKTLAQYTSKTCSNCGFTITSADYDRVLEKLKKTATGWMTTINGKELKVEGQITYYNRYKRQNVVKDLSVELDRLSEESVNNDISSWTKGRSGEALSLLKKRFSHRPVQEKFVCLNCGFETHADEQAALNIARSWLFLRSQEYKKYQTNKTTGNTDKRAFVETWQSFYRKKLKEVWKPAV

SEQ ID NO: 151 - protein, 84 aa, unidentified
  REGION 1..84: note = chloroplast transit peptide
MASMISSSAVTTVSRASRGQSAAMAPFGGLKSMTGFPVRKVNTDITSITSNGGRVKCMQVWPPIGKKKFETLSYLPPLTRDSRA

SEQ ID NO: 152 - protein, 57 aa, unidentified
  REGION 1..57: note = chloroplast transit peptide
MASMISSSAVTTVSRASRGQSAAMAPFGGLKSMTGFPVRKVNTDITSITSNGGRVKS

SEQ ID NO: 153 - protein, 85 aa, unidentified
  REGION 1..85: note = chloroplast transit peptide
MASSMLSSATMVASPAQATMVAPFNGLKSSAAFPATRKANNDITSITSNGGRVNCMQVWPPIEKKKFETLSYLPDLTDSGGRVNC

SEQ ID NO: 154 - protein, 76 aa, unidentified
  REGION 1..76: note = chloroplast transit peptide
MAQVSRICNGVQNPSLISNLSKSSQRKSPLSVSLKTQQHPRAYPISSSWGLKKSGMTLIGSELRPLKVMSSVSTAC

SEQ ID NO: 155 - protein, 76 aa, unidentified
  REGION 1..76: note = chloroplast transit peptide
MAQVSRICNGVWNPSLISNLSKSSQRKSPLSVSLKTQQHPRAYPISSSWGLKKSGMTLIGSELRPLKVMSSVSTAC

SEQ ID NO: 156 - protein, 72 aa, unidentified
  REGION 1..72: note = chloroplast transit peptide
MAQINNMAQGIQTLNPNSNFHKPQVPKSSSFLVFGSKKLKNSANSMLVLKKDSIFMQLFCSFRISASVATAC

SEQ ID NO: 157 - protein, 69 aa, unidentified
  REGION 1..69: note = chloroplast transit peptide
MAALVTSQLATSGTVLSVTDRFRRPGFQGLRPRNPADAALGMRTVGASAAPKQSRKPHRFDRRCLSMVV

SEQ ID NO: 158 - protein, 77 aa, unidentified
  REGION 1..77: note = chloroplast transit peptide
MAALTTSQLATSATGFGIADRSAPSSLLRHGFQGLKPRSPAGGDATSLSVTTSARATPKQQRSVQRGSRRFPSVVVC

SEQ ID NO: 159 - protein, 57 aa, unidentified
  REGION 1..57: note = chloroplast transit peptide
MASSVLSSAAVATRSNVAQANMVAPFTGLKSAASFPVSRKQNLDITSIASNGGRVQC

SEQ ID NO: 160 - protein, 65 aa, unidentified
  REGION 1..65: note = chloroplast transit peptide
MESLAATSVFAPSRVAVPAARALVRAGTVVPTRRTSSTSGTSGVKCSAAVTPQASPVISRSAAAA

SEQ ID NO: 161 - protein, 72 aa, unidentified
  REGION 1..72: note = chloroplast transit peptide
MGAAATSMQSLKFSNRLVPPSRRLSPVPNNVTCNNLPKSAAPVRTVKCCASSWNSTINGAAATTNGASAASS

SEQ ID NO: 162 - protein, 20 aa, unidentified
  REGION 1..20: note = endosomal escape peptide
  SITE 4: note = MISC_FEATURE - Xaa is Lys, His or Arg
  SITE 8: note = MISC_FEATURE - Xaa is Lys, His or Arg
  SITE 11: note = MISC_FEATURE - Xaa is Lys, His or Arg
  SITE 15: note = MISC_FEATURE - Xaa is Lys, His or Arg
  SITE 19: note = MISC_FEATURE - Xaa is Lys, His or Arg
GLFXALLXLLXSLWXLLLXA

SEQ ID NO: 163 - protein, 20 aa, unidentified
  REGION 1..20: note = endosomal escape peptide
GLFHALLHLLHSLWHLLLHA

SEQ ID NO: 164 - protein, 9 aa, unidentified
  REGION 1..9: note = endosomal escape peptide
HHHHHHHHH

SEQ ID NO: 165 - protein, 7 aa, Betapolyomavirus macaca mulatta polyomavirus 1
PKKKRKV

SEQ ID NO: 166 - protein, 16 aa, unidentified
  REGION 1..16: note = nuclear localization signal
KRPAATKKAGQAKKKK

SEQ ID NO: 167 - protein, 9 aa, Homo sapiens
PAAKRVKLD

SEQ ID NO: 168 - protein, 11 aa, Homo sapiens
RQRRNELKRSP

SEQ ID NO: 169 - protein, 38 aa, unidentified
  REGION 1..38: note = nuclear localization signal
NQSSNFGPMKGGNFGGRSSGPYGGGGQYFAKPRNQGGY

SEQ ID NO: 170 - protein, 42 aa, unidentified
  REGION 1..42: note = nuclear localization signal
RMRIZFKNKGKDTAELRRRRVEVSVELRKAKKDEQILKRRNV

SEQ ID NO: 171 - protein, 8 aa, unidentified
  REGION 1..8: note = nuclear localization signal
VSRKRPRP

SEQ ID NO: 172 - protein, 8 aa, unidentified
  REGION 1..8: note = nuclear localization signal
PPKKARED

SEQ ID NO: 173 - protein, 8 aa, Homo sapiens
PQPKKKPL

SEQ ID NO: 174 - protein, 12 aa, Mus musculus
SALIKKKKKMAP

SEQ ID NO: 175 - protein, 5 aa, Alphainfluenzavirus influenza A virus
DRLRR

SEQ ID NO: 176 - protein, 7 aa, Alphainfluenzavirus influenza A virus
PKQKKRK

SEQ ID NO: 177 - protein, 10 aa, Deltavirushepatitis delta virus
RKLKKKIKKL

SEQ ID NO: 178 - protein, 10 aa, Mus musculus
REKKKFLKRR

SEQ ID NO: 179 - protein, 20 aa, Homo sapiens
KRKGDEVDGVDEVAKKKSKK

SEQ ID NO: 180 - protein, 17 aa, Homo sapiens
RKCLQAGMNLEARKTKK

SEQ ID NO: 181 - protein, 8 aa, Orthobornavirus mammalian 1 orthobornavirus
PRPRKIPR

SEQ ID NO: 182 - protein, 9 aa, Hepacivirus hepacivirus C
PPRKKRTVV

SEQ ID NO: 183 - protein, 12 aa, unidentified
  REGION 1..12: note = nuclear localization signal
NLSKKKKRKREK

SEQ ID NO: 184 - protein, 10 aa, unidentified
  REGION 1..10: note = nuclear localization signal
RRPSRPFRKP

SEQ ID NO: 185 - protein, 8 aa, Lymphocryptovirus human gammaherpesvirus 4
KRPRSPSS

SEQ ID NO: 186 - protein, 19 aa, Alphainfluenzavirus influenza A virus
KRGINDRNFWRGENERKTR

SEQ ID NO: 187 - protein, 11 aa, Homo sapiens
PRPPKMARYDN

SEQ ID NO: 188 - protein, 8 aa, unidentified
  REGION 1..8: note = nuclear localization signal
KRSFSKAF

SEQ ID NO: 189 - protein, 9 aa, unidentified
  REGION 1..9: note = nuclear localization signal
KLKIKRPVK

SEQ ID NO: 190 - protein, 19 aa, unidentified
  REGION 1..19: note = nuclear localization signal
PKKKRKVPPPPAAKRVKLD

SEQ ID NO: 191 - protein, 17 aa, Deltaretrovirus human T-lymphotropic virus 1
PKTRRRPRRSQRKRPPT

SEQ ID NO: 192 - protein, 25 aa, Caenorhabditis elegans
MSRRRKANPTKLSENAKKLAKEVEN

SEQ ID NO: 193 - protein, 16 aa, unidentified
  REGION 1..16: note = nuclear localization signal
KTRRRPRRSQRKRPPT

SEQ ID NO: 194 - protein, 13 aa, unidentified
  REGION 1..13: note = nuclear localization signal
RRKKRRPRRKKRR

SEQ ID NO: 195 - protein, 14 aa, unidentified
  REGION 1..14: note = nuclear localization signal
PKKKSRKPKKKSRK

SEQ ID NO: 196 - protein, 17 aa, unidentified
  REGION 1..17: note = nuclear localization signal
HKKKHPDASVNFSEFSK

SEQ ID NO: 197 - protein, 18 aa, unidentified
  REGION 1..18: note = nuclear localization signal
QRPGPYDRPQRPGPYDRP

SEQ ID NO: 198 - protein, 16 aa, unidentified
  REGION 1..16: note = nuclear localization signal
LSPSLSPLLSPSLSPL

SEQ ID NO: 199 - protein, 18 aa, unidentified
  REGION 1..18: note = nuclear localization signal
RGKGGKGLGKGGAKRHRK

SEQ ID NO: 200 - protein, 14 aa, unidentified
  REGION 1..14: note = nuclear localization signal
PKRGRGRPKRGRGR

SEQ ID NO: 201 - protein, 17 aa, unidentified
  REGION 1..17: note = nuclear localization signal
PKKKRKVPPPPKKKRKV

SEQ ID NO: 202 - protein, 11 aa, unidentified
  REGION 1..11: note = nuclear localization signal
PAKRARRGYKC

SEQ ID NO: 203 - protein, 11 aa, unidentified
  REGION 1..11: note = nuclear localization signal
KLGPRKATGRW

SEQ ID NO: 204 - protein, 7 aa, unidentified
  REGION 1..7: note = nuclear localization signal
PRRKREE

SEQ ID NO: 205 - protein, 11 aa, Human immunodeficiency virus 1
YGRKKRRQRRR

SEQ ID NO: 206 - protein, 8 aa, Human immunodeficiency virus 1
RKKRRQRR

SEQ ID NO: 207 - protein, 11 aa, Human immunodeficiency virus 1
YARAAARQARA

SEQ ID NO: 208 - protein, 11 aa, Human immunodeficiency virus 1
THRLPRRRRRR

SEQ ID NO: 209 - protein, 11 aa, Human immunodeficiency virus 1
GGRRARRRRRR

SEQ ID NO: 210 - protein, 50 aa, synthetic construct
  REGION 1..50: note = peptide transduction domain
  REGION 4..50: note = MISC_FEATURE - These individual amino acid residues may be present or absent
RRRRRRRRRRRRRRRRRRRRRRRRRRRRRRRRRRRRRRRRRRRRRRRRRR

SEQ ID NO: 211 - protein, 12 aa, synthetic construct
  REGION 1..12: note = peptide transduction domain
RRQRRTSKLMKR

SEQ ID NO: 212 - protein, 27 aa, synthetic construct
  REGION 1..27: note = peptide transduction domain
GWTLNSAGYLLGKINLKALAALAKKIL

SEQ ID NO: 213 - protein, 33 aa, synthetic construct
  REGION 1..33: note = peptide transduction domain
KALAWEAKLAKALAKALAKHLAKALAKALKCEA

SEQ ID NO: 214 - protein, 16 aa, synthetic construct
  REGION 1..16: note = peptide transduction domain
RQIKIWFQNRRMKWKK

SEQ ID NO: 215 - protein, 5 aa, synthetic construct
  REGION 1..5: note = linker
GSGGS

SEQ ID NO: 216 - protein, 6 aa, synthetic construct
  REGION 1..6: note = linker
GGSGGS

SEQ ID NO: 217 - protein, 4 aa, synthetic construct
  REGION 1..4: note = linker
GGGS

SEQ ID NO: 218 - protein, 4 aa, synthetic construct
  REGION 1..4: note = linker
GGSG

SEQ ID NO: 219 - protein, 5 aa, synthetic construct
  REGION 1..5: note = linker
GGSGG

SEQ ID NO: 220 - protein, 5 aa, synthetic construct
  REGION 1..5: note = linker
GSGSG

SEQ ID NO: 221 - protein, 5 aa, synthetic construct
  REGION 1..5: note = linker
GSGGG

SEQ ID NO: 222 - protein, 5 aa, synthetic construct
  REGION 1..5: note = linker
GGGSG

SEQ ID NO: 223 - protein, 5 aa, synthetic construct
  REGION 1..5: note = linker
GSSSG

SEQ ID NO: 224 - protein, 4 aa, synthetic construct
  REGION 1..4: note = linker
GPGP

SEQ ID NO: 225 - protein, 6 aa, synthetic construct
  REGION 1..6: note = linker
PPAPPA

SEQ ID NO: 226 - protein, 7 aa, synthetic construct
  REGION 1..7: note = linker
PPPGPPP

SEQ ID NO: 227 - protein, 481 aa, Homo sapiens
MSTLCPPPSPAVAKTEIALSGKSPLLAATFAYWDNILGPRVRHIWAPKTEQVLLSDGEITFLANHTLNGEILRNAESGAIDVKFFVLSEKGVIIVSLIFDGNWNGDRSTYGLSIILPQTELSFYLPLHRVCVDRLTHIIRKGRIWMHKERQENVQKIILEGTERMEDQGQSIIPMLTGEVIPVMELLSSMKSHSVPEEIDIADTVLNDDDIGDSCHEGFLLNAISSHLQTCGCSVVVGSSAEKVNKIVRTLCLFLTPAERKCSRLCEAESSFKYESGLFVQGLLKDSTGSFVLPFRQVMYAPYPTTHIDVDVNTVKQMPPCHEHIYNQRRYMRSELTAFWRATSEEDMAQDTIIYTDESFTPDLNIFQDVLHRDTLVKAFLDQVFQLKPGLSLRSTFLAQFLLVLHRKALTLIKYIEDDTQKGKKPFKSLRNLKIDLDLTAEGDLNIIMALAEKIKPGLHSFIFGRPFYTSVQERDVLMTF

SEQ ID NO: 228 - protein, 222 aa, Homo sapiens
MSTLCPPPSPAVAKTEIALSGKSPLLAATFAYWDNILGPRVRHIWAPKTEQVLLSDGEITFLANHTLNGEILRNAESGAIDVKFFVLSEKGVIIVSLIFDGNWNGDRSTYGLSIILPQTELSFYLPLHRVCVDRLTHIIRKGRIWMHKERQENVQKIILEGTERMEDQGQSIIPMLTGEVIPVMELLSSMKSHSVPEEIDIADTVLNDDDIGDSCHEGFLLK

SEQ ID NO: 229 - DNA, 3120 bp, synthetic construct
  misc_feature 1..3120: note = SV40 NLS-CasX-SV40 NLS-TEV cleavage site - TwinStrep tag
  source 1..3120: mol_type = other DNA
atggctccgaagaagaagcgaaaggtcagccaggaaattaaacgcatcaacaagatccgccgtcgtctggtaaaagacagcaatacgaaaaaagccggaaaaaccggtccgatgaaaacgctgctggtgcgcgtgatgacgccggatctccgcgaacgtcttgagaatttgcgtaagaaacctgaaaatattccgcaaccgatttctaacacctcgcgcgccaatctgaataaactgctgaccgattacaccgaaatgaagaaagcgattctgcacgtttactgggaagagttccagaaagacccggtcggtctgatgagccgcgttgcgcaacctgcgccgaaaaatatcgatcagcgcaagttaatcccggttaaagatggtaatgaacgtttaacctccagcggctttgcctgcagtcagtgctgccagccactttatgtttataaacttgaacaggttaacgataaagggaaaccccataccaattatttcggccgctgcaatgtcagcgaacatgaacgcctgattttgttaagcccgcataaaccggaagcgaatgacgaactggtgacctattccctgggtaaatttggtcagcgggcgctggatttttacagcattcatgtgacgcgggaaagtaaccatccggtaaagccactggaacaaatcggcggtaacagctgcgcctctggcccggttggcaaagcgcttagcgatgcctgtatgggcgcggtggcgagctttctgacaaaataccaggatattatcctggagcatcagaaggtgatcaaaaagaacgagaaacgtctggcaaatttaaaggatattgcctccgctaacggcctggcgttcccgaagattaccttaccgccgcagccgcacaccaaagaaggtatcgaagcgtataacaacgttgttgcccagatcgtcatctgggtgaatctcaacctgtggcaaaaactgaaaattggtcgtgatgaagcaaaaccgttgcagcgactgaaaggattcccgtcgtttccgctggttgaacgacaggcgaacgaagtggattggtgggatatggtttgtaacgtcaaaaaattgatcaacgaaaaaaaggaagatggcaaagttttctggcaaaatctggcgggttacaaacgtcaggaggcgttgcttccgtatctctcttcagaagaagatcgcaaaaaaggcaagaagtttgctcgctatcagtttggcgatttattactgcatctggaaaaaaaacacggcgaagactggggcaaagtgtacgatgaagcctgggagcgtatcgacaaaaaagtggaaggtttgtcgaaacatattaaactcgaagaagagcgccgcagtgaagatgcgcagtcaaaagcagcgctgacggactggttacgtgcgaaagccagttttgtgattgaaggattaaaagaagctgataaagatgaattttgccgttgcgaactgaaactgcaaaaatggtatggcgacctgcgcggcaaaccgttcgccattgaggcagaaaatagcatccttgatatctccggtttcagcaaacaatataactgcgcgtttatttggcagaaagacggcgtgaaaaagcttaacctgtatctgatcattaactattttaaaggcgggaaactgcgtttcaagaaaatcaagccggaagcatttgaagccaatcgtttttataccgttattaataaaaaaagcggtgaaatcgtgccgatggaagttaattttaactttgatgatccgaacttgattattctgccgctggcattcggtaaacggcagggccgtgagtttatctggaacgacctgttatcgctggaaacgggcagcctgaaattagccaacggtcgcgtcattgaaaaaacgctctacaaccgccgcacccgccaggatgagccggcactgtttgtcgcgctgacctttgaacggcgtgaagtcctcgatagcagcaacatcaaaccaatgaaccttatcggtattgatcgtggtgaaaacattcctgccgttatcgccctgactgatccagaaggctgcccgctttctcgcttcaaagattcactgggcaacccgacccatatcctccgtattggcgagagctacaaagagaaacagcgtaccattcaggcagccaaagaagtggagcagcgtcgcgcgggcggctatagccgtaaatatgccagcaaagctaaaaacctggcggatgacatggtgcgtaacacggcgcgcgatttgctgtactacgccgtcacccaggacgcgatgctgatttttgagaacctctcccgcggttttgggcgtcagggtaaacgcacgtttatggcggaacgccagtatacgcgtatggaggactggctgaccgcgaagctggcctatgaaggcttgccgtctaaaacttacctgagcaagaccctggctcagtacaccagtaaaacctgtagtaattgcggctttaccatcaccagcgccgattatgaccgcgtgctggaaaagctgaagaaaaccgccaccggctggatgaccaccatcaatggtaaagagcttaaagtcgaagggcagattacttattacaaccgttataagcggcaaaacgtggtgaaagatctgtcggttgagctggaccgtttgtctgaagaaagcgtgaacaatgatatcagctcctggaccaaaggtcgttccggcgaagcgttaagtctgttgaaaaagcgctttagccatcgcccggtgcaggaaaaattcgtttgcctgaactgtggcttcgaaacccacgccgacgagcaagcggcgctcaatattgcgcgtagctggctgttcctgcgcagccaggaatataaaaaatatcaaaccaacaaaacaactggcaataccgacaagcgtgcctttgttgaaacctggcagagcttctatcgcaaaaaactgaaagaggtctggaaaccggcggtagcgccaaagaaaaaacgcaaagtgagcgaaaatctttattttcaaggtagcgcatggagtcatcctcaattcgagaaaggtggaggttctggcggtggatcgggaggttcagcgtggagccacccgcagttcgaaaaaggaaggggatccggctgctaa

SEQ ID NO: 230 - DNA, 3123 bp, synthetic construct
  misc_feature 1..3123: note = CasX variant
  source 1..3123: mol_type = other DNA
atggctccgaagaagaagcgaaaggtcagccaggaaattaaacgcatcaacaagatccgccgtcgtctggtaaaagacagcaatacgaaaaaagccggaaaaaccggtccgatgaaaacgctgctggtgcgcgtgatgacgccggatctccgcgaacgtcttgagaatttgcgtaagaaacctgaaaatattccgcaaccgatttctaacacctcgcgcgccaatctgaataaactgctgaccgattacaccgaaatgaagaaagcgattctgcacgtttactgggaagagttccagaaagacccggtcggtctgatgagccgcgttgcgcaacctgcgccgaaaaatatcgatcagcgcaagttaatcccggttaaagatggtaatgaacgtttaacctccagcggctttgcctgcagtcagtgctgccagccactttatgtttataaacttgaacaggttaacgataaagggaaaccccataccaattatttcggccgctgcaatgtcagcgaacatgaacgcctgattttgttaagcccgcataaaccggaagcgaatgacgaactggtgacctattccctgggtaaatttggtcagcgggcgctggatttttacagcattcatgtgacgcgggaaagtaaccatccggtaaagccactggaacaaatcggcggtaacagctgcgcctctggcccggttggcaaagcgcttagcgatgcctgtatgggcgcggtggcgagctttctgacaaaataccaggatattatcctggagcatcagaaggtgatcaaaaagaacgagaaacgtctggcaaatttaaaggatattgcctccgctaacggcctggcgttcccgaagattaccttaccgccgcagccgcacaccaaagaaggtatcgaagcgtataacaacgttgttgcccagatcgtcatctgggtgaatctcaacctgtggcaaaaactgaaaattggtcgtgatgaagcaaaaccgttgcagcgactgaaaggattcccgtcgtttccgctggttgaacgacaggcgaacgaagtggattggtgggatatggtttgtaacgtcaaaaaattgatcaacgaaaaaaaggaagatggcaaagttttctggcaaaatctggcgggttacaaacgtcaggaggcgttgcgtccgtatctctcttcagaagaagatcgcaaaaaaggcaagaagtttgctcgctatcagtttggcgatttattactgcatctggaaaaaaaacacggcgaagactggggcaaagtgtacgatgaagcctgggagcgtatcgacaaaaaagtggaaggtttgtcgaaacatattaaactcgaagaagagcgccgcagtgaagatgcgcagtcaaaagcagcgctgacggactggttacgtgcgaaagccagttttgtgattgaaggattaaaagaagctgataaagatgaattttgccgttgcgaactgaaactgcaaaaatggtatggcgacctgcgcggcaaaccgttcgccattgaggcagaaaatagcatccttgatatctccggtttcagcaaacaatataactgcgcgtttatttggcagaaagacggcgtgaaaaagcttaacctgtatctgatcattaactattttaaaggcgggaaactgcgtttcaagaaaatcaagccggaagcatttgaagccaatcgtttttataccgttattaataaaaaaagcggtgaaatcgtgccgatggaagttaattttaactttgatgatccgaacttgattattctgccgctggcattcggtaaacggcagggccgtgagtttatctggaacgacctgttatcgctggaaacgggcagcctgaaattagccaacggtcgcgtcattgaaaaaacgctctacaaccgccgcacccgccaggatgagccggcactgtttgtcgcgctgacctttgaacggcgtgaagtcctcgatagcagcaacatcaaaccaatgaaccttatcggtattgatcgtggtgaaaacattcctgccgttatcgccctgactgatccagaaggctgcccgctttctcgcttcaaagattcactgggcaacccgacccatatcctccgtattggcgagagctacaaagagaaacagcgtaccattcaggcaaagaaagaagtggagcagcgtcgcgcgggcggctatagccgtaaatatgccagcaaagctaaaaacctggcggatgacatggtgcgtaacacggcgcgcgatttgctgtactacgccgtcacccaggacgcgatgctgatttttgagaacctctcccgcggttttgggcgtcagggtaaacgcacgtttatggcggaacgccagtatacgcgtatggaggactggctgaccgcgaagctggcctatgaaggcttgtctaaaacttacctgagcaagaccctggctcagtacaccagtaaaacctgtagtaattgcggctttaccatcaccagcgccgattatgaccgcgtgctggaaaagctgaagaaaaccgccaccggctggatgaccaccatcaatggtaaagagcttaaagtcgaagggcagattacttattacaaccgttataagcggcaaaacgtggtgaaagatctgtcggttgagctggaccgtttgtctgaagaaagcgtgaacaatgatatcagctcctggaccaaaggtcgttccggcgaagcgttaagtctgttgaaaaagcgctttagccatcgcccggtgcaggaaaaattcgtttgcctgaactgtggcttcgaaacccacgccgacgagcaagcggcgctcaatattgcgcgtagctggctgttcctgcgcagccaggaatataaaaaatatcaaaccaacaaaacaactggcaataccgacaagcgtgcctttgttgaaacctggcagagcttctatcgcaagaagctgaaagaggtctggaaaccggcggtaccacctgcgccaaagaaaaaacgcaaagtgagcgaaaatctttattttcaaggtagcgcatggagtcatcctcaattcgagaaaggtggaggttctggcggtggatcgggaggttcagcgtggagccacccgcagttcgaaaaaggaaggggatccggctgctaa

SEQ ID NO: 231 - DNA, 2928 bp, synthetic construct
  misc_feature 1..2928: note = CasX variant
  source 1..2928: mol_type = other DNA
caagagatcaagagaatcaacaagatcagaaggagactggtcaaggacagcaacacaaagaaggccggcaagacaggccccatgaaaaccctgctcgtcagagtgatgacccctgacctgagagagcggctggaaaacctgagaaagaagcccgagaacatccctcagcctatcagcaacaccagcagggccaacctgaacaagctgctgaccgactacaccgagatgaagaaagccatcctgcacgtgtactgggaagagttccagaaagaccccgtgggcctgatgagcagagttgctcagcccgctcctaagaacatcgaccagagaaagctgatccccgtgaaggacggcaacgagagactgacctctagcggctttgcctgcagccagtgttgccagcctctgtacgtgtacaagctggaacaagtgaacgacaagggcaagccccacaccaactacttcggcagatgcaacgtgtccgagcacgagaggctgatcctgctgtctcctcacaagcccgaggccaacgatgagctggtcacatacagcctgggcaagttcggacagagagccctggacttctacagcatccacgtgaccagggagagcaatcaccctgtgaagcccctggaacagatcggcggcaatagctgtgcctctggacctgtgggaaaagccctgagcgacgcctgtatgggagccgtggcatccttcctgaccaagtaccaggacatcatcctggaacacaagaaagtgatcaagaagaacgagaaaagactggccaacctcaaggatatcgccagcgctaacggcctggcctttcctaagatcaccctgcctccacagcctcacaccaaagagggcatcgaggcctacaacaacgtggtggcccagatcgtgatttgggtcaacctgaatctgtggcagaagctgaagatcggcagggacgaagccaagccactgcagagactgaagggcttccctagcttccctctggtggaaagacaggccaatgaagtggattggtgggacatggtctgcaacgtgaagaagctgatcaacgagaagaaagaggatggcaaggttttctggcagaacctggccggctacaagagacaagaagccctgaggccttacctgagcagccccgaggaccggaagaagggcaagaagttcgccagataccagctgggcgacctgctgctgcacctggaaaagaagcacggcgaggactggggcaaagtgtacgatgaggcctgggagagaatcgacaagaaggtggaaggcctgagcaagcacattaagctggaagaggaaagaaggagcgaggacgcccaatctaaagccgctctgaccgattggctgagagccaaggccagctttgtgatcgagggcctgaaagaggccgacaaggacgagttctgcagatgcgagctgaagctgcagaagtggtacggcgatctgagaggcaagcccttcgccattgaggccgagaacagcatcctggacatcagcggcttcagcaagcagtacaactgcgccttcatttggcagaaagacggcgtcaagaaactgaacctgtacctgatcatcaattacttcaaaggcggcaagctgcggttcaagaagatcaaacccgaggccttcgaggctaacagattctacaccgtgatcaacaaaaagtccggcgagatcgtgcccatggaagtgaacttcaacttcgacgaccccaacctgattatcctgcctctggccttcggcaagagacagggcagagagttcatctggaacgatctgctgagcctggaaaccggctctctgaagctggccaatggcagagtgatcgagaaacccctgtacaacaggagaaccagacaggacgagcctgctctgtttgtggccctgaccttcgagagaagagaggtgctggacagcagcaacatcaagcccatgaacctgatcggcgtggaccggggcgagaatatccctgctgtgatcgccctgacagaccctgaaggatgcccactgagcagattcaaggactccctgggcaaccctacacacatcctgagaatcggcgagagctacaaagagaagcagaggacaatccaggccaagaaagaggtggaacagagaagagccggcggatactctaggaagtacgccagcaaggccaagaatctggccgacgacatggtccgaaacaccgccagagatctgctgtactacgccgtgacacaggacgccatgctgatcttcgagaatctgagcagaggcttcggccggcagggcaagagaacctttatggccgagaggcagtacaccagaatggaagattggctcacagctaaactggcctacgagggactgagcaagacctacctgtccaaaacactggcccagtatacctccaagacctgcagcaattgcggcttcaccatcaccagcgccgactacgacagagtgctggaaaagctcaagaaaaccgccaccggctggatgaccaccatcaacggcaaagagctgaaggttgagggccagatcacctactacaacaggaggaagaggcagaacgtcgtgaaggatctgagcgtggaactggacagactgagcgaagagagcgtgaacaacgacatcagcagctggacaaagggcagatcaggcgaggctctgagcctgctgaagaagaggtttagccacagacctgtgcaagagaagttcgtgtgcctgaactgcggcttcgagacacacgccgatgaacaggctgccctgaacattgccagaagctggctgttcctgagaagccaagagtacaagaagtaccagaccaacaagaccaccggcaacaccgacaagagggcctttgtggaaacctggcagagcttctacagaaaaaagctgaaagaagtctggaagcccgccgtg

SEQ ID NO: 232 - DNA, 2928 bp, synthetic construct
  misc_feature 1..2928: note = CasX variant
  source 1..2928: mol_type = other DNA
caagagatcaagagaatcaacaagatcagaaggagactggtcaaggacagcaacacaaagaaggccggcaagacaggccccatgaaaaccctgctcgtcagagtgatgacccctgacctgagagagcggctggaaaacctgagaaagaagcccgagaacatccctcagcctatcagcaacaccagcagggccaacctgaacaagctgctgaccgactacaccgagatgaagaaagccatcctgcacgtgtactgggaagagttccagaaagaccccgtgggcctgatgagcagagttgctcagcccgctcctaagaacatcgaccagagaaagctgatccccgtgaaggacggcaacgagagactgacctctagcggctttgcctgcagccagtgttgccagcctctgtacgtgtacaagctggaacaagtgaacgacaagggcaagccccacaccaactacttcggcagatgcaacgtgtccgagcacgagaggctgatcctgctgtctcctcacaagcccgaggccaacgatgagctggtcacatacagcctgggcaagttcggacagagagccctggacttctacagcatccacgtgaccagggagagcaatcaccctgtgaagcccctggaacagatcggcggcaatagctgtgcctctggacctgtgggaaaagccctgagcgacgcctgtatgggagccgtggcatccttcctgaccaagtaccaggacatcatcctggaacaccagaaagtgatcaagaagaacgagaaaagactggccaacctcaaggatatcgccagcgctaacggcctggcctttcctaagatcaccctgcctccacagcctcacaccaaagagggcatcgaggcctacaacaacgtggtggcccagatcgtgatttgggtcaacctgaatctgtggcagaagctgaagatcggcagggacgaagccaagccactgcagagactgaagggcttccctagcttccctctggtggaaagacaggccaatgaagtggattggtgggacatggtctgcaacgtgaagaagctgatcaacgagaagaaagaggatggcaaggttttctggcagaacctggccggctacaagagacaagaagccctgaggccttacctgagcagcgaagaggaccggaagaagggcaagaagttcgccagataccagctgggcgacctgctgaagcacctggaaaagaagcacggcgaggactggggcaaagtgtacgatgaggcctgggagagaatcgacaagaaggtggaaggcctgagcaagcacattaagctggaagaggaaagaaggagcgaggacgcccaatctaaagccgctctgaccgattggctgagagccaaggccagctttgtgatcgagggcctgaaagaggccgacaaggacgagttctgcagatgcgagctgaagctgcagaagtggtacggcgatctgagaggcaagcccttcgccattgaggccgagaacagcatcctggacatcagcggcttcagcaagcagtacaactgcgccttcatttggcagaaagacggcgtcaagaaactgaacctgtacctgatcatcaattacttcaaaggcggcaagctgcggttcaagaagatcaaacccgaggccttcgaggctaacagattctacaccgtgatcaacaaaaagtccggcgagatcgtgcccatggaagtgaacttcaacttcgacgaccccaacctgattatcctgcctctggccttcggcaagagacagggcagagagttcatctggaacgatctgctgagcctggaaaccggctctctgaagctggccaatggcagagtgatcgagaaaaccctgtacaacaggagaaccagacaggacgagcctgctctgtttgtggccctgaccttcgagagaagagaggtgctggacagcagcaacatcaagcccatgaacctgatcggcgtggaccggggcgagaatatccctgctgtgatcgccctgacagaccctgaaggatgcccactgagcagattcaaggactccctgggcaaccctacacacatcctgagaatcggcgagagctacaaagagaagcagaggacaatccaggccaagaaagaggtggaacagagaagagccggcggatactctaggaagtacgccagcaaggccaagaatctggccgacgacatggtccgaaacaccgccagagatctgctgtactacgccgtgacacaggacgccatgctgatcttcgagaatctgagcagaggcttcggccggcagggcaagagaacctttatggccgagaggcagtacaccagaatggaagattggctcacagctaaactggcctacgagggactgagcaagacctacctgtccaaaacactggcccagtatacctccaagacctgcagcaattgcggcttcaccatcaccagcgccgactacgacagagtgctggaaaagctcaagaaaaccgccaccggctggatgaccaccatcaacggcaaagagctgaaggttgagggccagatcacctactacaacaggaggaagaggcagaacgtcgtgaaggatctgagcgtggaactggacagactgagcgaagagagcgtgaacaacgacatcagcagctggacaaagggcagatcaggcgaggctctgagcctgctgaagaagaggtttagccacagacctgtgcaagagaagttcgtgtgcctgaactgcggcttcgagacacacgccgatgaacaggctgccctgaacattgccagaagctggctgttcctgagaagccaagagtacaagaagtaccagaccaacaagaccaccggcaacaccgacaagagggcctttgtggaaacctggcagagcttctacagaaaaaagctgaaagaagtctggaagcccgccgtg

SEQ ID NO: 233 - protein, 976 aa, synthetic construct; identical to SEQ ID NO: 117
  REGION 1..976: note = CasX variant

SEQ ID NO: 234 - protein, 976 aa, synthetic construct
  REGION 1..976: note = CasX variant
QEIKRINKIRRRLVKDSNTKKAGKTGPMKTLLVRVMTPDLRERLENLRKKPENIPQPISNTSRANLNKLLTDYTEMKKAILHVYWEEFQKDPVGLMSRVAQPAPKNIDQRKLIPVKDGNERLTSSGFACSQCCQPLYVYKLEQVNDKGKPHTNYFGRCNVSEHERLILLSPHKPEANDELVTYSLGKFGQRALDFYSIHVTRESNHPVKPLEQIGGNSCASGPVGKALSDACMGAVASFLTKYQDIILEHKKVIKKNEKRLANLKDIASANGLAFPKITLPPQPHTKEGIEAYNNVVAQIVIWVNLNLWQKLKIGRDEAKPLQRLKGFPSFPLVERQANEVDWWDMVCNVKKLINEKKEDGKVFWQNLAGYKRQEALRPYLSSPEDRKKGKKFARYQLGDLLLHLEKKHGEDWGKVYDEAWERIDKKVEGLSKHIKLEEERRSEDAQSKAALTDWLRAKASFVIEGLKEADKDEFCRCELKLQKWYGDLRGKPFAIEAENSILDISGFSKQYNCAFIWQKDGVKKLNLYLIINYFKGGKLRFKKIKPEAFEANRFYTVINKKSGEIVPMEVNFNFDDPNLIILPLAFGKRQGREFIWNDLLSLETGSLKLANGRVIEKPLYNRRTRQDEPALFVALTFERREVLDSSNIKPMNLIGVDRGENIPAVIALTDPEGCPLSRFKDSLGNPTHILRIGESYKEKQRTIQAKKEVEQRRAGGYSRKYASKAKNLADDMVRNTARDLLYYAVTQDAMLIFENLSRGFGRQGKRTFMAERQYTRMEDWLTAKLAYEGLSKTYLSKTLAQYTSKTCSNCGFTITSADYDRVLEKLKKTATGWMTTINGKELKVEGQITYYNRRKRQNVVKDLSVELDRLSEESVNNDISSWTKGRSGEALSLLKKRFSHRPVQEKFVCLNCGFETHADEQAALNIARSWLFLRSQEYKKYQTNKTTGNTDKRAFVETWQSFYRKKLKEVWKPAV

SEQ ID NO: 235 - protein, 976 aa, synthetic construct
  REGION 1..976: note = CasX variant
QEIKRINKIRRRLVKDSNTKKAGKTGPMKTLLVRVMTPDLRERLENLRKKPENIPQPISNTSRANLNKLLTDYTEMKKAILHVYWEEFQKDPVGLMSRVAQPAPKNIDQRKLIPVKDGNERLTSSGFACSQCCQPLYVYKLEQVNDKGKPHTNYFGRCNVSEHERLILLSPHKPEANDELVTYSLGKFGQRALDFYSIHVTRESNHPVKPLEQIGGNSCASGPVGKALSDACMGAVASFLTKYQDIILEHQKVIKKNEKRLANLKDIASANGLAFPKITLPPQPHTKEGIEAYNNVVAQIVIWVNLNLWQKLKIGRDEAKPLQRLKGFPSFPLVERQANEVDWWDMVCNVKKLINEKKEDGKVFWQNLAGYKRQEALRPYLSSEEDRKKGKKFARYQLGDLLKHLEKKHGEDWGKVYDEAWERIDKKVEGLSKHIKLEEERRSEDAQSKAALTDWLRAKASFVIEGLKEADKDEFCRCELKLQKWYGDLRGKPFAIEAENSILDISGFSKQYNCAFIWQKDGVKKLNLYLIINYFKGGKLRFKKIKPEAFEANRFYTVINKKSGEIVPMEVNFNFDDPNLIILPLAFGKRQGREFIWNDLLSLETGSLKLANGRVIEKTLYNRRTRQDEPALFVALTFERREVLDSSNIKPMNLIGVDRGENIPAVIALTDPEGCPLSRFKDSLGNPTHILRIGESYKEKQRTIQAKKEVEQRRAGGYSRKYASKAKNLADDMVRNTARDLLYYAVTQDAMLIFENLSRGFGRQGKRTFMAERQYTRMEDWLTAKLAYEGLSKTYLSKTLAQYTSKTCSNCGFTITSADYDRVLEKLKKTATGWMTTINGKELKVEGQITYYNRRKRQNVVKDLSVELDRLSEESVNNDISSWTKGRSGEALSLLKKRFSHRPVQEKFVCLNCGFETHADEQAALNIARSWLFLRSQEYKKYQTNKTTGNTDKRAFVETWQSFYRKKLKEVWKPAV

SEQ ID NO: 236 - DNA, 2931 bp, synthetic construct
  misc_feature 1..2931: note = CasX variant 488
  source 1..2931: mol_type = other DNA
caagagatcaagagaatcaacaagatcagaaggagactggtcaaggacagcaacacaaagaaggccggcaagacaggccccatgaaaaccctgctcgtcagagtgatgacccctgacctgagagagcggctggaaaacctgagaaagaagcccgagaacatccctcagcctatcagcaacaccagcagggccaacctgaacaagctgctgaccgactacaccgagatgaagaaagccatcctgcacgtgtactgggaagagttccagaaagaccccgtgggcctgatgagcagagttgctcagcctgccagcaagaagatcgaccagaacaagctgaagcccgagatggacgagaagggcaatctgaccacagccggctttgcctgctctcagtgtggccagcctctgttcgtgtacaagctggaacaggtgtccgagaaaggcaaggcctacaccaactacttcggcagatgtaacgtggccgagcacgagaagctgattctgctggcccagctgaaacctgagaaggactctgatgaggccgtgacctacagcctgggcaagtttggacagagagccctggacttctacagcatccacgtgaccaaagaaagcacacaccccgtgaagcccctggctcagatcgccggcaatagatacgcctctggacctgtgggcaaagccctgtccgatgcctgcatgggaacaatcgccagcttcctgagcaagtaccaggacatcatcatcgagcaccagaaggtggtcaagggcaaccagaagagactggaaagcctgagggagctggccggcaaagagaacctggaataccccagcgtgaccctgcctcctcagcctcacacaaaagaaggcgtggacgcctacaacgaagtgatcgccagagtgagaatgtgggtcaacctgaacctgtggcagaagctgaaactgtccagggacgacgccaagcctctgctgagactgaagggcttccctagcttccctctggtggaaagacaggccaatgaagtggattggtgggacatggtctgcaacgtgaagaagctgatcaacgagaagaaagaggatggcaaggttttctggcagaacctggccggctacaagagacaagaagccctgaggccttacctgagcagcgaagaggaccggaagaagggcaagaagttcgccagataccagttcggcgacctgctgctgcacctggaaaagaagcacggcgaggactggggcaaagtgtacgatgaggcctgggagagaatcgacaagaaggtggaaggcctgagcaagcacattaagctggaagaggaaagaaggagcgaggacgcccaatctaaagccgctctgaccgattggctgagagccaaggccagctttgtgatcgagggcctgaaagaggccgacaaggacgagttctgcagatgcgagctgaagctgcagaagtggtacggcgatctgagaggcaagcccttcgccattgaggccgagaacagcatcctggacatcagcggcttcagcaagcagtacaactgcgccttcatttggcagaaagacggcgtcaagaaactgaacctgtacctgatcatcaattacttcaaaggcggcaagctgcggttcaagaagatcaaacccgaggccttcgaggctaacagattctacaccgtgatcaacaaaaagtccggcgagatcgtgcccatggaagtgaacttcaacttcgacgaccccaacctgattatcctgcctctggccttcggcaagagacagggcagagagttcatctggaacgatctgctgagcctggaaaccggctctctgaagctggccaatggcagagtgatcgagaaaaccctgtacaacaggagaaccagacaggacgagcctgctctgtttgtggccctgaccttcgagagaagagaggtgctggacagcagcaacatcaagcccatgaacctgatcggcatcgaccggggcgagaatatccctgctgtgatcgccctgacagaccctgaaggatgcccactgagcagattcaaggactccctgggcaaccctacacacatcctgagaatcggcgagagctacaaagagaagcagaggacaatccaggccaagaaagaggtggaacagagaagagccggcggatactctaggaagtacgccagcaaggccaagaatctggccgacgacatggtccgaaacaccgccagagatctgctgtactacgccgtgacacaggacgccatgctgatcttcgagaatctgagcagaggcttcggccggcagggcaagagaacctttatggccgagaggcagtacaccagaatggaagattggctcacagctaaactggcctacgagggactgagcaagacctacctgtccaaaacactggcccagtatacctccaagacctgcagcaattgcggcttcaccatcaccagcgccgactacgacagagtgctggaaaagctcaagaaaaccgccaccggctggatgaccaccatcaacggcaaagagctgaaggttgagggccagatcacctactacaacaggtacaagaggcagaacgtcgtgaaggatctgagcgtggaactggacagactgagcgaagagagcgtgaacaacgacatcagcagctggacaaagggcagatcaggcgaggctctgagcctgctgaagaagaggtttagccacagacctgtgcaagagaagttcgtgtgcctgaactgcggcttcgagacacacgccgatgaacaggctgccctgaacattgccagaagctggctgttcctgagaagccaagagtacaagaagtaccagaccaacaagaccaccggcaacaccgacaagagggcctttgtggaaacctggcagagcttctacagaaaaaagctgaaagaagtctggaagcccgccgtg

SEQ ID NO: 237 - DNA, 2931 bp, synthetic construct
  misc_feature 1..2931: note = CasX variant 491
  source 1..2931: mol_type = other DNA
caagagatcaagagaatcaacaagatcagaaggagactggtcaaggacagcaacacaaagaaggccggcaagacaggccccatgaaaaccctgctcgtcagagtgatgacccctgacctgagagagcggctggaaaacctgagaaagaagcccgagaacatccctcagcctatcagcaacaccagcagggccaacctgaacaagctgctgaccgactacaccgagatgaagaaagccatcctgcacgtgtactgggaagagttccagaaagaccccgtgggcctgatgagcagagttgctcagcctgccagcaagaagatcgaccagaacaagctgaagcccgagatggacgagaagggcaatctgaccacagccggctttgcctgctctcagtgtggccagcctctgttcgtgtacaagctggaacaggtgtccgagaaaggcaaggcctacaccaactacttcggcagatgtaacgtggccgagcacgagaagctgattctgctggcccagctgaaacctgagaaggactctgatgaggccgtgacctacagcctgggcaagtttggacagagagccctggacttctacagcatccacgtgaccaaagaaagcacacaccccgtgaagcccctggctcagatcgccggcaatagatacgcctctggacctgtgggcaaagccctgtccgatgcctgcatgggaacaatcgccagcttcctgagcaagtaccaggacatcatcatcgagcaccagaaggtggtcaagggcaaccagaagagactggaaagcctgagggagctggccggcaaagagaacctggaataccccagcgtgaccctgcctcctcagcctcacacaaaagaaggcgtggacgcctacaacgaagtgatcgccagagtgagaatgtgggtcaacctgaacctgtggcagaagctgaaactgtccagggacgacgccaagcctctgctgagactgaagggcttccctagcttccctctggtggaaagacaggccaatgaagtggattggtgggacatggtctgcaacgtgaagaagctgatcaacgagaagaaagaggatggcaaggttttctggcagaacctggccggctacaagagacaagaagccctgaggccttacctgagcagcgaagaggaccggaagaagggcaagaagttcgccagataccagctgggcgacctgctgctgcacctggaaaagaagcacggcgaggactggggcaaagtgtacgatgaggcctgggagagaatcgacaagaaggtggaaggcctgagcaagcacattaagctggaagaggaaagaaggagcgaggacgcccaatctaaagccgctctgaccgattggctgagagccaaggccagctttgtgatcgagggcctgaaagaggccgacaaggacgagttctgcagatgcgagctgaagctgcagaagtggtacggcgatctgagaggcaagcccttcgccattgaggccgagaacagcatcctggacatcagcggcttcagcaagcagtacaactgcgccttcatttggcagaaagacggcgtcaagaaactgaacctgtacctgatcatcaattacttcaaaggcggcaagctgcggttcaagaagatcaaacccgaggccttcgaggctaacagattctacaccgtgatcaacaaaaagtccggcgagatcgtgcccatggaagtgaacttcaacttcgacgaccccaacctgattatcctgcctctggccttcggcaagagacagggcagagagttcatctggaacgatctgctgagcctggaaaccggctctctgaagctggccaatggcagagtgatcgagaaaaccctgtacaacaggagaaccagacaggacgagcctgctctgtttgtggccctgaccttcgagagaagagaggtgctggacagcagcaacatcaagcccatgaacctgatcggcgtggaccggggcgagaatatccctgctgtgatcgccctgacagaccctgaaggatgcccactgagcagattcaaggactccctgggcaaccctacacacatcctgagaatcggcgagagctacaaagagaagcagaggacaatccaggccaagaaagaggtggaacagagaagagccggcggatactctaggaagtacgccagcaaggccaagaatctggccgacgacatggtccgaaacaccgccagagatctgctgtactacgccgtgacacaggacgccatgctgatcttcgagaatctgagcagaggcttcggccggcagggcaagagaacctttatggccgagaggcagtacaccagaatggaagattggctcacagctaaactggcctacgagggactgagcaagacctacctgtccaaaacactggcccagtatacctccaagacctgcagcaattgcggcttcaccatcaccagcgccgactacgacagagtgctggaaaagctcaagaaaaccgccaccggctggatgaccaccatcaacggcaaagagctgaaggttgagggccagatcacctactacaacaggtacaagaggcagaacgtcgtgaaggatctgagcgtggaactggacagactgagcgaagagagcgtgaacaacgacatcagcagctggacaaagggcagatcaggcgaggctctgagcctgctgaagaagaggtttagccacagacctgtgcaagagaagttcgtgtgcctgaactgcggcttcgagacacacgccgatgaacaggctgccctgaacattgccagaagctggctgttcctgagaagccaagagtacaagaagtaccagaccaacaagaccaccggcaacaccgacaagagggcctttgtggaaacctggcagagcttctacagaaaaaagctgaaagaagtctggaagcccgccgtg

SEQ ID NO: 238 - protein, 977 aa, synthetic construct; identical to SEQ ID NO: 135
  REGION 1..977: note = CasX Variant

SEQ ID NO: 239 - protein, 977 aa, synthetic construct; identical to SEQ ID NO: 138
  REGION 1..977: note = CasX Variant

SEQ ID NO: 240 - protein, 987 aa, synthetic construct
  REGION 1..987: note = CasX Variant
MAPKKKRKVSRQEIKRINKIRRRLVKDSNTKKAGKTGPMKTLLVRVMTPDLRERLENLRKKPENIPQPISNTSRANLNKLLTDYTEMKKAILHVYWEEFQKDPVGLMSRVAQPAPKNIDQRKLIPVKDGNERLTSSGFACSQCCQPLYVYKLEQVNDKGKPHTNYFGRCNVSEHERLILLSPHKPEANDELVTYSLGKFGQRALDFYSIHVTRESNHPVKPLEQIGGNSCASGPVGKALSDACMGAVASFLTKYQDIILEHQKVIKKNEKRLANLKDIASANGLAFPKITLPPQPHTKEGIEAYNNVVAQIVIWVNLNLWQKLKIGRDEAKPLQRLKGFPSFPLVERQANEVDWWDMVCNVKKLINEKKEDGKVFWQNLAGYKRQEALRPYLSSEEDRKKGKKFARYQFGDLLLHLEKKHGEDWGKVYDEAWERIDKKVEGLSKHIKLEEERRSEDAQSKAALTDWLRAKASFVIEGLKEADKDEFCRCELKLQKWYGDLRGKPFAIEAENSILDISGFSKQYNCAFIWQKDGVKKLNLYLIINYFKGGKLRFKKIKPEAFEANRFYTVINKKSGEIVPMEVNFNFDDPNLIILPLAFGKRQGREFIWNDLLSLETGSLKLANGRVIEKTLYNRRTRQDEPALFVALTFERREVLDSSNIKPMNLIGIDRGENIPAVIALTDPEGCPLSRFKDSLGNPTHILRIGESYKEKQRTIQAKKEVEQRRAGGYSRKYASKAKNLADDMVRNTARDLLYYAVTQDAMLIFENLSRGFGRQGKRTFMAERQYTRMEDWLTAKLAYEGLSKTYLSKTLAQYTSKTCSNCGFTITSADYDRVLEKLKKTATGWMTTINGKELKVEGQITYYNRYKRQNVVKDLSVELDRLSEESVNNDISSWTKGRSGEALSLLKKRFSHRPVQEKFVCLNCGFETHADEQAALNIARSWLFLRSQEYKKYQTNKTTGNTDKRAFVETWQSFYRKKLKEVWKPAV

SEQ ID NO: 241 - protein, 986 aa, synthetic construct
  REGION 1..986: note = CasX Variant
MQEIKRINKIRRRLVKDSNTKKAGKTGPMKTLLVRVMTPDLRERLENLRKKPENIPQPISNTSRANLNKLLTDYTEMKKAILHVYWEEFQKDPVGLMSRVAQPAPKNIDQRKLIPVKDGNERLTSSGFACSQCCQPLYVYKLEQVNDKGKPHTNYFGRCNVSEHERLILLSPHKPEANDELVTYSLGKFGQRALDFYSIHVTRESNHPVKPLEQIGGNSCASGPVGKALSDACMGAVASFLTKYQDIILEHQKVIKKNEKRLANLKDIASANGLAFPKITLPPQPHTKEGIEAYNNVVAQIVIWVNLNLWQKLKIGRDEAKPLQRLKGFPSFPLVERQANEVDWWDMVCNVKKLINEKKEDGKVFWQNLAGYKRQEALRPYLSSEEDRKKGKKFARYQFGDLLLHLEKKHGEDWGKVYDEAWERIDKKVEGLSKHIKLEEERRSEDAQSKAALTDWLRAKASFVIEGLKEADKDEFCRCELKLQKWYGDLRGKPFAIEAENSILDISGFSKQYNCAFIWQKDGVKKLNLYLIINYFKGGKLRFKKIKPEAFEANRFYTVINKKSGEIVPMEVNFNFDDPNLIILPLAFGKRQGREFIWNDLLSLETGSLKLANGRVIEKTLYNRRTRQDEPALFVALTFERREVLDSSNIKPMNLIGIDRGENIPAVIALTDPEGCPLSRFKDSLGNPTHILRIGESYKEKQRTIQAKKEVEQRRAGGYSRKYASKAKNLADDMVRNTARDLLYYAVTQDAMLIFENLSRGFGRQGKRTFMAERQYTRMEDWLTAKLAYEGLSKTYLSKTLAQYTSKTCSNCGFTITSADYDRVLEKLKKTATGWMTTINGKELKVEGQITYYNRYKRQNVVKDLSVELDRLSEESVNNDISSWTKGRSGEALSLLKKRFSHRPVQEKFVCLNCGFETHADEQAALNIARSWLFLRSQEYKKYQTNKTTGNTDKRAFVETWQSFYRKKLKEVWKPAVTSPKKKRKV

SEQ ID NO: 242 - protein, 996 aa, synthetic construct
  REGION 1..996: note = CasX Variant
MQEIKRINKIRRRLVKDSNTKKAGKTGPMKTLLVRVMTPDLRERLENLRKKPENIPQPISNTSRANLNKLLTDYTEMKKAILHVYWEEFQKDPVGLMSRVAQPAPKNIDQRKLIPVKDGNERLTSSGFACSQCCQPLYVYKLEQVNDKGKPHTNYFGRCNVSEHERLILLSPHKPEANDELVTYSLGKFGQRALDFYSIHVTRESNHPVKPLEQIGGNSCASGPVGKALSDACMGAVASFLTKYQDIILEHQKVIKKNEKRLANLKDIASANGLAFPKITLPPQPHTKEGIEAYNNVVAQIVIWVNLNLWQKLKIGRDEAKPLQRLKGFPSFPLVERQANEVDWWDMVCNVKKLINEKKEDGKVFWQNLAGYKRQEALRPYLSSEEDRKKGKKFARYQFGDLLLHLEKKHGEDWGKVYDEAWERIDKKVEGLSKHIKLEEERRSEDAQSKAALTDWLRAKASFVIEGLKEADKDEFCRCELKLQKWYGDLRGKPFAIEAENSILDISGFSKQYNCAFIWQKDGVKKLNLYLIINYFKGGKLRFKKIKPEAFEANRFYTVINKKSGEIVPMEVNFNFDDPNLIILPLAFGKRQGREFIWNDLLSLETGSLKLANGRVIEKTLYNRRTRQDEPALFVALTFERREVLDSSNIKPMNLIGIDRGENIPAVIALTDPEGCPLSRFKDSLGNPTHILRIGESYKEKQRTIQAKKEVEQRRAGGYSRKYASKAKNLADDMVRNTARDLLYYAVTQDAMLIFENLSRGFGRQGKRTFMAERQYTRMEDWLTAKLAYEGLSKTYLSKTLAQYTSKTCSNCGFTITSADYDRVLEKLKKTATGWMTTINGKELKVEGQITYYNRYKRQNVVKDLSVELDRLSEESVNNDISSWTKGRSGEALSLLKKRFSHRPVQEKFVCLNCGFETHADEQAALNIARSWLFLRSQEYKKYQTNKTTGNTDKRAFVETWQSFYRKKLKEVWKPAVTSPKKKRKVPPPPKKKRKV

SEQ ID NO: 243 - protein, 1006 aa, synthetic construct
  REGION 1..1006: note = CasX Variant
MQEIKRINKIRRRLVKDSNTKKAGKTGPMKTLLVRVMTPDLRERLENLRKKPENIPQPISNTSRANLNKLLTDYTEMKKAILHVYWEEFQKDPVGLMSRVAQPAPKNIDQRKLIPVKDGNERLTSSGFACSQCCQPLYVYKLEQVNDKGKPHTNYFGRCNVSEHERLILLSPHKPEANDELVTYSLGKFGQRALDFYSIHVTRESNHPVKPLEQIGGNSCASGPVGKALSDACMGAVASFLTKYQDIILEHQKVIKKNEKRLANLKDIASANGLAFPKITLPPQPHTKEGIEAYNNVVAQIVIWVNLNLWQKLKIGRDEAKPLQRLKGFPSFPLVERQANEVDWWDMVCNVKKLINEKKEDGKVFWQNLAGYKRQEALRPYLSSEEDRKKGKKFARYQFGDLLLHLEKKHGEDWGKVYDEAWERIDKKVEGLSKHIKLEEERRSEDAQSKAALTDWLRAKASFVIEGLKEADKDEFCRCELKLQKWYGDLRGKPFAIEAENSILDISGFSKQYNCAFIWQKDGVKKLNLYLIINYFKGGKLRFKKIKPEAFEANRFYTVINKKSGEIVPMEVNFNFDDPNLIILPLAFGKRQGREFIWNDLLSLETGSLKLANGRVIEKTLYNRRTRQDEPALFVALTFERREVLDSSNIKPMNLIGIDRGENIPAVIALTDPEGCPLSRFKDSLGNPTHILRIGESYKEKQRTIQAKKEVEQRRAGGYSRKYASKAKNLADDMVRNTARDLLYYAVTQDAMLIFENLSRGFGRQGKRTFMAERQYTRMEDWLTAKLAYEGLSKTYLSKTLAQYTSKTCSNCGFTITSADYDRVLEKLKKTATGWMTTINGKELKVEGQITYYNRYKRQNVVKDLSVELDRLSEESVNNDISSWTKGRSGEALSLLKKRFSHRPVQEKFVCLNCGFETHADEQAALNIARSWLFLRSQEYKKYQTNKTTGNTDKRAFVETWQSFYRKKLKEVWKPAVTSPKKKRKVPPPHKKKHPDASVNFSEFSK

SEQ ID NO: 244 - protein, 1007 aa, synthetic construct
  REGION 1..1007: note = CasX Variant
MQEIKRINKIRRRLVKDSNTKKAGKTGPMKTLLVRVMTPDLRERLENLRKKPENIPQPISNTSRANLNKLLTDYTEMKKAILHVYWEEFQKDPVGLMSRVAQPAPKNIDQRKLIPVKDGNERLTSSGFACSQCCQPLYVYKLEQVNDKGKPHTNYFGRCNVSEHERLILLSPHKPEANDELVTYSLGKFGQRALDFYSIHVTRESNHPVKPLEQIGGNSCASGPVGKALSDACMGAVASFLTKYQDIILEHQKVIKKNEKRLANLKDIASANGLAFPKITLPPQPHTKEGIEAYNNVVAQIVIWVNLNLWQKLKIGRDEAKPLQRLKGFPSFPLVERQANEVDWWDMVCNVKKLINEKKEDGKVFWQNLAGYKRQEALRPYLSSEEDRKKGKKFARYQFGDLLLHLEKKHGEDWGKVYDEAWERIDKKVEGLSKHIKLEEERRSEDAQSKAALTDWLRAKASFVIEGLKEADKDEFCRCELKLQKWYGDLRGKPFAIEAENSILDISGFSKQYNCAFIWQKDGVKKLNLYLIINYFKGGKLRFKKIKPEAFEANRFYTVINKKSGEIVPMEVNFNFDDPNLIILPLAFGKRQGREFIWNDLLSLETGSLKLANGRVIEKTLYNRRTRQDEPALFVALTFERREVLDSSNIKPMNLIGIDRGENIPAVIALTDPEGCPLSRFKDSLGNPTHILRIGESYKEKQRTIQAKKEVEQRRAGGYSRKYASKAKNLADDMVRNTARDLLYYAVTQDAMLIFENLSRGFGRQGKRTFMAERQYTRMEDWLTAKLAYEGLSKTYLSKTLAQYTSKTCSNCGFTITSADYDRVLEKLKKTATGWMTTINGKELKVEGQITYYNRYKRQNVVKDLSVELDRLSEESVNNDISSWTKGRSGEALSLLKKRFSHRPVQEKFVCLNCGFETHADEQAALNIARSWLFLRSQEYKKYQTNKTTGNTDKRAFVETWQSFYRKKLKEVWKPAVTSPKKKRKVPPPQRPGPYDRPQRPGPYDRP

SEQ ID NO: 245 - protein, 1005 aa, synthetic construct
  REGION 1..1005: note = CasX Variant
MQEIKRINKIRRRLVKDSNTKKAGKTGPMKTLLVRVMTPDLRERLENLRKKPENIPQPISNTSRANLNKLLTDYTEMKKAILHVYWEEFQKDPVGLMSRVAQPAPKNIDQRKLIPVKDGNERLTSSGFACSQCCQPLYVYKLEQVNDKGKPHTNYFGRCNVSEHERLILLSPHKPEANDELVTYSLGKFGQRALDFYSIHVTRESNHPVKPLEQIGGNSCASGPVGKALSDACMGAVASFLTKYQDIILEHQKVIKKNEKRLANLKDIASANGLAFPKITLPPQPHTKEGIEAYNNVVAQIVIWVNLNLWQKLKIGRDEAKPLQRLKGFPSFPLVERQANEVDWWDMVCNVKKLINEKKEDGKVFWQNLAGYKRQEALRPYLSSEEDRKKGKKFARYQFGDLLLHLEKKHGEDWGKVYDEAWERIDKKVEGLSKHIKLEEERRSEDAQSKAALTDWLRAKASFVIEGLKEADKDEFCRCELKLQKWYGDLRGKPFAIEAENSILDISGFSKQYNCAFIWQKDGVKKLNLYLIINYFKGGKLRFKKIKPEAFEANRFYTVINKKSGEIVPMEVNFNFDDPNLIILPLAFGKRQGREFIWNDLLSLETGSLKLANGRVIEKTLYNRRTRQDEPALFVALTFERREVLDSSNIKPMNLIGIDRGENIPAVIALTDPEGCPLSRFKDSLGNPTHILRIGESYKEKQRTIQAKKEVEQRRAGGYSRKYASKAKNLADDMVRNTARDLLYYAVTQDAMLIFENLSRGFGRQGKRTFMAERQYTRMEDWLTAKLAYEGLSKTYLSKTLAQYTSKTCSNCGFTITSADYDRVLEKLKKTATGWMTTINGKELKVEGQITYYNRYKRQNVVKDLSVELDRLSEESVNNDISSWTKGRSGEALSLLKKRFSHRPVQEKFVCLNCGFETHADEQAALNIARSWLFLRSQEYKKYQTNKTTGNTDKRAFVETWQSFYRKKLKEVWKPAVTSPKKKRKVPPPLSPSLSPLLSPSLSPL

SEQ ID NO: 246 - protein, 1008 aa, synthetic construct
  REGION 1..1008: note = CasX Variant
MQEIKRINKIRRRLVKDSNTKKAGKTGPMKTLLVRVMTPDLRERLENLRKKPENIPQPISNTSRANLNKLLTDYTEMKKAILHVYWEEFQKDPVGLMSRVAQPAPKNIDQRKLIPVKDGNERLTMSSGFACSQCCQPLYVYKLEQVNDKGKPHTNYFGRCNVSEHERLILLSPHKPEANDELVTYSLGKFGQRALDFYSIHVTRESNHPVKPLEQIGGNSCASGPVGKALSDACMGAVASFLTKYQDIILEHQKVIKKNEKRLANLKDIASANGLAFPKITLPPQPHTKEGIEAYNNVVAQIVIWVNLNLWQKLKIGRDEAKPLQRLKGFPSFPLVERQANEVDWWDMVCNVKKLINEKKEDGKVFWQNLAGYKRQEALRPYLSSEEDRKKGKKFARYQFGDLLLHLEKKHGEDWGKVYDEAWERIDKKVEGLSKHIKLEEERRSEDAQSKAALTDWLRAKASFVIEGLKEADKDEFCRCELKLQKWYGDLRGKPFAIEAENSILDISGFSKQYNCAFIWQKDGVKKLNLYLIINYFKGGKLRFKKIKPEAFEANRFYTVINKKSGEIVPMEVNFNFDDPNLIILPLAFGKRQGREFIWNDLLSLETGSLKLANGRVIEKTLYNRRTRQDEPALFVALTFERREVLDSSNIKPMNLIGIDRGENIPAVIALTDPEGCPLSRFKDSLGNPTHILRIGESYKEKQRTIQAKKEVEQRRAGGYSRKYASKAKNLADDMVRNTARDLLYYAVTQDAMLIFENLSRGFGRQGKRTFMAERQYTRMEDWLTAKLAYEGLSKTYLSKTLAQYTSKTCSNCGFTITSADYDRVLEKLKKTATGWMTTINGKELKVEGQITYYNRYKRQNVVKDLSVELDRLSEESVNNDISSWTKGRSGEALSLLKKRFSHRPVQEKFVCLNCGFETHADEQAALNIARSWLFLRSQEYKKYQTNKTTGNTDKRAFVETWQSFYRKKLKEVWKPAVTSPKKKRKVPPPRGKGGKGLGKGGAKRHRK

SEQ ID NO: 247 - protein, 1013 aa, synthetic construct
  REGION 1..1013: note = CasX Variant
MQEIKRINKIRRRLVKDSNTKKAGKTGPMKTLLVRVMTPDLRERLENLRKKPENIPQPISNTSRANLNKLLTDYTEMKKAILHVYWEEFQKDPVGLMSRVAQPAPKNIDQRKLIPVKDGNERLTSSGFACSQCCQPLYVYKLEQVNDKGKPHTNYFGRCNVSEHERLILLSPHKPEANDELVTYSLGKFGQRALDFYSIHVTRESNHPVKPLEQIGGNSCASGPVGKALSDACMGAVASFLTKYQDIILEHQKVIKKNEKRLANLKDIASANGLAFPKITLPPQPHTKEGIEAYNNVVAQIVIWVNLNLWQKLKIGRDEAKPLQRLKGFPSFPLVERQANEVDWWDMVCNVKKLINEKKEDGKVFWQNLAGYKRQEALRPYLSSEEDRKKGKKFARYQFGDLLLHLEKKHGEDWGKVYDEAWERIDKKVEGLSKHIKLEEERRSEDAQSKAALTDWLRAKASFVIEGLKEADKDEFCRCELKLQKWYGDLRGKPFAIEAENSILDISGFSKQYNCAFIWQKDGVKKLNLYLIINYFKGGKLRFKKIKPEAFEANRFYTVINKKSGEIVPMEVNFNFDDPNLIILPLAFGKRQGREFIWNDLLSLETGSLKLANGRVIEKTLYNRRTRQDEPALFVALTFERREVLDSSNIKPMNLIGIDRGENIPAVIALTDPEGCPLSRFKDSLGNPTHILRIGESYKEKQRTIQAKKEVEQRRAGGYSRKYASKAKNLADDMVRNTARDLLYYAVTQDAMLIFENLSRGFGRQGKRTFMAERQYTRMEDWLTAKLAYEGLSKTYLSKTLAQYTSKTCSNCGFTITSADYDRVLEKLKKTATGWMTTINGKELKVEGQITYYNRYKRQNVVKDLSVELDRLSEESVNNDISSWTKGRSGEALSLLKKRFSHRPVQEKFVCLNCGFETHADEQAALNIARSWLFLRSQEYKKYQTNKTTGNTDKRAFVETWQSFYRKKLKEVWKPAVTSPKKKRKVPPPSRRRKANPTKLSENAKKLAKEVEN

SEQ ID NO: 248 - protein, 998 aa, synthetic construct
  REGION 1..998: note = CasX Variant
MQEIKRINKIRRRLVKDSNTKKAGKTGPMKTLLVRVMTPDLRERLENLRKKPENIPQPISNTSRANLNKLLTDYTEMKKAILHVYWEEFQKDPVGLMSRVAQPAPKNIDQRKLIPVKDGNERLTSSGFACSQCCQPLYVYKLEQVNDKGKPHTNYFGRCNVSEHERLILLSPHKPEANDELVTYSLGKFGQRALDFYSIHVTRESNHPVKPLEQIGGNSCASGPVGKALSDACMGAVASFLTKYQDIILEHQKVIKKNEKRLANLKDIASANGLAFPKITLPPQPHTKEGIEAYNNVVAQIVIWVNLNLWQKLKIGRDEAKPLQRLKGFPSFPLVERQANEVDWWDMVCNVKKLINEKKEDGKVFWQNLAGYKRQEALRPYLSSEEDRKKGKKFARYQFGDLLLHLEKKHGEDWGKVYDEAWERIDKKVEGLSKHIKLEEERRSEDAQSKAALTDWLRAKASFVIEGLKEADKDEFCRCELKLQKWYGDLRGKPFAIEAENSILDISGFSKQYNCAFIWQKDGVKKLNLYLIINYFKGGKLRFKKIKPEAFEANRFYTVINKKSGEIVPMEVNFNFDDPNLIILPLAFGKRQGREFIWNDLLSLETGSLKLANGRVIEKTLYNRRTRQDEPALFVALTFERREVLDSSNIKPMNLIGIDRGENIPAVIALTDPEGCPLSRFKDSLGNPTHILRIGESYKEKQRTIQAKKEVEQRRAGGYSRKYASKAKNLADDMVRNTARDLLYYAVTQDAMLIFENLSRGFGRQGKRTFMAERQYTRMEDWLTAKLAYEGLSKTYLSKTLAQYTSKTCSNCGFTITSADYDRVLEKLKKTATGWMTTINGKELKVEGQITYYNRYKRQNVVKDLSVELDRLSEESVNNDISSWTKGRSGEALSLLKKRFSHRPVQEKFVCLNCGFETHADEQAALNIARSWLFLRSQEYKKYQTNKTTGNTDKRAFVETWQSFYRKKLKEVWKPAVTSPKKKRKVPPPPAAKRVKLD

SEQ ID NO: 249 - protein, 997 aa, synthetic construct
  REGION 1..997: note = CasX Variant
MQEIKRINKIRRRLVKDSNTKKAGKTGPMKTLLVRVMTPDLRERLENLRKKPENIPQPISNTSRANLNKLLTDYTEMKKAILHVYWEEFQKDPVGLMSRVAQPAPKNIDQRKLIPVKDGNERLTSSGFACSQCCQPLYVYKLEQVNDKGKPHTNYFGRCNVSEHERLILLSPHKPEANDELVTYSLGKFGQRALDFYSIHVTRESNHPVKPLEQIGGNSCASGPVGKALSDACMGAVASFLTKYQDIILEHQKVIKKNEKRLANLKDIASANGLAFPKITLPPQPHTKEGIEAYNNVVAQIVIWVNLNLWQKLKIGRDEAKPLQRLKGFPSFPLVERQANEVDWWDMVCNVKKLINEKKEDGKVFWQNLAGYKRQEALRPYLSSEEDRKKGKKFARYQFGDLLLHLEKKHGEDWGKVYDEAWERIDKKVEGLSKHIKLEEERRSEDAQSKAALTDWLRAKASFVIEGLKEADKDEFCRCELKLQKWYGDLRGKPFAIEAENSILDISGFSKQYNCAFIWQKDGVKKLNLYLIINYFKGGKLRFKKIKPEAFEANRFYTVINKKSGEIVPMEVNFNFDDPNLIILPLAFGKRQGREFIWNDLLSLETGSLKLANGRVIEKTLYNRRTRQDEPALFVALTFERREVLDSSNIKPMNLIGIDRGENIPAVIALTDPEGCPLSRFKDSLGNPTHILRIGESYKEKQRTIQAKKEVEQRRAGGYSRKYASKAKNLADDMVRNTARDLLYYAVTQDAMLIFENLSRGFGRQGKRTFMAERQYTRMEDWLTAKLAYEGLSKTYLSKTLAQYTSKTCSNCGFTITSADYDRVLEKLKKTATGWMTTINGKELKVEGQITYYNRYKRQNVVKDLSVELDRLSEESVNNDISSWTKGRSGEALSLLKKRFSHRPVQEKFVCLNCGFETHADEQAALNIARSWLFLRSQEYKKYQTNKTTGNTDKRAFVETWQSFYRKKLKEVWKPAVTSPKKKRKVPPPKRSFSKAF

SEQ ID NO: 250 - protein, 1008 aa, synthetic construct
  REGION 1..1008: note = CasX Variant
MQEIKRINKIRRRLVKDSNTKKAGKTGPMKTLLVRVMTPDLRERLENLRKKPENIPQPISNTSRANLNKLLTDYTEMKKAILHVYWEEFQKDPVGLMSRVAQPAPKNIDQRKLIPVKDGNERLTSSGFACSQCCQPLYVYKLEQVNDKGKPHTNYFGRCNVSEHERLILLSPHKPEANDELVTYSLGKFGQRALDFYSIHVTRESNHPVKPLEQIGGNSCASGPVGKALSDACMGAVASFLTKYQDIILEHQKVIKKNEKRLANLKDIASANGLAFPKITLPPQPHTKEGIEAYNNVVAQIVIWVNLNLWQKLKIGRDEAKPLQRLKGFPSFPLVERQANEVDWWDMVCNVKKLINEKKEDGKVFWQNLAGYKRQEALRPYLSSEEDRKKGKKFARYQFGDLLLHLEKKHGEDWGKVYDEAWERIDKKVEGLSKHIKLEEERRSEDAQSKAALTDWLRAKASFVIEGLKEADKDEFCRCELKLQKWYGDLRGKPFAIEAENSILDISGFSKQYNCAFIWQKDGVKKLNLYLIINYFKGGKLRFKKIKPEAFEANRFYTVINKKSGEIVPMEVNFNFDDPNLIILPLAFGKRQGREFIWNDLLSLETGSLKLANGRVIEKTLYNRRTRQDEPALFVALTFERREVLDSSNIKPMNLIGIDRGENIPAVIALTDPEGCPLSRFKDSLGNPTHILRIGESYKEKQRTIQAKKEVEQRRAGGYSRKYASKAKNLADDMVRNTARDLLYYAVTQDAMLIFENLSRGFGRQGKRTFMAERQYTRMEDWLTAKLAYEGLSKTYLSKTLAQYTSKTCSNCGFTITSADYDRVLEKLKKTATGWMTTINGKELKVEGQITYYNRYKRQNVVKDLSVELDRLSEESVNNDISSWTKGRSGEALSLLKKRFSHRPVQEKFVCLNCGFETHADEQAALNIARSWLFLRSQEYKKYQTNKTTGNTDKRAFVETWQSFYRKKLKEVWKPAVTSPKKKRKVPPPKRGINDRNFWRGENERKTR

SEQ ID NO: 251 - protein, 1007 aa, synthetic construct
  REGION 1..1007: note = CasX Variant
MAPKKKRKVSRMQEIKRINKIRRRLVKDSNTKKAGKTGPMKTLLVRVMTPDLRERLENLRKKPENIPQPISNTSRANLNKLLTDYTEMKKAILHVYWEEFQKDPVGLMSRVAQPAPKNIDQRKLIPVKDGNERLTSSGFACSQCCQPLYVYKLEQVNDKGKPHTNYFGRCNVSEHERLILLSPHKPEANDELVTYSLGKFGQRALDFYSIHVTRESNHPVKPLEQIGGNSCASGPVGKALSDACMGAVASFLTKYQDIILEHQKVIKKNEKRLANLKDIASANGLAFPKITLPPQPHTKEGIEAYNNVVAQIVIWVNLNLWQKLKIGRDEAKPLQRLKGFPSFPLVERQANEVDWWDMVCNVKKLINEKKEDGKVFWQNLAGYKRQEALRPYLSSEEDRKKGKKFARYQFGDLLLHLEKKHGEDWGKVYDEAWERIDKKVEGLSKHIKLEEERRSEDAQSKAALTDWLRAKASFVIEGLKEADKDEFCRCELKLQKWYGDLRGKPFAIEAENSILDISGFSKQYNCAFIWQKDGVKKLNLYLIINYFKGGKLRFKKIKPEAFEANRFYTVINKKSGEIVPMEVNFNFDDPNLIILPLAFGKRQGREFIWNDLLSLETGSLKLANGRVIEKTLYNRRTRQDEPALFVALTFERREVLDSSNIKPMNLIGIDRGENIPAVIALTDPEGCPLSRFKDSLGNPTHILRIGESYKEKQRTIQAKKEVEQRRAGGYSRKYASKAKNLADDMVRNTARDLLYYAVTQDAMLIFENLSRGFGRQGKRTFMAERQYTRMEDWLTAKLAYEGLSKTYLSKTLAQYTSKTCSNCGFTITSADYDRVLEKLKKTATGWMTTINGKELKVEGQITYYNRYKRQNVVKDLSVELDRLSEESVNNDISSWTKGRSGEALSLLKKRFSHRPVQEKFVCLNCGFETHADEQAALNIARSWLFLRSQEYKKYQTNKTTGNTDKRAFVETWQSFYRKKLKEVWKPAVTSPKKKRKVPPPPKKKRKV

SEQ ID NO: 252 - protein, 1009 aa, synthetic construct
  REGION 1..1009: note = CasX Variant
MAPKKKRKVSRMQEIKRINKIRRRLVKDSNTKKAGKTGPMKTLLVRVMTPDLRERLENLRKKPENIPQPISNTSRANLNKLLTDYTEMKKAILHVYWEEFQKDPVGLMSRVAQPAPKNIDQRKLIPVKDGNERLTSSGFACSQCCQPLYVYKLEQVNDKGKPHTNYFGRCNVSEHERLILLSPHKPEANDELVTYSLGKFGQRALDFYSIHVTRESNHPVKPLEQIGGNSCASGPVGKALSDACMGAVASFLTKYQDIILEHQKVIKKNEKRLANLKDIASANGLAFPKITLPPQPHTKEGIEAYNNVVAQIVIWVNLNLWQKLKIGRDEAKPLQRLKGFPSFPLVERQANEVDWWDMVCNVKKLINEKKEDGKVFWQNLAGYKRQEALRPYLSSEEDRKKGKKFARYQFGDLLLHLEKKHGEDWGKVYDEAWERIDKKVEGLSKHIKLEEERRSEDAQSKAALTDWLRAKASFVIEGLKEADKDEFCRCELKLQKWYGDLRGKPFAIEAENSILDISGFSKQYNCAFIWQKDGVKKLNLYLIINYFKGGKLRFKKIKPEAFEANRFYTVINKKSGEIVPMEVNFNFDDPNLIILPLAFGKRQGREFIWNDLLSLETGSLKLANGRVIEKTLYNRRTRQDEPALFVALTFERREVLDSSNIKPMNLIGIDRGENIPAVIALTDPEGCPLSRFKDSLGNPTHILRIGESYKEKQRTIQAKKEVEQRRAGGYSRKYASKAKNLADDMVRNTARDLLYYAVTQDAMLIFENLSRGFGRQGKRTFMAERQYTRMEDWLTAKLAYEGLSKTYLSKTLAQYTSKTCSNCGFTITSADYDRVLEKLKKTATGWMTTINGKELKVEGQITYYNRYKRQNVVKDLSVELDRLSEESVNNDISSWTKGRSGEALSLLKKRFSHRPVQEKFVCLNCGFETHADEQAALNIARSWLFLRSQEYKKYQTNKTTGNTDKRAFVETWQSFYRKKLKEVWKPAVTSPKKKRKVPPPPAAKRVKLD

SEQ ID NO: 253 - DNA, 21 bp, unidentified
  misc_feature 1..21: note = nuclear localization signal
  source 1..21: mol_type = other DNA
ccaaagaagaagcggaaggtc

SEQ ID NO: 254 - DNA, 51 bp, unidentified
  misc_feature 1..51: note = nuclear localization signal
  source 1..51: mol_type = other DNA
cacaagaagaaacatccagacgcatcagtcaactttagcgagttcagtaaa

SEQ ID NO: 255 - DNA, 54 bp, unidentified
  misc_feature 1..54: note = nuclear localization signal
  source 1..54: mol_type = other DNA
cagcgccctgggccttacgataggccgcaaagacccggaccgtatgatcgccct

SEQ ID NO: 256 - DNA, 48 bp, unidentified
  misc_feature 1..48: note = nuclear localization signal
  source 1..48: mol_type = other DNA
ctcagcccgagtcttagtccactgctttccccgtccctgtctccactg

SEQ ID NO: 257 - DNA, 54 bp, unidentified
  misc_feature 1..54: note = nuclear localization signal
  source 1..54: mol_type = other DNA
cggggcaagggtggcaaggggcttggcaaggggggggcaaagaggcacaggaag

SEQ ID NO: 258 - DNA, 72 bp, unidentified
  misc_feature 1..72: note = nuclear localization signal
  source 1..72: mol_type = other DNA
agccgccgcagaaaagccaatcctacaaaactgtcagaaaatgcgaaaaaacttgctaaggaggtggaaaac

SEQ ID NO: 259 - DNA, 27 bp, unidentified
  misc_feature 1..27: note = nuclear localization signal
  source 1..27: mol_type = other DNA
cctgccgcaaagcgagtgaaattggac

SEQ ID NO: 260 - DNA, 24 bp, unidentified
  misc_feature 1..24: note = nuclear localization signal
  source 1..24: mol_type = other DNA
aagcggtccttcagtaaggccttt

SEQ ID NO: 261 - DNA, 57 bp, unidentified
  misc_feature 1..57: note = nuclear localization signal
  source 1..57: mol_type = other DNA
aaacggggaataaacgaccggaacttctggcgcggggaaaacgagcgcaaaacccga

SEQ ID NO: 262 - DNA, 2991 bp, synthetic construct
  misc_feature 1..2991: note = CasX variant 387
  source 1..2991: mol_type = other DNA
atggccccaaagaagaagcggaaggtctctagacaagagatcaagagaatcaacaagatcagaaggagactggtcaaggacagcaacacaaagaaggccggcaagacaggccccatgaaaaccctgctcgtcagagtgatgacccctgacctgagagagcggctggaaaacctgagaaagaagcccgagaacatccctcagcctatcagcaacaccagcagggccaacctgaacaagctgctgaccgactacaccgagatgaagaaagccatcctgcacgtgtactgggaagagttccagaaagaccccgtgggcctgatgagcagagttgctcagcctgccagcaagaagatcgaccagaacaagctgaagcccgagatggacgagaagggcaatctgaccacagccggctttgcctgctctcagtgtggccagcctctgttcgtgtacaagctggaacaggtgtccgagaaaggcaaggcctacaccaactacttcggcagatgtaacgtggccgagcacgagaagctgattctgctggcccagctgaaacctgagaaggactctgatgaggccgtgacctacagcctgggcaagtttggacagagagccctggacttctacagcatccacgtgaccagggagagcaatcaccctgtgaagcccctggaacagatcggcggcaatagctgtgcctctggacctgtgggaaaagccctgagcgacgcctgtatgggagccgtggcatccttcctgaccaagtaccaggacatcatcctggaacaccagaaagtgatcaagaagaacgagaaaagactggccaacctcaaggatatcgccagcgctaacggcctggcctttcctaagatcaccctgcctccacagcctcacaccaaagagggcatcgaggcctacaacaacgtggtggcccagatcgtgatttgggtcaacctgaatctgtggcagaagctgaagatcggcagggacgaagccaagccactgcagagactgaagggcttccctagcttccctctggtggaaagacaggccaatgaagtggattggtgggacatggtctgcaacgtgaagaagctgatcaacgagaagaaagaggatggcaaggttttctggcagaacctggccggctacaagagacaagaagccctgaggccttacctgagcagcgaagaggaccggaagaagggcaagaagttcgccagataccagttcggcgacctgctgctgcacctggaaaagaagcacggcgaggactggggcaaagtgtacgatgaggcctgggagagaatcgacaagaaggtggaaggcctgagcaagcacattaagctggaagaggaaagaaggagcgaggacgcccaatctaaagccgctctgaccgattggctgagagccaaggccagctttgtgatcgagggcctgaaagaggccgacaaggacgagttctgcagatgcgagctgaagctgcagaagtggtacggcgatctgagaggcaagcccttcgccattgaggccgagaacagcatcctggacatcagcggcttcagcaagcagtacaactgcgccttcatttggcagaaagacggcgtcaagaaactgaacctgtacctgatcatcaattacttcaaaggcggcaagctgcggttcaagaagatcaaacccgaggccttcgaggctaacagattctacaccgtgatcaacaaaaagtccggcgagatcgtgcccatggaagtgaacttcaacttcgacgaccccaacctgattatcctgcctctggccttcggcaagagacagggcagagagttcatctggaacgatctgctgagcctggaaaccggctctctgaagctggccaatggcagagtgatcgagaaaaccctgtacaacaggagaaccagacaggacgagcctgctctgtttgtggccctgaccttcgagagaagagaggtgctggacagcagcaacatcaagcccatgaacctgatcggcatcgaccggggcgagaatatccctgctgtgatcgccctgacagaccctgaaggatgcccactgagcagattcaaggactccctgggcaaccctacacacatcctgagaatcggcgagagctacaaagagaagcagaggacaatccaggccaagaaagaggtggaacagagaagagccggcggatactctaggaagtacgccagcaaggccaagaatctggccgacgacatggtccgaaacaccgccagagatctgctgtactacgccgtgacacaggacgccatgctgatcttcgagaatctgagcagaggcttcggccggcagggcaagagaacctttatggccgagaggcagtacaccagaatggaagattggctcacagctaaactggcctacgagggactgagcaagacctacctgtccaaaacactggcccagtatacctccaagacctgcagcaattgcggcttcaccatcaccagcgccgactacgacagagtgctggaaaagctcaagaaaaccgccaccggctggatgaccaccatcaacggcaaagagctgaaggttgagggccagatcacctactacaacaggtacaagaggcagaacgtcgtgaaggatctgagcgtggaactggacagactgagcgaagagagcgtgaacaacgacatcagcagctggacaaagggcagatcaggcgaggctctgagcctgctgaagaagaggtttagccacagacctgtgcaagagaagttcgtgtgcctgaactgcggcttcgagacacacgccgatgaacaggctgccctgaacattgccagaagctggctgttcctgagaagccaagagtacaagaagtaccagaccaacaagaccaccggcaacaccgacaagagggcctttgtggaaacctggcagagcttctacagaaaaaagctgaaagaagtctggaagcccgccgtgactagtccaaaaaagaagagaaaggta

SEQ ID NO: 263 - DNA, 2988 bp, synthetic construct
  misc_feature 1..2988: note = CasX variant 395
  source 1..2988: mol_type = other DNA
atggccccaaagaagaagcggaaggtctctagacaagagatcaagagaatcaacaagatcagaaggagactggtcaaggacagcaacacaaagaaggccggcaagacaggccccatgaaaaccctgctcgtcagagtgatgacccctgacctgagagagcggctggaaaacctgagaaagaagcccgagaacatccctcagcctatcagcaacaccagcagggccaacctgaacaagctgctgaccgactacaccgagatgaagaaagccatcctgcacgtgtactgggaagagttccagaaagaccccgtgggcctgatgagcagagttgctcagcccgctcctaagaacatcgaccagagaaagctgatccccgtgaaggacggcaacgagagactgacctctagcggctttgcctgcagccagtgttgccagcctctgtacgtgtacaagctggaacaagtgaacgacaagggcaagccccacaccaactacttcggcagatgcaacgtgtccgagcacgagaggctgatcctgctgtctcctcacaagcccgaggccaacgatgagctggtcacatacagcctgggcaagttcggacagagagccctggacttctacagcatccacgtgaccaaagaaagcacacaccccgtgaagcccctggctcagatcgccggcaatagatacgcctctggacctgtgggcaaagccctgtccgatgcctgcatgggaacaatcgccagcttcctgagcaagtaccaggacatcatcatcgagcaccagaaggtggtcaagggcaaccagaagagactggaaagcctgagggagctggccggcaaagagaacctggaataccccagcgtgaccctgcctcctcagcctcacacaaaagaaggcgtggacgcctacaacgaagtgatcgccagagtgagaatgtgggtcaacctgaacctgtggcagaagctgaaactgtccagggacgacgccaagcctctgctgagactgaagggcttccctagcttccctctggtggaaagacaggccaatgaagtggattggtgggacatggtctgcaacgtgaagaagctgatcaacgagaagaaagaggatggcaaggttttctggcagaacctggccggctacaagagacaagaagccctgaggccttacctgagcagcgaagaggaccggaagaagggcaagaagttcgccagataccagttcggcgacctgctgctgcacctggaaaagaagcacggcgaggactggggcaaagtgtacgatgaggcctgggagagaatcgacaagaaggtggaaggcctgagcaagcacattaagctggaagaggaaagaaggagcgaggacgcccaatctaaagccgctctgaccgattggctgagagccaaggccagctttgtgatcgagggcctgaaagaggccgacaaggacgagttctgcagatgcgagctgaagctgcagaagtggtacggcgatctgagaggcaagcccttcgccattgaggccgagaacagcatcctggacatcagcggcttcagcaagcagtacaactgcgccttcatttggcagaaagacggcgtcaagaaactgaacctgtacctgatcatcaattacttcaaaggcggcaagctgcggttcaagaagatcaaacccgaggccttcgaggctaacagattctacaccgtgatcaacaaaaagtccggcgagatcgtgcccatggaagtgaacttcaacttcgacgaccccaacctgattatcctgcctctggccttcggcaagagacagggcagagagttcatctggaacgatctgctgagcctggaaaccggctctctgaagctggccaatggcagagtgatcgagaaaaccctgtacaacaggagaaccagacaggacgagcctgctctgtttgtggccctgaccttcgagagaagagaggtgctggacagcagcaacatcaagcccatgaacctgatcggcatcgaccggggcgagaatatccctgctgtgatcgccctgacagaccctgaaggatgcccactgagcagattcaaggactccctgggcaaccctacacacatcctgagaatcggcgagagctacaaagagaagcagaggacaatccaggccaagaaagaggtggaacagagaagagccggcggatactctaggaagtacgccagcaaggccaagaatctggccgacgacatggtccgaaacaccgccagagatctgctgtactacgccgtgacacaggacgccatgctgatcttcgagaatctgagcagaggcttcggccggcagggcaagagaacctttatggccgagaggcagtacaccagaatggaagattggctcacagctaaactggcctacgagggactgagcaagacctacctgtccaaaacactggcccagtatacctccaagacctgcagcaattgcggcttcaccatcaccagcgccgactacgacagagtgctggaaaagctcaagaaaaccgccaccggctggatgaccaccatcaacggcaaagagctgaaggttgagggccagatcacctactacaacaggtacaagaggcagaacgtcgtgaaggatctgagcgtggaactggacagactgagcgaagagagcgtgaacaacgacatcagcagctggacaaagggcagatcaggcgaggctctgagcctgctgaagaagaggtttagccacagacctgtgcaagagaagttcgtgtgcctgaactgcggcttcgagacacacgccgatgaacaggctgccctgaacattgccagaagctggctgttcctgagaagccaagagtacaagaagtaccagaccaacaagaccaccggcaacaccgacaagagggcctttgtggaaacctggcagagcttctacagaaaaaagctgaaagaagtctggaagcccgccgtgactagtccaaaaaagaagagaaaggta

SEQ ID NO: 264 - DNA, 2988 bp, synthetic construct
  misc_feature 1..2988: note = CasX variant 485
  source 1..2988: mol_type = other DNA
atggccccaaagaagaagcggaaggtctctagacaagagatcaagagaatcaacaagatcagaaggagactggtcaaggacagcaacacaaagaaggccggcaagacaggccccatgaaaaccctgctcgtcagagtgatgacccctgacctgagagagcggctggaaaacctgagaaagaagcccgagaacatccctcagcctatcagcaacaccagcagggccaacctgaacaagctgctgaccgactacaccgagatgaagaaagccatcctgcacgtgtactgggaagagttccagaaagaccccgtgggcctgatgagcagagttgctcagcccgctcctaagaacatcgaccagagaaagctgatccccgtgaaggacggcaacgagagactgacctctagcggctttgcctgcagccagtgttgccagcctctgtacgtgtacaagctggaacaagtgaacgacaagggcaagccccacaccaactacttcggcagatgcaacgtgtccgagcacgagaggctgatcctgctgtctcctcacaagcccgaggccaacgatgagctggtcacatacagcctgggcaagttcggacagagagccctggacttctacagcatccacgtgaccaaagaaagcacacaccccgtgaagcccctggctcagatcgccggcaatagatacgcctctggacctgtgggcaaagccctgtccgatgcctgcatgggaacaatcgccagcttcctgagcaagtaccaggacatcatcatcgagcaccagaaggtggtcaagggcaaccagaagagactggaaagcctgagggagctggccggcaaagagaacctggaataccccagcgtgaccctgcctcctcagcctcacacaaaagaaggcgtggacgcctacaacgaagtgatcgccagagtgagaatgtgggtcaacctgaacctgtggcagaagctgaaactgtccagggacgacgccaagcctctgctgagactgaagggcttccctagcttccctctggtggaaagacaggccaatgaagtggattggtgggacatggtctgcaacgtgaagaagctgatcaacgagaagaaagaggatggcaaggttttctggcagaacctggccggctacaagagacaagaagccctgaggccttacctgagcagcgaagaggaccggaagaagggcaagaagttcgccagataccagctgggcgacctgctgctgcacctggaaaagaagcacggcgaggactggggcaaagtgtacgatgaggcctgggagagaatcgacaagaaggtggaaggcctgagcaagcacattaagctggaagaggaaagaaggagcgaggacgcccaatctaaagccgctctgaccgattggctgagagccaaggccagctttgtgatcgagggcctgaaagaggccgacaaggacgagttctgcagatgcgagctgaagctgcagaagtggtacggcgatctgagaggcaagcccttcgccattgaggccgagaacagcatcctggacatcagcggcttcagcaagcagtacaactgcgccttcatttggcagaaagacggcgtcaagaaactgaacctgtacctgatcatcaattacttcaaaggcggcaagctgcggttcaagaagatcaaacccgaggccttcgaggctaacagattctacaccgtgatcaacaaaaagtccggcgagatcgtgcccatggaagtgaacttcaacttcgacgaccccaacctgattatcctgcctctggccttcggcaagagacagggcagagagttcatctggaacgatctgctgagcctggaaaccggctctctgaagctggccaatggcagagtgatcgagaaaaccctgtacaacaggagaaccagacaggacgagcctgctctgtttgtggccctgaccttcgagagaagagaggtgctggacagcagcaacatcaagcccatgaacctgatcggcgtggaccggggcgagaatatccctgctgtgatcgccctgacagaccctgaaggatgcccactgagcagattcaaggactccctgggcaaccctacacacatcctgagaatcggcgagagctacaaagagaagcagaggacaatccaggccaagaaagaggtggaacagagaagagccggcggatactctaggaagtacgccagcaaggccaagaatctggccgacgacatggtccgaaacaccgccagagatctgctgtactacgccgtgacacaggacgccatgctgatcttcgagaatctgagcagaggcttcggccggcagggcaagagaacctttatggccgagaggcagtacaccagaatggaagattggctcacagctaaactggcctacgagggactgagcaagacctacctgtccaaaacactggcccagtatacctccaagacctgcagcaattgcggcttcaccatcaccagcgccgactacgacagagtgctggaaaagctcaagaaaaccgccaccggctggatgaccaccatcaacggcaaagagctgaaggttgagggccagatcacctactacaacaggaggaagaggcagaacgtcgtgaaggatctgagcgtggaactggacagactgagcgaagagagcgtgaacaacgacatcagcagctggacaaagggcagatcaggcgaggctctgagcctgctgaagaagaggtttagccacagacctgtgcaagagaagttcgtgtgcctgaactgcggcttcgagacacacgccgatgaacaggctgccctgaacattgccagaagctggctgttcctgagaagccaagagtacaagaagtaccagaccaacaagaccaccggcaacaccgacaagagggcctttgtggaaacctggcagagcttctacagaaaaaagctgaaagaagtctggaagcccgccgtgactagtccaaaaaagaagagaaaggta

SEQ ID NO: 265 - DNA, 2988 bp, synthetic construct
  misc_feature 1..2988: note = CasX variant 486
  source 1..2988: mol_type = other DNA
atggccccaaagaagaagcggaaggtctctagacaagagatcaagagaatcaacaagatcagaaggagactggtcaaggacagcaacacaaagaaggccggcaagacaggccccatgaaaaccctgctcgtcagagtgatgacccctgacctgagagagcggctggaaaacctgagaaagaagcccgagaacatccctcagcctatcagcaacaccagcagggccaacctgaacaagctgctgaccgactacaccgagatgaagaaagccatcctgcacgtgtactgggaagagttccagaaagaccccgtgggcctgatgagcagagttgctcagcccgctcctaagaacatcgaccagagaaagctgatccccgtgaaggacggcaacgagagactgacctctagcggctttgcctgcagccagtgttgccagcctctgtacgtgtacaagctggaacaagtgaacgacaagggcaagccccacaccaactacttcggcagatgcaacgtgtccgagcacgagaggctgatcctgctgtctcctcacaagcccgaggccaacgatgagctggtcacatacagcctgggcaagttcggacagagagccctggacttctacagcatccacgtgaccaaagaaagcacacaccccgtgaagcccctggctcagatcgccggcaatagatacgcctctggacctgtgggcaaagccctgtccgatgcctgcatgggaacaatcgccagcttcctgagcaagtaccaggacatcatcatcgagcaccagaaggtggtcaagggcaaccagaagagactggaaagcctgagggagctggccggcaaagagaacctggaataccccagcgtgaccctgcctcctcagcctcacacaaaagaaggcgtggacgcctacaacgaagtgatcgccagagtgagaatgtgggtcaacctgaacctgtggcagaagctgaaactgtccagggacgacgccaagcctctgctgagactgaagggcttccctagcttccctctggtggaaagacaggccaatgaagtggattggtgggacatggtctgcaacgtgaagaagctgatcaacgagaagaaagaggatggcaaggttttctggcagaacctggccggctacaagagacaagaagccctgaggccttacctgagcagcgaagaggaccggaagaagggcaagaagttcgccagataccagctgggcgacctgctgaagcacctggaaaagaagcacggcgaggactggggcaaagtgtacgatgaggcctgggagagaatcgacaagaaggtggaaggcctgagcaagcacattaagctggaagaggaaagaaggagcgaggacgcccaatctaaagccgctctgaccgattggctgagagccaaggccagctttgtgatcgagggcctgaaagaggccgacaaggacgagttctgcagatgcgagctgaagctgcagaagtggtacggcgatctgagaggcaagcccttcgccattgaggccgagaacagcatcctggacatcagcggcttcagcaagcagtacaactgcgccttcatttggcagaaagacggcgtcaagaaactgaacctgtacctgatcatcaattacttcaaaggcggcaagctgcggttcaagaagatcaaacccgaggccttcgaggctaacagattctacaccgtgatcaacaaaaagtccggcgagatcgtgcccatggaagtgaacttcaacttcgacgaccccaacctgattatcctgcctctggccttcggcaagagacagggcagagagttcatctggaacgatctgctgagcctggaaaccggctctctgaagctggccaatggcagagtgatcgagaaaaccctgtacaacaggagaaccagacaggacgagcctgctctgtttgtggccctgaccttcgagagaagagaggtgctggacagcagcaacatcaagcccatgaacctgatcggcgtggaccggggcgagaatatccctgctgtgatcgccctgacagaccctgaaggatgcccactgagcagattcaaggactccctgggcaaccctacacacatcctgagaatcggcgagagctacaaagagaagcagaggacaatccaggccaagaaagaggtggaacagagaagagccggcggatactctaggaagtacgccagcaaggccaagaatctggccgacgacatggtccgaaacaccgccagagatctgctgtactacgccgtgacacaggacgccatgctgatcttcgagaatctgagcagaggcttcggccggcagggcaagagaacctttatggccgagaggcagtacaccagaatggaagattggctcacagctaaactggcctacgagggactgagcaagacctacctgtccaaaacactggcccagtatacctccaagacctgcagcaattgcggcttcaccatcaccagcgccgactacgacagagtgctggaaaagctcaagaaaaccgccaccggctggatgaccaccatcaacggcaaagagctgaaggttgagggccagatcacctactacaacaggaggaagaggcagaacgtcgtgaaggatctgagcgtggaactggacagactgagcgaagagagcgtgaacaacgacatcagcagctggacaaagggcagatcaggcgaggctctgagcctgctgaagaagaggtttagccacagacctgtgcaagagaagttcgtgtgcctgaactgcggcttcgagacacacgccgatgaacaggctgccctgaacattgccagaagctggctgttcctgagaagccaagagtacaagaagtaccagaccaacaagaccaccggcaacaccgacaagagggcctttgtggaaacctggcagagcttctacagaaaaaagctgaaagaagtctggaagcccgccgtgactagtccaaaaaagaagagaaaggta

SEQ ID NO: 266 - DNA, 2988 bp, synthetic construct
  misc_feature 1..2988: note = CasX variant 487
  source 1..2988: mol_type = other DNA
atggccccaaagaagaagcggaaggtctctagacaagagatcaagagaatcaacaagatcagaaggagactggtcaaggacagcaacacaaagaaggccggcaagacaggccccatgaaaaccctgctcgtcagagtgatgacccctgacctgagagagcggctggaaaacctgagaaagaagcccgagaacatccctcagcctatcagcaacaccagcagggccaacctgaacaagctgctgaccgactacaccgagatgaagaaagccatcctgcacgtgtactgggaagagttccagaaagaccccgtgggcctgatgagcagagttgctcagcccgctcctaagaacatcgaccagagaaagctgatccccgtgaaggacggcaacgagagactgacctctagcggctttgcctgcagccagtgttgccagcctctgtacgtgtacaagctggaacaagtgaacgacaagggcaagccccacaccaactacttcggcagatgcaacgtgtccgagcacgagaggctgatcctgctgtctcctcacaagcccgaggccaacgatgagctggtcacatacagcctgggcaagttcggacagagagccctggacttctacagcatccacgtgaccaaagaaagcacacaccccgtgaagcccctggctcagatcgccggcaatagatacgcctctggacctgtgggcaaagccctgtccgatgcctgcatgggaacaatcgccagcttcctgagcaagtaccaggacatcatcatcgagcaccagaaggtggtcaagggcaaccagaagagactggaaagcctgagggagctggccggcaaagagaacctggaataccccagcgtgaccctgcctcctcagcctcacacaaaagaaggcgtggacgcctacaacgaagtgatcgccagagtgagaatgtgggtcaacctgaacctgtggcagaagctgaaactgtccagggacgacgccaagcctctgctgagactgaagggcttccctagcttccctctggtggaaagacaggccaatgaagtggattggtgggacatggtctgcaacgtgaagaagctgatcaacgagaagaaagaggatggcaaggttttctggcagaacctggccggctacaagagacaagaagccctgaggccttacctgagcagcgaagaggaccggaagaagggcaagaagttcgccagataccagctgggcgacctgctgctgcacctggaaaagaagcacggcgaggactggggcaaagtgtacgatgaggcctgggagagaatcgacaagaaggtggaaggcctgagcaagcacattaagctggaagaggaaagaaggagcgaggacgcccaatctaaagccgctctgaccgattggctgagagccaaggccagctttgtgatcgagggcctgaaagaggccgacaaggacgagttctgcagatgcgagctgaagctgcagaagtggtacggcgatctgagaggcaagcccttcgccattgaggccgagaacagcatcctggacatcagcggcttcagcaagcagtacaactgcgccttcatttggcagaaagacggcgtcaagaaactgaacctgtacctgatcatcaattacttcaaaggcggcaagctgcggttcaagaagatcaaacccgaggccttcgaggctaacagattctacaccgtgatcaacaaaaagtccggcgagatcgtgcccatggaagtgaacttcaacttcgacgaccccaacctgattatcctgcctctggccttcggcaagagacagggcagagagttcatctggaacgatctgctgagcctggaaaccggctctctgaagctggccaatggcagagtgatcgagaaaaccctgtacaacaggagaaccagacaggacgagcctgctctgtttgtggccctgaccttcgagagaagagaggtgctggacagcagcaacatcaagcccatgaacctgatcggcgtggaccggggcgagaatatccctgctgtgatcgccctgacagaccctgaaggatgcccactgagcagattcaaggactccctgggcaaccctacacacatcctgagaatcggcgagagctacaaagagaagcagaggacaatccaggccaagaaagaggtggaacagagaagagccggcggatactctaggaagtacgccagcaaggccaagaatctggccgacgacatggtccgaaacaccgccagagatctgctgtactacgccgtgacacaggacgccatgctgatcttcgagaatctgagcagaggcttcggccggcagggcaagagaacctttatggccgagaggcagtacaccagaatggaagattggctcacagctaaactggcctacgagggactgagcaagacctacctgtccaaaacactggcccagtatacctccaagacctgcagcaattgcggcttcaccatcaccagcgccgactacgacagagtgctggaaaagctcaagaaaaccgccaccggctggatgaccaccatcaacggcaaagagctgaaggttgagggccagatcacctactacaacaggtacaagaggcagaacgtcgtgaaggatctgagcgtggaactggacagactgagcgaagagagcgtgaacaacgacatcagcagctggacaaagggcagatcaggcgaggctctgagcctgctgaagaagaggtttagccacagacctgtgcaagagaagttcgtgtgcctgaactgcggcttcgagacacacgccgatgaacaggctgccctgaacattgccagaagctggctgttcctgagaagccaagagtacaagaagtaccagaccaacaagaccaccggcaacaccgacaagagggcctttgtggaaacctggcagagcttctacagaaaaaagctgaaagaagtctggaagcccgccgtgactagtccaaaaaagaagagaaaggta

SEQ ID NO: 267 - DNA, 2991 bp, synthetic construct
  misc_feature 1..2991: note = CasX variant 488
  source 1..2991: mol_type = other DNA
atggccccaaagaagaagcggaaggtctctagacaagagatcaagagaatcaacaagatcagaaggagactggtcaaggacagcaacacaaagaaggccggcaagacaggccccatgaaaaccctgctcgtcagagtgatgacccctgacctgagagagcggctggaaaacctgagaaagaagcccgagaacatccctcagcctatcagcaacaccagcagggccaacctgaacaagctgctgaccgactacaccgagatgaagaaagccatcctgcacgtgtactgggaagagttccagaaagaccccgtgggcctgatgagcagagttgctcagcctgccagcaagaagatcgaccagaacaagctgaagcccgagatggacgagaagggcaatctgaccacagccggctttgcctgctctcagtgtggccagcctctgttcgtgtacaagctggaacaggtgtccgagaaaggcaaggcctacaccaactacttcggcagatgtaacgtggccgagcacgagaagctgattctgctggcccagctgaaacctgagaaggactctgatgaggccgtgacctacagcctgggcaagtttggacagagagccctggacttctacagcatccacgtgaccaaagaaagcacacaccccgtgaagcccctggctcagatcgccggcaatagatacgcctctggacctgtgggcaaagccctgtccgatgcctgcatgggaacaatcgccagcttcctgagcaagtaccaggacatcatcatcgagcaccagaaggtggtcaagggcaaccagaagagactggaaagcctgagggagctggccggcaaagagaacctggaataccccagcgtgaccctgcctcctcagcctcacacaaaagaaggcgtggacgcctacaacgaagtgatcgccagagtgagaatgtgggtcaacctgaacctgtggcagaagctgaaactgtccagggacgacgccaagcctctgctgagactgaagggcttccctagcttccctctggtggaaagacaggccaatgaagtggattggtgggacatggtctgcaacgtgaagaagctgatcaacgagaagaaagaggatggcaaggttttctggcagaacctggccggctacaagagacaagaagccctgaggccttacctgagcagcgaagaggaccggaagaagggcaagaagttcgccagataccagttcggcgacctgctgctgcacctggaaaagaagcacggcgaggactggggcaaagtgtacgatgaggcctgggagagaatcgacaagaaggtggaaggcctgagcaagcacattaagctggaagaggaaagaaggagcgaggacgcccaatctaaagccgctctgaccgattggctgagagccaaggccagctttgtgatcgagggcctgaaagaggccgacaaggacgagttctgcagatgcgagctgaagctgcagaagtggtacggcgatctgagaggcaagcccttcgccattgaggccgagaacagcatcctggacatcagcggcttcagcaagcagtacaactgcgccttcatttggcagaaagacggcgtcaagaaactgaacctgtacctgatcatcaattacttcaaaggcggcaagctgcggttcaagaagatcaaacccgaggccttcgaggctaacagattctacaccgtgatcaacaaaaagtccggcgagatcgtgcccatggaagtgaacttcaacttcgacgaccccaacctgattatcctgcctctggccttcggcaagagacagggcagagagttcatctggaacgatctgctgagcctggaaaccggctctctgaagctggccaatggcagagtgatcgagaaaaccctgtacaacaggagaaccagacaggacgagcctgctctgtttgtggccctgaccttcgagagaagagaggtgctggacagcagcaacatcaagcccatgaacctgatcggcatcgaccggggcgagaatatccctgctgtgatcgccctgacagaccctgaaggatgcccactgagcagattcaaggactccctgggcaaccctacacacatcctgagaatcggcgagagctacaaagagaagcagaggacaatccaggccaagaaagaggtggaacagagaagagccggcggatactctaggaagtacgccagcaaggccaagaatctggccgacgacatggtccgaaacaccgccagagatctgctgtactacgccgtgacacaggacgccatgctgatcttcgagaatctgagcagaggcttcggccggcagggcaagagaacctttatggccgagaggcagtacaccagaatggaagattggctcacagctaaactggcctacgagggactgagcaagacctacctgtccaaaacactggcccagtatacctccaagacctgcagcaattgcggcttcaccatcaccagcgccgactacgacagagtgctggaaaagctcaagaaaaccgccaccggctggatgaccaccatcaacggcaaagagctgaaggttgagggccagatcacctactacaacaggtacaagaggcagaacgtcgtgaaggatctgagcgtggaactggacagactgagcgaagagagcgtgaacaacgacatcagcagctggacaaagggcagatcaggcgaggctctgagcctgctgaagaagaggtttagccacagacctgtgcaagagaagttcgtgtgcctgaactgcggcttcgagacacacgccgatgaacaggctgccctgaacattgccagaagctggctgttcctgagaagccaagagtacaagaagtaccagaccaacaagaccaccggcaacaccgacaagagggcctttgtggaaacctggcagagcttctacagaaaaaagctgaaagaagtctggaagcccgccgtgactagtccaaaaaagaagagaaaggta

SEQ ID NO: 268 - DNA, 2991 bp, synthetic construct
  misc_feature 1..2991: note = CasX variant 489
  source 1..2991: mol_type = other DNA
atggccccaaagaagaagcggaaggtctctagacaagagatcaagagaatcaacaagatcagaaggagactggtcaaggacagcaacacaaagaaggccggcaagacaggccccatgaaaaccctgctcgtcagagtgatgacccctgacctgagagagcggctggaaaacctgagaaagaagcccgagaacatccctcagcctatcagcaacaccagcagggccaacctgaacaagctgctgaccgactacaccgagatgaagaaagccatcctgcacgtgtactgggaagagttccagaaagaccccgtgggcctgatgagcagagttgctcagcctgccagcaagaagatcgaccagaacaagctgaagcccgagatggacgagaagggcaatctgaccacagccggctttgcctgctctcagtgtggccagcctctgttcgtgtacaagctggaacaggtgtccgagaaaggcaaggcctacaccaactacttcggcagatgtaacgtggccgagcacgagaagctgattctgctggcccagctgaaacctgagaaggactctgatgaggccgtgacctacagcctgggcaagtttggacagagagccctggacttctacagcatccacgtgaccaaagaaagcacacaccccgtgaagcccctggctcagatcgccggcaatagatacgcctctggacctgtgggcaaagccctgtccgatgcctgcatgggaacaatcgccagcttcctgagcaagtaccaggacatcatcatcgagcaccagaaggtggtcaagggcaaccagaagagactggaaagcctgagggagctggccggcaaagagaacctggaataccccagcgtgaccctgcctcctcagcctcacacaaaagaaggcgtggacgcctacaacgaagtgatcgccagagtgagaatgtgggtcaacctgaacctgtggcagaagctgaaactgtccagggacgacgccaagcctctgctgagactgaagggcttccctagcttccctctggtggaaagacaggccaatgaagtggattggtgggacatggtctgcaacgtgaagaagctgatcaacgagaagaaagaggatggcaaggttttctggcagaacctggccggctacaagagacaagaagccctgaggccttacctgagcagcgaagaggaccggaagaagggcaagaagttcgccagataccagctgggcgacctgctgctgcacctggaaaagaagcacggcgaggactggggcaaagtgtacgatgaggcctgggagagaatcgacaagaaggtggaaggcctgagcaagcacattaagctggaagaggaaagaaggagcgaggacgcccaatctaaagccgctctgaccgattggctgagagccaaggccagctttgtgatcgagggcctgaaagaggccgacaaggacgagttctgcagatgcgagctgaagctgcagaagtggtacggcgatctgagaggcaagcccttcgccattgaggccgagaacagcatcctggacatcagcggcttcagcaagcagtacaactgcgccttcatttggcagaaagacggcgtcaagaaactgaacctgtacctgatcatcaattacttcaaaggcggcaagctgcggttcaagaagatcaaacccgaggccttcgaggctaacagattctacaccgtgatcaacaaaaagtccggcgagatcgtgcccatggaagtgaacttcaacttcgacgaccccaacctgattatcctgcctctggccttcggcaagagacagggcagagagttcatctggaacgatctgctgagcctggaaaccggctctctgaagctggccaatggcagagtgatcgagaaaaccctgtacaacaggagaaccagacaggacgagcctgctctgtttgtggccctgaccttcgagagaagagaggtgctggacagcagcaacatcaagcccatgaacctgatcggcgtggaccggggcgagaatatccctgctgtgatcgccctgacagaccctgaaggatgcccactgagcagattcaaggactccctgggcaaccctacacacatcctgagaatcggcgagagctacaaagagaagcagaggacaatccaggccaagaaagaggtggaacagagaagagccggcggatactctaggaagtacgccagcaaggccaagaatctggccgacgacatggtccgaaacaccgccagagatctgctgtactacgccgtgacacaggacgccatgctgatcttcgagaatctgagcagaggcttcggccggcagggcaagagaacctttatggccgagaggcagtacaccagaatggaagattggctcacagctaaactggcctacgagggactgagcaagacctacctgtccaaaacactggcccagtatacctccaagacctgcagcaattgcggcttcaccatcaccagcgccgactacgacagagtgctggaaaagctcaagaaaaccgccaccggctggatgaccaccatcaacggcaaagagctgaaggttgagggccagatcacctactacaacaggaggaagaggcagaacgtcgtgaaggatctgagcgtggaactggacagactgagcgaagagagcgtgaacaacgacatcagcagctggacaaagggcagatcaggcgaggctctgagcctgctgaagaagaggtttagccacagacctgtgcaagagaagttcgtgtgcctgaactgcggcttcgagacacacgccgatgaacaggctgccctgaacattgccagaagctggctgttcctgagaagccaagagtacaagaagtaccagaccaacaagaccaccggcaacaccgacaagagggcctttgtggaaacctggcagagcttctacagaaaaaagctgaaagaagtctggaagcccgccgtgactagtccaaaaaagaagagaaaggta

SEQ ID NO: 269 - DNA, 2991 bp, synthetic construct
  misc_feature 1..2991: note = CasX variant 490
  source 1..2991: mol_type = other DNA
atggccccaaagaagaagcggaaggtctctagacaagagatcaagagaatcaacaagatcagaaggagactggtcaaggacagcaacacaaagaaggccggcaagacaggccccatgaaaaccctgctcgtcagagtgatgacccctgacctgagagagcggctggaaaacctgagaaagaagcccgagaacatccctcagcctatcagcaacaccagcagggccaacctgaacaagctgctgaccgactacaccgagatgaagaaagccatcctgcacgtgtactgggaagagttccagaaagaccccgtgggcctgatgagcagagttgctcagcctgccagcaagaagatcgaccagaacaagctgaagcccgagatggacgagaagggcaatctgaccacagccggctttgcctgctctcagtgtggccagcctctgttcgtgtacaagctggaacaggtgtccgagaaaggcaaggcctacaccaactacttcggcagatgtaacgtggccgagcacgagaagctgattctgctggcccagctgaaacctgagaaggactctgatgaggccgtgacctacagcctgggcaagtttggacagagagccctggacttctacagcatccacgtgaccaaagaaagcacacaccccgtgaagcccctggctcagatcgccggcaatagatacgcctctggacctgtgggcaaagccctgtccgatgcctgcatgggaacaatcgccagcttcctgagcaagtaccaggacatcatcatcgagcaccagaaggtggtcaagggcaaccagaagagactggaaagcctgagggagctggccggcaaagagaacctggaataccccagcgtgaccctgcctcctcagcctcacacaaaagaaggcgtggacgcctacaacgaagtgatcgccagagtgagaatgtgggtcaacctgaacctgtggcagaagctgaaactgtccagggacgacgccaagcctctgctgagactgaagggcttccctagcttccctctggtggaaagacaggccaatgaagtggattggtgggacatggtctgcaacgtgaagaagctgatcaacgagaagaaagaggatggcaaggttttctggcagaacctggccggctacaagagacaagaagccctgaggccttacctgagcagcgaagaggaccggaagaagggcaagaagttcgccagataccagctgggcgacctgctgaagcacctggaaaagaagcacggcgaggactggggcaaagtgtacgatgaggcctgggagagaatcgacaagaaggtggaaggcctgagcaagcacattaagctggaagaggaaagaaggagcgaggacgcccaatctaaagccgctctgaccgattggctgagagccaaggccagctttgtgatcgagggcctgaaagaggccgacaaggacgagttctgcagatgcgagctgaagctgcagaagtggtacggcgatctgagaggcaagcccttcgccattgaggccgagaacagcatcctggacatcagcggcttcagcaagcagtacaactgcgccttcatttggcagaaagacggcgtcaagaaactgaacctgtacctgatcatcaattacttcaaaggcggcaagctgcggttcaagaagatcaaacccgaggccttcgaggctaacagattctacaccgtgatcaacaaaaagtccggcgagatcgtgcccatggaagtgaacttcaacttcgacgaccccaacctgattatcctgcctctggccttcggcaagagacagggcagagagttcatctggaacgatctgctgagcctggaaaccggctctctgaagctggccaatggcagagtgatcgagaaaaccctgtacaacaggagaaccagacaggacgagcctgctctgtttgtggccctgaccttcgagagaagagaggtgctggacagcagcaacatcaagcccatgaacctgatcggcgtggaccggggcgagaatatccctgctgtgatcgccctgacagaccctgaaggatgcccactgagcagattcaaggactccctgggcaaccctacacacatcctgagaatcggcgagagctacaaagagaagcagaggacaatccaggccaagaaagaggtggaacagagaagagccggcggatactctaggaagtacgccagcaaggccaagaatctggccgacgacatggtccgaaacaccgccagagatctgctgtactacgccgtgacacaggacgccatgctgatcttcgagaatctgagcagaggcttcggccggcagggcaagagaacctttatggccgagaggcagtacaccagaatggaagattggctcacagctaaactggcctacgagggactgagcaagacctacctgtccaaaacactggcccagtatacctccaagacctgcagcaattgcggcttcaccatcaccagcgccgactacgacagagtgctggaaaagctcaagaaaaccgccaccggctggatgaccaccatcaacggcaaagagctgaaggttgagggccagatcacctactacaacaggaggaagaggcagaacgtcgtgaaggatctgagcgtggaactggacagactgagcgaagagagcgtgaacaacgacatcagcagctggacaaagggcagatcaggcgaggctctgagcctgctgaagaagaggtttagccacagacctgtgcaagagaagttcgtgtgcctgaactgcggcttcgagacacacgccgatgaacaggctgccctgaacattgccagaagctggctgttcctgagaagccaagagtacaagaagtaccagaccaacaagaccaccggcaacaccgacaagagggcctttgtggaaacctggcagagcttctacagaaaaaagctgaaagaagtctggaagcccgccgtgactagtccaaaaaagaagagaaaggta

SEQ ID NO: 270 - DNA, 2991 bp, synthetic construct
  misc_feature 1..2991: note = CasX variant 491
  source 1..2991: mol_type = other DNA
atggccccaaagaagaagcggaaggtctctagacaagagatcaagagaatcaacaagatcagaaggagactggtcaaggacagcaacacaaagaaggccggcaagacaggccccatgaaaaccctgctcgtcagagtgatgacccctgacctgagagagcggctggaaaacctgagaaagaagcccgagaacatccctcagcctatcagcaacaccagcagggccaacctgaacaagctgctgaccgactacaccgagatgaagaaagccatcctgcacgtgtactgggaagagttccagaaagaccccgtgggcctgatgagcagagttgctcagcctgccagcaagaagatcgaccagaacaagctgaagcccgagatggacgagaagggcaatctgaccacagccggctttgcctgctctcagtgtggccagcctctgttcgtgtacaagctggaacaggtgtccgagaaaggcaaggcctacaccaactacttcggcagatgtaacgtggccgagcacgagaagctgattctgctggcccagctgaaacctgagaaggactctgatgaggccgtgacctacagcctgggcaagtttggacagagagccctggacttctacagcatccacgtgaccaaagaaagcacacaccccgtgaagcccctggctcagatcgccggcaatagatacgcctctggacctgtgggcaaagccctgtccgatgcctgcatgggaacaatcgccagcttcctgagcaagtaccaggacatcatcatcgagcaccagaaggtggtcaagggcaaccagaagagactggaaagcctgagggagctggccggcaaagagaacctggaataccccagcgtgaccctgcctcctcagcctcacacaaaagaaggcgtggacgcctacaacgaagtgatcgccagagtgagaatgtgggtcaacctgaacctgtggcagaagctgaaactgtccagggacgacgccaagcctctgctgagactgaagggcttccctagcttccctctggtggaaagacaggccaatgaagtggattggtgggacatggtctgcaacgtgaagaagctgatcaacgagaagaaagaggatggcaaggttttctggcagaacctggccggctacaagagacaagaagccctgaggccttacctgagcagcgaagaggaccggaagaagggcaagaagttcgccagataccagctgggcgacctgctgctgcacctggaaaagaagcacggcgaggactggggcaaagtgtacgatgaggcctgggagagaatcgacaagaaggtggaaggcctgagcaagcacattaagctggaagaggaaagaaggagcgaggacgcccaatctaaagccgctctgaccgattggctgagagccaaggccagctttgtgatcgagggcctgaaagaggccgacaaggacgagttctgcagatgcgagctgaagctgcagaagtggtacggcgatctgagaggcaagcccttcgccattgaggccgagaacagcatcctggacatcagcggcttcagcaagcagtacaactgcgccttcatttggcagaaagacggcgtcaagaaactgaacctgtacctgatcatcaattacttcaaaggcggcaagctgcggttcaagaagatcaaacccgaggccttcgaggctaacagattctacaccgtgatcaacaaaaagtccggcgagatcgtgcccatggaagtgaacttcaacttcgacgaccccaacctgattatcctgcctctggccttcggcaagagacagggcagagagttcatctggaacgatctgctgagcctggaaaccggctctctgaagctggccaatggcagagtgatcgagaaaaccctgtacaacaggagaaccagacaggacgagcctgctctgtttgtggccctgaccttcgagagaagagaggtgctggacagcagcaacatcaagcccatgaacctgatcggcgtggaccggggcgagaatatccctgctgtgatcgccctgacagaccctgaaggatgcccactgagcagattcaaggactccctgggcaaccctacacacatcctgagaatcggcgagagctacaaagagaagcagaggacaatccaggccaagaaagaggtggaacagagaagagccggcggatactctaggaagtacgccagcaaggccaagaatctggccgacgacatggtccgaaacaccgccagagatctgctgtactacgccgtgacacaggacgccatgctgatcttcgagaatctgagcagaggcttcggccggcagggcaagagaacctttatggccgagaggcagtacaccagaatggaagattggctcacagctaaactggcctacgagggactgagcaagacctacctgtccaaaacactggcccagtatacctccaagacctgcagcaattgcggcttcaccatcaccagcgccgactacgacagagtgctggaaaagctcaagaaaaccgccaccggctggatgaccaccatcaacggcaaagagctgaaggttgagggccagatcacctactacaacaggtacaagaggcagaacgtcgtgaaggatctgagcgtggaactggacagactgagcgaagagagcgtgaacaacgacatcagcagctggacaaagggcagatcaggcgaggctctgagcctgctgaagaagaggtttagccacagacctgtgcaagagaagttcgtgtgcctgaactgcggcttcgagacacacgccgatgaacaggctgccctgaacattgccagaagctggctgttcctgagaagccaagagtacaagaagtaccagaccaacaagaccaccggcaacaccgacaagagggcctttgtggaaacctggcagagcttctacagaaaaaagctgaaagaagtctggaagcccgccgtgactagtccaaaaaagaagagaaaggta

SEQ ID NO: 271 - DNA, 2991 bp, synthetic construct
  misc_feature 1..2991: note = CasX variant 494
  source 1..2991: mol_type = other DNA
atggccccaaagaagaagcggaaggtctctagacaagagatcaagagaatcaacaagatcagaaggagactggtcaaggacagcaacacaaagaaggccggcaagacaggccccatgaaaaccctgctcgtcagagtgatgacccctgacctgagagagcggctggaaaacctgagaaagaagcccgagaacatccctcagcctatcagcaacaccagcagggccaacctgaacaagctgctgaccgactacaccgagatgaagaaagccatcctgcacgtgtactgggaagagttccagaaagaccccgtgggcctgatgagcagagttgctcagcctgccagcaagaagatcgaccagaacaagctgaagcccgagatggacgagaagggcaatctgaccacagccggctttgcctgctctcagtgtggccagcctctgttcgtgtacaagctggaacaggtgtccgagaaaggcaaggcctacaccaactacttcggcagatgtaacgtggccgagcacgagaagctgattctgctggcccagctgaaacctgagaaggactctgatgaggccgtgacctacagcctgggcaagtttggacagagagccctggacttctacagcatccacgtgaccagggagagcaatcaccctgtgaagcccctggaacagatcggcggcaatagctgtgcctctggacctgtgggaaaagccctgagcgacgcctgtatgggagccgtggcatccttcctgaccaagtaccaggacatcatcctggaacaccagaaagtgatcaagaagaacgagaaaagactggccaacctcaaggatatcgccagcgctaacggcctggcctttcctaagatcaccctgcctccacagcctcacaccaaagagggcatcgaggcctacaacaacgtggtggcccagatcgtgatttgggtcaacctgaatctgtggcagaagctgaagatcggcagggacgaagccaagccactgcagagactgaagggcttccctagcttccctctggtggaaagacaggccaatgaagtggattggtgggacatggtctgcaacgtgaagaagctgatcaacgagaagaaagaggatggcaaggttttctggcagaacctggccggctacaagagacaagaagccctgaggccttacctgagcagcgaagaggaccggaagaagggcaagaagttcgccagataccagctgggcgacctgctgctgcacctggaaaagaagcacggcgaggactggggcaaagtgtacgatgaggcctgggagagaatcgacaagaaggtggaaggcctgagcaagcacattaagctggaagaggaaagaaggagcgaggacgcccaatctaaagccgctctgaccgattggctgagagccaaggccagctttgtgatcgagggcctgaaagaggccgacaaggacgagttctgcagatgcgagctgaagctgcagaagtggtacggcgatctgagaggcaagcccttcgccattgaggccgagaacagcatcctggacatcagcggcttcagcaagcagtacaactgcgccttcatttggcagaaagacggcgtcaagaaactgaacctgtacctgatcatcaattacttcaaaggcggcaagctgcggttcaagaagatcaaacccgaggccttcgaggctaacagattctacaccgtgatcaacaaaaagtccggcgagatcgtgcccatggaagtgaacttcaacttcgacgaccccaacctgattatcctgcctctggccttcggcaagagacagggcagagagttcatctggaacgatctgctgagcctggaaaccggctctctgaagctggccaatggcagagtgatcgagaaaaccctgtacaacaggagaaccagacaggacgagcctgctctgtttgtggccctgaccttcgagagaagagaggtgctggacagcagcaacatcaagcccatgaacctgatcggcgtggaccggggcgagaatatccctgctgtgatcgccctgacagaccctgaaggatgcccactgagcagattcaaggactccctgggcaaccctacacacatcctgagaatcggcgagagctacaaagagaagcagaggacaatccaggccaagaaagaggtggaacagagaagagccggcggatactctaggaagtacgccagcaaggccaagaatctggccgacgacatggtccgaaacaccgccagagatctgctgtactacgccgtgacacaggacgccatgctgatcttcgagaatctgagcagaggcttcggccggcagggcaagagaacctttatggccgagaggcagtacaccagaatggaagattggctcacagctaaactggcctacgagggactgagcaagacctacctgtccaaaacactggcccagtatacctccaagacctgcagcaattgcggcttcaccatcaccagcgccgactacgacagagtgctggaaaagctcaagaaaaccgccaccggctggatgaccaccatcaacggcaaagagctgaaggttgagggccagatcacctactacaacaggtacaagaggcagaacgtcgtgaaggatctgagcgtggaactggacagactgagcgaagagagcgtgaacaacgacatcagcagctggacaaagggcagatcaggcgaggctctgagcctgctgaagaagaggtttagccacagacctgtgcaagagaagttcgtgtgcctgaactgcggcttcgagacacacgccgatgaacaggctgccctgaacattgccagaagctggctgttcctgagaagccaagagtacaagaagtaccagaccaacaagaccaccggcaacaccgacaagagggcctttgtggaaacctggcagagcttctacagaaaaaagctgaaagaagtctggaagcccgccgtgactagtccaaaaaagaagagaaaggta

SEQ ID NO: 272 - protein, 997 aa, synthetic construct
  REGION 1..997: note = CasX variant 387
MAPKKKRKVSRQEIKRINKIRRRLVKDSNTKKAGKTGPMKTLLVRVMTPDLRERLENLRKKPENIPQPISNTSRANLNKLLTDYTEMKKAILHVYWEEFQKDPVGLMSRVAQPASKKIDQNKLKPEMDEKGNLTTAGFACSQCGQPLFVYKLEQVSEKGKAYTNYFGRCNVAEHEKLILLAQLKPEKDSDEAVTYSLGKFGQRALDFYSIHVTRESNHPVKPLEQIGGNSCASGPVGKALSDACMGAVASFLTKYQDIILEHQKVIKKNEKRLANLKDIASANGLAFPKITLPPQPHTKEGIEAYNNVVAQIVIWVNLNLWQKLKIGRDEAKPLQRLKGFPSFPLVERQANEVDWWDMVCNVKKLINEKKEDGKVFWQNLAGYKRQEALRPYLSSEEDRKKGKKFARYQFGDLLLHLEKKHGEDWGKVYDEAWERIDKKVEGLSKHIKLEEERRSEDAQSKAALTDWLRAKASFVIEGLKEADKDEFCRCELKLQKWYGDLRGKPFAIEAENSILDISGFSKQYNCAFIWQKDGVKKLNLYLIINYFKGGKLRFKKIKPEAFEANRFYTVINKKSGEIVPMEVNFNFDDPNLIILPLAFGKRQGREFIWNDLLSLETGSLKLANGRVIEKTLYNRRTRQDEPALFVALTFERREVLDSSNIKPMNLIGIDRGENIPAVIALTDPEGCPLSRFKDSLGNPTHILRIGESYKEKQRTIQAKKEVEQRRAGGYSRKYASKAKNLADDMVRNTARDLLYYAVTQDAMLIFENLSRGFGRQGKRTFMAERQYTRMEDWLTAKLAYEGLSKTYLSKTLAQYTSKTCSNCGFTITSADYDRVLEKLKKTATGWMTTINGKELKVEGQITYYNRYKRQNVVKDLSVELDRLSEESVNNDISSWTKGRSGEALSLLKKRFSHRPVQEKFVCLNCGFETHADEQAALNIARSWLFLRSQEYKKYQTNKTTGNTDKRAFVETWQSFYRKKLKEVWKPAVTSPKKKRKV

SEQ ID NO: 273 - protein, 1005 aa, synthetic construct
  REGION 1..1005: note = CasX variant 395
MAPKKKRKVSRQEIKRINKIRRRLVKDSNTKKAGKTGPMKTLLVRVMTPDLRERLENLRKKPENIPQPISNTSRANLNKLLTDYTEMKKAILHVYWEEFQKDPVGLMSRVAQPAPKNIDQRKLIPVKDGNERLTSSGFACSQCCQPLYVYKLEQVNDKGKPHTNYFGRCNVSEHERLILLSPHKPEANDELVTYSLGKFGQRALDFYSIHVTKESTHPVKPLAQIAGNRYASGPVGKALSDACMGTIASFLSKYQDIIIEHQKVVKGNQKRLESLRELAGKENLEYPSVTLPPQPHTKEGVDAYNEVIARVRMWVNLNLWQKLKLSRDDAKPLLRLKGFPSFPLVERQANEVDWWDMVCNVKKLINEKKEDGKVFWQNLAGYKRQEALRPYLSSEEDRKKGKKFARYQFGDLLLHLEKKHGEDWGKVYDEAWERIDKKVEGLSKHIKLEEERRSEDAQSKAALTDWLRAKASFVIEGLKEADKDEFCRCELKLQKWYGDLRGKPFAIEAENSILDISGFSKQYNCAFIWQKDGVKKLNLYLIINYFKGGKLRFKKIKPEAFEANRFYTVINKKSGEIVPMEVNFNFDDPNLIILPLAFGKRQGREFIWNDLLSLETGSLKLANGRVIEKTLYNRRTRQDEPALFVALTFERREVLDSSNIKPMNLIGIDRGENIPAVIALTDPEGCPLSRFKDSLGNPTHILRIGESYKEKQRTIQAKKEVEQRRAGGYSRKYASKAKNLADDMVRNTARDLLYYAVTQDAMLIFENLSRGFGRQGKRTFMAERQYTRMEDWLTAKLAYEGLSKTYLSKTLAQYTSKTCSNCGFTITSADYDRVLEKLKKTATGWMTTINGKELKVEGQITYYNRYKRQNVVKDLSVELDRLSEESVNNDISSWTKGRSGEALSLLKKRFSHRPVQEKFVCLNCGFETHADEQAALNIARSWLFLRSQEYKKYQTNKTTGNTDKRAFVETWQSFYRKKLKEVWKPAVTSPKKKRKVTSPKKKRKV

SEQ ID NO: 274 - protein, 996 aa, synthetic construct
  REGION 1..996: note = CasX variant 485
MAPKKKRKVSRQEIKRINKIRRRLVKDSNTKKAGKTGPMKTLLVRVMTPDLRERLENLRKKPENIPQPISNTSRANLNKLLTDYTEMKKAILHVYWEEFQKDPVGLMSRVAQPAPKNIDQRKLIPVKDGNERLTSSGFACSQCCQPLYVYKLEQVNDKGKPHTNYFGRCNVSEHERLILLSPHKPEANDELVTYSLGKFGQRALDFYSIHVTKESTHPVKPLAQIAGNRYASGPVGKALSDACMGTIASFLSKYQDIIIEHQKVVKGNQKRLESLRELAGKENLEYPSVTLPPQPHTKEGVDAYNEVIARVRMWVNLNLWQKLKLSRDDAKPLLRLKGFPSFPLVERQANEVDWWDMVCNVKKLINEKKEDGKVFWQNLAGYKRQEALRPYLSSEEDRKKGKKFARYQLGDLLLHLEKKHGEDWGKVYDEAWERIDKKVEGLSKHIKLEEERRSEDAQSKAALTDWLRAKASFVIEGLKEADKDEFCRCELKLQKWYGDLRGKPFAIEAENSILDISGFSKQYNCAFIWQKDGVKKLNLYLIINYFKGGKLRFKKIKPEAFEANRFYTVINKKSGEIVPMEVNFNFDDPNLIILPLAFGKRQGREFIWNDLLSLETGSLKLANGRVIEKTLYNRRTRQDEPALFVALTFERREVLDSSNIKPMNLIGVDRGENIPAVIALTDPEGCPLSRFKDSLGNPTHILRIGESYKEKQRTIQAKKEVEQRRAGGYSRKYASKAKNLADDMVRNTARDLLYYAVTQDAMLIFENLSRGFGRQGKRTFMAERQYTRMEDWLTAKLAYEGLSKTYLSKTLAQYTSKTCSNCGFTITSADYDRVLEKLKKTATGWMTTINGKELKVEGQITYYNRRKRQNVVKDLSVELDRLSEESVNNDISSWTKGRSGEALSLLKKRFSHRPVQEKFVCLNCGFETHADEQAALNIARSWLFLRSQEYKKYQTNKTTGNTDKRAFVETWQSFYRKKLKEVWKPAVTSPKKKRKV

SEQ ID NO: 275 - protein, 996 aa, synthetic construct
  REGION 1..996: note = CasX variant 486
MAPKKKRKVSRQEIKRINKIRRRLVKDSNTKKAGKTGPMKTLLVRVMTPDLRERLENLRKKPENIPQPISNTSRANLNKLLTDYTEMKKAILHVYWEEFQKDPVGLMSRVAQPAPKNIDQRKLIPVKDGNERLTSSGFACSQCCQPLYVYKLEQVNDKGKPHTNYFGRCNVSEHERLILLSPHKPEANDELVTYSLGKFGQRALDFYSIHVTKESTHPVKPLAQIAGNRYASGPVGKALSDACMGTIASFLSKYQDIIIEHQKVVKGNQKRLESLRELAGKENLEYPSVTLPPQPHTKEGVDAYNEVIARVRMWVNLNLWQKLKLSRDDAKPLLRLKGFPSFPLVERQANEVDWWDMVCNVKKLINEKKEDGKVFWQNLAGYKRQEALRPYLSSEEDRKKGKKFARYQLGDLLKHLEKKHGEDWGKVYDEAWERIDKKVEGLSKHIKLEEERRSEDAQSKAALTDWLRAKASFVIEGLKEADKDEFCRCELKLQKWYGDLRGKPFAIEAENSILDISGFSKQYNCAFIWQKDGVKKLNLYLIINYFKGGKLRFKKIKPEAFEANRFYTVINKKSGEIVPMEVNFNFDDPNLIILPLAFGKRQGREFIWNDLLSLETGSLKLANGRVIEKTLYNRRTRQDEPALFVALTFERREVLDSSNIKPMNLIGVDRGENIPAVIALTDPEGCPLSRFKDSLGNPTHILRIGESYKEKQRTIQAKKEVEQRRAGGYSRKYASKAKNLADDMVRNTARDLLYYAVTQDAMLIFENLSRGFGRQGKRTFMAERQYTRMEDWLTAKLAYEGLSKTYLSKTLAQYTSKTCSNCGFTITSADYDRVLEKLKKTATGWMTTINGKELKVEGQITYYNRRKRQNVVKDLSVELDRLSEESVNNDISSWTKGRSGEALSLLKKRFSHRPVQEKFVCLNCGFETHADEQAALNIARSWLFLRSQEYKKYQTNKTTGNTDKRAFVETWQSFYRKKLKEVWKPAVTSPKKKRKV

SEQ ID NO: 276 - protein, 996 aa, synthetic construct
  REGION 1..996: note = CasX variant 487
MAPKKKRKVSRQEIKRINKIRRRLVKDSNTKKAGKTGPMKTLLVRVMTPDLRERLENLRKKPENIPQPISNTSRANLNKLLTDYTEMKKAILHVYWEEFQKDPVGLMSRVAQPAPKNIDQRKLIPVKDGNERLTSSGFACSQCCQPLYVYKLEQVNDKGKPHTNYFGRCNVSEHERLILLSPHKPEANDELVTYSLGKFGQRALDFYSIHVTKESTHPVKPLAQIAGNRYASGPVGKALSDACMGTIASFLSKYQDIIIEHQKVVKGNQKRLESLRELAGKENLEYPSVTLPPQPHTKEGVDAYNEVIARVRMWVNLNLWQKLKLSRDDAKPLLRLKGFPSFPLVERQANEVDWWDMVCNVKKLINEKKEDGKVFWQNLAGYKRQEALRPYLSSEEDRKKGKKFARYQLGDLLLHLEKKHGEDWGKVYDEAWERIDKKVEGLSKHIKLEEERRSEDAQSKAALTDWLRAKASFVIEGLKEADKDEFCRCELKLQKWYGDLRGKPFAIEAENSILDISGFSKQYNCAFIWQKDGVKKLNLYLIINYFKGGKLRFKKIKPEAFEANRFYTVINKKSGEIVPMEVNFNFDDPNLIILPLAFGKRQGREFIWNDLLSLETGSLKLANGRVIEKTLYNRRTRQDEPALFVALTFERREVLDSSNIKPMNLIGVDRGENIPAVIALTDPEGCPLSRFKDSLGNPTHILRIGESYKEKQRTIQAKKEVEQRRAGGYSRKYASKAKNLADDMVRNTARDLLYYAVTQDAMLIFENLSRGFGRQGKRTFMAERQYTRMEDWLTAKLAYEGLSKTYLSKTLAQYTSKTCSNCGFTITSADYDRVLEKLKKTATGWMTTINGKELKVEGQITYYNRYKRQNVVKDLSVELDRLSEESVNNDISSWTKGRSGEALSLLKKRFSHRPVQEKFVCLNCGFETHADEQAALNIARSWLFLRSQEYKKYQTNKTTGNTDKRAFVETWQSFYRKKLKEVWKPAVTSPKKKRKV

SEQ ID NO: 277 - protein, 997 aa, synthetic construct
  REGION 1..997: note = CasX variant 488
MAPKKKRKVSRQEIKRINKIRRRLVKDSNTKKAGKTGPMKTLLVRVMTPDLRERLENLRKKPENIPQPISNTSRANLNKLLTDYTEMKKAILHVYWEEFQKDPVGLMSRVAQPASKKIDQNKLKPEMDEKGNLTTAGFACSQCGQPLFVYKLEQVSEKGKAYTNYFGRCNVAEHEKLILLAQLKPEKDSDEAVTYSLGKFGQRALDFYSIHVTKESTHPVKPLAQIAGNRYASGPVGKALSDACMGTIASFLSKYQDIIIEHQKVVKGNQKRLESLRELAGKENLEYPSVTLPPQPHTKEGVDAYNEVIARVRMWVNLNLWQKLKLSRDDAKPLLRLKGFPSFPLVERQANEVDWWDMVCNVKKLINEKKEDGKVFWQNLAGYKRQEALRPYLSSEEDRKKGKKFARYQFGDLLLHLEKKHGEDWGKVYDEAWERIDKKVEGLSKHIKLEEERRSEDAQSKAALTDWLRAKASFVIEGLKEADKDEFCRCELKLQKWYGDLRGKPFAIEAENSILDISGFSKQYNCAFIWQKDGVKKLNLYLIINYFKGGKLRFKKIKPEAFEANRFYTVINKKSGEIVPMEVNFNFDDPNLIILPLAFGKRQGREFIWNDLLSLETGSLKLANGRVIEKTLYNRRTRQDEPALFVALTFERREVLDSSNIKPMNLIGIDRGENIPAVIALTDPEGCPLSRFKDSLGNPTHILRIGESYKEKQRTIQAKKEVEQRRAGGYSRKYASKAKNLADDMVRNTARDLLYYAVTQDAMLIFENLSRGFGRQGKRTFMAERQYTRMEDWLTAKLAYEGLSKTYLSKTLAQYTSKTCSNCGFTITSADYDRVLEKLKKTATGWMTTINGKELKVEGQITYYNRYKRQNVVKDLSVELDRLSEESVNNDISSWTKGRSGEALSLLKKRFSHRPVQEKFVCLNCGFETHADEQAALNIARSWLFLRSQEYKKYQTNKTTGNTDKRAFVETWQSFYRKKLKEVWKPAVTSPKKKRKV

SEQ ID NO: 278 - protein, 997 aa, synthetic construct
  REGION 1..997: note = CasX variant 489
MAPKKKRKVSRQEIKRINKIRRRLVKDSNTKKAGKTGPMKTLLVRVMTPDLRERLENLRKKPENIPQPISNTSRANLNKLLTDYTEMKKAILHVYWEEFQKDPVGLMSRVAQPASKKIDQNKLKPEMDEKGNLTTAGFACSQCGQPLFVYKLEQVSEKGKAYTNYFGRCNVAEHEKLILLAQLKPEKDSDEAVTYSLGKFGQRALDFYSIHVTKESTHPVKPLAQIAGNRYASGPVGKALSDACMGTIASFLSKYQDIIIEHQKVVKGNQKRLESLRELAGKENLEYPSVTLPPQPHTKEGVDAYNEVIARVRMWVNLNLWQKLKLSRDDAKPLLRLKGFPSFPLVERQANEVDWWDMVCNVKKLINEKKEDGKVFWQNLAGYKRQEALRPYLSSEEDRKKGKKFARYQLGDLLLHLEKKHGEDWGKVYDEAWERIDKKVEGLSKHIKLEEERRSEDAQSKAALTDWLRAKASFVIEGLKEADKDEFCRCELKLQKWYGDLRGKPFAIEAENSILDISGFSKQYNCAFIWQKDGVKKLNLYLIINYFKGGKLRFKKIKPEAFEANRFYTVINKKSGEIVPMEVNFNFDDPNLIILPLAFGKRQGREFIWNDLLSLETGSLKLANGRVIEKTLYNRRTRQDEPALFVALTFERREVLDSSNIKPMNLIGVDRGENIPAVIALTDPEGCPLSRFKDSLGNPTHILRIGESYKEKQRTIQAKKEVEQRRAGGYSRKYASKAKNLADDMVRNTARDLLYYAVTQDAMLIFENLSRGFGRQGKRTFMAERQYTRMEDWLTAKLAYEGLSKTYLSKTLAQYTSKTCSNCGFTITSADYDRVLEKLKKTATGWMTTINGKELKVEGQITYYNRRKRQNVVKDLSVELDRLSEESVNNDISSWTKGRSGEALSLLKKRFSHRPVQEKFVCLNCGFETHADEQAALNIARSWLFLRSQEYKKYQTNKTTGNTDKRAFVETWQSFYRKKLKEVWKPAVTSPKKKRKV

SEQ ID NO: 279 - protein, 997 aa, synthetic construct
  REGION 1..997: note = CasX variant 490
MAPKKKRKVSRQEIKRINKIRRRLVKDSNTKKAGKTGPMKTLLVRVMTPDLRERLENLRKKPENIPQPISNTSRANLNKLLTDYTEMKKAILHVYWEEFQKDPVGLMSRVAQPASKKIDQNKLKPEMDEKGNLTTAGFACSQCGQPLFVYKLEQVSEKGKAYTNYFGRCNVAEHEKLILLAQLKPEKDSDEAVTYSLGKFGQRALDFYSIHVTKESTHPVKPLAQIAGNRYASGPVGKALSDACMGTIASFLSKYQDIIIEHQKVVKGNQKRLESLRELAGKENLEYPSVTLPPQPHTKEGVDAYNEVIARVRMWVNLNLWQKLKLSRDDAKPLLRLKGFPSFPLVERQANEVDWWDMVCNVKKLINEKKEDGKVFWQNLAGYKRQEALRPYLSSEEDRKKGKKFARYQLGDLLKHLEKKHGEDWGKVYDEAWERIDKKVEGLSKHIKLEEERRSEDAQSKAALTDWLRAKASFVIEGLKEADKDEFCRCELKLQKWYGDLRGKPFAIEAENSILDISGFSKQYNCAFIWQKDGVKKLNLYLIINYFKGGKLRFKKIKPEAFEANRFYTVINKKSGEIVPMEVNFNFDDPNLIILPLAFGKRQGREFIWNDLLSLETGSLKLANGRVIEKTLYNRRTRQDEPALFVALTFERREVLDSSNIKPMNLIGVDRGENIPAVIALTDPEGCPLSRFKDSLGNPTHILRIGESYKEKQRTIQAKKEVEQRRAGGYSRKYASKAKNLADDMVRNTARDLLYYAVTQDAMLIFENLSRGFGRQGKRTFMAERQYTRMEDWLTAKLAYEGLSKTYLSKTLAQYTSKTCSNCGFTITSADYDRVLEKLKKTATGWMTTINGKELKVEGQITYYNRRKRQNVVKDLSVELDRLSEESVNNDISSWTKGRSGEALSLLKKRFSHRPVQEKFVCLNCGFETHADEQAALNIARSWLFLRSQEYKKYQTNKTTGNTDKRAFVETWQSFYRKKLKEVWKPAVTSPKKKRKV

SEQ ID NO: 280 - protein, 997 aa, synthetic construct
  REGION 1..997: note = CasX variant 491
MAPKKKRKVSRQEIKRINKIRRRLVKDSNTKKAGKTGPMKTLLVRVMTPDLRERLENLRKKPENIPQPISNTSRANLNKLLTDYTEMKKAILHVYWEEFQKDPVGLMSRVAQPASKKIDQNKLKPEMDEKGNLTTAGFACSQCGQPLFVYKLEQVSEKGKAYTNYFGRCNVAEHEKLILLAQLKPEKDSDEAVTYSLGKFGQRALDFYSIHVTKESTHPVKPLAQIAGNRYASGPVGKALSDACMGTIASFLSKYQDIIIEHQKVVKGNQKRLESLRELAGKENLEYPSVTLPPQPHTKEGVDAYNEVIARVRMWVNLNLWQKLKLSRDDAKPLLRLKGFPSFPLVERQANEVDWWDMVCNVKKLINEKKEDGKVFWQNLAGYKRQEALRPYLSSEEDRKKGKKFARYQLGDLLLHLEKKHGEDWGKVYDEAWERIDKKVEGLSKHIKLEEERRSEDAQSKAALTDWLRAKASFVIEGLKEADKDEFCRCELKLQKWYGDLRGKPFAIEAENSILDISGFSKQYNCAFIWQKDGVKKLNLYLIINYFKGGKLRFKKIKPEAFEANRFYTVINKKSGEIVPMEVNFNFDDPNLIILPLAFGKRQGREFIWNDLLSLETGSLKLANGRVIEKTLYNRRTRQDEPALFVALTFERREVLDSSNIKPMNLIGVDRGENIPAVIALTDPEGCPLSRFKDSLGNPTHILRIGESYKEKQRTIQAKKEVEQRRAGGYSRKYASKAKNLADDMVRNTARDLLYYAVTQDAMLIFENLSRGFGRQGKRTFMAERQYTRMEDWLTAKLAYEGLSKTYLSKTLAQYTSKTCSNCGFTITSADYDRVLEKLKKTATGWMTTINGKELKVEGQITYYNRYKRQNVVKDLSVELDRLSEESVNNDISSWTKGRSGEALSLLKKRFSHRPVQEKFVCLNCGFETHADEQAALNIARSWLFLRSQEYKKYQTNKTTGNTDKRAFVETWQSFYRKKLKEVWKPAVTSPKKKRKV

SEQ ID NO: 281 - protein, 997 aa, synthetic construct
  REGION 1..997: note = CasX variant 494
MAPKKKRKVSRQEIKRINKIRRRLVKDSNTKKAGKTGPMKTLLVRVMTPDLRERLENLRKKPENIPQPISNTSRANLNKLLTDYTEMKKAILHVYWEEFQKDPVGLMSRVAQPASKKIDQNKLKPEMDEKGNLTTAGFACSQCGQPLFVYKLEQVSEKGKAYTNYFGRCNVAEHEKLILLAQLKPEKDSDEAVTYSLGKFGQRALDFYSIHVTRESNHPVKPLEQIGGNSCASGPVGKALSDACMGAVASFLTKYQDIILEHQKVIKKNEKRLANLKDIASANGLAFPKITLPPQPHTKEGIEAYNNVVAQIVIWVNLNLWQKLKIGRDEAKPLQRLKGFPSFPLVERQANEVDWWDMVCNVKKLINEKKEDGKVFWQNLAGYKRQEALRPYLSSEEDRKKGKKFARYQLGDLLLHLEKKHGEDWGKVYDEAWERIDKKVEGLSKHIKLEEERRSEDAQSKAALTDWLRAKASFVIEGLKEADKDEFCRCELKLQKWYGDLRGKPFAIEAENSILDISGFSKQYNCAFIWQKDGVKKLNLYLIINYFKGGKLRFKKIKPEAFEANRFYTVINKKSGEIVPMEVNFNFDDPNLIILPLAFGKRQGREFIWNDLLSLETGSLKLANGRVIEKTLYNRRTRQDEPALFVALTFERREVLDSSNIKPMNLIGVDRGENIPAVIALTDPEGCPLSRFKDSLGNPTHILRIGESYKEKQRTIQAKKEVEQRRAGGYSRKYASKAKNLADDMVRNTARDLLYYAVTQDAMLIFENLSRGFGRQGKRTFMAERQYTRMEDWLTAKLAYEGLSKTYLSKTLAQYTSKTCSNCGFTITSADYDRVLEKLKKTATGWMTTINGKELKVEGQITYYNRYKRQNVVKDLSVELDRLSEESVNNDISSWTKGRSGEALSLLKKRFSHRPVQEKFVCLNCGFETHADEQAALNIARSWLFLRSQEYKKYQTNKTTGNTDKRAFVETWQSFYRKKLKEVWKPAVTSPKKKRKV

SEQ ID NO: 282 - DNA, 22 bp, synthetic construct
  misc_feature 1..22: note = T7 promoter primer
  source 1..22: mol_type = other DNA
gaaattaatacgactcactata

SEQ ID NO: 283 - DNA, 87 bp, synthetic construct
  misc_feature 1..87: note = sg2 backbone fwd primer
  source 1..87: mol_type = other DNA
gaaattaatacgactcactataggtactggcgcttttatctcattactttgagagccatcaccagcgactatgtcgtatgggtaaag

SEQ ID NO: 284 - DNA, 78 bp, synthetic construct
  misc_feature 1..78: note = sg2 backbone rev primer
  source 1..78: mol_type = other DNA
ctttgatgcttcttatttatcggatttctctccgataaataagcgctttacccatacgacatagtcgctggtgatggc

SEQ ID NO: 285 - DNA, 54 bp, synthetic construct
  misc_feature 1..54: note = sg2.7.37 spacer primer
  source 1..54: mol_type = other DNA
cggagcgagacatctcggccctttgatgcttcttatttatcggatttctctccg

SEQ ID NO: 286 - DNA, 90 bp, synthetic construct
  misc_feature 1..90: note = sg32 backbone fwd primer
  source 1..90: mol_type = other DNA
gaaattaatacgactcactataggtactggcgcttttatctcattactttgagagccatcaccagcgactatgtcgtatgggtaaagcgc

SEQ ID NO: 287 - DNA, 46 bp, synthetic construct
  misc_feature 1..46: note = sg32 backbone rev primer
  source 1..46: mol_type = other DNA
ctttgatgcttccctccgaagagggcgctttacccatacgacatag

SEQ ID NO: 288 - DNA, 43 bp, synthetic construct
  misc_feature 1..43: note = sg32.7.37 spacer primer
  source 1..43: mol_type = other DNA
cggagcgagacatctcggccctttgatgcttccctccgaagag

SEQ ID NO: 289 - DNA, 90 bp, synthetic construct
  misc_feature 1..90: note = sg64 backbone fwd primer
  source 1..90: mol_type = other DNA
gaaattaatacgactcactataggtactggcgcctttatctcattactttgagagccatcaccagcgactatgtcgtatgggtaaagcgc

SEQ ID NO: 290 - DNA, 54 bp, synthetic construct
  misc_feature 1..54: note = sg64 backbone rev primer
  source 1..54: mol_type = other DNA
ctttgatgcttcttacggaccgaagtccgtaagcgctttacccatacgacatag

SEQ ID NO: 291 - DNA, 45 bp, synthetic construct
  misc_feature 1..45: note = sg64.7.37 spacer primer
  source 1..45: mol_type = other DNA
cggagcgagacatctcggccctttgatgcttcttacggaccgaag

SEQ ID NO: 292 - DNA, 87 bp, synthetic construct
  misc_feature 1..87: note = sg174 backbone fwd primer
  source 1..87: mol_type = other DNA
gaaattaatacgactcactataactggcgcttttatctgattactttgagagccatcaccagcgactatgtcgtagtgggtaaagct

SEQ ID NO: 293 - DNA, 50 bp, synthetic construct
  misc_feature 1..50: note = sg174 backbone rev primer
  source 1..50: mol_type = other DNA
ctttgatgctccctccgaagagggagctttacccactacgacatagtcgc

SEQ ID NO: 294 - DNA, 36 bp, synthetic construct
  misc_feature 1..36: note = sg174.7.37 spacer primer
  source 1..36: mol_type = other DNA
cggagcgagacatctcggccctttgatgctccctcc

SEQ ID NO: 295 - RNA, 130 nt, synthetic construct
  misc_feature 1..130: note = gRNA sequence
  source 1..130: mol_type = other RNA
ggtactggcgcttttatctcattactttgagagccatcaccagcgactatgtcgtatgggtaaagcgcttatttatcggagagaaatccgataaataagaagcatcaaagggccgagatgtctcgctccg

SEQ ID NO: 296 - RNA, 107 nt, synthetic construct
  misc_feature 1..107: note = gRNA sequence
  source 1..107: mol_type = other RNA
ggtactggcgcttttatctcattactttgagagccatcaccagcgactatgtcgtatgggtaaagcgccctcttcggagggaagcatcaaagggccgagatgtctcg

SEQ ID NO: 297 - RNA, 120 nt, synthetic construct
  misc_feature 1..120: note = gRNA sequence
  source 1..120: mol_type = other RNA
ggtactggcgcctttatctcattactttgagagccatcaccagcgactatgtcgtatgggtaaagcgcttacggacttcggtccgtaagaagcatcaaagggccgagatgtctcgctccg

SEQ ID NO: 298 - RNA, 109 nt, synthetic construct
  misc_feature 1..109: note = gRNA sequence
  source 1..109: mol_type = other RNA
actggcgcttttatctgattactttgagagccatcaccagcgactatgtcgtagtgggtaaagctccctcttcggagggagcatcaaagggccgagatgtctcgctccg

SEQ ID NO: 299 - DNA, 60 bp, synthetic construct
  misc_feature 1..60: note = B2M oligo
  source 1..60: mol_type = other DNA
tgaagctgacagcattcgggccgagatgtctcgctccgtggccttagctgtgctcgcgct

SEQ ID NO: 300 - DNA, 60 bp, synthetic construct; identical to SEQ ID NO: 299
  misc_feature 1..60: note = B2M oligo
  source 1..60: mol_type = other DNA

SEQ ID NO: 301 - DNA, 60 bp, synthetic construct
  misc_feature 1..60: note = target sequence
  source 1..60: mol_type = other DNA
agcgcgagcacagctaaggccacggagcgagacatctcggcccgaatgctgtcagcttca

SEQ ID NO: 302 - DNA, 60 bp, synthetic construct; identical to SEQ ID NO: 299
  misc_feature 1..60: note = target sequence
  source 1..60: mol_type = other DNA

SEQ ID NO: 303 - DNA, 60 bp, synthetic construct
  misc_feature 1..60: note = target sequence
  source 1..60: mol_type = other DNA
agcgcgagcacagctaaggccacggagcgagacatctcggcccgagtgctgtcagcttca

SEQ ID NO: 304 - DNA, 60 bp, synthetic construct
  misc_feature 1..60: note = target sequence
  source 1..60: mol_type = other DNA
tgaagctgacagcactcgggccgagatgtctcgctccgtggccttagctgtgctcgcgct

SEQ ID NO: 305 - DNA, 60 bp, synthetic construct
  misc_feature 1..60: note = target sequence
  source 1..60: mol_type = other DNA
agcgcgagcacagctaaggccacggagcgagacatctcggcccgactgctgtcagcttca

SEQ ID NO: 306 - DNA, 60 bp, synthetic construct
  misc_feature 1..60: note = target sequence
  source 1..60: mol_type = other DNA
tgaagctgacagcagtcgggccgagatgtctcgctccgtggccttagctgtgctcgcgct

SEQ ID NO: 307 - DNA, 60 bp, synthetic construct
  misc_feature 1..60: note = target sequence
  source 1..60: mol_type = other DNA
agcgcgagcacagctaaggccacggagcgagacatctcggcccgattgctgtcagcttca

SEQ ID NO: 308 - DNA, 60 bp, synthetic construct
  misc_feature 1..60: note = target sequence
  source 1..60: mol_type = other DNA
tgaagctgacagcaatcgggccgagatgtctcgctccgtggccttagctgtgctcgcgct

SEQ ID NO: 309 - RNA, 20 nt, synthetic construct
  misc_feature 1..20: note = HRE targeting sequence
  source 1..20: mol_type = other RNA
cttgtccctgcgccgccgcc

SEQ ID NO: 310 - RNA, 20 nt, synthetic construct
  misc_feature 1..20: note = HRE targeting sequence
  source 1..20: mol_type = other RNA
ccaccgcctgcgcctccgcc

SEQ ID NO: 311 - RNA, 20 nt, synthetic construct
  misc_feature 1..20: note = HRE targeting sequence
  source 1..20: mol_type = other RNA
cctctagcgactggtggaat

SEQ ID NO: 312 - RNA, 20 nt, synthetic construct
  misc_feature 1..20: note = HRE targeting sequence
  source 1..20: mol_type = other RNA
accagtcgctagaggcgaaa

SEQ ID NO: 313 - RNA, 20 nt, synthetic construct
  misc_feature 1..20: note = HRE targeting sequence
  source 1..20: mol_type = other RNA
ctctcatttctctgaccgaa

SEQ ID NO: 314 - RNA, 20 nt, synthetic construct
  misc_feature 1..20: note = HRE targeting sequence
  source 1..20: mol_type = other RNA
acccgcgcctcttcccggca

SEQ ID NO: 315 - RNA, 20 nt, synthetic construct
  misc_feature 1..20: note = HRE targeting sequence
  source 1..20: mol_type = other RNA
gctgccgggaagaggcgcgg

SEQ ID NO: 316 - RNA, 20 nt, synthetic construct
  misc_feature 1..20: note = HRE targeting sequence
  source 1..20: mol_type = other RNA
cggcagccgaaccccaaaca

SEQ ID NO: 317 - RNA, 20 nt, synthetic construct
  misc_feature 1..20: note = HRE targeting sequence
  source 1..20: mol_type = other RNA
tggcgggtggctgtttgggg

SEQ ID NO: 318 - RNA, 20 nt, synthetic construct
  misc_feature 1..20: note = HRE targeting sequence
  source 1..20: mol_type = other RNA
tcactcacccactcgccacc

SEQ ID NO: 319 - RNA, 20 nt, synthetic construct
  misc_feature 1..20: note = HRE targeting sequence
  source 1..20: mol_type = other RNA
gccgccgcgggcgcaggcac

SEQ ID NO: 320 - RNA, 20 nt, synthetic construct
  misc_feature 1..20: note = HRE targeting sequence
  source 1..20: mol_type = other RNA
gggcgggcccgggggcgggc

SEQ ID NO: 321 - RNA, 20 nt, synthetic construct
  misc_feature 1..20: note = HRE targeting sequence
  source 1..20: mol_type = other RNA
ggagtcgcgcgctaggggcc

SEQ ID NO: 322 - RNA, 20 nt, synthetic construct
  misc_feature 1..20: note = HRE targeting sequence
  source 1..20: mol_type = other RNA
tgagttccagagcttgctac

SEQ ID NO: 323 - RNA, 20 nt, synthetic construct
  misc_feature 1..20: note = HRE targeting sequence
  source 1..20: mol_type = other RNA
agagcttgctacaggctgcg

SEQ ID NO: 324 - RNA, 20 nt, synthetic construct
  misc_feature 1..20: note = HRE targeting sequence
  source 1..20: mol_type = other RNA
tctggttaatctttatcagg

SEQ ID NO: 325 - RNA, 20 nt, synthetic construct
  misc_feature 1..20: note = HRE targeting sequence
  source 1..20: mol_type = other RNA
tgttcaccctcagcgagtac

SEQ ID NO: 326 - RNA, 20 nt, synthetic construct
  misc_feature 1..20: note = HRE targeting sequence
  source 1..20: mol_type = other RNA
ccctcagcgagtactgtgag

SEQ ID NO: 327 - RNA, 20 nt, synthetic construct
  misc_feature 1..20: note = HRE targeting sequence
  source 1..20: mol_type = other RNA
taaacccacacctgctcttg

SEQ ID NO: 328 - RNA, 20 nt, synthetic construct
  misc_feature 1..20: note = HRE targeting sequence
  source 1..20: mol_type = other RNA
tgctagaccccgcccccaaa

SEQ ID NO: 329 - RNA, 20 nt, synthetic construct
  misc_feature 1..20: note = HRE targeting sequence
  source 1..20: mol_type = other RNA
cttttgggggcggggtctag

SEQ ID NO: 330 - RNA, 20 nt, synthetic construct
  misc_feature 1..20: note = HRE targeting sequence
  source 1..20: mol_type = other RNA
gcccacgtaaaagatgacgc

SEQ ID NO: 331 - RNA, 20 nt, synthetic construct
  misc_feature 1..20: note = HRE targeting sequence
  source 1..20: mol_type = other RNA
tttacgtgggcggaacttgt

SEQ ID NO: 332 - RNA, 20 nt, synthetic construct
  misc_feature 1..20: note = HRE targeting sequence
  source 1..20: mol_type = other RNA
ctttcctagcgggacaccgt

SEQ ID NO: 333 - RNA, 20 nt, synthetic construct
  misc_feature 1..20: note = HRE targeting sequence
  source 1..20: mol_type = other RNA
ttcctagcgggacaccgtag

SEQ ID NO: 334 - RNA, 20 nt, synthetic construct
  misc_feature 1..20: note = HRE targeting sequence
  source 1..20: mol_type = other RNA
tagcgggacaccgtaggtta

SEQ ID NO: 335 - RNA, 20 nt, synthetic construct
  misc_feature 1..20: note = HRE targeting sequence
  source 1..20: mol_type = other RNA
atgtgcgatgacgttttctc

SEQ ID NO: 336 - RNA, 20 nt, synthetic construct
  misc_feature 1..20: note = HRE targeting sequence
  source 1..20: mol_type = other RNA
ctagcctcgtgagaaaacgt

SEQ ID NO: 337 - RNA, 20 nt, synthetic construct
  misc_feature 1..20: note = HRE targeting sequence
  source 1..20: mol_type = other RNA
cacgaggctagcgaaatggg

SEQ ID NO: 338 - RNA, 20 nt, synthetic construct
  misc_feature 1..20: note = HRE targeting sequence
  source 1..20: mol_type = other RNA
tttatcttaagacccgctct

SEQ ID NO: 339 - RNA, 20 nt, synthetic construct
  misc_feature 1..20: note = HRE targeting sequence
  source 1..20: mol_type = other RNA
tccagagcgggtcttaagat

SEQ ID NO: 340 - RNA, 20 nt, synthetic construct
  misc_feature 1..20: note = HRE targeting sequence
  source 1..20: mol_type = other RNA
taagacccgctctggaggag

SEQ ID NO: 341 - RNA, 20 nt, synthetic construct
  misc_feature 1..20: note = HRE targeting sequence
  source 1..20: mol_type = other RNA
ccagatccagcagcctcccc

SEQ ID NO: 342 - RNA, 20 nt, synthetic construct
  misc_feature 1..20: note = HRE targeting sequence
  source 1..20: mol_type = other RNA
aaaccacgaaatcgtcttca

SEQ ID NO: 343 - RNA, 20 nt, synthetic construct
  misc_feature 1..20: note = HRE targeting sequence
  source 1..20: mol_type = other RNA
tccaccaattatgtgttgag

SEQ ID NO: 344 - DNA, 20 bp, synthetic construct
  misc_feature 1..20: note = targeting sequence
  source 1..20: mol_type = other DNA
caaacaaatgtgtcacaaag

SEQ ID NO: 345 - DNA, 20 bp, synthetic construct
  misc_feature 1..20: note = targeting sequence
  source 1..20: mol_type = other DNA
ggaataatgctgttgttgaa

SEQ ID NO: 346 - DNA, 87 bp, synthetic construct; identical to SEQ ID NO: 292
  misc_feature 1..87: note = Scaffold 174 template fwd primer
  source 1..87: mol_type = other DNA

SEQ ID NO: 347 - DNA, 50 bp, synthetic construct; identical to SEQ ID NO: 293
  misc_feature 1..50: note = Scaffold 174 template rev primer
  source 1..50: mol_type = other DNA

SEQ ID NO: 348 - DNA, 22 bp, synthetic construct
  misc_feature 1..22: note = T7 amplification primer
  source 1..22: mol_type = other DNA
gaaattaatacgactcactata

SEQ ID NO: 349 - DNA, 36 bp, synthetic construct
  misc_feature 1..36: note = 15.3 20-nt spacer primer
  source 1..36: mol_type = other DNA
ctttgtgacacatttgtttgctttgatgctccctcc

SEQ ID NO: 350 - DNA, 35 bp, synthetic construct
  misc_feature 1..35: note = 15.3 19-nt spacer primer
  source 1..35: mol_type = other DNA
tttgtgacacatttgtttgctttgatgctccctcc

SEQ ID NO: 351 - DNA, 34 bp, synthetic construct
  misc_feature 1..34: note = 15.3 18-nt spacer primer
  source 1..34: mol_type = other DNA
ttgtgacacatttgtttgctttgatgctccctcc

SEQ ID NO: 352 - DNA, 36 bp, synthetic construct
  misc_feature 1..36: note = 15.5 20-nt spacer primer
  source 1..36: mol_type = other DNA
ttcaacaacagcattattccctttgatgctccctcc

SEQ ID NO: 353 - DNA, 35 bp, synthetic construct
  misc_feature 1..35: note = 15.5 19-nt spacer primer
  source 1..35: mol_type = other DNA
tcaacaacagcattattccctttgatgctccctcc

SEQ ID NO: 354 - DNA, 34 bp, synthetic construct
  misc_feature 1..34: note = 15.5 18-nt spacer primer
  source 1..34: mol_type = other DNA
caacaacagcattattccctttgatgctccctcc

SEQ ID NO: 355 - RNA, 20 nt, synthetic construct
  misc_feature 1..20: note = targeting sequence
  source 1..20: mol_type = other RNA
caaacaaatgtgtcacaaag

SEQ ID NO: 356 - RNA, 19 nt, synthetic construct
  misc_feature 1..19: note = targeting sequence
  source 1..19: mol_type = other RNA
caaacaaatgtgtcacaaa

SEQ ID NO: 357 - RNA, 18 nt, synthetic construct
  misc_feature 1..18: note = targeting sequence
  source 1..18: mol_type = other RNA
caaacaaatgtgtcacaa

SEQ ID NO: 358 - RNA, 20 nt, synthetic construct
  misc_feature 1..20: note = targeting sequence
  source 1..20: mol_type = other RNA
ggaataatgctgttgttgaa

SEQ ID NO: 359 - RNA, 19 nt, synthetic construct
  misc_feature 1..19: note = targeting sequence
  source 1..19: mol_type = other RNA
ggaataatgctgttgttga

SEQ ID NO: 360 - RNA, 18 nt, synthetic construct
  misc_feature 1..18: note = targeting sequence
  source 1..18: mol_type = other RNA
ggaataatgctgttgttg

SEQ ID NO: 361 - RNA, 20 nt, synthetic construct
  misc_feature 1..20: note = targeting sequence
  source 1..20: mol_type = other RNA
aaggggctccgcaccacgcc

SEQ ID NO: 362 - RNA, 20 nt, synthetic construct
  misc_feature 1..20: note = targeting sequence
  source 1..20: mol_type = other RNA
ctgcattctagttgtggttt

SEQ ID NO: 363 - RNA, 20 nt, synthetic construct
  misc_feature 1..20: note = C9Orf72 ATCN PAM targeting sequence
  source 1..20: mol_type = other RNA
atacagtagagatggcaaat

SEQ ID NO: 364 - RNA, 20 nt, synthetic construct
  misc_feature 1..20: note = C9Orf72 ATCN PAM targeting sequence
  source 1..20: mol_type = other RNA
gaccgcaaaggcttgctctt

SEQ ID NO: 365 - RNA, 20 nt, synthetic construct
  misc_feature 1..20: note = C9Orf72 ATCN PAM targeting sequence
  source 1..20: mol_type = other RNA
catggtgtagtagaaagagc

SEQ ID NO: 366 - RNA, 20 nt, synthetic construct
  misc_feature 1..20: note = C9Orf72 ATCN PAM targeting sequence
  source 1..20: mol_type = other RNA
tagaggctttaacctacaat

SEQ ID NO: 367 - RNA, 20 nt, synthetic construct
  misc_feature 1..20: note = C9Orf72 ATCN PAM targeting sequence
  source 1..20: mol_type = other RNA
gataatactggcatatatta

SEQ ID NO: 368 - RNA, 20 nt, synthetic construct
  misc_feature 1..20: note = C9Orf72 ATCN PAM targeting sequence
  source 1..20: mol_type = other RNA
gattgcatattcataagact

SEQ ID NO: 369 - RNA, 20 nt, synthetic construct
  misc_feature 1..20: note = C9Orf72 ATCN PAM targeting sequence
  source 1..20: mol_type = other RNA
ggcattttgaaaattcatga

SEQ ID NO: 370 - RNA, 20 nt, synthetic construct
  misc_feature 1..20: note = C9Orf72 ATCN PAM targeting sequence
  source 1..20: mol_type = other RNA
agactgatgccagtttgaat

SEQ ID NO: 371 - RNA, 20 nt, synthetic construct
  misc_feature 1..20: note = C9Orf72 ATCN PAM targeting sequence
  source 1..20: mol_type = other RNA
gtctggataaagaaaaaaat

SEQ ID NO: 372 - RNA, 20 nt, synthetic construct
  misc_feature 1..20: note = C9Orf72 ATCN PAM targeting sequence
  source 1..20: mol_type = other RNA
cagtgaccttgaataagtac

SEQ ID NO: 373 - RNA, 20 nt, synthetic construct
  misc_feature 1..20: note = C9Orf72 ATCN PAM targeting sequence
  source 1..20: mol_type = other RNA
tgcatctcagtgaccttgaa

SEQ ID NO: 374 - RNA, 20 nt, synthetic construct
  misc_feature 1..20: note = C9Orf72 ATCN PAM targeting sequence
  source 1..20: mol_type = other RNA
caggaaacagtttttatcct

SEQ ID NO: 375 - RNA, 20 nt, synthetic construct
  misc_feature 1..20: note = C9Orf72 ATCN PAM targeting sequence
  source 1..20: mol_type = other RNA
gctatttcaaccatacattc

SEQ ID NO: 376 - RNA, 20 nt, synthetic construct
  misc_feature 1..20: note = C9Orf72 ATCN PAM targeting sequence
  source 1..20: mol_type = other RNA
gaaacatcaggaaagacatt

SEQ ID NO: 377 - RNA, 20 nt, synthetic construct
  misc_feature 1..20: note = C9Orf72 ATCN PAM targeting sequence
  source 1..20: mol_type = other RNA
ggaaagacatttgagttgga

SEQ ID NO: 378 - RNA, 20 nt, synthetic construct
  misc_feature 1..20: note = C9Orf72 ATCN PAM targeting sequence
  source 1..20: mol_type = other RNA
aactcaaatgtctttcctga

SEQ ID NO: 379 - RNA, 20 nt, synthetic construct
  misc_feature 1..20: note = C9Orf72 ATCN PAM targeting sequence
  source 1..20: mol_type = other RNA
atccttcaaagctctgcaag

SEQ ID NO: 380 - RNA, 20 nt, synthetic construct
  misc_feature 1..20: note = C9Orf72 ATCN PAM targeting sequence
  source 1..20: mol_type = other RNA
ttcaaagctctgcaagactc

SEQ ID NO: 381 - RNA, 20 nt, synthetic construct
  misc_feature 1..20: note = C9Orf72 ATCN PAM targeting sequence
  source 1..20: mol_type = other RNA
ctttcttcatcagagccctc

SEQ ID NO: 382 - RNA, 20 nt, synthetic construct
  misc_feature 1..20: note = C9Orf72 ATCN PAM targeting sequence
  source 1..20: mol_type = other RNA
gagccctcccgcaggctagc

SEQ ID NO: 383 - RNA, 20 nt, synthetic construct
  misc_feature 1..20: note = C9Orf72 ATCN PAM targeting sequence
  source 1..20: mol_type = other RNA
cctcagcggaagccttttaa

SEQ ID NO: 384 - RNA, 20 nt, synthetic construct
  misc_feature 1..20: note = C9Orf72 ATCN PAM targeting sequence
  source 1..20: mol_type = other RNA
tcatatacaagccaagcaca

SEQ ID NO: 385 - RNA, 20 nt, synthetic construct
  misc_feature 1..20: note = C9Orf72 ATCN PAM targeting sequence
  source 1..20: mol_type = other RNA
tctgttaaaaacacattttg

SEQ ID NO: 386 - RNA, 20 nt, synthetic construct
  misc_feature 1..20: note = C9Orf72 ATCN PAM targeting sequence
  source 1..20: mol_type = other RNA
aagtagaatcttggttgtgg

SEQ ID NO: 387 - RNA, 20 nt, synthetic construct
  misc_feature 1..20: note = C9Orf72 ATCN PAM targeting sequence
  source 1..20: mol_type = other RNA
tggttgtggtcactcggttt

SEQ ID NO: 388 - RNA, 20 nt, synthetic construct
  misc_feature 1..20: note = C9Orf72 ATCN PAM targeting sequence
  source 1..20: mol_type = other RNA
attactgctttattttaaaa

SEQ ID NO: 389 - RNA, 20 nt, synthetic construct
  misc_feature 1..20: note = C9Orf72 ATCN PAM targeting sequence
  source 1..20: mol_type = other RNA
tctgaagcctgtcaaagaaa

SEQ ID NO: 390 - RNA, 20 nt, synthetic construct
  misc_feature 1..20: note = C9Orf72 ATCN PAM targeting sequence
  source 1..20: mol_type = other RNA
ccccctgctcacctcctgct

SEQ ID NO: 391 - RNA, 20 nt, synthetic construct
  misc_feature 1..20: note = C9Orf72 ATCN PAM targeting sequence
  source 1..20: mol_type = other RNA
ggtaaatattttctgccctt

SEQ ID NO: 392 - RNA, 20 nt, synthetic construct
  misc_feature 1..20: note = C9Orf72 ATCN PAM targeting sequence
  source 1..20: mol_type = other RNA
tttaagatgcaattgtcagc

SEQ ID NO: 393 - RNA, 20 nt, synthetic construct
  misc_feature 1..20: note = C9Orf72 ATCN PAM targeting sequence
  source 1..20: mol_type = other RNA
taaaggatgtcaaaatttgc

SEQ ID NO: 394 - RNA, 20 nt, synthetic construct
  misc_feature 1..20: note = C9Orf72 ATCN PAM targeting sequence
  source 1..20: mol_type = other RNA
ccatcactttgcacacattt

SEQ ID NO: 395 - RNA, 20 nt, synthetic construct
  misc_feature 1..20: note = C9Orf72 ATCN PAM targeting sequence
  source 1..20: mol_type = other RNA
ctttgcacacatttgcattc

SEQ ID NO: 396 - RNA, 20 nt, synthetic construct
  misc_feature 1..20: note = C9Orf72 ATCN PAM targeting sequence
  source 1..20: mol_type = other RNA
cattggaattcatcatttca

SEQ ID NO: 397 - RNA, 20 nt, synthetic construct
  misc_feature 1..20: note = C9Orf72 ATCN PAM targeting sequence
  source 1..20: mol_type = other RNA
aacggctttaaaatggttag

SEQ ID NO: 398 - RNA, 20 nt, synthetic construct
  misc_feature 1..20: note = C9Orf72 ATCN PAM targeting sequence
  source 1..20: mol_type = other RNA
ctcctactttccgttctgtt

SEQ ID NO: 399 - RNA, 20 nt, synthetic construct
  misc_feature 1..20: note = C9Orf72 ATCN PAM targeting sequence
  source 1..20: mol_type = other RNA
cccccagcaccttttccaat

SEQ ID NO: 400 - RNA, 20 nt, synthetic construct
  misc_feature 1..20: note = C9Orf72 ATCN PAM targeting sequence
  source 1..20: mol_type = other RNA
tgcagcttcatcaatacatt

SEQ ID NO: 401 - RNA, 20 nt, synthetic construct
  misc_feature 1..20: note = C9Orf72 ATCN PAM targeting sequence
  source 1..20: mol_type = other RNA
atacattttaaaggtaaaat

SEQ ID NO: 402 - RNA, 20 nt, synthetic construct
  misc_feature 1..20: note = C9Orf72 ATCN PAM targeting sequence
  source 1..20: mol_type = other RNA
aatgtgatattgctgaaaag

SEQ ID NO: 403 - RNA, 20 nt, synthetic construct
  misc_feature 1..20: note = C9Orf72 ATCN PAM targeting sequence
  source 1..20: mol_type = other RNA
catttgattttacctttaaa

SEQ ID NO: 404 - RNA, 20 nt, synthetic construct
  misc_feature 1..20: note = C9Orf72 ATCN PAM targeting sequence
  source 1..20: mol_type = other RNA
gcagtgcagcctcagtccca

SEQ ID NO: 405 - RNA, 20 nt, synthetic construct
  misc_feature 1..20: note = C9Orf72 ATCN PAM targeting sequence
  source 1..20: mol_type = other RNA
ccactcagatgggacatacc

SEQ ID NO: 406 - RNA, 20 nt, synthetic construct
  misc_feature 1..20: note = C9Orf72 ATCN PAM targeting sequence
  source 1..20: mol_type = other RNA
gagtggagatggggctgacg

SEQ ID NO: 407 - RNA, 20 nt, synthetic construct
  misc_feature 1..20: note = C9Orf72 ATCN PAM targeting sequence
  source 1..20: mol_type = other RNA
ccagattgtacccatatttc

SEQ ID NO: 408 - RNA, 20 nt, synthetic construct
  misc_feature 1..20: note = C9Orf72 ATCN PAM targeting sequence
  source 1..20: mol_type = other RNA
ggagatttttaagtctctaa

SEQ ID NO: 409 - RNA, 20 nt, synthetic construct
  misc_feature 1..20: note = C9Orf72 ATCN PAM targeting sequence
  source 1..20: mol_type = other RNA
cagaagaaactaatgaaata

SEQ ID NO: 410 - RNA, 20 nt, synthetic construct
  misc_feature 1..20: note = C9Orf72 ATCN PAM targeting sequence
  source 1..20: mol_type = other RNA
acagccatcacagaagaaac

SEQ ID NO: 411 - RNA, 20 nt, synthetic construct
  misc_feature 1..20: note = C9Orf72 ATCN PAM targeting sequence
  source 1..20: mol_type = other RNA
tgaaaattccctctctcatg

SEQ ID NO: 412 - RNA, 20 nt, synthetic construct
  misc_feature 1..20: note = C9Orf72 ATCN PAM targeting sequence
  source 1..20: mol_type = other RNA
caagatctaacccacttata

SEQ ID NO: 413 - RNA, 20 nt, synthetic construct
  misc_feature 1..20: note = C9Orf72 ATCN PAM targeting sequence
  source 1..20: mol_type = other RNA
tgagataaggaaatagcaaa

SEQ ID NO: 414 - RNA, 20 nt, synthetic construct
  misc_feature 1..20: note = C9Orf72 ATCN PAM targeting sequence
  source 1..20: mol_type = other RNA
aacccacttatagcaaaagc

SEQ ID NO: 415 - RNA, 20 nt, synthetic construct
  misc_feature 1..20: note = C9Orf72 ATCN PAM targeting sequence
  source 1..20: mol_type = other RNA
ctcctccaagaaaactaccc

SEQ ID NO: 416 - RNA, 20 nt, synthetic construct
  misc_feature 1..20: note = C9Orf72 ATCN PAM targeting sequence
  source 1..20: mol_type = other RNA
tcatcactcctccaagaaaa

SEQ ID NO: 417 - RNA, 20 nt, synthetic construct
  misc_feature 1..20: note = C9Orf72 ATCN PAM targeting sequence
  source 1..20: mol_type = other RNA
gcaagggattcgggttctca

SEQ ID NO: 418 - RNA, 20 nt, synthetic construct
  misc_feature 1..20: note = C9Orf72 ATCN PAM targeting sequence
  source 1..20: mol_type = other RNA
cttgctgatgccagctcatt

SEQ ID NO: 419 - RNA, 20 nt, synthetic construct
  misc_feature 1..20: note = C9Orf72 ATCN PAM targeting sequence
  source 1..20: mol_type = other RNA
tcttggactgtagacaggga

SEQ ID NO: 420 - RNA, 20 nt, synthetic construct
  misc_feature 1..20: note = C9Orf72 ATCN PAM targeting sequence
  source 1..20: mol_type = other RNA
gtgaggtttcttctagtgtc

SEQ ID NO: 421 - RNA, 20 nt, synthetic construct
  misc_feature 1..20: note = C9Orf72 ATCN PAM targeting sequence
  source 1..20: mol_type = other RNA
ccatgcctctcatagcgcca

SEQ ID NO: 422 - RNA, 20 nt, synthetic construct
  misc_feature 1..20: note = C9Orf72 ATCN PAM targeting sequence
  source 1..20: mol_type = other RNA
caaggcaagggcaggtgtgc

SEQ ID NO: 423 - RNA, 20 nt, synthetic construct
  misc_feature 1..20: note = C9Orf72 ATCN PAM targeting sequence
  source 1..20: mol_type = other RNA
aaagaggcagtggtattgtg

SEQ ID NO: 424 - RNA, 20 nt, synthetic construct
  misc_feature 1..20: note = C9Orf72 ATCN PAM targeting sequence
  source 1..20: mol_type = other RNA
ttgaatgccttaccacaata

SEQ ID NO: 425 - RNA, 20 nt, synthetic construct
  misc_feature 1..20: note = C9Orf72 ATCN PAM targeting sequence
  source 1..20: mol_type = other RNA
aaatgaaaaccaactgttct

SEQ ID NO: 426 - RNA, 20 nt, synthetic construct
  misc_feature 1..20: note = C9Orf72 ATCN PAM targeting sequence
  source 1..20: mol_type = other RNA
tccagtttgaagggctcaga

SEQ ID NO: 427 - RNA, 20 nt, synthetic construct
  misc_feature 1..20: note = C9Orf72 ATCN PAM targeting sequence
  source 1..20: mol_type = other RNA
tgtggctgttacctctagga

SEQ ID NO: 428 - RNA, 20 nt, synthetic construct
  misc_feature 1..20: note = C9Orf72 ATCN PAM targeting sequence
  source 1..20: mol_type = other RNA
tcagcagtacctttccagcc

SEQ ID NO: 429 - RNA, 20 nt, synthetic construct
  misc_feature 1..20: note = C9Orf72 ATCN PAM targeting sequence
  source 1..20: mol_type = other RNA
agggagaaataaaactgttt

SEQ ID NO: 430 - RNA, 20 nt, synthetic construct
  misc_feature 1..20: note = C9Orf72 ATCN PAM targeting sequence
  source 1..20: mol_type = other RNA
ccatttcctactagatcaag

SEQ ID NO: 431 - RNA, 20 nt, synthetic construct
  misc_feature 1..20: note = C9Orf72 ATCN PAM targeting sequence
  source 1..20: mol_type = other RNA
agtaggaaatggagatgcag

SEQ ID NO: 432 - RNA, 20 nt, synthetic construct
  misc_feature 1..20: note = C9Orf72 ATCN PAM targeting sequence
  source 1..20: mol_type = other RNA
agtcctcaacttcccatgac

SEQ ID NO: 433 - RNA, 20 nt, synthetic construct
  misc_feature 1..20: note = C9Orf72 ATCN PAM targeting sequence
  source 1..20: mol_type = other RNA
agaagtccttgcaagtcatg

SEQ ID NO: 434 - RNA, 20 nt, synthetic construct
  misc_feature 1..20: note = C9Orf72 ATCN PAM targeting sequence
  source 1..20: mol_type = other RNA
gcttcccgcccctgtctgtg

SEQ ID NO: 435 - RNA, 20 nt, synthetic construct
  misc_feature 1..20: note = C9Orf72 ATCN PAM targeting sequence
  source 1..20: mol_type = other RNA
tgcatctttgcacacttgtt

SEQ ID NO: 436 - RNA, 20 nt, synthetic construct
  misc_feature 1..20: note = C9Orf72 ATCN PAM targeting sequence
  source 1..20: mol_type = other RNA
ttgcacacttgttccttctg

SEQ ID NO: 437 - RNA, 20 nt, synthetic construct
  misc_feature 1..20: note = C9Orf72 ATCN PAM targeting sequence
  source 1..20: mol_type = other RNA
cacccagagttctgctccct

SEQ ID NO: 438 - RNA, 20 nt, synthetic construct
  misc_feature 1..20: note = C9Orf72 ATCN PAM targeting sequence
  source 1..20: mol_type = other RNA
ctctttcatcacacccagag

SEQ ID NO: 439 - RNA, 20 nt, synthetic construct
  misc_feature 1..20: note = C9Orf72 ATCN PAM targeting sequence
  source 1..20: mol_type = other RNA
tctatctctctttcatcaca

SEQ ID NO: 440 - RNA, 20 nt, synthetic construct
  misc_feature 1..20: note = C9Orf72 ATCN PAM targeting sequence
  source 1..20: mol_type = other RNA
cagcagcgccccagagctgg

SEQ ID NO: 441 - RNA, 20 nt, synthetic construct
  misc_feature 1..20: note = C9Orf72 ATCN PAM targeting sequence
  source 1..20: mol_type = other RNA
ggctgcttgctgcagggaaa

SEQ ID NO: 442 - RNA, 20 nt, synthetic construct
  misc_feature 1..20: note = C9Orf72 ATCN PAM targeting sequence
  source 1..20: mol_type = other RNA
ccggaaaaagagaggagaga

SEQ ID NO: 443 - RNA, 20 nt, synthetic construct
  misc_feature 1..20: note = C9Orf72 ATCN PAM targeting sequence
  source 1..20: mol_type = other RNA
caaacaactctacagccaag

SEQ ID NO: 444 - RNA, 20 nt, synthetic construct
  misc_feature 1..20: note = C9Orf72 ATCN PAM targeting sequence
  source 1..20: mol_type = other RNA
aaatagctgtatgtatcaga

SEQ ID NO: 445 - RNA, 20 nt, synthetic construct
  misc_feature 1..20: note = C9Orf72 ATCN PAM targeting sequence
  source 1..20: mol_type = other RNA
gaggaaataacactggcctt

SEQ ID NO: 446 - RNA, 20 nt, synthetic construct
  misc_feature 1..20: note = C9Orf72 ATCN PAM targeting sequence
  source 1..20: mol_type = other RNA
ttggtgcagagtgagggtga

SEQ ID NO: 447 - RNA, 20 nt, synthetic construct
  misc_feature 1..20: note = C9Orf72 ATCN PAM targeting sequence
  source 1..20: mol_type = other RNA
gctttcccggaccattccca

SEQ ID NO: 448 - RNA, 20 nt, synthetic construct
  misc_feature 1..20: note = C9Orf72 ATCN PAM targeting sequence
  source 1..20: mol_type = other RNA
ctaacttgcagcactccctc

SEQ ID NO: 449 - RNA, 20 nt, synthetic construct
  misc_feature 1..20: note = C9Orf72 ATCN PAM targeting sequence
  source 1..20: mol_type = other RNA
ctgggaaccctcggggagag

SEQ ID NO: 450 - RNA, 20 nt, synthetic construct
  misc_feature 1..20: note = C9Orf72 ATCN PAM targeting sequence
  source 1..20: mol_type = other RNA
ttaggcgaggttcaggcatg

SEQ ID NO: 451 - RNA, 20 nt, synthetic construct
  misc_feature 1..20: note = C9Orf72 ATCN PAM targeting sequence
  source 1..20: mol_type = other RNA
gggagagagaattccagtag

SEQ ID NO: 452 - RNA, 20 nt, synthetic construct
  misc_feature 1..20: note = C9Orf72 ATCN PAM targeting sequence
  source 1..20: mol_type = other RNA
gccaccccaaatttattttg

SEQ ID NO: 453 - RNA, 20 nt, synthetic construct
  misc_feature 1..20: note = C9Orf72 ATCN PAM targeting sequence
  source 1..20: mol_type = other RNA
tgttcactctgactcttgtg

SEQ ID NO: 454 - RNA, 20 nt, synthetic construct
  misc_feature 1..20: note = C9Orf72 ATCN PAM targeting sequence
  source 1..20: mol_type = other RNA
ctgccccatcttgttcactc

SEQ ID NO: 455 - RNA, 20 nt, synthetic construct
  misc_feature 1..20: note = C9Orf72 ATCN PAM targeting sequence
  source 1..20: mol_type = other RNA
ttaaccaaagtgtcttgtgt

SEQ ID NO: 456 - RNA, 20 nt, synthetic construct
  misc_feature 1..20: note = C9Orf72 ATCN PAM targeting sequence
  source 1..20: mol_type = other RNA
tttcctgcaccttttctgtg

SEQ ID NO: 457 - RNA, 20 nt, synthetic construct
  misc_feature 1..20: note = C9Orf72 ATCN PAM targeting sequence
  source 1..20: mol_type = other RNA
tttcattcaatccttacatc

SEQ ID NO: 458 - RNA, 20 nt, synthetic construct
  misc_feature 1..20: note = C9Orf72 ATCN PAM targeting sequence
  source 1..20: mol_type = other RNA
ttacatcagtcttatggggt

SEQ ID NO: 459 - RNA, 20 nt, synthetic construct
  misc_feature 1..20: note = C9Orf72 ATCN PAM targeting sequence
  source 1..20: mol_type = other RNA
gtcttatggggtatgtggta

SEQ ID NO: 460 - RNA, 20 nt, synthetic construct
  misc_feature 1..20: note = C9Orf72 ATCN PAM targeting sequence
  source 1..20: mol_type = other RNA
ttcttattttacagaggggt

SEQ ID NO: 461 - RNA, 20 nt, synthetic construct
  misc_feature 1..20: note = C9Orf72 ATCN PAM targeting sequence
  source 1..20: mol_type = other RNA
ctaataattaccctggccaa

SEQ ID NO: 462 - RNA, 20 nt, synthetic construct
  misc_feature 1..20: note = C9Orf72 ATCN PAM targeting sequence
  source 1..20: mol_type = other RNA
tcctaaccagtctactatat

SEQ ID NO: 463 - RNA, 20 nt, synthetic construct
  misc_feature 1..20: note = C9Orf72 ATCN PAM targeting sequence
  source 1..20: mol_type = other RNA
tgagccatcgtgctgaatat

SEQ ID NO: 464 - RNA, 20 nt, synthetic construct
  misc_feature 1..20: note = C9Orf72 ATCN PAM targeting sequence
  source 1..20: mol_type = other RNA
tgctgaatatatcttcattc

SEQ ID NO: 465 - RNA, 20 nt, synthetic construct
  misc_feature 1..20: note = C9Orf72 ATCN PAM targeting sequence
  source 1..20: mol_type = other RNA
tcattcatatctacatgtgc

SEQ ID NO: 466 - RNA, 20 nt, synthetic construct
  misc_feature 1..20: note = C9Orf72 ATCN PAM targeting sequence
  source 1..20: mol_type = other RNA
acatgtgctgtttcagttga

SEQ ID NO: 467 - RNA, 20 nt, synthetic construct
  misc_feature 1..20: note = C9Orf72 ATCN PAM targeting sequence
  source 1..20: mol_type = other RNA
gcggctgtaccacaccagca

SEQ ID NO: 468 - RNA, 20 nt, synthetic construct
  misc_feature 1..20: note = C9Orf72 ATCN PAM targeting sequence
  source 1..20: mol_type = other RNA
caaagtctgaattcttataa

SEQ ID NO: 469 - RNA, 20 nt, synthetic construct
  misc_feature 1..20: note = C9Orf72 ATCN PAM targeting sequence
  source 1..20: mol_type = other RNA
tgtatatacttagagttggg

SEQ ID NO: 470 - RNA, 20 nt, synthetic construct
  misc_feature 1..20: note = C9Orf72 ATCN PAM targeting sequence
  source 1..20: mol_type = other RNA
aaccagcacacaggaattag

SEQ ID NO: 471 - RNA, 20 nt, synthetic construct
  misc_feature 1..20: note = C9Orf72 ATCN PAM targeting sequence
  source 1..20: mol_type = other RNA
aataaatattgttctgtgtg

SEQ ID NO: 472 - RNA, 20 nt, synthetic construct
  misc_feature 1..20: note = C9Orf72 ATCN PAM targeting sequence
  source 1..20: mol_type = other RNA
tggaaacgccctccgtgtca

SEQ ID NO: 473 - RNA, 20 nt, synthetic construct
  misc_feature 1..20: note = C9Orf72 ATCN PAM targeting sequence
  source 1..20: mol_type = other RNA
agccatacatatgtatatgt

SEQ ID NO: 474 - RNA, 20 nt, synthetic construct
  misc_feature 1..20: note = C9Orf72 ATCN PAM targeting sequence
  source 1..20: mol_type = other RNA
gtatgaataaatattctccg

SEQ ID NO: 475 - RNA, 20 nt, synthetic construct
  misc_feature 1..20: note = C9Orf72 ATCN PAM targeting sequence
  source 1..20: mol_type = other RNA
aactgctcttctttttccaa

SEQ ID NO: 476 - RNA, 20 nt, synthetic construct
  misc_feature 1..20: note = C9Orf72 ATCN PAM targeting sequence
  source 1..20: mol_type = other RNA
ggaggctgaatatgtttaca

SEQ ID NO: 477 - RNA, 20 nt, synthetic construct
  misc_feature 1..20: note = C9Orf72 ATCN PAM targeting sequence
  source 1..20: mol_type = other RNA
cctgtggttaaatgagagaa

SEQ ID NO: 478 - RNA, 20 nt, synthetic construct
  misc_feature 1..20: note = C9Orf72 ATCN PAM targeting sequence
  source 1..20: mol_type = other RNA
tgaaagcaagagcattaatc

SEQ ID NO: 479 - RNA, 20 nt, synthetic construct
  misc_feature 1..20: note = C9Orf72 ATCN PAM targeting sequence
  source 1..20: mol_type = other RNA
aaactgtttgtggtcactgt

SEQ ID NO: 480 - RNA, 20 nt, synthetic construct
  misc_feature 1..20: note = C9Orf72 ATCN PAM targeting sequence
  source 1..20: mol_type = other RNA
ctgcagatcccctccctaga

SEQ ID NO: 481 - RNA, 20 nt, synthetic construct
  misc_feature 1..20: note = C9Orf72 ATCN PAM targeting sequence
  source 1..20: mol_type = other RNA
gcagagatacagtgaccaca

SEQ ID NO: 482 - RNA, 20 nt, synthetic construct
  misc_feature 1..20: note = C9Orf72 ATCN PAM targeting sequence
  source 1..20: mol_type = other RNA
cctccctagagccccgcagc

SEQ ID NO: 483 - RNA, 20 nt, synthetic construct
  misc_feature 1..20: note = C9Orf72 ATCN PAM targeting sequence
  source 1..20: mol_type = other RNA
acagagcaagacagggtgct

SEQ ID NO: 484 - RNA, 20 nt, synthetic construct
  misc_feature 1..20: note = C9Orf72 ATCN PAM targeting sequence
  source 1..20: mol_type = other RNA
acctaccatgtccttcccac

SEQ ID NO: 485 - RNA, 20 nt, synthetic construct
  misc_feature 1..20: note = C9Orf72 ATCN PAM targeting sequence
  source 1..20: mol_type = other RNA
acctggctgatgcactgatg

SEQ ID NO: 486 - RNA, 20 nt, synthetic construct
  misc_feature 1..20: note = C9Orf72 ATCN PAM targeting sequence
  source 1..20: mol_type = other RNA
gccaggttgatacaggtggg

SEQ ID NO: 487 - RNA, 20 nt, synthetic construct
  misc_feature 1..20: note = C9Orf72 ATCN PAM targeting sequence
  source 1..20: mol_type = other RNA
gtgcatcagccaggttgata

SEQ ID NO: 488 - RNA, 20 nt, synthetic construct
  misc_feature 1..20: note = C9Orf72 ATCN PAM targeting sequence
  source 1..20: mol_type = other RNA
cctgtcccatcagtgcatca

SEQ ID NO: 489 - RNA, 20 nt, synthetic construct
  misc_feature 1..20: note = C9Orf72 ATCN PAM targeting sequence
  source 1..20: mol_type = other RNA
aacctgatttctgctcagac

SEQ ID NO: 490 - RNA, 20 nt, synthetic construct
  misc_feature 1..20: note = C9Orf72 ATCN PAM targeting sequence
  source 1..20: mol_type = other RNA
ggttggatcccctgtcccat

SEQ ID NO: 491 - RNA, 20 nt, synthetic construct
  misc_feature 1..20: note = C9Orf72 ATCN PAM targeting sequence
  source 1..20: mol_type = other RNA
gtctgagcagaaatcaggtt

SEQ ID NO: 492 - RNA, 20 nt, synthetic construct
  misc_feature 1..20: note = C9Orf72 ATCN PAM targeting sequence
  source 1..20: mol_type = other RNA
caggtagcatcagtctgagc

SEQ ID NO: 493 - RNA, 20 nt, synthetic construct
  misc_feature 1..20: note = C9Orf72 ATCN PAM targeting sequence
  source 1..20: mol_type = other RNA
aaggagcctgtgatttctgc

SEQ ID NO: 494 - RNA, 20 nt, synthetic construct
  misc_feature 1..20: note = C9Orf72 ATCN PAM targeting sequence
  source 1..20: mol_type = other RNA
caggctcctttgatcacagg

SEQ ID NO: 495 - RNA, 20 nt, synthetic construct
  misc_feature 1..20: note = C9Orf72 ATCN PAM targeting sequence
  source 1..20: mol_type = other RNA
cagtgtcgctttgagcagaa

SEQ ID NO: 496 - RNA, 20 nt, synthetic construct
  misc_feature 1..20: note = C9Orf72 ATCN PAM targeting sequence
  source 1..20: mol_type = other RNA
ctgacatttggctgctgctc

SEQ ID NO: 497 - RNA, 20 nt, synthetic construct
  misc_feature 1..20: note = C9Orf72 ATCN PAM targeting sequence
  source 1..20: mol_type = other RNA
agctgcgctgacaaatgctg

SEQ ID NO: 498 - RNA, 20 nt, synthetic construct
  misc_feature 1..20: note = C9Orf72 ATCN PAM targeting sequence
  source 1..20: mol_type = other RNA
gccagaaaccaatccagctg

SEQ ID NO: 499 - RNA, 20 nt, synthetic construct
  misc_feature 1..20: note = C9Orf72 ATCN PAM targeting sequence
  source 1..20: mol_type = other RNA
cagaacaaggggcagcagca

SEQ ID NO: 500 - RNA, 20 nt, synthetic construct
  misc_feature 1..20: note = C9Orf72 ATCN PAM targeting sequence
  source 1..20: mol_type = other RNA
gtttcattcctcaaagcggg

SEQ ID NO: 501 - RNA, 20 nt, synthetic construct
  misc_feature 1..20: note = C9Orf72 ATCN PAM targeting sequence
  source 1..20: mol_type = other RNA
agcctttaaggaactgcaca

SEQ ID NO: 502 - RNA, 20 nt, synthetic construct
  misc_feature 1..20: note = C9Orf72 ATCN PAM targeting sequence
  source 1..20: mol_type = other RNA
ggagtgggagggaaggcact

SEQ ID NO: 503 - RNA, 20 nt, synthetic construct
  misc_feature 1..20: note = C9Orf72 ATCN PAM targeting sequence
  source 1..20: mol_type = other RNA
tttgttttcccaggggaggt

SEQ ID NO: 504 - RNA, 20 nt, synthetic construct
  misc_feature 1..20: note = C9Orf72 ATCN PAM targeting sequence
  source 1..20: mol_type = other RNA
gacacacaatagaggtctta

SEQ ID NO: 505 - RNA, 20 nt, synthetic construct
  misc_feature 1..20: note = C9Orf72 ATCN PAM targeting sequence
  source 1..20: mol_type = other RNA
aaataacactttgttcctac

SEQ ID NO: 506 - RNA, 20 nt, synthetic construct
  misc_feature 1..20: note = C9Orf72 ATCN PAM targeting sequence
  source 1..20: mol_type = other RNA
cattgtattaaaaggaaaat

SEQ ID NO: 507 - RNA, 20 nt, synthetic construct
  misc_feature 1..20: note = C9Orf72 ATCN PAM targeting sequence
  source 1..20: mol_type = other RNA
cttgctagaagtttgactac

SEQ ID NO: 508 - RNA, 20 nt, synthetic construct
  misc_feature 1..20: note = C9Orf72 ATCN PAM targeting sequence
  source 1..20: mol_type = other RNA
accatgtaaccttgggcaag

SEQ ID NO: 509 - RNA, 20 nt, synthetic construct
  misc_feature 1..20: note = C9Orf72 ATCN PAM targeting sequence
  source 1..20: mol_type = other RNA
tggtttgaattctcgctctg

SEQ ID NO: 510 - RNA, 20 nt, synthetic construct
  misc_feature 1..20: note = C9Orf72 ATCN PAM targeting sequence
  source 1..20: mol_type = other RNA
tttggatcttatcaacaggc

SEQ ID NO: 511 - RNA, 20 nt, synthetic construct
  misc_feature 1..20: note = C9Orf72 ATCN PAM targeting sequence
  source 1..20: mol_type = other RNA
aaatgatatcctggtttgaa

SEQ ID NO: 512 - RNA, 20 nt, synthetic construct
  misc_feature 1..20: note = C9Orf72 ATCN PAM targeting sequence
  source 1..20: mol_type = other RNA
tatcaacaggcctcggaatc

SEQ ID NO: 513 - RNA, 20 nt, synthetic construct
  misc_feature 1..20: note = C9Orf72 ATCN PAM targeting sequence
  source 1..20: mol_type = other RNA
acaggcctcggaatcctatc

SEQ ID NO: 514 - RNA, 20 nt, synthetic construct
  misc_feature 1..20: note = C9Orf72 ATCN PAM targeting sequence
  source 1..20: mol_type = other RNA
tatctttttttctatatcag

SEQ ID NO: 515 - RNA, 20 nt, synthetic construct
  misc_feature 1..20: note = C9Orf72 ATCN PAM targeting sequence
  source 1..20: mol_type = other RNA
ttttttctatatcagggacc

SEQ ID NO: 516 - RNA, 20 nt, synthetic construct
  misc_feature 1..20: note = C9Orf72 ATCN PAM targeting sequence
  source 1..20: mol_type = other RNA
gggaccagaaaatgacagtt

SEQ ID NO: 517 - RNA, 20 nt, synthetic construct
  misc_feature 1..20: note = C9Orf72 ATCN PAM targeting sequence
  source 1..20: mol_type = other RNA
agtccacacctgtttttgta

SEQ ID NO: 518 - RNA, 20 nt, synthetic construct
  misc_feature 1..20: note = C9Orf72 ATCN PAM targeting sequence
  source 1..20: mol_type = other RNA
aaaaatgtaaaaaccactct

SEQ ID NO: 519 - RNA, 20 nt, synthetic construct
  misc_feature 1..20: note = C9Orf72 ATCN PAM targeting sequence
  source 1..20: mol_type = other RNA
tatgtcataaaatattcttt

SEQ ID NO: 520 - RNA, 20 nt, synthetic construct
  misc_feature 1..20: note = C9Orf72 ATCN PAM targeting sequence
  source 1..20: mol_type = other RNA
ataaatgggtgtggcttact

SEQ ID NO: 521 - RNA, 20 nt, synthetic construct
  misc_feature 1..20: note = C9Orf72 ATCN PAM targeting sequence
  source 1..20: mol_type = other RNA
atttataaccatgtgggtca

SEQ ID NO: 522 - RNA, 20 nt, synthetic construct
  misc_feature 1..20: note = C9Orf72 ATCN PAM targeting sequence
  source 1..20: mol_type = other RNA
ccaagctgcctttccaaaac

SEQ ID NO: 523 - RNA, 20 nt, synthetic construct
  misc_feature 1..20: note = C9Orf72 ATCN PAM targeting sequence
  source 1..20: mol_type = other RNA
ataaatagtccagtcttctg

SEQ ID NO: 524 - RNA, 20 nt, synthetic construct
  misc_feature 1..20: note = C9Orf72 ATCN PAM targeting sequence
  source 1..20: mol_type = other RNA
ttgttctcccaagacagaag

SEQ ID NO: 525 - RNA, 20 nt, synthetic construct
  misc_feature 1..20: note = C9Orf72 ATCN PAM targeting sequence
  source 1..20: mol_type = other RNA
gtagaaaaacgcttctaaaa

SEQ ID NO: 526 - RNA, 20 nt, synthetic construct
  misc_feature 1..20: note = C9Orf72 ATCN PAM targeting sequence
  source 1..20: mol_type = other RNA
gagggagaccggggagaggg

SEQ ID NO: 527 - RNA, 20 nt, synthetic construct
  misc_feature 1..20: note = C9Orf72 ATCN PAM targeting sequence
  source 1..20: mol_type = other RNA
tggctcaccgcaacctccct

SEQ ID NO: 528 - RNA, 20 nt, synthetic construct
  misc_feature 1..20: note = C9Orf72 ATCN PAM targeting sequence
  source 1..20: mol_type = other RNA
ggcagggaggttgcggtgag

SEQ ID NO: 529 - RNA, 20 nt, synthetic construct
  misc_feature 1..20: note = C9Orf72 ATCN PAM targeting sequence
  source 1..20: mol_type = other RNA
ctgtatcctcagcacccagc

SEQ ID NO: 530 - RNA, 20 nt, synthetic construct
  misc_feature 1..20: note = C9Orf72 ATCN PAM targeting sequence
  source 1..20: mol_type = other RNA
tcagcacccagccatgttcc

SEQ ID NO: 531 - RNA, 20 nt, synthetic construct
  misc_feature 1..20: note = C9Orf72 ATCN PAM targeting sequence
  source 1..20: mol_type = other RNA
ccagggcgctacgttccagg

SEQ ID NO: 532 - RNA, 20 nt, synthetic construct
  misc_feature 1..20: note = C9Orf72 ATCN PAM targeting sequence
  source 1..20: mol_type = other RNA
cccaagactgcacttcagaa

SEQ ID NO: 533 - RNA, 20 nt, synthetic construct
  misc_feature 1..20: note = C9Orf72 ATCN PAM targeting sequence
  source 1..20: mol_type = other RNA
ccaccctaccctagaagtcc

SEQ ID NO: 534 - RNA, 20 nt, synthetic construct
  misc_feature 1..20: note = C9Orf72 ATCN PAM targeting sequence
  source 1..20: mol_type = other RNA
ctgccagcagggggtaacaa

SEQ ID NO: 535 - RNA, 20 nt, synthetic construct
  misc_feature 1..20: note = C9Orf72 ATCN PAM targeting sequence
  source 1..20: mol_type = other RNA
tacacgcaacaccttggcta

SEQ ID NO: 536 - RNA, 20 nt, synthetic construct
  misc_feature 1..20: note = C9Orf72 ATCN PAM targeting sequence
  source 1..20: mol_type = other RNA
atcctacacgcaacaccttg

SEQ ID NO: 537 - RNA, 20 nt, synthetic construct
  misc_feature 1..20: note = C9Orf72 ATCN PAM targeting sequence
  source 1..20: mol_type = other RNA
ttcacactgtatttttactg

SEQ ID NO: 538 - RNA, 20 nt, synthetic construct
  misc_feature 1..20: note = C9Orf72 ATCN PAM targeting sequence
  source 1..20: mol_type = other RNA
aaatgtagaaacagtacagt

SEQ ID NO: 539 - RNA, 20 nt, synthetic construct
  misc_feature 1..20: note = C9Orf72 ATCN PAM targeting sequence
  source 1..20: mol_type = other RNA
atttttatgtaagtatactc

SEQ ID NO: 540 - RNA, 20 nt, synthetic construct
  misc_feature 1..20: note = C9Orf72 ATCN PAM targeting sequence
  source 1..20: mol_type = other RNA
tagagtatacttacataaaa

SEQ ID NO: 541 - RNA, 20 nt, synthetic construct
  misc_feature 1..20: note = C9Orf72 ATCN PAM targeting sequence
  source 1..20: mol_type = other RNA
tcacattatggcaaagttgc

SEQ ID NO: 542 - RNA, 20 nt, synthetic construct
  misc_feature 1..20: note = C9Orf72 ATCN PAM targeting sequence
  source 1..20: mol_type = other RNA
ttatgtgacacatgactgta

SEQ ID NO: 543 - RNA, 20 nt, synthetic construct
  misc_feature 1..20: note = C9Orf72 ATCN PAM targeting sequence
  source 1..20: mol_type = other RNA
acactttctcacttcccttt

SEQ ID NO: 544 - RNA, 20 nt, synthetic construct
  misc_feature 1..20: note = C9Orf72 ATCN PAM targeting sequence
  source 1..20: mol_type = other RNA
gactccgtgaaaactcctat

SEQ ID NO: 545 - RNA, 20 nt, synthetic construct
  misc_feature 1..20: note = C9Orf72 ATCN PAM targeting sequence
  source 1..20: mol_type = other RNA
tacagcacaagtctgctacc

SEQ ID NO: 546 - RNA, 20 nt, synthetic construct
  misc_feature 1..20: note = C9Orf72 ATCN PAM targeting sequence
  source 1..20: mol_type = other RNA
ccagtttaaaaatgttggtc

SEQ ID NO: 547 - RNA, 20 nt, synthetic construct
  misc_feature 1..20: note = C9Orf72 ATCN PAM targeting sequence
  source 1..20: mol_type = other RNA
cagcactttgggaggctgag

SEQ ID NO: 548 - RNA, 20 nt, synthetic construct
  misc_feature 1..20: note = C9Orf72 ATCN PAM targeting sequence
  source 1..20: mol_type = other RNA
tcctgcctcagcctcccaaa

SEQ ID NO: 549 - RNA, 20 nt, synthetic construct
  misc_feature 1..20: note = C9Orf72 ATCN PAM targeting sequence
  source 1..20: mol_type = other RNA
cttgagttcaggagttccag

SEQ ID NO: 550 - RNA, 20 nt, synthetic construct
  misc_feature 1..20: note = C9Orf72 ATCN PAM targeting sequence
  source 1..20: mol_type = other RNA
ctactaaaaataaaaaaatt

SEQ ID NO: 551 - RNA, 20 nt, synthetic construct
  misc_feature 1..20: note = C9Orf72 ATCN PAM targeting sequence
  source 1..20: mol_type = other RNA
gggcatagtagcatgcacct

SEQ ID NO: 552 - RNA, 20 nt, synthetic construct
  misc_feature 1..20: note = C9Orf72 ATCN PAM targeting sequence
  source 1..20: mol_type = other RNA
cttgaaccagggaggtggag

SEQ ID NO: 553 - RNA, 20 nt, synthetic construct
  misc_feature 1..20: note = C9Orf72 ATCN PAM targeting sequence
  source 1..20: mol_type = other RNA
cggctcactgcaacctccac

SEQ ID NO: 554 - RNA, 20 nt, synthetic construct
  misc_feature 1..20: note = C9Orf72 ATCN PAM targeting sequence
  source 1..20: mol_type = other RNA
tgccactgcactccagtgtg

SEQ ID NO: 555 - RNA, 20 nt, synthetic construct
  misc_feature 1..20: note = C9Orf72 ATCN PAM targeting sequence
  source 1..20: mol_type = other RNA
caaaataaaaaaaaaaaaag

SEQ ID NO: 556 - RNA, 20 nt, synthetic construct
  misc_feature 1..20: note = C9Orf72 ATCN PAM targeting sequence
  source 1..20: mol_type = other RNA
cttctgactctagtctgtag

SEQ ID NO: 557 - RNA, 20 nt, synthetic construct
  misc_feature 1..20: note = C9Orf72 ATCN PAM targeting sequence
  source 1..20: mol_type = other RNA
tctacagactagagtcagaa

SEQ ID NO: 558 - RNA, 20 nt, synthetic construct
  misc_feature 1..20: note = C9Orf72 ATCN PAM targeting sequence
  source 1..20: mol_type = other RNA
ccatgtatcttctacagact

SEQ ID NO: 559 - RNA, 20 nt, synthetic construct
  misc_feature 1..20: note = C9Orf72 ATCN PAM targeting sequence
  source 1..20: mol_type = other RNA
tggttgccctctctgatatc

SEQ ID NO: 560 - RNA, 20 nt, synthetic construct
  misc_feature 1..20: note = C9Orf72 ATCN PAM targeting sequence
  source 1..20: mol_type = other RNA
gagagggcaaccaagatgga

SEQ ID NO: 561 - RNA, 20 nt, synthetic construct
  misc_feature 1..20: note = C9Orf72 ATCN PAM targeting sequence
  source 1..20: mol_type = other RNA
gggcattctgggagtagcca

SEQ ID NO: 562 - RNA, 20 nt, synthetic construct
  misc_feature 1..20: note = C9Orf72 ATCN PAM targeting sequence
  source 1..20: mol_type = other RNA
tgcaagtctaggcctaattg

SEQ ID NO: 563 - RNA, 20 nt, synthetic construct
  misc_feature 1..20: note = C9Orf72 ATCN PAM targeting sequence
  source 1..20: mol_type = other RNA
gcatatctctttcttcttcc

SEQ ID NO: 564 - RNA, 20 nt, synthetic construct
  misc_feature 1..20: note = C9Orf72 ATCN PAM targeting sequence
  source 1..20: mol_type = other RNA
ctttcttcttccagatctgc

SEQ ID NO: 565 - RNA, 20 nt, synthetic construct
  misc_feature 1..20: note = C9Orf72 ATCN PAM targeting sequence
  source 1..20: mol_type = other RNA
ggaagaagaaagagatatgc

SEQ ID NO: 566 - RNA, 20 nt, synthetic construct
  misc_feature 1..20: note = C9Orf72 ATCN PAM targeting sequence
  source 1..20: mol_type = other RNA
gcctccaggcattattcttg

SEQ ID NO: 567 - RNA, 20 nt, synthetic construct
  misc_feature 1..20: note = C9Orf72 ATCN PAM targeting sequence
  source 1..20: mol_type = other RNA
aagtgtaaatggaccaatag

SEQ ID NO: 568 - RNA, 20 nt, synthetic construct
  misc_feature 1..20: note = C9Orf72 ATCN PAM targeting sequence
  source 1..20: mol_type = other RNA
tggaattaatactaattagt

SEQ ID NO: 569 - RNA, 20 nt, synthetic construct
  misc_feature 1..20: note = C9Orf72 ATCN PAM targeting sequence
  source 1..20: mol_type = other RNA
gacctttatgtataaaattg

SEQ ID NO: 570 - RNA, 20 nt, synthetic construct
  misc_feature 1..20: note = C9Orf72 ATCN PAM targeting sequence
  source 1..20: mol_type = other RNA
tcatgcctttattgtggtgg

SEQ ID NO: 571 - RNA, 20 nt, synthetic construct
  misc_feature 1..20: note = C9Orf72 ATCN PAM targeting sequence
  source 1..20: mol_type = other RNA
aatcttatctggccgggaaa

SEQ ID NO: 572 - RNA, 20 nt, synthetic construct
  misc_feature 1..20: note = C9Orf72 ATCN PAM targeting sequence
  source 1..20: mol_type = other RNA
tatctggccgggaaatttaa

SEQ ID NO: 573 - RNA, 20 nt, synthetic construct
  misc_feature 1..20: note = C9Orf72 ATCN PAM targeting sequence
  source 1..20: mol_type = other RNA
ggccgggaaatttaaactag

SEQ ID NO: 574 - RNA, 20 nt, synthetic construct
  misc_feature 1..20: note = C9Orf72 ATCN PAM targeting sequence
  source 1..20: mol_type = other RNA
agccatactgactatttaca

SEQ ID NO: 575 - RNA, 20 nt, synthetic construct
  misc_feature 1..20: note = C9Orf72 ATCN PAM targeting sequence
  source 1..20: mol_type = other RNA
ctgctgtgactgacatcctg

SEQ ID NO: 576 - RNA, 20 nt, synthetic construct
  misc_feature 1..20: note = C9Orf72 ATCN PAM targeting sequence
  source 1..20: mol_type = other RNA
tgcagcaatttccaacactg

SEQ ID NO: 577 - RNA, 20 nt, synthetic construct
  misc_feature 1..20: note = C9Orf72 ATCN PAM targeting sequence
  source 1..20: mol_type = other RNA
taggggagctgttggtcaga

SEQ ID NO: 578 - RNA, 20 nt, synthetic construct
  misc_feature 1..20: note = C9Orf72 ATCN PAM targeting sequence
  source 1..20: mol_type = other RNA
gaacctccacctcaggaagc

SEQ ID NO: 579 - RNA, 20 nt, synthetic construct
  misc_feature 1..20: note = C9Orf72 ATCN PAM targeting sequence
  source 1..20: mol_type = other RNA
agggagaaatgttgagcaga

SEQ ID NO: 580 - RNA, 20 nt, synthetic construct
  misc_feature 1..20: note = C9Orf72 ATCN PAM targeting sequence
  source 1..20: mol_type = other RNA
ataaagtaggagagaagtgg

SEQ ID NO: 581 - RNA, 20 nt, synthetic construct
  misc_feature 1..20: note = C9Orf72 ATCN PAM targeting sequence
  source 1..20: mol_type = other RNA
ggcagctctttgtggaggga

SEQ ID NO: 582 - RNA, 20 nt, synthetic construct
  misc_feature 1..20: note = C9Orf72 ATCN PAM targeting sequence
  source 1..20: mol_type = other RNA
ttgtgggacattctctcaga

SEQ ID NO: 583 - RNA, 20 nt, synthetic construct
  misc_feature 1..20: note = C9Orf72 ATCN PAM targeting sequence
  source 1..20: mol_type = other RNA
gtgatatccaatacaatagc

SEQ ID NO: 584 - RNA, 20 nt, synthetic construct
  misc_feature 1..20: note = C9Orf72 ATCN PAM targeting sequence
  source 1..20: mol_type = other RNA
cagatactgaacattttcat

SEQ ID NO: 585 - RNA, 20 nt, synthetic construct
  misc_feature 1..20: note = C9Orf72 ATCN PAM targeting sequence
  source 1..20: mol_type = other RNA
aatacaatagccactagaca

SEQ ID NO: 586 - RNA, 20 nt, synthetic construct
  misc_feature 1..20: note = C9Orf72 ATCN PAM targeting sequence
  source 1..20: mol_type = other RNA
cagtagtcacaagtggttgg

SEQ ID NO: 587 - RNA, 20 nt, synthetic construct
  misc_feature 1..20: note = C9Orf72 ATCN PAM targeting sequence
  source 1..20: mol_type = other RNA
aactttatacttgaaaaggc

SEQ ID NO: 588 - RNA, 20 nt, synthetic construct
  misc_feature 1..20: note = C9Orf72 ATCN PAM targeting sequence
  source 1..20: mol_type = other RNA
gaaaaatcaaactttatact

SEQ ID NO: 589 - RNA, 20 nt, synthetic construct
  misc_feature 1..20: note = C9Orf72 ATCN PAM targeting sequence
  source 1..20: mol_type = other RNA
atagtaataccaagagagaa

SEQ ID NO: 590 - RNA, 20 nt, synthetic construct
  misc_feature 1..20: note = C9Orf72 ATCN PAM targeting sequence
  source 1..20: mol_type = other RNA
tctgtggacatatgattagt

SEQ ID NO: 591 - RNA, 20 nt, synthetic construct
  misc_feature 1..20: note = C9Orf72 ATCN PAM targeting sequence
  source 1..20: mol_type = other RNA
gtggacatatgattagtgat

SEQ ID NO: 592 - RNA, 20 nt, synthetic construct
  misc_feature 1..20: note = C9Orf72 ATCN PAM targeting sequence
  source 1..20: mol_type = other RNA
tatgtccacagatgataaag

SEQ ID NO: 593 - RNA, 20 nt, synthetic construct
  misc_feature 1..20: note = C9Orf72 ATCN PAM targeting sequence
  source 1..20: mol_type = other RNA
ctaatcatatgtccacagat

SEQ ID NO: 594 - RNA, 20 nt, synthetic construct
  misc_feature 1..20: note = C9Orf72 ATCN PAM targeting sequence
  source 1..20: mol_type = other RNA
tgcttttattacttaatatt

SEQ ID NO: 595 - RNA, 20 nt, synthetic construct
  misc_feature 1..20: note = C9Orf72 ATCN PAM targeting sequence
  source 1..20: mol_type = other RNA
tcaactataattgatcatat

SEQ ID NO: 596 - RNA, 20 nt, synthetic construct
  misc_feature 1..20: note = C9Orf72 ATCN PAM targeting sequence
  source 1..20: mol_type = other RNA
attatagttgaagatgtctc

SEQ ID NO: 597 - RNA, 20 nt, synthetic construct
  misc_feature 1..20: note = C9Orf72 ATCN PAM targeting sequence
  source 1..20: mol_type = other RNA
tattttaggccctgaaacaa

SEQ ID NO: 598 - RNA, 20 nt, synthetic construct
  misc_feature 1..20: note = C9Orf72 ATCN PAM targeting sequence
  source 1..20: mol_type = other RNA
gaccacatctcatctctgac

SEQ ID NO: 599 - RNA, 20 nt, synthetic construct
  misc_feature 1..20: note = C9Orf72 ATCN PAM targeting sequence
  source 1..20: mol_type = other RNA
catctctgaccaaattagaa

SEQ ID NO: 600 - RNA, 20 nt, synthetic construct
  misc_feature 1..20: note = C9Orf72 ATCN PAM targeting sequence
  source 1..20: mol_type = other RNA
ctgaccaaattagaaacaaa

SEQ ID NO: 601 - RNA, 20 nt, synthetic construct
  misc_feature 1..20: note = C9Orf72 ATCN PAM targeting sequence
  source 1..20: mol_type = other RNA
acaagggatgaataaatagg

SEQ ID NO: 602 - RNA, 20 nt, synthetic construct
  misc_feature 1..20: note = C9Orf72 ATCN PAM targeting sequence
  source 1..20: mol_type = other RNA
cttgttgatgtccagagaac

SEQ ID NO: 603 - RNA, 20 nt, synthetic construct
  misc_feature 1..20: note = C9Orf72 ATCN PAM targeting sequence
  source 1..20: mol_type = other RNA
ccagttacccagcataaggc

SEQ ID NO: 604 - RNA, 20 nt, synthetic construct
  misc_feature 1..20: note = C9Orf72 ATCN PAM targeting sequence
  source 1..20: mol_type = other RNA
tgtttctttgctatttttcc

SEQ ID NO: 605 - RNA, 20 nt, synthetic construct
  misc_feature 1..20: note = C9Orf72 ATCN PAM targeting sequence
  source 1..20: mol_type = other RNA
gccaagtctcctaaaatgat

SEQ ID NO: 606 - RNA, 20 nt, synthetic construct
  misc_feature 1..20: note = C9Orf72 ATCN PAM targeting sequence
  source 1..20: mol_type = other RNA
ttttaggagacttggcagat

SEQ ID NO: 607 - RNA, 20 nt, synthetic construct
  misc_feature 1..20: note = C9Orf72 ATCN PAM targeting sequence
  source 1..20: mol_type = other RNA
ggcaggccctcccactaatc

SEQ ID NO: 608 - RNA, 20 nt, synthetic construct
  misc_feature 1..20: note = C9Orf72 ATCN PAM targeting sequence
  source 1..20: mol_type = other RNA
ctgagcctttgcattatcct

SEQ ID NO: 609 - RNA, 20 nt, synthetic construct
  misc_feature 1..20: note = C9Orf72 ATCN PAM targeting sequence
  source 1..20: mol_type = other RNA
tgaacaaccaccaacagccg

SEQ ID NO: 610 - RNA, 20 nt, synthetic construct
  misc_feature 1..20: note = C9Orf72 ATCN PAM targeting sequence
  source 1..20: mol_type = other RNA
gctgttggtggttgttcagg

SEQ ID NO: 611 - RNA, 20 nt, synthetic construct
  misc_feature 1..20: note = C9Orf72 ATCN PAM targeting sequence
  source 1..20: mol_type = other RNA
gaactggcaaagccccatga

SEQ ID NO: 612 - RNA, 20 nt, synthetic construct
  misc_feature 1..20: note = C9Orf72 ATCN PAM targeting sequence
  source 1..20: mol_type = other RNA
cactccagcctggggcacaa

SEQ ID NO: 613 - RNA, 20 nt, synthetic construct
  misc_feature 1..20: note = C9Orf72 ATCN PAM targeting sequence
  source 1..20: mol_type = other RNA
tgccatcacactccagcctg

SEQ ID NO: 614 - RNA, 20 nt, synthetic construct
  misc_feature 1..20: note = C9Orf72 ATCN PAM targeting sequence
  source 1..20: mol_type = other RNA
cggctcactgcaacctccgc

SEQ ID NO: 615 - RNA, 20 nt, synthetic construct
  misc_feature 1..20: note = C9Orf72 ATCN PAM targeting sequence
  source 1..20: mol_type = other RNA
cagctactcaggaggctgag

SEQ ID NO: 616 - RNA, 20 nt, synthetic construct
  misc_feature 1..20: note = C9Orf72 ATCN PAM targeting sequence
  source 1..20: mol_type = other RNA
ctactaaaaatacaaaaatt

SEQ ID NO: 617 - RNA, 20 nt, synthetic construct
  misc_feature 1..20: note = C9Orf72 ATCN PAM targeting sequence
  source 1..20: mol_type = other RNA
cctgaggtcaggagttccag

SEQ ID NO: 618 - RNA, 20 nt, synthetic construct
  misc_feature 1..20: note = C9Orf72 ATCN PAM targeting sequence
  source 1..20: mol_type = other RNA
acccgcctaggcctcccaaa

SEQ ID NO: 619 - RNA, 20 nt, synthetic construct
  misc_feature 1..20: note = C9Orf72 ATCN PAM targeting sequence
  source 1..20: mol_type = other RNA
caacactttgggaggcctag

SEQ ID NO: 620 - RNA, 20 nt, synthetic construct
  misc_feature 1..20: note = C9Orf72 ATCN PAM targeting sequence
  source 1..20: mol_type = other RNA
atgaagggctctctaagcaa

SEQ ID NO: 621 - RNA, 20 nt, synthetic construct
  misc_feature 1..20: note = C9Orf72 ATCN PAM targeting sequence
  source 1..20: mol_type = other RNA
aagacaaccgtttctctttg

SEQ ID NO: 622 - RNA, 20 nt, synthetic construct
  misc_feature 1..20: note = C9Orf72 ATCN PAM targeting sequence
  source 1..20: mol_type = other RNA
ttcatccaagacaaccgttt

SEQ ID NO: 623 - RNA, 20 nt, synthetic construct
  misc_feature 1..20: note = C9Orf72 ATCN PAM targeting sequence
  source 1..20: mol_type = other RNA
tatcagtagtaatcccagta

SEQ ID NO: 624 - RNA, 20 nt, synthetic construct
  misc_feature 1..20: note = C9Orf72 ATCN PAM targeting sequence
  source 1..20: mol_type = other RNA
gtagtaatcccagtaggtca

SEQ ID NO: 625 - RNA, 20 nt, synthetic construct
  misc_feature 1..20: note = C9Orf72 ATCN PAM targeting sequence
  source 1..20: mol_type = other RNA
cagtaggtcagtaatcttag

SEQ ID NO: 626 - RNA, 20 nt, synthetic construct
  misc_feature 1..20: note = C9Orf72 ATCN PAM targeting sequence
  source 1..20: mol_type = other RNA
tagtagtgacccatcagtaa

SEQ ID NO: 627 - RNA, 20 nt, synthetic construct
  misc_feature 1..20: note = C9Orf72 ATCN PAM targeting sequence
  source 1..20: mol_type = other RNA
gtaatctctgtaggtcaggc

SEQ ID NO: 628 - RNA, 20 nt, synthetic construct
  misc_feature 1..20: note = C9Orf72 ATCN PAM targeting sequence
  source 1..20: mol_type = other RNA
ctgtaggtcaggctgggagg

SEQ ID NO: 629 - RNA, 20 nt, synthetic construct
  misc_feature 1..20: note = C9Orf72 ATCN PAM targeting sequence
  source 1..20: mol_type = other RNA
tcccagcctgacctacagag

SEQ ID NO: 630 - RNA, 20 nt, synthetic construct
  misc_feature 1..20: note = C9Orf72 ATCN PAM targeting sequence
  source 1..20: mol_type = other RNA
ctagaatcctcccagcctga

SEQ ID NO: 631 - RNA, 20 nt, synthetic construct
  misc_feature 1..20: note = C9Orf72 ATCN PAM targeting sequence
  source 1..20: mol_type = other RNA
tccctagaatcctcccagcc

SEQ ID NO: 632 - RNA, 20 nt, synthetic construct
  misc_feature 1..20: note = C9Orf72 ATCN PAM targeting sequence
  source 1..20: mol_type = other RNA
agccttctggctgaaggcca

SEQ ID NO: 633 - RNA, 20 nt, synthetic construct
  misc_feature 1..20: note = C9Orf72 ATCN PAM targeting sequence
  source 1..20: mol_type = other RNA
gtacagaggcctctgggttg

SEQ ID NO: 634 - RNA, 20 nt, synthetic construct
  misc_feature 1..20: note = C9Orf72 ATCN PAM targeting sequence
  source 1..20: mol_type = other RNA
tctgtacagaggcctctggg

SEQ ID NO: 635 - RNA, 20 nt, synthetic construct
  misc_feature 1..20: note = C9Orf72 ATCN PAM targeting sequence
  source 1..20: mol_type = other RNA
agtcaggactgtgaaaagaa

SEQ ID NO: 636 - RNA, 20 nt, synthetic construct
  misc_feature 1..20: note = C9Orf72 ATCN PAM targeting sequence
  source 1..20: mol_type = other RNA
taccattgcaggccaacctt

SEQ ID NO: 637 - RNA, 20 nt, synthetic construct
  misc_feature 1..20: note = C9Orf72 ATCN PAM targeting sequence
  source 1..20: mol_type = other RNA
aggccccagaatacactgac

SEQ ID NO: 638 - RNA, 20 nt, synthetic construct
  misc_feature 1..20: note = C9Orf72 ATCN PAM targeting sequence
  source 1..20: mol_type = other RNA
ttggtcttcaaattgttcta

SEQ ID NO: 639 - RNA, 20 nt, synthetic construct
  misc_feature 1..20: note = C9Orf72 ATCN PAM targeting sequence
  source 1..20: mol_type = other RNA
tctaaaaacgggtgcttttt

SEQ ID NO: 640 - RNA, 20 nt, synthetic construct
  misc_feature 1..20: note = C9Orf72 ATCN PAM targeting sequence
  source 1..20: mol_type = other RNA
caatcattagccaagaggca

SEQ ID NO: 641 - RNA, 20 nt, synthetic construct
  misc_feature 1..20: note = C9Orf72 ATCN PAM targeting sequence
  source 1..20: mol_type = other RNA
ttagccaagaggcacctaca

SEQ ID NO: 642 - RNA, 20 nt, synthetic construct
  misc_feature 1..20: note = C9Orf72 ATCN PAM targeting sequence
  source 1..20: mol_type = other RNA
ctgccattttgtcacaccaa

SEQ ID NO: 643 - RNA, 20 nt, synthetic construct
  misc_feature 1..20: note = C9Orf72 ATCN PAM targeting sequence
  source 1..20: mol_type = other RNA
cttatcactgccattttgtc

SEQ ID NO: 644 - RNA, 20 nt, synthetic construct
  misc_feature 1..20: note = C9Orf72 ATCN PAM targeting sequence
  source 1..20: mol_type = other RNA
gaaccacattcctctccatc

SEQ ID NO: 645 - RNA, 20 nt, synthetic construct
  misc_feature 1..20: note = C9Orf72 ATCN PAM targeting sequence
  source 1..20: mol_type = other RNA
catctgctggaaataatagt

SEQ ID NO: 646 - RNA, 20 nt, synthetic construct
  misc_feature 1..20: note = C9Orf72 ATCN PAM targeting sequence
  source 1..20: mol_type = other RNA
gctggaaataatagtaacaa

SEQ ID NO: 647 - RNA, 20 nt, synthetic construct
  misc_feature 1..20: note = C9Orf72 ATCN PAM targeting sequence
  source 1..20: mol_type = other RNA
gtaatcccagcactttggga

SEQ ID NO: 648 - RNA, 20 nt, synthetic construct
  misc_feature 1..20: note = C9Orf72 ATCN PAM targeting sequence
  source 1..20: mol_type = other RNA
cagcactttgggaggtcaag

SEQ ID NO: 649 - RNA, 20 nt, synthetic construct
  misc_feature 1..20: note = C9Orf72 ATCN PAM targeting sequence
  source 1..20: mol_type = other RNA
ttctgccttgacctcccaaa

SEQ ID NO: 650 - RNA, 20 nt, synthetic construct
  misc_feature 1..20: note = C9Orf72 ATCN PAM targeting sequence
  source 1..20: mol_type = other RNA
cttgagctcaggagttccag

SEQ ID NO: 651 - RNA, 20 nt, synthetic construct
  misc_feature 1..20: note = C9Orf72 ATCN PAM targeting sequence
  source 1..20: mol_type = other RNA
tcccacctcagcctcctaag

SEQ ID NO: 652 - RNA, 20 nt, synthetic construct
  misc_feature 1..20: note = C9Orf72 ATCN PAM targeting sequence
  source 1..20: mol_type = other RNA
cttgagcccaggaggctaga

SEQ ID NO: 653 - RNA, 20 nt, synthetic construct
  misc_feature 1..20: note = C9Orf72 ATCN PAM targeting sequence
  source 1..20: mol_type = other RNA
tctagcctcctgggctcaag

SEQ ID NO: 654 - RNA, 20 nt, synthetic construct
  misc_feature 1..20: note = C9Orf72 ATCN PAM targeting sequence
  source 1..20: mol_type = other RNA
tggctcactgcatcctctag

SEQ ID NO: 655 - RNA, 20 nt, synthetic construct
  misc_feature 1..20: note = C9Orf72 ATCN PAM targeting sequence
  source 1..20: mol_type = other RNA
caccagcctgggtgacagag

SEQ ID NO: 656 - RNA, 20 nt, synthetic construct
  misc_feature 1..20: note = C9Orf72 ATCN PAM targeting sequence
  source 1..20: mol_type = other RNA
cctcacacttgttacttttt

SEQ ID NO: 657 - RNA, 20 nt, synthetic construct
  misc_feature 1..20: note = C9Orf72 ATCN PAM targeting sequence
  source 1..20: mol_type = other RNA
gttagttcctcttgacatat

SEQ ID NO: 658 - RNA, 20 nt, synthetic construct
  misc_feature 1..20: note = C9Orf72 ATCN PAM targeting sequence
  source 1..20: mol_type = other RNA
ggaactgaagaaatgaagtt

SEQ ID NO: 659 - RNA, 20 nt, synthetic construct
  misc_feature 1..20: note = C9Orf72 ATCN PAM targeting sequence
  source 1..20: mol_type = other RNA
tatgacagacaccccttcgt

SEQ ID NO: 660 - RNA, 20 nt, synthetic construct
  misc_feature 1..20: note = C9Orf72 ATCN PAM targeting sequence
  source 1..20: mol_type = other RNA
tcatatgacagacacccctt

SEQ ID NO: 661 - RNA, 20 nt, synthetic construct
  misc_feature 1..20: note = C9Orf72 ATCN PAM targeting sequence
  source 1..20: mol_type = other RNA
tcccacatcatcatatgaca

SEQ ID NO: 662 - RNA, 20 nt, synthetic construct
  misc_feature 1..20: note = C9Orf72 ATCN PAM targeting sequence
  source 1..20: mol_type = other RNA
agagacacatcacatcacaa

SEQ ID NO: 663 - RNA, 20 nt, synthetic construct
  misc_feature 1..20: note = C9Orf72 ATCN PAM targeting sequence
  source 1..20: mol_type = other RNA
catcacaaagatgagcagtg

SEQ ID NO: 664 - RNA, 20 nt, synthetic construct
  misc_feature 1..20: note = C9Orf72 ATCN PAM targeting sequence
  source 1..20: mol_type = other RNA
caaagatgagcagtgctgcc

SEQ ID NO: 665 - RNA, 20 nt, synthetic construct
  misc_feature 1..20: note = C9Orf72 ATCN PAM targeting sequence
  source 1..20: mol_type = other RNA
ttgtgatgtgatgtgtctct

SEQ ID NO: 666 - RNA, 20 nt, synthetic construct
  misc_feature 1..20: note = C9Orf72 ATCN PAM targeting sequence
  source 1..20: mol_type = other RNA
atggaacacactctgggcag

SEQ ID NO: 667 - RNA, 20 nt, synthetic construct
  misc_feature 1..20: note = C9Orf72 ATCN PAM targeting sequence
  source 1..20: mol_type = other RNA
tgatatctctaagatgtcaa

SEQ ID NO: 668 - RNA, 20 nt, synthetic construct
  misc_feature 1..20: note = C9Orf72 ATCN PAM targeting sequence
  source 1..20: mol_type = other RNA
tgatccatggaacacactct

SEQ ID NO: 669 - RNA, 20 nt, synthetic construct
  misc_feature 1..20: note = C9Orf72 ATCN PAM targeting sequence
  source 1..20: mol_type = other RNA
ctaagatgtcaatgagtgat

SEQ ID NO: 670 - RNA, 20 nt, synthetic construct
  misc_feature 1..20: note = C9Orf72 ATCN PAM targeting sequence
  source 1..20: mol_type = other RNA
tagagatatcatgatccatg

SEQ ID NO: 671 - RNA, 20 nt, synthetic construct
  misc_feature 1..20: note = C9Orf72 ATCN PAM targeting sequence
  source 1..20: mol_type = other RNA
ctcattgacatcttagagat

SEQ ID NO: 672 - RNA, 20 nt, synthetic construct
  misc_feature 1..20: note = C9Orf72 ATCN PAM targeting sequence
  source 1..20: mol_type = other RNA
agtaaagaaacttgttcaat

SEQ ID NO: 673 - RNA, 20 nt, synthetic construct
  misc_feature 1..20: note = C9Orf72 ATCN PAM targeting sequence
  source 1..20: mol_type = other RNA
aagcctttgagaaggtatcc

SEQ ID NO: 674 - RNA, 20 nt, synthetic construct
  misc_feature 1..20: note = C9Orf72 ATCN PAM targeting sequence
  source 1..20: mol_type = other RNA
tcaagggtggagacgatgta

SEQ ID NO: 675 - RNA, 20 nt, synthetic construct
  misc_feature 1..20: note = C9Orf72 ATCN PAM targeting sequence
  source 1..20: mol_type = other RNA
tctccacccttgaagattta

SEQ ID NO: 676 - RNA, 20 nt, synthetic construct
  misc_feature 1..20: note = C9Orf72 ATCN PAM targeting sequence
  source 1..20: mol_type = other RNA
ctcaggactggcattttgag

SEQ ID NO: 677 - RNA, 20 nt, synthetic construct
  misc_feature 1..20: note = C9Orf72 ATCN PAM targeting sequence
  source 1..20: mol_type = other RNA
gtgtttgccaagagagctcc

SEQ ID NO: 678 - RNA, 20 nt, synthetic construct
  misc_feature 1..20: note = C9Orf72 ATCN PAM targeting sequence
  source 1..20: mol_type = other RNA
tcagatttttctcctttttg

SEQ ID NO: 679 - RNA, 20 nt, synthetic construct
  misc_feature 1..20: note = C9Orf72 ATCN PAM targeting sequence
  source 1..20: mol_type = other RNA
gaagatcagtgtttgccaag

SEQ ID NO: 680 - RNA, 20 nt, synthetic construct
  misc_feature 1..20: note = C9Orf72 ATCN PAM targeting sequence
  source 1..20: mol_type = other RNA
tagaggagaagagatgaagt

SEQ ID NO: 681 - RNA, 20 nt, synthetic construct
  misc_feature 1..20: note = C9Orf72 ATCN PAM targeting sequence
  source 1..20: mol_type = other RNA
cttctcctctaggattggga

SEQ ID NO: 682 - RNA, 20 nt, synthetic construct
  misc_feature 1..20: note = C9Orf72 ATCN PAM targeting sequence
  source 1..20: mol_type = other RNA
agggtcttttccctcaacgt

SEQ ID NO: 683 - RNA, 20 nt, synthetic construct
  misc_feature 1..20: note = C9Orf72 ATCN PAM targeting sequence
  source 1..20: mol_type = other RNA
atatcatctgggagcaaaat

SEQ ID NO: 684 - RNA, 20 nt, synthetic construct
  misc_feature 1..20: note = C9Orf72 ATCN PAM targeting sequence
  source 1..20: mol_type = other RNA
atgctgctggttcccagacc

SEQ ID NO: 685 - RNA, 20 nt, synthetic construct
  misc_feature 1..20: note = C9Orf72 ATCN PAM targeting sequence
  source 1..20: mol_type = other RNA
tctgggagcaaaatgaacat

SEQ ID NO: 686 - RNA, 20 nt, synthetic construct
  misc_feature 1..20: note = C9Orf72 ATCN PAM targeting sequence
  source 1..20: mol_type = other RNA
gggagcaaaatgaacattct

SEQ ID NO: 687 - RNA, 20 nt, synthetic construct
  misc_feature 1..20: note = C9Orf72 ATCN PAM targeting sequence
  source 1..20: mol_type = other RNA
gagaggaggagactcgagaa

SEQ ID NO: 688 - RNA, 20 nt, synthetic construct
  misc_feature 1..20: note = C9Orf72 ATCN PAM targeting sequence
  source 1..20: mol_type = other RNA
gaacttgcatttcagcaaga

SEQ ID NO: 689 - RNA, 20 nt, synthetic construct
  misc_feature 1..20: note = C9Orf72 ATCN PAM targeting sequence
  source 1..20: mol_type = other RNA
tgctgaaatgcaagttctga

SEQ ID NO: 690 - RNA, 20 nt, synthetic construct
  misc_feature 1..20: note = C9Orf72 ATCN PAM targeting sequence
  source 1..20: mol_type = other RNA
ctggtgattcacatgcacat

SEQ ID NO: 691 - RNA, 20 nt, synthetic construct
  misc_feature 1..20: note = C9Orf72 ATCN PAM targeting sequence
  source 1..20: mol_type = other RNA
ccagggatcttgctgaaatg

SEQ ID NO: 692 - RNA, 20 nt, synthetic construct
  misc_feature 1..20: note = C9Orf72 ATCN PAM targeting sequence
  source 1..20: mol_type = other RNA
caaactttaatgtgcatgtg

SEQ ID NO: 693 - RNA, 20 nt, synthetic construct
  misc_feature 1..20: note = C9Orf72 ATCN PAM targeting sequence
  source 1..20: mol_type = other RNA
taataattctgatttagtgt

SEQ ID NO: 694 - RNA, 20 nt, synthetic construct
  misc_feature 1..20: note = C9Orf72 ATCN PAM targeting sequence
  source 1..20: mol_type = other RNA
gaattattaagattagtgcc

SEQ ID NO: 695 - RNA, 20 nt, synthetic construct
  misc_feature 1..20: note = C9Orf72 ATCN PAM targeting sequence
  source 1..20: mol_type = other RNA
ggggtgaggcccaagaatgt

SEQ ID NO: 696 - RNA, 20 nt, synthetic construct
  misc_feature 1..20: note = C9Orf72 ATCN PAM targeting sequence
  source 1..20: mol_type = other RNA
cctggaggaagtacttcata

SEQ ID NO: 697 - RNA, 20 nt, synthetic construct
  misc_feature 1..20: note = C9Orf72 ATCN PAM targeting sequence
  source 1..20: mol_type = other RNA
gaatctcctggaggaagtac

SEQ ID NO: 698 - RNA, 20 nt, synthetic construct
  misc_feature 1..20: note = C9Orf72 ATCN PAM targeting sequence
  source 1..20: mol_type = other RNA
ctttcattgttagaaacaag

SEQ ID NO: 699 - RNA, 20 nt, synthetic construct
  misc_feature 1..20: note = C9Orf72 ATCN PAM targeting sequence
  source 1..20: mol_type = other RNA
ctgtcctccccctgccctaa

SEQ ID NO: 700 - RNA, 20 nt, synthetic construct
  misc_feature 1..20: note = C9Orf72 ATCN PAM targeting sequence
  source 1..20: mol_type = other RNA
gctcttcattcacaactact

SEQ ID NO: 701 - RNA, 20 nt, synthetic construct
  misc_feature 1..20: note = C9Orf72 ATCN PAM targeting sequence
  source 1..20: mol_type = other RNA
ttagcaagcacgaatagccc

SEQ ID NO: 702 - RNA, 20 nt, synthetic construct
  misc_feature 1..20: note = C9Orf72 ATCN PAM targeting sequence
  source 1..20: mol_type = other RNA
gaattatcattagcaagcac

SEQ ID NO: 703 - RNA, 20 nt, synthetic construct
  misc_feature 1..20: note = C9Orf72 ATCN PAM targeting sequence
  source 1..20: mol_type = other RNA
gggcctggcccattttctaa

SEQ ID NO: 704 - RNA, 20 nt, synthetic construct
  misc_feature 1..20: note = C9Orf72 ATCN PAM targeting sequence
  source 1..20: mol_type = other RNA
gcatcatttgggctgtttcc

SEQ ID NO: 705 - RNA, 20 nt, synthetic construct
  misc_feature 1..20: note = C9Orf72 ATCN PAM targeting sequence
  source 1..20: mol_type = other RNA
tttgggctgtttcctccaac

SEQ ID NO: 706 - RNA, 20 nt, synthetic construct
  misc_feature 1..20: note = C9Orf72 ATCN PAM targeting sequence
  source 1..20: mol_type = other RNA
tcagctgttgcatttacatg

SEQ ID NO: 707 - RNA, 20 nt, synthetic construct
  misc_feature 1..20: note = C9Orf72 ATCN PAM targeting sequence
  source 1..20: mol_type = other RNA
attgctcatgtaaatgcaac

SEQ ID NO: 708 - RNA, 20 nt, synthetic construct
  misc_feature 1..20: note = C9Orf72 ATCN PAM targeting sequence
  source 1..20: mol_type = other RNA
tccattgctcatgtaaatgc

SEQ ID NO: 709 - RNA, 20 nt, synthetic construct
  misc_feature 1..20: note = C9Orf72 ATCN PAM targeting sequence
  source 1..20: mol_type = other RNA
gtcacgtctgtgtctgtgtc

SEQ ID NO: 710 - RNA, 20 nt, synthetic construct
  misc_feature 1..20: note = C9Orf72 ATCN PAM targeting sequence
  source 1..20: mol_type = other RNA
acccccagagcttgcctcat

SEQ ID NO: 711 - RNA, 20 nt, synthetic construct
  misc_feature 1..20: note = C9Orf72 ATCN PAM targeting sequence
  source 1..20: mol_type = other RNA
atccacccccagagcttgcc

SEQ ID NO: 712 - RNA, 20 nt, synthetic construct
  misc_feature 1..20: note = C9Orf72 ATCN PAM targeting sequence
  source 1..20: mol_type = other RNA
ggcctctgagtgggaataca

SEQ ID NO: 713 - RNA, 20 nt, synthetic construct
  misc_feature 1..20: note = C9Orf72 ATCN PAM targeting sequence
  source 1..20: mol_type = other RNA
tttgcctgacacaccagggc

SEQ ID NO: 714 - RNA, 20 nt, synthetic construct
  misc_feature 1..20: note = C9Orf72 ATCN PAM targeting sequence
  source 1..20: mol_type = other RNA
tctcacactgcttttgtgcc

SEQ ID NO: 715 - RNA, 20 nt, synthetic construct
  misc_feature 1..20: note = C9Orf72 ATCN PAM targeting sequence
  source 1..20: mol_type = other RNA
tgaatcctctcacactgctt

SEQ ID NO: 716 - RNA, 20 nt, synthetic construct
  misc_feature 1..20: note = C9Orf72 ATCN PAM targeting sequence
  source 1..20: mol_type = other RNA
cccaggaaatcttgaatcct

SEQ ID NO: 717 - RNA, 20 nt, synthetic construct
  misc_feature 1..20: note = C9Orf72 ATCN PAM targeting sequence
  source 1..20: mol_type = other RNA
atctggaatttggaacagag

SEQ ID NO: 718 - RNA, 20 nt, synthetic construct
  misc_feature 1..20: note = C9Orf72 ATCN PAM targeting sequence
  source 1..20: mol_type = other RNA
ggaatttggaacagagaatg

SEQ ID NO: 719 - RNA, 20 nt, synthetic construct
  misc_feature 1..20: note = C9Orf72 ATCN PAM targeting sequence
  source 1..20: mol_type = other RNA
taagctttaggtctcacaga

SEQ ID NO: 720 - RNA, 20 nt, synthetic construct
  misc_feature 1..20: note = C9Orf72 ATCN PAM targeting sequence
  source 1..20: mol_type = other RNA
ctgctctctgtcttattttg

SEQ ID NO: 721 - RNA, 20 nt, synthetic construct
  misc_feature 1..20: note = C9Orf72 ATCN PAM targeting sequence
  source 1..20: mol_type = other RNA
gacaggatgaagcattagtc

SEQ ID NO: 722 - RNA, 20 nt, synthetic construct
  misc_feature 1..20: note = C9Orf72 ATCN PAM targeting sequence
  source 1..20: mol_type = other RNA
tgtcagattagcaatagaca

SEQ ID NO: 723 - RNA, 20 nt, synthetic construct
  misc_feature 1..20: note = C9Orf72 ATCN PAM targeting sequence
  source 1..20: mol_type = other RNA
cagaacatgcatgcagacct

SEQ ID NO: 724 - RNA, 20 nt, synthetic construct
  misc_feature 1..20: note = C9Orf72 ATCN PAM targeting sequence
  source 1..20: mol_type = other RNA
ctttgaatggaggtgcatca

SEQ ID NO: 725 - RNA, 20 nt, synthetic construct
  misc_feature 1..20: note = C9Orf72 ATCN PAM targeting sequence
  source 1..20: mol_type = other RNA
tccttaaagtactctcccca

SEQ ID NO: 726 - RNA, 20 nt, synthetic construct
  misc_feature 1..20: note = C9Orf72 ATCN PAM targeting sequence
  source 1..20: mol_type = other RNA
ttaaagtactctccccaatt

SEQ ID NO: 727 - RNA, 20 nt, synthetic construct
  misc_feature 1..20: note = C9Orf72 ATCN PAM targeting sequence
  source 1..20: mol_type = other RNA
catgggagtgactgatacaa

SEQ ID NO: 728 - RNA, 20 nt, synthetic construct
  misc_feature 1..20: note = C9Orf72 ATCN PAM targeting sequence
  source 1..20: mol_type = other RNA
gtcactcccatgggattgtc

SEQ ID NO: 729 - RNA, 20 nt, synthetic construct
  misc_feature 1..20: note = C9Orf72 ATCN PAM targeting sequence
  source 1..20: mol_type = other RNA
atcgttaagacagaaaagag

SEQ ID NO: 730 - RNA, 20 nt, synthetic construct
  misc_feature 1..20: note = C9Orf72 ATCN PAM targeting sequence
  source 1..20: mol_type = other RNA
ttaagacagaaaagaggtca

SEQ ID NO: 731 - RNA, 20 nt, synthetic construct
  misc_feature 1..20: note = C9Orf72 ATCN PAM targeting sequence
  source 1..20: mol_type = other RNA
actaactacagcccagctac

SEQ ID NO: 732 - RNA, 20 nt, synthetic construct
  misc_feature 1..20: note = C9Orf72 ATCN PAM targeting sequence
  source 1..20: mol_type = other RNA
atagcatgggtataataata

SEQ ID NO: 733 - RNA, 20 nt, synthetic construct
  misc_feature 1..20: note = C9Orf72 ATCN PAM targeting sequence
  source 1..20: mol_type = other RNA
tgctcaagtttgcacgttag

SEQ ID NO: 734 - RNA, 20 nt, synthetic construct
  misc_feature 1..20: note = C9Orf72 ATCN PAM targeting sequence
  source 1..20: mol_type = other RNA
tacagtgcctaagaaaagtc

SEQ ID NO: 735 - RNA, 20 nt, synthetic construct
  misc_feature 1..20: note = C9Orf72 ATCN PAM targeting sequence
  source 1..20: mol_type = other RNA
atgcagcaccctactggggt

SEQ ID NO: 736 - RNA, 20 nt, synthetic construct
  misc_feature 1..20: note = C9Orf72 ATCN PAM targeting sequence
  source 1..20: mol_type = other RNA
tcagcacaacctgtgtggta

SEQ ID NO: 737 - RNA, 20 nt, synthetic construct
  misc_feature 1..20: note = C9Orf72 ATCN PAM targeting sequence
  source 1..20: mol_type = other RNA
accacacaggttgtgctgag

SEQ ID NO: 738 - RNA, 20 nt, synthetic construct
  misc_feature 1..20: note = C9Orf72 ATCN PAM targeting sequence
  source 1..20: mol_type = other RNA
ctttgttgcttttgtctcac

SEQ ID NO: 739 - RNA, 20 nt, synthetic construct
  misc_feature 1..20: note = C9Orf72 ATCN PAM targeting sequence
  source 1..20: mol_type = other RNA
ttccctctgccttgcctcca

SEQ ID NO: 740 - RNA, 20 nt, synthetic construct
  misc_feature 1..20: note = C9Orf72 ATCN PAM targeting sequence
  source 1..20: mol_type = other RNA
caaggcatgacaccaagaat

SEQ ID NO: 741 - RNA, 20 nt, synthetic construct
  misc_feature 1..20: note = C9Orf72 ATCN PAM targeting sequence
  source 1..20: mol_type = other RNA
tcctttgagggtcaaaaatg

SEQ ID NO: 742 - RNA, 20 nt, synthetic construct
  misc_feature 1..20: note = C9Orf72 ATCN PAM targeting sequence
  source 1..20: mol_type = other RNA
tttgagggtcaaaaatgggt

SEQ ID NO: 743 - RNA, 20 nt, synthetic construct
  misc_feature 1..20: note = C9Orf72 ATCN PAM targeting sequence
  source 1..20: mol_type = other RNA
cgccactgcagtccggcctg

SEQ ID NO: 744 - RNA, 20 nt, synthetic construct
  misc_feature 1..20: note = C9Orf72 ATCN PAM targeting sequence
  source 1..20: mol_type = other RNA
cggctcactgcaagctctgc

SEQ ID NO: 745 - RNA, 20 nt, synthetic construct
  misc_feature 1..20: note = C9Orf72 ATCN PAM targeting sequence
  source 1..20: mol_type = other RNA
tggctaacacggtgaaaccc

SEQ ID NO: 746 - RNA, 20 nt, synthetic construct
  misc_feature 1..20: note = C9Orf72 ATCN PAM targeting sequence
  source 1..20: mol_type = other RNA
agaccatcctggctaacacg

SEQ ID NO: 747 - RNA, 20 nt, synthetic construct
  misc_feature 1..20: note = C9Orf72 ATCN PAM targeting sequence
  source 1..20: mol_type = other RNA
cctgacctcgtgatctgcct

SEQ ID NO: 748 - RNA, 20 nt, synthetic construct
  misc_feature 1..20: note = C9Orf72 ATCN PAM targeting sequence
  source 1..20: mol_type = other RNA
cgaggtcaggagatcgagac

SEQ ID NO: 749 - RNA, 20 nt, synthetic construct
  misc_feature 1..20: note = C9Orf72 ATCN PAM targeting sequence
  source 1..20: mol_type = other RNA
gcctgcctcgagagcataga

SEQ ID NO: 750 - RNA, 20 nt, synthetic construct
  misc_feature 1..20: note = C9Orf72 ATCN PAM targeting sequence
  source 1..20: mol_type = other RNA
atgctctcgaggcaggcaga

SEQ ID NO: 751 - RNA, 20 nt, synthetic construct
  misc_feature 1..20: note = C9Orf72 ATCN PAM targeting sequence
  source 1..20: mol_type = other RNA
gagcaacttgagttgtatat

SEQ ID NO: 752 - RNA, 20 nt, synthetic construct
  misc_feature 1..20: note = C9Orf72 ATCN PAM targeting sequence
  source 1..20: mol_type = other RNA
atatatgcaaatcaaataaa

SEQ ID NO: 753 - RNA, 20 nt, synthetic construct
  misc_feature 1..20: note = C9Orf72 ATCN PAM targeting sequence
  source 1..20: mol_type = other RNA
aataaaaatgtgttgacttg

SEQ ID NO: 754 - RNA, 20 nt, synthetic construct
  misc_feature 1..20: note = C9Orf72 ATCN PAM targeting sequence
  source 1..20: mol_type = other RNA
ggcataacatgtcaagtcaa

SEQ ID NO: 755 - RNA, 20 nt, synthetic construct
  misc_feature 1..20: note = C9Orf72 ATCN PAM targeting sequence
  source 1..20: mol_type = other RNA
tagcactgtcaactgttgaa

SEQ ID NO: 756 - RNA, 20 nt, synthetic construct
  misc_feature 1..20: note = C9Orf72 ATCN PAM targeting sequence
  source 1..20: mol_type = other RNA
acaagccataaacaatctac

SEQ ID NO: 757 - RNA, 20 nt, synthetic construct
  misc_feature 1..20: note = C9Orf72 ATCN PAM targeting sequence
  source 1..20: mol_type = other RNA
actcttaatggacactgcat

SEQ ID NO: 758 - RNA, 20 nt, synthetic construct
  misc_feature 1..20: note = C9Orf72 ATCN PAM targeting sequence
  source 1..20: mol_type = other RNA
agagcctgatattatatgat

SEQ ID NO: 759 - RNA, 20 nt, synthetic construct
  misc_feature 1..20: note = C9Orf72 ATCN PAM targeting sequence
  source 1..20: mol_type = other RNA
ggctctggatacttagcaca

SEQ ID NO: 760 - RNA, 20 nt, synthetic construct
  misc_feature 1..20: note = C9Orf72 ATCN PAM targeting sequence
  source 1..20: mol_type = other RNA
tataatatcaggctctggat

SEQ ID NO: 761 - RNA, 20 nt, synthetic construct
  misc_feature 1..20: note = C9Orf72 ATCN PAM targeting sequence
  source 1..20: mol_type = other RNA
atttctgttcctttataggg

SEQ ID NO: 762 - RNA, 20 nt, synthetic construct
  misc_feature 1..20: note = C9Orf72 ATCN PAM targeting sequence
  source 1..20: mol_type = other RNA
tgcttgcaatagtatacttc

SEQ ID NO: 763 - RNA, 20 nt, synthetic construct
  misc_feature 1..20: note = C9Orf72 ATCN PAM targeting sequence
  source 1..20: mol_type = other RNA
tagacaagggcctctttggg

SEQ ID NO: 764 - RNA, 20 nt, synthetic construct
  misc_feature 1..20: note = C9Orf72 ATCN PAM targeting sequence
  source 1..20: mol_type = other RNA
gaaaactcagttattttcta

SEQ ID NO: 765 - RNA, 20 nt, synthetic construct
  misc_feature 1..20: note = C9Orf72 ATCN PAM targeting sequence
  source 1..20: mol_type = other RNA
agtagagaaaggctttcttt

SEQ ID NO: 766 - RNA, 20 nt, synthetic construct
  misc_feature 1..20: note = C9Orf72 ATCN PAM targeting sequence
  source 1..20: mol_type = other RNA
gaaacaccacgacagagctg

SEQ ID NO: 767 - RNA, 20 nt, synthetic construct
  misc_feature 1..20: note = C9Orf72 ATCN PAM targeting sequence
  source 1..20: mol_type = other RNA
cttagctctgtgaaaccaaa

SEQ ID NO: 768 - RNA, 20 nt, synthetic construct
  misc_feature 1..20: note = C9Orf72 ATCN PAM targeting sequence
  source 1..20: mol_type = other RNA
aggagattgcagtggtttct

SEQ ID NO: 769 - RNA, 20 nt, synthetic construct
  misc_feature 1..20: note = C9Orf72 ATCN PAM targeting sequence
  source 1..20: mol_type = other RNA
cctggatggtttcagttcag

SEQ ID NO: 770 - RNA, 20 nt, synthetic construct
  misc_feature 1..20: note = C9Orf72 ATCN PAM targeting sequence
  source 1..20: mol_type = other RNA
ttcctctctgtccttgacat

SEQ ID NO: 771 - RNA, 20 nt, synthetic construct
  misc_feature 1..20: note = C9Orf72 ATCN PAM targeting sequence
  source 1..20: mol_type = other RNA
attgtttctagtcttaactc

SEQ ID NO: 772 - RNA, 20 nt, synthetic construct
  misc_feature 1..20: note = C9Orf72 ATCN PAM targeting sequence
  source 1..20: mol_type = other RNA
tcccatagtggctgtttacc

SEQ ID NO: 773 - RNA, 20 nt, synthetic construct
  misc_feature 1..20: note = C9Orf72 ATCN PAM targeting sequence
  source 1..20: mol_type = other RNA
atgaattctttccatactat

SEQ ID NO: 774 - RNA, 20 nt, synthetic construct
  misc_feature 1..20: note = C9Orf72 ATCN PAM targeting sequence
  source 1..20: mol_type = other RNA
atggctgagttttataaagg

SEQ ID NO: 775 - RNA, 20 nt, synthetic construct
  misc_feature 1..20: note = C9Orf72 ATCN PAM targeting sequence
  source 1..20: mol_type = other RNA
cttgtgaaagaaaatgaaga

SEQ ID NO: 776 - RNA, 20 nt, synthetic construct
  misc_feature 1..20: note = C9Orf72 ATCN PAM targeting sequence
  source 1..20: mol_type = other RNA
ttactttaaaaagagcctat

SEQ ID NO: 777 - RNA, 20 nt, synthetic construct
  misc_feature 1..20: note = C9Orf72 ATCN PAM targeting sequence
  source 1..20: mol_type = other RNA
caagtgtaacccaaaaagtc

SEQ ID NO: 778 - RNA, 20 nt, synthetic construct
  misc_feature 1..20: note = C9Orf72 ATCN PAM targeting sequence
  source 1..20: mol_type = other RNA
cctttagtgtttttcacctt

SEQ ID NO: 779 - RNA, 20 nt, synthetic construct
  misc_feature 1..20: note = C9Orf72 ATCN PAM targeting sequence
  source 1..20: mol_type = other RNA
tctttgccaggtacaggtac

SEQ ID NO: 780 - RNA, 20 nt, synthetic construct
  misc_feature 1..20: note = C9Orf72 ATCN PAM targeting sequence
  source 1..20: mol_type = other RNA
tttattttttgtgtttcgat

SEQ ID NO: 781 - RNA, 20 nt, synthetic construct
  misc_feature 1..20: note = C9Orf72 ATCN PAM targeting sequence
  source 1..20: mol_type = other RNA
aaacacaaaaaataaaagat

SEQ ID NO: 782 - RNA, 20 nt, synthetic construct
  misc_feature 1..20: note = C9Orf72 ATCN PAM targeting sequence
  source 1..20: mol_type = other RNA
aaggggccttgttgatcctg

SEQ ID NO: 783 - RNA, 20 nt, synthetic construct
  misc_feature 1..20: note = C9Orf72 ATCN PAM targeting sequence
  source 1..20: mol_type = other RNA
acaaggcccctttgatgtta

SEQ ID NO: 784 - RNA, 20 nt, synthetic construct
  misc_feature 1..20: note = C9Orf72 ATCN PAM targeting sequence
  source 1..20: mol_type = other RNA
tggagggactgcccctccca

SEQ ID NO: 785 - RNA, 20 nt, synthetic construct
  misc_feature 1..20: note = C9Orf72 ATCN PAM targeting sequence
  source 1..20: mol_type = other RNA
ctaggaattggctagctctg

SEQ ID NO: 786 - RNA, 20 nt, synthetic construct
  misc_feature 1..20: note = C9Orf72 ATCN PAM targeting sequence
  source 1..20: mol_type = other RNA
tgcagagcctgcaccccaaa

SEQ ID NO: 787 - RNA, 20 nt, synthetic construct
  misc_feature 1..20: note = C9Orf72 ATCN PAM targeting sequence
  source 1..20: mol_type = other RNA
gggtctcacactaaccaccc

SEQ ID NO: 788 - RNA, 20 nt, synthetic construct
  misc_feature 1..20: note = C9Orf72 ATCN PAM targeting sequence
  source 1..20: mol_type = other RNA
gataactaggaataacccct

SEQ ID NO: 789 - RNA, 20 nt, synthetic construct
  misc_feature 1..20: note = C9Orf72 ATCN PAM targeting sequence
  source 1..20: mol_type = other RNA
gataccttggcctggggtgg

SEQ ID NO: 790 - RNA, 20 nt, synthetic construct
  misc_feature 1..20: note = C9Orf72 ATCN PAM targeting sequence
  source 1..20: mol_type = other RNA
ctggagcctaggggttattc

SEQ ID NO: 791 - RNA, 20 nt, synthetic construct
  misc_feature 1..20: note = C9Orf72 ATCN PAM targeting sequence
  source 1..20: mol_type = other RNA
aagtataacacagtcccttt

SEQ ID NO: 792 - RNA, 20 nt, synthetic construct
  misc_feature 1..20: note = C9Orf72 ATCN PAM targeting sequence
  source 1..20: mol_type = other RNA
atcaaaattgaatcagaaaa

SEQ ID NO: 793 - RNA, 20 nt, synthetic construct
  misc_feature 1..20: note = C9Orf72 ATCN PAM targeting sequence
  source 1..20: mol_type = other RNA
atgaagtattccctgccttg

SEQ ID NO: 794 - RNA, 20 nt, synthetic construct
  misc_feature 1..20: note = C9Orf72 ATCN PAM targeting sequence
  source 1..20: mol_type = other RNA
aaattgaatcagaaaagagc

SEQ ID NO: 795 - RNA, 20 nt, synthetic construct
  misc_feature 1..20: note = C9Orf72 ATCN PAM targeting sequence
  source 1..20: mol_type = other RNA
gaaaagagcagtggtcttat

SEQ ID NO: 796 - RNA, 20 nt, synthetic construct
  misc_feature 1..20: note = C9Orf72 ATCN PAM targeting sequence
  source 1..20: mol_type = other RNA
tgactaaataagaccactgc

SEQ ID NO: 797 - RNA, 20 nt, synthetic construct
  misc_feature 1..20: note = C9Orf72 ATCN PAM targeting sequence
  source 1..20: mol_type = other RNA
atcatctcctgtttggggga

SEQ ID NO: 798 - RNA, 20 nt, synthetic construct
  misc_feature 1..20: note = C9Orf72 ATCN PAM targeting sequence
  source 1..20: mol_type = other RNA
tctcctgtttgggggaggca

SEQ ID NO: 799 - RNA, 20 nt, synthetic construct
  misc_feature 1..20: note = C9Orf72 ATCN PAM targeting sequence
  source 1..20: mol_type = other RNA
cctgtttgggggaggcaaaa

SEQ ID NO: 800 - RNA, 20 nt, synthetic construct
  misc_feature 1..20: note = C9Orf72 ATCN PAM targeting sequence
  source 1..20: mol_type = other RNA
tttctgctgtgggttttctt

SEQ ID NO: 801 - RNA, 20 nt, synthetic construct
  misc_feature 1..20: note = C9Orf72 ATCN PAM targeting sequence
  source 1..20: mol_type = other RNA
ggagtctggcaaaaagctat

SEQ ID NO: 802 - RNA, 20 nt, synthetic construct
  misc_feature 1..20: note = C9Orf72 ATCN PAM targeting sequence
  source 1..20: mol_type = other RNA
cagtgttcctcattgcaaag

SEQ ID NO: 803 - RNA, 20 nt, synthetic construct
  misc_feature 1..20: note = C9Orf72 ATCN PAM targeting sequence
  source 1..20: mol_type = other RNA
agcctagggtgtggaaagga

SEQ ID NO: 804 - RNA, 20 nt, synthetic construct
  misc_feature 1..20: note = C9Orf72 ATCN PAM targeting sequence
  source 1..20: mol_type = other RNA
ttgaaatcttccttcttctc

SEQ ID NO: 805 - RNA, 20 nt, synthetic construct
  misc_feature 1..20: note = C9Orf72 ATCN PAM targeting sequence
  source 1..20: mol_type = other RNA
tccttcttctcttttttttt

SEQ ID NO: 806 - RNA, 20 nt, synthetic construct
  misc_feature 1..20: note = C9Orf72 ATCN PAM targeting sequence
  source 1..20: mol_type = other RNA
atttcagttaggactgctgg

SEQ ID NO: 807 - RNA, 20 nt, synthetic construct
  misc_feature 1..20: note = C9Orf72 ATCN PAM targeting sequence
  source 1..20: mol_type = other RNA
taagggtttggagttagatt

SEQ ID NO: 808 - RNA, 20 nt, synthetic construct
  misc_feature 1..20: note = C9Orf72 ATCN PAM targeting sequence
  source 1..20: mol_type = other RNA
aactccaaacccttaagata

SEQ ID NO: 809 - RNA, 20 nt, synthetic construct
  misc_feature 1..20: note = C9Orf72 ATCN PAM targeting sequence
  source 1..20: mol_type = other RNA
agacaaaccatcagcaataa

SEQ ID NO: 810 - RNA, 20 nt, synthetic construct
  misc_feature 1..20: note = C9Orf72 ATCN PAM targeting sequence
  source 1..20: mol_type = other RNA
gcaataataccagactgtta

SEQ ID NO: 811 - RNA, 20 nt, synthetic construct
  misc_feature 1..20: note = C9Orf72 ATCN PAM targeting sequence
  source 1..20: mol_type = other RNA
aacagtctggtattattgct

SEQ ID NO: 812 - RNA, 20 nt, synthetic construct
  misc_feature 1..20: note = C9Orf72 ATCN PAM targeting sequence
  source 1..20: mol_type = other RNA
atacaggcacatatctaaca

SEQ ID NO: 813 - RNA, 20 nt, synthetic construct
  misc_feature 1..20: note = C9Orf72 ATCN PAM targeting sequence
  source 1..20: mol_type = other RNA
tcaatacaggcacatatcta

SEQ ID NO: 814 - RNA, 20 nt, synthetic construct
  misc_feature 1..20: note = C9Orf72 ATCN PAM targeting sequence
  source 1..20: mol_type = other RNA
ttgattacaagatctctaag

SEQ ID NO: 815 - RNA, 20 nt, synthetic construct
  misc_feature 1..20: note = C9Orf72 ATCN PAM targeting sequence
  source 1..20: mol_type = other RNA
aagattgttttctatatcat

SEQ ID NO: 816 - RNA, 20 nt, synthetic construct
  misc_feature 1..20: note = C9Orf72 ATCN PAM targeting sequence
  source 1..20: mol_type = other RNA
tgtaatcaaagattgttttc

SEQ ID NO: 817 - RNA, 20 nt, synthetic construct
  misc_feature 1..20: note = C9Orf72 ATCN PAM targeting sequence
  source 1..20: mol_type = other RNA
ctaagtgatttgcaatcaat

SEQ ID NO: 818 - RNA, 20 nt, synthetic construct
  misc_feature 1..20: note = C9Orf72 ATCN PAM targeting sequence
  source 1..20: mol_type = other RNA
cttagagatcttgtaatcaa

SEQ ID NO: 819 - RNA, 20 nt, synthetic construct
  misc_feature 1..20: note = C9Orf72 ATCN PAM targeting sequence
  source 1..20: mol_type = other RNA
ataattgagactcagaacat

SEQ ID NO: 820 - RNA, 20 nt, synthetic construct
  misc_feature 1..20: note = C9Orf72 ATCN PAM targeting sequence
  source 1..20: mol_type = other RNA
taccctgagctaccaccagt

SEQ ID NO: 821 - RNA, 20 nt, synthetic construct
  misc_feature 1..20: note = C9Orf72 ATCN PAM targeting sequence
  source 1..20: mol_type = other RNA
cctctctgtggagcactagt

SEQ ID NO: 822 - RNA, 20 nt, synthetic construct
  misc_feature 1..20: note = C9Orf72 ATCN PAM targeting sequence
  source 1..20: mol_type = other RNA
atcccctctctgtggagcac

SEQ ID NO: 823 - RNA, 20 nt, synthetic construct
  misc_feature 1..20: note = C9Orf72 ATCN PAM targeting sequence
  source 1..20: mol_type = other RNA
aggtgtccaaggataaccct

SEQ ID NO: 824 - RNA, 20 nt, synthetic construct
  misc_feature 1..20: note = C9Orf72 ATCN PAM targeting sequence
  source 1..20: mol_type = other RNA
ttggacacctggatatccat

SEQ ID NO: 825 - RNA, 20 nt, synthetic construct
  misc_feature 1..20: note = C9Orf72 ATCN PAM targeting sequence
  source 1..20: mol_type = other RNA
aggtccagggttatccttgg

SEQ ID NO: 826 - RNA, 20 nt, synthetic construct
  misc_feature 1..20: note = C9Orf72 ATCN PAM targeting sequence
  source 1..20: mol_type = other RNA
catgacccaaggccatccag

SEQ ID NO: 827 - RNA, 20 nt, synthetic construct
  misc_feature 1..20: note = C9Orf72 ATCN PAM targeting sequence
  source 1..20: mol_type = other RNA
aaaccaatcactgatacaag

SEQ ID NO: 828 - RNA, 20 nt, synthetic construct
  misc_feature 1..20: note = C9Orf72 ATCN PAM targeting sequence
  source 1..20: mol_type = other RNA
ctgatacaagtttctagcag

SEQ ID NO: 829 - RNA, 20 nt, synthetic construct
  misc_feature 1..20: note = C9Orf72 ATCN PAM targeting sequence
  source 1..20: mol_type = other RNA
gtgattggtttggattctgg

SEQ ID NO: 830 - RNA, 20 nt, synthetic construct
  misc_feature 1..20: note = C9Orf72 ATCN PAM targeting sequence
  source 1..20: mol_type = other RNA
ggccttcaagagagactcca

SEQ ID NO: 831 - RNA, 20 nt, synthetic construct
  misc_feature 1..20: note = C9Orf72 ATCN PAM targeting sequence
  source 1..20: mol_type = other RNA
gacagagccctgctgagttt

SEQ ID NO: 832 - RNA, 20 nt, synthetic construct
  misc_feature 1..20: note = C9Orf72 ATCN PAM targeting sequence
  source 1..20: mol_type = other RNA
gaaagttgtggttagacaca

SEQ ID NO: 833 - RNA, 20 nt, synthetic construct
  misc_feature 1..20: note = C9Orf72 ATCN PAM targeting sequence
  source 1..20: mol_type = other RNA
ccaagccacattcagtgtga

SEQ ID NO: 834 - RNA, 20 nt, synthetic construct
  misc_feature 1..20: note = C9Orf72 ATCN PAM targeting sequence
  source 1..20: mol_type = other RNA
agtatgaaacgtaataattt

SEQ ID NO: 835 - RNA, 20 nt, synthetic construct
  misc_feature 1..20: note = C9Orf72 ATCN PAM targeting sequence
  source 1..20: mol_type = other RNA
gcatggggcctcagagaaat

SEQ ID NO: 836 - RNA, 20 nt, synthetic construct
  misc_feature 1..20: note = C9Orf72 ATCN PAM targeting sequence
  source 1..20: mol_type = other RNA
ctgccttaggaaatctcctt

SEQ ID NO: 837 - RNA, 20 nt, synthetic construct
  misc_feature 1..20: note = C9Orf72 ATCN PAM targeting sequence
  source 1..20: mol_type = other RNA
cctttctccccaagaaaatt

SEQ ID NO: 838 - RNA, 20 nt, synthetic construct
  misc_feature 1..20: note = C9Orf72 ATCN PAM targeting sequence
  source 1..20: mol_type = other RNA
cattcaatccttccttttca

SEQ ID NO: 839 - RNA, 20 nt, synthetic construct
  misc_feature 1..20: note = C9Orf72 ATCN PAM targeting sequence
  source 1..20: mol_type = other RNA
ttccttttcaggcacctctg

SEQ ID NO: 840 - RNA, 20 nt, synthetic construct
  misc_feature 1..20: note = C9Orf72 ATCN PAM targeting sequence
  source 1..20: mol_type = other RNA
tgttatggaggccaaaaaag

SEQ ID NO: 841 - RNA, 20 nt, synthetic construct
  misc_feature 1..20: note = C9Orf72 ATCN PAM targeting sequence
  source 1..20: mol_type = other RNA
ccaccccccagtctcctgga

SEQ ID NO: 842 - RNA, 20 nt, synthetic construct
  misc_feature 1..20: note = C9Orf72 ATCN PAM targeting sequence
  source 1..20: mol_type = other RNA
ttcctgttttcatcattttc

SEQ ID NO: 843 - RNA, 20 nt, synthetic construct
  misc_feature 1..20: note = C9Orf72 ATCN PAM targeting sequence
  source 1..20: mol_type = other RNA
ttttcccttttctttggaag

SEQ ID NO: 844 - RNA, 20 nt, synthetic construct
  misc_feature 1..20: note = C9Orf72 ATCN PAM targeting sequence
  source 1..20: mol_type = other RNA
gagtctcattcccaggtgtt

SEQ ID NO: 845 - RNA, 20 nt, synthetic construct
  misc_feature 1..20: note = C9Orf72 ATCN PAM targeting sequence
  source 1..20: mol_type = other RNA
gtgatcggtgctgggctgaa

SEQ ID NO: 846 - RNA, 20 nt, synthetic construct
  misc_feature 1..20: note = C9Orf72 ATCN PAM targeting sequence
  source 1..20: mol_type = other RNA
cagatcagagtctcattccc

SEQ ID NO: 847 - RNA, 20 nt, synthetic construct
  misc_feature 1..20: note = C9Orf72 ATCN PAM targeting sequence
  source 1..20: mol_type = other RNA
gtgctgggctgaacctgggc

SEQ ID NO: 848 - RNA, 20 nt, synthetic construct
  misc_feature 1..20: note = C9Orf72 ATCN PAM targeting sequence
  source 1..20: mol_type = other RNA
ccagagacaaccttttggtt

SEQ ID NO: 849 - RNA, 20 nt, synthetic construct
  misc_feature 1..20: note = C9Orf72 ATCN PAM targeting sequence
  source 1..20: mol_type = other RNA
gccagttgtttgcagaactt

SEQ ID NO: 850 - RNA, 20 nt, synthetic construct
  misc_feature 1..20: note = C9Orf72 ATCN PAM targeting sequence
  source 1..20: mol_type = other RNA
tccgcagacccagcttccct

SEQ ID NO: 851 - RNA, 20 nt, synthetic construct
  misc_feature 1..20: note = C9Orf72 ATCN PAM targeting sequence
  source 1..20: mol_type = other RNA
gcagacccagcttccctggc

SEQ ID NO: 852 - RNA, 20 nt, synthetic construct
  misc_feature 1..20: note = C9Orf72 ATCN PAM targeting sequence
  source 1..20: mol_type = other RNA
gttattctgctcctgaaatt

SEQ ID NO: 853 - RNA, 20 nt, synthetic construct
  misc_feature 1..20: note = C9Orf72 ATCN PAM targeting sequence
  source 1..20: mol_type = other RNA
atgcaggaaaatttcaggag

SEQ ID NO: 854 - RNA, 20 nt, synthetic construct
  misc_feature 1..20: note = C9Orf72 ATCN PAM targeting sequence
  source 1..20: mol_type = other RNA
cacatggtaattccacatgt

SEQ ID NO: 855 - RNA, 20 nt, synthetic construct
  misc_feature 1..20: note = C9Orf72 ATCN PAM targeting sequence
  source 1..20: mol_type = other RNA
gtgggagtctctgcttcagg

SEQ ID NO: 856 - RNA, 20 nt, synthetic construct
  misc_feature 1..20: note = C9Orf72 ATCN PAM targeting sequence
  source 1..20: mol_type = other RNA
aagctcaaagaggtgaaggg

SEQ ID NO: 857 - RNA, 20 nt, synthetic construct
  misc_feature 1..20: note = C9Orf72 ATCN PAM targeting sequence
  source 1..20: mol_type = other RNA
caaactagctctataaagcc

SEQ ID NO: 858 - RNA, 20 nt, synthetic construct
  misc_feature 1..20: note = C9Orf72 ATCN PAM targeting sequence
  source 1..20: mol_type = other RNA
ctcttcatcacaaactagct

SEQ ID NO: 859 - RNA, 20 nt, synthetic construct
  misc_feature 1..20: note = C9Orf72 ATCN PAM targeting sequence
  source 1..20: mol_type = other RNA
gaattcaagtctgtctcaga

SEQ ID NO: 860 - RNA, 20 nt, synthetic construct
  misc_feature 1..20: note = C9Orf72 ATCN PAM targeting sequence
  source 1..20: mol_type = other RNA
catgcaaatacgattgacac

SEQ ID NO: 861 - RNA, 20 nt, synthetic construct
  misc_feature 1..20: note = C9Orf72 ATCN PAM targeting sequence
  source 1..20: mol_type = other RNA
tatttgcatgagatgaaagg

SEQ ID NO: 862 - RNA, 20 nt, synthetic construct
  misc_feature 1..20: note = C9Orf72 ATCN PAM targeting sequence
  source 1..20: mol_type = other RNA
catttatgattccagctgtg

SEQ ID NO: 863 - RNA, 20 nt, synthetic construct
  misc_feature 1..20: note = C9Orf72 ATCN PAM targeting sequence
  source 1..20: mol_type = other RNA
taaatgggattgaggccaga

SEQ ID NO: 864 - RNA, 20 nt, synthetic construct
  misc_feature 1..20: note = C9Orf72 ATCN PAM targeting sequence
  source 1..20: mol_type = other RNA
ccattcctcagacaagaaaa

SEQ ID NO: 865 - RNA, 20 nt, synthetic construct
  misc_feature 1..20: note = C9Orf72 ATCN PAM targeting sequence
  source 1..20: mol_type = other RNA
ggcaaatggcagccgatgtt

SEQ ID NO: 866 - RNA, 20 nt, synthetic construct
  misc_feature 1..20: note = C9Orf72 ATCN PAM targeting sequence
  source 1..20: mol_type = other RNA
gctgccatttgccagatgcc

SEQ ID NO: 867 - RNA, 20 nt, synthetic construct
  misc_feature 1..20: note = C9Orf72 ATCN PAM targeting sequence
  source 1..20: mol_type = other RNA
atgccaagacaggggtggca

SEQ ID NO: 868 - RNA, 20 nt, synthetic construct
  misc_feature 1..20: note = C9Orf72 ATCN PAM targeting sequence
  source 1..20: mol_type = other RNA
tttggagaagaggcagcttc

SEQ ID NO: 869 - RNA, 20 nt, synthetic construct
  misc_feature 1..20: note = C9Orf72 ATCN PAM targeting sequence
  source 1..20: mol_type = other RNA
tatgtcctttggaagctcct

SEQ ID NO: 870 - RNA, 20 nt, synthetic construct
  misc_feature 1..20: note = C9Orf72 ATCN PAM targeting sequence
  source 1..20: mol_type = other RNA
ggtttcatcatatgtccttt

SEQ ID NO: 871 - RNA, 20 nt, synthetic construct
  misc_feature 1..20: note = C9Orf72 ATCN PAM targeting sequence
  source 1..20: mol_type = other RNA
tttgggacccctgatggcat

SEQ ID NO: 872 - RNA, 20 nt, synthetic construct
  misc_feature 1..20: note = C9Orf72 ATCN PAM targeting sequence
  source 1..20: mol_type = other RNA
ggggtcccaaaggattggcc

SEQ ID NO: 873 - RNA, 20 nt, synthetic construct
  misc_feature 1..20: note = C9Orf72 ATCN PAM targeting sequence
  source 1..20: mol_type = other RNA
ctcttattactggactctga

SEQ ID NO: 874 - RNA, 20 nt, synthetic construct
  misc_feature 1..20: note = C9Orf72 ATCN PAM targeting sequence
  source 1..20: mol_type = other RNA
ctctacaagtcataaaaacc

SEQ ID NO: 875 - RNA, 20 nt, synthetic construct
  misc_feature 1..20: note = C9Orf72 ATCN PAM targeting sequence
  source 1..20: mol_type = other RNA
cacacacgtggaaaaagaaa

SEQ ID NO: 876 - RNA, 20 nt, synthetic construct
  misc_feature 1..20: note = C9Orf72 ATCN PAM targeting sequence
  source 1..20: mol_type = other RNA
tgttttgcaagtattttgga

SEQ ID NO: 877 - RNA, 20 nt, synthetic construct
  misc_feature 1..20: note = C9Orf72 ATCN PAM targeting sequence
  source 1..20: mol_type = other RNA
gatcacaaggcaaaaacaaa

SEQ ID NO: 878 - RNA, 20 nt, synthetic construct
  misc_feature 1..20: note = C9Orf72 ATCN PAM targeting sequence
  source 1..20: mol_type = other RNA
gattgcatcttgttttgcaa

SEQ ID NO: 879 - RNA, 20 nt, synthetic construct
  misc_feature 1..20: note = C9Orf72 ATCN PAM targeting sequence
  source 1..20: mol_type = other RNA
caaggcaaaaacaaaacaaa

SEQ ID NO: 880 - RNA, 20 nt, synthetic construct
  misc_feature 1..20: note = C9Orf72 ATCN PAM targeting sequence
  source 1..20: mol_type = other RNA
gtgttgttcatgtgttttgt

SEQ ID NO: 881 - RNA, 20 nt, synthetic construct
  misc_feature 1..20: note = C9Orf72 ATCN PAM targeting sequence
  source 1..20: mol_type = other RNA
tcctcctcttagcttattct

SEQ ID NO: 882 - RNA, 20 nt, synthetic construct
  misc_feature 1..20: note = C9Orf72 ATCN PAM targeting sequence
  source 1..20: mol_type = other RNA
atccattctcctgcctcctg

SEQ ID NO: 883 - RNA, 20 nt, synthetic construct
  misc_feature 1..20: note = C9Orf72 ATCN PAM targeting sequence
  source 1..20: mol_type = other RNA
attctcctgcctcctgctct

SEQ ID NO: 884 - RNA, 20 nt, synthetic construct
  misc_feature 1..20: note = C9Orf72 ATCN PAM targeting sequence
  source 1..20: mol_type = other RNA
gcaagaacacgaagcttctc

SEQ ID NO: 885 - RNA, 20 nt, synthetic construct
  misc_feature 1..20: note = C9Orf72 ATCN PAM targeting sequence
  source 1..20: mol_type = other RNA
gcatcagcaagaacacgaag

SEQ ID NO: 886 - RNA, 20 nt, synthetic construct
  misc_feature 1..20: note = C9Orf72 ATCN PAM targeting sequence
  source 1..20: mol_type = other RNA
tcgcagctgaattttcatca

SEQ ID NO: 887 - RNA, 20 nt, synthetic construct
  misc_feature 1..20: note = C9Orf72 ATCN PAM targeting sequence
  source 1..20: mol_type = other RNA
atcctcgcagctgaattttc

SEQ ID NO: 888 - RNA, 20 nt, synthetic construct
  misc_feature 1..20: note = C9Orf72 ATCN PAM targeting sequence
  source 1..20: mol_type = other RNA
gctaagaggaatcaatcctc

SEQ ID NO: 889 - RNA, 20 nt, synthetic construct
  misc_feature 1..20: note = C9Orf72 ATCN PAM targeting sequence
  source 1..20: mol_type = other RNA
cagtacgttcctcaagaaag

SEQ ID NO: 890 - RNA, 20 nt, synthetic construct
  misc_feature 1..20: note = C9Orf72 ATCN PAM targeting sequence
  source 1..20: mol_type = other RNA
tgtgtagcaggactttgttc

SEQ ID NO: 891 - RNA, 20 nt, synthetic construct
  misc_feature 1..20: note = C9Orf72 ATCN PAM targeting sequence
  source 1..20: mol_type = other RNA
tggtggttgggccaaaagaa

SEQ ID NO: 892 - RNA, 20 nt, synthetic construct
  misc_feature 1..20: note = C9Orf72 ATCN PAM targeting sequence
  source 1..20: mol_type = other RNA
cataccactgtttgtctttc

SEQ ID NO: 893 - RNA, 20 nt, synthetic construct
  misc_feature 1..20: note = C9Orf72 ATCN PAM targeting sequence
  source 1..20: mol_type = other RNA
gcatccccagctcccagatg

SEQ ID NO: 894 - RNA, 20 nt, synthetic construct
  misc_feature 1..20: note = C9Orf72 ATCN PAM targeting sequence
  source 1..20: mol_type = other RNA
ccagctcccagatggctgcc

SEQ ID NO: 895 - RNA, 20 nt, synthetic construct
  misc_feature 1..20: note = C9Orf72 ATCN PAM targeting sequence
  source 1..20: mol_type = other RNA
gggagctggggatgctgatg

SEQ ID NO: 896 - RNA, 20 nt, synthetic construct
  misc_feature 1..20: note = C9Orf72 ATCN PAM targeting sequence
  source 1..20: mol_type = other RNA
atgctgtgaaagcaggggac

SEQ ID NO: 897 - RNA, 20 nt, synthetic construct
  misc_feature 1..20: note = C9Orf72 ATCN PAM targeting sequence
  source 1..20: mol_type = other RNA
actgctcctttcacatccat

SEQ ID NO: 898 - RNA, 20 nt, synthetic construct
  misc_feature 1..20: note = C9Orf72 ATCN PAM targeting sequence
  source 1..20: mol_type = other RNA
tgggtctttcttaatctact

SEQ ID NO: 899 - RNA, 20 nt, synthetic construct
  misc_feature 1..20: note = C9Orf72 ATCN PAM targeting sequence
  source 1..20: mol_type = other RNA
ttcacgggttatcttgggtc

SEQ ID NO: 900 - RNA, 20 nt, synthetic construct
  misc_feature 1..20: note = C9Orf72 ATCN PAM targeting sequence
  source 1..20: mol_type = other RNA
acagtgaatatctttcacgg

SEQ ID NO: 901 - RNA, 20 nt, synthetic construct
  misc_feature 1..20: note = C9Orf72 ATCN PAM targeting sequence
  source 1..20: mol_type = other RNA
aatgggacaaatgagccaga

SEQ ID NO: 902 - RNA, 20 nt, synthetic construct
  misc_feature 1..20: note = C9Orf72 ATCN PAM targeting sequence
  source 1..20: mol_type = other RNA
tgttctcagctctggctcat

SEQ ID NO: 903 - RNA, 20 nt, synthetic construct
  misc_feature 1..20: note = C9Orf72 ATCN PAM targeting sequence
  source 1..20: mol_type = other RNA
aactcctggtacctcagcct

SEQ ID NO: 904 - RNA, 20 nt, synthetic construct
  misc_feature 1..20: note = C9Orf72 ATCN PAM targeting sequence
  source 1..20: mol_type = other RNA
ggaatataggtctaggacta

SEQ ID NO: 905 - RNA, 20 nt, synthetic construct
  misc_feature 1..20: note = C9Orf72 ATCN PAM targeting sequence
  source 1..20: mol_type = other RNA
atgacaaagaacctggcttt

SEQ ID NO: 906 - RNA, 20 nt, synthetic construct
  misc_feature 1..20: note = C9Orf72 ATCN PAM targeting sequence
  source 1..20: mol_type = other RNA
tcacaaataaaactattctt

SEQ ID NO: 907 - RNA, 20 nt, synthetic construct
  misc_feature 1..20: note = C9Orf72 ATCN PAM targeting sequence
  source 1..20: mol_type = other RNA
ttcttccattatgtggggac

SEQ ID NO: 908 - RNA, 20 nt, synthetic construct
  misc_feature 1..20: note = C9Orf72 ATCN PAM targeting sequence
  source 1..20: mol_type = other RNA
gcaactgttcaagacaagac

SEQ ID NO: 909 - RNA, 20 nt, synthetic construct
  misc_feature 1..20: note = C9Orf72 ATCN PAM targeting sequence
  source 1..20: mol_type = other RNA
ctaaatttctcttcagcccc

SEQ ID NO: 910 - RNA, 20 nt, synthetic construct
  misc_feature 1..20: note = C9Orf72 ATCN PAM targeting sequence
  source 1..20: mol_type = other RNA
ccacttggcaggtgaaggac

SEQ ID NO: 911 - RNA, 20 nt, synthetic construct
  misc_feature 1..20: note = C9Orf72 ATCN PAM targeting sequence
  source 1..20: mol_type = other RNA
aaccaggaagcctgtttttc

SEQ ID NO: 912 - RNA, 20 nt, synthetic construct
  misc_feature 1..20: note = C9Orf72 ATCN PAM targeting sequence
  source 1..20: mol_type = other RNA
aagctatttaacatgcaggc

SEQ ID NO: 913 - RNA, 20 nt, synthetic construct
  misc_feature 1..20: note = C9Orf72 ATCN PAM targeting sequence
  source 1..20: mol_type = other RNA
taaagggtcttgcctgcatg

SEQ ID NO: 914 - RNA, 20 nt, synthetic construct
  misc_feature 1..20: note = C9Orf72 ATCN PAM targeting sequence
  source 1..20: mol_type = other RNA
tttctggattctcccaactt

SEQ ID NO: 915 - RNA, 20 nt, synthetic construct
  misc_feature 1..20: note = C9Orf72 ATCN PAM targeting sequence
  source 1..20: mol_type = other RNA
agaaatgatggtggaccact

SEQ ID NO: 916 - RNA, 20 nt, synthetic construct
  misc_feature 1..20: note = C9Orf72 ATCN PAM targeting sequence
  source 1..20: mol_type = other RNA
gaagctacgatcctctttct

SEQ ID NO: 917 - RNA, 20 nt, synthetic construct
  misc_feature 1..20: note = C9Orf72 ATCN PAM targeting sequence
  source 1..20: mol_type = other RNA
tagcttcagatggctggagt

SEQ ID NO: 918 - RNA, 20 nt, synthetic construct
  misc_feature 1..20: note = C9Orf72 ATCN PAM targeting sequence
  source 1..20: mol_type = other RNA
tctttctcacttgcttctgg

SEQ ID NO: 919 - RNA, 20 nt, synthetic construct
  misc_feature 1..20: note = C9Orf72 ATCN PAM targeting sequence
  source 1..20: mol_type = other RNA
taacacccgctgcttcttcc

SEQ ID NO: 920 - RNA, 20 nt, synthetic construct
  misc_feature 1..20: note = C9Orf72 ATCN PAM targeting sequence
  source 1..20: mol_type = other RNA
acttttaattgtcctttttt

SEQ ID NO: 921 - RNA, 20 nt, synthetic construct
  misc_feature 1..20: note = C9Orf72 ATCN PAM targeting sequence
  source 1..20: mol_type = other RNA
ctgacattacacaattttca

SEQ ID NO: 922 - RNA, 20 nt, synthetic construct
  misc_feature 1..20: note = C9Orf72 ATCN PAM targeting sequence
  source 1..20: mol_type = other RNA
ttcttgttcatagtcatagc

SEQ ID NO: 923 - RNA, 20 nt, synthetic construct
  misc_feature 1..20: note = C9Orf72 ATCN PAM targeting sequence
  source 1..20: mol_type = other RNA
aatgcatagcagaacacggt

SEQ ID NO: 924 - RNA, 20 nt, synthetic construct
  misc_feature 1..20: note = C9Orf72 ATCN PAM targeting sequence
  source 1..20: mol_type = other RNA
gttgcattcaataattacat

SEQ ID NO: 925 - RNA, 20 nt, synthetic construct
  misc_feature 1..20: note = C9Orf72 ATCN PAM targeting sequence
  source 1..20: mol_type = other RNA
taattcccaggctgatggta

SEQ ID NO: 926 - RNA, 20 nt, synthetic construct
  misc_feature 1..20: note = C9Orf72 ATCN PAM targeting sequence
  source 1..20: mol_type = other RNA
gcctgggaattaggatttca

SEQ ID NO: 927 - RNA, 20 nt, synthetic construct
  misc_feature 1..20: note = C9Orf72 ATCN PAM targeting sequence
  source 1..20: mol_type = other RNA
cctcccaaaggccccacctc

SEQ ID NO: 928 - RNA, 20 nt, synthetic construct
  misc_feature 1..20: note = C9Orf72 ATCN PAM targeting sequence
  source 1..20: mol_type = other RNA
cattcatggggtgtctgcct

SEQ ID NO: 929 - RNA, 20 nt, synthetic construct
  misc_feature 1..20: note = C9Orf72 ATCN PAM targeting sequence
  source 1..20: mol_type = other RNA
cagcactttgggaggctaag

SEQ ID NO: 930 - RNA, 20 nt, synthetic construct
  misc_feature 1..20: note = C9Orf72 ATCN PAM targeting sequence
  source 1..20: mol_type = other RNA
gcccaccttagcctcccaaa

SEQ ID NO: 931 - RNA, 20 nt, synthetic construct
  misc_feature 1..20: note = C9Orf72 ATCN PAM targeting sequence
  source 1..20: mol_type = other RNA
cctgaggtcgggaattcaag

SEQ ID NO: 932 - RNA, 20 nt, synthetic construct
  misc_feature 1..20: note = C9Orf72 ATCN PAM targeting sequence
  source 1..20: mol_type = other RNA
cagctactagggaggctgag

SEQ ID NO: 933 - RNA, 20 nt, synthetic construct
  misc_feature 1..20: note = C9Orf72 ATCN PAM targeting sequence
  source 1..20: mol_type = other RNA
cttgaacttggaaggcagag

SEQ ID NO: 934 - RNA, 20 nt, synthetic construct
  misc_feature 1..20: note = C9Orf72 ATCN PAM targeting sequence
  source 1..20: mol_type = other RNA
cagaaaaaaaaaaaagaaaa

SEQ ID NO: 935 - RNA, 20 nt, synthetic construct
  misc_feature 1..20: note = C9Orf72 ATCN PAM targeting sequence
  source 1..20: mol_type = other RNA
gtgaaacaggaagcaaggcc

SEQ ID NO: 936 - RNA, 20 nt, synthetic construct
  misc_feature 1..20: note = C9Orf72 ATCN PAM targeting sequence
  source 1..20: mol_type = other RNA
gtcagtgccttgatcttgga

SEQ ID NO: 937 - RNA, 20 nt, synthetic construct
  misc_feature 1..20: note = C9Orf72 ATCN PAM targeting sequence
  source 1..20: mol_type = other RNA
aggcactgacagattcagtg

SEQ ID NO: 938 - RNA, 20 nt, synthetic construct
  misc_feature 1..20: note = C9Orf72 ATCN PAM targeting sequence
  source 1..20: mol_type = other RNA
tggacttcccagcctcctga

SEQ ID NO: 939 - RNA, 20 nt, synthetic construct
  misc_feature 1..20: note = C9Orf72 ATCN PAM targeting sequence
  source 1..20: mol_type = other RNA
gaaaaccactgcttggtaga

SEQ ID NO: 940 - RNA, 20 nt, synthetic construct
  misc_feature 1..20: note = C9Orf72 ATCN PAM targeting sequence
  source 1..20: mol_type = other RNA
ttctaccaagcagtggtttt

SEQ ID NO: 941 - RNA, 20 nt, synthetic construct
  misc_feature 1..20: note = C9Orf72 ATCN PAM targeting sequence
  source 1..20: mol_type = other RNA
ccatggaattgctataggcc

SEQ ID NO: 942 - RNA, 20 nt, synthetic construct
  misc_feature 1..20: note = C9Orf72 ATCN PAM targeting sequence
  source 1..20: mol_type = other RNA
cttcacaccttgcagatctc

SEQ ID NO: 943 - RNA, 20 nt, synthetic construct
  misc_feature 1..20: note = C9Orf72 ATCN PAM targeting sequence
  source 1..20: mol_type = other RNA
gcaaggtgtgaagagataac

SEQ ID NO: 944 - RNA, 20 nt, synthetic construct
  misc_feature 1..20: note = C9Orf72 ATCN PAM targeting sequence
  source 1..20: mol_type = other RNA
cggagagaaacgcatctatc

SEQ ID NO: 945 - RNA, 20 nt, synthetic construct
  misc_feature 1..20: note = C9Orf72 ATCN PAM targeting sequence
  source 1..20: mol_type = other RNA
atcagatttttactgatacc

SEQ ID NO: 946 - RNA, 20 nt, synthetic construct
  misc_feature 1..20: note = C9Orf72 ATCN PAM targeting sequence
  source 1..20: mol_type = other RNA
gatttttactgataccgagg

SEQ ID NO: 947 - RNA, 20 nt, synthetic construct
  misc_feature 1..20: note = C9Orf72 ATCN PAM targeting sequence
  source 1..20: mol_type = other RNA
gatagatgcgtttctctccg

SEQ ID NO: 948 - RNA, 20 nt, synthetic construct
  misc_feature 1..20: note = C9Orf72 ATCN PAM targeting sequence
  source 1..20: mol_type = other RNA
gtaaaaatctgatagatgcg

SEQ ID NO: 949 - RNA, 20 nt, synthetic construct
  misc_feature 1..20: note = C9Orf72 ATCN PAM targeting sequence
  source 1..20: mol_type = other RNA
ccctcttcgaattgtattgt

SEQ ID NO: 950 - RNA, 20 nt, synthetic construct
  misc_feature 1..20: note = C9Orf72 ATCN PAM targeting sequence
  source 1..20: mol_type = other RNA
atgcaaatgtacaatacaat

SEQ ID NO: 951 - RNA, 20 nt, synthetic construct
  misc_feature 1..20: note = C9Orf72 ATCN PAM targeting sequence
  source 1..20: mol_type = other RNA
aaataaagtcaaacaggtag

SEQ ID NO: 952 - RNA, 20 nt, synthetic construct
  misc_feature 1..20: note = C9Orf72 ATCN PAM targeting sequence
  source 1..20: mol_type = other RNA
ggcttattgcaaactttaat

SEQ ID NO: 953 - RNA, 20 nt, synthetic construct
  misc_feature 1..20: note = C9Orf72 ATCN PAM targeting sequence
  source 1..20: mol_type = other RNA
tgctgagacacataatggga

SEQ ID NO: 954 - RNA, 20 nt, synthetic construct
  misc_feature 1..20: note = C9Orf72 ATCN PAM targeting sequence
  source 1..20: mol_type = other RNA
tctcccttgcccccacctcc

SEQ ID NO: 955 - RNA, 20 nt, synthetic construct
  misc_feature 1..20: note = C9Orf72 ATCN PAM targeting sequence
  source 1..20: mol_type = other RNA
atgacattgctatcttctcc

SEQ ID NO: 956 - RNA, 20 nt, synthetic construct
  misc_feature 1..20: note = C9Orf72 ATCN PAM targeting sequence
  source 1..20: mol_type = other RNA
tctttgtacagttgggggaa

SEQ ID NO: 957 - RNA, 20 nt, synthetic construct
  misc_feature 1..20: note = C9Orf72 ATCN PAM targeting sequence
  source 1..20: mol_type = other RNA
caggttcatttcagaagggt

SEQ ID NO: 958 - RNA, 20 nt, synthetic construct
  misc_feature 1..20: note = C9Orf72 ATCN PAM targeting sequence
  source 1..20: mol_type = other RNA
cccaacagttttattcctat

SEQ ID NO: 959 - RNA, 20 nt, synthetic construct
  misc_feature 1..20: note = C9Orf72 ATCN PAM targeting sequence
  source 1..20: mol_type = other RNA
tctccagacaaacagaatct

SEQ ID NO: 960 - RNA, 20 nt, synthetic construct
  misc_feature 1..20: note = C9Orf72 ATCN PAM targeting sequence
  source 1..20: mol_type = other RNA
gagggaaagacggtgagtgg

SEQ ID NO: 961 - RNA, 20 nt, synthetic construct
  misc_feature 1..20: note = C9Orf72 ATCN PAM targeting sequence
  source 1..20: mol_type = other RNA
actcaccgtctttccctcag

SEQ ID NO: 962 - RNA, 20 nt, synthetic construct
  misc_feature 1..20: note = C9Orf72 ATCN PAM targeting sequence
  source 1..20: mol_type = other RNA
tacatgcaaatgcaatgact

SEQ ID NO: 963 - RNA, 20 nt, synthetic construct
  misc_feature 1..20: note = C9Orf72 ATCN PAM targeting sequence
  source 1..20: mol_type = other RNA
cgcgaaggtaagttgaaggg

SEQ ID NO: 964 - RNA, 20 nt, synthetic construct
  misc_feature 1..20: note = C9Orf72 ATCN PAM targeting sequence
  source 1..20: mol_type = other RNA
cttcaacttaccttcgcggg

SEQ ID NO: 965 - RNA, 20 nt, synthetic construct
  misc_feature 1..20: note = C9Orf72 ATCN PAM targeting sequence
  source 1..20: mol_type = other RNA
tatctctgggtcaaagtcaa

SEQ ID NO: 966 - RNA, 20 nt, synthetic construct
  misc_feature 1..20: note = C9Orf72 ATCN PAM targeting sequence
  source 1..20: mol_type = other RNA
ctgggtcaaagtcaagctaa

SEQ ID NO: 967 - RNA, 20 nt, synthetic construct
  misc_feature 1..20: note = C9Orf72 ATCN PAM targeting sequence
  source 1..20: mol_type = other RNA
tgtttaagacatattcaagt

SEQ ID NO: 968 - RNA, 20 nt, synthetic construct
  misc_feature 1..20: note = C9Orf72 ATCN PAM targeting sequence
  source 1..20: mol_type = other RNA
catattcacatgccttcagg

SEQ ID NO: 969 - RNA, 20 nt, synthetic construct
  misc_feature 1..20: note = C9Orf72 ATCN PAM targeting sequence
  source 1..20: mol_type = other RNA
ctgaaggcatgtgaatatgt

SEQ ID NO: 970 - RNA, 20 nt, synthetic construct
  misc_feature 1..20: note = C9Orf72 ATCN PAM targeting sequence
  source 1..20: mol_type = other RNA
tattacacccagcctacttt

SEQ ID NO: 971 - RNA, 20 nt, synthetic construct
  misc_feature 1..20: note = C9Orf72 ATCN PAM targeting sequence
  source 1..20: mol_type = other RNA
ggagtggcgtggactgtgcc

SEQ ID NO: 972 - RNA, 20 nt, synthetic construct
  misc_feature 1..20: note = C9Orf72 ATCN PAM targeting sequence
  source 1..20: mol_type = other RNA
gctaaggctgagaggctttt

SEQ ID NO: 973 - RNA, 20 nt, synthetic construct
  misc_feature 1..20: note = C9Orf72 ATCN PAM targeting sequence
  source 1..20: mol_type = other RNA
atattcctgctggccaacaa

SEQ ID NO: 974 - RNA, 20 nt, synthetic construct
  misc_feature 1..20: note = C9Orf72 ATCN PAM targeting sequence
  source 1..20: mol_type = other RNA
aggactgccagaccttctgt

SEQ ID NO: 975 - RNA, 20 nt, synthetic construct
  misc_feature 1..20: note = C9Orf72 ATCN PAM targeting sequence
  source 1..20: mol_type = other RNA
tgaaaaaaaacagaaggtct

SEQ ID NO: 976 - RNA, 20 nt, synthetic construct
  misc_feature 1..20: note = C9Orf72 ATCN PAM targeting sequence
  source 1..20: mol_type = other RNA
agaaatctagattcttacat

SEQ ID NO: 977 - RNA, 20 nt, synthetic construct
  misc_feature 1..20: note = C9Orf72 ATCN PAM targeting sequence
  source 1..20: mol_type = other RNA
agattcttacatgaaacctc

SEQ ID NO: 978 - RNA, 20 nt, synthetic construct
  misc_feature 1..20: note = C9Orf72 ATCN PAM targeting sequence
  source 1..20: mol_type = other RNA
agatttctggattatcttga

SEQ ID NO: 979 - RNA, 20 nt, synthetic construct
  misc_feature 1..20: note = C9Orf72 ATCN PAM targeting sequence
  source 1..20: mol_type = other RNA
atgtgtttcatgtgctcagt

SEQ ID NO: 980 - RNA, 20 nt, synthetic construct
  misc_feature 1..20: note = C9Orf72 ATCN PAM targeting sequence
  source 1..20: mol_type = other RNA
tggtttccaacatcattttt

SEQ ID NO: 981 - RNA, 20 nt, synthetic construct
  misc_feature 1..20: note = C9Orf72 ATCN PAM targeting sequence
  source 1..20: mol_type = other RNA
ttttttaaataaaggaatca

SEQ ID NO: 982 - RNA, 20 nt, synthetic construct
  misc_feature 1..20: note = C9Orf72 ATCN PAM targeting sequence
  source 1..20: mol_type = other RNA
gggccccttggagaaaatgg

SEQ ID NO: 983 - RNA, 20 nt, synthetic construct
  misc_feature 1..20: note = C9Orf72 ATCN PAM targeting sequence
  source 1..20: mol_type = other RNA
gccattttctccaaggggcc

SEQ ID NO: 984 - RNA, 20 nt, synthetic construct
  misc_feature 1..20: note = C9Orf72 ATCN PAM targeting sequence
  source 1..20: mol_type = other RNA
tttatatttcctgcctcagt

SEQ ID NO: 985 - RNA, 20 nt, synthetic construct
  misc_feature 1..20: note = C9Orf72 ATCN PAM targeting sequence
  source 1..20: mol_type = other RNA
gagcaaaaaaatagatggag

SEQ ID NO: 986 - RNA, 20 nt, synthetic construct
  misc_feature 1..20: note = C9Orf72 ATCN PAM targeting sequence
  source 1..20: mol_type = other RNA
atttttttgctcagattgtt

SEQ ID NO: 987 - RNA, 20 nt, synthetic construct
  misc_feature 1..20: note = C9Orf72 ATCN PAM targeting sequence
  source 1..20: mol_type = other RNA
gtgagttcacactgatataa

SEQ ID NO: 988 - RNA, 20 nt, synthetic construct
  misc_feature 1..20: note = C9Orf72 ATCN PAM targeting sequence
  source 1..20: mol_type = other RNA
gtgtgaactcacagatattt

SEQ ID NO: 989 - RNA, 20 nt, synthetic construct
  misc_feature 1..20: note = C9Orf72 ATCN PAM targeting sequence
  source 1..20: mol_type = other RNA
aaccatttatttatatcagt

SEQ ID NO: 990 - RNA, 20 nt, synthetic construct
  misc_feature 1..20: note = C9Orf72 ATCN PAM targeting sequence
  source 1..20: mol_type = other RNA
cctgtgtagtgagattccaa

SEQ ID NO: 991 - RNA, 20 nt, synthetic construct
  misc_feature 1..20: note = C9Orf72 ATCN PAM targeting sequence
  source 1..20: mol_type = other RNA
cactacacaggagatttttc

SEQ ID NO: 992 - RNA, 20 nt, synthetic construct
  misc_feature 1..20: note = C9Orf72 ATCN PAM targeting sequence
  source 1..20: mol_type = other RNA
ccttgaacagggagtattta

SEQ ID NO: 993 - RNA, 20 nt, synthetic construct
  misc_feature 1..20: note = C9Orf72 ATCN PAM targeting sequence
  source 1..20: mol_type = other RNA
cttggtcaaggtcatgtttg

SEQ ID NO: 994 - RNA, 20 nt, synthetic construct
  misc_feature 1..20: note = C9Orf72 ATCN PAM targeting sequence
  source 1..20: mol_type = other RNA
aggttaacatcaacagtgat

SEQ ID NO: 995 - RNA, 20 nt, synthetic construct
  misc_feature 1..20: note = C9Orf72 ATCN PAM targeting sequence
  source 1..20: mol_type = other RNA
acagtgatcaatcgtgttca

SEQ ID NO: 996 - RNA, 20 nt, synthetic construct
  misc_feature 1..20: note = C9Orf72 ATCN PAM targeting sequence
  source 1..20: mol_type = other RNA
ctgttgatgttaaccttgat

SEQ ID NO: 997 - RNA, 20 nt, synthetic construct
  misc_feature 1..20: note = C9Orf72 ATCN PAM targeting sequence
  source 1..20: mol_type = other RNA
atcgtgttcatagaatatgg

SEQ ID NO: 998 - RNA, 20 nt, synthetic construct
  misc_feature 1..20: note = C9Orf72 ATCN PAM targeting sequence
  source 1..20: mol_type = other RNA
tgttcatagaatatggcttt

SEQ ID NO: 999 - RNA, 20 nt, synthetic construct
  misc_feature 1..20: note = C9Orf72 ATCN PAM targeting sequence
  source 1..20: mol_type = other RNA
aagccatattctatgaacac

SEQ ID NO: 1000 - RNA, 20 nt, synthetic construct
  misc_feature 1..20: note = C9Orf72 ATCN PAM targeting sequence
  source 1..20: mol_type = other RNA
tatcaaagccatattctatg

SEQ ID NO: 1001 - RNA, 20 nt, synthetic construct
  misc_feature 1..20: note = C9Orf72 ATCN PAM targeting sequence
  source 1..20: mol_type = other RNA
aaccataaaaaaaatcagac

SEQ ID NO: 1002 - RNA, 20 nt, synthetic construct
  misc_feature 1..20: note = C9Orf72 ATCN PAM targeting sequence
  source 1..20: mol_type = other RNA
gacaaaccaacactgaagaa

SEQ ID NO: 1003 - RNA, 20 nt, synthetic construct
  misc_feature 1..20: note = C9Orf72 ATCN PAM targeting sequence
  source 1..20: mol_type = other RNA
gactggtagtcctcaaaact

SEQ ID NO: 1004 - RNA, 20 nt, synthetic construct
  misc_feature 1..20: note = C9Orf72 ATCN PAM targeting sequence
  source 1..20: mol_type = other RNA
aaacaaggaaagtctgaaga

SEQ ID NO: 1005 - RNA, 20 nt, synthetic construct
  misc_feature 1..20: note = C9Orf72 ATCN PAM targeting sequence
  source 1..20: mol_type = other RNA
ccttaggctcttcagacttt

SEQ ID NO: 1006 - RNA, 20 nt, synthetic construct
  misc_feature 1..20: note = C9Orf72 ATCN PAM targeting sequence
  source 1..20: mol_type = other RNA
tggatggaatccaggaacag

SEQ ID NO: 1007 - RNA, 20 nt, synthetic construct
  misc_feature 1..20: note = C9Orf72 ATCN PAM targeting sequence
  source 1..20: mol_type = other RNA
aggataccacattacattta

SEQ ID NO: 1008 - RNA, 20 nt, synthetic construct
  misc_feature 1..20: note = C9Orf72 ATCN PAM targeting sequence
  source 1..20: mol_type = other RNA
aggaacagaaaaagggcatt

SEQ ID NO: 1009 - RNA, 20 nt, synthetic construct
  misc_feature 1..20: note = C9Orf72 ATCN PAM targeting sequence
  source 1..20: mol_type = other RNA
cacaaaacatttgtcacagc

SEQ ID NO: 1010 - RNA, 20 nt, synthetic construct
  misc_feature 1..20: note = C9Orf72 ATCN PAM targeting sequence
  source 1..20: mol_type = other RNA
ctaacatctcacaaaacatt

SEQ ID NO: 1011 - RNA, 20 nt, synthetic construct
  misc_feature 1..20: note = C9Orf72 ATCN PAM targeting sequence
  source 1..20: mol_type = other RNA
ctcacccagtttccagtatc

SEQ ID NO: 1012 - RNA, 20 nt, synthetic construct
  misc_feature 1..20: note = C9Orf72 ATCN PAM targeting sequence
  source 1..20: mol_type = other RNA
ttacaactttttaataaacc

SEQ ID NO: 1013 - RNA, 20 nt, synthetic construct
  misc_feature 1..20: note = C9Orf72 ATCN PAM targeting sequence
  source 1..20: mol_type = other RNA
aatatttttgacccacagag

SEQ ID NO: 1014 - RNA, 20 nt, synthetic construct
  misc_feature 1..20: note = C9Orf72 ATCN PAM targeting sequence
  source 1..20: mol_type = other RNA
aaacgtacaaactcatggcc

SEQ ID NO: 1015 - RNA, 20 nt, synthetic construct
  misc_feature 1..20: note = C9Orf72 ATCN PAM targeting sequence
  source 1..20: mol_type = other RNA
gagcataacagtaaagacag

SEQ ID NO: 1016 - RNA, 20 nt, synthetic construct
  misc_feature 1..20: note = C9Orf72 ATCN PAM targeting sequence
  source 1..20: mol_type = other RNA
ggactggctacataatttgc

SEQ ID NO: 1017 - RNA, 20 nt, synthetic construct
  misc_feature 1..20: note = C9Orf72 ATCN PAM targeting sequence
  source 1..20: mol_type = other RNA
tgaagtgcttaataatttct

SEQ ID NO: 1018 - RNA, 20 nt, synthetic construct
  misc_feature 1..20: note = C9Orf72 ATCN PAM targeting sequence
  source 1..20: mol_type = other RNA
catgtcagagacagggccag

SEQ ID NO: 1019 - RNA, 20 nt, synthetic construct
  misc_feature 1..20: note = C9Orf72 ATCN PAM targeting sequence
  source 1..20: mol_type = other RNA
tatcacatgtcagagacagg

SEQ ID NO: 1020 - RNA, 20 nt, synthetic construct
  misc_feature 1..20: note = C9Orf72 ATCN PAM targeting sequence
  source 1..20: mol_type = other RNA
gaacagagctgtggagtcag

SEQ ID NO: 1021 - RNA, 20 nt, synthetic construct
  misc_feature 1..20: note = C9Orf72 ATCN PAM targeting sequence
  source 1..20: mol_type = other RNA
ttgccagatacaactcccac

SEQ ID NO: 1022 - RNA, 20 nt, synthetic construct
  misc_feature 1..20: note = C9Orf72 ATCN PAM targeting sequence
  source 1..20: mol_type = other RNA
ggcaaggatgactcctgact

SEQ ID NO: 1023 - RNA, 20 nt, synthetic construct
  misc_feature 1..20: note = C9Orf72 ATCN PAM targeting sequence
  source 1..20: mol_type = other RNA
gcaaacaaataaatatttgc

SEQ ID NO: 1024 - RNA, 20 nt, synthetic construct
  misc_feature 1..20: note = C9Orf72 ATCN PAM targeting sequence
  source 1..20: mol_type = other RNA
agcacatctgcaaacaaata

SEQ ID NO: 1025 - RNA, 20 nt, synthetic construct
  misc_feature 1..20: note = C9Orf72 ATCN PAM targeting sequence
  source 1..20: mol_type = other RNA
ctagtatctagcacatctgc

SEQ ID NO: 1026 - RNA, 20 nt, synthetic construct
  misc_feature 1..20: note = C9Orf72 ATCN PAM targeting sequence
  source 1..20: mol_type = other RNA
cctcaccctctctattttcc

SEQ ID NO: 1027 - RNA, 20 nt, synthetic construct
  misc_feature 1..20: note = C9Orf72 ATCN PAM targeting sequence
  source 1..20: mol_type = other RNA
tggctcactgcagcctcgac

SEQ ID NO: 1028 - RNA, 20 nt, synthetic construct
  misc_feature 1..20: note = C9Orf72 ATCN PAM targeting sequence
  source 1..20: mol_type = other RNA
tgccactgctggagtggtgt

SEQ ID NO: 1029 - RNA, 20 nt, synthetic construct
  misc_feature 1..20: note = C9Orf72 ATCN PAM targeting sequence
  source 1..20: mol_type = other RNA
caccacaccactccagcagt

SEQ ID NO: 1030 - RNA, 20 nt, synthetic construct
  misc_feature 1..20: note = C9Orf72 ATCN PAM targeting sequence
  source 1..20: mol_type = other RNA
tggctcactgcagcctcgac

SEQ ID NO: 1031 - RNA, 20 nt, synthetic construct
  misc_feature 1..20: note = C9Orf72 ATCN PAM targeting sequence
  source 1..20: mol_type = other RNA
tttgaacctgggaggtcgag

SEQ ID NO: 1032 - RNA, 20 nt, synthetic construct
  misc_feature 1..20: note = C9Orf72 ATCN PAM targeting sequence
  source 1..20: mol_type = other RNA
tcctgtctcagccttctaag

SEQ ID NO: 1033 - RNA, 20 nt, synthetic construct
  misc_feature 1..20: note = C9Orf72 ATCN PAM targeting sequence
  source 1..20: mol_type = other RNA
tgtattttgtagagacatgg

SEQ ID NO: 1034 - RNA, 20 nt, synthetic construct
  misc_feature 1..20: note = C9Orf72 ATCN PAM targeting sequence
  source 1..20: mol_type = other RNA
tcccgctctggcctgatacc

SEQ ID NO: 1035 - RNA, 20 nt, synthetic construct
  misc_feature 1..20: note = C9Orf72 ATCN PAM targeting sequence
  source 1..20: mol_type = other RNA
ggccagagcgggaggattgc

SEQ ID NO: 1036 - RNA, 20 nt, synthetic construct
  misc_feature 1..20: note = C9Orf72 ATCN PAM targeting sequence
  source 1..20: mol_type = other RNA
ccattttacagacaaggaaa

SEQ ID NO: 1037 - RNA, 20 nt, synthetic construct
  misc_feature 1..20: note = C9Orf72 ATCN PAM targeting sequence
  source 1..20: mol_type = other RNA
gagtctctgtttccttgtct

SEQ ID NO: 1038 - RNA, 20 nt, synthetic construct
  misc_feature 1..20: note = C9Orf72 ATCN PAM targeting sequence
  source 1..20: mol_type = other RNA
cctagtgcttgattcaaatt

SEQ ID NO: 1039 - RNA, 20 nt, synthetic construct
  misc_feature 1..20: note = C9Orf72 ATCN PAM targeting sequence
  source 1..20: mol_type = other RNA
agcactaggagatctgagtc

SEQ ID NO: 1040 - RNA, 20 nt, synthetic construct
  misc_feature 1..20: note = C9Orf72 ATCN PAM targeting sequence
  source 1..20: mol_type = other RNA
tttacaaatttgaatcaagc

SEQ ID NO: 1041 - RNA, 20 nt, synthetic construct
  misc_feature 1..20: note = C9Orf72 ATCN PAM targeting sequence
  source 1..20: mol_type = other RNA
aaaatgaagctttcttaaga

SEQ ID NO: 1042 - RNA, 20 nt, synthetic construct
  misc_feature 1..20: note = C9Orf72 ATCN PAM targeting sequence
  source 1..20: mol_type = other RNA
acctatttcttcttaagaaa

SEQ ID NO: 1043 - RNA, 20 nt, synthetic construct
  misc_feature 1..20: note = C9Orf72 ATCN PAM targeting sequence
  source 1..20: mol_type = other RNA
ggtaggcccccccccatgtt

SEQ ID NO: 1044 - RNA, 20 nt, synthetic construct
  misc_feature 1..20: note = C9Orf72 ATCN PAM targeting sequence
  source 1..20: mol_type = other RNA
aggatggataataacagatg

SEQ ID NO: 1045 - RNA, 20 nt, synthetic construct
  misc_feature 1..20: note = C9Orf72 ATCN PAM targeting sequence
  source 1..20: mol_type = other RNA
tggattgccattgtctttaa

SEQ ID NO: 1046 - RNA, 20 nt, synthetic construct
  misc_feature 1..20: note = C9Orf72 ATCN PAM targeting sequence
  source 1..20: mol_type = other RNA
atcctggattgccattgtct

SEQ ID NO: 1047 - RNA, 20 nt, synthetic construct
  misc_feature 1..20: note = C9Orf72 ATCN PAM targeting sequence
  source 1..20: mol_type = other RNA
gttattatccatcctggatt

SEQ ID NO: 1048 - RNA, 20 nt, synthetic construct
  misc_feature 1..20: note = C9Orf72 ATCN PAM targeting sequence
  source 1..20: mol_type = other RNA
tgccactgaacgacagaaca

SEQ ID NO: 1049 - RNA, 20 nt, synthetic construct
  misc_feature 1..20: note = C9Orf72 ATCN PAM targeting sequence
  source 1..20: mol_type = other RNA
gtgtcttttcctgagtgtga

SEQ ID NO: 1050 - RNA, 20 nt, synthetic construct
  misc_feature 1..20: note = C9Orf72 ATCN PAM targeting sequence
  source 1..20: mol_type = other RNA
cacactcaggaaaagacaca

SEQ ID NO: 1051 - RNA, 20 nt, synthetic construct
  misc_feature 1..20: note = C9Orf72 ATCN PAM targeting sequence
  source 1..20: mol_type = other RNA
aatagttagaacagtgctta

SEQ ID NO: 1052 - RNA, 20 nt, synthetic construct
  misc_feature 1..20: note = C9Orf72 ATCN PAM targeting sequence
  source 1..20: mol_type = other RNA
ctgagttcacattggctaag

SEQ ID NO: 1053 - RNA, 20 nt, synthetic construct
  misc_feature 1..20: note = C9Orf72 ATCN PAM targeting sequence
  source 1..20: mol_type = other RNA
tgttaaaatgcaggttctga

SEQ ID NO: 1054 - RNA, 20 nt, synthetic construct
  misc_feature 1..20: note = C9Orf72 ATCN PAM targeting sequence
  source 1..20: mol_type = other RNA
gaacctgcattttaacaaga

SEQ ID NO: 1055 - RNA, 20 nt, synthetic construct
  misc_feature 1..20: note = C9Orf72 ATCN PAM targeting sequence
  source 1..20: mol_type = other RNA
actggtccatggatgacact

SEQ ID NO: 1056 - RNA, 20 nt, synthetic construct
  misc_feature 1..20: note = C9Orf72 ATCN PAM targeting sequence
  source 1..20: mol_type = other RNA
atggaccagtagattcagta

SEQ ID NO: 1057 - RNA, 20 nt, synthetic construct
  misc_feature 1..20: note = C9Orf72 ATCN PAM targeting sequence
  source 1..20: mol_type = other RNA
aggcctgatctaactaagtg

SEQ ID NO: 1058 - RNA, 20 nt, synthetic construct
  misc_feature 1..20: note = C9Orf72 ATCN PAM targeting sequence
  source 1..20: mol_type = other RNA
ggccttgatgctttgagtgt

SEQ ID NO: 1059 - RNA, 20 nt, synthetic construct
  misc_feature 1..20: note = C9Orf72 ATCN PAM targeting sequence
  source 1..20: mol_type = other RNA
aactaagtgatcttgttaga

SEQ ID NO: 1060 - RNA, 20 nt, synthetic construct
  misc_feature 1..20: note = C9Orf72 ATCN PAM targeting sequence
  source 1..20: mol_type = other RNA
cttagttagatcaggccttg

SEQ ID NO: 1061 - RNA, 20 nt, synthetic construct
  misc_feature 1..20: note = C9Orf72 ATCN PAM targeting sequence
  source 1..20: mol_type = other RNA
tgttagaaatgtagactctc

SEQ ID NO: 1062 - RNA, 20 nt, synthetic construct
  misc_feature 1..20: note = C9Orf72 ATCN PAM targeting sequence
  source 1..20: mol_type = other RNA
accaggtttggggtgaagcc

SEQ ID NO: 1063 - RNA, 20 nt, synthetic construct
  misc_feature 1..20: note = C9Orf72 ATCN PAM targeting sequence
  source 1..20: mol_type = other RNA
aagtgtgcattttaacaaaa

SEQ ID NO: 1064 - RNA, 20 nt, synthetic construct
  misc_feature 1..20: note = C9Orf72 ATCN PAM targeting sequence
  source 1..20: mol_type = other RNA
caaaagtatatgatctgaga

SEQ ID NO: 1065 - RNA, 20 nt, synthetic construct
  misc_feature 1..20: note = C9Orf72 ATCN PAM targeting sequence
  source 1..20: mol_type = other RNA
tatacttttgagattttgtt

SEQ ID NO: 1066 - RNA, 20 nt, synthetic construct
  misc_feature 1..20: note = C9Orf72 ATCN PAM targeting sequence
  source 1..20: mol_type = other RNA
gagaagtgctgggttggagg

SEQ ID NO: 1067 - RNA, 20 nt, synthetic construct
  misc_feature 1..20: note = C9Orf72 ATCN PAM targeting sequence
  source 1..20: mol_type = other RNA
gttgacaaaacaataaatgg

SEQ ID NO: 1068 - RNA, 20 nt, synthetic construct
  misc_feature 1..20: note = C9Orf72 ATCN PAM targeting sequence
  source 1..20: mol_type = other RNA
ctcatttttttttctcgaac

SEQ ID NO: 1069 - RNA, 20 nt, synthetic construct
  misc_feature 1..20: note = C9Orf72 ATCN PAM targeting sequence
  source 1..20: mol_type = other RNA
ccttgacagatggtgacaat

SEQ ID NO: 1070 - RNA, 20 nt, synthetic construct
  misc_feature 1..20: note = C9Orf72 ATCN PAM targeting sequence
  source 1..20: mol_type = other RNA
gtcaaggcgattgtattcaa

SEQ ID NO: 1071 - RNA, 20 nt, synthetic construct
  misc_feature 1..20: note = C9Orf72 ATCN PAM targeting sequence
  source 1..20: mol_type = other RNA
aaagacctggtcattgtcac

SEQ ID NO: 1072 - RNA, 20 nt, synthetic construct
  misc_feature 1..20: note = C9Orf72 ATCN PAM targeting sequence
  source 1..20: mol_type = other RNA
ggactgacttgtatagccca

SEQ ID NO: 1073 - RNA, 20 nt, synthetic construct
  misc_feature 1..20: note = C9Orf72 ATCN PAM targeting sequence
  source 1..20: mol_type = other RNA
aatgaaccattggtttcaaa

SEQ ID NO: 1074 - RNA, 20 nt, synthetic construct
  misc_feature 1..20: note = C9Orf72 ATCN PAM targeting sequence
  source 1..20: mol_type = other RNA
ataaacatttactaaaagct

SEQ ID NO: 1075 - RNA, 20 nt, synthetic construct
  misc_feature 1..20: note = C9Orf72 ATCN PAM targeting sequence
  source 1..20: mol_type = other RNA
gtatgcatgttggtgcattg

SEQ ID NO: 1076 - RNA, 20 nt, synthetic construct
  misc_feature 1..20: note = C9Orf72 ATCN PAM targeting sequence
  source 1..20: mol_type = other RNA
ctgacctaagtaatactctg

SEQ ID NO: 1077 - RNA, 20 nt, synthetic construct
  misc_feature 1..20: note = C9Orf72 ATCN PAM targeting sequence
  source 1..20: mol_type = other RNA
aaataaatagcacaaaactg

SEQ ID NO: 1078 - RNA, 20 nt, synthetic construct
  misc_feature 1..20: note = C9Orf72 ATCN PAM targeting sequence
  source 1..20: mol_type = other RNA
attaggcagaaaatatggag

SEQ ID NO: 1079 - RNA, 20 nt, synthetic construct
  misc_feature 1..20: note = C9Orf72 ATCN PAM targeting sequence
  source 1..20: mol_type = other RNA
attataacaataaaacatgt

SEQ ID NO: 1080 - RNA, 20 nt, synthetic construct
  misc_feature 1..20: note = C9Orf72 ATCN PAM targeting sequence
  source 1..20: mol_type = other RNA
ataggaaaagaaaaattaga

SEQ ID NO: 1081 - RNA, 20 nt, synthetic construct
  misc_feature 1..20: note = C9Orf72 ATCN PAM targeting sequence
  source 1..20: mol_type = other RNA
aagagtccttgccagggata

SEQ ID NO: 1082 - RNA, 20 nt, synthetic construct
  misc_feature 1..20: note = C9Orf72 ATCN PAM targeting sequence
  source 1..20: mol_type = other RNA
ctggcaaggactctttgatt

SEQ ID NO: 1083 - RNA, 20 nt, synthetic construct
  misc_feature 1..20: note = C9Orf72 ATCN PAM targeting sequence
  source 1..20: mol_type = other RNA
ctcaggagtgactgggagag

SEQ ID NO: 1084 - RNA, 20 nt, synthetic construct
  misc_feature 1..20: note = C9Orf72 ATCN PAM targeting sequence
  source 1..20: mol_type = other RNA
atcttctctagccaggccca

SEQ ID NO: 1085 - RNA, 20 nt, synthetic construct
  misc_feature 1..20: note = C9Orf72 ATCN PAM targeting sequence
  source 1..20: mol_type = other RNA
tctctagccaggcccacctc

SEQ ID NO: 1086 - RNA, 20 nt, synthetic construct
  misc_feature 1..20: note = C9Orf72 ATCN PAM targeting sequence
  source 1..20: mol_type = other RNA
gcttcagtccctctcctttc

SEQ ID NO: 1087 - RNA, 20 nt, synthetic construct
  misc_feature 1..20: note = C9Orf72 ATCN PAM targeting sequence
  source 1..20: mol_type = other RNA
tatctgtgaggtggaggact

SEQ ID NO: 1088 - RNA, 20 nt, synthetic construct
  misc_feature 1..20: note = C9Orf72 ATCN PAM targeting sequence
  source 1..20: mol_type = other RNA
gtgaggtggaggactcctcc

SEQ ID NO: 1089 - RNA, 20 nt, synthetic construct
  misc_feature 1..20: note = C9Orf72 ATCN PAM targeting sequence
  source 1..20: mol_type = other RNA
tgccaggaggagtcctccac

SEQ ID NO: 1090 - RNA, 20 nt, synthetic construct
  misc_feature 1..20: note = C9Orf72 ATCN PAM targeting sequence
  source 1..20: mol_type = other RNA
gctgccaggatgattcattt

SEQ ID NO: 1091 - RNA, 20 nt, synthetic construct
  misc_feature 1..20: note = C9Orf72 ATCN PAM targeting sequence
  source 1..20: mol_type = other RNA
tggcagctgatcctgccagg

SEQ ID NO: 1092 - RNA, 20 nt, synthetic construct
  misc_feature 1..20: note = C9Orf72 ATCN PAM targeting sequence
  source 1..20: mol_type = other RNA
tcctggcagctgatcctgcc

SEQ ID NO: 1093 - RNA, 20 nt, synthetic construct
  misc_feature 1..20: note = C9Orf72 ATCN PAM targeting sequence
  source 1..20: mol_type = other RNA
tcattgccaggcacagagct

SEQ ID NO: 1094 - RNA, 20 nt, synthetic construct
  misc_feature 1..20: note = C9Orf72 ATCN PAM targeting sequence
  source 1..20: mol_type = other RNA
cagtgaaaccacaaaagagg

SEQ ID NO: 1095 - RNA, 20 nt, synthetic construct
  misc_feature 1..20: note = C9Orf72 ATCN PAM targeting sequence
  source 1..20: mol_type = other RNA
actttggttcctcttttgtg

SEQ ID NO: 1096 - RNA, 20 nt, synthetic construct
  misc_feature 1..20: note = C9Orf72 ATCN PAM targeting sequence
  source 1..20: mol_type = other RNA
cctgtcttcagttatttggg

SEQ ID NO: 1097 - RNA, 20 nt, synthetic construct
  misc_feature 1..20: note = C9Orf72 ATCN PAM targeting sequence
  source 1..20: mol_type = other RNA
gtaagctcactgccaactca

SEQ ID NO: 1098 - RNA, 20 nt, synthetic construct
  misc_feature 1..20: note = C9Orf72 ATCN PAM targeting sequence
  source 1..20: mol_type = other RNA
cagcggcctcagtgagttgg

SEQ ID NO: 1099 - RNA, 20 nt, synthetic construct
  misc_feature 1..20: note = C9Orf72 ATCN PAM targeting sequence
  source 1..20: mol_type = other RNA
gaaattccacctcttcagaa

SEQ ID NO: 1100 - RNA, 20 nt, synthetic construct
  misc_feature 1..20: note = C9Orf72 ATCN PAM targeting sequence
  source 1..20: mol_type = other RNA
aagaatgaccagtctgattt

SEQ ID NO: 1101 - RNA, 20 nt, synthetic construct
  misc_feature 1..20: note = C9Orf72 ATCN PAM targeting sequence
  source 1..20: mol_type = other RNA
gactggtcattctttgattc

SEQ ID NO: 1102 - RNA, 20 nt, synthetic construct
  misc_feature 1..20: note = C9Orf72 ATCN PAM targeting sequence
  source 1..20: mol_type = other RNA
tcctcccacttcccaaatat

SEQ ID NO: 1103 - RNA, 20 nt, synthetic construct
  misc_feature 1..20: note = C9Orf72 ATCN PAM targeting sequence
  source 1..20: mol_type = other RNA
actttaattcaatatttggg

SEQ ID NO: 1104 - RNA, 20 nt, synthetic construct
  misc_feature 1..20: note = C9Orf72 ATCN PAM targeting sequence
  source 1..20: mol_type = other RNA
taaaatgaacatcgtctgac

SEQ ID NO: 1105 - RNA, 20 nt, synthetic construct
  misc_feature 1..20: note = C9Orf72 ATCN PAM targeting sequence
  source 1..20: mol_type = other RNA
tctgacctttccaggatcca

SEQ ID NO: 1106 - RNA, 20 nt, synthetic construct
  misc_feature 1..20: note = C9Orf72 ATCN PAM targeting sequence
  source 1..20: mol_type = other RNA
tggaaaggtcagacgatgtt

SEQ ID NO: 1107 - RNA, 20 nt, synthetic construct
  misc_feature 1..20: note = C9Orf72 ATCN PAM targeting sequence
  source 1..20: mol_type = other RNA
aataaaggatgtgcctaaga

SEQ ID NO: 1108 - RNA, 20 nt, synthetic construct
  misc_feature 1..20: note = C9Orf72 ATCN PAM targeting sequence
  source 1..20: mol_type = other RNA
tttattggatcctggaaagg

SEQ ID NO: 1109 - RNA, 20 nt, synthetic construct
  misc_feature 1..20: note = C9Orf72 ATCN PAM targeting sequence
  source 1..20: mol_type = other RNA
taggcacatcctttattgga

SEQ ID NO: 1110 - RNA, 20 nt, synthetic construct
  misc_feature 1..20: note = C9Orf72 ATCN PAM targeting sequence
  source 1..20: mol_type = other RNA
gcccttatgcactgtttacc

SEQ ID NO: 1111 - RNA, 20 nt, synthetic construct
  misc_feature 1..20: note = C9Orf72 ATCN PAM targeting sequence
  source 1..20: mol_type = other RNA
ttgcccacaggacaacccca

SEQ ID NO: 1112 - RNA, 20 nt, synthetic construct
  misc_feature 1..20: note = C9Orf72 ATCN PAM targeting sequence
  source 1..20: mol_type = other RNA
cttccattctggggttgtcc

SEQ ID NO: 1113 - RNA, 20 nt, synthetic construct
  misc_feature 1..20: note = C9Orf72 ATCN PAM targeting sequence
  source 1..20: mol_type = other RNA
ctgcattttgttacattagt

SEQ ID NO: 1114 - RNA, 20 nt, synthetic construct
  misc_feature 1..20: note = C9Orf72 ATCN PAM targeting sequence
  source 1..20: mol_type = other RNA
tcaaagatatgcatggtttc

SEQ ID NO: 1115 - RNA, 20 nt, synthetic construct
  misc_feature 1..20: note = C9Orf72 ATCN PAM targeting sequence
  source 1..20: mol_type = other RNA
ttgaagattaaaatgaggca

SEQ ID NO: 1116 - RNA, 20 nt, synthetic construct
  misc_feature 1..20: note = C9Orf72 ATCN PAM targeting sequence
  source 1..20: mol_type = other RNA
gtgttcagaaataatgtgag

SEQ ID NO: 1117 - RNA, 20 nt, synthetic construct
  misc_feature 1..20: note = C9Orf72 ATCN PAM targeting sequence
  source 1..20: mol_type = other RNA
tctagctcttcaatggtcgt

SEQ ID NO: 1118 - RNA, 20 nt, synthetic construct
  misc_feature 1..20: note = C9Orf72 ATCN PAM targeting sequence
  source 1..20: mol_type = other RNA
gtgcagacattctagcatca

SEQ ID NO: 1119 - RNA, 20 nt, synthetic construct
  misc_feature 1..20: note = C9Orf72 ATCN PAM targeting sequence
  source 1..20: mol_type = other RNA
aatgtgtaagtaaatagtgc

SEQ ID NO: 1120 - RNA, 20 nt, synthetic construct
  misc_feature 1..20: note = C9Orf72 ATCN PAM targeting sequence
  source 1..20: mol_type = other RNA
attgtagctgttgctgctgc

SEQ ID NO: 1121 - RNA, 20 nt, synthetic construct
  misc_feature 1..20: note = C9Orf72 ATCN PAM targeting sequence
  source 1..20: mol_type = other RNA
ttataggtttttgctgaaaa

SEQ ID NO: 1122 - RNA, 20 nt, synthetic construct
  misc_feature 1..20: note = C9Orf72 ATCN PAM targeting sequence
  source 1..20: mol_type = other RNA
tcattcagaagaggacactt

SEQ ID NO: 1123 - RNA, 20 nt, synthetic construct
  misc_feature 1..20: note = C9Orf72 ATCN PAM targeting sequence
  source 1..20: mol_type = other RNA
ttcagaagaggacacttagt

SEQ ID NO: 1124 - RNA, 20 nt, synthetic construct
  misc_feature 1..20: note = C9Orf72 ATCN PAM targeting sequence
  source 1..20: mol_type = other RNA
cactcttttcttttactctt

SEQ ID NO: 1125 - RNA, 20 nt, synthetic construct
  misc_feature 1..20: note = C9Orf72 ATCN PAM targeting sequence
  source 1..20: mol_type = other RNA
aagctagttggtactggtgt

SEQ ID NO: 1126 - RNA, 20 nt, synthetic construct
  misc_feature 1..20: note = C9Orf72 ATCN PAM targeting sequence
  source 1..20: mol_type = other RNA
ttgtcattgttgggaatcta

SEQ ID NO: 1127 - RNA, 20 nt, synthetic construct
  misc_feature 1..20: note = C9Orf72 ATCN PAM targeting sequence
  source 1..20: mol_type = other RNA
accctgcccaaggtttgacc

SEQ ID NO: 1128 - RNA, 20 nt, synthetic construct
  misc_feature 1..20: note = C9Orf72 ATCN PAM targeting sequence
  source 1..20: mol_type = other RNA
aatcttactgcagttgtaaa

SEQ ID NO: 1129 - RNA, 20 nt, synthetic construct
  misc_feature 1..20: note = C9Orf72 ATCN PAM targeting sequence
  source 1..20: mol_type = other RNA
tactgcagttgtaaaaataa

SEQ ID NO: 1130 - RNA, 20 nt, synthetic construct
  misc_feature 1..20: note = C9Orf72 ATCN PAM targeting sequence
  source 1..20: mol_type = other RNA
tgtaataattttactttact

SEQ ID NO: 1131 - RNA, 20 nt, synthetic construct
  misc_feature 1..20: note = C9Orf72 ATCN PAM targeting sequence
  source 1..20: mol_type = other RNA
gagcttttatcctgtaataa

SEQ ID NO: 1132 - RNA, 20 nt, synthetic construct
  misc_feature 1..20: note = C9Orf72 ATCN PAM targeting sequence
  source 1..20: mol_type = other RNA
tataaagattataaatctta

SEQ ID NO: 1133 - RNA, 20 nt, synthetic construct
  misc_feature 1..20: note = C9Orf72 ATCN PAM targeting sequence
  source 1..20: mol_type = other RNA
ttataagattaaataggtca

SEQ ID NO: 1134 - RNA, 20 nt, synthetic construct
  misc_feature 1..20: note = C9Orf72 ATCN PAM targeting sequence
  source 1..20: mol_type = other RNA
tataatgacatcctactgat

SEQ ID NO: 1135 - RNA, 20 nt, synthetic construct
  misc_feature 1..20: note = C9Orf72 ATCN PAM targeting sequence
  source 1..20: mol_type = other RNA
tactgattatactgattttt

SEQ ID NO: 1136 - RNA, 20 nt, synthetic construct
  misc_feature 1..20: note = C9Orf72 ATCN PAM targeting sequence
  source 1..20: mol_type = other RNA
gtaggatgtcattataagat

SEQ ID NO: 1137 - RNA, 20 nt, synthetic construct
  misc_feature 1..20: note = C9Orf72 ATCN PAM targeting sequence
  source 1..20: mol_type = other RNA
gtataatcagtaggatgtca

SEQ ID NO: 1138 - RNA, 20 nt, synthetic construct
  misc_feature 1..20: note = C9Orf72 ATCN PAM targeting sequence
  source 1..20: mol_type = other RNA
ctcactgacttagagaagtt

SEQ ID NO: 1139 - RNA, 20 nt, synthetic construct
  misc_feature 1..20: note = C9Orf72 ATCN PAM targeting sequence
  source 1..20: mol_type = other RNA
ggaaataatataccaaatct

SEQ ID NO: 1140 - RNA, 20 nt, synthetic construct
  misc_feature 1..20: note = C9Orf72 ATCN PAM targeting sequence
  source 1..20: mol_type = other RNA
aagtcaggtgagggtagaag

SEQ ID NO: 1141 - RNA, 20 nt, synthetic construct
  misc_feature 1..20: note = C9Orf72 ATCN PAM targeting sequence
  source 1..20: mol_type = other RNA
cccattcttctaccctcacc

SEQ ID NO: 1142 - RNA, 20 nt, synthetic construct
  misc_feature 1..20: note = C9Orf72 ATCN PAM targeting sequence
  source 1..20: mol_type = other RNA
catcccccattcttctaccc

SEQ ID NO: 1143 - RNA, 20 nt, synthetic construct
  misc_feature 1..20: note = C9Orf72 ATCN PAM targeting sequence
  source 1..20: mol_type = other RNA
gtagttctcatcccatcccc

SEQ ID NO: 1144 - RNA, 20 nt, synthetic construct
  misc_feature 1..20: note = C9Orf72 ATCN PAM targeting sequence
  source 1..20: mol_type = other RNA
gctgatatgatgtcactctg

SEQ ID NO: 1145 - RNA, 20 nt, synthetic construct
  misc_feature 1..20: note = C9Orf72 ATCN PAM targeting sequence
  source 1..20: mol_type = other RNA
gctgatatacactcatgctt

SEQ ID NO: 1146 - RNA, 20 nt, synthetic construct
  misc_feature 1..20: note = C9Orf72 ATCN PAM targeting sequence
  source 1..20: mol_type = other RNA
tatcagctgatatacactca

SEQ ID NO: 1147 - RNA, 20 nt, synthetic construct
  misc_feature 1..20: note = C9Orf72 ATCN PAM targeting sequence
  source 1..20: mol_type = other RNA
gttcaaggttcagagtgaca

SEQ ID NO: 1148 - RNA, 20 nt, synthetic construct
  misc_feature 1..20: note = C9Orf72 ATCN PAM targeting sequence
  source 1..20: mol_type = other RNA
caatatccgttcaaggttca

SEQ ID NO: 1149 - RNA, 20 nt, synthetic construct
  misc_feature 1..20: note = C9Orf72 ATCN PAM targeting sequence
  source 1..20: mol_type = other RNA
gctgatatgatatcactctg

SEQ ID NO: 1150 - RNA, 20 nt, synthetic construct
  misc_feature 1..20: note = C9Orf72 ATCN PAM targeting sequence
  source 1..20: mol_type = other RNA
gctgatatacacccatgctt

SEQ ID NO: 1151 - RNA, 20 nt, synthetic construct
  misc_feature 1..20: note = C9Orf72 ATCN PAM targeting sequence
  source 1..20: mol_type = other RNA
tatcagctgatatacaccca

SEQ ID NO: 1152 - RNA, 20 nt, synthetic construct
  misc_feature 1..20: note = C9Orf72 ATCN PAM targeting sequence
  source 1..20: mol_type = other RNA
ctctgaaccttcagtggata

SEQ ID NO: 1153 - RNA, 20 nt, synthetic construct
  misc_feature 1..20: note = C9Orf72 ATCN PAM targeting sequence
  source 1..20: mol_type = other RNA
actgaaggttcagagtgata

SEQ ID NO: 1154 - RNA, 20 nt, synthetic construct
  misc_feature 1..20: note = C9Orf72 ATCN PAM targeting sequence
  source 1..20: mol_type = other RNA
cagtatccactgaaggttca

SEQ ID NO: 1155 - RNA, 20 nt, synthetic construct
  misc_feature 1..20: note = C9Orf72 ATCN PAM targeting sequence
  source 1..20: mol_type = other RNA
tttcttggaaaagtcttaaa

SEQ ID NO: 1156 - RNA, 20 nt, synthetic construct
  misc_feature 1..20: note = C9Orf72 ATCN PAM targeting sequence
  source 1..20: mol_type = other RNA
aacttccttgaatttgaacc

SEQ ID NO: 1157 - RNA, 20 nt, synthetic construct
  misc_feature 1..20: note = C9Orf72 ATCN PAM targeting sequence
  source 1..20: mol_type = other RNA
tgtaactgacaacagacttg

SEQ ID NO: 1158 - RNA, 20 nt, synthetic construct
  misc_feature 1..20: note = C9Orf72 ATCN PAM targeting sequence
  source 1..20: mol_type = other RNA
ggaaccattgcaaaagatct

SEQ ID NO: 1159 - RNA, 20 nt, synthetic construct
  misc_feature 1..20: note = C9Orf72 ATCN PAM targeting sequence
  source 1..20: mol_type = other RNA
tttgcaatggttccagatgt

SEQ ID NO: 1160 - RNA, 20 nt, synthetic construct
  misc_feature 1..20: note = C9Orf72 ATCN PAM targeting sequence
  source 1..20: mol_type = other RNA
ttgcaggaaggtggagaaca

SEQ ID NO: 1161 - RNA, 20 nt, synthetic construct
  misc_feature 1..20: note = C9Orf72 ATCN PAM targeting sequence
  source 1..20: mol_type = other RNA
tttgaaaattcaaactgtat

SEQ ID NO: 1162 - RNA, 20 nt, synthetic construct
  misc_feature 1..20: note = C9Orf72 ATCN PAM targeting sequence
  source 1..20: mol_type = other RNA
taagtttaagtttgacaggg

SEQ ID NO: 1163 - RNA, 20 nt, synthetic construct
  misc_feature 1..20: note = C9Orf72 ATCN PAM targeting sequence
  source 1..20: mol_type = other RNA
cctgtcaaacttaaacttat

SEQ ID NO: 1164 - RNA, 20 nt, synthetic construct
  misc_feature 1..20: note = C9Orf72 ATCN PAM targeting sequence
  source 1..20: mol_type = other RNA
tgcctgctcttggtgttaat

SEQ ID NO: 1165 - RNA, 20 nt, synthetic construct
  misc_feature 1..20: note = C9Orf72 ATCN PAM targeting sequence
  source 1..20: mol_type = other RNA
tcatgttcatcatttgaatc

SEQ ID NO: 1166 - RNA, 20 nt, synthetic construct
  misc_feature 1..20: note = C9Orf72 ATCN PAM targeting sequence
  source 1..20: mol_type = other RNA
tgttcatcatttgaatcata

SEQ ID NO: 1167 - RNA, 20 nt, synthetic construct
  misc_feature 1..20: note = C9Orf72 ATCN PAM targeting sequence
  source 1..20: mol_type = other RNA
tttgaatcatattatgatac

SEQ ID NO: 1168 - RNA, 20 nt, synthetic construct
  misc_feature 1..20: note = C9Orf72 ATCN PAM targeting sequence
  source 1..20: mol_type = other RNA
tattatgatacaagttttac

SEQ ID NO: 1169 - RNA, 20 nt, synthetic construct
  misc_feature 1..20: note = C9Orf72 ATCN PAM targeting sequence
  source 1..20: mol_type = other RNA
taatatgattcaaatgatga

SEQ ID NO: 1170 - RNA, 20 nt, synthetic construct
  misc_feature 1..20: note = C9Orf72 ATCN PAM targeting sequence
  source 1..20: mol_type = other RNA
gactctctagtaaaacttgt

SEQ ID NO: 1171 - RNA, 20 nt, synthetic construct
  misc_feature 1..20: note = C9Orf72 ATCN PAM targeting sequence
  source 1..20: mol_type = other RNA
atcttaggatgcctaaaatt

SEQ ID NO: 1172 - RNA, 20 nt, synthetic construct
  misc_feature 1..20: note = C9Orf72 ATCN PAM targeting sequence
  source 1..20: mol_type = other RNA
taggatgcctaaaattctaa

SEQ ID NO: 1173 - RNA, 20 nt, synthetic construct
  misc_feature 1..20: note = C9Orf72 ATCN PAM targeting sequence
  source 1..20: mol_type = other RNA
taagatagattctaggtgac

SEQ ID NO: 1174 - RNA, 20 nt, synthetic construct
  misc_feature 1..20: note = C9Orf72 ATCN PAM targeting sequence
  source 1..20: mol_type = other RNA
cactgtgtctcagtttcctt

SEQ ID NO: 1175 - RNA, 20 nt, synthetic construct
  misc_feature 1..20: note = C9Orf72 ATCN PAM targeting sequence
  source 1..20: mol_type = other RNA
tgatcacagaaccagtaagt

SEQ ID NO: 1176 - RNA, 20 nt, synthetic construct
  misc_feature 1..20: note = C9Orf72 ATCN PAM targeting sequence
  source 1..20: mol_type = other RNA
ggatatagcttcaatctcac

SEQ ID NO: 1177 - RNA, 20 nt, synthetic construct
  misc_feature 1..20: note = C9Orf72 ATCN PAM targeting sequence
  source 1..20: mol_type = other RNA
cagaaccagtaagtagccaa

SEQ ID NO: 1178 - RNA, 20 nt, synthetic construct
  misc_feature 1..20: note = C9Orf72 ATCN PAM targeting sequence
  source 1..20: mol_type = other RNA
cttctggagtggcacatgac

SEQ ID NO: 1179 - RNA, 20 nt, synthetic construct
  misc_feature 1..20: note = C9Orf72 ATCN PAM targeting sequence
  source 1..20: mol_type = other RNA
atttctggaaacttcgcggt

SEQ ID NO: 1180 - RNA, 20 nt, synthetic construct
  misc_feature 1..20: note = C9Orf72 ATCN PAM targeting sequence
  source 1..20: mol_type = other RNA
agaccgcgaagtttccagaa

SEQ ID NO: 1181 - RNA, 20 nt, synthetic construct
  misc_feature 1..20: note = C9Orf72 ATCN PAM targeting sequence
  source 1..20: mol_type = other RNA
aggtcttttgaatctagacc

SEQ ID NO: 1182 - RNA, 20 nt, synthetic construct
  misc_feature 1..20: note = C9Orf72 ATCN PAM targeting sequence
  source 1..20: mol_type = other RNA
cagttttgtcttctttaaag

SEQ ID NO: 1183 - RNA, 20 nt, synthetic construct
  misc_feature 1..20: note = C9Orf72 ATCN PAM targeting sequence
  source 1..20: mol_type = other RNA
ttaaagaagacaaaactgag

SEQ ID NO: 1184 - RNA, 20 nt, synthetic construct
  misc_feature 1..20: note = C9Orf72 ATCN PAM targeting sequence
  source 1..20: mol_type = other RNA
tctttaaagaagacaaaact

SEQ ID NO: 1185 - RNA, 20 nt, synthetic construct
  misc_feature 1..20: note = C9Orf72 ATCN PAM targeting sequence
  source 1..20: mol_type = other RNA
taacactttgggaagctgag

SEQ ID NO: 1186 - RNA, 20 nt, synthetic construct
  misc_feature 1..20: note = C9Orf72 ATCN PAM targeting sequence
  source 1..20: mol_type = other RNA
gcctggctcagcttcccaaa

SEQ ID NO: 1187 - RNA, 20 nt, synthetic construct
  misc_feature 1..20: note = C9Orf72 ATCN PAM targeting sequence
  source 1..20: mol_type = other RNA
ctacaaaaaatacaaaaatt

SEQ ID NO: 1188 - RNA, 20 nt, synthetic construct
  misc_feature 1..20: note = C9Orf72 ATCN PAM targeting sequence
  source 1..20: mol_type = other RNA
tcccacctcagcctcccaag

SEQ ID NO: 1189 - RNA, 20 nt, synthetic construct
  misc_feature 1..20: note = C9Orf72 ATCN PAM targeting sequence
  source 1..20: mol_type = other RNA
cctgagcctggggatgtcca

SEQ ID NO: 1190 - RNA, 20 nt, synthetic construct
  misc_feature 1..20: note = C9Orf72 ATCN PAM targeting sequence
  source 1..20: mol_type = other RNA
ccaggctcaggtgatcctcc

SEQ ID NO: 1191 - RNA, 20 nt, synthetic construct
  misc_feature 1..20: note = C9Orf72 ATCN PAM targeting sequence
  source 1..20: mol_type = other RNA
tggctcactgcagtctggac

SEQ ID NO: 1192 - RNA, 20 nt, synthetic construct
  misc_feature 1..20: note = C9Orf72 ATCN PAM targeting sequence
  source 1..20: mol_type = other RNA
ttattatttttttctttttt

SEQ ID NO: 1193 - RNA, 20 nt, synthetic construct
  misc_feature 1..20: note = C9Orf72 ATCN PAM targeting sequence
  source 1..20: mol_type = other RNA
cttctaattttcacagtaac

SEQ ID NO: 1194 - RNA, 20 nt, synthetic construct
  misc_feature 1..20: note = C9Orf72 ATCN PAM targeting sequence
  source 1..20: mol_type = other RNA
gtcactatgtcaataaccat

SEQ ID NO: 1195 - RNA, 20 nt, synthetic construct
  misc_feature 1..20: note = C9Orf72 ATCN PAM targeting sequence
  source 1..20: mol_type = other RNA
agaaatgatgtgagaaacag

SEQ ID NO: 1196 - RNA, 20 nt, synthetic construct
  misc_feature 1..20: note = C9Orf72 ATCN PAM targeting sequence
  source 1..20: mol_type = other RNA
tttcttgatattaagtcaaa

SEQ ID NO: 1197 - RNA, 20 nt, synthetic construct
  misc_feature 1..20: note = C9Orf72 ATCN PAM targeting sequence
  source 1..20: mol_type = other RNA
ttttctgtttctcacatcat

SEQ ID NO: 1198 - RNA, 20 nt, synthetic construct
  misc_feature 1..20: note = C9Orf72 ATCN PAM targeting sequence
  source 1..20: mol_type = other RNA
ctgaggttaatattatttct

SEQ ID NO: 1199 - RNA, 20 nt, synthetic construct
  misc_feature 1..20: note = C9Orf72 ATCN PAM targeting sequence
  source 1..20: mol_type = other RNA
aatcactgaggttaatatta

SEQ ID NO: 1200 - RNA, 20 nt, synthetic construct
  misc_feature 1..20: note = C9Orf72 ATCN PAM targeting sequence
  source 1..20: mol_type = other RNA
aatgcaatatggcttatttc

SEQ ID NO: 1201 - RNA, 20 nt, synthetic construct
  misc_feature 1..20: note = C9Orf72 ATCN PAM targeting sequence
  source 1..20: mol_type = other RNA
accatgccctcccactaatc

SEQ ID NO: 1202 - RNA, 20 nt, synthetic construct
  misc_feature 1..20: note = C9Orf72 ATCN PAM targeting sequence
  source 1..20: mol_type = other RNA
ctcaaacacttttcagaata

SEQ ID NO: 1203 - RNA, 20 nt, synthetic construct
  misc_feature 1..20: note = C9Orf72 ATCN PAM targeting sequence
  source 1..20: mol_type = other RNA
agttacaacctctgtattct

SEQ ID NO: 1204 - RNA, 20 nt, synthetic construct
  misc_feature 1..20: note = C9Orf72 ATCN PAM targeting sequence
  source 1..20: mol_type = other RNA
gaatacagaggttgtaactg

SEQ ID NO: 1205 - RNA, 20 nt, synthetic construct
  misc_feature 1..20: note = C9Orf72 ATCN PAM targeting sequence
  source 1..20: mol_type = other RNA
gcagcatgaaaatgagctaa

SEQ ID NO: 1206 - RNA, 20 nt, synthetic construct
  misc_feature 1..20: note = C9Orf72 ATCN PAM targeting sequence
  source 1..20: mol_type = other RNA
tggcgggaggtggaagacac

SEQ ID NO: 1207 - RNA, 20 nt, synthetic construct
  misc_feature 1..20: note = C9Orf72 ATCN PAM targeting sequence
  source 1..20: mol_type = other RNA
ggggtctctttttttgcttc

SEQ ID NO: 1208 - RNA, 20 nt, synthetic construct
  misc_feature 1..20: note = C9Orf72 ATCN PAM targeting sequence
  source 1..20: mol_type = other RNA
gatctcgtgagacttattca

SEQ ID NO: 1209 - RNA, 20 nt, synthetic construct
  misc_feature 1..20: note = C9Orf72 ATCN PAM targeting sequence
  source 1..20: mol_type = other RNA
gatgggtttatcaggggtct

SEQ ID NO: 1210 - RNA, 20 nt, synthetic construct
  misc_feature 1..20: note = C9Orf72 ATCN PAM targeting sequence
  source 1..20: mol_type = other RNA
cgtgagacttattcactatc

SEQ ID NO: 1211 - RNA, 20 nt, synthetic construct
  misc_feature 1..20: note = C9Orf72 ATCN PAM targeting sequence
  source 1..20: mol_type = other RNA
cgagaatagcatgggaaaga

SEQ ID NO: 1212 - RNA, 20 nt, synthetic construct
  misc_feature 1..20: note = C9Orf72 ATCN PAM targeting sequence
  source 1..20: mol_type = other RNA
tgggggccagtctttcccat

SEQ ID NO: 1213 - RNA, 20 nt, synthetic construct
  misc_feature 1..20: note = C9Orf72 ATCN PAM targeting sequence
  source 1..20: mol_type = other RNA
ccccctgggtccctgccata

SEQ ID NO: 1214 - RNA, 20 nt, synthetic construct
  misc_feature 1..20: note = C9Orf72 ATCN PAM targeting sequence
  source 1..20: mol_type = other RNA
cccagagttctcacatgcta

SEQ ID NO: 1215 - RNA, 20 nt, synthetic construct
  misc_feature 1..20: note = C9Orf72 ATCN PAM targeting sequence
  source 1..20: mol_type = other RNA
caacttgaattatatctccc

SEQ ID NO: 1216 - RNA, 20 nt, synthetic construct
  misc_feature 1..20: note = C9Orf72 ATCN PAM targeting sequence
  source 1..20: mol_type = other RNA
ttctgcccctggcccctcca

SEQ ID NO: 1217 - RNA, 20 nt, synthetic construct
  misc_feature 1..20: note = C9Orf72 ATCN PAM targeting sequence
  source 1..20: mol_type = other RNA
cacgacctcacatttcaaaa

SEQ ID NO: 1218 - RNA, 20 nt, synthetic construct
  misc_feature 1..20: note = C9Orf72 ATCN PAM targeting sequence
  source 1..20: mol_type = other RNA
tgccttcccaacagtcaccc

SEQ ID NO: 1219 - RNA, 20 nt, synthetic construct
  misc_feature 1..20: note = C9Orf72 ATCN PAM targeting sequence
  source 1..20: mol_type = other RNA
gagacaaggcaagtcccttc

SEQ ID NO: 1220 - RNA, 20 nt, synthetic construct
  misc_feature 1..20: note = C9Orf72 ATCN PAM targeting sequence
  source 1..20: mol_type = other RNA
agcagggcagtcaaatttta

SEQ ID NO: 1221 - RNA, 20 nt, synthetic construct
  misc_feature 1..20: note = C9Orf72 ATCN PAM targeting sequence
  source 1..20: mol_type = other RNA
ttttggagctttaaaatttg

SEQ ID NO: 1222 - RNA, 20 nt, synthetic construct
  misc_feature 1..20: note = C9Orf72 ATCN PAM targeting sequence
  source 1..20: mol_type = other RNA
cctttgactccaggtctgac

SEQ ID NO: 1223 - RNA, 20 nt, synthetic construct
  misc_feature 1..20: note = C9Orf72 ATCN PAM targeting sequence
  source 1..20: mol_type = other RNA
aggtcatgctgctgcaagaa

SEQ ID NO: 1224 - RNA, 20 nt, synthetic construct
  misc_feature 1..20: note = C9Orf72 ATCN PAM targeting sequence
  source 1..20: mol_type = other RNA
actgacagcttgcactgtgc

SEQ ID NO: 1225 - RNA, 20 nt, synthetic construct
  misc_feature 1..20: note = C9Orf72 ATCN PAM targeting sequence
  source 1..20: mol_type = other RNA
accattctggggtctggaag

SEQ ID NO: 1226 - RNA, 20 nt, synthetic construct
  misc_feature 1..20: note = C9Orf72 ATCN PAM targeting sequence
  source 1..20: mol_type = other RNA
tcttccagaccccagaatgg

SEQ ID NO: 1227 - RNA, 20 nt, synthetic construct
  misc_feature 1..20: note = C9Orf72 ATCN PAM targeting sequence
  source 1..20: mol_type = other RNA
aggcatgtccacacatcttc

SEQ ID NO: 1228 - RNA, 20 nt, synthetic construct
  misc_feature 1..20: note = C9Orf72 ATCN PAM targeting sequence
  source 1..20: mol_type = other RNA
tctgaaatctagggggaggt

SEQ ID NO: 1229 - RNA, 20 nt, synthetic construct
  misc_feature 1..20: note = C9Orf72 ATCN PAM targeting sequence
  source 1..20: mol_type = other RNA
agggggaggtttccaaacct

SEQ ID NO: 1230 - RNA, 20 nt, synthetic construct
  misc_feature 1..20: note = C9Orf72 ATCN PAM targeting sequence
  source 1..20: mol_type = other RNA
ccgtgctgtatgcagcctag

SEQ ID NO: 1231 - RNA, 20 nt, synthetic construct
  misc_feature 1..20: note = C9Orf72 ATCN PAM targeting sequence
  source 1..20: mol_type = other RNA
tgggaccggcccacaaaacc

SEQ ID NO: 1232 - RNA, 20 nt, synthetic construct
  misc_feature 1..20: note = C9Orf72 ATCN PAM targeting sequence
  source 1..20: mol_type = other RNA
caggcccagaggcccagcag

SEQ ID NO: 1233 - RNA, 20 nt, synthetic construct
  misc_feature 1..20: note = C9Orf72 ATCN PAM targeting sequence
  source 1..20: mol_type = other RNA
tcatggctgccccacccatc

SEQ ID NO: 1234 - RNA, 20 nt, synthetic construct
  misc_feature 1..20: note = C9Orf72 ATCN PAM targeting sequence
  source 1..20: mol_type = other RNA
ctgacatggcctggagacat

SEQ ID NO: 1235 - RNA, 20 nt, synthetic construct
  misc_feature 1..20: note = C9Orf72 ATCN PAM targeting sequence
  source 1..20: mol_type = other RNA
ctaagaccatggggaaaatg

SEQ ID NO: 1236 - RNA, 20 nt, synthetic construct
  misc_feature 1..20: note = C9Orf72 ATCN PAM targeting sequence
  source 1..20: mol_type = other RNA
tctctctcaagttcaaagtt

SEQ ID NO: 1237 - RNA, 20 nt, synthetic construct
  misc_feature 1..20: note = C9Orf72 ATCN PAM targeting sequence
  source 1..20: mol_type = other RNA
ctctcaagttcaaagttcca

SEQ ID NO: 1238 - RNA, 20 nt, synthetic construct
  misc_feature 1..20: note = C9Orf72 ATCN PAM targeting sequence
  source 1..20: mol_type = other RNA
ctagggccaccagtctcttt

SEQ ID NO: 1239 - RNA, 20 nt, synthetic construct
  misc_feature 1..20: note = C9Orf72 ATCN PAM targeting sequence
  source 1..20: mol_type = other RNA
ccatctgagaccacttcagc

SEQ ID NO: 1240 - RNA, 20 nt, synthetic construct
  misc_feature 1..20: note = C9Orf72 ATCN PAM targeting sequence
  source 1..20: mol_type = other RNA
gagaccacttcagcctggac

SEQ ID NO: 1241 - RNA, 20 nt, synthetic construct
  misc_feature 1..20: note = C9Orf72 ATCN PAM targeting sequence
  source 1..20: mol_type = other RNA
ctatcagcatttttgtcaaa

SEQ ID NO: 1242 - RNA, 20 nt, synthetic construct
  misc_feature 1..20: note = C9Orf72 ATCN PAM targeting sequence
  source 1..20: mol_type = other RNA
gcatttttgtcaaagccatt

SEQ ID NO: 1243 - RNA, 20 nt, synthetic construct
  misc_feature 1..20: note = C9Orf72 ATCN PAM targeting sequence
  source 1..20: mol_type = other RNA
tttcagcaacgcctcactct

SEQ ID NO: 1244 - RNA, 20 nt, synthetic construct
  misc_feature 1..20: note = C9Orf72 ATCN PAM targeting sequence
  source 1..20: mol_type = other RNA
gcagcatgaaaatggacaaa

SEQ ID NO: 1245 - RNA, 20 nt, synthetic construct
  misc_feature 1..20: note = C9Orf72 ATCN PAM targeting sequence
  source 1..20: mol_type = other RNA
tagtgggaggcagaaggcac

SEQ ID NO: 1246 - RNA, 20 nt, synthetic construct
  misc_feature 1..20: note = C9Orf72 ATCN PAM targeting sequence
  source 1..20: mol_type = other RNA
ggggtttctgcttttgcttc

SEQ ID NO: 1247 - RNA, 20 nt, synthetic construct
  misc_feature 1..20: note = C9Orf72 ATCN PAM targeting sequence
  source 1..20: mol_type = other RNA
gatctcgtgagacttattca

SEQ ID NO: 1248 - RNA, 20 nt, synthetic construct
  misc_feature 1..20: note = C9Orf72 ATCN PAM targeting sequence
  source 1..20: mol_type = other RNA
gatgggtttatcaggggttt

SEQ ID NO: 1249 - RNA, 20 nt, synthetic construct
  misc_feature 1..20: note = C9Orf72 ATCN PAM targeting sequence
  source 1..20: mol_type = other RNA
cgtgagacttattcactatc

SEQ ID NO: 1250 - RNA, 20 nt, synthetic construct
  misc_feature 1..20: note = C9Orf72 ATCN PAM targeting sequence
  source 1..20: mol_type = other RNA
caagaatagcacgggaaaga

SEQ ID NO: 1251 - RNA, 20 nt, synthetic construct
  misc_feature 1..20: note = C9Orf72 ATCN PAM targeting sequence
  source 1..20: mol_type = other RNA
taagggccggtctttcccgt

SEQ ID NO: 1252 - RNA, 20 nt, synthetic construct
  misc_feature 1..20: note = C9Orf72 ATCN PAM targeting sequence
  source 1..20: mol_type = other RNA
ccccttgggtccgtcctaca

SEQ ID NO: 1253 - RNA, 20 nt, synthetic construct
  misc_feature 1..20: note = C9Orf72 ATCN PAM targeting sequence
  source 1..20: mol_type = other RNA
cccaaaattcccacatattg

SEQ ID NO: 1254 - RNA, 20 nt, synthetic construct
  misc_feature 1..20: note = C9Orf72 ATCN PAM targeting sequence
  source 1..20: mol_type = other RNA
caacttgaattttatctccc

SEQ ID NO: 1255 - RNA, 20 nt, synthetic construct
  misc_feature 1..20: note = C9Orf72 ATCN PAM targeting sequence
  source 1..20: mol_type = other RNA
ttcctgttatcattcctgtt

SEQ ID NO: 1256 - RNA, 20 nt, synthetic construct
  misc_feature 1..20: note = C9Orf72 ATCN PAM targeting sequence
  source 1..20: mol_type = other RNA
ttcctgttatcagaatccag

SEQ ID NO: 1257 - RNA, 20 nt, synthetic construct
  misc_feature 1..20: note = C9Orf72 ATCN PAM targeting sequence
  source 1..20: mol_type = other RNA
gaatccagagatcctgccag

SEQ ID NO: 1258 - RNA, 20 nt, synthetic construct
  misc_feature 1..20: note = C9Orf72 ATCN PAM targeting sequence
  source 1..20: mol_type = other RNA
agagatcctgccagaaggat

SEQ ID NO: 1259 - RNA, 20 nt, synthetic construct
  misc_feature 1..20: note = C9Orf72 ATCN PAM targeting sequence
  source 1..20: mol_type = other RNA
ctggattctgataacaggaa

SEQ ID NO: 1260 - RNA, 20 nt, synthetic construct
  misc_feature 1..20: note = C9Orf72 ATCN PAM targeting sequence
  source 1..20: mol_type = other RNA
tgccagaaggattaagtctg

SEQ ID NO: 1261 - RNA, 20 nt, synthetic construct
  misc_feature 1..20: note = C9Orf72 ATCN PAM targeting sequence
  source 1..20: mol_type = other RNA
ttctggcaggatctctggat

SEQ ID NO: 1262 - RNA, 20 nt, synthetic construct
  misc_feature 1..20: note = C9Orf72 ATCN PAM targeting sequence
  source 1..20: mol_type = other RNA
agctagatgatttctcattt

SEQ ID NO: 1263 - RNA, 20 nt, synthetic construct
  misc_feature 1..20: note = C9Orf72 ATCN PAM targeting sequence
  source 1..20: mol_type = other RNA
agctagatggttgtctgttc

SEQ ID NO: 1264 - RNA, 20 nt, synthetic construct
  misc_feature 1..20: note = C9Orf72 ATCN PAM targeting sequence
  source 1..20: mol_type = other RNA
tctagctagatggttgtctg

SEQ ID NO: 1265 - RNA, 20 nt, synthetic construct
  misc_feature 1..20: note = C9Orf72 ATCN PAM targeting sequence
  source 1..20: mol_type = other RNA
cagggttacctgctttgtgt

SEQ ID NO: 1266 - RNA, 20 nt, synthetic construct
  misc_feature 1..20: note = C9Orf72 ATCN PAM targeting sequence
  source 1..20: mol_type = other RNA
ttaattatttgtctcaattt

SEQ ID NO: 1267 - RNA, 20 nt, synthetic construct
  misc_feature 1..20: note = C9Orf72 ATCN PAM targeting sequence
  source 1..20: mol_type = other RNA
tcctcaaagactgaaaagag

SEQ ID NO: 1268 - RNA, 20 nt, synthetic construct
  misc_feature 1..20: note = C9Orf72 ATCN PAM targeting sequence
  source 1..20: mol_type = other RNA
ttctggctctaaaggtagac

SEQ ID NO: 1269 - RNA, 20 nt, synthetic construct
  misc_feature 1..20: note = C9Orf72 ATCN PAM targeting sequence
  source 1..20: mol_type = other RNA
cagtgggttttggggataag

SEQ ID NO: 1270 - RNA, 20 nt, synthetic construct
  misc_feature 1..20: note = C9Orf72 ATCN PAM targeting sequence
  source 1..20: mol_type = other RNA
ccaaaacccactgtgatatt

SEQ ID NO: 1271 - RNA, 20 nt, synthetic construct
  misc_feature 1..20: note = C9Orf72 ATCN PAM targeting sequence
  source 1..20: mol_type = other RNA
cacttatccccaaaacccac

SEQ ID NO: 1272 - RNA, 20 nt, synthetic construct
  misc_feature 1..20: note = C9Orf72 ATCN PAM targeting sequence
  source 1..20: mol_type = other RNA
ttacttatattatctcactt

SEQ ID NO: 1273 - RNA, 20 nt, synthetic construct
  misc_feature 1..20: note = C9Orf72 ATCN PAM targeting sequence
  source 1..20: mol_type = other RNA
ggatttctcctatgatcaga

SEQ ID NO: 1274 - RNA, 20 nt, synthetic construct
  misc_feature 1..20: note = C9Orf72 ATCN PAM targeting sequence
  source 1..20: mol_type = other RNA
agattaataaatttaacact

SEQ ID NO: 1275 - RNA, 20 nt, synthetic construct
  misc_feature 1..20: note = C9Orf72 ATCN PAM targeting sequence
  source 1..20: mol_type = other RNA
taggagaaatccagattaat

SEQ ID NO: 1276 - RNA, 20 nt, synthetic construct
  misc_feature 1..20: note = C9Orf72 ATCN PAM targeting sequence
  source 1..20: mol_type = other RNA
gatttcaggtggtgtgatga

SEQ ID NO: 1277 - RNA, 20 nt, synthetic construct
  misc_feature 1..20: note = C9Orf72 ATCN PAM targeting sequence
  source 1..20: mol_type = other RNA
gatcataggagaaatccaga

SEQ ID NO: 1278 - RNA, 20 nt, synthetic construct
  misc_feature 1..20: note = C9Orf72 ATCN PAM targeting sequence
  source 1..20: mol_type = other RNA
caccacctgaaatctgatca

SEQ ID NO: 1279 - RNA, 20 nt, synthetic construct
  misc_feature 1..20: note = C9Orf72 ATCN PAM targeting sequence
  source 1..20: mol_type = other RNA
tcacaccacctgaaatctga

SEQ ID NO: 1280 - RNA, 20 nt, synthetic construct
  misc_feature 1..20: note = C9Orf72 ATCN PAM targeting sequence
  source 1..20: mol_type = other RNA
ataggagtcccaaccataat

SEQ ID NO: 1281 - RNA, 20 nt, synthetic construct
  misc_feature 1..20: note = C9Orf72 ATCN PAM targeting sequence
  source 1..20: mol_type = other RNA
tgaggcacctcagagggaag

SEQ ID NO: 1282 - RNA, 20 nt, synthetic construct
  misc_feature 1..20: note = C9Orf72 ATCN PAM targeting sequence
  source 1..20: mol_type = other RNA
aaaccacgagtggggaaatg

SEQ ID NO: 1283 - RNA, 20 nt, synthetic construct
  misc_feature 1..20: note = C9Orf72 ATCN PAM targeting sequence
  source 1..20: mol_type = other RNA
tactatcctctctatgtcct

SEQ ID NO: 1284 - RNA, 20 nt, synthetic construct
  misc_feature 1..20: note = C9Orf72 ATCN PAM targeting sequence
  source 1..20: mol_type = other RNA
tctctatgtccttttactaa

SEQ ID NO: 1285 - RNA, 20 nt, synthetic construct
  misc_feature 1..20: note = C9Orf72 ATCN PAM targeting sequence
  source 1..20: mol_type = other RNA
ccccagggcaagtggaggga

SEQ ID NO: 1286 - RNA, 20 nt, synthetic construct
  misc_feature 1..20: note = C9Orf72 ATCN PAM targeting sequence
  source 1..20: mol_type = other RNA
ctccacttgccctggggcga

SEQ ID NO: 1287 - RNA, 20 nt, synthetic construct
  misc_feature 1..20: note = C9Orf72 ATCN PAM targeting sequence
  source 1..20: mol_type = other RNA
atccctccacttgccctggg

SEQ ID NO: 1288 - RNA, 20 nt, synthetic construct
  misc_feature 1..20: note = C9Orf72 ATCN PAM targeting sequence
  source 1..20: mol_type = other RNA
agagtttagagttaacaggc

SEQ ID NO: 1289 - RNA, 20 nt, synthetic construct
  misc_feature 1..20: note = C9Orf72 ATCN PAM targeting sequence
  source 1..20: mol_type = other RNA
actttgtttcttatggaagc

SEQ ID NO: 1290 - RNA, 20 nt, synthetic construct
  misc_feature 1..20: note = C9Orf72 ATCN PAM targeting sequence
  source 1..20: mol_type = other RNA
acttctttgaagccacatag

SEQ ID NO: 1291 - RNA, 20 nt, synthetic construct
  misc_feature 1..20: note = C9Orf72 ATCN PAM targeting sequence
  source 1..20: mol_type = other RNA
gcagaaagtctgtctacaca

SEQ ID NO: 1292 - RNA, 20 nt, synthetic construct
  misc_feature 1..20: note = C9Orf72 ATCN PAM targeting sequence
  source 1..20: mol_type = other RNA
cttgagaaggctatgcattt

SEQ ID NO: 1293 - RNA, 20 nt, synthetic construct
  misc_feature 1..20: note = C9Orf72 ATCN PAM targeting sequence
  source 1..20: mol_type = other RNA
tctatgaagtgcttctgaat

SEQ ID NO: 1294 - RNA, 20 nt, synthetic construct
  misc_feature 1..20: note = C9Orf72 ATCN PAM targeting sequence
  source 1..20: mol_type = other RNA
atgaagtgcttctgaatcct

SEQ ID NO: 1295 - RNA, 20 nt, synthetic construct
  misc_feature 1..20: note = C9Orf72 ATCN PAM targeting sequence
  source 1..20: mol_type = other RNA
tccacaattgacagtgagct

SEQ ID NO: 1296 - RNA, 20 nt, synthetic construct
  misc_feature 1..20: note = C9Orf72 ATCN PAM targeting sequence
  source 1..20: mol_type = other RNA
tgttcccagacagtagccac

SEQ ID NO: 1297 - RNA, 20 nt, synthetic construct
  misc_feature 1..20: note = C9Orf72 ATCN PAM targeting sequence
  source 1..20: mol_type = other RNA
gaagctttctccagggaact

SEQ ID NO: 1298 - RNA, 20 nt, synthetic construct
  misc_feature 1..20: note = C9Orf72 ATCN PAM targeting sequence
  source 1..20: mol_type = other RNA
actcagataaggcctctccc

SEQ ID NO: 1299 - RNA, 20 nt, synthetic construct
  misc_feature 1..20: note = C9Orf72 ATCN PAM targeting sequence
  source 1..20: mol_type = other RNA
gagtggatagaaagtttttc

SEQ ID NO: 1300 - RNA, 20 nt, synthetic construct
  misc_feature 1..20: note = C9Orf72 ATCN PAM targeting sequence
  source 1..20: mol_type = other RNA
aggctgggcaagggagaggc

SEQ ID NO: 1301 - RNA, 20 nt, synthetic construct
  misc_feature 1..20: note = C9Orf72 ATCN PAM targeting sequence
  source 1..20: mol_type = other RNA
cgtccttcttgctccttctt

SEQ ID NO: 1302 - RNA, 20 nt, synthetic construct
  misc_feature 1..20: note = C9Orf72 ATCN PAM targeting sequence
  source 1..20: mol_type = other RNA
tgtgcaccttgcatgcacat

SEQ ID NO: 1303 - RNA, 20 nt, synthetic construct
  misc_feature 1..20: note = C9Orf72 ATCN PAM targeting sequence
  source 1..20: mol_type = other RNA
ctgatgcgaatgccccagga

SEQ ID NO: 1304 - RNA, 20 nt, synthetic construct
  misc_feature 1..20: note = C9Orf72 ATCN PAM targeting sequence
  source 1..20: mol_type = other RNA
gagatgtgcatgcaaggtgc

SEQ ID NO: 1305 - RNA, 20 nt, synthetic construct
  misc_feature 1..20: note = C9Orf72 ATCN PAM targeting sequence
  source 1..20: mol_type = other RNA
gtttatgagggttgggagca

SEQ ID NO: 1306 - RNA, 20 nt, synthetic construct
  misc_feature 1..20: note = C9Orf72 ATCN PAM targeting sequence
  source 1..20: mol_type = other RNA
ctggtacctaacacaggacc

SEQ ID NO: 1307 - RNA, 20 nt, synthetic construct
  misc_feature 1..20: note = C9Orf72 ATCN PAM targeting sequence
  source 1..20: mol_type = other RNA
aaatgattgttaatcaaata

SEQ ID NO: 1308 - RNA, 20 nt, synthetic construct
  misc_feature 1..20: note = C9Orf72 ATCN PAM targeting sequence
  source 1..20: mol_type = other RNA
tttagatacacagtttaacc

SEQ ID NO: 1309 - RNA, 20 nt, synthetic construct
  misc_feature 1..20: note = C9Orf72 ATCN PAM targeting sequence
  source 1..20: mol_type = other RNA
aataccgcacagataaacag

SEQ ID NO: 1310 - RNA, 20 nt, synthetic construct
  misc_feature 1..20: note = C9Orf72 ATCN PAM targeting sequence
  source 1..20: mol_type = other RNA
gtgcggtatttgattaacaa

SEQ ID NO: 1311 - RNA, 20 nt, synthetic construct
  misc_feature 1..20: note = C9Orf72 ATCN PAM targeting sequence
  source 1..20: mol_type = other RNA
taatgagacaatggacaaaa

SEQ ID NO: 1312 - RNA, 20 nt, synthetic construct
  misc_feature 1..20: note = C9Orf72 ATCN PAM targeting sequence
  source 1..20: mol_type = other RNA
tttcagaaaacagaactact

SEQ ID NO: 1313 - RNA, 20 nt, synthetic construct
  misc_feature 1..20: note = C9Orf72 ATCN PAM targeting sequence
  source 1..20: mol_type = other RNA
ttgcatgaagtagttctgtt

SEQ ID NO: 1314 - RNA, 20 nt, synthetic construct
  misc_feature 1..20: note = C9Orf72 ATCN PAM targeting sequence
  source 1..20: mol_type = other RNA
acagtggctactggacatga

SEQ ID NO: 1315 - RNA, 20 nt, synthetic construct
  misc_feature 1..20: note = C9Orf72 ATCN PAM targeting sequence
  source 1..20: mol_type = other RNA
tgtccagtagccactgttga

SEQ ID NO: 1316 - RNA, 20 nt, synthetic construct
  misc_feature 1..20: note = C9Orf72 ATCN PAM targeting sequence
  source 1..20: mol_type = other RNA
aaacagctcccatgttttca

SEQ ID NO: 1317 - RNA, 20 nt, synthetic construct
  misc_feature 1..20: note = C9Orf72 ATCN PAM targeting sequence
  source 1..20: mol_type = other RNA
ttacaaagttctaccatgac

SEQ ID NO: 1318 - RNA, 20 nt, synthetic construct
  misc_feature 1..20: note = C9Orf72 ATCN PAM targeting sequence
  source 1..20: mol_type = other RNA
ttgcaataccacgcaaagac

SEQ ID NO: 1319 - RNA, 20 nt, synthetic construct
  misc_feature 1..20: note = C9Orf72 ATCN PAM targeting sequence
  source 1..20: mol_type = other RNA
acttgggaatttttcttttt

SEQ ID NO: 1320 - RNA, 20 nt, synthetic construct
  misc_feature 1..20: note = C9Orf72 ATCN PAM targeting sequence
  source 1..20: mol_type = other RNA
ctacaaaaaaagaaaaattc

SEQ ID NO: 1321 - RNA, 20 nt, synthetic construct
  misc_feature 1..20: note = C9Orf72 ATCN PAM targeting sequence
  source 1..20: mol_type = other RNA
tgggctcaagcagtcctcct

SEQ ID NO: 1322 - RNA, 20 nt, synthetic construct
  misc_feature 1..20: note = C9Orf72 ATCN PAM targeting sequence
  source 1..20: mol_type = other RNA
agggaggctgaggcaggagg

SEQ ID NO: 1323 - RNA, 20 nt, synthetic construct
  misc_feature 1..20: note = C9Orf72 ATCN PAM targeting sequence
  source 1..20: mol_type = other RNA
cagcatctagggaggctgag

SEQ ID NO: 1324 - RNA, 20 nt, synthetic construct
  misc_feature 1..20: note = C9Orf72 ATCN PAM targeting sequence
  source 1..20: mol_type = other RNA
ctgtaatcccagcatctagg

SEQ ID NO: 1325 - RNA, 20 nt, synthetic construct
  misc_feature 1..20: note = C9Orf72 ATCN PAM targeting sequence
  source 1..20: mol_type = other RNA
tctcacctcctttagtgaaa

SEQ ID NO: 1326 - RNA, 20 nt, synthetic construct
  misc_feature 1..20: note = C9Orf72 ATCN PAM targeting sequence
  source 1..20: mol_type = other RNA
cacctcctttagtgaaaact

SEQ ID NO: 1327 - RNA, 20 nt, synthetic construct
  misc_feature 1..20: note = C9Orf72 ATCN PAM targeting sequence
  source 1..20: mol_type = other RNA
actcttgttgcctttgtacc

SEQ ID NO: 1328 - RNA, 20 nt, synthetic construct
  misc_feature 1..20: note = C9Orf72 ATCN PAM targeting sequence
  source 1..20: mol_type = other RNA
tggcccctaacctgtctccc

SEQ ID NO: 1329 - RNA, 20 nt, synthetic construct
  misc_feature 1..20: note = C9Orf72 ATCN PAM targeting sequence
  source 1..20: mol_type = other RNA
tcccacacaacaccacgaca

SEQ ID NO: 1330 - RNA, 20 nt, synthetic construct
  misc_feature 1..20: note = C9Orf72 ATCN PAM targeting sequence
  source 1..20: mol_type = other RNA
cacacaacaccacgacatta

SEQ ID NO: 1331 - RNA, 20 nt, synthetic construct
  misc_feature 1..20: note = C9Orf72 ATCN PAM targeting sequence
  source 1..20: mol_type = other RNA
aagttcgaggaaaattaatg

SEQ ID NO: 1332 - RNA, 20 nt, synthetic construct
  misc_feature 1..20: note = C9Orf72 ATCN PAM targeting sequence
  source 1..20: mol_type = other RNA
tgctacccattccgtgtgca

SEQ ID NO: 1333 - RNA, 20 nt, synthetic construct
  misc_feature 1..20: note = C9Orf72 ATCN PAM targeting sequence
  source 1..20: mol_type = other RNA
gctagggaggcctgatagca

SEQ ID NO: 1334 - RNA, 20 nt, synthetic construct
  misc_feature 1..20: note = C9Orf72 ATCN PAM targeting sequence
  source 1..20: mol_type = other RNA
ggcctccctagcagatgcac

SEQ ID NO: 1335 - RNA, 20 nt, synthetic construct
  misc_feature 1..20: note = C9Orf72 ATCN PAM targeting sequence
  source 1..20: mol_type = other RNA
tgtcagccatgaccttgcta

SEQ ID NO: 1336 - RNA, 20 nt, synthetic construct
  misc_feature 1..20: note = C9Orf72 ATCN PAM targeting sequence
  source 1..20: mol_type = other RNA
gttaattcaatagagcctct

SEQ ID NO: 1337 - RNA, 20 nt, synthetic construct
  misc_feature 1..20: note = C9Orf72 ATCN PAM targeting sequence
  source 1..20: mol_type = other RNA
attgcctagtggaaagaaca

SEQ ID NO: 1338 - RNA, 20 nt, synthetic construct
  misc_feature 1..20: note = C9Orf72 ATCN PAM targeting sequence
  source 1..20: mol_type = other RNA
gtttaatacttcagcaagtc

SEQ ID NO: 1339 - RNA, 20 nt, synthetic construct
  misc_feature 1..20: note = C9Orf72 ATCN PAM targeting sequence
  source 1..20: mol_type = other RNA
tcctgccttggcttcccaaa

SEQ ID NO: 1340 - RNA, 20 nt, synthetic construct
  misc_feature 1..20: note = C9Orf72 ATCN PAM targeting sequence
  source 1..20: mol_type = other RNA
cttgaagccaggaattagag

SEQ ID NO: 1341 - RNA, 20 nt, synthetic construct
  misc_feature 1..20: note = C9Orf72 ATCN PAM targeting sequence
  source 1..20: mol_type = other RNA
ctgcaaaacaaaacaaaaca

SEQ ID NO: 1342 - RNA, 20 nt, synthetic construct
  misc_feature 1..20: note = C9Orf72 ATCN PAM targeting sequence
  source 1..20: mol_type = other RNA
gggaggctgaggcaggagga

SEQ ID NO: 1343 - RNA, 20 nt, synthetic construct
  misc_feature 1..20: note = C9Orf72 ATCN PAM targeting sequence
  source 1..20: mol_type = other RNA
tcctcctgcctcagcctccc

SEQ ID NO: 1344 - RNA, 20 nt, synthetic construct
  misc_feature 1..20: note = C9Orf72 ATCN PAM targeting sequence
  source 1..20: mol_type = other RNA
catgagcctaggagttcgag

SEQ ID NO: 1345 - RNA, 20 nt, synthetic construct
  misc_feature 1..20: note = C9Orf72 ATCN PAM targeting sequence
  source 1..20: mol_type = other RNA
tgtcactgcattccagcatg

SEQ ID NO: 1346 - RNA, 20 nt, synthetic construct
  misc_feature 1..20: note = C9Orf72 ATCN PAM targeting sequence
  source 1..20: mol_type = other RNA
aaaaagacagttaagttggg

SEQ ID NO: 1347 - RNA, 20 nt, synthetic construct
  misc_feature 1..20: note = C9Orf72 ATCN PAM targeting sequence
  source 1..20: mol_type = other RNA
atggagagatgtagatatag

SEQ ID NO: 1348 - RNA, 20 nt, synthetic construct
  misc_feature 1..20: note = C9Orf72 ATCN PAM targeting sequence
  source 1..20: mol_type = other RNA
ctccatagatctaaaaagac

SEQ ID NO: 1349 - RNA, 20 nt, synthetic construct
  misc_feature 1..20: note = C9Orf72 ATCN PAM targeting sequence
  source 1..20: mol_type = other RNA
acatctctccatagatctaa

SEQ ID NO: 1350 - RNA, 20 nt, synthetic construct
  misc_feature 1..20: note = C9Orf72 ATCN PAM targeting sequence
  source 1..20: mol_type = other RNA
atatctacatctctccatag

SEQ ID NO: 1351 - RNA, 20 nt, synthetic construct
  misc_feature 1..20: note = C9Orf72 ATCN PAM targeting sequence
  source 1..20: mol_type = other RNA
ccaggaatatgaataatatc

SEQ ID NO: 1352 - RNA, 20 nt, synthetic construct
  misc_feature 1..20: note = C9Orf72 ATCN PAM targeting sequence
  source 1..20: mol_type = other RNA
cttctgcagctgaagcaggg

SEQ ID NO: 1353 - RNA, 20 nt, synthetic construct
  misc_feature 1..20: note = C9Orf72 ATCN PAM targeting sequence
  source 1..20: mol_type = other RNA
agcgaaacctgaaagttctc

SEQ ID NO: 1354 - RNA, 20 nt, synthetic construct
  misc_feature 1..20: note = C9Orf72 ATCN PAM targeting sequence
  source 1..20: mol_type = other RNA
atcggacaactccccagacc

SEQ ID NO: 1355 - RNA, 20 nt, synthetic construct
  misc_feature 1..20: note = C9Orf72 ATCN PAM targeting sequence
  source 1..20: mol_type = other RNA
gacaactccccagaccccta

SEQ ID NO: 1356 - RNA, 20 nt, synthetic construct
  misc_feature 1..20: note = C9Orf72 ATCN PAM targeting sequence
  source 1..20: mol_type = other RNA
ctgcccctgccctttctttt

SEQ ID NO: 1357 - RNA, 20 nt, synthetic construct
  misc_feature 1..20: note = C9Orf72 ATCN PAM targeting sequence
  source 1..20: mol_type = other RNA
tccagcctccaggcgacttc

SEQ ID NO: 1358 - RNA, 20 nt, synthetic construct
  misc_feature 1..20: note = C9Orf72 ATCN PAM targeting sequence
  source 1..20: mol_type = other RNA
gtagcccttcctttgtatct

SEQ ID NO: 1359 - RNA, 20 nt, synthetic construct
  misc_feature 1..20: note = C9Orf72 ATCN PAM targeting sequence
  source 1..20: mol_type = other RNA
aaacagtccgatttgttggt

SEQ ID NO: 1360 - RNA, 20 nt, synthetic construct
  misc_feature 1..20: note = C9Orf72 ATCN PAM targeting sequence
  source 1..20: mol_type = other RNA
gactgtttagatacaaagga

SEQ ID NO: 1361 - RNA, 20 nt, synthetic construct
  misc_feature 1..20: note = C9Orf72 ATCN PAM targeting sequence
  source 1..20: mol_type = other RNA
ataatcagggcccacccacc

SEQ ID NO: 1362 - RNA, 20 nt, synthetic construct
  misc_feature 1..20: note = C9Orf72 ATCN PAM targeting sequence
  source 1..20: mol_type = other RNA
gggcccacccacccatctgt

SEQ ID NO: 1363 - RNA, 20 nt, synthetic construct
  misc_feature 1..20: note = C9Orf72 ATCN PAM targeting sequence
  source 1..20: mol_type = other RNA
gttagccctgtgggcccatc

SEQ ID NO: 1364 - RNA, 20 nt, synthetic construct
  misc_feature 1..20: note = C9Orf72 ATCN PAM targeting sequence
  source 1..20: mol_type = other RNA
aagcaggcttcaaacacaag

SEQ ID NO: 1365 - RNA, 20 nt, synthetic construct
  misc_feature 1..20: note = C9Orf72 ATCN PAM targeting sequence
  source 1..20: mol_type = other RNA
ggctttgtttctgccatccc

SEQ ID NO: 1366 - RNA, 20 nt, synthetic construct
  misc_feature 1..20: note = C9Orf72 ATCN PAM targeting sequence
  source 1..20: mol_type = other RNA
ctgccgcactcatttggaac

SEQ ID NO: 1367 - RNA, 20 nt, synthetic construct
  misc_feature 1..20: note = C9Orf72 ATCN PAM targeting sequence
  source 1..20: mol_type = other RNA
tttgtttgtttgtttttttc

SEQ ID NO: 1368 - RNA, 20 nt, synthetic construct
  misc_feature 1..20: note = C9Orf72 ATCN PAM targeting sequence
  source 1..20: mol_type = other RNA
gtccacggactaactagtaa

SEQ ID NO: 1369 - RNA, 20 nt, synthetic construct
  misc_feature 1..20: note = C9Orf72 ATCN PAM targeting sequence
  source 1..20: mol_type = other RNA
tggtctttctgccatttccg

SEQ ID NO: 1370 - RNA, 20 nt, synthetic construct
  misc_feature 1..20: note = C9Orf72 ATCN PAM targeting sequence
  source 1..20: mol_type = other RNA
cttgcacctggggtgcaagt

SEQ ID NO: 1371 - RNA, 20 nt, synthetic construct
  misc_feature 1..20: note = C9Orf72 ATCN PAM targeting sequence
  source 1..20: mol_type = other RNA
cacccctcaccagtggatgt

SEQ ID NO: 1372 - RNA, 20 nt, synthetic construct
  misc_feature 1..20: note = C9Orf72 ATCN PAM targeting sequence
  source 1..20: mol_type = other RNA
actggtgaggggtgggatgc

SEQ ID NO: 1373 - RNA, 20 nt, synthetic construct
  misc_feature 1..20: note = C9Orf72 ATCN PAM targeting sequence
  source 1..20: mol_type = other RNA
tggagagcagcagagtccac

SEQ ID NO: 1374 - RNA, 20 nt, synthetic construct
  misc_feature 1..20: note = C9Orf72 ATCN PAM targeting sequence
  source 1..20: mol_type = other RNA
agtggtccatgggccaaaag

SEQ ID NO: 1375 - RNA, 20 nt, synthetic construct
  misc_feature 1..20: note = C9Orf72 ATCN PAM targeting sequence
  source 1..20: mol_type = other RNA
gaagagttgtatttccagca

SEQ ID NO: 1376 - RNA, 20 nt, synthetic construct
  misc_feature 1..20: note = C9Orf72 ATCN PAM targeting sequence
  source 1..20: mol_type = other RNA
ttattgggaatatacaacat

SEQ ID NO: 1377 - RNA, 20 nt, synthetic construct
  misc_feature 1..20: note = C9Orf72 ATCN PAM targeting sequence
  source 1..20: mol_type = other RNA
atttacttaacgaccagtct

SEQ ID NO: 1378 - RNA, 20 nt, synthetic construct
  misc_feature 1..20: note = C9Orf72 ATCN PAM targeting sequence
  source 1..20: mol_type = other RNA
gagatcagactgcccgattt

SEQ ID NO: 1379 - RNA, 20 nt, synthetic construct
  misc_feature 1..20: note = C9Orf72 ATCN PAM targeting sequence
  source 1..20: mol_type = other RNA
cagatccatttacttaacga

SEQ ID NO: 1380 - RNA, 20 nt, synthetic construct
  misc_feature 1..20: note = C9Orf72 ATCN PAM targeting sequence
  source 1..20: mol_type = other RNA
gactgcccgattttgactcc

SEQ ID NO: 1381 - RNA, 20 nt, synthetic construct
  misc_feature 1..20: note = C9Orf72 ATCN PAM targeting sequence
  source 1..20: mol_type = other RNA
ggcagtctgatctcagatcc

SEQ ID NO: 1382 - RNA, 20 nt, synthetic construct
  misc_feature 1..20: note = C9Orf72 ATCN PAM targeting sequence
  source 1..20: mol_type = other RNA
accatttctagagtgtgggc

SEQ ID NO: 1383 - RNA, 20 nt, synthetic construct
  misc_feature 1..20: note = C9Orf72 ATCN PAM targeting sequence
  source 1..20: mol_type = other RNA
cattgctcaacgttagcttc

SEQ ID NO: 1384 - RNA, 20 nt, synthetic construct
  misc_feature 1..20: note = C9Orf72 ATCN PAM targeting sequence
  source 1..20: mol_type = other RNA
ccattttacagaaatggaag

SEQ ID NO: 1385 - RNA, 20 nt, synthetic construct
  misc_feature 1..20: note = C9Orf72 ATCN PAM targeting sequence
  source 1..20: mol_type = other RNA
atctcaaagggctgccatga

SEQ ID NO: 1386 - RNA, 20 nt, synthetic construct
  misc_feature 1..20: note = C9Orf72 ATCN PAM targeting sequence
  source 1..20: mol_type = other RNA
caaagggctgccatgagagt

SEQ ID NO: 1387 - RNA, 20 nt, synthetic construct
  misc_feature 1..20: note = C9Orf72 ATCN PAM targeting sequence
  source 1..20: mol_type = other RNA
aaataaagcatttgatatag

SEQ ID NO: 1388 - RNA, 20 nt, synthetic construct
  misc_feature 1..20: note = C9Orf72 ATCN PAM targeting sequence
  source 1..20: mol_type = other RNA
aatgctttatttggataatg

SEQ ID NO: 1389 - RNA, 20 nt, synthetic construct
  misc_feature 1..20: note = C9Orf72 ATCN PAM targeting sequence
  source 1..20: mol_type = other RNA
ctaacatcatgctttcttga

SEQ ID NO: 1390 - RNA, 20 nt, synthetic construct
  misc_feature 1..20: note = C9Orf72 ATCN PAM targeting sequence
  source 1..20: mol_type = other RNA
tgctttcttgaacttactca

SEQ ID NO: 1391 - RNA, 20 nt, synthetic construct
  misc_feature 1..20: note = C9Orf72 ATCN PAM targeting sequence
  source 1..20: mol_type = other RNA
agaaggagggagacatatgt

SEQ ID NO: 1392 - RNA, 20 nt, synthetic construct
  misc_feature 1..20: note = C9Orf72 ATCN PAM targeting sequence
  source 1..20: mol_type = other RNA
gcttttcaggagttccctat

SEQ ID NO: 1393 - RNA, 20 nt, synthetic construct
  misc_feature 1..20: note = C9Orf72 ATCN PAM targeting sequence
  source 1..20: mol_type = other RNA
cacaggctgctacgttccct

SEQ ID NO: 1394 - RNA, 20 nt, synthetic construct
  misc_feature 1..20: note = C9Orf72 ATCN PAM targeting sequence
  source 1..20: mol_type = other RNA
tgcaaggtataacccactaa

SEQ ID NO: 1395 - RNA, 20 nt, synthetic construct
  misc_feature 1..20: note = C9Orf72 ATCN PAM targeting sequence
  source 1..20: mol_type = other RNA
ccacaatcctgcaaggtata

SEQ ID NO: 1396 - RNA, 20 nt, synthetic construct
  misc_feature 1..20: note = C9Orf72 ATCN PAM targeting sequence
  source 1..20: mol_type = other RNA
actaagacagtaggtgaaga

SEQ ID NO: 1397 - RNA, 20 nt, synthetic construct
  misc_feature 1..20: note = C9Orf72 ATCN PAM targeting sequence
  source 1..20: mol_type = other RNA
tcccgagtccaagggtgctt

SEQ ID NO: 1398 - RNA, 20 nt, synthetic construct
  misc_feature 1..20: note = C9Orf72 ATCN PAM targeting sequence
  source 1..20: mol_type = other RNA
cgagtccaagggtgcttttt

SEQ ID NO: 1399 - RNA, 20 nt, synthetic construct
  misc_feature 1..20: note = C9Orf72 ATCN PAM targeting sequence
  source 1..20: mol_type = other RNA
taatcctgatgtttttatgt

SEQ ID NO: 1400 - RNA, 20 nt, synthetic construct
  misc_feature 1..20: note = C9Orf72 ATCN PAM targeting sequence
  source 1..20: mol_type = other RNA
tgatgtttttatgtaaccac

SEQ ID NO: 1401 - RNA, 20 nt, synthetic construct
  misc_feature 1..20: note = C9Orf72 ATCN PAM targeting sequence
  source 1..20: mol_type = other RNA
ggattaagatatttggtatt

SEQ ID NO: 1402 - RNA, 20 nt, synthetic construct
  misc_feature 1..20: note = C9Orf72 ATCN PAM targeting sequence
  source 1..20: mol_type = other RNA
aagagaaaaatcttctcata

SEQ ID NO: 1403 - RNA, 20 nt, synthetic construct
  misc_feature 1..20: note = C9Orf72 ATCN PAM targeting sequence
  source 1..20: mol_type = other RNA
tctcatagtttctaatccaa

SEQ ID NO: 1404 - RNA, 20 nt, synthetic construct
  misc_feature 1..20: note = C9Orf72 ATCN PAM targeting sequence
  source 1..20: mol_type = other RNA
aacttgcatggaaatagtta

SEQ ID NO: 1405 - RNA, 20 nt, synthetic construct
  misc_feature 1..20: note = C9Orf72 ATCN PAM targeting sequence
  source 1..20: mol_type = other RNA
tgcaaaagagtgaagggtgt

SEQ ID NO: 1406 - RNA, 20 nt, synthetic construct
  misc_feature 1..20: note = C9Orf72 ATCN PAM targeting sequence
  source 1..20: mol_type = other RNA
gccacaggcgcagggctgag

SEQ ID NO: 1407 - RNA, 20 nt, synthetic construct
  misc_feature 1..20: note = C9Orf72 ATCN PAM targeting sequence
  source 1..20: mol_type = other RNA
actgacttctttttcattta

SEQ ID NO: 1408 - RNA, 20 nt, synthetic construct
  misc_feature 1..20: note = C9Orf72 ATCN PAM targeting sequence
  source 1..20: mol_type = other RNA
taaatgaaaaagaagtcagt

SEQ ID NO: 1409 - RNA, 20 nt, synthetic construct
  misc_feature 1..20: note = C9Orf72 ATCN PAM targeting sequence
  source 1..20: mol_type = other RNA
atacgtcttgttaggtaagc

SEQ ID NO: 1410 - RNA, 20 nt, synthetic construct
  misc_feature 1..20: note = C9Orf72 ATCN PAM targeting sequence
  source 1..20: mol_type = other RNA
actggaggcttacctaacaa

SEQ ID NO: 1411 - RNA, 20 nt, synthetic construct
  misc_feature 1..20: note = C9Orf72 ATCN PAM targeting sequence
  source 1..20: mol_type = other RNA
gaagaggaaaaacagaaaca

SEQ ID NO: 1412 - RNA, 20 nt, synthetic construct
  misc_feature 1..20: note = C9Orf72 ATCN PAM targeting sequence
  source 1..20: mol_type = other RNA
gcccagcaagagaccaaaac

SEQ ID NO: 1413 - RNA, 20 nt, synthetic construct
  misc_feature 1..20: note = C9Orf72 ATCN PAM targeting sequence
  source 1..20: mol_type = other RNA
ggtaaaagctcccactctat

SEQ ID NO: 1414 - RNA, 20 nt, synthetic construct
  misc_feature 1..20: note = C9Orf72 ATCN PAM targeting sequence
  source 1..20: mol_type = other RNA
aacactgtttaaactcaggg

SEQ ID NO: 1415 - RNA, 20 nt, synthetic construct
  misc_feature 1..20: note = C9Orf72 ATCN PAM targeting sequence
  source 1..20: mol_type = other RNA
ggtgcttatataaaatcaaa

SEQ ID NO: 1416 - RNA, 20 nt, synthetic construct
  misc_feature 1..20: note = C9Orf72 ATCN PAM targeting sequence
  source 1..20: mol_type = other RNA
tctggtgcttatataaaatc

SEQ ID NO: 1417 - RNA, 20 nt, synthetic construct
  misc_feature 1..20: note = C9Orf72 ATCN PAM targeting sequence
  source 1..20: mol_type = other RNA
tccaccacctttttccaaaa

SEQ ID NO: 1418 - RNA, 20 nt, synthetic construct
  misc_feature 1..20: note = C9Orf72 ATCN PAM targeting sequence
  source 1..20: mol_type = other RNA
gagtttttatggaatcctcc

SEQ ID NO: 1419 - RNA, 20 nt, synthetic construct
  misc_feature 1..20: note = C9Orf72 ATCN PAM targeting sequence
  source 1..20: mol_type = other RNA
tttcttctaccaactttagt

SEQ ID NO: 1420 - RNA, 20 nt, synthetic construct
  misc_feature 1..20: note = C9Orf72 ATCN PAM targeting sequence
  source 1..20: mol_type = other RNA
aaaagtcactttggtgcatc

SEQ ID NO: 1421 - RNA, 20 nt, synthetic construct
  misc_feature 1..20: note = C9Orf72 ATCN PAM targeting sequence
  source 1..20: mol_type = other RNA
caaatgcacgtctttacata

SEQ ID NO: 1422 - RNA, 20 nt, synthetic construct
  misc_feature 1..20: note = C9Orf72 ATCN PAM targeting sequence
  source 1..20: mol_type = other RNA
gttatgtaaagacgtgcatt

SEQ ID NO: 1423 - RNA, 20 nt, synthetic construct
  misc_feature 1..20: note = C9Orf72 ATCN PAM targeting sequence
  source 1..20: mol_type = other RNA
agatacaaaccatttgcaaa

SEQ ID NO: 1424 - RNA, 20 nt, synthetic construct
  misc_feature 1..20: note = C9Orf72 ATCN PAM targeting sequence
  source 1..20: mol_type = other RNA
tgatcagttatgtaaagacg

SEQ ID NO: 1425 - RNA, 20 nt, synthetic construct
  misc_feature 1..20: note = C9Orf72 ATCN PAM targeting sequence
  source 1..20: mol_type = other RNA
cagatagctattccaactca

SEQ ID NO: 1426 - RNA, 20 nt, synthetic construct
  misc_feature 1..20: note = C9Orf72 ATCN PAM targeting sequence
  source 1..20: mol_type = other RNA
gtgatttaaaacataaatgt

SEQ ID NO: 1427 - RNA, 20 nt, synthetic construct
  misc_feature 1..20: note = C9Orf72 ATCN PAM targeting sequence
  source 1..20: mol_type = other RNA
ctgagttggaatagctatct

SEQ ID NO: 1428 - RNA, 20 nt, synthetic construct
  misc_feature 1..20: note = C9Orf72 ATCN PAM targeting sequence
  source 1..20: mol_type = other RNA
cttaaaatctctgagttgga

SEQ ID NO: 1429 - RNA, 20 nt, synthetic construct
  misc_feature 1..20: note = C9Orf72 ATCN PAM targeting sequence
  source 1..20: mol_type = other RNA
gggctccttggccatactac

SEQ ID NO: 1430 - RNA, 20 nt, synthetic construct
  misc_feature 1..20: note = C9Orf72 ATCN PAM targeting sequence
  source 1..20: mol_type = other RNA
aagtgtagtggcctttcaaa

SEQ ID NO: 1431 - RNA, 20 nt, synthetic construct
  misc_feature 1..20: note = C9Orf72 ATCN PAM targeting sequence
  source 1..20: mol_type = other RNA
agagagctgagctcgctgtc

SEQ ID NO: 1432 - RNA, 20 nt, synthetic construct
  misc_feature 1..20: note = C9Orf72 ATCN PAM targeting sequence
  source 1..20: mol_type = other RNA
agcggagtaatcttgtgaaa

SEQ ID NO: 1433 - RNA, 20 nt, synthetic construct
  misc_feature 1..20: note = C9Orf72 ATCN PAM targeting sequence
  source 1..20: mol_type = other RNA
tgtgaaatgtgagtacaatc

SEQ ID NO: 1434 - RNA, 20 nt, synthetic construct
  misc_feature 1..20: note = C9Orf72 ATCN PAM targeting sequence
  source 1..20: mol_type = other RNA
gcccagtgtctgagggaggc

SEQ ID NO: 1435 - RNA, 20 nt, synthetic construct
  misc_feature 1..20: note = C9Orf72 ATCN PAM targeting sequence
  source 1..20: mol_type = other RNA
tgcctcctgcctgtgccctc

SEQ ID NO: 1436 - RNA, 20 nt, synthetic construct
  misc_feature 1..20: note = C9Orf72 ATCN PAM targeting sequence
  source 1..20: mol_type = other RNA
tggccttcacggtgcccagg

SEQ ID NO: 1437 - RNA, 20 nt, synthetic construct
  misc_feature 1..20: note = C9Orf72 ATCN PAM targeting sequence
  source 1..20: mol_type = other RNA
acatcaaggagggccatggg

SEQ ID NO: 1438 - RNA, 20 nt, synthetic construct
  misc_feature 1..20: note = C9Orf72 ATCN PAM targeting sequence
  source 1..20: mol_type = other RNA
aggagggccatgggcctctg

SEQ ID NO: 1439 - RNA, 20 nt, synthetic construct
  misc_feature 1..20: note = C9Orf72 ATCN PAM targeting sequence
  source 1..20: mol_type = other RNA
agcaccttctccaaccaaga

SEQ ID NO: 1440 - RNA, 20 nt, synthetic construct
  misc_feature 1..20: note = C9Orf72 ATCN PAM targeting sequence
  source 1..20: mol_type = other RNA
cctgtttggggctgacctct

SEQ ID NO: 1441 - RNA, 20 nt, synthetic construct
  misc_feature 1..20: note = C9Orf72 ATCN PAM targeting sequence
  source 1..20: mol_type = other RNA
ccaacatcccctgtttgggg

SEQ ID NO: 1442 - RNA, 20 nt, synthetic construct
  misc_feature 1..20: note = C9Orf72 ATCN PAM targeting sequence
  source 1..20: mol_type = other RNA
agacattccctcagcttcat

SEQ ID NO: 1443 - RNA, 20 nt, synthetic construct
  misc_feature 1..20: note = C9Orf72 ATCN PAM targeting sequence
  source 1..20: mol_type = other RNA
gaggtcatgcactctcccca

SEQ ID NO: 1444 - RNA, 20 nt, synthetic construct
  misc_feature 1..20: note = C9Orf72 ATCN PAM targeting sequence
  source 1..20: mol_type = other RNA
ttcaaatggggcatctaacc

SEQ ID NO: 1445 - RNA, 20 nt, synthetic construct
  misc_feature 1..20: note = C9Orf72 ATCN PAM targeting sequence
  source 1..20: mol_type = other RNA
aacctgatagcagccacagt

SEQ ID NO: 1446 - RNA, 20 nt, synthetic construct
  misc_feature 1..20: note = C9Orf72 ATCN PAM targeting sequence
  source 1..20: mol_type = other RNA
ggttagatgccccatttgaa

SEQ ID NO: 1447 - RNA, 20 nt, synthetic construct
  misc_feature 1..20: note = C9Orf72 ATCN PAM targeting sequence
  source 1..20: mol_type = other RNA
cattggaggttagaatttga

SEQ ID NO: 1448 - RNA, 20 nt, synthetic construct
  misc_feature 1..20: note = C9Orf72 ATCN PAM targeting sequence
  source 1..20: mol_type = other RNA
tccaaaggtcccacctttta

SEQ ID NO: 1449 - RNA, 20 nt, synthetic construct
  misc_feature 1..20: note = C9Orf72 ATCN PAM targeting sequence
  source 1..20: mol_type = other RNA
cattcattagggtagagccc

SEQ ID NO: 1450 - RNA, 20 nt, synthetic construct
  misc_feature 1..20: note = C9Orf72 ATCN PAM targeting sequence
  source 1..20: mol_type = other RNA
tgctggtaccctgatattgg

SEQ ID NO: 1451 - RNA, 20 nt, synthetic construct
  misc_feature 1..20: note = C9Orf72 ATCN PAM targeting sequence
  source 1..20: mol_type = other RNA
gggtaccagcatgattgggt

SEQ ID NO: 1452 - RNA, 20 nt, synthetic construct
  misc_feature 1..20: note = C9Orf72 ATCN PAM targeting sequence
  source 1..20: mol_type = other RNA
aatatcagggtaccagcatg

SEQ ID NO: 1453 - RNA, 20 nt, synthetic construct
  misc_feature 1..20: note = C9Orf72 ATCN PAM targeting sequence
  source 1..20: mol_type = other RNA
atttctcatagttctggaag

SEQ ID NO: 1454 - RNA, 20 nt, synthetic construct
  misc_feature 1..20: note = C9Orf72 ATCN PAM targeting sequence
  source 1..20: mol_type = other RNA
tgttacaggtagcctgtaag

SEQ ID NO: 1455 - RNA, 20 nt, synthetic construct
  misc_feature 1..20: note = C9Orf72 ATCN PAM targeting sequence
  source 1..20: mol_type = other RNA
gtgtgtcttacaggctacct

SEQ ID NO: 1456 - RNA, 20 nt, synthetic construct
  misc_feature 1..20: note = C9Orf72 ATCN PAM targeting sequence
  source 1..20: mol_type = other RNA
tgtaaatatctgtgtgtctt

SEQ ID NO: 1457 - RNA, 20 nt, synthetic construct
  misc_feature 1..20: note = C9Orf72 ATCN PAM targeting sequence
  source 1..20: mol_type = other RNA
catttttattatagtctagg

SEQ ID NO: 1458 - RNA, 20 nt, synthetic construct
  misc_feature 1..20: note = C9Orf72 ATCN PAM targeting sequence
  source 1..20: mol_type = other RNA
ccttcccatacaaggcttta

SEQ ID NO: 1459 - RNA, 20 nt, synthetic construct
  misc_feature 1..20: note = C9Orf72 ATCN PAM targeting sequence
  source 1..20: mol_type = other RNA
ctattactttatctccttcc

SEQ ID NO: 1460 - RNA, 20 nt, synthetic construct
  misc_feature 1..20: note = C9Orf72 ATCN PAM targeting sequence
  source 1..20: mol_type = other RNA
agtaaacacaaatgggtcct

SEQ ID NO: 1461 - RNA, 20 nt, synthetic construct
  misc_feature 1..20: note = C9Orf72 ATCN PAM targeting sequence
  source 1..20: mol_type = other RNA
tcagaactcatgagcttctg

SEQ ID NO: 1462 - RNA, 20 nt, synthetic construct
  misc_feature 1..20: note = C9Orf72 ATCN PAM targeting sequence
  source 1..20: mol_type = other RNA
tgggcccaaactgactcctt

SEQ ID NO: 1463 - RNA, 20 nt, synthetic construct
  misc_feature 1..20: note = C9Orf72 ATCN PAM targeting sequence
  source 1..20: mol_type = other RNA
ctggtataaggagtcagttt

SEQ ID NO: 1464 - RNA, 20 nt, synthetic construct
  misc_feature 1..20: note = C9Orf72 ATCN PAM targeting sequence
  source 1..20: mol_type = other RNA
aggctggctgaataaacctt

SEQ ID NO: 1465 - RNA, 20 nt, synthetic construct
  misc_feature 1..20: note = C9Orf72 ATCN PAM targeting sequence
  source 1..20: mol_type = other RNA
aggtcatcataccctagaat

SEQ ID NO: 1466 - RNA, 20 nt, synthetic construct
  misc_feature 1..20: note = C9Orf72 ATCN PAM targeting sequence
  source 1..20: mol_type = other RNA
taccctagaatagtcaccat

SEQ ID NO: 1467 - RNA, 20 nt, synthetic construct
  misc_feature 1..20: note = C9Orf72 ATCN PAM targeting sequence
  source 1..20: mol_type = other RNA
tggtgactattctagggtat

SEQ ID NO: 1468 - RNA, 20 nt, synthetic construct
  misc_feature 1..20: note = C9Orf72 ATCN PAM targeting sequence
  source 1..20: mol_type = other RNA
gcaggcacatgcatcatggt

SEQ ID NO: 1469 - RNA, 20 nt, synthetic construct
  misc_feature 1..20: note = C9Orf72 ATCN PAM targeting sequence
  source 1..20: mol_type = other RNA
ttcctgttgcaagacacata

SEQ ID NO: 1470 - RNA, 20 nt, synthetic construct
  misc_feature 1..20: note = C9Orf72 ATCN PAM targeting sequence
  source 1..20: mol_type = other RNA
ggaaaggctctttgaggagc

SEQ ID NO: 1471 - RNA, 20 nt, synthetic construct
  misc_feature 1..20: note = C9Orf72 ATCN PAM targeting sequence
  source 1..20: mol_type = other RNA
aaacaaactttgaaatctag

SEQ ID NO: 1472 - RNA, 20 nt, synthetic construct
  misc_feature 1..20: note = C9Orf72 ATCN PAM targeting sequence
  source 1..20: mol_type = other RNA
agaatgaagattttgaaaag

SEQ ID NO: 1473 - RNA, 20 nt, synthetic construct
  misc_feature 1..20: note = C9Orf72 ATCN PAM targeting sequence
  source 1..20: mol_type = other RNA
tcattctagatttcaaagtt

SEQ ID NO: 1474 - RNA, 20 nt, synthetic construct
  misc_feature 1..20: note = C9Orf72 ATCN PAM targeting sequence
  source 1..20: mol_type = other RNA
actgttatatatgaaatgtt

SEQ ID NO: 1475 - RNA, 20 nt, synthetic construct
  misc_feature 1..20: note = C9Orf72 ATCN PAM targeting sequence
  source 1..20: mol_type = other RNA
atcaaaacacaaatgtattg

SEQ ID NO: 1476 - RNA, 20 nt, synthetic construct
  misc_feature 1..20: note = C9Orf72 ATCN PAM targeting sequence
  source 1..20: mol_type = other RNA
aaacacaaatgtattgggtt

SEQ ID NO: 1477 - RNA, 20 nt, synthetic construct
  misc_feature 1..20: note = C9Orf72 ATCN PAM targeting sequence
  source 1..20: mol_type = other RNA
gcctggcaccataacccaat

SEQ ID NO: 1478 - RNA, 20 nt, synthetic construct
  misc_feature 1..20: note = C9Orf72 ATCN PAM targeting sequence
  source 1..20: mol_type = other RNA
ctaggagccaccttagaaat

SEQ ID NO: 1479 - RNA, 20 nt, synthetic construct
  misc_feature 1..20: note = C9Orf72 ATCN PAM targeting sequence
  source 1..20: mol_type = other RNA
ctgtctcctggcatccatgc

SEQ ID NO: 1480 - RNA, 20 nt, synthetic construct
  misc_feature 1..20: note = C9Orf72 ATCN PAM targeting sequence
  source 1..20: mol_type = other RNA
atgcttttgtataatgctct

SEQ ID NO: 1481 - RNA, 20 nt, synthetic construct
  misc_feature 1..20: note = C9Orf72 ATCN PAM targeting sequence
  source 1..20: mol_type = other RNA
gagcattatacaaaagcatg

SEQ ID NO: 1482 - RNA, 20 nt, synthetic construct
  misc_feature 1..20: note = C9Orf72 ATCN PAM targeting sequence
  source 1..20: mol_type = other RNA
cttttgctgtattctgttca

SEQ ID NO: 1483 - RNA, 20 nt, synthetic construct
  misc_feature 1..20: note = C9Orf72 ATCN PAM targeting sequence
  source 1..20: mol_type = other RNA
cagaagagtgccccatccct

SEQ ID NO: 1484 - RNA, 20 nt, synthetic construct
  misc_feature 1..20: note = C9Orf72 ATCN PAM targeting sequence
  source 1..20: mol_type = other RNA
aagcgagagcaagagtgtgt

SEQ ID NO: 1485 - RNA, 20 nt, synthetic construct
  misc_feature 1..20: note = C9Orf72 ATCN PAM targeting sequence
  source 1..20: mol_type = other RNA
tcaaagcgagagcaagagtg

SEQ ID NO: 1486 - RNA, 20 nt, synthetic construct
  misc_feature 1..20: note = C9Orf72 ATCN PAM targeting sequence
  source 1..20: mol_type = other RNA
tggtgaactgttggcctgag

SEQ ID NO: 1487 - RNA, 20 nt, synthetic construct
  misc_feature 1..20: note = C9Orf72 ATCN PAM targeting sequence
  source 1..20: mol_type = other RNA
gaatcctgccaatgaccact

SEQ ID NO: 1488 - RNA, 20 nt, synthetic construct
  misc_feature 1..20: note = C9Orf72 ATCN PAM targeting sequence
  source 1..20: mol_type = other RNA
tgccaatgaccactgagtaa

SEQ ID NO: 1489 - RNA, 20 nt, synthetic construct
  misc_feature 1..20: note = C9Orf72 ATCN PAM targeting sequence
  source 1..20: mol_type = other RNA
aggtttgactgggaaggagc

SEQ ID NO: 1490 - RNA, 20 nt, synthetic construct
  misc_feature 1..20: note = C9Orf72 ATCN PAM targeting sequence
  source 1..20: mol_type = other RNA
ctcccaaggctgaggctgca

SEQ ID NO: 1491 - RNA, 20 nt, synthetic construct
  misc_feature 1..20: note = C9Orf72 ATCN PAM targeting sequence
  source 1..20: mol_type = other RNA
tgaaccggagaacccagcta

SEQ ID NO: 1492 - RNA, 20 nt, synthetic construct
  misc_feature 1..20: note = C9Orf72 ATCN PAM targeting sequence
  source 1..20: mol_type = other RNA
cgcagtttttttgggtcagc

SEQ ID NO: 1493 - RNA, 20 nt, synthetic construct
  misc_feature 1..20: note = C9Orf72 ATCN PAM targeting sequence
  source 1..20: mol_type = other RNA
cctccaatgcagtggtttaa

SEQ ID NO: 1494 - RNA, 20 nt, synthetic construct
  misc_feature 1..20: note = C9Orf72 ATCN PAM targeting sequence
  source 1..20: mol_type = other RNA
attgcttcataacagaatcc

SEQ ID NO: 1495 - RNA, 20 nt, synthetic construct
  misc_feature 1..20: note = C9Orf72 ATCN PAM targeting sequence
  source 1..20: mol_type = other RNA
tacagctgtttaagcctcat

SEQ ID NO: 1496 - RNA, 20 nt, synthetic construct
  misc_feature 1..20: note = C9Orf72 ATCN PAM targeting sequence
  source 1..20: mol_type = other RNA
catacaaaaggaaacaacca

SEQ ID NO: 1497 - RNA, 20 nt, synthetic construct
  misc_feature 1..20: note = C9Orf72 ATCN PAM targeting sequence
  source 1..20: mol_type = other RNA
atgaatggacttttggttgt

SEQ ID NO: 1498 - RNA, 20 nt, synthetic construct
  misc_feature 1..20: note = C9Orf72 ATCN PAM targeting sequence
  source 1..20: mol_type = other RNA
agaatggcatatccacataa

SEQ ID NO: 1499 - RNA, 20 nt, synthetic construct
  misc_feature 1..20: note = C9Orf72 ATCN PAM targeting sequence
  source 1..20: mol_type = other RNA
acataagaaatattgggcag

SEQ ID NO: 1500 - RNA, 20 nt, synthetic construct
  misc_feature 1..20: note = C9Orf72 ATCN PAM targeting sequence
  source 1..20: mol_type = other RNA
gtattgatatgaaaagaagt

SEQ ID NO: 1501 - RNA, 20 nt, synthetic construct
  misc_feature 1..20: note = C9Orf72 ATCN PAM targeting sequence
  source 1..20: mol_type = other RNA
atacagatatattgacctcc

SEQ ID NO: 1502 - RNA, 20 nt, synthetic construct
  misc_feature 1..20: note = C9Orf72 ATCN PAM targeting sequence
  source 1..20: mol_type = other RNA
aaaagcaaattgcaaaacaa

SEQ ID NO: 1503 - RNA, 20 nt, synthetic construct
  misc_feature 1..20: note = C9Orf72 ATCN PAM targeting sequence
  source 1..20: mol_type = other RNA
gccattttttaaaagtcaca

SEQ ID NO: 1504 - RNA, 20 nt, synthetic construct
  misc_feature 1..20: note = C9Orf72 ATCN PAM targeting sequence
  source 1..20: mol_type = other RNA
acatccattcctgtaaactc

SEQ ID NO: 1505 - RNA, 20 nt, synthetic construct
  misc_feature 1..20: note = C9Orf72 ATCN PAM targeting sequence
  source 1..20: mol_type = other RNA
attcctgtaaactccagata

SEQ ID NO: 1506 - RNA, 20 nt, synthetic construct
  misc_feature 1..20: note = C9Orf72 ATCN PAM targeting sequence
  source 1..20: mol_type = other RNA
ggagtttacaggaatggatg

SEQ ID NO: 1507 - RNA, 20 nt, synthetic construct
  misc_feature 1..20: note = C9Orf72 ATCN PAM targeting sequence
  source 1..20: mol_type = other RNA
atttgaaagtatatcattta

SEQ ID NO: 1508 - RNA, 20 nt, synthetic construct
  misc_feature 1..20: note = C9Orf72 ATCN PAM targeting sequence
  source 1..20: mol_type = other RNA
tttacttcaaattgccaaca

SEQ ID NO: 1509 - RNA, 20 nt, synthetic construct
  misc_feature 1..20: note = C9Orf72 ATCN PAM targeting sequence
  source 1..20: mol_type = other RNA
caaactcctcacaccctcca

SEQ ID NO: 1510 - RNA, 20 nt, synthetic construct
  misc_feature 1..20: note = C9Orf72 ATCN PAM targeting sequence
  source 1..20: mol_type = other RNA
ggtggtgtggacaagagtag

SEQ ID NO: 1511 - RNA, 20 nt, synthetic construct
  misc_feature 1..20: note = C9Orf72 ATCN PAM targeting sequence
  source 1..20: mol_type = other RNA
ttaaagtaccactctggctc

SEQ ID NO: 1512 - RNA, 20 nt, synthetic construct
  misc_feature 1..20: note = C9Orf72 ATCN PAM targeting sequence
  source 1..20: mol_type = other RNA
ggccactgccctcttcaagc

SEQ ID NO: 1513 - RNA, 20 nt, synthetic construct
  misc_feature 1..20: note = C9Orf72 ATCN PAM targeting sequence
  source 1..20: mol_type = other RNA
cactcagaataaaaacaaat

SEQ ID NO: 1514 - RNA, 20 nt, synthetic construct
  misc_feature 1..20: note = C9Orf72 ATCN PAM targeting sequence
  source 1..20: mol_type = other RNA
tgactttgtaaaccaatata

SEQ ID NO: 1515 - RNA, 20 nt, synthetic construct
  misc_feature 1..20: note = C9Orf72 ATCN PAM targeting sequence
  source 1..20: mol_type = other RNA
acagatctggcccctggata

SEQ ID NO: 1516 - RNA, 20 nt, synthetic construct
  misc_feature 1..20: note = C9Orf72 ATCN PAM targeting sequence
  source 1..20: mol_type = other RNA
gtagatcatgactttgtaaa

SEQ ID NO: 1517 - RNA, 20 nt, synthetic construct
  misc_feature 1..20: note = C9Orf72 ATCN PAM targeting sequence
  source 1..20: mol_type = other RNA
ggcccctggatacctctcct

SEQ ID NO: 1518 - RNA, 20 nt, synthetic construct
  misc_feature 1..20: note = C9Orf72 ATCN PAM targeting sequence
  source 1..20: mol_type = other RNA
aggggccagatctgtagatc

SEQ ID NO: 1519 - RNA, 20 nt, synthetic construct
  misc_feature 1..20: note = C9Orf72 ATCN PAM targeting sequence
  source 1..20: mol_type = other RNA
taggggaaggagaggtatcc

SEQ ID NO: 1520 - RNA, 20 nt, synthetic construct
  misc_feature 1..20: note = C9Orf72 ATCN PAM targeting sequence
  source 1..20: mol_type = other RNA
gctctatccacagtggcctc

SEQ ID NO: 1521 - RNA, 20 nt, synthetic construct
  misc_feature 1..20: note = C9Orf72 ATCN PAM targeting sequence
  source 1..20: mol_type = other RNA
acagtggcctccctgatgtt

SEQ ID NO: 1522 - RNA, 20 nt, synthetic construct
  misc_feature 1..20: note = C9Orf72 ATCN PAM targeting sequence
  source 1..20: mol_type = other RNA
gggaggccactgtggataga

SEQ ID NO: 1523 - RNA, 20 nt, synthetic construct
  misc_feature 1..20: note = C9Orf72 ATCN PAM targeting sequence
  source 1..20: mol_type = other RNA
cttcaaggctgtattagttt

SEQ ID NO: 1524 - RNA, 20 nt, synthetic construct
  misc_feature 1..20: note = C9Orf72 ATCN PAM targeting sequence
  source 1..20: mol_type = other RNA
gaaatcaaggtgttggctgg

SEQ ID NO: 1525 - RNA, 20 nt, synthetic construct
  misc_feature 1..20: note = C9Orf72 ATCN PAM targeting sequence
  source 1..20: mol_type = other RNA
aggtgttggctgggcaatgc

SEQ ID NO: 1526 - RNA, 20 nt, synthetic construct
  misc_feature 1..20: note = C9Orf72 ATCN PAM targeting sequence
  source 1..20: mol_type = other RNA
gtttcatgtttccgtctttg

SEQ ID NO: 1527 - RNA, 20 nt, synthetic construct
  misc_feature 1..20: note = C9Orf72 ATCN PAM targeting sequence
  source 1..20: mol_type = other RNA
tcagtgttccttggcttgta

SEQ ID NO: 1528 - RNA, 20 nt, synthetic construct
  misc_feature 1..20: note = C9Orf72 ATCN PAM targeting sequence
  source 1..20: mol_type = other RNA
ctaccttcatcttcacaagt

SEQ ID NO: 1529 - RNA, 20 nt, synthetic construct
  misc_feature 1..20: note = C9Orf72 ATCN PAM targeting sequence
  source 1..20: mol_type = other RNA
tcacaagttatccttcctgt

SEQ ID NO: 1530 - RNA, 20 nt, synthetic construct
  misc_feature 1..20: note = C9Orf72 ATCN PAM targeting sequence
  source 1..20: mol_type = other RNA
ttcctgtgtgtatgtctatc

SEQ ID NO: 1531 - RNA, 20 nt, synthetic construct
  misc_feature 1..20: note = C9Orf72 ATCN PAM targeting sequence
  source 1..20: mol_type = other RNA
ccaaattttccctttttatg

SEQ ID NO: 1532 - RNA, 20 nt, synthetic construct
  misc_feature 1..20: note = C9Orf72 ATCN PAM targeting sequence
  source 1..20: mol_type = other RNA
tcataaaaagggaaaatttg

SEQ ID NO: 1533 - RNA, 20 nt, synthetic construct
  misc_feature 1..20: note = C9Orf72 ATCN PAM targeting sequence
  source 1..20: mol_type = other RNA
aaaatgactgctatcctcat

SEQ ID NO: 1534 - RNA, 20 nt, synthetic construct
  misc_feature 1..20: note = C9Orf72 ATCN PAM targeting sequence
  source 1..20: mol_type = other RNA
gttaacatgaggtcatactg

SEQ ID NO: 1535 - RNA, 20 nt, synthetic construct
  misc_feature 1..20: note = C9Orf72 ATCN PAM targeting sequence
  source 1..20: mol_type = other RNA
caaattcatatgtagaattc

SEQ ID NO: 1536 - RNA, 20 nt, synthetic construct
  misc_feature 1..20: note = C9Orf72 ATCN PAM targeting sequence
  source 1..20: mol_type = other RNA
ctgtcccctcttcctgaaaa

SEQ ID NO: 1537 - RNA, 20 nt, synthetic construct
  misc_feature 1..20: note = C9Orf72 ATCN PAM targeting sequence
  source 1..20: mol_type = other RNA
aacttacaaggagtattact

SEQ ID NO: 1538 - RNA, 20 nt, synthetic construct
  misc_feature 1..20: note = C9Orf72 ATCN PAM targeting sequence
  source 1..20: mol_type = other RNA
atctctgcatttgtgctgaa

SEQ ID NO: 1539 - RNA, 20 nt, synthetic construct
  misc_feature 1..20: note = C9Orf72 ATCN PAM targeting sequence
  source 1..20: mol_type = other RNA
ctgcatttgtgctgaagcca

SEQ ID NO: 1540 - RNA, 20 nt, synthetic construct
  misc_feature 1..20: note = C9Orf72 ATCN PAM targeting sequence
  source 1..20: mol_type = other RNA
aggagtagcctgtgagaaat

SEQ ID NO: 1541 - RNA, 20 nt, synthetic construct
  misc_feature 1..20: note = C9Orf72 ATCN PAM targeting sequence
  source 1..20: mol_type = other RNA
ctatgcctgccatgctcagt

SEQ ID NO: 1542 - RNA, 20 nt, synthetic construct
  misc_feature 1..20: note = C9Orf72 ATCN PAM targeting sequence
  source 1..20: mol_type = other RNA
cccaggaataggtttgcatc

SEQ ID NO: 1543 - RNA, 20 nt, synthetic construct
  misc_feature 1..20: note = C9Orf72 ATCN PAM targeting sequence
  source 1..20: mol_type = other RNA
cttggaggagtctttgagtc

SEQ ID NO: 1544 - RNA, 20 nt, synthetic construct
  misc_feature 1..20: note = C9Orf72 ATCN PAM targeting sequence
  source 1..20: mol_type = other RNA
aggctctcttgaaacagcac

SEQ ID NO: 1545 - RNA, 20 nt, synthetic construct
  misc_feature 1..20: note = C9Orf72 ATCN PAM targeting sequence
  source 1..20: mol_type = other RNA
tacagggctgtgctgtttca

SEQ ID NO: 1546 - RNA, 20 nt, synthetic construct
  misc_feature 1..20: note = C9Orf72 ATCN PAM targeting sequence
  source 1..20: mol_type = other RNA
caatcagaggagtctcccga

SEQ ID NO: 1547 - RNA, 20 nt, synthetic construct
  misc_feature 1..20: note = C9Orf72 ATCN PAM targeting sequence
  source 1..20: mol_type = other RNA
gaggagtctcccgagctccc

SEQ ID NO: 1548 - RNA, 20 nt, synthetic construct
  misc_feature 1..20: note = C9Orf72 ATCN PAM targeting sequence
  source 1..20: mol_type = other RNA
tggaattcttaatgttattt

SEQ ID NO: 1549 - RNA, 20 nt, synthetic construct
  misc_feature 1..20: note = C9Orf72 ATCN PAM targeting sequence
  source 1..20: mol_type = other RNA
cttgcatagccaatcctgcc

SEQ ID NO: 1550 - RNA, 20 nt, synthetic construct
  misc_feature 1..20: note = C9Orf72 ATCN PAM targeting sequence
  source 1..20: mol_type = other RNA
tgccttggcgtaatgcttct

SEQ ID NO: 1551 - RNA, 20 nt, synthetic construct
  misc_feature 1..20: note = C9Orf72 ATCN PAM targeting sequence
  source 1..20: mol_type = other RNA
ggggtgtgagtccgttttct

SEQ ID NO: 1552 - RNA, 20 nt, synthetic construct
  misc_feature 1..20: note = C9Orf72 ATCN PAM targeting sequence
  source 1..20: mol_type = other RNA
tgctggtatctggggtgtga

SEQ ID NO: 1553 - RNA, 20 nt, synthetic construct
  misc_feature 1..20: note = C9Orf72 ATCN PAM targeting sequence
  source 1..20: mol_type = other RNA
ctccagctgattttactata

SEQ ID NO: 1554 - RNA, 20 nt, synthetic construct
  misc_feature 1..20: note = C9Orf72 ATCN PAM targeting sequence
  source 1..20: mol_type = other RNA
gctggagcgatgaagaaaat

SEQ ID NO: 1555 - RNA, 20 nt, synthetic construct
  misc_feature 1..20: note = C9Orf72 ATCN PAM targeting sequence
  source 1..20: mol_type = other RNA
tgttcctgactttgtcatag

SEQ ID NO: 1556 - RNA, 20 nt, synthetic construct
  misc_feature 1..20: note = C9Orf72 ATCN PAM targeting sequence
  source 1..20: mol_type = other RNA
gggtaaattcagactgacat

SEQ ID NO: 1557 - RNA, 20 nt, synthetic construct
  misc_feature 1..20: note = C9Orf72 ATCN PAM targeting sequence
  source 1..20: mol_type = other RNA
tctttcagttccaaaatata

SEQ ID NO: 1558 - RNA, 20 nt, synthetic construct
  misc_feature 1..20: note = C9Orf72 ATCN PAM targeting sequence
  source 1..20: mol_type = other RNA
caagaatgtacctcatatac

SEQ ID NO: 1559 - RNA, 20 nt, synthetic construct
  misc_feature 1..20: note = C9Orf72 ATCN PAM targeting sequence
  source 1..20: mol_type = other RNA
aaagctaaaccaataagaat

SEQ ID NO: 1560 - RNA, 20 nt, synthetic construct
  misc_feature 1..20: note = C9Orf72 ATCN PAM targeting sequence
  source 1..20: mol_type = other RNA
cccagaggggtgttgaatct

SEQ ID NO: 1561 - RNA, 20 nt, synthetic construct
  misc_feature 1..20: note = C9Orf72 ATCN PAM targeting sequence
  source 1..20: mol_type = other RNA
ggatacagctgcttaggggt

SEQ ID NO: 1562 - RNA, 20 nt, synthetic construct
  misc_feature 1..20: note = C9Orf72 ATCN PAM targeting sequence
  source 1..20: mol_type = other RNA
agattcaacacccctctggg

SEQ ID NO: 1563 - RNA, 20 nt, synthetic construct
  misc_feature 1..20: note = C9Orf72 ATCN PAM targeting sequence
  source 1..20: mol_type = other RNA
cagccctaaacccctaagca

SEQ ID NO: 1564 - RNA, 20 nt, synthetic construct
  misc_feature 1..20: note = C9Orf72 ATCN PAM targeting sequence
  source 1..20: mol_type = other RNA
taccttgcatgagccttggg

SEQ ID NO: 1565 - RNA, 20 nt, synthetic construct
  misc_feature 1..20: note = C9Orf72 ATCN PAM targeting sequence
  source 1..20: mol_type = other RNA
agtcagaattcttcaaaata

SEQ ID NO: 1566 - RNA, 20 nt, synthetic construct
  misc_feature 1..20: note = C9Orf72 ATCN PAM targeting sequence
  source 1..20: mol_type = other RNA
atttacataaaaacaggact

SEQ ID NO: 1567 - RNA, 20 nt, synthetic construct
  misc_feature 1..20: note = C9Orf72 ATCN PAM targeting sequence
  source 1..20: mol_type = other RNA
gggtgaaaaaaaatgcatcc

SEQ ID NO: 1568 - RNA, 20 nt, synthetic construct
  misc_feature 1..20: note = C9Orf72 ATCN PAM targeting sequence
  source 1..20: mol_type = other RNA
gattaaaaaaactaaataga

SEQ ID NO: 1569 - RNA, 20 nt, synthetic construct
  misc_feature 1..20: note = C9Orf72 ATCN PAM targeting sequence
  source 1..20: mol_type = other RNA
gatgcattttttttcaccct

SEQ ID NO: 1570 - RNA, 20 nt, synthetic construct
  misc_feature 1..20: note = C9Orf72 ATCN PAM targeting sequence
  source 1..20: mol_type = other RNA
tgaactaatagatcactata

SEQ ID NO: 1571 - RNA, 20 nt, synthetic construct
  misc_feature 1..20: note = C9Orf72 ATCN PAM targeting sequence
  source 1..20: mol_type = other RNA
attagttcaagatacttaca

SEQ ID NO: 1572 - RNA, 20 nt, synthetic construct
  misc_feature 1..20: note = C9Orf72 ATCN PAM targeting sequence
  source 1..20: mol_type = other RNA
ctataaaaatgttcccagaa

SEQ ID NO: 1573 - RNA, 20 nt, synthetic construct
  misc_feature 1..20: note = C9Orf72 ATCN PAM targeting sequence
  source 1..20: mol_type = other RNA
gacaggatctataagctaat

SEQ ID NO: 1574 - RNA, 20 nt, synthetic construct
  misc_feature 1..20: note = C9Orf72 ATCN PAM targeting sequence
  source 1..20: mol_type = other RNA
tgtcagattattctcttact

SEQ ID NO: 1575 - RNA, 20 nt, synthetic construct
  misc_feature 1..20: note = C9Orf72 ATCN PAM targeting sequence
  source 1..20: mol_type = other RNA
ataagctaattacgtttaaa

SEQ ID NO: 1576 - RNA, 20 nt, synthetic construct
  misc_feature 1..20: note = C9Orf72 ATCN PAM targeting sequence
  source 1..20: mol_type = other RNA
tttatgaacaaagggcaact

SEQ ID NO: 1577 - RNA, 20 nt, synthetic construct
  misc_feature 1..20: note = C9Orf72 ATCN PAM targeting sequence
  source 1..20: mol_type = other RNA
ttaagaattcaaattagttc

SEQ ID NO: 1578 - RNA, 20 nt, synthetic construct
  misc_feature 1..20: note = C9Orf72 ATCN PAM targeting sequence
  source 1..20: mol_type = other RNA
aatatgcaatttaacatgtt

SEQ ID NO: 1579 - RNA, 20 nt, synthetic construct
  misc_feature 1..20: note = C9Orf72 ATCN PAM targeting sequence
  source 1..20: mol_type = other RNA
tgaaagatgggtctaaagaa

SEQ ID NO: 1580 - RNA, 20 nt, synthetic construct
  misc_feature 1..20: note = C9Orf72 ATCN PAM targeting sequence
  source 1..20: mol_type = other RNA
ttcatgatggtaattctctt

SEQ ID NO: 1581 - RNA, 20 nt, synthetic construct
  misc_feature 1..20: note = C9Orf72 ATCN PAM targeting sequence
  source 1..20: mol_type = other RNA
cttttttctttctctgctcc

SEQ ID NO: 1582 - RNA, 20 nt, synthetic construct
  misc_feature 1..20: note = C9Orf72 ATCN PAM targeting sequence
  source 1..20: mol_type = other RNA
aaaaatgtgaaagagaggtt

SEQ ID NO: 1583 - RNA, 20 nt, synthetic construct
  misc_feature 1..20: note = C9Orf72 ATCN PAM targeting sequence
  source 1..20: mol_type = other RNA
tttcagtattgccactctca

SEQ ID NO: 1584 - RNA, 20 nt, synthetic construct
  misc_feature 1..20: note = C9Orf72 ATCN PAM targeting sequence
  source 1..20: mol_type = other RNA
agaacatatgtattgcttta

SEQ ID NO: 1585 - RNA, 20 nt, synthetic construct
  misc_feature 1..20: note = C9Orf72 ATCN PAM targeting sequence
  source 1..20: mol_type = other RNA
tgcttgggacttgtaatttt

SEQ ID NO: 1586 - RNA, 20 nt, synthetic construct
  misc_feature 1..20: note = C9Orf72 ATCN PAM targeting sequence
  source 1..20: mol_type = other RNA
ttttctctctggttgcttgt

SEQ ID NO: 1587 - RNA, 20 nt, synthetic construct
  misc_feature 1..20: note = C9Orf72 ATCN PAM targeting sequence
  source 1..20: mol_type = other RNA
aattgccattattaagtttg

SEQ ID NO: 1588 - RNA, 20 nt, synthetic construct
  misc_feature 1..20: note = C9Orf72 ATCN PAM targeting sequence
  source 1..20: mol_type = other RNA
ataatacagaggccagatga

SEQ ID NO: 1589 - RNA, 20 nt, synthetic construct
  misc_feature 1..20: note = C9Orf72 ATCN PAM targeting sequence
  source 1..20: mol_type = other RNA
ggcctctgtattattgatga

SEQ ID NO: 1590 - RNA, 20 nt, synthetic construct
  misc_feature 1..20: note = C9Orf72 ATCN PAM targeting sequence
  source 1..20: mol_type = other RNA
tctggcctctgtattattga

SEQ ID NO: 1591 - RNA, 20 nt, synthetic construct
  misc_feature 1..20: note = C9Orf72 ATCN PAM targeting sequence
  source 1..20: mol_type = other RNA
tggcagaaggcatcatatgg

SEQ ID NO: 1592 - RNA, 20 nt, synthetic construct
  misc_feature 1..20: note = C9Orf72 ATCN PAM targeting sequence
  source 1..20: mol_type = other RNA
tatgggcaagagagagagag

SEQ ID NO: 1593 - RNA, 20 nt, synthetic construct
  misc_feature 1..20: note = C9Orf72 ATCN PAM targeting sequence
  source 1..20: mol_type = other RNA
tttataagaaaccccttcct

SEQ ID NO: 1594 - RNA, 20 nt, synthetic construct
  misc_feature 1..20: note = C9Orf72 ATCN PAM targeting sequence
  source 1..20: mol_type = other RNA
tgggagtaagttcattgtag

SEQ ID NO: 1595 - RNA, 20 nt, synthetic construct
  misc_feature 1..20: note = C9Orf72 ATCN PAM targeting sequence
  source 1..20: mol_type = other RNA
attcatgagggcagaacctt

SEQ ID NO: 1596 - RNA, 20 nt, synthetic construct
  misc_feature 1..20: note = C9Orf72 ATCN PAM targeting sequence
  source 1..20: mol_type = other RNA
cctcttaaacttcccacctc

SEQ ID NO: 1597 - RNA, 20 nt, synthetic construct
  misc_feature 1..20: note = C9Orf72 ATCN PAM targeting sequence
  source 1..20: mol_type = other RNA
gtgttgagaggtgggaagtt

SEQ ID NO: 1598 - RNA, 20 nt, synthetic construct
  misc_feature 1..20: note = C9Orf72 ATCN PAM targeting sequence
  source 1..20: mol_type = other RNA
tcaatgcatcagtgttgaga

SEQ ID NO: 1599 - RNA, 20 nt, synthetic construct
  misc_feature 1..20: note = C9Orf72 ATCN PAM targeting sequence
  source 1..20: mol_type = other RNA
aattcatagacccttgctga

SEQ ID NO: 1600 - RNA, 20 nt, synthetic construct
  misc_feature 1..20: note = C9Orf72 ATCN PAM targeting sequence
  source 1..20: mol_type = other RNA
aagttattattctttaatat

SEQ ID NO: 1601 - RNA, 20 nt, synthetic construct
  misc_feature 1..20: note = C9Orf72 ATCN PAM targeting sequence
  source 1..20: mol_type = other RNA
ttttcttagtttccttcata

SEQ ID NO: 1602 - RNA, 20 nt, synthetic construct
  misc_feature 1..20: note = C9Orf72 ATCN PAM targeting sequence
  source 1..20: mol_type = other RNA
ttgcttatttatctttttct

SEQ ID NO: 1603 - RNA, 20 nt, synthetic construct
  misc_feature 1..20: note = C9Orf72 ATCN PAM targeting sequence
  source 1..20: mol_type = other RNA
taaaaattttttttgagtag

SEQ ID NO: 1604 - RNA, 20 nt, synthetic construct
  misc_feature 1..20: note = C9Orf72 ATCN PAM targeting sequence
  source 1..20: mol_type = other RNA
gatagcaataatatgaaaga

SEQ ID NO: 1605 - RNA, 20 nt, synthetic construct
  misc_feature 1..20: note = C9Orf72 ATCN PAM targeting sequence
  source 1..20: mol_type = other RNA
gatgttttagtttcaagttg

SEQ ID NO: 1606 - RNA, 20 nt, synthetic construct
  misc_feature 1..20: note = C9Orf72 ATCN PAM targeting sequence
  source 1..20: mol_type = other RNA
ctctttcatattattgctat

SEQ ID NO: 1607 - RNA, 20 nt, synthetic construct
  misc_feature 1..20: note = C9Orf72 ATCN PAM targeting sequence
  source 1..20: mol_type = other RNA
cgtaatgcaagggccataga

SEQ ID NO: 1608 - RNA, 20 nt, synthetic construct
  misc_feature 1..20: note = C9Orf72 ATCN PAM targeting sequence
  source 1..20: mol_type = other RNA
agctaatttttaaaactttt

SEQ ID NO: 1609 - RNA, 20 nt, synthetic construct
  misc_feature 1..20: note = C9Orf72 ATCN PAM targeting sequence
  source 1..20: mol_type = other RNA
atagtcctagctacttgaga

SEQ ID NO: 1610 - RNA, 20 nt, synthetic construct
  misc_feature 1..20: note = C9Orf72 ATCN PAM targeting sequence
  source 1..20: mol_type = other RNA
tgctctgttgcccaggctga

SEQ ID NO: 1611 - RNA, 20 nt, synthetic construct
  misc_feature 1..20: note = C9Orf72 ATCN PAM targeting sequence
  source 1..20: mol_type = other RNA
cggctcactgcaactgcaac

SEQ ID NO: 1612 - RNA, 20 nt, synthetic construct
  misc_feature 1..20: note = C9Orf72 ATCN PAM targeting sequence
  source 1..20: mol_type = other RNA
cgtcactgcactccagcctg

SEQ ID NO: 1613 - RNA, 20 nt, synthetic construct
  misc_feature 1..20: note = C9Orf72 ATCN PAM targeting sequence
  source 1..20: mol_type = other RNA
cggctcactgcaagctccgc

SEQ ID NO: 1614 - RNA, 20 nt, synthetic construct
  misc_feature 1..20: note = C9Orf72 ATCN PAM targeting sequence
  source 1..20: mol_type = other RNA
tggctaacattgtgaaaccc

SEQ ID NO: 1615 - RNA, 20 nt, synthetic construct
  misc_feature 1..20: note = C9Orf72 ATCN PAM targeting sequence
  source 1..20: mol_type = other RNA
agaccatcctggctaacatt

SEQ ID NO: 1616 - RNA, 20 nt, synthetic construct
  misc_feature 1..20: note = C9Orf72 ATCN PAM targeting sequence
  source 1..20: mol_type = other RNA
cctgaccttgtgatccgact

SEQ ID NO: 1617 - RNA, 20 nt, synthetic construct
  misc_feature 1..20: note = C9Orf72 ATCN PAM targeting sequence
  source 1..20: mol_type = other RNA
caaggtcaggagatcaagac

SEQ ID NO: 1618 - RNA, 20 nt, synthetic construct
  misc_feature 1..20: note = C9Orf72 ATCN PAM targeting sequence
  source 1..20: mol_type = other RNA
gactgcctcagcctcccaaa

SEQ ID NO: 1619 - RNA, 20 nt, synthetic construct
  misc_feature 1..20: note = C9Orf72 ATCN PAM targeting sequence
  source 1..20: mol_type = other RNA
tagcactttgggaggctgag

SEQ ID NO: 1620 - RNA, 20 nt, synthetic construct
  misc_feature 1..20: note = C9Orf72 ATCN PAM targeting sequence
  source 1..20: mol_type = other RNA
gtaatcctagcactttggga

SEQ ID NO: 1621 - RNA, 20 nt, synthetic construct
  misc_feature 1..20: note = C9Orf72 ATCN PAM targeting sequence
  source 1..20: mol_type = other RNA
tggccaacatggtgaaaccc

SEQ ID NO: 1622 - RNA, 20 nt, synthetic construct
  misc_feature 1..20: note = C9Orf72 ATCN PAM targeting sequence
  source 1..20: mol_type = other RNA
agaccatcctggccaacatg

SEQ ID NO: 1623 - RNA, 20 nt, synthetic construct
  misc_feature 1..20: note = C9Orf72 ATCN PAM targeting sequence
  source 1..20: mol_type = other RNA
cttgatctgcctgcctgggc

SEQ ID NO: 1624 - RNA, 20 nt, synthetic construct
  misc_feature 1..20: note = C9Orf72 ATCN PAM targeting sequence
  source 1..20: mol_type = other RNA
agagatcaagaccatcctgg

SEQ ID NO: 1625 - RNA, 20 nt, synthetic construct
  misc_feature 1..20: note = C9Orf72 ATCN PAM targeting sequence
  source 1..20: mol_type = other RNA
gcctgcctgggccttccaaa

SEQ ID NO: 1626 - RNA, 20 nt, synthetic construct
  misc_feature 1..20: note = C9Orf72 ATCN PAM targeting sequence
  source 1..20: mol_type = other RNA
cagcactttggaaggcccag

SEQ ID NO: 1627 - RNA, 20 nt, synthetic construct
  misc_feature 1..20: note = C9Orf72 ATCN PAM targeting sequence
  source 1..20: mol_type = other RNA
ttaaaattccttcttttttt

SEQ ID NO: 1628 - RNA, 20 nt, synthetic construct
  misc_feature 1..20: note = C9Orf72 ATCN PAM targeting sequence
  source 1..20: mol_type = other RNA
ttttctgttctcttaattct

SEQ ID NO: 1629 - RNA, 20 nt, synthetic construct
  misc_feature 1..20: note = C9Orf72 ATCN PAM targeting sequence
  source 1..20: mol_type = other RNA
atacaagcactgactctata

SEQ ID NO: 1630 - RNA, 20 nt, synthetic construct
  misc_feature 1..20: note = C9Orf72 ATCN PAM targeting sequence
  source 1..20: mol_type = other RNA
tttcttttattcttttatag

SEQ ID NO: 1631 - RNA, 20 nt, synthetic construct
  misc_feature 1..20: note = C9Orf72 ATCN PAM targeting sequence
  source 1..20: mol_type = other RNA
ctccccgcaattcttacact

SEQ ID NO: 1632 - RNA, 20 nt, synthetic construct
  misc_feature 1..20: note = C9Orf72 ATCN PAM targeting sequence
  source 1..20: mol_type = other RNA
atagttttaccttcctttga

SEQ ID NO: 1633 - RNA, 20 nt, synthetic construct
  misc_feature 1..20: note = C9Orf72 ATCN PAM targeting sequence
  source 1..20: mol_type = other RNA
ctttagaatttagtaagtta

SEQ ID NO: 1634 - RNA, 20 nt, synthetic construct
  misc_feature 1..20: note = C9Orf72 ATCN PAM targeting sequence
  source 1..20: mol_type = other RNA
ctgaaagaataaaacagtat

SEQ ID NO: 1635 - RNA, 20 nt, synthetic construct
  misc_feature 1..20: note = C9Orf72 ATCN PAM targeting sequence
  source 1..20: mol_type = other RNA
ataaaaagacaaaaaaggcg

SEQ ID NO: 1636 - RNA, 20 nt, synthetic construct
  misc_feature 1..20: note = C9Orf72 ATCN PAM targeting sequence
  source 1..20: mol_type = other RNA
gctggagtcttttgtgctgt

SEQ ID NO: 1637 - RNA, 20 nt, synthetic construct
  misc_feature 1..20: note = C9Orf72 ATCN PAM targeting sequence
  source 1..20: mol_type = other RNA
gtacagttaattataacaaa

SEQ ID NO: 1638 - RNA, 20 nt, synthetic construct
  misc_feature 1..20: note = C9Orf72 ATCN PAM targeting sequence
  source 1..20: mol_type = other RNA
actaaatgctccagctaaaa

SEQ ID NO: 1639 - RNA, 20 nt, synthetic construct
  misc_feature 1..20: note = C9Orf72 ATCN PAM targeting sequence
  source 1..20: mol_type = other RNA
tttagctggagcatttagtt

SEQ ID NO: 1640 - RNA, 20 nt, synthetic construct
  misc_feature 1..20: note = C9Orf72 ATCN PAM targeting sequence
  source 1..20: mol_type = other RNA
tcttttagctggagcattta

SEQ ID NO: 1641 - RNA, 20 nt, synthetic construct
  misc_feature 1..20: note = C9Orf72 ATCN PAM targeting sequence
  source 1..20: mol_type = other RNA
gttgtggttatttgggttgt

SEQ ID NO: 1642 - RNA, 20 nt, synthetic construct
  misc_feature 1..20: note = C9Orf72 ATCN PAM targeting sequence
  source 1..20: mol_type = other RNA
cgccactgtactcctgcact

SEQ ID NO: 1643 - RNA, 20 nt, synthetic construct
  misc_feature 1..20: note = C9Orf72 ATCN PAM targeting sequence
  source 1..20: mol_type = other RNA
cggctcactgcaagctccgc

SEQ ID NO: 1644 - RNA, 20 nt, synthetic construct
  misc_feature 1..20: note = C9Orf72 ATCN PAM targeting sequence
  source 1..20: mol_type = other RNA
ctactaaaaatacaaaaaat

SEQ ID NO: 1645 - RNA, 20 nt, synthetic construct
  misc_feature 1..20: note = C9Orf72 ATCN PAM targeting sequence
  source 1..20: mol_type = other RNA
tggctaacacagtgaaaccc

SEQ ID NO: 1646 - RNA, 20 nt, synthetic construct
  misc_feature 1..20: note = C9Orf72 ATCN PAM targeting sequence
  source 1..20: mol_type = other RNA
agaccatcctggctaacaca

SEQ ID NO: 1647 - RNA, 20 nt, synthetic construct
  misc_feature 1..20: note = C9Orf72 ATCN PAM targeting sequence
  source 1..20: mol_type = other RNA
cctgacctcatgatctgccc

SEQ ID NO: 1648 - RNA, 20 nt, synthetic construct
  misc_feature 1..20: note = C9Orf72 ATCN PAM targeting sequence
  source 1..20: mol_type = other RNA
tgaggtcaggagatcgagac

SEQ ID NO: 1649 - RNA, 20 nt, synthetic construct
  misc_feature 1..20: note = C9Orf72 ATCN PAM targeting sequence
  source 1..20: mol_type = other RNA
gcccgcctcggcctcccaaa

SEQ ID NO: 1650 - RNA, 20 nt, synthetic construct
  misc_feature 1..20: note = C9Orf72 ATCN PAM targeting sequence
  source 1..20: mol_type = other RNA
ttgcactttgggaggccgag

SEQ ID NO: 1651 - RNA, 20 nt, synthetic construct
  misc_feature 1..20: note = C9Orf72 ATCN PAM targeting sequence
  source 1..20: mol_type = other RNA
gtaagaactaccttccttag

SEQ ID NO: 1652 - RNA, 20 nt, synthetic construct
  misc_feature 1..20: note = C9Orf72 ATCN PAM targeting sequence
  source 1..20: mol_type = other RNA
ttgccatgtgggaatacagt

SEQ ID NO: 1653 - RNA, 20 nt, synthetic construct
  misc_feature 1..20: note = C9Orf72 ATCN PAM targeting sequence
  source 1..20: mol_type = other RNA
gaattttaaacatcagccat

SEQ ID NO: 1654 - RNA, 20 nt, synthetic construct
  misc_feature 1..20: note = C9Orf72 ATCN PAM targeting sequence
  source 1..20: mol_type = other RNA
gccatgaatttttttttaaa

SEQ ID NO: 1655 - RNA, 20 nt, synthetic construct
  misc_feature 1..20: note = C9Orf72 ATCN PAM targeting sequence
  source 1..20: mol_type = other RNA
atagcattttatttcctttt

SEQ ID NO: 1656 - RNA, 20 nt, synthetic construct
  misc_feature 1..20: note = C9Orf72 ATCN PAM targeting sequence
  source 1..20: mol_type = other RNA
agtggagggaagaaaagaga

SEQ ID NO: 1657 - RNA, 20 nt, synthetic construct
  misc_feature 1..20: note = C9Orf72 ATCN PAM targeting sequence
  source 1..20: mol_type = other RNA
cttttcttccctccactgga

SEQ ID NO: 1658 - RNA, 20 nt, synthetic construct
  misc_feature 1..20: note = C9Orf72 ATCN PAM targeting sequence
  source 1..20: mol_type = other RNA
tatctcttttcttccctcca

SEQ ID NO: 1659 - RNA, 20 nt, synthetic construct
  misc_feature 1..20: note = C9Orf72 ATCN PAM targeting sequence
  source 1..20: mol_type = other RNA
cagtggcgttttagcataag

SEQ ID NO: 1660 - RNA, 20 nt, synthetic construct
  misc_feature 1..20: note = C9Orf72 ATCN PAM targeting sequence
  source 1..20: mol_type = other RNA
ccaccctgtaatttccgccc

SEQ ID NO: 1661 - RNA, 20 nt, synthetic construct
  misc_feature 1..20: note = C9Orf72 ATCN PAM targeting sequence
  source 1..20: mol_type = other RNA
tttggctgaagagacctaac

SEQ ID NO: 1662 - RNA, 20 nt, synthetic construct
  misc_feature 1..20: note = C9Orf72 ATCN PAM targeting sequence
  source 1..20: mol_type = other RNA
aaacataaagcacatggagc

SEQ ID NO: 1663 - RNA, 20 nt, synthetic construct
  misc_feature 1..20: note = C9Orf72 ATCN PAM targeting sequence
  source 1..20: mol_type = other RNA
agacattattatgagttttg

SEQ ID NO: 1664 - RNA, 20 nt, synthetic construct
  misc_feature 1..20: note = C9Orf72 ATCN PAM targeting sequence
  source 1..20: mol_type = other RNA
agaccatccagacattatta

SEQ ID NO: 1665 - RNA, 20 nt, synthetic construct
  misc_feature 1..20: note = C9Orf72 ATCN PAM targeting sequence
  source 1..20: mol_type = other RNA
agtaagcccccaaaggagac

SEQ ID NO: 1666 - RNA, 20 nt, synthetic construct
  misc_feature 1..20: note = C9Orf72 ATCN PAM targeting sequence
  source 1..20: mol_type = other RNA
agctattaagaaaaacggca

SEQ ID NO: 1667 - RNA, 20 nt, synthetic construct
  misc_feature 1..20: note = C9Orf72 ATCN PAM targeting sequence
  source 1..20: mol_type = other RNA
acaacattcaccttaagtta

SEQ ID NO: 1668 - RNA, 20 nt, synthetic construct
  misc_feature 1..20: note = C9Orf72 ATCN PAM targeting sequence
  source 1..20: mol_type = other RNA
caacctctgcctctacacca

SEQ ID NO: 1669 - RNA, 20 nt, synthetic construct
  misc_feature 1..20: note = C9Orf72 ATCN PAM targeting sequence
  source 1..20: mol_type = other RNA
gggcaggccaccagcacggg

SEQ ID NO: 1670 - RNA, 20 nt, synthetic construct
  misc_feature 1..20: note = C9Orf72 ATCN PAM targeting sequence
  source 1..20: mol_type = other RNA
ccccatctgtacttcccacc

SEQ ID NO: 1671 - RNA, 20 nt, synthetic construct
  misc_feature 1..20: note = C9Orf72 ATCN PAM targeting sequence
  source 1..20: mol_type = other RNA
gtacttcccaccaaaccctt

SEQ ID NO: 1672 - RNA, 20 nt, synthetic construct
  misc_feature 1..20: note = C9Orf72 ATCN PAM targeting sequence
  source 1..20: mol_type = other RNA
ctgtataaggaatgcaccac

SEQ ID NO: 1673 - RNA, 20 nt, synthetic construct
  misc_feature 1..20: note = C9Orf72 ATCN PAM targeting sequence
  source 1..20: mol_type = other RNA
gaaggcacatggggaaaatg

SEQ ID NO: 1674 - RNA, 20 nt, synthetic construct
  misc_feature 1..20: note = C9Orf72 ATCN PAM targeting sequence
  source 1..20: mol_type = other RNA
ggccaacccattttccccat

SEQ ID NO: 1675 - RNA, 20 nt, synthetic construct
  misc_feature 1..20: note = C9Orf72 ATCN PAM targeting sequence
  source 1..20: mol_type = other RNA
tggcttcatttctctccaga

SEQ ID NO: 1676 - RNA, 20 nt, synthetic construct
  misc_feature 1..20: note = C9Orf72 ATCN PAM targeting sequence
  source 1..20: mol_type = other RNA
tgccttgaacaggcctcctg

SEQ ID NO: 1677 - RNA, 20 nt, synthetic construct
  misc_feature 1..20: note = C9Orf72 ATCN PAM targeting sequence
  source 1..20: mol_type = other RNA
actggaaaacatagctacag

SEQ ID NO: 1678 - RNA, 20 nt, synthetic construct
  misc_feature 1..20: note = C9Orf72 ATCN PAM targeting sequence
  source 1..20: mol_type = other RNA
ttaagaggtgcacatacata

SEQ ID NO: 1679 - RNA, 20 nt, synthetic construct
  misc_feature 1..20: note = C9Orf72 ATCN PAM targeting sequence
  source 1..20: mol_type = other RNA
cttttaagccctcaaatatg

SEQ ID NO: 1680 - RNA, 20 nt, synthetic construct
  misc_feature 1..20: note = C9Orf72 ATCN PAM targeting sequence
  source 1..20: mol_type = other RNA
ctttgtattttggaaacaat

SEQ ID NO: 1681 - RNA, 20 nt, synthetic construct
  misc_feature 1..20: note = C9Orf72 ATCN PAM targeting sequence
  source 1..20: mol_type = other RNA
tggctcactgcaagctccgc

SEQ ID NO: 1682 - RNA, 20 nt, synthetic construct
  misc_feature 1..20: note = C9Orf72 ATCN PAM targeting sequence
  source 1..20: mol_type = other RNA
ttctggctaacacggtgaaa

SEQ ID NO: 1683 - RNA, 20 nt, synthetic construct
  misc_feature 1..20: note = C9Orf72 ATCN PAM targeting sequence
  source 1..20: mol_type = other RNA
tgatctcctgactttgtgat

SEQ ID NO: 1684 - RNA, 20 nt, synthetic construct
  misc_feature 1..20: note = C9Orf72 ATCN PAM targeting sequence
  source 1..20: mol_type = other RNA
agatcattctggctaacacg

SEQ ID NO: 1685 - RNA, 20 nt, synthetic construct
  misc_feature 1..20: note = C9Orf72 ATCN PAM targeting sequence
  source 1..20: mol_type = other RNA
cctgactttgtgatccgccc

SEQ ID NO: 1686 - RNA, 20 nt, synthetic construct
  misc_feature 1..20: note = C9Orf72 ATCN PAM targeting sequence
  source 1..20: mol_type = other RNA
caaagtcaggagatcaagat

SEQ ID NO: 1687 - RNA, 20 nt, synthetic construct
  misc_feature 1..20: note = C9Orf72 ATCN PAM targeting sequence
  source 1..20: mol_type = other RNA
gcccgcctcggcctcccaaa

SEQ ID NO: 1688 - RNA, 20 nt, synthetic construct
  misc_feature 1..20: note = C9Orf72 ATCN PAM targeting sequence
  source 1..20: mol_type = other RNA
cagcactttgggaggccgag

SEQ ID NO: 1689 - RNA, 20 nt, synthetic construct
  misc_feature 1..20: note = C9Orf72 ATCN PAM targeting sequence
  source 1..20: mol_type = other RNA
aacaaatttcaataacattt

SEQ ID NO: 1690 - RNA, 20 nt, synthetic construct
  misc_feature 1..20: note = C9Orf72 ATCN PAM targeting sequence
  source 1..20: mol_type = other RNA
taaattgaatgacatactta

SEQ ID NO: 1691 - RNA, 20 nt, synthetic construct
  misc_feature 1..20: note = C9Orf72 ATCN PAM targeting sequence
  source 1..20: mol_type = other RNA
tttgactgtaagtatgtcat

SEQ ID NO: 1692 - RNA, 20 nt, synthetic construct
  misc_feature 1..20: note = C9Orf72 ATCN PAM targeting sequence
  source 1..20: mol_type = other RNA
cttgctgcacagattatatt

SEQ ID NO: 1693 - RNA, 20 nt, synthetic construct
  misc_feature 1..20: note = C9Orf72 ATCN PAM targeting sequence
  source 1..20: mol_type = other RNA
gtgcagcaagcgatgaaaag

SEQ ID NO: 1694 - RNA, 20 nt, synthetic construct
  misc_feature 1..20: note = C9Orf72 ATCN PAM targeting sequence
  source 1..20: mol_type = other RNA
taaaagacctggtcccatgt

SEQ ID NO: 1695 - RNA, 20 nt, synthetic construct
  misc_feature 1..20: note = C9Orf72 ATCN PAM targeting sequence
  source 1..20: mol_type = other RNA
tattaataccagctctcttt

SEQ ID NO: 1696 - RNA, 20 nt, synthetic construct
  misc_feature 1..20: note = C9Orf72 ATCN PAM targeting sequence
  source 1..20: mol_type = other RNA
tcaaaaaagctacagactct

SEQ ID NO: 1697 - RNA, 20 nt, synthetic construct
  misc_feature 1..20: note = C9Orf72 ATCN PAM targeting sequence
  source 1..20: mol_type = other RNA
agtggaaagcagcattttcc

SEQ ID NO: 1698 - RNA, 20 nt, synthetic construct
  misc_feature 1..20: note = C9Orf72 ATCN PAM targeting sequence
  source 1..20: mol_type = other RNA
cctacaagaaatccagtgga

SEQ ID NO: 1699 - RNA, 20 nt, synthetic construct
  misc_feature 1..20: note = C9Orf72 ATCN PAM targeting sequence
  source 1..20: mol_type = other RNA
taagctcgttatgggccctc

SEQ ID NO: 1700 - RNA, 20 nt, synthetic construct
  misc_feature 1..20: note = C9Orf72 ATCN PAM targeting sequence
  source 1..20: mol_type = other RNA
ttgaggggcagggatgcccc

SEQ ID NO: 1701 - RNA, 20 nt, synthetic construct
  misc_feature 1..20: note = C9Orf72 ATCN PAM targeting sequence
  source 1..20: mol_type = other RNA
ctgcccctcaaagatgcagg

SEQ ID NO: 1702 - RNA, 20 nt, synthetic construct
  misc_feature 1..20: note = C9Orf72 ATCN PAM targeting sequence
  source 1..20: mol_type = other RNA
cagttgtctggagctgaggg

SEQ ID NO: 1703 - RNA, 20 nt, synthetic construct
  misc_feature 1..20: note = C9Orf72 ATCN PAM targeting sequence
  source 1..20: mol_type = other RNA
cttctatgttcaactcaccc

SEQ ID NO: 1704 - RNA, 20 nt, synthetic construct
  misc_feature 1..20: note = C9Orf72 ATCN PAM targeting sequence
  source 1..20: mol_type = other RNA
ggagtctttctaagggctcc

SEQ ID NO: 1705 - RNA, 20 nt, synthetic construct
  misc_feature 1..20: note = C9Orf72 ATCN PAM targeting sequence
  source 1..20: mol_type = other RNA
tctgaatgggagcccttaga

SEQ ID NO: 1706 - RNA, 20 nt, synthetic construct
  misc_feature 1..20: note = C9Orf72 ATCN PAM targeting sequence
  source 1..20: mol_type = other RNA
cattaactcagagaaaaacg

SEQ ID NO: 1707 - RNA, 20 nt, synthetic construct
  misc_feature 1..20: note = C9Orf72 ATCN PAM targeting sequence
  source 1..20: mol_type = other RNA
cttcccgtttttctctgagt

SEQ ID NO: 1708 - RNA, 20 nt, synthetic construct
  misc_feature 1..20: note = C9Orf72 ATCN PAM targeting sequence
  source 1..20: mol_type = other RNA
cagaagacactgatctaaca

SEQ ID NO: 1709 - RNA, 20 nt, synthetic construct
  misc_feature 1..20: note = C9Orf72 ATCN PAM targeting sequence
  source 1..20: mol_type = other RNA
gtgtcttctgtgatggctgt

SEQ ID NO: 1710 - RNA, 20 nt, synthetic construct
  misc_feature 1..20: note = C9Orf72 ATCN PAM targeting sequence
  source 1..20: mol_type = other RNA
aacaaggtctcccagcattt

SEQ ID NO: 1711 - RNA, 20 nt, synthetic construct
  misc_feature 1..20: note = C9Orf72 ATCN PAM targeting sequence
  source 1..20: mol_type = other RNA
gttttgcacagggagaaatg

SEQ ID NO: 1712 - RNA, 20 nt, synthetic construct
  misc_feature 1..20: note = C9Orf72 ATCN PAM targeting sequence
  source 1..20: mol_type = other RNA
acattaaagggccaccataa

SEQ ID NO: 1713 - RNA, 20 nt, synthetic construct
  misc_feature 1..20: note = C9Orf72 ATCN PAM targeting sequence
  source 1..20: mol_type = other RNA
tgggactgctattcatgaag

SEQ ID NO: 1714 - RNA, 20 nt, synthetic construct
  misc_feature 1..20: note = C9Orf72 ATCN PAM targeting sequence
  source 1..20: mol_type = other RNA
accccccgacccccggcctc

SEQ ID NO: 1715 - RNA, 20 nt, synthetic construct
  misc_feature 1..20: note = C9Orf72 ATCN PAM targeting sequence
  source 1..20: mol_type = other RNA
tcaggctttttctgcaggct

SEQ ID NO: 1716 - RNA, 20 nt, synthetic construct
  misc_feature 1..20: note = C9Orf72 ATCN PAM targeting sequence
  source 1..20: mol_type = other RNA
acacagtcaggttgaggtat

SEQ ID NO: 1717 - RNA, 20 nt, synthetic construct
  misc_feature 1..20: note = C9Orf72 ATCN PAM targeting sequence
  source 1..20: mol_type = other RNA
actttagaaggggactctgg

SEQ ID NO: 1718 - RNA, 20 nt, synthetic construct
  misc_feature 1..20: note = C9Orf72 ATCN PAM targeting sequence
  source 1..20: mol_type = other RNA
gtggtctgtttaaaaatact

SEQ ID NO: 1719 - RNA, 20 nt, synthetic construct
  misc_feature 1..20: note = C9Orf72 ATCN PAM targeting sequence
  source 1..20: mol_type = other RNA
aagttcgagacaagtgtttt

SEQ ID NO: 1720 - RNA, 20 nt, synthetic construct
  misc_feature 1..20: note = C9Orf72 ATCN PAM targeting sequence
  source 1..20: mol_type = other RNA
ggccacgcaaaacacttgtc

SEQ ID NO: 1721 - RNA, 20 nt, synthetic construct
  misc_feature 1..20: note = C9Orf72 ATCN PAM targeting sequence
  source 1..20: mol_type = other RNA
agctgaaactgtccatctgg

SEQ ID NO: 1722 - RNA, 20 nt, synthetic construct
  misc_feature 1..20: note = C9Orf72 ATCN PAM targeting sequence
  source 1..20: mol_type = other RNA
agtccatatattgataatat

SEQ ID NO: 1723 - RNA, 20 nt, synthetic construct
  misc_feature 1..20: note = C9Orf72 ATCN PAM targeting sequence
  source 1..20: mol_type = other RNA
atatatggactggatgccct

SEQ ID NO: 1724 - RNA, 20 nt, synthetic construct
  misc_feature 1..20: note = C9Orf72 ATCN PAM targeting sequence
  source 1..20: mol_type = other RNA
ataacaacaaggatcatagc

SEQ ID NO: 1725 - RNA, 20 nt, synthetic construct
  misc_feature 1..20: note = C9Orf72 ATCN PAM targeting sequence
  source 1..20: mol_type = other RNA
ttgttgttattgatatatta

SEQ ID NO: 1726 - RNA, 20 nt, synthetic construct
  misc_feature 1..20: note = C9Orf72 ATCN PAM targeting sequence
  source 1..20: mol_type = other RNA
tagcaaatacttctatatat

SEQ ID NO: 1727 - RNA, 20 nt, synthetic construct
  misc_feature 1..20: note = C9Orf72 ATCN PAM targeting sequence
  source 1..20: mol_type = other RNA
cttattctacaatattaact

SEQ ID NO: 1728 - RNA, 20 nt, synthetic construct
  misc_feature 1..20: note = C9Orf72 ATCN PAM targeting sequence
  source 1..20: mol_type = other RNA
tcgaaacaacccatgaggta

SEQ ID NO: 1729 - RNA, 20 nt, synthetic construct
  misc_feature 1..20: note = C9Orf72 ATCN PAM targeting sequence
  source 1..20: mol_type = other RNA
taacagataaagaagctgag

SEQ ID NO: 1730 - RNA, 20 nt, synthetic construct
  misc_feature 1..20: note = C9Orf72 ATCN PAM targeting sequence
  source 1..20: mol_type = other RNA
gttaagataggaataataac

SEQ ID NO: 1731 - RNA, 20 nt, synthetic construct
  misc_feature 1..20: note = C9Orf72 ATCN PAM targeting sequence
  source 1..20: mol_type = other RNA
gtctcccaatcacaaagccc

SEQ ID NO: 1732 - RNA, 20 nt, synthetic construct
  misc_feature 1..20: note = C9Orf72 ATCN PAM targeting sequence
  source 1..20: mol_type = other RNA
caaagccccaaatgtcagca

SEQ ID NO: 1733 - RNA, 20 nt, synthetic construct
  misc_feature 1..20: note = C9Orf72 ATCN PAM targeting sequence
  source 1..20: mol_type = other RNA
cactgattctgtctctggaa

SEQ ID NO: 1734 - RNA, 20 nt, synthetic construct
  misc_feature 1..20: note = C9Orf72 ATCN PAM targeting sequence
  source 1..20: mol_type = other RNA
gtgagatttgcccaaggcaa

SEQ ID NO: 1735 - RNA, 20 nt, synthetic construct
  misc_feature 1..20: note = C9Orf72 ATCN PAM targeting sequence
  source 1..20: mol_type = other RNA
acttttgtgtggaccatctc

SEQ ID NO: 1736 - RNA, 20 nt, synthetic construct
  misc_feature 1..20: note = C9Orf72 ATCN PAM targeting sequence
  source 1..20: mol_type = other RNA
caaactgattttacatccta

SEQ ID NO: 1737 - RNA, 20 nt, synthetic construct
  misc_feature 1..20: note = C9Orf72 ATCN PAM targeting sequence
  source 1..20: mol_type = other RNA
gtttgagatggtccacacaa

SEQ ID NO: 1738 - RNA, 20 nt, synthetic construct
  misc_feature 1..20: note = C9Orf72 ATCN PAM targeting sequence
  source 1..20: mol_type = other RNA
tacattctcttccctctcta

SEQ ID NO: 1739 - RNA, 20 nt, synthetic construct
  misc_feature 1..20: note = C9Orf72 ATCN PAM targeting sequence
  source 1..20: mol_type = other RNA
tggtaattctgctgttgaca

SEQ ID NO: 1740 - RNA, 20 nt, synthetic construct
  misc_feature 1..20: note = C9Orf72 ATCN PAM targeting sequence
  source 1..20: mol_type = other RNA
atttttcccccttgttctct

SEQ ID NO: 1741 - RNA, 20 nt, synthetic construct
  misc_feature 1..20: note = C9Orf72 ATCN PAM targeting sequence
  source 1..20: mol_type = other RNA
caatgcctttaactcaataa

SEQ ID NO: 1742 - RNA, 20 nt, synthetic construct
  misc_feature 1..20: note = C9Orf72 ATCN PAM targeting sequence
  source 1..20: mol_type = other RNA
aatgatgttaagtcctgtat

SEQ ID NO: 1743 - RNA, 20 nt, synthetic construct
  misc_feature 1..20: note = C9Orf72 ATCN PAM targeting sequence
  source 1..20: mol_type = other RNA
ttagatagtgttttgtttct

SEQ ID NO: 1744 - RNA, 20 nt, synthetic construct
  misc_feature 1..20: note = C9Orf72 ATCN PAM targeting sequence
  source 1..20: mol_type = other RNA
ataatttgttcaatcaatat

SEQ ID NO: 1745 - RNA, 20 nt, synthetic construct
  misc_feature 1..20: note = C9Orf72 ATCN PAM targeting sequence
  source 1..20: mol_type = other RNA
atatttcttgagcacttggt

SEQ ID NO: 1746 - RNA, 20 nt, synthetic construct
  misc_feature 1..20: note = C9Orf72 ATCN PAM targeting sequence
  source 1..20: mol_type = other RNA
ttcattcattacagaaaacc

SEQ ID NO: 1747 - RNA, 20 nt, synthetic construct
  misc_feature 1..20: note = C9Orf72 ATCN PAM targeting sequence
  source 1..20: mol_type = other RNA
tgtatgtgtgtttaatggct

SEQ ID NO: 1748 - RNA, 20 nt, synthetic construct
  misc_feature 1..20: note = C9Orf72 ATCN PAM targeting sequence
  source 1..20: mol_type = other RNA
aaactagctcttgcccgttg

SEQ ID NO: 1749 - RNA, 20 nt, synthetic construct
  misc_feature 1..20: note = C9Orf72 ATCN PAM targeting sequence
  source 1..20: mol_type = other RNA
aagaggcattcctggtccac

SEQ ID NO: 1750 - RNA, 20 nt, synthetic construct
  misc_feature 1..20: note = C9Orf72 ATCN PAM targeting sequence
  source 1..20: mol_type = other RNA
tcatcaaagaggcattcctg

SEQ ID NO: 1751 - RNA, 20 nt, synthetic construct
  misc_feature 1..20: note = C9Orf72 ATCN PAM targeting sequence
  source 1..20: mol_type = other RNA
ttctagtctctgtgcacaag

SEQ ID NO: 1752 - RNA, 20 nt, synthetic construct
  misc_feature 1..20: note = C9Orf72 ATCN PAM targeting sequence
  source 1..20: mol_type = other RNA
aaagtttcatttgatgaaat

SEQ ID NO: 1753 - RNA, 20 nt, synthetic construct
  misc_feature 1..20: note = C9Orf72 ATCN PAM targeting sequence
  source 1..20: mol_type = other RNA
aatgaaactttagataggta

SEQ ID NO: 1754 - RNA, 20 nt, synthetic construct
  misc_feature 1..20: note = C9Orf72 ATCN PAM targeting sequence
  source 1..20: mol_type = other RNA
attaagacttttaagaagaa

SEQ ID NO: 1755 - RNA, 20 nt, synthetic construct
  misc_feature 1..20: note = C9Orf72 ATCN PAM targeting sequence
  source 1..20: mol_type = other RNA
tcttcttaaaagtcttaata

SEQ ID NO: 1756 - RNA, 20 nt, synthetic construct
  misc_feature 1..20: note = C9Orf72 ATCN PAM targeting sequence
  source 1..20: mol_type = other RNA
ggaacaagaaatccaaacaa

SEQ ID NO: 1757 - RNA, 20 nt, synthetic construct
  misc_feature 1..20: note = C9Orf72 ATCN PAM targeting sequence
  source 1..20: mol_type = other RNA
aaacaattaataggatagaa

SEQ ID NO: 1758 - RNA, 20 nt, synthetic construct
  misc_feature 1..20: note = C9Orf72 ATCN PAM targeting sequence
  source 1..20: mol_type = other RNA
tattaattgtttggatttct

SEQ ID NO: 1759 - RNA, 20 nt, synthetic construct
  misc_feature 1..20: note = C9Orf72 ATCN PAM targeting sequence
  source 1..20: mol_type = other RNA
attttctatcctattaattg

SEQ ID NO: 1760 - RNA, 20 nt, synthetic construct
  misc_feature 1..20: note = C9Orf72 ATCN PAM targeting sequence
  source 1..20: mol_type = other RNA
cttctgcctctggctcaaat

SEQ ID NO: 1761 - RNA, 20 nt, synthetic construct
  misc_feature 1..20: note = C9Orf72 ATCN PAM targeting sequence
  source 1..20: mol_type = other RNA
catcccaaatgaacagacgc

SEQ ID NO: 1762 - RNA, 20 nt, synthetic construct
  misc_feature 1..20: note = C9Orf72 ATCN PAM targeting sequence
  source 1..20: mol_type = other RNA
caaatgaacagacgcataag

SEQ ID NO: 1763 - RNA, 20 nt, synthetic construct
  misc_feature 1..20: note = C9Orf72 ATCN PAM targeting sequence
  source 1..20: mol_type = other RNA
acttatgcgtctgttcattt

SEQ ID NO: 1764 - RNA, 20 nt, synthetic construct
  misc_feature 1..20: note = C9Orf72 ATCN PAM targeting sequence
  source 1..20: mol_type = other RNA
agcctaactaaagctagtcc

SEQ ID NO: 1765 - RNA, 20 nt, synthetic construct
  misc_feature 1..20: note = C9Orf72 ATCN PAM targeting sequence
  source 1..20: mol_type = other RNA
aagtgtcagggtttcatatt

SEQ ID NO: 1766 - RNA, 20 nt, synthetic construct
  misc_feature 1..20: note = C9Orf72 ATCN PAM targeting sequence
  source 1..20: mol_type = other RNA
aatatgaaaccctgacactt

SEQ ID NO: 1767 - RNA, 20 nt, synthetic construct
  misc_feature 1..20: note = C9Orf72 ATCN PAM targeting sequence
  source 1..20: mol_type = other RNA
gaatgcgggcccttgaatgc

SEQ ID NO: 1768 - RNA, 20 nt, synthetic construct
  misc_feature 1..20: note = C9Orf72 ATCN PAM targeting sequence
  source 1..20: mol_type = other RNA
aattttccagctttatgtta

SEQ ID NO: 1769 - RNA, 20 nt, synthetic construct
  misc_feature 1..20: note = C9Orf72 ATCN PAM targeting sequence
  source 1..20: mol_type = other RNA
ctagaaggccagagctaact

SEQ ID NO: 1770 - RNA, 20 nt, synthetic construct
  misc_feature 1..20: note = C9Orf72 ATCN PAM targeting sequence
  source 1..20: mol_type = other RNA
acccaggctagtgtgactgt

SEQ ID NO: 1771 - RNA, 20 nt, synthetic construct
  misc_feature 1..20: note = C9Orf72 ATCN PAM targeting sequence
  source 1..20: mol_type = other RNA
aaacaggagttaaaacagga

SEQ ID NO: 1772 - RNA, 20 nt, synthetic construct
  misc_feature 1..20: note = C9Orf72 ATCN PAM targeting sequence
  source 1..20: mol_type = other RNA
gcctcagcctcccaaagtgc

SEQ ID NO: 1773 - RNA, 20 nt, synthetic construct
  misc_feature 1..20: note = C9Orf72 ATCN PAM targeting sequence
  source 1..20: mol_type = other RNA
atctgcctcagcctcccaaa

SEQ ID NO: 1774 - RNA, 20 nt, synthetic construct
  misc_feature 1..20: note = C9Orf72 ATCN PAM targeting sequence
  source 1..20: mol_type = other RNA
cttgaggccaggggttcaag

SEQ ID NO: 1775 - RNA, 20 nt, synthetic construct
  misc_feature 1..20: note = C9Orf72 ATCN PAM targeting sequence
  source 1..20: mol_type = other RNA
cttgaacctgggaggtgaag

SEQ ID NO: 1776 - RNA, 20 nt, synthetic construct
  misc_feature 1..20: note = C9Orf72 ATCN PAM targeting sequence
  source 1..20: mol_type = other RNA
tactgtgttgcccaggctgg

SEQ ID NO: 1777 - RNA, 20 nt, synthetic construct
  misc_feature 1..20: note = C9Orf72 ATCN PAM targeting sequence
  source 1..20: mol_type = other RNA
cagaaaatatagtctggcat

SEQ ID NO: 1778 - RNA, 20 nt, synthetic construct
  misc_feature 1..20: note = C9Orf72 ATCN PAM targeting sequence
  source 1..20: mol_type = other RNA
ttagtttcctaggctgtttg

SEQ ID NO: 1779 - RNA, 20 nt, synthetic construct
  misc_feature 1..20: note = C9Orf72 ATCN PAM targeting sequence
  source 1..20: mol_type = other RNA
gcaggggaacactatcttta

SEQ ID NO: 1780 - RNA, 20 nt, synthetic construct
  misc_feature 1..20: note = C9Orf72 ATCN PAM targeting sequence
  source 1..20: mol_type = other RNA
gaaggcacatgtgtttcctg

SEQ ID NO: 1781 - RNA, 20 nt, synthetic construct
  misc_feature 1..20: note = C9Orf72 ATCN PAM targeting sequence
  source 1..20: mol_type = other RNA
cctgcccagagatcggttta

SEQ ID NO: 1782 - RNA, 20 nt, synthetic construct
  misc_feature 1..20: note = C9Orf72 ATCN PAM targeting sequence
  source 1..20: mol_type = other RNA
ctgggcaggggatgttctct

SEQ ID NO: 1783 - RNA, 20 nt, synthetic construct
  misc_feature 1..20: note = C9Orf72 ATCN PAM targeting sequence
  source 1..20: mol_type = other RNA
gtttacattccagggtaata

SEQ ID NO: 1784 - RNA, 20 nt, synthetic construct
  misc_feature 1..20: note = C9Orf72 ATCN PAM targeting sequence
  source 1..20: mol_type = other RNA
gccgtctctggaggggagga

SEQ ID NO: 1785 - RNA, 20 nt, synthetic construct
  misc_feature 1..20: note = C9Orf72 ATCN PAM targeting sequence
  source 1..20: mol_type = other RNA
tcccctccagagacggctga

SEQ ID NO: 1786 - RNA, 20 nt, synthetic construct
  misc_feature 1..20: note = C9Orf72 ATCN PAM targeting sequence
  source 1..20: mol_type = other RNA
acctaggcccacatccccat

SEQ ID NO: 1787 - RNA, 20 nt, synthetic construct
  misc_feature 1..20: note = C9Orf72 ATCN PAM targeting sequence
  source 1..20: mol_type = other RNA
ccatcacctccatgagacct

SEQ ID NO: 1788 - RNA, 20 nt, synthetic construct
  misc_feature 1..20: note = C9Orf72 ATCN PAM targeting sequence
  source 1..20: mol_type = other RNA
cctccatgagacctgggggg

SEQ ID NO: 1789 - RNA, 20 nt, synthetic construct
  misc_feature 1..20: note = C9Orf72 ATCN PAM targeting sequence
  source 1..20: mol_type = other RNA
gttctccctggccccccagg

SEQ ID NO: 1790 - RNA, 20 nt, synthetic construct
  misc_feature 1..20: note = C9Orf72 ATCN PAM targeting sequence
  source 1..20: mol_type = other RNA
tcagttctccctggcccccc

SEQ ID NO: 1791 - RNA, 20 nt, synthetic construct
  misc_feature 1..20: note = C9Orf72 ATCN PAM targeting sequence
  source 1..20: mol_type = other RNA
ggcagcatgagcattatgtc

SEQ ID NO: 1792 - RNA, 20 nt, synthetic construct
  misc_feature 1..20: note = C9Orf72 ATCN PAM targeting sequence
  source 1..20: mol_type = other RNA
agtttattactcgtggtaca

SEQ ID NO: 1793 - RNA, 20 nt, synthetic construct
  misc_feature 1..20: note = C9Orf72 ATCN PAM targeting sequence
  source 1..20: mol_type = other RNA
gctggaaaggaaataatgaa

SEQ ID NO: 1794 - RNA, 20 nt, synthetic construct
  misc_feature 1..20: note = C9Orf72 ATCN PAM targeting sequence
  source 1..20: mol_type = other RNA
agtagctttctattctaagc

SEQ ID NO: 1795 - RNA, 20 nt, synthetic construct
  misc_feature 1..20: note = C9Orf72 ATCN PAM targeting sequence
  source 1..20: mol_type = other RNA
tcgaactcttgcttctaagg

SEQ ID NO: 1796 - RNA, 20 nt, synthetic construct
  misc_feature 1..20: note = C9Orf72 ATCN PAM targeting sequence
  source 1..20: mol_type = other RNA
atggaaatagttgagtcatt

SEQ ID NO: 1797 - RNA, 20 nt, synthetic construct
  misc_feature 1..20: note = C9Orf72 ATCN PAM targeting sequence
  source 1..20: mol_type = other RNA
ttctcaccctgatgctatgg

SEQ ID NO: 1798 - RNA, 20 nt, synthetic construct
  misc_feature 1..20: note = C9Orf72 ATCN PAM targeting sequence
  source 1..20: mol_type = other RNA
gggtgagaaagatgtacatg

SEQ ID NO: 1799 - RNA, 20 nt, synthetic construct
  misc_feature 1..20: note = C9Orf72 ATCN PAM targeting sequence
  source 1..20: mol_type = other RNA
ataagcagagaagagaccat

SEQ ID NO: 1800 - RNA, 20 nt, synthetic construct
  misc_feature 1..20: note = C9Orf72 ATCN PAM targeting sequence
  source 1..20: mol_type = other RNA
tcatggcttctgccttctct

SEQ ID NO: 1801 - RNA, 20 nt, synthetic construct
  misc_feature 1..20: note = C9Orf72 ATCN PAM targeting sequence
  source 1..20: mol_type = other RNA
tggcttctgccttctcttaa

SEQ ID NO: 1802 - RNA, 20 nt, synthetic construct
  misc_feature 1..20: note = C9Orf72 ATCN PAM targeting sequence
  source 1..20: mol_type = other RNA
ttgtagatttcacttctgac

SEQ ID NO: 1803 - RNA, 20 nt, synthetic construct
  misc_feature 1..20: note = C9Orf72 ATCN PAM targeting sequence
  source 1..20: mol_type = other RNA
acaaggatgcacacaaaaga

SEQ ID NO: 1804 - RNA, 20 nt, synthetic construct
  misc_feature 1..20: note = C9Orf72 ATCN PAM targeting sequence
  source 1..20: mol_type = other RNA
gacagtcagaagtgaaatct

SEQ ID NO: 1805 - RNA, 20 nt, synthetic construct
  misc_feature 1..20: note = C9Orf72 ATCN PAM targeting sequence
  source 1..20: mol_type = other RNA
ttacttccaaaaccaaactt

SEQ ID NO: 1806 - RNA, 20 nt, synthetic construct
  misc_feature 1..20: note = C9Orf72 ATCN PAM targeting sequence
  source 1..20: mol_type = other RNA
ctgtccattcagggacacat

SEQ ID NO: 1807 - RNA, 20 nt, synthetic construct
  misc_feature 1..20: note = C9Orf72 ATCN PAM targeting sequence
  source 1..20: mol_type = other RNA
tgatgattatttatctgctg

SEQ ID NO: 1808 - RNA, 20 nt, synthetic construct
  misc_feature 1..20: note = C9Orf72 ATCN PAM targeting sequence
  source 1..20: mol_type = other RNA
tgatggtcacctgactcaag

SEQ ID NO: 1809 - RNA, 20 nt, synthetic construct
  misc_feature 1..20: note = C9Orf72 ATCN PAM targeting sequence
  source 1..20: mol_type = other RNA
tcatgatggtcacctgactc

SEQ ID NO: 1810 - RNA, 20 nt, synthetic construct
  misc_feature 1..20: note = C9Orf72 ATCN PAM targeting sequence
  source 1..20: mol_type = other RNA
gctgtttcagcctcaaacct

SEQ ID NO: 1811 - RNA, 20 nt, synthetic construct
  misc_feature 1..20: note = C9Orf72 ATCN PAM targeting sequence
  source 1..20: mol_type = other RNA
atgggaggcagaggagggac

SEQ ID NO: 1812 - RNA, 20 nt, synthetic construct
  misc_feature 1..20: note = C9Orf72 ATCN PAM targeting sequence
  source 1..20: mol_type = other RNA
ggcagaatacagagagactt

SEQ ID NO: 1813 - RNA, 20 nt, synthetic construct
  misc_feature 1..20: note = C9Orf72 ATCN PAM targeting sequence
  source 1..20: mol_type = other RNA
cccaactcagcacaacattc

SEQ ID NO: 1814 - RNA, 20 nt, synthetic construct
  misc_feature 1..20: note = C9Orf72 ATCN PAM targeting sequence
  source 1..20: mol_type = other RNA
actggggtgaatgttgtgct

SEQ ID NO: 1815 - RNA, 20 nt, synthetic construct
  misc_feature 1..20: note = C9Orf72 ATCN PAM targeting sequence
  source 1..20: mol_type = other RNA
aggtacactgcaaacataat

SEQ ID NO: 1816 - RNA, 20 nt, synthetic construct
  misc_feature 1..20: note = C9Orf72 ATCN PAM targeting sequence
  source 1..20: mol_type = other RNA
ctgtgtaaaacattatgttt

SEQ ID NO: 1817 - RNA, 20 nt, synthetic construct
  misc_feature 1..20: note = C9Orf72 ATCN PAM targeting sequence
  source 1..20: mol_type = other RNA
aagattggtatcacatctct

SEQ ID NO: 1818 - RNA, 20 nt, synthetic construct
  misc_feature 1..20: note = C9Orf72 ATCN PAM targeting sequence
  source 1..20: mol_type = other RNA
tggatctctgtgtaaaacat

SEQ ID NO: 1819 - RNA, 20 nt, synthetic construct
  misc_feature 1..20: note = C9Orf72 ATCN PAM targeting sequence
  source 1..20: mol_type = other RNA
catctctctttttatattta

SEQ ID NO: 1820 - RNA, 20 nt, synthetic construct
  misc_feature 1..20: note = C9Orf72 ATCN PAM targeting sequence
  source 1..20: mol_type = other RNA
ctctttttatatttatttat

SEQ ID NO: 1821 - RNA, 20 nt, synthetic construct
  misc_feature 1..20: note = C9Orf72 ATCN PAM targeting sequence
  source 1..20: mol_type = other RNA
caaaaataaataaataaata

SEQ ID NO: 1822 - RNA, 20 nt, synthetic construct
  misc_feature 1..20: note = C9Orf72 ATCN PAM targeting sequence
  source 1..20: mol_type = other RNA
tggcttactgcagcctctgc

SEQ ID NO: 1823 - RNA, 20 nt, synthetic construct
  misc_feature 1..20: note = C9Orf72 ATCN PAM targeting sequence
  source 1..20: mol_type = other RNA
cagctactcaggaggctgag

SEQ ID NO: 1824 - RNA, 20 nt, synthetic construct
  misc_feature 1..20: note = C9Orf72 ATCN PAM targeting sequence
  source 1..20: mol_type = other RNA
ccgcctgccaaagtgctggg

SEQ ID NO: 1825 - RNA, 20 nt, synthetic construct
  misc_feature 1..20: note = C9Orf72 ATCN PAM targeting sequence
  source 1..20: mol_type = other RNA
cagcactttggcaggcggag

SEQ ID NO: 1826 - RNA, 20 nt, synthetic construct
  misc_feature 1..20: note = C9Orf72 ATCN PAM targeting sequence
  source 1..20: mol_type = other RNA
ctaaaggggtcatggcatac

SEQ ID NO: 1827 - RNA, 20 nt, synthetic construct
  misc_feature 1..20: note = C9Orf72 ATCN PAM targeting sequence
  source 1..20: mol_type = other RNA
agtagcactgacaaccaaac

SEQ ID NO: 1828 - RNA, 20 nt, synthetic construct
  misc_feature 1..20: note = C9Orf72 ATCN PAM targeting sequence
  source 1..20: mol_type = other RNA
tgtttggttgtcagtgctac

SEQ ID NO: 1829 - RNA, 20 nt, synthetic construct
  misc_feature 1..20: note = C9Orf72 ATCN PAM targeting sequence
  source 1..20: mol_type = other RNA
agaacactatggaatgtggt

SEQ ID NO: 1830 - RNA, 20 nt, synthetic construct
  misc_feature 1..20: note = C9Orf72 ATCN PAM targeting sequence
  source 1..20: mol_type = other RNA
tgtctcactcttttagtctg

SEQ ID NO: 1831 - RNA, 20 nt, synthetic construct
  misc_feature 1..20: note = C9Orf72 ATCN PAM targeting sequence
  source 1..20: mol_type = other RNA
cttgaaacatcatgtctcac

SEQ ID NO: 1832 - RNA, 20 nt, synthetic construct
  misc_feature 1..20: note = C9Orf72 ATCN PAM targeting sequence
  source 1..20: mol_type = other RNA
agcggggattttagataatc

SEQ ID NO: 1833 - RNA, 20 nt, synthetic construct
  misc_feature 1..20: note = C9Orf72 ATCN PAM targeting sequence
  source 1..20: mol_type = other RNA
ccgctagatattatcacttg

SEQ ID NO: 1834 - RNA, 20 nt, synthetic construct
  misc_feature 1..20: note = C9Orf72 ATCN PAM targeting sequence
  source 1..20: mol_type = other RNA
aaaatccccgctagatatta

SEQ ID NO: 1835 - RNA, 20 nt, synthetic construct
  misc_feature 1..20: note = C9Orf72 ATCN PAM targeting sequence
  source 1..20: mol_type = other RNA
tggctcccacggtagtttta

SEQ ID NO: 1836 - RNA, 20 nt, synthetic construct
  misc_feature 1..20: note = C9Orf72 ATCN PAM targeting sequence
  source 1..20: mol_type = other RNA
acattttctaaaactaccgt

SEQ ID NO: 1837 - RNA, 20 nt, synthetic construct
  misc_feature 1..20: note = C9Orf72 ATCN PAM targeting sequence
  source 1..20: mol_type = other RNA
aacagaagccttttgtgtgg

SEQ ID NO: 1838 - RNA, 20 nt, synthetic construct
  misc_feature 1..20: note = C9Orf72 ATCN PAM targeting sequence
  source 1..20: mol_type = other RNA
cccacacaaaaggcttctgt

SEQ ID NO: 1839 - RNA, 20 nt, synthetic construct
  misc_feature 1..20: note = C9Orf72 ATCN PAM targeting sequence
  source 1..20: mol_type = other RNA
tgagctctcactcttaaaaa

SEQ ID NO: 1840 - RNA, 20 nt, synthetic construct
  misc_feature 1..20: note = C9Orf72 ATCN PAM targeting sequence
  source 1..20: mol_type = other RNA
tgagctcaagccacacttgc

SEQ ID NO: 1841 - RNA, 20 nt, synthetic construct
  misc_feature 1..20: note = C9Orf72 ATCN PAM targeting sequence
  source 1..20: mol_type = other RNA
caggcagcattgtataccag

SEQ ID NO: 1842 - RNA, 20 nt, synthetic construct
  misc_feature 1..20: note = C9Orf72 ATCN PAM targeting sequence
  source 1..20: mol_type = other RNA
gaagataaaggctaaccacg

SEQ ID NO: 1843 - RNA, 20 nt, synthetic construct
  misc_feature 1..20: note = C9Orf72 ATCN PAM targeting sequence
  source 1..20: mol_type = other RNA
tccgattagggaaatttatg

SEQ ID NO: 1844 - RNA, 20 nt, synthetic construct
  misc_feature 1..20: note = C9Orf72 ATCN PAM targeting sequence
  source 1..20: mol_type = other RNA
cccacatacgtggttagcct

SEQ ID NO: 1845 - RNA, 20 nt, synthetic construct
  misc_feature 1..20: note = C9Orf72 ATCN PAM targeting sequence
  source 1..20: mol_type = other RNA
caccagataaggaaataatc

SEQ ID NO: 1846 - RNA, 20 nt, synthetic construct
  misc_feature 1..20: note = C9Orf72 ATCN PAM targeting sequence
  source 1..20: mol_type = other RNA
ggtgtgatgtttccctctag

SEQ ID NO: 1847 - RNA, 20 nt, synthetic construct
  misc_feature 1..20: note = C9Orf72 ATCN PAM targeting sequence
  source 1..20: mol_type = other RNA
ttttttttttttggtccaac

SEQ ID NO: 1848 - RNA, 20 nt, synthetic construct
  misc_feature 1..20: note = C9Orf72 ATCN PAM targeting sequence
  source 1..20: mol_type = other RNA
tatgccaagtaatgtccacc

SEQ ID NO: 1849 - RNA, 20 nt, synthetic construct
  misc_feature 1..20: note = C9Orf72 ATCN PAM targeting sequence
  source 1..20: mol_type = other RNA
ctaaaacagtcacataagct

SEQ ID NO: 1850 - RNA, 20 nt, synthetic construct
  misc_feature 1..20: note = C9Orf72 ATCN PAM targeting sequence
  source 1..20: mol_type = other RNA
ataaacaatataaagtcaag

SEQ ID NO: 1851 - RNA, 20 nt, synthetic construct
  misc_feature 1..20: note = C9Orf72 ATCN PAM targeting sequence
  source 1..20: mol_type = other RNA
tgtttcaccaccttaaagaa

SEQ ID NO: 1852 - RNA, 20 nt, synthetic construct
  misc_feature 1..20: note = C9Orf72 ATCN PAM targeting sequence
  source 1..20: mol_type = other RNA
ccatttcaaaacagtgggca

SEQ ID NO: 1853 - RNA, 20 nt, synthetic construct
  misc_feature 1..20: note = C9Orf72 ATCN PAM targeting sequence
  source 1..20: mol_type = other RNA
atcaacacacttcccctctg

SEQ ID NO: 1854 - RNA, 20 nt, synthetic construct
  misc_feature 1..20: note = C9Orf72 ATCN PAM targeting sequence
  source 1..20: mol_type = other RNA
acacacttcccctctgcatt

SEQ ID NO: 1855 - RNA, 20 nt, synthetic construct
  misc_feature 1..20: note = C9Orf72 ATCN PAM targeting sequence
  source 1..20: mol_type = other RNA
cctggctgggcctcttgttc

SEQ ID NO: 1856 - RNA, 20 nt, synthetic construct
  misc_feature 1..20: note = C9Orf72 ATCN PAM targeting sequence
  source 1..20: mol_type = other RNA
ccctactacagatgggtgaa

SEQ ID NO: 1857 - RNA, 20 nt, synthetic construct
  misc_feature 1..20: note = C9Orf72 ATCN PAM targeting sequence
  source 1..20: mol_type = other RNA
gtagtagggggattggacca

SEQ ID NO: 1858 - RNA, 20 nt, synthetic construct
  misc_feature 1..20: note = C9Orf72 ATCN PAM targeting sequence
  source 1..20: mol_type = other RNA
ggcgaagttctagaccctgg

SEQ ID NO: 1859 - RNA, 20 nt, synthetic construct
  misc_feature 1..20: note = C9Orf72 ATCN PAM targeting sequence
  source 1..20: mol_type = other RNA
ttttctccccagggtctaga

SEQ ID NO: 1860 - RNA, 20 nt, synthetic construct
  misc_feature 1..20: note = C9Orf72 ATCN PAM targeting sequence
  source 1..20: mol_type = other RNA
ctctcactaaaccatgagca

SEQ ID NO: 1861 - RNA, 20 nt, synthetic construct
  misc_feature 1..20: note = C9Orf72 ATCN PAM targeting sequence
  source 1..20: mol_type = other RNA
cataattccacaaacacaca

SEQ ID NO: 1862 - RNA, 20 nt, synthetic construct
  misc_feature 1..20: note = C9Orf72 ATCN PAM targeting sequence
  source 1..20: mol_type = other RNA
gcaaggaatctcataattcc

SEQ ID NO: 1863 - RNA, 20 nt, synthetic construct
  misc_feature 1..20: note = C9Orf72 ATCN PAM targeting sequence
  source 1..20: mol_type = other RNA
cctgtgggaaactcttcttg

SEQ ID NO: 1864 - RNA, 20 nt, synthetic construct
  misc_feature 1..20: note = C9Orf72 ATCN PAM targeting sequence
  source 1..20: mol_type = other RNA
catctcctgtgggaaactct

SEQ ID NO: 1865 - RNA, 20 nt, synthetic construct
  misc_feature 1..20: note = C9Orf72 ATCN PAM targeting sequence
  source 1..20: mol_type = other RNA
ttaaatggcccacattcaaa

SEQ ID NO: 1866 - RNA, 20 nt, synthetic construct
  misc_feature 1..20: note = C9Orf72 ATCN PAM targeting sequence
  source 1..20: mol_type = other RNA
ggacctcctctcccactcct

SEQ ID NO: 1867 - RNA, 20 nt, synthetic construct
  misc_feature 1..20: note = C9Orf72 ATCN PAM targeting sequence
  source 1..20: mol_type = other RNA
aggtccagtgtaaagagcac

SEQ ID NO: 1868 - RNA, 20 nt, synthetic construct
  misc_feature 1..20: note = C9Orf72 ATCN PAM targeting sequence
  source 1..20: mol_type = other RNA
tttttaacataataaatacc

SEQ ID NO: 1869 - RNA, 20 nt, synthetic construct
  misc_feature 1..20: note = C9Orf72 ATCN PAM targeting sequence
  source 1..20: mol_type = other RNA
atgctgtaggcacaatgggt

SEQ ID NO: 1870 - RNA, 20 nt, synthetic construct
  misc_feature 1..20: note = C9Orf72 ATCN PAM targeting sequence
  source 1..20: mol_type = other RNA
atggtatttattatgttaaa

SEQ ID NO: 1871 - RNA, 20 nt, synthetic construct
  misc_feature 1..20: note = C9Orf72 ATCN PAM targeting sequence
  source 1..20: mol_type = other RNA
aagccctagatagcacatca

SEQ ID NO: 1872 - RNA, 20 nt, synthetic construct
  misc_feature 1..20: note = C9Orf72 ATCN PAM targeting sequence
  source 1..20: mol_type = other RNA
agggctttgataaatactct

SEQ ID NO: 1873 - RNA, 20 nt, synthetic construct
  misc_feature 1..20: note = C9Orf72 ATCN PAM targeting sequence
  source 1..20: mol_type = other RNA
tacagcctttttttttttta

SEQ ID NO: 1874 - RNA, 20 nt, synthetic construct
  misc_feature 1..20: note = C9Orf72 ATCN PAM targeting sequence
  source 1..20: mol_type = other RNA
tttattttctgaattaaaaa

SEQ ID NO: 1875 - RNA, 20 nt, synthetic construct
  misc_feature 1..20: note = C9Orf72 ATCN PAM targeting sequence
  source 1..20: mol_type = other RNA
tcctctgtcctggtatcctt

SEQ ID NO: 1876 - RNA, 20 nt, synthetic construct
  misc_feature 1..20: note = C9Orf72 ATCN PAM targeting sequence
  source 1..20: mol_type = other RNA
tcttcctctgtcctggtatc

SEQ ID NO: 1877 - RNA, 20 nt, synthetic construct
  misc_feature 1..20: note = C9Orf72 ATCN PAM targeting sequence
  source 1..20: mol_type = other RNA
ctattattatcatcttcctc

SEQ ID NO: 1878 - RNA, 20 nt, synthetic construct
  misc_feature 1..20: note = C9Orf72 ATCN PAM targeting sequence
  source 1..20: mol_type = other RNA
tcctttgtatatattatttc

SEQ ID NO: 1879 - RNA, 20 nt, synthetic construct
  misc_feature 1..20: note = C9Orf72 ATCN PAM targeting sequence
  source 1..20: mol_type = other RNA
ttccgaagaaataatatata

SEQ ID NO: 1880 - RNA, 20 nt, synthetic construct
  misc_feature 1..20: note = C9Orf72 ATCN PAM targeting sequence
  source 1..20: mol_type = other RNA
catcgttccgaagaaataat

SEQ ID NO: 1881 - RNA, 20 nt, synthetic construct
  misc_feature 1..20: note = C9Orf72 ATCN PAM targeting sequence
  source 1..20: mol_type = other RNA
ataactaaaaagaagaagac

SEQ ID NO: 1882 - RNA, 20 nt, synthetic construct
  misc_feature 1..20: note = C9Orf72 ATCN PAM targeting sequence
  source 1..20: mol_type = other RNA
ctgttgtcaaaatataaatc

SEQ ID NO: 1883 - RNA, 20 nt, synthetic construct
  misc_feature 1..20: note = C9Orf72 ATCN PAM targeting sequence
  source 1..20: mol_type = other RNA
gatgccttcatgatgaggaa

SEQ ID NO: 1884 - RNA, 20 nt, synthetic construct
  misc_feature 1..20: note = C9Orf72 ATCN PAM targeting sequence
  source 1..20: mol_type = other RNA
gatttatattttgacaacag

SEQ ID NO: 1885 - RNA, 20 nt, synthetic construct
  misc_feature 1..20: note = C9Orf72 ATCN PAM targeting sequence
  source 1..20: mol_type = other RNA
tgaaggcatctgatttatat

SEQ ID NO: 1886 - RNA, 20 nt, synthetic construct
  misc_feature 1..20: note = C9Orf72 ATCN PAM targeting sequence
  source 1..20: mol_type = other RNA
gtggagaaaacttttttttc

SEQ ID NO: 1887 - RNA, 20 nt, synthetic construct
  misc_feature 1..20: note = C9Orf72 ATCN PAM targeting sequence
  source 1..20: mol_type = other RNA
tctgtggagaaaactttttt

SEQ ID NO: 1888 - RNA, 20 nt, synthetic construct
  misc_feature 1..20: note = C9Orf72 ATCN PAM targeting sequence
  source 1..20: mol_type = other RNA
ctgaaaataaaaagtttgac

SEQ ID NO: 1889 - RNA, 20 nt, synthetic construct
  misc_feature 1..20: note = C9Orf72 ATCN PAM targeting sequence
  source 1..20: mol_type = other RNA
gtatcaaccattctttttcc

SEQ ID NO: 1890 - RNA, 20 nt, synthetic construct
  misc_feature 1..20: note = C9Orf72 ATCN PAM targeting sequence
  source 1..20: mol_type = other RNA
accattctttttccatattc

SEQ ID NO: 1891 - RNA, 20 nt, synthetic construct
  misc_feature 1..20: note = C9Orf72 ATCN PAM targeting sequence
  source 1..20: mol_type = other RNA
ttctaatttagaatatggaa

SEQ ID NO: 1892 - RNA, 20 nt, synthetic construct
  misc_feature 1..20: note = C9Orf72 ATCN PAM targeting sequence
  source 1..20: mol_type = other RNA
atataggtggttgggcacgg

SEQ ID NO: 1893 - RNA, 20 nt, synthetic construct
  misc_feature 1..20: note = C9Orf72 ATCN PAM targeting sequence
  source 1..20: mol_type = other RNA
cagcactttgggaggccgag

SEQ ID NO: 1894 - RNA, 20 nt, synthetic construct
  misc_feature 1..20: note = C9Orf72 ATCN PAM targeting sequence
  source 1..20: mol_type = other RNA
gcctgctcggcctcccaaag

SEQ ID NO: 1895 - RNA, 20 nt, synthetic construct
  misc_feature 1..20: note = C9Orf72 ATCN PAM targeting sequence
  source 1..20: mol_type = other RNA
caaggtcaggagattgagac

SEQ ID NO: 1896 - RNA, 20 nt, synthetic construct
  misc_feature 1..20: note = C9Orf72 ATCN PAM targeting sequence
  source 1..20: mol_type = other RNA
cctgaccttgtgatctgcct

SEQ ID NO: 1897 - RNA, 20 nt, synthetic construct
  misc_feature 1..20: note = C9Orf72 ATCN PAM targeting sequence
  source 1..20: mol_type = other RNA
tggctaacatggtgaaaccc

SEQ ID NO: 1898 - RNA, 20 nt, synthetic construct
  misc_feature 1..20: note = C9Orf72 ATCN PAM targeting sequence
  source 1..20: mol_type = other RNA
ctactaaaaatacaaaaaat

SEQ ID NO: 1899 - RNA, 20 nt, synthetic construct
  misc_feature 1..20: note = C9Orf72 ATCN PAM targeting sequence
  source 1..20: mol_type = other RNA
cggctcactgcaagctccgc

SEQ ID NO: 1900 - RNA, 20 nt, synthetic construct
  misc_feature 1..20: note = C9Orf72 ATCN PAM targeting sequence
  source 1..20: mol_type = other RNA
caccactgcactccagcctg

SEQ ID NO: 1901 - RNA, 20 nt, synthetic construct
  misc_feature 1..20: note = C9Orf72 ATCN PAM targeting sequence
  source 1..20: mol_type = other RNA
atataggaatttgcctatgt

SEQ ID NO: 1902 - RNA, 20 nt, synthetic construct
  misc_feature 1..20: note = C9Orf72 ATCN PAM targeting sequence
  source 1..20: mol_type = other RNA
aataaaggtgcttagaacat

SEQ ID NO: 1903 - RNA, 20 nt, synthetic construct
  misc_feature 1..20: note = C9Orf72 ATCN PAM targeting sequence
  source 1..20: mol_type = other RNA
ctacttttataggcatatct

SEQ ID NO: 1904 - RNA, 20 nt, synthetic construct
  misc_feature 1..20: note = C9Orf72 ATCN PAM targeting sequence
  source 1..20: mol_type = other RNA
cttttaaagtcttgtctgag

SEQ ID NO: 1905 - RNA, 20 nt, synthetic construct
  misc_feature 1..20: note = C9Orf72 ATCN PAM targeting sequence
  source 1..20: mol_type = other RNA
cagacaagactttaaaagag

SEQ ID NO: 1906 - RNA, 20 nt, synthetic construct
  misc_feature 1..20: note = C9Orf72 ATCN PAM targeting sequence
  source 1..20: mol_type = other RNA
ttgtagtgaagaagaaagaa

SEQ ID NO: 1907 - RNA, 20 nt, synthetic construct
  misc_feature 1..20: note = C9Orf72 ATCN PAM targeting sequence
  source 1..20: mol_type = other RNA
catttgcaaaattctttctt

SEQ ID NO: 1908 - RNA, 20 nt, synthetic construct
  misc_feature 1..20: note = C9Orf72 ATCN PAM targeting sequence
  source 1..20: mol_type = other RNA
ctctctactctcaaatctca

SEQ ID NO: 1909 - RNA, 20 nt, synthetic construct
  misc_feature 1..20: note = C9Orf72 ATCN PAM targeting sequence
  source 1..20: mol_type = other RNA
taagagcaaattgcagggta

SEQ ID NO: 1910 - RNA, 20 nt, synthetic construct
  misc_feature 1..20: note = C9Orf72 ATCN PAM targeting sequence
  source 1..20: mol_type = other RNA
acaaattggctcatattttt

SEQ ID NO: 1911 - RNA, 20 nt, synthetic construct
  misc_feature 1..20: note = C9Orf72 ATCN PAM targeting sequence
  source 1..20: mol_type = other RNA
cccttcatttttaccccaca

SEQ ID NO: 1912 - RNA, 20 nt, synthetic construct
  misc_feature 1..20: note = C9Orf72 ATCN PAM targeting sequence
  source 1..20: mol_type = other RNA
cttccgtaatcccccttcat

SEQ ID NO: 1913 - RNA, 20 nt, synthetic construct
  misc_feature 1..20: note = C9Orf72 ATCN PAM targeting sequence
  source 1..20: mol_type = other RNA
gcataaggttcacactcatt

SEQ ID NO: 1914 - RNA, 20 nt, synthetic construct
  misc_feature 1..20: note = C9Orf72 ATCN PAM targeting sequence
  source 1..20: mol_type = other RNA
ttataatgagtgtgaacctt

SEQ ID NO: 1915 - RNA, 20 nt, synthetic construct
  misc_feature 1..20: note = C9Orf72 ATCN PAM targeting sequence
  source 1..20: mol_type = other RNA
taaaatgtcacaattttcct

SEQ ID NO: 1916 - RNA, 20 nt, synthetic construct
  misc_feature 1..20: note = C9Orf72 ATCN PAM targeting sequence
  source 1..20: mol_type = other RNA
tttctattcaattaaaggaa

SEQ ID NO: 1917 - RNA, 20 nt, synthetic construct
  misc_feature 1..20: note = C9Orf72 ATCN PAM targeting sequence
  source 1..20: mol_type = other RNA
ttattcttagggtttatttt

SEQ ID NO: 1918 - RNA, 20 nt, synthetic construct
  misc_feature 1..20: note = C9Orf72 ATCN PAM targeting sequence
  source 1..20: mol_type = other RNA
attctttagtgttttaaaaa

SEQ ID NO: 1919 - RNA, 20 nt, synthetic construct
  misc_feature 1..20: note = C9Orf72 ATCN PAM targeting sequence
  source 1..20: mol_type = other RNA
aacaggtagtctgccagcga

SEQ ID NO: 1920 - RNA, 20 nt, synthetic construct
  misc_feature 1..20: note = C9Orf72 ATCN PAM targeting sequence
  source 1..20: mol_type = other RNA
tgagagtcacttgggcagca

SEQ ID NO: 1921 - RNA, 20 nt, synthetic construct
  misc_feature 1..20: note = C9Orf72 ATCN PAM targeting sequence
  source 1..20: mol_type = other RNA
agcatctagcaccataaatt

SEQ ID NO: 1922 - RNA, 20 nt, synthetic construct
  misc_feature 1..20: note = C9Orf72 ATCN PAM targeting sequence
  source 1..20: mol_type = other RNA
agcaccataaattagcagac

SEQ ID NO: 1923 - RNA, 20 nt, synthetic construct
  misc_feature 1..20: note = C9Orf72 ATCN PAM targeting sequence
  source 1..20: mol_type = other RNA
tattggtctgctaatttatg

SEQ ID NO: 1924 - RNA, 20 nt, synthetic construct
  misc_feature 1..20: note = C9Orf72 ATCN PAM targeting sequence
  source 1..20: mol_type = other RNA
gggaactgataactgccagg

SEQ ID NO: 1925 - RNA, 20 nt, synthetic construct
  misc_feature 1..20: note = C9Orf72 ATCN PAM targeting sequence
  source 1..20: mol_type = other RNA
gttcccagatgcagttttgg

SEQ ID NO: 1926 - RNA, 20 nt, synthetic construct
  misc_feature 1..20: note = C9Orf72 ATCN PAM targeting sequence
  source 1..20: mol_type = other RNA
tgctagcaggtttacagcaa

SEQ ID NO: 1927 - RNA, 20 nt, synthetic construct
  misc_feature 1..20: note = C9Orf72 ATCN PAM targeting sequence
  source 1..20: mol_type = other RNA
ggagcagaaggtaattaact

SEQ ID NO: 1928 - RNA, 20 nt, synthetic construct
  misc_feature 1..20: note = C9Orf72 ATCN PAM targeting sequence
  source 1..20: mol_type = other RNA
gtcagcttcatgacagaaag

SEQ ID NO: 1929 - RNA, 20 nt, synthetic construct
  misc_feature 1..20: note = C9Orf72 ATCN PAM targeting sequence
  source 1..20: mol_type = other RNA
ctgaaagcatgcttcatact

SEQ ID NO: 1930 - RNA, 20 nt, synthetic construct
  misc_feature 1..20: note = C9Orf72 ATCN PAM targeting sequence
  source 1..20: mol_type = other RNA
tgcatttaaattctggttca

SEQ ID NO: 1931 - RNA, 20 nt, synthetic construct
  misc_feature 1..20: note = C9Orf72 ATCN PAM targeting sequence
  source 1..20: mol_type = other RNA
cttaacttctatgaacgtct

SEQ ID NO: 1932 - RNA, 20 nt, synthetic construct
  misc_feature 1..20: note = C9Orf72 ATCN PAM targeting sequence
  source 1..20: mol_type = other RNA
gacgttcatagaagttaagg

SEQ ID NO: 1933 - RNA, 20 nt, synthetic construct
  misc_feature 1..20: note = C9Orf72 ATCN PAM targeting sequence
  source 1..20: mol_type = other RNA
ccattttgcaccctagaaat

SEQ ID NO: 1934 - RNA, 20 nt, synthetic construct
  misc_feature 1..20: note = C9Orf72 ATCN PAM targeting sequence
  source 1..20: mol_type = other RNA
tacaggctgtagaaggaaat

SEQ ID NO: 1935 - RNA, 20 nt, synthetic construct
  misc_feature 1..20: note = C9Orf72 ATCN PAM targeting sequence
  source 1..20: mol_type = other RNA
tactcatttccttctacagc

SEQ ID NO: 1936 - RNA, 20 nt, synthetic construct
  misc_feature 1..20: note = C9Orf72 ATCN PAM targeting sequence
  source 1..20: mol_type = other RNA
tatactaagctacttagcag

SEQ ID NO: 1937 - RNA, 20 nt, synthetic construct
  misc_feature 1..20: note = C9Orf72 ATCN PAM targeting sequence
  source 1..20: mol_type = other RNA
ttccagtacaccttgatcaa

SEQ ID NO: 1938 - RNA, 20 nt, synthetic construct
  misc_feature 1..20: note = C9Orf72 ATCN PAM targeting sequence
  source 1..20: mol_type = other RNA
aggtgtactggaatgattta

SEQ ID NO: 1939 - RNA, 20 nt, synthetic construct
  misc_feature 1..20: note = C9Orf72 ATCN PAM targeting sequence
  source 1..20: mol_type = other RNA
agagtgggctcactctgctc

SEQ ID NO: 1940 - RNA, 20 nt, synthetic construct
  misc_feature 1..20: note = C9Orf72 ATCN PAM targeting sequence
  source 1..20: mol_type = other RNA
caaatgtatgttcttacata

SEQ ID NO: 1941 - RNA, 20 nt, synthetic construct
  misc_feature 1..20: note = C9Orf72 ATCN PAM targeting sequence
  source 1..20: mol_type = other RNA
acgttcttctgtcatggctt

SEQ ID NO: 1942 - RNA, 20 nt, synthetic construct
  misc_feature 1..20: note = C9Orf72 ATCN PAM targeting sequence
  source 1..20: mol_type = other RNA
tcacaatccacgttcttctg

SEQ ID NO: 1943 - RNA, 20 nt, synthetic construct
  misc_feature 1..20: note = C9Orf72 ATCN PAM targeting sequence
  source 1..20: mol_type = other RNA
ctaaacataaattgtaaaga

SEQ ID NO: 1944 - RNA, 20 nt, synthetic construct
  misc_feature 1..20: note = C9Orf72 ATCN PAM targeting sequence
  source 1..20: mol_type = other RNA
ttacaatttatgtttagaga

SEQ ID NO: 1945 - RNA, 20 nt, synthetic construct
  misc_feature 1..20: note = C9Orf72 ATCN PAM targeting sequence
  source 1..20: mol_type = other RNA
caagggtattgattggggaa

SEQ ID NO: 1946 - RNA, 20 nt, synthetic construct
  misc_feature 1..20: note = C9Orf72 ATCN PAM targeting sequence
  source 1..20: mol_type = other RNA
cttaatcctgtcagccgagg

SEQ ID NO: 1947 - RNA, 20 nt, synthetic construct
  misc_feature 1..20: note = C9Orf72 ATCN PAM targeting sequence
  source 1..20: mol_type = other RNA
tgtcagccgaggaggatgta

SEQ ID NO: 1948 - RNA, 20 nt, synthetic construct
  misc_feature 1..20: note = C9Orf72 ATCN PAM targeting sequence
  source 1..20: mol_type = other RNA
tcctcggctgacaggattaa

SEQ ID NO: 1949 - RNA, 20 nt, synthetic construct
  misc_feature 1..20: note = C9Orf72 ATCN PAM targeting sequence
  source 1..20: mol_type = other RNA
cctcaggaccctgtaataat

SEQ ID NO: 1950 - RNA, 20 nt, synthetic construct
  misc_feature 1..20: note = C9Orf72 ATCN PAM targeting sequence
  source 1..20: mol_type = other RNA
accggtctgaccaaaattta

SEQ ID NO: 1951 - RNA, 20 nt, synthetic construct
  misc_feature 1..20: note = C9Orf72 ATCN PAM targeting sequence
  source 1..20: mol_type = other RNA
caaaaccctgtctcctgata

SEQ ID NO: 1952 - RNA, 20 nt, synthetic construct
  misc_feature 1..20: note = C9Orf72 ATCN PAM targeting sequence
  source 1..20: mol_type = other RNA
ggagacagggttttgagatc

SEQ ID NO: 1953 - RNA, 20 nt, synthetic construct
  misc_feature 1..20: note = C9Orf72 ATCN PAM targeting sequence
  source 1..20: mol_type = other RNA
tatcaggagacagggttttg

SEQ ID NO: 1954 - RNA, 20 nt, synthetic construct
  misc_feature 1..20: note = C9Orf72 ATCN PAM targeting sequence
  source 1..20: mol_type = other RNA
atgacaatggtgcccgaaac

SEQ ID NO: 1955 - RNA, 20 nt, synthetic construct
  misc_feature 1..20: note = C9Orf72 ATCN PAM targeting sequence
  source 1..20: mol_type = other RNA
taggaccacaggaccagggt

SEQ ID NO: 1956 - RNA, 20 nt, synthetic construct
  misc_feature 1..20: note = C9Orf72 ATCN PAM targeting sequence
  source 1..20: mol_type = other RNA
cgccctgcctccacttgcct

SEQ ID NO: 1957 - RNA, 20 nt, synthetic construct
  misc_feature 1..20: note = C9Orf72 ATCN PAM targeting sequence
  source 1..20: mol_type = other RNA
tcccacctcagcctcctaaa

SEQ ID NO: 1958 - RNA, 20 nt, synthetic construct
  misc_feature 1..20: note = C9Orf72 ATCN PAM targeting sequence
  source 1..20: mol_type = other RNA
cttgagcccaggagttcaag

SEQ ID NO: 1959 - RNA, 20 nt, synthetic construct
  misc_feature 1..20: note = C9Orf72 ATCN PAM targeting sequence
  source 1..20: mol_type = other RNA
cttgtagagacaaggtctca

SEQ ID NO: 1960 - RNA, 20 nt, synthetic construct
  misc_feature 1..20: note = C9Orf72 ATCN PAM targeting sequence
  source 1..20: mol_type = other RNA
gctgggcacagtggcataca

SEQ ID NO: 1961 - RNA, 20 nt, synthetic construct
  misc_feature 1..20: note = C9Orf72 ATCN PAM targeting sequence
  source 1..20: mol_type = other RNA
atttatttatttattttgga

SEQ ID NO: 1962 - RNA, 20 nt, synthetic construct
  misc_feature 1..20: note = C9Orf72 ATCN PAM targeting sequence
  source 1..20: mol_type = other RNA
tgatggccccaagggactgc

SEQ ID NO: 1963 - RNA, 20 nt, synthetic construct
  misc_feature 1..20: note = C9Orf72 ATCN PAM targeting sequence
  source 1..20: mol_type = other RNA
ggatgggttccttgtcttca

SEQ ID NO: 1964 - RNA, 20 nt, synthetic construct
  misc_feature 1..20: note = C9Orf72 ATCN PAM targeting sequence
  source 1..20: mol_type = other RNA
atgaatgtatgaaattcatg

SEQ ID NO: 1965 - RNA, 20 nt, synthetic construct
  misc_feature 1..20: note = C9Orf72 ATCN PAM targeting sequence
  source 1..20: mol_type = other RNA
aacaataaagcacttaatac

SEQ ID NO: 1966 - RNA, 20 nt, synthetic construct
  misc_feature 1..20: note = C9Orf72 ATCN PAM targeting sequence
  source 1..20: mol_type = other RNA
aggcaagagaactatcagga

SEQ ID NO: 1967 - RNA, 20 nt, synthetic construct
  misc_feature 1..20: note = C9Orf72 ATCN PAM targeting sequence
  source 1..20: mol_type = other RNA
ggaaagattaatcctggaca

SEQ ID NO: 1968 - RNA, 20 nt, synthetic construct
  misc_feature 1..20: note = C9Orf72 ATCN PAM targeting sequence
  source 1..20: mol_type = other RNA
ttcctgatagttctcttgcc

SEQ ID NO: 1969 - RNA, 20 nt, synthetic construct
  misc_feature 1..20: note = C9Orf72 ATCN PAM targeting sequence
  source 1..20: mol_type = other RNA
tggacattcactttagaaag

SEQ ID NO: 1970 - RNA, 20 nt, synthetic construct
  misc_feature 1..20: note = C9Orf72 ATCN PAM targeting sequence
  source 1..20: mol_type = other RNA
ttctaaagtgaatgtccagg

SEQ ID NO: 1971 - RNA, 20 nt, synthetic construct
  misc_feature 1..20: note = C9Orf72 ATCN PAM targeting sequence
  source 1..20: mol_type = other RNA
cctatcctggaggaacagta

SEQ ID NO: 1972 - RNA, 20 nt, synthetic construct
  misc_feature 1..20: note = C9Orf72 ATCN PAM targeting sequence
  source 1..20: mol_type = other RNA
tggaggaacagtaagtacag

SEQ ID NO: 1973 - RNA, 20 nt, synthetic construct
  misc_feature 1..20: note = C9Orf72 ATCN PAM targeting sequence
  source 1..20: mol_type = other RNA
ctaggacaacatcatttaca

SEQ ID NO: 1974 - RNA, 20 nt, synthetic construct
  misc_feature 1..20: note = C9Orf72 ATCN PAM targeting sequence
  source 1..20: mol_type = other RNA
tttacaaaacaatcatgctg

SEQ ID NO: 1975 - RNA, 20 nt, synthetic construct
  misc_feature 1..20: note = C9Orf72 ATCN PAM targeting sequence
  source 1..20: mol_type = other RNA
tgctggcagcatactgttat

SEQ ID NO: 1976 - RNA, 20 nt, synthetic construct
  misc_feature 1..20: note = C9Orf72 ATCN PAM targeting sequence
  source 1..20: mol_type = other RNA
atgctaattataacagtatg

SEQ ID NO: 1977 - RNA, 20 nt, synthetic construct
  misc_feature 1..20: note = C9Orf72 ATCN PAM targeting sequence
  source 1..20: mol_type = other RNA
ctctatgctaatcactttaa

SEQ ID NO: 1978 - RNA, 20 nt, synthetic construct
  misc_feature 1..20: note = C9Orf72 ATCN PAM targeting sequence
  source 1..20: mol_type = other RNA
ctttaaaggttctgtaagca

SEQ ID NO: 1979 - RNA, 20 nt, synthetic construct
  misc_feature 1..20: note = C9Orf72 ATCN PAM targeting sequence
  source 1..20: mol_type = other RNA
ctaaaaacgagcaaaaaaac

SEQ ID NO: 1980 - RNA, 20 nt, synthetic construct
  misc_feature 1..20: note = C9Orf72 ATCN PAM targeting sequence
  source 1..20: mol_type = other RNA
gtgtccatttttacaattaa

SEQ ID NO: 1981 - RNA, 20 nt, synthetic construct
  misc_feature 1..20: note = C9Orf72 ATCN PAM targeting sequence
  source 1..20: mol_type = other RNA
tactgcaggaacaagtggag

SEQ ID NO: 1982 - RNA, 20 nt, synthetic construct
  misc_feature 1..20: note = C9Orf72 ATCN PAM targeting sequence
  source 1..20: mol_type = other RNA
ccacttgttcctgcagtagg

SEQ ID NO: 1983 - RNA, 20 nt, synthetic construct
  misc_feature 1..20: note = C9Orf72 ATCN PAM targeting sequence
  source 1..20: mol_type = other RNA
cctggcaataaaaccagact

SEQ ID NO: 1984 - RNA, 20 nt, synthetic construct
  misc_feature 1..20: note = C9Orf72 ATCN PAM targeting sequence
  source 1..20: mol_type = other RNA
cgtttgggcaagtgcttcct

SEQ ID NO: 1985 - RNA, 20 nt, synthetic construct
  misc_feature 1..20: note = C9Orf72 ATCN PAM targeting sequence
  source 1..20: mol_type = other RNA
atttacatagcatgcattct

SEQ ID NO: 1986 - RNA, 20 nt, synthetic construct
  misc_feature 1..20: note = C9Orf72 ATCN PAM targeting sequence
  source 1..20: mol_type = other RNA
gaagaatgcatgctatgtaa

SEQ ID NO: 1987 - RNA, 20 nt, synthetic construct
  misc_feature 1..20: note = C9Orf72 ATCN PAM targeting sequence
  source 1..20: mol_type = other RNA
gactctcaggttattcgatt

SEQ ID NO: 1988 - RNA, 20 nt, synthetic construct
  misc_feature 1..20: note = C9Orf72 ATCN PAM targeting sequence
  source 1..20: mol_type = other RNA
aataacctgagagtctgatc

SEQ ID NO: 1989 - RNA, 20 nt, synthetic construct
  misc_feature 1..20: note = C9Orf72 ATCN PAM targeting sequence
  source 1..20: mol_type = other RNA
atattttttaatatttaggc

SEQ ID NO: 1990 - RNA, 20 nt, synthetic construct
  misc_feature 1..20: note = C9Orf72 ATCN PAM targeting sequence
  source 1..20: mol_type = other RNA
caatagaataataggactcc

SEQ ID NO: 1991 - RNA, 20 nt, synthetic construct
  misc_feature 1..20: note = C9Orf72 ATCN PAM targeting sequence
  source 1..20: mol_type = other RNA
agtcagcctaagcagtccaa

SEQ ID NO: 1992 - RNA, 20 nt, synthetic construct
  misc_feature 1..20: note = C9Orf72 ATCN PAM targeting sequence
  source 1..20: mol_type = other RNA
atccactctaaactctccct

SEQ ID NO: 1993 - RNA, 20 nt, synthetic construct
  misc_feature 1..20: note = C9Orf72 ATCN PAM targeting sequence
  source 1..20: mol_type = other RNA
actctaaactctccctgggc

SEQ ID NO: 1994 - RNA, 20 nt, synthetic construct
  misc_feature 1..20: note = C9Orf72 ATCN PAM targeting sequence
  source 1..20: mol_type = other RNA
agaatggaaaaccaactctt

SEQ ID NO: 1995 - RNA, 20 nt, synthetic construct
  misc_feature 1..20: note = C9Orf72 ATCN PAM targeting sequence
  source 1..20: mol_type = other RNA
aaaacaaatgttaattaaaa

SEQ ID NO: 1996 - RNA, 20 nt, synthetic construct
  misc_feature 1..20: note = C9Orf72 ATCN PAM targeting sequence
  source 1..20: mol_type = other RNA
ttttaattaacatttgtttt

SEQ ID NO: 1997 - RNA, 20 nt, synthetic construct
  misc_feature 1..20: note = C9Orf72 ATCN PAM targeting sequence
  source 1..20: mol_type = other RNA
cttgctggagtttcttggaa

SEQ ID NO: 1998 - RNA, 20 nt, synthetic construct
  misc_feature 1..20: note = C9Orf72 ATCN PAM targeting sequence
  source 1..20: mol_type = other RNA
agacaaaagcagtcaaagaa

SEQ ID NO: 1999 - RNA, 20 nt, synthetic construct
  misc_feature 1..20: note = C9Orf72 ATCN PAM targeting sequence
  source 1..20: mol_type = other RNA
ttctgggaagctactcagaa

SEQ ID NO: 2000 - RNA, 20 nt, synthetic construct
  misc_feature 1..20: note = C9Orf72 ATCN PAM targeting sequence
  source 1..20: mol_type = other RNA
cttctgggaaattttcctaa

SEQ ID NO: 2001 - RNA, 20 nt, synthetic construct
  misc_feature 1..20: note = C9Orf72 ATCN PAM targeting sequence
  source 1..20: mol_type = other RNA
atgctttttccttaggaaaa

SEQ ID NO: 2002 - RNA, 20 nt, synthetic construct
  misc_feature 1..20: note = C9Orf72 ATCN PAM targeting sequence
  source 1..20: mol_type = other RNA
caatttcctaaaaaatatat

SEQ ID NO: 2003 - RNA, 20 nt, synthetic construct
  misc_feature 1..20: note = C9Orf72 ATCN PAM targeting sequence
  source 1..20: mol_type = other RNA
cctgaaactagacataatta

SEQ ID NO: 2004 - RNA, 20 nt, synthetic construct
  misc_feature 1..20: note = C9Orf72 ATCN PAM targeting sequence
  source 1..20: mol_type = other RNA
ctagattagtaggaaattaa

SEQ ID NO: 2005 - RNA, 20 nt, synthetic construct
  misc_feature 1..20: note = C9Orf72 ATCN PAM targeting sequence
  source 1..20: mol_type = other RNA
agtgattaattccccatgta

SEQ ID NO: 2006 - RNA, 20 nt, synthetic construct
  misc_feature 1..20: note = C9Orf72 ATCN PAM targeting sequence
  source 1..20: mol_type = other RNA
attgttaatttcattaattt

SEQ ID NO: 2007 - RNA, 20 nt, synthetic construct
  misc_feature 1..20: note = C9Orf72 ATCN PAM targeting sequence
  source 1..20: mol_type = other RNA
actgggaggaatttatttac

SEQ ID NO: 2008 - RNA, 20 nt, synthetic construct
  misc_feature 1..20: note = C9Orf72 ATCN PAM targeting sequence
  source 1..20: mol_type = other RNA
gctaatagaaactggaggta

SEQ ID NO: 2009 - RNA, 20 nt, synthetic construct
  misc_feature 1..20: note = C9Orf72 ATCN PAM targeting sequence
  source 1..20: mol_type = other RNA
ttgtttagaagcagtccact

SEQ ID NO: 2010 - RNA, 20 nt, synthetic construct
  misc_feature 1..20: note = C9Orf72 ATCN PAM targeting sequence
  source 1..20: mol_type = other RNA
gtggactgcttctaaacaag

SEQ ID NO: 2011 - RNA, 20 nt, synthetic construct
  misc_feature 1..20: note = C9Orf72 ATCN PAM targeting sequence
  source 1..20: mol_type = other RNA
aaatgaaactccaagaaaga

SEQ ID NO: 2012 - RNA, 20 nt, synthetic construct
  misc_feature 1..20: note = C9Orf72 ATCN PAM targeting sequence
  source 1..20: mol_type = other RNA
tcttgtctttcttggagttt

SEQ ID NO: 2013 - RNA, 20 nt, synthetic construct
  misc_feature 1..20: note = C9Orf72 ATCN PAM targeting sequence
  source 1..20: mol_type = other RNA
ctgtgcatagcaccaaggcc

SEQ ID NO: 2014 - RNA, 20 nt, synthetic construct
  misc_feature 1..20: note = C9Orf72 ATCN PAM targeting sequence
  source 1..20: mol_type = other RNA
attcatattcatggtttcca

SEQ ID NO: 2015 - RNA, 20 nt, synthetic construct
  misc_feature 1..20: note = C9Orf72 ATCN PAM targeting sequence
  source 1..20: mol_type = other RNA
gaatgctccatctattcata

SEQ ID NO: 2016 - RNA, 20 nt, synthetic construct
  misc_feature 1..20: note = C9Orf72 ATCN PAM targeting sequence
  source 1..20: mol_type = other RNA
tgctatccgaatgctccatc

SEQ ID NO: 2017 - RNA, 20 nt, synthetic construct
  misc_feature 1..20: note = C9Orf72 ATCN PAM targeting sequence
  source 1..20: mol_type = other RNA
aggcctggagaagggggtgg

SEQ ID NO: 2018 - RNA, 20 nt, synthetic construct
  misc_feature 1..20: note = C9Orf72 ATCN PAM targeting sequence
  source 1..20: mol_type = other RNA
atcacagcgttttccaagct

SEQ ID NO: 2019 - RNA, 20 nt, synthetic construct
  misc_feature 1..20: note = C9Orf72 ATCN PAM targeting sequence
  source 1..20: mol_type = other RNA
cagcgttttccaagctactc

SEQ ID NO: 2020 - RNA, 20 nt, synthetic construct
  misc_feature 1..20: note = C9Orf72 ATCN PAM targeting sequence
  source 1..20: mol_type = other RNA
cacgcttattccaccagctc

SEQ ID NO: 2021 - RNA, 20 nt, synthetic construct
  misc_feature 1..20: note = C9Orf72 ATCN PAM targeting sequence
  source 1..20: mol_type = other RNA
ctttgcaaatgcacctttgg

SEQ ID NO: 2022 - RNA, 20 nt, synthetic construct
  misc_feature 1..20: note = C9Orf72 ATCN PAM targeting sequence
  source 1..20: mol_type = other RNA
ctgaattcaaataccactta

SEQ ID NO: 2023 - RNA, 20 nt, synthetic construct
  misc_feature 1..20: note = C9Orf72 ATCN PAM targeting sequence
  source 1..20: mol_type = other RNA
ttattaagtggtatttgaat

SEQ ID NO: 2024 - RNA, 20 nt, synthetic construct
  misc_feature 1..20: note = C9Orf72 ATCN PAM targeting sequence
  source 1..20: mol_type = other RNA
aggtcaacagagaaaaccct

SEQ ID NO: 2025 - RNA, 20 nt, synthetic construct
  misc_feature 1..20: note = C9Orf72 ATCN PAM targeting sequence
  source 1..20: mol_type = other RNA
gggttttctctgttgaccta

SEQ ID NO: 2026 - RNA, 20 nt, synthetic construct
  misc_feature 1..20: note = C9Orf72 ATCN PAM targeting sequence
  source 1..20: mol_type = other RNA
cagagactgttggtgctgag

SEQ ID NO: 2027 - RNA, 20 nt, synthetic construct
  misc_feature 1..20: note = C9Orf72 ATCN PAM targeting sequence
  source 1..20: mol_type = other RNA
ctacatagcaactgctgcta

SEQ ID NO: 2028 - RNA, 20 nt, synthetic construct
  misc_feature 1..20: note = C9Orf72 ATCN PAM targeting sequence
  source 1..20: mol_type = other RNA
agcaatgtcaggtctttatc

SEQ ID NO: 2029 - RNA, 20 nt, synthetic construct
  misc_feature 1..20: note = C9Orf72 ATCN PAM targeting sequence
  source 1..20: mol_type = other RNA
tatgattctttaagcgtaat

SEQ ID NO: 2030 - RNA, 20 nt, synthetic construct
  misc_feature 1..20: note = C9Orf72 ATCN PAM targeting sequence
  source 1..20: mol_type = other RNA
taagatccagcaatgtcagg

SEQ ID NO: 2031 - RNA, 20 nt, synthetic construct
  misc_feature 1..20: note = C9Orf72 ATCN PAM targeting sequence
  source 1..20: mol_type = other RNA
attttttaggtgaaatctgt

SEQ ID NO: 2032 - RNA, 20 nt, synthetic construct
  misc_feature 1..20: note = C9Orf72 ATCN PAM targeting sequence
  source 1..20: mol_type = other RNA
gtatttttataggttgataa

SEQ ID NO: 2033 - RNA, 20 nt, synthetic construct
  misc_feature 1..20: note = C9Orf72 ATCN PAM targeting sequence
  source 1..20: mol_type = other RNA
acctataaaaatacagattt

SEQ ID NO: 2034 - RNA, 20 nt, synthetic construct
  misc_feature 1..20: note = C9Orf72 ATCN PAM targeting sequence
  source 1..20: mol_type = other RNA
acactttctatgagcaaaca

SEQ ID NO: 2035 - RNA, 20 nt, synthetic construct
  misc_feature 1..20: note = C9Orf72 ATCN PAM targeting sequence
  source 1..20: mol_type = other RNA
ctgtgggccaaaataggcct

SEQ ID NO: 2036 - RNA, 20 nt, synthetic construct
  misc_feature 1..20: note = C9Orf72 ATCN PAM targeting sequence
  source 1..20: mol_type = other RNA
gaggtccacaggcctatttt

SEQ ID NO: 2037 - RNA, 20 nt, synthetic construct
  misc_feature 1..20: note = C9Orf72 ATCN PAM targeting sequence
  source 1..20: mol_type = other RNA
tcttcttcctgaatcagagg

SEQ ID NO: 2038 - RNA, 20 nt, synthetic construct
  misc_feature 1..20: note = C9Orf72 ATCN PAM targeting sequence
  source 1..20: mol_type = other RNA
taacacaagattttttaagc

SEQ ID NO: 2039 - RNA, 20 nt, synthetic construct
  misc_feature 1..20: note = C9Orf72 ATCN PAM targeting sequence
  source 1..20: mol_type = other RNA
tgtgttaagatcctcttctt

SEQ ID NO: 2040 - RNA, 20 nt, synthetic construct
  misc_feature 1..20: note = C9Orf72 ATCN PAM targeting sequence
  source 1..20: mol_type = other RNA
gtatatgcataaattattat

SEQ ID NO: 2041 - RNA, 20 nt, synthetic construct
  misc_feature 1..20: note = C9Orf72 ATCN PAM targeting sequence
  source 1..20: mol_type = other RNA
aataaattcagtagaaaaga

SEQ ID NO: 2042 - RNA, 20 nt, synthetic construct
  misc_feature 1..20: note = C9Orf72 ATCN PAM targeting sequence
  source 1..20: mol_type = other RNA
gaatcagctcctaaaatcat

SEQ ID NO: 2043 - RNA, 20 nt, synthetic construct
  misc_feature 1..20: note = C9Orf72 ATCN PAM targeting sequence
  source 1..20: mol_type = other RNA
gctcctaaaatcattttggg

SEQ ID NO: 2044 - RNA, 20 nt, synthetic construct
  misc_feature 1..20: note = C9Orf72 ATCN PAM targeting sequence
  source 1..20: mol_type = other RNA
ttttgggtctattttcctcc

SEQ ID NO: 2045 - RNA, 20 nt, synthetic construct
  misc_feature 1..20: note = C9Orf72 ATCN PAM targeting sequence
  source 1..20: mol_type = other RNA
actaaagttttacaatttaa

SEQ ID NO: 2046 - RNA, 20 nt, synthetic construct
  misc_feature 1..20: note = C9Orf72 ATCN PAM targeting sequence
  source 1..20: mol_type = other RNA
cagagccactgctgatgtat

SEQ ID NO: 2047 - RNA, 20 nt, synthetic construct
  misc_feature 1..20: note = C9Orf72 ATCN PAM targeting sequence
  source 1..20: mol_type = other RNA
gcagtggctctgagatgcaa

SEQ ID NO: 2048 - RNA, 20 nt, synthetic construct
  misc_feature 1..20: note = C9Orf72 ATCN PAM targeting sequence
  source 1..20: mol_type = other RNA
cagaaaagccagaggatgaa

SEQ ID NO: 2049 - RNA, 20 nt, synthetic construct
  misc_feature 1..20: note = C9Orf72 ATCN PAM targeting sequence
  source 1..20: mol_type = other RNA
tctggcttttctgtgatttt

SEQ ID NO: 2050 - RNA, 20 nt, synthetic construct
  misc_feature 1..20: note = C9Orf72 ATCN PAM targeting sequence
  source 1..20: mol_type = other RNA
taaagagacaggactcttgc

SEQ ID NO: 2051 - RNA, 20 nt, synthetic construct
  misc_feature 1..20: note = C9Orf72 ATCN PAM targeting sequence
  source 1..20: mol_type = other RNA
aataaaaaccttctctaaaa

SEQ ID NO: 2052 - RNA, 20 nt, synthetic construct
  misc_feature 1..20: note = C9Orf72 ATCN PAM targeting sequence
  source 1..20: mol_type = other RNA
cgtaaacaaattacttctat

SEQ ID NO: 2053 - RNA, 20 nt, synthetic construct
  misc_feature 1..20: note = C9Orf72 ATCN PAM targeting sequence
  source 1..20: mol_type = other RNA
ttttactgggactattatag

SEQ ID NO: 2054 - RNA, 20 nt, synthetic construct
  misc_feature 1..20: note = C9Orf72 ATCN PAM targeting sequence
  source 1..20: mol_type = other RNA
caggttcttatttaaaactc

SEQ ID NO: 2055 - RNA, 20 nt, synthetic construct
  misc_feature 1..20: note = C9Orf72 ATCN PAM targeting sequence
  source 1..20: mol_type = other RNA
ttatctgtttttaacaactg

SEQ ID NO: 2056 - RNA, 20 nt, synthetic construct
  misc_feature 1..20: note = C9Orf72 ATCN PAM targeting sequence
  source 1..20: mol_type = other RNA
gtttttaacaactggaatat

SEQ ID NO: 2057 - RNA, 20 nt, synthetic construct
  misc_feature 1..20: note = C9Orf72 ATCN PAM targeting sequence
  source 1..20: mol_type = other RNA
tatctaattcaatgtatatt

SEQ ID NO: 2058 - RNA, 20 nt, synthetic construct
  misc_feature 1..20: note = C9Orf72 ATCN PAM targeting sequence
  source 1..20: mol_type = other RNA
aattcaatgtatatttcaaa

SEQ ID NO: 2059 - RNA, 20 nt, synthetic construct
  misc_feature 1..20: note = C9Orf72 ATCN PAM targeting sequence
  source 1..20: mol_type = other RNA
caccttctgaaggacaagtc

SEQ ID NO: 2060 - RNA, 20 nt, synthetic construct
  misc_feature 1..20: note = C9Orf72 ATCN PAM targeting sequence
  source 1..20: mol_type = other RNA
aatactgaaggatctgaact

SEQ ID NO: 2061 - RNA, 20 nt, synthetic construct
  misc_feature 1..20: note = C9Orf72 ATCN PAM targeting sequence
  source 1..20: mol_type = other RNA
ttcagtattagatacattgt

SEQ ID NO: 2062 - RNA, 20 nt, synthetic construct
  misc_feature 1..20: note = C9Orf72 ATCN PAM targeting sequence
  source 1..20: mol_type = other RNA
gaactttgggacaatcactt

SEQ ID NO: 2063 - RNA, 20 nt, synthetic construct
  misc_feature 1..20: note = C9Orf72 ATCN PAM targeting sequence
  source 1..20: mol_type = other RNA
ctttttctagatattgtttg

SEQ ID NO: 2064 - RNA, 20 nt, synthetic construct
  misc_feature 1..20: note = C9Orf72 ATCN PAM targeting sequence
  source 1..20: mol_type = other RNA
agaaaaagtgattgtcccaa

SEQ ID NO: 2065 - RNA, 20 nt, synthetic construct
  misc_feature 1..20: note = C9Orf72 ATCN PAM targeting sequence
  source 1..20: mol_type = other RNA
acagctatcactaaatgttt

SEQ ID NO: 2066 - RNA, 20 nt, synthetic construct
  misc_feature 1..20: note = C9Orf72 ATCN PAM targeting sequence
  source 1..20: mol_type = other RNA
ctaaatgtttatgaattttc

SEQ ID NO: 2067 - RNA, 20 nt, synthetic construct
  misc_feature 1..20: note = C9Orf72 ATCN PAM targeting sequence
  source 1..20: mol_type = other RNA
acaatcaacctttcaattag

SEQ ID NO: 2068 - RNA, 20 nt, synthetic construct
  misc_feature 1..20: note = C9Orf72 ATCN PAM targeting sequence
  source 1..20: mol_type = other RNA
acctttcaattagtcttata

SEQ ID NO: 2069 - RNA, 20 nt, synthetic construct
  misc_feature 1..20: note = C9Orf72 ATCN PAM targeting sequence
  source 1..20: mol_type = other RNA
aacttgagaccgactttgta

SEQ ID NO: 2070 - RNA, 20 nt, synthetic construct
  misc_feature 1..20: note = C9Orf72 ATCN PAM targeting sequence
  source 1..20: mol_type = other RNA
aacttaaatgcatcttgtgg

SEQ ID NO: 2071 - RNA, 20 nt, synthetic construct
  misc_feature 1..20: note = C9Orf72 ATCN PAM targeting sequence
  source 1..20: mol_type = other RNA
tgtggttaaatgctgtggaa

SEQ ID NO: 2072 - RNA, 20 nt, synthetic construct
  misc_feature 1..20: note = C9Orf72 ATCN PAM targeting sequence
  source 1..20: mol_type = other RNA
ataacttataaataatggtt

SEQ ID NO: 2073 - RNA, 20 nt, synthetic construct
  misc_feature 1..20: note = C9Orf72 ATCN PAM targeting sequence
  source 1..20: mol_type = other RNA
ccattaaagtgtgtatagca

SEQ ID NO: 2074 - RNA, 20 nt, synthetic construct
  misc_feature 1..20: note = C9Orf72 ATCN PAM targeting sequence
  source 1..20: mol_type = other RNA
ataagtcacagggttctccc

SEQ ID NO: 2075 - RNA, 20 nt, synthetic construct
  misc_feature 1..20: note = C9Orf72 ATCN PAM targeting sequence
  source 1..20: mol_type = other RNA
tgctgtccaaattatagaaa

SEQ ID NO: 2076 - RNA, 20 nt, synthetic construct
  misc_feature 1..20: note = C9Orf72 ATCN PAM targeting sequence
  source 1..20: mol_type = other RNA
gtactatgctgttttggtta

SEQ ID NO: 2077 - RNA, 20 nt, synthetic construct
  misc_feature 1..20: note = C9Orf72 ATCN PAM targeting sequence
  source 1..20: mol_type = other RNA
ctgttttggtatcagtacta

SEQ ID NO: 2078 - RNA, 20 nt, synthetic construct
  misc_feature 1..20: note = C9Orf72 ATCN PAM targeting sequence
  source 1..20: mol_type = other RNA
acaaccatctgatctttgac

SEQ ID NO: 2079 - RNA, 20 nt, synthetic construct
  misc_feature 1..20: note = C9Orf72 ATCN PAM targeting sequence
  source 1..20: mol_type = other RNA
gatctttgacaaacctgaca

SEQ ID NO: 2080 - RNA, 20 nt, synthetic construct
  misc_feature 1..20: note = C9Orf72 ATCN PAM targeting sequence
  source 1..20: mol_type = other RNA
gatggttgtagatttgtggt

SEQ ID NO: 2081 - RNA, 20 nt, synthetic construct
  misc_feature 1..20: note = C9Orf72 ATCN PAM targeting sequence
  source 1..20: mol_type = other RNA
ttgacaaacctgacaaaaac

SEQ ID NO: 2082 - RNA, 20 nt, synthetic construct
  misc_feature 1..20: note = C9Orf72 ATCN PAM targeting sequence
  source 1..20: mol_type = other RNA
tttccccatttcttgttttt

SEQ ID NO: 2083 - RNA, 20 nt, synthetic construct
  misc_feature 1..20: note = C9Orf72 ATCN PAM targeting sequence
  source 1..20: mol_type = other RNA
agtttcagctttctacatac

SEQ ID NO: 2084 - RNA, 20 nt, synthetic construct
  misc_feature 1..20: note = C9Orf72 ATCN PAM targeting sequence
  source 1..20: mol_type = other RNA
acaaagaacttaaacaaatt

SEQ ID NO: 2085 - RNA, 20 nt, synthetic construct
  misc_feature 1..20: note = C9Orf72 ATCN PAM targeting sequence
  source 1..20: mol_type = other RNA
aaaagtgggcaaaggatatg

SEQ ID NO: 2086 - RNA, 20 nt, synthetic construct
  misc_feature 1..20: note = C9Orf72 ATCN PAM targeting sequence
  source 1..20: mol_type = other RNA
tttgcccactttttgatggg

SEQ ID NO: 2087 - RNA, 20 nt, synthetic construct
  misc_feature 1..20: note = C9Orf72 ATCN PAM targeting sequence
  source 1..20: mol_type = other RNA
tcactggtcattagagaact

SEQ ID NO: 2088 - RNA, 20 nt, synthetic construct
  misc_feature 1..20: note = C9Orf72 ATCN PAM targeting sequence
  source 1..20: mol_type = other RNA
ctggtcattagagaactgca

SEQ ID NO: 2089 - RNA, 20 nt, synthetic construct
  misc_feature 1..20: note = C9Orf72 ATCN PAM targeting sequence
  source 1..20: mol_type = other RNA
aaaccacaatgagataccat

SEQ ID NO: 2090 - RNA, 20 nt, synthetic construct
  misc_feature 1..20: note = C9Orf72 ATCN PAM targeting sequence
  source 1..20: mol_type = other RNA
cattgtggttttgatttgca

SEQ ID NO: 2091 - RNA, 20 nt, synthetic construct
  misc_feature 1..20: note = C9Orf72 ATCN PAM targeting sequence
  source 1..20: mol_type = other RNA
cacactagttagaatgacga

SEQ ID NO: 2092 - RNA, 20 nt, synthetic construct
  misc_feature 1..20: note = C9Orf72 ATCN PAM targeting sequence
  source 1..20: mol_type = other RNA
gttgtttcctgactttttaa

SEQ ID NO: 2093 - RNA, 20 nt, synthetic construct
  misc_feature 1..20: note = C9Orf72 ATCN PAM targeting sequence
  source 1..20: mol_type = other RNA
tctccagcatctgttgtttc

SEQ ID NO: 2094 - RNA, 20 nt, synthetic construct
  misc_feature 1..20: note = C9Orf72 ATCN PAM targeting sequence
  source 1..20: mol_type = other RNA
ccacactgtcttccacaatt

SEQ ID NO: 2095 - RNA, 20 nt, synthetic construct
  misc_feature 1..20: note = C9Orf72 ATCN PAM targeting sequence
  source 1..20: mol_type = other RNA
ttgaggaatcaccacactgt

SEQ ID NO: 2096 - RNA, 20 nt, synthetic construct
  misc_feature 1..20: note = C9Orf72 ATCN PAM targeting sequence
  source 1..20: mol_type = other RNA
agagctagaaataccatttt

SEQ ID NO: 2097 - RNA, 20 nt, synthetic construct
  misc_feature 1..20: note = C9Orf72 ATCN PAM targeting sequence
  source 1..20: mol_type = other RNA
ctgggtaaaatggtatttct

SEQ ID NO: 2098 - RNA, 20 nt, synthetic construct
  misc_feature 1..20: note = C9Orf72 ATCN PAM targeting sequence
  source 1..20: mol_type = other RNA
cattactgggtgtataccca

SEQ ID NO: 2099 - RNA, 20 nt, synthetic construct
  misc_feature 1..20: note = C9Orf72 ATCN PAM targeting sequence
  source 1..20: mol_type = other RNA
tttgggtatacacccagtaa

SEQ ID NO: 2100 - RNA, 20 nt, synthetic construct
  misc_feature 1..20: note = C9Orf72 ATCN PAM targeting sequence
  source 1..20: mol_type = other RNA
tgctactataaagacacatg

SEQ ID NO: 2101 - RNA, 108 nt, synthetic construct
  misc_feature 1..108: note = gNA Variant Scaffold
  source 1..108: mol_type = other RNA
tactggcgcttttatctcattactttgagagccatcaccagcgactatgtcgtatgggtaaagcgcaggtgggacgacctctcggtcgtcctatctgaagcatcaaag

SEQ ID NO: 2102 - RNA, 99 nt, synthetic construct
  misc_feature 1..99: note = gNA Variant Scaffold
  source 1..99: mol_type = other RNA
tactggcgcttttatctcattactttgagagccatcaccagcgactatgtcgtatgggtaaagcgctgctcgacgcgtcctcgagcagaagcatcaaag

SEQ ID NO: 2103 - RNA, 97 nt, synthetic construct
  misc_feature 1..97: note = gNA Variant Scaffold
  source 1..97: mol_type = other RNA
tactggcgcttttatctcattactttgagagccatcaccagcgactatgtcgtatgggtaaagcgctgctcgctccgttcgagcagaagcatcaaag

SEQ ID NO: 2104 - RNA, 91 nt, synthetic construct
  misc_feature 1..91: note = gNA Variant Scaffold
  source 1..91: mol_type = other RNA
gtactggcgcttttatctcattactttgagagccatcaccagcgactatgtcgtatgggtaaagcgccctcttcggagggaagcatcaaag

SEQ ID NO: 2105 - RNA, 99 nt, synthetic construct
  misc_feature 1..99: note = gNA Variant Scaffold
  source 1..99: mol_type = other RNA
tactggcgcttttatctcattactttgagagccatcaccagcgactatgtcgtatgggtaaagcgcaggagtttctatggaaaccctgaagcatcaaag

SEQ ID NO: 2106 - RNA, 99 nt, synthetic construct
  misc_feature 1..99: note = gNA Variant Scaffold
  source 1..99: mol_type = other RNA
gtactggcgcctttatctcattactttgagagccatcaccagcgactatgtcgtatgggtaaagcgcttacggacttcggtccgtaagaagcatcaaag

SEQ ID NO: 2107 - RNA, 90 nt, synthetic construct
  misc_feature 1..90: note = gNA Variant Scaffold
  source 1..90: mol_type = other RNA
tactggcgcttttatctcattactttgagagccatcaccagcgactatgtcgtatgggtaaagcgctgcgcttgcgcagaagcatcaaag

SEQ ID NO: 2108 - RNA, 108 nt, synthetic construct
  misc_feature 1..108: note = gNA Variant Scaffold
  source 1..108: mol_type = other RNA
tactggcgcttttatctgattactttgagagccatcaccagcgactatgtcgtatgggtaaagcgcttatttatcggagagaaatccgataaataagaagcatcaaag

SEQ ID NO: 2109 - RNA, 108 nt, synthetic construct
  misc_feature 1..108: note = gNA Variant Scaffold
  source 1..108: mol_type = other RNA
tactggcgcttttatcgcattactttgagagccatcaccagcgactatgtcgtatgggtaaagcgcttatttatcggagagaaatccgataaataagaagcatcaaag

SEQ ID NO: 2110 - RNA, 110 nt, synthetic construct
  misc_feature 1..110: note = gNA Variant Scaffold
  source 1..110: mol_type = other RNA
tactggcgcttttatctcattactttgagagccatcaccagcgactatgtcgtatgggtaaagcgcttatttatcggagacttcggtccgataaataagaagcatcaaag

SEQ ID NO: 2111 - RNA, 97 nt, synthetic construct
  misc_feature 1..97: note = gNA Variant Scaffold
  source 1..97: mol_type = other RNA
tactggcgcttttatctcattactttgagagccatcaccagcgactatgtcgtatgggtaaagcgcacatgaggattacccatgtgaagcatcaaag

SEQ ID NO: 2112 - RNA, 106 nt, synthetic construct
  misc_feature 1..106: note = gNA Variant Scaffold
  source 1..106: mol_type = other RNA
gctggcgcttttatctcattactttgagagccatcaccagcgactatgtcgtatgggtaaagcgcttatttatcgtgagaaatccgataaataagaagcatcaaag

SEQ ID NO: 2113 - RNA, 96 nt, synthetic construct
  misc_feature 1..96: note = gNA Variant Scaffold
  source 1..96: mol_type = other RNA
tactggcgcttttatctcattactttgagagccatcaccagcgactatgtcgtatgggtaaagcgctgcatgtctaagacagcagaagcatcaaag

SEQ ID NO: 2114 - RNA, 90 nt, synthetic construct
  misc_feature 1..90: note = gNA Variant Scaffold
  source 1..90: mol_type = other RNA
tactggcgcttttatctcattactttgagagccatcaccagcgactatgtcgtatgggtaaagcgcagggcttcggccgaagcatcaaag

SEQ ID NO: 2115 - RNA, 98 nt, synthetic construct
  misc_feature 1..98: note = gNA Variant Scaffold
  source 1..98: mol_type = other RNA
tactggcgcttttatctcattactttgagagccatcaccagcgactatgtcgtatgggtaaagcgcaatccattgcactccggattgaagcatcaaag

SEQ ID NO: 2116 - RNA, 108 nt, synthetic construct
  misc_feature 1..108: note = gNA Variant Scaffold
  source 1..108: mol_type = other RNA
tactggcgcttttctcgcattactttgagagccatcaccagcgactatgtcgtatgggtaaagcgcttatttatcggagagaaatccgataaataagaagcatcaaag

SEQ ID NO: 2117 - RNA, 108 nt, synthetic construct
  misc_feature 1..108: note = gNA Variant Scaffold
  source 1..108: mol_type = other RNA
tactggcgcttttatctcattactttgagagccatcaccagcgactatgtcgtatgggtaaagcgcttatttatcggacttcggtccgataaataagaagcatcaaag

SEQ ID NO: 2118 - RNA, 100 nt, synthetic construct
  misc_feature 1..100: note = gNA Variant Scaffold
  source 1..100: mol_type = other RNA
tactggcgcttttatctcattactttgagagccatcaccagcgactatgtcgtatgggtaaagcgctgctcgtttgcggctacgagcagaagcatcaaag

SEQ ID NO: 2119 - RNA, 100 nt, synthetic construct
  misc_feature 1..100: note = gNA Variant Scaffold
  source 1..100: mol_type = other RNA
tactggcgcttttatctcattactttgagagccatcaccagcgactatgtcgtatgggtaaagcgcttatttatcgagagataaataagaagcatcaaag

SEQ ID NO: 2120 - RNA, 107 nt, synthetic construct
  misc_feature 1..107: note = gNA Variant Scaffold
  source 1..107: mol_type = other RNA
tacggcgcttttatctcattactttgagagccatcaccagcgactatgtcgtatgggtaaagcgcttatttatcggagagaaatccgataaataagaagcatcaaag

SEQ ID NO: 2121 - RNA, 99 nt, synthetic construct
  misc_feature 1..99: note = gNA Variant Scaffold
  source 1..99: mol_type = other RNA
tactggcgccttttatctcattactttgagagccatcaccagcgactatgtcgtatgggtaaagcgcttacggacttcggtccgtaagaagcatcaaag

SEQ ID NO: 2122 - RNA, 108 nt, synthetic construct
  misc_feature 1..108: note = gNA Variant Scaffold
  source 1..108: mol_type = other RNA
tactggcgcttttatctcattactttgagagccatcaccagcgactatgtcgtatcggtaaagcgcttatttatcggagagaaatccgataaataagaagcatcaaag

SEQ ID NO: 2123 - RNA, 108 nt, synthetic construct
  misc_feature 1..108: note = gNA Variant Scaffold
  source 1..108: mol_type = other RNA
tactggcgcctttatctcattactttgagagccatcaccagcgactatgtcgtatgggtaaagcgcttatttatcggacttcggtccgataaataagaagcatcaaag

SEQ ID NO: 2124 - RNA, 105 nt, synthetic construct
  misc_feature 1..105: note = gNA Variant Scaffold
  source 1..105: mol_type = other RNA
tactggcgcttttatctcattactttgagagccatcaccagcgactatgtcgtatgggtaaagcgcttatttatcgagaaatccgataaataagaagcatcaaag

SEQ ID NO: 2125 - RNA, 103 nt, synthetic construct
  misc_feature 1..103: note = gNA Variant Scaffold
  source 1..103: mol_type = other RNA
gcgcttttatctcattactttgagagccatcaccagcgactatgtcgtatgggtaaagcgcttatttatcggagagaaatccgataaataagaagcatcaaag

SEQ ID NO: 2126 - RNA, 103 nt, synthetic construct
  misc_feature 1..103: note = gNA Variant Scaffold
  source 1..103: mol_type = other RNA
tactggcgcttttatctcattactttgagagccatcaccagcgactatgtcgtatgggtaaagcgcttatttatcggagagagataaataagaagcatcaaag

SEQ ID NO: 2127 - RNA, 108 nt, synthetic construct
  misc_feature 1..108: note = gNA Variant Scaffold
  source 1..108: mol_type = other RNA
tactggcgcttttatctcattactttggagagccatcaccagcgactatgtcgtatgggtaaagcgcttatttatcggagagtatccgataaataagaagcatcaaag

SEQ ID NO: 2128 - RNA, 109 nt, synthetic construct
  misc_feature 1..109: note = gNA Variant Scaffold
  source 1..109: mol_type = other RNA
tactggcgcttttatctcattactttgagagccatcaccagcgactatgttcgtatgggtaaagcgcttatttatcggagagaaatccgataaataagaagcatcaaag

SEQ ID NO: 2129 - RNA, 105 nt, synthetic construct
  misc_feature 1..105: note = gNA Variant Scaffold
  source 1..105: mol_type = other RNA
agcgcttttatctcattactttgagagccatcaccagcgactatgtcgtatgggtaaagcgcttatttatcggagagaaatgccgataaataagaagcatcaaag

SEQ ID NO: 2130 - RNA, 109 nt, synthetic construct
  misc_feature 1..109: note = gNA Variant Scaffold
  source 1..109: mol_type = other RNA
tactggcgcttttatctcattactttgagagccatcaccagcgactatgtcgtatgggtaaagcgcttatttatcggagagaaatccgataaaataagaagcatcaaag

SEQ ID NO: 2131 - RNA, 109 nt, synthetic construct
  misc_feature 1..109: note = gNA Variant Scaffold
  source 1..109: mol_type = other RNA
tactggcgcttttatctcattactttgagagccatcaccagcgactatgtcgtatgggtaaagcgcttattgtatcggagagaaatccgataaataagaagcatcaaag

SEQ ID NO: 2132 - RNA, 102 nt, synthetic construct
  misc_feature 1..102: note = gNA Variant Scaffold
  source 1..102: mol_type = other RNA
gcgcttttatctcattactttgagagccatcaccagcgactatgtcgtatgggtaaagcgcttatttatcggacttcggtccgataaataagcgcatcaaag

SEQ ID NO: 2133 - RNA, 108 nt, synthetic construct
  misc_feature 1..108: note = gNA Variant Scaffold
  source 1..108: mol_type = other RNA
tactggcgcttttctctcattactttgagagccatcaccagcgactatgtcgtatgggtaaagcgcttatttatcggagagaaatccgataaataagaagcatcaaag

SEQ ID NO: 2134 - RNA, 106 nt, synthetic construct
  misc_feature 1..106: note = gNA Variant Scaffold
  source 1..106: mol_type = other RNA
gtggcgcttttatctcattactttgagagccatcaccagcgactatgtcgtatgggtaaagcgcttatttatcggagagaaatccgataaataagaagcatcaaag

SEQ ID NO: 2135 - RNA, 110 nt, synthetic construct
  misc_feature 1..110: note = gNA Variant Scaffold
  source 1..110: mol_type = other RNA
tactggcgcttttatctcattactttgagagccatcaccagcgaccttatgtcgtatgggtaaagcgcttatttatcggagagaaatccgataaataagaagcatcaaag

SEQ ID NO: 2136 - RNA, 107 nt, synthetic construct
  misc_feature 1..107: note = gNA Variant Scaffold
  source 1..107: mol_type = other RNA
gatggcgcttttatctcattactttgagagccatcaccagcgactatgtcgtatgggtaaagcgcttatttatcggacttcggtccgataaataagaagcatcaaag

SEQ ID NO: 2137 - RNA, 106 nt, synthetic construct
  misc_feature 1..106: note = gNA Variant Scaffold
  source 1..106: mol_type = other RNA
tactggcgcttttatctcattactttgagagccatcaccagcgactatgtcgtatgggtaaagcgcttatttatcggagagaaatccgataaaagaagcatcaaag

SEQ ID NO: 2138 - RNA, 109 nt, synthetic construct
  misc_feature 1..109: note = gNA Variant Scaffold
  source 1..109: mol_type = other RNA
tactggcgcttttatctcattactttgagagccatcaccagcgatctatgtcgtatgggtaaagcgcttatttatcggagagaaatccgataaataagaagcatcaaag

SEQ ID NO: 2139 - RNA, 106 nt, synthetic construct
  misc_feature 1..106: note = gNA Variant Scaffold
  source 1..106: mol_type = other RNA
tactggcgcttttatctcattactttgagagccatcaccagcgactatgtcgtatgggtaaaggcttatttatcggagagaaatccgataaaaagaagcatcaaag

SEQ ID NO: 2140 - RNA, 107 nt, synthetic construct
  misc_feature 1..107: note = gNA Variant Scaffold
  source 1..107: mol_type = other RNA
tactggcgcttttatctcattactttgagagccatcaccagcgactatgtcgtatgggtaaagcgcttatttatcggagagaaatccgataaaaagaagcatcaaag

SEQ ID NO: 2141 - RNA, 107 nt, synthetic construct
  misc_feature 1..107: note = gNA Variant Scaffold
  source 1..107: mol_type = other RNA
tactggcgctttatctcattactttgagagccatcaccagcgactatgtcgtatgggtaaagcgcttatttatcggacttcggtccgataaataagaagcatcaaag

SEQ ID NO: 2142 - RNA, 98 nt, synthetic construct
  misc_feature 1..98: note = gNA Variant Scaffold
  source 1..98: mol_type = other RNA
cggcgcttttctcgcattactttgagagccatcaccagcgactatgtcgtatgggtaaagcgcttattgtatcgagagataaataagaagcatcaaag

SEQ ID NO: 2143 - RNA, 107 nt, synthetic construct
  misc_feature 1..107: note = gNA Variant Scaffold
  source 1..107: mol_type = other RNA
cactggcgcttttatctcattactttgagagccatcaccagcgactatgtcgtatgggtaaagcgcttattttcggagagaaatccgataaataagaagcatcaaag

SEQ ID NO: 2144 - RNA, 106 nt, synthetic construct
  misc_feature 1..106: note = gNA Variant Scaffold
  source 1..106: mol_type = other RNA
tactggcgctttatctcattactttgagagccatcaccagcgacttcggtcgtatgggtaaagcgcttatgtatcggcttcggccgatacataagaagcatcaaag

SEQ ID NO: 2145 - RNA, 107 nt, synthetic construct
  misc_feature 1..107: note = gNA Variant Scaffold
  source 1..107: mol_type = other RNA
tactggcgcttttatctcattactttgagagccatcaccagcgacttcggtcgtatgggtaaagcgcttatgtatcggcttcggccgatacataagaagcatcaaag

SEQ ID NO: 2146 - RNA, 109 nt, synthetic construct
  misc_feature 1..109: note = gNA Variant Scaffold
  source 1..109: mol_type = other RNA
tactggcgcttttatctcattactttgagagccatcaccagcgactatgtcgtatgggtgaaagcgcttatttatcggagagaaatccgataaataagaagcatcaaag

SEQ ID NO: 2147 - RNA, 64 nt, synthetic construct
  misc_feature 1..64: note = gNA Variant Scaffold
  source 1..64: mol_type = other RNA
tactggcgcttttatctcattactttgagagccatcaccagcgacttcggtcgtatgggtaaag

SEQ ID NO: 2148 - RNA, 62 nt, synthetic construct
  misc_feature 1..62: note = gNA Variant Scaffold
  source 1..62: mol_type = other RNA
gatgggcttttatctcattactttgagagccatcaccagcgacttcggtcgtatgggtaaag

SEQ ID NO: 2149 - RNA, 105 nt, synthetic construct
  misc_feature 1..105: note = gNA Variant Scaffold
  source 1..105: mol_type = other RNA
gatgggcttttatctcattactttgagagccatcaccagcgacttcggtcgtatgggtaaagcgcttatttatcggcttcggccgataaataagaagcatcaaag

SEQ ID NO: 2150 - RNA, 156 nt, synthetic construct
  misc_feature 1..156: note = gNA Variant Scaffold
  source 1..156: mol_type = other RNA
tactggcgcttttatctcattactttgagagccatcaccagcgactatgtcgtatgggtaaagcgctacactgggatcgctgaattagagatcggcgtcctttcattctatatactttggagttttaaaatgtctctaagtacagaagcatcaaag

SEQ ID NO: 2151 - RNA, 103 nt, synthetic construct
  misc_feature 1..103: note = gNA Variant Scaffold
  source 1..103: mol_type = other RNA
ggcgcttttatctcattactttgagagccatcaccagcgacttcggtcgtatgggtaaagcgcttatttatcggcttcggccgataaataagaagcatcaaag

SEQ ID NO: 2152 - RNA, 106 nt, synthetic construct
  misc_feature 1..106: note = gNA Variant Scaffold
  source 1..106: mol_type = other RNA
gctggcgcttttatctcattactttgagagccatcaccagcgacttcggtcgtatgggtaaagcgcttatttatcggcttcggccgataaataagaagcatcaaag

SEQ ID NO: 2153 - RNA, 109 nt, synthetic construct
  misc_feature 1..109: note = gNA Variant Scaffold
  source 1..109: mol_type = other RNA
tactggcgcttttatctcattactttgagagccatcaccagcgacttcggtcgtatgggtaaagcgcttatttatcggagagaaatccgataaataagaagcatcaaag

SEQ ID NO: 2154 - RNA, 112 nt, synthetic construct
  misc_feature 1..112: note = gNA Variant Scaffold
  source 1..112: mol_type = other RNA
tactggcgcttttatctcattactttgagagccatgctccaccagcgactatgtcgtatgggtaaagcgcttatttatcggagagaaatccgataaataagaagcatcaaag

SEQ ID NO: 2155 - RNA, 97 nt, synthetic construct
  misc_feature 1..97: note = gNA Variant Scaffold
  source 1..97: mol_type = other RNA
tactggcgcttttatctcattactttgagagccatcaccagcgactatgtcgtatgggtaaagcggggttagggttagggttagggaagcatcaaag

SEQ ID NO: 2156 - RNA, 96 nt, synthetic construct
  misc_feature 1..96: note = gNA Variant Scaffold
  source 1..96: mol_type = other RNA
tactggcgcttttatctcattactttgagagccatcaccagcgactatgtcgtatgggtaaagcggagggagggagggagagggaaagcatcaaag

SEQ ID NO: 2157 - RNA, 101 nt, synthetic construct
  misc_feature 1..101: note = gNA Variant Scaffold
  source 1..101: mol_type = other RNA
tactggcgcttttatctcattactttgagagccatcaccagcgactatgtcgtatgggtaaagcgttgggttagggttagggttagggaaaagcatcaaag

SEQ ID NO: 2158 - RNA, 91 nt, synthetic construct
  misc_feature 1..91: note = gNA Variant Scaffold
  source 1..91: mol_type = other RNA
tactggcgcttttatctcattactttgagagccatcaccagcgactatgtcgtatgggtaaagcgcagggcttcggccggaagcatcaaag

SEQ ID NO: 2159 - RNA, 103 nt, synthetic construct
  misc_feature 1..103: note = gNA Variant Scaffold
  source 1..103: mol_type = other RNA
tactggcgcttttatctcattactttgagagccatcaccagcgactatgtcgtatgggtaaagcgcctgctcagtacgagaggaaccgcaggaagcatcaaag

SEQ ID NO: 2160 - RNA, 90 nt, synthetic construct
  misc_feature 1..90: note = gNA Variant Scaffold
  source 1..90: mol_type = other RNA
tactggcgcttttatctgattactttgagagccatcaccagcgactatgtcgtatgggtaaagcgccctcttcggagggaagcatcaaag

SEQ ID NO: 2161 - RNA, 98 nt, synthetic construct
  misc_feature 1..98: note = gNA Variant Scaffold
  source 1..98: mol_type = other RNA
tactggcgcctttatctgattactttgagagccatcaccagcgactatgtcgtatgggtaaagcgcttacggacttcggtccgtaagaagcatcaaag

SEQ ID NO: 2162 - RNA, 98 nt, synthetic construct
  misc_feature 1..98: note = gNA Variant Scaffold
  source 1..98: mol_type = other RNA
tactggcgcttttatctgattactttgagagccatcaccagcgactatgtcgtatgggtaaagcgcggacgacctctcggtcgtccgaagcatcaaag

SEQ ID NO: 2163 - RNA, 108 nt, synthetic construct
  misc_feature 1..108: note = gNA Variant Scaffold
  source 1..108: mol_type = other RNA
tactggcgcttttatctgattactttgagagccatcaccagcgactatgtcgtatgggtaaagcgcaggtgggacgacctctcggtcgtcctatctgaagcatcaaag

SEQ ID NO: 2164 - RNA, 99 nt, synthetic construct
  misc_feature 1..99: note = gNA Variant Scaffold
  source 1..99: mol_type = other RNA
tactggcgcctttatctgcattactttgagagccatcaccagcgactatgtcgtatgggtaaagcgcttacggacttcggtccgtaagaagcatcaaag

SEQ ID NO: 2165 - RNA, 97 nt, synthetic construct
  misc_feature 1..97: note = gNA Variant Scaffold
  source 1..97: mol_type = other RNA
gctggcgcttttatctgattactttgagagccatcaccagcgactatgtcgtatgggtaaagcgcttacggacttcggtccgtaagaagcatcaaag

SEQ ID NO: 2166 - RNA, 108 nt, synthetic construct
  misc_feature 1..108: note = gNA Variant Scaffold
  source 1..108: mol_type = other RNA
tactggcgcctttatctgattactttgagagccatcaccagcgactatgtcgtatgggtaaagcgcaggtgggacgacctctcggtcgtcctatctgaagcatcaaag

SEQ ID NO: 2167 - RNA, 98 nt, synthetic construct
  misc_feature 1..98: note = gNA Variant Scaffold
  source 1..98: mol_type = other RNA
tactggcgcctttatctgattactttgagagccatcaccagcgactatgtcgtatgggtaaagcgcggacgacctctcggtcgtccgaagcatcaaag

SEQ ID NO: 2168 - RNA, 90 nt, synthetic construct
  misc_feature 1..90: note = gNA Variant Scaffold
  source 1..90: mol_type = other RNA
tactggcgcctttatctcattactttgagagccatcaccagcgactatgtcgtatgggtaaagcgccctcttcggagggaagcatcaaag

SEQ ID NO: 2169 - RNA, 98 nt, synthetic construct
  misc_feature 1..98: note = gNA Variant Scaffold
  source 1..98: mol_type = other RNA
tactggcgcttttatctcattactttgagagccatcaccagcgactatgtcgtatgggtaaagcgcttacggacttcggtccgtaagaagcatcaaag

SEQ ID NO: 2170 - RNA, 99 nt, synthetic construct
  misc_feature 1..99: note = gNA Variant Scaffold
  source 1..99: mol_type = other RNA
tactggcgcctttatcatcattactttgagagccatcaccagcgactatgtcgtatgggtaaagcgcttacggacttcggtccgtaagaagcatcaaag

SEQ ID NO: 2171 - RNA, 194 nt, synthetic construct
  misc_feature 1..194: note = gNA Variant Scaffold
  source 1..194: mol_type = other RNA
tactggcgcttttatctcattactttgagagccatcaccagcgactatgtcgtatgggtaaagcgcttatttatcggagagaaatccgataaataagaagcatcaaagggccggcatggtcccagcctcctcgctggcgccggctgggcaacattccgaggggaccgtcccctcggtaatggcgaatgggaccc

SEQ ID NO: 2172 - RNA, 108 nt, synthetic construct
  misc_feature 1..108: note = gNA Variant Scaffold
  source 1..108: mol_type = other RNA
tactggcgcctttatctcattactttgagagccatcaccagcgactatgtcgtatgggtaaagcgcaggtgggacgacctctcggtcgtcctatctgaagcatcaaag

SEQ ID NO: 2173 - RNA, 106 nt, synthetic construct
  misc_feature 1..106: note = gNA Variant Scaffold
  source 1..106: mol_type = other RNA
tactggcgcttttatctcattactttgagagccatcaccagcgactatgtcgtatgggtaaagcgcttatttatcggagaaatccgataaataagaagcatcaaag

SEQ ID NO: 2174 - RNA, 98 nt, synthetic construct
  misc_feature 1..98: note = gNA Variant Scaffold
  source 1..98: mol_type = other RNA
tactggcgcctttatctcattactttgagagccatcaccagcgactatgtcgtatgggtaaagcgcggacgacctctcggtcgtccgaagcatcaaag

SEQ ID NO: 2175 - RNA, 92 nt, synthetic construct
  misc_feature 1..92: note = gNA Variant Scaffold
  source 1..92: mol_type = other RNA
tactggcgcttttatctcattactttgagagccatcaccagcgactatgtcgtatgggtaaagcgccggacttcggtccggaagcatcaaag

SEQ ID NO: 2176 - RNA, 108 nt, synthetic construct
  misc_feature 1..108: note = gNA Variant Scaffold
  source 1..108: mol_type = other RNA
tactggcgcttttatcggattactttgagagccatcaccagcgactatgtcgtatgggtaaagcgcttatttatcggagagaaatccgataaataagaagcatcaaag

SEQ ID NO: 2177 - RNA, 98 nt, synthetic construct
  misc_feature 1..98: note = gNA Variant Scaffold
  source 1..98: mol_type = other RNA
tactggcgcttttatctcattactttgagagccatcaccagcgactatgtcgtatgggtaaagcgcggacgacctctcggtcgtccgaagcatcaaag

SEQ ID NO: 2178 - RNA, 89 nt, synthetic construct
  misc_feature 1..89: note = gNA Variant Scaffold
  source 1..89: mol_type = other RNA
gctggcgcttttatctgattactttgagagccatcaccagcgactatgtcgtatgggtaaagcgccctcttcggagggaagcatcaaag

SEQ ID NO: 2179 - RNA, 88 nt, synthetic construct
  misc_feature 1..88: note = gNA Variant Scaffold
  source 1..88: mol_type = other RNA
gctggcgcctttatctgattactttgagagccatcaccagcgactatgtcgtatgggtaaagctccctcttcggagggagcatcaaag

SEQ ID NO: 2180 - RNA, 197 nt, synthetic construct
  misc_feature 1..197: note = gNA Variant Scaffold
  source 1..197: mol_type = other RNA
tactggcgcttttatctcattactttgagagccatcaccagcgactatgtcgtatgggtaaagcgcttatttatcggagagaaatccgataaataagaagcatcaaaggggtcggcatggcatctccacctcctcgcggtccgacctgggcatccgaaggaggacgcacgtccactcggatggctaagggagagcca

SEQ ID NO: 2181 - RNA, 88 nt, synthetic construct
  misc_feature 1..88: note = gNA Variant Scaffold
  source 1..88: mol_type = other RNA
gctggcgcctttatctgattactttgagagccatcaccagcgactatgtcgtatgggtaaagcgccctcttcggagggcgcatcaaag

SEQ ID NO: 2182 - RNA, 186 nt, synthetic construct
  misc_feature 1..186: note = gNA Variant Scaffold
  source 1..186: mol_type = other RNA
tactggcgcttttatctcattactttgagagccatcaccagcgactatgtcgtatgggtaaagcgcttatttatcggagagaaatccgataaataagaagcatcaaagttttggccggcatggtcccagcctcctcgctggcgccggctgggcaacatgcttcggcatggcgaatgggaccccggg

SEQ ID NO: 2183 - RNA, 97 nt, synthetic construct
  misc_feature 1..97: note = gNA Variant Scaffold
  source 1..97: mol_type = other RNA
gatggcgcctttatctcattactttgagagccatcaccagcgactatgtcgtatgggtaaagcgcttacggacttcggtccgtaagaagcatcaaag

SEQ ID NO: 2184 - RNA, 89 nt, synthetic construct
  misc_feature 1..89: note = gNA Variant Scaffold
  source 1..89: mol_type = other RNA
gctggcgcttttatctcattactttgagagccatcaccagcgactatgtcgtatgggtaaagcgccctcttcggagggaagcatcaaag

SEQ ID NO: 2185 - RNA, 96 nt, synthetic construct
  misc_feature 1..96: note = gNA Variant Scaffold
  source 1..96: mol_type = other RNA
gctggcgcctttatctgattactttgagagccatcaccagcgactatgtcgtatgggtaaagctcttacggacttcggtccgtaagagcatcaaag

SEQ ID NO: 2186 - RNA, 96 nt, synthetic construct
  misc_feature 1..96: note = gNA Variant Scaffold
  source 1..96: mol_type = other RNA
gctggcgcctttatctgattactttgagagccatcaccagcgactatgtcgtatgggtaaagctcggacgacctctcggtcgtccgagcatcaaag

SEQ ID NO: 2187 - RNA, 160 nt, synthetic construct
  misc_feature 1..160: note = gNA Variant Scaffold
  source 1..160: mol_type = other RNA
tactggcgcttttatctcattactttgagagccatcaccagcgactatgtcgtatgggtaaagcgcttatttatcggagagaaatccgataaataagaagcatcaaagcctgtcaccggatgtgctttccggtctgatgagtccgtgaggacgaaacagg

SEQ ID NO: 2188 - RNA, 97 nt, synthetic construct
  misc_feature 1..97: note = gNA Variant Scaffold
  source 1..97: mol_type = other RNA
gctggcgcttttatctgattactttgagagccatcaccagcgactatgtcgtatgggtaaagcgcggacgacctctcggtcgtccgaagcatcaaag

SEQ ID NO: 2189 - RNA, 97 nt, synthetic construct
  misc_feature 1..97: note = gNA Variant Scaffold
  source 1..97: mol_type = other RNA
gctggcgcctttatctgattactttgagagccatcaccagcgactatgtcgtatgggtaaagcgcggacgacctctcggtcgtccgaagcatcaaag

SEQ ID NO: 2190 - RNA, 106 nt, synthetic construct
  misc_feature 1..106: note = gNA Variant Scaffold
  source 1..106: mol_type = other RNA
gctggcgcctttatctgattactttgagagccatcaccagcgactatgtcgtatgggtaaagctcaggtgggacgacctctcggtcgtcctatctgagcatcaaag

SEQ ID NO: 2191 - RNA, 177 nt, synthetic construct
  misc_feature 1..177: note = gNA Variant Scaffold
  source 1..177: mol_type = other RNA
tactggcgcttttatctcattactttgagagccatcaccagcgactatgtcgtatgggtaaagcgcttatttatcggagagaaatccgataaataagaagcatcaaaggatggccggcatggtcccagcctcctcgctggcgccggctgggcaacaccttcgggtggcgaatgggac

SEQ ID NO: 2192 - RNA, 107 nt, synthetic construct
  misc_feature 1..107: note = gNA Variant Scaffold
  source 1..107: mol_type = other RNA
gctggcgcttttatctgattactttgagagccatcaccagcgactatgtcgtatgggtaaagcgcaggtgggacgacctctcggtcgtcctatctgaagcatcaaag

SEQ ID NO: 2193 - RNA, 109 nt, synthetic construct
  misc_feature 1..109: note = gNA Variant Scaffold
  source 1..109: mol_type = other RNA
tactggcgcttttatctcattactttgagagccatcaccagcgactatgtcgtactgggtaaagcgcttatttatcggagagaaatccgataaataagaagcatcaaag

SEQ ID NO: 2194 - RNA, 107 nt, synthetic construct
  misc_feature 1..107: note = gNA Variant Scaffold
  source 1..107: mol_type = other RNA
tactggcgcttttatctcattactttgagagccatcaccagcgactatgtcgtatgggtaaagcgcttatttatcgtgagaaatccgataaataagaagcatcaaag

SEQ ID NO: 2195 - RNA, 109 nt, synthetic construct
  misc_feature 1..109: note = gNA Variant Scaffold
  source 1..109: mol_type = other RNA
gtactggcgcttttatctcattactttgagagccatcaccagcgactatgtcgtatgggtaaagcgcttatttatcggagagaaatccgataaataagaagcatcaaag

SEQ ID NO: 2196 - RNA, 97 nt, synthetic construct
  misc_feature 1..97: note = gNA Variant Scaffold
  source 1..97: mol_type = other RNA
gctggcgcttttatctcattactttgagagccatcaccagcgactatgtcgtatgggtaaagcgcggacgacctctcggtcgtccgaagcatcaaag

SEQ ID NO: 2197 - RNA, 97 nt, synthetic construct
  misc_feature 1..97: note = gNA Variant Scaffold
  source 1..97: mol_type = other RNA
gctggcgcctttatctgattactttgagagccatcaccagcgactatgtcgtatgggtaaagcgcttacggacttcggtccgtaagaagcatcaaag

SEQ ID NO: 2198 - RNA, 107 nt, synthetic construct
  misc_feature 1..107: note = gNA Variant Scaffold
  source 1..107: mol_type = other RNA
gctggcgcttttatctcattactttgagagccatcaccagcgactatgtcgtatgggtaaagcgcttatttatcggagagaaatccgataaataagaagcatcaaag

SEQ ID NO: 2199 - RNA, 97 nt, synthetic construct
  misc_feature 1..97: note = gNA Variant Scaffold
  source 1..97: mol_type = other RNA
gctggcgcctttatctcattactttgagagccatcaccagcgactatgtcgtatgggtaaagcgcttacggacttcggtccgtaagaagcatcaaag

SEQ ID NO: 2200 - RNA, 89 nt, synthetic construct
  misc_feature 1..89: note = gNA Variant Scaffold
  source 1..89: mol_type = other RNA
gctggcgcctttatctgattactttgagagccatcaccagcgactatgtcgtatgggtaaagcgccctcttcggagggaagcatcaaag

SEQ ID NO: 2201 - RNA, 107 nt, synthetic construct
  misc_feature 1..107: note = gNA Variant Scaffold
  source 1..107: mol_type = other RNA
gctggcgcttttatctcattactttgagagccatcaccagcgactatgtcgtatgggtaaagcgcaggtgggacgacctctcggtcgtcctatctgaagcatcaaag

SEQ ID NO: 2202 - RNA, 107 nt, synthetic construct
  misc_feature 1..107: note = gNA Variant Scaffold
  source 1..107: mol_type = other RNA
gctggcgcctttatctcattactttgagagccatcaccagcgactatgtcgtatgggtaaagcgcaggtgggacgacctctcggtcgtcctatctgaagcatcaaag

SEQ ID NO: 2203 - RNA, 107 nt, synthetic construct
  misc_feature 1..107: note = gNA Variant Scaffold
  source 1..107: mol_type = other RNA
gctggcgcctttatctgattactttgagagccatcaccagcgactatgtcgtatgggtaaagcgcaggtgggacgacctctcggtcgtcctatctgaagcatcaaag

SEQ ID NO: 2204 - RNA, 98 nt, synthetic construct
  misc_feature 1..98: note = gNA Variant Scaffold
  source 1..98: mol_type = other RNA
tactggcgcttttatctgattactttgagagccatcaccagcgactatgtcgtatgggtaaagcgcttacggacttcggtccgtaagaagcatcaaag

SEQ ID NO: 2205 - RNA, 89 nt, synthetic construct
  misc_feature 1..89: note = gNA Variant Scaffold
  source 1..89: mol_type = other RNA
gctggcgcctttatctcattactttgagagccatcaccagcgactatgtcgtatgggtaaagcgccctcttcggagggaagcatcaaag

SEQ ID NO: 2206 - RNA, 97 nt, synthetic construct
  misc_feature 1..97: note = gNA Variant Scaffold
  source 1..97: mol_type = other RNA
gctggcgcttttatctcattactttgagagccatcaccagcgactatgtcgtatgggtaaagcgcttacggacttcggtccgtaagaagcatcaaag

SEQ ID NO: 2207 - RNA, 97 nt, synthetic construct
  misc_feature 1..97: note = gNA Variant Scaffold
  source 1..97: mol_type = other RNA
gctggcgcctttatctcattactttgagagccatcaccagcgactatgtcgtatgggtaaagcgcggacgacctctcggtcgtccgaagcatcaaag

SEQ ID NO: 2208 - RNA, 177 nt, synthetic construct
  misc_feature 1..177: note = gNA Variant Scaffold
  source 1..177: mol_type = other RNA
gatggccggcatggtcccagcctcctcgctggcgccggctgggcaacaccttcgggtggcgaatgggactactggcgcttttatctcattactttgagagccatcaccagcgactatgtcgtatgggtaaagcgcttatttatcggagagaaatccgataaataagaagcatcaaag

SEQ ID NO: 2209 - RNA, 194 nt, synthetic construct
  misc_feature 1..194: note = gNA Variant Scaffold
  source 1..194: mol_type = other RNA
ggccggcatggtcccagcctcctcgctggcgccggctgggcaacattccgaggggaccgtcccctcggtaatggcgaatgggaccctactggcgcttttatctcattactttgagagccatcaccagcgactatgtcgtatgggtaaagcgcttatttatcggagagaaatccgataaataagaagcatcaaag

SEQ ID NO: 2210 - RNA, 96 nt, synthetic construct
  misc_feature 1..96: note = gNA Variant Scaffold
  source 1..96: mol_type = other RNA
gctggcgcctttatctgattactttgagagccatcaccagcgactatgtcgtatgggtaaagcgcttacggacttcggtccgtaagcgcatcaaag

SEQ ID NO: 2211 - RNA, 172 nt, synthetic construct
  misc_feature 1..172: note = gNA Variant Scaffold
  source 1..172: mol_type = other RNA
cgtggttagggccacgttaaatagttgcttaagccctaagcgttgatcttcggatcaggtgcaatactggcgcttttatctcattactttgagagccatcaccagcgactatgtcgtatgggtaaagcgcttatttatcggagagaaatccgataaataagaagcatcaaag

SEQ ID NO: 2212 - RNA, 197 nt, synthetic construct
  misc_feature 1..197: note = gNA Variant Scaffold
  source 1..197: mol_type = other RNA
gggtcggcatggcatctccacctcctcgcggtccgacctgggcatccgaaggaggacgcacgtccactcggatggctaagggagagccatactggcgcttttatctcattactttgagagccatcaccagcgactatgtcgtatgggtaaagcgcttatttatcggagagaaatccgataaataagaagcatcaaag

SEQ ID NO: 2213 - RNA, 171 nt, synthetic construct
  misc_feature 1..171: note = gNA Variant Scaffold
  source 1..171: mol_type = other RNA
tactggcgcttttatctcattactttgagagccatcaccagcgactatgtcgtatgggtaaagcgcttatttatcggagagaaatccgataaataagaagcatcaaagccagtactgatgagtccgtgaggacgaaacgagtaagctcgtctactggcgcttttatctcat

SEQ ID NO: 2214 - RNA, 99 nt, synthetic construct
  misc_feature 1..99: note = gNA Variant Scaffold
  source 1..99: mol_type = other RNA
tactggcgcctttatctcattactttagagagccatcaccagcgactatgtcgtatgggtaaagcgcttacggacttcggtccgtaagaagcatcaaag

SEQ ID NO: 2215 - RNA, 157 nt, synthetic construct
  misc_feature 1..157: note = gNA Variant Scaffold
  source 1..157: mol_type = other RNA
cgactactgatgagtccgtgaggacgaaacgagtaagctcgtctagtcgtactggcgcttttatctcattactttgagagccatcaccagcgactatgtcgtatgggtaaagcgcttatttatcggagagaaatccgataaataagaagcatcaaag

SEQ ID NO: 2216 - RNA, 106 nt, synthetic construct
  misc_feature 1..106: note = gNA Variant Scaffold
  source 1..106: mol_type = other RNA
gctggcgcctttatctgattactttgagagccatcaccagcgactatgtcgtatgggtaaagcgcaggtgggacgacctctcggtcgtcctatctgcgcatcaaag

SEQ ID NO: 2217 - RNA, 97 nt, synthetic construct
  misc_feature 1..97: note = gNA Variant Scaffold
  source 1..97: mol_type = other RNA
tactggcgcctttatctcattactttagagccatcaccagcgactatgtcgtatgggtaaagcgcttacggacttcggtccgtaagaagcatcaaag

SEQ ID NO: 2218 - RNA, 186 nt, synthetic construct
  misc_feature 1..186: note = gNA Variant Scaffold
  source 1..186: mol_type = other RNA
tactggcgcttttatctcattactttgagagccatcaccagcgactatgtcgtatgggtaaagcgcttatttatcggagagaaatccgataaataagaagcatcaaagcattcctcagaaaatgacaaacctgtggggcgtaagtagatcttcggatctatgatcgtgcagacgttaaaatcaggt

SEQ ID NO: 2219 - RNA, 171 nt, synthetic construct
  misc_feature 1..171: note = gNA Variant Scaffold
  source 1..171: mol_type = other RNA
tactggcgcttttatctcattactttgagagccatcaccagcgactatgtcgtatgggtaaagcgcttatttatcggagagaaatccgataaataagaagcatcaaagcgactactgatgagtccgtgaggacgaaacgagtaagctcgtctagtcgcgtgtagcgaagca

SEQ ID NO: 2220 - RNA, 186 nt, synthetic construct
  misc_feature 1..186: note = gNA Variant Scaffold
  source 1..186: mol_type = other RNA
cattcctcagaaaatgacaaacctgtggggcgtaagtagatcttcggatctatgatcgtgcagacgttaaaatcaggttactggcgcttttatctcattactttgagagccatcaccagcgactatgtcgtatgggtaaagcgcttatttatcggagagaaatccgataaataagaagcatcaaag

SEQ ID NO: 2221 - RNA, 186 nt, synthetic construct
  misc_feature 1..186: note = gNA Variant Scaffold
  source 1..186: mol_type = other RNA
ttttggccggcatggtcccagcctcctcgctggcgccggctgggcaacatgcttcggcatggcgaatgggaccccgggtactggcgcttttatctcattactttgagagccatcaccagcgactatgtcgtatgggtaaagcgcttatttatcggagagaaatccgataaataagaagcatcaaag

SEQ ID NO: 2222 - RNA, 171 nt, synthetic construct
  misc_feature 1..171: note = gNA Variant Scaffold
  source 1..171: mol_type = other RNA
cgactactgatgagtccgtgaggacgaaacgagtaagctcgtctagtcgcgtgtagcgaagcatactggcgcttttatctcattactttgagagccatcaccagcgactatgtcgtatgggtaaagcgcttatttatcggagagaaatccgataaataagaagcatcaaag

SEQ ID NO: 2223 - RNA, 168 nt, synthetic construct
  misc_feature 1..168: note = gNA Variant Scaffold
  source 1..168: mol_type = other RNA
tactggcgcttttatctcattactttgagagccatcaccagcgactatgtcgtatgggtaaagcgcttatttatcggagagaaatccgataaataagaagcatcaaaggggagccccgctgatgaggtcggggagaccgaaagggacttcggtccctacggggctccc

SEQ ID NO: 2224 - RNA, 144 nt, synthetic construct
  misc_feature 1..144: note = gNA Variant Scaffold
  source 1..144: mol_type = other RNA
ccacccccaccaccacccccacccccaccaccaccctactggcgcttttatctcattactttgagagccatcaccagcgactatgtcgtatgggtaaagcgcttatttatcggagagaaatccgataaataagaagcatcaaag

SEQ ID NO: 2225 - RNA, 157 nt, synthetic construct
  misc_feature 1..157: note = gNA Variant Scaffold
  source 1..157: mol_type = other RNA
tactggcgcttttatctcattactttgagagccatcaccagcgactatgtcgtatgggtaaagcgcttatttatcggagagaaatccgataaataagaagcatcaaagcgactactgatgagtccgtgaggacgaaacgagtaagctcgtctagtcg

SEQ ID NO: 2226 - RNA, 172 nt, synthetic construct
  misc_feature 1..172: note = gNA Variant Scaffold
  source 1..172: mol_type = other RNA
tactggcgcttttatctcattactttgagagccatcaccagcgactatgtcgtatgggtaaagcgcttatttatcggagagaaatccgataaataagaagcatcaaagcgtggttagggccacgttaaatagttgcttaagccctaagcgttgatcttcggatcaggtgcaa

SEQ ID NO: 2227 - RNA, 184 nt, synthetic construct
  misc_feature 1..184: note = gNA Variant Scaffold
  source 1..184: mol_type = other RNA
tactggcgcttttatctcattactttgagagccatcaccagcgactatgtcgtatgggtaaagcgcttatttatcggagagaaatccgataaataagaagcatcaaagggcaataaagcggttacaagcccgcaaaaatagcagagtaatgtcgcgatagcgcggcattaatgcagctttattg

SEQ ID NO: 2228 - RNA, 122 nt, synthetic construct
  misc_feature 1..122: note = gNA Variant Scaffold
  source 1..122: mol_type = other RNA
tactggcgcttttatctcattactattatctcattactttgagagccatcaccagcgactatgtcgtatgggtaaagcgcttatttatcggagagaaatccgataaataagaagcatcaaag

SEQ ID NO: 2229 - RNA, 184 nt, synthetic construct
  misc_feature 1..184: note = gNA Variant Scaffold
  source 1..184: mol_type = other RNA
ggcaataaagcggttacaagcccgcaaaaatagcagagtaatgtcgcgatagcgcggcattaatgcagctttattgtactggcgcttttatctcattactttgagagccatcaccagcgactatgtcgtatgggtaaagcgcttatttatcggagagaaatccgataaataagaagcatcaaag

SEQ ID NO: 2230 - RNA, 185 nt, synthetic construct
  misc_feature 1..185: note = gNA Variant Scaffold
  source 1..185: mol_type = other RNA
tactggcgcttttatctcattactttgagagccatcaccagcgactatgtcgtatgggtaaagcgcttatttatcggagagaaatccgataaataagaagcatcaaagacccgcaaggccgacggcatccgccgccgctggtgcaagtccagccgccccttcgggggcgggcgctcatgggtaac

SEQ ID NO: 2231 - RNA, 63 nt, synthetic construct
  misc_feature 1..63: note = gNA Variant Scaffold
  source 1..63: mol_type = other RNA
tactggcgcttttatctcattactttgagagccatcaccagcgactatgtcgtatgggtaaag

SEQ ID NO: 2232 - RNA, 168 nt, synthetic construct
  misc_feature 1..168: note = gNA Variant Scaffold
  source 1..168: mol_type = other RNA
gggagccccgctgatgaggtcggggagaccgaaagggacttcggtccctacggggctccctactggcgcttttatctcattactttgagagccatcaccagcgactatgtcgtatgggtaaagcgcttatttatcggagagaaatccgataaataagaagcatcaaag

SEQ ID NO: 2233 - RNA, 171 nt, synthetic construct
  misc_feature 1..171: note = gNA Variant Scaffold
  source 1..171: mol_type = other RNA
ccagtactgatgagtccgtgaggacgaaacgagtaagctcgtctactggcgcttttatctcattactggcgcttttatctcattactttgagagccatcaccagcgactatgtcgtatgggtaaagcgcttatttatcggagagaaatccgataaataagaagcatcaaag

SEQ ID NO: 2234 - RNA, 185 nt, synthetic construct
  misc_feature 1..185: note = gNA Variant Scaffold
  source 1..185: mol_type = other RNA
acccgcaaggccgacggcatccgccgccgctggtgcaagtccagccgccccttcgggggcgggcgctcatgggtaactactggcgcttttatctcattactttgagagccatcaccagcgactatgtcgtatgggtaaagcgcttatttatcggagagaaatccgataaataagaagcatcaaag

SEQ ID NO: 2235 - RNA, 160 nt, synthetic construct
  misc_feature 1..160: note = gNA Variant Scaffold
  source 1..160: mol_type = other RNA
cctgtcaccggatgtgctttccggtctgatgagtccgtgaggacgaaacaggtactggcgcttttatctcattactttgagagccatcaccagcgactatgtcgtatgggtaaagcgcttatttatcggagagaaatccgataaataagaagcatcaaag

SEQ ID NO: 2236 - RNA, 100 nt, synthetic construct
  misc_feature 1..100: note = gNA Variant Scaffold
  source 1..100: mol_type = other RNA
gtactggcgcctttatctcattactttgagagccatcaccagcgactatgtcgtagtgggtaaagcgcttacggacttcggtccgtaagaagcatcaaag

SEQ ID NO: 2237 - RNA, 91 nt, synthetic construct
  misc_feature 1..91: note = gNA Variant Scaffold
  source 1..91: mol_type = other RNA
gtactggcgcttttatctgattactttgagagccatcaccagcgactatgtcgtagtgggtaaagctccctcttcggagggagcatcaaag

SEQ ID NO: 2238 - RNA, 89 nt, synthetic construct; identical to SEQ ID NO: 33
  misc_feature 1..89: note = gNA Variant Scaffold
  source 1..89: mol_type = other RNA

SEQ ID NO: 2239 - RNA, 97 nt, synthetic construct
  misc_feature 1..97: note = gNA Variant Scaffold
  source 1..97: mol_type = other RNA
actggcgcctttatctcattactttgagagccatcaccagcgactatgtcgtatgggtaaagcgcttacggacttcggtccgtaagaagcatcaaag

SEQ ID NO: 2240 - RNA, 89 nt, synthetic construct
  misc_feature 1..89: note = gNA Variant Scaffold
  source 1..89: mol_type = other RNA
gctggcgcttttatctgattactttgagagccatcaccagcgactatgtcgtagtgggtaaagctccctcttcggagggagcatcaaag

SEQ ID NO: 2241 - RNA, 88 nt, synthetic construct
  misc_feature 1..88: note = gNA Variant Scaffold
  source 1..88: mol_type = other RNA
actggcgcttttatctgattactttgagagccatcaccagcgactatgtcgtatgggtaaagctccctcttcggagggagcatcaaag

SEQ ID NO: 2242 - RNA, 97 nt, synthetic construct
  misc_feature 1..97: note = gNA Variant Scaffold
  source 1..97: mol_type = other RNA
actggcgcctttatctgattactttgagagccatcaccagcgactatgtcgtatgggtaaagcgcttacggacttcggtccgtaagaagcatcaaag

SEQ ID NO: 2243 - RNA, 97 nt, synthetic construct
  misc_feature 1..97: note = gNA Variant Scaffold
  source 1..97: mol_type = other RNA
actggcgcttttatctgattactttgagagccatcaccagcgactatgtcgtatgggtaaagcgcttacggacttcggtccgtaagaagcatcaaag

SEQ ID NO: 2244 - RNA, 98 nt, synthetic construct
  misc_feature 1..98: note = gNA Variant Scaffold
  source 1..98: mol_type = other RNA
actggcgcttttatctgattactttgagagccatcaccagcgactatgtcgtagtgggtaaagcgcttacggacttcggtccgtaagaagcatcaaag

SEQ ID NO: 2245 - RNA, 89 nt, synthetic construct
  misc_feature 1..89: note = gNA Variant Scaffold
  source 1..89: mol_type = other RNA
actggcgcttttatctgattactttgagagccatcaccagcgactatgtcgtattgggtaaagctccctcttcggagggagcatcaaag

SEQ ID NO: 2246 - RNA, 98 nt, synthetic construct
  misc_feature 1..98: note = gNA Variant Scaffold
  source 1..98: mol_type = other RNA
actggcgcttttatctgattactttgagagccatcaccagcgactatgtcgtattgggtaaagcgcttacggacttcggtccgtaagaagcatcaaag

SEQ ID NO: 2247 - RNA, 98 nt, synthetic construct
  misc_feature 1..98: note = gNA Variant Scaffold
  source 1..98: mol_type = other RNA
actggcgcctttatcatcattactttgagagccatcaccagcgactatgtcgtatgggtaaagcgcttacggacttcggtccgtaagaagcatcaaag

SEQ ID NO: 2248 - RNA, 90 nt, synthetic construct
  misc_feature 1..90: note = gNA Variant Scaffold
  source 1..90: mol_type = other RNA
actggcgcttttatctgattactttgagagccatcaccagcgactatgtcgtagtgggtaaagcgccctcttcggagggaagcatcaaag

SEQ ID NO: 2249 - RNA, 96 nt, synthetic construct
  misc_feature 1..96: note = gNA Variant Scaffold
  source 1..96: mol_type = other RNA
actggcgcttttatctgattactttgagagccatcaccagcgactatgtcgtagtgggtaaagctcacatgaggatcacccatgtgagcatcaaag

SEQ ID NO: 2250 - RNA, 89 nt, synthetic construct
  misc_feature 1..89: note = gNA Variant Scaffold
  source 1..89: mol_type = other RNA
actggcacttttacctgattactttgagagccaacaccagcgactatgtcgtagtgggtaaagctccctcttcggagggagcatcaaag

SEQ ID NO: 2251 - RNA, 89 nt, synthetic construct
  misc_feature 1..89: note = gNA Variant Scaffold
  source 1..89: mol_type = other RNA
actggcacttttatctgattactttgagagccatcaccagcgactatgtcgtagtgggtaaagctccctcttcggagggagcatcaaag

SEQ ID NO: 2252 - RNA, 89 nt, synthetic construct
  misc_feature 1..89: note = gNA Variant Scaffold
  source 1..89: mol_type = other RNA
actggcccttttatctgattactttgagagccatcaccagcgactatgtcgtagtgggtaaagctccctcttcggagggagcatcaaag

SEQ ID NO: 2253 - RNA, 89 nt, synthetic construct
  misc_feature 1..89: note = gNA Variant Scaffold
  source 1..89: mol_type = other RNA
actggcgcttttacctgattactttgagagccatcaccagcgactatgtcgtagtgggtaaagctccctcttcggagggagcatcaaag

SEQ ID NO: 2254 - RNA, 89 nt, synthetic construct
  misc_feature 1..89: note = gNA Variant Scaffold
  source 1..89: mol_type = other RNA
actggcgcttttatctgattactttgagagccaacaccagcgactatgtcgtagtgggtaaagctccctcttcggagggagcatcaaag

SEQ ID NO: 2255 - RNA, 97 nt, synthetic construct
  misc_feature 1..97: note = gNA Variant Scaffold
  source 1..97: mol_type = other RNA
actggcacctttacctgattactttgagagccaacaccagcgactatgtcgtatgggtaaagcgcttacggacttcggtccgtaagaagcatcaaag

SEQ ID NO: 2256 - RNA, 97 nt, synthetic construct
  misc_feature 1..97: note = gNA Variant Scaffold
  source 1..97: mol_type = other RNA
actggcacctttatctgattactttgagagccatcaccagcgactatgtcgtatgggtaaagcgcttacggacttcggtccgtaagaagcatcaaag

SEQ ID NO: 2257 - RNA, 97 nt, synthetic construct
  misc_feature 1..97: note = gNA Variant Scaffold
  source 1..97: mol_type = other RNA
actggcccctttatctgattactttgagagccatcaccagcgactatgtcgtatgggtaaagcgcttacggacttcggtccgtaagaagcatcaaag

SEQ ID NO: 2258 - RNA, 97 nt, synthetic construct
  misc_feature 1..97: note = gNA Variant Scaffold
  source 1..97: mol_type = other RNA
actggcgcctttatctgattactttgagagccaacaccagcgactatgtcgtatgggtaaagcgcttacggacttcggtccgtaagaagcatcaaag

SEQ ID NO: 2259 - RNA, 89 nt, synthetic construct; identical to SEQ ID NO: 2240
  misc_feature 1..89: note = gNA Variant Scaffold
  source 1..89: mol_type = other RNA

SEQ ID NO: 2260 - RNA, 90 nt, synthetic construct
  misc_feature 1..90: note = gNA Variant Scaffold
  source 1..90: mol_type = other RNA
gactggcgcttttatctgattactttgagagccatcaccagcgactatgtcgtagtgggtaaagctccctcttcggagggagcatcaaag

SEQ ID NO: 2261 - RNA, 90 nt, synthetic construct
  misc_feature 1..90: note = gNA Variant Scaffold
  source 1..90: mol_type = other RNA
actggcgcctttatctgattactttggagagccatcaccagcgactatgtcgtagtgggtaaagctccctcttcggagggagcatcaaag

SEQ ID NO: 2262 - RNA, 89 nt, synthetic construct
  misc_feature 1..89: note = gNA Variant Scaffold
  source 1..89: mol_type = other RNA
actggcgcatttatctgattactttgtgagccatcaccagcgactatgtcgtagtgggtaaagctccctcttcggagggagcatcaaag

SEQ ID NO: 2263 - RNA, 89 nt, synthetic construct
  misc_feature 1..89: note = gNA Variant Scaffold
  source 1..89: mol_type = other RNA
actggcgcctttatctgattactttgagagccatcaccagcgactatgtcgtagtgggtaaagctccctcttcggagggagcatcaaag

SEQ ID NO: 2264 - RNA, 90 nt, synthetic construct
  misc_feature 1..90: note = gNA Variant Scaffold
  source 1..90: mol_type = other RNA
actggcgcttttatctgattactttggagagccatcaccagcgactatgtcgtagtgggtaaagctccctcttcggagggagcatcaaag

SEQ ID NO: 2265 - RNA, 89 nt, synthetic construct
  misc_feature 1..89: note = gNA Variant Scaffold
  source 1..89: mol_type = other RNA
actggcgcatttatctgattactttgagagccatcaccagcgactatgtcgtagtgggtaaagctccctcttcggagggagcatcaaag

SEQ ID NO: 2266 - RNA, 89 nt, synthetic construct
  misc_feature 1..89: note = gNA Variant Scaffold
  source 1..89: mol_type = other RNA
actggcgcttttatctgattactttgtgagccatcaccagcgactatgtcgtagtgggtaaagctccctcttcggagggagcatcaaag

SEQ ID NO: 2267 - RNA, 90 nt, synthetic construct
  misc_feature 1..90: note = gNA Variant Scaffold
  source 1..90: mol_type = other RNA
actggcgcttttattctgattactttgagagccatcaccagcgactatgtcgtagtgggtaaagctccctcttcggagggagcatcaaag

SEQ ID NO: 2268 - RNA, 88 nt, synthetic construct
  misc_feature 1..88: note = gNA Variant Scaffold
  source 1..88: mol_type = other RNA
acggcgcttttatctgattactttgagagccatcaccagcgactatgtcgtagtgggtaaagctccctcttcggagggagcatcaaag

SEQ ID NO: 2269 - RNA, 89 nt, synthetic construct
  misc_feature 1..89: note = gNA Variant Scaffold
  source 1..89: mol_type = other RNA
actggcgcttttatatgattactttgagagccatcaccagcgactatgtcgtagtgggtaaagctccctcttcggagggagcatcaaag

SEQ ID NO: 2270 - RNA, 90 nt, synthetic construct
  misc_feature 1..90: note = gNA Variant Scaffold
  source 1..90: mol_type = other RNA
actggcgcttttatcttgattactttgagagccatcaccagcgactatgtcgtagtgggtaaagctccctcttcggagggagcatcaaag

SEQ ID NO: 2271 - RNA, 89 nt, synthetic construct
  misc_feature 1..89: note = gNA Variant Scaffold
  source 1..89: mol_type = other RNA
actggcgcttttatctgattactttgagagccagcaccagcgactatgtcgtagtgggtaaagctccctcttcggagggagcatcaaag

SEQ ID NO: 2272 - RNA, 89 nt, synthetic construct
  misc_feature 1..89: note = gNA Variant Scaffold
  source 1..89: mol_type = other RNA
actggcgctgttatctgattacttcgagagccatcaccagcgactatgtcgtagtgggtaaagctccctcttcggagggagcatcgaag

SEQ ID NO: 2273 - RNA, 89 nt, synthetic construct
  misc_feature 1..89: note = gNA Variant Scaffold
  source 1..89: mol_type = other RNA
actggcgctcttatctgattacttcgagagccatcaccagcgactatgtcgtagtgggtaaagctccctcttcggagggagcatcgaag

SEQ ID NO: 2274 - RNA, 89 nt, synthetic construct
  misc_feature 1..89: note = gNA Variant Scaffold
  source 1..89: mol_type = other RNA
actggcgcttgtatctgattactctgagagccatcaccagcgactatgtcgtagtgggtaaagctccctcttcggagggagcatcagag

SEQ ID NO: 2275 - RNA, 89 nt, synthetic construct
  misc_feature 1..89: note = gNA Variant Scaffold
  source 1..89: mol_type = other RNA
actggcgcttctatctgattactctgagagccatcaccagcgactatgtcgtagtgggtaaagctccctcttcggagggagcatcagag

SEQ ID NO: 2276 - RNA, 89 nt, synthetic construct
  misc_feature 1..89: note = gNA Variant Scaffold
  source 1..89: mol_type = other RNA
actggcgctttgatctgattaccttgagagccatcaccagcgactatgtcgtagtgggtaaagctccctcttcggagggagcatcaagg

SEQ ID NO: 2277 - RNA, 89 nt, synthetic construct
  misc_feature 1..89: note = gNA Variant Scaffold
  source 1..89: mol_type = other RNA
actggcgctttcatctgattaccttgagagccatcaccagcgactatgtcgtagtgggtaaagctccctcttcggagggagcatcaagg

SEQ ID NO: 2278 - RNA, 89 nt, synthetic construct
  misc_feature 1..89: note = gNA Variant Scaffold
  source 1..89: mol_type = other RNA
actggcgctgttatctgattactttgagagccatcaccagcgactatgtcgtagtgggtaaagctccctcttcggagggagcatcaaag

SEQ ID NO: 2279 - RNA, 89 nt, synthetic construct
  misc_feature 1..89: note = gNA Variant Scaffold
  source 1..89: mol_type = other RNA
actggcgcttttatctgattactttgagagccatcaccagcgactatgtcgtagtgggtaaagctccctcttcggagggagcatcgaag

SEQ ID NO: 2280 - RNA, 89 nt, synthetic construct
  misc_feature 1..89: note = gNA Variant Scaffold
  source 1..89: mol_type = other RNA
actggcgcttttatctgattacttcgagagccatcaccagcgactatgtcgtagtgggtaaagctccctcttcggagggagcatcaaag

SEQ ID NO: 2281 - RNA, 98 nt, synthetic construct
  misc_feature 1..98: note = gNA Variant Scaffold
  source 1..98: mol_type = other RNA
actggcacttctatctgattactctgagagccatcaccagcgactatgtcgtatgggtaaagccgcttacggacttcggtccgtaagaggcatcagag

SEQ ID NO: 2282 - RNA, 89 nt, synthetic construct
  misc_feature 1..89: note = gNA Variant Scaffold
  source 1..89: mol_type = other RNA
actggcacttctatctgattactctgagagccatcaccagcgactatgtcgtagtgggtaaagctccctcttcggagggagcatcagag

SEQ ID NO: 2283 - RNA, 98 nt, synthetic construct
  misc_feature 1..98: note = gNA Variant Scaffold
  source 1..98: mol_type = other RNA
actggcacctttatctgattactttgagagccatcaccagcgactatgtcgtatgggtaaagccgcttacggacttcggtccgtaagaggcatcaaag

SEQ ID NO: 2284 - RNA, 98 nt, synthetic construct
  misc_feature 1..98: note = gNA Variant Scaffold
  source 1..98: mol_type = other RNA
actggcacttgtatctgattactctgagagccatcaccagcgactatgtcgtatgggtaaagccgcttacggacttcggtccgtaagaggcatcagag

SEQ ID NO: 2285 - RNA, 89 nt, synthetic construct
  misc_feature 1..89: note = gNA Variant Scaffold
  source 1..89: mol_type = other RNA
actggcacttgtatctgattactctgagagccatcaccagcgactatgtcgtagtgggtaaagctccctcttcggagggagcatcagag

SEQ ID NO: 2286 - RNA, 97 nt, synthetic construct
  misc_feature 1..97: note = gNA Variant Scaffold
  source 1..97: mol_type = other RNA
actggcacttttatctgattactttgagagccatcaccagcgactatgtcgtatgggtaaagcgcttacggacttcggtccgtaagaagcatcaaag

SEQ ID NO: 2287 - RNA, 97 nt, synthetic construct
  misc_feature 1..97: note = gNA Variant Scaffold
  source 1..97: mol_type = other RNA
actggcacttctatctgattactctgagagccatcaccagcgactatgtcgtatgggtaaagcgcttacggacttcggtccgtaagaagcatcagag

SEQ ID NO: 2288 - RNA, 98 nt, synthetic construct
  misc_feature 1..98: note = gNA Variant Scaffold
  source 1..98: mol_type = other RNA
actggcgcttctatctgattactctgagagccatcaccagcgactatgtcgtatgggtaaagccgcttacggacttcggtccgtaagaggcatcagag

SEQ ID NO: 2289 - RNA, 98 nt, synthetic construct
  misc_feature 1..98: note = gNA Variant Scaffold
  source 1..98: mol_type = other RNA
actggcacttctatctgattactctgagcgccatcaccagcgactatgtcgtatgggtaaagccgcttacggacttcggtccgtaagaggcatcagag

SEQ ID NO: 2290 - RNA, 98 nt, synthetic construct
  misc_feature 1..98: note = gNA Variant Scaffold
  source 1..98: mol_type = other RNA
actggcgcttctatctgattactctgagcgccatcaccagcgactatgtcgtatgggtaaagccgcttacggacttcggtccgtaagaggcatcagag

SEQ ID NO: 2291 - RNA, 98 nt, synthetic construct
  misc_feature 1..98: note = gNA Variant Scaffold
  source 1..98: mol_type = other RNA
actggcgcttctatctgattactctgagcgccatcaccagcgactatgtcgtatgggtaaagcgccttacggacttcggtccgtaaggagcatcagag

SEQ ID NO: 2292 - RNA, 99 nt, synthetic construct
  misc_feature 1..99: note = gNA Variant Scaffold
  source 1..99: mol_type = other RNA
actggcgcttctatctgattactctgagcgccatcaccagcgactatgtcgtagtgggtaaagccgcttacggacttcggtccgtaagaggcatcagag

SEQ ID NO: 2293 - RNA, 98 nt, synthetic construct
  misc_feature 1..98: note = gNA Variant Scaffold
  source 1..98: mol_type = other RNA
acgggactttctatctgattactctgaagtccctcaccagcgactatgtcgtatgggtaaagccgcttacggacttcggtccgtaagaggcatcagag

SEQ ID NO: 2294 - RNA, 98 nt, synthetic construct
  misc_feature 1..98: note = gNA Variant Scaffold
  source 1..98: mol_type = other RNA
acctgtagttctatctgattactctgactacagtcaccagcgactatgtcgtatgggtaaagccgcttacggacttcggtccgtaagaggcatcagag

SEQ ID NO: 2295 - RNA, 20 nt, synthetic construct
  misc_feature 1..20: note = C9Orf72 ATCN PAM targeting sequence
  source 1..20: mol_type = other RNA
atgatagactggattaagaa

SEQ ID NO: 2296 - RNA, 20 nt, synthetic construct
  misc_feature 1..20: note = C9Orf72 ATCN PAM targeting sequence
  source 1..20: mol_type = other RNA
ttgatgggcatttgagttgg

SEQ ID NO: 2297 - RNA, 20 nt, synthetic construct
  misc_feature 1..20: note = C9Orf72 ATCN PAM targeting sequence
  source 1..20: mol_type = other RNA
agtctatcattgatgggcat

SEQ ID NO: 2298 - RNA, 20 nt, synthetic construct
  misc_feature 1..20: note = C9Orf72 ATCN PAM targeting sequence
  source 1..20: mol_type = other RNA
tttttttggctgcatagtat

SEQ ID NO: 2299 - RNA, 20 nt, synthetic construct
  misc_feature 1..20: note = C9Orf72 ATCN PAM targeting sequence
  source 1..20: mol_type = other RNA
ttctgagcaaactaccacaa

SEQ ID NO: 2300 - RNA, 20 nt, synthetic construct
  misc_feature 1..20: note = C9Orf72 ATCN PAM targeting sequence
  source 1..20: mol_type = other RNA
atgagtgagaacatgcagtg

SEQ ID NO: 2301 - RNA, 20 nt, synthetic construct
  misc_feature 1..20: note = C9Orf72 ATCN PAM targeting sequence
  source 1..20: mol_type = other RNA
cacaccagggcctgtcatgg

SEQ ID NO: 2302 - RNA, 20 nt, synthetic construct
  misc_feature 1..20: note = C9Orf72 ATCN PAM targeting sequence
  source 1..20: mol_type = other RNA
ttccccccaccccccacccc

SEQ ID NO: 2303 - RNA, 20 nt, synthetic construct
  misc_feature 1..20: note = C9Orf72 ATCN PAM targeting sequence
  source 1..20: mol_type = other RNA
caatgctatccttcccccca

SEQ ID NO: 2304 - RNA, 20 nt, synthetic construct
  misc_feature 1..20: note = C9Orf72 ATCN PAM targeting sequence
  source 1..20: mol_type = other RNA
tttacattagttatttatcc

SEQ ID NO: 2305 - RNA, 20 nt, synthetic construct
  misc_feature 1..20: note = C9Orf72 ATCN PAM targeting sequence
  source 1..20: mol_type = other RNA
acccatcatttacattagtt

SEQ ID NO: 2306 - RNA, 20 nt, synthetic construct
  misc_feature 1..20: note = C9Orf72 ATCN PAM targeting sequence
  source 1..20: mol_type = other RNA
cttgaacccaggaggtgtag

SEQ ID NO: 2307 - RNA, 20 nt, synthetic construct
  misc_feature 1..20: note = C9Orf72 ATCN PAM targeting sequence
  source 1..20: mol_type = other RNA
tggctcactgcaacctacac

SEQ ID NO: 2308 - RNA, 20 nt, synthetic construct
  misc_feature 1..20: note = C9Orf72 ATCN PAM targeting sequence
  source 1..20: mol_type = other RNA
ccccactgcaccgtagtctg

SEQ ID NO: 2309 - RNA, 20 nt, synthetic construct
  misc_feature 1..20: note = C9Orf72 ATCN PAM targeting sequence
  source 1..20: mol_type = other RNA
cacaaatagcactttttttt

SEQ ID NO: 2310 - RNA, 20 nt, synthetic construct
  misc_feature 1..20: note = C9Orf72 ATCN PAM targeting sequence
  source 1..20: mol_type = other RNA
ctatctcacaaatagcactt

SEQ ID NO: 2311 - RNA, 20 nt, synthetic construct
  misc_feature 1..20: note = C9Orf72 ATCN PAM targeting sequence
  source 1..20: mol_type = other RNA
acatgagcaatttaatgtac

SEQ ID NO: 2312 - RNA, 20 nt, synthetic construct
  misc_feature 1..20: note = C9Orf72 ATCN PAM targeting sequence
  source 1..20: mol_type = other RNA
aaactgttagggtagacttt

SEQ ID NO: 2313 - RNA, 20 nt, synthetic construct
  misc_feature 1..20: note = C9Orf72 ATCN PAM targeting sequence
  source 1..20: mol_type = other RNA
aggactacacaggtaaaact

SEQ ID NO: 2314 - RNA, 20 nt, synthetic construct
  misc_feature 1..20: note = C9Orf72 ATCN PAM targeting sequence
  source 1..20: mol_type = other RNA
gaccctgtttgtccttccct

SEQ ID NO: 2315 - RNA, 20 nt, synthetic construct
  misc_feature 1..20: note = C9Orf72 ATCN PAM targeting sequence
  source 1..20: mol_type = other RNA
atttgcctctcttatttctt

SEQ ID NO: 2316 - RNA, 20 nt, synthetic construct
  misc_feature 1..20: note = C9Orf72 ATCN PAM targeting sequence
  source 1..20: mol_type = other RNA
tgtatatatggaagaaataa

SEQ ID NO: 2317 - RNA, 20 nt, synthetic construct
  misc_feature 1..20: note = C9Orf72 ATCN PAM targeting sequence
  source 1..20: mol_type = other RNA
ttctccctacaaatgtgaca

SEQ ID NO: 2318 - RNA, 20 nt, synthetic construct
  misc_feature 1..20: note = C9Orf72 ATCN PAM targeting sequence
  source 1..20: mol_type = other RNA
gtcacatttgtagggagaag

SEQ ID NO: 2319 - RNA, 20 nt, synthetic construct
  misc_feature 1..20: note = C9Orf72 ATCN PAM targeting sequence
  source 1..20: mol_type = other RNA
ccagtttctagtcatgattt

SEQ ID NO: 2320 - RNA, 20 nt, synthetic construct
  misc_feature 1..20: note = C9Orf72 ATCN PAM targeting sequence
  source 1..20: mol_type = other RNA
tgactagaaactggagatct

SEQ ID NO: 2321 - RNA, 20 nt, synthetic construct
  misc_feature 1..20: note = C9Orf72 ATCN PAM targeting sequence
  source 1..20: mol_type = other RNA
gaaaacaggcagtgaagtat

SEQ ID NO: 2322 - RNA, 20 nt, synthetic construct
  misc_feature 1..20: note = C9Orf72 ATCN PAM targeting sequence
  source 1..20: mol_type = other RNA
aaagagacaatgagcgaatt

SEQ ID NO: 2323 - RNA, 20 nt, synthetic construct
  misc_feature 1..20: note = C9Orf72 ATCN PAM targeting sequence
  source 1..20: mol_type = other RNA
ttatatcctcaggtccagca

SEQ ID NO: 2324 - RNA, 20 nt, synthetic construct
  misc_feature 1..20: note = C9Orf72 ATCN PAM targeting sequence
  source 1..20: mol_type = other RNA
tcaggtccagcactttagga

SEQ ID NO: 2325 - RNA, 20 nt, synthetic construct
  misc_feature 1..20: note = C9Orf72 ATCN PAM targeting sequence
  source 1..20: mol_type = other RNA
atgactccaggtcctaaagt

SEQ ID NO: 2326 - RNA, 20 nt, synthetic construct
  misc_feature 1..20: note = C9Orf72 ATCN PAM targeting sequence
  source 1..20: mol_type = other RNA
aggtctcccacacaatatca

SEQ ID NO: 2327 - RNA, 20 nt, synthetic construct
  misc_feature 1..20: note = C9Orf72 ATCN PAM targeting sequence
  source 1..20: mol_type = other RNA
aaccaaataatacttaatac

SEQ ID NO: 2328 - RNA, 20 nt, synthetic construct
  misc_feature 1..20: note = C9Orf72 ATCN PAM targeting sequence
  source 1..20: mol_type = other RNA
taaaataagtatatgaatag

SEQ ID NO: 2329 - RNA, 20 nt, synthetic construct
  misc_feature 1..20: note = C9Orf72 ATCN PAM targeting sequence
  source 1..20: mol_type = other RNA
ttcactctttctgtgaagtc

SEQ ID NO: 2330 - RNA, 20 nt, synthetic construct
  misc_feature 1..20: note = C9Orf72 ATCN PAM targeting sequence
  source 1..20: mol_type = other RNA
tgtacttagcattttacctc

SEQ ID NO: 2331 - RNA, 20 nt, synthetic construct
  misc_feature 1..20: note = C9Orf72 ATCN PAM targeting sequence
  source 1..20: mol_type = other RNA
ggtttggggtatactgtagt

SEQ ID NO: 2332 - RNA, 20 nt, synthetic construct
  misc_feature 1..20: note = C9Orf72 ATCN PAM targeting sequence
  source 1..20: mol_type = other RNA
aatgcatacctttaatctgg

SEQ ID NO: 2333 - RNA, 20 nt, synthetic construct
  misc_feature 1..20: note = C9Orf72 ATCN PAM targeting sequence
  source 1..20: mol_type = other RNA
gccaactgaggactgttgtg

SEQ ID NO: 2334 - RNA, 20 nt, synthetic construct
  misc_feature 1..20: note = C9Orf72 ATCN PAM targeting sequence
  source 1..20: mol_type = other RNA
caggacattagtcttcacac

SEQ ID NO: 2335 - RNA, 20 nt, synthetic construct
  misc_feature 1..20: note = C9Orf72 ATCN PAM targeting sequence
  source 1..20: mol_type = other RNA
ggtgtccctttcctccccag

SEQ ID NO: 2336 - RNA, 20 nt, synthetic construct
  misc_feature 1..20: note = C9Orf72 ATCN PAM targeting sequence
  source 1..20: mol_type = other RNA
gctaaggagacagaagcttt

SEQ ID NO: 2337 - RNA, 20 nt, synthetic construct
  misc_feature 1..20: note = C9Orf72 ATCN PAM targeting sequence
  source 1..20: mol_type = other RNA
ttcttaacacagcctctcca

SEQ ID NO: 2338 - RNA, 20 nt, synthetic construct
  misc_feature 1..20: note = C9Orf72 ATCN PAM targeting sequence
  source 1..20: mol_type = other RNA
ggaggaccaagtctgaccct

SEQ ID NO: 2339 - RNA, 20 nt, synthetic construct
  misc_feature 1..20: note = C9Orf72 ATCN PAM targeting sequence
  source 1..20: mol_type = other RNA
accaggatgcccaaactaaa

SEQ ID NO: 2340 - RNA, 20 nt, synthetic construct
  misc_feature 1..20: note = C9Orf72 ATCN PAM targeting sequence
  source 1..20: mol_type = other RNA
tggtggattgagggcttgga

SEQ ID NO: 2341 - RNA, 20 nt, synthetic construct
  misc_feature 1..20: note = C9Orf72 ATCN PAM targeting sequence
  source 1..20: mol_type = other RNA
gtaagaatttagtttgggca

SEQ ID NO: 2342 - RNA, 20 nt, synthetic construct
  misc_feature 1..20: note = C9Orf72 ATCN PAM targeting sequence
  source 1..20: mol_type = other RNA
tcagtctttctaaagagaat

SEQ ID NO: 2343 - RNA, 20 nt, synthetic construct
  misc_feature 1..20: note = C9Orf72 ATCN PAM targeting sequence
  source 1..20: mol_type = other RNA
ctttttatccaggttttagc

SEQ ID NO: 2344 - RNA, 20 nt, synthetic construct
  misc_feature 1..20: note = C9Orf72 ATCN PAM targeting sequence
  source 1..20: mol_type = other RNA
aggttttagcctaagtgtta

SEQ ID NO: 2345 - RNA, 20 nt, synthetic construct
  misc_feature 1..20: note = C9Orf72 ATCN PAM targeting sequence
  source 1..20: mol_type = other RNA
taacacttaggctaaaacct

SEQ ID NO: 2346 - RNA, 20 nt, synthetic construct
  misc_feature 1..20: note = C9Orf72 ATCN PAM targeting sequence
  source 1..20: mol_type = other RNA
gcaattctaaaacatggtgt

SEQ ID NO: 2347 - RNA, 20 nt, synthetic construct
  misc_feature 1..20: note = C9Orf72 ATCN PAM targeting sequence
  source 1..20: mol_type = other RNA
tgttcatctccctgctgaat

SEQ ID NO: 2348 - RNA, 20 nt, synthetic construct
  misc_feature 1..20: note = C9Orf72 ATCN PAM targeting sequence
  source 1..20: mol_type = other RNA
ccctgctgaattcttagcaa

SEQ ID NO: 2349 - RNA, 20 nt, synthetic construct
  misc_feature 1..20: note = C9Orf72 ATCN PAM targeting sequence
  source 1..20: mol_type = other RNA
ctgagagaggttgctaagaa

SEQ ID NO: 2350 - RNA, 20 nt, synthetic construct
  misc_feature 1..20: note = C9Orf72 ATCN PAM targeting sequence
  source 1..20: mol_type = other RNA
gcagaccctttttcttgggg

SEQ ID NO: 2351 - RNA, 20 nt, synthetic construct
  misc_feature 1..20: note = C9Orf72 ATCN PAM targeting sequence
  source 1..20: mol_type = other RNA
acttctcgcaaattaataag

SEQ ID NO: 2352 - RNA, 20 nt, synthetic construct
  misc_feature 1..20: note = C9Orf72 ATCN PAM targeting sequence
  source 1..20: mol_type = other RNA
aagtggaggcggatccagcc

SEQ ID NO: 2353 - RNA, 20 nt, synthetic construct
  misc_feature 1..20: note = C9Orf72 ATCN PAM targeting sequence
  source 1..20: mol_type = other RNA
gcctccactttgattttcat

SEQ ID NO: 2354 - RNA, 20 nt, synthetic construct
  misc_feature 1..20: note = C9Orf72 ATCN PAM targeting sequence
  source 1..20: mol_type = other RNA
agccccaactggctgctgtt

SEQ ID NO: 2355 - RNA, 20 nt, synthetic construct
  misc_feature 1..20: note = C9Orf72 ATCN PAM targeting sequence
  source 1..20: mol_type = other RNA
ggggcagagtatgcaggaag

SEQ ID NO: 2356 - RNA, 20 nt, synthetic construct
  misc_feature 1..20: note = C9Orf72 ATCN PAM targeting sequence
  source 1..20: mol_type = other RNA
gtattttagcaaggttcaag

SEQ ID NO: 2357 - RNA, 20 nt, synthetic construct
  misc_feature 1..20: note = C9Orf72 ATCN PAM targeting sequence
  source 1..20: mol_type = other RNA
tagaataatcagggtagtgg

SEQ ID NO: 2358 - RNA, 20 nt, synthetic construct
  misc_feature 1..20: note = C9Orf72 ATCN PAM targeting sequence
  source 1..20: mol_type = other RNA
gggtagtggaccctgtaatg

SEQ ID NO: 2359 - RNA, 20 nt, synthetic construct
  misc_feature 1..20: note = C9Orf72 ATCN PAM targeting sequence
  source 1..20: mol_type = other RNA
gattcctttaggactagggc

SEQ ID NO: 2360 - RNA, 20 nt, synthetic construct
  misc_feature 1..20: note = C9Orf72 ATCN PAM targeting sequence
  source 1..20: mol_type = other RNA
gatggcacattacagggtcc

SEQ ID NO: 2361 - RNA, 20 nt, synthetic construct
  misc_feature 1..20: note = C9Orf72 ATCN PAM targeting sequence
  source 1..20: mol_type = other RNA
caagagggcaaactccctcc

SEQ ID NO: 2362 - RNA, 20 nt, synthetic construct
  misc_feature 1..20: note = C9Orf72 ATCN PAM targeting sequence
  source 1..20: mol_type = other RNA
gccagtcattggctgtgggt

SEQ ID NO: 2363 - RNA, 20 nt, synthetic construct
  misc_feature 1..20: note = C9Orf72 ATCN PAM targeting sequence
  source 1..20: mol_type = other RNA
cagccatcttctccctctgt

SEQ ID NO: 2364 - RNA, 20 nt, synthetic construct
  misc_feature 1..20: note = C9Orf72 ATCN PAM targeting sequence
  source 1..20: mol_type = other RNA
tctccctctgttccgttctc

SEQ ID NO: 2365 - RNA, 20 nt, synthetic construct
  misc_feature 1..20: note = C9Orf72 ATCN PAM targeting sequence
  source 1..20: mol_type = other RNA
cagggtctcagagtgagatt

SEQ ID NO: 2366 - RNA, 20 nt, synthetic construct
  misc_feature 1..20: note = C9Orf72 ATCN PAM targeting sequence
  source 1..20: mol_type = other RNA
cactctgagaccctgtgatt

SEQ ID NO: 2367 - RNA, 20 nt, synthetic construct
  misc_feature 1..20: note = C9Orf72 ATCN PAM targeting sequence
  source 1..20: mol_type = other RNA
aggaatctcactctgagacc

SEQ ID NO: 2368 - RNA, 20 nt, synthetic construct
  misc_feature 1..20: note = C9Orf72 ATCN PAM targeting sequence
  source 1..20: mol_type = other RNA
gacacaaagtacaaatagtg

SEQ ID NO: 2369 - RNA, 20 nt, synthetic construct
  misc_feature 1..20: note = C9Orf72 ATCN PAM targeting sequence
  source 1..20: mol_type = other RNA
ccccaagccccagggccaag

SEQ ID NO: 2370 - RNA, 20 nt, synthetic construct
  misc_feature 1..20: note = C9Orf72 ATCN PAM targeting sequence
  source 1..20: mol_type = other RNA
ataaccaccctctggctagt

SEQ ID NO: 2371 - RNA, 20 nt, synthetic construct
  misc_feature 1..20: note = C9Orf72 ATCN PAM targeting sequence
  source 1..20: mol_type = other RNA
aacctcattattcatttccc

SEQ ID NO: 2372 - RNA, 20 nt, synthetic construct
  misc_feature 1..20: note = C9Orf72 ATCN PAM targeting sequence
  source 1..20: mol_type = other RNA
taaggtgattttacagtttg

SEQ ID NO: 2373 - RNA, 20 nt, synthetic construct
  misc_feature 1..20: note = C9Orf72 ATCN PAM targeting sequence
  source 1..20: mol_type = other RNA
ccttatgatgtttgaagcca

SEQ ID NO: 2374 - RNA, 20 nt, synthetic construct
  misc_feature 1..20: note = C9Orf72 ATCN PAM targeting sequence
  source 1..20: mol_type = other RNA
tgtttttgcaaatgactggt

SEQ ID NO: 2375 - RNA, 20 nt, synthetic construct
  misc_feature 1..20: note = C9Orf72 ATCN PAM targeting sequence
  source 1..20: mol_type = other RNA
aagggctggtgcaagagaag

SEQ ID NO: 2376 - RNA, 20 nt, synthetic construct
  misc_feature 1..20: note = C9Orf72 ATCN PAM targeting sequence
  source 1..20: mol_type = other RNA
aatgcctgggcagattgcca

SEQ ID NO: 2377 - RNA, 20 nt, synthetic construct
  misc_feature 1..20: note = C9Orf72 ATCN PAM targeting sequence
  source 1..20: mol_type = other RNA
gcccaggcatttgatttgac

SEQ ID NO: 2378 - RNA, 20 nt, synthetic construct
  misc_feature 1..20: note = C9Orf72 ATCN PAM targeting sequence
  source 1..20: mol_type = other RNA
aaacagagaagcattgcctt

SEQ ID NO: 2379 - RNA, 20 nt, synthetic construct
  misc_feature 1..20: note = C9Orf72 ATCN PAM targeting sequence
  source 1..20: mol_type = other RNA
agagctgcagcctggaacac

SEQ ID NO: 2380 - RNA, 20 nt, synthetic construct
  misc_feature 1..20: note = C9Orf72 ATCN PAM targeting sequence
  source 1..20: mol_type = other RNA
ctactgcagtgggatggttg

SEQ ID NO: 2381 - RNA, 20 nt, synthetic construct
  misc_feature 1..20: note = C9Orf72 ATCN PAM targeting sequence
  source 1..20: mol_type = other RNA
cactgcagtagcgatccaga

SEQ ID NO: 2382 - RNA, 20 nt, synthetic construct
  misc_feature 1..20: note = C9Orf72 ATCN PAM targeting sequence
  source 1..20: mol_type = other RNA
caaacagaaggaaacttaga

SEQ ID NO: 2383 - RNA, 20 nt, synthetic construct
  misc_feature 1..20: note = C9Orf72 ATCN PAM targeting sequence
  source 1..20: mol_type = other RNA
ctaagtttccttctgtttga

SEQ ID NO: 2384 - RNA, 20 nt, synthetic construct
  misc_feature 1..20: note = C9Orf72 ATCN PAM targeting sequence
  source 1..20: mol_type = other RNA
ctcatttaaattttcttctg

SEQ ID NO: 2385 - RNA, 20 nt, synthetic construct
  misc_feature 1..20: note = C9Orf72 ATCN PAM targeting sequence
  source 1..20: mol_type = other RNA
tagactctttatttaatatc

SEQ ID NO: 2386 - RNA, 20 nt, synthetic construct
  misc_feature 1..20: note = C9Orf72 ATCN PAM targeting sequence
  source 1..20: mol_type = other RNA
ccaattaagaggcttttaat

SEQ ID NO: 2387 - RNA, 20 nt, synthetic construct
  misc_feature 1..20: note = C9Orf72 ATCN PAM targeting sequence
  source 1..20: mol_type = other RNA
tctatctttcaactactact

SEQ ID NO: 2388 - RNA, 20 nt, synthetic construct
  misc_feature 1..20: note = C9Orf72 ATCN PAM targeting sequence
  source 1..20: mol_type = other RNA
atctttcaactactactcac

SEQ ID NO: 2389 - RNA, 20 nt, synthetic construct
  misc_feature 1..20: note = C9Orf72 ATCN PAM targeting sequence
  source 1..20: mol_type = other RNA
ttcaactactactcacttga

SEQ ID NO: 2390 - RNA, 20 nt, synthetic construct
  misc_feature 1..20: note = C9Orf72 ATCN PAM targeting sequence
  source 1..20: mol_type = other RNA
tagagaaccaggtaatttgc

SEQ ID NO: 2391 - RNA, 20 nt, synthetic construct
  misc_feature 1..20: note = C9Orf72 ATCN PAM targeting sequence
  source 1..20: mol_type = other RNA
tgaccatagtcttatgatgt

SEQ ID NO: 2392 - RNA, 20 nt, synthetic construct
  misc_feature 1..20: note = C9Orf72 ATCN PAM targeting sequence
  source 1..20: mol_type = other RNA
taagactatggtcaagatta

SEQ ID NO: 2393 - RNA, 20 nt, synthetic construct
  misc_feature 1..20: note = C9Orf72 ATCN PAM targeting sequence
  source 1..20: mol_type = other RNA
gtcacagtaaaactcagtaa

SEQ ID NO: 2394 - RNA, 20 nt, synthetic construct
  misc_feature 1..20: note = C9Orf72 ATCN PAM targeting sequence
  source 1..20: mol_type = other RNA
ttgtgtctatgagtcaatgt

SEQ ID NO: 2395 - RNA, 20 nt, synthetic construct
  misc_feature 1..20: note = C9Orf72 ATCN PAM targeting sequence
  source 1..20: mol_type = other RNA
taacattgactcatagacac

SEQ ID NO: 2396 - RNA, 20 nt, synthetic construct
  misc_feature 1..20: note = C9Orf72 ATCN PAM targeting sequence
  source 1..20: mol_type = other RNA
gcaaaagaggaatcataaca

SEQ ID NO: 2397 - RNA, 20 nt, synthetic construct
  misc_feature 1..20: note = C9Orf72 ATCN PAM targeting sequence
  source 1..20: mol_type = other RNA
tatggaagcttctgtttcta

SEQ ID NO: 2398 - RNA, 20 nt, synthetic construct
  misc_feature 1..20: note = C9Orf72 ATCN PAM targeting sequence
  source 1..20: mol_type = other RNA
gtggtcatacagctagtaag

SEQ ID NO: 2399 - RNA, 20 nt, synthetic construct
  misc_feature 1..20: note = C9Orf72 ATCN PAM targeting sequence
  source 1..20: mol_type = other RNA
cagccctgccacttactagc

SEQ ID NO: 2400 - RNA, 20 nt, synthetic construct
  misc_feature 1..20: note = C9Orf72 ATCN PAM targeting sequence
  source 1..20: mol_type = other RNA
aagtgcacaagtatcttcta

SEQ ID NO: 2401 - RNA, 20 nt, synthetic construct
  misc_feature 1..20: note = C9Orf72 ATCN PAM targeting sequence
  source 1..20: mol_type = other RNA
tctattcatacttcactcct

SEQ ID NO: 2402 - RNA, 20 nt, synthetic construct
  misc_feature 1..20: note = C9Orf72 ATCN PAM targeting sequence
  source 1..20: mol_type = other RNA
cactggctggaaagaaaaca

SEQ ID NO: 2403 - RNA, 20 nt, synthetic construct
  misc_feature 1..20: note = C9Orf72 ATCN PAM targeting sequence
  source 1..20: mol_type = other RNA
tccgtgtatctcagaattca

SEQ ID NO: 2404 - RNA, 20 nt, synthetic construct
  misc_feature 1..20: note = C9Orf72 ATCN PAM targeting sequence
  source 1..20: mol_type = other RNA
cagaattcatagagcactta

SEQ ID NO: 2405 - RNA, 20 nt, synthetic construct
  misc_feature 1..20: note = C9Orf72 ATCN PAM targeting sequence
  source 1..20: mol_type = other RNA
cttacggtactttgcatccc

SEQ ID NO: 2406 - RNA, 20 nt, synthetic construct
  misc_feature 1..20: note = C9Orf72 ATCN PAM targeting sequence
  source 1..20: mol_type = other RNA
atttcaacagaaaaataata

SEQ ID NO: 2407 - RNA, 20 nt, synthetic construct
  misc_feature 1..20: note = C9Orf72 ATCN PAM targeting sequence
  source 1..20: mol_type = other RNA
gtgtgctaaatccatttcaa

SEQ ID NO: 2408 - RNA, 20 nt, synthetic construct
  misc_feature 1..20: note = C9Orf72 ATCN PAM targeting sequence
  source 1..20: mol_type = other RNA
gttttgtttttaaagatttc

SEQ ID NO: 2409 - RNA, 20 nt, synthetic construct
  misc_feature 1..20: note = C9Orf72 ATCN PAM targeting sequence
  source 1..20: mol_type = other RNA
tgagtacgtatcacagagaa

SEQ ID NO: 2410 - RNA, 20 nt, synthetic construct
  misc_feature 1..20: note = C9Orf72 ATCN PAM targeting sequence
  source 1..20: mol_type = other RNA
aaatcctatggacaagttcc

SEQ ID NO: 2411 - RNA, 20 nt, synthetic construct
  misc_feature 1..20: note = C9Orf72 ATCN PAM targeting sequence
  source 1..20: mol_type = other RNA
tatggacaagttcctgaaga

SEQ ID NO: 2412 - RNA, 20 nt, synthetic construct
  misc_feature 1..20: note = C9Orf72 ATCN PAM targeting sequence
  source 1..20: mol_type = other RNA
gtggaatactttcttcagga

SEQ ID NO: 2413 - RNA, 20 nt, synthetic construct
  misc_feature 1..20: note = C9Orf72 ATCN PAM targeting sequence
  source 1..20: mol_type = other RNA
ctgtactaaatactgatact

SEQ ID NO: 2414 - RNA, 20 nt, synthetic construct
  misc_feature 1..20: note = C9Orf72 ATCN PAM targeting sequence
  source 1..20: mol_type = other RNA
gtatttagtacagagatttc

SEQ ID NO: 2415 - RNA, 20 nt, synthetic construct
  misc_feature 1..20: note = C9Orf72 ATCN PAM targeting sequence
  source 1..20: mol_type = other RNA
acgtgtagggaccattcaag

SEQ ID NO: 2416 - RNA, 20 nt, synthetic construct
  misc_feature 1..20: note = C9Orf72 ATCN PAM targeting sequence
  source 1..20: mol_type = other RNA
tgccaggacttcttgaatgg

SEQ ID NO: 2417 - RNA, 20 nt, synthetic construct
  misc_feature 1..20: note = C9Orf72 ATCN PAM targeting sequence
  source 1..20: mol_type = other RNA
ctgtctggggacaaacttaa

SEQ ID NO: 2418 - RNA, 20 nt, synthetic construct
  misc_feature 1..20: note = C9Orf72 ATCN PAM targeting sequence
  source 1..20: mol_type = other RNA
cccagtctaaatattgaaga

SEQ ID NO: 2419 - RNA, 20 nt, synthetic construct
  misc_feature 1..20: note = C9Orf72 ATCN PAM targeting sequence
  source 1..20: mol_type = other RNA
ttccactactcctgggaaag

SEQ ID NO: 2420 - RNA, 20 nt, synthetic construct
  misc_feature 1..20: note = C9Orf72 ATCN PAM targeting sequence
  source 1..20: mol_type = other RNA
cacctctgccctcaagcctg

SEQ ID NO: 2421 - RNA, 20 nt, synthetic construct
  misc_feature 1..20: note = C9Orf72 ATCN PAM targeting sequence
  source 1..20: mol_type = other RNA
cggctcacttcaacctccgc

SEQ ID NO: 2422 - RNA, 20 nt, synthetic construct
  misc_feature 1..20: note = C9Orf72 ATCN PAM targeting sequence
  source 1..20: mol_type = other RNA
cagcactttaggagagcgag

SEQ ID NO: 2423 - RNA, 20 nt, synthetic construct
  misc_feature 1..20: note = C9Orf72 ATCN PAM targeting sequence
  source 1..20: mol_type = other RNA
gttacataaatttgttggag

SEQ ID NO: 2424 - RNA, 20 nt, synthetic construct
  misc_feature 1..20: note = C9Orf72 ATCN PAM targeting sequence
  source 1..20: mol_type = other RNA
attgaacagaaagttattag

SEQ ID NO: 2425 - RNA, 20 nt, synthetic construct
  misc_feature 1..20: note = C9Orf72 ATCN PAM targeting sequence
  source 1..20: mol_type = other RNA
ttctccagttgttccaactt

SEQ ID NO: 2426 - RNA, 20 nt, synthetic construct
  misc_feature 1..20: note = C9Orf72 ATCN PAM targeting sequence
  source 1..20: mol_type = other RNA
aatgagtcactgaaagttgg

SEQ ID NO: 2427 - RNA, 20 nt, synthetic construct
  misc_feature 1..20: note = C9Orf72 ATCN PAM targeting sequence
  source 1..20: mol_type = other RNA
agaagcttatgtggtaatag

SEQ ID NO: 2428 - RNA, 20 nt, synthetic construct
  misc_feature 1..20: note = C9Orf72 ATCN PAM targeting sequence
  source 1..20: mol_type = other RNA
gagaaaacactgaaattatg

SEQ ID NO: 2429 - RNA, 20 nt, synthetic construct
  misc_feature 1..20: note = C9Orf72 ATCN PAM targeting sequence
  source 1..20: mol_type = other RNA
taatttcagtgttttctctg

SEQ ID NO: 2430 - RNA, 20 nt, synthetic construct
  misc_feature 1..20: note = C9Orf72 ATCN PAM targeting sequence
  source 1..20: mol_type = other RNA
catcataatttcagtgtttt

SEQ ID NO: 2431 - RNA, 20 nt, synthetic construct
  misc_feature 1..20: note = C9Orf72 ATCN PAM targeting sequence
  source 1..20: mol_type = other RNA
ttgttgctgcttatattacc

SEQ ID NO: 2432 - RNA, 20 nt, synthetic construct
  misc_feature 1..20: note = C9Orf72 ATCN PAM targeting sequence
  source 1..20: mol_type = other RNA
cagggtgtggctggaattca

SEQ ID NO: 2433 - RNA, 20 nt, synthetic construct
  misc_feature 1..20: note = C9Orf72 ATCN PAM targeting sequence
  source 1..20: mol_type = other RNA
tatttgccaggtcccataag

SEQ ID NO: 2434 - RNA, 20 nt, synthetic construct
  misc_feature 1..20: note = C9Orf72 ATCN PAM targeting sequence
  source 1..20: mol_type = other RNA
ggcagcctttagttcggtgt

SEQ ID NO: 2435 - RNA, 20 nt, synthetic construct
  misc_feature 1..20: note = C9Orf72 ATCN PAM targeting sequence
  source 1..20: mol_type = other RNA
ccattttatggctgaagaac

SEQ ID NO: 2436 - RNA, 20 nt, synthetic construct
  misc_feature 1..20: note = C9Orf72 ATCN PAM targeting sequence
  source 1..20: mol_type = other RNA
tgcagcattccgtcagtgat

SEQ ID NO: 2437 - RNA, 20 nt, synthetic construct
  misc_feature 1..20: note = C9Orf72 ATCN PAM targeting sequence
  source 1..20: mol_type = other RNA
aaatgcattgagactggtat

SEQ ID NO: 2438 - RNA, 20 nt, synthetic construct
  misc_feature 1..20: note = C9Orf72 ATCN PAM targeting sequence
  source 1..20: mol_type = other RNA
agcaatcaaaatgcattgag

SEQ ID NO: 2439 - RNA, 20 nt, synthetic construct
  misc_feature 1..20: note = C9Orf72 ATCN PAM targeting sequence
  source 1..20: mol_type = other RNA
atttagaaaaacaatctagc

SEQ ID NO: 2440 - RNA, 20 nt, synthetic construct
  misc_feature 1..20: note = C9Orf72 ATCN PAM targeting sequence
  source 1..20: mol_type = other RNA
gagatgggctaactgttcac

SEQ ID NO: 2441 - RNA, 20 nt, synthetic construct
  misc_feature 1..20: note = C9Orf72 ATCN PAM targeting sequence
  source 1..20: mol_type = other RNA
ctgatctatttagaaaaaca

SEQ ID NO: 2442 - RNA, 20 nt, synthetic construct
  misc_feature 1..20: note = C9Orf72 ATCN PAM targeting sequence
  source 1..20: mol_type = other RNA
ctcgcacttagctgtggcca

SEQ ID NO: 2443 - RNA, 20 nt, synthetic construct
  misc_feature 1..20: note = C9Orf72 ATCN PAM targeting sequence
  source 1..20: mol_type = other RNA
aaaattataggatggcctaa

SEQ ID NO: 2444 - RNA, 20 nt, synthetic construct
  misc_feature 1..20: note = C9Orf72 ATCN PAM targeting sequence
  source 1..20: mol_type = other RNA
ggaagtcctgagatttttgc

SEQ ID NO: 2445 - RNA, 20 nt, synthetic construct
  misc_feature 1..20: note = C9Orf72 ATCN PAM targeting sequence
  source 1..20: mol_type = other RNA
caggacttccagatgcttca

SEQ ID NO: 2446 - RNA, 20 nt, synthetic construct
  misc_feature 1..20: note = C9Orf72 ATCN PAM targeting sequence
  source 1..20: mol_type = other RNA
cataatgttctgcaaaaatc

SEQ ID NO: 2447 - RNA, 20 nt, synthetic construct
  misc_feature 1..20: note = C9Orf72 ATCN PAM targeting sequence
  source 1..20: mol_type = other RNA
aattactgtgtgccaagtcc

SEQ ID NO: 2448 - RNA, 20 nt, synthetic construct
  misc_feature 1..20: note = C9Orf72 ATCN PAM targeting sequence
  source 1..20: mol_type = other RNA
aaaactaaggtatcattata

SEQ ID NO: 2449 - RNA, 20 nt, synthetic construct
  misc_feature 1..20: note = C9Orf72 ATCN PAM targeting sequence
  source 1..20: mol_type = other RNA
ttataaactaggttctactc

SEQ ID NO: 2450 - RNA, 20 nt, synthetic construct
  misc_feature 1..20: note = C9Orf72 ATCN PAM targeting sequence
  source 1..20: mol_type = other RNA
ttggctaaagtataagggag

SEQ ID NO: 2451 - RNA, 20 nt, synthetic construct
  misc_feature 1..20: note = C9Orf72 ATCN PAM targeting sequence
  source 1..20: mol_type = other RNA
aatgctaaatgagattattt

SEQ ID NO: 2452 - RNA, 20 nt, synthetic construct
  misc_feature 1..20: note = C9Orf72 ATCN PAM targeting sequence
  source 1..20: mol_type = other RNA
catttagcatttgatctttc

SEQ ID NO: 2453 - RNA, 20 nt, synthetic construct
  misc_feature 1..20: note = C9Orf72 ATCN PAM targeting sequence
  source 1..20: mol_type = other RNA
gtaaataatctcatttagca

SEQ ID NO: 2454 - RNA, 20 nt, synthetic construct
  misc_feature 1..20: note = C9Orf72 ATCN PAM targeting sequence
  source 1..20: mol_type = other RNA
tgttaattcagtaaagatct

SEQ ID NO: 2455 - RNA, 20 nt, synthetic construct
  misc_feature 1..20: note = C9Orf72 ATCN PAM targeting sequence
  source 1..20: mol_type = other RNA
ttactgaattaacatgatag

SEQ ID NO: 2456 - RNA, 20 nt, synthetic construct
  misc_feature 1..20: note = C9Orf72 ATCN PAM targeting sequence
  source 1..20: mol_type = other RNA
cataatcaaatacattatca

SEQ ID NO: 2457 - RNA, 20 nt, synthetic construct
  misc_feature 1..20: note = C9Orf72 ATCN PAM targeting sequence
  source 1..20: mol_type = other RNA
aatacattatcaatggtact

SEQ ID NO: 2458 - RNA, 20 nt, synthetic construct
  misc_feature 1..20: note = C9Orf72 ATCN PAM targeting sequence
  source 1..20: mol_type = other RNA
atcctttcatctccaaggag

SEQ ID NO: 2459 - RNA, 20 nt, synthetic construct
  misc_feature 1..20: note = C9Orf72 ATCN PAM targeting sequence
  source 1..20: mol_type = other RNA
gtttatccatcctttcatct

SEQ ID NO: 2460 - RNA, 20 nt, synthetic construct
  misc_feature 1..20: note = C9Orf72 ATCN PAM targeting sequence
  source 1..20: mol_type = other RNA
atctgtttatccatcctttc

SEQ ID NO: 2461 - RNA, 20 nt, synthetic construct
  misc_feature 1..20: note = C9Orf72 ATCN PAM targeting sequence
  source 1..20: mol_type = other RNA
atccatctgtttatccatcc

SEQ ID NO: 2462 - RNA, 20 nt, synthetic construct
  misc_feature 1..20: note = C9Orf72 ATCN PAM targeting sequence
  source 1..20: mol_type = other RNA
atccatccatctgtttatcc

SEQ ID NO: 2463 - RNA, 20 nt, synthetic construct
  misc_feature 1..20: note = C9Orf72 ATCN PAM targeting sequence
  source 1..20: mol_type = other RNA
atccatccatccatctgttt

SEQ ID NO: 2464 - RNA, 20 nt, synthetic construct
  misc_feature 1..20: note = C9Orf72 ATCN PAM targeting sequence
  source 1..20: mol_type = other RNA
atccatccatccatccatct

SEQ ID NO: 2465 - RNA, 20 nt, synthetic construct
  misc_feature 1..20: note = C9Orf72 ATCN PAM targeting sequence
  source 1..20: mol_type = other RNA
atccatccatccatccatcc

SEQ ID NO: 2466 - RNA, 20 nt, synthetic construct
  misc_feature 1..20: note = C9Orf72 ATCN PAM targeting sequence
  source 1..20: mol_type = other RNA
atccatccatccatccatcc

SEQ ID NO: 2467 - RNA, 20 nt, synthetic construct
  misc_feature 1..20: note = C9Orf72 ATCN PAM targeting sequence
  source 1..20: mol_type = other RNA
atccatccatccatccatcc

SEQ ID NO: 2468 - RNA, 20 nt, synthetic construct
  misc_feature 1..20: note = C9Orf72 ATCN PAM targeting sequence
  source 1..20: mol_type = other RNA
atccatccatccatccatcc

SEQ ID NO: 2469 - RNA, 20 nt, synthetic construct
  misc_feature 1..20: note = C9Orf72 ATCN PAM targeting sequence
  source 1..20: mol_type = other RNA
atccatccatccatccatcc

SEQ ID NO: 2470 - RNA, 20 nt, synthetic construct
  misc_feature 1..20: note = C9Orf72 ATCN PAM targeting sequence
  source 1..20: mol_type = other RNA
acccacccaccatccatcca

SEQ ID NO: 2471 - RNA, 20 nt, synthetic construct
  misc_feature 1..20: note = C9Orf72 ATCN PAM targeting sequence
  source 1..20: mol_type = other RNA
atccacccacccaccatcca

SEQ ID NO: 2472 - RNA, 20 nt, synthetic construct
  misc_feature 1..20: note = C9Orf72 ATCN PAM targeting sequence
  source 1..20: mol_type = other RNA
attttgcataattgagtatt

SEQ ID NO: 2473 - RNA, 20 nt, synthetic construct
  misc_feature 1..20: note = C9Orf72 ATCN PAM targeting sequence
  source 1..20: mol_type = other RNA
tcttggaattatcaattttg

SEQ ID NO: 2474 - RNA, 20 nt, synthetic construct
  misc_feature 1..20: note = C9Orf72 ATCN PAM targeting sequence
  source 1..20: mol_type = other RNA
tggtttttaattttaagaca

SEQ ID NO: 2475 - RNA, 20 nt, synthetic construct
  misc_feature 1..20: note = C9Orf72 ATCN PAM targeting sequence
  source 1..20: mol_type = other RNA
aatttatgaagaagctcttt

SEQ ID NO: 2476 - RNA, 20 nt, synthetic construct
  misc_feature 1..20: note = C9Orf72 ATCN PAM targeting sequence
  source 1..20: mol_type = other RNA
gacagaatagttttgttttc

SEQ ID NO: 2477 - RNA, 20 nt, synthetic construct
  misc_feature 1..20: note = C9Orf72 ATCN PAM targeting sequence
  source 1..20: mol_type = other RNA
gtagacacaactctctttaa

SEQ ID NO: 2478 - RNA, 20 nt, synthetic construct
  misc_feature 1..20: note = C9Orf72 ATCN PAM targeting sequence
  source 1..20: mol_type = other RNA
tgcatttcctattatatata

SEQ ID NO: 2479 - RNA, 20 nt, synthetic construct
  misc_feature 1..20: note = C9Orf72 ATCN PAM targeting sequence
  source 1..20: mol_type = other RNA
gatctaggcaagggctcttt

SEQ ID NO: 2480 - RNA, 20 nt, synthetic construct
  misc_feature 1..20: note = C9Orf72 ATCN PAM targeting sequence
  source 1..20: mol_type = other RNA
gatcctgcatttcctattat

SEQ ID NO: 2481 - RNA, 20 nt, synthetic construct
  misc_feature 1..20: note = C9Orf72 ATCN PAM targeting sequence
  source 1..20: mol_type = other RNA
aggcaagggctctttaaatg

SEQ ID NO: 2482 - RNA, 20 nt, synthetic construct
  misc_feature 1..20: note = C9Orf72 ATCN PAM targeting sequence
  source 1..20: mol_type = other RNA
tggcccaaaatggggaaaag

SEQ ID NO: 2483 - RNA, 20 nt, synthetic construct
  misc_feature 1..20: note = C9Orf72 ATCN PAM targeting sequence
  source 1..20: mol_type = other RNA
caagccagcagagcagctga

SEQ ID NO: 2484 - RNA, 20 nt, synthetic construct
  misc_feature 1..20: note = C9Orf72 ATCN PAM targeting sequence
  source 1..20: mol_type = other RNA
cacggtgctccctccttgaa

SEQ ID NO: 2485 - RNA, 20 nt, synthetic construct
  misc_feature 1..20: note = C9Orf72 ATCN PAM targeting sequence
  source 1..20: mol_type = other RNA
tgtacattgcatagtaactg

SEQ ID NO: 2486 - RNA, 20 nt, synthetic construct
  misc_feature 1..20: note = C9Orf72 ATCN PAM targeting sequence
  source 1..20: mol_type = other RNA
agagcattggcacttaataa

SEQ ID NO: 2487 - RNA, 20 nt, synthetic construct
  misc_feature 1..20: note = C9Orf72 ATCN PAM targeting sequence
  source 1..20: mol_type = other RNA
gtatagctattaataataat

SEQ ID NO: 2488 - RNA, 20 nt, synthetic construct
  misc_feature 1..20: note = C9Orf72 ATCN PAM targeting sequence
  source 1..20: mol_type = other RNA
tgttgacaggcttatgagca

SEQ ID NO: 2489 - RNA, 20 nt, synthetic construct
  misc_feature 1..20: note = C9Orf72 ATCN PAM targeting sequence
  source 1..20: mol_type = other RNA
actcatataccacatttctc

SEQ ID NO: 2490 - RNA, 20 nt, synthetic construct
  misc_feature 1..20: note = C9Orf72 ATCN PAM targeting sequence
  source 1..20: mol_type = other RNA
agcatgttggaaagaatggc

SEQ ID NO: 2491 - RNA, 20 nt, synthetic construct
  misc_feature 1..20: note = C9Orf72 ATCN PAM targeting sequence
  source 1..20: mol_type = other RNA
tgcaacaaatctagcatgtt

SEQ ID NO: 2492 - RNA, 20 nt, synthetic construct
  misc_feature 1..20: note = C9Orf72 ATCN PAM targeting sequence
  source 1..20: mol_type = other RNA
tctccccattaaggctccct

SEQ ID NO: 2493 - RNA, 20 nt, synthetic construct
  misc_feature 1..20: note = C9Orf72 ATCN PAM targeting sequence
  source 1..20: mol_type = other RNA
cctgtcgtggattgaactgt

SEQ ID NO: 2494 - RNA, 20 nt, synthetic construct
  misc_feature 1..20: note = C9Orf72 ATCN PAM targeting sequence
  source 1..20: mol_type = other RNA
acgacaggggatatggtaca

SEQ ID NO: 2495 - RNA, 20 nt, synthetic construct
  misc_feature 1..20: note = C9Orf72 ATCN PAM targeting sequence
  source 1..20: mol_type = other RNA
ccaatacctataatgtggcc

SEQ ID NO: 2496 - RNA, 20 nt, synthetic construct
  misc_feature 1..20: note = C9Orf72 ATCN PAM targeting sequence
  source 1..20: mol_type = other RNA
aattaagaagatgtcatact

SEQ ID NO: 2497 - RNA, 20 nt, synthetic construct
  misc_feature 1..20: note = C9Orf72 ATCN PAM targeting sequence
  source 1..20: mol_type = other RNA
tcttaatttgattacatttg

SEQ ID NO: 2498 - RNA, 20 nt, synthetic construct
  misc_feature 1..20: note = C9Orf72 ATCN PAM targeting sequence
  source 1..20: mol_type = other RNA
agtatgacatcttcttaatt

SEQ ID NO: 2499 - RNA, 20 nt, synthetic construct
  misc_feature 1..20: note = C9Orf72 ATCN PAM targeting sequence
  source 1..20: mol_type = other RNA
gcacactacttgttacactt

SEQ ID NO: 2500 - RNA, 20 nt, synthetic construct
  misc_feature 1..20: note = C9Orf72 ATCN PAM targeting sequence
  source 1..20: mol_type = other RNA
gtgtgtcccttcacgtggcc

SEQ ID NO: 2501 - RNA, 20 nt, synthetic construct
  misc_feature 1..20: note = C9Orf72 ATCN PAM targeting sequence
  source 1..20: mol_type = other RNA
ctgcctccatagttacatga

SEQ ID NO: 2502 - RNA, 20 nt, synthetic construct
  misc_feature 1..20: note = C9Orf72 ATCN PAM targeting sequence
  source 1..20: mol_type = other RNA
tctctgcctccatagttaca

SEQ ID NO: 2503 - RNA, 20 nt, synthetic construct
  misc_feature 1..20: note = C9Orf72 ATCN PAM targeting sequence
  source 1..20: mol_type = other RNA
agaaaccaaagaacactaag

SEQ ID NO: 2504 - RNA, 20 nt, synthetic construct
  misc_feature 1..20: note = C9Orf72 ATCN PAM targeting sequence
  source 1..20: mol_type = other RNA
ttccttgcctcttttagctt

SEQ ID NO: 2505 - RNA, 20 nt, synthetic construct
  misc_feature 1..20: note = C9Orf72 ATCN PAM targeting sequence
  source 1..20: mol_type = other RNA
tgatggcactctgattttgg

SEQ ID NO: 2506 - RNA, 20 nt, synthetic construct
  misc_feature 1..20: note = C9Orf72 ATCN PAM targeting sequence
  source 1..20: mol_type = other RNA
tgataatgcttctgccaaag

SEQ ID NO: 2507 - RNA, 20 nt, synthetic construct
  misc_feature 1..20: note = C9Orf72 ATCN PAM targeting sequence
  source 1..20: mol_type = other RNA
gagtgccatcatgataatgc

SEQ ID NO: 2508 - RNA, 20 nt, synthetic construct
  misc_feature 1..20: note = C9Orf72 ATCN PAM targeting sequence
  source 1..20: mol_type = other RNA
ccataacttaggtggcttag

SEQ ID NO: 2509 - RNA, 20 nt, synthetic construct
  misc_feature 1..20: note = C9Orf72 ATCN PAM targeting sequence
  source 1..20: mol_type = other RNA
caaaactcctacagccccaa

SEQ ID NO: 2510 - RNA, 20 nt, synthetic construct
  misc_feature 1..20: note = C9Orf72 ATCN PAM targeting sequence
  source 1..20: mol_type = other RNA
cttggactgcaagtttgcct

SEQ ID NO: 2511 - RNA, 20 nt, synthetic construct
  misc_feature 1..20: note = C9Orf72 ATCN PAM targeting sequence
  source 1..20: mol_type = other RNA
tactgccaggcatgtatgtg

SEQ ID NO: 2512 - RNA, 20 nt, synthetic construct
  misc_feature 1..20: note = C9Orf72 ATCN PAM targeting sequence
  source 1..20: mol_type = other RNA
catcaacaggagggcattag

SEQ ID NO: 2513 - RNA, 20 nt, synthetic construct
  misc_feature 1..20: note = C9Orf72 ATCN PAM targeting sequence
  source 1..20: mol_type = other RNA
acaggagggcattaggccta

SEQ ID NO: 2514 - RNA, 20 nt, synthetic construct
  misc_feature 1..20: note = C9Orf72 ATCN PAM targeting sequence
  source 1..20: mol_type = other RNA
aggcctaatgccctcctgtt

SEQ ID NO: 2515 - RNA, 20 nt, synthetic construct
  misc_feature 1..20: note = C9Orf72 ATCN PAM targeting sequence
  source 1..20: mol_type = other RNA
acaatggcaaatagagctta

SEQ ID NO: 2516 - RNA, 20 nt, synthetic construct
  misc_feature 1..20: note = C9Orf72 ATCN PAM targeting sequence
  source 1..20: mol_type = other RNA
agctattctcagttaagctc

SEQ ID NO: 2517 - RNA, 20 nt, synthetic construct
  misc_feature 1..20: note = C9Orf72 ATCN PAM targeting sequence
  source 1..20: mol_type = other RNA
gggcaaagatgcagagacaa

SEQ ID NO: 2518 - RNA, 20 nt, synthetic construct
  misc_feature 1..20: note = C9Orf72 ATCN PAM targeting sequence
  source 1..20: mol_type = other RNA
ttgcccagatgactccacag

SEQ ID NO: 2519 - RNA, 20 nt, synthetic construct
  misc_feature 1..20: note = C9Orf72 ATCN PAM targeting sequence
  source 1..20: mol_type = other RNA
ttatgcctgtgaccatcctc

SEQ ID NO: 2520 - RNA, 20 nt, synthetic construct
  misc_feature 1..20: note = C9Orf72 ATCN PAM targeting sequence
  source 1..20: mol_type = other RNA
tctccagtttcctcttctgc

SEQ ID NO: 2521 - RNA, 20 nt, synthetic construct
  misc_feature 1..20: note = C9Orf72 ATCN PAM targeting sequence
  source 1..20: mol_type = other RNA
gtgggtctgtccaaagagaa

SEQ ID NO: 2522 - RNA, 20 nt, synthetic construct
  misc_feature 1..20: note = C9Orf72 ATCN PAM targeting sequence
  source 1..20: mol_type = other RNA
acagaagctgtaagtggtaa

SEQ ID NO: 2523 - RNA, 20 nt, synthetic construct
  misc_feature 1..20: note = C9Orf72 ATCN PAM targeting sequence
  source 1..20: mol_type = other RNA
atctctcctggcagcatcag

SEQ ID NO: 2524 - RNA, 20 nt, synthetic construct
  misc_feature 1..20: note = C9Orf72 ATCN PAM targeting sequence
  source 1..20: mol_type = other RNA
ctcctggcagcatcagtctt

SEQ ID NO: 2525 - RNA, 20 nt, synthetic construct
  misc_feature 1..20: note = C9Orf72 ATCN PAM targeting sequence
  source 1..20: mol_type = other RNA
gtcttctgctcttgtctagg

SEQ ID NO: 2526 - RNA, 20 nt, synthetic construct
  misc_feature 1..20: note = C9Orf72 ATCN PAM targeting sequence
  source 1..20: mol_type = other RNA
aactgctggatagacatctc

SEQ ID NO: 2527 - RNA, 20 nt, synthetic construct
  misc_feature 1..20: note = C9Orf72 ATCN PAM targeting sequence
  source 1..20: mol_type = other RNA
agcagttggatatatgggcc

SEQ ID NO: 2528 - RNA, 20 nt, synthetic construct
  misc_feature 1..20: note = C9Orf72 ATCN PAM targeting sequence
  source 1..20: mol_type = other RNA
ccacttagctatctcagaca

SEQ ID NO: 2529 - RNA, 20 nt, synthetic construct
  misc_feature 1..20: note = C9Orf72 ATCN PAM targeting sequence
  source 1..20: mol_type = other RNA
cagacaattcaaagcaactt

SEQ ID NO: 2530 - RNA, 20 nt, synthetic construct
  misc_feature 1..20: note = C9Orf72 ATCN PAM targeting sequence
  source 1..20: mol_type = other RNA
ctcagctggtggcacgatca

SEQ ID NO: 2531 - RNA, 20 nt, synthetic construct
  misc_feature 1..20: note = C9Orf72 ATCN PAM targeting sequence
  source 1..20: mol_type = other RNA
tgccaccagctgagagatag

SEQ ID NO: 2532 - RNA, 20 nt, synthetic construct
  misc_feature 1..20: note = C9Orf72 ATCN PAM targeting sequence
  source 1..20: mol_type = other RNA
tatacctagctagaaaactg

SEQ ID NO: 2533 - RNA, 20 nt, synthetic construct
  misc_feature 1..20: note = C9Orf72 ATCN PAM targeting sequence
  source 1..20: mol_type = other RNA
atttccaaaagttgccaacc

SEQ ID NO: 2534 - RNA, 20 nt, synthetic construct
  misc_feature 1..20: note = C9Orf72 ATCN PAM targeting sequence
  source 1..20: mol_type = other RNA
agaagaagacaattacttag

SEQ ID NO: 2535 - RNA, 20 nt, synthetic construct
  misc_feature 1..20: note = C9Orf72 ATCN PAM targeting sequence
  source 1..20: mol_type = other RNA
ctctcctaattcaaactctc

SEQ ID NO: 2536 - RNA, 20 nt, synthetic construct
  misc_feature 1..20: note = C9Orf72 ATCN PAM targeting sequence
  source 1..20: mol_type = other RNA
actcttgccttttaagatta

SEQ ID NO: 2537 - RNA, 20 nt, synthetic construct
  misc_feature 1..20: note = C9Orf72 ATCN PAM targeting sequence
  source 1..20: mol_type = other RNA
taaaaggcaagagttgatga

SEQ ID NO: 2538 - RNA, 20 nt, synthetic construct
  misc_feature 1..20: note = C9Orf72 ATCN PAM targeting sequence
  source 1..20: mol_type = other RNA
ctgcctccaggaacctctgc

SEQ ID NO: 2539 - RNA, 20 nt, synthetic construct
  misc_feature 1..20: note = C9Orf72 ATCN PAM targeting sequence
  source 1..20: mol_type = other RNA
gttgcctacagtgttagaca

SEQ ID NO: 2540 - RNA, 20 nt, synthetic construct
  misc_feature 1..20: note = C9Orf72 ATCN PAM targeting sequence
  source 1..20: mol_type = other RNA
tctgttgcctacagtgttag

SEQ ID NO: 2541 - RNA, 20 nt, synthetic construct
  misc_feature 1..20: note = C9Orf72 ATCN PAM targeting sequence
  source 1..20: mol_type = other RNA
tcatctgttgcctacagtgt

SEQ ID NO: 2542 - RNA, 20 nt, synthetic construct
  misc_feature 1..20: note = C9Orf72 ATCN PAM targeting sequence
  source 1..20: mol_type = other RNA
tcatcatctgttgcctacag

SEQ ID NO: 2543 - RNA, 20 nt, synthetic construct
  misc_feature 1..20: note = C9Orf72 ATCN PAM targeting sequence
  source 1..20: mol_type = other RNA
tttattgtccacattctata

SEQ ID NO: 2544 - RNA, 20 nt, synthetic construct
  misc_feature 1..20: note = C9Orf72 ATCN PAM targeting sequence
  source 1..20: mol_type = other RNA
gttcagtaattctacctctt

SEQ ID NO: 2545 - RNA, 20 nt, synthetic construct
  misc_feature 1..20: note = C9Orf72 ATCN PAM targeting sequence
  source 1..20: mol_type = other RNA
gatattcaatttagattaaa

SEQ ID NO: 2546 - RNA, 20 nt, synthetic construct
  misc_feature 1..20: note = C9Orf72 ATCN PAM targeting sequence
  source 1..20: mol_type = other RNA
gatcagttcagtaattctac

SEQ ID NO: 2547 - RNA, 20 nt, synthetic construct
  misc_feature 1..20: note = C9Orf72 ATCN PAM targeting sequence
  source 1..20: mol_type = other RNA
aaattgaatatcagatcagt

SEQ ID NO: 2548 - RNA, 20 nt, synthetic construct
  misc_feature 1..20: note = C9Orf72 ATCN PAM targeting sequence
  source 1..20: mol_type = other RNA
tatgagtatattttaatcta

SEQ ID NO: 2549 - RNA, 20 nt, synthetic construct
  misc_feature 1..20: note = C9Orf72 ATCN PAM targeting sequence
  source 1..20: mol_type = other RNA
gttcattcaataaatattta

SEQ ID NO: 2550 - RNA, 20 nt, synthetic construct
  misc_feature 1..20: note = C9Orf72 ATCN PAM targeting sequence
  source 1..20: mol_type = other RNA
ctcaggaaacccattccaag

SEQ ID NO: 2551 - RNA, 20 nt, synthetic construct
  misc_feature 1..20: note = C9Orf72 ATCN PAM targeting sequence
  source 1..20: mol_type = other RNA
tttcttcccaattacagcca

SEQ ID NO: 2552 - RNA, 20 nt, synthetic construct
  misc_feature 1..20: note = C9Orf72 ATCN PAM targeting sequence
  source 1..20: mol_type = other RNA
aagagtggctgtaattggga

SEQ ID NO: 2553 - RNA, 20 nt, synthetic construct
  misc_feature 1..20: note = C9Orf72 ATCN PAM targeting sequence
  source 1..20: mol_type = other RNA
catccaagagtggctgtaat

SEQ ID NO: 2554 - RNA, 20 nt, synthetic construct
  misc_feature 1..20: note = C9Orf72 ATCN PAM targeting sequence
  source 1..20: mol_type = other RNA
aggaaaaaaatccacatcta

SEQ ID NO: 2555 - RNA, 20 nt, synthetic construct
  misc_feature 1..20: note = C9Orf72 ATCN PAM targeting sequence
  source 1..20: mol_type = other RNA
acatctattcactgagtaaa

SEQ ID NO: 2556 - RNA, 20 nt, synthetic construct
  misc_feature 1..20: note = C9Orf72 ATCN PAM targeting sequence
  source 1..20: mol_type = other RNA
attcactgagtaaagagaag

SEQ ID NO: 2557 - RNA, 20 nt, synthetic construct
  misc_feature 1..20: note = C9Orf72 ATCN PAM targeting sequence
  source 1..20: mol_type = other RNA
ttctctttactcagtgaata

SEQ ID NO: 2558 - RNA, 20 nt, synthetic construct
  misc_feature 1..20: note = C9Orf72 ATCN PAM targeting sequence
  source 1..20: mol_type = other RNA
atttttcatgcctgccatct

SEQ ID NO: 2559 - RNA, 20 nt, synthetic construct
  misc_feature 1..20: note = C9Orf72 ATCN PAM targeting sequence
  source 1..20: mol_type = other RNA
gaaattcttactaacatcct

SEQ ID NO: 2560 - RNA, 20 nt, synthetic construct
  misc_feature 1..20: note = C9Orf72 ATCN PAM targeting sequence
  source 1..20: mol_type = other RNA
tcagaagtaaaagccccatt

SEQ ID NO: 2561 - RNA, 20 nt, synthetic construct
  misc_feature 1..20: note = C9Orf72 ATCN PAM targeting sequence
  source 1..20: mol_type = other RNA
acactgaaatgaggatatgg

SEQ ID NO: 2562 - RNA, 20 nt, synthetic construct
  misc_feature 1..20: note = C9Orf72 ATCN PAM targeting sequence
  source 1..20: mol_type = other RNA
tcatttcagtgttgatttcc

SEQ ID NO: 2563 - RNA, 20 nt, synthetic construct
  misc_feature 1..20: note = C9Orf72 ATCN PAM targeting sequence
  source 1..20: mol_type = other RNA
atatcctcatttcagtgttg

SEQ ID NO: 2564 - RNA, 20 nt, synthetic construct
  misc_feature 1..20: note = C9Orf72 ATCN PAM targeting sequence
  source 1..20: mol_type = other RNA
taaaacagagagtaggtttt

SEQ ID NO: 2565 - RNA, 20 nt, synthetic construct
  misc_feature 1..20: note = C9Orf72 ATCN PAM targeting sequence
  source 1..20: mol_type = other RNA
gtaaaacctactctctgttt

SEQ ID NO: 2566 - RNA, 20 nt, synthetic construct
  misc_feature 1..20: note = C9Orf72 ATCN PAM targeting sequence
  source 1..20: mol_type = other RNA
cagtaaataaacgtgtacca

SEQ ID NO: 2567 - RNA, 20 nt, synthetic construct
  misc_feature 1..20: note = C9Orf72 ATCN PAM targeting sequence
  source 1..20: mol_type = other RNA
tgctacatttctttttatca

SEQ ID NO: 2568 - RNA, 20 nt, synthetic construct
  misc_feature 1..20: note = C9Orf72 ATCN PAM targeting sequence
  source 1..20: mol_type = other RNA
gggattcttttccaacagct

SEQ ID NO: 2569 - RNA, 20 nt, synthetic construct
  misc_feature 1..20: note = C9Orf72 ATCN PAM targeting sequence
  source 1..20: mol_type = other RNA
ctgataaaaagaaatgtagc

SEQ ID NO: 2570 - RNA, 20 nt, synthetic construct
  misc_feature 1..20: note = C9Orf72 ATCN PAM targeting sequence
  source 1..20: mol_type = other RNA
tcagttgggctggaaaagac

SEQ ID NO: 2571 - RNA, 20 nt, synthetic construct
  misc_feature 1..20: note = C9Orf72 ATCN PAM targeting sequence
  source 1..20: mol_type = other RNA
agttgtcttttccagcccaa

SEQ ID NO: 2572 - RNA, 20 nt, synthetic construct
  misc_feature 1..20: note = C9Orf72 ATCN PAM targeting sequence
  source 1..20: mol_type = other RNA
accttagaggggctctttgg

SEQ ID NO: 2573 - RNA, 20 nt, synthetic construct
  misc_feature 1..20: note = C9Orf72 ATCN PAM targeting sequence
  source 1..20: mol_type = other RNA
tgtacaaaaaagcagcaaaa

SEQ ID NO: 2574 - RNA, 20 nt, synthetic construct
  misc_feature 1..20: note = C9Orf72 ATCN PAM targeting sequence
  source 1..20: mol_type = other RNA
gatttgagaactataagaag

SEQ ID NO: 2575 - RNA, 20 nt, synthetic construct
  misc_feature 1..20: note = C9Orf72 ATCN PAM targeting sequence
  source 1..20: mol_type = other RNA
gattcagtaataacctgtat

SEQ ID NO: 2576 - RNA, 20 nt, synthetic construct
  misc_feature 1..20: note = C9Orf72 ATCN PAM targeting sequence
  source 1..20: mol_type = other RNA
aaaactgccgtgtgacttct

SEQ ID NO: 2577 - RNA, 20 nt, synthetic construct
  misc_feature 1..20: note = C9Orf72 ATCN PAM targeting sequence
  source 1..20: mol_type = other RNA
gtggcacttcttacacagta

SEQ ID NO: 2578 - RNA, 20 nt, synthetic construct
  misc_feature 1..20: note = C9Orf72 ATCN PAM targeting sequence
  source 1..20: mol_type = other RNA
accaagaaatacaaaactgt

SEQ ID NO: 2579 - RNA, 20 nt, synthetic construct
  misc_feature 1..20: note = C9Orf72 ATCN PAM targeting sequence
  source 1..20: mol_type = other RNA
ctagagtagaggtacgaaag

SEQ ID NO: 2580 - RNA, 20 nt, synthetic construct
  misc_feature 1..20: note = C9Orf72 ATCN PAM targeting sequence
  source 1..20: mol_type = other RNA
tgagcactttcgtacctcta

SEQ ID NO: 2581 - RNA, 20 nt, synthetic construct
  misc_feature 1..20: note = C9Orf72 ATCN PAM targeting sequence
  source 1..20: mol_type = other RNA
gaccagcctcggggaatccc

SEQ ID NO: 2582 - RNA, 20 nt, synthetic construct
  misc_feature 1..20: note = C9Orf72 ATCN PAM targeting sequence
  source 1..20: mol_type = other RNA
caaggagaatgcaccagaag

SEQ ID NO: 2583 - RNA, 20 nt, synthetic construct
  misc_feature 1..20: note = C9Orf72 ATCN PAM targeting sequence
  source 1..20: mol_type = other RNA
accactctgttaattccctt

SEQ ID NO: 2584 - RNA, 20 nt, synthetic construct
  misc_feature 1..20: note = C9Orf72 ATCN PAM targeting sequence
  source 1..20: mol_type = other RNA
gactttgtcctctccatatc

SEQ ID NO: 2585 - RNA, 20 nt, synthetic construct
  misc_feature 1..20: note = C9Orf72 ATCN PAM targeting sequence
  source 1..20: mol_type = other RNA
ctacacaaaaagaaccaaac

SEQ ID NO: 2586 - RNA, 20 nt, synthetic construct
  misc_feature 1..20: note = C9Orf72 ATCN PAM targeting sequence
  source 1..20: mol_type = other RNA
tcattcagtcacccaacaaa

SEQ ID NO: 2587 - RNA, 20 nt, synthetic construct
  misc_feature 1..20: note = C9Orf72 ATCN PAM targeting sequence
  source 1..20: mol_type = other RNA
ttcagtcacccaacaaataa

SEQ ID NO: 2588 - RNA, 20 nt, synthetic construct
  misc_feature 1..20: note = C9Orf72 ATCN PAM targeting sequence
  source 1..20: mol_type = other RNA
cagcacctggcccatagtag

SEQ ID NO: 2589 - RNA, 20 nt, synthetic construct
  misc_feature 1..20: note = C9Orf72 ATCN PAM targeting sequence
  source 1..20: mol_type = other RNA
tggacctcatatccataaag

SEQ ID NO: 2590 - RNA, 20 nt, synthetic construct
  misc_feature 1..20: note = C9Orf72 ATCN PAM targeting sequence
  source 1..20: mol_type = other RNA
ataaagggctgataatatag

SEQ ID NO: 2591 - RNA, 20 nt, synthetic construct
  misc_feature 1..20: note = C9Orf72 ATCN PAM targeting sequence
  source 1..20: mol_type = other RNA
gccctttatggatatgaggt

SEQ ID NO: 2592 - RNA, 20 nt, synthetic construct
  misc_feature 1..20: note = C9Orf72 ATCN PAM targeting sequence
  source 1..20: mol_type = other RNA
atattatcagccctttatgg

SEQ ID NO: 2593 - RNA, 20 nt, synthetic construct
  misc_feature 1..20: note = C9Orf72 ATCN PAM targeting sequence
  source 1..20: mol_type = other RNA
tctccaaatgatatcctata

SEQ ID NO: 2594 - RNA, 20 nt, synthetic construct
  misc_feature 1..20: note = C9Orf72 ATCN PAM targeting sequence
  source 1..20: mol_type = other RNA
ccaaatgatatcctatatac

SEQ ID NO: 2595 - RNA, 20 nt, synthetic construct
  misc_feature 1..20: note = C9Orf72 ATCN PAM targeting sequence
  source 1..20: mol_type = other RNA
tttggagatgatattaaaaa

SEQ ID NO: 2596 - RNA, 20 nt, synthetic construct
  misc_feature 1..20: note = C9Orf72 ATCN PAM targeting sequence
  source 1..20: mol_type = other RNA
tatatacagtcacacagata

SEQ ID NO: 2597 - RNA, 20 nt, synthetic construct
  misc_feature 1..20: note = C9Orf72 ATCN PAM targeting sequence
  source 1..20: mol_type = other RNA
gtgtgactgtatataggata

SEQ ID NO: 2598 - RNA, 20 nt, synthetic construct
  misc_feature 1..20: note = C9Orf72 ATCN PAM targeting sequence
  source 1..20: mol_type = other RNA
tagaagtttatctgtgtgac

SEQ ID NO: 2599 - RNA, 20 nt, synthetic construct
  misc_feature 1..20: note = C9Orf72 ATCN PAM targeting sequence
  source 1..20: mol_type = other RNA
caatttttataatcctgtat

SEQ ID NO: 2600 - RNA, 20 nt, synthetic construct
  misc_feature 1..20: note = C9Orf72 ATCN PAM targeting sequence
  source 1..20: mol_type = other RNA
tgtattgccaattttaaaaa

SEQ ID NO: 2601 - RNA, 20 nt, synthetic construct
  misc_feature 1..20: note = C9Orf72 ATCN PAM targeting sequence
  source 1..20: mol_type = other RNA
atgggtggcagtaggaggac

SEQ ID NO: 2602 - RNA, 20 nt, synthetic construct
  misc_feature 1..20: note = C9Orf72 ATCN PAM targeting sequence
  source 1..20: mol_type = other RNA
tatccatgggtggcagtagg

SEQ ID NO: 2603 - RNA, 20 nt, synthetic construct
  misc_feature 1..20: note = C9Orf72 ATCN PAM targeting sequence
  source 1..20: mol_type = other RNA
aggtctctcctattccctat

SEQ ID NO: 2604 - RNA, 20 nt, synthetic construct
  misc_feature 1..20: note = C9Orf72 ATCN PAM targeting sequence
  source 1..20: mol_type = other RNA
aacaggacacataccaaact

SEQ ID NO: 2605 - RNA, 20 nt, synthetic construct
  misc_feature 1..20: note = C9Orf72 ATCN PAM targeting sequence
  source 1..20: mol_type = other RNA
gtttggtatgtgtcctgttt

SEQ ID NO: 2606 - RNA, 20 nt, synthetic construct
  misc_feature 1..20: note = C9Orf72 ATCN PAM targeting sequence
  source 1..20: mol_type = other RNA
acagtattccctgaatagtc

SEQ ID NO: 2607 - RNA, 20 nt, synthetic construct
  misc_feature 1..20: note = C9Orf72 ATCN PAM targeting sequence
  source 1..20: mol_type = other RNA
gtttctctatcagggtcatc

SEQ ID NO: 2608 - RNA, 20 nt, synthetic construct
  misc_feature 1..20: note = C9Orf72 ATCN PAM targeting sequence
  source 1..20: mol_type = other RNA
gggtcatcattaagagaaga

SEQ ID NO: 2609 - RNA, 20 nt, synthetic construct
  misc_feature 1..20: note = C9Orf72 ATCN PAM targeting sequence
  source 1..20: mol_type = other RNA
ttaagagaagagccaagaaa

SEQ ID NO: 2610 - RNA, 20 nt, synthetic construct
  misc_feature 1..20: note = C9Orf72 ATCN PAM targeting sequence
  source 1..20: mol_type = other RNA
agttgccagaggtgactgcg

SEQ ID NO: 2611 - RNA, 20 nt, synthetic construct
  misc_feature 1..20: note = C9Orf72 ATCN PAM targeting sequence
  source 1..20: mol_type = other RNA
tcagacaaacgcagtcacct

SEQ ID NO: 2612 - RNA, 20 nt, synthetic construct
  misc_feature 1..20: note = C9Orf72 ATCN PAM targeting sequence
  source 1..20: mol_type = other RNA
caaggttgtgtgcagctatt

SEQ ID NO: 2613 - RNA, 20 nt, synthetic construct
  misc_feature 1..20: note = C9Orf72 ATCN PAM targeting sequence
  source 1..20: mol_type = other RNA
tctgcatgccccatgggaag

SEQ ID NO: 2614 - RNA, 20 nt, synthetic construct
  misc_feature 1..20: note = C9Orf72 ATCN PAM targeting sequence
  source 1..20: mol_type = other RNA
cctaatgaccctacaaatgg

SEQ ID NO: 2615 - RNA, 20 nt, synthetic construct
  misc_feature 1..20: note = C9Orf72 ATCN PAM targeting sequence
  source 1..20: mol_type = other RNA
atattactcaattcttgaaa

SEQ ID NO: 2616 - RNA, 20 nt, synthetic construct
  misc_feature 1..20: note = C9Orf72 ATCN PAM targeting sequence
  source 1..20: mol_type = other RNA
tccatattactcaattcttg

SEQ ID NO: 2617 - RNA, 20 nt, synthetic construct
  misc_feature 1..20: note = C9Orf72 ATCN PAM targeting sequence
  source 1..20: mol_type = other RNA
atgtgttactctcgtcctga

SEQ ID NO: 2618 - RNA, 20 nt, synthetic construct
  misc_feature 1..20: note = C9Orf72 ATCN PAM targeting sequence
  source 1..20: mol_type = other RNA
ggacgagagtaacacattga

SEQ ID NO: 2619 - RNA, 20 nt, synthetic construct
  misc_feature 1..20: note = C9Orf72 ATCN PAM targeting sequence
  source 1..20: mol_type = other RNA
tatcagtagatgccaaatgc

SEQ ID NO: 2620 - RNA, 20 nt, synthetic construct
  misc_feature 1..20: note = C9Orf72 ATCN PAM targeting sequence
  source 1..20: mol_type = other RNA
gtagatgccaaatgcccctc

SEQ ID NO: 2621 - RNA, 20 nt, synthetic construct
  misc_feature 1..20: note = C9Orf72 ATCN PAM targeting sequence
  source 1..20: mol_type = other RNA
actgataagatttattgctc

SEQ ID NO: 2622 - RNA, 20 nt, synthetic construct
  misc_feature 1..20: note = C9Orf72 ATCN PAM targeting sequence
  source 1..20: mol_type = other RNA
cagctatatcgtctagactg

SEQ ID NO: 2623 - RNA, 20 nt, synthetic construct
  misc_feature 1..20: note = C9Orf72 ATCN PAM targeting sequence
  source 1..20: mol_type = other RNA
tctagactgaaatgtctcat

SEQ ID NO: 2624 - RNA, 20 nt, synthetic construct
  misc_feature 1..20: note = C9Orf72 ATCN PAM targeting sequence
  source 1..20: mol_type = other RNA
ccattttgccaaattctgcc

SEQ ID NO: 2625 - RNA, 20 nt, synthetic construct
  misc_feature 1..20: note = C9Orf72 ATCN PAM targeting sequence
  source 1..20: mol_type = other RNA
cataatccacatagacacca

SEQ ID NO: 2626 - RNA, 20 nt, synthetic construct
  misc_feature 1..20: note = C9Orf72 ATCN PAM targeting sequence
  source 1..20: mol_type = other RNA
acatagacaccacacaattc

SEQ ID NO: 2627 - RNA, 20 nt, synthetic construct
  misc_feature 1..20: note = C9Orf72 ATCN PAM targeting sequence
  source 1..20: mol_type = other RNA
tttatacatgttcaggcttt

SEQ ID NO: 2628 - RNA, 20 nt, synthetic construct
  misc_feature 1..20: note = C9Orf72 ATCN PAM targeting sequence
  source 1..20: mol_type = other RNA
caagccatgccagggaaata

SEQ ID NO: 2629 - RNA, 20 nt, synthetic construct
  misc_feature 1..20: note = C9Orf72 ATCN PAM targeting sequence
  source 1..20: mol_type = other RNA
gttcttatttccctggcatg

SEQ ID NO: 2630 - RNA, 20 nt, synthetic construct
  misc_feature 1..20: note = C9Orf72 ATCN PAM targeting sequence
  source 1..20: mol_type = other RNA
tggaaaccatgttagcatgt

SEQ ID NO: 2631 - RNA, 20 nt, synthetic construct
  misc_feature 1..20: note = C9Orf72 ATCN PAM targeting sequence
  source 1..20: mol_type = other RNA
gtaggctatgcactgacatg

SEQ ID NO: 2632 - RNA, 20 nt, synthetic construct
  misc_feature 1..20: note = C9Orf72 ATCN PAM targeting sequence
  source 1..20: mol_type = other RNA
gaaaattgaaaacaatgaca

SEQ ID NO: 2633 - RNA, 20 nt, synthetic construct
  misc_feature 1..20: note = C9Orf72 ATCN PAM targeting sequence
  source 1..20: mol_type = other RNA
caaaaatataatcagaaaat

SEQ ID NO: 2634 - RNA, 20 nt, synthetic construct
  misc_feature 1..20: note = C9Orf72 ATCN PAM targeting sequence
  source 1..20: mol_type = other RNA
gtcactggtcatacctctgt

SEQ ID NO: 2635 - RNA, 20 nt, synthetic construct
  misc_feature 1..20: note = C9Orf72 ATCN PAM targeting sequence
  source 1..20: mol_type = other RNA
ttcaataatgcttctaatca

SEQ ID NO: 2636 - RNA, 20 nt, synthetic construct
  misc_feature 1..20: note = C9Orf72 ATCN PAM targeting sequence
  source 1..20: mol_type = other RNA
gagtgattatatgtgagtgt

SEQ ID NO: 2637 - RNA, 20 nt, synthetic construct
  misc_feature 1..20: note = C9Orf72 ATCN PAM targeting sequence
  source 1..20: mol_type = other RNA
ctctgattagaagcattatt

SEQ ID NO: 2638 - RNA, 20 nt, synthetic construct
  misc_feature 1..20: note = C9Orf72 ATCN PAM targeting sequence
  source 1..20: mol_type = other RNA
aatgtaactctgcaggagga

SEQ ID NO: 2639 - RNA, 20 nt, synthetic construct
  misc_feature 1..20: note = C9Orf72 ATCN PAM targeting sequence
  source 1..20: mol_type = other RNA
cctgcagagagccattcctc

SEQ ID NO: 2640 - RNA, 20 nt, synthetic construct
  misc_feature 1..20: note = C9Orf72 ATCN PAM targeting sequence
  source 1..20: mol_type = other RNA
accatgcaagctcccactga

SEQ ID NO: 2641 - RNA, 20 nt, synthetic construct
  misc_feature 1..20: note = C9Orf72 ATCN PAM targeting sequence
  source 1..20: mol_type = other RNA
gacaaccctatccaccatgc

SEQ ID NO: 2642 - RNA, 20 nt, synthetic construct
  misc_feature 1..20: note = C9Orf72 ATCN PAM targeting sequence
  source 1..20: mol_type = other RNA
gaatttcagaaaaacaatga

SEQ ID NO: 2643 - RNA, 20 nt, synthetic construct
  misc_feature 1..20: note = C9Orf72 ATCN PAM targeting sequence
  source 1..20: mol_type = other RNA
gctaagacaggcaatcctaa

SEQ ID NO: 2644 - RNA, 20 nt, synthetic construct
  misc_feature 1..20: note = C9Orf72 ATCN PAM targeting sequence
  source 1..20: mol_type = other RNA
taatggtgggagaaggacag

SEQ ID NO: 2645 - RNA, 20 nt, synthetic construct
  misc_feature 1..20: note = C9Orf72 ATCN PAM targeting sequence
  source 1..20: mol_type = other RNA
gtccttctcccaccattagg

SEQ ID NO: 2646 - RNA, 20 nt, synthetic construct
  misc_feature 1..20: note = C9Orf72 ATCN PAM targeting sequence
  source 1..20: mol_type = other RNA
ttccttctttgtcatgaata

SEQ ID NO: 2647 - RNA, 20 nt, synthetic construct
  misc_feature 1..20: note = C9Orf72 ATCN PAM targeting sequence
  source 1..20: mol_type = other RNA
gcatctattaacgtttacag

SEQ ID NO: 2648 - RNA, 20 nt, synthetic construct
  misc_feature 1..20: note = C9Orf72 ATCN PAM targeting sequence
  source 1..20: mol_type = other RNA
attaacgtttacagaacatg

SEQ ID NO: 2649 - RNA, 20 nt, synthetic construct
  misc_feature 1..20: note = C9Orf72 ATCN PAM targeting sequence
  source 1..20: mol_type = other RNA
cgaggaggctgtggttgaag

SEQ ID NO: 2650 - RNA, 20 nt, synthetic construct
  misc_feature 1..20: note = C9Orf72 ATCN PAM targeting sequence
  source 1..20: mol_type = other RNA
tgcactacaacttattcctc

SEQ ID NO: 2651 - RNA, 20 nt, synthetic construct
  misc_feature 1..20: note = C9Orf72 ATCN PAM targeting sequence
  source 1..20: mol_type = other RNA
actgattggaactgagcctt

SEQ ID NO: 2652 - RNA, 20 nt, synthetic construct
  misc_feature 1..20: note = C9Orf72 ATCN PAM targeting sequence
  source 1..20: mol_type = other RNA
gttgatatgaataacacaca

SEQ ID NO: 2653 - RNA, 20 nt, synthetic construct
  misc_feature 1..20: note = C9Orf72 ATCN PAM targeting sequence
  source 1..20: mol_type = other RNA
acattttctttcaaaatact

SEQ ID NO: 2654 - RNA, 20 nt, synthetic construct
  misc_feature 1..20: note = C9Orf72 ATCN PAM targeting sequence
  source 1..20: mol_type = other RNA
atactattttatttgtttaa

SEQ ID NO: 2655 - RNA, 20 nt, synthetic construct
  misc_feature 1..20: note = C9Orf72 ATCN PAM targeting sequence
  source 1..20: mol_type = other RNA
catttcagatgtataataat

SEQ ID NO: 2656 - RNA, 20 nt, synthetic construct
  misc_feature 1..20: note = C9Orf72 ATCN PAM targeting sequence
  source 1..20: mol_type = other RNA
gaaatgggatcaatactatt

SEQ ID NO: 2657 - RNA, 20 nt, synthetic construct
  misc_feature 1..20: note = C9Orf72 ATCN PAM targeting sequence
  source 1..20: mol_type = other RNA
atccaagtgaccaaatatat

SEQ ID NO: 2658 - RNA, 20 nt, synthetic construct
  misc_feature 1..20: note = C9Orf72 ATCN PAM targeting sequence
  source 1..20: mol_type = other RNA
aagtgaccaaatatattccc

SEQ ID NO: 2659 - RNA, 20 nt, synthetic construct
  misc_feature 1..20: note = C9Orf72 ATCN PAM targeting sequence
  source 1..20: mol_type = other RNA
gtagaaaacatatatgtaag

SEQ ID NO: 2660 - RNA, 20 nt, synthetic construct
  misc_feature 1..20: note = C9Orf72 ATCN PAM targeting sequence
  source 1..20: mol_type = other RNA
tcattatttctggggaatca

SEQ ID NO: 2661 - RNA, 20 nt, synthetic construct
  misc_feature 1..20: note = C9Orf72 ATCN PAM targeting sequence
  source 1..20: mol_type = other RNA
ttatttctggggaatcagtt

SEQ ID NO: 2662 - RNA, 20 nt, synthetic construct
  misc_feature 1..20: note = C9Orf72 ATCN PAM targeting sequence
  source 1..20: mol_type = other RNA
gttcctagaggatcaatcgc

SEQ ID NO: 2663 - RNA, 20 nt, synthetic construct
  misc_feature 1..20: note = C9Orf72 ATCN PAM targeting sequence
  source 1..20: mol_type = other RNA
tctaggaactgattccccag

SEQ ID NO: 2664 - RNA, 20 nt, synthetic construct
  misc_feature 1..20: note = C9Orf72 ATCN PAM targeting sequence
  source 1..20: mol_type = other RNA
atcgctgagtcaaatattat

SEQ ID NO: 2665 - RNA, 20 nt, synthetic construct
  misc_feature 1..20: note = C9Orf72 ATCN PAM targeting sequence
  source 1..20: mol_type = other RNA
ctgagtcaaatattatgtac

SEQ ID NO: 2666 - RNA, 20 nt, synthetic construct
  misc_feature 1..20: note = C9Orf72 ATCN PAM targeting sequence
  source 1..20: mol_type = other RNA
aaagccttaaaaatgtacat

SEQ ID NO: 2667 - RNA, 20 nt, synthetic construct
  misc_feature 1..20: note = C9Orf72 ATCN PAM targeting sequence
  source 1..20: mol_type = other RNA
atatcaccactttcctctct

SEQ ID NO: 2668 - RNA, 20 nt, synthetic construct
  misc_feature 1..20: note = C9Orf72 ATCN PAM targeting sequence
  source 1..20: mol_type = other RNA
ccactttcctctctaggaag

SEQ ID NO: 2669 - RNA, 20 nt, synthetic construct
  misc_feature 1..20: note = C9Orf72 ATCN PAM targeting sequence
  source 1..20: mol_type = other RNA
tttttttcttgagaagatat

SEQ ID NO: 2670 - RNA, 20 nt, synthetic construct
  misc_feature 1..20: note = C9Orf72 ATCN PAM targeting sequence
  source 1..20: mol_type = other RNA
tctcaagaaaaaaaagatat

SEQ ID NO: 2671 - RNA, 20 nt, synthetic construct
  misc_feature 1..20: note = C9Orf72 ATCN PAM targeting sequence
  source 1..20: mol_type = other RNA
agaaccaccaggcaagaaga

SEQ ID NO: 2672 - RNA, 20 nt, synthetic construct
  misc_feature 1..20: note = C9Orf72 ATCN PAM targeting sequence
  source 1..20: mol_type = other RNA
tggacttagccttccatatg

SEQ ID NO: 2673 - RNA, 20 nt, synthetic construct
  misc_feature 1..20: note = C9Orf72 ATCN PAM targeting sequence
  source 1..20: mol_type = other RNA
atcctggacttagccttcca

SEQ ID NO: 2674 - RNA, 20 nt, synthetic construct
  misc_feature 1..20: note = C9Orf72 ATCN PAM targeting sequence
  source 1..20: mol_type = other RNA
ttttcttcagttaaatccat

SEQ ID NO: 2675 - RNA, 20 nt, synthetic construct
  misc_feature 1..20: note = C9Orf72 ATCN PAM targeting sequence
  source 1..20: mol_type = other RNA
ctaaatatccttttcttcag

SEQ ID NO: 2676 - RNA, 20 nt, synthetic construct
  misc_feature 1..20: note = C9Orf72 ATCN PAM targeting sequence
  source 1..20: mol_type = other RNA
acattttctaatgcaacaga

SEQ ID NO: 2677 - RNA, 20 nt, synthetic construct
  misc_feature 1..20: note = C9Orf72 ATCN PAM targeting sequence
  source 1..20: mol_type = other RNA
ttttggagatccagaaaaat

SEQ ID NO: 2678 - RNA, 20 nt, synthetic construct
  misc_feature 1..20: note = C9Orf72 ATCN PAM targeting sequence
  source 1..20: mol_type = other RNA
ccaaaaagatgaagaataga

SEQ ID NO: 2679 - RNA, 20 nt, synthetic construct
  misc_feature 1..20: note = C9Orf72 ATCN PAM targeting sequence
  source 1..20: mol_type = other RNA
agaaaaatcaaaaagagaaa

SEQ ID NO: 2680 - RNA, 20 nt, synthetic construct
  misc_feature 1..20: note = C9Orf72 ATCN PAM targeting sequence
  source 1..20: mol_type = other RNA
aaaagagaaaatatccaaat

SEQ ID NO: 2681 - RNA, 20 nt, synthetic construct
  misc_feature 1..20: note = C9Orf72 ATCN PAM targeting sequence
  source 1..20: mol_type = other RNA
aaatatagaagcttaattta

SEQ ID NO: 2682 - RNA, 20 nt, synthetic construct
  misc_feature 1..20: note = C9Orf72 ATCN PAM targeting sequence
  source 1..20: mol_type = other RNA
aataatcacagtcatttggt

SEQ ID NO: 2683 - RNA, 20 nt, synthetic construct
  misc_feature 1..20: note = C9Orf72 ATCN PAM targeting sequence
  source 1..20: mol_type = other RNA
tagacattgaccaaatgact

SEQ ID NO: 2684 - RNA, 20 nt, synthetic construct
  misc_feature 1..20: note = C9Orf72 ATCN PAM targeting sequence
  source 1..20: mol_type = other RNA
tgtctcattgagttaatcat

SEQ ID NO: 2685 - RNA, 20 nt, synthetic construct
  misc_feature 1..20: note = C9Orf72 ATCN PAM targeting sequence
  source 1..20: mol_type = other RNA
gtcttgttatgatgattcct

SEQ ID NO: 2686 - RNA, 20 nt, synthetic construct
  misc_feature 1..20: note = C9Orf72 ATCN PAM targeting sequence
  source 1..20: mol_type = other RNA
taacaagactgatgcagggt

SEQ ID NO: 2687 - RNA, 20 nt, synthetic construct
  misc_feature 1..20: note = C9Orf72 ATCN PAM targeting sequence
  source 1..20: mol_type = other RNA
tcataacaagactgatgcag

SEQ ID NO: 2688 - RNA, 20 nt, synthetic construct
  misc_feature 1..20: note = C9Orf72 ATCN PAM targeting sequence
  source 1..20: mol_type = other RNA
cagcactaaggaatcatcat

SEQ ID NO: 2689 - RNA, 20 nt, synthetic construct
  misc_feature 1..20: note = C9Orf72 ATCN PAM targeting sequence
  source 1..20: mol_type = other RNA
atcccagcactaaggaatca

SEQ ID NO: 2690 - RNA, 20 nt, synthetic construct
  misc_feature 1..20: note = C9Orf72 ATCN PAM targeting sequence
  source 1..20: mol_type = other RNA
tccaggcatttaaggtaaca

SEQ ID NO: 2691 - RNA, 20 nt, synthetic construct
  misc_feature 1..20: note = C9Orf72 ATCN PAM targeting sequence
  source 1..20: mol_type = other RNA
aggcatttaaggtaacacga

SEQ ID NO: 2692 - RNA, 20 nt, synthetic construct
  misc_feature 1..20: note = C9Orf72 ATCN PAM targeting sequence
  source 1..20: mol_type = other RNA
tgttaccttaaatgcctgga

SEQ ID NO: 2693 - RNA, 20 nt, synthetic construct
  misc_feature 1..20: note = C9Orf72 ATCN PAM targeting sequence
  source 1..20: mol_type = other RNA
cttccaaagtcggcatagtc

SEQ ID NO: 2694 - RNA, 20 nt, synthetic construct
  misc_feature 1..20: note = C9Orf72 ATCN PAM targeting sequence
  source 1..20: mol_type = other RNA
tcagcaggaggagttttctc

SEQ ID NO: 2695 - RNA, 20 nt, synthetic construct
  misc_feature 1..20: note = C9Orf72 ATCN PAM targeting sequence
  source 1..20: mol_type = other RNA
ttgtcatatacacatcttct

SEQ ID NO: 2696 - RNA, 20 nt, synthetic construct
  misc_feature 1..20: note = C9Orf72 ATCN PAM targeting sequence
  source 1..20: mol_type = other RNA
gagacatctgagtagtatga

SEQ ID NO: 2697 - RNA, 20 nt, synthetic construct
  misc_feature 1..20: note = C9Orf72 ATCN PAM targeting sequence
  source 1..20: mol_type = other RNA
gagtagtatgagcaattcat

SEQ ID NO: 2698 - RNA, 20 nt, synthetic construct
  misc_feature 1..20: note = C9Orf72 ATCN PAM targeting sequence
  source 1..20: mol_type = other RNA
tcagccaacacaccttcaaa

SEQ ID NO: 2699 - RNA, 20 nt, synthetic construct
  misc_feature 1..20: note = C9Orf72 ATCN PAM targeting sequence
  source 1..20: mol_type = other RNA
gcaagcagagtacctgaacc

SEQ ID NO: 2700 - RNA, 20 nt, synthetic construct
  misc_feature 1..20: note = C9Orf72 ATCN PAM targeting sequence
  source 1..20: mol_type = other RNA
cctcagttccaggctgctca

SEQ ID NO: 2701 - RNA, 20 nt, synthetic construct
  misc_feature 1..20: note = C9Orf72 ATCN PAM targeting sequence
  source 1..20: mol_type = other RNA
tgtggaaatatctcctcagt

SEQ ID NO: 2702 - RNA, 20 nt, synthetic construct
  misc_feature 1..20: note = C9Orf72 ATCN PAM targeting sequence
  source 1..20: mol_type = other RNA
cccaggcacagtcactgtat

SEQ ID NO: 2703 - RNA, 20 nt, synthetic construct
  misc_feature 1..20: note = C9Orf72 ATCN PAM targeting sequence
  source 1..20: mol_type = other RNA
gaagatgtttgtattacttt

SEQ ID NO: 2704 - RNA, 20 nt, synthetic construct
  misc_feature 1..20: note = C9Orf72 ATCN PAM targeting sequence
  source 1..20: mol_type = other RNA
tctgatttccactcggacaa

SEQ ID NO: 2705 - RNA, 20 nt, synthetic construct
  misc_feature 1..20: note = C9Orf72 ATCN PAM targeting sequence
  source 1..20: mol_type = other RNA
ctttctccttctcctcctcc

SEQ ID NO: 2706 - RNA, 20 nt, synthetic construct
  misc_feature 1..20: note = C9Orf72 ATCN PAM targeting sequence
  source 1..20: mol_type = other RNA
ttaaaaagaagttggaggag

SEQ ID NO: 2707 - RNA, 20 nt, synthetic construct
  misc_feature 1..20: note = C9Orf72 ATCN PAM targeting sequence
  source 1..20: mol_type = other RNA
tcactcttaaagtaatgaaa

SEQ ID NO: 2708 - RNA, 20 nt, synthetic construct
  misc_feature 1..20: note = C9Orf72 ATCN PAM targeting sequence
  source 1..20: mol_type = other RNA
atagtgaaattggatggatg

SEQ ID NO: 2709 - RNA, 20 nt, synthetic construct
  misc_feature 1..20: note = C9Orf72 ATCN PAM targeting sequence
  source 1..20: mol_type = other RNA
aatttcactatggatcttca

SEQ ID NO: 2710 - RNA, 20 nt, synthetic construct
  misc_feature 1..20: note = C9Orf72 ATCN PAM targeting sequence
  source 1..20: mol_type = other RNA
atccaatttcactatggatc

SEQ ID NO: 2711 - RNA, 20 nt, synthetic construct
  misc_feature 1..20: note = C9Orf72 ATCN PAM targeting sequence
  source 1..20: mol_type = other RNA
atgtcagctaggtggtgaat

SEQ ID NO: 2712 - RNA, 20 nt, synthetic construct
  misc_feature 1..20: note = C9Orf72 ATCN PAM targeting sequence
  source 1..20: mol_type = other RNA
accccatttcagaatcatct

SEQ ID NO: 2713 - RNA, 20 nt, synthetic construct
  misc_feature 1..20: note = C9Orf72 ATCN PAM targeting sequence
  source 1..20: mol_type = other RNA
tctaccttcaagcaagaatt

SEQ ID NO: 2714 - RNA, 20 nt, synthetic construct
  misc_feature 1..20: note = C9Orf72 ATCN PAM targeting sequence
  source 1..20: mol_type = other RNA
accttcaagcaagaattaac

SEQ ID NO: 2715 - RNA, 20 nt, synthetic construct
  misc_feature 1..20: note = C9Orf72 ATCN PAM targeting sequence
  source 1..20: mol_type = other RNA
ctgttaattcttgcttgaag

SEQ ID NO: 2716 - RNA, 20 nt, synthetic construct
  misc_feature 1..20: note = C9Orf72 ATCN PAM targeting sequence
  source 1..20: mol_type = other RNA
cttctaacttcttggctgaa

SEQ ID NO: 2717 - RNA, 20 nt, synthetic construct
  misc_feature 1..20: note = C9Orf72 ATCN PAM targeting sequence
  source 1..20: mol_type = other RNA
acaatttgttcttgttcttt

SEQ ID NO: 2718 - RNA, 20 nt, synthetic construct
  misc_feature 1..20: note = C9Orf72 ATCN PAM targeting sequence
  source 1..20: mol_type = other RNA
tggtatatgcaggctatcag

SEQ ID NO: 2719 - RNA, 20 nt, synthetic construct
  misc_feature 1..20: note = C9Orf72 ATCN PAM targeting sequence
  source 1..20: mol_type = other RNA
gcagaaggatcagacaataa

SEQ ID NO: 2720 - RNA, 20 nt, synthetic construct
  misc_feature 1..20: note = C9Orf72 ATCN PAM targeting sequence
  source 1..20: mol_type = other RNA
ttctgctgatagcctgcata

SEQ ID NO: 2721 - RNA, 20 nt, synthetic construct
  misc_feature 1..20: note = C9Orf72 ATCN PAM targeting sequence
  source 1..20: mol_type = other RNA
gacaataaaatgagttagtg

SEQ ID NO: 2722 - RNA, 20 nt, synthetic construct
  misc_feature 1..20: note = C9Orf72 ATCN PAM targeting sequence
  source 1..20: mol_type = other RNA
gcagagttgttccagattaa

SEQ ID NO: 2723 - RNA, 20 nt, synthetic construct
  misc_feature 1..20: note = C9Orf72 ATCN PAM targeting sequence
  source 1..20: mol_type = other RNA
ggaacaactctgctgatagt

SEQ ID NO: 2724 - RNA, 20 nt, synthetic construct
  misc_feature 1..20: note = C9Orf72 ATCN PAM targeting sequence
  source 1..20: mol_type = other RNA
tggaggaaagagaatggctg

SEQ ID NO: 2725 - RNA, 20 nt, synthetic construct
  misc_feature 1..20: note = C9Orf72 ATCN PAM targeting sequence
  source 1..20: mol_type = other RNA
ttaaaaaagcatactgttct

SEQ ID NO: 2726 - RNA, 20 nt, synthetic construct
  misc_feature 1..20: note = C9Orf72 ATCN PAM targeting sequence
  source 1..20: mol_type = other RNA
catctaatcaaaagaaaaag

SEQ ID NO: 2727 - RNA, 20 nt, synthetic construct
  misc_feature 1..20: note = C9Orf72 ATCN PAM targeting sequence
  source 1..20: mol_type = other RNA
aatcaaaagaaaaaggataa

SEQ ID NO: 2728 - RNA, 20 nt, synthetic construct
  misc_feature 1..20: note = C9Orf72 ATCN PAM targeting sequence
  source 1..20: mol_type = other RNA
aaagaaaaaggataacatct

SEQ ID NO: 2729 - RNA, 20 nt, synthetic construct
  misc_feature 1..20: note = C9Orf72 ATCN PAM targeting sequence
  source 1..20: mol_type = other RNA
tttttcttttgattagatgt

SEQ ID NO: 2730 - RNA, 20 nt, synthetic construct
  misc_feature 1..20: note = C9Orf72 ATCN PAM targeting sequence
  source 1..20: mol_type = other RNA
ccactggaaaaaaggcaagg

SEQ ID NO: 2731 - RNA, 20 nt, synthetic construct
  misc_feature 1..20: note = C9Orf72 ATCN PAM targeting sequence
  source 1..20: mol_type = other RNA
tcacaaaggaagaaatacta

SEQ ID NO: 2732 - RNA, 20 nt, synthetic construct
  misc_feature 1..20: note = C9Orf72 ATCN PAM targeting sequence
  source 1..20: mol_type = other RNA
caaaggaagaaatactacag

SEQ ID NO: 2733 - RNA, 20 nt, synthetic construct
  misc_feature 1..20: note = C9Orf72 ATCN PAM targeting sequence
  source 1..20: mol_type = other RNA
aacttgatttttaaatgcaa

SEQ ID NO: 2734 - RNA, 20 nt, synthetic construct
  misc_feature 1..20: note = C9Orf72 ATCN PAM targeting sequence
  source 1..20: mol_type = other RNA
agttagattaaacatttttc

SEQ ID NO: 2735 - RNA, 20 nt, synthetic construct
  misc_feature 1..20: note = C9Orf72 ATCN PAM targeting sequence
  source 1..20: mol_type = other RNA
tattttgcatttaaaaatca

SEQ ID NO: 2736 - RNA, 20 nt, synthetic construct
  misc_feature 1..20: note = C9Orf72 ATCN PAM targeting sequence
  source 1..20: mol_type = other RNA
tgtcatcttattttgcattt

SEQ ID NO: 2737 - RNA, 20 nt, synthetic construct
  misc_feature 1..20: note = C9Orf72 ATCN PAM targeting sequence
  source 1..20: mol_type = other RNA
gtatgacagaaaagaaaaag

SEQ ID NO: 2738 - RNA, 20 nt, synthetic construct
  misc_feature 1..20: note = C9Orf72 ATCN PAM targeting sequence
  source 1..20: mol_type = other RNA
tcaatatcctaaagaacgca

SEQ ID NO: 2739 - RNA, 20 nt, synthetic construct
  misc_feature 1..20: note = C9Orf72 ATCN PAM targeting sequence
  source 1..20: mol_type = other RNA
taaagaacgcatcagcccct

SEQ ID NO: 2740 - RNA, 20 nt, synthetic construct
  misc_feature 1..20: note = C9Orf72 ATCN PAM targeting sequence
  source 1..20: mol_type = other RNA
gcccctgtgacctaggtatc

SEQ ID NO: 2741 - RNA, 20 nt, synthetic construct
  misc_feature 1..20: note = C9Orf72 ATCN PAM targeting sequence
  source 1..20: mol_type = other RNA
cgtcttccgaaatttattcc

SEQ ID NO: 2742 - RNA, 20 nt, synthetic construct
  misc_feature 1..20: note = C9Orf72 ATCN PAM targeting sequence
  source 1..20: mol_type = other RNA
taaacctatttccttggaat

SEQ ID NO: 2743 - RNA, 20 nt, synthetic construct
  misc_feature 1..20: note = C9Orf72 ATCN PAM targeting sequence
  source 1..20: mol_type = other RNA
cccccttttacattcatttt

SEQ ID NO: 2744 - RNA, 20 nt, synthetic construct
  misc_feature 1..20: note = C9Orf72 ATCN PAM targeting sequence
  source 1..20: mol_type = other RNA
aatggtgaaaatgaatgtaa

SEQ ID NO: 2745 - RNA, 20 nt, synthetic construct
  misc_feature 1..20: note = C9Orf72 ATCN PAM targeting sequence
  source 1..20: mol_type = other RNA
ctataggaaaaaatagaaaa

SEQ ID NO: 2746 - RNA, 20 nt, synthetic construct
  misc_feature 1..20: note = C9Orf72 ATCN PAM targeting sequence
  source 1..20: mol_type = other RNA
tcccaaaaaaatcactatag

SEQ ID NO: 2747 - RNA, 20 nt, synthetic construct
  misc_feature 1..20: note = C9Orf72 ATCN PAM targeting sequence
  source 1..20: mol_type = other RNA
ttaacaaaataaaagagcat

SEQ ID NO: 2748 - RNA, 20 nt, synthetic construct
  misc_feature 1..20: note = C9Orf72 ATCN PAM targeting sequence
  source 1..20: mol_type = other RNA
ttccttggggatcattttca

SEQ ID NO: 2749 - RNA, 20 nt, synthetic construct
  misc_feature 1..20: note = C9Orf72 ATCN PAM targeting sequence
  source 1..20: mol_type = other RNA
ccaaggaaggattcctttga

SEQ ID NO: 2750 - RNA, 20 nt, synthetic construct
  misc_feature 1..20: note = C9Orf72 ATCN PAM targeting sequence
  source 1..20: mol_type = other RNA
ttttcataatgaaatgtttg

SEQ ID NO: 2751 - RNA, 20 nt, synthetic construct
  misc_feature 1..20: note = C9Orf72 ATCN PAM targeting sequence
  source 1..20: mol_type = other RNA
ttgaagtactgcaaggcact

SEQ ID NO: 2752 - RNA, 20 nt, synthetic construct
  misc_feature 1..20: note = C9Orf72 ATCN PAM targeting sequence
  source 1..20: mol_type = other RNA
ctttaccttcccaacggtgg

SEQ ID NO: 2753 - RNA, 20 nt, synthetic construct
  misc_feature 1..20: note = C9Orf72 ATCN PAM targeting sequence
  source 1..20: mol_type = other RNA
ctagagaaagtgctctatgt

SEQ ID NO: 2754 - RNA, 20 nt, synthetic construct
  misc_feature 1..20: note = C9Orf72 ATCN PAM targeting sequence
  source 1..20: mol_type = other RNA
actgacaatgtctgagtggg

SEQ ID NO: 2755 - RNA, 20 nt, synthetic construct
  misc_feature 1..20: note = C9Orf72 ATCN PAM targeting sequence
  source 1..20: mol_type = other RNA
atgtacccactcagacattg

SEQ ID NO: 2756 - RNA, 20 nt, synthetic construct
  misc_feature 1..20: note = C9Orf72 ATCN PAM targeting sequence
  source 1..20: mol_type = other RNA
taatgttcctacagaagcct

SEQ ID NO: 2757 - RNA, 20 nt, synthetic construct
  misc_feature 1..20: note = C9Orf72 ATCN PAM targeting sequence
  source 1..20: mol_type = other RNA
aaagtgtaattgagcttcct

SEQ ID NO: 2758 - RNA, 20 nt, synthetic construct
  misc_feature 1..20: note = C9Orf72 ATCN PAM targeting sequence
  source 1..20: mol_type = other RNA
ccaatgagtccctcttccaa

SEQ ID NO: 2759 - RNA, 20 nt, synthetic construct
  misc_feature 1..20: note = C9Orf72 ATCN PAM targeting sequence
  source 1..20: mol_type = other RNA
cacaggaaaagctggcaaca

SEQ ID NO: 2760 - RNA, 20 nt, synthetic construct
  misc_feature 1..20: note = C9Orf72 ATCN PAM targeting sequence
  source 1..20: mol_type = other RNA
ggggaccctgacttctcaga

SEQ ID NO: 2761 - RNA, 20 nt, synthetic construct
  misc_feature 1..20: note = C9Orf72 ATCN PAM targeting sequence
  source 1..20: mol_type = other RNA
ataatccacactaagaatga

SEQ ID NO: 2762 - RNA, 20 nt, synthetic construct
  misc_feature 1..20: note = C9Orf72 ATCN PAM targeting sequence
  source 1..20: mol_type = other RNA
acactaagaatgaacacaat

SEQ ID NO: 2763 - RNA, 20 nt, synthetic construct
  misc_feature 1..20: note = C9Orf72 ATCN PAM targeting sequence
  source 1..20: mol_type = other RNA
gacttgtgcagggaaacagg

SEQ ID NO: 2764 - RNA, 20 nt, synthetic construct
  misc_feature 1..20: note = C9Orf72 ATCN PAM targeting sequence
  source 1..20: mol_type = other RNA
taagccacttgttctctggg

SEQ ID NO: 2765 - RNA, 20 nt, synthetic construct
  misc_feature 1..20: note = C9Orf72 ATCN PAM targeting sequence
  source 1..20: mol_type = other RNA
gtgttgcgtcgtctgagtcc

SEQ ID NO: 2766 - RNA, 20 nt, synthetic construct
  misc_feature 1..20: note = C9Orf72 ATCN PAM targeting sequence
  source 1..20: mol_type = other RNA
caagtcccctttcttcattg

SEQ ID NO: 2767 - RNA, 20 nt, synthetic construct
  misc_feature 1..20: note = C9Orf72 ATCN PAM targeting sequence
  source 1..20: mol_type = other RNA
tcgttctctttttggcgact

SEQ ID NO: 2768 - RNA, 20 nt, synthetic construct
  misc_feature 1..20: note = C9Orf72 ATCN PAM targeting sequence
  source 1..20: mol_type = other RNA
cagctttccgcctaccaaag

SEQ ID NO: 2769 - RNA, 20 nt, synthetic construct
  misc_feature 1..20: note = C9Orf72 ATCN PAM targeting sequence
  source 1..20: mol_type = other RNA
gggcacctttggtaggcgga

SEQ ID NO: 2770 - RNA, 20 nt, synthetic construct
  misc_feature 1..20: note = C9Orf72 ATCN PAM targeting sequence
  source 1..20: mol_type = other RNA
cctcccactgccctagcagc

SEQ ID NO: 2771 - RNA, 20 nt, synthetic construct
  misc_feature 1..20: note = C9Orf72 ATCN PAM targeting sequence
  source 1..20: mol_type = other RNA
ctagccaaaggcgttggggc

SEQ ID NO: 2772 - RNA, 20 nt, synthetic construct
  misc_feature 1..20: note = C9Orf72 ATCN PAM targeting sequence
  source 1..20: mol_type = other RNA
tctggaaccaaccactggac

SEQ ID NO: 2773 - RNA, 20 nt, synthetic construct
  misc_feature 1..20: note = C9Orf72 ATCN PAM targeting sequence
  source 1..20: mol_type = other RNA
agagcgtccagtggttggtt

SEQ ID NO: 2774 - RNA, 20 nt, synthetic construct
  misc_feature 1..20: note = C9Orf72 ATCN PAM targeting sequence
  source 1..20: mol_type = other RNA
gagaaggtgctgctttcgag

SEQ ID NO: 2775 - RNA, 20 nt, synthetic construct
  misc_feature 1..20: note = C9Orf72 ATCN PAM targeting sequence
  source 1..20: mol_type = other RNA
cagcccaggcgcgccgcaaa

SEQ ID NO: 2776 - RNA, 20 nt, synthetic construct
  misc_feature 1..20: note = C9Orf72 ATCN PAM targeting sequence
  source 1..20: mol_type = other RNA
gagaaatgcgccctgggcca

SEQ ID NO: 2777 - RNA, 20 nt, synthetic construct
  misc_feature 1..20: note = C9Orf72 ATCN PAM targeting sequence
  source 1..20: mol_type = other RNA
cagctgggaaagtggaggag

SEQ ID NO: 2778 - RNA, 20 nt, synthetic construct
  misc_feature 1..20: note = C9Orf72 ATCN PAM targeting sequence
  source 1..20: mol_type = other RNA
cctgccggagctggcgtggg

SEQ ID NO: 2779 - RNA, 20 nt, synthetic construct
  misc_feature 1..20: note = C9Orf72 ATCN PAM targeting sequence
  source 1..20: mol_type = other RNA
ggcggggcttggggagagaa

SEQ ID NO: 2780 - RNA, 20 nt, synthetic construct
  misc_feature 1..20: note = C9Orf72 ATCN PAM targeting sequence
  source 1..20: mol_type = other RNA
tggcgaatggccttttgttt

SEQ ID NO: 2781 - RNA, 20 nt, synthetic construct
  misc_feature 1..20: note = C9Orf72 ATCN PAM targeting sequence
  source 1..20: mol_type = other RNA
cagtcggctgcgtagagaga

SEQ ID NO: 2782 - RNA, 20 nt, synthetic construct
  misc_feature 1..20: note = C9Orf72 ATCN PAM targeting sequence
  source 1..20: mol_type = other RNA
ctctacgcagccgactgaga

SEQ ID NO: 2783 - RNA, 20 nt, synthetic construct
  misc_feature 1..20: note = C9Orf72 ATCN PAM targeting sequence
  source 1..20: mol_type = other RNA
ctgtggggagggttagggga

SEQ ID NO: 2784 - RNA, 20 nt, synthetic construct
  misc_feature 1..20: note = C9Orf72 ATCN PAM targeting sequence
  source 1..20: mol_type = other RNA
cccccctcgcgctctttcct

SEQ ID NO: 2785 - RNA, 20 nt, synthetic construct
  misc_feature 1..20: note = C9Orf72 ATCN PAM targeting sequence
  source 1..20: mol_type = other RNA
cgagagatttagagtctctg

SEQ ID NO: 2786 - RNA, 20 nt, synthetic construct
  misc_feature 1..20: note = C9Orf72 ATCN PAM targeting sequence
  source 1..20: mol_type = other RNA
ctcgggatcccccccctcgc

SEQ ID NO: 2787 - RNA, 20 nt, synthetic construct
  misc_feature 1..20: note = C9Orf72 ATCN PAM targeting sequence
  source 1..20: mol_type = other RNA
aagaaaacttgaagggtttt

SEQ ID NO: 2788 - RNA, 20 nt, synthetic construct
  misc_feature 1..20: note = C9Orf72 ATCN PAM targeting sequence
  source 1..20: mol_type = other RNA
cagcccctccctttccctga

SEQ ID NO: 2789 - RNA, 20 nt, synthetic construct
  misc_feature 1..20: note = C9Orf72 ATCN PAM targeting sequence
  source 1..20: mol_type = other RNA
ggaatcccagcccctccctt

SEQ ID NO: 2790 - RNA, 20 nt, synthetic construct
  misc_feature 1..20: note = C9Orf72 ATCN PAM targeting sequence
  source 1..20: mol_type = other RNA
cgcttaactttggggccaac

SEQ ID NO: 2791 - RNA, 20 nt, synthetic construct
  misc_feature 1..20: note = C9Orf72 ATCN PAM targeting sequence
  source 1..20: mol_type = other RNA
tcagccccgggggcgacctg

SEQ ID NO: 2792 - RNA, 20 nt, synthetic construct
  misc_feature 1..20: note = C9Orf72 ATCN PAM targeting sequence
  source 1..20: mol_type = other RNA
tgagggaggagtctcggctt

SEQ ID NO: 2793 - RNA, 20 nt, synthetic construct
  misc_feature 1..20: note = C9Orf72 ATCN PAM targeting sequence
  source 1..20: mol_type = other RNA
ggacgcccaagcgttgtccc

SEQ ID NO: 2794 - RNA, 20 nt, synthetic construct
  misc_feature 1..20: note = C9Orf72 ATCN PAM targeting sequence
  source 1..20: mol_type = other RNA
ccagccgcggacgcctgcag

SEQ ID NO: 2795 - RNA, 20 nt, synthetic construct
  misc_feature 1..20: note = C9Orf72 ATCN PAM targeting sequence
  source 1..20: mol_type = other RNA
tccttctttcggggtgcaag

SEQ ID NO: 2796 - RNA, 20 nt, synthetic construct
  misc_feature 1..20: note = C9Orf72 ATCN PAM targeting sequence
  source 1..20: mol_type = other RNA
tattgatttatatcttttca

SEQ ID NO: 2797 - RNA, 20 nt, synthetic construct
  misc_feature 1..20: note = C9Orf72 ATCN PAM targeting sequence
  source 1..20: mol_type = other RNA
ataagatcgtccttctttcg

SEQ ID NO: 2798 - RNA, 20 nt, synthetic construct
  misc_feature 1..20: note = C9Orf72 ATCN PAM targeting sequence
  source 1..20: mol_type = other RNA
tttcaaatcaaggacaaatc

SEQ ID NO: 2799 - RNA, 20 nt, synthetic construct
  misc_feature 1..20: note = C9Orf72 ATCN PAM targeting sequence
  source 1..20: mol_type = other RNA
aggacaaatcaagatcccgg

SEQ ID NO: 2800 - RNA, 20 nt, synthetic construct
  misc_feature 1..20: note = C9Orf72 ATCN PAM targeting sequence
  source 1..20: mol_type = other RNA
agatcccggggtggaaagtg

SEQ ID NO: 2801 - RNA, 20 nt, synthetic construct
  misc_feature 1..20: note = C9Orf72 ATCN PAM targeting sequence
  source 1..20: mol_type = other RNA
tgatttgtccttgatttgaa

SEQ ID NO: 2802 - RNA, 20 nt, synthetic construct
  misc_feature 1..20: note = C9Orf72 ATCN PAM targeting sequence
  source 1..20: mol_type = other RNA
cggggtggaaagtgggcgac

SEQ ID NO: 2803 - RNA, 20 nt, synthetic construct
  misc_feature 1..20: note = C9Orf72 ATCN PAM targeting sequence
  source 1..20: mol_type = other RNA
cgcccgggcgggcggcgagg

SEQ ID NO: 2804 - RNA, 20 nt, synthetic construct
  misc_feature 1..20: note = C9Orf72 ATCN PAM targeting sequence
  source 1..20: mol_type = other RNA
ggagcgagcagccaccgggc

SEQ ID NO: 2805 - RNA, 20 nt, synthetic construct
  misc_feature 1..20: note = C9Orf72 ATCN PAM targeting sequence
  source 1..20: mol_type = other RNA
acgcaagggactctgccgcc

SEQ ID NO: 2806 - RNA, 20 nt, synthetic construct
  misc_feature 1..20: note = C9Orf72 ATCN PAM targeting sequence
  source 1..20: mol_type = other RNA
caaagacgacttttctctcc

SEQ ID NO: 2807 - RNA, 20 nt, synthetic construct
  misc_feature 1..20: note = C9Orf72 ATCN PAM targeting sequence
  source 1..20: mol_type = other RNA
tcttccctccggaaagagat

SEQ ID NO: 2808 - RNA, 20 nt, synthetic construct
  misc_feature 1..20: note = C9Orf72 ATCN PAM targeting sequence
  source 1..20: mol_type = other RNA
tccctccggaaagagatggg

SEQ ID NO: 2809 - RNA, 20 nt, synthetic construct
  misc_feature 1..20: note = C9Orf72 ATCN PAM targeting sequence
  source 1..20: mol_type = other RNA
ctttccggagggaagatgat

SEQ ID NO: 2810 - RNA, 20 nt, synthetic construct
  misc_feature 1..20: note = C9Orf72 ATCN PAM targeting sequence
  source 1..20: mol_type = other RNA
gacaccttcttcactgccct

SEQ ID NO: 2811 - RNA, 20 nt, synthetic construct
  misc_feature 1..20: note = C9Orf72 ATCN PAM targeting sequence
  source 1..20: mol_type = other RNA
gaaaggatgatctctgggtc

SEQ ID NO: 2812 - RNA, 20 nt, synthetic construct
  misc_feature 1..20: note = C9Orf72 ATCN PAM targeting sequence
  source 1..20: mol_type = other RNA
tttctgatctgacaccttct

SEQ ID NO: 2813 - RNA, 20 nt, synthetic construct
  misc_feature 1..20: note = C9Orf72 ATCN PAM targeting sequence
  source 1..20: mol_type = other RNA
tcctttctgatctgacacct

SEQ ID NO: 2814 - RNA, 20 nt, synthetic construct
  misc_feature 1..20: note = C9Orf72 ATCN PAM targeting sequence
  source 1..20: mol_type = other RNA
ctgggtccacaacggccact

SEQ ID NO: 2815 - RNA, 20 nt, synthetic construct
  misc_feature 1..20: note = C9Orf72 ATCN PAM targeting sequence
  source 1..20: mol_type = other RNA
tggggaaggcaaactgtttc

SEQ ID NO: 2816 - RNA, 20 nt, synthetic construct
  misc_feature 1..20: note = C9Orf72 ATCN PAM targeting sequence
  source 1..20: mol_type = other RNA
gaaaatcctggggaaggcaa

SEQ ID NO: 2817 - RNA, 20 nt, synthetic construct
  misc_feature 1..20: note = C9Orf72 ATCN PAM targeting sequence
  source 1..20: mol_type = other RNA
ttggaaaatactcagattct

SEQ ID NO: 2818 - RNA, 20 nt, synthetic construct
  misc_feature 1..20: note = C9Orf72 ATCN PAM targeting sequence
  source 1..20: mol_type = other RNA
gagtattttccaatgattta

SEQ ID NO: 2819 - RNA, 20 nt, synthetic construct
  misc_feature 1..20: note = C9Orf72 ATCN PAM targeting sequence
  source 1..20: mol_type = other RNA
actagaatctgagtattttc

SEQ ID NO: 2820 - RNA, 20 nt, synthetic construct
  misc_feature 1..20: note = C9Orf72 ATCN PAM targeting sequence
  source 1..20: mol_type = other RNA
atgactcccagtgtgttcta

SEQ ID NO: 2821 - RNA, 20 nt, synthetic construct
  misc_feature 1..20: note = C9Orf72 ATCN PAM targeting sequence
  source 1..20: mol_type = other RNA
aggttcatccatgactccca

SEQ ID NO: 2822 - RNA, 20 nt, synthetic construct
  misc_feature 1..20: note = C9Orf72 ATCN PAM targeting sequence
  source 1..20: mol_type = other RNA
acaaccttaaagcctcagta

SEQ ID NO: 2823 - RNA, 20 nt, synthetic construct
  misc_feature 1..20: note = C9Orf72 ATCN PAM targeting sequence
  source 1..20: mol_type = other RNA
cccttgcagggtgatggtta

SEQ ID NO: 2824 - RNA, 20 nt, synthetic construct
  misc_feature 1..20: note = C9Orf72 ATCN PAM targeting sequence
  source 1..20: mol_type = other RNA
ccctgcaagggtgatattgc

SEQ ID NO: 2825 - RNA, 20 nt, synthetic construct
  misc_feature 1..20: note = C9Orf72 ATCN PAM targeting sequence
  source 1..20: mol_type = other RNA
aatatgagcttcctgccttc

SEQ ID NO: 2826 - RNA, 20 nt, synthetic construct
  misc_feature 1..20: note = C9Orf72 ATCN PAM targeting sequence
  source 1..20: mol_type = other RNA
aattctttttctccagaagg

SEQ ID NO: 2827 - RNA, 20 nt, synthetic construct
  misc_feature 1..20: note = C9Orf72 ATCN PAM targeting sequence
  source 1..20: mol_type = other RNA
ttcacatttttctattaccc

SEQ ID NO: 2828 - RNA, 20 nt, synthetic construct
  misc_feature 1..20: note = C9Orf72 ATCN PAM targeting sequence
  source 1..20: mol_type = other RNA
tatgggtaatagaaaaatgt

SEQ ID NO: 2829 - RNA, 20 nt, synthetic construct
  misc_feature 1..20: note = C9Orf72 ATCN PAM targeting sequence
  source 1..20: mol_type = other RNA
catcttaatgcatattgatt

SEQ ID NO: 2830 - RNA, 20 nt, synthetic construct
  misc_feature 1..20: note = C9Orf72 ATCN PAM targeting sequence
  source 1..20: mol_type = other RNA
taatgcatattgattgaact

SEQ ID NO: 2831 - RNA, 20 nt, synthetic construct
  misc_feature 1..20: note = C9Orf72 ATCN PAM targeting sequence
  source 1..20: mol_type = other RNA
atatgcattaagatgtgatc

SEQ ID NO: 2832 - RNA, 20 nt, synthetic construct
  misc_feature 1..20: note = C9Orf72 ATCN PAM targeting sequence
  source 1..20: mol_type = other RNA
taatttctacttaatatatt

SEQ ID NO: 2833 - RNA, 20 nt, synthetic construct
  misc_feature 1..20: note = C9Orf72 ATCN PAM targeting sequence
  source 1..20: mol_type = other RNA
ctcctccaaaagaggtttct

SEQ ID NO: 2834 - RNA, 20 nt, synthetic construct
  misc_feature 1..20: note = C9Orf72 ATCN PAM targeting sequence
  source 1..20: mol_type = other RNA
cttacatcttttgcaatatc

SEQ ID NO: 2835 - RNA, 20 nt, synthetic construct
  misc_feature 1..20: note = C9Orf72 ATCN PAM targeting sequence
  source 1..20: mol_type = other RNA
tttgcaatatcatctcagat

SEQ ID NO: 2836 - RNA, 20 nt, synthetic construct
  misc_feature 1..20: note = C9Orf72 ATCN PAM targeting sequence
  source 1..20: mol_type = other RNA
tctcagatattgtaagaaac

SEQ ID NO: 2837 - RNA, 20 nt, synthetic construct
  misc_feature 1..20: note = C9Orf72 ATCN PAM targeting sequence
  source 1..20: mol_type = other RNA
cagatattgtaagaaacatt

SEQ ID NO: 2838 - RNA, 20 nt, synthetic construct
  misc_feature 1..20: note = C9Orf72 ATCN PAM targeting sequence
  source 1..20: mol_type = other RNA
gagatgatattgcaaaagat

SEQ ID NO: 2839 - RNA, 20 nt, synthetic construct
  misc_feature 1..20: note = C9Orf72 ATCN PAM targeting sequence
  source 1..20: mol_type = other RNA
ttaagtcatgactatttatt

SEQ ID NO: 2840 - RNA, 20 nt, synthetic construct
  misc_feature 1..20: note = C9Orf72 ATCN PAM targeting sequence
  source 1..20: mol_type = other RNA
accctggattaaatgactct

SEQ ID NO: 2841 - RNA, 20 nt, synthetic construct
  misc_feature 1..20: note = C9Orf72 ATCN PAM targeting sequence
  source 1..20: mol_type = other RNA
agggttgatatcattaagtc

SEQ ID NO: 2842 - RNA, 20 nt, synthetic construct
  misc_feature 1..20: note = C9Orf72 ATCN PAM targeting sequence
  source 1..20: mol_type = other RNA
ttacattacacaaaagtgac

SEQ ID NO: 2843 - RNA, 20 nt, synthetic construct
  misc_feature 1..20: note = C9Orf72 ATCN PAM targeting sequence
  source 1..20: mol_type = other RNA
gtatctttacattacacaaa

SEQ ID NO: 2844 - RNA, 20 nt, synthetic construct
  misc_feature 1..20: note = C9Orf72 ATCN PAM targeting sequence
  source 1..20: mol_type = other RNA
ggcagttttcccatatttga

SEQ ID NO: 2845 - RNA, 20 nt, synthetic construct
  misc_feature 1..20: note = C9Orf72 ATCN PAM targeting sequence
  source 1..20: mol_type = other RNA
ccgaggaatctcatttccaa

SEQ ID NO: 2846 - RNA, 20 nt, synthetic construct
  misc_feature 1..20: note = C9Orf72 ATCN PAM targeting sequence
  source 1..20: mol_type = other RNA
catttccaaagtgccccagt

SEQ ID NO: 2847 - RNA, 20 nt, synthetic construct
  misc_feature 1..20: note = C9Orf72 ATCN PAM targeting sequence
  source 1..20: mol_type = other RNA
tataaaatgaggataatata

SEQ ID NO: 2848 - RNA, 20 nt, synthetic construct
  misc_feature 1..20: note = C9Orf72 ATCN PAM targeting sequence
  source 1..20: mol_type = other RNA
tcattttataagatgaggta

SEQ ID NO: 2849 - RNA, 20 nt, synthetic construct
  misc_feature 1..20: note = C9Orf72 ATCN PAM targeting sequence
  source 1..20: mol_type = other RNA
ttgtttccagcatacagtta

SEQ ID NO: 2850 - RNA, 20 nt, synthetic construct
  misc_feature 1..20: note = C9Orf72 ATCN PAM targeting sequence
  source 1..20: mol_type = other RNA
ccccaccgacatgtagcccc

SEQ ID NO: 2851 - RNA, 20 nt, synthetic construct
  misc_feature 1..20: note = C9Orf72 ATCN PAM targeting sequence
  source 1..20: mol_type = other RNA
taagggacactgaagcttgt

SEQ ID NO: 2852 - RNA, 20 nt, synthetic construct
  misc_feature 1..20: note = C9Orf72 ATCN PAM targeting sequence
  source 1..20: mol_type = other RNA
cctggaaagtaggaacagaa

SEQ ID NO: 2853 - RNA, 20 nt, synthetic construct
  misc_feature 1..20: note = C9Orf72 ATCN PAM targeting sequence
  source 1..20: mol_type = other RNA
gtactgacttgggcaaggaa

SEQ ID NO: 2854 - RNA, 20 nt, synthetic construct
  misc_feature 1..20: note = C9Orf72 ATCN PAM targeting sequence
  source 1..20: mol_type = other RNA
tttccaactcatactttata

SEQ ID NO: 2855 - RNA, 20 nt, synthetic construct
  misc_feature 1..20: note = C9Orf72 ATCN PAM targeting sequence
  source 1..20: mol_type = other RNA
tgctggttttcagtagcata

SEQ ID NO: 2856 - RNA, 20 nt, synthetic construct
  misc_feature 1..20: note = C9Orf72 ATCN PAM targeting sequence
  source 1..20: mol_type = other RNA
tcttggaatttttttttttt

SEQ ID NO: 2857 - RNA, 20 nt, synthetic construct
  misc_feature 1..20: note = C9Orf72 ATCN PAM targeting sequence
  source 1..20: mol_type = other RNA
tctaaggggaagctgtaatg

SEQ ID NO: 2858 - RNA, 20 nt, synthetic construct
  misc_feature 1..20: note = C9Orf72 ATCN PAM targeting sequence
  source 1..20: mol_type = other RNA
ctgtgcttctttggtatcct

SEQ ID NO: 2859 - RNA, 20 nt, synthetic construct
  misc_feature 1..20: note = C9Orf72 ATCN PAM targeting sequence
  source 1..20: mol_type = other RNA
gtctattacaatgttgctat

SEQ ID NO: 2860 - RNA, 20 nt, synthetic construct
  misc_feature 1..20: note = C9Orf72 ATCN PAM targeting sequence
  source 1..20: mol_type = other RNA
tcaagagtccctttcatcct

SEQ ID NO: 2861 - RNA, 20 nt, synthetic construct
  misc_feature 1..20: note = C9Orf72 ATCN PAM targeting sequence
  source 1..20: mol_type = other RNA
taagcaatgtgagttcacaa

SEQ ID NO: 2862 - RNA, 20 nt, synthetic construct
  misc_feature 1..20: note = C9Orf72 ATCN PAM targeting sequence
  source 1..20: mol_type = other RNA
aaatgtgtacctaataaatc

SEQ ID NO: 2863 - RNA, 20 nt, synthetic construct
  misc_feature 1..20: note = C9Orf72 ATCN PAM targeting sequence
  source 1..20: mol_type = other RNA
tcaatagtaaagcgtacttc

SEQ ID NO: 2864 - RNA, 20 nt, synthetic construct
  misc_feature 1..20: note = C9Orf72 ATCN PAM targeting sequence
  source 1..20: mol_type = other RNA
cagaagctcccataagcatt

SEQ ID NO: 2865 - RNA, 20 nt, synthetic construct
  misc_feature 1..20: note = C9Orf72 ATCN PAM targeting sequence
  source 1..20: mol_type = other RNA
catatataaatttgctgtta

SEQ ID NO: 2866 - RNA, 20 nt, synthetic construct
  misc_feature 1..20: note = C9Orf72 ATCN PAM targeting sequence
  source 1..20: mol_type = other RNA
gtgtatatcacatatataaa

SEQ ID NO: 2867 - RNA, 20 nt, synthetic construct
  misc_feature 1..20: note = C9Orf72 ATCN PAM targeting sequence
  source 1..20: mol_type = other RNA
catatagatatataagaaga

SEQ ID NO: 2868 - RNA, 20 nt, synthetic construct
  misc_feature 1..20: note = C9Orf72 ATCN PAM targeting sequence
  source 1..20: mol_type = other RNA
atatgtgatatatttatata

SEQ ID NO: 2869 - RNA, 20 nt, synthetic construct
  misc_feature 1..20: note = C9Orf72 ATCN PAM targeting sequence
  source 1..20: mol_type = other RNA
tatatatatacacacacatt

SEQ ID NO: 2870 - RNA, 20 nt, synthetic construct
  misc_feature 1..20: note = C9Orf72 ATCN PAM targeting sequence
  source 1..20: mol_type = other RNA
ctaaaatgtgtgtgtatata

SEQ ID NO: 2871 - RNA, 20 nt, synthetic construct
  misc_feature 1..20: note = C9Orf72 ATCN PAM targeting sequence
  source 1..20: mol_type = other RNA
tatatatcttttaagcaatt

SEQ ID NO: 2872 - RNA, 20 nt, synthetic construct
  misc_feature 1..20: note = C9Orf72 ATCN PAM targeting sequence
  source 1..20: mol_type = other RNA
tttaagcaatttcaaaccat

SEQ ID NO: 2873 - RNA, 20 nt, synthetic construct
  misc_feature 1..20: note = C9Orf72 ATCN PAM targeting sequence
  source 1..20: mol_type = other RNA
atatatgatcttaaggcata

SEQ ID NO: 2874 - RNA, 20 nt, synthetic construct
  misc_feature 1..20: note = C9Orf72 ATCN PAM targeting sequence
  source 1..20: mol_type = other RNA
tatatggattcttgtatggt

SEQ ID NO: 2875 - RNA, 20 nt, synthetic construct
  misc_feature 1..20: note = C9Orf72 ATCN PAM targeting sequence
  source 1..20: mol_type = other RNA
taaggcataatttctgccag

SEQ ID NO: 2876 - RNA, 20 nt, synthetic construct
  misc_feature 1..20: note = C9Orf72 ATCN PAM targeting sequence
  source 1..20: mol_type = other RNA
atccctttttgtgaaagtgg

SEQ ID NO: 2877 - RNA, 20 nt, synthetic construct
  misc_feature 1..20: note = C9Orf72 ATCN PAM targeting sequence
  source 1..20: mol_type = other RNA
ctttttgtgaaagtggaact

SEQ ID NO: 2878 - RNA, 20 nt, synthetic construct
  misc_feature 1..20: note = C9Orf72 ATCN PAM targeting sequence
  source 1..20: mol_type = other RNA
tgttcagctgtcactgaaac

SEQ ID NO: 2879 - RNA, 20 nt, synthetic construct
  misc_feature 1..20: note = C9Orf72 ATCN PAM targeting sequence
  source 1..20: mol_type = other RNA
taatggacaattatctgctt

SEQ ID NO: 2880 - RNA, 20 nt, synthetic construct
  misc_feature 1..20: note = C9Orf72 ATCN PAM targeting sequence
  source 1..20: mol_type = other RNA
gctttctggtctataggaat

SEQ ID NO: 2881 - RNA, 20 nt, synthetic construct
  misc_feature 1..20: note = C9Orf72 ATCN PAM targeting sequence
  source 1..20: mol_type = other RNA
gttttgtttatagtgaccca

SEQ ID NO: 2882 - RNA, 20 nt, synthetic construct
  misc_feature 1..20: note = C9Orf72 ATCN PAM targeting sequence
  source 1..20: mol_type = other RNA
atcagatggtatttttttct

SEQ ID NO: 2883 - RNA, 20 nt, synthetic construct
  misc_feature 1..20: note = C9Orf72 ATCN PAM targeting sequence
  source 1..20: mol_type = other RNA
gatggtatttttttcttatt

SEQ ID NO: 2884 - RNA, 20 nt, synthetic construct
  misc_feature 1..20: note = C9Orf72 ATCN PAM targeting sequence
  source 1..20: mol_type = other RNA
gatagatatgaaggagcatt

SEQ ID NO: 2885 - RNA, 20 nt, synthetic construct
  misc_feature 1..20: note = C9Orf72 ATCN PAM targeting sequence
  source 1..20: mol_type = other RNA
tagctcactgcagcctcaac

SEQ ID NO: 2886 - RNA, 20 nt, synthetic construct
  misc_feature 1..20: note = C9Orf72 ATCN PAM targeting sequence
  source 1..20: mol_type = other RNA
ttaataagcgacccttcttc

SEQ ID NO: 2887 - RNA, 20 nt, synthetic construct
  misc_feature 1..20: note = C9Orf72 ATCN PAM targeting sequence
  source 1..20: mol_type = other RNA
cttgagaagaagggtcgctt

SEQ ID NO: 2888 - RNA, 20 nt, synthetic construct
  misc_feature 1..20: note = C9Orf72 ATCN PAM targeting sequence
  source 1..20: mol_type = other RNA
ggctcatctcttgagaagaa

SEQ ID NO: 2889 - RNA, 20 nt, synthetic construct
  misc_feature 1..20: note = C9Orf72 ATCN PAM targeting sequence
  source 1..20: mol_type = other RNA
caagtgtaccacacctggct

SEQ ID NO: 2890 - RNA, 20 nt, synthetic construct
  misc_feature 1..20: note = C9Orf72 ATCN PAM targeting sequence
  source 1..20: mol_type = other RNA
gcctcagtattctgagtaat

SEQ ID NO: 2891 - RNA, 20 nt, synthetic construct
  misc_feature 1..20: note = C9Orf72 ATCN PAM targeting sequence
  source 1..20: mol_type = other RNA
aagttgacctgtttcacagt

SEQ ID NO: 2892 - RNA, 20 nt, synthetic construct
  misc_feature 1..20: note = C9Orf72 ATCN PAM targeting sequence
  source 1..20: mol_type = other RNA
tatctaagttgacctgtttc

SEQ ID NO: 2893 - RNA, 20 nt, synthetic construct
  misc_feature 1..20: note = C9Orf72 ATCN PAM targeting sequence
  source 1..20: mol_type = other RNA
aaaaagggttagttgccagg

SEQ ID NO: 2894 - RNA, 20 nt, synthetic construct
  misc_feature 1..20: note = C9Orf72 ATCN PAM targeting sequence
  source 1..20: mol_type = other RNA
acaagcccatagcctggacc

SEQ ID NO: 2895 - RNA, 20 nt, synthetic construct
  misc_feature 1..20: note = C9Orf72 ATCN PAM targeting sequence
  source 1..20: mol_type = other RNA
tacagtgagactttagcacc

SEQ ID NO: 2896 - RNA, 20 nt, synthetic construct
  misc_feature 1..20: note = C9Orf72 ATCN PAM targeting sequence
  source 1..20: mol_type = other RNA
gaccactgtgtgctcaatgg

SEQ ID NO: 2897 - RNA, 20 nt, synthetic construct
  misc_feature 1..20: note = C9Orf72 ATCN PAM targeting sequence
  source 1..20: mol_type = other RNA
ttctatgcctttctgtatta

SEQ ID NO: 2898 - RNA, 20 nt, synthetic construct
  misc_feature 1..20: note = C9Orf72 ATCN PAM targeting sequence
  source 1..20: mol_type = other RNA
atgagtcactagtctcttct

SEQ ID NO: 2899 - RNA, 20 nt, synthetic construct
  misc_feature 1..20: note = C9Orf72 ATCN PAM targeting sequence
  source 1..20: mol_type = other RNA
cgttggaagcatccatgagt

SEQ ID NO: 2900 - RNA, 20 nt, synthetic construct
  misc_feature 1..20: note = C9Orf72 ATCN PAM targeting sequence
  source 1..20: mol_type = other RNA
tcattattttactatttaga

SEQ ID NO: 2901 - RNA, 20 nt, synthetic construct
  misc_feature 1..20: note = C9Orf72 ATCN PAM targeting sequence
  source 1..20: mol_type = other RNA
caaagagactttctctcttt

SEQ ID NO: 2902 - RNA, 20 nt, synthetic construct
  misc_feature 1..20: note = C9Orf72 ATCN PAM targeting sequence
  source 1..20: mol_type = other RNA
caaaagcagtaaagctgtgt

SEQ ID NO: 2903 - RNA, 20 nt, synthetic construct
  misc_feature 1..20: note = C9Orf72 ATCN PAM targeting sequence
  source 1..20: mol_type = other RNA
atgcccactgccctcaccaa

SEQ ID NO: 2904 - RNA, 20 nt, synthetic construct
  misc_feature 1..20: note = C9Orf72 ATCN PAM targeting sequence
  source 1..20: mol_type = other RNA
gtcattaattcccaactgcc

SEQ ID NO: 2905 - RNA, 20 nt, synthetic construct
  misc_feature 1..20: note = C9Orf72 ATCN PAM targeting sequence
  source 1..20: mol_type = other RNA
aaaaacctttttttctatat

SEQ ID NO: 2906 - RNA, 20 nt, synthetic construct
  misc_feature 1..20: note = C9Orf72 ATCN PAM targeting sequence
  source 1..20: mol_type = other RNA
ccttagctctctttgaatgt

SEQ ID NO: 2907 - RNA, 20 nt, synthetic construct
  misc_feature 1..20: note = C9Orf72 ATCN PAM targeting sequence
  source 1..20: mol_type = other RNA
accttcagtctggcagtaga

SEQ ID NO: 2908 - RNA, 20 nt, synthetic construct
  misc_feature 1..20: note = C9Orf72 ATCN PAM targeting sequence
  source 1..20: mol_type = other RNA
aaatctaccttcagtctggc

SEQ ID NO: 2909 - RNA, 20 nt, synthetic construct
  misc_feature 1..20: note = C9Orf72 ATCN PAM targeting sequence
  source 1..20: mol_type = other RNA
ccctctaccctcctggcata

SEQ ID NO: 2910 - RNA, 20 nt, synthetic construct
  misc_feature 1..20: note = C9Orf72 ATCN PAM targeting sequence
  source 1..20: mol_type = other RNA
tgtttattttctatgccagg

SEQ ID NO: 2911 - RNA, 20 nt, synthetic construct
  misc_feature 1..20: note = C9Orf72 ATCN PAM targeting sequence
  source 1..20: mol_type = other RNA
taattaaggaaagagacaaa

SEQ ID NO: 2912 - RNA, 20 nt, synthetic construct
  misc_feature 1..20: note = C9Orf72 ATCN PAM targeting sequence
  source 1..20: mol_type = other RNA
tccaacctgatcttctttag

SEQ ID NO: 2913 - RNA, 20 nt, synthetic construct
  misc_feature 1..20: note = C9Orf72 ATCN PAM targeting sequence
  source 1..20: mol_type = other RNA
aacctgatcttctttagcct

SEQ ID NO: 2914 - RNA, 20 nt, synthetic construct
  misc_feature 1..20: note = C9Orf72 ATCN PAM targeting sequence
  source 1..20: mol_type = other RNA
ggttggatgataccttcatt

SEQ ID NO: 2915 - RNA, 20 nt, synthetic construct
  misc_feature 1..20: note = C9Orf72 ATCN PAM targeting sequence
  source 1..20: mol_type = other RNA
tctttagcctctagctgttc

SEQ ID NO: 2916 - RNA, 20 nt, synthetic construct
  misc_feature 1..20: note = C9Orf72 ATCN PAM targeting sequence
  source 1..20: mol_type = other RNA
tgagaaaatagttctgtgtc

SEQ ID NO: 2917 - RNA, 20 nt, synthetic construct
  misc_feature 1..20: note = C9Orf72 ATCN PAM targeting sequence
  source 1..20: mol_type = other RNA
ttagaggctgttcaataccc

SEQ ID NO: 2918 - RNA, 20 nt, synthetic construct
  misc_feature 1..20: note = C9Orf72 ATCN PAM targeting sequence
  source 1..20: mol_type = other RNA
ctctgaaaagatttttggaa

SEQ ID NO: 2919 - RNA, 20 nt, synthetic construct
  misc_feature 1..20: note = C9Orf72 ATCN PAM targeting sequence
  source 1..20: mol_type = other RNA
tttcagagggattttttccc

SEQ ID NO: 2920 - RNA, 20 nt, synthetic construct
  misc_feature 1..20: note = C9Orf72 ATCN PAM targeting sequence
  source 1..20: mol_type = other RNA
attcatttctacagagactc

SEQ ID NO: 2921 - RNA, 20 nt, synthetic construct
  misc_feature 1..20: note = C9Orf72 ATCN PAM targeting sequence
  source 1..20: mol_type = other RNA
tgccctcttccgtctttgtt

SEQ ID NO: 2922 - RNA, 20 nt, synthetic construct
  misc_feature 1..20: note = C9Orf72 ATCN PAM targeting sequence
  source 1..20: mol_type = other RNA
tctaacagagaagagaagag

SEQ ID NO: 2923 - RNA, 20 nt, synthetic construct
  misc_feature 1..20: note = C9Orf72 ATCN PAM targeting sequence
  source 1..20: mol_type = other RNA
taaatcctctaacagagaag

SEQ ID NO: 2924 - RNA, 20 nt, synthetic construct
  misc_feature 1..20: note = C9Orf72 ATCN PAM targeting sequence
  source 1..20: mol_type = other RNA
agtgtcccagaagaataatt

SEQ ID NO: 2925 - RNA, 20 nt, synthetic construct
  misc_feature 1..20: note = C9Orf72 ATCN PAM targeting sequence
  source 1..20: mol_type = other RNA
gctgaaagaaaccaaaaaga

SEQ ID NO: 2926 - RNA, 20 nt, synthetic construct
  misc_feature 1..20: note = C9Orf72 ATCN PAM targeting sequence
  source 1..20: mol_type = other RNA
tctgctgaaagaaaccaaaa

SEQ ID NO: 2927 - RNA, 20 nt, synthetic construct
  misc_feature 1..20: note = C9Orf72 ATCN PAM targeting sequence
  source 1..20: mol_type = other RNA
tttatcatctgctgaaagaa

SEQ ID NO: 2928 - RNA, 20 nt, synthetic construct
  misc_feature 1..20: note = C9Orf72 ATCN PAM targeting sequence
  source 1..20: mol_type = other RNA
gggcgtggaaaagggtctct

SEQ ID NO: 2929 - RNA, 20 nt, synthetic construct
  misc_feature 1..20: note = C9Orf72 ATCN PAM targeting sequence
  source 1..20: mol_type = other RNA
ccttcttgggggttggggtc

SEQ ID NO: 2930 - RNA, 20 nt, synthetic construct
  misc_feature 1..20: note = C9Orf72 ATCN PAM targeting sequence
  source 1..20: mol_type = other RNA
gtttgaggctcatagcttgt

SEQ ID NO: 2931 - RNA, 20 nt, synthetic construct
  misc_feature 1..20: note = C9Orf72 ATCN PAM targeting sequence
  source 1..20: mol_type = other RNA
ggctctaaactaacaagcta

SEQ ID NO: 2932 - RNA, 20 nt, synthetic construct
  misc_feature 1..20: note = C9Orf72 ATCN PAM targeting sequence
  source 1..20: mol_type = other RNA
agatctcatggcttttaatc

SEQ ID NO: 2933 - RNA, 20 nt, synthetic construct
  misc_feature 1..20: note = C9Orf72 ATCN PAM targeting sequence
  source 1..20: mol_type = other RNA
ggattctaacaagctgtgct

SEQ ID NO: 2934 - RNA, 20 nt, synthetic construct
  misc_feature 1..20: note = C9Orf72 ATCN PAM targeting sequence
  source 1..20: mol_type = other RNA
catggcttttaatccagaaa

SEQ ID NO: 2935 - RNA, 20 nt, synthetic construct
  misc_feature 1..20: note = C9Orf72 ATCN PAM targeting sequence
  source 1..20: mol_type = other RNA
agaaatatttctttgtttgg

SEQ ID NO: 2936 - RNA, 20 nt, synthetic construct
  misc_feature 1..20: note = C9Orf72 ATCN PAM targeting sequence
  source 1..20: mol_type = other RNA
ctcagtcccttcttttagaa

SEQ ID NO: 2937 - RNA, 20 nt, synthetic construct
  misc_feature 1..20: note = C9Orf72 ATCN PAM targeting sequence
  source 1..20: mol_type = other RNA
tgtaggcaaaccattgtttc

SEQ ID NO: 2938 - RNA, 20 nt, synthetic construct
  misc_feature 1..20: note = C9Orf72 ATCN PAM targeting sequence
  source 1..20: mol_type = other RNA
aatataacaggagcagggcc

SEQ ID NO: 2939 - RNA, 20 nt, synthetic construct
  misc_feature 1..20: note = C9Orf72 ATCN PAM targeting sequence
  source 1..20: mol_type = other RNA
ctccctcccttcctcccttc

SEQ ID NO: 2940 - RNA, 20 nt, synthetic construct
  misc_feature 1..20: note = C9Orf72 ATCN PAM targeting sequence
  source 1..20: mol_type = other RNA
tcaacatctctccctccctt

SEQ ID NO: 2941 - RNA, 20 nt, synthetic construct
  misc_feature 1..20: note = C9Orf72 ATCN PAM targeting sequence
  source 1..20: mol_type = other RNA
ccagtgacttatacaggaaa

SEQ ID NO: 2942 - RNA, 20 nt, synthetic construct
  misc_feature 1..20: note = C9Orf72 ATCN PAM targeting sequence
  source 1..20: mol_type = other RNA
ttaattttcctgtataagtc

SEQ ID NO: 2943 - RNA, 20 nt, synthetic construct
  misc_feature 1..20: note = C9Orf72 ATCN PAM targeting sequence
  source 1..20: mol_type = other RNA
gatatcctttgttaaatttt

SEQ ID NO: 2944 - RNA, 20 nt, synthetic construct
  misc_feature 1..20: note = C9Orf72 ATCN PAM targeting sequence
  source 1..20: mol_type = other RNA
gatcattaattttcctgtat

SEQ ID NO: 2945 - RNA, 20 nt, synthetic construct
  misc_feature 1..20: note = C9Orf72 ATCN PAM targeting sequence
  source 1..20: mol_type = other RNA
tttgttaaattttaatactg

SEQ ID NO: 2946 - RNA, 20 nt, synthetic construct
  misc_feature 1..20: note = C9Orf72 ATCN PAM targeting sequence
  source 1..20: mol_type = other RNA
aaaagtgatgaaaagcaatc

SEQ ID NO: 2947 - RNA, 20 nt, synthetic construct
  misc_feature 1..20: note = C9Orf72 ATCN PAM targeting sequence
  source 1..20: mol_type = other RNA
cttttggattccctaataac

SEQ ID NO: 2948 - RNA, 20 nt, synthetic construct
  misc_feature 1..20: note = C9Orf72 ATCN PAM targeting sequence
  source 1..20: mol_type = other RNA
cccttccttctcctctgctc

SEQ ID NO: 2949 - RNA, 20 nt, synthetic construct
  misc_feature 1..20: note = C9Orf72 ATCN PAM targeting sequence
  source 1..20: mol_type = other RNA
acttggatgatgacatagga

SEQ ID NO: 2950 - RNA, 20 nt, synthetic construct
  misc_feature 1..20: note = C9Orf72 ATCN PAM targeting sequence
  source 1..20: mol_type = other RNA
aagtagatgcagtgaagtat

SEQ ID NO: 2951 - RNA, 20 nt, synthetic construct
  misc_feature 1..20: note = C9Orf72 ATCN PAM targeting sequence
  source 1..20: mol_type = other RNA
tccaagtagatgcagtgaag

SEQ ID NO: 2952 - RNA, 20 nt, synthetic construct
  misc_feature 1..20: note = C9Orf72 ATCN PAM targeting sequence
  source 1..20: mol_type = other RNA
tacctgcaatttcctcattc

SEQ ID NO: 2953 - RNA, 20 nt, synthetic construct
  misc_feature 1..20: note = C9Orf72 ATCN PAM targeting sequence
  source 1..20: mol_type = other RNA
gcagaactgctcagctgacc

SEQ ID NO: 2954 - RNA, 20 nt, synthetic construct
  misc_feature 1..20: note = C9Orf72 ATCN PAM targeting sequence
  source 1..20: mol_type = other RNA
ctccaaaatgtagcacctta

SEQ ID NO: 2955 - RNA, 20 nt, synthetic construct
  misc_feature 1..20: note = C9Orf72 ATCN PAM targeting sequence
  source 1..20: mol_type = other RNA
gttatttattgccacaataa

SEQ ID NO: 2956 - RNA, 20 nt, synthetic construct
  misc_feature 1..20: note = C9Orf72 ATCN PAM targeting sequence
  source 1..20: mol_type = other RNA
gtatcagttatttattgcca

SEQ ID NO: 2957 - RNA, 20 nt, synthetic construct
  misc_feature 1..20: note = C9Orf72 ATCN PAM targeting sequence
  source 1..20: mol_type = other RNA
ccacattatctgtatcagtt

SEQ ID NO: 2958 - RNA, 20 nt, synthetic construct
  misc_feature 1..20: note = C9Orf72 ATCN PAM targeting sequence
  source 1..20: mol_type = other RNA
tgatgaatacaagagtgcct

SEQ ID NO: 2959 - RNA, 20 nt, synthetic construct
  misc_feature 1..20: note = C9Orf72 ATCN PAM targeting sequence
  source 1..20: mol_type = other RNA
agatcaccacattatctgta

SEQ ID NO: 2960 - RNA, 20 nt, synthetic construct
  misc_feature 1..20: note = C9Orf72 ATCN PAM targeting sequence
  source 1..20: mol_type = other RNA
ataggggcttaattaaatat

SEQ ID NO: 2961 - RNA, 20 nt, synthetic construct
  misc_feature 1..20: note = C9Orf72 ATCN PAM targeting sequence
  source 1..20: mol_type = other RNA
actcattgaatttttattca

SEQ ID NO: 2962 - RNA, 20 nt, synthetic construct
  misc_feature 1..20: note = C9Orf72 ATCN PAM targeting sequence
  source 1..20: mol_type = other RNA
taagccatcaactcattgaa

SEQ ID NO: 2963 - RNA, 20 nt, synthetic construct
  misc_feature 1..20: note = C9Orf72 ATCN PAM targeting sequence
  source 1..20: mol_type = other RNA
gtaaagaaagcctgtataca

SEQ ID NO: 2964 - RNA, 20 nt, synthetic construct
  misc_feature 1..20: note = C9Orf72 ATCN PAM targeting sequence
  source 1..20: mol_type = other RNA
tgctgctttgtatacaggct

SEQ ID NO: 2965 - RNA, 20 nt, synthetic construct
  misc_feature 1..20: note = C9Orf72 ATCN PAM targeting sequence
  source 1..20: mol_type = other RNA
acaatgtatatattcatagg

SEQ ID NO: 2966 - RNA, 20 nt, synthetic construct
  misc_feature 1..20: note = C9Orf72 ATCN PAM targeting sequence
  source 1..20: mol_type = other RNA
ggaagtacatataccaagat

SEQ ID NO: 2967 - RNA, 20 nt, synthetic construct
  misc_feature 1..20: note = C9Orf72 ATCN PAM targeting sequence
  source 1..20: mol_type = other RNA
tggtatatgtacttccagat

SEQ ID NO: 2968 - RNA, 20 nt, synthetic construct
  misc_feature 1..20: note = C9Orf72 ATCN PAM targeting sequence
  source 1..20: mol_type = other RNA
taacaggttaatttaaaatt

SEQ ID NO: 2969 - RNA, 20 nt, synthetic construct
  misc_feature 1..20: note = C9Orf72 ATCN PAM targeting sequence
  source 1..20: mol_type = other RNA
ccttactcttttgttattat

SEQ ID NO: 2970 - RNA, 20 nt, synthetic construct
  misc_feature 1..20: note = C9Orf72 ATCN PAM targeting sequence
  source 1..20: mol_type = other RNA
tatcaccttactcttttgtt

SEQ ID NO: 2971 - RNA, 20 nt, synthetic construct
  misc_feature 1..20: note = C9Orf72 ATCN PAM targeting sequence
  source 1..20: mol_type = other RNA
gggtagctcaccccatgtgt

SEQ ID NO: 2972 - RNA, 20 nt, synthetic construct
  misc_feature 1..20: note = C9Orf72 ATCN PAM targeting sequence
  source 1..20: mol_type = other RNA
tcattgtgctttggggagag

SEQ ID NO: 2973 - RNA, 20 nt, synthetic construct
  misc_feature 1..20: note = C9Orf72 ATCN PAM targeting sequence
  source 1..20: mol_type = other RNA
tgaagggcacacagagagag

SEQ ID NO: 2974 - RNA, 20 nt, synthetic construct
  misc_feature 1..20: note = C9Orf72 ATCN PAM targeting sequence
  source 1..20: mol_type = other RNA
agaggttgaatttggcccat

SEQ ID NO: 2975 - RNA, 20 nt, synthetic construct
  misc_feature 1..20: note = C9Orf72 ATCN PAM targeting sequence
  source 1..20: mol_type = other RNA
catatttcatccagaggttg

SEQ ID NO: 2976 - RNA, 20 nt, synthetic construct
  misc_feature 1..20: note = C9Orf72 ATCN PAM targeting sequence
  source 1..20: mol_type = other RNA
atttgccacttctgacaatg

SEQ ID NO: 2977 - RNA, 20 nt, synthetic construct
  misc_feature 1..20: note = C9Orf72 ATCN PAM targeting sequence
  source 1..20: mol_type = other RNA
accacaggtagcaagtaacg

SEQ ID NO: 2978 - RNA, 20 nt, synthetic construct
  misc_feature 1..20: note = C9Orf72 ATCN PAM targeting sequence
  source 1..20: mol_type = other RNA
ctgcctcaatcatgcccctc

SEQ ID NO: 2979 - RNA, 20 nt, synthetic construct
  misc_feature 1..20: note = C9Orf72 ATCN PAM targeting sequence
  source 1..20: mol_type = other RNA
tgcccctcctcttgccttgt

SEQ ID NO: 2980 - RNA, 20 nt, synthetic construct
  misc_feature 1..20: note = C9Orf72 ATCN PAM targeting sequence
  source 1..20: mol_type = other RNA
ccaaccagagggcttcttct

SEQ ID NO: 2981 - RNA, 20 nt, synthetic construct
  misc_feature 1..20: note = C9Orf72 ATCN PAM targeting sequence
  source 1..20: mol_type = other RNA
ttgcttgctgacctcaaggt

SEQ ID NO: 2982 - RNA, 20 nt, synthetic construct
  misc_feature 1..20: note = C9Orf72 ATCN PAM targeting sequence
  source 1..20: mol_type = other RNA
tccttgcttgctgacctcaa

SEQ ID NO: 2983 - RNA, 20 nt, synthetic construct
  misc_feature 1..20: note = C9Orf72 ATCN PAM targeting sequence
  source 1..20: mol_type = other RNA
ccttttcacctctctcagtt

SEQ ID NO: 2984 - RNA, 20 nt, synthetic construct
  misc_feature 1..20: note = C9Orf72 ATCN PAM targeting sequence
  source 1..20: mol_type = other RNA
gtaactgagagaggtgaaaa

SEQ ID NO: 2985 - RNA, 20 nt, synthetic construct
  misc_feature 1..20: note = C9Orf72 ATCN PAM targeting sequence
  source 1..20: mol_type = other RNA
gtaaaatgggaaaaagaaac

SEQ ID NO: 2986 - RNA, 20 nt, synthetic construct
  misc_feature 1..20: note = C9Orf72 ATCN PAM targeting sequence
  source 1..20: mol_type = other RNA
agtagtgcccaaagccagtg

SEQ ID NO: 2987 - RNA, 20 nt, synthetic construct
  misc_feature 1..20: note = C9Orf72 ATCN PAM targeting sequence
  source 1..20: mol_type = other RNA
cagtcattaagtgttaaagt

SEQ ID NO: 2988 - RNA, 20 nt, synthetic construct
  misc_feature 1..20: note = C9Orf72 ATCN PAM targeting sequence
  source 1..20: mol_type = other RNA
agtgcagctccggatacaca

SEQ ID NO: 2989 - RNA, 20 nt, synthetic construct
  misc_feature 1..20: note = C9Orf72 ATCN PAM targeting sequence
  source 1..20: mol_type = other RNA
ggagctgcactagatgctga

SEQ ID NO: 2990 - RNA, 20 nt, synthetic construct
  misc_feature 1..20: note = C9Orf72 ATCN PAM targeting sequence
  source 1..20: mol_type = other RNA
attcctcccgaagatcttgg

SEQ ID NO: 2991 - RNA, 20 nt, synthetic construct
  misc_feature 1..20: note = C9Orf72 ATCN PAM targeting sequence
  source 1..20: mol_type = other RNA
tcgggaggaatagatgaact

SEQ ID NO: 2992 - RNA, 20 nt, synthetic construct
  misc_feature 1..20: note = C9Orf72 ATCN PAM targeting sequence
  source 1..20: mol_type = other RNA
tggatggtgggtattattac

SEQ ID NO: 2993 - RNA, 20 nt, synthetic construct
  misc_feature 1..20: note = C9Orf72 ATCN PAM targeting sequence
  source 1..20: mol_type = other RNA
aagatcttcgggaggaatag

SEQ ID NO: 2994 - RNA, 20 nt, synthetic construct
  misc_feature 1..20: note = C9Orf72 ATCN PAM targeting sequence
  source 1..20: mol_type = other RNA
ccaaaatgaaggtaataata

SEQ ID NO: 2995 - RNA, 20 nt, synthetic construct
  misc_feature 1..20: note = C9Orf72 ATCN PAM targeting sequence
  source 1..20: mol_type = other RNA
tgactgttcccttgcatcca

SEQ ID NO: 2996 - RNA, 20 nt, synthetic construct
  misc_feature 1..20: note = C9Orf72 ATCN PAM targeting sequence
  source 1..20: mol_type = other RNA
atcccctctgtaagaactga

SEQ ID NO: 2997 - RNA, 20 nt, synthetic construct
  misc_feature 1..20: note = C9Orf72 ATCN PAM targeting sequence
  source 1..20: mol_type = other RNA
cctctgtaagaactgagatt

SEQ ID NO: 2998 - RNA, 20 nt, synthetic construct
  misc_feature 1..20: note = C9Orf72 ATCN PAM targeting sequence
  source 1..20: mol_type = other RNA
cagttcttacagaggggatg

SEQ ID NO: 2999 - RNA, 20 nt, synthetic construct
  misc_feature 1..20: note = C9Orf72 ATCN PAM targeting sequence
  source 1..20: mol_type = other RNA
gaggtgtctactgcaccagc

SEQ ID NO: 3000 - RNA, 20 nt, synthetic construct
  misc_feature 1..20: note = C9Orf72 ATCN PAM targeting sequence
  source 1..20: mol_type = other RNA
cttgacacatctctgatttc

SEQ ID NO: 3001 - RNA, 20 nt, synthetic construct
  misc_feature 1..20: note = C9Orf72 ATCN PAM targeting sequence
  source 1..20: mol_type = other RNA
ctgatttcagtgcacttatg

SEQ ID NO: 3002 - RNA, 20 nt, synthetic construct
  misc_feature 1..20: note = C9Orf72 ATCN PAM targeting sequence
  source 1..20: mol_type = other RNA
gagatgtgtcaagagatgtg

SEQ ID NO: 3003 - RNA, 20 nt, synthetic construct
  misc_feature 1..20: note = C9Orf72 ATCN PAM targeting sequence
  source 1..20: mol_type = other RNA
taagtgcactgaaatcagag

SEQ ID NO: 3004 - RNA, 20 nt, synthetic construct
  misc_feature 1..20: note = C9Orf72 ATCN PAM targeting sequence
  source 1..20: mol_type = other RNA
gggaaagaggccacatcata

SEQ ID NO: 3005 - RNA, 20 nt, synthetic construct
  misc_feature 1..20: note = C9Orf72 ATCN PAM targeting sequence
  source 1..20: mol_type = other RNA
caagcacgcagcagtcatta

SEQ ID NO: 3006 - RNA, 20 nt, synthetic construct
  misc_feature 1..20: note = C9Orf72 ATCN PAM targeting sequence
  source 1..20: mol_type = other RNA
gccccgggacggtttccaca

SEQ ID NO: 3007 - RNA, 20 nt, synthetic construct
  misc_feature 1..20: note = C9Orf72 ATCN PAM targeting sequence
  source 1..20: mol_type = other RNA
gtggaaaccgtcccggggca

SEQ ID NO: 3008 - RNA, 20 nt, synthetic construct
  misc_feature 1..20: note = C9Orf72 ATCN PAM targeting sequence
  source 1..20: mol_type = other RNA
ttatattgacttttcctcct

SEQ ID NO: 3009 - RNA, 20 nt, synthetic construct
  misc_feature 1..20: note = C9Orf72 ATCN PAM targeting sequence
  source 1..20: mol_type = other RNA
gtcagcctgcaacacgaagg

SEQ ID NO: 3010 - RNA, 20 nt, synthetic construct
  misc_feature 1..20: note = C9Orf72 ATCN PAM targeting sequence
  source 1..20: mol_type = other RNA
ctcattcccacttcctggaa

SEQ ID NO: 3011 - RNA, 20 nt, synthetic construct
  misc_feature 1..20: note = C9Orf72 ATCN PAM targeting sequence
  source 1..20: mol_type = other RNA
cctcccaaacaaactaactg

SEQ ID NO: 3012 - RNA, 20 nt, synthetic construct
  misc_feature 1..20: note = C9Orf72 ATCN PAM targeting sequence
  source 1..20: mol_type = other RNA
gagcctgagacaaggactag

SEQ ID NO: 3013 - RNA, 20 nt, synthetic construct
  misc_feature 1..20: note = C9Orf72 ATCN PAM targeting sequence
  source 1..20: mol_type = other RNA
cacactatcagagcctgaga

SEQ ID NO: 3014 - RNA, 20 nt, synthetic construct
  misc_feature 1..20: note = C9Orf72 ATCN PAM targeting sequence
  source 1..20: mol_type = other RNA
tgtgtactgactagtgaagg

SEQ ID NO: 3015 - RNA, 20 nt, synthetic construct
  misc_feature 1..20: note = C9Orf72 ATCN PAM targeting sequence
  source 1..20: mol_type = other RNA
aaatattatttattataatt

SEQ ID NO: 3016 - RNA, 20 nt, synthetic construct
  misc_feature 1..20: note = C9Orf72 ATCN PAM targeting sequence
  source 1..20: mol_type = other RNA
tattattatattaattattc

SEQ ID NO: 3017 - RNA, 20 nt, synthetic construct
  misc_feature 1..20: note = C9Orf72 ATCN PAM targeting sequence
  source 1..20: mol_type = other RNA
ggggaatgtccattgaaaat

SEQ ID NO: 3018 - RNA, 20 nt, synthetic construct
  misc_feature 1..20: note = C9Orf72 ATCN PAM targeting sequence
  source 1..20: mol_type = other RNA
atcagtcttgatctgccccc

SEQ ID NO: 3019 - RNA, 20 nt, synthetic construct
  misc_feature 1..20: note = C9Orf72 ATCN PAM targeting sequence
  source 1..20: mol_type = other RNA
gtcttgatctgccccctggg

SEQ ID NO: 3020 - RNA, 20 nt, synthetic construct
  misc_feature 1..20: note = C9Orf72 ATCN PAM targeting sequence
  source 1..20: mol_type = other RNA
agactgatagataagagaag

SEQ ID NO: 3021 - RNA, 20 nt, synthetic construct
  misc_feature 1..20: note = C9Orf72 ATCN PAM targeting sequence
  source 1..20: mol_type = other RNA
gccccctggggaatcacaat

SEQ ID NO: 3022 - RNA, 20 nt, synthetic construct
  misc_feature 1..20: note = C9Orf72 ATCN PAM targeting sequence
  source 1..20: mol_type = other RNA
caattcttgtcactgcagtt

SEQ ID NO: 3023 - RNA, 20 nt, synthetic construct
  misc_feature 1..20: note = C9Orf72 ATCN PAM targeting sequence
  source 1..20: mol_type = other RNA
tctacctaatttgagtcaca

SEQ ID NO: 3024 - RNA, 20 nt, synthetic construct
  misc_feature 1..20: note = C9Orf72 ATCN PAM targeting sequence
  source 1..20: mol_type = other RNA
ttctccacttggaaggcagc

SEQ ID NO: 3025 - RNA, 20 nt, synthetic construct
  misc_feature 1..20: note = C9Orf72 ATCN PAM targeting sequence
  source 1..20: mol_type = other RNA
gggtcacttggtctgtcacc

SEQ ID NO: 3026 - RNA, 20 nt, synthetic construct
  misc_feature 1..20: note = C9Orf72 ATCN PAM targeting sequence
  source 1..20: mol_type = other RNA
caagcagttgtttgtttcca

SEQ ID NO: 3027 - RNA, 20 nt, synthetic construct
  misc_feature 1..20: note = C9Orf72 ATCN PAM targeting sequence
  source 1..20: mol_type = other RNA
ttaatttttaaatatggact

SEQ ID NO: 3028 - RNA, 20 nt, synthetic construct
  misc_feature 1..20: note = C9Orf72 ATCN PAM targeting sequence
  source 1..20: mol_type = other RNA
cttagcctagtccatattta

SEQ ID NO: 3029 - RNA, 20 nt, synthetic construct
  misc_feature 1..20: note = C9Orf72 ATCN PAM targeting sequence
  source 1..20: mol_type = other RNA
cggtatcccttagcctagtc

SEQ ID NO: 3030 - RNA, 20 nt, synthetic construct
  misc_feature 1..20: note = C9Orf72 ATCN PAM targeting sequence
  source 1..20: mol_type = other RNA
agaaataatgttttaccagc

SEQ ID NO: 3031 - RNA, 20 nt, synthetic construct
  misc_feature 1..20: note = C9Orf72 ATCN PAM targeting sequence
  source 1..20: mol_type = other RNA
tcacagacacatccagaaat

SEQ ID NO: 3032 - RNA, 20 nt, synthetic construct
  misc_feature 1..20: note = C9Orf72 ATCN PAM targeting sequence
  source 1..20: mol_type = other RNA
tctatactcagtctgctaat

SEQ ID NO: 3033 - RNA, 20 nt, synthetic construct
  misc_feature 1..20: note = C9Orf72 ATCN PAM targeting sequence
  source 1..20: mol_type = other RNA
acccttaccaatgtgggagg

SEQ ID NO: 3034 - RNA, 20 nt, synthetic construct
  misc_feature 1..20: note = C9Orf72 ATCN PAM targeting sequence
  source 1..20: mol_type = other RNA
tccaatccattgagggccca

SEQ ID NO: 3035 - RNA, 20 nt, synthetic construct
  misc_feature 1..20: note = C9Orf72 ATCN PAM targeting sequence
  source 1..20: mol_type = other RNA
aatccattgagggcccagag

SEQ ID NO: 3036 - RNA, 20 nt, synthetic construct
  misc_feature 1..20: note = C9Orf72 ATCN PAM targeting sequence
  source 1..20: mol_type = other RNA
attgagggcccagagaggac

SEQ ID NO: 3037 - RNA, 20 nt, synthetic construct
  misc_feature 1..20: note = C9Orf72 ATCN PAM targeting sequence
  source 1..20: mol_type = other RNA
accttctggctggcctttga

SEQ ID NO: 3038 - RNA, 20 nt, synthetic construct
  misc_feature 1..20: note = C9Orf72 ATCN PAM targeting sequence
  source 1..20: mol_type = other RNA
taccctagcacacccaccct

SEQ ID NO: 3039 - RNA, 20 nt, synthetic construct
  misc_feature 1..20: note = C9Orf72 ATCN PAM targeting sequence
  source 1..20: mol_type = other RNA
catttctcaggccttcaggc

SEQ ID NO: 3040 - RNA, 20 nt, synthetic construct
  misc_feature 1..20: note = C9Orf72 ATCN PAM targeting sequence
  source 1..20: mol_type = other RNA
tgtaagccaattcccataat

SEQ ID NO: 3041 - RNA, 20 nt, synthetic construct
  misc_feature 1..20: note = C9Orf72 ATCN PAM targeting sequence
  source 1..20: mol_type = other RNA
tggttctcaagagaaacaga

SEQ ID NO: 3042 - RNA, 20 nt, synthetic construct
  misc_feature 1..20: note = C9Orf72 ATCN PAM targeting sequence
  source 1..20: mol_type = other RNA
ttaatcatggttctcaagag

SEQ ID NO: 3043 - RNA, 20 nt, synthetic construct
  misc_feature 1..20: note = C9Orf72 ATCN PAM targeting sequence
  source 1..20: mol_type = other RNA
ttgcagttttaagccactaa

SEQ ID NO: 3044 - RNA, 20 nt, synthetic construct
  misc_feature 1..20: note = C9Orf72 ATCN PAM targeting sequence
  source 1..20: mol_type = other RNA
tgatgggggtgggaaagggg

SEQ ID NO: 3045 - RNA, 20 nt, synthetic construct
  misc_feature 1..20: note = C9Orf72 ATCN PAM targeting sequence
  source 1..20: mol_type = other RNA
agatgtgcatgctgcataag

SEQ ID NO: 3046 - RNA, 20 nt, synthetic construct
  misc_feature 1..20: note = C9Orf72 ATCN PAM targeting sequence
  source 1..20: mol_type = other RNA
ggaatgttagtggccactgt

SEQ ID NO: 3047 - RNA, 20 nt, synthetic construct
  misc_feature 1..20: note = C9Orf72 ATCN PAM targeting sequence
  source 1..20: mol_type = other RNA
gaaagtgataaacgctgctt

SEQ ID NO: 3048 - RNA, 20 nt, synthetic construct
  misc_feature 1..20: note = C9Orf72 ATCN PAM targeting sequence
  source 1..20: mol_type = other RNA
ctttcagatggaaggctttg

SEQ ID NO: 3049 - RNA, 20 nt, synthetic construct
  misc_feature 1..20: note = C9Orf72 ATCN PAM targeting sequence
  source 1..20: mol_type = other RNA
gccttgcagataagaaagga

SEQ ID NO: 3050 - RNA, 20 nt, synthetic construct
  misc_feature 1..20: note = C9Orf72 ATCN PAM targeting sequence
  source 1..20: mol_type = other RNA
gcaaggcagattgccctttc

SEQ ID NO: 3051 - RNA, 20 nt, synthetic construct
  misc_feature 1..20: note = C9Orf72 ATCN PAM targeting sequence
  source 1..20: mol_type = other RNA
ccccctttttttctcctttc

SEQ ID NO: 3052 - RNA, 20 nt, synthetic construct
  misc_feature 1..20: note = C9Orf72 ATCN PAM targeting sequence
  source 1..20: mol_type = other RNA
ttttcaaaatctcccccttt

SEQ ID NO: 3053 - RNA, 20 nt, synthetic construct
  misc_feature 1..20: note = C9Orf72 ATCN PAM targeting sequence
  source 1..20: mol_type = other RNA
gacaatcattttcaaaatct

SEQ ID NO: 3054 - RNA, 20 nt, synthetic construct
  misc_feature 1..20: note = C9Orf72 ATCN PAM targeting sequence
  source 1..20: mol_type = other RNA
tttaacctaagcttcagtgt

SEQ ID NO: 3055 - RNA, 20 nt, synthetic construct
  misc_feature 1..20: note = C9Orf72 ATCN PAM targeting sequence
  source 1..20: mol_type = other RNA
tgtactgaggggatatccac

SEQ ID NO: 3056 - RNA, 20 nt, synthetic construct
  misc_feature 1..20: note = C9Orf72 ATCN PAM targeting sequence
  source 1..20: mol_type = other RNA
cctcagtacatgatgagaac

SEQ ID NO: 3057 - RNA, 20 nt, synthetic construct
  misc_feature 1..20: note = C9Orf72 ATCN PAM targeting sequence
  source 1..20: mol_type = other RNA
actttacaaggttattatga

SEQ ID NO: 3058 - RNA, 20 nt, synthetic construct
  misc_feature 1..20: note = C9Orf72 ATCN PAM targeting sequence
  source 1..20: mol_type = other RNA
ctgtcaaaatagcagcattt

SEQ ID NO: 3059 - RNA, 20 nt, synthetic construct
  misc_feature 1..20: note = C9Orf72 ATCN PAM targeting sequence
  source 1..20: mol_type = other RNA
tttgtttacctgaaatataa

SEQ ID NO: 3060 - RNA, 20 nt, synthetic construct
  misc_feature 1..20: note = C9Orf72 ATCN PAM targeting sequence
  source 1..20: mol_type = other RNA
taatattatatttcaggtaa

SEQ ID NO: 3061 - RNA, 20 nt, synthetic construct
  misc_feature 1..20: note = C9Orf72 ATCN PAM targeting sequence
  source 1..20: mol_type = other RNA
ttcctacatctctgggagta

SEQ ID NO: 3062 - RNA, 20 nt, synthetic construct
  misc_feature 1..20: note = C9Orf72 ATCN PAM targeting sequence
  source 1..20: mol_type = other RNA
ctgggagtaaaaaactcttg

SEQ ID NO: 3063 - RNA, 20 nt, synthetic construct
  misc_feature 1..20: note = C9Orf72 ATCN PAM targeting sequence
  source 1..20: mol_type = other RNA
ttttctggaggttgcatttt

SEQ ID NO: 3064 - RNA, 20 nt, synthetic construct
  misc_feature 1..20: note = C9Orf72 ATCN PAM targeting sequence
  source 1..20: mol_type = other RNA
tagaatggtcagaatttgga

SEQ ID NO: 3065 - RNA, 20 nt, synthetic construct
  misc_feature 1..20: note = C9Orf72 ATCN PAM targeting sequence
  source 1..20: mol_type = other RNA
attatttatggcgaatatta

SEQ ID NO: 3066 - RNA, 20 nt, synthetic construct
  misc_feature 1..20: note = C9Orf72 ATCN PAM targeting sequence
  source 1..20: mol_type = other RNA
ttatgtttgaaaagctagga

SEQ ID NO: 3067 - RNA, 20 nt, synthetic construct
  misc_feature 1..20: note = C9Orf72 ATCN PAM targeting sequence
  source 1..20: mol_type = other RNA
tagtaactttgtacccagtc

SEQ ID NO: 3068 - RNA, 20 nt, synthetic construct
  misc_feature 1..20: note = C9Orf72 ATCN PAM targeting sequence
  source 1..20: mol_type = other RNA
tatgggcttagttggccaag

SEQ ID NO: 3069 - RNA, 20 nt, synthetic construct
  misc_feature 1..20: note = C9Orf72 ATCN PAM targeting sequence
  source 1..20: mol_type = other RNA
tcttgtcaacagaacacaca

SEQ ID NO: 3070 - RNA, 20 nt, synthetic construct
  misc_feature 1..20: note = C9Orf72 ATCN PAM targeting sequence
  source 1..20: mol_type = other RNA
tgtcaacagaacacacagtg

SEQ ID NO: 3071 - RNA, 20 nt, synthetic construct
  misc_feature 1..20: note = C9Orf72 ATCN PAM targeting sequence
  source 1..20: mol_type = other RNA
agtctcaagactttctcatt

SEQ ID NO: 3072 - RNA, 20 nt, synthetic construct
  misc_feature 1..20: note = C9Orf72 ATCN PAM targeting sequence
  source 1..20: mol_type = other RNA
tttgctgaacagaaagtccc

SEQ ID NO: 3073 - RNA, 20 nt, synthetic construct
  misc_feature 1..20: note = C9Orf72 ATCN PAM targeting sequence
  source 1..20: mol_type = other RNA
ggcaaaagcaaccccactac

SEQ ID NO: 3074 - RNA, 20 nt, synthetic construct
  misc_feature 1..20: note = C9Orf72 ATCN PAM targeting sequence
  source 1..20: mol_type = other RNA
accttggccagacattttct

SEQ ID NO: 3075 - RNA, 20 nt, synthetic construct
  misc_feature 1..20: note = C9Orf72 ATCN PAM targeting sequence
  source 1..20: mol_type = other RNA
aagaaggttctcagttttga

SEQ ID NO: 3076 - RNA, 20 nt, synthetic construct
  misc_feature 1..20: note = C9Orf72 ATCN PAM targeting sequence
  source 1..20: mol_type = other RNA
agaagaaacttgccctgctg

SEQ ID NO: 3077 - RNA, 20 nt, synthetic construct
  misc_feature 1..20: note = C9Orf72 ATCN PAM targeting sequence
  source 1..20: mol_type = other RNA
gactgcttccagcagtctca

SEQ ID NO: 3078 - RNA, 20 nt, synthetic construct
  misc_feature 1..20: note = C9Orf72 ATCN PAM targeting sequence
  source 1..20: mol_type = other RNA
gggtcaagtggcctgaaatg

SEQ ID NO: 3079 - RNA, 20 nt, synthetic construct
  misc_feature 1..20: note = C9Orf72 ATCN PAM targeting sequence
  source 1..20: mol_type = other RNA
tttcaggccacttgaccccg

SEQ ID NO: 3080 - RNA, 20 nt, synthetic construct
  misc_feature 1..20: note = C9Orf72 ATCN PAM targeting sequence
  source 1..20: mol_type = other RNA
ggctgctttgcaaacatttt

SEQ ID NO: 3081 - RNA, 20 nt, synthetic construct
  misc_feature 1..20: note = C9Orf72 ATCN PAM targeting sequence
  source 1..20: mol_type = other RNA
attgttaaataaaatgtttg

SEQ ID NO: 3082 - RNA, 20 nt, synthetic construct
  misc_feature 1..20: note = C9Orf72 ATCN PAM targeting sequence
  source 1..20: mol_type = other RNA
tttgggggaatcagagaccc

SEQ ID NO: 3083 - RNA, 20 nt, synthetic construct
  misc_feature 1..20: note = C9Orf72 ATCN PAM targeting sequence
  source 1..20: mol_type = other RNA
gagacccctttgagaatctg

SEQ ID NO: 3084 - RNA, 20 nt, synthetic construct
  misc_feature 1..20: note = C9Orf72 ATCN PAM targeting sequence
  source 1..20: mol_type = other RNA
gaggaaggctatggagaaat

SEQ ID NO: 3085 - RNA, 20 nt, synthetic construct
  misc_feature 1..20: note = C9Orf72 ATCN PAM targeting sequence
  source 1..20: mol_type = other RNA
gatgaagcctgtgggaaaaa

SEQ ID NO: 3086 - RNA, 20 nt, synthetic construct
  misc_feature 1..20: note = C9Orf72 ATCN PAM targeting sequence
  source 1..20: mol_type = other RNA
gatatttctccatagccttc

SEQ ID NO: 3087 - RNA, 20 nt, synthetic construct
  misc_feature 1..20: note = C9Orf72 ATCN PAM targeting sequence
  source 1..20: mol_type = other RNA
agaaaaatgtatatatgcaa

SEQ ID NO: 3088 - RNA, 20 nt, synthetic construct
  misc_feature 1..20: note = C9Orf72 ATCN PAM targeting sequence
  source 1..20: mol_type = other RNA
ttgggatgacatccaaaaat

SEQ ID NO: 3089 - RNA, 20 nt, synthetic construct
  misc_feature 1..20: note = C9Orf72 ATCN PAM targeting sequence
  source 1..20: mol_type = other RNA
caatgataccactaacattt

SEQ ID NO: 3090 - RNA, 20 nt, synthetic construct
  misc_feature 1..20: note = C9Orf72 ATCN PAM targeting sequence
  source 1..20: mol_type = other RNA
aaaaattgtcagggaagtcc

SEQ ID NO: 3091 - RNA, 20 nt, synthetic construct
  misc_feature 1..20: note = C9Orf72 ATCN PAM targeting sequence
  source 1..20: mol_type = other RNA
ccttgcttcagaatttgggg

SEQ ID NO: 3092 - RNA, 20 nt, synthetic construct
  misc_feature 1..20: note = C9Orf72 ATCN PAM targeting sequence
  source 1..20: mol_type = other RNA
gaggtttaaagtttccccaa

SEQ ID NO: 3093 - RNA, 20 nt, synthetic construct
  misc_feature 1..20: note = C9Orf72 ATCN PAM targeting sequence
  source 1..20: mol_type = other RNA
acataccattaatctgaggt

SEQ ID NO: 3094 - RNA, 20 nt, synthetic construct
  misc_feature 1..20: note = C9Orf72 ATCN PAM targeting sequence
  source 1..20: mol_type = other RNA
ttgtatttccagcttccaac

SEQ ID NO: 3095 - RNA, 20 nt, synthetic construct
  misc_feature 1..20: note = C9Orf72 ATCN PAM targeting sequence
  source 1..20: mol_type = other RNA
ttattatgggtttgttttgt

SEQ ID NO: 3096 - RNA, 20 nt, synthetic construct
  misc_feature 1..20: note = C9Orf72 ATCN PAM targeting sequence
  source 1..20: mol_type = other RNA
tgcatcattattatgggttt

SEQ ID NO: 3097 - RNA, 20 nt, synthetic construct
  misc_feature 1..20: note = C9Orf72 ATCN PAM targeting sequence
  source 1..20: mol_type = other RNA
attcaatatatatttaataa

SEQ ID NO: 3098 - RNA, 20 nt, synthetic construct
  misc_feature 1..20: note = C9Orf72 ATCN PAM targeting sequence
  source 1..20: mol_type = other RNA
tgtctatgcaccagcttatt

SEQ ID NO: 3099 - RNA, 20 nt, synthetic construct
  misc_feature 1..20: note = C9Orf72 ATCN PAM targeting sequence
  source 1..20: mol_type = other RNA
ctatcccatggagccttaag

SEQ ID NO: 3100 - RNA, 20 nt, synthetic construct
  misc_feature 1..20: note = C9Orf72 ATCN PAM targeting sequence
  source 1..20: mol_type = other RNA
catggagccttaagtctgga

SEQ ID NO: 3101 - RNA, 20 nt, synthetic construct
  misc_feature 1..20: note = C9Orf72 ATCN PAM targeting sequence
  source 1..20: mol_type = other RNA
tgttcttccaggcccctcct

SEQ ID NO: 3102 - RNA, 20 nt, synthetic construct
  misc_feature 1..20: note = C9Orf72 ATCN PAM targeting sequence
  source 1..20: mol_type = other RNA
taagtaaagttcacccaggt

SEQ ID NO: 3103 - RNA, 20 nt, synthetic construct
  misc_feature 1..20: note = C9Orf72 ATCN PAM targeting sequence
  source 1..20: mol_type = other RNA
gggctctccatgaaggcagg

SEQ ID NO: 3104 - RNA, 20 nt, synthetic construct
  misc_feature 1..20: note = C9Orf72 ATCN PAM targeting sequence
  source 1..20: mol_type = other RNA
gcccccagcacacctctcca

SEQ ID NO: 3105 - RNA, 20 nt, synthetic construct
  misc_feature 1..20: note = C9Orf72 ATCN PAM targeting sequence
  source 1..20: mol_type = other RNA
ccaaggctcctgtgcttcac

SEQ ID NO: 3106 - RNA, 20 nt, synthetic construct
  misc_feature 1..20: note = C9Orf72 ATCN PAM targeting sequence
  source 1..20: mol_type = other RNA
atggtgaagcacaggagcct

SEQ ID NO: 3107 - RNA, 20 nt, synthetic construct
  misc_feature 1..20: note = C9Orf72 ATCN PAM targeting sequence
  source 1..20: mol_type = other RNA
cggctcactgcaagctctgc

SEQ ID NO: 3108 - RNA, 20 nt, synthetic construct
  misc_feature 1..20: note = C9Orf72 ATCN PAM targeting sequence
  source 1..20: mol_type = other RNA
gtactaaaaatacaagaaat

SEQ ID NO: 3109 - RNA, 20 nt, synthetic construct
  misc_feature 1..20: note = C9Orf72 ATCN PAM targeting sequence
  source 1..20: mol_type = other RNA
tgactaacacagtgaaaccc

SEQ ID NO: 3110 - RNA, 20 nt, synthetic construct
  misc_feature 1..20: note = C9Orf72 ATCN PAM targeting sequence
  source 1..20: mol_type = other RNA
cttgacctcgtgatccacct

SEQ ID NO: 3111 - RNA, 20 nt, synthetic construct
  misc_feature 1..20: note = C9Orf72 ATCN PAM targeting sequence
  source 1..20: mol_type = other RNA
cgaggtcaagagattgagac

SEQ ID NO: 3112 - RNA, 20 nt, synthetic construct
  misc_feature 1..20: note = C9Orf72 ATCN PAM targeting sequence
  source 1..20: mol_type = other RNA
acctgcctcggcctcccaaa

SEQ ID NO: 3113 - RNA, 20 nt, synthetic construct
  misc_feature 1..20: note = C9Orf72 ATCN PAM targeting sequence
  source 1..20: mol_type = other RNA
cagcactttgggaggccgag

SEQ ID NO: 3114 - RNA, 20 nt, synthetic construct
  misc_feature 1..20: note = C9Orf72 ATCN PAM targeting sequence
  source 1..20: mol_type = other RNA
ttctaataggaaactcctga

SEQ ID NO: 3115 - RNA, 20 nt, synthetic construct
  misc_feature 1..20: note = C9Orf72 ATCN PAM targeting sequence
  source 1..20: mol_type = other RNA
ctctaccataaatggagaaa

SEQ ID NO: 3116 - RNA, 20 nt, synthetic construct
  misc_feature 1..20: note = C9Orf72 ATCN PAM targeting sequence
  source 1..20: mol_type = other RNA
cctcccctttgcccaatttt

SEQ ID NO: 3117 - RNA, 20 nt, synthetic construct
  misc_feature 1..20: note = C9Orf72 ATCN PAM targeting sequence
  source 1..20: mol_type = other RNA
tggagactagaaggaaggaa

SEQ ID NO: 3118 - RNA, 20 nt, synthetic construct
  misc_feature 1..20: note = C9Orf72 ATCN PAM targeting sequence
  source 1..20: mol_type = other RNA
agacaagaaatgataaggtc

SEQ ID NO: 3119 - RNA, 20 nt, synthetic construct
  misc_feature 1..20: note = C9Orf72 ATCN PAM targeting sequence
  source 1..20: mol_type = other RNA
tttcttgtctagattaattc

SEQ ID NO: 3120 - RNA, 20 nt, synthetic construct
  misc_feature 1..20: note = C9Orf72 ATCN PAM targeting sequence
  source 1..20: mol_type = other RNA
ccactgccactattaggacc

SEQ ID NO: 3121 - RNA, 20 nt, synthetic construct
  misc_feature 1..20: note = C9Orf72 ATCN PAM targeting sequence
  source 1..20: mol_type = other RNA
tccactttactccatctcca

SEQ ID NO: 3122 - RNA, 20 nt, synthetic construct
  misc_feature 1..20: note = C9Orf72 ATCN PAM targeting sequence
  source 1..20: mol_type = other RNA
cattttcccatcgtccactt

SEQ ID NO: 3123 - RNA, 20 nt, synthetic construct
  misc_feature 1..20: note = C9Orf72 ATCN PAM targeting sequence
  source 1..20: mol_type = other RNA
tgttactgacgtggtatcac

SEQ ID NO: 3124 - RNA, 20 nt, synthetic construct
  misc_feature 1..20: note = C9Orf72 ATCN PAM targeting sequence
  source 1..20: mol_type = other RNA
ccgggaatcatggctgtata

SEQ ID NO: 3125 - RNA, 20 nt, synthetic construct
  misc_feature 1..20: note = C9Orf72 ATCN PAM targeting sequence
  source 1..20: mol_type = other RNA
tggctgtataactgtagttt

SEQ ID NO: 3126 - RNA, 20 nt, synthetic construct
  misc_feature 1..20: note = C9Orf72 ATCN PAM targeting sequence
  source 1..20: mol_type = other RNA
aattttggaactctacattt

SEQ ID NO: 3127 - RNA, 20 nt, synthetic construct
  misc_feature 1..20: note = C9Orf72 ATCN PAM targeting sequence
  source 1..20: mol_type = other RNA
ccattaagcaattaaatgta

SEQ ID NO: 3128 - RNA, 20 nt, synthetic construct
  misc_feature 1..20: note = C9Orf72 ATCN PAM targeting sequence
  source 1..20: mol_type = other RNA
tcaccattaagcaattaaat

SEQ ID NO: 3129 - RNA, 20 nt, synthetic construct
  misc_feature 1..20: note = C9Orf72 ATCN PAM targeting sequence
  source 1..20: mol_type = other RNA
tcatcaccattaagcaatta

SEQ ID NO: 3130 - RNA, 20 nt, synthetic construct
  misc_feature 1..20: note = C9Orf72 ATCN PAM targeting sequence
  source 1..20: mol_type = other RNA
gtattattcctgtcataatc

SEQ ID NO: 3131 - RNA, 20 nt, synthetic construct
  misc_feature 1..20: note = C9Orf72 ATCN PAM targeting sequence
  source 1..20: mol_type = other RNA
tcaagtgactctatcgggta

SEQ ID NO: 3132 - RNA, 20 nt, synthetic construct
  misc_feature 1..20: note = C9Orf72 ATCN PAM targeting sequence
  source 1..20: mol_type = other RNA
ggtaggttctattcttactc

SEQ ID NO: 3133 - RNA, 20 nt, synthetic construct
  misc_feature 1..20: note = C9Orf72 ATCN PAM targeting sequence
  source 1..20: mol_type = other RNA
attctttaagagtaagaata

SEQ ID NO: 3134 - RNA, 20 nt, synthetic construct
  misc_feature 1..20: note = C9Orf72 ATCN PAM targeting sequence
  source 1..20: mol_type = other RNA
ttattttctcacttcctagc

SEQ ID NO: 3135 - RNA, 20 nt, synthetic construct
  misc_feature 1..20: note = C9Orf72 ATCN PAM targeting sequence
  source 1..20: mol_type = other RNA
gagccttggaaatctggttc

SEQ ID NO: 3136 - RNA, 20 nt, synthetic construct
  misc_feature 1..20: note = C9Orf72 ATCN PAM targeting sequence
  source 1..20: mol_type = other RNA
ggttctaggacgcaaacttc

SEQ ID NO: 3137 - RNA, 20 nt, synthetic construct
  misc_feature 1..20: note = C9Orf72 ATCN PAM targeting sequence
  source 1..20: mol_type = other RNA
atttacaatgacaaacataa

SEQ ID NO: 3138 - RNA, 20 nt, synthetic construct
  misc_feature 1..20: note = C9Orf72 ATCN PAM targeting sequence
  source 1..20: mol_type = other RNA
caataaaaagtagtgcggag

SEQ ID NO: 3139 - RNA, 20 nt, synthetic construct
  misc_feature 1..20: note = C9Orf72 ATCN PAM targeting sequence
  source 1..20: mol_type = other RNA
taggagtggtacatgaagca

SEQ ID NO: 3140 - RNA, 20 nt, synthetic construct
  misc_feature 1..20: note = C9Orf72 ATCN PAM targeting sequence
  source 1..20: mol_type = other RNA
gcaaaaacactcacacccag

SEQ ID NO: 3141 - RNA, 20 nt, synthetic construct
  misc_feature 1..20: note = C9Orf72 ATCN PAM targeting sequence
  source 1..20: mol_type = other RNA
agtatttagaaagtcattcc

SEQ ID NO: 3142 - RNA, 20 nt, synthetic construct
  misc_feature 1..20: note = C9Orf72 ATCN PAM targeting sequence
  source 1..20: mol_type = other RNA
gatttcttgaatgtccgcgc

SEQ ID NO: 3143 - RNA, 20 nt, synthetic construct
  misc_feature 1..20: note = C9Orf72 ATCN PAM targeting sequence
  source 1..20: mol_type = other RNA
gatccagtatttagaaagtc

SEQ ID NO: 3144 - RNA, 20 nt, synthetic construct
  misc_feature 1..20: note = C9Orf72 ATCN PAM targeting sequence
  source 1..20: mol_type = other RNA
gtggagcgcggacattcaag

SEQ ID NO: 3145 - RNA, 20 nt, synthetic construct
  misc_feature 1..20: note = C9Orf72 ATCN PAM targeting sequence
  source 1..20: mol_type = other RNA
atctgtggagcgcggacatt

SEQ ID NO: 3146 - RNA, 20 nt, synthetic construct
  misc_feature 1..20: note = C9Orf72 ATCN PAM targeting sequence
  source 1..20: mol_type = other RNA
gaccaattaggacaatagta

SEQ ID NO: 3147 - RNA, 20 nt, synthetic construct
  misc_feature 1..20: note = C9Orf72 ATCN PAM targeting sequence
  source 1..20: mol_type = other RNA
agcaattaatttaacaaaaa

SEQ ID NO: 3148 - RNA, 20 nt, synthetic construct
  misc_feature 1..20: note = C9Orf72 ATCN PAM targeting sequence
  source 1..20: mol_type = other RNA
cttgctgaaatgtttttgtt

SEQ ID NO: 3149 - RNA, 20 nt, synthetic construct
  misc_feature 1..20: note = C9Orf72 ATCN PAM targeting sequence
  source 1..20: mol_type = other RNA
catctcttgctgaaatgttt

SEQ ID NO: 3150 - RNA, 20 nt, synthetic construct
  misc_feature 1..20: note = C9Orf72 ATCN PAM targeting sequence
  source 1..20: mol_type = other RNA
tttcaaatttctgtttctgc

SEQ ID NO: 3151 - RNA, 20 nt, synthetic construct
  misc_feature 1..20: note = C9Orf72 ATCN PAM targeting sequence
  source 1..20: mol_type = other RNA
ttttgaagtaatacatttga

SEQ ID NO: 3152 - RNA, 20 nt, synthetic construct
  misc_feature 1..20: note = C9Orf72 ATCN PAM targeting sequence
  source 1..20: mol_type = other RNA
ttgaaactttagagctaggt

SEQ ID NO: 3153 - RNA, 20 nt, synthetic construct
  misc_feature 1..20: note = C9Orf72 ATCN PAM targeting sequence
  source 1..20: mol_type = other RNA
tctgggaaaataagtttttg

SEQ ID NO: 3154 - RNA, 20 nt, synthetic construct
  misc_feature 1..20: note = C9Orf72 ATCN PAM targeting sequence
  source 1..20: mol_type = other RNA
aaaacttattttcccagaag

SEQ ID NO: 3155 - RNA, 20 nt, synthetic construct
  misc_feature 1..20: note = C9Orf72 ATCN PAM targeting sequence
  source 1..20: mol_type = other RNA
aggaaattgctttctttata

SEQ ID NO: 3156 - RNA, 20 nt, synthetic construct
  misc_feature 1..20: note = C9Orf72 ATCN PAM targeting sequence
  source 1..20: mol_type = other RNA
atccagctaacatttactgg

SEQ ID NO: 3157 - RNA, 20 nt, synthetic construct
  misc_feature 1..20: note = C9Orf72 ATCN PAM targeting sequence
  source 1..20: mol_type = other RNA
agctaacatttactggaagc

SEQ ID NO: 3158 - RNA, 20 nt, synthetic construct
  misc_feature 1..20: note = C9Orf72 ATCN PAM targeting sequence
  source 1..20: mol_type = other RNA
tgttctttagcctaggtggg

SEQ ID NO: 3159 - RNA, 20 nt, synthetic construct
  misc_feature 1..20: note = C9Orf72 ATCN PAM targeting sequence
  source 1..20: mol_type = other RNA
ccccacctaggctaaagaac

SEQ ID NO: 3160 - RNA, 20 nt, synthetic construct
  misc_feature 1..20: note = C9Orf72 ATCN PAM targeting sequence
  source 1..20: mol_type = other RNA
atctccccacctaggctaaa

SEQ ID NO: 3161 - RNA, 20 nt, synthetic construct
  misc_feature 1..20: note = C9Orf72 ATCN PAM targeting sequence
  source 1..20: mol_type = other RNA
ttctaacctttcttcccaca

SEQ ID NO: 3162 - RNA, 20 nt, synthetic construct
  misc_feature 1..20: note = C9Orf72 ATCN PAM targeting sequence
  source 1..20: mol_type = other RNA
cttctgcttaatggctctcc

SEQ ID NO: 3163 - RNA, 20 nt, synthetic construct
  misc_feature 1..20: note = C9Orf72 ATCN PAM targeting sequence
  source 1..20: mol_type = other RNA
ttagatttaattttagaagg

SEQ ID NO: 3164 - RNA, 20 nt, synthetic construct
  misc_feature 1..20: note = C9Orf72 ATCN PAM targeting sequence
  source 1..20: mol_type = other RNA
aacgatcacttctgcttaat

SEQ ID NO: 3165 - RNA, 20 nt, synthetic construct
  misc_feature 1..20: note = C9Orf72 ATCN PAM targeting sequence
  source 1..20: mol_type = other RNA
ttctaaaattaaatctaacg

SEQ ID NO: 3166 - RNA, 20 nt, synthetic construct
  misc_feature 1..20: note = C9Orf72 ATCN PAM targeting sequence
  source 1..20: mol_type = other RNA
tgctgttatcaatgtgaaga

SEQ ID NO: 3167 - RNA, 20 nt, synthetic construct
  misc_feature 1..20: note = C9Orf72 ATCN PAM targeting sequence
  source 1..20: mol_type = other RNA
atgtgaagaatgggctgtag

SEQ ID NO: 3168 - RNA, 20 nt, synthetic construct
  misc_feature 1..20: note = C9Orf72 ATCN PAM targeting sequence
  source 1..20: mol_type = other RNA
gcctttggcgtttccccact

SEQ ID NO: 3169 - RNA, 20 nt, synthetic construct
  misc_feature 1..20: note = C9Orf72 ATCN PAM targeting sequence
  source 1..20: mol_type = other RNA
taccacagcactctgatacc

SEQ ID NO: 3170 - RNA, 20 nt, synthetic construct
  misc_feature 1..20: note = C9Orf72 ATCN PAM targeting sequence
  source 1..20: mol_type = other RNA
gagtgctgtggtacgatttt

SEQ ID NO: 3171 - RNA, 20 nt, synthetic construct
  misc_feature 1..20: note = C9Orf72 ATCN PAM targeting sequence
  source 1..20: mol_type = other RNA
atttctcttttccccccaac

SEQ ID NO: 3172 - RNA, 20 nt, synthetic construct
  misc_feature 1..20: note = C9Orf72 ATCN PAM targeting sequence
  source 1..20: mol_type = other RNA
gtgttggggggaaaagagaa

SEQ ID NO: 3173 - RNA, 20 nt, synthetic construct
  misc_feature 1..20: note = C9Orf72 ATCN PAM targeting sequence
  source 1..20: mol_type = other RNA
gggaaaacctcaaaaacttg

SEQ ID NO: 3174 - RNA, 20 nt, synthetic construct
  misc_feature 1..20: note = C9Orf72 ATCN PAM targeting sequence
  source 1..20: mol_type = other RNA
ttttaaatttatcaagattt

SEQ ID NO: 3175 - RNA, 20 nt, synthetic construct
  misc_feature 1..20: note = C9Orf72 ATCN PAM targeting sequence
  source 1..20: mol_type = other RNA
agatttgtttcatggctcaa

SEQ ID NO: 3176 - RNA, 20 nt, synthetic construct
  misc_feature 1..20: note = C9Orf72 ATCN PAM targeting sequence
  source 1..20: mol_type = other RNA
tgataaatttaaaaggattc

SEQ ID NO: 3177 - RNA, 20 nt, synthetic construct
  misc_feature 1..20: note = C9Orf72 ATCN PAM targeting sequence
  source 1..20: mol_type = other RNA
tggtacatgtttcatgtact

SEQ ID NO: 3178 - RNA, 20 nt, synthetic construct
  misc_feature 1..20: note = C9Orf72 ATCN PAM targeting sequence
  source 1..20: mol_type = other RNA
cacattctttccaagagtac

SEQ ID NO: 3179 - RNA, 20 nt, synthetic construct
  misc_feature 1..20: note = C9Orf72 ATCN PAM targeting sequence
  source 1..20: mol_type = other RNA
aacaatttgacttaaatgac

SEQ ID NO: 3180 - RNA, 20 nt, synthetic construct
  misc_feature 1..20: note = C9Orf72 ATCN PAM targeting sequence
  source 1..20: mol_type = other RNA
tctatatccttactgatttt

SEQ ID NO: 3181 - RNA, 20 nt, synthetic construct
  misc_feature 1..20: note = C9Orf72 ATCN PAM targeting sequence
  source 1..20: mol_type = other RNA
ttactgattttgtgtattct

SEQ ID NO: 3182 - RNA, 20 nt, synthetic construct
  misc_feature 1..20: note = C9Orf72 ATCN PAM targeting sequence
  source 1..20: mol_type = other RNA
gtaaggatatagaagattag

SEQ ID NO: 3183 - RNA, 20 nt, synthetic construct
  misc_feature 1..20: note = C9Orf72 ATCN PAM targeting sequence
  source 1..20: mol_type = other RNA
tttcaatgtttagtagaaca

SEQ ID NO: 3184 - RNA, 20 nt, synthetic construct
  misc_feature 1..20: note = C9Orf72 ATCN PAM targeting sequence
  source 1..20: mol_type = other RNA
ccaggctgcgtgcagtggct

SEQ ID NO: 3185 - RNA, 20 nt, synthetic construct
  misc_feature 1..20: note = C9Orf72 ATCN PAM targeting sequence
  source 1..20: mol_type = other RNA
cagcactttgggaggccgag

SEQ ID NO: 3186 - RNA, 20 nt, synthetic construct
  misc_feature 1..20: note = C9Orf72 ATCN PAM targeting sequence
  source 1..20: mol_type = other RNA
gcctgcctcggcctcccaaa

SEQ ID NO: 3187 - RNA, 20 nt, synthetic construct
  misc_feature 1..20: note = C9Orf72 ATCN PAM targeting sequence
  source 1..20: mol_type = other RNA
cgaggtcaggagatcgagac

SEQ ID NO: 3188 - RNA, 20 nt, synthetic construct
  misc_feature 1..20: note = C9Orf72 ATCN PAM targeting sequence
  source 1..20: mol_type = other RNA
cctgacctcgtgatctgcct

SEQ ID NO: 3189 - RNA, 20 nt, synthetic construct
  misc_feature 1..20: note = C9Orf72 ATCN PAM targeting sequence
  source 1..20: mol_type = other RNA
agaccatcctggctaacacg

SEQ ID NO: 3190 - RNA, 20 nt, synthetic construct
  misc_feature 1..20: note = C9Orf72 ATCN PAM targeting sequence
  source 1..20: mol_type = other RNA
tggctaacacggtgaaaccc

SEQ ID NO: 3191 - RNA, 20 nt, synthetic construct
  misc_feature 1..20: note = C9Orf72 ATCN PAM targeting sequence
  source 1..20: mol_type = other RNA
cagctcactgcaagctccgc

SEQ ID NO: 3192 - RNA, 20 nt, synthetic construct
  misc_feature 1..20: note = C9Orf72 ATCN PAM targeting sequence
  source 1..20: mol_type = other RNA
tgccactgcactccagcctg

SEQ ID NO: 3193 - RNA, 20 nt, synthetic construct
  misc_feature 1..20: note = C9Orf72 ATCN PAM targeting sequence
  source 1..20: mol_type = other RNA
ccaaacataattgtggactt

SEQ ID NO: 3194 - RNA, 20 nt, synthetic construct
  misc_feature 1..20: note = C9Orf72 ATCN PAM targeting sequence
  source 1..20: mol_type = other RNA
gtttttgcttcatctatttt

SEQ ID NO: 3195 - RNA, 20 nt, synthetic construct
  misc_feature 1..20: note = C9Orf72 ATCN PAM targeting sequence
  source 1..20: mol_type = other RNA
attttgacacagctatgagg

SEQ ID NO: 3196 - RNA, 20 nt, synthetic construct
  misc_feature 1..20: note = C9Orf72 ATCN PAM targeting sequence
  source 1..20: mol_type = other RNA
ttttgctgaactgactcttt

SEQ ID NO: 3197 - RNA, 20 nt, synthetic construct
  misc_feature 1..20: note = C9Orf72 ATCN PAM targeting sequence
  source 1..20: mol_type = other RNA
ttataaaatgatcattttta

SEQ ID NO: 3198 - RNA, 20 nt, synthetic construct
  misc_feature 1..20: note = C9Orf72 ATCN PAM targeting sequence
  source 1..20: mol_type = other RNA
ttttataatgataaaagagt

SEQ ID NO: 3199 - RNA, 20 nt, synthetic construct
  misc_feature 1..20: note = C9Orf72 ATCN PAM targeting sequence
  source 1..20: mol_type = other RNA
tttttacccctggtaatatt

SEQ ID NO: 3200 - RNA, 20 nt, synthetic construct
  misc_feature 1..20: note = C9Orf72 ATCN PAM targeting sequence
  source 1..20: mol_type = other RNA
attttgtttcatattgtcac

SEQ ID NO: 3201 - RNA, 20 nt, synthetic construct
  misc_feature 1..20: note = C9Orf72 ATCN PAM targeting sequence
  source 1..20: mol_type = other RNA
tattggtaattagaagaaaa

SEQ ID NO: 3202 - RNA, 20 nt, synthetic construct
  misc_feature 1..20: note = C9Orf72 ATCN PAM targeting sequence
  source 1..20: mol_type = other RNA
tttctccatccttttacttt

SEQ ID NO: 3203 - RNA, 20 nt, synthetic construct
  misc_feature 1..20: note = C9Orf72 ATCN PAM targeting sequence
  source 1..20: mol_type = other RNA
ttttacttttaatctgtttg

SEQ ID NO: 3204 - RNA, 20 nt, synthetic construct
  misc_feature 1..20: note = C9Orf72 ATCN PAM targeting sequence
  source 1..20: mol_type = other RNA
gtttgttcgtcctttatttt

SEQ ID NO: 3205 - RNA, 20 nt, synthetic construct
  misc_feature 1..20: note = C9Orf72 ATCN PAM targeting sequence
  source 1..20: mol_type = other RNA
gatctgaaaatctgattttt

SEQ ID NO: 3206 - RNA, 20 nt, synthetic construct
  misc_feature 1..20: note = C9Orf72 ATCN PAM targeting sequence
  source 1..20: mol_type = other RNA
gataaaaaagcaagacccaa

SEQ ID NO: 3207 - RNA, 20 nt, synthetic construct
  misc_feature 1..20: note = C9Orf72 ATCN PAM targeting sequence
  source 1..20: mol_type = other RNA
gaaaatctgattttttaagg

SEQ ID NO: 3208 - RNA, 20 nt, synthetic construct
  misc_feature 1..20: note = C9Orf72 ATCN PAM targeting sequence
  source 1..20: mol_type = other RNA
gattttttaaggacatttct

SEQ ID NO: 3209 - RNA, 20 nt, synthetic construct
  misc_feature 1..20: note = C9Orf72 ATCN PAM targeting sequence
  source 1..20: mol_type = other RNA
gattttcagatcagataaaa

SEQ ID NO: 3210 - RNA, 20 nt, synthetic construct
  misc_feature 1..20: note = C9Orf72 ATCN PAM targeting sequence
  source 1..20: mol_type = other RNA
tattgtatgctataaatata

SEQ ID NO: 3211 - RNA, 20 nt, synthetic construct
  misc_feature 1..20: note = C9Orf72 ATCN PAM targeting sequence
  source 1..20: mol_type = other RNA
tttaagtgttctctctacaa

SEQ ID NO: 3212 - RNA, 20 nt, synthetic construct
  misc_feature 1..20: note = C9Orf72 ATCN PAM targeting sequence
  source 1..20: mol_type = other RNA
attgtacaatgtgactataa

SEQ ID NO: 3213 - RNA, 20 nt, synthetic construct
  misc_feature 1..20: note = C9Orf72 ATCN PAM targeting sequence
  source 1..20: mol_type = other RNA
cttgatctttagcttattcc

SEQ ID NO: 3214 - RNA, 20 nt, synthetic construct
  misc_feature 1..20: note = C9Orf72 ATCN PAM targeting sequence
  source 1..20: mol_type = other RNA
agagatctattgtacaatgt

SEQ ID NO: 3215 - RNA, 20 nt, synthetic construct
  misc_feature 1..20: note = C9Orf72 ATCN PAM targeting sequence
  source 1..20: mol_type = other RNA
ttagcttattcctcctatct

SEQ ID NO: 3216 - RNA, 20 nt, synthetic construct
  misc_feature 1..20: note = C9Orf72 ATCN PAM targeting sequence
  source 1..20: mol_type = other RNA
aactgaataagttgtacaat

SEQ ID NO: 3217 - RNA, 20 nt, synthetic construct
  misc_feature 1..20: note = C9Orf72 ATCN PAM targeting sequence
  source 1..20: mol_type = other RNA
attgtacaacttattcagtt

SEQ ID NO: 3218 - RNA, 20 nt, synthetic construct
  misc_feature 1..20: note = C9Orf72 ATCN PAM targeting sequence
  source 1..20: mol_type = other RNA
cttgaacttattcctcctgt

SEQ ID NO: 3219 - RNA, 20 nt, synthetic construct
  misc_feature 1..20: note = C9Orf72 ATCN PAM targeting sequence
  source 1..20: mol_type = other RNA
ccccagcccaccgcctctcc

SEQ ID NO: 3220 - RNA, 20 nt, synthetic construct
  misc_feature 1..20: note = C9Orf72 ATCN PAM targeting sequence
  source 1..20: mol_type = other RNA
cacttacacacagaattgaa

SEQ ID NO: 3221 - RNA, 20 nt, synthetic construct
  misc_feature 1..20: note = C9Orf72 ATCN PAM targeting sequence
  source 1..20: mol_type = other RNA
tgtggtattaacaatctctg

SEQ ID NO: 3222 - RNA, 20 nt, synthetic construct
  misc_feature 1..20: note = C9Orf72 ATCN PAM targeting sequence
  source 1..20: mol_type = other RNA
ctgacttttaattggggtgt

SEQ ID NO: 3223 - RNA, 20 nt, synthetic construct
  misc_feature 1..20: note = C9Orf72 ATCN PAM targeting sequence
  source 1..20: mol_type = other RNA
ttaaaagataattgactgta

SEQ ID NO: 3224 - RNA, 20 nt, synthetic construct
  misc_feature 1..20: note = C9Orf72 ATCN PAM targeting sequence
  source 1..20: mol_type = other RNA
tttaaagatatttaaatata

SEQ ID NO: 3225 - RNA, 20 nt, synthetic construct
  misc_feature 1..20: note = C9Orf72 ATCN PAM targeting sequence
  source 1..20: mol_type = other RNA
aagagtatagttaataagac

SEQ ID NO: 3226 - RNA, 20 nt, synthetic construct
  misc_feature 1..20: note = C9Orf72 ATCN PAM targeting sequence
  source 1..20: mol_type = other RNA
aaaagtaaggagaaaacaaa

SEQ ID NO: 3227 - RNA, 20 nt, synthetic construct
  misc_feature 1..20: note = C9Orf72 ATCN PAM targeting sequence
  source 1..20: mol_type = other RNA
tgctgttttctatttgttct

SEQ ID NO: 3228 - RNA, 20 nt, synthetic construct
  misc_feature 1..20: note = C9Orf72 ATCN PAM targeting sequence
  source 1..20: mol_type = other RNA
tattaaatgttctaaatgcc

SEQ ID NO: 3229 - RNA, 20 nt, synthetic construct
  misc_feature 1..20: note = C9Orf72 ATCN PAM targeting sequence
  source 1..20: mol_type = other RNA
ccagcttgtaattggggcat

SEQ ID NO: 3230 - RNA, 20 nt, synthetic construct
  misc_feature 1..20: note = C9Orf72 ATCN PAM targeting sequence
  source 1..20: mol_type = other RNA
gacaatctccagcttgtaat

SEQ ID NO: 3231 - RNA, 20 nt, synthetic construct
  misc_feature 1..20: note = C9Orf72 ATCN PAM targeting sequence
  source 1..20: mol_type = other RNA
aatctgacaatctccagctt

SEQ ID NO: 3232 - RNA, 20 nt, synthetic construct
  misc_feature 1..20: note = C9Orf72 ATCN PAM targeting sequence
  source 1..20: mol_type = other RNA
ttagttcagtacctgactag

SEQ ID NO: 3233 - RNA, 20 nt, synthetic construct
  misc_feature 1..20: note = C9Orf72 ATCN PAM targeting sequence
  source 1..20: mol_type = other RNA
tataaggtctcattaaatcc

SEQ ID NO: 3234 - RNA, 20 nt, synthetic construct
  misc_feature 1..20: note = C9Orf72 ATCN PAM targeting sequence
  source 1..20: mol_type = other RNA
tctggtgaagtacgtattat

SEQ ID NO: 3235 - RNA, 20 nt, synthetic construct
  misc_feature 1..20: note = C9Orf72 ATCN PAM targeting sequence
  source 1..20: mol_type = other RNA
ctccatttccaatatttaca

SEQ ID NO: 3236 - RNA, 20 nt, synthetic construct
  misc_feature 1..20: note = C9Orf72 ATCN PAM targeting sequence
  source 1..20: mol_type = other RNA
ctgctgtgctgcttggagaa

SEQ ID NO: 3237 - RNA, 20 nt, synthetic construct
  misc_feature 1..20: note = C9Orf72 ATCN PAM targeting sequence
  source 1..20: mol_type = other RNA
cagacagttacagtcattgc

SEQ ID NO: 3238 - RNA, 20 nt, synthetic construct
  misc_feature 1..20: note = C9Orf72 ATCN PAM targeting sequence
  source 1..20: mol_type = other RNA
acctttaccagctgtgtgac

SEQ ID NO: 3239 - RNA, 20 nt, synthetic construct
  misc_feature 1..20: note = C9Orf72 ATCN PAM targeting sequence
  source 1..20: mol_type = other RNA
ttaagctttagtttcctcat

SEQ ID NO: 3240 - RNA, 20 nt, synthetic construct
  misc_feature 1..20: note = C9Orf72 ATCN PAM targeting sequence
  source 1..20: mol_type = other RNA
gcagggtatagcttaaagta

SEQ ID NO: 3241 - RNA, 20 nt, synthetic construct
  misc_feature 1..20: note = C9Orf72 ATCN PAM targeting sequence
  source 1..20: mol_type = other RNA
taggagaaatatcaatttgt

SEQ ID NO: 3242 - RNA, 20 nt, synthetic construct
  misc_feature 1..20: note = C9Orf72 ATCN PAM targeting sequence
  source 1..20: mol_type = other RNA
atttgtgcaattctacatca

SEQ ID NO: 3243 - RNA, 20 nt, synthetic construct
  misc_feature 1..20: note = C9Orf72 ATCN PAM targeting sequence
  source 1..20: mol_type = other RNA
aaatcaaaatagtattatat

SEQ ID NO: 3244 - RNA, 20 nt, synthetic construct
  misc_feature 1..20: note = C9Orf72 ATCN PAM targeting sequence
  source 1..20: mol_type = other RNA
aaatagtattatataagagt

SEQ ID NO: 3245 - RNA, 20 nt, synthetic construct
  misc_feature 1..20: note = C9Orf72 ATCN PAM targeting sequence
  source 1..20: mol_type = other RNA
ctcttatataatactatttt

SEQ ID NO: 3246 - RNA, 20 nt, synthetic construct
  misc_feature 1..20: note = C9Orf72 ATCN PAM targeting sequence
  source 1..20: mol_type = other RNA
gtttaaactgtagcattata

SEQ ID NO: 3247 - RNA, 20 nt, synthetic construct
  misc_feature 1..20: note = C9Orf72 ATCN PAM targeting sequence
  source 1..20: mol_type = other RNA
tagtaatgtgatcagttagt

SEQ ID NO: 3248 - RNA, 20 nt, synthetic construct
  misc_feature 1..20: note = C9Orf72 ATCN PAM targeting sequence
  source 1..20: mol_type = other RNA
cattactatgattctcaaag

SEQ ID NO: 3249 - RNA, 20 nt, synthetic construct
  misc_feature 1..20: note = C9Orf72 ATCN PAM targeting sequence
  source 1..20: mol_type = other RNA
gttagtcttcttttaaagaa

SEQ ID NO: 3250 - RNA, 20 nt, synthetic construct
  misc_feature 1..20: note = C9Orf72 ATCN PAM targeting sequence
  source 1..20: mol_type = other RNA
caactattctattttcaaaa

SEQ ID NO: 3251 - RNA, 20 nt, synthetic construct
  misc_feature 1..20: note = C9Orf72 ATCN PAM targeting sequence
  source 1..20: mol_type = other RNA
gcaaagctaggaataggttt

SEQ ID NO: 3252 - RNA, 20 nt, synthetic construct
  misc_feature 1..20: note = C9Orf72 ATCN PAM targeting sequence
  source 1..20: mol_type = other RNA
gaacactttcatctgcaaag

SEQ ID NO: 3253 - RNA, 20 nt, synthetic construct
  misc_feature 1..20: note = C9Orf72 ATCN PAM targeting sequence
  source 1..20: mol_type = other RNA
aaggaatctgaacactttca

SEQ ID NO: 3254 - RNA, 20 nt, synthetic construct
  misc_feature 1..20: note = C9Orf72 ATCN PAM targeting sequence
  source 1..20: mol_type = other RNA
aaagtaaaaatccaaggaat

SEQ ID NO: 3255 - RNA, 20 nt, synthetic construct
  misc_feature 1..20: note = C9Orf72 ATCN PAM targeting sequence
  source 1..20: mol_type = other RNA
aatacatgtatccaaagtaa

SEQ ID NO: 3256 - RNA, 20 nt, synthetic construct
  misc_feature 1..20: note = C9Orf72 ATCN PAM targeting sequence
  source 1..20: mol_type = other RNA
caggtatctaatacatgtat

SEQ ID NO: 3257 - RNA, 20 nt, synthetic construct
  misc_feature 1..20: note = C9Orf72 ATCN PAM targeting sequence
  source 1..20: mol_type = other RNA
aaatagtattttacatttga

SEQ ID NO: 3258 - RNA, 20 nt, synthetic construct
  misc_feature 1..20: note = C9Orf72 ATCN PAM targeting sequence
  source 1..20: mol_type = other RNA
aaatgaaatccagagagtta

SEQ ID NO: 3259 - RNA, 20 nt, synthetic construct
  misc_feature 1..20: note = C9Orf72 ATCN PAM targeting sequence
  source 1..20: mol_type = other RNA
agagagttaagcagaaagtt

SEQ ID NO: 3260 - RNA, 20 nt, synthetic construct
  misc_feature 1..20: note = C9Orf72 ATCN PAM targeting sequence
  source 1..20: mol_type = other RNA
tatgttaaaaaaactttctg

SEQ ID NO: 3261 - RNA, 20 nt, synthetic construct
  misc_feature 1..20: note = C9Orf72 ATCN PAM targeting sequence
  source 1..20: mol_type = other RNA
aaactttttttaaaattaat

SEQ ID NO: 3262 - RNA, 20 nt, synthetic construct
  misc_feature 1..20: note = C9Orf72 ATCN PAM targeting sequence
  source 1..20: mol_type = other RNA
agcatgactgtcagctgaac

SEQ ID NO: 3263 - RNA, 20 nt, synthetic construct
  misc_feature 1..20: note = C9Orf72 ATCN PAM targeting sequence
  source 1..20: mol_type = other RNA
gcttctgttcagctgacagt

SEQ ID NO: 3264 - RNA, 20 nt, synthetic construct
  misc_feature 1..20: note = C9Orf72 ATCN PAM targeting sequence
  source 1..20: mol_type = other RNA
gtcttcaaatatcatagtat

SEQ ID NO: 3265 - RNA, 20 nt, synthetic construct
  misc_feature 1..20: note = C9Orf72 ATCN PAM targeting sequence
  source 1..20: mol_type = other RNA
tagtatttttttctgaatga

SEQ ID NO: 3266 - RNA, 20 nt, synthetic construct
  misc_feature 1..20: note = C9Orf72 ATCN PAM targeting sequence
  source 1..20: mol_type = other RNA
tttctcctaaatggagaatt

SEQ ID NO: 3267 - RNA, 20 nt, synthetic construct
  misc_feature 1..20: note = C9Orf72 ATCN PAM targeting sequence
  source 1..20: mol_type = other RNA
accatgtaaaaaacacagta

SEQ ID NO: 3268 - RNA, 20 nt, synthetic construct
  misc_feature 1..20: note = C9Orf72 ATCN PAM targeting sequence
  source 1..20: mol_type = other RNA
agttcagtggttgtctaaaa

SEQ ID NO: 3269 - RNA, 20 nt, synthetic construct
  misc_feature 1..20: note = C9Orf72 ATCN PAM targeting sequence
  source 1..20: mol_type = other RNA
agctgtccacatctttctga

SEQ ID NO: 3270 - RNA, 20 nt, synthetic construct
  misc_feature 1..20: note = C9Orf72 ATCN PAM targeting sequence
  source 1..20: mol_type = other RNA
ttctgattcatgatgggaaa

SEQ ID NO: 3271 - RNA, 20 nt, synthetic construct
  misc_feature 1..20: note = C9Orf72 ATCN PAM targeting sequence
  source 1..20: mol_type = other RNA
gaaagatgtggacagcttga

SEQ ID NO: 3272 - RNA, 20 nt, synthetic construct
  misc_feature 1..20: note = C9Orf72 ATCN PAM targeting sequence
  source 1..20: mol_type = other RNA
tgaatcagaaagatgtggac

SEQ ID NO: 3273 - RNA, 20 nt, synthetic construct
  misc_feature 1..20: note = C9Orf72 ATCN PAM targeting sequence
  source 1..20: mol_type = other RNA
ctttcttataaatatatttt

SEQ ID NO: 3274 - RNA, 20 nt, synthetic construct
  misc_feature 1..20: note = C9Orf72 ATCN PAM targeting sequence
  source 1..20: mol_type = other RNA
gttattttatagccagcaaa

SEQ ID NO: 3275 - RNA, 20 nt, synthetic construct
  misc_feature 1..20: note = C9Orf72 ATCN PAM targeting sequence
  source 1..20: mol_type = other RNA
tttgttttcttaatgcgttt

SEQ ID NO: 3276 - RNA, 20 nt, synthetic construct
  misc_feature 1..20: note = C9Orf72 ATCN PAM targeting sequence
  source 1..20: mol_type = other RNA
ttttttcagaaacagaaaat

SEQ ID NO: 3277 - RNA, 20 nt, synthetic construct
  misc_feature 1..20: note = C9Orf72 ATCN PAM targeting sequence
  source 1..20: mol_type = other RNA
tattagttagtatattctct

SEQ ID NO: 3278 - RNA, 20 nt, synthetic construct
  misc_feature 1..20: note = C9Orf72 ATCN PAM targeting sequence
  source 1..20: mol_type = other RNA
cagagttgcaatgattgcca

SEQ ID NO: 3279 - RNA, 20 nt, synthetic construct
  misc_feature 1..20: note = C9Orf72 ATCN PAM targeting sequence
  source 1..20: mol_type = other RNA
ttgcaactctgagattataa

SEQ ID NO: 3280 - RNA, 20 nt, synthetic construct
  misc_feature 1..20: note = C9Orf72 ATCN PAM targeting sequence
  source 1..20: mol_type = other RNA
tgttttcttcttgctaagtc

SEQ ID NO: 3281 - RNA, 20 nt, synthetic construct
  misc_feature 1..20: note = C9Orf72 ATCN PAM targeting sequence
  source 1..20: mol_type = other RNA
gaacttgttccaagtaatta

SEQ ID NO: 3282 - RNA, 20 nt, synthetic construct
  misc_feature 1..20: note = C9Orf72 ATCN PAM targeting sequence
  source 1..20: mol_type = other RNA
aattacttggaacaagttca

SEQ ID NO: 3283 - RNA, 20 nt, synthetic construct
  misc_feature 1..20: note = C9Orf72 ATCN PAM targeting sequence
  source 1..20: mol_type = other RNA
acaatagcaagaacaataaa

SEQ ID NO: 3284 - RNA, 20 nt, synthetic construct
  misc_feature 1..20: note = C9Orf72 ATCN PAM targeting sequence
  source 1..20: mol_type = other RNA
cagggactaaatccacaaag

SEQ ID NO: 3285 - RNA, 20 nt, synthetic construct
  misc_feature 1..20: note = C9Orf72 ATCN PAM targeting sequence
  source 1..20: mol_type = other RNA
acaaagtaggatctaataat

SEQ ID NO: 3286 - RNA, 20 nt, synthetic construct
  misc_feature 1..20: note = C9Orf72 ATCN PAM targeting sequence
  source 1..20: mol_type = other RNA
tactttgtggatttagtccc

SEQ ID NO: 3287 - RNA, 20 nt, synthetic construct
  misc_feature 1..20: note = C9Orf72 ATCN PAM targeting sequence
  source 1..20: mol_type = other RNA
aataatcaattccaattaaa

SEQ ID NO: 3288 - RNA, 20 nt, synthetic construct
  misc_feature 1..20: note = C9Orf72 ATCN PAM targeting sequence
  source 1..20: mol_type = other RNA
attccaattaaacatctgct

SEQ ID NO: 3289 - RNA, 20 nt, synthetic construct
  misc_feature 1..20: note = C9Orf72 ATCN PAM targeting sequence
  source 1..20: mol_type = other RNA
gcttgatcaattttctttct

SEQ ID NO: 3290 - RNA, 20 nt, synthetic construct
  misc_feature 1..20: note = C9Orf72 ATCN PAM targeting sequence
  source 1..20: mol_type = other RNA
agcagatgtttaattggaat

SEQ ID NO: 3291 - RNA, 20 nt, synthetic construct
  misc_feature 1..20: note = C9Orf72 ATCN PAM targeting sequence
  source 1..20: mol_type = other RNA
attttctttctaaagctcat

SEQ ID NO: 3292 - RNA, 20 nt, synthetic construct
  misc_feature 1..20: note = C9Orf72 ATCN PAM targeting sequence
  source 1..20: mol_type = other RNA
tatgttcaagctcactttct

SEQ ID NO: 3293 - RNA, 20 nt, synthetic construct
  misc_feature 1..20: note = C9Orf72 ATCN PAM targeting sequence
  source 1..20: mol_type = other RNA
tttaaaggctctagttttca

SEQ ID NO: 3294 - RNA, 20 nt, synthetic construct
  misc_feature 1..20: note = C9Orf72 ATCN PAM targeting sequence
  source 1..20: mol_type = other RNA
actgaaaactagagccttta

SEQ ID NO: 3295 - RNA, 20 nt, synthetic construct
  misc_feature 1..20: note = C9Orf72 ATCN PAM targeting sequence
  source 1..20: mol_type = other RNA
tttggcattctttggtgtgt

SEQ ID NO: 3296 - RNA, 20 nt, synthetic construct
  misc_feature 1..20: note = C9Orf72 ATCN PAM targeting sequence
  source 1..20: mol_type = other RNA
gtaaaagccaactcagattt

SEQ ID NO: 3297 - RNA, 20 nt, synthetic construct
  misc_feature 1..20: note = C9Orf72 ATCN PAM targeting sequence
  source 1..20: mol_type = other RNA
gagttggcttttacagatag

SEQ ID NO: 3298 - RNA, 20 nt, synthetic construct
  misc_feature 1..20: note = C9Orf72 ATCN PAM targeting sequence
  source 1..20: mol_type = other RNA
tgtatttcaaaaaaacagta

SEQ ID NO: 3299 - RNA, 20 nt, synthetic construct
  misc_feature 1..20: note = C9Orf72 ATCN PAM targeting sequence
  source 1..20: mol_type = other RNA
tattattatatctttaaaag

SEQ ID NO: 3300 - RNA, 20 nt, synthetic construct
  misc_feature 1..20: note = C9Orf72 ATCN PAM targeting sequence
  source 1..20: mol_type = other RNA
ttaaaagatagcaataatat

SEQ ID NO: 3301 - RNA, 20 nt, synthetic construct
  misc_feature 1..20: note = C9Orf72 ATCN PAM targeting sequence
  source 1..20: mol_type = other RNA
tttaaagatataataatagg

SEQ ID NO: 3302 - RNA, 20 nt, synthetic construct
  misc_feature 1..20: note = C9Orf72 ATCN PAM targeting sequence
  source 1..20: mol_type = other RNA
caaaagcataaatctaggaa

SEQ ID NO: 3303 - RNA, 20 nt, synthetic construct
  misc_feature 1..20: note = C9Orf72 ATCN PAM targeting sequence
  source 1..20: mol_type = other RNA
aggaaaagagacacccaatg

SEQ ID NO: 3304 - RNA, 20 nt, synthetic construct
  misc_feature 1..20: note = C9Orf72 ATCN PAM targeting sequence
  source 1..20: mol_type = other RNA
ttacattgggtgtctctttt

SEQ ID NO: 3305 - RNA, 20 nt, synthetic construct
  misc_feature 1..20: note = C9Orf72 ATCN PAM targeting sequence
  source 1..20: mol_type = other RNA
cctcacaggctcttgtgaga

SEQ ID NO: 3306 - RNA, 20 nt, synthetic construct
  misc_feature 1..20: note = C9Orf72 ATCN PAM targeting sequence
  source 1..20: mol_type = other RNA
tactccagaattctgctctc

SEQ ID NO: 3307 - RNA, 20 nt, synthetic construct
  misc_feature 1..20: note = C9Orf72 ATCN PAM targeting sequence
  source 1..20: mol_type = other RNA
aggggaacgtttccccacac

SEQ ID NO: 3308 - RNA, 20 nt, synthetic construct
  misc_feature 1..20: note = C9Orf72 ATCN PAM targeting sequence
  source 1..20: mol_type = other RNA
ctggtaaagtagctcagtgg

SEQ ID NO: 3309 - RNA, 20 nt, synthetic construct
  misc_feature 1..20: note = C9Orf72 ATCN PAM targeting sequence
  source 1..20: mol_type = other RNA
tgattgtgatggaataggct

SEQ ID NO: 3310 - RNA, 20 nt, synthetic construct
  misc_feature 1..20: note = C9Orf72 ATCN PAM targeting sequence
  source 1..20: mol_type = other RNA
tgatcgctggtaaagtagct

SEQ ID NO: 3311 - RNA, 20 nt, synthetic construct
  misc_feature 1..20: note = C9Orf72 ATCN PAM targeting sequence
  source 1..20: mol_type = other RNA
caatcatgatcgctggtaaa

SEQ ID NO: 3312 - RNA, 20 nt, synthetic construct
  misc_feature 1..20: note = C9Orf72 ATCN PAM targeting sequence
  source 1..20: mol_type = other RNA
cgttcttgcacactagtgta

SEQ ID NO: 3313 - RNA, 20 nt, synthetic construct
  misc_feature 1..20: note = C9Orf72 ATCN PAM targeting sequence
  source 1..20: mol_type = other RNA
ttggaagacctttctacact

SEQ ID NO: 3314 - RNA, 20 nt, synthetic construct
  misc_feature 1..20: note = C9Orf72 ATCN PAM targeting sequence
  source 1..20: mol_type = other RNA
taacataataatggctctgg

SEQ ID NO: 3315 - RNA, 20 nt, synthetic construct
  misc_feature 1..20: note = C9Orf72 ATCN PAM targeting sequence
  source 1..20: mol_type = other RNA
ccctctgctgttaaatcaag

SEQ ID NO: 3316 - RNA, 20 nt, synthetic construct
  misc_feature 1..20: note = C9Orf72 ATCN PAM targeting sequence
  source 1..20: mol_type = other RNA
aggtctatcttcaggttccg

SEQ ID NO: 3317 - RNA, 20 nt, synthetic construct
  misc_feature 1..20: note = C9Orf72 ATCN PAM targeting sequence
  source 1..20: mol_type = other RNA
tcaggttccgaagagattta

SEQ ID NO: 3318 - RNA, 20 nt, synthetic construct
  misc_feature 1..20: note = C9Orf72 ATCN PAM targeting sequence
  source 1..20: mol_type = other RNA
cttcggaacctgaagataga

SEQ ID NO: 3319 - RNA, 20 nt, synthetic construct
  misc_feature 1..20: note = C9Orf72 ATCN PAM targeting sequence
  source 1..20: mol_type = other RNA
taatttttgcgcttcttttt

SEQ ID NO: 3320 - RNA, 20 nt, synthetic construct
  misc_feature 1..20: note = C9Orf72 ATCN PAM targeting sequence
  source 1..20: mol_type = other RNA
tcttctatatattttattag

SEQ ID NO: 3321 - RNA, 20 nt, synthetic construct
  misc_feature 1..20: note = C9Orf72 ATCN PAM targeting sequence
  source 1..20: mol_type = other RNA
ctcagaagtactttccttgc

SEQ ID NO: 3322 - RNA, 20 nt, synthetic construct
  misc_feature 1..20: note = C9Orf72 ATCN PAM targeting sequence
  source 1..20: mol_type = other RNA
ccttaaccatttccactgat

SEQ ID NO: 3323 - RNA, 20 nt, synthetic construct
  misc_feature 1..20: note = C9Orf72 ATCN PAM targeting sequence
  source 1..20: mol_type = other RNA
gtggaaatggttaaggagat

SEQ ID NO: 3324 - RNA, 20 nt, synthetic construct
  misc_feature 1..20: note = C9Orf72 ATCN PAM targeting sequence
  source 1..20: mol_type = other RNA
gatatttttttttttttttg

SEQ ID NO: 3325 - RNA, 20 nt, synthetic construct
  misc_feature 1..20: note = C9Orf72 ATCN PAM targeting sequence
  source 1..20: mol_type = other RNA
gattgttcctacacctagtg

SEQ ID NO: 3326 - RNA, 20 nt, synthetic construct
  misc_feature 1..20: note = C9Orf72 ATCN PAM targeting sequence
  source 1..20: mol_type = other RNA
cgccactgcactttagcctg

SEQ ID NO: 3327 - RNA, 20 nt, synthetic construct
  misc_feature 1..20: note = C9Orf72 ATCN PAM targeting sequence
  source 1..20: mol_type = other RNA
tgactcactgcaacctacac

SEQ ID NO: 3328 - RNA, 20 nt, synthetic construct
  misc_feature 1..20: note = C9Orf72 ATCN PAM targeting sequence
  source 1..20: mol_type = other RNA
cttgaacccaggaggtgtag

SEQ ID NO: 3329 - RNA, 20 nt, synthetic construct
  misc_feature 1..20: note = C9Orf72 ATCN PAM targeting sequence
  source 1..20: mol_type = other RNA
cagctacctgggaggctgag

SEQ ID NO: 3330 - RNA, 20 nt, synthetic construct
  misc_feature 1..20: note = C9Orf72 ATCN PAM targeting sequence
  source 1..20: mol_type = other RNA
tgccaacatggtgaaacccc

SEQ ID NO: 3331 - RNA, 20 nt, synthetic construct
  misc_feature 1..20: note = C9Orf72 ATCN PAM targeting sequence
  source 1..20: mol_type = other RNA
agaccatcctgccaacatgg

SEQ ID NO: 3332 - RNA, 20 nt, synthetic construct
  misc_feature 1..20: note = C9Orf72 ATCN PAM targeting sequence
  source 1..20: mol_type = other RNA
cctgaccttgtgatccaccc

SEQ ID NO: 3333 - RNA, 20 nt, synthetic construct
  misc_feature 1..20: note = C9Orf72 ATCN PAM targeting sequence
  source 1..20: mol_type = other RNA
caaggtcaggagatcgagac

SEQ ID NO: 3334 - RNA, 20 nt, synthetic construct
  misc_feature 1..20: note = C9Orf72 ATCN PAM targeting sequence
  source 1..20: mol_type = other RNA
acccacctcggactcccaaa

SEQ ID NO: 3335 - RNA, 20 nt, synthetic construct
  misc_feature 1..20: note = C9Orf72 ATCN PAM targeting sequence
  source 1..20: mol_type = other RNA
cagcactttgggagtccgag

SEQ ID NO: 3336 - RNA, 20 nt, synthetic construct
  misc_feature 1..20: note = C9Orf72 ATCN PAM targeting sequence
  source 1..20: mol_type = other RNA
gacagtttttagaagttttc

SEQ ID NO: 3337 - RNA, 20 nt, synthetic construct
  misc_feature 1..20: note = C9Orf72 ATCN PAM targeting sequence
  source 1..20: mol_type = other RNA
ttaaaaatgcattcaaattt

SEQ ID NO: 3338 - RNA, 20 nt, synthetic construct
  misc_feature 1..20: note = C9Orf72 ATCN PAM targeting sequence
  source 1..20: mol_type = other RNA
atgtttacttcacttttaaa

SEQ ID NO: 3339 - RNA, 20 nt, synthetic construct
  misc_feature 1..20: note = C9Orf72 ATCN PAM targeting sequence
  source 1..20: mol_type = other RNA
tcaaataacattgaagctcc

SEQ ID NO: 3340 - RNA, 20 nt, synthetic construct
  misc_feature 1..20: note = C9Orf72 ATCN PAM targeting sequence
  source 1..20: mol_type = other RNA
tctaggagcttcaatgttat

SEQ ID NO: 3341 - RNA, 20 nt, synthetic construct
  misc_feature 1..20: note = C9Orf72 ATCN PAM targeting sequence
  source 1..20: mol_type = other RNA
tatgcacacattctactcct

SEQ ID NO: 3342 - RNA, 20 nt, synthetic construct
  misc_feature 1..20: note = C9Orf72 ATCN PAM targeting sequence
  source 1..20: mol_type = other RNA
ctcccactctccacctcatc

SEQ ID NO: 3343 - RNA, 20 nt, synthetic construct
  misc_feature 1..20: note = C9Orf72 ATCN PAM targeting sequence
  source 1..20: mol_type = other RNA
atgaggtctgtgacatattg

SEQ ID NO: 3344 - RNA, 20 nt, synthetic construct
  misc_feature 1..20: note = C9Orf72 ATCN PAM targeting sequence
  source 1..20: mol_type = other RNA
caatccaaaatttctagtaa

SEQ ID NO: 3345 - RNA, 20 nt, synthetic construct
  misc_feature 1..20: note = C9Orf72 ATCN PAM targeting sequence
  source 1..20: mol_type = other RNA
aaaatttctagtaaacataa

SEQ ID NO: 3346 - RNA, 20 nt, synthetic construct
  misc_feature 1..20: note = C9Orf72 ATCN PAM targeting sequence
  source 1..20: mol_type = other RNA
ttatgtttactagaaatttt

SEQ ID NO: 3347 - RNA, 20 nt, synthetic construct
  misc_feature 1..20: note = C9Orf72 ATCN PAM targeting sequence
  source 1..20: mol_type = other RNA
cattatttcaaagctttatc

SEQ ID NO: 3348 - RNA, 20 nt, synthetic construct
  misc_feature 1..20: note = C9Orf72 ATCN PAM targeting sequence
  source 1..20: mol_type = other RNA
atgacacagtttcctggcct

SEQ ID NO: 3349 - RNA, 20 nt, synthetic construct
  misc_feature 1..20: note = C9Orf72 ATCN PAM targeting sequence
  source 1..20: mol_type = other RNA
ggccaggaaactgtgtcata

SEQ ID NO: 3350 - RNA, 20 nt, synthetic construct
  misc_feature 1..20: note = C9Orf72 ATCN PAM targeting sequence
  source 1..20: mol_type = other RNA
ccagaatgttattataacaa

SEQ ID NO: 3351 - RNA, 20 nt, synthetic construct
  misc_feature 1..20: note = C9Orf72 ATCN PAM targeting sequence
  source 1..20: mol_type = other RNA
acgatttccttcaactgtgt

SEQ ID NO: 3352 - RNA, 20 nt, synthetic construct
  misc_feature 1..20: note = C9Orf72 ATCN PAM targeting sequence
  source 1..20: mol_type = other RNA
tagattatatggaacttatt

SEQ ID NO: 3353 - RNA, 20 nt, synthetic construct
  misc_feature 1..20: note = C9Orf72 ATCN PAM targeting sequence
  source 1..20: mol_type = other RNA
acttaattacacagttgaag

SEQ ID NO: 3354 - RNA, 20 nt, synthetic construct
  misc_feature 1..20: note = C9Orf72 ATCN PAM targeting sequence
  source 1..20: mol_type = other RNA
ttattgtttcattcttttaa

SEQ ID NO: 3355 - RNA, 20 nt, synthetic construct
  misc_feature 1..20: note = C9Orf72 ATCN PAM targeting sequence
  source 1..20: mol_type = other RNA
tttagacactttagaaagac

SEQ ID NO: 3356 - RNA, 20 nt, synthetic construct
  misc_feature 1..20: note = C9Orf72 ATCN PAM targeting sequence
  source 1..20: mol_type = other RNA
gttttattaggtgctttttg

SEQ ID NO: 3357 - RNA, 20 nt, synthetic construct
  misc_feature 1..20: note = C9Orf72 ATCN PAM targeting sequence
  source 1..20: mol_type = other RNA
ttttataaatgttaaaatat

SEQ ID NO: 3358 - RNA, 20 nt, synthetic construct
  misc_feature 1..20: note = C9Orf72 ATCN PAM targeting sequence
  source 1..20: mol_type = other RNA
tagagtatatgttatatatt

SEQ ID NO: 3359 - RNA, 20 nt, synthetic construct
  misc_feature 1..20: note = C9Orf72 ATCN PAM targeting sequence
  source 1..20: mol_type = other RNA
tatataacatatactctaca

SEQ ID NO: 3360 - RNA, 20 nt, synthetic construct
  misc_feature 1..20: note = C9Orf72 ATCN PAM targeting sequence
  source 1..20: mol_type = other RNA
tacaatgctggtaatatgta

SEQ ID NO: 3361 - RNA, 20 nt, synthetic construct
  misc_feature 1..20: note = C9Orf72 ATCN PAM targeting sequence
  source 1..20: mol_type = other RNA
tgcaatgcttgtactatata

SEQ ID NO: 3362 - RNA, 20 nt, synthetic construct
  misc_feature 1..20: note = C9Orf72 ATCN PAM targeting sequence
  source 1..20: mol_type = other RNA
gtaaaagctaagtcagattt

SEQ ID NO: 3363 - RNA, 20 nt, synthetic construct
  misc_feature 1..20: note = C9Orf72 ATCN PAM targeting sequence
  source 1..20: mol_type = other RNA
gacttagcttttacagatat

SEQ ID NO: 3364 - RNA, 20 nt, synthetic construct
  misc_feature 1..20: note = C9Orf72 ATCN PAM targeting sequence
  source 1..20: mol_type = other RNA
aagtgaaatctgacttagct

SEQ ID NO: 3365 - RNA, 20 nt, synthetic construct
  misc_feature 1..20: note = C9Orf72 ATCN PAM targeting sequence
  source 1..20: mol_type = other RNA
tattattatatctttaaaag

SEQ ID NO: 3366 - RNA, 20 nt, synthetic construct
  misc_feature 1..20: note = C9Orf72 ATCN PAM targeting sequence
  source 1..20: mol_type = other RNA
ttaaaagatagcaataatat

SEQ ID NO: 3367 - RNA, 20 nt, synthetic construct
  misc_feature 1..20: note = C9Orf72 ATCN PAM targeting sequence
  source 1..20: mol_type = other RNA
tttaaagatataataataag

SEQ ID NO: 3368 - RNA, 20 nt, synthetic construct
  misc_feature 1..20: note = C9Orf72 ATCN PAM targeting sequence
  source 1..20: mol_type = other RNA
aggacaagaggcaaccaatg

SEQ ID NO: 3369 - RNA, 20 nt, synthetic construct
  misc_feature 1..20: note = C9Orf72 ATCN PAM targeting sequence
  source 1..20: mol_type = other RNA
ttacattggttgcctcttgt

SEQ ID NO: 3370 - RNA, 20 nt, synthetic construct
  misc_feature 1..20: note = C9Orf72 ATCN PAM targeting sequence
  source 1..20: mol_type = other RNA
tgccccagagttctgctcag

SEQ ID NO: 3371 - RNA, 20 nt, synthetic construct
  misc_feature 1..20: note = C9Orf72 ATCN PAM targeting sequence
  source 1..20: mol_type = other RNA
aggggaatataaatatatag

SEQ ID NO: 3372 - RNA, 20 nt, synthetic construct
  misc_feature 1..20: note = C9Orf72 ATCN PAM targeting sequence
  source 1..20: mol_type = other RNA
tacaatgcctgttctatata

SEQ ID NO: 3373 - RNA, 20 nt, synthetic construct
  misc_feature 1..20: note = C9Orf72 ATCN PAM targeting sequence
  source 1..20: mol_type = other RNA
ttcactctgacaatctcaag

SEQ ID NO: 3374 - RNA, 20 nt, synthetic construct
  misc_feature 1..20: note = C9Orf72 ATCN PAM targeting sequence
  source 1..20: mol_type = other RNA
caagttcaacatttacctga

SEQ ID NO: 3375 - RNA, 20 nt, synthetic construct
  misc_feature 1..20: note = C9Orf72 ATCN PAM targeting sequence
  source 1..20: mol_type = other RNA
ggtaaatgttgaacttgaga

SEQ ID NO: 3376 - RNA, 20 nt, synthetic construct
  misc_feature 1..20: note = C9Orf72 ATCN PAM targeting sequence
  source 1..20: mol_type = other RNA
aggaaggctttcactagagt

SEQ ID NO: 3377 - RNA, 20 nt, synthetic construct
  misc_feature 1..20: note = C9Orf72 ATCN PAM targeting sequence
  source 1..20: mol_type = other RNA
tgaaaaatattcctgaagaa

SEQ ID NO: 3378 - RNA, 20 nt, synthetic construct
  misc_feature 1..20: note = C9Orf72 ATCN PAM targeting sequence
  source 1..20: mol_type = other RNA
ctcacttgagccaacatttt

SEQ ID NO: 3379 - RNA, 20 nt, synthetic construct
  misc_feature 1..20: note = C9Orf72 ATCN PAM targeting sequence
  source 1..20: mol_type = other RNA
atttataagaacttaaaatg

SEQ ID NO: 3380 - RNA, 20 nt, synthetic construct
  misc_feature 1..20: note = C9Orf72 ATCN PAM targeting sequence
  source 1..20: mol_type = other RNA
atattcttacaaatgtgttt

SEQ ID NO: 3381 - RNA, 20 nt, synthetic construct
  misc_feature 1..20: note = C9Orf72 ATCN PAM targeting sequence
  source 1..20: mol_type = other RNA
ttgagtaaataaatgaatgt

SEQ ID NO: 3382 - RNA, 20 nt, synthetic construct
  misc_feature 1..20: note = C9Orf72 ATCN PAM targeting sequence
  source 1..20: mol_type = other RNA
atcaatctattttactactc

SEQ ID NO: 3383 - RNA, 20 nt, synthetic construct
  misc_feature 1..20: note = C9Orf72 ATCN PAM targeting sequence
  source 1..20: mol_type = other RNA
atctattttactactctcat

SEQ ID NO: 3384 - RNA, 20 nt, synthetic construct
  misc_feature 1..20: note = C9Orf72 ATCN PAM targeting sequence
  source 1..20: mol_type = other RNA
attttactactctcatcttt

SEQ ID NO: 3385 - RNA, 20 nt, synthetic construct
  misc_feature 1..20: note = C9Orf72 ATCN PAM targeting sequence
  source 1..20: mol_type = other RNA
tttaaaaaaagtagagaccc

SEQ ID NO: 3386 - RNA, 20 nt, synthetic construct
  misc_feature 1..20: note = C9Orf72 ATCN PAM targeting sequence
  source 1..20: mol_type = other RNA
caaaaaaaaacaaaaaacaa

SEQ ID NO: 3387 - RNA, 20 nt, synthetic construct
  misc_feature 1..20: note = C9Orf72 ATCN PAM targeting sequence
  source 1..20: mol_type = other RNA
aaaaccaaaacaaaccaaaa

SEQ ID NO: 3388 - RNA, 20 nt, synthetic construct
  misc_feature 1..20: note = C9Orf72 ATCN PAM targeting sequence
  source 1..20: mol_type = other RNA
cactcaaatttttcttcaca

SEQ ID NO: 3389 - RNA, 20 nt, synthetic construct
  misc_feature 1..20: note = C9Orf72 ATCN PAM targeting sequence
  source 1..20: mol_type = other RNA
gagtgtgttctctaatctca

SEQ ID NO: 3390 - RNA, 20 nt, synthetic construct
  misc_feature 1..20: note = C9Orf72 ATCN PAM targeting sequence
  source 1..20: mol_type = other RNA
tcggagtgtgttctctaatc

SEQ ID NO: 3391 - RNA, 20 nt, synthetic construct
  misc_feature 1..20: note = C9Orf72 ATCN PAM targeting sequence
  source 1..20: mol_type = other RNA
actgggtttgcctcaacaag

SEQ ID NO: 3392 - RNA, 20 nt, synthetic construct
  misc_feature 1..20: note = C9Orf72 ATCN PAM targeting sequence
  source 1..20: mol_type = other RNA
gtaagtaacatgaaccaact

SEQ ID NO: 3393 - RNA, 20 nt, synthetic construct
  misc_feature 1..20: note = C9Orf72 ATCN PAM targeting sequence
  source 1..20: mol_type = other RNA
aagaaagtactacctacctt

SEQ ID NO: 3394 - RNA, 20 nt, synthetic construct
  misc_feature 1..20: note = C9Orf72 ATCN PAM targeting sequence
  source 1..20: mol_type = other RNA
taggtgctgtgttaggcaca

SEQ ID NO: 3395 - RNA, 20 nt, synthetic construct
  misc_feature 1..20: note = C9Orf72 ATCN PAM targeting sequence
  source 1..20: mol_type = other RNA
ttttctcttccattttccct

SEQ ID NO: 3396 - RNA, 20 nt, synthetic construct
  misc_feature 1..20: note = C9Orf72 ATCN PAM targeting sequence
  source 1..20: mol_type = other RNA
ctaccactttcagttaaaaa

SEQ ID NO: 3397 - RNA, 20 nt, synthetic construct
  misc_feature 1..20: note = C9Orf72 ATCN PAM targeting sequence
  source 1..20: mol_type = other RNA
tcctatacctgaccagagtg

SEQ ID NO: 3398 - RNA, 20 nt, synthetic construct
  misc_feature 1..20: note = C9Orf72 ATCN PAM targeting sequence
  source 1..20: mol_type = other RNA
tatacctgaccagagtggca

SEQ ID NO: 3399 - RNA, 20 nt, synthetic construct
  misc_feature 1..20: note = C9Orf72 ATCN PAM targeting sequence
  source 1..20: mol_type = other RNA
taagaaacgagtgtaccaca

SEQ ID NO: 3400 - RNA, 20 nt, synthetic construct
  misc_feature 1..20: note = C9Orf72 ATCN PAM targeting sequence
  source 1..20: mol_type = other RNA
gtgcccagtcaataatgacg

SEQ ID NO: 3401 - RNA, 20 nt, synthetic construct
  misc_feature 1..20: note = C9Orf72 ATCN PAM targeting sequence
  source 1..20: mol_type = other RNA
agtggacttattatacctgt

SEQ ID NO: 3402 - RNA, 20 nt, synthetic construct
  misc_feature 1..20: note = C9Orf72 ATCN PAM targeting sequence
  source 1..20: mol_type = other RNA
tcatcataagtgaattagat

SEQ ID NO: 3403 - RNA, 20 nt, synthetic construct
  misc_feature 1..20: note = C9Orf72 ATCN PAM targeting sequence
  source 1..20: mol_type = other RNA
taagtgaattagataaagca

SEQ ID NO: 3404 - RNA, 20 nt, synthetic construct
  misc_feature 1..20: note = C9Orf72 ATCN PAM targeting sequence
  source 1..20: mol_type = other RNA
aattcacttatgatgaagat

SEQ ID NO: 3405 - RNA, 20 nt, synthetic construct
  misc_feature 1..20: note = C9Orf72 ATCN PAM targeting sequence
  source 1..20: mol_type = other RNA
ctgatttctttcagcagtgt

SEQ ID NO: 3406 - RNA, 20 nt, synthetic construct
  misc_feature 1..20: note = C9Orf72 ATCN PAM targeting sequence
  source 1..20: mol_type = other RNA
gagatgacacaaacaaatgg

SEQ ID NO: 3407 - RNA, 20 nt, synthetic construct
  misc_feature 1..20: note = C9Orf72 ATCN PAM targeting sequence
  source 1..20: mol_type = other RNA
ctatgagaattacaaaacac

SEQ ID NO: 3408 - RNA, 20 nt, synthetic construct
  misc_feature 1..20: note = C9Orf72 ATCN PAM targeting sequence
  source 1..20: mol_type = other RNA
ttcacctccctggttagctg

SEQ ID NO: 3409 - RNA, 20 nt, synthetic construct
  misc_feature 1..20: note = C9Orf72 ATCN PAM targeting sequence
  source 1..20: mol_type = other RNA
agctaaccagggaggtgaaa

SEQ ID NO: 3410 - RNA, 20 nt, synthetic construct
  misc_feature 1..20: note = C9Orf72 ATCN PAM targeting sequence
  source 1..20: mol_type = other RNA
agaacacagtcccattcaca

SEQ ID NO: 3411 - RNA, 20 nt, synthetic construct
  misc_feature 1..20: note = C9Orf72 ATCN PAM targeting sequence
  source 1..20: mol_type = other RNA
gttaaaaatttcagcaaagt

SEQ ID NO: 3412 - RNA, 20 nt, synthetic construct
  misc_feature 1..20: note = C9Orf72 ATCN PAM targeting sequence
  source 1..20: mol_type = other RNA
catagtctctgcccagaaac

SEQ ID NO: 3413 - RNA, 20 nt, synthetic construct
  misc_feature 1..20: note = C9Orf72 ATCN PAM targeting sequence
  source 1..20: mol_type = other RNA
gaatgtctttctttctttct

SEQ ID NO: 3414 - RNA, 20 nt, synthetic construct
  misc_feature 1..20: note = C9Orf72 ATCN PAM targeting sequence
  source 1..20: mol_type = other RNA
ggaaagagaaagaaagaaag

SEQ ID NO: 3415 - RNA, 20 nt, synthetic construct
  misc_feature 1..20: note = C9Orf72 ATCN PAM targeting sequence
  source 1..20: mol_type = other RNA
ttgtcttgttacggttctca

SEQ ID NO: 3416 - RNA, 20 nt, synthetic construct
  misc_feature 1..20: note = C9Orf72 ATCN PAM targeting sequence
  source 1..20: mol_type = other RNA
taccaaatgggcaaaagctg

SEQ ID NO: 3417 - RNA, 20 nt, synthetic construct
  misc_feature 1..20: note = C9Orf72 ATCN PAM targeting sequence
  source 1..20: mol_type = other RNA
atgacagacccatagccaat

SEQ ID NO: 3418 - RNA, 20 nt, synthetic construct
  misc_feature 1..20: note = C9Orf72 ATCN PAM targeting sequence
  source 1..20: mol_type = other RNA
taaacaaactaggcattgaa

SEQ ID NO: 3419 - RNA, 20 nt, synthetic construct
  misc_feature 1..20: note = C9Orf72 ATCN PAM targeting sequence
  source 1..20: mol_type = other RNA
caaacaatcctaaacaaact

SEQ ID NO: 3420 - RNA, 20 nt, synthetic construct
  misc_feature 1..20: note = C9Orf72 ATCN PAM targeting sequence
  source 1..20: mol_type = other RNA
tgccaccgcactccagcctg

SEQ ID NO: 3421 - RNA, 20 nt, synthetic construct
  misc_feature 1..20: note = C9Orf72 ATCN PAM targeting sequence
  source 1..20: mol_type = other RNA
cagctcgctgccaacctctg

SEQ ID NO: 3422 - RNA, 20 nt, synthetic construct
  misc_feature 1..20: note = C9Orf72 ATCN PAM targeting sequence
  source 1..20: mol_type = other RNA
tcccacctcaacctcctgaa

SEQ ID NO: 3423 - RNA, 20 nt, synthetic construct
  misc_feature 1..20: note = C9Orf72 ATCN PAM targeting sequence
  source 1..20: mol_type = other RNA
ctacaaaaaaaaaaaaaaaa

SEQ ID NO: 3424 - RNA, 20 nt, synthetic construct
  misc_feature 1..20: note = C9Orf72 ATCN PAM targeting sequence
  source 1..20: mol_type = other RNA
cttaagcccaggagttcaag

SEQ ID NO: 3425 - RNA, 20 nt, synthetic construct
  misc_feature 1..20: note = C9Orf72 ATCN PAM targeting sequence
  source 1..20: mol_type = other RNA
cagcactttgggaggccaag

SEQ ID NO: 3426 - RNA, 20 nt, synthetic construct
  misc_feature 1..20: note = C9Orf72 ATCN PAM targeting sequence
  source 1..20: mol_type = other RNA
tccatgttaaaaaccttcag

SEQ ID NO: 3427 - RNA, 20 nt, synthetic construct
  misc_feature 1..20: note = C9Orf72 ATCN PAM targeting sequence
  source 1..20: mol_type = other RNA
caataggtagagaaaaggtt

SEQ ID NO: 3428 - RNA, 20 nt, synthetic construct
  misc_feature 1..20: note = C9Orf72 ATCN PAM targeting sequence
  source 1..20: mol_type = other RNA
tgtggtttttgtttttagct

SEQ ID NO: 3429 - RNA, 20 nt, synthetic construct
  misc_feature 1..20: note = C9Orf72 ATCN PAM targeting sequence
  source 1..20: mol_type = other RNA
cataaacagagctaaaaaca

SEQ ID NO: 3430 - RNA, 20 nt, synthetic construct
  misc_feature 1..20: note = C9Orf72 ATCN PAM targeting sequence
  source 1..20: mol_type = other RNA
cacttattgatttgtgtatg

SEQ ID NO: 3431 - RNA, 20 nt, synthetic construct
  misc_feature 1..20: note = C9Orf72 ATCN PAM targeting sequence
  source 1..20: mol_type = other RNA
ataagtgtgattcatcacat

SEQ ID NO: 3432 - RNA, 20 nt, synthetic construct
  misc_feature 1..20: note = C9Orf72 ATCN PAM targeting sequence
  source 1..20: mol_type = other RNA
cagggataaagcctacttga

SEQ ID NO: 3433 - RNA, 20 nt, synthetic construct
  misc_feature 1..20: note = C9Orf72 ATCN PAM targeting sequence
  source 1..20: mol_type = other RNA
ctgggatgcaaggttggttc

SEQ ID NO: 3434 - RNA, 20 nt, synthetic construct
  misc_feature 1..20: note = C9Orf72 ATCN PAM targeting sequence
  source 1..20: mol_type = other RNA
agtaggctttatccctggga

SEQ ID NO: 3435 - RNA, 20 nt, synthetic construct
  misc_feature 1..20: note = C9Orf72 ATCN PAM targeting sequence
  source 1..20: mol_type = other RNA
aagtagatcagctttttgat

SEQ ID NO: 3436 - RNA, 20 nt, synthetic construct
  misc_feature 1..20: note = C9Orf72 ATCN PAM targeting sequence
  source 1..20: mol_type = other RNA
actttgatcaagtaggcttt

SEQ ID NO: 3437 - RNA, 20 nt, synthetic construct
  misc_feature 1..20: note = C9Orf72 ATCN PAM targeting sequence
  source 1..20: mol_type = other RNA
gctttttgatgtgctgctgg

SEQ ID NO: 3438 - RNA, 20 nt, synthetic construct
  misc_feature 1..20: note = C9Orf72 ATCN PAM targeting sequence
  source 1..20: mol_type = other RNA
aaaagctgatctactttgat

SEQ ID NO: 3439 - RNA, 20 nt, synthetic construct
  misc_feature 1..20: note = C9Orf72 ATCN PAM targeting sequence
  source 1..20: mol_type = other RNA
agcagcacatcaaaaagctg

SEQ ID NO: 3440 - RNA, 20 nt, synthetic construct
  misc_feature 1..20: note = C9Orf72 ATCN PAM targeting sequence
  source 1..20: mol_type = other RNA
tcaacaaaatactagcaaac

SEQ ID NO: 3441 - RNA, 20 nt, synthetic construct
  misc_feature 1..20: note = C9Orf72 ATCN PAM targeting sequence
  source 1..20: mol_type = other RNA
atattcatcaaggatattgg

SEQ ID NO: 3442 - RNA, 20 nt, synthetic construct
  misc_feature 1..20: note = C9Orf72 ATCN PAM targeting sequence
  source 1..20: mol_type = other RNA
aggatattggcctgaagttt

SEQ ID NO: 3443 - RNA, 20 nt, synthetic construct
  misc_feature 1..20: note = C9Orf72 ATCN PAM targeting sequence
  source 1..20: mol_type = other RNA
ttgatgaatatagatgcaaa

SEQ ID NO: 3444 - RNA, 20 nt, synthetic construct
  misc_feature 1..20: note = C9Orf72 ATCN PAM targeting sequence
  source 1..20: mol_type = other RNA
gaatgatgctggcctcatta

SEQ ID NO: 3445 - RNA, 20 nt, synthetic construct
  misc_feature 1..20: note = C9Orf72 ATCN PAM targeting sequence
  source 1..20: mol_type = other RNA
ttctgataccaaaacctggc

SEQ ID NO: 3446 - RNA, 20 nt, synthetic construct
  misc_feature 1..20: note = C9Orf72 ATCN PAM targeting sequence
  source 1..20: mol_type = other RNA
gttccaaaaaattgaggagg

SEQ ID NO: 3447 - RNA, 20 nt, synthetic construct
  misc_feature 1..20: note = C9Orf72 ATCN PAM targeting sequence
  source 1..20: mol_type = other RNA
ggtataaagagatgacacaa

SEQ ID NO: 3448 - RNA, 20 nt, synthetic construct
  misc_feature 1..20: note = C9Orf72 ATCN PAM targeting sequence
  source 1..20: mol_type = other RNA
ctttatacctgatgtataaa

SEQ ID NO: 3449 - RNA, 20 nt, synthetic construct
  misc_feature 1..20: note = C9Orf72 ATCN PAM targeting sequence
  source 1..20: mol_type = other RNA
atgaatatggaatgtttttc

SEQ ID NO: 3450 - RNA, 20 nt, synthetic construct
  misc_feature 1..20: note = C9Orf72 ATCN PAM targeting sequence
  source 1..20: mol_type = other RNA
acagattcaatgctattcct

SEQ ID NO: 3451 - RNA, 20 nt, synthetic construct
  misc_feature 1..20: note = C9Orf72 ATCN PAM targeting sequence
  source 1..20: mol_type = other RNA
gtagattgctttgggcagta

SEQ ID NO: 3452 - RNA, 20 nt, synthetic construct
  misc_feature 1..20: note = C9Orf72 ATCN PAM targeting sequence
  source 1..20: mol_type = other RNA
ttggtagtttataggaatag

SEQ ID NO: 3453 - RNA, 20 nt, synthetic construct
  misc_feature 1..20: note = C9Orf72 ATCN PAM targeting sequence
  source 1..20: mol_type = other RNA
ttcacaaaaccagaaaaaac

SEQ ID NO: 3454 - RNA, 20 nt, synthetic construct
  misc_feature 1..20: note = C9Orf72 ATCN PAM targeting sequence
  source 1..20: mol_type = other RNA
taagcaaaaagaacaaagct

SEQ ID NO: 3455 - RNA, 20 nt, synthetic construct
  misc_feature 1..20: note = C9Orf72 ATCN PAM targeting sequence
  source 1..20: mol_type = other RNA
cattagccgattttatacta

SEQ ID NO: 3456 - RNA, 20 nt, synthetic construct
  misc_feature 1..20: note = C9Orf72 ATCN PAM targeting sequence
  source 1..20: mol_type = other RNA
gctaatgtgatgcctccagc

SEQ ID NO: 3457 - RNA, 20 nt, synthetic construct
  misc_feature 1..20: note = C9Orf72 ATCN PAM targeting sequence
  source 1..20: mol_type = other RNA
gatcttcaacaaagttgaca

SEQ ID NO: 3458 - RNA, 20 nt, synthetic construct
  misc_feature 1..20: note = C9Orf72 ATCN PAM targeting sequence
  source 1..20: mol_type = other RNA
gatggttgtaagtgtgtggc

SEQ ID NO: 3459 - RNA, 20 nt, synthetic construct
  misc_feature 1..20: note = C9Orf72 ATCN PAM targeting sequence
  source 1..20: mol_type = other RNA
tcaacaaagttgacaaaaaa

SEQ ID NO: 3460 - RNA, 20 nt, synthetic construct
  misc_feature 1..20: note = C9Orf72 ATCN PAM targeting sequence
  source 1..20: mol_type = other RNA
cagcaccatttattgaatac

SEQ ID NO: 3461 - RNA, 20 nt, synthetic construct
  misc_feature 1..20: note = C9Orf72 ATCN PAM targeting sequence
  source 1..20: mol_type = other RNA
actcaagatggattaaagac

SEQ ID NO: 3462 - RNA, 20 nt, synthetic construct
  misc_feature 1..20: note = C9Orf72 ATCN PAM targeting sequence
  source 1..20: mol_type = other RNA
tgagttgatttttgtatatg

SEQ ID NO: 3463 - RNA, 20 nt, synthetic construct
  misc_feature 1..20: note = C9Orf72 ATCN PAM targeting sequence
  source 1..20: mol_type = other RNA
atcttgagttgatttttgta

SEQ ID NO: 3464 - RNA, 20 nt, synthetic construct
  misc_feature 1..20: note = C9Orf72 ATCN PAM targeting sequence
  source 1..20: mol_type = other RNA
aaaattgtaaaaaccctgga

SEQ ID NO: 3465 - RNA, 20 nt, synthetic construct
  misc_feature 1..20: note = C9Orf72 ATCN PAM targeting sequence
  source 1..20: mol_type = other RNA
gtgccagggcctatgtccag

SEQ ID NO: 3466 - RNA, 20 nt, synthetic construct
  misc_feature 1..20: note = C9Orf72 ATCN PAM targeting sequence
  source 1..20: mol_type = other RNA
taaaatctgtgccagggcct

SEQ ID NO: 3467 - RNA, 20 nt, synthetic construct
  misc_feature 1..20: note = C9Orf72 ATCN PAM targeting sequence
  source 1..20: mol_type = other RNA
acagagtaaaagacaaccta

SEQ ID NO: 3468 - RNA, 20 nt, synthetic construct
  misc_feature 1..20: note = C9Orf72 ATCN PAM targeting sequence
  source 1..20: mol_type = other RNA
gcaaaccatgtatccaacaa

SEQ ID NO: 3469 - RNA, 20 nt, synthetic construct
  misc_feature 1..20: note = C9Orf72 ATCN PAM targeting sequence
  source 1..20: mol_type = other RNA
aacaaagggatatgcagaat

SEQ ID NO: 3470 - RNA, 20 nt, synthetic construct
  misc_feature 1..20: note = C9Orf72 ATCN PAM targeting sequence
  source 1..20: mol_type = other RNA
ctttgttggatacatggttt

SEQ ID NO: 3471 - RNA, 20 nt, synthetic construct
  misc_feature 1..20: note = C9Orf72 ATCN PAM targeting sequence
  source 1..20: mol_type = other RNA
ggaaggaacttaaaactaat

SEQ ID NO: 3472 - RNA, 20 nt, synthetic construct
  misc_feature 1..20: note = C9Orf72 ATCN PAM targeting sequence
  source 1..20: mol_type = other RNA
ctaatagagaattgcaaatc

SEQ ID NO: 3473 - RNA, 20 nt, synthetic construct
  misc_feature 1..20: note = C9Orf72 ATCN PAM targeting sequence
  source 1..20: mol_type = other RNA
attctctaggaatggctatt

SEQ ID NO: 3474 - RNA, 20 nt, synthetic construct
  misc_feature 1..20: note = C9Orf72 ATCN PAM targeting sequence
  source 1..20: mol_type = other RNA
cagatgttggcaaggttgtg

SEQ ID NO: 3475 - RNA, 20 nt, synthetic construct
  misc_feature 1..20: note = C9Orf72 ATCN PAM targeting sequence
  source 1..20: mol_type = other RNA
gtgattttttgactttttaa

SEQ ID NO: 3476 - RNA, 20 nt, synthetic construct
  misc_feature 1..20: note = C9Orf72 ATCN PAM targeting sequence
  source 1..20: mol_type = other RNA
tcaaactgcttttcataata

SEQ ID NO: 3477 - RNA, 20 nt, synthetic construct
  misc_feature 1..20: note = C9Orf72 ATCN PAM targeting sequence
  source 1..20: mol_type = other RNA
cagcactattcatgataaca

SEQ ID NO: 3478 - RNA, 20 nt, synthetic construct
  misc_feature 1..20: note = C9Orf72 ATCN PAM targeting sequence
  source 1..20: mol_type = other RNA
tgaatagtgctgtgatgaac

SEQ ID NO: 3479 - RNA, 20 nt, synthetic construct
  misc_feature 1..20: note = C9Orf72 ATCN PAM targeting sequence
  source 1..20: mol_type = other RNA
acctaaatgcctatcaatgg

SEQ ID NO: 3480 - RNA, 20 nt, synthetic construct
  misc_feature 1..20: note = C9Orf72 ATCN PAM targeting sequence
  source 1..20: mol_type = other RNA
atggtagactggataaagaa

SEQ ID NO: 3481 - RNA, 20 nt, synthetic construct
  misc_feature 1..20: note = C9Orf72 ATCN PAM targeting sequence
  source 1..20: mol_type = other RNA
agtctaccattgataggcat

SEQ ID NO: 3482 - RNA, 20 nt, synthetic construct
  misc_feature 1..20: note = C9Orf72 ATCN PAM targeting sequence
  source 1..20: mol_type = other RNA
cattttctttatccagtcta

SEQ ID NO: 3483 - RNA, 20 nt, synthetic construct
  misc_feature 1..20: note = C9Orf72 ATCN PAM targeting sequence
  source 1..20: mol_type = other RNA
ggtttttatggctgcatagt

SEQ ID NO: 3484 - RNA, 20 nt, synthetic construct
  misc_feature 1..20: note = C9Orf72 ATCN PAM targeting sequence
  source 1..20: mol_type = other RNA
taagtgaactaatccaggaa

SEQ ID NO: 3485 - RNA, 20 nt, synthetic construct
  misc_feature 1..20: note = C9Orf72 ATCN PAM targeting sequence
  source 1..20: mol_type = other RNA
aggaacagaaaaccaactac

SEQ ID NO: 3486 - RNA, 20 nt, synthetic construct
  misc_feature 1..20: note = C9Orf72 ATCN PAM targeting sequence
  source 1..20: mol_type = other RNA
tcacccttctcccaccctca

SEQ ID NO: 3487 - RNA, 20 nt, synthetic construct
  misc_feature 1..20: note = C9Orf72 ATCN PAM targeting sequence
  source 1..20: mol_type = other RNA
aaaaactacctattgggtac

SEQ ID NO: 3488 - RNA, 20 nt, synthetic construct
  misc_feature 1..20: note = C9Orf72 ATCN PAM targeting sequence
  source 1..20: mol_type = other RNA
cctgtacaccaaaccctcat

SEQ ID NO: 3489 - RNA, 20 nt, synthetic construct
  misc_feature 1..20: note = C9Orf72 ATCN PAM targeting sequence
  source 1..20: mol_type = other RNA
agtggctgaaaatactattt

SEQ ID NO: 3490 - RNA, 20 nt, synthetic construct
  misc_feature 1..20: note = C9Orf72 ATCN PAM targeting sequence
  source 1..20: mol_type = other RNA
agctctaaattttctaaaca

SEQ ID NO: 3491 - RNA, 20 nt, synthetic construct
  misc_feature 1..20: note = C9Orf72 ATCN PAM targeting sequence
  source 1..20: mol_type = other RNA
tgaatttttaaattttgcat

SEQ ID NO: 3492 - RNA, 20 nt, synthetic construct
  misc_feature 1..20: note = C9Orf72 ATCN PAM targeting sequence
  source 1..20: mol_type = other RNA
tgacaaaataatatcctgaa

SEQ ID NO: 3493 - RNA, 20 nt, synthetic construct
  misc_feature 1..20: note = C9Orf72 ATCN PAM targeting sequence
  source 1..20: mol_type = other RNA
gcaaaatgagaatagctgtc

SEQ ID NO: 3494 - RNA, 20 nt, synthetic construct
  misc_feature 1..20: note = C9Orf72 ATCN PAM targeting sequence
  source 1..20: mol_type = other RNA
gcaaaacaaacatagctggc

SEQ ID NO: 3495 - RNA, 20 nt, synthetic construct
  misc_feature 1..20: note = C9Orf72 ATCN PAM targeting sequence
  source 1..20: mol_type = other RNA
tttttagccagctatgtttg

SEQ ID NO: 3496 - RNA, 20 nt, synthetic construct
  misc_feature 1..20: note = C9Orf72 ATCN PAM targeting sequence
  source 1..20: mol_type = other RNA
tctaaaaaacaaaacaaaaa

SEQ ID NO: 3497 - RNA, 20 nt, synthetic construct
  misc_feature 1..20: note = C9Orf72 ATCN PAM targeting sequence
  source 1..20: mol_type = other RNA
aaaaacggaaaaaatactaa

SEQ ID NO: 3498 - RNA, 20 nt, synthetic construct
  misc_feature 1..20: note = C9Orf72 ATCN PAM targeting sequence
  source 1..20: mol_type = other RNA
gtgccttgaaacattttctt

SEQ ID NO: 3499 - RNA, 20 nt, synthetic construct
  misc_feature 1..20: note = C9Orf72 ATCN PAM targeting sequence
  source 1..20: mol_type = other RNA
ttctgcaccttgagatgtat

SEQ ID NO: 3500 - RNA, 20 nt, synthetic construct
  misc_feature 1..20: note = C9Orf72 ATCN PAM targeting sequence
  source 1..20: mol_type = other RNA
caaggtgcagaaagatgact

SEQ ID NO: 3501 - RNA, 20 nt, synthetic construct
  misc_feature 1..20: note = C9Orf72 ATCN PAM targeting sequence
  source 1..20: mol_type = other RNA
tgttcaagggacccccagcc

SEQ ID NO: 3502 - RNA, 20 nt, synthetic construct
  misc_feature 1..20: note = C9Orf72 ATCN PAM targeting sequence
  source 1..20: mol_type = other RNA
gtttgagcttaggtaacaga

SEQ ID NO: 3503 - RNA, 20 nt, synthetic construct
  misc_feature 1..20: note = C9Orf72 ATCN PAM targeting sequence
  source 1..20: mol_type = other RNA
acagaatcagtttgagctta

SEQ ID NO: 3504 - RNA, 20 nt, synthetic construct
  misc_feature 1..20: note = C9Orf72 ATCN PAM targeting sequence
  source 1..20: mol_type = other RNA
taactccctgtaacctcaaa

SEQ ID NO: 3505 - RNA, 20 nt, synthetic construct
  misc_feature 1..20: note = C9Orf72 ATCN PAM targeting sequence
  source 1..20: mol_type = other RNA
tttgagcccaggagtttgag

SEQ ID NO: 3506 - RNA, 20 nt, synthetic construct
  misc_feature 1..20: note = C9Orf72 ATCN PAM targeting sequence
  source 1..20: mol_type = other RNA
tcctgcctcagctttcggaa

SEQ ID NO: 3507 - RNA, 20 nt, synthetic construct
  misc_feature 1..20: note = C9Orf72 ATCN PAM targeting sequence
  source 1..20: mol_type = other RNA
tagctattccgaaagctgag

SEQ ID NO: 3508 - RNA, 20 nt, synthetic construct
  misc_feature 1..20: note = C9Orf72 ATCN PAM targeting sequence
  source 1..20: mol_type = other RNA
ctacaaaaaataaaaaagaa

SEQ ID NO: 3509 - RNA, 20 nt, synthetic construct
  misc_feature 1..20: note = C9Orf72 ATCN PAM targeting sequence
  source 1..20: mol_type = other RNA
cttgaggccaggagttccag

SEQ ID NO: 3510 - RNA, 20 nt, synthetic construct
  misc_feature 1..20: note = C9Orf72 ATCN PAM targeting sequence
  source 1..20: mol_type = other RNA
gcctgccttgcactcccaaa

SEQ ID NO: 3511 - RNA, 20 nt, synthetic construct
  misc_feature 1..20: note = C9Orf72 ATCN PAM targeting sequence
  source 1..20: mol_type = other RNA
gttgaaaaaaggcacagtag

SEQ ID NO: 3512 - RNA, 20 nt, synthetic construct
  misc_feature 1..20: note = C9Orf72 ATCN PAM targeting sequence
  source 1..20: mol_type = other RNA
ggaaaagaattatagtatac

SEQ ID NO: 3513 - RNA, 20 nt, synthetic construct
  misc_feature 1..20: note = C9Orf72 ATCN PAM targeting sequence
  source 1..20: mol_type = other RNA
tttaagtgtttacttagggt

SEQ ID NO: 3514 - RNA, 20 nt, synthetic construct
  misc_feature 1..20: note = C9Orf72 ATCN PAM targeting sequence
  source 1..20: mol_type = other RNA
taaaaccctaagtaaacact

SEQ ID NO: 3515 - RNA, 20 nt, synthetic construct
  misc_feature 1..20: note = C9Orf72 ATCN PAM targeting sequence
  source 1..20: mol_type = other RNA
ataatcctaaaaccctaagt

SEQ ID NO: 3516 - RNA, 20 nt, synthetic construct
  misc_feature 1..20: note = C9Orf72 ATCN PAM targeting sequence
  source 1..20: mol_type = other RNA
tcatcattttttttttcaag

SEQ ID NO: 3517 - RNA, 20 nt, synthetic construct
  misc_feature 1..20: note = C9Orf72 ATCN PAM targeting sequence
  source 1..20: mol_type = other RNA
tcattttttttttcaagttg

SEQ ID NO: 3518 - RNA, 20 nt, synthetic construct
  misc_feature 1..20: note = C9Orf72 ATCN PAM targeting sequence
  source 1..20: mol_type = other RNA
ttttttttttcaagttgggt

SEQ ID NO: 3519 - RNA, 20 nt, synthetic construct
  misc_feature 1..20: note = C9Orf72 ATCN PAM targeting sequence
  source 1..20: mol_type = other RNA
ttacttttccttttgaattt

SEQ ID NO: 3520 - RNA, 20 nt, synthetic construct
  misc_feature 1..20: note = C9Orf72 ATCN PAM targeting sequence
  source 1..20: mol_type = other RNA
tacctattttagggtaaaca

SEQ ID NO: 3521 - RNA, 20 nt, synthetic construct
  misc_feature 1..20: note = C9Orf72 ATCN PAM targeting sequence
  source 1..20: mol_type = other RNA
agcatttttttcttaaatgt

SEQ ID NO: 3522 - RNA, 20 nt, synthetic construct
  misc_feature 1..20: note = C9Orf72 ATCN PAM targeting sequence
  source 1..20: mol_type = other RNA
ggagtaaagctttcgtcagt

SEQ ID NO: 3523 - RNA, 20 nt, synthetic construct
  misc_feature 1..20: note = C9Orf72 ATCN PAM targeting sequence
  source 1..20: mol_type = other RNA
acactgacgaaagctttact

SEQ ID NO: 3524 - RNA, 20 nt, synthetic construct
  misc_feature 1..20: note = C9Orf72 ATCN PAM targeting sequence
  source 1..20: mol_type = other RNA
tctacactgacgaaagcttt

SEQ ID NO: 3525 - RNA, 20 nt, synthetic construct
  misc_feature 1..20: note = C9Orf72 ATCN PAM targeting sequence
  source 1..20: mol_type = other RNA
tatcctgagccatgtcttct

SEQ ID NO: 3526 - RNA, 20 nt, synthetic construct
  misc_feature 1..20: note = C9Orf72 ATCN PAM targeting sequence
  source 1..20: mol_type = other RNA
tgagccatgtcttcttctga

SEQ ID NO: 3527 - RNA, 20 nt, synthetic construct
  misc_feature 1..20: note = C9Orf72 ATCN PAM targeting sequence
  source 1..20: mol_type = other RNA
gagctgacagccttctggag

SEQ ID NO: 3528 - RNA, 20 nt, synthetic construct
  misc_feature 1..20: note = C9Orf72 ATCN PAM targeting sequence
  source 1..20: mol_type = other RNA
catgtatctacgctgattat

SEQ ID NO: 3529 - RNA, 20 nt, synthetic construct
  misc_feature 1..20: note = C9Orf72 ATCN PAM targeting sequence
  source 1..20: mol_type = other RNA
acgctgattataaatatgtt

SEQ ID NO: 3530 - RNA, 20 nt, synthetic construct
  misc_feature 1..20: note = C9Orf72 ATCN PAM targeting sequence
  source 1..20: mol_type = other RNA
gcgtagatacatgagatccg

SEQ ID NO: 3531 - RNA, 20 nt, synthetic construct
  misc_feature 1..20: note = C9Orf72 ATCN PAM targeting sequence
  source 1..20: mol_type = other RNA
gcttcacagtattgacatcc

SEQ ID NO: 3532 - RNA, 20 nt, synthetic construct
  misc_feature 1..20: note = C9Orf72 ATCN PAM targeting sequence
  source 1..20: mol_type = other RNA
acatctatgtgtgtggtggg

SEQ ID NO: 3533 - RNA, 20 nt, synthetic construct
  misc_feature 1..20: note = C9Orf72 ATCN PAM targeting sequence
  source 1..20: mol_type = other RNA
atgtgtgtggtgggatatgg

SEQ ID NO: 3534 - RNA, 20 nt, synthetic construct
  misc_feature 1..20: note = C9Orf72 ATCN PAM targeting sequence
  source 1..20: mol_type = other RNA
caccacacacatagatgtgg

SEQ ID NO: 3535 - RNA, 20 nt, synthetic construct
  misc_feature 1..20: note = C9Orf72 ATCN PAM targeting sequence
  source 1..20: mol_type = other RNA
tgtcaaaataaaaggaaaat

SEQ ID NO: 3536 - RNA, 20 nt, synthetic construct
  misc_feature 1..20: note = C9Orf72 ATCN PAM targeting sequence
  source 1..20: mol_type = other RNA
tttggcatgtaagacagtaa

SEQ ID NO: 3537 - RNA, 20 nt, synthetic construct
  misc_feature 1..20: note = C9Orf72 ATCN PAM targeting sequence
  source 1..20: mol_type = other RNA
gagaccattttttaaaatta

SEQ ID NO: 3538 - RNA, 20 nt, synthetic construct
  misc_feature 1..20: note = C9Orf72 ATCN PAM targeting sequence
  source 1..20: mol_type = other RNA
atctctaaaaatttatccta

SEQ ID NO: 3539 - RNA, 20 nt, synthetic construct
  misc_feature 1..20: note = C9Orf72 ATCN PAM targeting sequence
  source 1..20: mol_type = other RNA
ctaaaaatttatcctaagaa

SEQ ID NO: 3540 - RNA, 20 nt, synthetic construct
  misc_feature 1..20: note = C9Orf72 ATCN PAM targeting sequence
  source 1..20: mol_type = other RNA
taagaagctattcatgagtg

SEQ ID NO: 3541 - RNA, 20 nt, synthetic construct
  misc_feature 1..20: note = C9Orf72 ATCN PAM targeting sequence
  source 1..20: mol_type = other RNA
gaatgacctaagcatccaaa

SEQ ID NO: 3542 - RNA, 20 nt, synthetic construct
  misc_feature 1..20: note = C9Orf72 ATCN PAM targeting sequence
  source 1..20: mol_type = other RNA
aaaggaagtggttaagtaaa

SEQ ID NO: 3543 - RNA, 20 nt, synthetic construct
  misc_feature 1..20: note = C9Orf72 ATCN PAM targeting sequence
  source 1..20: mol_type = other RNA
atagatgaagttgttgaagt

SEQ ID NO: 3544 - RNA, 20 nt, synthetic construct
  misc_feature 1..20: note = C9Orf72 ATCN PAM targeting sequence
  source 1..20: mol_type = other RNA
atagatgccaaataataaat

SEQ ID NO: 3545 - RNA, 20 nt, synthetic construct
  misc_feature 1..20: note = C9Orf72 ATCN PAM targeting sequence
  source 1..20: mol_type = other RNA
acacaaacttcaacaacttc

SEQ ID NO: 3546 - RNA, 20 nt, synthetic construct
  misc_feature 1..20: note = C9Orf72 ATCN PAM targeting sequence
  source 1..20: mol_type = other RNA
gctgtgaaaaaagcagatta

SEQ ID NO: 3547 - RNA, 20 nt, synthetic construct
  misc_feature 1..20: note = C9Orf72 ATCN PAM targeting sequence
  source 1..20: mol_type = other RNA
gcttttttcacagcagattc

SEQ ID NO: 3548 - RNA, 20 nt, synthetic construct
  misc_feature 1..20: note = C9Orf72 ATCN PAM targeting sequence
  source 1..20: mol_type = other RNA
ctgcatgttctaatctgctt

SEQ ID NO: 3549 - RNA, 20 nt, synthetic construct
  misc_feature 1..20: note = C9Orf72 ATCN PAM targeting sequence
  source 1..20: mol_type = other RNA
tctctgcatgttctaatctg

SEQ ID NO: 3550 - RNA, 20 nt, synthetic construct
  misc_feature 1..20: note = C9Orf72 ATCN PAM targeting sequence
  source 1..20: mol_type = other RNA
agtgggggtgggagtcttaa

SEQ ID NO: 3551 - RNA, 20 nt, synthetic construct
  misc_feature 1..20: note = C9Orf72 ATCN PAM targeting sequence
  source 1..20: mol_type = other RNA
ctttctagtctttttttccc

SEQ ID NO: 3552 - RNA, 20 nt, synthetic construct
  misc_feature 1..20: note = C9Orf72 ATCN PAM targeting sequence
  source 1..20: mol_type = other RNA
agtgaatacccactgttaat

SEQ ID NO: 3553 - RNA, 20 nt, synthetic construct
  misc_feature 1..20: note = C9Orf72 ATCN PAM targeting sequence
  source 1..20: mol_type = other RNA
gttggggtagccagttacca

SEQ ID NO: 3554 - RNA, 20 nt, synthetic construct
  misc_feature 1..20: note = C9Orf72 ATCN PAM targeting sequence
  source 1..20: mol_type = other RNA
cagcattataatagtaaaaa

SEQ ID NO: 3555 - RNA, 20 nt, synthetic construct
  misc_feature 1..20: note = C9Orf72 ATCN PAM targeting sequence
  source 1..20: mol_type = other RNA
tctttgtataatgtcaaagg

SEQ ID NO: 3556 - RNA, 20 nt, synthetic construct
  misc_feature 1..20: note = C9Orf72 ATCN PAM targeting sequence
  source 1..20: mol_type = other RNA
ttgtataatgtcaaaggtat

SEQ ID NO: 3557 - RNA, 20 nt, synthetic construct
  misc_feature 1..20: note = C9Orf72 ATCN PAM targeting sequence
  source 1..20: mol_type = other RNA
tatagttttccagaaaatac

SEQ ID NO: 3558 - RNA, 20 nt, synthetic construct
  misc_feature 1..20: note = C9Orf72 ATCN PAM targeting sequence
  source 1..20: mol_type = other RNA
aatgaaaaaatatttaatag

SEQ ID NO: 3559 - RNA, 20 nt, synthetic construct
  misc_feature 1..20: note = C9Orf72 ATCN PAM targeting sequence
  source 1..20: mol_type = other RNA
tagttttgaaatttcctcta

SEQ ID NO: 3560 - RNA, 20 nt, synthetic construct
  misc_feature 1..20: note = C9Orf72 ATCN PAM targeting sequence
  source 1..20: mol_type = other RNA
ggtataggtccctttcagaa

SEQ ID NO: 3561 - RNA, 20 nt, synthetic construct
  misc_feature 1..20: note = C9Orf72 ATCN PAM targeting sequence
  source 1..20: mol_type = other RNA
gtaaattagaacttctcctg

SEQ ID NO: 3562 - RNA, 20 nt, synthetic construct
  misc_feature 1..20: note = C9Orf72 ATCN PAM targeting sequence
  source 1..20: mol_type = other RNA
ttctgagttcatagcagcac

SEQ ID NO: 3563 - RNA, 20 nt, synthetic construct
  misc_feature 1..20: note = C9Orf72 ATCN PAM targeting sequence
  source 1..20: mol_type = other RNA
tcaagaaagtagtcactatg

SEQ ID NO: 3564 - RNA, 20 nt, synthetic construct
  misc_feature 1..20: note = C9Orf72 ATCN PAM targeting sequence
  source 1..20: mol_type = other RNA
cataaccattaggaaagcta

SEQ ID NO: 3565 - RNA, 20 nt, synthetic construct
  misc_feature 1..20: note = C9Orf72 ATCN PAM targeting sequence
  source 1..20: mol_type = other RNA
attattgttatttcaattat

SEQ ID NO: 3566 - RNA, 20 nt, synthetic construct
  misc_feature 1..20: note = C9Orf72 ATCN PAM targeting sequence
  source 1..20: mol_type = other RNA
tataagcttcttaaagatgt

SEQ ID NO: 3567 - RNA, 20 nt, synthetic construct
  misc_feature 1..20: note = C9Orf72 ATCN PAM targeting sequence
  source 1..20: mol_type = other RNA
ttaagaagcttataggattt

SEQ ID NO: 3568 - RNA, 20 nt, synthetic construct
  misc_feature 1..20: note = C9Orf72 ATCN PAM targeting sequence
  source 1..20: mol_type = other RNA
atttagttaaaaagaaatga

SEQ ID NO: 3569 - RNA, 20 nt, synthetic construct
  misc_feature 1..20: note = C9Orf72 ATCN PAM targeting sequence
  source 1..20: mol_type = other RNA
tttctttttaactaaataga

SEQ ID NO: 3570 - RNA, 20 nt, synthetic construct
  misc_feature 1..20: note = C9Orf72 ATCN PAM targeting sequence
  source 1..20: mol_type = other RNA
tatttttgatgtgcaacctg

SEQ ID NO: 3571 - RNA, 20 nt, synthetic construct
  misc_feature 1..20: note = C9Orf72 ATCN PAM targeting sequence
  source 1..20: mol_type = other RNA
aaaataagatcatttctttt

SEQ ID NO: 3572 - RNA, 20 nt, synthetic construct
  misc_feature 1..20: note = C9Orf72 ATCN PAM targeting sequence
  source 1..20: mol_type = other RNA
ggttgcacatcaaaaataag

SEQ ID NO: 3573 - RNA, 20 nt, synthetic construct
  misc_feature 1..20: note = C9Orf72 ATCN PAM targeting sequence
  source 1..20: mol_type = other RNA
gtgaaacaccatagaatacc

SEQ ID NO: 3574 - RNA, 20 nt, synthetic construct
  misc_feature 1..20: note = C9Orf72 ATCN PAM targeting sequence
  source 1..20: mol_type = other RNA
tcagtgaaacaccatagaat

SEQ ID NO: 3575 - RNA, 20 nt, synthetic construct
  misc_feature 1..20: note = C9Orf72 ATCN PAM targeting sequence
  source 1..20: mol_type = other RNA
ataagacatatagtctatgt

SEQ ID NO: 3576 - RNA, 20 nt, synthetic construct
  misc_feature 1..20: note = C9Orf72 ATCN PAM targeting sequence
  source 1..20: mol_type = other RNA
catattgacatgcccagaga

SEQ ID NO: 3577 - RNA, 20 nt, synthetic construct
  misc_feature 1..20: note = C9Orf72 ATCN PAM targeting sequence
  source 1..20: mol_type = other RNA
taaatattagcatttaatgt

SEQ ID NO: 3578 - RNA, 20 nt, synthetic construct
  misc_feature 1..20: note = C9Orf72 ATCN PAM targeting sequence
  source 1..20: mol_type = other RNA
tttttgagactctttataga

SEQ ID NO: 3579 - RNA, 20 nt, synthetic construct
  misc_feature 1..20: note = C9Orf72 ATCN PAM targeting sequence
  source 1..20: mol_type = other RNA
caagtgaaaccacttttcta

SEQ ID NO: 3580 - RNA, 20 nt, synthetic construct
  misc_feature 1..20: note = C9Orf72 ATCN PAM targeting sequence
  source 1..20: mol_type = other RNA
tttaaatatgagtcagggct

SEQ ID NO: 3581 - RNA, 20 nt, synthetic construct
  misc_feature 1..20: note = C9Orf72 ATCN PAM targeting sequence
  source 1..20: mol_type = other RNA
tcatttaaatatgagtcagg

SEQ ID NO: 3582 - RNA, 20 nt, synthetic construct
  misc_feature 1..20: note = C9Orf72 ATCN PAM targeting sequence
  source 1..20: mol_type = other RNA
ataaaagaaaatattttagc

SEQ ID NO: 3583 - RNA, 20 nt, synthetic construct
  misc_feature 1..20: note = C9Orf72 ATCN PAM targeting sequence
  source 1..20: mol_type = other RNA
gtggtctttttacttcatgt

SEQ ID NO: 3584 - RNA, 20 nt, synthetic construct
  misc_feature 1..20: note = C9Orf72 ATCN PAM targeting sequence
  source 1..20: mol_type = other RNA
ttcataagcaaatcagtggt

SEQ ID NO: 3585 - RNA, 20 nt, synthetic construct
  misc_feature 1..20: note = C9Orf72 ATCN PAM targeting sequence
  source 1..20: mol_type = other RNA
gaaattttaattgttattat

SEQ ID NO: 3586 - RNA, 20 nt, synthetic construct
  misc_feature 1..20: note = C9Orf72 ATCN PAM targeting sequence
  source 1..20: mol_type = other RNA
ataaaacatatcctaagaaa

SEQ ID NO: 3587 - RNA, 20 nt, synthetic construct
  misc_feature 1..20: note = C9Orf72 ATCN PAM targeting sequence
  source 1..20: mol_type = other RNA
taagaaataagtattcttta

SEQ ID NO: 3588 - RNA, 20 nt, synthetic construct
  misc_feature 1..20: note = C9Orf72 ATCN PAM targeting sequence
  source 1..20: mol_type = other RNA
atgggatgtaacagttgttg

SEQ ID NO: 3589 - RNA, 20 nt, synthetic construct
  misc_feature 1..20: note = C9Orf72 ATCN PAM targeting sequence
  source 1..20: mol_type = other RNA
catggattccaggtgactaa

SEQ ID NO: 3590 - RNA, 20 nt, synthetic construct
  misc_feature 1..20: note = C9Orf72 ATCN PAM targeting sequence
  source 1..20: mol_type = other RNA
ctattttaagcaacaactgt

SEQ ID NO: 3591 - RNA, 20 nt, synthetic construct
  misc_feature 1..20: note = C9Orf72 ATCN PAM targeting sequence
  source 1..20: mol_type = other RNA
caaaacctttaacatttggc

SEQ ID NO: 3592 - RNA, 20 nt, synthetic construct
  misc_feature 1..20: note = C9Orf72 ATCN PAM targeting sequence
  source 1..20: mol_type = other RNA
tctgcagactttctcagact

SEQ ID NO: 3593 - RNA, 20 nt, synthetic construct
  misc_feature 1..20: note = C9Orf72 ATCN PAM targeting sequence
  source 1..20: mol_type = other RNA
gcagactttctcagacttat

SEQ ID NO: 3594 - RNA, 20 nt, synthetic construct
  misc_feature 1..20: note = C9Orf72 ATCN PAM targeting sequence
  source 1..20: mol_type = other RNA
aagaatgtccagatcctcca

SEQ ID NO: 3595 - RNA, 20 nt, synthetic construct
  misc_feature 1..20: note = C9Orf72 ATCN PAM targeting sequence
  source 1..20: mol_type = other RNA
ggacattctttgatatttct

SEQ ID NO: 3596 - RNA, 20 nt, synthetic construct
  misc_feature 1..20: note = C9Orf72 ATCN PAM targeting sequence
  source 1..20: mol_type = other RNA
tccaaaaagaagagaattaa

SEQ ID NO: 3597 - RNA, 20 nt, synthetic construct
  misc_feature 1..20: note = C9Orf72 ATCN PAM targeting sequence
  source 1..20: mol_type = other RNA
aattcaataattaattctct

SEQ ID NO: 3598 - RNA, 20 nt, synthetic construct
  misc_feature 1..20: note = C9Orf72 ATCN PAM targeting sequence
  source 1..20: mol_type = other RNA
cacccaatgacctgcttatt

SEQ ID NO: 3599 - RNA, 20 nt, synthetic construct
  misc_feature 1..20: note = C9Orf72 ATCN PAM targeting sequence
  source 1..20: mol_type = other RNA
gattctaataatatttgacc

SEQ ID NO: 3600 - RNA, 20 nt, synthetic construct
  misc_feature 1..20: note = C9Orf72 ATCN PAM targeting sequence
  source 1..20: mol_type = other RNA
gatttctaaatcccacccaa

SEQ ID NO: 3601 - RNA, 20 nt, synthetic construct
  misc_feature 1..20: note = C9Orf72 ATCN PAM targeting sequence
  source 1..20: mol_type = other RNA
tgaaattcaaaccatatcca

SEQ ID NO: 3602 - RNA, 20 nt, synthetic construct
  misc_feature 1..20: note = C9Orf72 ATCN PAM targeting sequence
  source 1..20: mol_type = other RNA
acagttattatgttaaagga

SEQ ID NO: 3603 - RNA, 20 nt, synthetic construct
  misc_feature 1..20: note = C9Orf72 ATCN PAM targeting sequence
  source 1..20: mol_type = other RNA
tgttttaatttgagaaagaa

SEQ ID NO: 3604 - RNA, 20 nt, synthetic construct
  misc_feature 1..20: note = C9Orf72 ATCN PAM targeting sequence
  source 1..20: mol_type = other RNA
tcttgagggagaatagctta

SEQ ID NO: 3605 - RNA, 20 nt, synthetic construct
  misc_feature 1..20: note = C9Orf72 ATCN PAM targeting sequence
  source 1..20: mol_type = other RNA
tccatcctcttgagggagaa

SEQ ID NO: 3606 - RNA, 20 nt, synthetic construct
  misc_feature 1..20: note = C9Orf72 ATCN PAM targeting sequence
  source 1..20: mol_type = other RNA
ccaaagccttaggttgcaca

SEQ ID NO: 3607 - RNA, 20 nt, synthetic construct
  misc_feature 1..20: note = C9Orf72 ATCN PAM targeting sequence
  source 1..20: mol_type = other RNA
cagatggaaagccacctgtt

SEQ ID NO: 3608 - RNA, 20 nt, synthetic construct
  misc_feature 1..20: note = C9Orf72 ATCN PAM targeting sequence
  source 1..20: mol_type = other RNA
gtgatctccaaagccttagg

SEQ ID NO: 3609 - RNA, 20 nt, synthetic construct
  misc_feature 1..20: note = C9Orf72 ATCN PAM targeting sequence
  source 1..20: mol_type = other RNA
acgaactagtgaccttattc

SEQ ID NO: 3610 - RNA, 20 nt, synthetic construct
  misc_feature 1..20: note = C9Orf72 ATCN PAM targeting sequence
  source 1..20: mol_type = other RNA
gctactttgtatatttacat

SEQ ID NO: 3611 - RNA, 20 nt, synthetic construct
  misc_feature 1..20: note = C9Orf72 ATCN PAM targeting sequence
  source 1..20: mol_type = other RNA
ttgtaaagtatcatttccaa

SEQ ID NO: 3612 - RNA, 20 nt, synthetic construct
  misc_feature 1..20: note = C9Orf72 ATCN PAM targeting sequence
  source 1..20: mol_type = other RNA
tttccaacatatttcctatg

SEQ ID NO: 3613 - RNA, 20 nt, synthetic construct
  misc_feature 1..20: note = C9Orf72 ATCN PAM targeting sequence
  source 1..20: mol_type = other RNA
ttcaatttcagcaaacctaa

SEQ ID NO: 3614 - RNA, 20 nt, synthetic construct
  misc_feature 1..20: note = C9Orf72 ATCN PAM targeting sequence
  source 1..20: mol_type = other RNA
ctgaactctttctaactaat

SEQ ID NO: 3615 - RNA, 20 nt, synthetic construct
  misc_feature 1..20: note = C9Orf72 ATCN PAM targeting sequence
  source 1..20: mol_type = other RNA
tttagtttattagctaatgc

SEQ ID NO: 3616 - RNA, 20 nt, synthetic construct
  misc_feature 1..20: note = C9Orf72 ATCN PAM targeting sequence
  source 1..20: mol_type = other RNA
ttaattaactcaagtagcac

SEQ ID NO: 3617 - RNA, 20 nt, synthetic construct
  misc_feature 1..20: note = C9Orf72 ATCN PAM targeting sequence
  source 1..20: mol_type = other RNA
atgaccacttaatcccaata

SEQ ID NO: 3618 - RNA, 20 nt, synthetic construct
  misc_feature 1..20: note = C9Orf72 ATCN PAM targeting sequence
  source 1..20: mol_type = other RNA
caatagctccctagaaggga

SEQ ID NO: 3619 - RNA, 20 nt, synthetic construct
  misc_feature 1..20: note = C9Orf72 ATCN PAM targeting sequence
  source 1..20: mol_type = other RNA
gtcccttctagggagctatt

SEQ ID NO: 3620 - RNA, 20 nt, synthetic construct
  misc_feature 1..20: note = C9Orf72 ATCN PAM targeting sequence
  source 1..20: mol_type = other RNA
agatgaataaacaaataaca

SEQ ID NO: 3621 - RNA, 20 nt, synthetic construct
  misc_feature 1..20: note = C9Orf72 ATCN PAM targeting sequence
  source 1..20: mol_type = other RNA
tgatttcattgtcttcgctt

SEQ ID NO: 3622 - RNA, 20 nt, synthetic construct
  misc_feature 1..20: note = C9Orf72 ATCN PAM targeting sequence
  source 1..20: mol_type = other RNA
tcagatttgttaaagataac

SEQ ID NO: 3623 - RNA, 20 nt, synthetic construct
  misc_feature 1..20: note = C9Orf72 ATCN PAM targeting sequence
  source 1..20: mol_type = other RNA
gaagatagtcatgtactttt

SEQ ID NO: 3624 - RNA, 20 nt, synthetic construct
  misc_feature 1..20: note = C9Orf72 ATCN PAM targeting sequence
  source 1..20: mol_type = other RNA
ttaacaaatctgaagatagt

SEQ ID NO: 3625 - RNA, 20 nt, synthetic construct
  misc_feature 1..20: note = C9Orf72 ATCN PAM targeting sequence
  source 1..20: mol_type = other RNA
gattttaatatattctcaaa

SEQ ID NO: 3626 - RNA, 20 nt, synthetic construct
  misc_feature 1..20: note = C9Orf72 ATCN PAM targeting sequence
  source 1..20: mol_type = other RNA
gatatataaaaaaaattact

SEQ ID NO: 3627 - RNA, 20 nt, synthetic construct
  misc_feature 1..20: note = C9Orf72 ATCN PAM targeting sequence
  source 1..20: mol_type = other RNA
aaataaactgataaatgatt

SEQ ID NO: 3628 - RNA, 20 nt, synthetic construct
  misc_feature 1..20: note = C9Orf72 ATCN PAM targeting sequence
  source 1..20: mol_type = other RNA
gtttattttgatagctcgga

SEQ ID NO: 3629 - RNA, 20 nt, synthetic construct
  misc_feature 1..20: note = C9Orf72 ATCN PAM targeting sequence
  source 1..20: mol_type = other RNA
tttatcagtttattttgata

SEQ ID NO: 3630 - RNA, 20 nt, synthetic construct
  misc_feature 1..20: note = C9Orf72 ATCN PAM targeting sequence
  source 1..20: mol_type = other RNA
aattgctaagacaccttgtg

SEQ ID NO: 3631 - RNA, 20 nt, synthetic construct
  misc_feature 1..20: note = C9Orf72 ATCN PAM targeting sequence
  source 1..20: mol_type = other RNA
catcaaattgctaagacacc

SEQ ID NO: 3632 - RNA, 20 nt, synthetic construct
  misc_feature 1..20: note = C9Orf72 ATCN PAM targeting sequence
  source 1..20: mol_type = other RNA
agtagtataaggaggcaatg

SEQ ID NO: 3633 - RNA, 20 nt, synthetic construct
  misc_feature 1..20: note = C9Orf72 ATCN PAM targeting sequence
  source 1..20: mol_type = other RNA
ttttaattgcaacctaccat

SEQ ID NO: 3634 - RNA, 20 nt, synthetic construct
  misc_feature 1..20: note = C9Orf72 ATCN PAM targeting sequence
  source 1..20: mol_type = other RNA
atgatatatcatcagtctta

SEQ ID NO: 3635 - RNA, 20 nt, synthetic construct
  misc_feature 1..20: note = C9Orf72 ATCN PAM targeting sequence
  source 1..20: mol_type = other RNA
tggattgtcatttaaatggt

SEQ ID NO: 3636 - RNA, 20 nt, synthetic construct
  misc_feature 1..20: note = C9Orf72 ATCN PAM targeting sequence
  source 1..20: mol_type = other RNA
tcagtcttaaagagtcaaat

SEQ ID NO: 3637 - RNA, 20 nt, synthetic construct
  misc_feature 1..20: note = C9Orf72 ATCN PAM targeting sequence
  source 1..20: mol_type = other RNA
gtcttaaagagtcaaatcat

SEQ ID NO: 3638 - RNA, 20 nt, synthetic construct
  misc_feature 1..20: note = C9Orf72 ATCN PAM targeting sequence
  source 1..20: mol_type = other RNA
tttgctagattataaaataa

SEQ ID NO: 3639 - RNA, 20 nt, synthetic construct
  misc_feature 1..20: note = C9Orf72 ATCN PAM targeting sequence
  source 1..20: mol_type = other RNA
agcaaatgatttgactcttt

SEQ ID NO: 3640 - RNA, 20 nt, synthetic construct
  misc_feature 1..20: note = C9Orf72 ATCN PAM targeting sequence
  source 1..20: mol_type = other RNA
gctcacacttgcaaacctgt

SEQ ID NO: 3641 - RNA, 20 nt, synthetic construct
  misc_feature 1..20: note = C9Orf72 ATCN PAM targeting sequence
  source 1..20: mol_type = other RNA
gttttctttaacttacagtg

SEQ ID NO: 3642 - RNA, 20 nt, synthetic construct
  misc_feature 1..20: note = C9Orf72 ATCN PAM targeting sequence
  source 1..20: mol_type = other RNA
tataaagctattctgagtta

SEQ ID NO: 3643 - RNA, 20 nt, synthetic construct
  misc_feature 1..20: note = C9Orf72 ATCN PAM targeting sequence
  source 1..20: mol_type = other RNA
tttatttgtataggaaccta

SEQ ID NO: 3644 - RNA, 20 nt, synthetic construct
  misc_feature 1..20: note = C9Orf72 ATCN PAM targeting sequence
  source 1..20: mol_type = other RNA
tttaattaatgtatttattt

SEQ ID NO: 3645 - RNA, 20 nt, synthetic construct
  misc_feature 1..20: note = C9Orf72 ATCN PAM targeting sequence
  source 1..20: mol_type = other RNA
ttttatagctgaagaaattg

SEQ ID NO: 3646 - RNA, 20 nt, synthetic construct
  misc_feature 1..20: note = C9Orf72 ATCN PAM targeting sequence
  source 1..20: mol_type = other RNA
ctctacatgtcaatttcttc

SEQ ID NO: 3647 - RNA, 20 nt, synthetic construct
  misc_feature 1..20: note = C9Orf72 ATCN PAM targeting sequence
  source 1..20: mol_type = other RNA
catttgactttaagtaagtc

SEQ ID NO: 3648 - RNA, 20 nt, synthetic construct
  misc_feature 1..20: note = C9Orf72 ATCN PAM targeting sequence
  source 1..20: mol_type = other RNA
ttttaaatcccatttgactt

SEQ ID NO: 3649 - RNA, 20 nt, synthetic construct
  misc_feature 1..20: note = C9Orf72 ATCN PAM targeting sequence
  source 1..20: mol_type = other RNA
gttcagtgtcagcctttcat

SEQ ID NO: 3650 - RNA, 20 nt, synthetic construct
  misc_feature 1..20: note = C9Orf72 ATCN PAM targeting sequence
  source 1..20: mol_type = other RNA
gaagcactttagtcctgtat

SEQ ID NO: 3651 - RNA, 20 nt, synthetic construct
  misc_feature 1..20: note = C9Orf72 ATCN PAM targeting sequence
  source 1..20: mol_type = other RNA
gaggcatgagtgtgtttaac

SEQ ID NO: 3652 - RNA, 20 nt, synthetic construct
  misc_feature 1..20: note = C9Orf72 ATCN PAM targeting sequence
  source 1..20: mol_type = other RNA
tgagcctaaaggaaaagact

SEQ ID NO: 3653 - RNA, 20 nt, synthetic construct
  misc_feature 1..20: note = C9Orf72 ATCN PAM targeting sequence
  source 1..20: mol_type = other RNA
gtaactgtgaagaaacttta

SEQ ID NO: 3654 - RNA, 20 nt, synthetic construct
  misc_feature 1..20: note = C9Orf72 ATCN PAM targeting sequence
  source 1..20: mol_type = other RNA
tatattctgttttaaagttt

SEQ ID NO: 3655 - RNA, 20 nt, synthetic construct
  misc_feature 1..20: note = C9Orf72 ATCN PAM targeting sequence
  source 1..20: mol_type = other RNA
tactcaatgcttataacaac

SEQ ID NO: 3656 - RNA, 20 nt, synthetic construct
  misc_feature 1..20: note = C9Orf72 ATCN PAM targeting sequence
  source 1..20: mol_type = other RNA
gtaaaatggcaataatagta

SEQ ID NO: 3657 - RNA, 20 nt, synthetic construct
  misc_feature 1..20: note = C9Orf72 ATCN PAM targeting sequence
  source 1..20: mol_type = other RNA
agggagtctggtttaagggc

SEQ ID NO: 3658 - RNA, 20 nt, synthetic construct
  misc_feature 1..20: note = C9Orf72 ATCN PAM targeting sequence
  source 1..20: mol_type = other RNA
agcagtggagtttagtactt

SEQ ID NO: 3659 - RNA, 20 nt, synthetic construct
  misc_feature 1..20: note = C9Orf72 ATCN PAM targeting sequence
  source 1..20: mol_type = other RNA
ttttccatccagcagtggag

SEQ ID NO: 3660 - RNA, 20 nt, synthetic construct
  misc_feature 1..20: note = C9Orf72 ATCN PAM targeting sequence
  source 1..20: mol_type = other RNA
gtataaatatgaataatttt

SEQ ID NO: 3661 - RNA, 20 nt, synthetic construct
  misc_feature 1..20: note = C9Orf72 ATCN PAM targeting sequence
  source 1..20: mol_type = other RNA
acagtacaacttaatatgaa

SEQ ID NO: 3662 - RNA, 20 nt, synthetic construct
  misc_feature 1..20: note = C9Orf72 ATCN PAM targeting sequence
  source 1..20: mol_type = other RNA
tttcatattaagttgtactg

SEQ ID NO: 3663 - RNA, 20 nt, synthetic construct
  misc_feature 1..20: note = C9Orf72 ATCN PAM targeting sequence
  source 1..20: mol_type = other RNA
agcaaggggccatgatttct

SEQ ID NO: 3664 - RNA, 20 nt, synthetic construct
  misc_feature 1..20: note = C9Orf72 ATCN PAM targeting sequence
  source 1..20: mol_type = other RNA
tggccccttgcttgattctg

SEQ ID NO: 3665 - RNA, 20 nt, synthetic construct
  misc_feature 1..20: note = C9Orf72 ATCN PAM targeting sequence
  source 1..20: mol_type = other RNA
cagacaagaaatcatggccc

SEQ ID NO: 3666 - RNA, 20 nt, synthetic construct
  misc_feature 1..20: note = C9Orf72 ATCN PAM targeting sequence
  source 1..20: mol_type = other RNA
aagtagacagtctgttattt

SEQ ID NO: 3667 - RNA, 20 nt, synthetic construct
  misc_feature 1..20: note = C9Orf72 ATCN PAM targeting sequence
  source 1..20: mol_type = other RNA
tgtcataggtgagcataaga

SEQ ID NO: 3668 - RNA, 20 nt, synthetic construct
  misc_feature 1..20: note = C9Orf72 ATCN PAM targeting sequence
  source 1..20: mol_type = other RNA
tatgctcacctatgacaaga

SEQ ID NO: 3669 - RNA, 20 nt, synthetic construct
  misc_feature 1..20: note = C9Orf72 ATCN PAM targeting sequence
  source 1..20: mol_type = other RNA
gcttcatccagcttttatga

SEQ ID NO: 3670 - RNA, 20 nt, synthetic construct
  misc_feature 1..20: note = C9Orf72 ATCN PAM targeting sequence
  source 1..20: mol_type = other RNA
agcttttatgaaaagaaaaa

SEQ ID NO: 3671 - RNA, 20 nt, synthetic construct
  misc_feature 1..20: note = C9Orf72 ATCN PAM targeting sequence
  source 1..20: mol_type = other RNA
tcatcattgagtactgtatc

SEQ ID NO: 3672 - RNA, 20 nt, synthetic construct
  misc_feature 1..20: note = C9Orf72 ATCN PAM targeting sequence
  source 1..20: mol_type = other RNA
tcattgagtactgtatcagc

SEQ ID NO: 3673 - RNA, 20 nt, synthetic construct
  misc_feature 1..20: note = C9Orf72 ATCN PAM targeting sequence
  source 1..20: mol_type = other RNA
ttgagtactgtatcagctat

SEQ ID NO: 3674 - RNA, 20 nt, synthetic construct
  misc_feature 1..20: note = C9Orf72 ATCN PAM targeting sequence
  source 1..20: mol_type = other RNA
gctatctaaaatgcatcaaa

SEQ ID NO: 3675 - RNA, 20 nt, synthetic construct
  misc_feature 1..20: note = C9Orf72 ATCN PAM targeting sequence
  source 1..20: mol_type = other RNA
aaaatgcatcaaaaaataaa

SEQ ID NO: 3676 - RNA, 20 nt, synthetic construct
  misc_feature 1..20: note = C9Orf72 ATCN PAM targeting sequence
  source 1..20: mol_type = other RNA
aaaaataaaaaaattagtct

SEQ ID NO: 3677 - RNA, 20 nt, synthetic construct
  misc_feature 1..20: note = C9Orf72 ATCN PAM targeting sequence
  source 1..20: mol_type = other RNA
agacttccgaaaacttgtat

SEQ ID NO: 3678 - RNA, 20 nt, synthetic construct
  misc_feature 1..20: note = C9Orf72 ATCN PAM targeting sequence
  source 1..20: mol_type = other RNA
agactccccaaaaaacaatc

SEQ ID NO: 3679 - RNA, 20 nt, synthetic construct
  misc_feature 1..20: note = C9Orf72 ATCN PAM targeting sequence
  source 1..20: mol_type = other RNA
ctgtgcactaccataaactt

SEQ ID NO: 3680 - RNA, 20 nt, synthetic construct
  misc_feature 1..20: note = C9Orf72 ATCN PAM targeting sequence
  source 1..20: mol_type = other RNA
ggagactaacctaaatgaca

SEQ ID NO: 3681 - RNA, 20 nt, synthetic construct
  misc_feature 1..20: note = C9Orf72 ATCN PAM targeting sequence
  source 1..20: mol_type = other RNA
gaaaacaacaagaatagttt

SEQ ID NO: 3682 - RNA, 20 nt, synthetic construct
  misc_feature 1..20: note = C9Orf72 ATCN PAM targeting sequence
  source 1..20: mol_type = other RNA
cttaacactcatagtgtgtg

SEQ ID NO: 3683 - RNA, 20 nt, synthetic construct
  misc_feature 1..20: note = C9Orf72 ATCN PAM targeting sequence
  source 1..20: mol_type = other RNA
cacactatgagtgttaagag

SEQ ID NO: 3684 - RNA, 20 nt, synthetic construct
  misc_feature 1..20: note = C9Orf72 ATCN PAM targeting sequence
  source 1..20: mol_type = other RNA
tttgttgaggacgttttgaa

SEQ ID NO: 3685 - RNA, 20 nt, synthetic construct
  misc_feature 1..20: note = C9Orf72 ATCN PAM targeting sequence
  source 1..20: mol_type = other RNA
cagctcttataggagcaatt

SEQ ID NO: 3686 - RNA, 20 nt, synthetic construct
  misc_feature 1..20: note = C9Orf72 ATCN PAM targeting sequence
  source 1..20: mol_type = other RNA
tcccacttttaggaattata

SEQ ID NO: 3687 - RNA, 20 nt, synthetic construct
  misc_feature 1..20: note = C9Orf72 ATCN PAM targeting sequence
  source 1..20: mol_type = other RNA
ctgatcaaaaatgcctctgt

SEQ ID NO: 3688 - RNA, 20 nt, synthetic construct
  misc_feature 1..20: note = C9Orf72 ATCN PAM targeting sequence
  source 1..20: mol_type = other RNA
gtgatgacaaaattaaattc

SEQ ID NO: 3689 - RNA, 20 nt, synthetic construct
  misc_feature 1..20: note = C9Orf72 ATCN PAM targeting sequence
  source 1..20: mol_type = other RNA
aaaatgcctctgttttgcca

SEQ ID NO: 3690 - RNA, 20 nt, synthetic construct
  misc_feature 1..20: note = C9Orf72 ATCN PAM targeting sequence
  source 1..20: mol_type = other RNA
aggattttgtgtgtgcttat

SEQ ID NO: 3691 - RNA, 20 nt, synthetic construct
  misc_feature 1..20: note = C9Orf72 ATCN PAM targeting sequence
  source 1..20: mol_type = other RNA
tggattttatggcaaaacag

SEQ ID NO: 3692 - RNA, 20 nt, synthetic construct
  misc_feature 1..20: note = C9Orf72 ATCN PAM targeting sequence
  source 1..20: mol_type = other RNA
atttcttcaggaacactgtg

SEQ ID NO: 3693 - RNA, 20 nt, synthetic construct
  misc_feature 1..20: note = C9Orf72 ATCN PAM targeting sequence
  source 1..20: mol_type = other RNA
cacagtgttcctgaagaaat

SEQ ID NO: 3694 - RNA, 20 nt, synthetic construct
  misc_feature 1..20: note = C9Orf72 ATCN PAM targeting sequence
  source 1..20: mol_type = other RNA
atgaaatcacacagtgttcc

SEQ ID NO: 3695 - RNA, 20 nt, synthetic construct
  misc_feature 1..20: note = C9Orf72 ATCN PAM targeting sequence
  source 1..20: mol_type = other RNA
cttctccagtaagcattgga

SEQ ID NO: 3696 - RNA, 20 nt, synthetic construct
  misc_feature 1..20: note = C9Orf72 ATCN PAM targeting sequence
  source 1..20: mol_type = other RNA
cgtaatatgagagaagctgg

SEQ ID NO: 3697 - RNA, 20 nt, synthetic construct
  misc_feature 1..20: note = C9Orf72 ATCN PAM targeting sequence
  source 1..20: mol_type = other RNA
aacaataacattctttgatg

SEQ ID NO: 3698 - RNA, 20 nt, synthetic construct
  misc_feature 1..20: note = C9Orf72 ATCN PAM targeting sequence
  source 1..20: mol_type = other RNA
aagaatgttattgtttgatg

SEQ ID NO: 3699 - RNA, 20 nt, synthetic construct
  misc_feature 1..20: note = C9Orf72 ATCN PAM targeting sequence
  source 1..20: mol_type = other RNA
aacaagtctactacatgtct

SEQ ID NO: 3700 - RNA, 20 nt, synthetic construct
  misc_feature 1..20: note = C9Orf72 ATCN PAM targeting sequence
  source 1..20: mol_type = other RNA
tttagacatgtagtagactt

SEQ ID NO: 3701 - RNA, 20 nt, synthetic construct
  misc_feature 1..20: note = C9Orf72 ATCN PAM targeting sequence
  source 1..20: mol_type = other RNA
aaagctcacttttattcttt

SEQ ID NO: 3702 - RNA, 20 nt, synthetic construct
  misc_feature 1..20: note = C9Orf72 ATCN PAM targeting sequence
  source 1..20: mol_type = other RNA
caaaaaaaaaaaaagaaaag

SEQ ID NO: 3703 - RNA, 20 nt, synthetic construct
  misc_feature 1..20: note = C9Orf72 ATCN PAM targeting sequence
  source 1..20: mol_type = other RNA
cgccattgcactccagcctg

SEQ ID NO: 3704 - RNA, 20 nt, synthetic construct
  misc_feature 1..20: note = C9Orf72 ATCN PAM targeting sequence
  source 1..20: mol_type = other RNA
cagctcactgcaacctctcc

SEQ ID NO: 3705 - RNA, 20 nt, synthetic construct
  misc_feature 1..20: note = C9Orf72 ATCN PAM targeting sequence
  source 1..20: mol_type = other RNA
tcccaagtagctgggactat

SEQ ID NO: 3706 - RNA, 20 nt, synthetic construct
  misc_feature 1..20: note = C9Orf72 ATCN PAM targeting sequence
  source 1..20: mol_type = other RNA
gccgggcatggtggcggcac

SEQ ID NO: 3707 - RNA, 20 nt, synthetic construct
  misc_feature 1..20: note = C9Orf72 ATCN PAM targeting sequence
  source 1..20: mol_type = other RNA
ttggtttatcgtttactgtt

SEQ ID NO: 3708 - RNA, 20 nt, synthetic construct
  misc_feature 1..20: note = C9Orf72 ATCN PAM targeting sequence
  source 1..20: mol_type = other RNA
tttactgttacatgcaatga

SEQ ID NO: 3709 - RNA, 20 nt, synthetic construct
  misc_feature 1..20: note = C9Orf72 ATCN PAM targeting sequence
  source 1..20: mol_type = other RNA
ttgcatgtaacagtaaacga

SEQ ID NO: 3710 - RNA, 20 nt, synthetic construct
  misc_feature 1..20: note = C9Orf72 ATCN PAM targeting sequence
  source 1..20: mol_type = other RNA
tgcctcttttagaaaagatc

SEQ ID NO: 3711 - RNA, 20 nt, synthetic construct
  misc_feature 1..20: note = C9Orf72 ATCN PAM targeting sequence
  source 1..20: mol_type = other RNA
tttctaaaagaggcatgatg

SEQ ID NO: 3712 - RNA, 20 nt, synthetic construct
  misc_feature 1..20: note = C9Orf72 ATCN PAM targeting sequence
  source 1..20: mol_type = other RNA
cctttaaaatttgagataaa

SEQ ID NO: 3713 - RNA, 20 nt, synthetic construct
  misc_feature 1..20: note = C9Orf72 ATCN PAM targeting sequence
  source 1..20: mol_type = other RNA
caaattttaaaggagatctt

SEQ ID NO: 3714 - RNA, 20 nt, synthetic construct
  misc_feature 1..20: note = C9Orf72 ATCN PAM targeting sequence
  source 1..20: mol_type = other RNA
atatatttcatatttaaaaa

SEQ ID NO: 3715 - RNA, 20 nt, synthetic construct
  misc_feature 1..20: note = C9Orf72 ATCN PAM targeting sequence
  source 1..20: mol_type = other RNA
ttaccaaataggtaaggaaa

SEQ ID NO: 3716 - RNA, 20 nt, synthetic construct
  misc_feature 1..20: note = C9Orf72 ATCN PAM targeting sequence
  source 1..20: mol_type = other RNA
atacctaacctccatactca

SEQ ID NO: 3717 - RNA, 20 nt, synthetic construct
  misc_feature 1..20: note = C9Orf72 ATCN PAM targeting sequence
  source 1..20: mol_type = other RNA
acccaaatgcaaatcaaaat

SEQ ID NO: 3718 - RNA, 20 nt, synthetic construct
  misc_feature 1..20: note = C9Orf72 ATCN PAM targeting sequence
  source 1..20: mol_type = other RNA
aaatcagcacatatatttta

SEQ ID NO: 3719 - RNA, 20 nt, synthetic construct
  misc_feature 1..20: note = C9Orf72 ATCN PAM targeting sequence
  source 1..20: mol_type = other RNA
gcacatatattttaagaatc

SEQ ID NO: 3720 - RNA, 20 nt, synthetic construct
  misc_feature 1..20: note = C9Orf72 ATCN PAM targeting sequence
  source 1..20: mol_type = other RNA
ataaaacagaaaaattccct

SEQ ID NO: 3721 - RNA, 20 nt, synthetic construct
  misc_feature 1..20: note = C9Orf72 ATCN PAM targeting sequence
  source 1..20: mol_type = other RNA
tgaaatagctctaaagggaa

SEQ ID NO: 3722 - RNA, 20 nt, synthetic construct
  misc_feature 1..20: note = C9Orf72 ATCN PAM targeting sequence
  source 1..20: mol_type = other RNA
tgaaattgtaattttgaaat

SEQ ID NO: 3723 - RNA, 20 nt, synthetic construct
  misc_feature 1..20: note = C9Orf72 ATCN PAM targeting sequence
  source 1..20: mol_type = other RNA
aactgaaaattcagtataac

SEQ ID NO: 3724 - RNA, 20 nt, synthetic construct
  misc_feature 1..20: note = C9Orf72 ATCN PAM targeting sequence
  source 1..20: mol_type = other RNA
caaatgtaaagtgtctcaaa

SEQ ID NO: 3725 - RNA, 20 nt, synthetic construct
  misc_feature 1..20: note = C9Orf72 ATCN PAM targeting sequence
  source 1..20: mol_type = other RNA
atatttgagacactttacat

SEQ ID NO: 3726 - RNA, 20 nt, synthetic construct
  misc_feature 1..20: note = C9Orf72 ATCN PAM targeting sequence
  source 1..20: mol_type = other RNA
gttttgtgaccaacttggtt

SEQ ID NO: 3727 - RNA, 20 nt, synthetic construct
  misc_feature 1..20: note = C9Orf72 ATCN PAM targeting sequence
  source 1..20: mol_type = other RNA
caaaaaatttacttaaccaa

SEQ ID NO: 3728 - RNA, 20 nt, synthetic construct
  misc_feature 1..20: note = C9Orf72 ATCN PAM targeting sequence
  source 1..20: mol_type = other RNA
tacattatttaagatgaatt

SEQ ID NO: 3729 - RNA, 20 nt, synthetic construct
  misc_feature 1..20: note = C9Orf72 ATCN PAM targeting sequence
  source 1..20: mol_type = other RNA
taaataatgtatgatttaaa

SEQ ID NO: 3730 - RNA, 20 nt, synthetic construct
  misc_feature 1..20: note = C9Orf72 ATCN PAM targeting sequence
  source 1..20: mol_type = other RNA
tttcataaaataagtgagga

SEQ ID NO: 3731 - RNA, 20 nt, synthetic construct
  misc_feature 1..20: note = C9Orf72 ATCN PAM targeting sequence
  source 1..20: mol_type = other RNA
ttaagttagaatctttgtca

SEQ ID NO: 3732 - RNA, 20 nt, synthetic construct
  misc_feature 1..20: note = C9Orf72 ATCN PAM targeting sequence
  source 1..20: mol_type = other RNA
ttgtcagacccagggccatt

SEQ ID NO: 3733 - RNA, 20 nt, synthetic construct
  misc_feature 1..20: note = C9Orf72 ATCN PAM targeting sequence
  source 1..20: mol_type = other RNA
catttaaattctcaagcaac

SEQ ID NO: 3734 - RNA, 20 nt, synthetic construct
  misc_feature 1..20: note = C9Orf72 ATCN PAM targeting sequence
  source 1..20: mol_type = other RNA
taagccatatgcccatttgc

SEQ ID NO: 3735 - RNA, 20 nt, synthetic construct
  misc_feature 1..20: note = C9Orf72 ATCN PAM targeting sequence
  source 1..20: mol_type = other RNA
tttagtaacctccacaacta

SEQ ID NO: 3736 - RNA, 20 nt, synthetic construct
  misc_feature 1..20: note = C9Orf72 ATCN PAM targeting sequence
  source 1..20: mol_type = other RNA
tgcctgtttacaattacaat

SEQ ID NO: 3737 - RNA, 20 nt, synthetic construct
  misc_feature 1..20: note = C9Orf72 ATCN PAM targeting sequence
  source 1..20: mol_type = other RNA
aacaagaataatgactagat

SEQ ID NO: 3738 - RNA, 20 nt, synthetic construct
  misc_feature 1..20: note = C9Orf72 ATCN PAM targeting sequence
  source 1..20: mol_type = other RNA
agtcattattcttgttagat

SEQ ID NO: 3739 - RNA, 20 nt, synthetic construct
  misc_feature 1..20: note = C9Orf72 ATCN PAM targeting sequence
  source 1..20: mol_type = other RNA
gtgttaaatttccttccctg

SEQ ID NO: 3740 - RNA, 20 nt, synthetic construct
  misc_feature 1..20: note = C9Orf72 ATCN PAM targeting sequence
  source 1..20: mol_type = other RNA
gatgacagctacaactgaag

SEQ ID NO: 3741 - RNA, 20 nt, synthetic construct
  misc_feature 1..20: note = C9Orf72 ATCN PAM targeting sequence
  source 1..20: mol_type = other RNA
gataaaattgcttcacaggg

SEQ ID NO: 3742 - RNA, 20 nt, synthetic construct
  misc_feature 1..20: note = C9Orf72 ATCN PAM targeting sequence
  source 1..20: mol_type = other RNA
tccccaaacagtattgttca

SEQ ID NO: 3743 - RNA, 20 nt, synthetic construct
  misc_feature 1..20: note = C9Orf72 ATCN PAM targeting sequence
  source 1..20: mol_type = other RNA
ccaaacagtattgttcaaaa

SEQ ID NO: 3744 - RNA, 20 nt, synthetic construct
  misc_feature 1..20: note = C9Orf72 ATCN PAM targeting sequence
  source 1..20: mol_type = other RNA
cacaacgactttattttgaa

SEQ ID NO: 3745 - RNA, 20 nt, synthetic construct
  misc_feature 1..20: note = C9Orf72 ATCN PAM targeting sequence
  source 1..20: mol_type = other RNA
aaaggcaactcctccttttc

SEQ ID NO: 3746 - RNA, 20 nt, synthetic construct
  misc_feature 1..20: note = C9Orf72 ATCN PAM targeting sequence
  source 1..20: mol_type = other RNA
cagacattatcagtataagt

SEQ ID NO: 3747 - RNA, 20 nt, synthetic construct
  misc_feature 1..20: note = C9Orf72 ATCN PAM targeting sequence
  source 1..20: mol_type = other RNA
gtataagtgaatgaatagcc

SEQ ID NO: 3748 - RNA, 20 nt, synthetic construct
  misc_feature 1..20: note = C9Orf72 ATCN PAM targeting sequence
  source 1..20: mol_type = other RNA
tacagggctaaatacagaag

SEQ ID NO: 3749 - RNA, 20 nt, synthetic construct
  misc_feature 1..20: note = C9Orf72 ATCN PAM targeting sequence
  source 1..20: mol_type = other RNA
cttaagtttctattcctcct

SEQ ID NO: 3750 - RNA, 20 nt, synthetic construct
  misc_feature 1..20: note = C9Orf72 ATCN PAM targeting sequence
  source 1..20: mol_type = other RNA
tactgctgagaagttcaagt

SEQ ID NO: 3751 - RNA, 20 nt, synthetic construct
  misc_feature 1..20: note = C9Orf72 ATCN PAM targeting sequence
  source 1..20: mol_type = other RNA
cagtaaaagcagaattttag

SEQ ID NO: 3752 - RNA, 20 nt, synthetic construct
  misc_feature 1..20: note = C9Orf72 ATCN PAM targeting sequence
  source 1..20: mol_type = other RNA
caagttgaggaaacttagaa

SEQ ID NO: 3753 - RNA, 20 nt, synthetic construct
  misc_feature 1..20: note = C9Orf72 ATCN PAM targeting sequence
  source 1..20: mol_type = other RNA
cagtccttatttgctggtca

SEQ ID NO: 3754 - RNA, 20 nt, synthetic construct
  misc_feature 1..20: note = C9Orf72 ATCN PAM targeting sequence
  source 1..20: mol_type = other RNA
tttcttgttaagtcagacct

SEQ ID NO: 3755 - RNA, 20 nt, synthetic construct
  misc_feature 1..20: note = C9Orf72 ATCN PAM targeting sequence
  source 1..20: mol_type = other RNA
acaaaagtacaaacataaca

SEQ ID NO: 3756 - RNA, 20 nt, synthetic construct
  misc_feature 1..20: note = C9Orf72 ATCN PAM targeting sequence
  source 1..20: mol_type = other RNA
cctttaccaaattgttatgt

SEQ ID NO: 3757 - RNA, 20 nt, synthetic construct
  misc_feature 1..20: note = C9Orf72 ATCN PAM targeting sequence
  source 1..20: mol_type = other RNA
ttgtattgggttctgtatta

SEQ ID NO: 3758 - RNA, 20 nt, synthetic construct
  misc_feature 1..20: note = C9Orf72 ATCN PAM targeting sequence
  source 1..20: mol_type = other RNA
tctgtctcattcatgctaaa

SEQ ID NO: 3759 - RNA, 20 nt, synthetic construct
  misc_feature 1..20: note = C9Orf72 ATCN PAM targeting sequence
  source 1..20: mol_type = other RNA
gtctcattcatgctaaaaag

SEQ ID NO: 3760 - RNA, 20 nt, synthetic construct
  misc_feature 1..20: note = C9Orf72 ATCN PAM targeting sequence
  source 1..20: mol_type = other RNA
ccagtgaagaaagagttctt

SEQ ID NO: 3761 - RNA, 20 nt, synthetic construct
  misc_feature 1..20: note = C9Orf72 ATCN PAM targeting sequence
  source 1..20: mol_type = other RNA
cttggctttgaatgcccctc

SEQ ID NO: 3762 - RNA, 20 nt, synthetic construct
  misc_feature 1..20: note = C9Orf72 ATCN PAM targeting sequence
  source 1..20: mol_type = other RNA
ctgacaaattttaatactaa

SEQ ID NO: 3763 - RNA, 20 nt, synthetic construct
  misc_feature 1..20: note = C9Orf72 ATCN PAM targeting sequence
  source 1..20: mol_type = other RNA
ttaagactcatgcaatttac

SEQ ID NO: 3764 - RNA, 20 nt, synthetic construct
  misc_feature 1..20: note = C9Orf72 ATCN PAM targeting sequence
  source 1..20: mol_type = other RNA
gtctggggtgtaggcccagg

SEQ ID NO: 3765 - RNA, 20 nt, synthetic construct
  misc_feature 1..20: note = C9Orf72 ATCN PAM targeting sequence
  source 1..20: mol_type = other RNA
gagacaattttttttatttt

SEQ ID NO: 3766 - RNA, 20 nt, synthetic construct
  misc_feature 1..20: note = C9Orf72 ATCN PAM targeting sequence
  source 1..20: mol_type = other RNA
aaaatttattctgggcaaac

SEQ ID NO: 3767 - RNA, 20 nt, synthetic construct
  misc_feature 1..20: note = C9Orf72 ATCN PAM targeting sequence
  source 1..20: mol_type = other RNA
acaaattaatatttgctccc

SEQ ID NO: 3768 - RNA, 20 nt, synthetic construct
  misc_feature 1..20: note = C9Orf72 ATCN PAM targeting sequence
  source 1..20: mol_type = other RNA
gtaaacaaaggaaaatagta

SEQ ID NO: 3769 - RNA, 20 nt, synthetic construct
  misc_feature 1..20: note = C9Orf72 ATCN PAM targeting sequence
  source 1..20: mol_type = other RNA
taaacccaaagagttaaatc

SEQ ID NO: 3770 - RNA, 20 nt, synthetic construct
  misc_feature 1..20: note = C9Orf72 ATCN PAM targeting sequence
  source 1..20: mol_type = other RNA
tcctccagtttattctgtac

SEQ ID NO: 3771 - RNA, 20 nt, synthetic construct
  misc_feature 1..20: note = C9Orf72 ATCN PAM targeting sequence
  source 1..20: mol_type = other RNA
accttatacagatacatgct

SEQ ID NO: 3772 - RNA, 20 nt, synthetic construct
  misc_feature 1..20: note = C9Orf72 ATCN PAM targeting sequence
  source 1..20: mol_type = other RNA
gtataaggttgatggctaca

SEQ ID NO: 3773 - RNA, 20 nt, synthetic construct
  misc_feature 1..20: note = C9Orf72 ATCN PAM targeting sequence
  source 1..20: mol_type = other RNA
ggtatatgcaaattgcatac

SEQ ID NO: 3774 - RNA, 20 nt, synthetic construct
  misc_feature 1..20: note = C9Orf72 ATCN PAM targeting sequence
  source 1..20: mol_type = other RNA
tccattctctctgtgccttc

SEQ ID NO: 3775 - RNA, 20 nt, synthetic construct
  misc_feature 1..20: note = C9Orf72 ATCN PAM targeting sequence
  source 1..20: mol_type = other RNA
tagaaggcacagagagaatg

SEQ ID NO: 3776 - RNA, 20 nt, synthetic construct
  misc_feature 1..20: note = C9Orf72 ATCN PAM targeting sequence
  source 1..20: mol_type = other RNA
tctggacattttcttgtctt

SEQ ID NO: 3777 - RNA, 20 nt, synthetic construct
  misc_feature 1..20: note = C9Orf72 ATCN PAM targeting sequence
  source 1..20: mol_type = other RNA
aaatgttgtgggttgttttt

SEQ ID NO: 3778 - RNA, 20 nt, synthetic construct
  misc_feature 1..20: note = C9Orf72 ATCN PAM targeting sequence
  source 1..20: mol_type = other RNA
aaacaacctttattctgcag

SEQ ID NO: 3779 - RNA, 20 nt, synthetic construct
  misc_feature 1..20: note = C9Orf72 ATCN PAM targeting sequence
  source 1..20: mol_type = other RNA
ttttttcactgcagaataaa

SEQ ID NO: 3780 - RNA, 20 nt, synthetic construct
  misc_feature 1..20: note = C9Orf72 ATCN PAM targeting sequence
  source 1..20: mol_type = other RNA
gcatagtttcaaaaaggaaa

SEQ ID NO: 3781 - RNA, 20 nt, synthetic construct
  misc_feature 1..20: note = C9Orf72 ATCN PAM targeting sequence
  source 1..20: mol_type = other RNA
taatgtttaatttgaaaagt

SEQ ID NO: 3782 - RNA, 20 nt, synthetic construct
  misc_feature 1..20: note = C9Orf72 ATCN PAM targeting sequence
  source 1..20: mol_type = other RNA
tttaaacaacatcataatgt

SEQ ID NO: 3783 - RNA, 20 nt, synthetic construct
  misc_feature 1..20: note = C9Orf72 ATCN PAM targeting sequence
  source 1..20: mol_type = other RNA
ggagaatcttttaaacaaca

SEQ ID NO: 3784 - RNA, 20 nt, synthetic construct
  misc_feature 1..20: note = C9Orf72 ATCN PAM targeting sequence
  source 1..20: mol_type = other RNA
tttaaaagaataatttttta

SEQ ID NO: 3785 - RNA, 20 nt, synthetic construct
  misc_feature 1..20: note = C9Orf72 ATCN PAM targeting sequence
  source 1..20: mol_type = other RNA
aactggaacacaggaaggag

SEQ ID NO: 3786 - RNA, 20 nt, synthetic construct
  misc_feature 1..20: note = C9Orf72 ATCN PAM targeting sequence
  source 1..20: mol_type = other RNA
aaagaacacattgaattctc

SEQ ID NO: 3787 - RNA, 20 nt, synthetic construct
  misc_feature 1..20: note = C9Orf72 ATCN PAM targeting sequence
  source 1..20: mol_type = other RNA
aaactatactgaaatgtaaa

SEQ ID NO: 3788 - RNA, 20 nt, synthetic construct
  misc_feature 1..20: note = C9Orf72 ATCN PAM targeting sequence
  source 1..20: mol_type = other RNA
tgtagttgaatatataatgc

SEQ ID NO: 3789 - RNA, 20 nt, synthetic construct
  misc_feature 1..20: note = C9Orf72 ATCN PAM targeting sequence
  source 1..20: mol_type = other RNA
tacagaaattattgttttcc

SEQ ID NO: 3790 - RNA, 20 nt, synthetic construct
  misc_feature 1..20: note = C9Orf72 ATCN PAM targeting sequence
  source 1..20: mol_type = other RNA
agggtctaaaagtttcttta

SEQ ID NO: 3791 - RNA, 20 nt, synthetic construct
  misc_feature 1..20: note = C9Orf72 ATCN PAM targeting sequence
  source 1..20: mol_type = other RNA
ataatgtggagctaccattt

SEQ ID NO: 3792 - RNA, 20 nt, synthetic construct
  misc_feature 1..20: note = C9Orf72 ATCN PAM targeting sequence
  source 1..20: mol_type = other RNA
tcatattaactgtggaaggt

SEQ ID NO: 3793 - RNA, 20 nt, synthetic construct
  misc_feature 1..20: note = C9Orf72 ATCN PAM targeting sequence
  source 1..20: mol_type = other RNA
gaccagatgtatttgtatct

SEQ ID NO: 3794 - RNA, 20 nt, synthetic construct
  misc_feature 1..20: note = C9Orf72 ATCN PAM targeting sequence
  source 1..20: mol_type = other RNA
ggtctgatacctgtcatctt

SEQ ID NO: 3795 - RNA, 20 nt, synthetic construct
  misc_feature 1..20: note = C9Orf72 ATCN PAM targeting sequence
  source 1..20: mol_type = other RNA
aatagggtaaatgcaaaata

SEQ ID NO: 3796 - RNA, 20 nt, synthetic construct
  misc_feature 1..20: note = C9Orf72 ATCN PAM targeting sequence
  source 1..20: mol_type = other RNA
aacaataaatgttatttatt

SEQ ID NO: 3797 - RNA, 20 nt, synthetic construct
  misc_feature 1..20: note = C9Orf72 ATCN PAM targeting sequence
  source 1..20: mol_type = other RNA
tatttttttaattatatgca

SEQ ID NO: 3798 - RNA, 20 nt, synthetic construct
  misc_feature 1..20: note = C9Orf72 ATCN PAM targeting sequence
  source 1..20: mol_type = other RNA
gttgaaagcttattttctgg

SEQ ID NO: 3799 - RNA, 20 nt, synthetic construct
  misc_feature 1..20: note = C9Orf72 ATCN PAM targeting sequence
  source 1..20: mol_type = other RNA
tgttaacctatctgttgaaa

SEQ ID NO: 3800 - RNA, 20 nt, synthetic construct
  misc_feature 1..20: note = C9Orf72 ATCN PAM targeting sequence
  source 1..20: mol_type = other RNA
cttaccttatgcatccatat

SEQ ID NO: 3801 - RNA, 20 nt, synthetic construct
  misc_feature 1..20: note = C9Orf72 ATCN PAM targeting sequence
  source 1..20: mol_type = other RNA
atattcttcctttccggatt

SEQ ID NO: 3802 - RNA, 20 nt, synthetic construct
  misc_feature 1..20: note = C9Orf72 ATCN PAM targeting sequence
  source 1..20: mol_type = other RNA
ggaaaggaagaatatggatg

SEQ ID NO: 3803 - RNA, 20 nt, synthetic construct
  misc_feature 1..20: note = C9Orf72 ATCN PAM targeting sequence
  source 1..20: mol_type = other RNA
atcaacacacactctatgaa

SEQ ID NO: 3804 - RNA, 20 nt, synthetic construct
  misc_feature 1..20: note = C9Orf72 ATCN PAM targeting sequence
  source 1..20: mol_type = other RNA
acacacactctatgaagtgg

SEQ ID NO: 3805 - RNA, 20 nt, synthetic construct
  misc_feature 1..20: note = C9Orf72 ATCN PAM targeting sequence
  source 1..20: mol_type = other RNA
attatacttccacagacaga

SEQ ID NO: 3806 - RNA, 20 nt, synthetic construct
  misc_feature 1..20: note = C9Orf72 ATCN PAM targeting sequence
  source 1..20: mol_type = other RNA
cagcacatatggactatcaa

SEQ ID NO: 3807 - RNA, 20 nt, synthetic construct
  misc_feature 1..20: note = C9Orf72 ATCN PAM targeting sequence
  source 1..20: mol_type = other RNA
ccattccagtttccatcaaa

SEQ ID NO: 3808 - RNA, 20 nt, synthetic construct
  misc_feature 1..20: note = C9Orf72 ATCN PAM targeting sequence
  source 1..20: mol_type = other RNA
aagattaatgaaacaataat

SEQ ID NO: 3809 - RNA, 20 nt, synthetic construct
  misc_feature 1..20: note = C9Orf72 ATCN PAM targeting sequence
  source 1..20: mol_type = other RNA
ttgatggaaactggaatggg

SEQ ID NO: 3810 - RNA, 20 nt, synthetic construct
  misc_feature 1..20: note = C9Orf72 ATCN PAM targeting sequence
  source 1..20: mol_type = other RNA
ctcccttttcagacaagaca

SEQ ID NO: 3811 - RNA, 20 nt, synthetic construct
  misc_feature 1..20: note = C9Orf72 ATCN PAM targeting sequence
  source 1..20: mol_type = other RNA
atagcaccactctctgcatt

SEQ ID NO: 3812 - RNA, 20 nt, synthetic construct
  misc_feature 1..20: note = C9Orf72 ATCN PAM targeting sequence
  source 1..20: mol_type = other RNA
ttcgaaatgcagagagtggt

SEQ ID NO: 3813 - RNA, 20 nt, synthetic construct
  misc_feature 1..20: note = C9Orf72 ATCN PAM targeting sequence
  source 1..20: mol_type = other RNA
ctgagaagtacctgttctgt

SEQ ID NO: 3814 - RNA, 20 nt, synthetic construct
  misc_feature 1..20: note = C9Orf72 ATCN PAM targeting sequence
  source 1..20: mol_type = other RNA
cctttattagcagctacttt

SEQ ID NO: 3815 - RNA, 20 nt, synthetic construct
  misc_feature 1..20: note = C9Orf72 ATCN PAM targeting sequence
  source 1..20: mol_type = other RNA
ctgtcttggcaacagctgga

SEQ ID NO: 3816 - RNA, 20 nt, synthetic construct
  misc_feature 1..20: note = C9Orf72 ATCN PAM targeting sequence
  source 1..20: mol_type = other RNA
ccagctgttgccaagacaga

SEQ ID NO: 3817 - RNA, 20 nt, synthetic construct
  misc_feature 1..20: note = C9Orf72 ATCN PAM targeting sequence
  source 1..20: mol_type = other RNA
ctgcattccaactgtcacat

SEQ ID NO: 3818 - RNA, 20 nt, synthetic construct
  misc_feature 1..20: note = C9Orf72 ATCN PAM targeting sequence
  source 1..20: mol_type = other RNA
aaatgctccggagatatcta

SEQ ID NO: 3819 - RNA, 20 nt, synthetic construct
  misc_feature 1..20: note = C9Orf72 ATCN PAM targeting sequence
  source 1..20: mol_type = other RNA
ccggagcatttggataatgt

SEQ ID NO: 3820 - RNA, 20 nt, synthetic construct
  misc_feature 1..20: note = C9Orf72 ATCN PAM targeting sequence
  source 1..20: mol_type = other RNA
aaacaatgacatatgaaacc

SEQ ID NO: 3821 - RNA, 20 nt, synthetic construct
  misc_feature 1..20: note = C9Orf72 ATCN PAM targeting sequence
  source 1..20: mol_type = other RNA
ttggtttcatatgtcattgt

SEQ ID NO: 3822 - RNA, 20 nt, synthetic construct
  misc_feature 1..20: note = C9Orf72 ATCN PAM targeting sequence
  source 1..20: mol_type = other RNA
ttaaattgctgaacctaatc

SEQ ID NO: 3823 - RNA, 20 nt, synthetic construct
  misc_feature 1..20: note = C9Orf72 ATCN PAM targeting sequence
  source 1..20: mol_type = other RNA
atcaaaaccccaaatgattt

SEQ ID NO: 3824 - RNA, 20 nt, synthetic construct
  misc_feature 1..20: note = C9Orf72 ATCN PAM targeting sequence
  source 1..20: mol_type = other RNA
aaaccccaaatgatttagac

SEQ ID NO: 3825 - RNA, 20 nt, synthetic construct
  misc_feature 1..20: note = C9Orf72 ATCN PAM targeting sequence
  source 1..20: mol_type = other RNA
tttggggttttgatggatat

SEQ ID NO: 3826 - RNA, 20 nt, synthetic construct
  misc_feature 1..20: note = C9Orf72 ATCN PAM targeting sequence
  source 1..20: mol_type = other RNA
ttgacttaagaggacaaacc

SEQ ID NO: 3827 - RNA, 20 nt, synthetic construct
  misc_feature 1..20: note = C9Orf72 ATCN PAM targeting sequence
  source 1..20: mol_type = other RNA
tgttatctcctatcaggata

SEQ ID NO: 3828 - RNA, 20 nt, synthetic construct
  misc_feature 1..20: note = C9Orf72 ATCN PAM targeting sequence
  source 1..20: mol_type = other RNA
cctatcaggataaagacatt

SEQ ID NO: 3829 - RNA, 20 nt, synthetic construct
  misc_feature 1..20: note = C9Orf72 ATCN PAM targeting sequence
  source 1..20: mol_type = other RNA
ggataaagacattcaactag

SEQ ID NO: 3830 - RNA, 20 nt, synthetic construct
  misc_feature 1..20: note = C9Orf72 ATCN PAM targeting sequence
  source 1..20: mol_type = other RNA
tgataggagataacaggatt

SEQ ID NO: 3831 - RNA, 20 nt, synthetic construct
  misc_feature 1..20: note = C9Orf72 ATCN PAM targeting sequence
  source 1..20: mol_type = other RNA
acaaacatttaatgtgcacc

SEQ ID NO: 3832 - RNA, 20 nt, synthetic construct
  misc_feature 1..20: note = C9Orf72 ATCN PAM targeting sequence
  source 1..20: mol_type = other RNA
tatcaacaaacatttaatgt

SEQ ID NO: 3833 - RNA, 20 nt, synthetic construct
  misc_feature 1..20: note = C9Orf72 ATCN PAM targeting sequence
  source 1..20: mol_type = other RNA
ttttacaagacatggtaact

SEQ ID NO: 3834 - RNA, 20 nt, synthetic construct
  misc_feature 1..20: note = C9Orf72 ATCN PAM targeting sequence
  source 1..20: mol_type = other RNA
gtgtaaagaagccctttttt

SEQ ID NO: 3835 - RNA, 20 nt, synthetic construct
  misc_feature 1..20: note = C9Orf72 ATCN PAM targeting sequence
  source 1..20: mol_type = other RNA
agtccatgtgcaattctagt

SEQ ID NO: 3836 - RNA, 20 nt, synthetic construct
  misc_feature 1..20: note = C9Orf72 ATCN PAM targeting sequence
  source 1..20: mol_type = other RNA
ccagtcatactagaattgca

SEQ ID NO: 3837 - RNA, 20 nt, synthetic construct
  misc_feature 1..20: note = C9Orf72 ATCN PAM targeting sequence
  source 1..20: mol_type = other RNA
ttttgggggacacaattcaa

SEQ ID NO: 3838 - RNA, 20 nt, synthetic construct
  misc_feature 1..20: note = C9Orf72 ATCN PAM targeting sequence
  source 1..20: mol_type = other RNA
agaaataagtgtaatcatgt

SEQ ID NO: 3839 - RNA, 20 nt, synthetic construct
  misc_feature 1..20: note = C9Orf72 ATCN PAM targeting sequence
  source 1..20: mol_type = other RNA
tgttaaaatggggtcatact

SEQ ID NO: 3840 - RNA, 20 nt, synthetic construct
  misc_feature 1..20: note = C9Orf72 ATCN PAM targeting sequence
  source 1..20: mol_type = other RNA
agtatgaccccattttaaca

SEQ ID NO: 3841 - RNA, 20 nt, synthetic construct
  misc_feature 1..20: note = C9Orf72 ATCN PAM targeting sequence
  source 1..20: mol_type = other RNA
aataactgctgtgtttataa

SEQ ID NO: 3842 - RNA, 20 nt, synthetic construct
  misc_feature 1..20: note = C9Orf72 ATCN PAM targeting sequence
  source 1..20: mol_type = other RNA
ctctccttataaacacagca

SEQ ID NO: 3843 - RNA, 20 nt, synthetic construct
  misc_feature 1..20: note = C9Orf72 ATCN PAM targeting sequence
  source 1..20: mol_type = other RNA
gccttttgtcttcacatggc

SEQ ID NO: 3844 - RNA, 20 nt, synthetic construct
  misc_feature 1..20: note = C9Orf72 ATCN PAM targeting sequence
  source 1..20: mol_type = other RNA
agtatctgccttttgtcttc

SEQ ID NO: 3845 - RNA, 20 nt, synthetic construct
  misc_feature 1..20: note = C9Orf72 ATCN PAM targeting sequence
  source 1..20: mol_type = other RNA
tgagtgttcctttcttgcct

SEQ ID NO: 3846 - RNA, 20 nt, synthetic construct
  misc_feature 1..20: note = C9Orf72 ATCN PAM targeting sequence
  source 1..20: mol_type = other RNA
tcaagagagaagactctttc

SEQ ID NO: 3847 - RNA, 20 nt, synthetic construct
  misc_feature 1..20: note = C9Orf72 ATCN PAM targeting sequence
  source 1..20: mol_type = other RNA
tgcccctgtcaacactttga

SEQ ID NO: 3848 - RNA, 20 nt, synthetic construct
  misc_feature 1..20: note = C9Orf72 ATCN PAM targeting sequence
  source 1..20: mol_type = other RNA
aagtgttgacaggggcatga

SEQ ID NO: 3849 - RNA, 20 nt, synthetic construct
  misc_feature 1..20: note = C9Orf72 ATCN PAM targeting sequence
  source 1..20: mol_type = other RNA
tagaaaagtaatacaacacc

SEQ ID NO: 3850 - RNA, 20 nt, synthetic construct
  misc_feature 1..20: note = C9Orf72 ATCN PAM targeting sequence
  source 1..20: mol_type = other RNA
tcagtgaactctctggttat

SEQ ID NO: 3851 - RNA, 20 nt, synthetic construct
  misc_feature 1..20: note = C9Orf72 ATCN PAM targeting sequence
  source 1..20: mol_type = other RNA
ggcttcagtattctcataac

SEQ ID NO: 3852 - RNA, 20 nt, synthetic construct
  misc_feature 1..20: note = C9Orf72 ATCN PAM targeting sequence
  source 1..20: mol_type = other RNA
tgatgtttaaaacgacattg

SEQ ID NO: 3853 - RNA, 20 nt, synthetic construct
  misc_feature 1..20: note = C9Orf72 ATCN PAM targeting sequence
  source 1..20: mol_type = other RNA
ggatcgggcttcagtattct

SEQ ID NO: 3854 - RNA, 20 nt, synthetic construct
  misc_feature 1..20: note = C9Orf72 ATCN PAM targeting sequence
  source 1..20: mol_type = other RNA
agacaaagataaaaatattt

SEQ ID NO: 3855 - RNA, 20 nt, synthetic construct
  misc_feature 1..20: note = C9Orf72 ATCN PAM targeting sequence
  source 1..20: mol_type = other RNA
ttgtcttgatacttcaatgt

SEQ ID NO: 3856 - RNA, 20 nt, synthetic construct
  misc_feature 1..20: note = C9Orf72 ATCN PAM targeting sequence
  source 1..20: mol_type = other RNA
ctgcaaagagagttctacac

SEQ ID NO: 3857 - RNA, 20 nt, synthetic construct
  misc_feature 1..20: note = C9Orf72 ATCN PAM targeting sequence
  source 1..20: mol_type = other RNA
aagacagaacccagggctct

SEQ ID NO: 3858 - RNA, 20 nt, synthetic construct
  misc_feature 1..20: note = C9Orf72 ATCN PAM targeting sequence
  source 1..20: mol_type = other RNA
taatccacataaacatacca

SEQ ID NO: 3859 - RNA, 20 nt, synthetic construct
  misc_feature 1..20: note = C9Orf72 ATCN PAM targeting sequence
  source 1..20: mol_type = other RNA
acataaacataccactctaa

SEQ ID NO: 3860 - RNA, 20 nt, synthetic construct
  misc_feature 1..20: note = C9Orf72 ATCN PAM targeting sequence
  source 1..20: mol_type = other RNA
tatgtgatattaatgtaaaa

SEQ ID NO: 3861 - RNA, 20 nt, synthetic construct
  misc_feature 1..20: note = C9Orf72 ATCN PAM targeting sequence
  source 1..20: mol_type = other RNA
cataggatgtacctttttag

SEQ ID NO: 3862 - RNA, 20 nt, synthetic construct
  misc_feature 1..20: note = C9Orf72 ATCN PAM targeting sequence
  source 1..20: mol_type = other RNA
ttcttgcaaatacagttatg

SEQ ID NO: 3863 - RNA, 20 nt, synthetic construct
  misc_feature 1..20: note = C9Orf72 ATCN PAM targeting sequence
  source 1..20: mol_type = other RNA
tatatgcagtctaccattga

SEQ ID NO: 3864 - RNA, 20 nt, synthetic construct
  misc_feature 1..20: note = C9Orf72 ATCN PAM targeting sequence
  source 1..20: mol_type = other RNA
aatgggactaccatcatata

SEQ ID NO: 3865 - RNA, 20 nt, synthetic construct
  misc_feature 1..20: note = C9Orf72 ATCN PAM targeting sequence
  source 1..20: mol_type = other RNA
taaggtcttagtactatttt

SEQ ID NO: 3866 - RNA, 20 nt, synthetic construct
  misc_feature 1..20: note = C9Orf72 ATCN PAM targeting sequence
  source 1..20: mol_type = other RNA
agtgttgtacactgtaataa

SEQ ID NO: 3867 - RNA, 20 nt, synthetic construct
  misc_feature 1..20: note = C9Orf72 ATCN PAM targeting sequence
  source 1..20: mol_type = other RNA
taggtgacagctacatgtgt

SEQ ID NO: 3868 - RNA, 20 nt, synthetic construct
  misc_feature 1..20: note = C9Orf72 ATCN PAM targeting sequence
  source 1..20: mol_type = other RNA
tgtcccactggaaggttttt

SEQ ID NO: 3869 - RNA, 20 nt, synthetic construct
  misc_feature 1..20: note = C9Orf72 ATCN PAM targeting sequence
  source 1..20: mol_type = other RNA
ctcccttccacctcactgcc

SEQ ID NO: 3870 - RNA, 20 nt, synthetic construct
  misc_feature 1..20: note = C9Orf72 ATCN PAM targeting sequence
  source 1..20: mol_type = other RNA
gtatcactcccttccacctc

SEQ ID NO: 3871 - RNA, 20 nt, synthetic construct
  misc_feature 1..20: note = C9Orf72 ATCN PAM targeting sequence
  source 1..20: mol_type = other RNA
tcagtatcactcccttccac

SEQ ID NO: 3872 - RNA, 20 nt, synthetic construct
  misc_feature 1..20: note = C9Orf72 ATCN PAM targeting sequence
  source 1..20: mol_type = other RNA
taatcctgtctatgcctagg

SEQ ID NO: 3873 - RNA, 20 nt, synthetic construct
  misc_feature 1..20: note = C9Orf72 ATCN PAM targeting sequence
  source 1..20: mol_type = other RNA
tgtctatgcctaggtgaaag

SEQ ID NO: 3874 - RNA, 20 nt, synthetic construct
  misc_feature 1..20: note = C9Orf72 ATCN PAM targeting sequence
  source 1..20: mol_type = other RNA
ttattctagaagcttttttc

SEQ ID NO: 3875 - RNA, 20 nt, synthetic construct
  misc_feature 1..20: note = C9Orf72 ATCN PAM targeting sequence
  source 1..20: mol_type = other RNA
taacagtttttcttcaataa

SEQ ID NO: 3876 - RNA, 20 nt, synthetic construct
  misc_feature 1..20: note = C9Orf72 ATCN PAM targeting sequence
  source 1..20: mol_type = other RNA
tttataccatacttttactg

SEQ ID NO: 3877 - RNA, 20 nt, synthetic construct
  misc_feature 1..20: note = C9Orf72 ATCN PAM targeting sequence
  source 1..20: mol_type = other RNA
aaatatatgcaaacagagaa

SEQ ID NO: 3878 - RNA, 20 nt, synthetic construct
  misc_feature 1..20: note = C9Orf72 ATCN PAM targeting sequence
  source 1..20: mol_type = other RNA
aggtttgtgtaagtacactc

SEQ ID NO: 3879 - RNA, 20 nt, synthetic construct
  misc_feature 1..20: note = C9Orf72 ATCN PAM targeting sequence
  source 1..20: mol_type = other RNA
tagagtgtacttacacaaac

SEQ ID NO: 3880 - RNA, 20 nt, synthetic construct
  misc_feature 1..20: note = C9Orf72 ATCN PAM targeting sequence
  source 1..20: mol_type = other RNA
cctaatgatgcattcctaag

SEQ ID NO: 3881 - RNA, 20 nt, synthetic construct
  misc_feature 1..20: note = C9Orf72 ATCN PAM targeting sequence
  source 1..20: mol_type = other RNA
ttaggcgattttgtcattat

SEQ ID NO: 3882 - RNA, 20 nt, synthetic construct
  misc_feature 1..20: note = C9Orf72 ATCN PAM targeting sequence
  source 1..20: mol_type = other RNA
cacattgcttaggaatgcat

SEQ ID NO: 3883 - RNA, 20 nt, synthetic construct
  misc_feature 1..20: note = C9Orf72 ATCN PAM targeting sequence
  source 1..20: mol_type = other RNA
aagactgaaagtaaaaagaa

SEQ ID NO: 3884 - RNA, 20 nt, synthetic construct
  misc_feature 1..20: note = C9Orf72 ATCN PAM targeting sequence
  source 1..20: mol_type = other RNA
tagtttgcctattagctgct

SEQ ID NO: 3885 - RNA, 20 nt, synthetic construct
  misc_feature 1..20: note = C9Orf72 ATCN PAM targeting sequence
  source 1..20: mol_type = other RNA
ttgccatatgattgctttgg

SEQ ID NO: 3886 - RNA, 20 nt, synthetic construct
  misc_feature 1..20: note = C9Orf72 ATCN PAM targeting sequence
  source 1..20: mol_type = other RNA
tatggcaaagataggtatat

SEQ ID NO: 3887 - RNA, 20 nt, synthetic construct
  misc_feature 1..20: note = C9Orf72 ATCN PAM targeting sequence
  source 1..20: mol_type = other RNA
aatgttagctcccaaagcaa

SEQ ID NO: 3888 - RNA, 20 nt, synthetic construct
  misc_feature 1..20: note = C9Orf72 ATCN PAM targeting sequence
  source 1..20: mol_type = other RNA
gtaaatgtatgacaaagtaa

SEQ ID NO: 3889 - RNA, 20 nt, synthetic construct
  misc_feature 1..20: note = C9Orf72 ATCN PAM targeting sequence
  source 1..20: mol_type = other RNA
acatcttgtcaagagagttc

SEQ ID NO: 3890 - RNA, 20 nt, synthetic construct
  misc_feature 1..20: note = C9Orf72 ATCN PAM targeting sequence
  source 1..20: mol_type = other RNA
tgtcaagagagttcagtctg

SEQ ID NO: 3891 - RNA, 20 nt, synthetic construct
  misc_feature 1..20: note = C9Orf72 ATCN PAM targeting sequence
  source 1..20: mol_type = other RNA
gactgaactctcttgacaag

SEQ ID NO: 3892 - RNA, 20 nt, synthetic construct
  misc_feature 1..20: note = C9Orf72 ATCN PAM targeting sequence
  source 1..20: mol_type = other RNA
aatgctctgtaaatagaagt

SEQ ID NO: 3893 - RNA, 20 nt, synthetic construct
  misc_feature 1..20: note = C9Orf72 ATCN PAM targeting sequence
  source 1..20: mol_type = other RNA
tattatgagtaggcatacag

SEQ ID NO: 3894 - RNA, 20 nt, synthetic construct
  misc_feature 1..20: note = C9Orf72 ATCN PAM targeting sequence
  source 1..20: mol_type = other RNA
atttaatagtcttaagagac

SEQ ID NO: 3895 - RNA, 20 nt, synthetic construct
  misc_feature 1..20: note = C9Orf72 ATCN PAM targeting sequence
  source 1..20: mol_type = other RNA
agtgctgtctcttaagacta

SEQ ID NO: 3896 - RNA, 20 nt, synthetic construct
  misc_feature 1..20: note = C9Orf72 ATCN PAM targeting sequence
  source 1..20: mol_type = other RNA
actgtttttaatacaatgta

SEQ ID NO: 3897 - RNA, 20 nt, synthetic construct
  misc_feature 1..20: note = C9Orf72 ATCN PAM targeting sequence
  source 1..20: mol_type = other RNA
ttgtaaactgactgcttaca

SEQ ID NO: 3898 - RNA, 20 nt, synthetic construct
  misc_feature 1..20: note = C9Orf72 ATCN PAM targeting sequence
  source 1..20: mol_type = other RNA
aatataggaatgtaatctga

SEQ ID NO: 3899 - RNA, 20 nt, synthetic construct
  misc_feature 1..20: note = C9Orf72 ATCN PAM targeting sequence
  source 1..20: mol_type = other RNA
gaattgaaatggtaatgaca

SEQ ID NO: 3900 - RNA, 20 nt, synthetic construct
  misc_feature 1..20: note = C9Orf72 ATCN PAM targeting sequence
  source 1..20: mol_type = other RNA
acctttttaacctaaaagaa

SEQ ID NO: 3901 - RNA, 20 nt, synthetic construct
  misc_feature 1..20: note = C9Orf72 ATCN PAM targeting sequence
  source 1..20: mol_type = other RNA
taaaggcaatattacaactc

SEQ ID NO: 3902 - RNA, 20 nt, synthetic construct
  misc_feature 1..20: note = C9Orf72 ATCN PAM targeting sequence
  source 1..20: mol_type = other RNA
ttaaactgaaaataaaagta

SEQ ID NO: 3903 - RNA, 20 nt, synthetic construct
  misc_feature 1..20: note = C9Orf72 ATCN PAM targeting sequence
  source 1..20: mol_type = other RNA
gattgaattatagggaaact

SEQ ID NO: 3904 - RNA, 20 nt, synthetic construct
  misc_feature 1..20: note = C9Orf72 ATCN PAM targeting sequence
  source 1..20: mol_type = other RNA
gattttgctccagggttcag

SEQ ID NO: 3905 - RNA, 20 nt, synthetic construct
  misc_feature 1..20: note = C9Orf72 ATCN PAM targeting sequence
  source 1..20: mol_type = other RNA
cagctctttggtaggccgag

SEQ ID NO: 3906 - RNA, 20 nt, synthetic construct
  misc_feature 1..20: note = C9Orf72 ATCN PAM targeting sequence
  source 1..20: mol_type = other RNA
acctgcctcggcctaccaaa

SEQ ID NO: 3907 - RNA, 20 nt, synthetic construct
  misc_feature 1..20: note = C9Orf72 ATCN PAM targeting sequence
  source 1..20: mol_type = other RNA
cctgaggtcaggagctcaag

SEQ ID NO: 3908 - RNA, 20 nt, synthetic construct
  misc_feature 1..20: note = C9Orf72 ATCN PAM targeting sequence
  source 1..20: mol_type = other RNA
cagctactcgggaggctgag

SEQ ID NO: 3909 - RNA, 20 nt, synthetic construct
  misc_feature 1..20: note = C9Orf72 ATCN PAM targeting sequence
  source 1..20: mol_type = other RNA
cttgaacccggaggtggcag

SEQ ID NO: 3910 - RNA, 20 nt, synthetic construct
  misc_feature 1..20: note = C9Orf72 ATCN PAM targeting sequence
  source 1..20: mol_type = other RNA
cagctcattgcaacctctgc

SEQ ID NO: 3911 - RNA, 20 nt, synthetic construct
  misc_feature 1..20: note = C9Orf72 ATCN PAM targeting sequence
  source 1..20: mol_type = other RNA
ttgtccttcattttctttct

SEQ ID NO: 3912 - RNA, 20 nt, synthetic construct
  misc_feature 1..20: note = C9Orf72 ATCN PAM targeting sequence
  source 1..20: mol_type = other RNA
tactgaattgcttagtttta

SEQ ID NO: 3913 - RNA, 20 nt, synthetic construct
  misc_feature 1..20: note = C9Orf72 ATCN PAM targeting sequence
  source 1..20: mol_type = other RNA
taccaaaagaaatagcctgg

SEQ ID NO: 3914 - RNA, 20 nt, synthetic construct
  misc_feature 1..20: note = C9Orf72 ATCN PAM targeting sequence
  source 1..20: mol_type = other RNA
ggagagctgtacaattattt

SEQ ID NO: 3915 - RNA, 20 nt, synthetic construct
  misc_feature 1..20: note = C9Orf72 ATCN PAM targeting sequence
  source 1..20: mol_type = other RNA
tctttggtgagaaaaatcca

SEQ ID NO: 3916 - RNA, 20 nt, synthetic construct
  misc_feature 1..20: note = C9Orf72 ATCN PAM targeting sequence
  source 1..20: mol_type = other RNA
atacatgcaaatgcagctga

SEQ ID NO: 3917 - RNA, 20 nt, synthetic construct
  misc_feature 1..20: note = C9Orf72 ATCN PAM targeting sequence
  source 1..20: mol_type = other RNA
gctcaaaaccaatagttgtt

SEQ ID NO: 3918 - RNA, 20 nt, synthetic construct
  misc_feature 1..20: note = C9Orf72 ATCN PAM targeting sequence
  source 1..20: mol_type = other RNA
tacgtacatgtagtgctgtc

SEQ ID NO: 3919 - RNA, 20 nt, synthetic construct
  misc_feature 1..20: note = C9Orf72 ATCN PAM targeting sequence
  source 1..20: mol_type = other RNA
tggcttccctcaaaagactg

SEQ ID NO: 3920 - RNA, 20 nt, synthetic construct
  misc_feature 1..20: note = C9Orf72 ATCN PAM targeting sequence
  source 1..20: mol_type = other RNA
catacatgcagacatgatta

SEQ ID NO: 3921 - RNA, 20 nt, synthetic construct
  misc_feature 1..20: note = C9Orf72 ATCN PAM targeting sequence
  source 1..20: mol_type = other RNA
tgtctgcatgtatgggatta

SEQ ID NO: 3922 - RNA, 20 nt, synthetic construct
  misc_feature 1..20: note = C9Orf72 ATCN PAM targeting sequence
  source 1..20: mol_type = other RNA
gctaaaactgttagtagagt

SEQ ID NO: 3923 - RNA, 20 nt, synthetic construct
  misc_feature 1..20: note = C9Orf72 ATCN PAM targeting sequence
  source 1..20: mol_type = other RNA
accatctcttccctgattgg

SEQ ID NO: 3924 - RNA, 20 nt, synthetic construct
  misc_feature 1..20: note = C9Orf72 ATCN PAM targeting sequence
  source 1..20: mol_type = other RNA
cttccctgattggtatttag

SEQ ID NO: 3925 - RNA, 20 nt, synthetic construct
  misc_feature 1..20: note = C9Orf72 ATCN PAM targeting sequence
  source 1..20: mol_type = other RNA
gggaagagatggttgatttt

SEQ ID NO: 3926 - RNA, 20 nt, synthetic construct
  misc_feature 1..20: note = C9Orf72 ATCN PAM targeting sequence
  source 1..20: mol_type = other RNA
taaagccctcacttcttgtt

SEQ ID NO: 3927 - RNA, 20 nt, synthetic construct
  misc_feature 1..20: note = C9Orf72 ATCN PAM targeting sequence
  source 1..20: mol_type = other RNA
aggctggaatgcactggcag

SEQ ID NO: 3928 - RNA, 20 nt, synthetic construct
  misc_feature 1..20: note = C9Orf72 ATCN PAM targeting sequence
  source 1..20: mol_type = other RNA
tgccagtgcattccagcctg

SEQ ID NO: 3929 - RNA, 20 nt, synthetic construct
  misc_feature 1..20: note = C9Orf72 ATCN PAM targeting sequence
  source 1..20: mol_type = other RNA
tagctctcggtaacttcaaa

SEQ ID NO: 3930 - RNA, 20 nt, synthetic construct
  misc_feature 1..20: note = C9Orf72 ATCN PAM targeting sequence
  source 1..20: mol_type = other RNA
ccacgcccggctaagttttt

SEQ ID NO: 3931 - RNA, 20 nt, synthetic construct
  misc_feature 1..20: note = C9Orf72 ATCN PAM targeting sequence
  source 1..20: mol_type = other RNA
cttgaagccaggagttcaag

SEQ ID NO: 3932 - RNA, 20 nt, synthetic construct
  misc_feature 1..20: note = C9Orf72 ATCN PAM targeting sequence
  source 1..20: mol_type = other RNA
tcttgcctccgcctcccaaa

SEQ ID NO: 3933 - RNA, 20 nt, synthetic construct
  misc_feature 1..20: note = C9Orf72 ATCN PAM targeting sequence
  source 1..20: mol_type = other RNA
tgcttctctttgggctggga

SEQ ID NO: 3934 - RNA, 20 nt, synthetic construct
  misc_feature 1..20: note = C9Orf72 ATCN PAM targeting sequence
  source 1..20: mol_type = other RNA
taaaccgtccactttccaca

SEQ ID NO: 3935 - RNA, 20 nt, synthetic construct
  misc_feature 1..20: note = C9Orf72 ATCN PAM targeting sequence
  source 1..20: mol_type = other RNA
tcaacatcagggaagactgg

SEQ ID NO: 3936 - RNA, 20 nt, synthetic construct
  misc_feature 1..20: note = C9Orf72 ATCN PAM targeting sequence
  source 1..20: mol_type = other RNA
gggaagactggaaggtgaag

SEQ ID NO: 3937 - RNA, 20 nt, synthetic construct
  misc_feature 1..20: note = C9Orf72 ATCN PAM targeting sequence
  source 1..20: mol_type = other RNA
ctatctggccatttctcaca

SEQ ID NO: 3938 - RNA, 20 nt, synthetic construct
  misc_feature 1..20: note = C9Orf72 ATCN PAM targeting sequence
  source 1..20: mol_type = other RNA
ggccatttctcacagttcca

SEQ ID NO: 3939 - RNA, 20 nt, synthetic construct
  misc_feature 1..20: note = C9Orf72 ATCN PAM targeting sequence
  source 1..20: mol_type = other RNA
aattaacgtagaatagaacc

SEQ ID NO: 3940 - RNA, 20 nt, synthetic construct
  misc_feature 1..20: note = C9Orf72 ATCN PAM targeting sequence
  source 1..20: mol_type = other RNA
acttcataaggtgcttgtaa

SEQ ID NO: 3941 - RNA, 20 nt, synthetic construct
  misc_feature 1..20: note = C9Orf72 ATCN PAM targeting sequence
  source 1..20: mol_type = other RNA
ggaatgtggtaattactctc

SEQ ID NO: 3942 - RNA, 20 nt, synthetic construct
  misc_feature 1..20: note = C9Orf72 ATCN PAM targeting sequence
  source 1..20: mol_type = other RNA
gaaacaagaacgagagtaat

SEQ ID NO: 3943 - RNA, 20 nt, synthetic construct
  misc_feature 1..20: note = C9Orf72 ATCN PAM targeting sequence
  source 1..20: mol_type = other RNA
gcatgtagcagtttccaact

SEQ ID NO: 3944 - RNA, 20 nt, synthetic construct
  misc_feature 1..20: note = C9Orf72 ATCN PAM targeting sequence
  source 1..20: mol_type = other RNA
gttggaaactgctacatgct

SEQ ID NO: 3945 - RNA, 20 nt, synthetic construct
  misc_feature 1..20: note = C9Orf72 ATCN PAM targeting sequence
  source 1..20: mol_type = other RNA
cctatatgatagtcttgttt

SEQ ID NO: 3946 - RNA, 20 nt, synthetic construct
  misc_feature 1..20: note = C9Orf72 ATCN PAM targeting sequence
  source 1..20: mol_type = other RNA
tataggggatattaataacc

SEQ ID NO: 3947 - RNA, 20 nt, synthetic construct
  misc_feature 1..20: note = C9Orf72 ATCN PAM targeting sequence
  source 1..20: mol_type = other RNA
cagaaacaagactatcatat

SEQ ID NO: 3948 - RNA, 20 nt, synthetic construct
  misc_feature 1..20: note = C9Orf72 ATCN PAM targeting sequence
  source 1..20: mol_type = other RNA
gtgaatatcacagaaacaag

SEQ ID NO: 3949 - RNA, 20 nt, synthetic construct
  misc_feature 1..20: note = C9Orf72 ATCN PAM targeting sequence
  source 1..20: mol_type = other RNA
tatcttaacagtatcttttt

SEQ ID NO: 3950 - RNA, 20 nt, synthetic construct
  misc_feature 1..20: note = C9Orf72 ATCN PAM targeting sequence
  source 1..20: mol_type = other RNA
taacagtatctttttttttt

SEQ ID NO: 3951 - RNA, 20 nt, synthetic construct
  misc_feature 1..20: note = C9Orf72 ATCN PAM targeting sequence
  source 1..20: mol_type = other RNA
tttttttttttgatcctttg

SEQ ID NO: 3952 - RNA, 20 nt, synthetic construct
  misc_feature 1..20: note = C9Orf72 ATCN PAM targeting sequence
  source 1..20: mol_type = other RNA
aaaaaaaaaaagatactgtt

SEQ ID NO: 3953 - RNA, 20 nt, synthetic construct
  misc_feature 1..20: note = C9Orf72 ATCN PAM targeting sequence
  source 1..20: mol_type = other RNA
tttgtacaaaagtagaagta

SEQ ID NO: 3954 - RNA, 20 nt, synthetic construct
  misc_feature 1..20: note = C9Orf72 ATCN PAM targeting sequence
  source 1..20: mol_type = other RNA
gtctggcattacttctactt

SEQ ID NO: 3955 - RNA, 20 nt, synthetic construct
  misc_feature 1..20: note = C9Orf72 ATCN PAM targeting sequence
  source 1..20: mol_type = other RNA
cgattgcatctgaaagggcc

SEQ ID NO: 3956 - RNA, 20 nt, synthetic construct
  misc_feature 1..20: note = C9Orf72 ATCN PAM targeting sequence
  source 1..20: mol_type = other RNA
agattgttaggctctgggag

SEQ ID NO: 3957 - RNA, 20 nt, synthetic construct
  misc_feature 1..20: note = C9Orf72 ATCN PAM targeting sequence
  source 1..20: mol_type = other RNA
gaaagggccacccctcctgg

SEQ ID NO: 3958 - RNA, 20 nt, synthetic construct
  misc_feature 1..20: note = C9Orf72 ATCN PAM targeting sequence
  source 1..20: mol_type = other RNA
ggccgcgttgaacaccacca

SEQ ID NO: 3959 - RNA, 20 nt, synthetic construct
  misc_feature 1..20: note = C9Orf72 ATCN PAM targeting sequence
  source 1..20: mol_type = other RNA
gtgcacttctttagacaact

SEQ ID NO: 3960 - RNA, 20 nt, synthetic construct
  misc_feature 1..20: note = C9Orf72 ATCN PAM targeting sequence
  source 1..20: mol_type = other RNA
gttgtctaaagaagtgcaca

SEQ ID NO: 3961 - RNA, 20 nt, synthetic construct
  misc_feature 1..20: note = C9Orf72 ATCN PAM targeting sequence
  source 1..20: mol_type = other RNA
gtcaagtgatgcccaagtca

SEQ ID NO: 3962 - RNA, 20 nt, synthetic construct
  misc_feature 1..20: note = C9Orf72 ATCN PAM targeting sequence
  source 1..20: mol_type = other RNA
cttgactgatggtaatcagt

SEQ ID NO: 3963 - RNA, 20 nt, synthetic construct
  misc_feature 1..20: note = C9Orf72 ATCN PAM targeting sequence
  source 1..20: mol_type = other RNA
cggagctgtgaagcaaccag

SEQ ID NO: 3964 - RNA, 20 nt, synthetic construct
  misc_feature 1..20: note = C9Orf72 ATCN PAM targeting sequence
  source 1..20: mol_type = other RNA
ccactctctagaagcttggg

SEQ ID NO: 3965 - RNA, 20 nt, synthetic construct
  misc_feature 1..20: note = C9Orf72 ATCN PAM targeting sequence
  source 1..20: mol_type = other RNA
catcccgcatgatctcctcg

SEQ ID NO: 3966 - RNA, 20 nt, synthetic construct
  misc_feature 1..20: note = C9Orf72 ATCN PAM targeting sequence
  source 1..20: mol_type = other RNA
cgcatgatctcctcgccggc

SEQ ID NO: 3967 - RNA, 20 nt, synthetic construct
  misc_feature 1..20: note = C9Orf72 ATCN PAM targeting sequence
  source 1..20: mol_type = other RNA
tgcgggatgagatgggggtg

SEQ ID NO: 3968 - RNA, 20 nt, synthetic construct
  misc_feature 1..20: note = C9Orf72 ATCN PAM targeting sequence
  source 1..20: mol_type = other RNA
cctcgccggcagggaccgtc

SEQ ID NO: 3969 - RNA, 20 nt, synthetic construct
  misc_feature 1..20: note = C9Orf72 ATCN PAM targeting sequence
  source 1..20: mol_type = other RNA
ggcctcttccttgctttccc

SEQ ID NO: 3970 - RNA, 20 nt, synthetic construct
  misc_feature 1..20: note = C9Orf72 ATCN PAM targeting sequence
  source 1..20: mol_type = other RNA
ccatcccttgtccctgcgcc

SEQ ID NO: 3971 - RNA, 20 nt, synthetic construct
  misc_feature 1..20: note = C9Orf72 ATCN PAM targeting sequence
  source 1..20: mol_type = other RNA
cttgtccctgcgccgccgcc

SEQ ID NO: 3972 - RNA, 20 nt, synthetic construct
  misc_feature 1..20: note = C9Orf72 ATCN PAM targeting sequence
  source 1..20: mol_type = other RNA
gggccccgggcttcccggcg

SEQ ID NO: 3973 - RNA, 20 nt, synthetic construct
  misc_feature 1..20: note = C9Orf72 ATCN PAM targeting sequence
  source 1..20: mol_type = other RNA
tggcgggtggctgtttgggg

SEQ ID NO: 3974 - RNA, 20 nt, synthetic construct
  misc_feature 1..20: note = C9Orf72 ATCN PAM targeting sequence
  source 1..20: mol_type = other RNA
ttatcaggtcttttcttgtt

SEQ ID NO: 3975 - RNA, 20 nt, synthetic construct
  misc_feature 1..20: note = C9Orf72 ATCN PAM targeting sequence
  source 1..20: mol_type = other RNA
ggtcttttcttgttcaccct

SEQ ID NO: 3976 - RNA, 20 nt, synthetic construct
  misc_feature 1..20: note = C9Orf72 ATCN PAM targeting sequence
  source 1..20: mol_type = other RNA
tttacgtgggcggaacttgt

SEQ ID NO: 3977 - RNA, 20 nt, synthetic construct
  misc_feature 1..20: note = C9Orf72 ATCN PAM targeting sequence
  source 1..20: mol_type = other RNA
cacatagaaaacagacagac

SEQ ID NO: 3978 - RNA, 20 nt, synthetic construct
  misc_feature 1..20: note = C9Orf72 ATCN PAM targeting sequence
  source 1..20: mol_type = other RNA
taagacccgctctggaggag

SEQ ID NO: 3979 - RNA, 20 nt, synthetic construct
  misc_feature 1..20: note = C9Orf72 ATCN PAM targeting sequence
  source 1..20: mol_type = other RNA
agcagcctcccctattaagg

SEQ ID NO: 3980 - RNA, 20 nt, synthetic construct
  misc_feature 1..20: note = C9Orf72 ATCN PAM targeting sequence
  source 1..20: mol_type = other RNA
ggagaaagtgaagacgattt

SEQ ID NO: 3981 - RNA, 20 nt, synthetic construct
  misc_feature 1..20: note = C9Orf72 ATCN PAM targeting sequence
  source 1..20: mol_type = other RNA
tcttcactttctccagatcc

SEQ ID NO: 3982 - RNA, 20 nt, synthetic construct
  misc_feature 1..20: note = C9Orf72 ATCN PAM targeting sequence
  source 1..20: mol_type = other RNA
accaattatgtgttgagcgc

SEQ ID NO: 3983 - RNA, 20 nt, synthetic construct
  misc_feature 1..20: note = C9Orf72 ATCN PAM targeting sequence
  source 1..20: mol_type = other RNA
cacggtcccctgcaaagtca

SEQ ID NO: 3984 - RNA, 20 nt, synthetic construct
  misc_feature 1..20: note = C9Orf72 ATCN PAM targeting sequence
  source 1..20: mol_type = other RNA
caattttgcctttacatgta

SEQ ID NO: 3985 - RNA, 20 nt, synthetic construct
  misc_feature 1..20: note = C9Orf72 ATCN PAM targeting sequence
  source 1..20: mol_type = other RNA
tgcttgagagaattcttaca

SEQ ID NO: 3986 - RNA, 20 nt, synthetic construct
  misc_feature 1..20: note = C9Orf72 ATCN PAM targeting sequence
  source 1..20: mol_type = other RNA
acatattgcaactagcaaaa

SEQ ID NO: 3987 - RNA, 20 nt, synthetic construct
  misc_feature 1..20: note = C9Orf72 ATCN PAM targeting sequence
  source 1..20: mol_type = other RNA
aacagaatggtacgtttttc

SEQ ID NO: 3988 - RNA, 20 nt, synthetic construct
  misc_feature 1..20: note = C9Orf72 ATCN PAM targeting sequence
  source 1..20: mol_type = other RNA
ttgtgttttttacacatcaa

SEQ ID NO: 3989 - RNA, 20 nt, synthetic construct
  misc_feature 1..20: note = C9Orf72 ATCN PAM targeting sequence
  source 1..20: mol_type = other RNA
atacacctgcagaccaaaag

SEQ ID NO: 3990 - RNA, 20 nt, synthetic construct
  misc_feature 1..20: note = C9Orf72 ATCN PAM targeting sequence
  source 1..20: mol_type = other RNA
gtagtaagtggaatctatac

SEQ ID NO: 3991 - RNA, 20 nt, synthetic construct
  misc_feature 1..20: note = C9Orf72 ATCN PAM targeting sequence
  source 1..20: mol_type = other RNA
gagtggtgtaaatgctactc

SEQ ID NO: 3992 - RNA, 20 nt, synthetic construct
  misc_feature 1..20: note = C9Orf72 ATCN PAM targeting sequence
  source 1..20: mol_type = other RNA
aaaggcacacagtttaaaaa

SEQ ID NO: 3993 - RNA, 20 nt, synthetic construct
  misc_feature 1..20: note = C9Orf72 ATCN PAM targeting sequence
  source 1..20: mol_type = other RNA
gcaagtgtgagatggcactt

SEQ ID NO: 3994 - RNA, 20 nt, synthetic construct
  misc_feature 1..20: note = C9Orf72 ATCN PAM targeting sequence
  source 1..20: mol_type = other RNA
cacacttgcagatcaaaagg

SEQ ID NO: 3995 - RNA, 20 nt, synthetic construct
  misc_feature 1..20: note = C9Orf72 ATCN PAM targeting sequence
  source 1..20: mol_type = other RNA
ttttcatcactaaaaatcac

SEQ ID NO: 3996 - RNA, 20 nt, synthetic construct
  misc_feature 1..20: note = C9Orf72 ATCN PAM targeting sequence
  source 1..20: mol_type = other RNA
ctaaaaatcacacagaacgt

SEQ ID NO: 3997 - RNA, 20 nt, synthetic construct
  misc_feature 1..20: note = C9Orf72 ATCN PAM targeting sequence
  source 1..20: mol_type = other RNA
cacagaacgttttaatcatt

SEQ ID NO: 3998 - RNA, 20 nt, synthetic construct
  misc_feature 1..20: note = C9Orf72 ATCN PAM targeting sequence
  source 1..20: mol_type = other RNA
ttcaccgaggaagaaaggga

SEQ ID NO: 3999 - RNA, 20 nt, synthetic construct
  misc_feature 1..20: note = C9Orf72 ATCN PAM targeting sequence
  source 1..20: mol_type = other RNA
actttcacaaagcatagaac

SEQ ID NO: 4000 - RNA, 20 nt, synthetic construct
  misc_feature 1..20: note = C9Orf72 ATCN PAM targeting sequence
  source 1..20: mol_type = other RNA
tacaaattgggtcattcttt

SEQ ID NO: 4001 - RNA, 20 nt, synthetic construct
  misc_feature 1..20: note = C9Orf72 ATCN PAM targeting sequence
  source 1..20: mol_type = other RNA
aatagttgctaaaatgacct

SEQ ID NO: 4002 - RNA, 20 nt, synthetic construct
  misc_feature 1..20: note = C9Orf72 ATCN PAM targeting sequence
  source 1..20: mol_type = other RNA
accaccatcactcaccagtt

SEQ ID NO: 4003 - RNA, 20 nt, synthetic construct
  misc_feature 1..20: note = C9Orf72 ATCN PAM targeting sequence
  source 1..20: mol_type = other RNA
ctcaccagttgaaactcacc

SEQ ID NO: 4004 - RNA, 20 nt, synthetic construct
  misc_feature 1..20: note = C9Orf72 ATCN PAM targeting sequence
  source 1..20: mol_type = other RNA
gaggagctggtgagtttcaa

SEQ ID NO: 4005 - RNA, 20 nt, synthetic construct
  misc_feature 1..20: note = C9Orf72 ATCN PAM targeting sequence
  source 1..20: mol_type = other RNA
ttaatagtgccaatgaattt

SEQ ID NO: 4006 - RNA, 20 nt, synthetic construct
  misc_feature 1..20: note = C9Orf72 ATCN PAM targeting sequence
  source 1..20: mol_type = other RNA
acacaacaaagaaaaggggg

SEQ ID NO: 4007 - RNA, 20 nt, synthetic construct
  misc_feature 1..20: note = C9Orf72 ATCN PAM targeting sequence
  source 1..20: mol_type = other RNA
gatctacatgtatgccctaa

SEQ ID NO: 4008 - RNA, 20 nt, synthetic construct
  misc_feature 1..20: note = C9Orf72 ATCN PAM targeting sequence
  source 1..20: mol_type = other RNA
gatggtcttcggtatatcca

SEQ ID NO: 4009 - RNA, 20 nt, synthetic construct
  misc_feature 1..20: note = C9Orf72 ATCN PAM targeting sequence
  source 1..20: mol_type = other RNA
acatgtatgccctaattgca

SEQ ID NO: 4010 - RNA, 20 nt, synthetic construct
  misc_feature 1..20: note = C9Orf72 ATCN PAM targeting sequence
  source 1..20: mol_type = other RNA
cttaatttagagattcatct

SEQ ID NO: 4011 - RNA, 20 nt, synthetic construct
  misc_feature 1..20: note = C9Orf72 ATCN PAM targeting sequence
  source 1..20: mol_type = other RNA
ctaaattaagtgatttattt

SEQ ID NO: 4012 - RNA, 20 nt, synthetic construct
  misc_feature 1..20: note = C9Orf72 ATCN PAM targeting sequence
  source 1..20: mol_type = other RNA
ctgtatttttattttgactg

SEQ ID NO: 4013 - RNA, 20 nt, synthetic construct
  misc_feature 1..20: note = C9Orf72 ATCN PAM targeting sequence
  source 1..20: mol_type = other RNA
agagatttaatgtacaacat

SEQ ID NO: 4014 - RNA, 20 nt, synthetic construct
  misc_feature 1..20: note = C9Orf72 ATCN PAM targeting sequence
  source 1..20: mol_type = other RNA
ctagatgtattagacgtaac

SEQ ID NO: 4015 - RNA, 20 nt, synthetic construct
  misc_feature 1..20: note = C9Orf72 ATCN PAM targeting sequence
  source 1..20: mol_type = other RNA
agccatgcttcttgtacagc

SEQ ID NO: 4016 - RNA, 20 nt, synthetic construct
  misc_feature 1..20: note = C9Orf72 ATCN PAM targeting sequence
  source 1..20: mol_type = other RNA
gcttctgggcaggccatagg

SEQ ID NO: 4017 - RNA, 20 nt, synthetic construct
  misc_feature 1..20: note = C9Orf72 ATCN PAM targeting sequence
  source 1..20: mol_type = other RNA
tgatggaaggcatagggaga

SEQ ID NO: 4018 - RNA, 20 nt, synthetic construct
  misc_feature 1..20: note = C9Orf72 ATCN PAM targeting sequence
  source 1..20: mol_type = other RNA
tgattttaagttccctatgg

SEQ ID NO: 4019 - RNA, 20 nt, synthetic construct
  misc_feature 1..20: note = C9Orf72 ATCN PAM targeting sequence
  source 1..20: mol_type = other RNA
agttgtttaaacgtatgtag

SEQ ID NO: 4020 - RNA, 20 nt, synthetic construct
  misc_feature 1..20: note = C9Orf72 ATCN PAM targeting sequence
  source 1..20: mol_type = other RNA
tgtcagaactcactatatag

SEQ ID NO: 4021 - RNA, 20 nt, synthetic construct
  misc_feature 1..20: note = C9Orf72 ATCN PAM targeting sequence
  source 1..20: mol_type = other RNA
actcacctcccaccaggccc

SEQ ID NO: 4022 - RNA, 20 nt, synthetic construct
  misc_feature 1..20: note = C9Orf72 ATCN PAM targeting sequence
  source 1..20: mol_type = other RNA
ccagtgttggaggttgggcc

SEQ ID NO: 4023 - RNA, 20 nt, synthetic construct
  misc_feature 1..20: note = C9Orf72 ATCN PAM targeting sequence
  source 1..20: mol_type = other RNA
catgttcaactgtaatcccc

SEQ ID NO: 4024 - RNA, 20 nt, synthetic construct
  misc_feature 1..20: note = C9Orf72 ATCN PAM targeting sequence
  source 1..20: mol_type = other RNA
ctgtccccacccaaatctca

SEQ ID NO: 4025 - RNA, 20 nt, synthetic construct
  misc_feature 1..20: note = C9Orf72 ATCN PAM targeting sequence
  source 1..20: mol_type = other RNA
aaaccatgttattccaactc

SEQ ID NO: 4026 - RNA, 20 nt, synthetic construct
  misc_feature 1..20: note = C9Orf72 ATCN PAM targeting sequence
  source 1..20: mol_type = other RNA
aatgtccttctcatattgca

SEQ ID NO: 4027 - RNA, 20 nt, synthetic construct
  misc_feature 1..20: note = C9Orf72 ATCN PAM targeting sequence
  source 1..20: mol_type = other RNA
agttaagactttggggaact

SEQ ID NO: 4028 - RNA, 20 nt, synthetic construct
  misc_feature 1..20: note = C9Orf72 ATCN PAM targeting sequence
  source 1..20: mol_type = other RNA
agcattcattcaaaagtcca

SEQ ID NO: 4029 - RNA, 20 nt, synthetic construct
  misc_feature 1..20: note = C9Orf72 ATCN PAM targeting sequence
  source 1..20: mol_type = other RNA
aaaacaaggtaattgcttca

SEQ ID NO: 4030 - RNA, 20 nt, synthetic construct
  misc_feature 1..20: note = C9Orf72 ATCN PAM targeting sequence
  source 1..20: mol_type = other RNA
ttgaagcaattaccttgttt

SEQ ID NO: 4031 - RNA, 20 nt, synthetic construct
  misc_feature 1..20: note = C9Orf72 ATCN PAM targeting sequence
  source 1..20: mol_type = other RNA
gcccaatgcctataccccca

SEQ ID NO: 4032 - RNA, 20 nt, synthetic construct
  misc_feature 1..20: note = C9Orf72 ATCN PAM targeting sequence
  source 1..20: mol_type = other RNA
gccaaaagaaagaggctata

SEQ ID NO: 4033 - RNA, 20 nt, synthetic construct
  misc_feature 1..20: note = C9Orf72 ATCN PAM targeting sequence
  source 1..20: mol_type = other RNA
cctttgactcacacccaggg

SEQ ID NO: 4034 - RNA, 20 nt, synthetic construct
  misc_feature 1..20: note = C9Orf72 ATCN PAM targeting sequence
  source 1..20: mol_type = other RNA
gtgttccctgggtgtgagtc

SEQ ID NO: 4035 - RNA, 20 nt, synthetic construct
  misc_feature 1..20: note = C9Orf72 ATCN PAM targeting sequence
  source 1..20: mol_type = other RNA
cccacagctgctctcatggg

SEQ ID NO: 4036 - RNA, 20 nt, synthetic construct
  misc_feature 1..20: note = C9Orf72 ATCN PAM targeting sequence
  source 1..20: mol_type = other RNA
accaacaacttgcaccctgc

SEQ ID NO: 4037 - RNA, 20 nt, synthetic construct
  misc_feature 1..20: note = C9Orf72 ATCN PAM targeting sequence
  source 1..20: mol_type = other RNA
accattctggggtctggagg

SEQ ID NO: 4038 - RNA, 20 nt, synthetic construct
  misc_feature 1..20: note = C9Orf72 ATCN PAM targeting sequence
  source 1..20: mol_type = other RNA
actagggaagcaaggagaag

SEQ ID NO: 4039 - RNA, 20 nt, synthetic construct
  misc_feature 1..20: note = C9Orf72 ATCN PAM targeting sequence
  source 1..20: mol_type = other RNA
tcatggagaacatctactag

SEQ ID NO: 4040 - RNA, 20 nt, synthetic construct
  misc_feature 1..20: note = C9Orf72 ATCN PAM targeting sequence
  source 1..20: mol_type = other RNA
aggctttttcatacatcctc

SEQ ID NO: 4041 - RNA, 20 nt, synthetic construct
  misc_feature 1..20: note = C9Orf72 ATCN PAM targeting sequence
  source 1..20: mol_type = other RNA
tctaaaatctaggcagagct

SEQ ID NO: 4042 - RNA, 20 nt, synthetic construct
  misc_feature 1..20: note = C9Orf72 ATCN PAM targeting sequence
  source 1..20: mol_type = other RNA
aggcagagcttcttaagcct

SEQ ID NO: 4043 - RNA, 20 nt, synthetic construct
  misc_feature 1..20: note = C9Orf72 ATCN PAM targeting sequence
  source 1..20: mol_type = other RNA
gagttaccagctgcaaatcc

SEQ ID NO: 4044 - RNA, 20 nt, synthetic construct
  misc_feature 1..20: note = C9Orf72 ATCN PAM targeting sequence
  source 1..20: mol_type = other RNA
atgtgggtctgcagcaacct

SEQ ID NO: 4045 - RNA, 20 nt, synthetic construct
  misc_feature 1..20: note = C9Orf72 ATCN PAM targeting sequence
  source 1..20: mol_type = other RNA
taggttcaaggtcaaacagg

SEQ ID NO: 4046 - RNA, 20 nt, synthetic construct
  misc_feature 1..20: note = C9Orf72 ATCN PAM targeting sequence
  source 1..20: mol_type = other RNA
tatacactggcctacttctg

SEQ ID NO: 4047 - RNA, 20 nt, synthetic construct
  misc_feature 1..20: note = C9Orf72 ATCN PAM targeting sequence
  source 1..20: mol_type = other RNA
tgtgcccctttcccttggtc

SEQ ID NO: 4048 - RNA, 20 nt, synthetic construct
  misc_feature 1..20: note = C9Orf72 ATCN PAM targeting sequence
  source 1..20: mol_type = other RNA
caggaactgagagagtgggc

SEQ ID NO: 4049 - RNA, 20 nt, synthetic construct
  misc_feature 1..20: note = C9Orf72 ATCN PAM targeting sequence
  source 1..20: mol_type = other RNA
tattggaagcgcccagttac

SEQ ID NO: 4050 - RNA, 20 nt, synthetic construct
  misc_feature 1..20: note = C9Orf72 ATCN PAM targeting sequence
  source 1..20: mol_type = other RNA
attgagaagttgcctctccc

SEQ ID NO: 4051 - RNA, 20 nt, synthetic construct
  misc_feature 1..20: note = C9Orf72 ATCN PAM targeting sequence
  source 1..20: mol_type = other RNA
tctgatggttgcctgacatt

SEQ ID NO: 4052 - RNA, 20 nt, synthetic construct
  misc_feature 1..20: note = C9Orf72 ATCN PAM targeting sequence
  source 1..20: mol_type = other RNA
gatggttgcctgacattcct

SEQ ID NO: 4053 - RNA, 20 nt, synthetic construct
  misc_feature 1..20: note = C9Orf72 ATCN PAM targeting sequence
  source 1..20: mol_type = other RNA
gatgatggtcaggcagttgt

SEQ ID NO: 4054 - RNA, 20 nt, synthetic construct
  misc_feature 1..20: note = C9Orf72 ATCN PAM targeting sequence
  source 1..20: mol_type = other RNA
ggcatgagtggggtaagaga

SEQ ID NO: 4055 - RNA, 20 nt, synthetic construct
  misc_feature 1..20: note = C9Orf72 ATCN PAM targeting sequence
  source 1..20: mol_type = other RNA
cagctgctcaaaggggccca

SEQ ID NO: 4056 - RNA, 20 nt, synthetic construct
  misc_feature 1..20: note = C9Orf72 ATCN PAM targeting sequence
  source 1..20: mol_type = other RNA
tttcctgggccaggcctagg

SEQ ID NO: 4057 - RNA, 20 nt, synthetic construct
  misc_feature 1..20: note = C9Orf72 ATCN PAM targeting sequence
  source 1..20: mol_type = other RNA
caggccccgaggcctaggag

SEQ ID NO: 4058 - RNA, 20 nt, synthetic construct
  misc_feature 1..20: note = C9Orf72 ATCN PAM targeting sequence
  source 1..20: mol_type = other RNA
ccacactgacttccacaatg

SEQ ID NO: 4059 - RNA, 20 nt, synthetic construct
  misc_feature 1..20: note = C9Orf72 ATCN PAM targeting sequence
  source 1..20: mol_type = other RNA
ctgaggaatcgccacactga

SEQ ID NO: 4060 - RNA, 20 nt, synthetic construct
  misc_feature 1..20: note = C9Orf72 ATCN PAM targeting sequence
  source 1..20: mol_type = other RNA
agaactagaaataccatttg

SEQ ID NO: 4061 - RNA, 20 nt, synthetic construct
  misc_feature 1..20: note = C9Orf72 ATCN PAM targeting sequence
  source 1..20: mol_type = other RNA
catcactgggtatataccca

SEQ ID NO: 4062 - RNA, 20 nt, synthetic construct
  misc_feature 1..20: note = C9Orf72 ATCN PAM targeting sequence
  source 1..20: mol_type = other RNA
ctgggtatatacccaaagga

SEQ ID NO: 4063 - RNA, 20 nt, synthetic construct
  misc_feature 1..20: note = C9Orf72 ATCN PAM targeting sequence
  source 1..20: mol_type = other RNA
tgctgctataaagacacatg

SEQ ID NO: 4064 - RNA, 20 nt, synthetic construct
  misc_feature 1..20: note = C9Orf72 ATCN PAM targeting sequence
  source 1..20: mol_type = other RNA
ctgttggacatttgggttgg

SEQ ID NO: 4065 - RNA, 20 nt, synthetic construct
  misc_feature 1..20: note = C9Orf72 ATCN PAM targeting sequence
  source 1..20: mol_type = other RNA
agtctatcactgttggacat

SEQ ID NO: 4066 - RNA, 20 nt, synthetic construct
  misc_feature 1..20: note = C9Orf72 ATCN PAM targeting sequence
  source 1..20: mol_type = other RNA
ttttttatggctgcatagta

SEQ ID NO: 4067 - RNA, 20 nt, synthetic construct
  misc_feature 1..20: note = C9Orf72 ATCN PAM targeting sequence
  source 1..20: mol_type = other RNA
atgtccctacaaaggacatg

SEQ ID NO: 4068 - RNA, 20 nt, synthetic construct
  misc_feature 1..20: note = C9Orf72 ATCN PAM targeting sequence
  source 1..20: mol_type = other RNA
tcattctcagtaaactattg

SEQ ID NO: 4069 - RNA, 20 nt, synthetic construct
  misc_feature 1..20: note = C9Orf72 ATCN PAM targeting sequence
  source 1..20: mol_type = other RNA
cactctggggactgttgtgg

SEQ ID NO: 4070 - RNA, 20 nt, synthetic construct
  misc_feature 1..20: note = C9Orf72 ATCN PAM targeting sequence
  source 1..20: mol_type = other RNA
ctcccccctcccccacccca

SEQ ID NO: 4071 - RNA, 20 nt, synthetic construct
  misc_feature 1..20: note = C9Orf72 ATCN PAM targeting sequence
  source 1..20: mol_type = other RNA
cctaatgctatccctccccc

SEQ ID NO: 4072 - RNA, 20 nt, synthetic construct
  misc_feature 1..20: note = C9Orf72 ATCN PAM targeting sequence
  source 1..20: mol_type = other RNA
gcccttgccttccttttagt

SEQ ID NO: 4073 - RNA, 20 nt, synthetic construct
  misc_feature 1..20: note = C9Orf72 ATCN PAM targeting sequence
  source 1..20: mol_type = other RNA
ggcagaagaaatttctaagc

SEQ ID NO: 4074 - RNA, 20 nt, synthetic construct
  misc_feature 1..20: note = C9Orf72 ATCN PAM targeting sequence
  source 1..20: mol_type = other RNA
tcattcttaagtctaagatt

SEQ ID NO: 4075 - RNA, 20 nt, synthetic construct
  misc_feature 1..20: note = C9Orf72 ATCN PAM targeting sequence
  source 1..20: mol_type = other RNA
ttcttaagtctaagatttca

SEQ ID NO: 4076 - RNA, 20 nt, synthetic construct
  misc_feature 1..20: note = C9Orf72 ATCN PAM targeting sequence
  source 1..20: mol_type = other RNA
tagacttaagaatgatgatt

SEQ ID NO: 4077 - RNA, 20 nt, synthetic construct
  misc_feature 1..20: note = C9Orf72 ATCN PAM targeting sequence
  source 1..20: mol_type = other RNA
gtgaaatcttagacttaaga

SEQ ID NO: 4078 - RNA, 20 nt, synthetic construct
  misc_feature 1..20: note = C9Orf72 ATCN PAM targeting sequence
  source 1..20: mol_type = other RNA
ctagaacagaggaacaatgc

SEQ ID NO: 4079 - RNA, 20 nt, synthetic construct
  misc_feature 1..20: note = C9Orf72 ATCN PAM targeting sequence
  source 1..20: mol_type = other RNA
gagacctcctcagcctggac

SEQ ID NO: 4080 - RNA, 20 nt, synthetic construct
  misc_feature 1..20: note = C9Orf72 ATCN PAM targeting sequence
  source 1..20: mol_type = other RNA
ctatcagtattttggttaca

SEQ ID NO: 4081 - RNA, 20 nt, synthetic construct
  misc_feature 1..20: note = C9Orf72 ATCN PAM targeting sequence
  source 1..20: mol_type = other RNA
gtattttggttacaaccact

SEQ ID NO: 4082 - RNA, 20 nt, synthetic construct
  misc_feature 1..20: note = C9Orf72 ATCN PAM targeting sequence
  source 1..20: mol_type = other RNA
ttctgtcttcttctgagccc

SEQ ID NO: 4083 - RNA, 20 nt, synthetic construct
  misc_feature 1..20: note = C9Orf72 ATCN PAM targeting sequence
  source 1..20: mol_type = other RNA
ttatagcaatgcccttcttc

SEQ ID NO: 4084 - RNA, 20 nt, synthetic construct
  misc_feature 1..20: note = C9Orf72 ATCN PAM targeting sequence
  source 1..20: mol_type = other RNA
gcttctggggatgcctcaga

SEQ ID NO: 4085 - RNA, 20 nt, synthetic construct
  misc_feature 1..20: note = C9Orf72 ATCN PAM targeting sequence
  source 1..20: mol_type = other RNA
ccagaagctgatgctgccat

SEQ ID NO: 4086 - RNA, 20 nt, synthetic construct
  misc_feature 1..20: note = C9Orf72 ATCN PAM targeting sequence
  source 1..20: mol_type = other RNA
tggcggaaggcaaagaggga

SEQ ID NO: 4087 - RNA, 20 nt, synthetic construct
  misc_feature 1..20: note = C9Orf72 ATCN PAM targeting sequence
  source 1..20: mol_type = other RNA
ggttgtttaaaagtgtgtaa

SEQ ID NO: 4088 - RNA, 20 nt, synthetic construct
  misc_feature 1..20: note = C9Orf72 ATCN PAM targeting sequence
  source 1..20: mol_type = other RNA
cgtgagaacttactcactat

SEQ ID NO: 4089 - RNA, 20 nt, synthetic construct
  misc_feature 1..20: note = C9Orf72 ATCN PAM targeting sequence
  source 1..20: mol_type = other RNA
tttcttggtactgtatagtg

SEQ ID NO: 4090 - RNA, 20 nt, synthetic construct
  misc_feature 1..20: note = C9Orf72 ATCN PAM targeting sequence
  source 1..20: mol_type = other RNA
caggggtggcttctaatggt

SEQ ID NO: 4091 - RNA, 20 nt, synthetic construct
  misc_feature 1..20: note = C9Orf72 ATCN PAM targeting sequence
  source 1..20: mol_type = other RNA
aatcacctccaaccaggctc

SEQ ID NO: 4092 - RNA, 20 nt, synthetic construct
  misc_feature 1..20: note = C9Orf72 ATCN PAM targeting sequence
  source 1..20: mol_type = other RNA
cctccaaccaggctccatct

SEQ ID NO: 4093 - RNA, 20 nt, synthetic construct
  misc_feature 1..20: note = C9Orf72 ATCN PAM targeting sequence
  source 1..20: mol_type = other RNA
ccaacgttggggattgcaac

SEQ ID NO: 4094 - RNA, 20 nt, synthetic construct
  misc_feature 1..20: note = C9Orf72 ATCN PAM targeting sequence
  source 1..20: mol_type = other RNA
ccaacgttggagatggagcc

SEQ ID NO: 4095 - RNA, 20 nt, synthetic construct
  misc_feature 1..20: note = C9Orf72 ATCN PAM targeting sequence
  source 1..20: mol_type = other RNA
catgttcagttgcaatcccc

SEQ ID NO: 4096 - RNA, 20 nt, synthetic construct
  misc_feature 1..20: note = C9Orf72 ATCN PAM targeting sequence
  source 1..20: mol_type = other RNA
aaatctcatgttcagttgca

SEQ ID NO: 4097 - RNA, 20 nt, synthetic construct
  misc_feature 1..20: note = C9Orf72 ATCN PAM targeting sequence
  source 1..20: mol_type = other RNA
ccatccaaatctcatgttca

SEQ ID NO: 4098 - RNA, 20 nt, synthetic construct
  misc_feature 1..20: note = C9Orf72 ATCN PAM targeting sequence
  source 1..20: mol_type = other RNA
atatccccatccaaatctca

SEQ ID NO: 4099 - RNA, 20 nt, synthetic construct
  misc_feature 1..20: note = C9Orf72 ATCN PAM targeting sequence
  source 1..20: mol_type = other RNA
aaccatatcaatattgtata

SEQ ID NO: 4100 - RNA, 20 nt, synthetic construct
  misc_feature 1..20: note = C9Orf72 ATCN PAM targeting sequence
  source 1..20: mol_type = other RNA
atattgtatactggaaattt

SEQ ID NO: 4101 - RNA, 20 nt, synthetic construct
  misc_feature 1..20: note = C9Orf72 ATCN PAM targeting sequence
  source 1..20: mol_type = other RNA
attctcttaccaaatttcca

SEQ ID NO: 4102 - RNA, 20 nt, synthetic construct
  misc_feature 1..20: note = C9Orf72 ATCN PAM targeting sequence
  source 1..20: mol_type = other RNA
aaaatctattctcttaccaa

SEQ ID NO: 4103 - RNA, 20 nt, synthetic construct
  misc_feature 1..20: note = C9Orf72 ATCN PAM targeting sequence
  source 1..20: mol_type = other RNA
tatcacatacataaaaggta

SEQ ID NO: 4104 - RNA, 20 nt, synthetic construct
  misc_feature 1..20: note = C9Orf72 ATCN PAM targeting sequence
  source 1..20: mol_type = other RNA
catacataaaaggtagctat

SEQ ID NO: 4105 - RNA, 20 nt, synthetic construct
  misc_feature 1..20: note = C9Orf72 ATCN PAM targeting sequence
  source 1..20: mol_type = other RNA
tttcatagctaccttttatg

SEQ ID NO: 4106 - RNA, 20 nt, synthetic construct
  misc_feature 1..20: note = C9Orf72 ATCN PAM targeting sequence
  source 1..20: mol_type = other RNA
atcatttcatagctaccttt

SEQ ID NO: 4107 - RNA, 20 nt, synthetic construct
  misc_feature 1..20: note = C9Orf72 ATCN PAM targeting sequence
  source 1..20: mol_type = other RNA
ctatacacgtgtatatcaaa

SEQ ID NO: 4108 - RNA, 20 nt, synthetic construct
  misc_feature 1..20: note = C9Orf72 ATCN PAM targeting sequence
  source 1..20: mol_type = other RNA
aaacattatgttgcccattt

SEQ ID NO: 4109 - RNA, 20 nt, synthetic construct
  misc_feature 1..20: note = C9Orf72 ATCN PAM targeting sequence
  source 1..20: mol_type = other RNA
tcctgacatctctaggatgt

SEQ ID NO: 4110 - RNA, 20 nt, synthetic construct
  misc_feature 1..20: note = C9Orf72 ATCN PAM targeting sequence
  source 1..20: mol_type = other RNA
ctaggatgtagatattgtca

SEQ ID NO: 4111 - RNA, 20 nt, synthetic construct
  misc_feature 1..20: note = C9Orf72 ATCN PAM targeting sequence
  source 1..20: mol_type = other RNA
tagagatgtcaggaggatta

SEQ ID NO: 4112 - RNA, 20 nt, synthetic construct
  misc_feature 1..20: note = C9Orf72 ATCN PAM targeting sequence
  source 1..20: mol_type = other RNA
acatcctagagatgtcagga

SEQ ID NO: 4113 - RNA, 20 nt, synthetic construct
  misc_feature 1..20: note = C9Orf72 ATCN PAM targeting sequence
  source 1..20: mol_type = other RNA
ctaggatgtagatatgtttt

SEQ ID NO: 4114 - RNA, 20 nt, synthetic construct
  misc_feature 1..20: note = C9Orf72 ATCN PAM targeting sequence
  source 1..20: mol_type = other RNA
tagggatgacaatatctaca

SEQ ID NO: 4115 - RNA, 20 nt, synthetic construct
  misc_feature 1..20: note = C9Orf72 ATCN PAM targeting sequence
  source 1..20: mol_type = other RNA
acatcctagggatgacaata

SEQ ID NO: 4116 - RNA, 20 nt, synthetic construct
  misc_feature 1..20: note = C9Orf72 ATCN PAM targeting sequence
  source 1..20: mol_type = other RNA
cctctgtaaaacatatctac

SEQ ID NO: 4117 - RNA, 20 nt, synthetic construct
  misc_feature 1..20: note = C9Orf72 ATCN PAM targeting sequence
  source 1..20: mol_type = other RNA
aagtatgtagccttgggtaa

SEQ ID NO: 4118 - RNA, 20 nt, synthetic construct
  misc_feature 1..20: note = C9Orf72 ATCN PAM targeting sequence
  source 1..20: mol_type = other RNA
acttggtaccaggttgttgt

SEQ ID NO: 4119 - RNA, 20 nt, synthetic construct
  misc_feature 1..20: note = C9Orf72 ATCN PAM targeting sequence
  source 1..20: mol_type = other RNA
tcaacttggtaccaggttgt

SEQ ID NO: 4120 - RNA, 20 nt, synthetic construct
  misc_feature 1..20: note = C9Orf72 ATCN PAM targeting sequence
  source 1..20: mol_type = other RNA
cagataactcctatggtggt

SEQ ID NO: 4121 - RNA, 20 nt, synthetic construct
  misc_feature 1..20: note = C9Orf72 ATCN PAM targeting sequence
  source 1..20: mol_type = other RNA
gagatgagttatcatcaact

SEQ ID NO: 4122 - RNA, 20 nt, synthetic construct
  misc_feature 1..20: note = C9Orf72 ATCN PAM targeting sequence
  source 1..20: mol_type = other RNA
ccagtttagaataagactgg

SEQ ID NO: 4123 - RNA, 20 nt, synthetic construct
  misc_feature 1..20: note = C9Orf72 ATCN PAM targeting sequence
  source 1..20: mol_type = other RNA
aagttccagtcttattctaa

SEQ ID NO: 4124 - RNA, 20 nt, synthetic construct
  misc_feature 1..20: note = C9Orf72 ATCN PAM targeting sequence
  source 1..20: mol_type = other RNA
caaaaaaacagaaaaaccta

SEQ ID NO: 4125 - RNA, 20 nt, synthetic construct
  misc_feature 1..20: note = C9Orf72 ATCN PAM targeting sequence
  source 1..20: mol_type = other RNA
accctgaaacaactatgttt

SEQ ID NO: 4126 - RNA, 20 nt, synthetic construct
  misc_feature 1..20: note = C9Orf72 ATCN PAM targeting sequence
  source 1..20: mol_type = other RNA
acaccaaagcctaaattcta

SEQ ID NO: 4127 - RNA, 20 nt, synthetic construct
  misc_feature 1..20: note = C9Orf72 ATCN PAM targeting sequence
  source 1..20: mol_type = other RNA
tgtagaatttaggctttggt

SEQ ID NO: 4128 - RNA, 20 nt, synthetic construct
  misc_feature 1..20: note = C9Orf72 ATCN PAM targeting sequence
  source 1..20: mol_type = other RNA
tgagaaataaaatatatggt

SEQ ID NO: 4129 - RNA, 20 nt, synthetic construct
  misc_feature 1..20: note = C9Orf72 ATCN PAM targeting sequence
  source 1..20: mol_type = other RNA
tgcatacagagccattttca

SEQ ID NO: 4130 - RNA, 20 nt, synthetic construct
  misc_feature 1..20: note = C9Orf72 ATCN PAM targeting sequence
  source 1..20: mol_type = other RNA
tccccccacctaatccaaca

SEQ ID NO: 4131 - RNA, 20 nt, synthetic construct
  misc_feature 1..20: note = C9Orf72 ATCN PAM targeting sequence
  source 1..20: mol_type = other RNA
aacaggtatttagtcattgt

SEQ ID NO: 4132 - RNA, 20 nt, synthetic construct
  misc_feature 1..20: note = C9Orf72 ATCN PAM targeting sequence
  source 1..20: mol_type = other RNA
aatgaaagacatacaagcta

SEQ ID NO: 4133 - RNA, 20 nt, synthetic construct
  misc_feature 1..20: note = C9Orf72 ATCN PAM targeting sequence
  source 1..20: mol_type = other RNA
ggagagaaacaataattata

SEQ ID NO: 4134 - RNA, 20 nt, synthetic construct
  misc_feature 1..20: note = C9Orf72 ATCN PAM targeting sequence
  source 1..20: mol_type = other RNA
ttttctctttggttcccaga

SEQ ID NO: 4135 - RNA, 20 nt, synthetic construct
  misc_feature 1..20: note = C9Orf72 ATCN PAM targeting sequence
  source 1..20: mol_type = other RNA
agtaatgtgattcatattag

SEQ ID NO: 4136 - RNA, 20 nt, synthetic construct
  misc_feature 1..20: note = C9Orf72 ATCN PAM targeting sequence
  source 1..20: mol_type = other RNA
cattactagatacttaaata

SEQ ID NO: 4137 - RNA, 20 nt, synthetic construct
  misc_feature 1..20: note = C9Orf72 ATCN PAM targeting sequence
  source 1..20: mol_type = other RNA
ttcatgctgctaatatgaat

SEQ ID NO: 4138 - RNA, 20 nt, synthetic construct
  misc_feature 1..20: note = C9Orf72 ATCN PAM targeting sequence
  source 1..20: mol_type = other RNA
ttttcatactctgttaactg

SEQ ID NO: 4139 - RNA, 20 nt, synthetic construct
  misc_feature 1..20: note = C9Orf72 ATCN PAM targeting sequence
  source 1..20: mol_type = other RNA
agtaactgtagcatctaaat

SEQ ID NO: 4140 - RNA, 20 nt, synthetic construct
  misc_feature 1..20: note = C9Orf72 ATCN PAM targeting sequence
  source 1..20: mol_type = other RNA
aaatgaaaataggtttttct

SEQ ID NO: 4141 - RNA, 20 nt, synthetic construct
  misc_feature 1..20: note = C9Orf72 ATCN PAM targeting sequence
  source 1..20: mol_type = other RNA
gagctggtgtgagtattgtc

SEQ ID NO: 4142 - RNA, 20 nt, synthetic construct
  misc_feature 1..20: note = C9Orf72 ATCN PAM targeting sequence
  source 1..20: mol_type = other RNA
aaggcaaagacaatactcac

SEQ ID NO: 4143 - RNA, 20 nt, synthetic construct
  misc_feature 1..20: note = C9Orf72 ATCN PAM targeting sequence
  source 1..20: mol_type = other RNA
taggagaaattattctgcat

SEQ ID NO: 4144 - RNA, 20 nt, synthetic construct
  misc_feature 1..20: note = C9Orf72 ATCN PAM targeting sequence
  source 1..20: mol_type = other RNA
ttgtgagggtcatgtgtgat

SEQ ID NO: 4145 - RNA, 20 nt, synthetic construct
  misc_feature 1..20: note = C9Orf72 ATCN PAM targeting sequence
  source 1..20: mol_type = other RNA
cacatgaccctcacaatgat

SEQ ID NO: 4146 - RNA, 20 nt, synthetic construct
  misc_feature 1..20: note = C9Orf72 ATCN PAM targeting sequence
  source 1..20: mol_type = other RNA
agcaagctaaggatttagaa

SEQ ID NO: 4147 - RNA, 20 nt, synthetic construct
  misc_feature 1..20: note = C9Orf72 ATCN PAM targeting sequence
  source 1..20: mol_type = other RNA
ttagcttgcttgatcacaca

SEQ ID NO: 4148 - RNA, 20 nt, synthetic construct
  misc_feature 1..20: note = C9Orf72 ATCN PAM targeting sequence
  source 1..20: mol_type = other RNA
caattttactaactatgcag

SEQ ID NO: 4149 - RNA, 20 nt, synthetic construct
  misc_feature 1..20: note = C9Orf72 ATCN PAM targeting sequence
  source 1..20: mol_type = other RNA
ctgcatagttagtaaaattg

SEQ ID NO: 4150 - RNA, 20 nt, synthetic construct
  misc_feature 1..20: note = C9Orf72 ATCN PAM targeting sequence
  source 1..20: mol_type = other RNA
tacataggtacatagtttaa

SEQ ID NO: 4151 - RNA, 20 nt, synthetic construct
  misc_feature 1..20: note = C9Orf72 ATCN PAM targeting sequence
  source 1..20: mol_type = other RNA
gaatccagataaacttcctg

SEQ ID NO: 4152 - RNA, 20 nt, synthetic construct
  misc_feature 1..20: note = C9Orf72 ATCN PAM targeting sequence
  source 1..20: mol_type = other RNA
agataaacttcctgctgtgt

SEQ ID NO: 4153 - RNA, 20 nt, synthetic construct
  misc_feature 1..20: note = C9Orf72 ATCN PAM targeting sequence
  source 1..20: mol_type = other RNA
ggattctgatataatagtta

SEQ ID NO: 4154 - RNA, 20 nt, synthetic construct
  misc_feature 1..20: note = C9Orf72 ATCN PAM targeting sequence
  source 1..20: mol_type = other RNA
gctgctgattcagagctaga

SEQ ID NO: 4155 - RNA, 20 nt, synthetic construct
  misc_feature 1..20: note = C9Orf72 ATCN PAM targeting sequence
  source 1..20: mol_type = other RNA
gcagcagatattgcattttt

SEQ ID NO: 4156 - RNA, 20 nt, synthetic construct
  misc_feature 1..20: note = C9Orf72 ATCN PAM targeting sequence
  source 1..20: mol_type = other RNA
acaagctctcagctctagct

SEQ ID NO: 4157 - RNA, 20 nt, synthetic construct
  misc_feature 1..20: note = C9Orf72 ATCN PAM targeting sequence
  source 1..20: mol_type = other RNA
agattacagcaaattagatt

SEQ ID NO: 4158 - RNA, 20 nt, synthetic construct
  misc_feature 1..20: note = C9Orf72 ATCN PAM targeting sequence
  source 1..20: mol_type = other RNA
ggataaatgggagctaatca

SEQ ID NO: 4159 - RNA, 20 nt, synthetic construct
  misc_feature 1..20: note = C9Orf72 ATCN PAM targeting sequence
  source 1..20: mol_type = other RNA
aatttgctgtaatctggata

SEQ ID NO: 4160 - RNA, 20 nt, synthetic construct
  misc_feature 1..20: note = C9Orf72 ATCN PAM targeting sequence
  source 1..20: mol_type = other RNA
ttcacatgccagtcacagtt

SEQ ID NO: 4161 - RNA, 20 nt, synthetic construct
  misc_feature 1..20: note = C9Orf72 ATCN PAM targeting sequence
  source 1..20: mol_type = other RNA
tatgtaggacatggaggagg

SEQ ID NO: 4162 - RNA, 20 nt, synthetic construct
  misc_feature 1..20: note = C9Orf72 ATCN PAM targeting sequence
  source 1..20: mol_type = other RNA
tgccattgcactccagcctg

SEQ ID NO: 4163 - RNA, 20 nt, synthetic construct
  misc_feature 1..20: note = C9Orf72 ATCN PAM targeting sequence
  source 1..20: mol_type = other RNA
caacctccacctcctgggtt

SEQ ID NO: 4164 - RNA, 20 nt, synthetic construct
  misc_feature 1..20: note = C9Orf72 ATCN PAM targeting sequence
  source 1..20: mol_type = other RNA
cttgaacccaggaggtggag

SEQ ID NO: 4165 - RNA, 20 nt, synthetic construct
  misc_feature 1..20: note = C9Orf72 ATCN PAM targeting sequence
  source 1..20: mol_type = other RNA
cagctactcaggaggctgag

SEQ ID NO: 4166 - RNA, 20 nt, synthetic construct
  misc_feature 1..20: note = C9Orf72 ATCN PAM targeting sequence
  source 1..20: mol_type = other RNA
ctactaaaaatacaaaatta

SEQ ID NO: 4167 - RNA, 20 nt, synthetic construct
  misc_feature 1..20: note = C9Orf72 ATCN PAM targeting sequence
  source 1..20: mol_type = other RNA
catctctactaaaaatacaa

SEQ ID NO: 4168 - RNA, 20 nt, synthetic construct
  misc_feature 1..20: note = C9Orf72 ATCN PAM targeting sequence
  source 1..20: mol_type = other RNA
acatggagaaatcccatctc

SEQ ID NO: 4169 - RNA, 20 nt, synthetic construct
  misc_feature 1..20: note = C9Orf72 ATCN PAM targeting sequence
  source 1..20: mol_type = other RNA
ggctggtctcaaactcccaa

SEQ ID NO: 4170 - RNA, 20 nt, synthetic construct
  misc_feature 1..20: note = C9Orf72 ATCN PAM targeting sequence
  source 1..20: mol_type = other RNA
cctgaggttgggagtttgag

SEQ ID NO: 4171 - RNA, 20 nt, synthetic construct
  misc_feature 1..20: note = C9Orf72 ATCN PAM targeting sequence
  source 1..20: mol_type = other RNA
gccctccttggcctcccgaa

SEQ ID NO: 4172 - RNA, 20 nt, synthetic construct
  misc_feature 1..20: note = C9Orf72 ATCN PAM targeting sequence
  source 1..20: mol_type = other RNA
cagcacttcgggaggccaag

SEQ ID NO: 4173 - RNA, 20 nt, synthetic construct
  misc_feature 1..20: note = C9Orf72 ATCN PAM targeting sequence
  source 1..20: mol_type = other RNA
cattatttaaaagaaattaa

SEQ ID NO: 4174 - RNA, 20 nt, synthetic construct
  misc_feature 1..20: note = C9Orf72 ATCN PAM targeting sequence
  source 1..20: mol_type = other RNA
ttacggactaggcggtatgc

SEQ ID NO: 4175 - RNA, 20 nt, synthetic construct
  misc_feature 1..20: note = C9Orf72 ATCN PAM targeting sequence
  source 1..20: mol_type = other RNA
tttggttggaatgtgaatga

SEQ ID NO: 4176 - RNA, 20 nt, synthetic construct
  misc_feature 1..20: note = C9Orf72 ATCN PAM targeting sequence
  source 1..20: mol_type = other RNA
tgattcttgagtatataaag

SEQ ID NO: 4177 - RNA, 20 nt, synthetic construct
  misc_feature 1..20: note = C9Orf72 ATCN PAM targeting sequence
  source 1..20: mol_type = other RNA
agatttcacctagaagtacc

SEQ ID NO: 4178 - RNA, 20 nt, synthetic construct
  misc_feature 1..20: note = C9Orf72 ATCN PAM targeting sequence
  source 1..20: mol_type = other RNA
cactggcaaccagaagtaac

SEQ ID NO: 4179 - RNA, 20 nt, synthetic construct
  misc_feature 1..20: note = C9Orf72 ATCN PAM targeting sequence
  source 1..20: mol_type = other RNA
gaactgtagagtgttggctc

SEQ ID NO: 4180 - RNA, 20 nt, synthetic construct
  misc_feature 1..20: note = C9Orf72 ATCN PAM targeting sequence
  source 1..20: mol_type = other RNA
tcagaactgtagagtgttgg

SEQ ID NO: 4181 - RNA, 20 nt, synthetic construct
  misc_feature 1..20: note = C9Orf72 ATCN PAM targeting sequence
  source 1..20: mol_type = other RNA
ggccgggtgtggtggctcac

SEQ ID NO: 4182 - RNA, 20 nt, synthetic construct
  misc_feature 1..20: note = C9Orf72 ATCN PAM targeting sequence
  source 1..20: mol_type = other RNA
cagcacactgggaggccgag

SEQ ID NO: 4183 - RNA, 20 nt, synthetic construct
  misc_feature 1..20: note = C9Orf72 ATCN PAM targeting sequence
  source 1..20: mol_type = other RNA
accagcctcggcctcccagt

SEQ ID NO: 4184 - RNA, 20 nt, synthetic construct
  misc_feature 1..20: note = C9Orf72 ATCN PAM targeting sequence
  source 1..20: mol_type = other RNA
tttgaggtcaggagttcaac

SEQ ID NO: 4185 - RNA, 20 nt, synthetic construct
  misc_feature 1..20: note = C9Orf72 ATCN PAM targeting sequence
  source 1..20: mol_type = other RNA
ctactaaaaatacaaaaaaa

SEQ ID NO: 4186 - RNA, 20 nt, synthetic construct
  misc_feature 1..20: note = C9Orf72 ATCN PAM targeting sequence
  source 1..20: mol_type = other RNA
ggctaatttttttttgtatt

SEQ ID NO: 4187 - RNA, 20 nt, synthetic construct
  misc_feature 1..20: note = C9Orf72 ATCN PAM targeting sequence
  source 1..20: mol_type = other RNA
catctacttggaaggctgag

SEQ ID NO: 4188 - RNA, 20 nt, synthetic construct
  misc_feature 1..20: note = C9Orf72 ATCN PAM targeting sequence
  source 1..20: mol_type = other RNA
acttggaaggctgaggcagg

SEQ ID NO: 4189 - RNA, 20 nt, synthetic construct
  misc_feature 1..20: note = C9Orf72 ATCN PAM targeting sequence
  source 1..20: mol_type = other RNA
cagctcactgcaacctccac

SEQ ID NO: 4190 - RNA, 20 nt, synthetic construct
  misc_feature 1..20: note = C9Orf72 ATCN PAM targeting sequence
  source 1..20: mol_type = other RNA
ttaggatccaatatatattt

SEQ ID NO: 4191 - RNA, 20 nt, synthetic construct
  misc_feature 1..20: note = C9Orf72 ATCN PAM targeting sequence
  source 1..20: mol_type = other RNA
taatgatattctcttttttt

SEQ ID NO: 4192 - RNA, 20 nt, synthetic construct
  misc_feature 1..20: note = C9Orf72 ATCN PAM targeting sequence
  source 1..20: mol_type = other RNA
aatatatatttccttttggt

SEQ ID NO: 4193 - RNA, 20 nt, synthetic construct
  misc_feature 1..20: note = C9Orf72 ATCN PAM targeting sequence
  source 1..20: mol_type = other RNA
taagtcccaggaaaaaccaa

SEQ ID NO: 4194 - RNA, 20 nt, synthetic construct
  misc_feature 1..20: note = C9Orf72 ATCN PAM targeting sequence
  source 1..20: mol_type = other RNA
catctttgaccagacattaa

SEQ ID NO: 4195 - RNA, 20 nt, synthetic construct
  misc_feature 1..20: note = C9Orf72 ATCN PAM targeting sequence
  source 1..20: mol_type = other RNA
ttgaccagacattaacctct

SEQ ID NO: 4196 - RNA, 20 nt, synthetic construct
  misc_feature 1..20: note = C9Orf72 ATCN PAM targeting sequence
  source 1..20: mol_type = other RNA
acagagaaggaatagaggtt

SEQ ID NO: 4197 - RNA, 20 nt, synthetic construct
  misc_feature 1..20: note = C9Orf72 ATCN PAM targeting sequence
  source 1..20: mol_type = other RNA
ctcaaaactgttgcttataa

SEQ ID NO: 4198 - RNA, 20 nt, synthetic construct
  misc_feature 1..20: note = C9Orf72 ATCN PAM targeting sequence
  source 1..20: mol_type = other RNA
aaggcctggaatacagagtt

SEQ ID NO: 4199 - RNA, 20 nt, synthetic construct
  misc_feature 1..20: note = C9Orf72 ATCN PAM targeting sequence
  source 1..20: mol_type = other RNA
tcctacttcttgttctcttt

SEQ ID NO: 4200 - RNA, 20 nt, synthetic construct
  misc_feature 1..20: note = C9Orf72 ATCN PAM targeting sequence
  source 1..20: mol_type = other RNA
tgctcatcttcctacttctt

SEQ ID NO: 4201 - RNA, 20 nt, synthetic construct
  misc_feature 1..20: note = C9Orf72 ATCN PAM targeting sequence
  source 1..20: mol_type = other RNA
tcttaaattttagagaagac

SEQ ID NO: 4202 - RNA, 20 nt, synthetic construct
  misc_feature 1..20: note = C9Orf72 ATCN PAM targeting sequence
  source 1..20: mol_type = other RNA
aggtactagttcaaattctc

SEQ ID NO: 4203 - RNA, 20 nt, synthetic construct
  misc_feature 1..20: note = C9Orf72 ATCN PAM targeting sequence
  source 1..20: mol_type = other RNA
aattatgaccaacctatcaa

SEQ ID NO: 4204 - RNA, 20 nt, synthetic construct
  misc_feature 1..20: note = C9Orf72 ATCN PAM targeting sequence
  source 1..20: mol_type = other RNA
aaattccatcaaattatgac

SEQ ID NO: 4205 - RNA, 20 nt, synthetic construct
  misc_feature 1..20: note = C9Orf72 ATCN PAM targeting sequence
  source 1..20: mol_type = other RNA
ttgtgcactgttctttccat

SEQ ID NO: 4206 - RNA, 20 nt, synthetic construct
  misc_feature 1..20: note = C9Orf72 ATCN PAM targeting sequence
  source 1..20: mol_type = other RNA
gctactagtcccccactact

SEQ ID NO: 4207 - RNA, 20 nt, synthetic construct
  misc_feature 1..20: note = C9Orf72 ATCN PAM targeting sequence
  source 1..20: mol_type = other RNA
acttcagaatggttccctga

SEQ ID NO: 4208 - RNA, 20 nt, synthetic construct
  misc_feature 1..20: note = C9Orf72 ATCN PAM targeting sequence
  source 1..20: mol_type = other RNA
tacatgaaataactaaagaa

SEQ ID NO: 4209 - RNA, 20 nt, synthetic construct
  misc_feature 1..20: note = C9Orf72 ATCN PAM targeting sequence
  source 1..20: mol_type = other RNA
gatgattagcaaatgccacg

SEQ ID NO: 4210 - RNA, 20 nt, synthetic construct
  misc_feature 1..20: note = C9Orf72 ATCN PAM targeting sequence
  source 1..20: mol_type = other RNA
gatatgagctaacaataaag

SEQ ID NO: 4211 - RNA, 20 nt, synthetic construct
  misc_feature 1..20: note = C9Orf72 ATCN PAM targeting sequence
  source 1..20: mol_type = other RNA
tctgatatgagctaacaata

SEQ ID NO: 4212 - RNA, 20 nt, synthetic construct
  misc_feature 1..20: note = C9Orf72 ATCN PAM targeting sequence
  source 1..20: mol_type = other RNA
gctacgtggcatttgctaat

SEQ ID NO: 4213 - RNA, 20 nt, synthetic construct
  misc_feature 1..20: note = C9Orf72 ATCN PAM targeting sequence
  source 1..20: mol_type = other RNA
ttgagtcaggctagttttat

SEQ ID NO: 4214 - RNA, 20 nt, synthetic construct
  misc_feature 1..20: note = C9Orf72 ATCN PAM targeting sequence
  source 1..20: mol_type = other RNA
tgaatatataaaactagcct

SEQ ID NO: 4215 - RNA, 20 nt, synthetic construct
  misc_feature 1..20: note = C9Orf72 ATCN PAM targeting sequence
  source 1..20: mol_type = other RNA
tttcactctcatgttcttca

SEQ ID NO: 4216 - RNA, 20 nt, synthetic construct
  misc_feature 1..20: note = C9Orf72 ATCN PAM targeting sequence
  source 1..20: mol_type = other RNA
ggctccacttgactttcaag

SEQ ID NO: 4217 - RNA, 20 nt, synthetic construct
  misc_feature 1..20: note = C9Orf72 ATCN PAM targeting sequence
  source 1..20: mol_type = other RNA
aagggaaagggcggtaagag

SEQ ID NO: 4218 - RNA, 20 nt, synthetic construct
  misc_feature 1..20: note = C9Orf72 ATCN PAM targeting sequence
  source 1..20: mol_type = other RNA
tgcagacgcatgactgttta

SEQ ID NO: 4219 - RNA, 20 nt, synthetic construct
  misc_feature 1..20: note = C9Orf72 ATCN PAM targeting sequence
  source 1..20: mol_type = other RNA
aggaagacttcatggaggag

SEQ ID NO: 4220 - RNA, 20 nt, synthetic construct
  misc_feature 1..20: note = C9Orf72 ATCN PAM targeting sequence
  source 1..20: mol_type = other RNA
ctttgcatccttgggggagt

SEQ ID NO: 4221 - RNA, 20 nt, synthetic construct
  misc_feature 1..20: note = C9Orf72 ATCN PAM targeting sequence
  source 1..20: mol_type = other RNA
ttgggggagttacttaacat

SEQ ID NO: 4222 - RNA, 20 nt, synthetic construct
  misc_feature 1..20: note = C9Orf72 ATCN PAM targeting sequence
  source 1..20: mol_type = other RNA
tcaaagcaattccattttca

SEQ ID NO: 4223 - RNA, 20 nt, synthetic construct
  misc_feature 1..20: note = C9Orf72 ATCN PAM targeting sequence
  source 1..20: mol_type = other RNA
taaagggtttatcttgatac

SEQ ID NO: 4224 - RNA, 20 nt, synthetic construct
  misc_feature 1..20: note = C9Orf72 ATCN PAM targeting sequence
  source 1..20: mol_type = other RNA
tgatacctgccccatggtaa

SEQ ID NO: 4225 - RNA, 20 nt, synthetic construct
  misc_feature 1..20: note = C9Orf72 ATCN PAM targeting sequence
  source 1..20: mol_type = other RNA
agataaaccctttatgatgg

SEQ ID NO: 4226 - RNA, 20 nt, synthetic construct
  misc_feature 1..20: note = C9Orf72 ATCN PAM targeting sequence
  source 1..20: mol_type = other RNA
catggtagacgctcaatttg

SEQ ID NO: 4227 - RNA, 20 nt, synthetic construct
  misc_feature 1..20: note = C9Orf72 ATCN PAM targeting sequence
  source 1..20: mol_type = other RNA
ataaactaggggttgggaat

SEQ ID NO: 4228 - RNA, 20 nt, synthetic construct
  misc_feature 1..20: note = C9Orf72 ATCN PAM targeting sequence
  source 1..20: mol_type = other RNA
cttcatctataaactagggg

SEQ ID NO: 4229 - RNA, 20 nt, synthetic construct
  misc_feature 1..20: note = C9Orf72 ATCN PAM targeting sequence
  source 1..20: mol_type = other RNA
ctttccctttccctttcaat

SEQ ID NO: 4230 - RNA, 20 nt, synthetic construct
  misc_feature 1..20: note = C9Orf72 ATCN PAM targeting sequence
  source 1..20: mol_type = other RNA
gccccaaactaaaggtgtca

SEQ ID NO: 4231 - RNA, 20 nt, synthetic construct
  misc_feature 1..20: note = C9Orf72 ATCN PAM targeting sequence
  source 1..20: mol_type = other RNA
gtaactaacactttcatatg

SEQ ID NO: 4232 - RNA, 20 nt, synthetic construct
  misc_feature 1..20: note = C9Orf72 ATCN PAM targeting sequence
  source 1..20: mol_type = other RNA
acataaggtgtgtatacgtc

SEQ ID NO: 4233 - RNA, 20 nt, synthetic construct
  misc_feature 1..20: note = C9Orf72 ATCN PAM targeting sequence
  source 1..20: mol_type = other RNA
ctagactgaaagcttccgga

SEQ ID NO: 4234 - RNA, 20 nt, synthetic construct
  misc_feature 1..20: note = C9Orf72 ATCN PAM targeting sequence
  source 1..20: mol_type = other RNA
gacaagttccctgccctccg

SEQ ID NO: 4235 - RNA, 20 nt, synthetic construct
  misc_feature 1..20: note = C9Orf72 ATCN PAM targeting sequence
  source 1..20: mol_type = other RNA
aacatttattaaagacctaa

SEQ ID NO: 4236 - RNA, 20 nt, synthetic construct
  misc_feature 1..20: note = C9Orf72 ATCN PAM targeting sequence
  source 1..20: mol_type = other RNA
atgtgtagattaaaatttca

SEQ ID NO: 4237 - RNA, 20 nt, synthetic construct
  misc_feature 1..20: note = C9Orf72 ATCN PAM targeting sequence
  source 1..20: mol_type = other RNA
acacattgattaaatacatt

SEQ ID NO: 4238 - RNA, 20 nt, synthetic construct
  misc_feature 1..20: note = C9Orf72 ATCN PAM targeting sequence
  source 1..20: mol_type = other RNA
agtgatgttaataaagaaaa

SEQ ID NO: 4239 - RNA, 20 nt, synthetic construct
  misc_feature 1..20: note = C9Orf72 ATCN PAM targeting sequence
  source 1..20: mol_type = other RNA
cttgattgtgtgccatattt

SEQ ID NO: 4240 - RNA, 20 nt, synthetic construct
  misc_feature 1..20: note = C9Orf72 ATCN PAM targeting sequence
  source 1..20: mol_type = other RNA
tcaagatttctagaaagagc

SEQ ID NO: 4241 - RNA, 20 nt, synthetic construct
  misc_feature 1..20: note = C9Orf72 ATCN PAM targeting sequence
  source 1..20: mol_type = other RNA
agatttctagaaagagcagt

SEQ ID NO: 4242 - RNA, 20 nt, synthetic construct
  misc_feature 1..20: note = C9Orf72 ATCN PAM targeting sequence
  source 1..20: mol_type = other RNA
tgatgatgaagtggcctgtt

SEQ ID NO: 4243 - RNA, 20 nt, synthetic construct
  misc_feature 1..20: note = C9Orf72 ATCN PAM targeting sequence
  source 1..20: mol_type = other RNA
cttattctttttgcttggca

SEQ ID NO: 4244 - RNA, 20 nt, synthetic construct
  misc_feature 1..20: note = C9Orf72 ATCN PAM targeting sequence
  source 1..20: mol_type = other RNA
gtttaaaatttgaatacaaa

SEQ ID NO: 4245 - RNA, 20 nt, synthetic construct
  misc_feature 1..20: note = C9Orf72 ATCN PAM targeting sequence
  source 1..20: mol_type = other RNA
tgaaggattaattagtaccc

SEQ ID NO: 4246 - RNA, 20 nt, synthetic construct
  misc_feature 1..20: note = C9Orf72 ATCN PAM targeting sequence
  source 1..20: mol_type = other RNA
ttcacgataataacttgtca

SEQ ID NO: 4247 - RNA, 20 nt, synthetic construct
  misc_feature 1..20: note = C9Orf72 ATCN PAM targeting sequence
  source 1..20: mol_type = other RNA
cttcttaggtttttgtaagc

SEQ ID NO: 4248 - RNA, 20 nt, synthetic construct
  misc_feature 1..20: note = C9Orf72 ATCN PAM targeting sequence
  source 1..20: mol_type = other RNA
atcccttcttaggtttttgt

SEQ ID NO: 4249 - RNA, 20 nt, synthetic construct
  misc_feature 1..20: note = C9Orf72 ATCN PAM targeting sequence
  source 1..20: mol_type = other RNA
caaatatgtagagagatagt

SEQ ID NO: 4250 - RNA, 20 nt, synthetic construct
  misc_feature 1..20: note = C9Orf72 ATCN PAM targeting sequence
  source 1..20: mol_type = other RNA
ctctacatatttgagatgaa

SEQ ID NO: 4251 - RNA, 20 nt, synthetic construct
  misc_feature 1..20: note = C9Orf72 ATCN PAM targeting sequence
  source 1..20: mol_type = other RNA
taaataggacaaaatagaca

SEQ ID NO: 4252 - RNA, 20 nt, synthetic construct
  misc_feature 1..20: note = C9Orf72 ATCN PAM targeting sequence
  source 1..20: mol_type = other RNA
agtttgttgttctgtactaa

SEQ ID NO: 4253 - RNA, 20 nt, synthetic construct
  misc_feature 1..20: note = C9Orf72 ATCN PAM targeting sequence
  source 1..20: mol_type = other RNA
atctagtttgttgttctgta

SEQ ID NO: 4254 - RNA, 20 nt, synthetic construct
  misc_feature 1..20: note = C9Orf72 ATCN PAM targeting sequence
  source 1..20: mol_type = other RNA
tttccaagtaagaaaataaa

SEQ ID NO: 4255 - RNA, 20 nt, synthetic construct
  misc_feature 1..20: note = C9Orf72 ATCN PAM targeting sequence
  source 1..20: mol_type = other RNA
tgcacatggaatatggacag

SEQ ID NO: 4256 - RNA, 20 nt, synthetic construct
  misc_feature 1..20: note = C9Orf72 ATCN PAM targeting sequence
  source 1..20: mol_type = other RNA
gcaatgtttgagcactattt

SEQ ID NO: 4257 - RNA, 20 nt, synthetic construct
  misc_feature 1..20: note = C9Orf72 ATCN PAM targeting sequence
  source 1..20: mol_type = other RNA
cctctgacgactatcagttg

SEQ ID NO: 4258 - RNA, 20 nt, synthetic construct
  misc_feature 1..20: note = C9Orf72 ATCN PAM targeting sequence
  source 1..20: mol_type = other RNA
gttgtttttaccaaatagtg

SEQ ID NO: 4259 - RNA, 20 nt, synthetic construct
  misc_feature 1..20: note = C9Orf72 ATCN PAM targeting sequence
  source 1..20: mol_type = other RNA
tcattcttttctaaagcact

SEQ ID NO: 4260 - RNA, 20 nt, synthetic construct
  misc_feature 1..20: note = C9Orf72 ATCN PAM targeting sequence
  source 1..20: mol_type = other RNA
taatgtcatttcccatgcag

SEQ ID NO: 4261 - RNA, 20 nt, synthetic construct
  misc_feature 1..20: note = C9Orf72 ATCN PAM targeting sequence
  source 1..20: mol_type = other RNA
aattctcaagcactttctcc

SEQ ID NO: 4262 - RNA, 20 nt, synthetic construct
  misc_feature 1..20: note = C9Orf72 ATCN PAM targeting sequence
  source 1..20: mol_type = other RNA
ggagacacgcacatttgttt

SEQ ID NO: 4263 - RNA, 20 nt, synthetic construct
  misc_feature 1..20: note = C9Orf72 ATCN PAM targeting sequence
  source 1..20: mol_type = other RNA
aatggaccacttacttttct

SEQ ID NO: 4264 - RNA, 20 nt, synthetic construct
  misc_feature 1..20: note = C9Orf72 ATCN PAM targeting sequence
  source 1..20: mol_type = other RNA
gctctttatcaaatggacca

SEQ ID NO: 4265 - RNA, 20 nt, synthetic construct
  misc_feature 1..20: note = C9Orf72 ATCN PAM targeting sequence
  source 1..20: mol_type = other RNA
ttgtgtagcaaaactagaag

SEQ ID NO: 4266 - RNA, 20 nt, synthetic construct
  misc_feature 1..20: note = C9Orf72 ATCN PAM targeting sequence
  source 1..20: mol_type = other RNA
aattatctctcacagttctc

SEQ ID NO: 4267 - RNA, 20 nt, synthetic construct
  misc_feature 1..20: note = C9Orf72 ATCN PAM targeting sequence
  source 1..20: mol_type = other RNA
ctcacagttctcgagttttt

SEQ ID NO: 4268 - RNA, 20 nt, synthetic construct
  misc_feature 1..20: note = C9Orf72 ATCN PAM targeting sequence
  source 1..20: mol_type = other RNA
gaactgcaattttttgttct

SEQ ID NO: 4269 - RNA, 20 nt, synthetic construct
  misc_feature 1..20: note = C9Orf72 ATCN PAM targeting sequence
  source 1..20: mol_type = other RNA
cacacacagcagctttcact

SEQ ID NO: 4270 - RNA, 20 nt, synthetic construct
  misc_feature 1..20: note = C9Orf72 ATCN PAM targeting sequence
  source 1..20: mol_type = other RNA
gcatttctccactccaagca

SEQ ID NO: 4271 - RNA, 20 nt, synthetic construct
  misc_feature 1..20: note = C9Orf72 ATCN PAM targeting sequence
  source 1..20: mol_type = other RNA
gtccttagagtacaaaatta

SEQ ID NO: 4272 - RNA, 20 nt, synthetic construct
  misc_feature 1..20: note = C9Orf72 ATCN PAM targeting sequence
  source 1..20: mol_type = other RNA
tctccaacatgaagtaatgt

SEQ ID NO: 4273 - RNA, 20 nt, synthetic construct
  misc_feature 1..20: note = C9Orf72 ATCN PAM targeting sequence
  source 1..20: mol_type = other RNA
ctttccagtctcactgtcac

SEQ ID NO: 4274 - RNA, 20 nt, synthetic construct
  misc_feature 1..20: note = C9Orf72 ATCN PAM targeting sequence
  source 1..20: mol_type = other RNA
caccactgcactctagcctg

SEQ ID NO: 4275 - RNA, 20 nt, synthetic construct
  misc_feature 1..20: note = C9Orf72 ATCN PAM targeting sequence
  source 1..20: mol_type = other RNA
cgatattgcagccttggcct

SEQ ID NO: 4276 - RNA, 20 nt, synthetic construct
  misc_feature 1..20: note = C9Orf72 ATCN PAM targeting sequence
  source 1..20: mol_type = other RNA
agatcacaccactgcactct

SEQ ID NO: 4277 - RNA, 20 nt, synthetic construct
  misc_feature 1..20: note = C9Orf72 ATCN PAM targeting sequence
  source 1..20: mol_type = other RNA
cttgaacccgggaggccaag

SEQ ID NO: 4278 - RNA, 20 nt, synthetic construct
  misc_feature 1..20: note = C9Orf72 ATCN PAM targeting sequence
  source 1..20: mol_type = other RNA
ctactaaaaatacaaaaatt

SEQ ID NO: 4279 - RNA, 20 nt, synthetic construct
  misc_feature 1..20: note = C9Orf72 ATCN PAM targeting sequence
  source 1..20: mol_type = other RNA
cttgaggccaggagttcaag

SEQ ID NO: 4280 - RNA, 20 nt, synthetic construct
  misc_feature 1..20: note = C9Orf72 ATCN PAM targeting sequence
  source 1..20: mol_type = other RNA
gctcaccttggcatcccaaa

SEQ ID NO: 4281 - RNA, 20 nt, synthetic construct
  misc_feature 1..20: note = C9Orf72 ATCN PAM targeting sequence
  source 1..20: mol_type = other RNA
caaagtgctgagattacagg

SEQ ID NO: 4282 - RNA, 20 nt, synthetic construct
  misc_feature 1..20: note = C9Orf72 ATCN PAM targeting sequence
  source 1..20: mol_type = other RNA
cagcactttgggatgccaag

SEQ ID NO: 4283 - RNA, 20 nt, synthetic construct
  misc_feature 1..20: note = C9Orf72 ATCN PAM targeting sequence
  source 1..20: mol_type = other RNA
taaacaagagacaaacctac

SEQ ID NO: 4284 - RNA, 20 nt, synthetic construct
  misc_feature 1..20: note = C9Orf72 ATCN PAM targeting sequence
  source 1..20: mol_type = other RNA
tgttgaccaaatgcaactta

SEQ ID NO: 4285 - RNA, 20 nt, synthetic construct
  misc_feature 1..20: note = C9Orf72 ATCN PAM targeting sequence
  source 1..20: mol_type = other RNA
tcttgttgaccaaatgcaac

SEQ ID NO: 4286 - RNA, 20 nt, synthetic construct
  misc_feature 1..20: note = C9Orf72 ATCN PAM targeting sequence
  source 1..20: mol_type = other RNA
tattatattaaatatactat

SEQ ID NO: 4287 - RNA, 20 nt, synthetic construct
  misc_feature 1..20: note = C9Orf72 ATCN PAM targeting sequence
  source 1..20: mol_type = other RNA
tattttgaattaatccaaac

SEQ ID NO: 4288 - RNA, 20 nt, synthetic construct
  misc_feature 1..20: note = C9Orf72 ATCN PAM targeting sequence
  source 1..20: mol_type = other RNA
aaacattgttaaaaacataa

SEQ ID NO: 4289 - RNA, 20 nt, synthetic construct
  misc_feature 1..20: note = C9Orf72 ATCN PAM targeting sequence
  source 1..20: mol_type = other RNA
aataacaataaaaaaatcat

SEQ ID NO: 4290 - RNA, 20 nt, synthetic construct
  misc_feature 1..20: note = C9Orf72 ATCN PAM targeting sequence
  source 1..20: mol_type = other RNA
tcatccactcccctcctcta

SEQ ID NO: 4291 - RNA, 20 nt, synthetic construct
  misc_feature 1..20: note = C9Orf72 ATCN PAM targeting sequence
  source 1..20: mol_type = other RNA
tccactcccctcctctacca

SEQ ID NO: 4292 - RNA, 20 nt, synthetic construct
  misc_feature 1..20: note = C9Orf72 ATCN PAM targeting sequence
  source 1..20: mol_type = other RNA
actcccctcctctaccacca

SEQ ID NO: 4293 - RNA, 20 nt, synthetic construct
  misc_feature 1..20: note = C9Orf72 ATCN PAM targeting sequence
  source 1..20: mol_type = other RNA
ccacatccttattccaaact

SEQ ID NO: 4294 - RNA, 20 nt, synthetic construct
  misc_feature 1..20: note = C9Orf72 ATCN PAM targeting sequence
  source 1..20: mol_type = other RNA
ttattccaaactaatgtaag

SEQ ID NO: 4295 - RNA, 20 nt, synthetic construct
  misc_feature 1..20: note = C9Orf72 ATCN PAM targeting sequence
  source 1..20: mol_type = other RNA
caaattgggttaaagcagtc

SEQ ID NO: 4296 - RNA, 20 nt, synthetic construct
  misc_feature 1..20: note = C9Orf72 ATCN PAM targeting sequence
  source 1..20: mol_type = other RNA
tgtttacagggttctgagac

SEQ ID NO: 4297 - RNA, 20 nt, synthetic construct
  misc_feature 1..20: note = C9Orf72 ATCN PAM targeting sequence
  source 1..20: mol_type = other RNA
cttcaacacactgactacta

SEQ ID NO: 4298 - RNA, 20 nt, synthetic construct
  misc_feature 1..20: note = C9Orf72 ATCN PAM targeting sequence
  source 1..20: mol_type = other RNA
catctcttcaacacactgac

SEQ ID NO: 4299 - RNA, 20 nt, synthetic construct
  misc_feature 1..20: note = C9Orf72 ATCN PAM targeting sequence
  source 1..20: mol_type = other RNA
ccagataaaaacttctcaca

SEQ ID NO: 4300 - RNA, 20 nt, synthetic construct
  misc_feature 1..20: note = C9Orf72 ATCN PAM targeting sequence
  source 1..20: mol_type = other RNA
ggtgatggaaaatctcatct

SEQ ID NO: 4301 - RNA, 20 nt, synthetic construct
  misc_feature 1..20: note = C9Orf72 ATCN PAM targeting sequence
  source 1..20: mol_type = other RNA
atgtaacagtggtagtgagt

SEQ ID NO: 4302 - RNA, 20 nt, synthetic construct
  misc_feature 1..20: note = C9Orf72 ATCN PAM targeting sequence
  source 1..20: mol_type = other RNA
atgcaactctgtgagaagtt

SEQ ID NO: 4303 - RNA, 20 nt, synthetic construct
  misc_feature 1..20: note = C9Orf72 ATCN PAM targeting sequence
  source 1..20: mol_type = other RNA
gtgccaaagaggccattcag

SEQ ID NO: 4304 - RNA, 20 nt, synthetic construct
  misc_feature 1..20: note = C9Orf72 ATCN PAM targeting sequence
  source 1..20: mol_type = other RNA
tgactctcaggactggaaca

SEQ ID NO: 4305 - RNA, 20 nt, synthetic construct
  misc_feature 1..20: note = C9Orf72 ATCN PAM targeting sequence
  source 1..20: mol_type = other RNA
aaagagcatttacaaagtga

SEQ ID NO: 4306 - RNA, 20 nt, synthetic construct
  misc_feature 1..20: note = C9Orf72 ATCN PAM targeting sequence
  source 1..20: mol_type = other RNA
gaagagtaattgtaactttc

SEQ ID NO: 4307 - RNA, 20 nt, synthetic construct
  misc_feature 1..20: note = C9Orf72 ATCN PAM targeting sequence
  source 1..20: mol_type = other RNA
gaggaaggtttttccctttg

SEQ ID NO: 4308 - RNA, 20 nt, synthetic construct
  misc_feature 1..20: note = C9Orf72 ATCN PAM targeting sequence
  source 1..20: mol_type = other RNA
tctgaggaaggtttttccct

SEQ ID NO: 4309 - RNA, 20 nt, synthetic construct
  misc_feature 1..20: note = C9Orf72 ATCN PAM targeting sequence
  source 1..20: mol_type = other RNA
tgagtactacttttctcttt

SEQ ID NO: 4310 - RNA, 20 nt, synthetic construct
  misc_feature 1..20: note = C9Orf72 ATCN PAM targeting sequence
  source 1..20: mol_type = other RNA
ttggtacttccttaaaaaag

SEQ ID NO: 4311 - RNA, 20 nt, synthetic construct
  misc_feature 1..20: note = C9Orf72 ATCN PAM targeting sequence
  source 1..20: mol_type = other RNA
acttttgcagagctactcat

SEQ ID NO: 4312 - RNA, 20 nt, synthetic construct
  misc_feature 1..20: note = C9Orf72 ATCN PAM targeting sequence
  source 1..20: mol_type = other RNA
aaaaatgagtagctctgcaa

SEQ ID NO: 4313 - RNA, 20 nt, synthetic construct
  misc_feature 1..20: note = C9Orf72 ATCN PAM targeting sequence
  source 1..20: mol_type = other RNA
agttagtttacagttcacta

SEQ ID NO: 4314 - RNA, 20 nt, synthetic construct
  misc_feature 1..20: note = C9Orf72 ATCN PAM targeting sequence
  source 1..20: mol_type = other RNA
gctcttgtaccaaacaccaa

SEQ ID NO: 4315 - RNA, 20 nt, synthetic construct
  misc_feature 1..20: note = C9Orf72 ATCN PAM targeting sequence
  source 1..20: mol_type = other RNA
gaacagttggctgtctttgc

SEQ ID NO: 4316 - RNA, 20 nt, synthetic construct
  misc_feature 1..20: note = C9Orf72 ATCN PAM targeting sequence
  source 1..20: mol_type = other RNA
agctgtttgtgtacctcact

SEQ ID NO: 4317 - RNA, 20 nt, synthetic construct
  misc_feature 1..20: note = C9Orf72 ATCN PAM targeting sequence
  source 1..20: mol_type = other RNA
ctctttcccttttctgccca

SEQ ID NO: 4318 - RNA, 20 nt, synthetic construct
  misc_feature 1..20: note = C9Orf72 ATCN PAM targeting sequence
  source 1..20: mol_type = other RNA
tctccaaccatgtgacagca

SEQ ID NO: 4319 - RNA, 20 nt, synthetic construct
  misc_feature 1..20: note = C9Orf72 ATCN PAM targeting sequence
  source 1..20: mol_type = other RNA
ggcaacccccagaaacagaa

SEQ ID NO: 4320 - RNA, 20 nt, synthetic construct
  misc_feature 1..20: note = C9Orf72 ATCN PAM targeting sequence
  source 1..20: mol_type = other RNA
tcaaatcattctttgcccaa

SEQ ID NO: 4321 - RNA, 20 nt, synthetic construct
  misc_feature 1..20: note = C9Orf72 ATCN PAM targeting sequence
  source 1..20: mol_type = other RNA
ttctttgcccaattaaactc

SEQ ID NO: 4322 - RNA, 20 nt, synthetic construct
  misc_feature 1..20: note = C9Orf72 ATCN PAM targeting sequence
  source 1..20: mol_type = other RNA
aatttaacagagtttaattg

SEQ ID NO: 4323 - RNA, 20 nt, synthetic construct
  misc_feature 1..20: note = C9Orf72 ATCN PAM targeting sequence
  source 1..20: mol_type = other RNA
tataagtatatacacctatt

SEQ ID NO: 4324 - RNA, 20 nt, synthetic construct
  misc_feature 1..20: note = C9Orf72 ATCN PAM targeting sequence
  source 1..20: mol_type = other RNA
aaatagctcatgtatcttat

SEQ ID NO: 4325 - RNA, 20 nt, synthetic construct
  misc_feature 1..20: note = C9Orf72 ATCN PAM targeting sequence
  source 1..20: mol_type = other RNA
catcaaggtaaattagatat

SEQ ID NO: 4326 - RNA, 20 nt, synthetic construct
  misc_feature 1..20: note = C9Orf72 ATCN PAM targeting sequence
  source 1..20: mol_type = other RNA
aggtaaattagatatccatc

SEQ ID NO: 4327 - RNA, 20 nt, synthetic construct
  misc_feature 1..20: note = C9Orf72 ATCN PAM targeting sequence
  source 1..20: mol_type = other RNA
aatttaccttgatgtgatta

SEQ ID NO: 4328 - RNA, 20 nt, synthetic construct
  misc_feature 1..20: note = C9Orf72 ATCN PAM targeting sequence
  source 1..20: mol_type = other RNA
atcccctcacatcacctcaa

SEQ ID NO: 4329 - RNA, 20 nt, synthetic construct
  misc_feature 1..20: note = C9Orf72 ATCN PAM targeting sequence
  source 1..20: mol_type = other RNA
cctcacatcacctcaagcat

SEQ ID NO: 4330 - RNA, 20 nt, synthetic construct
  misc_feature 1..20: note = C9Orf72 ATCN PAM targeting sequence
  source 1..20: mol_type = other RNA
cctcaagcatttattgcttc

SEQ ID NO: 4331 - RNA, 20 nt, synthetic construct
  misc_feature 1..20: note = C9Orf72 ATCN PAM targeting sequence
  source 1..20: mol_type = other RNA
gatactagatcttattactc

SEQ ID NO: 4332 - RNA, 20 nt, synthetic construct
  misc_feature 1..20: note = C9Orf72 ATCN PAM targeting sequence
  source 1..20: mol_type = other RNA
gatagcacaacagggtaatt

SEQ ID NO: 4333 - RNA, 20 nt, synthetic construct
  misc_feature 1..20: note = C9Orf72 ATCN PAM targeting sequence
  source 1..20: mol_type = other RNA
agtatctgatagcacaacag

SEQ ID NO: 4334 - RNA, 20 nt, synthetic construct
  misc_feature 1..20: note = C9Orf72 ATCN PAM targeting sequence
  source 1..20: mol_type = other RNA
tattactcctatctatattt

SEQ ID NO: 4335 - RNA, 20 nt, synthetic construct
  misc_feature 1..20: note = C9Orf72 ATCN PAM targeting sequence
  source 1..20: mol_type = other RNA
atatttttgtactcattaac

SEQ ID NO: 4336 - RNA, 20 nt, synthetic construct
  misc_feature 1..20: note = C9Orf72 ATCN PAM targeting sequence
  source 1..20: mol_type = other RNA
tcagaatgggagaaaatatt

SEQ ID NO: 4337 - RNA, 20 nt, synthetic construct
  misc_feature 1..20: note = C9Orf72 ATCN PAM targeting sequence
  source 1..20: mol_type = other RNA
gacaagggattaataaccag

SEQ ID NO: 4338 - RNA, 20 nt, synthetic construct
  misc_feature 1..20: note = C9Orf72 ATCN PAM targeting sequence
  source 1..20: mol_type = other RNA
cttgtcagatgaataatttg

SEQ ID NO: 4339 - RNA, 20 nt, synthetic construct
  misc_feature 1..20: note = C9Orf72 ATCN PAM targeting sequence
  source 1..20: mol_type = other RNA
ttgcccatttttaaatggcg

SEQ ID NO: 4340 - RNA, 20 nt, synthetic construct
  misc_feature 1..20: note = C9Orf72 ATCN PAM targeting sequence
  source 1..20: mol_type = other RNA
gaatagacatttttcaagag

SEQ ID NO: 4341 - RNA, 20 nt, synthetic construct
  misc_feature 1..20: note = C9Orf72 ATCN PAM targeting sequence
  source 1..20: mol_type = other RNA
ccgatcatgagagaaatgca

SEQ ID NO: 4342 - RNA, 20 nt, synthetic construct
  misc_feature 1..20: note = C9Orf72 ATCN PAM targeting sequence
  source 1..20: mol_type = other RNA
gtgatgttgagcaccttttt

SEQ ID NO: 4343 - RNA, 20 nt, synthetic construct
  misc_feature 1..20: note = C9Orf72 ATCN PAM targeting sequence
  source 1..20: mol_type = other RNA
tgagagaaatgcaaatcaaa

SEQ ID NO: 4344 - RNA, 20 nt, synthetic construct
  misc_feature 1..20: note = C9Orf72 ATCN PAM targeting sequence
  source 1..20: mol_type = other RNA
aaactacaatgaaatatcat

SEQ ID NO: 4345 - RNA, 20 nt, synthetic construct
  misc_feature 1..20: note = C9Orf72 ATCN PAM targeting sequence
  source 1..20: mol_type = other RNA
tttcactctagtgataatgg

SEQ ID NO: 4346 - RNA, 20 nt, synthetic construct
  misc_feature 1..20: note = C9Orf72 ATCN PAM targeting sequence
  source 1..20: mol_type = other RNA
ctagagtgaaatgatatttc

SEQ ID NO: 4347 - RNA, 20 nt, synthetic construct
  misc_feature 1..20: note = C9Orf72 ATCN PAM targeting sequence
  source 1..20: mol_type = other RNA
cttccacctgttaagaaaaa

SEQ ID NO: 4348 - RNA, 20 nt, synthetic construct
  misc_feature 1..20: note = C9Orf72 ATCN PAM targeting sequence
  source 1..20: mol_type = other RNA
ttcctacctcttcctgaatt

SEQ ID NO: 4349 - RNA, 20 nt, synthetic construct
  misc_feature 1..20: note = C9Orf72 ATCN PAM targeting sequence
  source 1..20: mol_type = other RNA
ctttatcatatgtgttctgc

SEQ ID NO: 4350 - RNA, 20 nt, synthetic construct
  misc_feature 1..20: note = C9Orf72 ATCN PAM targeting sequence
  source 1..20: mol_type = other RNA
tatgtgttctgcctccccta

SEQ ID NO: 4351 - RNA, 20 nt, synthetic construct
  misc_feature 1..20: note = C9Orf72 ATCN PAM targeting sequence
  source 1..20: mol_type = other RNA
atgtgccagacattgtgttc

SEQ ID NO: 4352 - RNA, 20 nt, synthetic construct
  misc_feature 1..20: note = C9Orf72 ATCN PAM targeting sequence
  source 1..20: mol_type = other RNA
agtaatcaaaaatgtatcaa

SEQ ID NO: 4353 - RNA, 20 nt, synthetic construct
  misc_feature 1..20: note = C9Orf72 ATCN PAM targeting sequence
  source 1..20: mol_type = other RNA
aaaatgtatcaagtttaatt

SEQ ID NO: 4354 - RNA, 20 nt, synthetic construct
  misc_feature 1..20: note = C9Orf72 ATCN PAM targeting sequence
  source 1..20: mol_type = other RNA
agtttaattttatgaaggaa

SEQ ID NO: 4355 - RNA, 20 nt, synthetic construct
  misc_feature 1..20: note = C9Orf72 ATCN PAM targeting sequence
  source 1..20: mol_type = other RNA
aaatataaaataaatacata

SEQ ID NO: 4356 - RNA, 20 nt, synthetic construct
  misc_feature 1..20: note = C9Orf72 ATCN PAM targeting sequence
  source 1..20: mol_type = other RNA
atccctaaccctagtcttca

SEQ ID NO: 4357 - RNA, 20 nt, synthetic construct
  misc_feature 1..20: note = C9Orf72 ATCN PAM targeting sequence
  source 1..20: mol_type = other RNA
ctaaccctagtcttcatcca

SEQ ID NO: 4358 - RNA, 20 nt, synthetic construct
  misc_feature 1..20: note = C9Orf72 ATCN PAM targeting sequence
  source 1..20: mol_type = other RNA
actcaattactcttaccctt

SEQ ID NO: 4359 - RNA, 20 nt, synthetic construct
  misc_feature 1..20: note = C9Orf72 ATCN PAM targeting sequence
  source 1..20: mol_type = other RNA
cttaatataaatggaagaaa

SEQ ID NO: 4360 - RNA, 20 nt, synthetic construct
  misc_feature 1..20: note = C9Orf72 ATCN PAM targeting sequence
  source 1..20: mol_type = other RNA
cccttcttttttagacaaaa

SEQ ID NO: 4361 - RNA, 20 nt, synthetic construct
  misc_feature 1..20: note = C9Orf72 ATCN PAM targeting sequence
  source 1..20: mol_type = other RNA
gtcttccttccatgtcagcg

SEQ ID NO: 4362 - RNA, 20 nt, synthetic construct
  misc_feature 1..20: note = C9Orf72 ATCN PAM targeting sequence
  source 1..20: mol_type = other RNA
agcctgggcgacagagcgag

SEQ ID NO: 4363 - RNA, 20 nt, synthetic construct
  misc_feature 1..20: note = C9Orf72 ATCN PAM targeting sequence
  source 1..20: mol_type = other RNA
cggctcactgcaagctctgc

SEQ ID NO: 4364 - RNA, 20 nt, synthetic construct
  misc_feature 1..20: note = C9Orf72 ATCN PAM targeting sequence
  source 1..20: mol_type = other RNA
tggctaacacggtgaaaccc

SEQ ID NO: 4365 - RNA, 20 nt, synthetic construct
  misc_feature 1..20: note = C9Orf72 ATCN PAM targeting sequence
  source 1..20: mol_type = other RNA
agaccatcctggctaacacg

SEQ ID NO: 4366 - RNA, 20 nt, synthetic construct
  misc_feature 1..20: note = C9Orf72 ATCN PAM targeting sequence
  source 1..20: mol_type = other RNA
cctgacctcgtgatccaccc

SEQ ID NO: 4367 - RNA, 20 nt, synthetic construct
  misc_feature 1..20: note = C9Orf72 ATCN PAM targeting sequence
  source 1..20: mol_type = other RNA
cgaggtcaggagatcaagac

SEQ ID NO: 4368 - RNA, 20 nt, synthetic construct
  misc_feature 1..20: note = C9Orf72 ATCN PAM targeting sequence
  source 1..20: mol_type = other RNA
acccgcctcggcctcccaaa

SEQ ID NO: 4369 - RNA, 20 nt, synthetic construct
  misc_feature 1..20: note = C9Orf72 ATCN PAM targeting sequence
  source 1..20: mol_type = other RNA
cagcactttgggaggccgag

SEQ ID NO: 4370 - RNA, 20 nt, synthetic construct
  misc_feature 1..20: note = C9Orf72 ATCN PAM targeting sequence
  source 1..20: mol_type = other RNA
cacagggactggtttcatga

SEQ ID NO: 4371 - RNA, 20 nt, synthetic construct
  misc_feature 1..20: note = C9Orf72 ATCN PAM targeting sequence
  source 1..20: mol_type = other RNA
atcacacagggactggtttc

SEQ ID NO: 4372 - RNA, 20 nt, synthetic construct
  misc_feature 1..20: note = C9Orf72 ATCN PAM targeting sequence
  source 1..20: mol_type = other RNA
atccatcacacagggactgg

SEQ ID NO: 4373 - RNA, 20 nt, synthetic construct
  misc_feature 1..20: note = C9Orf72 ATCN PAM targeting sequence
  source 1..20: mol_type = other RNA
tagggtacacctgcacactt

SEQ ID NO: 4374 - RNA, 20 nt, synthetic construct
  misc_feature 1..20: note = C9Orf72 ATCN PAM targeting sequence
  source 1..20: mol_type = other RNA
ccattcatagaattgctagg

SEQ ID NO: 4375 - RNA, 20 nt, synthetic construct
  misc_feature 1..20: note = C9Orf72 ATCN PAM targeting sequence
  source 1..20: mol_type = other RNA
tagcaattctatgaatgggg

SEQ ID NO: 4376 - RNA, 20 nt, synthetic construct
  misc_feature 1..20: note = C9Orf72 ATCN PAM targeting sequence
  source 1..20: mol_type = other RNA
ccaaattttcttccataagt

SEQ ID NO: 4377 - RNA, 20 nt, synthetic construct
  misc_feature 1..20: note = C9Orf72 ATCN PAM targeting sequence
  source 1..20: mol_type = other RNA
ttttcattttctccagtaat

SEQ ID NO: 4378 - RNA, 20 nt, synthetic construct
  misc_feature 1..20: note = C9Orf72 ATCN PAM targeting sequence
  source 1..20: mol_type = other RNA
gtgggaaaacatgaattcct

SEQ ID NO: 4379 - RNA, 20 nt, synthetic construct
  misc_feature 1..20: note = C9Orf72 ATCN PAM targeting sequence
  source 1..20: mol_type = other RNA
accaaacaaatgtttagtta

SEQ ID NO: 4380 - RNA, 20 nt, synthetic construct
  misc_feature 1..20: note = C9Orf72 ATCN PAM targeting sequence
  source 1..20: mol_type = other RNA
tttggatgtttttgaattct

SEQ ID NO: 4381 - RNA, 20 nt, synthetic construct
  misc_feature 1..20: note = C9Orf72 ATCN PAM targeting sequence
  source 1..20: mol_type = other RNA
aaatgattaactaaacattt

SEQ ID NO: 4382 - RNA, 20 nt, synthetic construct
  misc_feature 1..20: note = C9Orf72 ATCN PAM targeting sequence
  source 1..20: mol_type = other RNA
cagttaaagaaatacaaaaa

SEQ ID NO: 4383 - RNA, 20 nt, synthetic construct
  misc_feature 1..20: note = C9Orf72 ATCN PAM targeting sequence
  source 1..20: mol_type = other RNA
gaaaaagtttcaactgcaat

SEQ ID NO: 4384 - RNA, 20 nt, synthetic construct
  misc_feature 1..20: note = C9Orf72 ATCN PAM targeting sequence
  source 1..20: mol_type = other RNA
tgaattcttcccatctgaaa

SEQ ID NO: 4385 - RNA, 20 nt, synthetic construct
  misc_feature 1..20: note = C9Orf72 ATCN PAM targeting sequence
  source 1..20: mol_type = other RNA
agcatcttgaattcttccca

SEQ ID NO: 4386 - RNA, 20 nt, synthetic construct
  misc_feature 1..20: note = C9Orf72 ATCN PAM targeting sequence
  source 1..20: mol_type = other RNA
acttgcagaggcagtgttta

SEQ ID NO: 4387 - RNA, 20 nt, synthetic construct
  misc_feature 1..20: note = C9Orf72 ATCN PAM targeting sequence
  source 1..20: mol_type = other RNA
cctaaggaacgatatcagga

SEQ ID NO: 4388 - RNA, 20 nt, synthetic construct
  misc_feature 1..20: note = C9Orf72 ATCN PAM targeting sequence
  source 1..20: mol_type = other RNA
ttccttaggtgatctacttg

SEQ ID NO: 4389 - RNA, 20 nt, synthetic construct
  misc_feature 1..20: note = C9Orf72 ATCN PAM targeting sequence
  source 1..20: mol_type = other RNA
ggacaattaagggagtgagg

SEQ ID NO: 4390 - RNA, 20 nt, synthetic construct
  misc_feature 1..20: note = C9Orf72 ATCN PAM targeting sequence
  source 1..20: mol_type = other RNA
tgggtggccagctgcccagc

SEQ ID NO: 4391 - RNA, 20 nt, synthetic construct
  misc_feature 1..20: note = C9Orf72 ATCN PAM targeting sequence
  source 1..20: mol_type = other RNA
cccaggggctctcactcact

SEQ ID NO: 4392 - RNA, 20 nt, synthetic construct
  misc_feature 1..20: note = C9Orf72 ATCN PAM targeting sequence
  source 1..20: mol_type = other RNA
tcactttccacagggacctg

SEQ ID NO: 4393 - RNA, 20 nt, synthetic construct
  misc_feature 1..20: note = C9Orf72 ATCN PAM targeting sequence
  source 1..20: mol_type = other RNA
tgggaactggagaacccctt

SEQ ID NO: 4394 - RNA, 20 nt, synthetic construct
  misc_feature 1..20: note = C9Orf72 ATCN PAM targeting sequence
  source 1..20: mol_type = other RNA
caatacctgatccgtgtccc

SEQ ID NO: 4395 - RNA, 20 nt, synthetic construct
  misc_feature 1..20: note = C9Orf72 ATCN PAM targeting sequence
  source 1..20: mol_type = other RNA
ggtattgggatgaaggggtt

SEQ ID NO: 4396 - RNA, 20 nt, synthetic construct
  misc_feature 1..20: note = C9Orf72 ATCN PAM targeting sequence
  source 1..20: mol_type = other RNA
gtgtccctgggcctctagac

SEQ ID NO: 4397 - RNA, 20 nt, synthetic construct
  misc_feature 1..20: note = C9Orf72 ATCN PAM targeting sequence
  source 1..20: mol_type = other RNA
tcagacaaggcttagcatca

SEQ ID NO: 4398 - RNA, 20 nt, synthetic construct
  misc_feature 1..20: note = C9Orf72 ATCN PAM targeting sequence
  source 1..20: mol_type = other RNA
gacaaggcttagcatcagct

SEQ ID NO: 4399 - RNA, 20 nt, synthetic construct
  misc_feature 1..20: note = C9Orf72 ATCN PAM targeting sequence
  source 1..20: mol_type = other RNA
gcttccagcacaatggcctg

SEQ ID NO: 4400 - RNA, 20 nt, synthetic construct
  misc_feature 1..20: note = C9Orf72 ATCN PAM targeting sequence
  source 1..20: mol_type = other RNA
gttggacagtgggttgagag

SEQ ID NO: 4401 - RNA, 20 nt, synthetic construct
  misc_feature 1..20: note = C9Orf72 ATCN PAM targeting sequence
  source 1..20: mol_type = other RNA
cccactgcttgagcaccatg

SEQ ID NO: 4402 - RNA, 20 nt, synthetic construct
  misc_feature 1..20: note = C9Orf72 ATCN PAM targeting sequence
  source 1..20: mol_type = other RNA
cctactctcagaacactgag

SEQ ID NO: 4403 - RNA, 20 nt, synthetic construct
  misc_feature 1..20: note = C9Orf72 ATCN PAM targeting sequence
  source 1..20: mol_type = other RNA
ggtgagggggtcatctctcc

SEQ ID NO: 4404 - RNA, 20 nt, synthetic construct
  misc_feature 1..20: note = C9Orf72 ATCN PAM targeting sequence
  source 1..20: mol_type = other RNA
ctccctaccaccacagagca

SEQ ID NO: 4405 - RNA, 20 nt, synthetic construct
  misc_feature 1..20: note = C9Orf72 ATCN PAM targeting sequence
  source 1..20: mol_type = other RNA
gccagctaccactcttaagc

SEQ ID NO: 4406 - RNA, 20 nt, synthetic construct
  misc_feature 1..20: note = C9Orf72 ATCN PAM targeting sequence
  source 1..20: mol_type = other RNA
cctactggattgcaccccaa

SEQ ID NO: 4407 - RNA, 20 nt, synthetic construct
  misc_feature 1..20: note = C9Orf72 ATCN PAM targeting sequence
  source 1..20: mol_type = other RNA
agtaggtgatgcttaagagt

SEQ ID NO: 4408 - RNA, 20 nt, synthetic construct
  misc_feature 1..20: note = C9Orf72 ATCN PAM targeting sequence
  source 1..20: mol_type = other RNA
agccacaaataaagatgctg

SEQ ID NO: 4409 - RNA, 20 nt, synthetic construct
  misc_feature 1..20: note = C9Orf72 ATCN PAM targeting sequence
  source 1..20: mol_type = other RNA
ttatttgtggctagattttt

SEQ ID NO: 4410 - RNA, 20 nt, synthetic construct
  misc_feature 1..20: note = C9Orf72 ATCN PAM targeting sequence
  source 1..20: mol_type = other RNA
caagaactctagcaattcaa

SEQ ID NO: 4411 - RNA, 20 nt, synthetic construct
  misc_feature 1..20: note = C9Orf72 ATCN PAM targeting sequence
  source 1..20: mol_type = other RNA
tttgctggaggacttgtgtg

SEQ ID NO: 4412 - RNA, 20 nt, synthetic construct
  misc_feature 1..20: note = C9Orf72 ATCN PAM targeting sequence
  source 1..20: mol_type = other RNA
ggttaaaatcctttgctgga

SEQ ID NO: 4413 - RNA, 20 nt, synthetic construct
  misc_feature 1..20: note = C9Orf72 ATCN PAM targeting sequence
  source 1..20: mol_type = other RNA
ggatggcaaggaagtacatc

SEQ ID NO: 4414 - RNA, 20 nt, synthetic construct
  misc_feature 1..20: note = C9Orf72 ATCN PAM targeting sequence
  source 1..20: mol_type = other RNA
agattctgaattctatgtat

SEQ ID NO: 4415 - RNA, 20 nt, synthetic construct
  misc_feature 1..20: note = C9Orf72 ATCN PAM targeting sequence
  source 1..20: mol_type = other RNA
agatccaggagatcattgaa

SEQ ID NO: 4416 - RNA, 20 nt, synthetic construct
  misc_feature 1..20: note = C9Orf72 ATCN PAM targeting sequence
  source 1..20: mol_type = other RNA
tgatgtacttccttgccatc

SEQ ID NO: 4417 - RNA, 20 nt, synthetic construct
  misc_feature 1..20: note = C9Orf72 ATCN PAM targeting sequence
  source 1..20: mol_type = other RNA
aggagatcattgaaacccaa

SEQ ID NO: 4418 - RNA, 20 nt, synthetic construct
  misc_feature 1..20: note = C9Orf72 ATCN PAM targeting sequence
  source 1..20: mol_type = other RNA
cctggatcttgatgtacttc

SEQ ID NO: 4419 - RNA, 20 nt, synthetic construct
  misc_feature 1..20: note = C9Orf72 ATCN PAM targeting sequence
  source 1..20: mol_type = other RNA
ttgaaacccaatacaaggaa

SEQ ID NO: 4420 - RNA, 20 nt, synthetic construct
  misc_feature 1..20: note = C9Orf72 ATCN PAM targeting sequence
  source 1..20: mol_type = other RNA
agaaaaatgatcaaagagct

SEQ ID NO: 4421 - RNA, 20 nt, synthetic construct
  misc_feature 1..20: note = C9Orf72 ATCN PAM targeting sequence
  source 1..20: mol_type = other RNA
tttttctggattccttgagt

SEQ ID NO: 4422 - RNA, 20 nt, synthetic construct
  misc_feature 1..20: note = C9Orf72 ATCN PAM targeting sequence
  source 1..20: mol_type = other RNA
aagagcttaaagatgaaata

SEQ ID NO: 4423 - RNA, 20 nt, synthetic construct
  misc_feature 1..20: note = C9Orf72 ATCN PAM targeting sequence
  source 1..20: mol_type = other RNA
ttaagctctttgatcatttt

SEQ ID NO: 4424 - RNA, 20 nt, synthetic construct
  misc_feature 1..20: note = C9Orf72 ATCN PAM targeting sequence
  source 1..20: mol_type = other RNA
ctcaatttctgaagttcagt

SEQ ID NO: 4425 - RNA, 20 nt, synthetic construct
  misc_feature 1..20: note = C9Orf72 ATCN PAM targeting sequence
  source 1..20: mol_type = other RNA
acttcaaaaatttcataata

SEQ ID NO: 4426 - RNA, 20 nt, synthetic construct
  misc_feature 1..20: note = C9Orf72 ATCN PAM targeting sequence
  source 1..20: mol_type = other RNA
cagagtttgaagaccagtta

SEQ ID NO: 4427 - RNA, 20 nt, synthetic construct
  misc_feature 1..20: note = C9Orf72 ATCN PAM targeting sequence
  source 1..20: mol_type = other RNA
acttggttggacaaaaataa

SEQ ID NO: 4428 - RNA, 20 nt, synthetic construct
  misc_feature 1..20: note = C9Orf72 ATCN PAM targeting sequence
  source 1..20: mol_type = other RNA
tgaaggttttgttcatgttt

SEQ ID NO: 4429 - RNA, 20 nt, synthetic construct
  misc_feature 1..20: note = C9Orf72 ATCN PAM targeting sequence
  source 1..20: mol_type = other RNA
gaggatgcagtccatgaaaa

SEQ ID NO: 4430 - RNA, 20 nt, synthetic construct
  misc_feature 1..20: note = C9Orf72 ATCN PAM targeting sequence
  source 1..20: mol_type = other RNA
tcagatgtatgttctaagtt

SEQ ID NO: 4431 - RNA, 20 nt, synthetic construct
  misc_feature 1..20: note = C9Orf72 ATCN PAM targeting sequence
  source 1..20: mol_type = other RNA
caccagagaggtgggcatac

SEQ ID NO: 4432 - RNA, 20 nt, synthetic construct
  misc_feature 1..20: note = C9Orf72 ATCN PAM targeting sequence
  source 1..20: mol_type = other RNA
gattcaccaaggtcaatgca

SEQ ID NO: 4433 - RNA, 20 nt, synthetic construct
  misc_feature 1..20: note = C9Orf72 ATCN PAM targeting sequence
  source 1..20: mol_type = other RNA
gatgactatgtgacttggca

SEQ ID NO: 4434 - RNA, 20 nt, synthetic construct
  misc_feature 1..20: note = C9Orf72 ATCN PAM targeting sequence
  source 1..20: mol_type = other RNA
ggccagcaacagttctgtca

SEQ ID NO: 4435 - RNA, 20 nt, synthetic construct
  misc_feature 1..20: note = C9Orf72 ATCN PAM targeting sequence
  source 1..20: mol_type = other RNA
tctggcttgtaaggtttctg

SEQ ID NO: 4436 - RNA, 20 nt, synthetic construct
  misc_feature 1..20: note = C9Orf72 ATCN PAM targeting sequence
  source 1..20: mol_type = other RNA
caccaaactgagtttcataa

SEQ ID NO: 4437 - RNA, 20 nt, synthetic construct
  misc_feature 1..20: note = C9Orf72 ATCN PAM targeting sequence
  source 1..20: mol_type = other RNA
ttctcagacaagcaagcacc

SEQ ID NO: 4438 - RNA, 20 nt, synthetic construct
  misc_feature 1..20: note = C9Orf72 ATCN PAM targeting sequence
  source 1..20: mol_type = other RNA
ccttggtgcttgcttgtctg

SEQ ID NO: 4439 - RNA, 20 nt, synthetic construct
  misc_feature 1..20: note = C9Orf72 ATCN PAM targeting sequence
  source 1..20: mol_type = other RNA
ggtggtaatgaatctccttg

SEQ ID NO: 4440 - RNA, 20 nt, synthetic construct
  misc_feature 1..20: note = C9Orf72 ATCN PAM targeting sequence
  source 1..20: mol_type = other RNA
tctggtggtaatgaatctcc

SEQ ID NO: 4441 - RNA, 20 nt, synthetic construct
  misc_feature 1..20: note = C9Orf72 ATCN PAM targeting sequence
  source 1..20: mol_type = other RNA
gtaagtgattgctaaacatg

SEQ ID NO: 4442 - RNA, 20 nt, synthetic construct
  misc_feature 1..20: note = C9Orf72 ATCN PAM targeting sequence
  source 1..20: mol_type = other RNA
cttacggatttcctgtaaga

SEQ ID NO: 4443 - RNA, 20 nt, synthetic construct
  misc_feature 1..20: note = C9Orf72 ATCN PAM targeting sequence
  source 1..20: mol_type = other RNA
cacatgtcaatgctaaccct

SEQ ID NO: 4444 - RNA, 20 nt, synthetic construct
  misc_feature 1..20: note = C9Orf72 ATCN PAM targeting sequence
  source 1..20: mol_type = other RNA
agcttaccactttatgcatt

SEQ ID NO: 4445 - RNA, 20 nt, synthetic construct
  misc_feature 1..20: note = C9Orf72 ATCN PAM targeting sequence
  source 1..20: mol_type = other RNA
tctgaaaacagcagacagtt

SEQ ID NO: 4446 - RNA, 20 nt, synthetic construct
  misc_feature 1..20: note = C9Orf72 ATCN PAM targeting sequence
  source 1..20: mol_type = other RNA
tacatgaatgacactcacag

SEQ ID NO: 4447 - RNA, 20 nt, synthetic construct
  misc_feature 1..20: note = C9Orf72 ATCN PAM targeting sequence
  source 1..20: mol_type = other RNA
ttcttcattctttcactttg

SEQ ID NO: 4448 - RNA, 20 nt, synthetic construct
  misc_feature 1..20: note = C9Orf72 ATCN PAM targeting sequence
  source 1..20: mol_type = other RNA
accatgcaaatgaaaaacaa

SEQ ID NO: 4449 - RNA, 20 nt, synthetic construct
  misc_feature 1..20: note = C9Orf72 ATCN PAM targeting sequence
  source 1..20: mol_type = other RNA
gattaaaacatactttaaac

SEQ ID NO: 4450 - RNA, 20 nt, synthetic construct
  misc_feature 1..20: note = C9Orf72 ATCN PAM targeting sequence
  source 1..20: mol_type = other RNA
gatttaagggtagcaactcc

SEQ ID NO: 4451 - RNA, 20 nt, synthetic construct
  misc_feature 1..20: note = C9Orf72 ATCN PAM targeting sequence
  source 1..20: mol_type = other RNA
ggaaggacaaagaagggcat

SEQ ID NO: 4452 - RNA, 20 nt, synthetic construct
  misc_feature 1..20: note = C9Orf72 ATCN PAM targeting sequence
  source 1..20: mol_type = other RNA
ttttataatgcccttctttg

SEQ ID NO: 4453 - RNA, 20 nt, synthetic construct
  misc_feature 1..20: note = C9Orf72 ATCN PAM targeting sequence
  source 1..20: mol_type = other RNA
gagtgctccagtgttgggtg

SEQ ID NO: 4454 - RNA, 20 nt, synthetic construct
  misc_feature 1..20: note = C9Orf72 ATCN PAM targeting sequence
  source 1..20: mol_type = other RNA
acgttttattgtaggccaat

SEQ ID NO: 4455 - RNA, 20 nt, synthetic construct
  misc_feature 1..20: note = C9Orf72 ATCN PAM targeting sequence
  source 1..20: mol_type = other RNA
ctccactgatagcattagac

SEQ ID NO: 4456 - RNA, 20 nt, synthetic construct
  misc_feature 1..20: note = C9Orf72 ATCN PAM targeting sequence
  source 1..20: mol_type = other RNA
gtggagtgataaagccccca

SEQ ID NO: 4457 - RNA, 20 nt, synthetic construct
  misc_feature 1..20: note = C9Orf72 ATCN PAM targeting sequence
  source 1..20: mol_type = other RNA
gtctaatgctatcagtggag

SEQ ID NO: 4458 - RNA, 20 nt, synthetic construct
  misc_feature 1..20: note = C9Orf72 ATCN PAM targeting sequence
  source 1..20: mol_type = other RNA
ctgaggcagaaaactgacga

SEQ ID NO: 4459 - RNA, 20 nt, synthetic construct
  misc_feature 1..20: note = C9Orf72 ATCN PAM targeting sequence
  source 1..20: mol_type = other RNA
tagagaggtctattaggtcc

SEQ ID NO: 4460 - RNA, 20 nt, synthetic construct
  misc_feature 1..20: note = C9Orf72 ATCN PAM targeting sequence
  source 1..20: mol_type = other RNA
tagaatacgttccatgtgca

SEQ ID NO: 4461 - RNA, 20 nt, synthetic construct
  misc_feature 1..20: note = C9Orf72 ATCN PAM targeting sequence
  source 1..20: mol_type = other RNA
tacaaaggccactctcaaat

SEQ ID NO: 4462 - RNA, 20 nt, synthetic construct
  misc_feature 1..20: note = C9Orf72 ATCN PAM targeting sequence
  source 1..20: mol_type = other RNA
tagtgaaataacaatagaaa

SEQ ID NO: 4463 - RNA, 20 nt, synthetic construct
  misc_feature 1..20: note = C9Orf72 ATCN PAM targeting sequence
  source 1..20: mol_type = other RNA
ataccaagaagatctctcaa

SEQ ID NO: 4464 - RNA, 20 nt, synthetic construct
  misc_feature 1..20: note = C9Orf72 ATCN PAM targeting sequence
  source 1..20: mol_type = other RNA
tcttggtattgatttctatt

SEQ ID NO: 4465 - RNA, 20 nt, synthetic construct
  misc_feature 1..20: note = C9Orf72 ATCN PAM targeting sequence
  source 1..20: mol_type = other RNA
ctcaaaactacacaaaagca

SEQ ID NO: 4466 - RNA, 20 nt, synthetic construct
  misc_feature 1..20: note = C9Orf72 ATCN PAM targeting sequence
  source 1..20: mol_type = other RNA
aaaaattatttgaaattaat

SEQ ID NO: 4467 - RNA, 20 nt, synthetic construct
  misc_feature 1..20: note = C9Orf72 ATCN PAM targeting sequence
  source 1..20: mol_type = other RNA
ttgggatgtagcaaaagcag

SEQ ID NO: 4468 - RNA, 20 nt, synthetic construct
  misc_feature 1..20: note = C9Orf72 ATCN PAM targeting sequence
  source 1..20: mol_type = other RNA
caaagattttggaaagttgt

SEQ ID NO: 4469 - RNA, 20 nt, synthetic construct
  misc_feature 1..20: note = C9Orf72 ATCN PAM targeting sequence
  source 1..20: mol_type = other RNA
agaggttagaaagatctcaa

SEQ ID NO: 4470 - RNA, 20 nt, synthetic construct
  misc_feature 1..20: note = C9Orf72 ATCN PAM targeting sequence
  source 1..20: mol_type = other RNA
ttctaacctcttgatgaagg

SEQ ID NO: 4471 - RNA, 20 nt, synthetic construct
  misc_feature 1..20: note = C9Orf72 ATCN PAM targeting sequence
  source 1..20: mol_type = other RNA
caactaaacaatctaacata

SEQ ID NO: 4472 - RNA, 20 nt, synthetic construct
  misc_feature 1..20: note = C9Orf72 ATCN PAM targeting sequence
  source 1..20: mol_type = other RNA
aacataacactagaggaact

SEQ ID NO: 4473 - RNA, 20 nt, synthetic construct
  misc_feature 1..20: note = C9Orf72 ATCN PAM targeting sequence
  source 1..20: mol_type = other RNA
cacagctagcagaggaaaag

SEQ ID NO: 4474 - RNA, 20 nt, synthetic construct
  misc_feature 1..20: note = C9Orf72 ATCN PAM targeting sequence
  source 1..20: mol_type = other RNA
gataatgactaaataaaatt

SEQ ID NO: 4475 - RNA, 20 nt, synthetic construct
  misc_feature 1..20: note = C9Orf72 ATCN PAM targeting sequence
  source 1..20: mol_type = other RNA
gattttagttatgtcttttc

SEQ ID NO: 4476 - RNA, 20 nt, synthetic construct
  misc_feature 1..20: note = C9Orf72 ATCN PAM targeting sequence
  source 1..20: mol_type = other RNA
caattttatttagtcattat

SEQ ID NO: 4477 - RNA, 20 nt, synthetic construct
  misc_feature 1..20: note = C9Orf72 ATCN PAM targeting sequence
  source 1..20: mol_type = other RNA
cacagaaatgccaaagattt

SEQ ID NO: 4478 - RNA, 20 nt, synthetic construct
  misc_feature 1..20: note = C9Orf72 ATCN PAM targeting sequence
  source 1..20: mol_type = other RNA
ttggcatttctgtgggattg

SEQ ID NO: 4479 - RNA, 20 nt, synthetic construct
  misc_feature 1..20: note = C9Orf72 ATCN PAM targeting sequence
  source 1..20: mol_type = other RNA
agaggaaatggataaattcc

SEQ ID NO: 4480 - RNA, 20 nt, synthetic construct
  misc_feature 1..20: note = C9Orf72 ATCN PAM targeting sequence
  source 1..20: mol_type = other RNA
atttcctctagatttcctac

SEQ ID NO: 4481 - RNA, 20 nt, synthetic construct
  misc_feature 1..20: note = C9Orf72 ATCN PAM targeting sequence
  source 1..20: mol_type = other RNA
tgggaggttgtatgtttcca

SEQ ID NO: 4482 - RNA, 20 nt, synthetic construct
  misc_feature 1..20: note = C9Orf72 ATCN PAM targeting sequence
  source 1..20: mol_type = other RNA
gtaataaaaaacctaccaac

SEQ ID NO: 4483 - RNA, 20 nt, synthetic construct
  misc_feature 1..20: note = C9Orf72 ATCN PAM targeting sequence
  source 1..20: mol_type = other RNA
ggtccagggctaaatttggt

SEQ ID NO: 4484 - RNA, 20 nt, synthetic construct
  misc_feature 1..20: note = C9Orf72 ATCN PAM targeting sequence
  source 1..20: mol_type = other RNA
atctggtccagggctaaatt

SEQ ID NO: 4485 - RNA, 20 nt, synthetic construct
  misc_feature 1..20: note = C9Orf72 ATCN PAM targeting sequence
  source 1..20: mol_type = other RNA
gttcttctttgtatgcttgg

SEQ ID NO: 4486 - RNA, 20 nt, synthetic construct
  misc_feature 1..20: note = C9Orf72 ATCN PAM targeting sequence
  source 1..20: mol_type = other RNA
tactgaaactattccataat

SEQ ID NO: 4487 - RNA, 20 nt, synthetic construct
  misc_feature 1..20: note = C9Orf72 ATCN PAM targeting sequence
  source 1..20: mol_type = other RNA
tcctgatatcaaaatctgcc

SEQ ID NO: 4488 - RNA, 20 nt, synthetic construct
  misc_feature 1..20: note = C9Orf72 ATCN PAM targeting sequence
  source 1..20: mol_type = other RNA
tgatatcaaaatctgccaga

SEQ ID NO: 4489 - RNA, 20 nt, synthetic construct
  misc_feature 1..20: note = C9Orf72 ATCN PAM targeting sequence
  source 1..20: mol_type = other RNA
ggatgatgctggcattgtag

SEQ ID NO: 4490 - RNA, 20 nt, synthetic construct
  misc_feature 1..20: note = C9Orf72 ATCN PAM targeting sequence
  source 1..20: mol_type = other RNA
aaatctgccagagacacaat

SEQ ID NO: 4491 - RNA, 20 nt, synthetic construct
  misc_feature 1..20: note = C9Orf72 ATCN PAM targeting sequence
  source 1..20: mol_type = other RNA
gccagagacacaatgaaaaa

SEQ ID NO: 4492 - RNA, 20 nt, synthetic construct
  misc_feature 1..20: note = C9Orf72 ATCN PAM targeting sequence
  source 1..20: mol_type = other RNA
ctgattaacataaacacgaa

SEQ ID NO: 4493 - RNA, 20 nt, synthetic construct
  misc_feature 1..20: note = C9Orf72 ATCN PAM targeting sequence
  source 1..20: mol_type = other RNA
gagatattgtcctgaagttt

SEQ ID NO: 4494 - RNA, 20 nt, synthetic construct
  misc_feature 1..20: note = C9Orf72 ATCN PAM targeting sequence
  source 1..20: mol_type = other RNA
tcaacaaaatatgagcaaac

SEQ ID NO: 4495 - RNA, 20 nt, synthetic construct
  misc_feature 1..20: note = C9Orf72 ATCN PAM targeting sequence
  source 1..20: mol_type = other RNA
agaagcacatcaaaaagtta

SEQ ID NO: 4496 - RNA, 20 nt, synthetic construct
  misc_feature 1..20: note = C9Orf72 ATCN PAM targeting sequence
  source 1..20: mol_type = other RNA
aaaagttaattcacaacaat

SEQ ID NO: 4497 - RNA, 20 nt, synthetic construct
  misc_feature 1..20: note = C9Orf72 ATCN PAM targeting sequence
  source 1..20: mol_type = other RNA
agtaggctttattcctggga

SEQ ID NO: 4498 - RNA, 20 nt, synthetic construct
  misc_feature 1..20: note = C9Orf72 ATCN PAM targeting sequence
  source 1..20: mol_type = other RNA
caggaataaagcctacttga

SEQ ID NO: 4499 - RNA, 20 nt, synthetic construct
  misc_feature 1..20: note = C9Orf72 ATCN PAM targeting sequence
  source 1..20: mol_type = other RNA
ataagtgtgattcaccacat

SEQ ID NO: 4500 - RNA, 20 nt, synthetic construct
  misc_feature 1..20: note = C9Orf72 ATCN PAM targeting sequence
  source 1..20: mol_type = other RNA
cacttattgatttgttatgt

SEQ ID NO: 4501 - RNA, 20 nt, synthetic construct
  misc_feature 1..20: note = C9Orf72 ATCN PAM targeting sequence
  source 1..20: mol_type = other RNA
tatggtttttgttttttcat

SEQ ID NO: 4502 - RNA, 20 nt, synthetic construct
  misc_feature 1..20: note = C9Orf72 ATCN PAM targeting sequence
  source 1..20: mol_type = other RNA
tctcaatagtttcagaaaaa

SEQ ID NO: 4503 - RNA, 20 nt, synthetic construct
  misc_feature 1..20: note = C9Orf72 ATCN PAM targeting sequence
  source 1..20: mol_type = other RNA
caatagtttcagaaaaaacc

SEQ ID NO: 4504 - RNA, 20 nt, synthetic construct
  misc_feature 1..20: note = C9Orf72 ATCN PAM targeting sequence
  source 1..20: mol_type = other RNA
attcatgattaaaaaccctc

SEQ ID NO: 4505 - RNA, 20 nt, synthetic construct
  misc_feature 1..20: note = C9Orf72 ATCN PAM targeting sequence
  source 1..20: mol_type = other RNA
tgaatggatattgaatttta

SEQ ID NO: 4506 - RNA, 20 nt, synthetic construct
  misc_feature 1..20: note = C9Orf72 ATCN PAM targeting sequence
  source 1..20: mol_type = other RNA
aaggaatataccttagaata

SEQ ID NO: 4507 - RNA, 20 nt, synthetic construct
  misc_feature 1..20: note = C9Orf72 ATCN PAM targeting sequence
  source 1..20: mol_type = other RNA
tattattctaaggtatattc

SEQ ID NO: 4508 - RNA, 20 nt, synthetic construct
  misc_feature 1..20: note = C9Orf72 ATCN PAM targeting sequence
  source 1..20: mol_type = other RNA
acctatgacaaaccacagcc

SEQ ID NO: 4509 - RNA, 20 nt, synthetic construct
  misc_feature 1..20: note = C9Orf72 ATCN PAM targeting sequence
  source 1..20: mol_type = other RNA
tactaaacaggtaaatgctg

SEQ ID NO: 4510 - RNA, 20 nt, synthetic construct
  misc_feature 1..20: note = C9Orf72 ATCN PAM targeting sequence
  source 1..20: mol_type = other RNA
ttgtcttgttccagtactca

SEQ ID NO: 4511 - RNA, 20 nt, synthetic construct
  misc_feature 1..20: note = C9Orf72 ATCN PAM targeting sequence
  source 1..20: mol_type = other RNA
aaaaagaagaagaagtcaaa

SEQ ID NO: 4512 - RNA, 20 nt, synthetic construct
  misc_feature 1..20: note = C9Orf72 ATCN PAM targeting sequence
  source 1..20: mol_type = other RNA
gcaaagagagacagtttgac

SEQ ID NO: 4513 - RNA, 20 nt, synthetic construct
  misc_feature 1..20: note = C9Orf72 ATCN PAM targeting sequence
  source 1..20: mol_type = other RNA
tcagcaaagagagacagttt

SEQ ID NO: 4514 - RNA, 20 nt, synthetic construct
  misc_feature 1..20: note = C9Orf72 ATCN PAM targeting sequence
  source 1..20: mol_type = other RNA
tatcatcagcaaagagagac

SEQ ID NO: 4515 - RNA, 20 nt, synthetic construct
  misc_feature 1..20: note = C9Orf72 ATCN PAM targeting sequence
  source 1..20: mol_type = other RNA
gttctaggagacttttggag

SEQ ID NO: 4516 - RNA, 20 nt, synthetic construct
  misc_feature 1..20: note = C9Orf72 ATCN PAM targeting sequence
  source 1..20: mol_type = other RNA
ttaaactttactgaagttat

SEQ ID NO: 4517 - RNA, 20 nt, synthetic construct
  misc_feature 1..20: note = C9Orf72 ATCN PAM targeting sequence
  source 1..20: mol_type = other RNA
atgtacaaaaatcagtagca

SEQ ID NO: 4518 - RNA, 20 nt, synthetic construct
  misc_feature 1..20: note = C9Orf72 ATCN PAM targeting sequence
  source 1..20: mol_type = other RNA
gtagcaattctatacaccaa

SEQ ID NO: 4519 - RNA, 20 nt, synthetic construct
  misc_feature 1..20: note = C9Orf72 ATCN PAM targeting sequence
  source 1..20: mol_type = other RNA
aaccatggaagtgaaatgtt

SEQ ID NO: 4520 - RNA, 20 nt, synthetic construct
  misc_feature 1..20: note = C9Orf72 ATCN PAM targeting sequence
  source 1..20: mol_type = other RNA
agatgactgaataaatataa

SEQ ID NO: 4521 - RNA, 20 nt, synthetic construct
  misc_feature 1..20: note = C9Orf72 ATCN PAM targeting sequence
  source 1..20: mol_type = other RNA
tgatttctttcagcagtgtt

SEQ ID NO: 4522 - RNA, 20 nt, synthetic construct
  misc_feature 1..20: note = C9Orf72 ATCN PAM targeting sequence
  source 1..20: mol_type = other RNA
atgagcatggagtattttta

SEQ ID NO: 4523 - RNA, 20 nt, synthetic construct
  misc_feature 1..20: note = C9Orf72 ATCN PAM targeting sequence
  source 1..20: mol_type = other RNA
atatcattaaaatggccaca

SEQ ID NO: 4524 - RNA, 20 nt, synthetic construct
  misc_feature 1..20: note = C9Orf72 ATCN PAM targeting sequence
  source 1..20: mol_type = other RNA
ttaaaatggccacactgtcc

SEQ ID NO: 4525 - RNA, 20 nt, synthetic construct
  misc_feature 1..20: note = C9Orf72 ATCN PAM targeting sequence
  source 1..20: mol_type = other RNA
ctagcaaaatatcaagtcat

SEQ ID NO: 4526 - RNA, 20 nt, synthetic construct
  misc_feature 1..20: note = C9Orf72 ATCN PAM targeting sequence
  source 1..20: mol_type = other RNA
agtcatttttcacagaatca

SEQ ID NO: 4527 - RNA, 20 nt, synthetic construct
  misc_feature 1..20: note = C9Orf72 ATCN PAM targeting sequence
  source 1..20: mol_type = other RNA
gaaaaatattctaaaattca

SEQ ID NO: 4528 - RNA, 20 nt, synthetic construct
  misc_feature 1..20: note = C9Orf72 ATCN PAM targeting sequence
  source 1..20: mol_type = other RNA
taagcaaaaagaacgaagcc

SEQ ID NO: 4529 - RNA, 20 nt, synthetic construct
  misc_feature 1..20: note = C9Orf72 ATCN PAM targeting sequence
  source 1..20: mol_type = other RNA
cattacccaacttcaaacta

SEQ ID NO: 4530 - RNA, 20 nt, synthetic construct
  misc_feature 1..20: note = C9Orf72 ATCN PAM targeting sequence
  source 1..20: mol_type = other RNA
tcgtaggtgtatgggtccat

SEQ ID NO: 4531 - RNA, 20 nt, synthetic construct
  misc_feature 1..20: note = C9Orf72 ATCN PAM targeting sequence
  source 1..20: mol_type = other RNA
gatattcaacaaaattgaca

SEQ ID NO: 4532 - RNA, 20 nt, synthetic construct
  misc_feature 1..20: note = C9Orf72 ATCN PAM targeting sequence
  source 1..20: mol_type = other RNA
gatcgtcgtaggtgtatggg

SEQ ID NO: 4533 - RNA, 20 nt, synthetic construct
  misc_feature 1..20: note = C9Orf72 ATCN PAM targeting sequence
  source 1..20: mol_type = other RNA
tgagttaatttttgtatatg

SEQ ID NO: 4534 - RNA, 20 nt, synthetic construct
  misc_feature 1..20: note = C9Orf72 ATCN PAM targeting sequence
  source 1..20: mol_type = other RNA
atcttgagttaatttttgta

SEQ ID NO: 4535 - RNA, 20 nt, synthetic construct
  misc_feature 1..20: note = C9Orf72 ATCN PAM targeting sequence
  source 1..20: mol_type = other RNA
ttaatccatcttgagttaat

SEQ ID NO: 4536 - RNA, 20 nt, synthetic construct
  misc_feature 1..20: note = C9Orf72 ATCN PAM targeting sequence
  source 1..20: mol_type = other RNA
tagaagaaaacctagaaaat

SEQ ID NO: 4537 - RNA, 20 nt, synthetic construct
  misc_feature 1..20: note = C9Orf72 ATCN PAM targeting sequence
  source 1..20: mol_type = other RNA
ttctccacgttggctttggc

SEQ ID NO: 4538 - RNA, 20 nt, synthetic construct
  misc_feature 1..20: note = C9Orf72 ATCN PAM targeting sequence
  source 1..20: mol_type = other RNA
gacaaagatctaatttccag

SEQ ID NO: 4539 - RNA, 20 nt, synthetic construct
  misc_feature 1..20: note = C9Orf72 ATCN PAM targeting sequence
  source 1..20: mol_type = other RNA
ttgtcagatgcatagtttgc

SEQ ID NO: 4540 - RNA, 20 nt, synthetic construct
  misc_feature 1..20: note = C9Orf72 ATCN PAM targeting sequence
  source 1..20: mol_type = other RNA
aatttccagaatatacaaag

SEQ ID NO: 4541 - RNA, 20 nt, synthetic construct
  misc_feature 1..20: note = C9Orf72 ATCN PAM targeting sequence
  source 1..20: mol_type = other RNA
gcaagcaaaaaacaaatatt

SEQ ID NO: 4542 - RNA, 20 nt, synthetic construct
  misc_feature 1..20: note = C9Orf72 ATCN PAM targeting sequence
  source 1..20: mol_type = other RNA
ttagagaaatggaaatccaa

SEQ ID NO: 4543 - RNA, 20 nt, synthetic construct
  misc_feature 1..20: note = C9Orf72 ATCN PAM targeting sequence
  source 1..20: mol_type = other RNA
aaaccacagtgagataccat

SEQ ID NO: 4544 - RNA, 20 nt, synthetic construct
  misc_feature 1..20: note = C9Orf72 ATCN PAM targeting sequence
  source 1..20: mol_type = other RNA
cactgtggtttggatttcca

SEQ ID NO: 4545 - RNA, 20 nt, synthetic construct
  misc_feature 1..20: note = C9Orf72 ATCN PAM targeting sequence
  source 1..20: mol_type = other RNA
aaaggctattaaaaagccaa

SEQ ID NO: 4546 - RNA, 20 nt, synthetic construct
  misc_feature 1..20: note = C9Orf72 ATCN PAM targeting sequence
  source 1..20: mol_type = other RNA
gttatgttttggctttttaa

SEQ ID NO: 4547 - RNA, 20 nt, synthetic construct
  misc_feature 1..20: note = C9Orf72 ATCN PAM targeting sequence
  source 1..20: mol_type = other RNA
tttcaccagcatctgttatg

SEQ ID NO: 4548 - RNA, 20 nt, synthetic construct
  misc_feature 1..20: note = C9Orf72 ATCN PAM targeting sequence
  source 1..20: mol_type = other RNA
ctcaccgcttcgctccagtc

SEQ ID NO: 4549 - RNA, 20 nt, synthetic construct
  misc_feature 1..20: note = C9Orf72 ATCN PAM targeting sequence
  source 1..20: mol_type = other RNA
catgcctccaaagagactgg

SEQ ID NO: 4550 - RNA, 20 nt, synthetic construct
  misc_feature 1..20: note = C9Orf72 ATCN PAM targeting sequence
  source 1..20: mol_type = other RNA
acgccagtagtgtcagctga

SEQ ID NO: 4551 - RNA, 20 nt, synthetic construct
  misc_feature 1..20: note = C9Orf72 ATCN PAM targeting sequence
  source 1..20: mol_type = other RNA
tggcaggctgcgctcagctg

SEQ ID NO: 4552 - RNA, 20 nt, synthetic construct
  misc_feature 1..20: note = C9Orf72 ATCN PAM targeting sequence
  source 1..20: mol_type = other RNA
ttgggggtgttgcttttctg

SEQ ID NO: 4553 - RNA, 20 nt, synthetic construct
  misc_feature 1..20: note = C9Orf72 ATCN PAM targeting sequence
  source 1..20: mol_type = other RNA
cataacagtatcagtatttt

SEQ ID NO: 4554 - RNA, 20 nt, synthetic construct
  misc_feature 1..20: note = C9Orf72 ATCN PAM targeting sequence
  source 1..20: mol_type = other RNA
gtatttttcagtcaggagga

SEQ ID NO: 4555 - RNA, 20 nt, synthetic construct
  misc_feature 1..20: note = C9Orf72 ATCN PAM targeting sequence
  source 1..20: mol_type = other RNA
atagaaacatcattacaaaa

SEQ ID NO: 4556 - RNA, 20 nt, synthetic construct
  misc_feature 1..20: note = C9Orf72 ATCN PAM targeting sequence
  source 1..20: mol_type = other RNA
ttacaaaacaagatcaatat

SEQ ID NO: 4557 - RNA, 20 nt, synthetic construct
  misc_feature 1..20: note = C9Orf72 ATCN PAM targeting sequence
  source 1..20: mol_type = other RNA
tgttttgtaatgatgtttct

SEQ ID NO: 4558 - RNA, 20 nt, synthetic construct
  misc_feature 1..20: note = C9Orf72 ATCN PAM targeting sequence
  source 1..20: mol_type = other RNA
atatttctgattttcatgct

SEQ ID NO: 4559 - RNA, 20 nt, synthetic construct
  misc_feature 1..20: note = C9Orf72 ATCN PAM targeting sequence
  source 1..20: mol_type = other RNA
gaaatattgatcttgttttg

SEQ ID NO: 4560 - RNA, 20 nt, synthetic construct
  misc_feature 1..20: note = C9Orf72 ATCN PAM targeting sequence
  source 1..20: mol_type = other RNA
ctatataaatgaaaatttct

SEQ ID NO: 4561 - RNA, 20 nt, synthetic construct
  misc_feature 1..20: note = C9Orf72 ATCN PAM targeting sequence
  source 1..20: mol_type = other RNA
gaatagagtatatctctata

SEQ ID NO: 4562 - RNA, 20 nt, synthetic construct
  misc_feature 1..20: note = C9Orf72 ATCN PAM targeting sequence
  source 1..20: mol_type = other RNA
gaaagaacagataatgactt

SEQ ID NO: 4563 - RNA, 20 nt, synthetic construct
  misc_feature 1..20: note = C9Orf72 ATCN PAM targeting sequence
  source 1..20: mol_type = other RNA
gttctttctgattatcagaa

SEQ ID NO: 4564 - RNA, 20 nt, synthetic construct
  misc_feature 1..20: note = C9Orf72 ATCN PAM targeting sequence
  source 1..20: mol_type = other RNA
agattaaggttcctaaggta

SEQ ID NO: 4565 - RNA, 20 nt, synthetic construct
  misc_feature 1..20: note = C9Orf72 ATCN PAM targeting sequence
  source 1..20: mol_type = other RNA
tgatgttctccaaagtcatt

SEQ ID NO: 4566 - RNA, 20 nt, synthetic construct
  misc_feature 1..20: note = C9Orf72 ATCN PAM targeting sequence
  source 1..20: mol_type = other RNA
atttttttggtcaacgagta

SEQ ID NO: 4567 - RNA, 20 nt, synthetic construct
  misc_feature 1..20: note = C9Orf72 ATCN PAM targeting sequence
  source 1..20: mol_type = other RNA
gttgcatttatttttaaact

SEQ ID NO: 4568 - RNA, 20 nt, synthetic construct
  misc_feature 1..20: note = C9Orf72 ATCN PAM targeting sequence
  source 1..20: mol_type = other RNA
tgattgctaaaaggattaat

SEQ ID NO: 4569 - RNA, 20 nt, synthetic construct
  misc_feature 1..20: note = C9Orf72 ATCN PAM targeting sequence
  source 1..20: mol_type = other RNA
agatagcggctacttttggt

SEQ ID NO: 4570 - RNA, 20 nt, synthetic construct
  misc_feature 1..20: note = C9Orf72 ATCN PAM targeting sequence
  source 1..20: mol_type = other RNA
ttttagcaatcaagatagcg

SEQ ID NO: 4571 - RNA, 20 nt, synthetic construct
  misc_feature 1..20: note = C9Orf72 ATCN PAM targeting sequence
  source 1..20: mol_type = other RNA
ggaaaccactcctttcatga

SEQ ID NO: 4572 - RNA, 20 nt, synthetic construct
  misc_feature 1..20: note = C9Orf72 ATCN PAM targeting sequence
  source 1..20: mol_type = other RNA
tgaaaggagtggtttccaga

SEQ ID NO: 4573 - RNA, 20 nt, synthetic construct
  misc_feature 1..20: note = C9Orf72 ATCN PAM targeting sequence
  source 1..20: mol_type = other RNA
cagaggtagaataattattt

SEQ ID NO: 4574 - RNA, 20 nt, synthetic construct
  misc_feature 1..20: note = C9Orf72 ATCN PAM targeting sequence
  source 1..20: mol_type = other RNA
ttccgacagagagttaccta

SEQ ID NO: 4575 - RNA, 20 nt, synthetic construct
  misc_feature 1..20: note = C9Orf72 ATCN PAM targeting sequence
  source 1..20: mol_type = other RNA
ttagcataaaaacttattta

SEQ ID NO: 4576 - RNA, 20 nt, synthetic construct
  misc_feature 1..20: note = C9Orf72 ATCN PAM targeting sequence
  source 1..20: mol_type = other RNA
cacaaatggaattattaaaa

SEQ ID NO: 4577 - RNA, 20 nt, synthetic construct
  misc_feature 1..20: note = C9Orf72 ATCN PAM targeting sequence
  source 1..20: mol_type = other RNA
ttatttttaataattccatt

SEQ ID NO: 4578 - RNA, 20 nt, synthetic construct
  misc_feature 1..20: note = C9Orf72 ATCN PAM targeting sequence
  source 1..20: mol_type = other RNA
agagagaaggacaggaacag

SEQ ID NO: 4579 - RNA, 20 nt, synthetic construct
  misc_feature 1..20: note = C9Orf72 ATCN PAM targeting sequence
  source 1..20: mol_type = other RNA
agagaatgttactgtgtccc

SEQ ID NO: 4580 - RNA, 20 nt, synthetic construct
  misc_feature 1..20: note = C9Orf72 ATCN PAM targeting sequence
  source 1..20: mol_type = other RNA
ggtgtaggtacaatcgagtt

SEQ ID NO: 4581 - RNA, 20 nt, synthetic construct
  misc_feature 1..20: note = C9Orf72 ATCN PAM targeting sequence
  source 1..20: mol_type = other RNA
agtttcacaaatgttgaaat

SEQ ID NO: 4582 - RNA, 20 nt, synthetic construct
  misc_feature 1..20: note = C9Orf72 ATCN PAM targeting sequence
  source 1..20: mol_type = other RNA
taggatttaggaatagtgcc

SEQ ID NO: 4583 - RNA, 20 nt, synthetic construct
  misc_feature 1..20: note = C9Orf72 ATCN PAM targeting sequence
  source 1..20: mol_type = other RNA
agccacctctggaccatatc

SEQ ID NO: 4584 - RNA, 20 nt, synthetic construct
  misc_feature 1..20: note = C9Orf72 ATCN PAM targeting sequence
  source 1..20: mol_type = other RNA
ctccactgcactccagcctg

SEQ ID NO: 4585 - RNA, 20 nt, synthetic construct
  misc_feature 1..20: note = C9Orf72 ATCN PAM targeting sequence
  source 1..20: mol_type = other RNA
ccgctcactgcaaactccac

SEQ ID NO: 4586 - RNA, 20 nt, synthetic construct
  misc_feature 1..20: note = C9Orf72 ATCN PAM targeting sequence
  source 1..20: mol_type = other RNA
catcttttgaattagtcctt

SEQ ID NO: 4587 - RNA, 20 nt, synthetic construct
  misc_feature 1..20: note = C9Orf72 ATCN PAM targeting sequence
  source 1..20: mol_type = other RNA
tttgaattagtcctttgaac

SEQ ID NO: 4588 - RNA, 20 nt, synthetic construct
  misc_feature 1..20: note = C9Orf72 ATCN PAM targeting sequence
  source 1..20: mol_type = other RNA
tgtacaaatagtgttcaaag

SEQ ID NO: 4589 - RNA, 20 nt, synthetic construct
  misc_feature 1..20: note = C9Orf72 ATCN PAM targeting sequence
  source 1..20: mol_type = other RNA
gtgcttttaataatgacaat

SEQ ID NO: 4590 - RNA, 20 nt, synthetic construct
  misc_feature 1..20: note = C9Orf72 ATCN PAM targeting sequence
  source 1..20: mol_type = other RNA
tgaccttaagggaatgaagt

SEQ ID NO: 4591 - RNA, 20 nt, synthetic construct
  misc_feature 1..20: note = C9Orf72 ATCN PAM targeting sequence
  source 1..20: mol_type = other RNA
gtccagcacttcattccctt

SEQ ID NO: 4592 - RNA, 20 nt, synthetic construct
  misc_feature 1..20: note = C9Orf72 ATCN PAM targeting sequence
  source 1..20: mol_type = other RNA
cagtttactgagaatggaaa

SEQ ID NO: 4593 - RNA, 20 nt, synthetic construct
  misc_feature 1..20: note = C9Orf72 ATCN PAM targeting sequence
  source 1..20: mol_type = other RNA
actttccagcaagccaaagt

SEQ ID NO: 4594 - RNA, 20 nt, synthetic construct
  misc_feature 1..20: note = C9Orf72 ATCN PAM targeting sequence
  source 1..20: mol_type = other RNA
agaaagtctggtatattttt

SEQ ID NO: 4595 - RNA, 20 nt, synthetic construct
  misc_feature 1..20: note = C9Orf72 ATCN PAM targeting sequence
  source 1..20: mol_type = other RNA
tactttaaaataaataatat

SEQ ID NO: 4596 - RNA, 20 nt, synthetic construct
  misc_feature 1..20: note = C9Orf72 ATCN PAM targeting sequence
  source 1..20: mol_type = other RNA
cttcccataaatagaagata

SEQ ID NO: 4597 - RNA, 20 nt, synthetic construct
  misc_feature 1..20: note = C9Orf72 ATCN PAM targeting sequence
  source 1..20: mol_type = other RNA
tctatttatgggaagtgata

SEQ ID NO: 4598 - RNA, 20 nt, synthetic construct
  misc_feature 1..20: note = C9Orf72 ATCN PAM targeting sequence
  source 1..20: mol_type = other RNA
cttagaagaatgaatttgga

SEQ ID NO: 4599 - RNA, 20 nt, synthetic construct
  misc_feature 1..20: note = C9Orf72 ATCN PAM targeting sequence
  source 1..20: mol_type = other RNA
gaagaccggagtagtcatct

SEQ ID NO: 4600 - RNA, 20 nt, synthetic construct
  misc_feature 1..20: note = C9Orf72 ATCN PAM targeting sequence
  source 1..20: mol_type = other RNA
cagctctgctacttctgtgt

SEQ ID NO: 4601 - RNA, 20 nt, synthetic construct
  misc_feature 1..20: note = C9Orf72 ATCN PAM targeting sequence
  source 1..20: mol_type = other RNA
cttgacttctctgagtccca

SEQ ID NO: 4602 - RNA, 20 nt, synthetic construct
  misc_feature 1..20: note = C9Orf72 ATCN PAM targeting sequence
  source 1..20: mol_type = other RNA
cgtccctttttttttttttt

SEQ ID NO: 4603 - RNA, 20 nt, synthetic construct
  misc_feature 1..20: note = C9Orf72 ATCN PAM targeting sequence
  source 1..20: mol_type = other RNA
agctgcaaagggaaatatgt

SEQ ID NO: 4604 - RNA, 20 nt, synthetic construct
  misc_feature 1..20: note = C9Orf72 ATCN PAM targeting sequence
  source 1..20: mol_type = other RNA
ttgtttcttcttctctctct

SEQ ID NO: 4605 - RNA, 20 nt, synthetic construct
  misc_feature 1..20: note = C9Orf72 ATCN PAM targeting sequence
  source 1..20: mol_type = other RNA
gcccgtgtaattctgttgtt

SEQ ID NO: 4606 - RNA, 20 nt, synthetic construct
  misc_feature 1..20: note = C9Orf72 ATCN PAM targeting sequence
  source 1..20: mol_type = other RNA
ctttctttgcttcattatgt

SEQ ID NO: 4607 - RNA, 20 nt, synthetic construct
  misc_feature 1..20: note = C9Orf72 ATCN PAM targeting sequence
  source 1..20: mol_type = other RNA
atttgcaaagcctaggaaat

SEQ ID NO: 4608 - RNA, 20 nt, synthetic construct
  misc_feature 1..20: note = C9Orf72 ATCN PAM targeting sequence
  source 1..20: mol_type = other RNA
tgcagtggaaactgctacca

SEQ ID NO: 4609 - RNA, 20 nt, synthetic construct
  misc_feature 1..20: note = C9Orf72 ATCN PAM targeting sequence
  source 1..20: mol_type = other RNA
cttaagttctccgaagtatt

SEQ ID NO: 4610 - RNA, 20 nt, synthetic construct
  misc_feature 1..20: note = C9Orf72 ATCN PAM targeting sequence
  source 1..20: mol_type = other RNA
aaacatcacttaagttctcc

SEQ ID NO: 4611 - RNA, 20 nt, synthetic construct
  misc_feature 1..20: note = C9Orf72 ATCN PAM targeting sequence
  source 1..20: mol_type = other RNA
gtgggcatcaaaacatcact

SEQ ID NO: 4612 - RNA, 20 nt, synthetic construct
  misc_feature 1..20: note = C9Orf72 ATCN PAM targeting sequence
  source 1..20: mol_type = other RNA
acatttctaatatttgtcca

SEQ ID NO: 4613 - RNA, 20 nt, synthetic construct
  misc_feature 1..20: note = C9Orf72 ATCN PAM targeting sequence
  source 1..20: mol_type = other RNA
tattaaacagtaatggacaa

SEQ ID NO: 4614 - RNA, 20 nt, synthetic construct
  misc_feature 1..20: note = C9Orf72 ATCN PAM targeting sequence
  source 1..20: mol_type = other RNA
tcctcacttcttggaagtga

SEQ ID NO: 4615 - RNA, 20 nt, synthetic construct
  misc_feature 1..20: note = C9Orf72 ATCN PAM targeting sequence
  source 1..20: mol_type = other RNA
acaaactgctccttggtaat

SEQ ID NO: 4616 - RNA, 20 nt, synthetic construct
  misc_feature 1..20: note = C9Orf72 ATCN PAM targeting sequence
  source 1..20: mol_type = other RNA
ggttatgggtttgttagtaa

SEQ ID NO: 4617 - RNA, 20 nt, synthetic construct
  misc_feature 1..20: note = C9Orf72 ATCN PAM targeting sequence
  source 1..20: mol_type = other RNA
tgagtgacttcacaataccc

SEQ ID NO: 4618 - RNA, 20 nt, synthetic construct
  misc_feature 1..20: note = C9Orf72 ATCN PAM targeting sequence
  source 1..20: mol_type = other RNA
gtatcctgagtgacttcaca

SEQ ID NO: 4619 - RNA, 20 nt, synthetic construct
  misc_feature 1..20: note = C9Orf72 ATCN PAM targeting sequence
  source 1..20: mol_type = other RNA
gcactatatctgtatcctga

SEQ ID NO: 4620 - RNA, 20 nt, synthetic construct
  misc_feature 1..20: note = C9Orf72 ATCN PAM targeting sequence
  source 1..20: mol_type = other RNA
catcagcactatatctgtat

SEQ ID NO: 4621 - RNA, 20 nt, synthetic construct
  misc_feature 1..20: note = C9Orf72 ATCN PAM targeting sequence
  source 1..20: mol_type = other RNA
attaaaatgaattgtagtcc

SEQ ID NO: 4622 - RNA, 20 nt, synthetic construct
  misc_feature 1..20: note = C9Orf72 ATCN PAM targeting sequence
  source 1..20: mol_type = other RNA
ttgtcactcgtagtgcttca

SEQ ID NO: 4623 - RNA, 20 nt, synthetic construct
  misc_feature 1..20: note = C9Orf72 ATCN PAM targeting sequence
  source 1..20: mol_type = other RNA
cttactttatgaccacattt

SEQ ID NO: 4624 - RNA, 20 nt, synthetic construct
  misc_feature 1..20: note = C9Orf72 ATCN PAM targeting sequence
  source 1..20: mol_type = other RNA
gggtgagcaagactatgaaa

SEQ ID NO: 4625 - RNA, 20 nt, synthetic construct
  misc_feature 1..20: note = C9Orf72 ATCN PAM targeting sequence
  source 1..20: mol_type = other RNA
tattctggacctacataaag

SEQ ID NO: 4626 - RNA, 20 nt, synthetic construct
  misc_feature 1..20: note = C9Orf72 ATCN PAM targeting sequence
  source 1..20: mol_type = other RNA
taatgtttgcaagtttgtct

SEQ ID NO: 4627 - RNA, 20 nt, synthetic construct
  misc_feature 1..20: note = C9Orf72 ATCN PAM targeting sequence
  source 1..20: mol_type = other RNA
attattttcaaatcgtaatg

SEQ ID NO: 4628 - RNA, 20 nt, synthetic construct
  misc_feature 1..20: note = C9Orf72 ATCN PAM targeting sequence
  source 1..20: mol_type = other RNA
tcatttcaaagcactttcaa

SEQ ID NO: 4629 - RNA, 20 nt, synthetic construct
  misc_feature 1..20: note = C9Orf72 ATCN PAM targeting sequence
  source 1..20: mol_type = other RNA
tttcaaagcactttcaagaa

SEQ ID NO: 4630 - RNA, 20 nt, synthetic construct
  misc_feature 1..20: note = C9Orf72 ATCN PAM targeting sequence
  source 1..20: mol_type = other RNA
tctttcctagacaactaaag

SEQ ID NO: 4631 - RNA, 20 nt, synthetic construct
  misc_feature 1..20: note = C9Orf72 ATCN PAM targeting sequence
  source 1..20: mol_type = other RNA
gaattaacagccctctttag

SEQ ID NO: 4632 - RNA, 20 nt, synthetic construct
  misc_feature 1..20: note = C9Orf72 ATCN PAM targeting sequence
  source 1..20: mol_type = other RNA
tctgaaagctttttcttatc

SEQ ID NO: 4633 - RNA, 20 nt, synthetic construct
  misc_feature 1..20: note = C9Orf72 ATCN PAM targeting sequence
  source 1..20: mol_type = other RNA
gaaagctttttcttatcacc

SEQ ID NO: 4634 - RNA, 20 nt, synthetic construct
  misc_feature 1..20: note = C9Orf72 ATCN PAM targeting sequence
  source 1..20: mol_type = other RNA
ccaacttacttattttcttt

SEQ ID NO: 4635 - RNA, 20 nt, synthetic construct
  misc_feature 1..20: note = C9Orf72 ATCN PAM targeting sequence
  source 1..20: mol_type = other RNA
tgaaataatgccacaagaac

SEQ ID NO: 4636 - RNA, 20 nt, synthetic construct
  misc_feature 1..20: note = C9Orf72 ATCN PAM targeting sequence
  source 1..20: mol_type = other RNA
gaatttagtgattacataag

SEQ ID NO: 4637 - RNA, 20 nt, synthetic construct
  misc_feature 1..20: note = C9Orf72 ATCN PAM targeting sequence
  source 1..20: mol_type = other RNA
ctaaattcagatcctgaaat

SEQ ID NO: 4638 - RNA, 20 nt, synthetic construct
  misc_feature 1..20: note = C9Orf72 ATCN PAM targeting sequence
  source 1..20: mol_type = other RNA
agacccattcaaggtccatt

SEQ ID NO: 4639 - RNA, 20 nt, synthetic construct
  misc_feature 1..20: note = C9Orf72 ATCN PAM targeting sequence
  source 1..20: mol_type = other RNA
ctggaagaaatggaccttga

SEQ ID NO: 4640 - RNA, 20 nt, synthetic construct
  misc_feature 1..20: note = C9Orf72 ATCN PAM targeting sequence
  source 1..20: mol_type = other RNA
ggattagtccattctctacc

SEQ ID NO: 4641 - RNA, 20 nt, synthetic construct
  misc_feature 1..20: note = C9Orf72 ATCN PAM targeting sequence
  source 1..20: mol_type = other RNA
ggatccctggaagaaatgga

SEQ ID NO: 4642 - RNA, 20 nt, synthetic construct
  misc_feature 1..20: note = C9Orf72 ATCN PAM targeting sequence
  source 1..20: mol_type = other RNA
agtagaaataaaatgcaaac

SEQ ID NO: 4643 - RNA, 20 nt, synthetic construct
  misc_feature 1..20: note = C9Orf72 ATCN PAM targeting sequence
  source 1..20: mol_type = other RNA
ggattatattttatacttaa

SEQ ID NO: 4644 - RNA, 20 nt, synthetic construct
  misc_feature 1..20: note = C9Orf72 ATCN PAM targeting sequence
  source 1..20: mol_type = other RNA
agatttctaagacttcaaaa

SEQ ID NO: 4645 - RNA, 20 nt, synthetic construct
  misc_feature 1..20: note = C9Orf72 ATCN PAM targeting sequence
  source 1..20: mol_type = other RNA
tgtacttccttatttcatag

SEQ ID NO: 4646 - RNA, 20 nt, synthetic construct
  misc_feature 1..20: note = C9Orf72 ATCN PAM targeting sequence
  source 1..20: mol_type = other RNA
ataggcaattactaatagct

SEQ ID NO: 4647 - RNA, 20 nt, synthetic construct
  misc_feature 1..20: note = C9Orf72 ATCN PAM targeting sequence
  source 1..20: mol_type = other RNA
atcaataggcaattactaat

SEQ ID NO: 4648 - RNA, 20 nt, synthetic construct
  misc_feature 1..20: note = C9Orf72 ATCN PAM targeting sequence
  source 1..20: mol_type = other RNA
gtgacctcttaaacacagca

SEQ ID NO: 4649 - RNA, 20 nt, synthetic construct
  misc_feature 1..20: note = C9Orf72 ATCN PAM targeting sequence
  source 1..20: mol_type = other RNA
taatataaatatggggaaga

SEQ ID NO: 4650 - RNA, 20 nt, synthetic construct
  misc_feature 1..20: note = C9Orf72 ATCN PAM targeting sequence
  source 1..20: mol_type = other RNA
cctctgttttgttagatctg

SEQ ID NO: 4651 - RNA, 20 nt, synthetic construct
  misc_feature 1..20: note = C9Orf72 ATCN PAM targeting sequence
  source 1..20: mol_type = other RNA
aacaaaacagaggtgatttg

SEQ ID NO: 4652 - RNA, 20 nt, synthetic construct
  misc_feature 1..20: note = C9Orf72 ATCN PAM targeting sequence
  source 1..20: mol_type = other RNA
gaatctctgtgggtatgttg

SEQ ID NO: 4653 - RNA, 20 nt, synthetic construct
  misc_feature 1..20: note = C9Orf72 ATCN PAM targeting sequence
  source 1..20: mol_type = other RNA
ctgtgggtatgttggatgag

SEQ ID NO: 4654 - RNA, 20 nt, synthetic construct
  misc_feature 1..20: note = C9Orf72 ATCN PAM targeting sequence
  source 1..20: mol_type = other RNA
aacatacccacagagattca

SEQ ID NO: 4655 - RNA, 20 nt, synthetic construct
  misc_feature 1..20: note = C9Orf72 ATCN PAM targeting sequence
  source 1..20: mol_type = other RNA
catccaacatacccacagag

SEQ ID NO: 4656 - RNA, 20 nt, synthetic construct
  misc_feature 1..20: note = C9Orf72 ATCN PAM targeting sequence
  source 1..20: mol_type = other RNA
atttcttataatctcatcca

SEQ ID NO: 4657 - RNA, 20 nt, synthetic construct
  misc_feature 1..20: note = C9Orf72 ATCN PAM targeting sequence
  source 1..20: mol_type = other RNA
ttcagacaattcaggcaaaa

SEQ ID NO: 4658 - RNA, 20 nt, synthetic construct
  misc_feature 1..20: note = C9Orf72 ATCN PAM targeting sequence
  source 1..20: mol_type = other RNA
tattttgcctgaattgtctg

SEQ ID NO: 4659 - RNA, 20 nt, synthetic construct
  misc_feature 1..20: note = C9Orf72 ATCN PAM targeting sequence
  source 1..20: mol_type = other RNA
atgggataattgcctccatt

SEQ ID NO: 4660 - RNA, 20 nt, synthetic construct
  misc_feature 1..20: note = C9Orf72 ATCN PAM targeting sequence
  source 1..20: mol_type = other RNA
cattgatttcagctataaat

SEQ ID NO: 4661 - RNA, 20 nt, synthetic construct
  misc_feature 1..20: note = C9Orf72 ATCN PAM targeting sequence
  source 1..20: mol_type = other RNA
aaccatgaagcagaggccct

SEQ ID NO: 4662 - RNA, 20 nt, synthetic construct
  misc_feature 1..20: note = C9Orf72 ATCN PAM targeting sequence
  source 1..20: mol_type = other RNA
aattgaagggcctctgcttc

SEQ ID NO: 4663 - RNA, 20 nt, synthetic construct
  misc_feature 1..20: note = C9Orf72 ATCN PAM targeting sequence
  source 1..20: mol_type = other RNA
ctgggataggaatagcttat

SEQ ID NO: 4664 - RNA, 20 nt, synthetic construct
  misc_feature 1..20: note = C9Orf72 ATCN PAM targeting sequence
  source 1..20: mol_type = other RNA
cagtgatttagtttcagctt

SEQ ID NO: 4665 - RNA, 20 nt, synthetic construct
  misc_feature 1..20: note = C9Orf72 ATCN PAM targeting sequence
  source 1..20: mol_type = other RNA
tgaaacaaaccatgcatgga

SEQ ID NO: 4666 - RNA, 20 nt, synthetic construct
  misc_feature 1..20: note = C9Orf72 ATCN PAM targeting sequence
  source 1..20: mol_type = other RNA
ttctgttttggggaagtttc

SEQ ID NO: 4667 - RNA, 20 nt, synthetic construct
  misc_feature 1..20: note = C9Orf72 ATCN PAM targeting sequence
  source 1..20: mol_type = other RNA
aggaatgttattgtttattg

SEQ ID NO: 4668 - RNA, 20 nt, synthetic construct
  misc_feature 1..20: note = C9Orf72 ATCN PAM targeting sequence
  source 1..20: mol_type = other RNA
tataaattgtcaaagttaca

SEQ ID NO: 4669 - RNA, 20 nt, synthetic construct
  misc_feature 1..20: note = C9Orf72 ATCN PAM targeting sequence
  source 1..20: mol_type = other RNA
gtaacatcaatcttagctcc

SEQ ID NO: 4670 - RNA, 20 nt, synthetic construct
  misc_feature 1..20: note = C9Orf72 ATCN PAM targeting sequence
  source 1..20: mol_type = other RNA
atcttagctccctgttaact

SEQ ID NO: 4671 - RNA, 20 nt, synthetic construct
  misc_feature 1..20: note = C9Orf72 ATCN PAM targeting sequence
  source 1..20: mol_type = other RNA
taagatcacatccaatttaa

SEQ ID NO: 4672 - RNA, 20 nt, synthetic construct
  misc_feature 1..20: note = C9Orf72 ATCN PAM targeting sequence
  source 1..20: mol_type = other RNA
taagattcttctgtcaaaat

SEQ ID NO: 4673 - RNA, 20 nt, synthetic construct
  misc_feature 1..20: note = C9Orf72 ATCN PAM targeting sequence
  source 1..20: mol_type = other RNA
catccaatttaataaaaaca

SEQ ID NO: 4674 - RNA, 20 nt, synthetic construct
  misc_feature 1..20: note = C9Orf72 ATCN PAM targeting sequence
  source 1..20: mol_type = other RNA
aatttaataaaaacaaaggc

SEQ ID NO: 4675 - RNA, 20 nt, synthetic construct
  misc_feature 1..20: note = C9Orf72 ATCN PAM targeting sequence
  source 1..20: mol_type = other RNA
gaagccactgtggggcctca

SEQ ID NO: 4676 - RNA, 20 nt, synthetic construct
  misc_feature 1..20: note = C9Orf72 ATCN PAM targeting sequence
  source 1..20: mol_type = other RNA
ccccagcctctcagtagtca

SEQ ID NO: 4677 - RNA, 20 nt, synthetic construct
  misc_feature 1..20: note = C9Orf72 ATCN PAM targeting sequence
  source 1..20: mol_type = other RNA
cagtctcaatacgtatttgt

SEQ ID NO: 4678 - RNA, 20 nt, synthetic construct
  misc_feature 1..20: note = C9Orf72 ATCN PAM targeting sequence
  source 1..20: mol_type = other RNA
ataatgcttatttttttcta

SEQ ID NO: 4679 - RNA, 20 nt, synthetic construct
  misc_feature 1..20: note = C9Orf72 ATCN PAM targeting sequence
  source 1..20: mol_type = other RNA
tatgtttgctttaattttat

SEQ ID NO: 4680 - RNA, 20 nt, synthetic construct
  misc_feature 1..20: note = C9Orf72 ATCN PAM targeting sequence
  source 1..20: mol_type = other RNA
caataaataaaattaaagca

SEQ ID NO: 4681 - RNA, 20 nt, synthetic construct
  misc_feature 1..20: note = C9Orf72 ATCN PAM targeting sequence
  source 1..20: mol_type = other RNA
gtgacagcagacccattgta

SEQ ID NO: 4682 - RNA, 20 nt, synthetic construct
  misc_feature 1..20: note = C9Orf72 ATCN PAM targeting sequence
  source 1..20: mol_type = other RNA
cttgcctactccatacagca

SEQ ID NO: 4683 - RNA, 20 nt, synthetic construct
  misc_feature 1..20: note = C9Orf72 ATCN PAM targeting sequence
  source 1..20: mol_type = other RNA
attctaaggttggaggttgg

SEQ ID NO: 4684 - RNA, 20 nt, synthetic construct
  misc_feature 1..20: note = C9Orf72 ATCN PAM targeting sequence
  source 1..20: mol_type = other RNA
aaatccattctaaggttgga

SEQ ID NO: 4685 - RNA, 20 nt, synthetic construct
  misc_feature 1..20: note = C9Orf72 ATCN PAM targeting sequence
  source 1..20: mol_type = other RNA
ttcgacaacaaagacaatgc

SEQ ID NO: 4686 - RNA, 20 nt, synthetic construct
  misc_feature 1..20: note = C9Orf72 ATCN PAM targeting sequence
  source 1..20: mol_type = other RNA
gagaaccactggacaagaag

SEQ ID NO: 4687 - RNA, 20 nt, synthetic construct
  misc_feature 1..20: note = C9Orf72 ATCN PAM targeting sequence
  source 1..20: mol_type = other RNA
gaataacttgggaagccttg

SEQ ID NO: 4688 - RNA, 20 nt, synthetic construct
  misc_feature 1..20: note = C9Orf72 ATCN PAM targeting sequence
  source 1..20: mol_type = other RNA
acagtctttaacaaggcttc

SEQ ID NO: 4689 - RNA, 20 nt, synthetic construct
  misc_feature 1..20: note = C9Orf72 ATCN PAM targeting sequence
  source 1..20: mol_type = other RNA
attacatggtgccattaagg

SEQ ID NO: 4690 - RNA, 20 nt, synthetic construct
  misc_feature 1..20: note = C9Orf72 ATCN PAM targeting sequence
  source 1..20: mol_type = other RNA
ttatatcttgctcacacagg

SEQ ID NO: 4691 - RNA, 20 nt, synthetic construct
  misc_feature 1..20: note = C9Orf72 ATCN PAM targeting sequence
  source 1..20: mol_type = other RNA
tgctcacacagggtcctgtg

SEQ ID NO: 4692 - RNA, 20 nt, synthetic construct
  misc_feature 1..20: note = C9Orf72 ATCN PAM targeting sequence
  source 1..20: mol_type = other RNA
tctggtctacctcgtactat

SEQ ID NO: 4693 - RNA, 20 nt, synthetic construct
  misc_feature 1..20: note = C9Orf72 ATCN PAM targeting sequence
  source 1..20: mol_type = other RNA
ttgatagacaaaaattcctt

SEQ ID NO: 4694 - RNA, 20 nt, synthetic construct
  misc_feature 1..20: note = C9Orf72 ATCN PAM targeting sequence
  source 1..20: mol_type = other RNA
aagatagtacgaggtagacc

SEQ ID NO: 4695 - RNA, 20 nt, synthetic construct
  misc_feature 1..20: note = C9Orf72 ATCN PAM targeting sequence
  source 1..20: mol_type = other RNA
gactaaatcttgtctaaaat

SEQ ID NO: 4696 - RNA, 20 nt, synthetic construct
  misc_feature 1..20: note = C9Orf72 ATCN PAM targeting sequence
  source 1..20: mol_type = other RNA
tgtctaaaatagtattctca

SEQ ID NO: 4697 - RNA, 20 nt, synthetic construct
  misc_feature 1..20: note = C9Orf72 ATCN PAM targeting sequence
  source 1..20: mol_type = other RNA
taactcatgaattttgcagt

SEQ ID NO: 4698 - RNA, 20 nt, synthetic construct
  misc_feature 1..20: note = C9Orf72 ATCN PAM targeting sequence
  source 1..20: mol_type = other RNA
cccgaagagactgcaaaatt

SEQ ID NO: 4699 - RNA, 20 nt, synthetic construct
  misc_feature 1..20: note = C9Orf72 ATCN PAM targeting sequence
  source 1..20: mol_type = other RNA
tccacttttgaaatattgag

SEQ ID NO: 4700 - RNA, 20 nt, synthetic construct
  misc_feature 1..20: note = C9Orf72 ATCN PAM targeting sequence
  source 1..20: mol_type = other RNA
acttttgaaatattgagtgt

SEQ ID NO: 4701 - RNA, 20 nt, synthetic construct
  misc_feature 1..20: note = C9Orf72 ATCN PAM targeting sequence
  source 1..20: mol_type = other RNA
tacacaatattacactcaat

SEQ ID NO: 4702 - RNA, 20 nt, synthetic construct
  misc_feature 1..20: note = C9Orf72 ATCN PAM targeting sequence
  source 1..20: mol_type = other RNA
tggagtataacataaagaca

SEQ ID NO: 4703 - RNA, 20 nt, synthetic construct
  misc_feature 1..20: note = C9Orf72 ATCN PAM targeting sequence
  source 1..20: mol_type = other RNA
acaatactgccagtacattc

SEQ ID NO: 4704 - RNA, 20 nt, synthetic construct
  misc_feature 1..20: note = C9Orf72 ATCN PAM targeting sequence
  source 1..20: mol_type = other RNA
tccacttttttagtttccag

SEQ ID NO: 4705 - RNA, 20 nt, synthetic construct
  misc_feature 1..20: note = C9Orf72 ATCN PAM targeting sequence
  source 1..20: mol_type = other RNA
tggaaactaaaaaagtggaa

SEQ ID NO: 4706 - RNA, 20 nt, synthetic construct
  misc_feature 1..20: note = C9Orf72 ATCN PAM targeting sequence
  source 1..20: mol_type = other RNA
aagtctgaggaaaattaatg

SEQ ID NO: 4707 - RNA, 20 nt, synthetic construct
  misc_feature 1..20: note = C9Orf72 ATCN PAM targeting sequence
  source 1..20: mol_type = other RNA
tggagcattactgagaattt

SEQ ID NO: 4708 - RNA, 20 nt, synthetic construct
  misc_feature 1..20: note = C9Orf72 ATCN PAM targeting sequence
  source 1..20: mol_type = other RNA
aaatccaaacataaatacaa

SEQ ID NO: 4709 - RNA, 20 nt, synthetic construct
  misc_feature 1..20: note = C9Orf72 ATCN PAM targeting sequence
  source 1..20: mol_type = other RNA
aaacataaatacaacatttt

SEQ ID NO: 4710 - RNA, 20 nt, synthetic construct
  misc_feature 1..20: note = C9Orf72 ATCN PAM targeting sequence
  source 1..20: mol_type = other RNA
caataaaaatgttgtattta

SEQ ID NO: 4711 - RNA, 20 nt, synthetic construct
  misc_feature 1..20: note = C9Orf72 ATCN PAM targeting sequence
  source 1..20: mol_type = other RNA
agctcagaaactcagcacat

SEQ ID NO: 4712 - RNA, 20 nt, synthetic construct
  misc_feature 1..20: note = C9Orf72 ATCN PAM targeting sequence
  source 1..20: mol_type = other RNA
ttaggaaataactcatcaga

SEQ ID NO: 4713 - RNA, 20 nt, synthetic construct
  misc_feature 1..20: note = C9Orf72 ATCN PAM targeting sequence
  source 1..20: mol_type = other RNA
tggttcagtgaacaattttg

SEQ ID NO: 4714 - RNA, 20 nt, synthetic construct
  misc_feature 1..20: note = C9Orf72 ATCN PAM targeting sequence
  source 1..20: mol_type = other RNA
actaaaatttatttaatgaa

SEQ ID NO: 4715 - RNA, 20 nt, synthetic construct
  misc_feature 1..20: note = C9Orf72 ATCN PAM targeting sequence
  source 1..20: mol_type = other RNA
tgcaggtagggaggctttaa

SEQ ID NO: 4716 - RNA, 20 nt, synthetic construct
  misc_feature 1..20: note = C9Orf72 ATCN PAM targeting sequence
  source 1..20: mol_type = other RNA
tggattagtttatcaaatta

SEQ ID NO: 4717 - RNA, 20 nt, synthetic construct
  misc_feature 1..20: note = C9Orf72 ATCN PAM targeting sequence
  source 1..20: mol_type = other RNA
acgattatataaacaataat

SEQ ID NO: 4718 - RNA, 20 nt, synthetic construct
  misc_feature 1..20: note = C9Orf72 ATCN PAM targeting sequence
  source 1..20: mol_type = other RNA
aattaaaatagttatactat

SEQ ID NO: 4719 - RNA, 20 nt, synthetic construct
  misc_feature 1..20: note = C9Orf72 ATCN PAM targeting sequence
  source 1..20: mol_type = other RNA
agaataacataaaatggaaa

SEQ ID NO: 4720 - RNA, 20 nt, synthetic construct
  misc_feature 1..20: note = C9Orf72 ATCN PAM targeting sequence
  source 1..20: mol_type = other RNA
tatgagtaaattatttccat

SEQ ID NO: 4721 - RNA, 20 nt, synthetic construct
  misc_feature 1..20: note = C9Orf72 ATCN PAM targeting sequence
  source 1..20: mol_type = other RNA
tctttatttagaaaacacta

SEQ ID NO: 4722 - RNA, 20 nt, synthetic construct
  misc_feature 1..20: note = C9Orf72 ATCN PAM targeting sequence
  source 1..20: mol_type = other RNA
ttatttagaaaacactatcc

SEQ ID NO: 4723 - RNA, 20 nt, synthetic construct
  misc_feature 1..20: note = C9Orf72 ATCN PAM targeting sequence
  source 1..20: mol_type = other RNA
tgagaattataattccatta

SEQ ID NO: 4724 - RNA, 20 nt, synthetic construct
  misc_feature 1..20: note = C9Orf72 ATCN PAM targeting sequence
  source 1..20: mol_type = other RNA
cttaagtaacagcagttact

SEQ ID NO: 4725 - RNA, 20 nt, synthetic construct
  misc_feature 1..20: note = C9Orf72 ATCN PAM targeting sequence
  source 1..20: mol_type = other RNA
cattttcagtttaagtaact

SEQ ID NO: 4726 - RNA, 20 nt, synthetic construct
  misc_feature 1..20: note = C9Orf72 ATCN PAM targeting sequence
  source 1..20: mol_type = other RNA
gtcaaaattacttttgaaga

SEQ ID NO: 4727 - RNA, 20 nt, synthetic construct
  misc_feature 1..20: note = C9Orf72 ATCN PAM targeting sequence
  source 1..20: mol_type = other RNA
agaaccacagcaagaaacct

SEQ ID NO: 4728 - RNA, 20 nt, synthetic construct
  misc_feature 1..20: note = C9Orf72 ATCN PAM targeting sequence
  source 1..20: mol_type = other RNA
gccctgcagggaactcactt

SEQ ID NO: 4729 - RNA, 20 nt, synthetic construct
  misc_feature 1..20: note = C9Orf72 ATCN PAM targeting sequence
  source 1..20: mol_type = other RNA
aggttttgggggaaggtaag

SEQ ID NO: 4730 - RNA, 20 nt, synthetic construct
  misc_feature 1..20: note = C9Orf72 ATCN PAM targeting sequence
  source 1..20: mol_type = other RNA
agcgaggcgtttcctcctta

SEQ ID NO: 4731 - RNA, 20 nt, synthetic construct
  misc_feature 1..20: note = C9Orf72 ATCN PAM targeting sequence
  source 1..20: mol_type = other RNA
accacatgctccatttgcaa

SEQ ID NO: 4732 - RNA, 20 nt, synthetic construct
  misc_feature 1..20: note = C9Orf72 ATCN PAM targeting sequence
  source 1..20: mol_type = other RNA
gggaaatcccttggtggaaa

SEQ ID NO: 4733 - RNA, 20 nt, synthetic construct
  misc_feature 1..20: note = C9Orf72 ATCN PAM targeting sequence
  source 1..20: mol_type = other RNA
cttggtggaaaataatcttg

SEQ ID NO: 4734 - RNA, 20 nt, synthetic construct
  misc_feature 1..20: note = C9Orf72 ATCN PAM targeting sequence
  source 1..20: mol_type = other RNA
tgagaagctccaaacatggt

SEQ ID NO: 4735 - RNA, 20 nt, synthetic construct
  misc_feature 1..20: note = C9Orf72 ATCN PAM targeting sequence
  source 1..20: mol_type = other RNA
cccggaaacaatggacctct

SEQ ID NO: 4736 - RNA, 20 nt, synthetic construct
  misc_feature 1..20: note = C9Orf72 ATCN PAM targeting sequence
  source 1..20: mol_type = other RNA
gaggtccattgtttccgggg

SEQ ID NO: 4737 - RNA, 20 nt, synthetic construct
  misc_feature 1..20: note = C9Orf72 ATCN PAM targeting sequence
  source 1..20: mol_type = other RNA
ctccctgctgaaaatgaagc

SEQ ID NO: 4738 - RNA, 20 nt, synthetic construct
  misc_feature 1..20: note = C9Orf72 ATCN PAM targeting sequence
  source 1..20: mol_type = other RNA
ggcacatttaaattaccaag

SEQ ID NO: 4739 - RNA, 20 nt, synthetic construct
  misc_feature 1..20: note = C9Orf72 ATCN PAM targeting sequence
  source 1..20: mol_type = other RNA
ttggtatcatttctgctgga

SEQ ID NO: 4740 - RNA, 20 nt, synthetic construct
  misc_feature 1..20: note = C9Orf72 ATCN PAM targeting sequence
  source 1..20: mol_type = other RNA
tttctgctggattccatttc

SEQ ID NO: 4741 - RNA, 20 nt, synthetic construct
  misc_feature 1..20: note = C9Orf72 ATCN PAM targeting sequence
  source 1..20: mol_type = other RNA
agcagaaatgataccaaaga

SEQ ID NO: 4742 - RNA, 20 nt, synthetic construct
  misc_feature 1..20: note = C9Orf72 ATCN PAM targeting sequence
  source 1..20: mol_type = other RNA
actttatccaaagaagtcat

SEQ ID NO: 4743 - RNA, 20 nt, synthetic construct
  misc_feature 1..20: note = C9Orf72 ATCN PAM targeting sequence
  source 1..20: mol_type = other RNA
aaagaagtcatattaaacct

SEQ ID NO: 4744 - RNA, 20 nt, synthetic construct
  misc_feature 1..20: note = C9Orf72 ATCN PAM targeting sequence
  source 1..20: mol_type = other RNA
gtcttgcctttgtggaggaa

SEQ ID NO: 4745 - RNA, 20 nt, synthetic construct
  misc_feature 1..20: note = C9Orf72 ATCN PAM targeting sequence
  source 1..20: mol_type = other RNA
ggatatgattgtcctggtgg

SEQ ID NO: 4746 - RNA, 20 nt, synthetic construct
  misc_feature 1..20: note = C9Orf72 ATCN PAM targeting sequence
  source 1..20: mol_type = other RNA
tgattcagctcttcctccac

SEQ ID NO: 4747 - RNA, 20 nt, synthetic construct
  misc_feature 1..20: note = C9Orf72 ATCN PAM targeting sequence
  source 1..20: mol_type = other RNA
tatcctgattcagctcttcc

SEQ ID NO: 4748 - RNA, 20 nt, synthetic construct
  misc_feature 1..20: note = C9Orf72 ATCN PAM targeting sequence
  source 1..20: mol_type = other RNA
tcctacggtcctgttcccat

SEQ ID NO: 4749 - RNA, 20 nt, synthetic construct
  misc_feature 1..20: note = C9Orf72 ATCN PAM targeting sequence
  source 1..20: mol_type = other RNA
tacggtcctgttcccatgga

SEQ ID NO: 4750 - RNA, 20 nt, synthetic construct
  misc_feature 1..20: note = C9Orf72 ATCN PAM targeting sequence
  source 1..20: mol_type = other RNA
tcacagggcttctctgacac

SEQ ID NO: 4751 - RNA, 20 nt, synthetic construct
  misc_feature 1..20: note = C9Orf72 ATCN PAM targeting sequence
  source 1..20: mol_type = other RNA
tgattctcctctttcattgg

SEQ ID NO: 4752 - RNA, 20 nt, synthetic construct
  misc_feature 1..20: note = C9Orf72 ATCN PAM targeting sequence
  source 1..20: mol_type = other RNA
agatgtgacaggttaaccaa

SEQ ID NO: 4753 - RNA, 20 nt, synthetic construct
  misc_feature 1..20: note = C9Orf72 ATCN PAM targeting sequence
  source 1..20: mol_type = other RNA
gatggtccagaggattccct

SEQ ID NO: 4754 - RNA, 20 nt, synthetic construct
  misc_feature 1..20: note = C9Orf72 ATCN PAM targeting sequence
  source 1..20: mol_type = other RNA
gattaccaatgaaagaggag

SEQ ID NO: 4755 - RNA, 20 nt, synthetic construct
  misc_feature 1..20: note = C9Orf72 ATCN PAM targeting sequence
  source 1..20: mol_type = other RNA
tctggaccatcagattacca

SEQ ID NO: 4756 - RNA, 20 nt, synthetic construct
  misc_feature 1..20: note = C9Orf72 ATCN PAM targeting sequence
  source 1..20: mol_type = other RNA
ttgctaacaggaggaggagg

SEQ ID NO: 4757 - RNA, 20 nt, synthetic construct
  misc_feature 1..20: note = C9Orf72 ATCN PAM targeting sequence
  source 1..20: mol_type = other RNA
taaacaagagcttttctctg

SEQ ID NO: 4758 - RNA, 20 nt, synthetic construct
  misc_feature 1..20: note = C9Orf72 ATCN PAM targeting sequence
  source 1..20: mol_type = other RNA
ttatgcacttcatgttccaa

SEQ ID NO: 4759 - RNA, 20 nt, synthetic construct
  misc_feature 1..20: note = C9Orf72 ATCN PAM targeting sequence
  source 1..20: mol_type = other RNA
ttttctaaaagttcaaattt

SEQ ID NO: 4760 - RNA, 20 nt, synthetic construct
  misc_feature 1..20: note = C9Orf72 ATCN PAM targeting sequence
  source 1..20: mol_type = other RNA
atccttgataagaatgaata

SEQ ID NO: 4761 - RNA, 20 nt, synthetic construct
  misc_feature 1..20: note = C9Orf72 ATCN PAM targeting sequence
  source 1..20: mol_type = other RNA
ttgataagaatgaatagttc

SEQ ID NO: 4762 - RNA, 20 nt, synthetic construct
  misc_feature 1..20: note = C9Orf72 ATCN PAM targeting sequence
  source 1..20: mol_type = other RNA
aggatggattatttcccacg

SEQ ID NO: 4763 - RNA, 20 nt, synthetic construct
  misc_feature 1..20: note = C9Orf72 ATCN PAM targeting sequence
  source 1..20: mol_type = other RNA
tgaagaagagttggcgagaa

SEQ ID NO: 4764 - RNA, 20 nt, synthetic construct
  misc_feature 1..20: note = C9Orf72 ATCN PAM targeting sequence
  source 1..20: mol_type = other RNA
ttggctcactttctataggt

SEQ ID NO: 4765 - RNA, 20 nt, synthetic construct
  misc_feature 1..20: note = C9Orf72 ATCN PAM targeting sequence
  source 1..20: mol_type = other RNA
gccgtgccactgaagagttg

SEQ ID NO: 4766 - RNA, 20 nt, synthetic construct
  misc_feature 1..20: note = C9Orf72 ATCN PAM targeting sequence
  source 1..20: mol_type = other RNA
tttcgtgtactttagaaagt

SEQ ID NO: 4767 - RNA, 20 nt, synthetic construct
  misc_feature 1..20: note = C9Orf72 ATCN PAM targeting sequence
  source 1..20: mol_type = other RNA
actgttaatttcctctggag

SEQ ID NO: 4768 - RNA, 20 nt, synthetic construct
  misc_feature 1..20: note = C9Orf72 ATCN PAM targeting sequence
  source 1..20: mol_type = other RNA
agaaaatgaaatgaaactcc

SEQ ID NO: 4769 - RNA, 20 nt, synthetic construct
  misc_feature 1..20: note = C9Orf72 ATCN PAM targeting sequence
  source 1..20: mol_type = other RNA
ttactttaagtttttgttga

SEQ ID NO: 4770 - RNA, 20 nt, synthetic construct
  misc_feature 1..20: note = C9Orf72 ATCN PAM targeting sequence
  source 1..20: mol_type = other RNA
gaagcttcaacaaaaactta

SEQ ID NO: 4771 - RNA, 20 nt, synthetic construct
  misc_feature 1..20: note = C9Orf72 ATCN PAM targeting sequence
  source 1..20: mol_type = other RNA
ttgcagtcagaaaacacaca

SEQ ID NO: 4772 - RNA, 20 nt, synthetic construct
  misc_feature 1..20: note = C9Orf72 ATCN PAM targeting sequence
  source 1..20: mol_type = other RNA
tcagactgaacaagcatctt

SEQ ID NO: 4773 - RNA, 20 nt, synthetic construct
  misc_feature 1..20: note = C9Orf72 ATCN PAM targeting sequence
  source 1..20: mol_type = other RNA
acttcagataactgactata

SEQ ID NO: 4774 - RNA, 20 nt, synthetic construct
  misc_feature 1..20: note = C9Orf72 ATCN PAM targeting sequence
  source 1..20: mol_type = other RNA
gaagttgataaaggaagagc

SEQ ID NO: 4775 - RNA, 20 nt, synthetic construct
  misc_feature 1..20: note = C9Orf72 ATCN PAM targeting sequence
  source 1..20: mol_type = other RNA
gaaaatggtgcttacttaga

SEQ ID NO: 4776 - RNA, 20 nt, synthetic construct
  misc_feature 1..20: note = C9Orf72 ATCN PAM targeting sequence
  source 1..20: mol_type = other RNA
tccgttatgtcttctccaag

SEQ ID NO: 4777 - RNA, 20 nt, synthetic construct
  misc_feature 1..20: note = C9Orf72 ATCN PAM targeting sequence
  source 1..20: mol_type = other RNA
gttatgtcttctccaagcat

SEQ ID NO: 4778 - RNA, 20 nt, synthetic construct
  misc_feature 1..20: note = C9Orf72 ATCN PAM targeting sequence
  source 1..20: mol_type = other RNA
ggctgctatgcttggagaag

SEQ ID NO: 4779 - RNA, 20 nt, synthetic construct
  misc_feature 1..20: note = C9Orf72 ATCN PAM targeting sequence
  source 1..20: mol_type = other RNA
ttcatttttagcaagcgttc

SEQ ID NO: 4780 - RNA, 20 nt, synthetic construct
  misc_feature 1..20: note = C9Orf72 ATCN PAM targeting sequence
  source 1..20: mol_type = other RNA
agactctgaacgcttgctaa

SEQ ID NO: 4781 - RNA, 20 nt, synthetic construct
  misc_feature 1..20: note = C9Orf72 ATCN PAM targeting sequence
  source 1..20: mol_type = other RNA
catcaagactctgaacgctt

SEQ ID NO: 4782 - RNA, 20 nt, synthetic construct
  misc_feature 1..20: note = C9Orf72 ATCN PAM targeting sequence
  source 1..20: mol_type = other RNA
tttagaacttgttctgcatg

SEQ ID NO: 4783 - RNA, 20 nt, synthetic construct
  misc_feature 1..20: note = C9Orf72 ATCN PAM targeting sequence
  source 1..20: mol_type = other RNA
tttattgctatcttcagtcg

SEQ ID NO: 4784 - RNA, 20 nt, synthetic construct
  misc_feature 1..20: note = C9Orf72 ATCN PAM targeting sequence
  source 1..20: mol_type = other RNA
tcagtcgttcttcattcatt

SEQ ID NO: 4785 - RNA, 20 nt, synthetic construct
  misc_feature 1..20: note = C9Orf72 ATCN PAM targeting sequence
  source 1..20: mol_type = other RNA
tcaagttcattttggcttca

SEQ ID NO: 4786 - RNA, 20 nt, synthetic construct
  misc_feature 1..20: note = C9Orf72 ATCN PAM targeting sequence
  source 1..20: mol_type = other RNA
ctcaaatgacaagtagctga

SEQ ID NO: 4787 - RNA, 20 nt, synthetic construct
  misc_feature 1..20: note = C9Orf72 ATCN PAM targeting sequence
  source 1..20: mol_type = other RNA
tctagagactgtatcctttt

SEQ ID NO: 4788 - RNA, 20 nt, synthetic construct
  misc_feature 1..20: note = C9Orf72 ATCN PAM targeting sequence
  source 1..20: mol_type = other RNA
ttttgcaaatatccaccatc

SEQ ID NO: 4789 - RNA, 20 nt, synthetic construct
  misc_feature 1..20: note = C9Orf72 ATCN PAM targeting sequence
  source 1..20: mol_type = other RNA
accatcaattcaccttgttc

SEQ ID NO: 4790 - RNA, 20 nt, synthetic construct
  misc_feature 1..20: note = C9Orf72 ATCN PAM targeting sequence
  source 1..20: mol_type = other RNA
attcaccttgttcagaatgt

SEQ ID NO: 4791 - RNA, 20 nt, synthetic construct
  misc_feature 1..20: note = C9Orf72 ATCN PAM targeting sequence
  source 1..20: mol_type = other RNA
aaacattctgaacaaggtga

SEQ ID NO: 4792 - RNA, 20 nt, synthetic construct
  misc_feature 1..20: note = C9Orf72 ATCN PAM targeting sequence
  source 1..20: mol_type = other RNA
tcaagttcagaattggacct

SEQ ID NO: 4793 - RNA, 20 nt, synthetic construct
  misc_feature 1..20: note = C9Orf72 ATCN PAM targeting sequence
  source 1..20: mol_type = other RNA
gttgggagtcggctttatgt

SEQ ID NO: 4794 - RNA, 20 nt, synthetic construct
  misc_feature 1..20: note = C9Orf72 ATCN PAM targeting sequence
  source 1..20: mol_type = other RNA
atgtacagctgcacatatca

SEQ ID NO: 4795 - RNA, 20 nt, synthetic construct
  misc_feature 1..20: note = C9Orf72 ATCN PAM targeting sequence
  source 1..20: mol_type = other RNA
ccaactcccatggaaaacca

SEQ ID NO: 4796 - RNA, 20 nt, synthetic construct
  misc_feature 1..20: note = C9Orf72 ATCN PAM targeting sequence
  source 1..20: mol_type = other RNA
ttatggttttccatgggagt

SEQ ID NO: 4797 - RNA, 20 nt, synthetic construct
  misc_feature 1..20: note = C9Orf72 ATCN PAM targeting sequence
  source 1..20: mol_type = other RNA
gcacgtggcaaacggagcgg

SEQ ID NO: 4798 - RNA, 20 nt, synthetic construct
  misc_feature 1..20: note = C9Orf72 ATCN PAM targeting sequence
  source 1..20: mol_type = other RNA
ctgaatagaccaataacaag

SEQ ID NO: 4799 - RNA, 20 nt, synthetic construct
  misc_feature 1..20: note = C9Orf72 ATCN PAM targeting sequence
  source 1..20: mol_type = other RNA
atttcttctagattttctag

SEQ ID NO: 4800 - RNA, 20 nt, synthetic construct
  misc_feature 1..20: note = C9Orf72 ATCN PAM targeting sequence
  source 1..20: mol_type = other RNA
agaagaaatggataaattcc

SEQ ID NO: 4801 - RNA, 20 nt, synthetic construct
  misc_feature 1..20: note = C9Orf72 ATCN PAM targeting sequence
  source 1..20: mol_type = other RNA
gagagaatactataaacaac

SEQ ID NO: 4802 - RNA, 20 nt, synthetic construct
  misc_feature 1..20: note = C9Orf72 ATCN PAM targeting sequence
  source 1..20: mol_type = other RNA
cacagaaatacaaactacca

SEQ ID NO: 4803 - RNA, 20 nt, synthetic construct
  misc_feature 1..20: note = C9Orf72 ATCN PAM targeting sequence
  source 1..20: mol_type = other RNA
gtggtgataccccctttatc

SEQ ID NO: 4804 - RNA, 20 nt, synthetic construct
  misc_feature 1..20: note = C9Orf72 ATCN PAM targeting sequence
  source 1..20: mol_type = other RNA
ccactgatcccacagaaata

SEQ ID NO: 4805 - RNA, 20 nt, synthetic construct
  misc_feature 1..20: note = C9Orf72 ATCN PAM targeting sequence
  source 1..20: mol_type = other RNA
ttttttattgcatctatttg

SEQ ID NO: 4806 - RNA, 20 nt, synthetic construct
  misc_feature 1..20: note = C9Orf72 ATCN PAM targeting sequence
  source 1..20: mol_type = other RNA
atttgattcttctctccttc

SEQ ID NO: 4807 - RNA, 20 nt, synthetic construct
  misc_feature 1..20: note = C9Orf72 ATCN PAM targeting sequence
  source 1..20: mol_type = other RNA
gggtgctcctgtattgggtg

SEQ ID NO: 4808 - RNA, 20 nt, synthetic construct
  misc_feature 1..20: note = C9Orf72 ATCN PAM targeting sequence
  source 1..20: mol_type = other RNA
taaatatatatgcacccaat

SEQ ID NO: 4809 - RNA, 20 nt, synthetic construct
  misc_feature 1..20: note = C9Orf72 ATCN PAM targeting sequence
  source 1..20: mol_type = other RNA
atgcaacaagaacagctaac

SEQ ID NO: 4810 - RNA, 20 nt, synthetic construct
  misc_feature 1..20: note = C9Orf72 ATCN PAM targeting sequence
  source 1..20: mol_type = other RNA
ctttaccattatgtaatgcc

SEQ ID NO: 4811 - RNA, 20 nt, synthetic construct
  misc_feature 1..20: note = C9Orf72 ATCN PAM targeting sequence
  source 1..20: mol_type = other RNA
ctttattttgagcctatgtg

SEQ ID NO: 4812 - RNA, 20 nt, synthetic construct
  misc_feature 1..20: note = C9Orf72 ATCN PAM targeting sequence
  source 1..20: mol_type = other RNA
cacatgaaaagacacacata

SEQ ID NO: 4813 - RNA, 20 nt, synthetic construct
  misc_feature 1..20: note = C9Orf72 ATCN PAM targeting sequence
  source 1..20: mol_type = other RNA
gtgtgctatattcaggagac

SEQ ID NO: 4814 - RNA, 20 nt, synthetic construct
  misc_feature 1..20: note = C9Orf72 ATCN PAM targeting sequence
  source 1..20: mol_type = other RNA
caccactgcactccagtctg

SEQ ID NO: 4815 - RNA, 20 nt, synthetic construct
  misc_feature 1..20: note = C9Orf72 ATCN PAM targeting sequence
  source 1..20: mol_type = other RNA
ctgctcactgcagcctcaac

SEQ ID NO: 4816 - RNA, 20 nt, synthetic construct
  misc_feature 1..20: note = C9Orf72 ATCN PAM targeting sequence
  source 1..20: mol_type = other RNA
cttgagctggagaggttgag

SEQ ID NO: 4817 - RNA, 20 nt, synthetic construct
  misc_feature 1..20: note = C9Orf72 ATCN PAM targeting sequence
  source 1..20: mol_type = other RNA
tcccacctcagcttcctgaa

SEQ ID NO: 4818 - RNA, 20 nt, synthetic construct
  misc_feature 1..20: note = C9Orf72 ATCN PAM targeting sequence
  source 1..20: mol_type = other RNA
cgtgagcccaggagctcgag

SEQ ID NO: 4819 - RNA, 20 nt, synthetic construct
  misc_feature 1..20: note = C9Orf72 ATCN PAM targeting sequence
  source 1..20: mol_type = other RNA
tcccgcttcagcttcccaaa

SEQ ID NO: 4820 - RNA, 20 nt, synthetic construct
  misc_feature 1..20: note = C9Orf72 ATCN PAM targeting sequence
  source 1..20: mol_type = other RNA
acttttatttttaactaata

SEQ ID NO: 4821 - RNA, 20 nt, synthetic construct
  misc_feature 1..20: note = C9Orf72 ATCN PAM targeting sequence
  source 1..20: mol_type = other RNA
atgagataatgtgaaagtaa

SEQ ID NO: 4822 - RNA, 20 nt, synthetic construct
  misc_feature 1..20: note = C9Orf72 ATCN PAM targeting sequence
  source 1..20: mol_type = other RNA
catagattttatttcaagtt

SEQ ID NO: 4823 - RNA, 20 nt, synthetic construct
  misc_feature 1..20: note = C9Orf72 ATCN PAM targeting sequence
  source 1..20: mol_type = other RNA
tggcattttactttcacatt

SEQ ID NO: 4824 - RNA, 20 nt, synthetic construct
  misc_feature 1..20: note = C9Orf72 ATCN PAM targeting sequence
  source 1..20: mol_type = other RNA
ttgtatcttggcattttact

SEQ ID NO: 4825 - RNA, 20 nt, synthetic construct
  misc_feature 1..20: note = C9Orf72 ATCN PAM targeting sequence
  source 1..20: mol_type = other RNA
acatctttgtatcttggcat

SEQ ID NO: 4826 - RNA, 20 nt, synthetic construct
  misc_feature 1..20: note = C9Orf72 ATCN PAM targeting sequence
  source 1..20: mol_type = other RNA
ttgttttactggtggaaaaa

SEQ ID NO: 4827 - RNA, 20 nt, synthetic construct
  misc_feature 1..20: note = C9Orf72 ATCN PAM targeting sequence
  source 1..20: mol_type = other RNA
gaggacaatgtggcaaagcc

SEQ ID NO: 4828 - RNA, 20 nt, synthetic construct
  misc_feature 1..20: note = C9Orf72 ATCN PAM targeting sequence
  source 1..20: mol_type = other RNA
atcacttcagtgaagcttga

SEQ ID NO: 4829 - RNA, 20 nt, synthetic construct
  misc_feature 1..20: note = C9Orf72 ATCN PAM targeting sequence
  source 1..20: mol_type = other RNA
cttcagtgaagcttgaaata

SEQ ID NO: 4830 - RNA, 20 nt, synthetic construct
  misc_feature 1..20: note = C9Orf72 ATCN PAM targeting sequence
  source 1..20: mol_type = other RNA
actttaatgcacttacattg

SEQ ID NO: 4831 - RNA, 20 nt, synthetic construct
  misc_feature 1..20: note = C9Orf72 ATCN PAM targeting sequence
  source 1..20: mol_type = other RNA
acaatgtaagtgcattaaag

SEQ ID NO: 4832 - RNA, 20 nt, synthetic construct
  misc_feature 1..20: note = C9Orf72 ATCN PAM targeting sequence
  source 1..20: mol_type = other RNA
catgaggaaataaaaaaaga

SEQ ID NO: 4833 - RNA, 20 nt, synthetic construct
  misc_feature 1..20: note = C9Orf72 ATCN PAM targeting sequence
  source 1..20: mol_type = other RNA
ctttttttatttcctcatga

SEQ ID NO: 4834 - RNA, 20 nt, synthetic construct
  misc_feature 1..20: note = C9Orf72 ATCN PAM targeting sequence
  source 1..20: mol_type = other RNA
tgttgagaaattaatgtcat

SEQ ID NO: 4835 - RNA, 20 nt, synthetic construct
  misc_feature 1..20: note = C9Orf72 ATCN PAM targeting sequence
  source 1..20: mol_type = other RNA
tctctaatagcaaagcagag

SEQ ID NO: 4836 - RNA, 20 nt, synthetic construct
  misc_feature 1..20: note = C9Orf72 ATCN PAM targeting sequence
  source 1..20: mol_type = other RNA
tctgctttgctattagagaa

SEQ ID NO: 4837 - RNA, 20 nt, synthetic construct
  misc_feature 1..20: note = C9Orf72 ATCN PAM targeting sequence
  source 1..20: mol_type = other RNA
tttgagtaactccttctgtt

SEQ ID NO: 4838 - RNA, 20 nt, synthetic construct
  misc_feature 1..20: note = C9Orf72 ATCN PAM targeting sequence
  source 1..20: mol_type = other RNA
tgcaaaaccatgacatcttt

SEQ ID NO: 4839 - RNA, 20 nt, synthetic construct
  misc_feature 1..20: note = C9Orf72 ATCN PAM targeting sequence
  source 1..20: mol_type = other RNA
cttgactttgaaagtgaact

SEQ ID NO: 4840 - RNA, 20 nt, synthetic construct
  misc_feature 1..20: note = C9Orf72 ATCN PAM targeting sequence
  source 1..20: mol_type = other RNA
atttttaatgacattcaaag

SEQ ID NO: 4841 - RNA, 20 nt, synthetic construct
  misc_feature 1..20: note = C9Orf72 ATCN PAM targeting sequence
  source 1..20: mol_type = other RNA
ttacaacatgcctctttgaa

SEQ ID NO: 4842 - RNA, 20 nt, synthetic construct
  misc_feature 1..20: note = C9Orf72 ATCN PAM targeting sequence
  source 1..20: mol_type = other RNA
atatgtctgcatatcagtgt

SEQ ID NO: 4843 - RNA, 20 nt, synthetic construct
  misc_feature 1..20: note = C9Orf72 ATCN PAM targeting sequence
  source 1..20: mol_type = other RNA
gtgttattgcatttgaaaaa

SEQ ID NO: 4844 - RNA, 20 nt, synthetic construct
  misc_feature 1..20: note = C9Orf72 ATCN PAM targeting sequence
  source 1..20: mol_type = other RNA
ttaaagtttttctataacta

SEQ ID NO: 4845 - RNA, 20 nt, synthetic construct
  misc_feature 1..20: note = C9Orf72 ATCN PAM targeting sequence
  source 1..20: mol_type = other RNA
tgagaaacaaactgccaccc

SEQ ID NO: 4846 - RNA, 20 nt, synthetic construct
  misc_feature 1..20: note = C9Orf72 ATCN PAM targeting sequence
  source 1..20: mol_type = other RNA
gtatacacaatttgtggtat

SEQ ID NO: 4847 - RNA, 20 nt, synthetic construct
  misc_feature 1..20: note = C9Orf72 ATCN PAM targeting sequence
  source 1..20: mol_type = other RNA
tcaatctagttgtaacatct

SEQ ID NO: 4848 - RNA, 20 nt, synthetic construct
  misc_feature 1..20: note = C9Orf72 ATCN PAM targeting sequence
  source 1..20: mol_type = other RNA
agttgtaacatcttagaaaa

SEQ ID NO: 4849 - RNA, 20 nt, synthetic construct
  misc_feature 1..20: note = C9Orf72 ATCN PAM targeting sequence
  source 1..20: mol_type = other RNA
tagaaaacttagtcatttca

SEQ ID NO: 4850 - RNA, 20 nt, synthetic construct
  misc_feature 1..20: note = C9Orf72 ATCN PAM targeting sequence
  source 1..20: mol_type = other RNA
ctctgataaaacatctcagg

SEQ ID NO: 4851 - RNA, 20 nt, synthetic construct
  misc_feature 1..20: note = C9Orf72 ATCN PAM targeting sequence
  source 1..20: mol_type = other RNA
gagtgataccaacttcatta

SEQ ID NO: 4852 - RNA, 20 nt, synthetic construct
  misc_feature 1..20: note = C9Orf72 ATCN PAM targeting sequence
  source 1..20: mol_type = other RNA
caggaatgctcatgtgattc

SEQ ID NO: 4853 - RNA, 20 nt, synthetic construct
  misc_feature 1..20: note = C9Orf72 ATCN PAM targeting sequence
  source 1..20: mol_type = other RNA
catgagcattcctgagatgt

SEQ ID NO: 4854 - RNA, 20 nt, synthetic construct
  misc_feature 1..20: note = C9Orf72 ATCN PAM targeting sequence
  source 1..20: mol_type = other RNA
ttgccgttggacacagcctg

SEQ ID NO: 4855 - RNA, 20 nt, synthetic construct
  misc_feature 1..20: note = C9Orf72 ATCN PAM targeting sequence
  source 1..20: mol_type = other RNA
ttgccagccttcagggtgag

SEQ ID NO: 4856 - RNA, 20 nt, synthetic construct
  misc_feature 1..20: note = C9Orf72 ATCN PAM targeting sequence
  source 1..20: mol_type = other RNA
tttttcaattaaaatttatt

SEQ ID NO: 4857 - RNA, 20 nt, synthetic construct
  misc_feature 1..20: note = C9Orf72 ATCN PAM targeting sequence
  source 1..20: mol_type = other RNA
taagaaaacctcataagcac

SEQ ID NO: 4858 - RNA, 20 nt, synthetic construct
  misc_feature 1..20: note = C9Orf72 ATCN PAM targeting sequence
  source 1..20: mol_type = other RNA
ttcagtagaatgctagtgct

SEQ ID NO: 4859 - RNA, 20 nt, synthetic construct
  misc_feature 1..20: note = C9Orf72 ATCN PAM targeting sequence
  source 1..20: mol_type = other RNA
tgaggtgaaccttctcttta

SEQ ID NO: 4860 - RNA, 20 nt, synthetic construct
  misc_feature 1..20: note = C9Orf72 ATCN PAM targeting sequence
  source 1..20: mol_type = other RNA
ttttgctatcagaacctgtt

SEQ ID NO: 4861 - RNA, 20 nt, synthetic construct
  misc_feature 1..20: note = C9Orf72 ATCN PAM targeting sequence
  source 1..20: mol_type = other RNA
gaacctgttttttgtttgct

SEQ ID NO: 4862 - RNA, 20 nt, synthetic construct
  misc_feature 1..20: note = C9Orf72 ATCN PAM targeting sequence
  source 1..20: mol_type = other RNA
tccattattgacctcttccc

SEQ ID NO: 4863 - RNA, 20 nt, synthetic construct
  misc_feature 1..20: note = C9Orf72 ATCN PAM targeting sequence
  source 1..20: mol_type = other RNA
attattgacctcttcccatc

SEQ ID NO: 4864 - RNA, 20 nt, synthetic construct
  misc_feature 1..20: note = C9Orf72 ATCN PAM targeting sequence
  source 1..20: mol_type = other RNA
acaataagacttgaatctgt

SEQ ID NO: 4865 - RNA, 20 nt, synthetic construct
  misc_feature 1..20: note = C9Orf72 ATCN PAM targeting sequence
  source 1..20: mol_type = other RNA
gtgtcattacctatagtgtc

SEQ ID NO: 4866 - RNA, 20 nt, synthetic construct
  misc_feature 1..20: note = C9Orf72 ATCN PAM targeting sequence
  source 1..20: mol_type = other RNA
gtagcatcttattcttacta

SEQ ID NO: 4867 - RNA, 20 nt, synthetic construct
  misc_feature 1..20: note = C9Orf72 ATCN PAM targeting sequence
  source 1..20: mol_type = other RNA
tattcttactatagaaccac

SEQ ID NO: 4868 - RNA, 20 nt, synthetic construct
  misc_feature 1..20: note = C9Orf72 ATCN PAM targeting sequence
  source 1..20: mol_type = other RNA
atgtccagaagtatgaagtg

SEQ ID NO: 4869 - RNA, 20 nt, synthetic construct
  misc_feature 1..20: note = C9Orf72 ATCN PAM targeting sequence
  source 1..20: mol_type = other RNA
ataaatccatgtccagaagt

SEQ ID NO: 4870 - RNA, 20 nt, synthetic construct
  misc_feature 1..20: note = C9Orf72 ATCN PAM targeting sequence
  source 1..20: mol_type = other RNA
caatttcattgcagtgcatc

SEQ ID NO: 4871 - RNA, 20 nt, synthetic construct
  misc_feature 1..20: note = C9Orf72 ATCN PAM targeting sequence
  source 1..20: mol_type = other RNA
ttgtttttaatcgcaatttc

SEQ ID NO: 4872 - RNA, 20 nt, synthetic construct
  misc_feature 1..20: note = C9Orf72 ATCN PAM targeting sequence
  source 1..20: mol_type = other RNA
aagcctaacctaacatgaat

SEQ ID NO: 4873 - RNA, 20 nt, synthetic construct
  misc_feature 1..20: note = C9Orf72 ATCN PAM targeting sequence
  source 1..20: mol_type = other RNA
ctcagattacctgtggctct

SEQ ID NO: 4874 - RNA, 20 nt, synthetic construct
  misc_feature 1..20: note = C9Orf72 ATCN PAM targeting sequence
  source 1..20: mol_type = other RNA
gagtgattaggcattcatgt

SEQ ID NO: 4875 - RNA, 20 nt, synthetic construct
  misc_feature 1..20: note = C9Orf72 ATCN PAM targeting sequence
  source 1..20: mol_type = other RNA
caaaagggaagagccacagg

SEQ ID NO: 4876 - RNA, 20 nt, synthetic construct
  misc_feature 1..20: note = C9Orf72 ATCN PAM targeting sequence
  source 1..20: mol_type = other RNA
ataaatactgacagctttgt

SEQ ID NO: 4877 - RNA, 20 nt, synthetic construct
  misc_feature 1..20: note = C9Orf72 ATCN PAM targeting sequence
  source 1..20: mol_type = other RNA
gtatgtggtccaagtagttg

SEQ ID NO: 4878 - RNA, 20 nt, synthetic construct
  misc_feature 1..20: note = C9Orf72 ATCN PAM targeting sequence
  source 1..20: mol_type = other RNA
gtttctaagtcagactacca

SEQ ID NO: 4879 - RNA, 20 nt, synthetic construct
  misc_feature 1..20: note = C9Orf72 ATCN PAM targeting sequence
  source 1..20: mol_type = other RNA
aagaagccttccttggaggt

SEQ ID NO: 4880 - RNA, 20 nt, synthetic construct
  misc_feature 1..20: note = C9Orf72 ATCN PAM targeting sequence
  source 1..20: mol_type = other RNA
agtgatcctcaaagcatgga

SEQ ID NO: 4881 - RNA, 20 nt, synthetic construct
  misc_feature 1..20: note = C9Orf72 ATCN PAM targeting sequence
  source 1..20: mol_type = other RNA
ctagatctaagaagccttcc

SEQ ID NO: 4882 - RNA, 20 nt, synthetic construct
  misc_feature 1..20: note = C9Orf72 ATCN PAM targeting sequence
  source 1..20: mol_type = other RNA
tcaaagcatggaatgcatga

SEQ ID NO: 4883 - RNA, 20 nt, synthetic construct
  misc_feature 1..20: note = C9Orf72 ATCN PAM targeting sequence
  source 1..20: mol_type = other RNA
tttcacagcctttcaggggg

SEQ ID NO: 4884 - RNA, 20 nt, synthetic construct
  misc_feature 1..20: note = C9Orf72 ATCN PAM targeting sequence
  source 1..20: mol_type = other RNA
tttttgacagaaaataatgc

SEQ ID NO: 4885 - RNA, 20 nt, synthetic construct
  misc_feature 1..20: note = C9Orf72 ATCN PAM targeting sequence
  source 1..20: mol_type = other RNA
acagaaatttgcattatttt

SEQ ID NO: 4886 - RNA, 20 nt, synthetic construct
  misc_feature 1..20: note = C9Orf72 ATCN PAM targeting sequence
  source 1..20: mol_type = other RNA
ggctactgtctgatggaggt

SEQ ID NO: 4887 - RNA, 20 nt, synthetic construct
  misc_feature 1..20: note = C9Orf72 ATCN PAM targeting sequence
  source 1..20: mol_type = other RNA
gacagtagccagatgaaata

SEQ ID NO: 4888 - RNA, 20 nt, synthetic construct
  misc_feature 1..20: note = C9Orf72 ATCN PAM targeting sequence
  source 1..20: mol_type = other RNA
acaatatggctttccacacc

SEQ ID NO: 4889 - RNA, 20 nt, synthetic construct
  misc_feature 1..20: note = C9Orf72 ATCN PAM targeting sequence
  source 1..20: mol_type = other RNA
tgaagccctttcacatattg

SEQ ID NO: 4890 - RNA, 20 nt, synthetic construct
  misc_feature 1..20: note = C9Orf72 ATCN PAM targeting sequence
  source 1..20: mol_type = other RNA
attctcagcatcttgaagcc

SEQ ID NO: 4891 - RNA, 20 nt, synthetic construct
  misc_feature 1..20: note = C9Orf72 ATCN PAM targeting sequence
  source 1..20: mol_type = other RNA
tgctgcttttgaatttgcac

SEQ ID NO: 4892 - RNA, 20 nt, synthetic construct
  misc_feature 1..20: note = C9Orf72 ATCN PAM targeting sequence
  source 1..20: mol_type = other RNA
actaggctcttgttaagcat

SEQ ID NO: 4893 - RNA, 20 nt, synthetic construct
  misc_feature 1..20: note = C9Orf72 ATCN PAM targeting sequence
  source 1..20: mol_type = other RNA
gaaagcgggcagaactgaca

SEQ ID NO: 4894 - RNA, 20 nt, synthetic construct
  misc_feature 1..20: note = C9Orf72 ATCN PAM targeting sequence
  source 1..20: mol_type = other RNA
ctgtgttgggctcaactctt

SEQ ID NO: 4895 - RNA, 20 nt, synthetic construct
  misc_feature 1..20: note = C9Orf72 ATCN PAM targeting sequence
  source 1..20: mol_type = other RNA
tctcatcttagatggcccaa

SEQ ID NO: 4896 - RNA, 20 nt, synthetic construct
  misc_feature 1..20: note = C9Orf72 ATCN PAM targeting sequence
  source 1..20: mol_type = other RNA
catcttagatggcccaaagc

SEQ ID NO: 4897 - RNA, 20 nt, synthetic construct
  misc_feature 1..20: note = C9Orf72 ATCN PAM targeting sequence
  source 1..20: mol_type = other RNA
tagatggcccaaagcaggtg

SEQ ID NO: 4898 - RNA, 20 nt, synthetic construct
  misc_feature 1..20: note = C9Orf72 ATCN PAM targeting sequence
  source 1..20: mol_type = other RNA
aagatgagatgataaagtaa

SEQ ID NO: 4899 - RNA, 20 nt, synthetic construct
  misc_feature 1..20: note = C9Orf72 ATCN PAM targeting sequence
  source 1..20: mol_type = other RNA
attattaaggagtttgaaat

SEQ ID NO: 4900 - RNA, 20 nt, synthetic construct
  misc_feature 1..20: note = C9Orf72 ATCN PAM targeting sequence
  source 1..20: mol_type = other RNA
acacctaaaaaagatgaaac

SEQ ID NO: 4901 - RNA, 20 nt, synthetic construct
  misc_feature 1..20: note = C9Orf72 ATCN PAM targeting sequence
  source 1..20: mol_type = other RNA
tttttaggtgttgatcaatt

SEQ ID NO: 4902 - RNA, 20 nt, synthetic construct
  misc_feature 1..20: note = C9Orf72 ATCN PAM targeting sequence
  source 1..20: mol_type = other RNA
ctttgtttcatcttttttag

SEQ ID NO: 4903 - RNA, 20 nt, synthetic construct
  misc_feature 1..20: note = C9Orf72 ATCN PAM targeting sequence
  source 1..20: mol_type = other RNA
acataaaaaataaaaataaa

SEQ ID NO: 4904 - RNA, 20 nt, synthetic construct
  misc_feature 1..20: note = C9Orf72 ATCN PAM targeting sequence
  source 1..20: mol_type = other RNA
ttgccatatacataaaatac

SEQ ID NO: 4905 - RNA, 20 nt, synthetic construct
  misc_feature 1..20: note = C9Orf72 ATCN PAM targeting sequence
  source 1..20: mol_type = other RNA
tttgtattttatgtatatgg

SEQ ID NO: 4906 - RNA, 20 nt, synthetic construct
  misc_feature 1..20: note = C9Orf72 ATCN PAM targeting sequence
  source 1..20: mol_type = other RNA
tgaatatataaagagctcat

SEQ ID NO: 4907 - RNA, 20 nt, synthetic construct
  misc_feature 1..20: note = C9Orf72 ATCN PAM targeting sequence
  source 1..20: mol_type = other RNA
ataagaaaaagataacagct

SEQ ID NO: 4908 - RNA, 20 nt, synthetic construct
  misc_feature 1..20: note = C9Orf72 ATCN PAM targeting sequence
  source 1..20: mol_type = other RNA
ttttcttattgatttatatg

SEQ ID NO: 4909 - RNA, 20 nt, synthetic construct
  misc_feature 1..20: note = C9Orf72 ATCN PAM targeting sequence
  source 1..20: mol_type = other RNA
tctgcttttcagctcttgag

SEQ ID NO: 4910 - RNA, 20 nt, synthetic construct
  misc_feature 1..20: note = C9Orf72 ATCN PAM targeting sequence
  source 1..20: mol_type = other RNA
ctggcttttctccttctgtg

SEQ ID NO: 4911 - RNA, 20 nt, synthetic construct
  misc_feature 1..20: note = C9Orf72 ATCN PAM targeting sequence
  source 1..20: mol_type = other RNA
ataaaataaaagaattaatg

SEQ ID NO: 4912 - RNA, 20 nt, synthetic construct
  misc_feature 1..20: note = C9Orf72 ATCN PAM targeting sequence
  source 1..20: mol_type = other RNA
cactagtaattggaaaaatg

SEQ ID NO: 4913 - RNA, 20 nt, synthetic construct
  misc_feature 1..20: note = C9Orf72 ATCN PAM targeting sequence
  source 1..20: mol_type = other RNA
caatgttgttttaatgcatt

SEQ ID NO: 4914 - RNA, 20 nt, synthetic construct
  misc_feature 1..20: note = C9Orf72 ATCN PAM targeting sequence
  source 1..20: mol_type = other RNA
ataagattgttaattaaaag

SEQ ID NO: 4915 - RNA, 20 nt, synthetic construct
  misc_feature 1..20: note = C9Orf72 ATCN PAM targeting sequence
  source 1..20: mol_type = other RNA
tatggatgaagaatactatc

SEQ ID NO: 4916 - RNA, 20 nt, synthetic construct
  misc_feature 1..20: note = C9Orf72 ATCN PAM targeting sequence
  source 1..20: mol_type = other RNA
ttacccccactggttataat

SEQ ID NO: 4917 - RNA, 20 nt, synthetic construct
  misc_feature 1..20: note = C9Orf72 ATCN PAM targeting sequence
  source 1..20: mol_type = other RNA
acagtgtaagaacatgtctg

SEQ ID NO: 4918 - RNA, 20 nt, synthetic construct
  misc_feature 1..20: note = C9Orf72 ATCN PAM targeting sequence
  source 1..20: mol_type = other RNA
aaactgttagagtcttttgg

SEQ ID NO: 4919 - RNA, 20 nt, synthetic construct
  misc_feature 1..20: note = C9Orf72 ATCN PAM targeting sequence
  source 1..20: mol_type = other RNA
ttttgctgtatgtatgcata

SEQ ID NO: 4920 - RNA, 20 nt, synthetic construct
  misc_feature 1..20: note = C9Orf72 ATCN PAM targeting sequence
  source 1..20: mol_type = other RNA
atgggagaataagtaattaa

SEQ ID NO: 4921 - RNA, 20 nt, synthetic construct
  misc_feature 1..20: note = C9Orf72 ATCN PAM targeting sequence
  source 1..20: mol_type = other RNA
atattttggactactctgca

SEQ ID NO: 4922 - RNA, 20 nt, synthetic construct
  misc_feature 1..20: note = C9Orf72 ATCN PAM targeting sequence
  source 1..20: mol_type = other RNA
acaatgcaattccatttaag

SEQ ID NO: 4923 - RNA, 20 nt, synthetic construct
  misc_feature 1..20: note = C9Orf72 ATCN PAM targeting sequence
  source 1..20: mol_type = other RNA
atttcagatgatgaataagc

SEQ ID NO: 4924 - RNA, 20 nt, synthetic construct
  misc_feature 1..20: note = C9Orf72 ATCN PAM targeting sequence
  source 1..20: mol_type = other RNA
gagatcgtactataaaactt

SEQ ID NO: 4925 - RNA, 20 nt, synthetic construct
  misc_feature 1..20: note = C9Orf72 ATCN PAM targeting sequence
  source 1..20: mol_type = other RNA
cagatccatttcagatgatg

SEQ ID NO: 4926 - RNA, 20 nt, synthetic construct
  misc_feature 1..20: note = C9Orf72 ATCN PAM targeting sequence
  source 1..20: mol_type = other RNA
tactataaaacttctagaag

SEQ ID NO: 4927 - RNA, 20 nt, synthetic construct
  misc_feature 1..20: note = C9Orf72 ATCN PAM targeting sequence
  source 1..20: mol_type = other RNA
ttttgtgttgagccaagatt

SEQ ID NO: 4928 - RNA, 20 nt, synthetic construct
  misc_feature 1..20: note = C9Orf72 ATCN PAM targeting sequence
  source 1..20: mol_type = other RNA
tggctcaacacaaaaagatt

SEQ ID NO: 4929 - RNA, 20 nt, synthetic construct
  misc_feature 1..20: note = C9Orf72 ATCN PAM targeting sequence
  source 1..20: mol_type = other RNA
ttcaaagaacgggaatttta

SEQ ID NO: 4930 - RNA, 20 nt, synthetic construct
  misc_feature 1..20: note = C9Orf72 ATCN PAM targeting sequence
  source 1..20: mol_type = other RNA
tttcatttatttaataatat

SEQ ID NO: 4931 - RNA, 20 nt, synthetic construct
  misc_feature 1..20: note = C9Orf72 ATCN PAM targeting sequence
  source 1..20: mol_type = other RNA
cataggcattttgcaagtat

SEQ ID NO: 4932 - RNA, 20 nt, synthetic construct
  misc_feature 1..20: note = C9Orf72 ATCN PAM targeting sequence
  source 1..20: mol_type = other RNA
aaaatatataaagagcattt

SEQ ID NO: 4933 - RNA, 20 nt, synthetic construct
  misc_feature 1..20: note = C9Orf72 ATCN PAM targeting sequence
  source 1..20: mol_type = other RNA
aacagaaaatgatcaaaaga

SEQ ID NO: 4934 - RNA, 20 nt, synthetic construct
  misc_feature 1..20: note = C9Orf72 ATCN PAM targeting sequence
  source 1..20: mol_type = other RNA
ttttctgttggattgttttc

SEQ ID NO: 4935 - RNA, 20 nt, synthetic construct
  misc_feature 1..20: note = C9Orf72 ATCN PAM targeting sequence
  source 1..20: mol_type = other RNA
aaagatctgaagaggtactt

SEQ ID NO: 4936 - RNA, 20 nt, synthetic construct
  misc_feature 1..20: note = C9Orf72 ATCN PAM targeting sequence
  source 1..20: mol_type = other RNA
tttgatcattttctgttgga

SEQ ID NO: 4937 - RNA, 20 nt, synthetic construct
  misc_feature 1..20: note = C9Orf72 ATCN PAM targeting sequence
  source 1..20: mol_type = other RNA
gaagaggtacttcagctttt

SEQ ID NO: 4938 - RNA, 20 nt, synthetic construct
  misc_feature 1..20: note = C9Orf72 ATCN PAM targeting sequence
  source 1..20: mol_type = other RNA
ttaataaaagctgaagtacc

SEQ ID NO: 4939 - RNA, 20 nt, synthetic construct
  misc_feature 1..20: note = C9Orf72 ATCN PAM targeting sequence
  source 1..20: mol_type = other RNA
ttaatttcagtcatcattaa

SEQ ID NO: 4940 - RNA, 20 nt, synthetic construct
  misc_feature 1..20: note = C9Orf72 ATCN PAM targeting sequence
  source 1..20: mol_type = other RNA
ccagtatttactaaataaat

SEQ ID NO: 4941 - RNA, 20 nt, synthetic construct
  misc_feature 1..20: note = C9Orf72 ATCN PAM targeting sequence
  source 1..20: mol_type = other RNA
agatgtggttatttttgcta

SEQ ID NO: 4942 - RNA, 20 nt, synthetic construct
  misc_feature 1..20: note = C9Orf72 ATCN PAM targeting sequence
  source 1..20: mol_type = other RNA
ggatggaacttcaatcacca

SEQ ID NO: 4943 - RNA, 20 nt, synthetic construct
  misc_feature 1..20: note = C9Orf72 ATCN PAM targeting sequence
  source 1..20: mol_type = other RNA
ctttttattacacattccag

SEQ ID NO: 4944 - RNA, 20 nt, synthetic construct
  misc_feature 1..20: note = C9Orf72 ATCN PAM targeting sequence
  source 1..20: mol_type = other RNA
ataaattttgttaattattt

SEQ ID NO: 4945 - RNA, 20 nt, synthetic construct
  misc_feature 1..20: note = C9Orf72 ATCN PAM targeting sequence
  source 1..20: mol_type = other RNA
taaattttctactttactaa

SEQ ID NO: 4946 - RNA, 20 nt, synthetic construct
  misc_feature 1..20: note = C9Orf72 ATCN PAM targeting sequence
  source 1..20: mol_type = other RNA
cctattccaaaataaaggga

SEQ ID NO: 4947 - RNA, 20 nt, synthetic construct
  misc_feature 1..20: note = C9Orf72 ATCN PAM targeting sequence
  source 1..20: mol_type = other RNA
ccttcatcctattcaacgat

SEQ ID NO: 4948 - RNA, 20 nt, synthetic construct
  misc_feature 1..20: note = C9Orf72 ATCN PAM targeting sequence
  source 1..20: mol_type = other RNA
tattcaacgatttactctct

SEQ ID NO: 4949 - RNA, 20 nt, synthetic construct
  misc_feature 1..20: note = C9Orf72 ATCN PAM targeting sequence
  source 1..20: mol_type = other RNA
ttgaataggatgaaggagat

SEQ ID NO: 4950 - RNA, 20 nt, synthetic construct
  misc_feature 1..20: note = C9Orf72 ATCN PAM targeting sequence
  source 1..20: mol_type = other RNA
gcaaagtcgcttttgcctca

SEQ ID NO: 4951 - RNA, 20 nt, synthetic construct
  misc_feature 1..20: note = C9Orf72 ATCN PAM targeting sequence
  source 1..20: mol_type = other RNA
catctgcaaagtcgcttttg

SEQ ID NO: 4952 - RNA, 20 nt, synthetic construct
  misc_feature 1..20: note = C9Orf72 ATCN PAM targeting sequence
  source 1..20: mol_type = other RNA
ttaacttccatcacatctgc

SEQ ID NO: 4953 - RNA, 20 nt, synthetic construct
  misc_feature 1..20: note = C9Orf72 ATCN PAM targeting sequence
  source 1..20: mol_type = other RNA
gagatcttgtattatctagt

SEQ ID NO: 4954 - RNA, 20 nt, synthetic construct
  misc_feature 1..20: note = C9Orf72 ATCN PAM targeting sequence
  source 1..20: mol_type = other RNA
cagatccttaacttccatca

SEQ ID NO: 4955 - RNA, 20 nt, synthetic construct
  misc_feature 1..20: note = C9Orf72 ATCN PAM targeting sequence
  source 1..20: mol_type = other RNA
tgtattatctagtgggcata

SEQ ID NO: 4956 - RNA, 20 nt, synthetic construct
  misc_feature 1..20: note = C9Orf72 ATCN PAM targeting sequence
  source 1..20: mol_type = other RNA
agtgggcatagtctaatcat

SEQ ID NO: 4957 - RNA, 20 nt, synthetic construct
  misc_feature 1..20: note = C9Orf72 ATCN PAM targeting sequence
  source 1..20: mol_type = other RNA
tagtaaatattttcatggta

SEQ ID NO: 4958 - RNA, 20 nt, synthetic construct
  misc_feature 1..20: note = C9Orf72 ATCN PAM targeting sequence
  source 1..20: mol_type = other RNA
agcattccatgttagtctta

SEQ ID NO: 4959 - RNA, 20 nt, synthetic construct
  misc_feature 1..20: note = C9Orf72 ATCN PAM targeting sequence
  source 1..20: mol_type = other RNA
aacatggttgtttaaggaca

SEQ ID NO: 4960 - RNA, 20 nt, synthetic construct
  misc_feature 1..20: note = C9Orf72 ATCN PAM targeting sequence
  source 1..20: mol_type = other RNA
gttttgtaaaatcaaacatg

SEQ ID NO: 4961 - RNA, 20 nt, synthetic construct
  misc_feature 1..20: note = C9Orf72 ATCN PAM targeting sequence
  source 1..20: mol_type = other RNA
atttttttgcttctcttcat

SEQ ID NO: 4962 - RNA, 20 nt, synthetic construct
  misc_feature 1..20: note = C9Orf72 ATCN PAM targeting sequence
  source 1..20: mol_type = other RNA
attgcattcatgttatctga

SEQ ID NO: 4963 - RNA, 20 nt, synthetic construct
  misc_feature 1..20: note = C9Orf72 ATCN PAM targeting sequence
  source 1..20: mol_type = other RNA
gagaggaaggatctgacaag

SEQ ID NO: 4964 - RNA, 20 nt, synthetic construct
  misc_feature 1..20: note = C9Orf72 ATCN PAM targeting sequence
  source 1..20: mol_type = other RNA
ttcctctcagataacatgaa

SEQ ID NO: 4965 - RNA, 20 nt, synthetic construct
  misc_feature 1..20: note = C9Orf72 ATCN PAM targeting sequence
  source 1..20: mol_type = other RNA
gacaagttaattaatttgtc

SEQ ID NO: 4966 - RNA, 20 nt, synthetic construct
  misc_feature 1..20: note = C9Orf72 ATCN PAM targeting sequence
  source 1..20: mol_type = other RNA
aaggcagtgcctttctctga

SEQ ID NO: 4967 - RNA, 20 nt, synthetic construct
  misc_feature 1..20: note = C9Orf72 ATCN PAM targeting sequence
  source 1..20: mol_type = other RNA
caaaaaaacagagacacctg

SEQ ID NO: 4968 - RNA, 20 nt, synthetic construct
  misc_feature 1..20: note = C9Orf72 ATCN PAM targeting sequence
  source 1..20: mol_type = other RNA
atgtattaggaacacacagg

SEQ ID NO: 4969 - RNA, 20 nt, synthetic construct
  misc_feature 1..20: note = C9Orf72 ATCN PAM targeting sequence
  source 1..20: mol_type = other RNA
ttacttgtcctgttggctct

SEQ ID NO: 4970 - RNA, 20 nt, synthetic construct
  misc_feature 1..20: note = C9Orf72 ATCN PAM targeting sequence
  source 1..20: mol_type = other RNA
taagagtttagagccaacag

SEQ ID NO: 4971 - RNA, 20 nt, synthetic construct
  misc_feature 1..20: note = C9Orf72 ATCN PAM targeting sequence
  source 1..20: mol_type = other RNA
tcttgagactctcctgcttc

SEQ ID NO: 4972 - RNA, 20 nt, synthetic construct
  misc_feature 1..20: note = C9Orf72 ATCN PAM targeting sequence
  source 1..20: mol_type = other RNA
tcaagatctaagttttcatc

SEQ ID NO: 4973 - RNA, 20 nt, synthetic construct
  misc_feature 1..20: note = C9Orf72 ATCN PAM targeting sequence
  source 1..20: mol_type = other RNA
tgaggatcttcttgagactc

SEQ ID NO: 4974 - RNA, 20 nt, synthetic construct
  misc_feature 1..20: note = C9Orf72 ATCN PAM targeting sequence
  source 1..20: mol_type = other RNA
aagttttcatcataaagttc

SEQ ID NO: 4975 - RNA, 20 nt, synthetic construct
  misc_feature 1..20: note = C9Orf72 ATCN PAM targeting sequence
  source 1..20: mol_type = other RNA
taaagttcttacccagtggt

SEQ ID NO: 4976 - RNA, 20 nt, synthetic construct
  misc_feature 1..20: note = C9Orf72 ATCN PAM targeting sequence
  source 1..20: mol_type = other RNA
agtccatctgagagtcttag

SEQ ID NO: 4977 - RNA, 20 nt, synthetic construct
  misc_feature 1..20: note = C9Orf72 ATCN PAM targeting sequence
  source 1..20: mol_type = other RNA
gagagtcttagtgtaaatga

SEQ ID NO: 4978 - RNA, 20 nt, synthetic construct
  misc_feature 1..20: note = C9Orf72 ATCN PAM targeting sequence
  source 1..20: mol_type = other RNA
tctagcatttatttaaacca

SEQ ID NO: 4979 - RNA, 20 nt, synthetic construct
  misc_feature 1..20: note = C9Orf72 ATCN PAM targeting sequence
  source 1..20: mol_type = other RNA
agcatttatttaaaccaggc

SEQ ID NO: 4980 - RNA, 20 nt, synthetic construct
  misc_feature 1..20: note = C9Orf72 ATCN PAM targeting sequence
  source 1..20: mol_type = other RNA
ctaccatatttcaaaagtcc

SEQ ID NO: 4981 - RNA, 20 nt, synthetic construct
  misc_feature 1..20: note = C9Orf72 ATCN PAM targeting sequence
  source 1..20: mol_type = other RNA
atccctaccatatttcaaaa

SEQ ID NO: 4982 - RNA, 20 nt, synthetic construct
  misc_feature 1..20: note = C9Orf72 ATCN PAM targeting sequence
  source 1..20: mol_type = other RNA
gcaagcgtcactaattttaa

SEQ ID NO: 4983 - RNA, 20 nt, synthetic construct
  misc_feature 1..20: note = C9Orf72 ATCN PAM targeting sequence
  source 1..20: mol_type = other RNA
gcacactctggccacaagtc

SEQ ID NO: 4984 - RNA, 20 nt, synthetic construct
  misc_feature 1..20: note = C9Orf72 ATCN PAM targeting sequence
  source 1..20: mol_type = other RNA
caatagcattagtttaggag

SEQ ID NO: 4985 - RNA, 20 nt, synthetic construct
  misc_feature 1..20: note = C9Orf72 ATCN PAM targeting sequence
  source 1..20: mol_type = other RNA
cagctggaatatgctattag

SEQ ID NO: 4986 - RNA, 20 nt, synthetic construct
  misc_feature 1..20: note = C9Orf72 ATCN PAM targeting sequence
  source 1..20: mol_type = other RNA
aaatatcacagctggaatat

SEQ ID NO: 4987 - RNA, 20 nt, synthetic construct
  misc_feature 1..20: note = C9Orf72 ATCN PAM targeting sequence
  source 1..20: mol_type = other RNA
ctaaaccttaacatttatta

SEQ ID NO: 4988 - RNA, 20 nt, synthetic construct
  misc_feature 1..20: note = C9Orf72 ATCN PAM targeting sequence
  source 1..20: mol_type = other RNA
ccaaaaggctgactgtcttc

SEQ ID NO: 4989 - RNA, 20 nt, synthetic construct
  misc_feature 1..20: note = C9Orf72 ATCN PAM targeting sequence
  source 1..20: mol_type = other RNA
cctatttataaataaagcca

SEQ ID NO: 4990 - RNA, 20 nt, synthetic construct
  misc_feature 1..20: note = C9Orf72 ATCN PAM targeting sequence
  source 1..20: mol_type = other RNA
cctaaaattcatggaaaaat

SEQ ID NO: 4991 - RNA, 20 nt, synthetic construct
  misc_feature 1..20: note = C9Orf72 ATCN PAM targeting sequence
  source 1..20: mol_type = other RNA
ctaaccctgcaaggagctgc

SEQ ID NO: 4992 - RNA, 20 nt, synthetic construct
  misc_feature 1..20: note = C9Orf72 ATCN PAM targeting sequence
  source 1..20: mol_type = other RNA
atctctaaccctgcaaggag

SEQ ID NO: 4993 - RNA, 20 nt, synthetic construct
  misc_feature 1..20: note = C9Orf72 ATCN PAM targeting sequence
  source 1..20: mol_type = other RNA
cttcctggaaggatccagcc

SEQ ID NO: 4994 - RNA, 20 nt, synthetic construct
  misc_feature 1..20: note = C9Orf72 ATCN PAM targeting sequence
  source 1..20: mol_type = other RNA
ttccaggaagtgatgctaca

SEQ ID NO: 4995 - RNA, 20 nt, synthetic construct
  misc_feature 1..20: note = C9Orf72 ATCN PAM targeting sequence
  source 1..20: mol_type = other RNA
agccctttgtatggtaaata

SEQ ID NO: 4996 - RNA, 20 nt, synthetic construct
  misc_feature 1..20: note = C9Orf72 ATCN PAM targeting sequence
  source 1..20: mol_type = other RNA
aggactaaaaactaagaaag

SEQ ID NO: 4997 - RNA, 20 nt, synthetic construct
  misc_feature 1..20: note = C9Orf72 ATCN PAM targeting sequence
  source 1..20: mol_type = other RNA
ggcaatgctactccacatca

SEQ ID NO: 4998 - RNA, 20 nt, synthetic construct
  misc_feature 1..20: note = C9Orf72 ATCN PAM targeting sequence
  source 1..20: mol_type = other RNA
gaaatgtaaatgtgactagg

SEQ ID NO: 4999 - RNA, 20 nt, synthetic construct
  misc_feature 1..20: note = C9Orf72 ATCN PAM targeting sequence
  source 1..20: mol_type = other RNA
ataaatacttccttaaaagt

SEQ ID NO: 5000 - RNA, 20 nt, synthetic construct
  misc_feature 1..20: note = C9Orf72 ATCN PAM targeting sequence
  source 1..20: mol_type = other RNA
ctaacattgcacgggacata

SEQ ID NO: 5001 - RNA, 20 nt, synthetic construct
  misc_feature 1..20: note = C9Orf72 ATCN PAM targeting sequence
  source 1..20: mol_type = other RNA
tatcttttatctggcaatcc

SEQ ID NO: 5002 - RNA, 20 nt, synthetic construct
  misc_feature 1..20: note = C9Orf72 ATCN PAM targeting sequence
  source 1..20: mol_type = other RNA
tttatctggcaatcctaatc

SEQ ID NO: 5003 - RNA, 20 nt, synthetic construct
  misc_feature 1..20: note = C9Orf72 ATCN PAM targeting sequence
  source 1..20: mol_type = other RNA
ggcaatcctaatctgggatt

SEQ ID NO: 5004 - RNA, 20 nt, synthetic construct
  misc_feature 1..20: note = C9Orf72 ATCN PAM targeting sequence
  source 1..20: mol_type = other RNA
taatctgggatttccttcca

SEQ ID NO: 5005 - RNA, 20 nt, synthetic construct
  misc_feature 1..20: note = C9Orf72 ATCN PAM targeting sequence
  source 1..20: mol_type = other RNA
gggatttccttccaggcaga

SEQ ID NO: 5006 - RNA, 20 nt, synthetic construct
  misc_feature 1..20: note = C9Orf72 ATCN PAM targeting sequence
  source 1..20: mol_type = other RNA
cagattaggattgccagata

SEQ ID NO: 5007 - RNA, 20 nt, synthetic construct
  misc_feature 1..20: note = C9Orf72 ATCN PAM targeting sequence
  source 1..20: mol_type = other RNA
tattgtgtctactcctcatt

SEQ ID NO: 5008 - RNA, 20 nt, synthetic construct
  misc_feature 1..20: note = C9Orf72 ATCN PAM targeting sequence
  source 1..20: mol_type = other RNA
caatgccatttccataatgt

SEQ ID NO: 5009 - RNA, 20 nt, synthetic construct
  misc_feature 1..20: note = C9Orf72 ATCN PAM targeting sequence
  source 1..20: mol_type = other RNA
attcctggttagccttgcaa

SEQ ID NO: 5010 - RNA, 20 nt, synthetic construct
  misc_feature 1..20: note = C9Orf72 ATCN PAM targeting sequence
  source 1..20: mol_type = other RNA
ctgtcaaacctcttctttac

SEQ ID NO: 5011 - RNA, 20 nt, synthetic construct
  misc_feature 1..20: note = C9Orf72 ATCN PAM targeting sequence
  source 1..20: mol_type = other RNA
taagaagtagaattaaaaat

SEQ ID NO: 5012 - RNA, 20 nt, synthetic construct
  misc_feature 1..20: note = C9Orf72 ATCN PAM targeting sequence
  source 1..20: mol_type = other RNA
ctcactccaccttatttttc

SEQ ID NO: 5013 - RNA, 20 nt, synthetic construct
  misc_feature 1..20: note = C9Orf72 ATCN PAM targeting sequence
  source 1..20: mol_type = other RNA
taatatacatgtatccctca

SEQ ID NO: 5014 - RNA, 20 nt, synthetic construct
  misc_feature 1..20: note = C9Orf72 ATCN PAM targeting sequence
  source 1..20: mol_type = other RNA
ctcaaatttacaaaataatt

SEQ ID NO: 5015 - RNA, 20 nt, synthetic construct
  misc_feature 1..20: note = C9Orf72 ATCN PAM targeting sequence
  source 1..20: mol_type = other RNA
acaggtcagccagtgctgcg

SEQ ID NO: 5016 - RNA, 20 nt, synthetic construct
  misc_feature 1..20: note = C9Orf72 ATCN PAM targeting sequence
  source 1..20: mol_type = other RNA
ttcccgtcaagcctctggtg

SEQ ID NO: 5017 - RNA, 20 nt, synthetic construct
  misc_feature 1..20: note = C9Orf72 ATCN PAM targeting sequence
  source 1..20: mol_type = other RNA
gcttctaagctcccttaggt

SEQ ID NO: 5018 - RNA, 20 nt, synthetic construct
  misc_feature 1..20: note = C9Orf72 ATCN PAM targeting sequence
  source 1..20: mol_type = other RNA
ttacattatggcatatttaa

SEQ ID NO: 5019 - RNA, 20 nt, synthetic construct
  misc_feature 1..20: note = C9Orf72 ATCN PAM targeting sequence
  source 1..20: mol_type = other RNA
gtcccatcattacattatgg

SEQ ID NO: 5020 - RNA, 20 nt, synthetic construct
  misc_feature 1..20: note = C9Orf72 ATCN PAM targeting sequence
  source 1..20: mol_type = other RNA
catcaactttcccatatctt

SEQ ID NO: 5021 - RNA, 20 nt, synthetic construct
  misc_feature 1..20: note = C9Orf72 ATCN PAM targeting sequence
  source 1..20: mol_type = other RNA
actttcccatatcttactgg

SEQ ID NO: 5022 - RNA, 20 nt, synthetic construct
  misc_feature 1..20: note = C9Orf72 ATCN PAM targeting sequence
  source 1..20: mol_type = other RNA
tactggttaaaagtaagtaa

SEQ ID NO: 5023 - RNA, 20 nt, synthetic construct
  misc_feature 1..20: note = C9Orf72 ATCN PAM targeting sequence
  source 1..20: mol_type = other RNA
tgaatttaaaaagaaaccat

SEQ ID NO: 5024 - RNA, 20 nt, synthetic construct
  misc_feature 1..20: note = C9Orf72 ATCN PAM targeting sequence
  source 1..20: mol_type = other RNA
tattgctccaggaagtaagg

SEQ ID NO: 5025 - RNA, 20 nt, synthetic construct
  misc_feature 1..20: note = C9Orf72 ATCN PAM targeting sequence
  source 1..20: mol_type = other RNA
tctgagtattaagatctgct

SEQ ID NO: 5026 - RNA, 20 nt, synthetic construct
  misc_feature 1..20: note = C9Orf72 ATCN PAM targeting sequence
  source 1..20: mol_type = other RNA
taatactcagaggatgttat

SEQ ID NO: 5027 - RNA, 20 nt, synthetic construct
  misc_feature 1..20: note = C9Orf72 ATCN PAM targeting sequence
  source 1..20: mol_type = other RNA
gctatatttgttgattaatg

SEQ ID NO: 5028 - RNA, 20 nt, synthetic construct
  misc_feature 1..20: note = C9Orf72 ATCN PAM targeting sequence
  source 1..20: mol_type = other RNA
acaaatatagcagatcttaa

SEQ ID NO: 5029 - RNA, 20 nt, synthetic construct
  misc_feature 1..20: note = C9Orf72 ATCN PAM targeting sequence
  source 1..20: mol_type = other RNA
aggccataagagaaaccatg

SEQ ID NO: 5030 - RNA, 20 nt, synthetic construct
  misc_feature 1..20: note = C9Orf72 ATCN PAM targeting sequence
  source 1..20: mol_type = other RNA
ataaacaaatctgagccaca

SEQ ID NO: 5031 - RNA, 20 nt, synthetic construct
  misc_feature 1..20: note = C9Orf72 ATCN PAM targeting sequence
  source 1..20: mol_type = other RNA
tttgtaacttttgttctctt

SEQ ID NO: 5032 - RNA, 20 nt, synthetic construct
  misc_feature 1..20: note = C9Orf72 ATCN PAM targeting sequence
  source 1..20: mol_type = other RNA
tttctttcttggagctgaat

SEQ ID NO: 5033 - RNA, 20 nt, synthetic construct
  misc_feature 1..20: note = C9Orf72 ATCN PAM targeting sequence
  source 1..20: mol_type = other RNA
cagcgtattccttgcatctt

SEQ ID NO: 5034 - RNA, 20 nt, synthetic construct
  misc_feature 1..20: note = C9Orf72 ATCN PAM targeting sequence
  source 1..20: mol_type = other RNA
aaacttcatctcagcgtatt

SEQ ID NO: 5035 - RNA, 20 nt, synthetic construct
  misc_feature 1..20: note = C9Orf72 ATCN PAM targeting sequence
  source 1..20: mol_type = other RNA
ttttacaaacgtagaattca

SEQ ID NO: 5036 - RNA, 20 nt, synthetic construct
  misc_feature 1..20: note = C9Orf72 ATCN PAM targeting sequence
  source 1..20: mol_type = other RNA
cagttctcacacttctgaat

SEQ ID NO: 5037 - RNA, 20 nt, synthetic construct
  misc_feature 1..20: note = C9Orf72 ATCN PAM targeting sequence
  source 1..20: mol_type = other RNA
agcatcacagttctcacact

SEQ ID NO: 5038 - RNA, 20 nt, synthetic construct
  misc_feature 1..20: note = C9Orf72 ATCN PAM targeting sequence
  source 1..20: mol_type = other RNA
ccatcaagcatcacagttct

SEQ ID NO: 5039 - RNA, 20 nt, synthetic construct
  misc_feature 1..20: note = C9Orf72 ATCN PAM targeting sequence
  source 1..20: mol_type = other RNA
caaatatatttttcccttgg

SEQ ID NO: 5040 - RNA, 20 nt, synthetic construct
  misc_feature 1..20: note = C9Orf72 ATCN PAM targeting sequence
  source 1..20: mol_type = other RNA
accttaaatctcaaatatat

SEQ ID NO: 5041 - RNA, 20 nt, synthetic construct
  misc_feature 1..20: note = C9Orf72 ATCN PAM targeting sequence
  source 1..20: mol_type = other RNA
tttgttcaaaagtgtacaaa

SEQ ID NO: 5042 - RNA, 20 nt, synthetic construct
  misc_feature 1..20: note = C9Orf72 ATCN PAM targeting sequence
  source 1..20: mol_type = other RNA
tctgtagccaagtttcaaga

SEQ ID NO: 5043 - RNA, 20 nt, synthetic construct
  misc_feature 1..20: note = C9Orf72 ATCN PAM targeting sequence
  source 1..20: mol_type = other RNA
tgctttgtttatatttctcc

SEQ ID NO: 5044 - RNA, 20 nt, synthetic construct
  misc_feature 1..20: note = C9Orf72 ATCN PAM targeting sequence
  source 1..20: mol_type = other RNA
ctacttcatttgattataaa

SEQ ID NO: 5045 - RNA, 20 nt, synthetic construct
  misc_feature 1..20: note = C9Orf72 ATCN PAM targeting sequence
  source 1..20: mol_type = other RNA
aatgaagtagggatcttgct

SEQ ID NO: 5046 - RNA, 20 nt, synthetic construct
  misc_feature 1..20: note = C9Orf72 ATCN PAM targeting sequence
  source 1..20: mol_type = other RNA
taaatttgcaccatgtttta

SEQ ID NO: 5047 - RNA, 20 nt, synthetic construct
  misc_feature 1..20: note = C9Orf72 ATCN PAM targeting sequence
  source 1..20: mol_type = other RNA
aaaacaattgcagaactaga

SEQ ID NO: 5048 - RNA, 20 nt, synthetic construct
  misc_feature 1..20: note = C9Orf72 ATCN PAM targeting sequence
  source 1..20: mol_type = other RNA
tgtagccttgtctccatgtt

SEQ ID NO: 5049 - RNA, 20 nt, synthetic construct
  misc_feature 1..20: note = C9Orf72 ATCN PAM targeting sequence
  source 1..20: mol_type = other RNA
gccacaactgaggaaatgaa

SEQ ID NO: 5050 - RNA, 20 nt, synthetic construct
  misc_feature 1..20: note = C9Orf72 ATCN PAM targeting sequence
  source 1..20: mol_type = other RNA
gggaaccaccggtctaacta

SEQ ID NO: 5051 - RNA, 20 nt, synthetic construct
  misc_feature 1..20: note = C9Orf72 ATCN PAM targeting sequence
  source 1..20: mol_type = other RNA
ttctaaacaaataacctatc

SEQ ID NO: 5052 - RNA, 20 nt, synthetic construct
  misc_feature 1..20: note = C9Orf72 ATCN PAM targeting sequence
  source 1..20: mol_type = other RNA
tttattttatatcaatagtg

SEQ ID NO: 5053 - RNA, 20 nt, synthetic construct
  misc_feature 1..20: note = C9Orf72 ATCN PAM targeting sequence
  source 1..20: mol_type = other RNA
atagtgaattaaaaactagg

SEQ ID NO: 5054 - RNA, 20 nt, synthetic construct
  misc_feature 1..20: note = C9Orf72 ATCN PAM targeting sequence
  source 1..20: mol_type = other RNA
tagtttttaattcactattg

SEQ ID NO: 5055 - RNA, 20 nt, synthetic construct
  misc_feature 1..20: note = C9Orf72 ATCN PAM targeting sequence
  source 1..20: mol_type = other RNA
tattgtttcctgatatttct

SEQ ID NO: 5056 - RNA, 20 nt, synthetic construct
  misc_feature 1..20: note = C9Orf72 ATCN PAM targeting sequence
  source 1..20: mol_type = other RNA
ggaaacaataagatttattt

SEQ ID NO: 5057 - RNA, 20 nt, synthetic construct
  misc_feature 1..20: note = C9Orf72 ATCN PAM targeting sequence
  source 1..20: mol_type = other RNA
ctgacaacctgcacaaaata

SEQ ID NO: 5058 - RNA, 20 nt, synthetic construct
  misc_feature 1..20: note = C9Orf72 ATCN PAM targeting sequence
  source 1..20: mol_type = other RNA
cacactgagaaaaaatagat

SEQ ID NO: 5059 - RNA, 20 nt, synthetic construct
  misc_feature 1..20: note = C9Orf72 ATCN PAM targeting sequence
  source 1..20: mol_type = other RNA
attttttctcagtgtgtgat

SEQ ID NO: 5060 - RNA, 20 nt, synthetic construct
  misc_feature 1..20: note = C9Orf72 ATCN PAM targeting sequence
  source 1..20: mol_type = other RNA
agggagggacccaatctatt

SEQ ID NO: 5061 - RNA, 20 nt, synthetic construct
  misc_feature 1..20: note = C9Orf72 ATCN PAM targeting sequence
  source 1..20: mol_type = other RNA
ctttgtccactgaacttagg

SEQ ID NO: 5062 - RNA, 20 nt, synthetic construct
  misc_feature 1..20: note = C9Orf72 ATCN PAM targeting sequence
  source 1..20: mol_type = other RNA
ttttctttcatcactttgtc

SEQ ID NO: 5063 - RNA, 20 nt, synthetic construct
  misc_feature 1..20: note = C9Orf72 ATCN PAM targeting sequence
  source 1..20: mol_type = other RNA
ctgagttcatcattttcttt

SEQ ID NO: 5064 - RNA, 20 nt, synthetic construct
  misc_feature 1..20: note = C9Orf72 ATCN PAM targeting sequence
  source 1..20: mol_type = other RNA
ggagaacaggcatgggaatg

SEQ ID NO: 5065 - RNA, 20 nt, synthetic construct
  misc_feature 1..20: note = C9Orf72 ATCN PAM targeting sequence
  source 1..20: mol_type = other RNA
attcccatgcctgttctcca

SEQ ID NO: 5066 - RNA, 20 nt, synthetic construct
  misc_feature 1..20: note = C9Orf72 ATCN PAM targeting sequence
  source 1..20: mol_type = other RNA
cacacccttaatatccattc

SEQ ID NO: 5067 - RNA, 20 nt, synthetic construct
  misc_feature 1..20: note = C9Orf72 ATCN PAM targeting sequence
  source 1..20: mol_type = other RNA
aactctatgttccttccacc

SEQ ID NO: 5068 - RNA, 20 nt, synthetic construct
  misc_feature 1..20: note = C9Orf72 ATCN PAM targeting sequence
  source 1..20: mol_type = other RNA
ggcagaatttcttgctttgg

SEQ ID NO: 5069 - RNA, 20 nt, synthetic construct
  misc_feature 1..20: note = C9Orf72 ATCN PAM targeting sequence
  source 1..20: mol_type = other RNA
tttccctttcccaatgcata

SEQ ID NO: 5070 - RNA, 20 nt, synthetic construct
  misc_feature 1..20: note = C9Orf72 ATCN PAM targeting sequence
  source 1..20: mol_type = other RNA
gacattgtggggactactgg

SEQ ID NO: 5071 - RNA, 20 nt, synthetic construct
  misc_feature 1..20: note = C9Orf72 ATCN PAM targeting sequence
  source 1..20: mol_type = other RNA
gctcagagccagtgtccagt

SEQ ID NO: 5072 - RNA, 20 nt, synthetic construct
  misc_feature 1..20: note = C9Orf72 ATCN PAM targeting sequence
  source 1..20: mol_type = other RNA
tgattccaggggacccaaaa

SEQ ID NO: 5073 - RNA, 20 nt, synthetic construct
  misc_feature 1..20: note = C9Orf72 ATCN PAM targeting sequence
  source 1..20: mol_type = other RNA
agatcagctcagagccagtg

SEQ ID NO: 5074 - RNA, 20 nt, synthetic construct
  misc_feature 1..20: note = C9Orf72 ATCN PAM targeting sequence
  source 1..20: mol_type = other RNA
tgtgattatttctccagtgc

SEQ ID NO: 5075 - RNA, 20 nt, synthetic construct
  misc_feature 1..20: note = C9Orf72 ATCN PAM targeting sequence
  source 1..20: mol_type = other RNA
caggataagtccagggaccc

SEQ ID NO: 5076 - RNA, 20 nt, synthetic construct
  misc_feature 1..20: note = C9Orf72 ATCN PAM targeting sequence
  source 1..20: mol_type = other RNA
ttcaggtccgtggtggtggc

SEQ ID NO: 5077 - RNA, 20 nt, synthetic construct
  misc_feature 1..20: note = C9Orf72 ATCN PAM targeting sequence
  source 1..20: mol_type = other RNA
ccacacctgcatctttcagg

SEQ ID NO: 5078 - RNA, 20 nt, synthetic construct
  misc_feature 1..20: note = C9Orf72 ATCN PAM targeting sequence
  source 1..20: mol_type = other RNA
ccattcaactctcccatttg

SEQ ID NO: 5079 - RNA, 20 nt, synthetic construct
  misc_feature 1..20: note = C9Orf72 ATCN PAM targeting sequence
  source 1..20: mol_type = other RNA
gtcttctgcacaggccaaat

SEQ ID NO: 5080 - RNA, 20 nt, synthetic construct
  misc_feature 1..20: note = C9Orf72 ATCN PAM targeting sequence
  source 1..20: mol_type = other RNA
actgtcattctcccagaccc

SEQ ID NO: 5081 - RNA, 20 nt, synthetic construct
  misc_feature 1..20: note = C9Orf72 ATCN PAM targeting sequence
  source 1..20: mol_type = other RNA
taagcttaaccaagtggtga

SEQ ID NO: 5082 - RNA, 20 nt, synthetic construct
  misc_feature 1..20: note = C9Orf72 ATCN PAM targeting sequence
  source 1..20: mol_type = other RNA
ggcaatttctccttcatgta

SEQ ID NO: 5083 - RNA, 20 nt, synthetic construct
  misc_feature 1..20: note = C9Orf72 ATCN PAM targeting sequence
  source 1..20: mol_type = other RNA
gtatataattgcacatctgg

SEQ ID NO: 5084 - RNA, 20 nt, synthetic construct
  misc_feature 1..20: note = C9Orf72 ATCN PAM targeting sequence
  source 1..20: mol_type = other RNA
agccaaaccattggctacag

SEQ ID NO: 5085 - RNA, 20 nt, synthetic construct
  misc_feature 1..20: note = C9Orf72 ATCN PAM targeting sequence
  source 1..20: mol_type = other RNA
acatacctcttcctcacatt

SEQ ID NO: 5086 - RNA, 20 nt, synthetic construct
  misc_feature 1..20: note = C9Orf72 ATCN PAM targeting sequence
  source 1..20: mol_type = other RNA
tcacagtttttgaccactca

SEQ ID NO: 5087 - RNA, 20 nt, synthetic construct
  misc_feature 1..20: note = C9Orf72 ATCN PAM targeting sequence
  source 1..20: mol_type = other RNA
catatgagtgctcaccaatg

SEQ ID NO: 5088 - RNA, 20 nt, synthetic construct
  misc_feature 1..20: note = C9Orf72 ATCN PAM targeting sequence
  source 1..20: mol_type = other RNA
tgttccccatcaccctgaag

SEQ ID NO: 5089 - RNA, 20 nt, synthetic construct
  misc_feature 1..20: note = C9Orf72 ATCN PAM targeting sequence
  source 1..20: mol_type = other RNA
ccctgaagcagctgattgat

SEQ ID NO: 5090 - RNA, 20 nt, synthetic construct
  misc_feature 1..20: note = C9Orf72 ATCN PAM targeting sequence
  source 1..20: mol_type = other RNA
gctgcttcagggtgatgggg

SEQ ID NO: 5091 - RNA, 20 nt, synthetic construct
  misc_feature 1..20: note = C9Orf72 ATCN PAM targeting sequence
  source 1..20: mol_type = other RNA
atcagctgcttcagggtgat

SEQ ID NO: 5092 - RNA, 20 nt, synthetic construct
  misc_feature 1..20: note = C9Orf72 ATCN PAM targeting sequence
  source 1..20: mol_type = other RNA
ctgcaaagtgttgtcaccta

SEQ ID NO: 5093 - RNA, 20 nt, synthetic construct
  misc_feature 1..20: note = C9Orf72 ATCN PAM targeting sequence
  source 1..20: mol_type = other RNA
atatcagctatgatcacatg

SEQ ID NO: 5094 - RNA, 20 nt, synthetic construct
  misc_feature 1..20: note = C9Orf72 ATCN PAM targeting sequence
  source 1..20: mol_type = other RNA
gctatgatcacatgaccagc

SEQ ID NO: 5095 - RNA, 20 nt, synthetic construct
  misc_feature 1..20: note = C9Orf72 ATCN PAM targeting sequence
  source 1..20: mol_type = other RNA
tagctgatattgatgactac

SEQ ID NO: 5096 - RNA, 20 nt, synthetic construct
  misc_feature 1..20: note = C9Orf72 ATCN PAM targeting sequence
  source 1..20: mol_type = other RNA
catgaccagctgcagaaatg

SEQ ID NO: 5097 - RNA, 20 nt, synthetic construct
  misc_feature 1..20: note = C9Orf72 ATCN PAM targeting sequence
  source 1..20: mol_type = other RNA
tgacaattacagtcctcatt

SEQ ID NO: 5098 - RNA, 20 nt, synthetic construct
  misc_feature 1..20: note = C9Orf72 ATCN PAM targeting sequence
  source 1..20: mol_type = other RNA
tcattttatttcctgtttac

SEQ ID NO: 5099 - RNA, 20 nt, synthetic construct
  misc_feature 1..20: note = C9Orf72 ATCN PAM targeting sequence
  source 1..20: mol_type = other RNA
tgtgacatgagatttattga

SEQ ID NO: 5100 - RNA, 20 nt, synthetic construct
  misc_feature 1..20: note = C9Orf72 ATCN PAM targeting sequence
  source 1..20: mol_type = other RNA
catgtcacatgataaagtaa

SEQ ID NO: 5101 - RNA, 20 nt, synthetic construct
  misc_feature 1..20: note = C9Orf72 ATCN PAM targeting sequence
  source 1..20: mol_type = other RNA
gcattcaagtattgttaact

SEQ ID NO: 5102 - RNA, 20 nt, synthetic construct
  misc_feature 1..20: note = C9Orf72 ATCN PAM targeting sequence
  source 1..20: mol_type = other RNA
ttccttcatacaaccataaa

SEQ ID NO: 5103 - RNA, 20 nt, synthetic construct
  misc_feature 1..20: note = C9Orf72 ATCN PAM targeting sequence
  source 1..20: mol_type = other RNA
tcaaataaagacaataataa

SEQ ID NO: 5104 - RNA, 20 nt, synthetic construct
  misc_feature 1..20: note = C9Orf72 ATCN PAM targeting sequence
  source 1..20: mol_type = other RNA
taatcttcaaataaagacaa

SEQ ID NO: 5105 - RNA, 20 nt, synthetic construct
  misc_feature 1..20: note = C9Orf72 ATCN PAM targeting sequence
  source 1..20: mol_type = other RNA
cacgagatgtgtatgggttc

SEQ ID NO: 5106 - RNA, 20 nt, synthetic construct
  misc_feature 1..20: note = C9Orf72 ATCN PAM targeting sequence
  source 1..20: mol_type = other RNA
cgtgagatcataatcttcaa

SEQ ID NO: 5107 - RNA, 20 nt, synthetic construct
  misc_feature 1..20: note = C9Orf72 ATCN PAM targeting sequence
  source 1..20: mol_type = other RNA
gaagtccacccctcgccaac

SEQ ID NO: 5108 - RNA, 20 nt, synthetic construct
  misc_feature 1..20: note = C9Orf72 ATCN PAM targeting sequence
  source 1..20: mol_type = other RNA
agttaacactcaatattaac

SEQ ID NO: 5109 - RNA, 20 nt, synthetic construct
  misc_feature 1..20: note = C9Orf72 ATCN PAM targeting sequence
  source 1..20: mol_type = other RNA
aatcaagttaacactcaata

SEQ ID NO: 5110 - RNA, 20 nt, synthetic construct
  misc_feature 1..20: note = C9Orf72 ATCN PAM targeting sequence
  source 1..20: mol_type = other RNA
ttcaatccaatcaagttaac

SEQ ID NO: 5111 - RNA, 20 nt, synthetic construct
  misc_feature 1..20: note = C9Orf72 ATCN PAM targeting sequence
  source 1..20: mol_type = other RNA
aaagtttgtatccttcaatc

SEQ ID NO: 5112 - RNA, 20 nt, synthetic construct
  misc_feature 1..20: note = C9Orf72 ATCN PAM targeting sequence
  source 1..20: mol_type = other RNA
catgtgtgtctgtgagggtg

SEQ ID NO: 5113 - RNA, 20 nt, synthetic construct
  misc_feature 1..20: note = C9Orf72 ATCN PAM targeting sequence
  source 1..20: mol_type = other RNA
cctttggcaacaccctcaca

SEQ ID NO: 5114 - RNA, 20 nt, synthetic construct
  misc_feature 1..20: note = C9Orf72 ATCN PAM targeting sequence
  source 1..20: mol_type = other RNA
gggtgggcacaatctaatca

SEQ ID NO: 5115 - RNA, 20 nt, synthetic construct
  misc_feature 1..20: note = C9Orf72 ATCN PAM targeting sequence
  source 1..20: mol_type = other RNA
aatcagcttccagtgtggct

SEQ ID NO: 5116 - RNA, 20 nt, synthetic construct
  misc_feature 1..20: note = C9Orf72 ATCN PAM targeting sequence
  source 1..20: mol_type = other RNA
gcttccagtgtggctacaat

SEQ ID NO: 5117 - RNA, 20 nt, synthetic construct
  misc_feature 1..20: note = C9Orf72 ATCN PAM targeting sequence
  source 1..20: mol_type = other RNA
cctcaggtagcagttggggg

SEQ ID NO: 5118 - RNA, 20 nt, synthetic construct
  misc_feature 1..20: note = C9Orf72 ATCN PAM targeting sequence
  source 1..20: mol_type = other RNA
ctcacatatatgctatataa

SEQ ID NO: 5119 - RNA, 20 nt, synthetic construct
  misc_feature 1..20: note = C9Orf72 ATCN PAM targeting sequence
  source 1..20: mol_type = other RNA
ctttaatactttaataatgg

SEQ ID NO: 5120 - RNA, 20 nt, synthetic construct
  misc_feature 1..20: note = C9Orf72 ATCN PAM targeting sequence
  source 1..20: mol_type = other RNA
ccctggactcttgtggatgt

SEQ ID NO: 5121 - RNA, 20 nt, synthetic construct
  misc_feature 1..20: note = C9Orf72 ATCN PAM targeting sequence
  source 1..20: mol_type = other RNA
ttataaaatgcttcaagagc

SEQ ID NO: 5122 - RNA, 20 nt, synthetic construct
  misc_feature 1..20: note = C9Orf72 ATCN PAM targeting sequence
  source 1..20: mol_type = other RNA
tagatcaagtgagacagtgg

SEQ ID NO: 5123 - RNA, 20 nt, synthetic construct
  misc_feature 1..20: note = C9Orf72 ATCN PAM targeting sequence
  source 1..20: mol_type = other RNA
atgatctttataaaatgctt

SEQ ID NO: 5124 - RNA, 20 nt, synthetic construct
  misc_feature 1..20: note = C9Orf72 ATCN PAM targeting sequence
  source 1..20: mol_type = other RNA
agtgagacagtggattacct

SEQ ID NO: 5125 - RNA, 20 nt, synthetic construct
  misc_feature 1..20: note = C9Orf72 ATCN PAM targeting sequence
  source 1..20: mol_type = other RNA
actgtctcacttgatctatg

SEQ ID NO: 5126 - RNA, 20 nt, synthetic construct
  misc_feature 1..20: note = C9Orf72 ATCN PAM targeting sequence
  source 1..20: mol_type = other RNA
acagagactgtggccacccc

SEQ ID NO: 5127 - RNA, 20 nt, synthetic construct
  misc_feature 1..20: note = C9Orf72 ATCN PAM targeting sequence
  source 1..20: mol_type = other RNA
gcagacttagcctttcctcc

SEQ ID NO: 5128 - RNA, 20 nt, synthetic construct
  misc_feature 1..20: note = C9Orf72 ATCN PAM targeting sequence
  source 1..20: mol_type = other RNA
gggcagcctagacaagtgtg

SEQ ID NO: 5129 - RNA, 20 nt, synthetic construct
  misc_feature 1..20: note = C9Orf72 ATCN PAM targeting sequence
  source 1..20: mol_type = other RNA
tctgtccagttctgcactct

SEQ ID NO: 5130 - RNA, 20 nt, synthetic construct
  misc_feature 1..20: note = C9Orf72 ATCN PAM targeting sequence
  source 1..20: mol_type = other RNA
tttattttgcttgtccaatt

SEQ ID NO: 5131 - RNA, 20 nt, synthetic construct
  misc_feature 1..20: note = C9Orf72 ATCN PAM targeting sequence
  source 1..20: mol_type = other RNA
gagtttgaagaccaccttgc

SEQ ID NO: 5132 - RNA, 20 nt, synthetic construct
  misc_feature 1..20: note = C9Orf72 ATCN PAM targeting sequence
  source 1..20: mol_type = other RNA
tgtctgcatgccttatttca

SEQ ID NO: 5133 - RNA, 20 nt, synthetic construct
  misc_feature 1..20: note = C9Orf72 ATCN PAM targeting sequence
  source 1..20: mol_type = other RNA
cactgtcaatattagacaga

SEQ ID NO: 5134 - RNA, 20 nt, synthetic construct
  misc_feature 1..20: note = C9Orf72 ATCN PAM targeting sequence
  source 1..20: mol_type = other RNA
gtctaatattgacagtggga

SEQ ID NO: 5135 - RNA, 20 nt, synthetic construct
  misc_feature 1..20: note = C9Orf72 ATCN PAM targeting sequence
  source 1..20: mol_type = other RNA
acaagacagaaaattaacaa

SEQ ID NO: 5136 - RNA, 20 nt, synthetic construct
  misc_feature 1..20: note = C9Orf72 ATCN PAM targeting sequence
  source 1..20: mol_type = other RNA
agaactgagttcaagtcctg

SEQ ID NO: 5137 - RNA, 20 nt, synthetic construct
  misc_feature 1..20: note = C9Orf72 ATCN PAM targeting sequence
  source 1..20: mol_type = other RNA
agtggacctaatagacatct

SEQ ID NO: 5138 - RNA, 20 nt, synthetic construct
  misc_feature 1..20: note = C9Orf72 ATCN PAM targeting sequence
  source 1..20: mol_type = other RNA
gcagaactctccaccccaaa

SEQ ID NO: 5139 - RNA, 20 nt, synthetic construct
  misc_feature 1..20: note = C9Orf72 ATCN PAM targeting sequence
  source 1..20: mol_type = other RNA
acagaatatacatttttgtt

SEQ ID NO: 5140 - RNA, 20 nt, synthetic construct
  misc_feature 1..20: note = C9Orf72 ATCN PAM targeting sequence
  source 1..20: mol_type = other RNA
gtggtgatatcccctttatc

SEQ ID NO: 5141 - RNA, 20 nt, synthetic construct
  misc_feature 1..20: note = C9Orf72 ATCN PAM targeting sequence
  source 1..20: mol_type = other RNA
caaagaaatataaactacca

SEQ ID NO: 5142 - RNA, 20 nt, synthetic construct
  misc_feature 1..20: note = C9Orf72 ATCN PAM targeting sequence
  source 1..20: mol_type = other RNA
gagaatactataaatacttc

SEQ ID NO: 5143 - RNA, 20 nt, synthetic construct
  misc_feature 1..20: note = C9Orf72 ATCN PAM targeting sequence
  source 1..20: mol_type = other RNA
agaagaaatggataaatttc

SEQ ID NO: 5144 - RNA, 20 nt, synthetic construct
  misc_feature 1..20: note = C9Orf72 ATCN PAM targeting sequence
  source 1..20: mol_type = other RNA
atttcttctagattttctag

SEQ ID NO: 5145 - RNA, 20 nt, synthetic construct
  misc_feature 1..20: note = C9Orf72 ATCN PAM targeting sequence
  source 1..20: mol_type = other RNA
tggtgggtaagttttttgat

SEQ ID NO: 5146 - RNA, 20 nt, synthetic construct
  misc_feature 1..20: note = C9Orf72 ATCN PAM targeting sequence
  source 1..20: mol_type = other RNA
agtcggcttcatctctggga

SEQ ID NO: 5147 - RNA, 20 nt, synthetic construct
  misc_feature 1..20: note = C9Orf72 ATCN PAM targeting sequence
  source 1..20: mol_type = other RNA
ctgggatgcaagcctggttc

SEQ ID NO: 5148 - RNA, 20 nt, synthetic construct
  misc_feature 1..20: note = C9Orf72 ATCN PAM targeting sequence
  source 1..20: mol_type = other RNA
cagagatgaagccgacttga

SEQ ID NO: 5149 - RNA, 20 nt, synthetic construct
  misc_feature 1..20: note = C9Orf72 ATCN PAM targeting sequence
  source 1..20: mol_type = other RNA
ataaacataatccatcgcat

SEQ ID NO: 5150 - RNA, 20 nt, synthetic construct
  misc_feature 1..20: note = C9Orf72 ATCN PAM targeting sequence
  source 1..20: mol_type = other RNA
atcgcataaacagaaccaaa

SEQ ID NO: 5151 - RNA, 20 nt, synthetic construct
  misc_feature 1..20: note = C9Orf72 ATCN PAM targeting sequence
  source 1..20: mol_type = other RNA
cataaacagaaccaaagaca

SEQ ID NO: 5152 - RNA, 20 nt, synthetic construct
  misc_feature 1..20: note = C9Orf72 ATCN PAM targeting sequence
  source 1..20: mol_type = other RNA
tgtgggttttgtctttggtt

SEQ ID NO: 5153 - RNA, 20 nt, synthetic construct
  misc_feature 1..20: note = C9Orf72 ATCN PAM targeting sequence
  source 1..20: mol_type = other RNA
gcttaaggagtttttgggct

SEQ ID NO: 5154 - RNA, 20 nt, synthetic construct
  misc_feature 1..20: note = C9Orf72 ATCN PAM targeting sequence
  source 1..20: mol_type = other RNA
tgagactttgctgaagttgt

SEQ ID NO: 5155 - RNA, 20 nt, synthetic construct
  misc_feature 1..20: note = C9Orf72 ATCN PAM targeting sequence
  source 1..20: mol_type = other RNA
atgtgcaaaaattacaagca

SEQ ID NO: 5156 - RNA, 20 nt, synthetic construct
  misc_feature 1..20: note = C9Orf72 ATCN PAM targeting sequence
  source 1..20: mol_type = other RNA
tgaattaactcccattcaca

SEQ ID NO: 5157 - RNA, 20 nt, synthetic construct
  misc_feature 1..20: note = C9Orf72 ATCN PAM targeting sequence
  source 1..20: mol_type = other RNA
tcatggataggaagaatcaa

SEQ ID NO: 5158 - RNA, 20 nt, synthetic construct
  misc_feature 1..20: note = C9Orf72 ATCN PAM targeting sequence
  source 1..20: mol_type = other RNA
atgaggatggaatgtttttc

SEQ ID NO: 5159 - RNA, 20 nt, synthetic construct
  misc_feature 1..20: note = C9Orf72 ATCN PAM targeting sequence
  source 1..20: mol_type = other RNA
atatcgtgaaaatggctata

SEQ ID NO: 5160 - RNA, 20 nt, synthetic construct
  misc_feature 1..20: note = C9Orf72 ATCN PAM targeting sequence
  source 1..20: mol_type = other RNA
tgaaaatggctatatggtcc

SEQ ID NO: 5161 - RNA, 20 nt, synthetic construct
  misc_feature 1..20: note = C9Orf72 ATCN PAM targeting sequence
  source 1..20: mol_type = other RNA
aagaagaccctgtagagcca

SEQ ID NO: 5162 - RNA, 20 nt, synthetic construct
  misc_feature 1..20: note = C9Orf72 ATCN PAM targeting sequence
  source 1..20: mol_type = other RNA
taagcaaaaagaacaaagct

SEQ ID NO: 5163 - RNA, 20 nt, synthetic construct
  misc_feature 1..20: note = C9Orf72 ATCN PAM targeting sequence
  source 1..20: mol_type = other RNA
cgctaactgacttcagagta

SEQ ID NO: 5164 - RNA, 20 nt, synthetic construct
  misc_feature 1..20: note = C9Orf72 ATCN PAM targeting sequence
  source 1..20: mol_type = other RNA
tgttttggttactgcagcct

SEQ ID NO: 5165 - RNA, 20 nt, synthetic construct
  misc_feature 1..20: note = C9Orf72 ATCN PAM targeting sequence
  source 1..20: mol_type = other RNA
gttttggtaccagtaccatc

SEQ ID NO: 5166 - RNA, 20 nt, synthetic construct
  misc_feature 1..20: note = C9Orf72 ATCN PAM targeting sequence
  source 1..20: mol_type = other RNA
aaaaccatctgattttcaac

SEQ ID NO: 5167 - RNA, 20 nt, synthetic construct
  misc_feature 1..20: note = C9Orf72 ATCN PAM targeting sequence
  source 1..20: mol_type = other RNA
gattttcaacaaacctgaca

SEQ ID NO: 5168 - RNA, 20 nt, synthetic construct
  misc_feature 1..20: note = C9Orf72 ATCN PAM targeting sequence
  source 1..20: mol_type = other RNA
catatggcagaacatttttt

SEQ ID NO: 5169 - RNA, 20 nt, synthetic construct
  misc_feature 1..20: note = C9Orf72 ATCN PAM targeting sequence
  source 1..20: mol_type = other RNA
tttttttgttgttgttccta

SEQ ID NO: 5170 - RNA, 20 nt, synthetic construct
  misc_feature 1..20: note = C9Orf72 ATCN PAM targeting sequence
  source 1..20: mol_type = other RNA
actaagacaaaaatgcccca

SEQ ID NO: 5171 - RNA, 20 nt, synthetic construct
  misc_feature 1..20: note = C9Orf72 ATCN PAM targeting sequence
  source 1..20: mol_type = other RNA
atgttctaggtggcatgagt

SEQ ID NO: 5172 - RNA, 20 nt, synthetic construct
  misc_feature 1..20: note = C9Orf72 ATCN PAM targeting sequence
  source 1..20: mol_type = other RNA
atgaatccactaagacaaaa

SEQ ID NO: 5173 - RNA, 20 nt, synthetic construct
  misc_feature 1..20: note = C9Orf72 ATCN PAM targeting sequence
  source 1..20: mol_type = other RNA
tagccacagggcaatgacag

SEQ ID NO: 5174 - RNA, 20 nt, synthetic construct
  misc_feature 1..20: note = C9Orf72 ATCN PAM targeting sequence
  source 1..20: mol_type = other RNA
ggagactatttcctgacttc

SEQ ID NO: 5175 - RNA, 20 nt, synthetic construct
  misc_feature 1..20: note = C9Orf72 ATCN PAM targeting sequence
  source 1..20: mol_type = other RNA
tccatcaggagactatttcc

SEQ ID NO: 5176 - RNA, 20 nt, synthetic construct
  misc_feature 1..20: note = C9Orf72 ATCN PAM targeting sequence
  source 1..20: mol_type = other RNA
gtgattttgtcaggtagagg

SEQ ID NO: 5177 - RNA, 20 nt, synthetic construct
  misc_feature 1..20: note = C9Orf72 ATCN PAM targeting sequence
  source 1..20: mol_type = other RNA
ctgatgtacctactggtgga

SEQ ID NO: 5178 - RNA, 20 nt, synthetic construct
  misc_feature 1..20: note = C9Orf72 ATCN PAM targeting sequence
  source 1..20: mol_type = other RNA
cctctacctgacaaaatcac

SEQ ID NO: 5179 - RNA, 20 nt, synthetic construct
  misc_feature 1..20: note = C9Orf72 ATCN PAM targeting sequence
  source 1..20: mol_type = other RNA
ggccatcccctctacctgac

SEQ ID NO: 5180 - RNA, 20 nt, synthetic construct
  misc_feature 1..20: note = C9Orf72 ATCN PAM targeting sequence
  source 1..20: mol_type = other RNA
ctatttgaaaacaccaagtc

SEQ ID NO: 5181 - RNA, 20 nt, synthetic construct
  misc_feature 1..20: note = C9Orf72 ATCN PAM targeting sequence
  source 1..20: mol_type = other RNA
ttcttacatagtactcaggc

SEQ ID NO: 5182 - RNA, 20 nt, synthetic construct
  misc_feature 1..20: note = C9Orf72 ATCN PAM targeting sequence
  source 1..20: mol_type = other RNA
ttatagaacaaaaagtccat

SEQ ID NO: 5183 - RNA, 20 nt, synthetic construct
  misc_feature 1..20: note = C9Orf72 ATCN PAM targeting sequence
  source 1..20: mol_type = other RNA
tcatctttatagaacaaaaa

SEQ ID NO: 5184 - RNA, 20 nt, synthetic construct
  misc_feature 1..20: note = C9Orf72 ATCN PAM targeting sequence
  source 1..20: mol_type = other RNA
ccacaaacacatgggtaatg

SEQ ID NO: 5185 - RNA, 20 nt, synthetic construct
  misc_feature 1..20: note = C9Orf72 ATCN PAM targeting sequence
  source 1..20: mol_type = other RNA
gcatgaagaatctatgttaa

SEQ ID NO: 5186 - RNA, 20 nt, synthetic construct
  misc_feature 1..20: note = C9Orf72 ATCN PAM targeting sequence
  source 1..20: mol_type = other RNA
atgttaaataaaaatatttt

SEQ ID NO: 5187 - RNA, 20 nt, synthetic construct
  misc_feature 1..20: note = C9Orf72 ATCN PAM targeting sequence
  source 1..20: mol_type = other RNA
ctggcctcagtcaactgctg

SEQ ID NO: 5188 - RNA, 20 nt, synthetic construct
  misc_feature 1..20: note = C9Orf72 ATCN PAM targeting sequence
  source 1..20: mol_type = other RNA
atggtaacagaaagcagacc

SEQ ID NO: 5189 - RNA, 20 nt, synthetic construct
  misc_feature 1..20: note = C9Orf72 ATCN PAM targeting sequence
  source 1..20: mol_type = other RNA
aatgtttgtattacaaataa

SEQ ID NO: 5190 - RNA, 20 nt, synthetic construct
  misc_feature 1..20: note = C9Orf72 ATCN PAM targeting sequence
  source 1..20: mol_type = other RNA
aagttcttctgcagaaagga

SEQ ID NO: 5191 - RNA, 20 nt, synthetic construct
  misc_feature 1..20: note = C9Orf72 ATCN PAM targeting sequence
  source 1..20: mol_type = other RNA
tagttggtgtttaacttctt

SEQ ID NO: 5192 - RNA, 20 nt, synthetic construct
  misc_feature 1..20: note = C9Orf72 ATCN PAM targeting sequence
  source 1..20: mol_type = other RNA
ctactgccagagtataagaa

SEQ ID NO: 5193 - RNA, 20 nt, synthetic construct
  misc_feature 1..20: note = C9Orf72 ATCN PAM targeting sequence
  source 1..20: mol_type = other RNA
ggagtactgaaacaggaaaa

SEQ ID NO: 5194 - RNA, 20 nt, synthetic construct
  misc_feature 1..20: note = C9Orf72 ATCN PAM targeting sequence
  source 1..20: mol_type = other RNA
tgctccatatacctaaccac

SEQ ID NO: 5195 - RNA, 20 nt, synthetic construct
  misc_feature 1..20: note = C9Orf72 ATCN PAM targeting sequence
  source 1..20: mol_type = other RNA
atgtggatagaagttcaaat

SEQ ID NO: 5196 - RNA, 20 nt, synthetic construct
  misc_feature 1..20: note = C9Orf72 ATCN PAM targeting sequence
  source 1..20: mol_type = other RNA
acatagattgtgtcaggaaa

SEQ ID NO: 5197 - RNA, 20 nt, synthetic construct
  misc_feature 1..20: note = C9Orf72 ATCN PAM targeting sequence
  source 1..20: mol_type = other RNA
aattggtaacagatagttga

SEQ ID NO: 5198 - RNA, 20 nt, synthetic construct
  misc_feature 1..20: note = C9Orf72 ATCN PAM targeting sequence
  source 1..20: mol_type = other RNA
gttaccaattggattccctg

SEQ ID NO: 5199 - RNA, 20 nt, synthetic construct
  misc_feature 1..20: note = C9Orf72 ATCN PAM targeting sequence
  source 1..20: mol_type = other RNA
gttcaactatctgttaccaa

SEQ ID NO: 5200 - RNA, 20 nt, synthetic construct
  misc_feature 1..20: note = C9Orf72 ATCN PAM targeting sequence
  source 1..20: mol_type = other RNA
gttagcaggccatttgcagt

SEQ ID NO: 5201 - RNA, 20 nt, synthetic construct
  misc_feature 1..20: note = C9Orf72 ATCN PAM targeting sequence
  source 1..20: mol_type = other RNA
aatcagttagcaggccattt

SEQ ID NO: 5202 - RNA, 20 nt, synthetic construct
  misc_feature 1..20: note = C9Orf72 ATCN PAM targeting sequence
  source 1..20: mol_type = other RNA
aatactcattagaaaatagt

SEQ ID NO: 5203 - RNA, 20 nt, synthetic construct
  misc_feature 1..20: note = C9Orf72 ATCN PAM targeting sequence
  source 1..20: mol_type = other RNA
taaaatgtcaaatagggtga

SEQ ID NO: 5204 - RNA, 20 nt, synthetic construct
  misc_feature 1..20: note = C9Orf72 ATCN PAM targeting sequence
  source 1..20: mol_type = other RNA
aagccatgaacctgaagcct

SEQ ID NO: 5205 - RNA, 20 nt, synthetic construct
  misc_feature 1..20: note = C9Orf72 ATCN PAM targeting sequence
  source 1..20: mol_type = other RNA
aagtattattacatattcaa

SEQ ID NO: 5206 - RNA, 20 nt, synthetic construct
  misc_feature 1..20: note = C9Orf72 ATCN PAM targeting sequence
  source 1..20: mol_type = other RNA
gctttgagttactttgtctt

SEQ ID NO: 5207 - RNA, 20 nt, synthetic construct
  misc_feature 1..20: note = C9Orf72 ATCN PAM targeting sequence
  source 1..20: mol_type = other RNA
gggtgtaaatgggcttcaag

SEQ ID NO: 5208 - RNA, 20 nt, synthetic construct
  misc_feature 1..20: note = C9Orf72 ATCN PAM targeting sequence
  source 1..20: mol_type = other RNA
aaatgtaaattagctatttc

SEQ ID NO: 5209 - RNA, 20 nt, synthetic construct
  misc_feature 1..20: note = C9Orf72 ATCN PAM targeting sequence
  source 1..20: mol_type = other RNA
ttttctgcacatactcaaat

SEQ ID NO: 5210 - RNA, 20 nt, synthetic construct
  misc_feature 1..20: note = C9Orf72 ATCN PAM targeting sequence
  source 1..20: mol_type = other RNA
gatgcaagcaatattttgaa

SEQ ID NO: 5211 - RNA, 20 nt, synthetic construct
  misc_feature 1..20: note = C9Orf72 ATCN PAM targeting sequence
  source 1..20: mol_type = other RNA
gatccttttctgcacatact

SEQ ID NO: 5212 - RNA, 20 nt, synthetic construct
  misc_feature 1..20: note = C9Orf72 ATCN PAM targeting sequence
  source 1..20: mol_type = other RNA
cttgtacagcctctttcttg

SEQ ID NO: 5213 - RNA, 20 nt, synthetic construct
  misc_feature 1..20: note = C9Orf72 ATCN PAM targeting sequence
  source 1..20: mol_type = other RNA
aaagtcatgtatcacttgta

SEQ ID NO: 5214 - RNA, 20 nt, synthetic construct
  misc_feature 1..20: note = C9Orf72 ATCN PAM targeting sequence
  source 1..20: mol_type = other RNA
taatataacctatattcaaa

SEQ ID NO: 5215 - RNA, 20 nt, synthetic construct
  misc_feature 1..20: note = C9Orf72 ATCN PAM targeting sequence
  source 1..20: mol_type = other RNA
tattttcattctctgttcta

SEQ ID NO: 5216 - RNA, 20 nt, synthetic construct
  misc_feature 1..20: note = C9Orf72 ATCN PAM targeting sequence
  source 1..20: mol_type = other RNA
acaatgaaatcttattttca

SEQ ID NO: 5217 - RNA, 20 nt, synthetic construct
  misc_feature 1..20: note = C9Orf72 ATCN PAM targeting sequence
  source 1..20: mol_type = other RNA
gccaaatggaagctctctaa

SEQ ID NO: 5218 - RNA, 20 nt, synthetic construct
  misc_feature 1..20: note = C9Orf72 ATCN PAM targeting sequence
  source 1..20: mol_type = other RNA
catataaaagctgatagtat

SEQ ID NO: 5219 - RNA, 20 nt, synthetic construct
  misc_feature 1..20: note = C9Orf72 ATCN PAM targeting sequence
  source 1..20: mol_type = other RNA
gcttttatatgagatctgcc

SEQ ID NO: 5220 - RNA, 20 nt, synthetic construct
  misc_feature 1..20: note = C9Orf72 ATCN PAM targeting sequence
  source 1..20: mol_type = other RNA
ttactgaattcattttctac

SEQ ID NO: 5221 - RNA, 20 nt, synthetic construct
  misc_feature 1..20: note = C9Orf72 ATCN PAM targeting sequence
  source 1..20: mol_type = other RNA
ctttaaatttaagtcacttt

SEQ ID NO: 5222 - RNA, 20 nt, synthetic construct
  misc_feature 1..20: note = C9Orf72 ATCN PAM targeting sequence
  source 1..20: mol_type = other RNA
aaaataaaagttttaatcac

SEQ ID NO: 5223 - RNA, 20 nt, synthetic construct
  misc_feature 1..20: note = C9Orf72 ATCN PAM targeting sequence
  source 1..20: mol_type = other RNA
aatatttaaatctggattta

SEQ ID NO: 5224 - RNA, 20 nt, synthetic construct
  misc_feature 1..20: note = C9Orf72 ATCN PAM targeting sequence
  source 1..20: mol_type = other RNA
ggatttatgagtaaatacgc

SEQ ID NO: 5225 - RNA, 20 nt, synthetic construct
  misc_feature 1..20: note = C9Orf72 ATCN PAM targeting sequence
  source 1..20: mol_type = other RNA
agatttaaatattagataaa

SEQ ID NO: 5226 - RNA, 20 nt, synthetic construct
  misc_feature 1..20: note = C9Orf72 ATCN PAM targeting sequence
  source 1..20: mol_type = other RNA
taaaaccccaattttttcct

SEQ ID NO: 5227 - RNA, 20 nt, synthetic construct
  misc_feature 1..20: note = C9Orf72 ATCN PAM targeting sequence
  source 1..20: mol_type = other RNA
gaatgaaatctatgttaata

SEQ ID NO: 5228 - RNA, 20 nt, synthetic construct
  misc_feature 1..20: note = C9Orf72 ATCN PAM targeting sequence
  source 1..20: mol_type = other RNA
atgttaatatagtatctaaa

SEQ ID NO: 5229 - RNA, 20 nt, synthetic construct
  misc_feature 1..20: note = C9Orf72 ATCN PAM targeting sequence
  source 1..20: mol_type = other RNA
aaatcttctaatcaattatt

SEQ ID NO: 5230 - RNA, 20 nt, synthetic construct
  misc_feature 1..20: note = C9Orf72 ATCN PAM targeting sequence
  source 1..20: mol_type = other RNA
gctggaacatttccctgtgt

SEQ ID NO: 5231 - RNA, 20 nt, synthetic construct
  misc_feature 1..20: note = C9Orf72 ATCN PAM targeting sequence
  source 1..20: mol_type = other RNA
ttctaaagttcagtgagtat

SEQ ID NO: 5232 - RNA, 20 nt, synthetic construct
  misc_feature 1..20: note = C9Orf72 ATCN PAM targeting sequence
  source 1..20: mol_type = other RNA
ttctatgctttccattctgt

SEQ ID NO: 5233 - RNA, 20 nt, synthetic construct
  misc_feature 1..20: note = C9Orf72 ATCN PAM targeting sequence
  source 1..20: mol_type = other RNA
taatgacaataattcaaata

SEQ ID NO: 5234 - RNA, 20 nt, synthetic construct
  misc_feature 1..20: note = C9Orf72 ATCN PAM targeting sequence
  source 1..20: mol_type = other RNA
ctatcattaagatcaatgtt

SEQ ID NO: 5235 - RNA, 20 nt, synthetic construct
  misc_feature 1..20: note = C9Orf72 ATCN PAM targeting sequence
  source 1..20: mol_type = other RNA
ttaagatcaatgttaaatac

SEQ ID NO: 5236 - RNA, 20 nt, synthetic construct
  misc_feature 1..20: note = C9Orf72 ATCN PAM targeting sequence
  source 1..20: mol_type = other RNA
taatgatagtgatttgtatt

SEQ ID NO: 5237 - RNA, 20 nt, synthetic construct
  misc_feature 1..20: note = C9Orf72 ATCN PAM targeting sequence
  source 1..20: mol_type = other RNA
atgttaaatacccttagaaa

SEQ ID NO: 5238 - RNA, 20 nt, synthetic construct
  misc_feature 1..20: note = C9Orf72 ATCN PAM targeting sequence
  source 1..20: mol_type = other RNA
atatattaaacaccttggtc

SEQ ID NO: 5239 - RNA, 20 nt, synthetic construct
  misc_feature 1..20: note = C9Orf72 ATCN PAM targeting sequence
  source 1..20: mol_type = other RNA
agcacagtcattaaactcca

SEQ ID NO: 5240 - RNA, 20 nt, synthetic construct
  misc_feature 1..20: note = C9Orf72 ATCN PAM targeting sequence
  source 1..20: mol_type = other RNA
tttcccagcaagtttacaat

SEQ ID NO: 5241 - RNA, 20 nt, synthetic construct
  misc_feature 1..20: note = C9Orf72 ATCN PAM targeting sequence
  source 1..20: mol_type = other RNA
gcagacacagctcactggtc

SEQ ID NO: 5242 - RNA, 20 nt, synthetic construct
  misc_feature 1..20: note = C9Orf72 ATCN PAM targeting sequence
  source 1..20: mol_type = other RNA
tggtctgcaaattatagtct

SEQ ID NO: 5243 - RNA, 20 nt, synthetic construct
  misc_feature 1..20: note = C9Orf72 ATCN PAM targeting sequence
  source 1..20: mol_type = other RNA
gctttgacatcatggtctgc

SEQ ID NO: 5244 - RNA, 20 nt, synthetic construct
  misc_feature 1..20: note = C9Orf72 ATCN PAM targeting sequence
  source 1..20: mol_type = other RNA
caaatctgctttgacatcat

SEQ ID NO: 5245 - RNA, 20 nt, synthetic construct
  misc_feature 1..20: note = C9Orf72 ATCN PAM targeting sequence
  source 1..20: mol_type = other RNA
ccaaccactgtcacaaatct

SEQ ID NO: 5246 - RNA, 20 nt, synthetic construct
  misc_feature 1..20: note = C9Orf72 ATCN PAM targeting sequence
  source 1..20: mol_type = other RNA
tattctaccacatcgtgcat

SEQ ID NO: 5247 - RNA, 20 nt, synthetic construct
  misc_feature 1..20: note = C9Orf72 ATCN PAM targeting sequence
  source 1..20: mol_type = other RNA
tgcatatgtgtaagttcagt

SEQ ID NO: 5248 - RNA, 20 nt, synthetic construct
  misc_feature 1..20: note = C9Orf72 ATCN PAM targeting sequence
  source 1..20: mol_type = other RNA
ggtacaaataagaaatggat

SEQ ID NO: 5249 - RNA, 20 nt, synthetic construct
  misc_feature 1..20: note = C9Orf72 ATCN PAM targeting sequence
  source 1..20: mol_type = other RNA
tcaatattttctgatgacat

SEQ ID NO: 5250 - RNA, 20 nt, synthetic construct
  misc_feature 1..20: note = C9Orf72 ATCN PAM targeting sequence
  source 1..20: mol_type = other RNA
gaaaatattgaggataggtt

SEQ ID NO: 5251 - RNA, 20 nt, synthetic construct
  misc_feature 1..20: note = C9Orf72 ATCN PAM targeting sequence
  source 1..20: mol_type = other RNA
gtcttattactttttttaat

SEQ ID NO: 5252 - RNA, 20 nt, synthetic construct
  misc_feature 1..20: note = C9Orf72 ATCN PAM targeting sequence
  source 1..20: mol_type = other RNA
cttttctgttgacttgtaca

SEQ ID NO: 5253 - RNA, 20 nt, synthetic construct
  misc_feature 1..20: note = C9Orf72 ATCN PAM targeting sequence
  source 1..20: mol_type = other RNA
ctgacagacacagagtactt

SEQ ID NO: 5254 - RNA, 20 nt, synthetic construct
  misc_feature 1..20: note = C9Orf72 ATCN PAM targeting sequence
  source 1..20: mol_type = other RNA
aaaaagttttgtatgaaccc

SEQ ID NO: 5255 - RNA, 20 nt, synthetic construct
  misc_feature 1..20: note = C9Orf72 ATCN PAM targeting sequence
  source 1..20: mol_type = other RNA
gcaaagtccctttcgccaaa

SEQ ID NO: 5256 - RNA, 20 nt, synthetic construct
  misc_feature 1..20: note = C9Orf72 ATCN PAM targeting sequence
  source 1..20: mol_type = other RNA
taaagtcttcaccttaataa

SEQ ID NO: 5257 - RNA, 20 nt, synthetic construct
  misc_feature 1..20: note = C9Orf72 ATCN PAM targeting sequence
  source 1..20: mol_type = other RNA
tttcttatgctttccatgtg

SEQ ID NO: 5258 - RNA, 20 nt, synthetic construct
  misc_feature 1..20: note = C9Orf72 ATCN PAM targeting sequence
  source 1..20: mol_type = other RNA
agcccagccacccagacttt

SEQ ID NO: 5259 - RNA, 20 nt, synthetic construct
  misc_feature 1..20: note = C9Orf72 ATCN PAM targeting sequence
  source 1..20: mol_type = other RNA
aacagtttctaaaggtcaaa

SEQ ID NO: 5260 - RNA, 20 nt, synthetic construct
  misc_feature 1..20: note = C9Orf72 ATCN PAM targeting sequence
  source 1..20: mol_type = other RNA
agcttgtccaatcggtggtg

SEQ ID NO: 5261 - RNA, 20 nt, synthetic construct
  misc_feature 1..20: note = C9Orf72 ATCN PAM targeting sequence
  source 1..20: mol_type = other RNA
gtggtgctggccgcatgtgg

SEQ ID NO: 5262 - RNA, 20 nt, synthetic construct
  misc_feature 1..20: note = C9Orf72 ATCN PAM targeting sequence
  source 1..20: mol_type = other RNA
ggtttaagtcacccatatct

SEQ ID NO: 5263 - RNA, 20 nt, synthetic construct
  misc_feature 1..20: note = C9Orf72 ATCN PAM targeting sequence
  source 1..20: mol_type = other RNA
ctggaaaataattgattata

SEQ ID NO: 5264 - RNA, 20 nt, synthetic construct
  misc_feature 1..20: note = C9Orf72 ATCN PAM targeting sequence
  source 1..20: mol_type = other RNA
attattttccagagatatgg

SEQ ID NO: 5265 - RNA, 20 nt, synthetic construct
  misc_feature 1..20: note = C9Orf72 ATCN PAM targeting sequence
  source 1..20: mol_type = other RNA
atttttaaaatatgccaacc

SEQ ID NO: 5266 - RNA, 20 nt, synthetic construct
  misc_feature 1..20: note = C9Orf72 ATCN PAM targeting sequence
  source 1..20: mol_type = other RNA
ccttcccaccgtcattcttt

SEQ ID NO: 5267 - RNA, 20 nt, synthetic construct
  misc_feature 1..20: note = C9Orf72 ATCN PAM targeting sequence
  source 1..20: mol_type = other RNA
attgcttaaggagaaagagg

SEQ ID NO: 5268 - RNA, 20 nt, synthetic construct
  misc_feature 1..20: note = C9Orf72 ATCN PAM targeting sequence
  source 1..20: mol_type = other RNA
aaattgcagactactaaaaa

SEQ ID NO: 5269 - RNA, 20 nt, synthetic construct
  misc_feature 1..20: note = C9Orf72 ATCN PAM targeting sequence
  source 1..20: mol_type = other RNA
tatgagaccataatgttagg

SEQ ID NO: 5270 - RNA, 20 nt, synthetic construct
  misc_feature 1..20: note = C9Orf72 ATCN PAM targeting sequence
  source 1..20: mol_type = other RNA
tgaagtagcctaacattatg

SEQ ID NO: 5271 - RNA, 20 nt, synthetic construct
  misc_feature 1..20: note = C9Orf72 ATCN PAM targeting sequence
  source 1..20: mol_type = other RNA
ctgggtgaaaaaatgagtta

SEQ ID NO: 5272 - RNA, 20 nt, synthetic construct
  misc_feature 1..20: note = C9Orf72 ATCN PAM targeting sequence
  source 1..20: mol_type = other RNA
aactccagaagcaaatctct

SEQ ID NO: 5273 - RNA, 20 nt, synthetic construct
  misc_feature 1..20: note = C9Orf72 ATCN PAM targeting sequence
  source 1..20: mol_type = other RNA
tgcttatttatttcagaatg

SEQ ID NO: 5274 - RNA, 20 nt, synthetic construct
  misc_feature 1..20: note = C9Orf72 ATCN PAM targeting sequence
  source 1..20: mol_type = other RNA
ttaattggctatcttgctta

SEQ ID NO: 5275 - RNA, 20 nt, synthetic construct
  misc_feature 1..20: note = C9Orf72 ATCN PAM targeting sequence
  source 1..20: mol_type = other RNA
aaattattttccacatttat

SEQ ID NO: 5276 - RNA, 20 nt, synthetic construct
  misc_feature 1..20: note = C9Orf72 ATCN PAM targeting sequence
  source 1..20: mol_type = other RNA
agaggacacttgtaagtttt

SEQ ID NO: 5277 - RNA, 20 nt, synthetic construct
  misc_feature 1..20: note = C9Orf72 ATCN PAM targeting sequence
  source 1..20: mol_type = other RNA
gtgactctaaagctgaggaa

SEQ ID NO: 5278 - RNA, 20 nt, synthetic construct
  misc_feature 1..20: note = C9Orf72 ATCN PAM targeting sequence
  source 1..20: mol_type = other RNA
caattccatcacttagtggc

SEQ ID NO: 5279 - RNA, 20 nt, synthetic construct
  misc_feature 1..20: note = C9Orf72 ATCN PAM targeting sequence
  source 1..20: mol_type = other RNA
cttagtggcctgtgtgatgt

SEQ ID NO: 5280 - RNA, 20 nt, synthetic construct
  misc_feature 1..20: note = C9Orf72 ATCN PAM targeting sequence
  source 1..20: mol_type = other RNA
cacaggccactaagtgatgg

SEQ ID NO: 5281 - RNA, 20 nt, synthetic construct
  misc_feature 1..20: note = C9Orf72 ATCN PAM targeting sequence
  source 1..20: mol_type = other RNA
ttaccatggagataataaca

SEQ ID NO: 5282 - RNA, 20 nt, synthetic construct
  misc_feature 1..20: note = C9Orf72 ATCN PAM targeting sequence
  source 1..20: mol_type = other RNA
ccatggtaaagatgagaaaa

SEQ ID NO: 5283 - RNA, 20 nt, synthetic construct
  misc_feature 1..20: note = C9Orf72 ATCN PAM targeting sequence
  source 1..20: mol_type = other RNA
tgaatctttagagaagctgg

SEQ ID NO: 5284 - RNA, 20 nt, synthetic construct
  misc_feature 1..20: note = C9Orf72 ATCN PAM targeting sequence
  source 1..20: mol_type = other RNA
taatggtttacatagaatgt

SEQ ID NO: 5285 - RNA, 20 nt, synthetic construct
  misc_feature 1..20: note = C9Orf72 ATCN PAM targeting sequence
  source 1..20: mol_type = other RNA
aaatctcagaccatttctcc

SEQ ID NO: 5286 - RNA, 20 nt, synthetic construct
  misc_feature 1..20: note = C9Orf72 ATCN PAM targeting sequence
  source 1..20: mol_type = other RNA
cagaccatttctccccctaa

SEQ ID NO: 5287 - RNA, 20 nt, synthetic construct
  misc_feature 1..20: note = C9Orf72 ATCN PAM targeting sequence
  source 1..20: mol_type = other RNA
ccatgtttcccctttattgc

SEQ ID NO: 5288 - RNA, 20 nt, synthetic construct
  misc_feature 1..20: note = C9Orf72 ATCN PAM targeting sequence
  source 1..20: mol_type = other RNA
gtacactaactattccaagg

SEQ ID NO: 5289 - RNA, 20 nt, synthetic construct
  misc_feature 1..20: note = C9Orf72 ATCN PAM targeting sequence
  source 1..20: mol_type = other RNA
ttgaaaatagcttggctata

SEQ ID NO: 5290 - RNA, 20 nt, synthetic construct
  misc_feature 1..20: note = C9Orf72 ATCN PAM targeting sequence
  source 1..20: mol_type = other RNA
ttaaatataattttaaaatg

SEQ ID NO: 5291 - RNA, 20 nt, synthetic construct
  misc_feature 1..20: note = C9Orf72 ATCN PAM targeting sequence
  source 1..20: mol_type = other RNA
tatctttcaagtcagttctt

SEQ ID NO: 5292 - RNA, 20 nt, synthetic construct
  misc_feature 1..20: note = C9Orf72 ATCN PAM targeting sequence
  source 1..20: mol_type = other RNA
ttcaagtcagttcttagact

SEQ ID NO: 5293 - RNA, 20 nt, synthetic construct
  misc_feature 1..20: note = C9Orf72 ATCN PAM targeting sequence
  source 1..20: mol_type = other RNA
taaacacagcacacataagt

SEQ ID NO: 5294 - RNA, 20 nt, synthetic construct
  misc_feature 1..20: note = C9Orf72 ATCN PAM targeting sequence
  source 1..20: mol_type = other RNA
ttggaaaatgtgaaataata

SEQ ID NO: 5295 - RNA, 20 nt, synthetic construct
  misc_feature 1..20: note = C9Orf72 ATCN PAM targeting sequence
  source 1..20: mol_type = other RNA
cagagacagaactattttct

SEQ ID NO: 5296 - RNA, 20 nt, synthetic construct
  misc_feature 1..20: note = C9Orf72 ATCN PAM targeting sequence
  source 1..20: mol_type = other RNA
aagtaaaaatattagcactc

SEQ ID NO: 5297 - RNA, 20 nt, synthetic construct
  misc_feature 1..20: note = C9Orf72 ATCN PAM targeting sequence
  source 1..20: mol_type = other RNA
accttctttttctgtttaga

SEQ ID NO: 5298 - RNA, 20 nt, synthetic construct
  misc_feature 1..20: note = C9Orf72 ATCN PAM targeting sequence
  source 1..20: mol_type = other RNA
aaacagaaaaagaaggtaga

SEQ ID NO: 5299 - RNA, 20 nt, synthetic construct
  misc_feature 1..20: note = C9Orf72 ATCN PAM targeting sequence
  source 1..20: mol_type = other RNA
gtcttgccagtggcaatgta

SEQ ID NO: 5300 - RNA, 20 nt, synthetic construct
  misc_feature 1..20: note = C9Orf72 ATCN PAM targeting sequence
  source 1..20: mol_type = other RNA
cagtagaggatattatgctg

SEQ ID NO: 5301 - RNA, 20 nt, synthetic construct
  misc_feature 1..20: note = C9Orf72 ATCN PAM targeting sequence
  source 1..20: mol_type = other RNA
tctactgagatgaagaacaa

SEQ ID NO: 5302 - RNA, 20 nt, synthetic construct
  misc_feature 1..20: note = C9Orf72 ATCN PAM targeting sequence
  source 1..20: mol_type = other RNA
gcataatatcctctactgag

SEQ ID NO: 5303 - RNA, 20 nt, synthetic construct
  misc_feature 1..20: note = C9Orf72 ATCN PAM targeting sequence
  source 1..20: mol_type = other RNA
ttttaggaaaaaaaaagttt

SEQ ID NO: 5304 - RNA, 20 nt, synthetic construct
  misc_feature 1..20: note = C9Orf72 ATCN PAM targeting sequence
  source 1..20: mol_type = other RNA
tttgtttgttgcaaacagtt

SEQ ID NO: 5305 - RNA, 20 nt, synthetic construct
  misc_feature 1..20: note = C9Orf72 ATCN PAM targeting sequence
  source 1..20: mol_type = other RNA
ccctgaattccctgtctccc

SEQ ID NO: 5306 - RNA, 20 nt, synthetic construct
  misc_feature 1..20: note = C9Orf72 ATCN PAM targeting sequence
  source 1..20: mol_type = other RNA
acagaactatagagttgaat

SEQ ID NO: 5307 - RNA, 20 nt, synthetic construct
  misc_feature 1..20: note = C9Orf72 ATCN PAM targeting sequence
  source 1..20: mol_type = other RNA
gaaacgaatccagtcatgtt

SEQ ID NO: 5308 - RNA, 20 nt, synthetic construct
  misc_feature 1..20: note = C9Orf72 ATCN PAM targeting sequence
  source 1..20: mol_type = other RNA
agtcatgttgctccctgctt

SEQ ID NO: 5309 - RNA, 20 nt, synthetic construct
  misc_feature 1..20: note = C9Orf72 ATCN PAM targeting sequence
  source 1..20: mol_type = other RNA
ctttttgttgcatttgttca

SEQ ID NO: 5310 - RNA, 20 nt, synthetic construct
  misc_feature 1..20: note = C9Orf72 ATCN PAM targeting sequence
  source 1..20: mol_type = other RNA
ttcttcacctctagacttaa

SEQ ID NO: 5311 - RNA, 20 nt, synthetic construct
  misc_feature 1..20: note = C9Orf72 ATCN PAM targeting sequence
  source 1..20: mol_type = other RNA
tatctagcaagtcgtaatgt

SEQ ID NO: 5312 - RNA, 20 nt, synthetic construct
  misc_feature 1..20: note = C9Orf72 ATCN PAM targeting sequence
  source 1..20: mol_type = other RNA
agcaagtcgtaatgtgtttg

SEQ ID NO: 5313 - RNA, 20 nt, synthetic construct
  misc_feature 1..20: note = C9Orf72 ATCN PAM targeting sequence
  source 1..20: mol_type = other RNA
ccctcctcctcaattctcca

SEQ ID NO: 5314 - RNA, 20 nt, synthetic construct
  misc_feature 1..20: note = C9Orf72 ATCN PAM targeting sequence
  source 1..20: mol_type = other RNA
gaaggcatgttcttctggag

SEQ ID NO: 5315 - RNA, 20 nt, synthetic construct
  misc_feature 1..20: note = C9Orf72 ATCN PAM targeting sequence
  source 1..20: mol_type = other RNA
cccactcccgcacacaccgc

SEQ ID NO: 5316 - RNA, 20 nt, synthetic construct
  misc_feature 1..20: note = C9Orf72 ATCN PAM targeting sequence
  source 1..20: mol_type = other RNA
aacaccaccccctcagacag

SEQ ID NO: 5317 - RNA, 20 nt, synthetic construct
  misc_feature 1..20: note = C9Orf72 ATCN PAM targeting sequence
  source 1..20: mol_type = other RNA
ctctaaagtaggtctcctca

SEQ ID NO: 5318 - RNA, 20 nt, synthetic construct
  misc_feature 1..20: note = C9Orf72 ATCN PAM targeting sequence
  source 1..20: mol_type = other RNA
agctgcacattcattttcgc

SEQ ID NO: 5319 - RNA, 20 nt, synthetic construct
  misc_feature 1..20: note = C9Orf72 ATCN PAM targeting sequence
  source 1..20: mol_type = other RNA
cagcctgggtgaccagtccg

SEQ ID NO: 5320 - RNA, 20 nt, synthetic construct
  misc_feature 1..20: note = C9Orf72 ATCN PAM targeting sequence
  source 1..20: mol_type = other RNA
gtcaatgaaagtgaagcagc

SEQ ID NO: 5321 - RNA, 20 nt, synthetic construct
  misc_feature 1..20: note = C9Orf72 ATCN PAM targeting sequence
  source 1..20: mol_type = other RNA
gtggctagcccctgtgtccc

SEQ ID NO: 5322 - RNA, 20 nt, synthetic construct
  misc_feature 1..20: note = C9Orf72 ATCN PAM targeting sequence
  source 1..20: mol_type = other RNA
tgcctgaaacaatttgtggt

SEQ ID NO: 5323 - RNA, 20 nt, synthetic construct
  misc_feature 1..20: note = C9Orf72 ATCN PAM targeting sequence
  source 1..20: mol_type = other RNA
cctcttaaaacaccacaaat

SEQ ID NO: 5324 - RNA, 20 nt, synthetic construct
  misc_feature 1..20: note = C9Orf72 ATCN PAM targeting sequence
  source 1..20: mol_type = other RNA
ttattgattttgttgctcaa

SEQ ID NO: 5325 - RNA, 20 nt, synthetic construct
  misc_feature 1..20: note = C9Orf72 ATCN PAM targeting sequence
  source 1..20: mol_type = other RNA
ataatgatagcattgtgtca

SEQ ID NO: 5326 - RNA, 20 nt, synthetic construct
  misc_feature 1..20: note = C9Orf72 ATCN PAM targeting sequence
  source 1..20: mol_type = other RNA
tttgagccttcaatgagttg

SEQ ID NO: 5327 - RNA, 20 nt, synthetic construct
  misc_feature 1..20: note = C9Orf72 ATCN PAM targeting sequence
  source 1..20: mol_type = other RNA
tcttccaaagttggagtgaa

SEQ ID NO: 5328 - RNA, 20 nt, synthetic construct
  misc_feature 1..20: note = C9Orf72 ATCN PAM targeting sequence
  source 1..20: mol_type = other RNA
tttcaaatcctgccactgct

SEQ ID NO: 5329 - RNA, 20 nt, synthetic construct
  misc_feature 1..20: note = C9Orf72 ATCN PAM targeting sequence
  source 1..20: mol_type = other RNA
tgccactgctttagcaacta

SEQ ID NO: 5330 - RNA, 20 nt, synthetic construct
  misc_feature 1..20: note = C9Orf72 ATCN PAM targeting sequence
  source 1..20: mol_type = other RNA
caagaaaccactttctttgc

SEQ ID NO: 5331 - RNA, 20 nt, synthetic construct
  misc_feature 1..20: note = C9Orf72 ATCN PAM targeting sequence
  source 1..20: mol_type = other RNA
attaaggtttttatcatgaa

SEQ ID NO: 5332 - RNA, 20 nt, synthetic construct
  misc_feature 1..20: note = C9Orf72 ATCN PAM targeting sequence
  source 1..20: mol_type = other RNA
tgaaattacagcagcaattc

SEQ ID NO: 5333 - RNA, 20 nt, synthetic construct
  misc_feature 1..20: note = C9Orf72 ATCN PAM targeting sequence
  source 1..20: mol_type = other RNA
tcaggctccagtaaatcatg

SEQ ID NO: 5334 - RNA, 20 nt, synthetic construct
  misc_feature 1..20: note = C9Orf72 ATCN PAM targeting sequence
  source 1..20: mol_type = other RNA
tgaatgttcctaatggcatc

SEQ ID NO: 5335 - RNA, 20 nt, synthetic construct
  misc_feature 1..20: note = C9Orf72 ATCN PAM targeting sequence
  source 1..20: mol_type = other RNA
tagctagatcttctagataa

SEQ ID NO: 5336 - RNA, 20 nt, synthetic construct
  misc_feature 1..20: note = C9Orf72 ATCN PAM targeting sequence
  source 1..20: mol_type = other RNA
agctaagatagctgatgaag

SEQ ID NO: 5337 - RNA, 20 nt, synthetic construct
  misc_feature 1..20: note = C9Orf72 ATCN PAM targeting sequence
  source 1..20: mol_type = other RNA
tctagataacttcctgcagc

SEQ ID NO: 5338 - RNA, 20 nt, synthetic construct
  misc_feature 1..20: note = C9Orf72 ATCN PAM targeting sequence
  source 1..20: mol_type = other RNA
agaagatctagctaagatag

SEQ ID NO: 5339 - RNA, 20 nt, synthetic construct
  misc_feature 1..20: note = C9Orf72 ATCN PAM targeting sequence
  source 1..20: mol_type = other RNA
gcacctgctccttcaccttc

SEQ ID NO: 5340 - RNA, 20 nt, synthetic construct
  misc_feature 1..20: note = C9Orf72 ATCN PAM targeting sequence
  source 1..20: mol_type = other RNA
aaggttagaaatgagtaagt

SEQ ID NO: 5341 - RNA, 20 nt, synthetic construct
  misc_feature 1..20: note = C9Orf72 ATCN PAM targeting sequence
  source 1..20: mol_type = other RNA
aagatcactgatcacagatc

SEQ ID NO: 5342 - RNA, 20 nt, synthetic construct
  misc_feature 1..20: note = C9Orf72 ATCN PAM targeting sequence
  source 1..20: mol_type = other RNA
ttgatgttattattgtaact

SEQ ID NO: 5343 - RNA, 20 nt, synthetic construct
  misc_feature 1..20: note = C9Orf72 ATCN PAM targeting sequence
  source 1..20: mol_type = other RNA
ctgatcacagatcacagtaa

SEQ ID NO: 5344 - RNA, 20 nt, synthetic construct
  misc_feature 1..20: note = C9Orf72 ATCN PAM targeting sequence
  source 1..20: mol_type = other RNA
gtgatctttgatgttattat

SEQ ID NO: 5345 - RNA, 20 nt, synthetic construct
  misc_feature 1..20: note = C9Orf72 ATCN PAM targeting sequence
  source 1..20: mol_type = other RNA
cagatcacagtaataggtat

SEQ ID NO: 5346 - RNA, 20 nt, synthetic construct
  misc_feature 1..20: note = C9Orf72 ATCN PAM targeting sequence
  source 1..20: mol_type = other RNA
gtgatcagtgatctttgatg

SEQ ID NO: 5347 - RNA, 20 nt, synthetic construct
  misc_feature 1..20: note = C9Orf72 ATCN PAM targeting sequence
  source 1..20: mol_type = other RNA
cagtaataggtataataata

SEQ ID NO: 5348 - RNA, 20 nt, synthetic construct
  misc_feature 1..20: note = C9Orf72 ATCN PAM targeting sequence
  source 1..20: mol_type = other RNA
tgagcatagctgtcatacct

SEQ ID NO: 5349 - RNA, 20 nt, synthetic construct
  misc_feature 1..20: note = C9Orf72 ATCN PAM targeting sequence
  source 1..20: mol_type = other RNA
gagcacctgaatcttgagca

SEQ ID NO: 5350 - RNA, 20 nt, synthetic construct
  misc_feature 1..20: note = C9Orf72 ATCN PAM targeting sequence
  source 1..20: mol_type = other RNA
ttttgaaagttctgctactt

SEQ ID NO: 5351 - RNA, 20 nt, synthetic construct
  misc_feature 1..20: note = C9Orf72 ATCN PAM targeting sequence
  source 1..20: mol_type = other RNA
gttttcttacctacttaaca

SEQ ID NO: 5352 - RNA, 20 nt, synthetic construct
  misc_feature 1..20: note = C9Orf72 ATCN PAM targeting sequence
  source 1..20: mol_type = other RNA
aactattgtgaagaagtaac

SEQ ID NO: 5353 - RNA, 20 nt, synthetic construct
  misc_feature 1..20: note = C9Orf72 ATCN PAM targeting sequence
  source 1..20: mol_type = other RNA
agaagttattcagagccaag

SEQ ID NO: 5354 - RNA, 20 nt, synthetic construct
  misc_feature 1..20: note = C9Orf72 ATCN PAM targeting sequence
  source 1..20: mol_type = other RNA
tttggaagcacatttgaaac

SEQ ID NO: 5355 - RNA, 20 nt, synthetic construct
  misc_feature 1..20: note = C9Orf72 ATCN PAM targeting sequence
  source 1..20: mol_type = other RNA
cttaaagaatgaacatttga

SEQ ID NO: 5356 - RNA, 20 nt, synthetic construct
  misc_feature 1..20: note = C9Orf72 ATCN PAM targeting sequence
  source 1..20: mol_type = other RNA
tcaaatgttcattctttaag

SEQ ID NO: 5357 - RNA, 20 nt, synthetic construct
  misc_feature 1..20: note = C9Orf72 ATCN PAM targeting sequence
  source 1..20: mol_type = other RNA
cgagaatgcattcttaacat

SEQ ID NO: 5358 - RNA, 20 nt, synthetic construct
  misc_feature 1..20: note = C9Orf72 ATCN PAM targeting sequence
  source 1..20: mol_type = other RNA
tcccgagaatgcattcttaa

SEQ ID NO: 5359 - RNA, 20 nt, synthetic construct
  misc_feature 1..20: note = C9Orf72 ATCN PAM targeting sequence
  source 1..20: mol_type = other RNA
tgtgttggggagaggagcag

SEQ ID NO: 5360 - RNA, 20 nt, synthetic construct
  misc_feature 1..20: note = C9Orf72 ATCN PAM targeting sequence
  source 1..20: mol_type = other RNA
cagctgggtgccatggctca

SEQ ID NO: 5361 - RNA, 20 nt, synthetic construct
  misc_feature 1..20: note = C9Orf72 ATCN PAM targeting sequence
  source 1..20: mol_type = other RNA
gttgttcaaggatacaccat

SEQ ID NO: 5362 - RNA, 20 nt, synthetic construct
  misc_feature 1..20: note = C9Orf72 ATCN PAM targeting sequence
  source 1..20: mol_type = other RNA
ttgaacaacagataagcttt

SEQ ID NO: 5363 - RNA, 20 nt, synthetic construct
  misc_feature 1..20: note = C9Orf72 ATCN PAM targeting sequence
  source 1..20: mol_type = other RNA
aataaatggtgtatccttga

SEQ ID NO: 5364 - RNA, 20 nt, synthetic construct
  misc_feature 1..20: note = C9Orf72 ATCN PAM targeting sequence
  source 1..20: mol_type = other RNA
aggaaacctcagaggggtga

SEQ ID NO: 5365 - RNA, 20 nt, synthetic construct
  misc_feature 1..20: note = C9Orf72 ATCN PAM targeting sequence
  source 1..20: mol_type = other RNA
agcgtcttaagtacattcac

SEQ ID NO: 5366 - RNA, 20 nt, synthetic construct
  misc_feature 1..20: note = C9Orf72 ATCN PAM targeting sequence
  source 1..20: mol_type = other RNA
actcacaaaaacattatcaa

SEQ ID NO: 5367 - RNA, 20 nt, synthetic construct
  misc_feature 1..20: note = C9Orf72 ATCN PAM targeting sequence
  source 1..20: mol_type = other RNA
agaattctgtattcttgctt

SEQ ID NO: 5368 - RNA, 20 nt, synthetic construct
  misc_feature 1..20: note = C9Orf72 ATCN PAM targeting sequence
  source 1..20: mol_type = other RNA
tacgacaccacaaccttcta

SEQ ID NO: 5369 - RNA, 20 nt, synthetic construct
  misc_feature 1..20: note = C9Orf72 ATCN PAM targeting sequence
  source 1..20: mol_type = other RNA
agtaagcatcctacgacacc

SEQ ID NO: 5370 - RNA, 20 nt, synthetic construct
  misc_feature 1..20: note = C9Orf72 ATCN PAM targeting sequence
  source 1..20: mol_type = other RNA
gaatattcctggccaggaat

SEQ ID NO: 5371 - RNA, 20 nt, synthetic construct
  misc_feature 1..20: note = C9Orf72 ATCN PAM targeting sequence
  source 1..20: mol_type = other RNA
gggtgtcgatcaaatgtggc

SEQ ID NO: 5372 - RNA, 20 nt, synthetic construct
  misc_feature 1..20: note = C9Orf72 ATCN PAM targeting sequence
  source 1..20: mol_type = other RNA
acacccagattcctggccag

SEQ ID NO: 5373 - RNA, 20 nt, synthetic construct
  misc_feature 1..20: note = C9Orf72 ATCN PAM targeting sequence
  source 1..20: mol_type = other RNA
aatgtggcagtacctttaaa

SEQ ID NO: 5374 - RNA, 20 nt, synthetic construct
  misc_feature 1..20: note = C9Orf72 ATCN PAM targeting sequence
  source 1..20: mol_type = other RNA
cattattaagctgtgtatat

SEQ ID NO: 5375 - RNA, 20 nt, synthetic construct
  misc_feature 1..20: note = C9Orf72 ATCN PAM targeting sequence
  source 1..20: mol_type = other RNA
cttaattctcaataaaaaga

SEQ ID NO: 5376 - RNA, 20 nt, synthetic construct
  misc_feature 1..20: note = C9Orf72 ATCN PAM targeting sequence
  source 1..20: mol_type = other RNA
tttttacactctttttattg

SEQ ID NO: 5377 - RNA, 20 nt, synthetic construct
  misc_feature 1..20: note = C9Orf72 ATCN PAM targeting sequence
  source 1..20: mol_type = other RNA
agcctataattattctgcca

SEQ ID NO: 5378 - RNA, 20 nt, synthetic construct
  misc_feature 1..20: note = C9Orf72 ATCN PAM targeting sequence
  source 1..20: mol_type = other RNA
ataaagtacagttatagaac

SEQ ID NO: 5379 - RNA, 20 nt, synthetic construct
  misc_feature 1..20: note = C9Orf72 ATCN PAM targeting sequence
  source 1..20: mol_type = other RNA
tgcaaaaatttttacatagg

SEQ ID NO: 5380 - RNA, 20 nt, synthetic construct
  misc_feature 1..20: note = C9Orf72 ATCN PAM targeting sequence
  source 1..20: mol_type = other RNA
aaattataaggcaaaaggtg

SEQ ID NO: 5381 - RNA, 20 nt, synthetic construct
  misc_feature 1..20: note = C9Orf72 ATCN PAM targeting sequence
  source 1..20: mol_type = other RNA
gtgtttgacatgcaaatatt

SEQ ID NO: 5382 - RNA, 20 nt, synthetic construct
  misc_feature 1..20: note = C9Orf72 ATCN PAM targeting sequence
  source 1..20: mol_type = other RNA
agcccagggggcttgtaatc

SEQ ID NO: 5383 - RNA, 20 nt, synthetic construct
  misc_feature 1..20: note = C9Orf72 ATCN PAM targeting sequence
  source 1..20: mol_type = other RNA
agctagtgacaaggctatgc

SEQ ID NO: 5384 - RNA, 20 nt, synthetic construct
  misc_feature 1..20: note = C9Orf72 ATCN PAM targeting sequence
  source 1..20: mol_type = other RNA
ttagtaaggcctttgccctg

SEQ ID NO: 5385 - RNA, 20 nt, synthetic construct
  misc_feature 1..20: note = C9Orf72 ATCN PAM targeting sequence
  source 1..20: mol_type = other RNA
gaccacaataaacatgctga

SEQ ID NO: 5386 - RNA, 20 nt, synthetic construct
  misc_feature 1..20: note = C9Orf72 ATCN PAM targeting sequence
  source 1..20: mol_type = other RNA
gtctctgctataattattag

SEQ ID NO: 5387 - RNA, 20 nt, synthetic construct
  misc_feature 1..20: note = C9Orf72 ATCN PAM targeting sequence
  source 1..20: mol_type = other RNA
ctggacttcaagcattttgc

SEQ ID NO: 5388 - RNA, 20 nt, synthetic construct
  misc_feature 1..20: note = C9Orf72 ATCN PAM targeting sequence
  source 1..20: mol_type = other RNA
ataagctcatatgtgtccaa

SEQ ID NO: 5389 - RNA, 20 nt, synthetic construct
  misc_feature 1..20: note = C9Orf72 ATCN PAM targeting sequence
  source 1..20: mol_type = other RNA
aggggaaaatgtattggagg

SEQ ID NO: 5390 - RNA, 20 nt, synthetic construct
  misc_feature 1..20: note = C9Orf72 ATCN PAM targeting sequence
  source 1..20: mol_type = other RNA
aaggatttaatgctcaaaat

SEQ ID NO: 5391 - RNA, 20 nt, synthetic construct
  misc_feature 1..20: note = C9Orf72 ATCN PAM targeting sequence
  source 1..20: mol_type = other RNA
ttagatatgcttaatttact

SEQ ID NO: 5392 - RNA, 20 nt, synthetic construct
  misc_feature 1..20: note = C9Orf72 ATCN PAM targeting sequence
  source 1..20: mol_type = other RNA
ccttggataattggcttatg

SEQ ID NO: 5393 - RNA, 20 nt, synthetic construct
  misc_feature 1..20: note = C9Orf72 ATCN PAM targeting sequence
  source 1..20: mol_type = other RNA
aaggtgattttgagcattaa

SEQ ID NO: 5394 - RNA, 20 nt, synthetic construct
  misc_feature 1..20: note = C9Orf72 ATCN PAM targeting sequence
  source 1..20: mol_type = other RNA
gtcaataattgatgaagcct

SEQ ID NO: 5395 - RNA, 20 nt, synthetic construct
  misc_feature 1..20: note = C9Orf72 ATCN PAM targeting sequence
  source 1..20: mol_type = other RNA
attattgacagatgtaccct

SEQ ID NO: 5396 - RNA, 20 nt, synthetic construct
  misc_feature 1..20: note = C9Orf72 ATCN PAM targeting sequence
  source 1..20: mol_type = other RNA
tatttggaatcaagtttatt

SEQ ID NO: 5397 - RNA, 20 nt, synthetic construct
  misc_feature 1..20: note = C9Orf72 ATCN PAM targeting sequence
  source 1..20: mol_type = other RNA
agtttattttcaagctgctt

SEQ ID NO: 5398 - RNA, 20 nt, synthetic construct
  misc_feature 1..20: note = C9Orf72 ATCN PAM targeting sequence
  source 1..20: mol_type = other RNA
agacttcaaaagcagcttga

SEQ ID NO: 5399 - RNA, 20 nt, synthetic construct
  misc_feature 1..20: note = C9Orf72 ATCN PAM targeting sequence
  source 1..20: mol_type = other RNA
catttgtttttttaagtcca

SEQ ID NO: 5400 - RNA, 20 nt, synthetic construct
  misc_feature 1..20: note = C9Orf72 ATCN PAM targeting sequence
  source 1..20: mol_type = other RNA
ggtttgtcagcaaagcatat

SEQ ID NO: 5401 - RNA, 20 nt, synthetic construct
  misc_feature 1..20: note = C9Orf72 ATCN PAM targeting sequence
  source 1..20: mol_type = other RNA
actgcgtgctgagcactgcg

SEQ ID NO: 5402 - RNA, 20 nt, synthetic construct
  misc_feature 1..20: note = C9Orf72 ATCN PAM targeting sequence
  source 1..20: mol_type = other RNA
ggcaggtgttactacaattt

SEQ ID NO: 5403 - RNA, 20 nt, synthetic construct
  misc_feature 1..20: note = C9Orf72 ATCN PAM targeting sequence
  source 1..20: mol_type = other RNA
gtagaaattgtagtaacacc

SEQ ID NO: 5404 - RNA, 20 nt, synthetic construct
  misc_feature 1..20: note = C9Orf72 ATCN PAM targeting sequence
  source 1..20: mol_type = other RNA
acatttctgagcctcagttc

SEQ ID NO: 5405 - RNA, 20 nt, synthetic construct
  misc_feature 1..20: note = C9Orf72 ATCN PAM targeting sequence
  source 1..20: mol_type = other RNA
ccagaacaccactgaacata

SEQ ID NO: 5406 - RNA, 20 nt, synthetic construct
  misc_feature 1..20: note = C9Orf72 ATCN PAM targeting sequence
  source 1..20: mol_type = other RNA
ctatgtatttggtattgaga

SEQ ID NO: 5407 - RNA, 20 nt, synthetic construct
  misc_feature 1..20: note = C9Orf72 ATCN PAM targeting sequence
  source 1..20: mol_type = other RNA
caataccaaatacatagaga

SEQ ID NO: 5408 - RNA, 20 nt, synthetic construct
  misc_feature 1..20: note = C9Orf72 ATCN PAM targeting sequence
  source 1..20: mol_type = other RNA
gcaaacctcttctgggtctc

SEQ ID NO: 5409 - RNA, 20 nt, synthetic construct
  misc_feature 1..20: note = C9Orf72 ATCN PAM targeting sequence
  source 1..20: mol_type = other RNA
tctatgttaggcatgttctt

SEQ ID NO: 5410 - RNA, 20 nt, synthetic construct
  misc_feature 1..20: note = C9Orf72 ATCN PAM targeting sequence
  source 1..20: mol_type = other RNA
ctacgattaatactgcattt

SEQ ID NO: 5411 - RNA, 20 nt, synthetic construct
  misc_feature 1..20: note = C9Orf72 ATCN PAM targeting sequence
  source 1..20: mol_type = other RNA
tagtgatatcttctatgtta

SEQ ID NO: 5412 - RNA, 20 nt, synthetic construct
  misc_feature 1..20: note = C9Orf72 ATCN PAM targeting sequence
  source 1..20: mol_type = other RNA
ctgtaatttttctgaacatt

SEQ ID NO: 5413 - RNA, 20 nt, synthetic construct
  misc_feature 1..20: note = C9Orf72 ATCN PAM targeting sequence
  source 1..20: mol_type = other RNA
gaactataatgttcagaaaa

SEQ ID NO: 5414 - RNA, 20 nt, synthetic construct
  misc_feature 1..20: note = C9Orf72 ATCN PAM targeting sequence
  source 1..20: mol_type = other RNA
gtcccatgccaaaataccct

SEQ ID NO: 5415 - RNA, 20 nt, synthetic construct
  misc_feature 1..20: note = C9Orf72 ATCN PAM targeting sequence
  source 1..20: mol_type = other RNA
ctaaaataattattctgaat

SEQ ID NO: 5416 - RNA, 20 nt, synthetic construct
  misc_feature 1..20: note = C9Orf72 ATCN PAM targeting sequence
  source 1..20: mol_type = other RNA
gcccttgagttctagttatt

SEQ ID NO: 5417 - RNA, 20 nt, synthetic construct
  misc_feature 1..20: note = C9Orf72 ATCN PAM targeting sequence
  source 1..20: mol_type = other RNA
tttcattagaaagttcaaaa

SEQ ID NO: 5418 - RNA, 20 nt, synthetic construct
  misc_feature 1..20: note = C9Orf72 ATCN PAM targeting sequence
  source 1..20: mol_type = other RNA
ctttgcctcattttttttca

SEQ ID NO: 5419 - RNA, 20 nt, synthetic construct
  misc_feature 1..20: note = C9Orf72 ATCN PAM targeting sequence
  source 1..20: mol_type = other RNA
ctcctaattgtcagggcaaa

SEQ ID NO: 5420 - RNA, 20 nt, synthetic construct
  misc_feature 1..20: note = C9Orf72 ATCN PAM targeting sequence
  source 1..20: mol_type = other RNA
agtgtatatttgccctgaca

SEQ ID NO: 5421 - RNA, 20 nt, synthetic construct
  misc_feature 1..20: note = C9Orf72 ATCN PAM targeting sequence
  source 1..20: mol_type = other RNA
gcatgagtcaaacagtaatt

SEQ ID NO: 5422 - RNA, 20 nt, synthetic construct
  misc_feature 1..20: note = C9Orf72 ATCN PAM targeting sequence
  source 1..20: mol_type = other RNA
caatcggcatgagtcaaaca

SEQ ID NO: 5423 - RNA, 20 nt, synthetic construct
  misc_feature 1..20: note = C9Orf72 ATCN PAM targeting sequence
  source 1..20: mol_type = other RNA
cattgtatggatgtgcataa

SEQ ID NO: 5424 - RNA, 20 nt, synthetic construct
  misc_feature 1..20: note = C9Orf72 ATCN PAM targeting sequence
  source 1..20: mol_type = other RNA
atacaatgggatgctactca

SEQ ID NO: 5425 - RNA, 20 nt, synthetic construct
  misc_feature 1..20: note = C9Orf72 ATCN PAM targeting sequence
  source 1..20: mol_type = other RNA
tggaaagattaatgtcattg

SEQ ID NO: 5426 - RNA, 20 nt, synthetic construct
  misc_feature 1..20: note = C9Orf72 ATCN PAM targeting sequence
  source 1..20: mol_type = other RNA
ttccatgatgtcactcagtc

SEQ ID NO: 5427 - RNA, 20 nt, synthetic construct
  misc_feature 1..20: note = C9Orf72 TTCN PAM targeting sequence
  source 1..20: mol_type = other RNA
tcatcaatacagtagagatg

SEQ ID NO: 5428 - RNA, 20 nt, synthetic construct
  misc_feature 1..20: note = C9Orf72 TTCN PAM targeting sequence
  source 1..20: mol_type = other RNA
ctgagggtttttcctcatca

SEQ ID NO: 5429 - RNA, 20 nt, synthetic construct
  misc_feature 1..20: note = C9Orf72 TTCN PAM targeting sequence
  source 1..20: mol_type = other RNA
atgtgacctggtaaggtact

SEQ ID NO: 5430 - RNA, 20 nt, synthetic construct
  misc_feature 1..20: note = C9Orf72 TTCN PAM targeting sequence
  source 1..20: mol_type = other RNA
actacaccatgtgattgtag

SEQ ID NO: 5431 - RNA, 20 nt, synthetic construct
  misc_feature 1..20: note = C9Orf72 TTCN PAM targeting sequence
  source 1..20: mol_type = other RNA
taagactatcttagaggctt

SEQ ID NO: 5432 - RNA, 20 nt, synthetic construct
  misc_feature 1..20: note = C9Orf72 TTCN PAM targeting sequence
  source 1..20: mol_type = other RNA
tgaattttcaaaatgccaga

SEQ ID NO: 5433 - RNA, 20 nt, synthetic construct
  misc_feature 1..20: note = C9Orf72 TTCN PAM targeting sequence
  source 1..20: mol_type = other RNA
tgaatgactgcaaccaccta

SEQ ID NO: 5434 - RNA, 20 nt, synthetic construct
  misc_feature 1..20: note = C9Orf72 TTCN PAM targeting sequence
  source 1..20: mol_type = other RNA
aaatgccagatttttttctt

SEQ ID NO: 5435 - RNA, 20 nt, synthetic construct
  misc_feature 1..20: note = C9Orf72 TTCN PAM targeting sequence
  source 1..20: mol_type = other RNA
ttatccagactgatgccagt

SEQ ID NO: 5436 - RNA, 20 nt, synthetic construct
  misc_feature 1..20: note = C9Orf72 TTCN PAM targeting sequence
  source 1..20: mol_type = other RNA
aactggcatcagtctggata

SEQ ID NO: 5437 - RNA, 20 nt, synthetic construct
  misc_feature 1..20: note = C9Orf72 TTCN PAM targeting sequence
  source 1..20: mol_type = other RNA
agtatttgcccattgtacct

SEQ ID NO: 5438 - RNA, 20 nt, synthetic construct
  misc_feature 1..20: note = C9Orf72 TTCN PAM targeting sequence
  source 1..20: mol_type = other RNA
agtgtccatactctctcagt

SEQ ID NO: 5439 - RNA, 20 nt, synthetic construct
  misc_feature 1..20: note = C9Orf72 TTCN PAM targeting sequence
  source 1..20: mol_type = other RNA
gagaggacagggtacttatt

SEQ ID NO: 5440 - RNA, 20 nt, synthetic construct
  misc_feature 1..20: note = C9Orf72 TTCN PAM targeting sequence
  source 1..20: mol_type = other RNA
aggtcactgagatgcaggat

SEQ ID NO: 5441 - RNA, 20 nt, synthetic construct
  misc_feature 1..20: note = C9Orf72 TTCN PAM targeting sequence
  source 1..20: mol_type = other RNA
tgggatgcctcttaaattca

SEQ ID NO: 5442 - RNA, 20 nt, synthetic construct
  misc_feature 1..20: note = C9Orf72 TTCN PAM targeting sequence
  source 1..20: mol_type = other RNA
taaagggaatgtatggttga

SEQ ID NO: 5443 - RNA, 20 nt, synthetic construct
  misc_feature 1..20: note = C9Orf72 TTCN PAM targeting sequence
  source 1..20: mol_type = other RNA
ctttatgaatttaagaggca

SEQ ID NO: 5444 - RNA, 20 nt, synthetic construct
  misc_feature 1..20: note = C9Orf72 TTCN PAM targeting sequence
  source 1..20: mol_type = other RNA
accatacattccctttatga

SEQ ID NO: 5445 - RNA, 20 nt, synthetic construct
  misc_feature 1..20: note = C9Orf72 TTCN PAM targeting sequence
  source 1..20: mol_type = other RNA
gatctgctatttcaaccata

SEQ ID NO: 5446 - RNA, 20 nt, synthetic construct
  misc_feature 1..20: note = C9Orf72 TTCN PAM targeting sequence
  source 1..20: mol_type = other RNA
tgatgtttctgatctgctat

SEQ ID NO: 5447 - RNA, 20 nt, synthetic construct
  misc_feature 1..20: note = C9Orf72 TTCN PAM targeting sequence
  source 1..20: mol_type = other RNA
aagctctgcaagactctgca

SEQ ID NO: 5448 - RNA, 20 nt, synthetic construct
  misc_feature 1..20: note = C9Orf72 TTCN PAM targeting sequence
  source 1..20: mol_type = other RNA
agcacttgcccactgggtgg

SEQ ID NO: 5449 - RNA, 20 nt, synthetic construct
  misc_feature 1..20: note = C9Orf72 TTCN PAM targeting sequence
  source 1..20: mol_type = other RNA
atcgctttcttcatcagagc

SEQ ID NO: 5450 - RNA, 20 nt, synthetic construct
  misc_feature 1..20: note = C9Orf72 TTCN PAM targeting sequence
  source 1..20: mol_type = other RNA
tcatcagagccctcccgcag

SEQ ID NO: 5451 - RNA, 20 nt, synthetic construct
  misc_feature 1..20: note = C9Orf72 TTCN PAM targeting sequence
  source 1..20: mol_type = other RNA
tcagagccctcccgcaggct

SEQ ID NO: 5452 - RNA, 20 nt, synthetic construct
  misc_feature 1..20: note = C9Orf72 TTCN PAM targeting sequence
  source 1..20: mol_type = other RNA
ttcctctctgagagtgtggc

SEQ ID NO: 5453 - RNA, 20 nt, synthetic construct
  misc_feature 1..20: note = C9Orf72 TTCN PAM targeting sequence
  source 1..20: mol_type = other RNA
tctctgagagtgtggccaaa

SEQ ID NO: 5454 - RNA, 20 nt, synthetic construct
  misc_feature 1..20: note = C9Orf72 TTCN PAM targeting sequence
  source 1..20: mol_type = other RNA
acccagggtgctctttacaa

SEQ ID NO: 5455 - RNA, 20 nt, synthetic construct
  misc_feature 1..20: note = C9Orf72 TTCN PAM targeting sequence
  source 1..20: mol_type = other RNA
ttgtaaagagcaccctgggt

SEQ ID NO: 5456 - RNA, 20 nt, synthetic construct
  misc_feature 1..20: note = C9Orf72 TTCN PAM targeting sequence
  source 1..20: mol_type = other RNA
gtaactccagcaatggcaaa

SEQ ID NO: 5457 - RNA, 20 nt, synthetic construct
  misc_feature 1..20: note = C9Orf72 TTCN PAM targeting sequence
  source 1..20: mol_type = other RNA
ttagtggcctgccttaatac

SEQ ID NO: 5458 - RNA, 20 nt, synthetic construct
  misc_feature 1..20: note = C9Orf72 TTCN PAM targeting sequence
  source 1..20: mol_type = other RNA
gctgaggtgatgagaagctt

SEQ ID NO: 5459 - RNA, 20 nt, synthetic construct
  misc_feature 1..20: note = C9Orf72 TTCN PAM targeting sequence
  source 1..20: mol_type = other RNA
catcacctcagcggaagcct

SEQ ID NO: 5460 - RNA, 20 nt, synthetic construct
  misc_feature 1..20: note = C9Orf72 TTCN PAM targeting sequence
  source 1..20: mol_type = other RNA
gagaaagttcctggtgactg

SEQ ID NO: 5461 - RNA, 20 nt, synthetic construct
  misc_feature 1..20: note = C9Orf72 TTCN PAM targeting sequence
  source 1..20: mol_type = other RNA
cagaagcttctcatcacctc

SEQ ID NO: 5462 - RNA, 20 nt, synthetic construct
  misc_feature 1..20: note = C9Orf72 TTCN PAM targeting sequence
  source 1..20: mol_type = other RNA
tggtgactgtgcttggcttg

SEQ ID NO: 5463 - RNA, 20 nt, synthetic construct
  misc_feature 1..20: note = C9Orf72 TTCN PAM targeting sequence
  source 1..20: mol_type = other RNA
tatacaagccaagcacagtc

SEQ ID NO: 5464 - RNA, 20 nt, synthetic construct
  misc_feature 1..20: note = C9Orf72 TTCN PAM targeting sequence
  source 1..20: mol_type = other RNA
aaaacacctgaatttttcaa

SEQ ID NO: 5465 - RNA, 20 nt, synthetic construct
  misc_feature 1..20: note = C9Orf72 TTCN PAM targeting sequence
  source 1..20: mol_type = other RNA
ggtgtttttgaaaatcttca

SEQ ID NO: 5466 - RNA, 20 nt, synthetic construct
  misc_feature 1..20: note = C9Orf72 TTCN PAM targeting sequence
  source 1..20: mol_type = other RNA
aaatgtgtttttaacagaag

SEQ ID NO: 5467 - RNA, 20 nt, synthetic construct
  misc_feature 1..20: note = C9Orf72 TTCN PAM targeting sequence
  source 1..20: mol_type = other RNA
gttaaaaacacattttgaaa

SEQ ID NO: 5468 - RNA, 20 nt, synthetic construct
  misc_feature 1..20: note = C9Orf72 TTCN PAM targeting sequence
  source 1..20: mol_type = other RNA
actttgatcttctgttaaaa

SEQ ID NO: 5469 - RNA, 20 nt, synthetic construct
  misc_feature 1..20: note = C9Orf72 TTCN PAM targeting sequence
  source 1..20: mol_type = other RNA
tttgttttaaaataaagcag

SEQ ID NO: 5470 - RNA, 20 nt, synthetic construct
  misc_feature 1..20: note = C9Orf72 TTCN PAM targeting sequence
  source 1..20: mol_type = other RNA
atgaagtccctggttctcca

SEQ ID NO: 5471 - RNA, 20 nt, synthetic construct
  misc_feature 1..20: note = C9Orf72 TTCN PAM targeting sequence
  source 1..20: mol_type = other RNA
tagaatcaattactgcttta

SEQ ID NO: 5472 - RNA, 20 nt, synthetic construct
  misc_feature 1..20: note = C9Orf72 TTCN PAM targeting sequence
  source 1..20: mol_type = other RNA
ccactgtcaacaaaacaaat

SEQ ID NO: 5473 - RNA, 20 nt, synthetic construct
  misc_feature 1..20: note = C9Orf72 TTCN PAM targeting sequence
  source 1..20: mol_type = other RNA
atcctctgaagcctgtcaaa

SEQ ID NO: 5474 - RNA, 20 nt, synthetic construct
  misc_feature 1..20: note = C9Orf72 TTCN PAM targeting sequence
  source 1..20: mol_type = other RNA
gaggatggaatttgttttgt

SEQ ID NO: 5475 - RNA, 20 nt, synthetic construct
  misc_feature 1..20: note = C9Orf72 TTCN PAM targeting sequence
  source 1..20: mol_type = other RNA
ttgacaggcttcagaggatg

SEQ ID NO: 5476 - RNA, 20 nt, synthetic construct
  misc_feature 1..20: note = C9Orf72 TTCN PAM targeting sequence
  source 1..20: mol_type = other RNA
gcaggaggtgagcagggggc

SEQ ID NO: 5477 - RNA, 20 nt, synthetic construct
  misc_feature 1..20: note = C9Orf72 TTCN PAM targeting sequence
  source 1..20: mol_type = other RNA
ctcccactcaccacaccagc

SEQ ID NO: 5478 - RNA, 20 nt, synthetic construct
  misc_feature 1..20: note = C9Orf72 TTCN PAM targeting sequence
  source 1..20: mol_type = other RNA
ccaggtctccaactggccag

SEQ ID NO: 5479 - RNA, 20 nt, synthetic construct
  misc_feature 1..20: note = C9Orf72 TTCN PAM targeting sequence
  source 1..20: mol_type = other RNA
agtggtttctttcttatatc

SEQ ID NO: 5480 - RNA, 20 nt, synthetic construct
  misc_feature 1..20: note = C9Orf72 TTCN PAM targeting sequence
  source 1..20: mol_type = other RNA
ttcttatatctggtaaatat

SEQ ID NO: 5481 - RNA, 20 nt, synthetic construct
  misc_feature 1..20: note = C9Orf72 TTCN PAM targeting sequence
  source 1..20: mol_type = other RNA
tatatctggtaaatattttc

SEQ ID NO: 5482 - RNA, 20 nt, synthetic construct
  misc_feature 1..20: note = C9Orf72 TTCN PAM targeting sequence
  source 1..20: mol_type = other RNA
gcccttctctgcctggcaaa

SEQ ID NO: 5483 - RNA, 20 nt, synthetic construct
  misc_feature 1..20: note = C9Orf72 TTCN PAM targeting sequence
  source 1..20: mol_type = other RNA
ctgcctggcaaattttgaca

SEQ ID NO: 5484 - RNA, 20 nt, synthetic construct
  misc_feature 1..20: note = C9Orf72 TTCN PAM targeting sequence
  source 1..20: mol_type = other RNA
tgggtatctccatcactttg

SEQ ID NO: 5485 - RNA, 20 nt, synthetic construct
  misc_feature 1..20: note = C9Orf72 TTCN PAM targeting sequence
  source 1..20: mol_type = other RNA
atcacattggaattcatcat

SEQ ID NO: 5486 - RNA, 20 nt, synthetic construct
  misc_feature 1..20: note = C9Orf72 TTCN PAM targeting sequence
  source 1..20: mol_type = other RNA
aatgtgatagaatgcaaatg

SEQ ID NO: 5487 - RNA, 20 nt, synthetic construct
  misc_feature 1..20: note = C9Orf72 TTCN PAM targeting sequence
  source 1..20: mol_type = other RNA
tcatttcatttttgcctgaa

SEQ ID NO: 5488 - RNA, 20 nt, synthetic construct
  misc_feature 1..20: note = C9Orf72 TTCN PAM targeting sequence
  source 1..20: mol_type = other RNA
cactaaccattttaaagccg

SEQ ID NO: 5489 - RNA, 20 nt, synthetic construct
  misc_feature 1..20: note = C9Orf72 TTCN PAM targeting sequence
  source 1..20: mol_type = other RNA
cgtatataaaggaaattggg

SEQ ID NO: 5490 - RNA, 20 nt, synthetic construct
  misc_feature 1..20: note = C9Orf72 TTCN PAM targeting sequence
  source 1..20: mol_type = other RNA
tttatatacgtgaactcctc

SEQ ID NO: 5491 - RNA, 20 nt, synthetic construct
  misc_feature 1..20: note = C9Orf72 TTCN PAM targeting sequence
  source 1..20: mol_type = other RNA
ggggtgtgtacgcatgagta

SEQ ID NO: 5492 - RNA, 20 nt, synthetic construct
  misc_feature 1..20: note = C9Orf72 TTCN PAM targeting sequence
  source 1..20: mol_type = other RNA
attacttcaggggtgtgtac

SEQ ID NO: 5493 - RNA, 20 nt, synthetic construct
  misc_feature 1..20: note = C9Orf72 TTCN PAM targeting sequence
  source 1..20: mol_type = other RNA
gtttccattacttcaggggt

SEQ ID NO: 5494 - RNA, 20 nt, synthetic construct
  misc_feature 1..20: note = C9Orf72 TTCN PAM targeting sequence
  source 1..20: mol_type = other RNA
gttctgtttccattacttca

SEQ ID NO: 5495 - RNA, 20 nt, synthetic construct
  misc_feature 1..20: note = C9Orf72 TTCN PAM targeting sequence
  source 1..20: mol_type = other RNA
tctcccccagcaccttttcc

SEQ ID NO: 5496 - RNA, 20 nt, synthetic construct
  misc_feature 1..20: note = C9Orf72 TTCN PAM targeting sequence
  source 1..20: mol_type = other RNA
aatcatgcagcttcatcaat

SEQ ID NO: 5497 - RNA, 20 nt, synthetic construct
  misc_feature 1..20: note = C9Orf72 TTCN PAM targeting sequence
  source 1..20: mol_type = other RNA
tcaatacattttaaaggtaa

SEQ ID NO: 5498 - RNA, 20 nt, synthetic construct
  misc_feature 1..20: note = C9Orf72 TTCN PAM targeting sequence
  source 1..20: mol_type = other RNA
gcaatatcacatttgatttt

SEQ ID NO: 5499 - RNA, 20 nt, synthetic construct
  misc_feature 1..20: note = C9Orf72 TTCN PAM targeting sequence
  source 1..20: mol_type = other RNA
tcgtgtcttttcagcaatat

SEQ ID NO: 5500 - RNA, 20 nt, synthetic construct
  misc_feature 1..20: note = C9Orf72 TTCN PAM targeting sequence
  source 1..20: mol_type = other RNA
gggggactcgcagctttcct

SEQ ID NO: 5501 - RNA, 20 nt, synthetic construct
  misc_feature 1..20: note = C9Orf72 TTCN PAM targeting sequence
  source 1..20: mol_type = other RNA
caaagtgcctccctgcccat

SEQ ID NO: 5502 - RNA, 20 nt, synthetic construct
  misc_feature 1..20: note = C9Orf72 TTCN PAM targeting sequence
  source 1..20: mol_type = other RNA
aggtatgtcccatctgagtg

SEQ ID NO: 5503 - RNA, 20 nt, synthetic construct
  misc_feature 1..20: note = C9Orf72 TTCN PAM targeting sequence
  source 1..20: mol_type = other RNA
agccacttttccaggtatgt

SEQ ID NO: 5504 - RNA, 20 nt, synthetic construct
  misc_feature 1..20: note = C9Orf72 TTCN PAM targeting sequence
  source 1..20: mol_type = other RNA
gctgcagttcaagccacttt

SEQ ID NO: 5505 - RNA, 20 nt, synthetic construct
  misc_feature 1..20: note = C9Orf72 TTCN PAM targeting sequence
  source 1..20: mol_type = other RNA
gtacttctgctgcagttcaa

SEQ ID NO: 5506 - RNA, 20 nt, synthetic construct
  misc_feature 1..20: note = C9Orf72 TTCN PAM targeting sequence
  source 1..20: mol_type = other RNA
ggctgggctgggggtggaca

SEQ ID NO: 5507 - RNA, 20 nt, synthetic construct
  misc_feature 1..20: note = C9Orf72 TTCN PAM targeting sequence
  source 1..20: mol_type = other RNA
cggttgtagggttttggtgc

SEQ ID NO: 5508 - RNA, 20 nt, synthetic construct
  misc_feature 1..20: note = C9Orf72 TTCN PAM targeting sequence
  source 1..20: mol_type = other RNA
ttccccacagcaaggctaag

SEQ ID NO: 5509 - RNA, 20 nt, synthetic construct
  misc_feature 1..20: note = C9Orf72 TTCN PAM targeting sequence
  source 1..20: mol_type = other RNA
ccacagcaaggctaaggccc

SEQ ID NO: 5510 - RNA, 20 nt, synthetic construct
  misc_feature 1..20: note = C9Orf72 TTCN PAM targeting sequence
  source 1..20: mol_type = other RNA
gacctggcctctacccctag

SEQ ID NO: 5511 - RNA, 20 nt, synthetic construct
  misc_feature 1..20: note = C9Orf72 TTCN PAM targeting sequence
  source 1..20: mol_type = other RNA
ggaagcctttcgtctcacaa

SEQ ID NO: 5512 - RNA, 20 nt, synthetic construct
  misc_feature 1..20: note = C9Orf72 TTCN PAM targeting sequence
  source 1..20: mol_type = other RNA
agaaagccctctttctgacc

SEQ ID NO: 5513 - RNA, 20 nt, synthetic construct
  misc_feature 1..20: note = C9Orf72 TTCN PAM targeting sequence
  source 1..20: mol_type = other RNA
tctcacaaattccacttctt

SEQ ID NO: 5514 - RNA, 20 nt, synthetic construct
  misc_feature 1..20: note = C9Orf72 TTCN PAM targeting sequence
  source 1..20: mol_type = other RNA
acttcttagagacttaaaaa

SEQ ID NO: 5515 - RNA, 20 nt, synthetic construct
  misc_feature 1..20: note = C9Orf72 TTCN PAM targeting sequence
  source 1..20: mol_type = other RNA
tagagacttaaaaatctcca

SEQ ID NO: 5516 - RNA, 20 nt, synthetic construct
  misc_feature 1..20: note = C9Orf72 TTCN PAM targeting sequence
  source 1..20: mol_type = other RNA
ttagtttcttctgtgatggc

SEQ ID NO: 5517 - RNA, 20 nt, synthetic construct
  misc_feature 1..20: note = C9Orf72 TTCN PAM targeting sequence
  source 1..20: mol_type = other RNA
tctgtgatggctgtggattg

SEQ ID NO: 5518 - RNA, 20 nt, synthetic construct
  misc_feature 1..20: note = C9Orf72 TTCN PAM targeting sequence
  source 1..20: mol_type = other RNA
gtgatggctgtggattgaga

SEQ ID NO: 5519 - RNA, 20 nt, synthetic construct
  misc_feature 1..20: note = C9Orf72 TTCN PAM targeting sequence
  source 1..20: mol_type = other RNA
caatccacagccatcacaga

SEQ ID NO: 5520 - RNA, 20 nt, synthetic construct
  misc_feature 1..20: note = C9Orf72 TTCN PAM targeting sequence
  source 1..20: mol_type = other RNA
agatggtcagtgttctcaat

SEQ ID NO: 5521 - RNA, 20 nt, synthetic construct
  misc_feature 1..20: note = C9Orf72 TTCN PAM targeting sequence
  source 1..20: mol_type = other RNA
ctctctcatggctttcccct

SEQ ID NO: 5522 - RNA, 20 nt, synthetic construct
  misc_feature 1..20: note = C9Orf72 TTCN PAM targeting sequence
  source 1..20: mol_type = other RNA
cctgcccttcctgcctccat

SEQ ID NO: 5523 - RNA, 20 nt, synthetic construct
  misc_feature 1..20: note = C9Orf72 TTCN PAM targeting sequence
  source 1..20: mol_type = other RNA
tgcctccattccaaacagct

SEQ ID NO: 5524 - RNA, 20 nt, synthetic construct
  misc_feature 1..20: note = C9Orf72 TTCN PAM targeting sequence
  source 1..20: mol_type = other RNA
aaacagctgtgctggcgagg

SEQ ID NO: 5525 - RNA, 20 nt, synthetic construct
  misc_feature 1..20: note = C9Orf72 TTCN PAM targeting sequence
  source 1..20: mol_type = other RNA
cggccccctcccaacagggt

SEQ ID NO: 5526 - RNA, 20 nt, synthetic construct
  misc_feature 1..20: note = C9Orf72 TTCN PAM targeting sequence
  source 1..20: mol_type = other RNA
ctcaggccacatttccacac

SEQ ID NO: 5527 - RNA, 20 nt, synthetic construct
  misc_feature 1..20: note = C9Orf72 TTCN PAM targeting sequence
  source 1..20: mol_type = other RNA
acactcaatgttacaccaac

SEQ ID NO: 5528 - RNA, 20 nt, synthetic construct
  misc_feature 1..20: note = C9Orf72 TTCN PAM targeting sequence
  source 1..20: mol_type = other RNA
ttatctcaagatctaaccca

SEQ ID NO: 5529 - RNA, 20 nt, synthetic construct
  misc_feature 1..20: note = C9Orf72 TTCN PAM targeting sequence
  source 1..20: mol_type = other RNA
tggaggagtgatgaggatga

SEQ ID NO: 5530 - RNA, 20 nt, synthetic construct
  misc_feature 1..20: note = C9Orf72 TTCN PAM targeting sequence
  source 1..20: mol_type = other RNA
ttggtctcatcctcatcact

SEQ ID NO: 5531 - RNA, 20 nt, synthetic construct
  misc_feature 1..20: note = C9Orf72 TTCN PAM targeting sequence
  source 1..20: mol_type = other RNA
ggttctcagctataccgtgt

SEQ ID NO: 5532 - RNA, 20 nt, synthetic construct
  misc_feature 1..20: note = C9Orf72 TTCN PAM targeting sequence
  source 1..20: mol_type = other RNA
cagctataccgtgtgggccc

SEQ ID NO: 5533 - RNA, 20 nt, synthetic construct
  misc_feature 1..20: note = C9Orf72 TTCN PAM targeting sequence
  source 1..20: mol_type = other RNA
aatgggcccacacggtatag

SEQ ID NO: 5534 - RNA, 20 nt, synthetic construct
  misc_feature 1..20: note = C9Orf72 TTCN PAM targeting sequence
  source 1..20: mol_type = other RNA
tctagtgtcgtggcgctatg

SEQ ID NO: 5535 - RNA, 20 nt, synthetic construct
  misc_feature 1..20: note = C9Orf72 TTCN PAM targeting sequence
  source 1..20: mol_type = other RNA
agtgtcgtggcgctatgaga

SEQ ID NO: 5536 - RNA, 20 nt, synthetic construct
  misc_feature 1..20: note = C9Orf72 TTCN PAM targeting sequence
  source 1..20: mol_type = other RNA
tttgacaacagtatcaccat

SEQ ID NO: 5537 - RNA, 20 nt, synthetic construct
  misc_feature 1..20: note = C9Orf72 TTCN PAM targeting sequence
  source 1..20: mol_type = other RNA
ggggctgtggaatcaaaaga

SEQ ID NO: 5538 - RNA, 20 nt, synthetic construct
  misc_feature 1..20: note = C9Orf72 TTCN PAM targeting sequence
  source 1..20: mol_type = other RNA
acagcccctgaaagcacacc

SEQ ID NO: 5539 - RNA, 20 nt, synthetic construct
  misc_feature 1..20: note = C9Orf72 TTCN PAM targeting sequence
  source 1..20: mol_type = other RNA
atgatcaaaatgaaaaccaa

SEQ ID NO: 5540 - RNA, 20 nt, synthetic construct
  misc_feature 1..20: note = C9Orf72 TTCN PAM targeting sequence
  source 1..20: mol_type = other RNA
ttttgatcattgaatgcctt

SEQ ID NO: 5541 - RNA, 20 nt, synthetic construct
  misc_feature 1..20: note = C9Orf72 TTCN PAM targeting sequence
  source 1..20: mol_type = other RNA
ctctgaatcgtccagtttga

SEQ ID NO: 5542 - RNA, 20 nt, synthetic construct
  misc_feature 1..20: note = C9Orf72 TTCN PAM targeting sequence
  source 1..20: mol_type = other RNA
gagagaacagttggttttca

SEQ ID NO: 5543 - RNA, 20 nt, synthetic construct
  misc_feature 1..20: note = C9Orf72 TTCN PAM targeting sequence
  source 1..20: mol_type = other RNA
aactggacgattcagagaga

SEQ ID NO: 5544 - RNA, 20 nt, synthetic construct
  misc_feature 1..20: note = C9Orf72 TTCN PAM targeting sequence
  source 1..20: mol_type = other RNA
gagcccttcaaactggacga

SEQ ID NO: 5545 - RNA, 20 nt, synthetic construct
  misc_feature 1..20: note = C9Orf72 TTCN PAM targeting sequence
  source 1..20: mol_type = other RNA
ctgtggcaccatgctgcctg

SEQ ID NO: 5546 - RNA, 20 nt, synthetic construct
  misc_feature 1..20: note = C9Orf72 TTCN PAM targeting sequence
  source 1..20: mol_type = other RNA
agtatgcaccaaggcccaga

SEQ ID NO: 5547 - RNA, 20 nt, synthetic construct
  misc_feature 1..20: note = C9Orf72 TTCN PAM targeting sequence
  source 1..20: mol_type = other RNA
gggccttggtgcatactgga

SEQ ID NO: 5548 - RNA, 20 nt, synthetic construct
  misc_feature 1..20: note = C9Orf72 TTCN PAM targeting sequence
  source 1..20: mol_type = other RNA
agccagtgctgttgaggaca

SEQ ID NO: 5549 - RNA, 20 nt, synthetic construct
  misc_feature 1..20: note = C9Orf72 TTCN PAM targeting sequence
  source 1..20: mol_type = other RNA
gcagtacctttccagccagt

SEQ ID NO: 5550 - RNA, 20 nt, synthetic construct
  misc_feature 1..20: note = C9Orf72 TTCN PAM targeting sequence
  source 1..20: mol_type = other RNA
ccctggatcttcagcagtac

SEQ ID NO: 5551 - RNA, 20 nt, synthetic construct
  misc_feature 1..20: note = C9Orf72 TTCN PAM targeting sequence
  source 1..20: mol_type = other RNA
tgcatctccatttcctacta

SEQ ID NO: 5552 - RNA, 20 nt, synthetic construct
  misc_feature 1..20: note = C9Orf72 TTCN PAM targeting sequence
  source 1..20: mol_type = other RNA
tactagatcaagtcctcaac

SEQ ID NO: 5553 - RNA, 20 nt, synthetic construct
  misc_feature 1..20: note = C9Orf72 TTCN PAM targeting sequence
  source 1..20: mol_type = other RNA
catgacttgcaaggacttct

SEQ ID NO: 5554 - RNA, 20 nt, synthetic construct
  misc_feature 1..20: note = C9Orf72 TTCN PAM targeting sequence
  source 1..20: mol_type = other RNA
ggatctgcttcccgcccctg

SEQ ID NO: 5555 - RNA, 20 nt, synthetic construct
  misc_feature 1..20: note = C9Orf72 TTCN PAM targeting sequence
  source 1..20: mol_type = other RNA
cgcccctgtctgtggccttg

SEQ ID NO: 5556 - RNA, 20 nt, synthetic construct
  misc_feature 1..20: note = C9Orf72 TTCN PAM targeting sequence
  source 1..20: mol_type = other RNA
gtttatcttgcatctttgca

SEQ ID NO: 5557 - RNA, 20 nt, synthetic construct
  misc_feature 1..20: note = C9Orf72 TTCN PAM targeting sequence
  source 1..20: mol_type = other RNA
ttctgcatggagagccctat

SEQ ID NO: 5558 - RNA, 20 nt, synthetic construct
  misc_feature 1..20: note = C9Orf72 TTCN PAM targeting sequence
  source 1..20: mol_type = other RNA
gcatggagagccctatttcc

SEQ ID NO: 5559 - RNA, 20 nt, synthetic construct
  misc_feature 1..20: note = C9Orf72 TTCN PAM targeting sequence
  source 1..20: mol_type = other RNA
ttgtttcctccagagcactc

SEQ ID NO: 5560 - RNA, 20 nt, synthetic construct
  misc_feature 1..20: note = C9Orf72 TTCN PAM targeting sequence
  source 1..20: mol_type = other RNA
tccagagcactccagttcct

SEQ ID NO: 5561 - RNA, 20 nt, synthetic construct
  misc_feature 1..20: note = C9Orf72 TTCN PAM targeting sequence
  source 1..20: mol_type = other RNA
tctttcccagccctgcttgg

SEQ ID NO: 5562 - RNA, 20 nt, synthetic construct
  misc_feature 1..20: note = C9Orf72 TTCN PAM targeting sequence
  source 1..20: mol_type = other RNA
cagccctgcttgggtgtggg

SEQ ID NO: 5563 - RNA, 20 nt, synthetic construct
  misc_feature 1..20: note = C9Orf72 TTCN PAM targeting sequence
  source 1..20: mol_type = other RNA
cccacacccaagcagggctg

SEQ ID NO: 5564 - RNA, 20 nt, synthetic construct
  misc_feature 1..20: note = C9Orf72 TTCN PAM targeting sequence
  source 1..20: mol_type = other RNA
cagaaagggagcagaactct

SEQ ID NO: 5565 - RNA, 20 nt, synthetic construct
  misc_feature 1..20: note = C9Orf72 TTCN PAM targeting sequence
  source 1..20: mol_type = other RNA
gggaattgctctgtctccca

SEQ ID NO: 5566 - RNA, 20 nt, synthetic construct
  misc_feature 1..20: note = C9Orf72 TTCN PAM targeting sequence
  source 1..20: mol_type = other RNA
gctccctttctgggaattgc

SEQ ID NO: 5567 - RNA, 20 nt, synthetic construct
  misc_feature 1..20: note = C9Orf72 TTCN PAM targeting sequence
  source 1..20: mol_type = other RNA
tcacacccagagttctgctc

SEQ ID NO: 5568 - RNA, 20 nt, synthetic construct
  misc_feature 1..20: note = C9Orf72 TTCN PAM targeting sequence
  source 1..20: mol_type = other RNA
tagcaaccagctctggggcg

SEQ ID NO: 5569 - RNA, 20 nt, synthetic construct
  misc_feature 1..20: note = C9Orf72 TTCN PAM targeting sequence
  source 1..20: mol_type = other RNA
gacgggggtgcagttctgct

SEQ ID NO: 5570 - RNA, 20 nt, synthetic construct
  misc_feature 1..20: note = C9Orf72 TTCN PAM targeting sequence
  source 1..20: mol_type = other RNA
gctttgaaggtgagtgtctg

SEQ ID NO: 5571 - RNA, 20 nt, synthetic construct
  misc_feature 1..20: note = C9Orf72 TTCN PAM targeting sequence
  source 1..20: mol_type = other RNA
aagcagaactgcacccccgt

SEQ ID NO: 5572 - RNA, 20 nt, synthetic construct
  misc_feature 1..20: note = C9Orf72 TTCN PAM targeting sequence
  source 1..20: mol_type = other RNA
aggaagacccatgaaaaaca

SEQ ID NO: 5573 - RNA, 20 nt, synthetic construct
  misc_feature 1..20: note = C9Orf72 TTCN PAM targeting sequence
  source 1..20: mol_type = other RNA
ttgaagtcagacactcacct

SEQ ID NO: 5574 - RNA, 20 nt, synthetic construct
  misc_feature 1..20: note = C9Orf72 TTCN PAM targeting sequence
  source 1..20: mol_type = other RNA
tgggtcttccttgaagtcag

SEQ ID NO: 5575 - RNA, 20 nt, synthetic construct
  misc_feature 1..20: note = C9Orf72 TTCN PAM targeting sequence
  source 1..20: mol_type = other RNA
ctgcagcaagcagcctgatg

SEQ ID NO: 5576 - RNA, 20 nt, synthetic construct
  misc_feature 1..20: note = C9Orf72 TTCN PAM targeting sequence
  source 1..20: mol_type = other RNA
ggggatttccctgcagcaag

SEQ ID NO: 5577 - RNA, 20 nt, synthetic construct
  misc_feature 1..20: note = C9Orf72 TTCN PAM targeting sequence
  source 1..20: mol_type = other RNA
ctcctctctttttccgggga

SEQ ID NO: 5578 - RNA, 20 nt, synthetic construct
  misc_feature 1..20: note = C9Orf72 TTCN PAM targeting sequence
  source 1..20: mol_type = other RNA
ttttttctctcctctctttt

SEQ ID NO: 5579 - RNA, 20 nt, synthetic construct
  misc_feature 1..20: note = C9Orf72 TTCN PAM targeting sequence
  source 1..20: mol_type = other RNA
tttctttttttctctcctct

SEQ ID NO: 5580 - RNA, 20 nt, synthetic construct
  misc_feature 1..20: note = C9Orf72 TTCN PAM targeting sequence
  source 1..20: mol_type = other RNA
cgctttgccacatggacttg

SEQ ID NO: 5581 - RNA, 20 nt, synthetic construct
  misc_feature 1..20: note = C9Orf72 TTCN PAM targeting sequence
  source 1..20: mol_type = other RNA
acggttcccgctttgccaca

SEQ ID NO: 5582 - RNA, 20 nt, synthetic construct
  misc_feature 1..20: note = C9Orf72 TTCN PAM targeting sequence
  source 1..20: mol_type = other RNA
caccttctacggttcccgct

SEQ ID NO: 5583 - RNA, 20 nt, synthetic construct
  misc_feature 1..20: note = C9Orf72 TTCN PAM targeting sequence
  source 1..20: mol_type = other RNA
tgtggtgtttctcttttagc

SEQ ID NO: 5584 - RNA, 20 nt, synthetic construct
  misc_feature 1..20: note = C9Orf72 TTCN PAM targeting sequence
  source 1..20: mol_type = other RNA
cttttagctttctagaatcc

SEQ ID NO: 5585 - RNA, 20 nt, synthetic construct
  misc_feature 1..20: note = C9Orf72 TTCN PAM targeting sequence
  source 1..20: mol_type = other RNA
agaatccaaatagctgtatg

SEQ ID NO: 5586 - RNA, 20 nt, synthetic construct
  misc_feature 1..20: note = C9Orf72 TTCN PAM targeting sequence
  source 1..20: mol_type = other RNA
agaaagctaaaagagaaaca

SEQ ID NO: 5587 - RNA, 20 nt, synthetic construct
  misc_feature 1..20: note = C9Orf72 TTCN PAM targeting sequence
  source 1..20: mol_type = other RNA
tctgatacatacagctattt

SEQ ID NO: 5588 - RNA, 20 nt, synthetic construct
  misc_feature 1..20: note = C9Orf72 TTCN PAM targeting sequence
  source 1..20: mol_type = other RNA
caaatgccttggcaactcca

SEQ ID NO: 5589 - RNA, 20 nt, synthetic construct
  misc_feature 1..20: note = C9Orf72 TTCN PAM targeting sequence
  source 1..20: mol_type = other RNA
cctggagttgccaaggcatt

SEQ ID NO: 5590 - RNA, 20 nt, synthetic construct
  misc_feature 1..20: note = C9Orf72 TTCN PAM targeting sequence
  source 1..20: mol_type = other RNA
aaggagccctcagttgcatc

SEQ ID NO: 5591 - RNA, 20 nt, synthetic construct
  misc_feature 1..20: note = C9Orf72 TTCN PAM targeting sequence
  source 1..20: mol_type = other RNA
cggaccattcccagctgttt

SEQ ID NO: 5592 - RNA, 20 nt, synthetic construct
  misc_feature 1..20: note = C9Orf72 TTCN PAM targeting sequence
  source 1..20: mol_type = other RNA
cagctgtttgtgtgaggctg

SEQ ID NO: 5593 - RNA, 20 nt, synthetic construct
  misc_feature 1..20: note = C9Orf72 TTCN PAM targeting sequence
  source 1..20: mol_type = other RNA
cagggatccctaacttgcag

SEQ ID NO: 5594 - RNA, 20 nt, synthetic construct
  misc_feature 1..20: note = C9Orf72 TTCN PAM targeting sequence
  source 1..20: mol_type = other RNA
ttcttgccctcaaggccttt

SEQ ID NO: 5595 - RNA, 20 nt, synthetic construct
  misc_feature 1..20: note = C9Orf72 TTCN PAM targeting sequence
  source 1..20: mol_type = other RNA
tgccctcaaggccttttctg

SEQ ID NO: 5596 - RNA, 20 nt, synthetic construct
  misc_feature 1..20: note = C9Orf72 TTCN PAM targeting sequence
  source 1..20: mol_type = other RNA
gcagtggtcaagctggtgga

SEQ ID NO: 5597 - RNA, 20 nt, synthetic construct
  misc_feature 1..20: note = C9Orf72 TTCN PAM targeting sequence
  source 1..20: mol_type = other RNA
tgcctggaagcttgttttca

SEQ ID NO: 5598 - RNA, 20 nt, synthetic construct
  misc_feature 1..20: note = C9Orf72 TTCN PAM targeting sequence
  source 1..20: mol_type = other RNA
aggcaggaagctccaccagc

SEQ ID NO: 5599 - RNA, 20 nt, synthetic construct
  misc_feature 1..20: note = C9Orf72 TTCN PAM targeting sequence
  source 1..20: mol_type = other RNA
gaggagggtaaagggaccag

SEQ ID NO: 5600 - RNA, 20 nt, synthetic construct
  misc_feature 1..20: note = C9Orf72 TTCN PAM targeting sequence
  source 1..20: mol_type = other RNA
accattgactcctggtccct

SEQ ID NO: 5601 - RNA, 20 nt, synthetic construct
  misc_feature 1..20: note = C9Orf72 TTCN PAM targeting sequence
  source 1..20: mol_type = other RNA
ggcatgaggcctaaacattt

SEQ ID NO: 5602 - RNA, 20 nt, synthetic construct
  misc_feature 1..20: note = C9Orf72 TTCN PAM targeting sequence
  source 1..20: mol_type = other RNA
taaaaaaatgtttaggcctc

SEQ ID NO: 5603 - RNA, 20 nt, synthetic construct
  misc_feature 1..20: note = C9Orf72 TTCN PAM targeting sequence
  source 1..20: mol_type = other RNA
gagcatctgggagagagaat

SEQ ID NO: 5604 - RNA, 20 nt, synthetic construct
  misc_feature 1..20: note = C9Orf72 TTCN PAM targeting sequence
  source 1..20: mol_type = other RNA
ctctcccagatgctctgaaa

SEQ ID NO: 5605 - RNA, 20 nt, synthetic construct
  misc_feature 1..20: note = C9Orf72 TTCN PAM targeting sequence
  source 1..20: mol_type = other RNA
agtaggggctgacatcagcc

SEQ ID NO: 5606 - RNA, 20 nt, synthetic construct
  misc_feature 1..20: note = C9Orf72 TTCN PAM targeting sequence
  source 1..20: mol_type = other RNA
aaaataaatttggggtggct

SEQ ID NO: 5607 - RNA, 20 nt, synthetic construct
  misc_feature 1..20: note = C9Orf72 TTCN PAM targeting sequence
  source 1..20: mol_type = other RNA
caagttatttataccaataa

SEQ ID NO: 5608 - RNA, 20 nt, synthetic construct
  misc_feature 1..20: note = C9Orf72 TTCN PAM targeting sequence
  source 1..20: mol_type = other RNA
cttctcaagttatttatacc

SEQ ID NO: 5609 - RNA, 20 nt, synthetic construct
  misc_feature 1..20: note = C9Orf72 TTCN PAM targeting sequence
  source 1..20: mol_type = other RNA
ttcacttctcaagttattta

SEQ ID NO: 5610 - RNA, 20 nt, synthetic construct
  misc_feature 1..20: note = C9Orf72 TTCN PAM targeting sequence
  source 1..20: mol_type = other RNA
ttcgttcacttctcaagtta

SEQ ID NO: 5611 - RNA, 20 nt, synthetic construct
  misc_feature 1..20: note = C9Orf72 TTCN PAM targeting sequence
  source 1..20: mol_type = other RNA
ttcattcgttcacttctcaa

SEQ ID NO: 5612 - RNA, 20 nt, synthetic construct
  misc_feature 1..20: note = C9Orf72 TTCN PAM targeting sequence
  source 1..20: mol_type = other RNA
ttcattcattcgttcacttc

SEQ ID NO: 5613 - RNA, 20 nt, synthetic construct
  misc_feature 1..20: note = C9Orf72 TTCN PAM targeting sequence
  source 1..20: mol_type = other RNA
ctctgactcttgtgacctgg

SEQ ID NO: 5614 - RNA, 20 nt, synthetic construct
  misc_feature 1..20: note = C9Orf72 TTCN PAM targeting sequence
  source 1..20: mol_type = other RNA
gaatggagtagtttctatca

SEQ ID NO: 5615 - RNA, 20 nt, synthetic construct
  misc_feature 1..20: note = C9Orf72 TTCN PAM targeting sequence
  source 1..20: mol_type = other RNA
gaacacaagacactttggtt

SEQ ID NO: 5616 - RNA, 20 nt, synthetic construct
  misc_feature 1..20: note = C9Orf72 TTCN PAM targeting sequence
  source 1..20: mol_type = other RNA
atcatttcctgcaccttttc

SEQ ID NO: 5617 - RNA, 20 nt, synthetic construct
  misc_feature 1..20: note = C9Orf72 TTCN PAM targeting sequence
  source 1..20: mol_type = other RNA
tgcaccttttctgtgtgcca

SEQ ID NO: 5618 - RNA, 20 nt, synthetic construct
  misc_feature 1..20: note = C9Orf72 TTCN PAM targeting sequence
  source 1..20: mol_type = other RNA
gtgtgccaggcactgtgctc

SEQ ID NO: 5619 - RNA, 20 nt, synthetic construct
  misc_feature 1..20: note = C9Orf72 TTCN PAM targeting sequence
  source 1..20: mol_type = other RNA
ttcaatccttacatcagtct

SEQ ID NO: 5620 - RNA, 20 nt, synthetic construct
  misc_feature 1..20: note = C9Orf72 TTCN PAM targeting sequence
  source 1..20: mol_type = other RNA
atccttacatcagtcttatg

SEQ ID NO: 5621 - RNA, 20 nt, synthetic construct
  misc_feature 1..20: note = C9Orf72 TTCN PAM targeting sequence
  source 1..20: mol_type = other RNA
tattttacagaggggtaatg

SEQ ID NO: 5622 - RNA, 20 nt, synthetic construct
  misc_feature 1..20: note = C9Orf72 TTCN PAM targeting sequence
  source 1..20: mol_type = other RNA
accttggccagggtaattat

SEQ ID NO: 5623 - RNA, 20 nt, synthetic construct
  misc_feature 1..20: note = C9Orf72 TTCN PAM targeting sequence
  source 1..20: mol_type = other RNA
agtttcaaccttggccaggg

SEQ ID NO: 5624 - RNA, 20 nt, synthetic construct
  misc_feature 1..20: note = C9Orf72 TTCN PAM targeting sequence
  source 1..20: mol_type = other RNA
gcacgatggctcaggatata

SEQ ID NO: 5625 - RNA, 20 nt, synthetic construct
  misc_feature 1..20: note = C9Orf72 TTCN PAM targeting sequence
  source 1..20: mol_type = other RNA
ttcatatctacatgtgctgt

SEQ ID NO: 5626 - RNA, 20 nt, synthetic construct
  misc_feature 1..20: note = C9Orf72 TTCN PAM targeting sequence
  source 1..20: mol_type = other RNA
tatctacatgtgctgtttca

SEQ ID NO: 5627 - RNA, 20 nt, synthetic construct
  misc_feature 1..20: note = C9Orf72 TTCN PAM targeting sequence
  source 1..20: mol_type = other RNA
gttgagtctctgaatcagcg

SEQ ID NO: 5628 - RNA, 20 nt, synthetic construct
  misc_feature 1..20: note = C9Orf72 TTCN PAM targeting sequence
  source 1..20: mol_type = other RNA
gagactcaactgaaacagca

SEQ ID NO: 5629 - RNA, 20 nt, synthetic construct
  misc_feature 1..20: note = C9Orf72 TTCN PAM targeting sequence
  source 1..20: mol_type = other RNA
caggaggcccacagccaggg

SEQ ID NO: 5630 - RNA, 20 nt, synthetic construct
  misc_feature 1..20: note = C9Orf72 TTCN PAM targeting sequence
  source 1..20: mol_type = other RNA
tcctttgctagcatcccaaa

SEQ ID NO: 5631 - RNA, 20 nt, synthetic construct
  misc_feature 1..20: note = C9Orf72 TTCN PAM targeting sequence
  source 1..20: mol_type = other RNA
tttgctagcatcccaaagtc

SEQ ID NO: 5632 - RNA, 20 nt, synthetic construct
  misc_feature 1..20: note = C9Orf72 TTCN PAM targeting sequence
  source 1..20: mol_type = other RNA
gactttgggatgctagcaaa

SEQ ID NO: 5633 - RNA, 20 nt, synthetic construct
  misc_feature 1..20: note = C9Orf72 TTCN PAM targeting sequence
  source 1..20: mol_type = other RNA
tataaagcaggcagggcagc

SEQ ID NO: 5634 - RNA, 20 nt, synthetic construct
  misc_feature 1..20: note = C9Orf72 TTCN PAM targeting sequence
  source 1..20: mol_type = other RNA
ccaactctaagtatatacag

SEQ ID NO: 5635 - RNA, 20 nt, synthetic construct
  misc_feature 1..20: note = C9Orf72 TTCN PAM targeting sequence
  source 1..20: mol_type = other RNA
tgtgtgctggttggatcctg

SEQ ID NO: 5636 - RNA, 20 nt, synthetic construct
  misc_feature 1..20: note = C9Orf72 TTCN PAM targeting sequence
  source 1..20: mol_type = other RNA
aattcctgtgtgctggttgg

SEQ ID NO: 5637 - RNA, 20 nt, synthetic construct
  misc_feature 1..20: note = C9Orf72 TTCN PAM targeting sequence
  source 1..20: mol_type = other RNA
ttctgctctcttttaggaat

SEQ ID NO: 5638 - RNA, 20 nt, synthetic construct
  misc_feature 1..20: note = C9Orf72 TTCN PAM targeting sequence
  source 1..20: mol_type = other RNA
gctctcttttaggaatgtgg

SEQ ID NO: 5639 - RNA, 20 nt, synthetic construct
  misc_feature 1..20: note = C9Orf72 TTCN PAM targeting sequence
  source 1..20: mol_type = other RNA
taaaagagagcagaaagaac

SEQ ID NO: 5640 - RNA, 20 nt, synthetic construct
  misc_feature 1..20: note = C9Orf72 TTCN PAM targeting sequence
  source 1..20: mol_type = other RNA
tttggcttatttgccaccca

SEQ ID NO: 5641 - RNA, 20 nt, synthetic construct
  misc_feature 1..20: note = C9Orf72 TTCN PAM targeting sequence
  source 1..20: mol_type = other RNA
atttttatttcgtttggctt

SEQ ID NO: 5642 - RNA, 20 nt, synthetic construct
  misc_feature 1..20: note = C9Orf72 TTCN PAM targeting sequence
  source 1..20: mol_type = other RNA
ctaaaccacacagaacaata

SEQ ID NO: 5643 - RNA, 20 nt, synthetic construct
  misc_feature 1..20: note = C9Orf72 TTCN PAM targeting sequence
  source 1..20: mol_type = other RNA
gtgtggtttagggaagtctg

SEQ ID NO: 5644 - RNA, 20 nt, synthetic construct
  misc_feature 1..20: note = C9Orf72 TTCN PAM targeting sequence
  source 1..20: mol_type = other RNA
gttcctaaacaacagcccac

SEQ ID NO: 5645 - RNA, 20 nt, synthetic construct
  misc_feature 1..20: note = C9Orf72 TTCN PAM targeting sequence
  source 1..20: mol_type = other RNA
taaacaacagcccacattac

SEQ ID NO: 5646 - RNA, 20 nt, synthetic construct
  misc_feature 1..20: note = C9Orf72 TTCN PAM targeting sequence
  source 1..20: mol_type = other RNA
acgatggaggggtgcgtgtg

SEQ ID NO: 5647 - RNA, 20 nt, synthetic construct
  misc_feature 1..20: note = C9Orf72 TTCN PAM targeting sequence
  source 1..20: mol_type = other RNA
cacacacgcacccctccatc

SEQ ID NO: 5648 - RNA, 20 nt, synthetic construct
  misc_feature 1..20: note = C9Orf72 TTCN PAM targeting sequence
  source 1..20: mol_type = other RNA
ccgtgggtggcgagtgtgtg

SEQ ID NO: 5649 - RNA, 20 nt, synthetic construct
  misc_feature 1..20: note = C9Orf72 TTCN PAM targeting sequence
  source 1..20: mol_type = other RNA
taccgatacaaaaatcaaac

SEQ ID NO: 5650 - RNA, 20 nt, synthetic construct
  misc_feature 1..20: note = C9Orf72 TTCN PAM targeting sequence
  source 1..20: mol_type = other RNA
ttttccaaaccctgcaaaca

SEQ ID NO: 5651 - RNA, 20 nt, synthetic construct
  misc_feature 1..20: note = C9Orf72 TTCN PAM targeting sequence
  source 1..20: mol_type = other RNA
aaaccctgcaaacattaaaa

SEQ ID NO: 5652 - RNA, 20 nt, synthetic construct
  misc_feature 1..20: note = C9Orf72 TTCN PAM targeting sequence
  source 1..20: mol_type = other RNA
gcctcctgatttacattgtt

SEQ ID NO: 5653 - RNA, 20 nt, synthetic construct
  misc_feature 1..20: note = C9Orf72 TTCN PAM targeting sequence
  source 1..20: mol_type = other RNA
tataaagacagagctgcaca

SEQ ID NO: 5654 - RNA, 20 nt, synthetic construct
  misc_feature 1..20: note = C9Orf72 TTCN PAM targeting sequence
  source 1..20: mol_type = other RNA
aaaatgtgcagctctgtctt

SEQ ID NO: 5655 - RNA, 20 nt, synthetic construct
  misc_feature 1..20: note = C9Orf72 TTCN PAM targeting sequence
  source 1..20: mol_type = other RNA
ctcatttaaccacaggagat

SEQ ID NO: 5656 - RNA, 20 nt, synthetic construct
  misc_feature 1..20: note = C9Orf72 TTCN PAM targeting sequence
  source 1..20: mol_type = other RNA
cgatgcactatgaggcaacc

SEQ ID NO: 5657 - RNA, 20 nt, synthetic construct
  misc_feature 1..20: note = C9Orf72 TTCN PAM targeting sequence
  source 1..20: mol_type = other RNA
gcaactctgtgctttttttt

SEQ ID NO: 5658 - RNA, 20 nt, synthetic construct
  misc_feature 1..20: note = C9Orf72 TTCN PAM targeting sequence
  source 1..20: mol_type = other RNA
cacctgtatcaacctggctg

SEQ ID NO: 5659 - RNA, 20 nt, synthetic construct
  misc_feature 1..20: note = C9Orf72 TTCN PAM targeting sequence
  source 1..20: mol_type = other RNA
gctcagactgatgctacctg

SEQ ID NO: 5660 - RNA, 20 nt, synthetic construct
  misc_feature 1..20: note = C9Orf72 TTCN PAM targeting sequence
  source 1..20: mol_type = other RNA
gctcaaagcgacactgagat

SEQ ID NO: 5661 - RNA, 20 nt, synthetic construct
  misc_feature 1..20: note = C9Orf72 TTCN PAM targeting sequence
  source 1..20: mol_type = other RNA
tcctctgttacccaacttct

SEQ ID NO: 5662 - RNA, 20 nt, synthetic construct
  misc_feature 1..20: note = C9Orf72 TTCN PAM targeting sequence
  source 1..20: mol_type = other RNA
ccagagcccccatggaggtc

SEQ ID NO: 5663 - RNA, 20 nt, synthetic construct
  misc_feature 1..20: note = C9Orf72 TTCN PAM targeting sequence
  source 1..20: mol_type = other RNA
catacccagcatttgtcagc

SEQ ID NO: 5664 - RNA, 20 nt, synthetic construct
  misc_feature 1..20: note = C9Orf72 TTCN PAM targeting sequence
  source 1..20: mol_type = other RNA
ggcagatgctgctgctgccc

SEQ ID NO: 5665 - RNA, 20 nt, synthetic construct
  misc_feature 1..20: note = C9Orf72 TTCN PAM targeting sequence
  source 1..20: mol_type = other RNA
gggatgagcaaagggtgact

SEQ ID NO: 5666 - RNA, 20 nt, synthetic construct
  misc_feature 1..20: note = C9Orf72 TTCN PAM targeting sequence
  source 1..20: mol_type = other RNA
tcaaagcgggtgggtgcact

SEQ ID NO: 5667 - RNA, 20 nt, synthetic construct
  misc_feature 1..20: note = C9Orf72 TTCN PAM targeting sequence
  source 1..20: mol_type = other RNA
ttcctcaaagcgggtgggtg

SEQ ID NO: 5668 - RNA, 20 nt, synthetic construct
  misc_feature 1..20: note = C9Orf72 TTCN PAM targeting sequence
  source 1..20: mol_type = other RNA
gcatggcccaatgccccctg

SEQ ID NO: 5669 - RNA, 20 nt, synthetic construct
  misc_feature 1..20: note = C9Orf72 TTCN PAM targeting sequence
  source 1..20: mol_type = other RNA
ttaaaggctggatgcgggag

SEQ ID NO: 5670 - RNA, 20 nt, synthetic construct
  misc_feature 1..20: note = C9Orf72 TTCN PAM targeting sequence
  source 1..20: mol_type = other RNA
cctgccctcccgcatccagc

SEQ ID NO: 5671 - RNA, 20 nt, synthetic construct
  misc_feature 1..20: note = C9Orf72 TTCN PAM targeting sequence
  source 1..20: mol_type = other RNA
ttcccctgccctcccgcatc

SEQ ID NO: 5672 - RNA, 20 nt, synthetic construct
  misc_feature 1..20: note = C9Orf72 TTCN PAM targeting sequence
  source 1..20: mol_type = other RNA
cacatttgcttctgtcatgt

SEQ ID NO: 5673 - RNA, 20 nt, synthetic construct
  misc_feature 1..20: note = C9Orf72 TTCN PAM targeting sequence
  source 1..20: mol_type = other RNA
gtcatgtggcctttctatca

SEQ ID NO: 5674 - RNA, 20 nt, synthetic construct
  misc_feature 1..20: note = C9Orf72 TTCN PAM targeting sequence
  source 1..20: mol_type = other RNA
atcaggagtgggagggaagg

SEQ ID NO: 5675 - RNA, 20 nt, synthetic construct
  misc_feature 1..20: note = C9Orf72 TTCN PAM targeting sequence
  source 1..20: mol_type = other RNA
ctcccactcctgatagaaag

SEQ ID NO: 5676 - RNA, 20 nt, synthetic construct
  misc_feature 1..20: note = C9Orf72 TTCN PAM targeting sequence
  source 1..20: mol_type = other RNA
ccggccagtgccttccctcc

SEQ ID NO: 5677 - RNA, 20 nt, synthetic construct
  misc_feature 1..20: note = C9Orf72 TTCN PAM targeting sequence
  source 1..20: mol_type = other RNA
ggtactctctgcttcaccgg

SEQ ID NO: 5678 - RNA, 20 nt, synthetic construct
  misc_feature 1..20: note = C9Orf72 TTCN PAM targeting sequence
  source 1..20: mol_type = other RNA
gacagaagcttaatgggggc

SEQ ID NO: 5679 - RNA, 20 nt, synthetic construct
  misc_feature 1..20: note = C9Orf72 TTCN PAM targeting sequence
  source 1..20: mol_type = other RNA
gtcagaataaataaaactct

SEQ ID NO: 5680 - RNA, 20 nt, synthetic construct
  misc_feature 1..20: note = C9Orf72 TTCN PAM targeting sequence
  source 1..20: mol_type = other RNA
tgcatgtcattaagagttgc

SEQ ID NO: 5681 - RNA, 20 nt, synthetic construct
  misc_feature 1..20: note = C9Orf72 TTCN PAM targeting sequence
  source 1..20: mol_type = other RNA
gcgtttcttgcatgtcatta

SEQ ID NO: 5682 - RNA, 20 nt, synthetic construct
  misc_feature 1..20: note = C9Orf72 TTCN PAM targeting sequence
  source 1..20: mol_type = other RNA
gaactttcagagcatgggtc

SEQ ID NO: 5683 - RNA, 20 nt, synthetic construct
  misc_feature 1..20: note = C9Orf72 TTCN PAM targeting sequence
  source 1..20: mol_type = other RNA
gaatactccctccaaaagga

SEQ ID NO: 5684 - RNA, 20 nt, synthetic construct
  misc_feature 1..20: note = C9Orf72 TTCN PAM targeting sequence
  source 1..20: mol_type = other RNA
gagcatgggtccctaaagga

SEQ ID NO: 5685 - RNA, 20 nt, synthetic construct
  misc_feature 1..20: note = C9Orf72 TTCN PAM targeting sequence
  source 1..20: mol_type = other RNA
tttagggacccatgctctga

SEQ ID NO: 5686 - RNA, 20 nt, synthetic construct
  misc_feature 1..20: note = C9Orf72 TTCN PAM targeting sequence
  source 1..20: mol_type = other RNA
tcctttagggacccatgctc

SEQ ID NO: 5687 - RNA, 20 nt, synthetic construct
  misc_feature 1..20: note = C9Orf72 TTCN PAM targeting sequence
  source 1..20: mol_type = other RNA
caggggaggtaaattcttcc

SEQ ID NO: 5688 - RNA, 20 nt, synthetic construct
  misc_feature 1..20: note = C9Orf72 TTCN PAM targeting sequence
  source 1..20: mol_type = other RNA
atagaagccgttcagcctag

SEQ ID NO: 5689 - RNA, 20 nt, synthetic construct
  misc_feature 1..20: note = C9Orf72 TTCN PAM targeting sequence
  source 1..20: mol_type = other RNA
atggaatcctttgttttccc

SEQ ID NO: 5690 - RNA, 20 nt, synthetic construct
  misc_feature 1..20: note = C9Orf72 TTCN PAM targeting sequence
  source 1..20: mol_type = other RNA
gcctagctgaattcaccaca

SEQ ID NO: 5691 - RNA, 20 nt, synthetic construct
  misc_feature 1..20: note = C9Orf72 TTCN PAM targeting sequence
  source 1..20: mol_type = other RNA
gctaggctgaacggcttcta

SEQ ID NO: 5692 - RNA, 20 nt, synthetic construct
  misc_feature 1..20: note = C9Orf72 TTCN PAM targeting sequence
  source 1..20: mol_type = other RNA
ccacaggacagagcttgcca

SEQ ID NO: 5693 - RNA, 20 nt, synthetic construct
  misc_feature 1..20: note = C9Orf72 TTCN PAM targeting sequence
  source 1..20: mol_type = other RNA
tcagacacacaatagaggtc

SEQ ID NO: 5694 - RNA, 20 nt, synthetic construct
  misc_feature 1..20: note = C9Orf72 TTCN PAM targeting sequence
  source 1..20: mol_type = other RNA
ccatatgttttcatcagaca

SEQ ID NO: 5695 - RNA, 20 nt, synthetic construct
  misc_feature 1..20: note = C9Orf72 TTCN PAM targeting sequence
  source 1..20: mol_type = other RNA
tcagtgagcctgtaatttag

SEQ ID NO: 5696 - RNA, 20 nt, synthetic construct
  misc_feature 1..20: note = C9Orf72 TTCN PAM targeting sequence
  source 1..20: mol_type = other RNA
taaattacaggctcactgag

SEQ ID NO: 5697 - RNA, 20 nt, synthetic construct
  misc_feature 1..20: note = C9Orf72 TTCN PAM targeting sequence
  source 1..20: mol_type = other RNA
aagcagtctcactcctttgg

SEQ ID NO: 5698 - RNA, 20 nt, synthetic construct
  misc_feature 1..20: note = C9Orf72 TTCN PAM targeting sequence
  source 1..20: mol_type = other RNA
taccaaaggagtgagactgc

SEQ ID NO: 5699 - RNA, 20 nt, synthetic construct
  misc_feature 1..20: note = C9Orf72 TTCN PAM targeting sequence
  source 1..20: mol_type = other RNA
tgtctatttactccatcaaa

SEQ ID NO: 5700 - RNA, 20 nt, synthetic construct
  misc_feature 1..20: note = C9Orf72 TTCN PAM targeting sequence
  source 1..20: mol_type = other RNA
ttttaatacaatgagatctc

SEQ ID NO: 5701 - RNA, 20 nt, synthetic construct
  misc_feature 1..20: note = C9Orf72 TTCN PAM targeting sequence
  source 1..20: mol_type = other RNA
agcaagagatctcattgtat

SEQ ID NO: 5702 - RNA, 20 nt, synthetic construct
  misc_feature 1..20: note = C9Orf72 TTCN PAM targeting sequence
  source 1..20: mol_type = other RNA
ataggtggtagtcaaacttc

SEQ ID NO: 5703 - RNA, 20 nt, synthetic construct
  misc_feature 1..20: note = C9Orf72 TTCN PAM targeting sequence
  source 1..20: mol_type = other RNA
caagctctcacagagagaaa

SEQ ID NO: 5704 - RNA, 20 nt, synthetic construct
  misc_feature 1..20: note = C9Orf72 TTCN PAM targeting sequence
  source 1..20: mol_type = other RNA
ctctgtgagagcttgagaac

SEQ ID NO: 5705 - RNA, 20 nt, synthetic construct
  misc_feature 1..20: note = C9Orf72 TTCN PAM targeting sequence
  source 1..20: mol_type = other RNA
cctagagaggaactgaaact

SEQ ID NO: 5706 - RNA, 20 nt, synthetic construct
  misc_feature 1..20: note = C9Orf72 TTCN PAM targeting sequence
  source 1..20: mol_type = other RNA
tctctaggggaagcataatg

SEQ ID NO: 5707 - RNA, 20 nt, synthetic construct
  misc_feature 1..20: note = C9Orf72 TTCN PAM targeting sequence
  source 1..20: mol_type = other RNA
gttcctctctaggggaagca

SEQ ID NO: 5708 - RNA, 20 nt, synthetic construct
  misc_feature 1..20: note = C9Orf72 TTCN PAM targeting sequence
  source 1..20: mol_type = other RNA
aagtttcagttcctctctag

SEQ ID NO: 5709 - RNA, 20 nt, synthetic construct
  misc_feature 1..20: note = C9Orf72 TTCN PAM targeting sequence
  source 1..20: mol_type = other RNA
cgctctgccaagtatcaacc

SEQ ID NO: 5710 - RNA, 20 nt, synthetic construct
  misc_feature 1..20: note = C9Orf72 TTCN PAM targeting sequence
  source 1..20: mol_type = other RNA
aaccaggatatcatttggat

SEQ ID NO: 5711 - RNA, 20 nt, synthetic construct
  misc_feature 1..20: note = C9Orf72 TTCN PAM targeting sequence
  source 1..20: mol_type = other RNA
gaggcctgttgataagatcc

SEQ ID NO: 5712 - RNA, 20 nt, synthetic construct
  misc_feature 1..20: note = C9Orf72 TTCN PAM targeting sequence
  source 1..20: mol_type = other RNA
atatcagggaccagaaaatg

SEQ ID NO: 5713 - RNA, 20 nt, synthetic construct
  misc_feature 1..20: note = C9Orf72 TTCN PAM targeting sequence
  source 1..20: mol_type = other RNA
ggtccctgatatagaaaaaa

SEQ ID NO: 5714 - RNA, 20 nt, synthetic construct
  misc_feature 1..20: note = C9Orf72 TTCN PAM targeting sequence
  source 1..20: mol_type = other RNA
tgggtcaaatccagtccaca

SEQ ID NO: 5715 - RNA, 20 nt, synthetic construct
  misc_feature 1..20: note = C9Orf72 TTCN PAM targeting sequence
  source 1..20: mol_type = other RNA
actatcaaaaaatgtaaaaa

SEQ ID NO: 5716 - RNA, 20 nt, synthetic construct
  misc_feature 1..20: note = C9Orf72 TTCN PAM targeting sequence
  source 1..20: mol_type = other RNA
tttttcaactatcaaaaaat

SEQ ID NO: 5717 - RNA, 20 nt, synthetic construct
  misc_feature 1..20: note = C9Orf72 TTCN PAM targeting sequence
  source 1..20: mol_type = other RNA
ttcttttttcaactatcaaa

SEQ ID NO: 5718 - RNA, 20 nt, synthetic construct
  misc_feature 1..20: note = C9Orf72 TTCN PAM targeting sequence
  source 1..20: mol_type = other RNA
taaaataatcatatgtcata

SEQ ID NO: 5719 - RNA, 20 nt, synthetic construct
  misc_feature 1..20: note = C9Orf72 TTCN PAM targeting sequence
  source 1..20: mol_type = other RNA
aatttccatgtccataaaca

SEQ ID NO: 5720 - RNA, 20 nt, synthetic construct
  misc_feature 1..20: note = C9Orf72 TTCN PAM targeting sequence
  source 1..20: mol_type = other RNA
atgtccataaacaagtttta

SEQ ID NO: 5721 - RNA, 20 nt, synthetic construct
  misc_feature 1..20: note = C9Orf72 TTCN PAM targeting sequence
  source 1..20: mol_type = other RNA
tccataaatgggtgtggctt

SEQ ID NO: 5722 - RNA, 20 nt, synthetic construct
  misc_feature 1..20: note = C9Orf72 TTCN PAM targeting sequence
  source 1..20: mol_type = other RNA
gcacttccatggcagagctg

SEQ ID NO: 5723 - RNA, 20 nt, synthetic construct
  misc_feature 1..20: note = C9Orf72 TTCN PAM targeting sequence
  source 1..20: mol_type = other RNA
atggcagagctgagcgactg

SEQ ID NO: 5724 - RNA, 20 nt, synthetic construct
  misc_feature 1..20: note = C9Orf72 TTCN PAM targeting sequence
  source 1..20: mol_type = other RNA
gaaaagctggctgacctcgc

SEQ ID NO: 5725 - RNA, 20 nt, synthetic construct
  misc_feature 1..20: note = C9Orf72 TTCN PAM targeting sequence
  source 1..20: mol_type = other RNA
gaaaagacccccatgctaaa

SEQ ID NO: 5726 - RNA, 20 nt, synthetic construct
  misc_feature 1..20: note = C9Orf72 TTCN PAM targeting sequence
  source 1..20: mol_type = other RNA
aaaactgacctggcaataaa

SEQ ID NO: 5727 - RNA, 20 nt, synthetic construct
  misc_feature 1..20: note = C9Orf72 TTCN PAM targeting sequence
  source 1..20: mol_type = other RNA
gtcttgggagaacaatgatg

SEQ ID NO: 5728 - RNA, 20 nt, synthetic construct
  misc_feature 1..20: note = C9Orf72 TTCN PAM targeting sequence
  source 1..20: mol_type = other RNA
cccaagacagaagactggac

SEQ ID NO: 5729 - RNA, 20 nt, synthetic construct
  misc_feature 1..20: note = C9Orf72 TTCN PAM targeting sequence
  source 1..20: mol_type = other RNA
actgatgtaacatcattgtt

SEQ ID NO: 5730 - RNA, 20 nt, synthetic construct
  misc_feature 1..20: note = C9Orf72 TTCN PAM targeting sequence
  source 1..20: mol_type = other RNA
aaaacaagagtggagtgaac

SEQ ID NO: 5731 - RNA, 20 nt, synthetic construct
  misc_feature 1..20: note = C9Orf72 TTCN PAM targeting sequence
  source 1..20: mol_type = other RNA
ctccactcttgttttagaag

SEQ ID NO: 5732 - RNA, 20 nt, synthetic construct
  misc_feature 1..20: note = C9Orf72 TTCN PAM targeting sequence
  source 1..20: mol_type = other RNA
aagggactataggcatgtag

SEQ ID NO: 5733 - RNA, 20 nt, synthetic construct
  misc_feature 1..20: note = C9Orf72 TTCN PAM targeting sequence
  source 1..20: mol_type = other RNA
ctcgtctccctctccctctc

SEQ ID NO: 5734 - RNA, 20 nt, synthetic construct
  misc_feature 1..20: note = C9Orf72 TTCN PAM targeting sequence
  source 1..20: mol_type = other RNA
caactttggtggcatcagag

SEQ ID NO: 5735 - RNA, 20 nt, synthetic construct
  misc_feature 1..20: note = C9Orf72 TTCN PAM targeting sequence
  source 1..20: mol_type = other RNA
cctgcctcagcctgcagagt

SEQ ID NO: 5736 - RNA, 20 nt, synthetic construct
  misc_feature 1..20: note = C9Orf72 TTCN PAM targeting sequence
  source 1..20: mol_type = other RNA
tggaacgtagcgccctggtg

SEQ ID NO: 5737 - RNA, 20 nt, synthetic construct
  misc_feature 1..20: note = C9Orf72 TTCN PAM targeting sequence
  source 1..20: mol_type = other RNA
aggaacatggctgggtgctg

SEQ ID NO: 5738 - RNA, 20 nt, synthetic construct
  misc_feature 1..20: note = C9Orf72 TTCN PAM targeting sequence
  source 1..20: mol_type = other RNA
gaagtgcagtcttgggggat

SEQ ID NO: 5739 - RNA, 20 nt, synthetic construct
  misc_feature 1..20: note = C9Orf72 TTCN PAM targeting sequence
  source 1..20: mol_type = other RNA
gaagcctggcacctcacctg

SEQ ID NO: 5740 - RNA, 20 nt, synthetic construct
  misc_feature 1..20: note = C9Orf72 TTCN PAM targeting sequence
  source 1..20: mol_type = other RNA
agggtagggtggtgatcgct

SEQ ID NO: 5741 - RNA, 20 nt, synthetic construct
  misc_feature 1..20: note = C9Orf72 TTCN PAM targeting sequence
  source 1..20: mol_type = other RNA
gggagaaggtatagggtgga

SEQ ID NO: 5742 - RNA, 20 nt, synthetic construct
  misc_feature 1..20: note = C9Orf72 TTCN PAM targeting sequence
  source 1..20: mol_type = other RNA
cccagaatccatcctacacg

SEQ ID NO: 5743 - RNA, 20 nt, synthetic construct
  misc_feature 1..20: note = C9Orf72 TTCN PAM targeting sequence
  source 1..20: mol_type = other RNA
tggcaaatgccctaggcagg

SEQ ID NO: 5744 - RNA, 20 nt, synthetic construct
  misc_feature 1..20: note = C9Orf72 TTCN PAM targeting sequence
  source 1..20: mol_type = other RNA
cactgtatttttactgtact

SEQ ID NO: 5745 - RNA, 20 nt, synthetic construct
  misc_feature 1..20: note = C9Orf72 TTCN PAM targeting sequence
  source 1..20: mol_type = other RNA
acatttagatacacaaatac

SEQ ID NO: 5746 - RNA, 20 nt, synthetic construct
  misc_feature 1..20: note = C9Orf72 TTCN PAM targeting sequence
  source 1..20: mol_type = other RNA
ttatagtaacatgctgtaca

SEQ ID NO: 5747 - RNA, 20 nt, synthetic construct
  misc_feature 1..20: note = C9Orf72 TTCN PAM targeting sequence
  source 1..20: mol_type = other RNA
cattatggcaaagttgccta

SEQ ID NO: 5748 - RNA, 20 nt, synthetic construct
  misc_feature 1..20: note = C9Orf72 TTCN PAM targeting sequence
  source 1..20: mol_type = other RNA
cagaatgtattcccatcatt

SEQ ID NO: 5749 - RNA, 20 nt, synthetic construct
  misc_feature 1..20: note = C9Orf72 TTCN PAM targeting sequence
  source 1..20: mol_type = other RNA
gagaaatgtgtctttaggca

SEQ ID NO: 5750 - RNA, 20 nt, synthetic construct
  misc_feature 1..20: note = C9Orf72 TTCN PAM targeting sequence
  source 1..20: mol_type = other RNA
catcattatgtgacacatga

SEQ ID NO: 5751 - RNA, 20 nt, synthetic construct
  misc_feature 1..20: note = C9Orf72 TTCN PAM targeting sequence
  source 1..20: mol_type = other RNA
gtagaaagaccaggtttctg

SEQ ID NO: 5752 - RNA, 20 nt, synthetic construct
  misc_feature 1..20: note = C9Orf72 TTCN PAM targeting sequence
  source 1..20: mol_type = other RNA
acagaagtacagtcatgtgt

SEQ ID NO: 5753 - RNA, 20 nt, synthetic construct
  misc_feature 1..20: note = C9Orf72 TTCN PAM targeting sequence
  source 1..20: mol_type = other RNA
ggagtggtggagtggtggag

SEQ ID NO: 5754 - RNA, 20 nt, synthetic construct
  misc_feature 1..20: note = C9Orf72 TTCN PAM targeting sequence
  source 1..20: mol_type = other RNA
cagtaacttgccctccacca

SEQ ID NO: 5755 - RNA, 20 nt, synthetic construct
  misc_feature 1..20: note = C9Orf72 TTCN PAM targeting sequence
  source 1..20: mol_type = other RNA
attcacagtaacttgccctc

SEQ ID NO: 5756 - RNA, 20 nt, synthetic construct
  misc_feature 1..20: note = C9Orf72 TTCN PAM targeting sequence
  source 1..20: mol_type = other RNA
ctttcaattcacagtaactt

SEQ ID NO: 5757 - RNA, 20 nt, synthetic construct
  misc_feature 1..20: note = C9Orf72 TTCN PAM targeting sequence
  source 1..20: mol_type = other RNA
cacttccctttcaattcaca

SEQ ID NO: 5758 - RNA, 20 nt, synthetic construct
  misc_feature 1..20: note = C9Orf72 TTCN PAM targeting sequence
  source 1..20: mol_type = other RNA
ttcaaggaaggggaggaaga

SEQ ID NO: 5759 - RNA, 20 nt, synthetic construct
  misc_feature 1..20: note = C9Orf72 TTCN PAM targeting sequence
  source 1..20: mol_type = other RNA
aggaaggggaggaagaagaa

SEQ ID NO: 5760 - RNA, 20 nt, synthetic construct
  misc_feature 1..20: note = C9Orf72 TTCN PAM targeting sequence
  source 1..20: mol_type = other RNA
ttgaaagaagccagtctagc

SEQ ID NO: 5761 - RNA, 20 nt, synthetic construct
  misc_feature 1..20: note = C9Orf72 TTCN PAM targeting sequence
  source 1..20: mol_type = other RNA
tccccttccttgaaagaagc

SEQ ID NO: 5762 - RNA, 20 nt, synthetic construct
  misc_feature 1..20: note = C9Orf72 TTCN PAM targeting sequence
  source 1..20: mol_type = other RNA
tcctccccttccttgaaaga

SEQ ID NO: 5763 - RNA, 20 nt, synthetic construct
  misc_feature 1..20: note = C9Orf72 TTCN PAM targeting sequence
  source 1..20: mol_type = other RNA
tcttcctccccttccttgaa

SEQ ID NO: 5764 - RNA, 20 nt, synthetic construct
  misc_feature 1..20: note = C9Orf72 TTCN PAM targeting sequence
  source 1..20: mol_type = other RNA
cggagtcagatttcttaagc

SEQ ID NO: 5765 - RNA, 20 nt, synthetic construct
  misc_feature 1..20: note = C9Orf72 TTCN PAM targeting sequence
  source 1..20: mol_type = other RNA
taagcaatgagcactttgga

SEQ ID NO: 5766 - RNA, 20 nt, synthetic construct
  misc_feature 1..20: note = C9Orf72 TTCN PAM targeting sequence
  source 1..20: mol_type = other RNA
acatcctacagcacaagtct

SEQ ID NO: 5767 - RNA, 20 nt, synthetic construct
  misc_feature 1..20: note = C9Orf72 TTCN PAM targeting sequence
  source 1..20: mol_type = other RNA
cattttctacatcctacagc

SEQ ID NO: 5768 - RNA, 20 nt, synthetic construct
  misc_feature 1..20: note = C9Orf72 TTCN PAM targeting sequence
  source 1..20: mol_type = other RNA
tttcccattttctacatcct

SEQ ID NO: 5769 - RNA, 20 nt, synthetic construct
  misc_feature 1..20: note = C9Orf72 TTCN PAM targeting sequence
  source 1..20: mol_type = other RNA
ctttcttttcccattttcta

SEQ ID NO: 5770 - RNA, 20 nt, synthetic construct
  misc_feature 1..20: note = C9Orf72 TTCN PAM targeting sequence
  source 1..20: mol_type = other RNA
ttgacctctgcatttctctt

SEQ ID NO: 5771 - RNA, 20 nt, synthetic construct
  misc_feature 1..20: note = C9Orf72 TTCN PAM targeting sequence
  source 1..20: mol_type = other RNA
tatgttaaataattttaaaa

SEQ ID NO: 5772 - RNA, 20 nt, synthetic construct
  misc_feature 1..20: note = C9Orf72 TTCN PAM targeting sequence
  source 1..20: mol_type = other RNA
tcatatgttaaataatttta

SEQ ID NO: 5773 - RNA, 20 nt, synthetic construct
  misc_feature 1..20: note = C9Orf72 TTCN PAM targeting sequence
  source 1..20: mol_type = other RNA
ctcttcaagaaatatggcca

SEQ ID NO: 5774 - RNA, 20 nt, synthetic construct
  misc_feature 1..20: note = C9Orf72 TTCN PAM targeting sequence
  source 1..20: mol_type = other RNA
agaaatatggccaggcctgg

SEQ ID NO: 5775 - RNA, 20 nt, synthetic construct
  misc_feature 1..20: note = C9Orf72 TTCN PAM targeting sequence
  source 1..20: mol_type = other RNA
tgaagagagaaatgttaaat

SEQ ID NO: 5776 - RNA, 20 nt, synthetic construct
  misc_feature 1..20: note = C9Orf72 TTCN PAM targeting sequence
  source 1..20: mol_type = other RNA
ggagttccagaccagcctgg

SEQ ID NO: 5777 - RNA, 20 nt, synthetic construct
  misc_feature 1..20: note = C9Orf72 TTCN PAM targeting sequence
  source 1..20: mol_type = other RNA
agaccagcctggccaacatg

SEQ ID NO: 5778 - RNA, 20 nt, synthetic construct
  misc_feature 1..20: note = C9Orf72 TTCN PAM targeting sequence
  source 1..20: mol_type = other RNA
ccatgttggccaggctggtc

SEQ ID NO: 5779 - RNA, 20 nt, synthetic construct
  misc_feature 1..20: note = C9Orf72 TTCN PAM targeting sequence
  source 1..20: mol_type = other RNA
agctgctctggaggctgagg

SEQ ID NO: 5780 - RNA, 20 nt, synthetic construct
  misc_feature 1..20: note = C9Orf72 TTCN PAM targeting sequence
  source 1..20: mol_type = other RNA
cctgcctcagcctccagagc

SEQ ID NO: 5781 - RNA, 20 nt, synthetic construct
  misc_feature 1..20: note = C9Orf72 TTCN PAM targeting sequence
  source 1..20: mol_type = other RNA
agcgattctcctgcctcagc

SEQ ID NO: 5782 - RNA, 20 nt, synthetic construct
  misc_feature 1..20: note = C9Orf72 TTCN PAM targeting sequence
  source 1..20: mol_type = other RNA
ttttttttttttattttgag

SEQ ID NO: 5783 - RNA, 20 nt, synthetic construct
  misc_feature 1..20: note = C9Orf72 TTCN PAM targeting sequence
  source 1..20: mol_type = other RNA
ttctttttttttttttattt

SEQ ID NO: 5784 - RNA, 20 nt, synthetic construct
  misc_feature 1..20: note = C9Orf72 TTCN PAM targeting sequence
  source 1..20: mol_type = other RNA
ttctttcttttttttttttt

SEQ ID NO: 5785 - RNA, 20 nt, synthetic construct
  misc_feature 1..20: note = C9Orf72 TTCN PAM targeting sequence
  source 1..20: mol_type = other RNA
tttagtgtgggctggactta

SEQ ID NO: 5786 - RNA, 20 nt, synthetic construct
  misc_feature 1..20: note = C9Orf72 TTCN PAM targeting sequence
  source 1..20: mol_type = other RNA
aatgaatggaaagtgggaag

SEQ ID NO: 5787 - RNA, 20 nt, synthetic construct
  misc_feature 1..20: note = C9Orf72 TTCN PAM targeting sequence
  source 1..20: mol_type = other RNA
ttagaagtaggttactaagt

SEQ ID NO: 5788 - RNA, 20 nt, synthetic construct
  misc_feature 1..20: note = C9Orf72 TTCN PAM targeting sequence
  source 1..20: mol_type = other RNA
attcattagaagtaggttac

SEQ ID NO: 5789 - RNA, 20 nt, synthetic construct
  misc_feature 1..20: note = C9Orf72 TTCN PAM targeting sequence
  source 1..20: mol_type = other RNA
cactttccattcattagaag

SEQ ID NO: 5790 - RNA, 20 nt, synthetic construct
  misc_feature 1..20: note = C9Orf72 TTCN PAM targeting sequence
  source 1..20: mol_type = other RNA
tcccactttccattcattag

SEQ ID NO: 5791 - RNA, 20 nt, synthetic construct
  misc_feature 1..20: note = C9Orf72 TTCN PAM targeting sequence
  source 1..20: mol_type = other RNA
gactctagtctgtagaagat

SEQ ID NO: 5792 - RNA, 20 nt, synthetic construct
  misc_feature 1..20: note = C9Orf72 TTCN PAM targeting sequence
  source 1..20: mol_type = other RNA
acagactagagtcagaagtg

SEQ ID NO: 5793 - RNA, 20 nt, synthetic construct
  misc_feature 1..20: note = C9Orf72 TTCN PAM targeting sequence
  source 1..20: mol_type = other RNA
atcttggttgccctctctga

SEQ ID NO: 5794 - RNA, 20 nt, synthetic construct
  misc_feature 1..20: note = C9Orf72 TTCN PAM targeting sequence
  source 1..20: mol_type = other RNA
gggagtagccagcagaaacc

SEQ ID NO: 5795 - RNA, 20 nt, synthetic construct
  misc_feature 1..20: note = C9Orf72 TTCN PAM targeting sequence
  source 1..20: mol_type = other RNA
gctggctactcccagaatgc

SEQ ID NO: 5796 - RNA, 20 nt, synthetic construct
  misc_feature 1..20: note = C9Orf72 TTCN PAM targeting sequence
  source 1..20: mol_type = other RNA
aatgaaaggtgtttgtctct

SEQ ID NO: 5797 - RNA, 20 nt, synthetic construct
  misc_feature 1..20: note = C9Orf72 TTCN PAM targeting sequence
  source 1..20: mol_type = other RNA
tttgaaacgttaggtttctg

SEQ ID NO: 5798 - RNA, 20 nt, synthetic construct
  misc_feature 1..20: note = C9Orf72 TTCN PAM targeting sequence
  source 1..20: mol_type = other RNA
cagagacaaacacctttcat

SEQ ID NO: 5799 - RNA, 20 nt, synthetic construct
  misc_feature 1..20: note = C9Orf72 TTCN PAM targeting sequence
  source 1..20: mol_type = other RNA
atgtcctcagcttaagtcct

SEQ ID NO: 5800 - RNA, 20 nt, synthetic construct
  misc_feature 1..20: note = C9Orf72 TTCN PAM targeting sequence
  source 1..20: mol_type = other RNA
aagaactctgggaagttccc

SEQ ID NO: 5801 - RNA, 20 nt, synthetic construct
  misc_feature 1..20: note = C9Orf72 TTCN PAM targeting sequence
  source 1..20: mol_type = other RNA
ttgaatgggccatgtcctct

SEQ ID NO: 5802 - RNA, 20 nt, synthetic construct
  misc_feature 1..20: note = C9Orf72 TTCN PAM targeting sequence
  source 1..20: mol_type = other RNA
cagagttctttgaatgggcc

SEQ ID NO: 5803 - RNA, 20 nt, synthetic construct
  misc_feature 1..20: note = C9Orf72 TTCN PAM targeting sequence
  source 1..20: mol_type = other RNA
ctatggagctatctgcatat

SEQ ID NO: 5804 - RNA, 20 nt, synthetic construct
  misc_feature 1..20: note = C9Orf72 TTCN PAM targeting sequence
  source 1..20: mol_type = other RNA
tcttccagatctgcctccag

SEQ ID NO: 5805 - RNA, 20 nt, synthetic construct
  misc_feature 1..20: note = C9Orf72 TTCN PAM targeting sequence
  source 1..20: mol_type = other RNA
tccagatctgcctccaggca

SEQ ID NO: 5806 - RNA, 20 nt, synthetic construct
  misc_feature 1..20: note = C9Orf72 TTCN PAM targeting sequence
  source 1..20: mol_type = other RNA
agatctgcctccaggcatta

SEQ ID NO: 5807 - RNA, 20 nt, synthetic construct
  misc_feature 1..20: note = C9Orf72 TTCN PAM targeting sequence
  source 1..20: mol_type = other RNA
tgtctattggtccatttaca

SEQ ID NO: 5808 - RNA, 20 nt, synthetic construct
  misc_feature 1..20: note = C9Orf72 TTCN PAM targeting sequence
  source 1..20: mol_type = other RNA
aagatgttggtgctaataga

SEQ ID NO: 5809 - RNA, 20 nt, synthetic construct
  misc_feature 1..20: note = C9Orf72 TTCN PAM targeting sequence
  source 1..20: mol_type = other RNA
agtaccacattatagcttaa

SEQ ID NO: 5810 - RNA, 20 nt, synthetic construct
  misc_feature 1..20: note = C9Orf72 TTCN PAM targeting sequence
  source 1..20: mol_type = other RNA
taggaggaagtgctcctgag

SEQ ID NO: 5811 - RNA, 20 nt, synthetic construct
  misc_feature 1..20: note = C9Orf72 TTCN PAM targeting sequence
  source 1..20: mol_type = other RNA
tcctatgaaacaattttata

SEQ ID NO: 5812 - RNA, 20 nt, synthetic construct
  misc_feature 1..20: note = C9Orf72 TTCN PAM targeting sequence
  source 1..20: mol_type = other RNA
tgcctttattgtggtgggac

SEQ ID NO: 5813 - RNA, 20 nt, synthetic construct
  misc_feature 1..20: note = C9Orf72 TTCN PAM targeting sequence
  source 1..20: mol_type = other RNA
cccaccacccacctgtccca

SEQ ID NO: 5814 - RNA, 20 nt, synthetic construct
  misc_feature 1..20: note = C9Orf72 TTCN PAM targeting sequence
  source 1..20: mol_type = other RNA
ataaataaaaccttccttca

SEQ ID NO: 5815 - RNA, 20 nt, synthetic construct
  misc_feature 1..20: note = C9Orf72 TTCN PAM targeting sequence
  source 1..20: mol_type = other RNA
ttcattcaaaccccaagtta

SEQ ID NO: 5816 - RNA, 20 nt, synthetic construct
  misc_feature 1..20: note = C9Orf72 TTCN PAM targeting sequence
  source 1..20: mol_type = other RNA
ttcaaaccccaagttaatac

SEQ ID NO: 5817 - RNA, 20 nt, synthetic construct
  misc_feature 1..20: note = C9Orf72 TTCN PAM targeting sequence
  source 1..20: mol_type = other RNA
aaccccaagttaatactcgc

SEQ ID NO: 5818 - RNA, 20 nt, synthetic construct
  misc_feature 1..20: note = C9Orf72 TTCN PAM targeting sequence
  source 1..20: mol_type = other RNA
ttggctccaaaaatgtcaag

SEQ ID NO: 5819 - RNA, 20 nt, synthetic construct
  misc_feature 1..20: note = C9Orf72 TTCN PAM targeting sequence
  source 1..20: mol_type = other RNA
cggccagataagattagatt

SEQ ID NO: 5820 - RNA, 20 nt, synthetic construct
  misc_feature 1..20: note = C9Orf72 TTCN PAM targeting sequence
  source 1..20: mol_type = other RNA
tgtaaatgctcatgaagacg

SEQ ID NO: 5821 - RNA, 20 nt, synthetic construct
  misc_feature 1..20: note = C9Orf72 TTCN PAM targeting sequence
  source 1..20: mol_type = other RNA
tgagcatttacatgaaaatg

SEQ ID NO: 5822 - RNA, 20 nt, synthetic construct
  misc_feature 1..20: note = C9Orf72 TTCN PAM targeting sequence
  source 1..20: mol_type = other RNA
tcttcatgagcatttacatg

SEQ ID NO: 5823 - RNA, 20 nt, synthetic construct
  misc_feature 1..20: note = C9Orf72 TTCN PAM targeting sequence
  source 1..20: mol_type = other RNA
aacactgcagagaacattaa

SEQ ID NO: 5824 - RNA, 20 nt, synthetic construct
  misc_feature 1..20: note = C9Orf72 TTCN PAM targeting sequence
  source 1..20: mol_type = other RNA
ctgcagtgttggaaattgct

SEQ ID NO: 5825 - RNA, 20 nt, synthetic construct
  misc_feature 1..20: note = C9Orf72 TTCN PAM targeting sequence
  source 1..20: mol_type = other RNA
tgaggtggaggttctgatgg

SEQ ID NO: 5826 - RNA, 20 nt, synthetic construct
  misc_feature 1..20: note = C9Orf72 TTCN PAM targeting sequence
  source 1..20: mol_type = other RNA
gatgggaaatctagggagaa

SEQ ID NO: 5827 - RNA, 20 nt, synthetic construct
  misc_feature 1..20: note = C9Orf72 TTCN PAM targeting sequence
  source 1..20: mol_type = other RNA
catcagaacctccacctcag

SEQ ID NO: 5828 - RNA, 20 nt, synthetic construct
  misc_feature 1..20: note = C9Orf72 TTCN PAM targeting sequence
  source 1..20: mol_type = other RNA
ccctagatttcccatcagaa

SEQ ID NO: 5829 - RNA, 20 nt, synthetic construct
  misc_feature 1..20: note = C9Orf72 TTCN PAM targeting sequence
  source 1..20: mol_type = other RNA
gctcaacatttctccctaga

SEQ ID NO: 5830 - RNA, 20 nt, synthetic construct
  misc_feature 1..20: note = C9Orf72 TTCN PAM targeting sequence
  source 1..20: mol_type = other RNA
tatcaataaagtaggagaga

SEQ ID NO: 5831 - RNA, 20 nt, synthetic construct
  misc_feature 1..20: note = C9Orf72 TTCN PAM targeting sequence
  source 1..20: mol_type = other RNA
ctcctactttattgatagga

SEQ ID NO: 5832 - RNA, 20 nt, synthetic construct
  misc_feature 1..20: note = C9Orf72 TTCN PAM targeting sequence
  source 1..20: mol_type = other RNA
ctttgctaagccacttctct

SEQ ID NO: 5833 - RNA, 20 nt, synthetic construct
  misc_feature 1..20: note = C9Orf72 TTCN PAM targeting sequence
  source 1..20: mol_type = other RNA
ttgtttaagccccctagtat

SEQ ID NO: 5834 - RNA, 20 nt, synthetic construct
  misc_feature 1..20: note = C9Orf72 TTCN PAM targeting sequence
  source 1..20: mol_type = other RNA
gttcattgtttaagccccct

SEQ ID NO: 5835 - RNA, 20 nt, synthetic construct
  misc_feature 1..20: note = C9Orf72 TTCN PAM targeting sequence
  source 1..20: mol_type = other RNA
cattgtctccatgctgccac

SEQ ID NO: 5836 - RNA, 20 nt, synthetic construct
  misc_feature 1..20: note = C9Orf72 TTCN PAM targeting sequence
  source 1..20: mol_type = other RNA
agagctactttttataaccc

SEQ ID NO: 5837 - RNA, 20 nt, synthetic construct
  misc_feature 1..20: note = C9Orf72 TTCN PAM targeting sequence
  source 1..20: mol_type = other RNA
ctcagacaccactgagccag

SEQ ID NO: 5838 - RNA, 20 nt, synthetic construct
  misc_feature 1..20: note = C9Orf72 TTCN PAM targeting sequence
  source 1..20: mol_type = other RNA
tcattgtgggacattctctc

SEQ ID NO: 5839 - RNA, 20 nt, synthetic construct
  misc_feature 1..20: note = C9Orf72 TTCN PAM targeting sequence
  source 1..20: mol_type = other RNA
gtatctgtgatatccaatac

SEQ ID NO: 5840 - RNA, 20 nt, synthetic construct
  misc_feature 1..20: note = C9Orf72 TTCN PAM targeting sequence
  source 1..20: mol_type = other RNA
tagccttactagccacatgt

SEQ ID NO: 5841 - RNA, 20 nt, synthetic construct
  misc_feature 1..20: note = C9Orf72 TTCN PAM targeting sequence
  source 1..20: mol_type = other RNA
aaccacttgtgactactgag

SEQ ID NO: 5842 - RNA, 20 nt, synthetic construct
  misc_feature 1..20: note = C9Orf72 TTCN PAM targeting sequence
  source 1..20: mol_type = other RNA
agtataaagtttgatttttc

SEQ ID NO: 5843 - RNA, 20 nt, synthetic construct
  misc_feature 1..20: note = C9Orf72 TTCN PAM targeting sequence
  source 1..20: mol_type = other RNA
gattagaaaagtgacacatg

SEQ ID NO: 5844 - RNA, 20 nt, synthetic construct
  misc_feature 1..20: note = C9Orf72 TTCN PAM targeting sequence
  source 1..20: mol_type = other RNA
aatcagaaaaatcaaacttt

SEQ ID NO: 5845 - RNA, 20 nt, synthetic construct
  misc_feature 1..20: note = C9Orf72 TTCN PAM targeting sequence
  source 1..20: mol_type = other RNA
gtcacaaacatgtgtcactt

SEQ ID NO: 5846 - RNA, 20 nt, synthetic construct
  misc_feature 1..20: note = C9Orf72 TTCN PAM targeting sequence
  source 1..20: mol_type = other RNA
aagttttctgtcacaaacat

SEQ ID NO: 5847 - RNA, 20 nt, synthetic construct
  misc_feature 1..20: note = C9Orf72 TTCN PAM targeting sequence
  source 1..20: mol_type = other RNA
ctcttggtattactatagat

SEQ ID NO: 5848 - RNA, 20 nt, synthetic construct
  misc_feature 1..20: note = C9Orf72 TTCN PAM targeting sequence
  source 1..20: mol_type = other RNA
tttatcatctgtggacatat

SEQ ID NO: 5849 - RNA, 20 nt, synthetic construct
  misc_feature 1..20: note = C9Orf72 TTCN PAM targeting sequence
  source 1..20: mol_type = other RNA
agtacagttttgtatcctgc

SEQ ID NO: 5850 - RNA, 20 nt, synthetic construct
  misc_feature 1..20: note = C9Orf72 TTCN PAM targeting sequence
  source 1..20: mol_type = other RNA
catgagagacatcttcaact

SEQ ID NO: 5851 - RNA, 20 nt, synthetic construct
  misc_feature 1..20: note = C9Orf72 TTCN PAM targeting sequence
  source 1..20: mol_type = other RNA
actataattgatcatatttt

SEQ ID NO: 5852 - RNA, 20 nt, synthetic construct
  misc_feature 1..20: note = C9Orf72 TTCN PAM targeting sequence
  source 1..20: mol_type = other RNA
gggcctaaaatatgatcaat

SEQ ID NO: 5853 - RNA, 20 nt, synthetic construct
  misc_feature 1..20: note = C9Orf72 TTCN PAM targeting sequence
  source 1..20: mol_type = other RNA
aatttggtcagagatgagat

SEQ ID NO: 5854 - RNA, 20 nt, synthetic construct
  misc_feature 1..20: note = C9Orf72 TTCN PAM targeting sequence
  source 1..20: mol_type = other RNA
ctttgtttctaatttggtca

SEQ ID NO: 5855 - RNA, 20 nt, synthetic construct
  misc_feature 1..20: note = C9Orf72 TTCN PAM targeting sequence
  source 1..20: mol_type = other RNA
tttttgttttagggtttctc

SEQ ID NO: 5856 - RNA, 20 nt, synthetic construct
  misc_feature 1..20: note = C9Orf72 TTCN PAM targeting sequence
  source 1..20: mol_type = other RNA
agtttatagggtgttgggtg

SEQ ID NO: 5857 - RNA, 20 nt, synthetic construct
  misc_feature 1..20: note = C9Orf72 TTCN PAM targeting sequence
  source 1..20: mol_type = other RNA
ctggacatcaacaagggatg

SEQ ID NO: 5858 - RNA, 20 nt, synthetic construct
  misc_feature 1..20: note = C9Orf72 TTCN PAM targeting sequence
  source 1..20: mol_type = other RNA
tcccttgttgatgtccagag

SEQ ID NO: 5859 - RNA, 20 nt, synthetic construct
  misc_feature 1..20: note = C9Orf72 TTCN PAM targeting sequence
  source 1..20: mol_type = other RNA
ttggaaataatcatgtttct

SEQ ID NO: 5860 - RNA, 20 nt, synthetic construct
  misc_feature 1..20: note = C9Orf72 TTCN PAM targeting sequence
  source 1..20: mol_type = other RNA
aatgaattgccttatgctgg

SEQ ID NO: 5861 - RNA, 20 nt, synthetic construct
  misc_feature 1..20: note = C9Orf72 TTCN PAM targeting sequence
  source 1..20: mol_type = other RNA
ttgctatttttccaattgac

SEQ ID NO: 5862 - RNA, 20 nt, synthetic construct
  misc_feature 1..20: note = C9Orf72 TTCN PAM targeting sequence
  source 1..20: mol_type = other RNA
aattgacactttagaataca

SEQ ID NO: 5863 - RNA, 20 nt, synthetic construct
  misc_feature 1..20: note = C9Orf72 TTCN PAM targeting sequence
  source 1..20: mol_type = other RNA
aaagtgtcaattggaaaaat

SEQ ID NO: 5864 - RNA, 20 nt, synthetic construct
  misc_feature 1..20: note = C9Orf72 TTCN PAM targeting sequence
  source 1..20: mol_type = other RNA
ggataatgcaaaggctcaga

SEQ ID NO: 5865 - RNA, 20 nt, synthetic construct
  misc_feature 1..20: note = C9Orf72 TTCN PAM targeting sequence
  source 1..20: mol_type = other RNA
gatgacaagtatatgtgtgt

SEQ ID NO: 5866 - RNA, 20 nt, synthetic construct
  misc_feature 1..20: note = C9Orf72 TTCN PAM targeting sequence
  source 1..20: mol_type = other RNA
tggggctttgccagttcaga

SEQ ID NO: 5867 - RNA, 20 nt, synthetic construct
  misc_feature 1..20: note = C9Orf72 TTCN PAM targeting sequence
  source 1..20: mol_type = other RNA
tcttaaaaaaaaaaaaaaaa

SEQ ID NO: 5868 - RNA, 20 nt, synthetic construct
  misc_feature 1..20: note = C9Orf72 TTCN PAM targeting sequence
  source 1..20: mol_type = other RNA
agcaattctcctgcctcagc

SEQ ID NO: 5869 - RNA, 20 nt, synthetic construct
  misc_feature 1..20: note = C9Orf72 TTCN PAM targeting sequence
  source 1..20: mol_type = other RNA
cctgcctcagcctcctgagt

SEQ ID NO: 5870 - RNA, 20 nt, synthetic construct
  misc_feature 1..20: note = C9Orf72 TTCN PAM targeting sequence
  source 1..20: mol_type = other RNA
ccattttggccaggctggtc

SEQ ID NO: 5871 - RNA, 20 nt, synthetic construct
  misc_feature 1..20: note = C9Orf72 TTCN PAM targeting sequence
  source 1..20: mol_type = other RNA
agaccagcctggccaaaatg

SEQ ID NO: 5872 - RNA, 20 nt, synthetic construct
  misc_feature 1..20: note = C9Orf72 TTCN PAM targeting sequence
  source 1..20: mol_type = other RNA
tggattaaagcccactgtgg

SEQ ID NO: 5873 - RNA, 20 nt, synthetic construct
  misc_feature 1..20: note = C9Orf72 TTCN PAM targeting sequence
  source 1..20: mol_type = other RNA
ctttgcttagagagcccttc

SEQ ID NO: 5874 - RNA, 20 nt, synthetic construct
  misc_feature 1..20: note = C9Orf72 TTCN PAM targeting sequence
  source 1..20: mol_type = other RNA
tccaagacaaccgtttctct

SEQ ID NO: 5875 - RNA, 20 nt, synthetic construct
  misc_feature 1..20: note = C9Orf72 TTCN PAM targeting sequence
  source 1..20: mol_type = other RNA
agggatgatgtcttttacag

SEQ ID NO: 5876 - RNA, 20 nt, synthetic construct
  misc_feature 1..20: note = C9Orf72 TTCN PAM targeting sequence
  source 1..20: mol_type = other RNA
ccacctgtaaaagacatcat

SEQ ID NO: 5877 - RNA, 20 nt, synthetic construct
  misc_feature 1..20: note = C9Orf72 TTCN PAM targeting sequence
  source 1..20: mol_type = other RNA
actattatgctaccacatta

SEQ ID NO: 5878 - RNA, 20 nt, synthetic construct
  misc_feature 1..20: note = C9Orf72 TTCN PAM targeting sequence
  source 1..20: mol_type = other RNA
caggctgcagctctttcttc

SEQ ID NO: 5879 - RNA, 20 nt, synthetic construct
  misc_feature 1..20: note = C9Orf72 TTCN PAM targeting sequence
  source 1..20: mol_type = other RNA
tctataatggctgagtccac

SEQ ID NO: 5880 - RNA, 20 nt, synthetic construct
  misc_feature 1..20: note = C9Orf72 TTCN PAM targeting sequence
  source 1..20: mol_type = other RNA
ataatggctgagtccacatc

SEQ ID NO: 5881 - RNA, 20 nt, synthetic construct
  misc_feature 1..20: note = C9Orf72 TTCN PAM targeting sequence
  source 1..20: mol_type = other RNA
ggctgaaggccaaggaagcc

SEQ ID NO: 5882 - RNA, 20 nt, synthetic construct
  misc_feature 1..20: note = C9Orf72 TTCN PAM targeting sequence
  source 1..20: mol_type = other RNA
gccagaaggcttgatgtgga

SEQ ID NO: 5883 - RNA, 20 nt, synthetic construct
  misc_feature 1..20: note = C9Orf72 TTCN PAM targeting sequence
  source 1..20: mol_type = other RNA
ttggccttcagccagaaggc

SEQ ID NO: 5884 - RNA, 20 nt, synthetic construct
  misc_feature 1..20: note = C9Orf72 TTCN PAM targeting sequence
  source 1..20: mol_type = other RNA
tgtcaggcggcttccttggc

SEQ ID NO: 5885 - RNA, 20 nt, synthetic construct
  misc_feature 1..20: note = C9Orf72 TTCN PAM targeting sequence
  source 1..20: mol_type = other RNA
aaagaaaaggtcctttcaaa

SEQ ID NO: 5886 - RNA, 20 nt, synthetic construct
  misc_feature 1..20: note = C9Orf72 TTCN PAM targeting sequence
  source 1..20: mol_type = other RNA
tttgaaacatcatctgtaca

SEQ ID NO: 5887 - RNA, 20 nt, synthetic construct
  misc_feature 1..20: note = C9Orf72 TTCN PAM targeting sequence
  source 1..20: mol_type = other RNA
aaagccccacaatggctctt

SEQ ID NO: 5888 - RNA, 20 nt, synthetic construct
  misc_feature 1..20: note = C9Orf72 TTCN PAM targeting sequence
  source 1..20: mol_type = other RNA
ttgctggctactttagggag

SEQ ID NO: 5889 - RNA, 20 nt, synthetic construct
  misc_feature 1..20: note = C9Orf72 TTCN PAM targeting sequence
  source 1..20: mol_type = other RNA
gcttcttttcacagtcctga

SEQ ID NO: 5890 - RNA, 20 nt, synthetic construct
  misc_feature 1..20: note = C9Orf72 TTCN PAM targeting sequence
  source 1..20: mol_type = other RNA
tttcacagtcctgacttgat

SEQ ID NO: 5891 - RNA, 20 nt, synthetic construct
  misc_feature 1..20: note = C9Orf72 TTCN PAM targeting sequence
  source 1..20: mol_type = other RNA
cagtcctgacttgatcttac

SEQ ID NO: 5892 - RNA, 20 nt, synthetic construct
  misc_feature 1..20: note = C9Orf72 TTCN PAM targeting sequence
  source 1..20: mol_type = other RNA
ctcagagttgcttgggtgag

SEQ ID NO: 5893 - RNA, 20 nt, synthetic construct
  misc_feature 1..20: note = C9Orf72 TTCN PAM targeting sequence
  source 1..20: mol_type = other RNA
ggggcctggataggcttgtg

SEQ ID NO: 5894 - RNA, 20 nt, synthetic construct
  misc_feature 1..20: note = C9Orf72 TTCN PAM targeting sequence
  source 1..20: mol_type = other RNA
aaatctttggtcttcaaatt

SEQ ID NO: 5895 - RNA, 20 nt, synthetic construct
  misc_feature 1..20: note = C9Orf72 TTCN PAM targeting sequence
  source 1..20: mol_type = other RNA
aattgttctaaaaagcaccc

SEQ ID NO: 5896 - RNA, 20 nt, synthetic construct
  misc_feature 1..20: note = C9Orf72 TTCN PAM targeting sequence
  source 1..20: mol_type = other RNA
aaaaagcacccgtttttaga

SEQ ID NO: 5897 - RNA, 20 nt, synthetic construct
  misc_feature 1..20: note = C9Orf72 TTCN PAM targeting sequence
  source 1..20: mol_type = other RNA
tctccatcccttatcactgc

SEQ ID NO: 5898 - RNA, 20 nt, synthetic construct
  misc_feature 1..20: note = C9Orf72 TTCN PAM targeting sequence
  source 1..20: mol_type = other RNA
gatgttgagaaactgcccat

SEQ ID NO: 5899 - RNA, 20 nt, synthetic construct
  misc_feature 1..20: note = C9Orf72 TTCN PAM targeting sequence
  source 1..20: mol_type = other RNA
caacatctgaaccacattcc

SEQ ID NO: 5900 - RNA, 20 nt, synthetic construct
  misc_feature 1..20: note = C9Orf72 TTCN PAM targeting sequence
  source 1..20: mol_type = other RNA
agcagatgtgatgggcagtt

SEQ ID NO: 5901 - RNA, 20 nt, synthetic construct
  misc_feature 1..20: note = C9Orf72 TTCN PAM targeting sequence
  source 1..20: mol_type = other RNA
gccttgacctcccaaagtgc

SEQ ID NO: 5902 - RNA, 20 nt, synthetic construct
  misc_feature 1..20: note = C9Orf72 TTCN PAM targeting sequence
  source 1..20: mol_type = other RNA
agaccagcctgggaaacgta

SEQ ID NO: 5903 - RNA, 20 nt, synthetic construct
  misc_feature 1..20: note = C9Orf72 TTCN PAM targeting sequence
  source 1..20: mol_type = other RNA
caggctggtctggaactcct

SEQ ID NO: 5904 - RNA, 20 nt, synthetic construct
  misc_feature 1..20: note = C9Orf72 TTCN PAM targeting sequence
  source 1..20: mol_type = other RNA
tctcctcacacttgttactt

SEQ ID NO: 5905 - RNA, 20 nt, synthetic construct
  misc_feature 1..20: note = C9Orf72 TTCN PAM targeting sequence
  source 1..20: mol_type = other RNA
tcttgacatatattatttca

SEQ ID NO: 5906 - RNA, 20 nt, synthetic construct
  misc_feature 1..20: note = C9Orf72 TTCN PAM targeting sequence
  source 1..20: mol_type = other RNA
agataatctgttagttcctc

SEQ ID NO: 5907 - RNA, 20 nt, synthetic construct
  misc_feature 1..20: note = C9Orf72 TTCN PAM targeting sequence
  source 1..20: mol_type = other RNA
gttccagataatctgttagt

SEQ ID NO: 5908 - RNA, 20 nt, synthetic construct
  misc_feature 1..20: note = C9Orf72 TTCN PAM targeting sequence
  source 1..20: mol_type = other RNA
tcagttccagataatctgtt

SEQ ID NO: 5909 - RNA, 20 nt, synthetic construct
  misc_feature 1..20: note = C9Orf72 TTCN PAM targeting sequence
  source 1..20: mol_type = other RNA
tttcttcagttccagataat

SEQ ID NO: 5910 - RNA, 20 nt, synthetic construct
  misc_feature 1..20: note = C9Orf72 TTCN PAM targeting sequence
  source 1..20: mol_type = other RNA
tgaaaatgcttgtgcgtcat

SEQ ID NO: 5911 - RNA, 20 nt, synthetic construct
  misc_feature 1..20: note = C9Orf72 TTCN PAM targeting sequence
  source 1..20: mol_type = other RNA
agaaataattaataacttca

SEQ ID NO: 5912 - RNA, 20 nt, synthetic construct
  misc_feature 1..20: note = C9Orf72 TTCN PAM targeting sequence
  source 1..20: mol_type = other RNA
taccatgtgcatgacgcaca

SEQ ID NO: 5913 - RNA, 20 nt, synthetic construct
  misc_feature 1..20: note = C9Orf72 TTCN PAM targeting sequence
  source 1..20: mol_type = other RNA
acgaaggggtgtctgtcata

SEQ ID NO: 5914 - RNA, 20 nt, synthetic construct
  misc_feature 1..20: note = C9Orf72 TTCN PAM targeting sequence
  source 1..20: mol_type = other RNA
tggaattcttaccatgtgca

SEQ ID NO: 5915 - RNA, 20 nt, synthetic construct
  misc_feature 1..20: note = C9Orf72 TTCN PAM targeting sequence
  source 1..20: mol_type = other RNA
ttgttgctcctcatcctccc

SEQ ID NO: 5916 - RNA, 20 nt, synthetic construct
  misc_feature 1..20: note = C9Orf72 TTCN PAM targeting sequence
  source 1..20: mol_type = other RNA
tgtgtgtgtgtgaagccctc

SEQ ID NO: 5917 - RNA, 20 nt, synthetic construct
  misc_feature 1..20: note = C9Orf72 TTCN PAM targeting sequence
  source 1..20: mol_type = other RNA
cacacacacaggaagtgcag

SEQ ID NO: 5918 - RNA, 20 nt, synthetic construct
  misc_feature 1..20: note = C9Orf72 TTCN PAM targeting sequence
  source 1..20: mol_type = other RNA
cttccttcccacctccctct

SEQ ID NO: 5919 - RNA, 20 nt, synthetic construct
  misc_feature 1..20: note = C9Orf72 TTCN PAM targeting sequence
  source 1..20: mol_type = other RNA
ttcccacctccctctccatg

SEQ ID NO: 5920 - RNA, 20 nt, synthetic construct
  misc_feature 1..20: note = C9Orf72 TTCN PAM targeting sequence
  source 1..20: mol_type = other RNA
cacctccctctccatgcggc

SEQ ID NO: 5921 - RNA, 20 nt, synthetic construct
  misc_feature 1..20: note = C9Orf72 TTCN PAM targeting sequence
  source 1..20: mol_type = other RNA
tcatgcctccaccctggcct

SEQ ID NO: 5922 - RNA, 20 nt, synthetic construct
  misc_feature 1..20: note = C9Orf72 TTCN PAM targeting sequence
  source 1..20: mol_type = other RNA
attttcctcatgcctccacc

SEQ ID NO: 5923 - RNA, 20 nt, synthetic construct
  misc_feature 1..20: note = C9Orf72 TTCN PAM targeting sequence
  source 1..20: mol_type = other RNA
atggatcatgatatctctaa

SEQ ID NO: 5924 - RNA, 20 nt, synthetic construct
  misc_feature 1..20: note = C9Orf72 TTCN PAM targeting sequence
  source 1..20: mol_type = other RNA
tttgctatcactcattgaca

SEQ ID NO: 5925 - RNA, 20 nt, synthetic construct
  misc_feature 1..20: note = C9Orf72 TTCN PAM targeting sequence
  source 1..20: mol_type = other RNA
attttgtgtagcccgcccaa

SEQ ID NO: 5926 - RNA, 20 nt, synthetic construct
  misc_feature 1..20: note = C9Orf72 TTCN PAM targeting sequence
  source 1..20: mol_type = other RNA
ttactggataccttctcaaa

SEQ ID NO: 5927 - RNA, 20 nt, synthetic construct
  misc_feature 1..20: note = C9Orf72 TTCN PAM targeting sequence
  source 1..20: mol_type = other RNA
caaaggctttgatatgctat

SEQ ID NO: 5928 - RNA, 20 nt, synthetic construct
  misc_feature 1..20: note = C9Orf72 TTCN PAM targeting sequence
  source 1..20: mol_type = other RNA
agggtggagacgatgtagta

SEQ ID NO: 5929 - RNA, 20 nt, synthetic construct
  misc_feature 1..20: note = C9Orf72 TTCN PAM targeting sequence
  source 1..20: mol_type = other RNA
gtggtcaaatgagtttacaa

SEQ ID NO: 5930 - RNA, 20 nt, synthetic construct
  misc_feature 1..20: note = C9Orf72 TTCN PAM targeting sequence
  source 1..20: mol_type = other RNA
ttctgtggtcaaatgagttt

SEQ ID NO: 5931 - RNA, 20 nt, synthetic construct
  misc_feature 1..20: note = C9Orf72 TTCN PAM targeting sequence
  source 1..20: mol_type = other RNA
ctgaccatcactcaggactg

SEQ ID NO: 5932 - RNA, 20 nt, synthetic construct
  misc_feature 1..20: note = C9Orf72 TTCN PAM targeting sequence
  source 1..20: mol_type = other RNA
gatttttctcctttttgctt

SEQ ID NO: 5933 - RNA, 20 nt, synthetic construct
  misc_feature 1..20: note = C9Orf72 TTCN PAM targeting sequence
  source 1..20: mol_type = other RNA
cctttttgctttacttcccc

SEQ ID NO: 5934 - RNA, 20 nt, synthetic construct
  misc_feature 1..20: note = C9Orf72 TTCN PAM targeting sequence
  source 1..20: mol_type = other RNA
ccaccccactgagctaactc

SEQ ID NO: 5935 - RNA, 20 nt, synthetic construct
  misc_feature 1..20: note = C9Orf72 TTCN PAM targeting sequence
  source 1..20: mol_type = other RNA
cctctaggattgggagttag

SEQ ID NO: 5936 - RNA, 20 nt, synthetic construct
  misc_feature 1..20: note = C9Orf72 TTCN PAM targeting sequence
  source 1..20: mol_type = other RNA
tctcttctcctctaggattg

SEQ ID NO: 5937 - RNA, 20 nt, synthetic construct
  misc_feature 1..20: note = C9Orf72 TTCN PAM targeting sequence
  source 1..20: mol_type = other RNA
cacatttgagggtaattgtc

SEQ ID NO: 5938 - RNA, 20 nt, synthetic construct
  misc_feature 1..20: note = C9Orf72 TTCN PAM targeting sequence
  source 1..20: mol_type = other RNA
ctcaacgtgtggtctgggaa

SEQ ID NO: 5939 - RNA, 20 nt, synthetic construct
  misc_feature 1..20: note = C9Orf72 TTCN PAM targeting sequence
  source 1..20: mol_type = other RNA
cagaccacacgttgagggaa

SEQ ID NO: 5940 - RNA, 20 nt, synthetic construct
  misc_feature 1..20: note = C9Orf72 TTCN PAM targeting sequence
  source 1..20: mol_type = other RNA
ttttgctcccagatgatatc

SEQ ID NO: 5941 - RNA, 20 nt, synthetic construct
  misc_feature 1..20: note = C9Orf72 TTCN PAM targeting sequence
  source 1..20: mol_type = other RNA
cgagtctcctcctctcagat

SEQ ID NO: 5942 - RNA, 20 nt, synthetic construct
  misc_feature 1..20: note = C9Orf72 TTCN PAM targeting sequence
  source 1..20: mol_type = other RNA
gtacatctgagaggaggaga

SEQ ID NO: 5943 - RNA, 20 nt, synthetic construct
  misc_feature 1..20: note = C9Orf72 TTCN PAM targeting sequence
  source 1..20: mol_type = other RNA
gattcagtacatctgagagg

SEQ ID NO: 5944 - RNA, 20 nt, synthetic construct
  misc_feature 1..20: note = C9Orf72 TTCN PAM targeting sequence
  source 1..20: mol_type = other RNA
gcaagatccctggtgattca

SEQ ID NO: 5945 - RNA, 20 nt, synthetic construct
  misc_feature 1..20: note = C9Orf72 TTCN PAM targeting sequence
  source 1..20: mol_type = other RNA
catgcacattaaagtttgag

SEQ ID NO: 5946 - RNA, 20 nt, synthetic construct
  misc_feature 1..20: note = C9Orf72 TTCN PAM targeting sequence
  source 1..20: mol_type = other RNA
gatttagtgtatctggggtg

SEQ ID NO: 5947 - RNA, 20 nt, synthetic construct
  misc_feature 1..20: note = C9Orf72 TTCN PAM targeting sequence
  source 1..20: mol_type = other RNA
tgggcctcaccccagataca

SEQ ID NO: 5948 - RNA, 20 nt, synthetic construct
  misc_feature 1..20: note = C9Orf72 TTCN PAM targeting sequence
  source 1..20: mol_type = other RNA
taagtacattcttgggcctc

SEQ ID NO: 5949 - RNA, 20 nt, synthetic construct
  misc_feature 1..20: note = C9Orf72 TTCN PAM targeting sequence
  source 1..20: mol_type = other RNA
tccaggagattctgatgcac

SEQ ID NO: 5950 - RNA, 20 nt, synthetic construct
  misc_feature 1..20: note = C9Orf72 TTCN PAM targeting sequence
  source 1..20: mol_type = other RNA
gatgcacgtgtgtgtgtgtg

SEQ ID NO: 5951 - RNA, 20 nt, synthetic construct
  misc_feature 1..20: note = C9Orf72 TTCN PAM targeting sequence
  source 1..20: mol_type = other RNA
caggagtccacacacacaca

SEQ ID NO: 5952 - RNA, 20 nt, synthetic construct
  misc_feature 1..20: note = C9Orf72 TTCN PAM targeting sequence
  source 1..20: mol_type = other RNA
gttaccttatagcagggtgc

SEQ ID NO: 5953 - RNA, 20 nt, synthetic construct
  misc_feature 1..20: note = C9Orf72 TTCN PAM targeting sequence
  source 1..20: mol_type = other RNA
cagcagcagctctacaaggt

SEQ ID NO: 5954 - RNA, 20 nt, synthetic construct
  misc_feature 1..20: note = C9Orf72 TTCN PAM targeting sequence
  source 1..20: mol_type = other RNA
ttgttagaaacaagaaaatg

SEQ ID NO: 5955 - RNA, 20 nt, synthetic construct
  misc_feature 1..20: note = C9Orf72 TTCN PAM targeting sequence
  source 1..20: mol_type = other RNA
aacaatgaaagtgattatac

SEQ ID NO: 5956 - RNA, 20 nt, synthetic construct
  misc_feature 1..20: note = C9Orf72 TTCN PAM targeting sequence
  source 1..20: mol_type = other RNA
tgtttctaacaatgaaagtg

SEQ ID NO: 5957 - RNA, 20 nt, synthetic construct
  misc_feature 1..20: note = C9Orf72 TTCN PAM targeting sequence
  source 1..20: mol_type = other RNA
ctctccaaggctccattttc

SEQ ID NO: 5958 - RNA, 20 nt, synthetic construct
  misc_feature 1..20: note = C9Orf72 TTCN PAM targeting sequence
  source 1..20: mol_type = other RNA
cattctctctccaaggctcc

SEQ ID NO: 5959 - RNA, 20 nt, synthetic construct
  misc_feature 1..20: note = C9Orf72 TTCN PAM targeting sequence
  source 1..20: mol_type = other RNA
tgaggtggggaggacagaca

SEQ ID NO: 5960 - RNA, 20 nt, synthetic construct
  misc_feature 1..20: note = C9Orf72 TTCN PAM targeting sequence
  source 1..20: mol_type = other RNA
ttcacaactactgcattgct

SEQ ID NO: 5961 - RNA, 20 nt, synthetic construct
  misc_feature 1..20: note = C9Orf72 TTCN PAM targeting sequence
  source 1..20: mol_type = other RNA
caactactgcattgctaaca

SEQ ID NO: 5962 - RNA, 20 nt, synthetic construct
  misc_feature 1..20: note = C9Orf72 TTCN PAM targeting sequence
  source 1..20: mol_type = other RNA
gtgaaaggccaacaaaacac

SEQ ID NO: 5963 - RNA, 20 nt, synthetic construct
  misc_feature 1..20: note = C9Orf72 TTCN PAM targeting sequence
  source 1..20: mol_type = other RNA
ctgaaaacaaaagcagactc

SEQ ID NO: 5964 - RNA, 20 nt, synthetic construct
  misc_feature 1..20: note = C9Orf72 TTCN PAM targeting sequence
  source 1..20: mol_type = other RNA
tgcttgctaatgataattct

SEQ ID NO: 5965 - RNA, 20 nt, synthetic construct
  misc_feature 1..20: note = C9Orf72 TTCN PAM targeting sequence
  source 1..20: mol_type = other RNA
gattagcttaattgtgtcag

SEQ ID NO: 5966 - RNA, 20 nt, synthetic construct
  misc_feature 1..20: note = C9Orf72 TTCN PAM targeting sequence
  source 1..20: mol_type = other RNA
atcagggcctggcccatttt

SEQ ID NO: 5967 - RNA, 20 nt, synthetic construct
  misc_feature 1..20: note = C9Orf72 TTCN PAM targeting sequence
  source 1..20: mol_type = other RNA
aattatcagcatcatttggg

SEQ ID NO: 5968 - RNA, 20 nt, synthetic construct
  misc_feature 1..20: note = C9Orf72 TTCN PAM targeting sequence
  source 1..20: mol_type = other RNA
tccaacaaggaacttgcttc

SEQ ID NO: 5969 - RNA, 20 nt, synthetic construct
  misc_feature 1..20: note = C9Orf72 TTCN PAM targeting sequence
  source 1..20: mol_type = other RNA
ttgttggaggaaacagccca

SEQ ID NO: 5970 - RNA, 20 nt, synthetic construct
  misc_feature 1..20: note = C9Orf72 TTCN PAM targeting sequence
  source 1..20: mol_type = other RNA
gttcaagttatcttcagctg

SEQ ID NO: 5971 - RNA, 20 nt, synthetic construct
  misc_feature 1..20: note = C9Orf72 TTCN PAM targeting sequence
  source 1..20: mol_type = other RNA
agttatcttcagctgttgca

SEQ ID NO: 5972 - RNA, 20 nt, synthetic construct
  misc_feature 1..20: note = C9Orf72 TTCN PAM targeting sequence
  source 1..20: mol_type = other RNA
gctgttgcatttacatgagc

SEQ ID NO: 5973 - RNA, 20 nt, synthetic construct
  misc_feature 1..20: note = C9Orf72 TTCN PAM targeting sequence
  source 1..20: mol_type = other RNA
cttggtctccagcagggagg

SEQ ID NO: 5974 - RNA, 20 nt, synthetic construct
  misc_feature 1..20: note = C9Orf72 TTCN PAM targeting sequence
  source 1..20: mol_type = other RNA
caggctgccagccatagcgg

SEQ ID NO: 5975 - RNA, 20 nt, synthetic construct
  misc_feature 1..20: note = C9Orf72 TTCN PAM targeting sequence
  source 1..20: mol_type = other RNA
gccgctatggctggcagcct

SEQ ID NO: 5976 - RNA, 20 nt, synthetic construct
  misc_feature 1..20: note = C9Orf72 TTCN PAM targeting sequence
  source 1..20: mol_type = other RNA
ccaggctagccagggtgacc

SEQ ID NO: 5977 - RNA, 20 nt, synthetic construct
  misc_feature 1..20: note = C9Orf72 TTCN PAM targeting sequence
  source 1..20: mol_type = other RNA
cagcttctgaattccaaact

SEQ ID NO: 5978 - RNA, 20 nt, synthetic construct
  misc_feature 1..20: note = C9Orf72 TTCN PAM targeting sequence
  source 1..20: mol_type = other RNA
gaattccaaactgtattccc

SEQ ID NO: 5979 - RNA, 20 nt, synthetic construct
  misc_feature 1..20: note = C9Orf72 TTCN PAM targeting sequence
  source 1..20: mol_type = other RNA
gaagctgggaagaggtcacc

SEQ ID NO: 5980 - RNA, 20 nt, synthetic construct
  misc_feature 1..20: note = C9Orf72 TTCN PAM targeting sequence
  source 1..20: mol_type = other RNA
aaactgtattcccactcaga

SEQ ID NO: 5981 - RNA, 20 nt, synthetic construct
  misc_feature 1..20: note = C9Orf72 TTCN PAM targeting sequence
  source 1..20: mol_type = other RNA
cactcagaggcctgataggg

SEQ ID NO: 5982 - RNA, 20 nt, synthetic construct
  misc_feature 1..20: note = C9Orf72 TTCN PAM targeting sequence
  source 1..20: mol_type = other RNA
taggacatgagaatttcact

SEQ ID NO: 5983 - RNA, 20 nt, synthetic construct
  misc_feature 1..20: note = C9Orf72 TTCN PAM targeting sequence
  source 1..20: mol_type = other RNA
catgtcctaggaaaactctt

SEQ ID NO: 5984 - RNA, 20 nt, synthetic construct
  misc_feature 1..20: note = C9Orf72 TTCN PAM targeting sequence
  source 1..20: mol_type = other RNA
ctgctaaaacagagagggtt

SEQ ID NO: 5985 - RNA, 20 nt, synthetic construct
  misc_feature 1..20: note = C9Orf72 TTCN PAM targeting sequence
  source 1..20: mol_type = other RNA
agatttcctgggtgatctat

SEQ ID NO: 5986 - RNA, 20 nt, synthetic construct
  misc_feature 1..20: note = C9Orf72 TTCN PAM targeting sequence
  source 1..20: mol_type = other RNA
tgggtgatctatctggaatt

SEQ ID NO: 5987 - RNA, 20 nt, synthetic construct
  misc_feature 1..20: note = C9Orf72 TTCN PAM targeting sequence
  source 1..20: mol_type = other RNA
agatagatcacccaggaaat

SEQ ID NO: 5988 - RNA, 20 nt, synthetic construct
  misc_feature 1..20: note = C9Orf72 TTCN PAM targeting sequence
  source 1..20: mol_type = other RNA
aaattccagatagatcaccc

SEQ ID NO: 5989 - RNA, 20 nt, synthetic construct
  misc_feature 1..20: note = C9Orf72 TTCN PAM targeting sequence
  source 1..20: mol_type = other RNA
ctgttccaaattccagatag

SEQ ID NO: 5990 - RNA, 20 nt, synthetic construct
  misc_feature 1..20: note = C9Orf72 TTCN PAM targeting sequence
  source 1..20: mol_type = other RNA
ctgtgagacctaaagcttat

SEQ ID NO: 5991 - RNA, 20 nt, synthetic construct
  misc_feature 1..20: note = C9Orf72 TTCN PAM targeting sequence
  source 1..20: mol_type = other RNA
tcctgtcagattagcaatag

SEQ ID NO: 5992 - RNA, 20 nt, synthetic construct
  misc_feature 1..20: note = C9Orf72 TTCN PAM targeting sequence
  source 1..20: mol_type = other RNA
atgttgggactaatgcttca

SEQ ID NO: 5993 - RNA, 20 nt, synthetic construct
  misc_feature 1..20: note = C9Orf72 TTCN PAM targeting sequence
  source 1..20: mol_type = other RNA
gagataaggggcgtattgaa

SEQ ID NO: 5994 - RNA, 20 nt, synthetic construct
  misc_feature 1..20: note = C9Orf72 TTCN PAM targeting sequence
  source 1..20: mol_type = other RNA
atacgccccttatctcagaa

SEQ ID NO: 5995 - RNA, 20 nt, synthetic construct
  misc_feature 1..20: note = C9Orf72 TTCN PAM targeting sequence
  source 1..20: mol_type = other RNA
aagggattacacactggtca

SEQ ID NO: 5996 - RNA, 20 nt, synthetic construct
  misc_feature 1..20: note = C9Orf72 TTCN PAM targeting sequence
  source 1..20: mol_type = other RNA
aaaacatattaagcatttat

SEQ ID NO: 5997 - RNA, 20 nt, synthetic construct
  misc_feature 1..20: note = C9Orf72 TTCN PAM targeting sequence
  source 1..20: mol_type = other RNA
tggtacctaataaatgctta

SEQ ID NO: 5998 - RNA, 20 nt, synthetic construct
  misc_feature 1..20: note = C9Orf72 TTCN PAM targeting sequence
  source 1..20: mol_type = other RNA
tgcattgcttagggttcctg

SEQ ID NO: 5999 - RNA, 20 nt, synthetic construct
  misc_feature 1..20: note = C9Orf72 TTCN PAM targeting sequence
  source 1..20: mol_type = other RNA
cagccctcaaagagttgaca

SEQ ID NO: 6000 - RNA, 20 nt, synthetic construct
  misc_feature 1..20: note = C9Orf72 TTCN PAM targeting sequence
  source 1..20: mol_type = other RNA
ctaggtagactcctagcaaa

SEQ ID NO: 6001 - RNA, 20 nt, synthetic construct
  misc_feature 1..20: note = C9Orf72 TTCN PAM targeting sequence
  source 1..20: mol_type = other RNA
gtcttaacgattgattccct

SEQ ID NO: 6002 - RNA, 20 nt, synthetic construct
  misc_feature 1..20: note = C9Orf72 TTCN PAM targeting sequence
  source 1..20: mol_type = other RNA
ctagctcccatgacctcttt

SEQ ID NO: 6003 - RNA, 20 nt, synthetic construct
  misc_feature 1..20: note = C9Orf72 TTCN PAM targeting sequence
  source 1..20: mol_type = other RNA
gtcttccctagctcccatga

SEQ ID NO: 6004 - RNA, 20 nt, synthetic construct
  misc_feature 1..20: note = C9Orf72 TTCN PAM targeting sequence
  source 1..20: mol_type = other RNA
ggaacatccactaactacag

SEQ ID NO: 6005 - RNA, 20 nt, synthetic construct
  misc_feature 1..20: note = C9Orf72 TTCN PAM targeting sequence
  source 1..20: mol_type = other RNA
tgaattctgtcttccctagc

SEQ ID NO: 6006 - RNA, 20 nt, synthetic construct
  misc_feature 1..20: note = C9Orf72 TTCN PAM targeting sequence
  source 1..20: mol_type = other RNA
taagcacttccacgtgacta

SEQ ID NO: 6007 - RNA, 20 nt, synthetic construct
  misc_feature 1..20: note = C9Orf72 TTCN PAM targeting sequence
  source 1..20: mol_type = other RNA
acgtgactaacccatttaat

SEQ ID NO: 6008 - RNA, 20 nt, synthetic construct
  misc_feature 1..20: note = C9Orf72 TTCN PAM targeting sequence
  source 1..20: mol_type = other RNA
tcatccatagcatgggtata

SEQ ID NO: 6009 - RNA, 20 nt, synthetic construct
  misc_feature 1..20: note = C9Orf72 TTCN PAM targeting sequence
  source 1..20: mol_type = other RNA
ttttcctcatccatagcatg

SEQ ID NO: 6010 - RNA, 20 nt, synthetic construct
  misc_feature 1..20: note = C9Orf72 TTCN PAM targeting sequence
  source 1..20: mol_type = other RNA
aagcttcattttcctcatcc

SEQ ID NO: 6011 - RNA, 20 nt, synthetic construct
  misc_feature 1..20: note = C9Orf72 TTCN PAM targeting sequence
  source 1..20: mol_type = other RNA
aaccctggaccctgcattta

SEQ ID NO: 6012 - RNA, 20 nt, synthetic construct
  misc_feature 1..20: note = C9Orf72 TTCN PAM targeting sequence
  source 1..20: mol_type = other RNA
taggcactgtatgatactga

SEQ ID NO: 6013 - RNA, 20 nt, synthetic construct
  misc_feature 1..20: note = C9Orf72 TTCN PAM targeting sequence
  source 1..20: mol_type = other RNA
ctctgccttgcctccaccat

SEQ ID NO: 6014 - RNA, 20 nt, synthetic construct
  misc_feature 1..20: note = C9Orf72 TTCN PAM targeting sequence
  source 1..20: mol_type = other RNA
atactgtggaatcccaaggc

SEQ ID NO: 6015 - RNA, 20 nt, synthetic construct
  misc_feature 1..20: note = C9Orf72 TTCN PAM targeting sequence
  source 1..20: mol_type = other RNA
acagtatggaactctgagac

SEQ ID NO: 6016 - RNA, 20 nt, synthetic construct
  misc_feature 1..20: note = C9Orf72 TTCN PAM targeting sequence
  source 1..20: mol_type = other RNA
tggtgtcatgccttgggatt

SEQ ID NO: 6017 - RNA, 20 nt, synthetic construct
  misc_feature 1..20: note = C9Orf72 TTCN PAM targeting sequence
  source 1..20: mol_type = other RNA
cacgccaccggtgggacatt

SEQ ID NO: 6018 - RNA, 20 nt, synthetic construct
  misc_feature 1..20: note = C9Orf72 TTCN PAM targeting sequence
  source 1..20: mol_type = other RNA
cagagttcccacgccaccgg

SEQ ID NO: 6019 - RNA, 20 nt, synthetic construct
  misc_feature 1..20: note = C9Orf72 TTCN PAM targeting sequence
  source 1..20: mol_type = other RNA
aagggaaactggctggacaa

SEQ ID NO: 6020 - RNA, 20 nt, synthetic construct
  misc_feature 1..20: note = C9Orf72 TTCN PAM targeting sequence
  source 1..20: mol_type = other RNA
cttagaacattggcattccc

SEQ ID NO: 6021 - RNA, 20 nt, synthetic construct
  misc_feature 1..20: note = C9Orf72 TTCN PAM targeting sequence
  source 1..20: mol_type = other RNA
ggccccagctgcattcaatt

SEQ ID NO: 6022 - RNA, 20 nt, synthetic construct
  misc_feature 1..20: note = C9Orf72 TTCN PAM targeting sequence
  source 1..20: mol_type = other RNA
attctaaaaaatgtacaact

SEQ ID NO: 6023 - RNA, 20 nt, synthetic construct
  misc_feature 1..20: note = C9Orf72 TTCN PAM targeting sequence
  source 1..20: mol_type = other RNA
aaaaaatgtacaactagaat

SEQ ID NO: 6024 - RNA, 20 nt, synthetic construct
  misc_feature 1..20: note = C9Orf72 TTCN PAM targeting sequence
  source 1..20: mol_type = other RNA
agttgtacattttttagaat

SEQ ID NO: 6025 - RNA, 20 nt, synthetic construct
  misc_feature 1..20: note = C9Orf72 TTCN PAM targeting sequence
  source 1..20: mol_type = other RNA
cattctagttgtacattttt

SEQ ID NO: 6026 - RNA, 20 nt, synthetic construct
  misc_feature 1..20: note = C9Orf72 TTCN PAM targeting sequence
  source 1..20: mol_type = other RNA
tcatcctttgagggtcaaaa

SEQ ID NO: 6027 - RNA, 20 nt, synthetic construct
  misc_feature 1..20: note = C9Orf72 TTCN PAM targeting sequence
  source 1..20: mol_type = other RNA
gactgtattgtaaatttctt

SEQ ID NO: 6028 - RNA, 20 nt, synthetic construct
  misc_feature 1..20: note = C9Orf72 TTCN PAM targeting sequence
  source 1..20: mol_type = other RNA
tgagagcatagtttttttct

SEQ ID NO: 6029 - RNA, 20 nt, synthetic construct
  misc_feature 1..20: note = C9Orf72 TTCN PAM targeting sequence
  source 1..20: mol_type = other RNA
ttttcttctttttttttttt

SEQ ID NO: 6030 - RNA, 20 nt, synthetic construct
  misc_feature 1..20: note = C9Orf72 TTCN PAM targeting sequence
  source 1..20: mol_type = other RNA
tctttttttttttttttgag

SEQ ID NO: 6031 - RNA, 20 nt, synthetic construct
  misc_feature 1..20: note = C9Orf72 TTCN PAM targeting sequence
  source 1..20: mol_type = other RNA
ttttttttttttttgagacg

SEQ ID NO: 6032 - RNA, 20 nt, synthetic construct
  misc_feature 1..20: note = C9Orf72 TTCN PAM targeting sequence
  source 1..20: mol_type = other RNA
cgccattctcctgcctcagc

SEQ ID NO: 6033 - RNA, 20 nt, synthetic construct
  misc_feature 1..20: note = C9Orf72 TTCN PAM targeting sequence
  source 1..20: mol_type = other RNA
cctgcctcagcctcccgagt

SEQ ID NO: 6034 - RNA, 20 nt, synthetic construct
  misc_feature 1..20: note = C9Orf72 TTCN PAM targeting sequence
  source 1..20: mol_type = other RNA
tagagacggggtttcaccgt

SEQ ID NO: 6035 - RNA, 20 nt, synthetic construct
  misc_feature 1..20: note = C9Orf72 TTCN PAM targeting sequence
  source 1..20: mol_type = other RNA
ccgtgttagccaggatggtc

SEQ ID NO: 6036 - RNA, 20 nt, synthetic construct
  misc_feature 1..20: note = C9Orf72 TTCN PAM targeting sequence
  source 1..20: mol_type = other RNA
atgtgcataaaaaatctatg

SEQ ID NO: 6037 - RNA, 20 nt, synthetic construct
  misc_feature 1..20: note = C9Orf72 TTCN PAM targeting sequence
  source 1..20: mol_type = other RNA
aatcaggcataacatgtcaa

SEQ ID NO: 6038 - RNA, 20 nt, synthetic construct
  misc_feature 1..20: note = C9Orf72 TTCN PAM targeting sequence
  source 1..20: mol_type = other RNA
acagttgacagtgctaggat

SEQ ID NO: 6039 - RNA, 20 nt, synthetic construct
  misc_feature 1..20: note = C9Orf72 TTCN PAM targeting sequence
  source 1..20: mol_type = other RNA
gcaatagcaatccacaagcc

SEQ ID NO: 6040 - RNA, 20 nt, synthetic construct
  misc_feature 1..20: note = C9Orf72 TTCN PAM targeting sequence
  source 1..20: mol_type = other RNA
cctcagaaacattcttaata

SEQ ID NO: 6041 - RNA, 20 nt, synthetic construct
  misc_feature 1..20: note = C9Orf72 TTCN PAM targeting sequence
  source 1..20: mol_type = other RNA
gaggcgaatcatataatatc

SEQ ID NO: 6042 - RNA, 20 nt, synthetic construct
  misc_feature 1..20: note = C9Orf72 TTCN PAM targeting sequence
  source 1..20: mol_type = other RNA
taatatctatttctgttcct

SEQ ID NO: 6043 - RNA, 20 nt, synthetic construct
  misc_feature 1..20: note = C9Orf72 TTCN PAM targeting sequence
  source 1..20: mol_type = other RNA
gttcctttatagggtttggt

SEQ ID NO: 6044 - RNA, 20 nt, synthetic construct
  misc_feature 1..20: note = C9Orf72 TTCN PAM targeting sequence
  source 1..20: mol_type = other RNA
tttatagggtttggttagtg

SEQ ID NO: 6045 - RNA, 20 nt, synthetic construct
  misc_feature 1..20: note = C9Orf72 TTCN PAM targeting sequence
  source 1..20: mol_type = other RNA
gacaattaagcatttaaaaa

SEQ ID NO: 6046 - RNA, 20 nt, synthetic construct
  misc_feature 1..20: note = C9Orf72 TTCN PAM targeting sequence
  source 1..20: mol_type = other RNA
tactttttaaatgcttaatt

SEQ ID NO: 6047 - RNA, 20 nt, synthetic construct
  misc_feature 1..20: note = C9Orf72 TTCN PAM targeting sequence
  source 1..20: mol_type = other RNA
ttttaatgcttgtaaatatt

SEQ ID NO: 6048 - RNA, 20 nt, synthetic construct
  misc_feature 1..20: note = C9Orf72 TTCN PAM targeting sequence
  source 1..20: mol_type = other RNA
ctataattataattaacaca

SEQ ID NO: 6049 - RNA, 20 nt, synthetic construct
  misc_feature 1..20: note = C9Orf72 TTCN PAM targeting sequence
  source 1..20: mol_type = other RNA
tacatttatgtgttaattat

SEQ ID NO: 6050 - RNA, 20 nt, synthetic construct
  misc_feature 1..20: note = C9Orf72 TTCN PAM targeting sequence
  source 1..20: mol_type = other RNA
ttaaatcttgcttgcaatag

SEQ ID NO: 6051 - RNA, 20 nt, synthetic construct
  misc_feature 1..20: note = C9Orf72 TTCN PAM targeting sequence
  source 1..20: mol_type = other RNA
ggggaaaaaaacctggtacc

SEQ ID NO: 6052 - RNA, 20 nt, synthetic construct
  misc_feature 1..20: note = C9Orf72 TTCN PAM targeting sequence
  source 1..20: mol_type = other RNA
ccagaagtttatatttcttt

SEQ ID NO: 6053 - RNA, 20 nt, synthetic construct
  misc_feature 1..20: note = C9Orf72 TTCN PAM targeting sequence
  source 1..20: mol_type = other RNA
tgctcaattaaactgttaaa

SEQ ID NO: 6054 - RNA, 20 nt, synthetic construct
  misc_feature 1..20: note = C9Orf72 TTCN PAM targeting sequence
  source 1..20: mol_type = other RNA
cccaggcccccaaagaggcc

SEQ ID NO: 6055 - RNA, 20 nt, synthetic construct
  misc_feature 1..20: note = C9Orf72 TTCN PAM targeting sequence
  source 1..20: mol_type = other RNA
gtgactctgagacttcaagt

SEQ ID NO: 6056 - RNA, 20 nt, synthetic construct
  misc_feature 1..20: note = C9Orf72 TTCN PAM targeting sequence
  source 1..20: mol_type = other RNA
agttagttcctggcactgcc

SEQ ID NO: 6057 - RNA, 20 nt, synthetic construct
  misc_feature 1..20: note = C9Orf72 TTCN PAM targeting sequence
  source 1..20: mol_type = other RNA
tggcactgccttggagccct

SEQ ID NO: 6058 - RNA, 20 nt, synthetic construct
  misc_feature 1..20: note = C9Orf72 TTCN PAM targeting sequence
  source 1..20: mol_type = other RNA
tcaattatagaaaataactg

SEQ ID NO: 6059 - RNA, 20 nt, synthetic construct
  misc_feature 1..20: note = C9Orf72 TTCN PAM targeting sequence
  source 1..20: mol_type = other RNA
attatagaaaataactgagt

SEQ ID NO: 6060 - RNA, 20 nt, synthetic construct
  misc_feature 1..20: note = C9Orf72 TTCN PAM targeting sequence
  source 1..20: mol_type = other RNA
ataattgaagaaagggctcc

SEQ ID NO: 6061 - RNA, 20 nt, synthetic construct
  misc_feature 1..20: note = C9Orf72 TTCN PAM targeting sequence
  source 1..20: mol_type = other RNA
gatagcaaagaaagcctttc

SEQ ID NO: 6062 - RNA, 20 nt, synthetic construct
  misc_feature 1..20: note = C9Orf72 TTCN PAM targeting sequence
  source 1..20: mol_type = other RNA
ttgctatcagaaaactcagt

SEQ ID NO: 6063 - RNA, 20 nt, synthetic construct
  misc_feature 1..20: note = C9Orf72 TTCN PAM targeting sequence
  source 1..20: mol_type = other RNA
ctacttgataacttacactc

SEQ ID NO: 6064 - RNA, 20 nt, synthetic construct
  misc_feature 1..20: note = C9Orf72 TTCN PAM targeting sequence
  source 1..20: mol_type = other RNA
tacaatgttgtctttatgct

SEQ ID NO: 6065 - RNA, 20 nt, synthetic construct
  misc_feature 1..20: note = C9Orf72 TTCN PAM targeting sequence
  source 1..20: mol_type = other RNA
ggcataaaggagaaattgac

SEQ ID NO: 6066 - RNA, 20 nt, synthetic construct
  misc_feature 1..20: note = C9Orf72 TTCN PAM targeting sequence
  source 1..20: mol_type = other RNA
cctttatgcctgaaagcata

SEQ ID NO: 6067 - RNA, 20 nt, synthetic construct
  misc_feature 1..20: note = C9Orf72 TTCN PAM targeting sequence
  source 1..20: mol_type = other RNA
gctctgtcgtggtgtttctg

SEQ ID NO: 6068 - RNA, 20 nt, synthetic construct
  misc_feature 1..20: note = C9Orf72 TTCN PAM targeting sequence
  source 1..20: mol_type = other RNA
gatcccttagctctgtgaaa

SEQ ID NO: 6069 - RNA, 20 nt, synthetic construct
  misc_feature 1..20: note = C9Orf72 TTCN PAM targeting sequence
  source 1..20: mol_type = other RNA
cagagctaagggatcagaaa

SEQ ID NO: 6070 - RNA, 20 nt, synthetic construct
  misc_feature 1..20: note = C9Orf72 TTCN PAM targeting sequence
  source 1..20: mol_type = other RNA
acagcctcttccttcttgtg

SEQ ID NO: 6071 - RNA, 20 nt, synthetic construct
  misc_feature 1..20: note = C9Orf72 TTCN PAM targeting sequence
  source 1..20: mol_type = other RNA
ttcttgtgggcctttggaga

SEQ ID NO: 6072 - RNA, 20 nt, synthetic construct
  misc_feature 1..20: note = C9Orf72 TTCN PAM targeting sequence
  source 1..20: mol_type = other RNA
tgtgggcctttggagaagtt

SEQ ID NO: 6073 - RNA, 20 nt, synthetic construct
  misc_feature 1..20: note = C9Orf72 TTCN PAM targeting sequence
  source 1..20: mol_type = other RNA
ccaaaggcccacaagaagga

SEQ ID NO: 6074 - RNA, 20 nt, synthetic construct
  misc_feature 1..20: note = C9Orf72 TTCN PAM targeting sequence
  source 1..20: mol_type = other RNA
attgacctgaacatgactat

SEQ ID NO: 6075 - RNA, 20 nt, synthetic construct
  misc_feature 1..20: note = C9Orf72 TTCN PAM targeting sequence
  source 1..20: mol_type = other RNA
ggtcaatggaaaataacttc

SEQ ID NO: 6076 - RNA, 20 nt, synthetic construct
  misc_feature 1..20: note = C9Orf72 TTCN PAM targeting sequence
  source 1..20: mol_type = other RNA
atagtcatgttcaggtcaat

SEQ ID NO: 6077 - RNA, 20 nt, synthetic construct
  misc_feature 1..20: note = C9Orf72 TTCN PAM targeting sequence
  source 1..20: mol_type = other RNA
cttctatagtcatgttcagg

SEQ ID NO: 6078 - RNA, 20 nt, synthetic construct
  misc_feature 1..20: note = C9Orf72 TTCN PAM targeting sequence
  source 1..20: mol_type = other RNA
gttctcttctatagtcatgt

SEQ ID NO: 6079 - RNA, 20 nt, synthetic construct
  misc_feature 1..20: note = C9Orf72 TTCN PAM targeting sequence
  source 1..20: mol_type = other RNA
gttcagttctcttctatagt

SEQ ID NO: 6080 - RNA, 20 nt, synthetic construct
  misc_feature 1..20: note = C9Orf72 TTCN PAM targeting sequence
  source 1..20: mol_type = other RNA
tctgggtcttcatttacgtg

SEQ ID NO: 6081 - RNA, 20 nt, synthetic construct
  misc_feature 1..20: note = C9Orf72 TTCN PAM targeting sequence
  source 1..20: mol_type = other RNA
gggtcttcatttacgtggcc

SEQ ID NO: 6082 - RNA, 20 nt, synthetic construct
  misc_feature 1..20: note = C9Orf72 TTCN PAM targeting sequence
  source 1..20: mol_type = other RNA
tttacgtggcccttgtccat

SEQ ID NO: 6083 - RNA, 20 nt, synthetic construct
  misc_feature 1..20: note = C9Orf72 TTCN PAM targeting sequence
  source 1..20: mol_type = other RNA
tctctgtccttgacattttc

SEQ ID NO: 6084 - RNA, 20 nt, synthetic construct
  misc_feature 1..20: note = C9Orf72 TTCN PAM targeting sequence
  source 1..20: mol_type = other RNA
gaaattaactttatcaattg

SEQ ID NO: 6085 - RNA, 20 nt, synthetic construct
  misc_feature 1..20: note = C9Orf72 TTCN PAM targeting sequence
  source 1..20: mol_type = other RNA
gaaaatgtcaaggacagaga

SEQ ID NO: 6086 - RNA, 20 nt, synthetic construct
  misc_feature 1..20: note = C9Orf72 TTCN PAM targeting sequence
  source 1..20: mol_type = other RNA
agtcttaactcccttgagct

SEQ ID NO: 6087 - RNA, 20 nt, synthetic construct
  misc_feature 1..20: note = C9Orf72 TTCN PAM targeting sequence
  source 1..20: mol_type = other RNA
catagtggctgtttacccaa

SEQ ID NO: 6088 - RNA, 20 nt, synthetic construct
  misc_feature 1..20: note = C9Orf72 TTCN PAM targeting sequence
  source 1..20: mol_type = other RNA
tcgatggctgagttttataa

SEQ ID NO: 6089 - RNA, 20 nt, synthetic construct
  misc_feature 1..20: note = C9Orf72 TTCN PAM targeting sequence
  source 1..20: mol_type = other RNA
ttccatactatttgtccaac

SEQ ID NO: 6090 - RNA, 20 nt, synthetic construct
  misc_feature 1..20: note = C9Orf72 TTCN PAM targeting sequence
  source 1..20: mol_type = other RNA
atactatttgtccaactgca

SEQ ID NO: 6091 - RNA, 20 nt, synthetic construct
  misc_feature 1..20: note = C9Orf72 TTCN PAM targeting sequence
  source 1..20: mol_type = other RNA
gagacaactcggttcctgcc

SEQ ID NO: 6092 - RNA, 20 nt, synthetic construct
  misc_feature 1..20: note = C9Orf72 TTCN PAM targeting sequence
  source 1..20: mol_type = other RNA
tgcccctgagagccttctag

SEQ ID NO: 6093 - RNA, 20 nt, synthetic construct
  misc_feature 1..20: note = C9Orf72 TTCN PAM targeting sequence
  source 1..20: mol_type = other RNA
agaaatctcttgtgaaagaa

SEQ ID NO: 6094 - RNA, 20 nt, synthetic construct
  misc_feature 1..20: note = C9Orf72 TTCN PAM targeting sequence
  source 1..20: mol_type = other RNA
agaaggctctcaggggcagg

SEQ ID NO: 6095 - RNA, 20 nt, synthetic construct
  misc_feature 1..20: note = C9Orf72 TTCN PAM targeting sequence
  source 1..20: mol_type = other RNA
caagagatttctagaaggct

SEQ ID NO: 6096 - RNA, 20 nt, synthetic construct
  misc_feature 1..20: note = C9Orf72 TTCN PAM targeting sequence
  source 1..20: mol_type = other RNA
ttcacaagagatttctagaa

SEQ ID NO: 6097 - RNA, 20 nt, synthetic construct
  misc_feature 1..20: note = C9Orf72 TTCN PAM targeting sequence
  source 1..20: mol_type = other RNA
ttttctttcacaagagattt

SEQ ID NO: 6098 - RNA, 20 nt, synthetic construct
  misc_feature 1..20: note = C9Orf72 TTCN PAM targeting sequence
  source 1..20: mol_type = other RNA
tcattttctttcacaagaga

SEQ ID NO: 6099 - RNA, 20 nt, synthetic construct
  misc_feature 1..20: note = C9Orf72 TTCN PAM targeting sequence
  source 1..20: mol_type = other RNA
aggactactgagtaatgcaa

SEQ ID NO: 6100 - RNA, 20 nt, synthetic construct
  misc_feature 1..20: note = C9Orf72 TTCN PAM targeting sequence
  source 1..20: mol_type = other RNA
cacagcagaataataaattt

SEQ ID NO: 6101 - RNA, 20 nt, synthetic construct
  misc_feature 1..20: note = C9Orf72 TTCN PAM targeting sequence
  source 1..20: mol_type = other RNA
gctgtgagaatatatggcaa

SEQ ID NO: 6102 - RNA, 20 nt, synthetic construct
  misc_feature 1..20: note = C9Orf72 TTCN PAM targeting sequence
  source 1..20: mol_type = other RNA
aggtgaaaaacactaaaggt

SEQ ID NO: 6103 - RNA, 20 nt, synthetic construct
  misc_feature 1..20: note = C9Orf72 TTCN PAM targeting sequence
  source 1..20: mol_type = other RNA
ccttgaaatttattattctg

SEQ ID NO: 6104 - RNA, 20 nt, synthetic construct
  misc_feature 1..20: note = C9Orf72 TTCN PAM targeting sequence
  source 1..20: mol_type = other RNA
catatcacctttagtgtttt

SEQ ID NO: 6105 - RNA, 20 nt, synthetic construct
  misc_feature 1..20: note = C9Orf72 TTCN PAM targeting sequence
  source 1..20: mol_type = other RNA
ccatcttctttgccaggtac

SEQ ID NO: 6106 - RNA, 20 nt, synthetic construct
  misc_feature 1..20: note = C9Orf72 TTCN PAM targeting sequence
  source 1..20: mol_type = other RNA
ttgccaggtacaggtactgt

SEQ ID NO: 6107 - RNA, 20 nt, synthetic construct
  misc_feature 1..20: note = C9Orf72 TTCN PAM targeting sequence
  source 1..20: mol_type = other RNA
attctctaacatcaaagggg

SEQ ID NO: 6108 - RNA, 20 nt, synthetic construct
  misc_feature 1..20: note = C9Orf72 TTCN PAM targeting sequence
  source 1..20: mol_type = other RNA
ctaacatcaaaggggccttg

SEQ ID NO: 6109 - RNA, 20 nt, synthetic construct
  misc_feature 1..20: note = C9Orf72 TTCN PAM targeting sequence
  source 1..20: mol_type = other RNA
tagtgatggtaaacaatttg

SEQ ID NO: 6110 - RNA, 20 nt, synthetic construct
  misc_feature 1..20: note = C9Orf72 TTCN PAM targeting sequence
  source 1..20: mol_type = other RNA
tagttatctgataccttggc

SEQ ID NO: 6111 - RNA, 20 nt, synthetic construct
  misc_feature 1..20: note = C9Orf72 TTCN PAM targeting sequence
  source 1..20: mol_type = other RNA
aattagccaaccctaaacct

SEQ ID NO: 6112 - RNA, 20 nt, synthetic construct
  misc_feature 1..20: note = C9Orf72 TTCN PAM targeting sequence
  source 1..20: mol_type = other RNA
ttcccatgaaaaccatggtg

SEQ ID NO: 6113 - RNA, 20 nt, synthetic construct
  misc_feature 1..20: note = C9Orf72 TTCN PAM targeting sequence
  source 1..20: mol_type = other RNA
catgaaaaccatggtgaagg

SEQ ID NO: 6114 - RNA, 20 nt, synthetic construct
  misc_feature 1..20: note = C9Orf72 TTCN PAM targeting sequence
  source 1..20: mol_type = other RNA
tgggaaggaaagggccagac

SEQ ID NO: 6115 - RNA, 20 nt, synthetic construct
  misc_feature 1..20: note = C9Orf72 TTCN PAM targeting sequence
  source 1..20: mol_type = other RNA
ccatggttttcatgggaagg

SEQ ID NO: 6116 - RNA, 20 nt, synthetic construct
  misc_feature 1..20: note = C9Orf72 TTCN PAM targeting sequence
  source 1..20: mol_type = other RNA
tgctcaagctttctctgctc

SEQ ID NO: 6117 - RNA, 20 nt, synthetic construct
  misc_feature 1..20: note = C9Orf72 TTCN PAM targeting sequence
  source 1..20: mol_type = other RNA
ctgctccctcagtctccgga

SEQ ID NO: 6118 - RNA, 20 nt, synthetic construct
  misc_feature 1..20: note = C9Orf72 TTCN PAM targeting sequence
  source 1..20: mol_type = other RNA
ctgaacaaagggactgtgtt

SEQ ID NO: 6119 - RNA, 20 nt, synthetic construct
  misc_feature 1..20: note = C9Orf72 TTCN PAM targeting sequence
  source 1..20: mol_type = other RNA
gagaacttacagcaatataa

SEQ ID NO: 6120 - RNA, 20 nt, synthetic construct
  misc_feature 1..20: note = C9Orf72 TTCN PAM targeting sequence
  source 1..20: mol_type = other RNA
acctttgaaagcacctggca

SEQ ID NO: 6121 - RNA, 20 nt, synthetic construct
  misc_feature 1..20: note = C9Orf72 TTCN PAM targeting sequence
  source 1..20: mol_type = other RNA
aaggtggaatcaaagtataa

SEQ ID NO: 6122 - RNA, 20 nt, synthetic construct
  misc_feature 1..20: note = C9Orf72 TTCN PAM targeting sequence
  source 1..20: mol_type = other RNA
ctgccttgcctgtgccaggt

SEQ ID NO: 6123 - RNA, 20 nt, synthetic construct
  misc_feature 1..20: note = C9Orf72 TTCN PAM targeting sequence
  source 1..20: mol_type = other RNA
tcgatcaaaattgaatcaga

SEQ ID NO: 6124 - RNA, 20 nt, synthetic construct
  misc_feature 1..20: note = C9Orf72 TTCN PAM targeting sequence
  source 1..20: mol_type = other RNA
attttgatcgatgaagtatt

SEQ ID NO: 6125 - RNA, 20 nt, synthetic construct
  misc_feature 1..20: note = C9Orf72 TTCN PAM targeting sequence
  source 1..20: mol_type = other RNA
gattcaattttgatcgatga

SEQ ID NO: 6126 - RNA, 20 nt, synthetic construct
  misc_feature 1..20: note = C9Orf72 TTCN PAM targeting sequence
  source 1..20: mol_type = other RNA
catcttgactaaataagacc

SEQ ID NO: 6127 - RNA, 20 nt, synthetic construct
  misc_feature 1..20: note = C9Orf72 TTCN PAM targeting sequence
  source 1..20: mol_type = other RNA
ttttttttttttgcctcccc

SEQ ID NO: 6128 - RNA, 20 nt, synthetic construct
  misc_feature 1..20: note = C9Orf72 TTCN PAM targeting sequence
  source 1..20: mol_type = other RNA
gctgtgggttttcttttttt

SEQ ID NO: 6129 - RNA, 20 nt, synthetic construct
  misc_feature 1..20: note = C9Orf72 TTCN PAM targeting sequence
  source 1..20: mol_type = other RNA
atgccaggactatatatatc

SEQ ID NO: 6130 - RNA, 20 nt, synthetic construct
  misc_feature 1..20: note = C9Orf72 TTCN PAM targeting sequence
  source 1..20: mol_type = other RNA
ccccaaaagcaacatgcagc

SEQ ID NO: 6131 - RNA, 20 nt, synthetic construct
  misc_feature 1..20: note = C9Orf72 TTCN PAM targeting sequence
  source 1..20: mol_type = other RNA
cttctccccaaaagcaacat

SEQ ID NO: 6132 - RNA, 20 nt, synthetic construct
  misc_feature 1..20: note = C9Orf72 TTCN PAM targeting sequence
  source 1..20: mol_type = other RNA
tcattgcaaagttttctctt

SEQ ID NO: 6133 - RNA, 20 nt, synthetic construct
  misc_feature 1..20: note = C9Orf72 TTCN PAM targeting sequence
  source 1..20: mol_type = other RNA
acaccctaggctggatcaca

SEQ ID NO: 6134 - RNA, 20 nt, synthetic construct
  misc_feature 1..20: note = C9Orf72 TTCN PAM targeting sequence
  source 1..20: mol_type = other RNA
tttccacaccctaggctgga

SEQ ID NO: 6135 - RNA, 20 nt, synthetic construct
  misc_feature 1..20: note = C9Orf72 TTCN PAM targeting sequence
  source 1..20: mol_type = other RNA
gagtttttcctttccacacc

SEQ ID NO: 6136 - RNA, 20 nt, synthetic construct
  misc_feature 1..20: note = C9Orf72 TTCN PAM targeting sequence
  source 1..20: mol_type = other RNA
ttttatcattgaaatcttcc

SEQ ID NO: 6137 - RNA, 20 nt, synthetic construct
  misc_feature 1..20: note = C9Orf72 TTCN PAM targeting sequence
  source 1..20: mol_type = other RNA
atgataaaaagaaagtttca

SEQ ID NO: 6138 - RNA, 20 nt, synthetic construct
  misc_feature 1..20: note = C9Orf72 TTCN PAM targeting sequence
  source 1..20: mol_type = other RNA
ttcttctctttttttttttt

SEQ ID NO: 6139 - RNA, 20 nt, synthetic construct
  misc_feature 1..20: note = C9Orf72 TTCN PAM targeting sequence
  source 1..20: mol_type = other RNA
tctctttttttttttttttt

SEQ ID NO: 6140 - RNA, 20 nt, synthetic construct
  misc_feature 1..20: note = C9Orf72 TTCN PAM targeting sequence
  source 1..20: mol_type = other RNA
cttttttttttttttttttt

SEQ ID NO: 6141 - RNA, 20 nt, synthetic construct
  misc_feature 1..20: note = C9Orf72 TTCN PAM targeting sequence
  source 1..20: mol_type = other RNA
ggtagtgagagttaattttc

SEQ ID NO: 6142 - RNA, 20 nt, synthetic construct
  misc_feature 1..20: note = C9Orf72 TTCN PAM targeting sequence
  source 1..20: mol_type = other RNA
gtcactgtactcagaaagtt

SEQ ID NO: 6143 - RNA, 20 nt, synthetic construct
  misc_feature 1..20: note = C9Orf72 TTCN PAM targeting sequence
  source 1..20: mol_type = other RNA
gagtacagtgactgaaaatt

SEQ ID NO: 6144 - RNA, 20 nt, synthetic construct
  misc_feature 1..20: note = C9Orf72 TTCN PAM targeting sequence
  source 1..20: mol_type = other RNA
gttaggactgctggttaatg

SEQ ID NO: 6145 - RNA, 20 nt, synthetic construct
  misc_feature 1..20: note = C9Orf72 TTCN PAM targeting sequence
  source 1..20: mol_type = other RNA
atatcatcaatacaggcaca

SEQ ID NO: 6146 - RNA, 20 nt, synthetic construct
  misc_feature 1..20: note = C9Orf72 TTCN PAM targeting sequence
  source 1..20: mol_type = other RNA
gagtctcaattattgattgc

SEQ ID NO: 6147 - RNA, 20 nt, synthetic construct
  misc_feature 1..20: note = C9Orf72 TTCN PAM targeting sequence
  source 1..20: mol_type = other RNA
ctctatcctaccctgagcta

SEQ ID NO: 6148 - RNA, 20 nt, synthetic construct
  misc_feature 1..20: note = C9Orf72 TTCN PAM targeting sequence
  source 1..20: mol_type = other RNA
agcttttaagctaagagcca

SEQ ID NO: 6149 - RNA, 20 nt, synthetic construct
  misc_feature 1..20: note = C9Orf72 TTCN PAM targeting sequence
  source 1..20: mol_type = other RNA
gactccaagaagttggccca

SEQ ID NO: 6150 - RNA, 20 nt, synthetic construct
  misc_feature 1..20: note = C9Orf72 TTCN PAM targeting sequence
  source 1..20: mol_type = other RNA
tggagtctgaaattttccag

SEQ ID NO: 6151 - RNA, 20 nt, synthetic construct
  misc_feature 1..20: note = C9Orf72 TTCN PAM targeting sequence
  source 1..20: mol_type = other RNA
caatgtgggccaacttcttg

SEQ ID NO: 6152 - RNA, 20 nt, synthetic construct
  misc_feature 1..20: note = C9Orf72 TTCN PAM targeting sequence
  source 1..20: mol_type = other RNA
gactagtgctccacagagag

SEQ ID NO: 6153 - RNA, 20 nt, synthetic construct
  misc_feature 1..20: note = C9Orf72 TTCN PAM targeting sequence
  source 1..20: mol_type = other RNA
gcaaacggaccagtactgaa

SEQ ID NO: 6154 - RNA, 20 nt, synthetic construct
  misc_feature 1..20: note = C9Orf72 TTCN PAM targeting sequence
  source 1..20: mol_type = other RNA
gtactggtccgtttgcagaa

SEQ ID NO: 6155 - RNA, 20 nt, synthetic construct
  misc_feature 1..20: note = C9Orf72 TTCN PAM targeting sequence
  source 1..20: mol_type = other RNA
ggctcattaactccatttca

SEQ ID NO: 6156 - RNA, 20 nt, synthetic construct
  misc_feature 1..20: note = C9Orf72 TTCN PAM targeting sequence
  source 1..20: mol_type = other RNA
ggcctctgcttaggcatgtt

SEQ ID NO: 6157 - RNA, 20 nt, synthetic construct
  misc_feature 1..20: note = C9Orf72 TTCN PAM targeting sequence
  source 1..20: mol_type = other RNA
agcaggagtctgctcaccag

SEQ ID NO: 6158 - RNA, 20 nt, synthetic construct
  misc_feature 1..20: note = C9Orf72 TTCN PAM targeting sequence
  source 1..20: mol_type = other RNA
gagcaattaggctaaggagg

SEQ ID NO: 6159 - RNA, 20 nt, synthetic construct
  misc_feature 1..20: note = C9Orf72 TTCN PAM targeting sequence
  source 1..20: mol_type = other RNA
agagagactccaggcctgca

SEQ ID NO: 6160 - RNA, 20 nt, synthetic construct
  misc_feature 1..20: note = C9Orf72 TTCN PAM targeting sequence
  source 1..20: mol_type = other RNA
tgagcaacagagacagggct

SEQ ID NO: 6161 - RNA, 20 nt, synthetic construct
  misc_feature 1..20: note = C9Orf72 TTCN PAM targeting sequence
  source 1..20: mol_type = other RNA
tgactgagtaccaaggcttc

SEQ ID NO: 6162 - RNA, 20 nt, synthetic construct
  misc_feature 1..20: note = C9Orf72 TTCN PAM targeting sequence
  source 1..20: mol_type = other RNA
taaactcagcagggctctgt

SEQ ID NO: 6163 - RNA, 20 nt, synthetic construct
  misc_feature 1..20: note = C9Orf72 TTCN PAM targeting sequence
  source 1..20: mol_type = other RNA
gatctccaagccacattcag

SEQ ID NO: 6164 - RNA, 20 nt, synthetic construct
  misc_feature 1..20: note = C9Orf72 TTCN PAM targeting sequence
  source 1..20: mol_type = other RNA
gtgtgagagctaaatcgagt

SEQ ID NO: 6165 - RNA, 20 nt, synthetic construct
  misc_feature 1..20: note = C9Orf72 TTCN PAM targeting sequence
  source 1..20: mol_type = other RNA
tactcgatttagctctcaca

SEQ ID NO: 6166 - RNA, 20 nt, synthetic construct
  misc_feature 1..20: note = C9Orf72 TTCN PAM targeting sequence
  source 1..20: mol_type = other RNA
ctgaggccccatgcagattt

SEQ ID NO: 6167 - RNA, 20 nt, synthetic construct
  misc_feature 1..20: note = C9Orf72 TTCN PAM targeting sequence
  source 1..20: mol_type = other RNA
tctctgccttaggaaatctc

SEQ ID NO: 6168 - RNA, 20 nt, synthetic construct
  misc_feature 1..20: note = C9Orf72 TTCN PAM targeting sequence
  source 1..20: mol_type = other RNA
taaggcagagatgaaaggca

SEQ ID NO: 6169 - RNA, 20 nt, synthetic construct
  misc_feature 1..20: note = C9Orf72 TTCN PAM targeting sequence
  source 1..20: mol_type = other RNA
ccccaagaaaatttaataaa

SEQ ID NO: 6170 - RNA, 20 nt, synthetic construct
  misc_feature 1..20: note = C9Orf72 TTCN PAM targeting sequence
  source 1..20: mol_type = other RNA
tggggagaaaggagatttcc

SEQ ID NO: 6171 - RNA, 20 nt, synthetic construct
  misc_feature 1..20: note = C9Orf72 TTCN PAM targeting sequence
  source 1..20: mol_type = other RNA
agtaatttctgcacttcaac

SEQ ID NO: 6172 - RNA, 20 nt, synthetic construct
  misc_feature 1..20: note = C9Orf72 TTCN PAM targeting sequence
  source 1..20: mol_type = other RNA
gcacttcaacccatttttct

SEQ ID NO: 6173 - RNA, 20 nt, synthetic construct
  misc_feature 1..20: note = C9Orf72 TTCN PAM targeting sequence
  source 1..20: mol_type = other RNA
acccatttttctttcttcct

SEQ ID NO: 6174 - RNA, 20 nt, synthetic construct
  misc_feature 1..20: note = C9Orf72 TTCN PAM targeting sequence
  source 1..20: mol_type = other RNA
ttcttcctctttccctcctg

SEQ ID NO: 6175 - RNA, 20 nt, synthetic construct
  misc_feature 1..20: note = C9Orf72 TTCN PAM targeting sequence
  source 1..20: mol_type = other RNA
tcctctttccctcctgcccc

SEQ ID NO: 6176 - RNA, 20 nt, synthetic construct
  misc_feature 1..20: note = C9Orf72 TTCN PAM targeting sequence
  source 1..20: mol_type = other RNA
tctttccctcctgcccctcc

SEQ ID NO: 6177 - RNA, 20 nt, synthetic construct
  misc_feature 1..20: note = C9Orf72 TTCN PAM targeting sequence
  source 1..20: mol_type = other RNA
ctcctgcccctcccttccac

SEQ ID NO: 6178 - RNA, 20 nt, synthetic construct
  misc_feature 1..20: note = C9Orf72 TTCN PAM targeting sequence
  source 1..20: mol_type = other RNA
actaagccctcaaacatctc

SEQ ID NO: 6179 - RNA, 20 nt, synthetic construct
  misc_feature 1..20: note = C9Orf72 TTCN PAM targeting sequence
  source 1..20: mol_type = other RNA
atccttccttttcaggcacc

SEQ ID NO: 6180 - RNA, 20 nt, synthetic construct
  misc_feature 1..20: note = C9Orf72 TTCN PAM targeting sequence
  source 1..20: mol_type = other RNA
ttttcaggcacctctgaaag

SEQ ID NO: 6181 - RNA, 20 nt, synthetic construct
  misc_feature 1..20: note = C9Orf72 TTCN PAM targeting sequence
  source 1..20: mol_type = other RNA
ggcacctctgaaagaaaata

SEQ ID NO: 6182 - RNA, 20 nt, synthetic construct
  misc_feature 1..20: note = C9Orf72 TTCN PAM targeting sequence
  source 1..20: mol_type = other RNA
gaggtgcctgaaaaggaagg

SEQ ID NO: 6183 - RNA, 20 nt, synthetic construct
  misc_feature 1..20: note = C9Orf72 TTCN PAM targeting sequence
  source 1..20: mol_type = other RNA
ttcagaggtgcctgaaaagg

SEQ ID NO: 6184 - RNA, 20 nt, synthetic construct
  misc_feature 1..20: note = C9Orf72 TTCN PAM targeting sequence
  source 1..20: mol_type = other RNA
ttttttggcctccataacaa

SEQ ID NO: 6185 - RNA, 20 nt, synthetic construct
  misc_feature 1..20: note = C9Orf72 TTCN PAM targeting sequence
  source 1..20: mol_type = other RNA
aaaggagtttttcctttttt

SEQ ID NO: 6186 - RNA, 20 nt, synthetic construct
  misc_feature 1..20: note = C9Orf72 TTCN PAM targeting sequence
  source 1..20: mol_type = other RNA
gcatattctaaaggagtttt

SEQ ID NO: 6187 - RNA, 20 nt, synthetic construct
  misc_feature 1..20: note = C9Orf72 TTCN PAM targeting sequence
  source 1..20: mol_type = other RNA
gttgacgaaggtccaggaga

SEQ ID NO: 6188 - RNA, 20 nt, synthetic construct
  misc_feature 1..20: note = C9Orf72 TTCN PAM targeting sequence
  source 1..20: mol_type = other RNA
tcaaccgaagcatttctgca

SEQ ID NO: 6189 - RNA, 20 nt, synthetic construct
  misc_feature 1..20: note = C9Orf72 TTCN PAM targeting sequence
  source 1..20: mol_type = other RNA
gagctggctgttaatcattc

SEQ ID NO: 6190 - RNA, 20 nt, synthetic construct
  misc_feature 1..20: note = C9Orf72 TTCN PAM targeting sequence
  source 1..20: mol_type = other RNA
tgttttcatcattttccctt

SEQ ID NO: 6191 - RNA, 20 nt, synthetic construct
  misc_feature 1..20: note = C9Orf72 TTCN PAM targeting sequence
  source 1..20: mol_type = other RNA
tcattttcccttttctttgg

SEQ ID NO: 6192 - RNA, 20 nt, synthetic construct
  misc_feature 1..20: note = C9Orf72 TTCN PAM targeting sequence
  source 1..20: mol_type = other RNA
cttttctttggaagagaaag

SEQ ID NO: 6193 - RNA, 20 nt, synthetic construct
  misc_feature 1..20: note = C9Orf72 TTCN PAM targeting sequence
  source 1..20: mol_type = other RNA
ttggaagagaaaggccaaca

SEQ ID NO: 6194 - RNA, 20 nt, synthetic construct
  misc_feature 1..20: note = C9Orf72 TTCN PAM targeting sequence
  source 1..20: mol_type = other RNA
aaagaaaagggaaaatgatg

SEQ ID NO: 6195 - RNA, 20 nt, synthetic construct
  misc_feature 1..20: note = C9Orf72 TTCN PAM targeting sequence
  source 1..20: mol_type = other RNA
cttccaaagaaaagggaaaa

SEQ ID NO: 6196 - RNA, 20 nt, synthetic construct
  misc_feature 1..20: note = C9Orf72 TTCN PAM targeting sequence
  source 1..20: mol_type = other RNA
caggtgttggcctttctctt

SEQ ID NO: 6197 - RNA, 20 nt, synthetic construct
  misc_feature 1..20: note = C9Orf72 TTCN PAM targeting sequence
  source 1..20: mol_type = other RNA
gcccagcaccgatcacagat

SEQ ID NO: 6198 - RNA, 20 nt, synthetic construct
  misc_feature 1..20: note = C9Orf72 TTCN PAM targeting sequence
  source 1..20: mol_type = other RNA
gaccacaaaagcccaggttc

SEQ ID NO: 6199 - RNA, 20 nt, synthetic construct
  misc_feature 1..20: note = C9Orf72 TTCN PAM targeting sequence
  source 1..20: mol_type = other RNA
tactcttcagaccacaaaag

SEQ ID NO: 6200 - RNA, 20 nt, synthetic construct
  misc_feature 1..20: note = C9Orf72 TTCN PAM targeting sequence
  source 1..20: mol_type = other RNA
ccagtatccccagagacaac

SEQ ID NO: 6201 - RNA, 20 nt, synthetic construct
  misc_feature 1..20: note = C9Orf72 TTCN PAM targeting sequence
  source 1..20: mol_type = other RNA
gcaaacaactggcagatagg

SEQ ID NO: 6202 - RNA, 20 nt, synthetic construct
  misc_feature 1..20: note = C9Orf72 TTCN PAM targeting sequence
  source 1..20: mol_type = other RNA
ttctttagagcttggctcag

SEQ ID NO: 6203 - RNA, 20 nt, synthetic construct
  misc_feature 1..20: note = C9Orf72 TTCN PAM targeting sequence
  source 1..20: mol_type = other RNA
ttagagcttggctcagtgtc

SEQ ID NO: 6204 - RNA, 20 nt, synthetic construct
  misc_feature 1..20: note = C9Orf72 TTCN PAM targeting sequence
  source 1..20: mol_type = other RNA
ctggcatctgttattctgct

SEQ ID NO: 6205 - RNA, 20 nt, synthetic construct
  misc_feature 1..20: note = C9Orf72 TTCN PAM targeting sequence
  source 1..20: mol_type = other RNA
gctcctgaaattttcctgca

SEQ ID NO: 6206 - RNA, 20 nt, synthetic construct
  misc_feature 1..20: note = C9Orf72 TTCN PAM targeting sequence
  source 1..20: mol_type = other RNA
ggagcagaataacagatgcc

SEQ ID NO: 6207 - RNA, 20 nt, synthetic construct
  misc_feature 1..20: note = C9Orf72 TTCN PAM targeting sequence
  source 1..20: mol_type = other RNA
tgcatagatcacacatggta

SEQ ID NO: 6208 - RNA, 20 nt, synthetic construct
  misc_feature 1..20: note = C9Orf72 TTCN PAM targeting sequence
  source 1..20: mol_type = other RNA
acatgtatctgtgggagtct

SEQ ID NO: 6209 - RNA, 20 nt, synthetic construct
  misc_feature 1..20: note = C9Orf72 TTCN PAM targeting sequence
  source 1..20: mol_type = other RNA
ggtctgttacctgctccaga

SEQ ID NO: 6210 - RNA, 20 nt, synthetic construct
  misc_feature 1..20: note = C9Orf72 TTCN PAM targeting sequence
  source 1..20: mol_type = other RNA
atacccaccctgctccaggt

SEQ ID NO: 6211 - RNA, 20 nt, synthetic construct
  misc_feature 1..20: note = C9Orf72 TTCN PAM targeting sequence
  source 1..20: mol_type = other RNA
aacggtcagcaagtatttat

SEQ ID NO: 6212 - RNA, 20 nt, synthetic construct
  misc_feature 1..20: note = C9Orf72 TTCN PAM targeting sequence
  source 1..20: mol_type = other RNA
gggtatgcaggcggcacagg

SEQ ID NO: 6213 - RNA, 20 nt, synthetic construct
  misc_feature 1..20: note = C9Orf72 TTCN PAM targeting sequence
  source 1..20: mol_type = other RNA
cctctttgagctttgatttc

SEQ ID NO: 6214 - RNA, 20 nt, synthetic construct
  misc_feature 1..20: note = C9Orf72 TTCN PAM targeting sequence
  source 1..20: mol_type = other RNA
tcacaaactagctctataaa

SEQ ID NO: 6215 - RNA, 20 nt, synthetic construct
  misc_feature 1..20: note = C9Orf72 TTCN PAM targeting sequence
  source 1..20: mol_type = other RNA
gatccctcttcatcacaaac

SEQ ID NO: 6216 - RNA, 20 nt, synthetic construct
  misc_feature 1..20: note = C9Orf72 TTCN PAM targeting sequence
  source 1..20: mol_type = other RNA
agtctgtctcagagcctatg

SEQ ID NO: 6217 - RNA, 20 nt, synthetic construct
  misc_feature 1..20: note = C9Orf72 TTCN PAM targeting sequence
  source 1..20: mol_type = other RNA
attctgccaggaagctttgt

SEQ ID NO: 6218 - RNA, 20 nt, synthetic construct
  misc_feature 1..20: note = C9Orf72 TTCN PAM targeting sequence
  source 1..20: mol_type = other RNA
gccaggaagctttgtagggt

SEQ ID NO: 6219 - RNA, 20 nt, synthetic construct
  misc_feature 1..20: note = C9Orf72 TTCN PAM targeting sequence
  source 1..20: mol_type = other RNA
tggcagaatagaaggagcat

SEQ ID NO: 6220 - RNA, 20 nt, synthetic construct
  misc_feature 1..20: note = C9Orf72 TTCN PAM targeting sequence
  source 1..20: mol_type = other RNA
acagctcctttcatctcatg

SEQ ID NO: 6221 - RNA, 20 nt, synthetic construct
  misc_feature 1..20: note = C9Orf72 TTCN PAM targeting sequence
  source 1..20: mol_type = other RNA
tctcatgcaaatacgattga

SEQ ID NO: 6222 - RNA, 20 nt, synthetic construct
  misc_feature 1..20: note = C9Orf72 TTCN PAM targeting sequence
  source 1..20: mol_type = other RNA
ccagctgtgtcaatcgtatt

SEQ ID NO: 6223 - RNA, 20 nt, synthetic construct
  misc_feature 1..20: note = C9Orf72 TTCN PAM targeting sequence
  source 1..20: mol_type = other RNA
tttccccagctgtgtcaatc

SEQ ID NO: 6224 - RNA, 20 nt, synthetic construct
  misc_feature 1..20: note = C9Orf72 TTCN PAM targeting sequence
  source 1..20: mol_type = other RNA
aacaagtttcgtttccccag

SEQ ID NO: 6225 - RNA, 20 nt, synthetic construct
  misc_feature 1..20: note = C9Orf72 TTCN PAM targeting sequence
  source 1..20: mol_type = other RNA
accttgtcttctaacaagtt

SEQ ID NO: 6226 - RNA, 20 nt, synthetic construct
  misc_feature 1..20: note = C9Orf72 TTCN PAM targeting sequence
  source 1..20: mol_type = other RNA
caaatgtatgtgtcactggg

SEQ ID NO: 6227 - RNA, 20 nt, synthetic construct
  misc_feature 1..20: note = C9Orf72 TTCN PAM targeting sequence
  source 1..20: mol_type = other RNA
ccagtgtcctaaacccccag

SEQ ID NO: 6228 - RNA, 20 nt, synthetic construct
  misc_feature 1..20: note = C9Orf72 TTCN PAM targeting sequence
  source 1..20: mol_type = other RNA
agctgtgggacttctgtgct

SEQ ID NO: 6229 - RNA, 20 nt, synthetic construct
  misc_feature 1..20: note = C9Orf72 TTCN PAM targeting sequence
  source 1..20: mol_type = other RNA
gtgctgcttgcccttaagca

SEQ ID NO: 6230 - RNA, 20 nt, synthetic construct
  misc_feature 1..20: note = C9Orf72 TTCN PAM targeting sequence
  source 1..20: mol_type = other RNA
tgtctgaggaatggtgataa

SEQ ID NO: 6231 - RNA, 20 nt, synthetic construct
  misc_feature 1..20: note = C9Orf72 TTCN PAM targeting sequence
  source 1..20: mol_type = other RNA
tcagacaagaaaacagaggc

SEQ ID NO: 6232 - RNA, 20 nt, synthetic construct
  misc_feature 1..20: note = C9Orf72 TTCN PAM targeting sequence
  source 1..20: mol_type = other RNA
tgagaccacaaggactaaat

SEQ ID NO: 6233 - RNA, 20 nt, synthetic construct
  misc_feature 1..20: note = C9Orf72 TTCN PAM targeting sequence
  source 1..20: mol_type = other RNA
catttagtccttgtggtctc

SEQ ID NO: 6234 - RNA, 20 nt, synthetic construct
  misc_feature 1..20: note = C9Orf72 TTCN PAM targeting sequence
  source 1..20: mol_type = other RNA
gtgtgcctgctggtgctgtg

SEQ ID NO: 6235 - RNA, 20 nt, synthetic construct
  misc_feature 1..20: note = C9Orf72 TTCN PAM targeting sequence
  source 1..20: mol_type = other RNA
tagcgttggtaacatcggct

SEQ ID NO: 6236 - RNA, 20 nt, synthetic construct
  misc_feature 1..20: note = C9Orf72 TTCN PAM targeting sequence
  source 1..20: mol_type = other RNA
gaatcaatgccaagacaggg

SEQ ID NO: 6237 - RNA, 20 nt, synthetic construct
  misc_feature 1..20: note = C9Orf72 TTCN PAM targeting sequence
  source 1..20: mol_type = other RNA
gaagagccgtcttcctagcg

SEQ ID NO: 6238 - RNA, 20 nt, synthetic construct
  misc_feature 1..20: note = C9Orf72 TTCN PAM targeting sequence
  source 1..20: mol_type = other RNA
tttgccctcctgccacccct

SEQ ID NO: 6239 - RNA, 20 nt, synthetic construct
  misc_feature 1..20: note = C9Orf72 TTCN PAM targeting sequence
  source 1..20: mol_type = other RNA
cctgtcctgtttcatttgcc

SEQ ID NO: 6240 - RNA, 20 nt, synthetic construct
  misc_feature 1..20: note = C9Orf72 TTCN PAM targeting sequence
  source 1..20: mol_type = other RNA
ccaaaggataaactcttctt

SEQ ID NO: 6241 - RNA, 20 nt, synthetic construct
  misc_feature 1..20: note = C9Orf72 TTCN PAM targeting sequence
  source 1..20: mol_type = other RNA
tggaaagtatacttggaaga

SEQ ID NO: 6242 - RNA, 20 nt, synthetic construct
  misc_feature 1..20: note = C9Orf72 TTCN PAM targeting sequence
  source 1..20: mol_type = other RNA
aagaagagtttatcctttgg

SEQ ID NO: 6243 - RNA, 20 nt, synthetic construct
  misc_feature 1..20: note = C9Orf72 TTCN PAM targeting sequence
  source 1..20: mol_type = other RNA
aagtatactttccaagaaga

SEQ ID NO: 6244 - RNA, 20 nt, synthetic construct
  misc_feature 1..20: note = C9Orf72 TTCN PAM targeting sequence
  source 1..20: mol_type = other RNA
aatatatgacatgtcttcca

SEQ ID NO: 6245 - RNA, 20 nt, synthetic construct
  misc_feature 1..20: note = C9Orf72 TTCN PAM targeting sequence
  source 1..20: mol_type = other RNA
catgctcttccaatatatga

SEQ ID NO: 6246 - RNA, 20 nt, synthetic construct
  misc_feature 1..20: note = C9Orf72 TTCN PAM targeting sequence
  source 1..20: mol_type = other RNA
aaaggacatatgatgaaacc

SEQ ID NO: 6247 - RNA, 20 nt, synthetic construct
  misc_feature 1..20: note = C9Orf72 TTCN PAM targeting sequence
  source 1..20: mol_type = other RNA
tcatatgtcctttggaagct

SEQ ID NO: 6248 - RNA, 20 nt, synthetic construct
  misc_feature 1..20: note = C9Orf72 TTCN PAM targeting sequence
  source 1..20: mol_type = other RNA
tggccaatcctttgggaccc

SEQ ID NO: 6249 - RNA, 20 nt, synthetic construct
  misc_feature 1..20: note = C9Orf72 TTCN PAM targeting sequence
  source 1..20: mol_type = other RNA
ggttgttgttgacatgccat

SEQ ID NO: 6250 - RNA, 20 nt, synthetic construct
  misc_feature 1..20: note = C9Orf72 TTCN PAM targeting sequence
  source 1..20: mol_type = other RNA
ccttgaaactgttattcatg

SEQ ID NO: 6251 - RNA, 20 nt, synthetic construct
  misc_feature 1..20: note = C9Orf72 TTCN PAM targeting sequence
  source 1..20: mol_type = other RNA
aggagaaacatgggcacttc

SEQ ID NO: 6252 - RNA, 20 nt, synthetic construct
  misc_feature 1..20: note = C9Orf72 TTCN PAM targeting sequence
  source 1..20: mol_type = other RNA
tgtctgagggcatttgtgct

SEQ ID NO: 6253 - RNA, 20 nt, synthetic construct
  misc_feature 1..20: note = C9Orf72 TTCN PAM targeting sequence
  source 1..20: mol_type = other RNA
gtcttcagagtccagtaata

SEQ ID NO: 6254 - RNA, 20 nt, synthetic construct
  misc_feature 1..20: note = C9Orf72 TTCN PAM targeting sequence
  source 1..20: mol_type = other RNA
gagtccagtaataagaggga

SEQ ID NO: 6255 - RNA, 20 nt, synthetic construct
  misc_feature 1..20: note = C9Orf72 TTCN PAM targeting sequence
  source 1..20: mol_type = other RNA
catccctcttattactggac

SEQ ID NO: 6256 - RNA, 20 nt, synthetic construct
  misc_feature 1..20: note = C9Orf72 TTCN PAM targeting sequence
  source 1..20: mol_type = other RNA
caatagttcatgaataaaaa

SEQ ID NO: 6257 - RNA, 20 nt, synthetic construct
  misc_feature 1..20: note = C9Orf72 TTCN PAM targeting sequence
  source 1..20: mol_type = other RNA
tgaataaaaacaacatccca

SEQ ID NO: 6258 - RNA, 20 nt, synthetic construct
  misc_feature 1..20: note = C9Orf72 TTCN PAM targeting sequence
  source 1..20: mol_type = other RNA
tgaactattgagaatgagtg

SEQ ID NO: 6259 - RNA, 20 nt, synthetic construct
  misc_feature 1..20: note = C9Orf72 TTCN PAM targeting sequence
  source 1..20: mol_type = other RNA
acgtgtgtgggatgttgttt

SEQ ID NO: 6260 - RNA, 20 nt, synthetic construct
  misc_feature 1..20: note = C9Orf72 TTCN PAM targeting sequence
  source 1..20: mol_type = other RNA
ttttccacgtgtgtgggatg

SEQ ID NO: 6261 - RNA, 20 nt, synthetic construct
  misc_feature 1..20: note = C9Orf72 TTCN PAM targeting sequence
  source 1..20: mol_type = other RNA
cagccacgctgccagaggag

SEQ ID NO: 6262 - RNA, 20 nt, synthetic construct
  misc_feature 1..20: note = C9Orf72 TTCN PAM targeting sequence
  source 1..20: mol_type = other RNA
aaaatacttgcaaaacaaga

SEQ ID NO: 6263 - RNA, 20 nt, synthetic construct
  misc_feature 1..20: note = C9Orf72 TTCN PAM targeting sequence
  source 1..20: mol_type = other RNA
tgtgttttgttttgttttgt

SEQ ID NO: 6264 - RNA, 20 nt, synthetic construct
  misc_feature 1..20: note = C9Orf72 TTCN PAM targeting sequence
  source 1..20: mol_type = other RNA
taataatatatatcctcctc

SEQ ID NO: 6265 - RNA, 20 nt, synthetic construct
  misc_feature 1..20: note = C9Orf72 TTCN PAM targeting sequence
  source 1..20: mol_type = other RNA
cttgccccttcatccatcca

SEQ ID NO: 6266 - RNA, 20 nt, synthetic construct
  misc_feature 1..20: note = C9Orf72 TTCN PAM targeting sequence
  source 1..20: mol_type = other RNA
tccatccattctcctgcctc

SEQ ID NO: 6267 - RNA, 20 nt, synthetic construct
  misc_feature 1..20: note = C9Orf72 TTCN PAM targeting sequence
  source 1..20: mol_type = other RNA
cctgcctcctgctctctgtc

SEQ ID NO: 6268 - RNA, 20 nt, synthetic construct
  misc_feature 1..20: note = C9Orf72 TTCN PAM targeting sequence
  source 1..20: mol_type = other RNA
ctctctctccctctctgtat

SEQ ID NO: 6269 - RNA, 20 nt, synthetic construct
  misc_feature 1..20: note = C9Orf72 TTCN PAM targeting sequence
  source 1..20: mol_type = other RNA
tgttcttgctgatgctgatg

SEQ ID NO: 6270 - RNA, 20 nt, synthetic construct
  misc_feature 1..20: note = C9Orf72 TTCN PAM targeting sequence
  source 1..20: mol_type = other RNA
tgctgatgctgatgaaaatt

SEQ ID NO: 6271 - RNA, 20 nt, synthetic construct
  misc_feature 1..20: note = C9Orf72 TTCN PAM targeting sequence
  source 1..20: mol_type = other RNA
tcagcatcagcaagaacacg

SEQ ID NO: 6272 - RNA, 20 nt, synthetic construct
  misc_feature 1..20: note = C9Orf72 TTCN PAM targeting sequence
  source 1..20: mol_type = other RNA
gctgcgaggattgattcctc

SEQ ID NO: 6273 - RNA, 20 nt, synthetic construct
  misc_feature 1..20: note = C9Orf72 TTCN PAM targeting sequence
  source 1..20: mol_type = other RNA
tcttagcagatgttttgtgt

SEQ ID NO: 6274 - RNA, 20 nt, synthetic construct
  misc_feature 1..20: note = C9Orf72 TTCN PAM targeting sequence
  source 1..20: mol_type = other RNA
tcaagaaagtgtctgttcgt

SEQ ID NO: 6275 - RNA, 20 nt, synthetic construct
  misc_feature 1..20: note = C9Orf72 TTCN PAM targeting sequence
  source 1..20: mol_type = other RNA
tgaggaacgtactgagataa

SEQ ID NO: 6276 - RNA, 20 nt, synthetic construct
  misc_feature 1..20: note = C9Orf72 TTCN PAM targeting sequence
  source 1..20: mol_type = other RNA
tcatgccaaggaaaacaatc

SEQ ID NO: 6277 - RNA, 20 nt, synthetic construct
  misc_feature 1..20: note = C9Orf72 TTCN PAM targeting sequence
  source 1..20: mol_type = other RNA
ttggcatgacgaacagacac

SEQ ID NO: 6278 - RNA, 20 nt, synthetic construct
  misc_feature 1..20: note = C9Orf72 TTCN PAM targeting sequence
  source 1..20: mol_type = other RNA
tctgcctaaaaaaagagaaa

SEQ ID NO: 6279 - RNA, 20 nt, synthetic construct
  misc_feature 1..20: note = C9Orf72 TTCN PAM targeting sequence
  source 1..20: mol_type = other RNA
ctttttttaggcagaggaac

SEQ ID NO: 6280 - RNA, 20 nt, synthetic construct
  misc_feature 1..20: note = C9Orf72 TTCN PAM targeting sequence
  source 1..20: mol_type = other RNA
aagcatttgcagctgtcagc

SEQ ID NO: 6281 - RNA, 20 nt, synthetic construct
  misc_feature 1..20: note = C9Orf72 TTCN PAM targeting sequence
  source 1..20: mol_type = other RNA
aactccctccctctgcccct

SEQ ID NO: 6282 - RNA, 20 nt, synthetic construct
  misc_feature 1..20: note = C9Orf72 TTCN PAM targeting sequence
  source 1..20: mol_type = other RNA
tttggcccaaccaccatgat

SEQ ID NO: 6283 - RNA, 20 nt, synthetic construct
  misc_feature 1..20: note = C9Orf72 TTCN PAM targeting sequence
  source 1..20: mol_type = other RNA
caagagagtcttaattcttt

SEQ ID NO: 6284 - RNA, 20 nt, synthetic construct
  misc_feature 1..20: note = C9Orf72 TTCN PAM targeting sequence
  source 1..20: mol_type = other RNA
ttcagacatgccatgtgctg

SEQ ID NO: 6285 - RNA, 20 nt, synthetic construct
  misc_feature 1..20: note = C9Orf72 TTCN PAM targeting sequence
  source 1..20: mol_type = other RNA
gacatgccatgtgctgggca

SEQ ID NO: 6286 - RNA, 20 nt, synthetic construct
  misc_feature 1..20: note = C9Orf72 TTCN PAM targeting sequence
  source 1..20: mol_type = other RNA
tatgcccagcacatggcatg

SEQ ID NO: 6287 - RNA, 20 nt, synthetic construct
  misc_feature 1..20: note = C9Orf72 TTCN PAM targeting sequence
  source 1..20: mol_type = other RNA
gccaccccaaggagcaacca

SEQ ID NO: 6288 - RNA, 20 nt, synthetic construct
  misc_feature 1..20: note = C9Orf72 TTCN PAM targeting sequence
  source 1..20: mol_type = other RNA
gagttgctcatcagcatccc

SEQ ID NO: 6289 - RNA, 20 nt, synthetic construct
  misc_feature 1..20: note = C9Orf72 TTCN PAM targeting sequence
  source 1..20: mol_type = other RNA
cagcatggatgtgaaaggag

SEQ ID NO: 6290 - RNA, 20 nt, synthetic construct
  misc_feature 1..20: note = C9Orf72 TTCN PAM targeting sequence
  source 1..20: mol_type = other RNA
catccatgctgtgaaagcag

SEQ ID NO: 6291 - RNA, 20 nt, synthetic construct
  misc_feature 1..20: note = C9Orf72 TTCN PAM targeting sequence
  source 1..20: mol_type = other RNA
taatctactgctcctttcac

SEQ ID NO: 6292 - RNA, 20 nt, synthetic construct
  misc_feature 1..20: note = C9Orf72 TTCN PAM targeting sequence
  source 1..20: mol_type = other RNA
cgggttatcttgggtctttc

SEQ ID NO: 6293 - RNA, 20 nt, synthetic construct
  misc_feature 1..20: note = C9Orf72 TTCN PAM targeting sequence
  source 1..20: mol_type = other RNA
ctgtggattgacaataaaag

SEQ ID NO: 6294 - RNA, 20 nt, synthetic construct
  misc_feature 1..20: note = C9Orf72 TTCN PAM targeting sequence
  source 1..20: mol_type = other RNA
aatggcttttattgtcaatc

SEQ ID NO: 6295 - RNA, 20 nt, synthetic construct
  misc_feature 1..20: note = C9Orf72 TTCN PAM targeting sequence
  source 1..20: mol_type = other RNA
gcaaactggtcaggtttaca

SEQ ID NO: 6296 - RNA, 20 nt, synthetic construct
  misc_feature 1..20: note = C9Orf72 TTCN PAM targeting sequence
  source 1..20: mol_type = other RNA
cagctctggctcatttgtcc

SEQ ID NO: 6297 - RNA, 20 nt, synthetic construct
  misc_feature 1..20: note = C9Orf72 TTCN PAM targeting sequence
  source 1..20: mol_type = other RNA
ttaacatcctgttctcagct

SEQ ID NO: 6298 - RNA, 20 nt, synthetic construct
  misc_feature 1..20: note = C9Orf72 TTCN PAM targeting sequence
  source 1..20: mol_type = other RNA
ttggttctggaaagtcaggc

SEQ ID NO: 6299 - RNA, 20 nt, synthetic construct
  misc_feature 1..20: note = C9Orf72 TTCN PAM targeting sequence
  source 1..20: mol_type = other RNA
ggaaagtcaggctgaggtac

SEQ ID NO: 6300 - RNA, 20 nt, synthetic construct
  misc_feature 1..20: note = C9Orf72 TTCN PAM targeting sequence
  source 1..20: mol_type = other RNA
agaaccaatgaagttcatta

SEQ ID NO: 6301 - RNA, 20 nt, synthetic construct
  misc_feature 1..20: note = C9Orf72 TTCN PAM targeting sequence
  source 1..20: mol_type = other RNA
tgatcaaactcctggtacct

SEQ ID NO: 6302 - RNA, 20 nt, synthetic construct
  misc_feature 1..20: note = C9Orf72 TTCN PAM targeting sequence
  source 1..20: mol_type = other RNA
ggtttttttcatgagcccca

SEQ ID NO: 6303 - RNA, 20 nt, synthetic construct
  misc_feature 1..20: note = C9Orf72 TTCN PAM targeting sequence
  source 1..20: mol_type = other RNA
tgagccccaaccagaatttg

SEQ ID NO: 6304 - RNA, 20 nt, synthetic construct
  misc_feature 1..20: note = C9Orf72 TTCN PAM targeting sequence
  source 1..20: mol_type = other RNA
ggttggggctcatgaaaaaa

SEQ ID NO: 6305 - RNA, 20 nt, synthetic construct
  misc_feature 1..20: note = C9Orf72 TTCN PAM targeting sequence
  source 1..20: mol_type = other RNA
aattctggttggggctcatg

SEQ ID NO: 6306 - RNA, 20 nt, synthetic construct
  misc_feature 1..20: note = C9Orf72 TTCN PAM targeting sequence
  source 1..20: mol_type = other RNA
ttgtcatggatgtaatattg

SEQ ID NO: 6307 - RNA, 20 nt, synthetic construct
  misc_feature 1..20: note = C9Orf72 TTCN PAM targeting sequence
  source 1..20: mol_type = other RNA
ttattccccagtagaatctt

SEQ ID NO: 6308 - RNA, 20 nt, synthetic construct
  misc_feature 1..20: note = C9Orf72 TTCN PAM targeting sequence
  source 1..20: mol_type = other RNA
ccagtagaatctttcttcca

SEQ ID NO: 6309 - RNA, 20 nt, synthetic construct
  misc_feature 1..20: note = C9Orf72 TTCN PAM targeting sequence
  source 1..20: mol_type = other RNA
actggggaataaagaatagt

SEQ ID NO: 6310 - RNA, 20 nt, synthetic construct
  misc_feature 1..20: note = C9Orf72 TTCN PAM targeting sequence
  source 1..20: mol_type = other RNA
tccattatgtggggacaatt

SEQ ID NO: 6311 - RNA, 20 nt, synthetic construct
  misc_feature 1..20: note = C9Orf72 TTCN PAM targeting sequence
  source 1..20: mol_type = other RNA
attatgtggggacaattaac

SEQ ID NO: 6312 - RNA, 20 nt, synthetic construct
  misc_feature 1..20: note = C9Orf72 TTCN PAM targeting sequence
  source 1..20: mol_type = other RNA
agacaagacttggtgttaat

SEQ ID NO: 6313 - RNA, 20 nt, synthetic construct
  misc_feature 1..20: note = C9Orf72 TTCN PAM targeting sequence
  source 1..20: mol_type = other RNA
cttcagccccactgcctcct

SEQ ID NO: 6314 - RNA, 20 nt, synthetic construct
  misc_feature 1..20: note = C9Orf72 TTCN PAM targeting sequence
  source 1..20: mol_type = other RNA
gccccactgcctccttccta

SEQ ID NO: 6315 - RNA, 20 nt, synthetic construct
  misc_feature 1..20: note = C9Orf72 TTCN PAM targeting sequence
  source 1..20: mol_type = other RNA
tagctcacctcctgcctagt

SEQ ID NO: 6316 - RNA, 20 nt, synthetic construct
  misc_feature 1..20: note = C9Orf72 TTCN PAM targeting sequence
  source 1..20: mol_type = other RNA
tttctttactcctgcatttc

SEQ ID NO: 6317 - RNA, 20 nt, synthetic construct
  misc_feature 1..20: note = C9Orf72 TTCN PAM targeting sequence
  source 1..20: mol_type = other RNA
ttactcctgcatttcttcaa

SEQ ID NO: 6318 - RNA, 20 nt, synthetic construct
  misc_feature 1..20: note = C9Orf72 TTCN PAM targeting sequence
  source 1..20: mol_type = other RNA
tcaatctccacttggcaggt

SEQ ID NO: 6319 - RNA, 20 nt, synthetic construct
  misc_feature 1..20: note = C9Orf72 TTCN PAM targeting sequence
  source 1..20: mol_type = other RNA
atctccacttggcaggtgaa

SEQ ID NO: 6320 - RNA, 20 nt, synthetic construct
  misc_feature 1..20: note = C9Orf72 TTCN PAM targeting sequence
  source 1..20: mol_type = other RNA
cctgccaagtggagattgaa

SEQ ID NO: 6321 - RNA, 20 nt, synthetic construct
  misc_feature 1..20: note = C9Orf72 TTCN PAM targeting sequence
  source 1..20: mol_type = other RNA
caatacgcaaatctaaccag

SEQ ID NO: 6322 - RNA, 20 nt, synthetic construct
  misc_feature 1..20: note = C9Orf72 TTCN PAM targeting sequence
  source 1..20: mol_type = other RNA
tggttagatttgcgtattgg

SEQ ID NO: 6323 - RNA, 20 nt, synthetic construct
  misc_feature 1..20: note = C9Orf72 TTCN PAM targeting sequence
  source 1..20: mol_type = other RNA
gcataaaactctaaagcagc

SEQ ID NO: 6324 - RNA, 20 nt, synthetic construct
  misc_feature 1..20: note = C9Orf72 TTCN PAM targeting sequence
  source 1..20: mol_type = other RNA
aaggtgaaatcaaagctatt

SEQ ID NO: 6325 - RNA, 20 nt, synthetic construct
  misc_feature 1..20: note = C9Orf72 TTCN PAM targeting sequence
  source 1..20: mol_type = other RNA
ccttggaagcagtaggaggc

SEQ ID NO: 6326 - RNA, 20 nt, synthetic construct
  misc_feature 1..20: note = C9Orf72 TTCN PAM targeting sequence
  source 1..20: mol_type = other RNA
cacatgcagtggtccaccat

SEQ ID NO: 6327 - RNA, 20 nt, synthetic construct
  misc_feature 1..20: note = C9Orf72 TTCN PAM targeting sequence
  source 1..20: mol_type = other RNA
ggattctcccaacttgcatg

SEQ ID NO: 6328 - RNA, 20 nt, synthetic construct
  misc_feature 1..20: note = C9Orf72 TTCN PAM targeting sequence
  source 1..20: mol_type = other RNA
cccaacttgcatgtaatact

SEQ ID NO: 6329 - RNA, 20 nt, synthetic construct
  misc_feature 1..20: note = C9Orf72 TTCN PAM targeting sequence
  source 1..20: mol_type = other RNA
gatggctggagtattacatg

SEQ ID NO: 6330 - RNA, 20 nt, synthetic construct
  misc_feature 1..20: note = C9Orf72 TTCN PAM targeting sequence
  source 1..20: mol_type = other RNA
cacttgcttctgggcgttgc

SEQ ID NO: 6331 - RNA, 20 nt, synthetic construct
  misc_feature 1..20: note = C9Orf72 TTCN PAM targeting sequence
  source 1..20: mol_type = other RNA
gggcgttgctacatactgga

SEQ ID NO: 6332 - RNA, 20 nt, synthetic construct
  misc_feature 1..20: note = C9Orf72 TTCN PAM targeting sequence
  source 1..20: mol_type = other RNA
agctaccaaccctccagtat

SEQ ID NO: 6333 - RNA, 20 nt, synthetic construct
  misc_feature 1..20: note = C9Orf72 TTCN PAM targeting sequence
  source 1..20: mol_type = other RNA
tcagcttctccatttcgcct

SEQ ID NO: 6334 - RNA, 20 nt, synthetic construct
  misc_feature 1..20: note = C9Orf72 TTCN PAM targeting sequence
  source 1..20: mol_type = other RNA
ccatttcgcctgactaactc

SEQ ID NO: 6335 - RNA, 20 nt, synthetic construct
  misc_feature 1..20: note = C9Orf72 TTCN PAM targeting sequence
  source 1..20: mol_type = other RNA
cctgactaactcccatttgt

SEQ ID NO: 6336 - RNA, 20 nt, synthetic construct
  misc_feature 1..20: note = C9Orf72 TTCN PAM targeting sequence
  source 1..20: mol_type = other RNA
aaccttaactaatttgtcac

SEQ ID NO: 6337 - RNA, 20 nt, synthetic construct
  misc_feature 1..20: note = C9Orf72 TTCN PAM targeting sequence
  source 1..20: mol_type = other RNA
tctagaacgtcctccctggc

SEQ ID NO: 6338 - RNA, 20 nt, synthetic construct
  misc_feature 1..20: note = C9Orf72 TTCN PAM targeting sequence
  source 1..20: mol_type = other RNA
agaggaagtgacaaattagt

SEQ ID NO: 6339 - RNA, 20 nt, synthetic construct
  misc_feature 1..20: note = C9Orf72 TTCN PAM targeting sequence
  source 1..20: mol_type = other RNA
tccatgacaatactaccaca

SEQ ID NO: 6340 - RNA, 20 nt, synthetic construct
  misc_feature 1..20: note = C9Orf72 TTCN PAM targeting sequence
  source 1..20: mol_type = other RNA
atgacaatactaccacatca

SEQ ID NO: 6341 - RNA, 20 nt, synthetic construct
  misc_feature 1..20: note = C9Orf72 TTCN PAM targeting sequence
  source 1..20: mol_type = other RNA
gtctcctgggagacaaaaaa

SEQ ID NO: 6342 - RNA, 20 nt, synthetic construct
  misc_feature 1..20: note = C9Orf72 TTCN PAM targeting sequence
  source 1..20: mol_type = other RNA
tgttcatagtcatagccctg

SEQ ID NO: 6343 - RNA, 20 nt, synthetic construct
  misc_feature 1..20: note = C9Orf72 TTCN PAM targeting sequence
  source 1..20: mol_type = other RNA
tagtcatagccctggcatcg

SEQ ID NO: 6344 - RNA, 20 nt, synthetic construct
  misc_feature 1..20: note = C9Orf72 TTCN PAM targeting sequence
  source 1..20: mol_type = other RNA
atgccagggctatgactatg

SEQ ID NO: 6345 - RNA, 20 nt, synthetic construct
  misc_feature 1..20: note = C9Orf72 TTCN PAM targeting sequence
  source 1..20: mol_type = other RNA
gctatgcattcgatgccagg

SEQ ID NO: 6346 - RNA, 20 nt, synthetic construct
  misc_feature 1..20: note = C9Orf72 TTCN PAM targeting sequence
  source 1..20: mol_type = other RNA
ccatatgtaattattgaatg

SEQ ID NO: 6347 - RNA, 20 nt, synthetic construct
  misc_feature 1..20: note = C9Orf72 TTCN PAM targeting sequence
  source 1..20: mol_type = other RNA
ataattacatatggagaacc

SEQ ID NO: 6348 - RNA, 20 nt, synthetic construct
  misc_feature 1..20: note = C9Orf72 TTCN PAM targeting sequence
  source 1..20: mol_type = other RNA
atccgttgcattcaataatt

SEQ ID NO: 6349 - RNA, 20 nt, synthetic construct
  misc_feature 1..20: note = C9Orf72 TTCN PAM targeting sequence
  source 1..20: mol_type = other RNA
acacgtgcatttgagggggg

SEQ ID NO: 6350 - RNA, 20 nt, synthetic construct
  misc_feature 1..20: note = C9Orf72 TTCN PAM targeting sequence
  source 1..20: mol_type = other RNA
caggctgatggtactaggag

SEQ ID NO: 6351 - RNA, 20 nt, synthetic construct
  misc_feature 1..20: note = C9Orf72 TTCN PAM targeting sequence
  source 1..20: mol_type = other RNA
tgacctaatcacctcccaaa

SEQ ID NO: 6352 - RNA, 20 nt, synthetic construct
  misc_feature 1..20: note = C9Orf72 TTCN PAM targeting sequence
  source 1..20: mol_type = other RNA
tggggtgtctgccttcatga

SEQ ID NO: 6353 - RNA, 20 nt, synthetic construct
  misc_feature 1..20: note = C9Orf72 TTCN PAM targeting sequence
  source 1..20: mol_type = other RNA
cgacctcaggtgatctgccc

SEQ ID NO: 6354 - RNA, 20 nt, synthetic construct
  misc_feature 1..20: note = C9Orf72 TTCN PAM targeting sequence
  source 1..20: mol_type = other RNA
agaccggcctgaccaacatg

SEQ ID NO: 6355 - RNA, 20 nt, synthetic construct
  misc_feature 1..20: note = C9Orf72 TTCN PAM targeting sequence
  source 1..20: mol_type = other RNA
ccatgttggtcaggccggtc

SEQ ID NO: 6356 - RNA, 20 nt, synthetic construct
  misc_feature 1..20: note = C9Orf72 TTCN PAM targeting sequence
  source 1..20: mol_type = other RNA
cctgcctcagcctccctagt

SEQ ID NO: 6357 - RNA, 20 nt, synthetic construct
  misc_feature 1..20: note = C9Orf72 TTCN PAM targeting sequence
  source 1..20: mol_type = other RNA
agtgattctcctgcctcagc

SEQ ID NO: 6358 - RNA, 20 nt, synthetic construct
  misc_feature 1..20: note = C9Orf72 TTCN PAM targeting sequence
  source 1..20: mol_type = other RNA
aagttcaagtgattctcctg

SEQ ID NO: 6359 - RNA, 20 nt, synthetic construct
  misc_feature 1..20: note = C9Orf72 TTCN PAM targeting sequence
  source 1..20: mol_type = other RNA
ctcttgttgcccagtctgga

SEQ ID NO: 6360 - RNA, 20 nt, synthetic construct
  misc_feature 1..20: note = C9Orf72 TTCN PAM targeting sequence
  source 1..20: mol_type = other RNA
gagatggagtttcactcttg

SEQ ID NO: 6361 - RNA, 20 nt, synthetic construct
  misc_feature 1..20: note = C9Orf72 TTCN PAM targeting sequence
  source 1..20: mol_type = other RNA
tttttttttttctgagatgg

SEQ ID NO: 6362 - RNA, 20 nt, synthetic construct
  misc_feature 1..20: note = C9Orf72 TTCN PAM targeting sequence
  source 1..20: mol_type = other RNA
ttctccatgtgaagttatag

SEQ ID NO: 6363 - RNA, 20 nt, synthetic construct
  misc_feature 1..20: note = C9Orf72 TTCN PAM targeting sequence
  source 1..20: mol_type = other RNA
ccatgtgaagttatagcaaa

SEQ ID NO: 6364 - RNA, 20 nt, synthetic construct
  misc_feature 1..20: note = C9Orf72 TTCN PAM targeting sequence
  source 1..20: mol_type = other RNA
catggagaaagaaaaaggac

SEQ ID NO: 6365 - RNA, 20 nt, synthetic construct
  misc_feature 1..20: note = C9Orf72 TTCN PAM targeting sequence
  source 1..20: mol_type = other RNA
cagatggcagtttttgctat

SEQ ID NO: 6366 - RNA, 20 nt, synthetic construct
  misc_feature 1..20: note = C9Orf72 TTCN PAM targeting sequence
  source 1..20: mol_type = other RNA
tgtttcacagatggcagttt

SEQ ID NO: 6367 - RNA, 20 nt, synthetic construct
  misc_feature 1..20: note = C9Orf72 TTCN PAM targeting sequence
  source 1..20: mol_type = other RNA
gtgtctggtgaggccttgct

SEQ ID NO: 6368 - RNA, 20 nt, synthetic construct
  misc_feature 1..20: note = C9Orf72 TTCN PAM targeting sequence
  source 1..20: mol_type = other RNA
gtgtctggtgggttcagtgt

SEQ ID NO: 6369 - RNA, 20 nt, synthetic construct
  misc_feature 1..20: note = C9Orf72 TTCN PAM targeting sequence
  source 1..20: mol_type = other RNA
cagcctcctgaactgtgaga

SEQ ID NO: 6370 - RNA, 20 nt, synthetic construct
  misc_feature 1..20: note = C9Orf72 TTCN PAM targeting sequence
  source 1..20: mol_type = other RNA
ggaggctgggaagtccaaga

SEQ ID NO: 6371 - RNA, 20 nt, synthetic construct
  misc_feature 1..20: note = C9Orf72 TTCN PAM targeting sequence
  source 1..20: mol_type = other RNA
cacagttcaggaggctggga

SEQ ID NO: 6372 - RNA, 20 nt, synthetic construct
  misc_feature 1..20: note = C9Orf72 TTCN PAM targeting sequence
  source 1..20: mol_type = other RNA
agctgctacaacaaaaatac

SEQ ID NO: 6373 - RNA, 20 nt, synthetic construct
  misc_feature 1..20: note = C9Orf72 TTCN PAM targeting sequence
  source 1..20: mol_type = other RNA
ctggcctagtccattcaagc

SEQ ID NO: 6374 - RNA, 20 nt, synthetic construct
  misc_feature 1..20: note = C9Orf72 TTCN PAM targeting sequence
  source 1..20: mol_type = other RNA
atggttatttgtttattcac

SEQ ID NO: 6375 - RNA, 20 nt, synthetic construct
  misc_feature 1..20: note = C9Orf72 TTCN PAM targeting sequence
  source 1..20: mol_type = other RNA
ccactcccgcacaactcagg

SEQ ID NO: 6376 - RNA, 20 nt, synthetic construct
  misc_feature 1..20: note = C9Orf72 TTCN PAM targeting sequence
  source 1..20: mol_type = other RNA
cctgcttgggttccccttac

SEQ ID NO: 6377 - RNA, 20 nt, synthetic construct
  misc_feature 1..20: note = C9Orf72 TTCN PAM targeting sequence
  source 1..20: mol_type = other RNA
ccttacttttcccaactcca

SEQ ID NO: 6378 - RNA, 20 nt, synthetic construct
  misc_feature 1..20: note = C9Orf72 TTCN PAM targeting sequence
  source 1..20: mol_type = other RNA
caactccaagcactggccct

SEQ ID NO: 6379 - RNA, 20 nt, synthetic construct
  misc_feature 1..20: note = C9Orf72 TTCN PAM targeting sequence
  source 1..20: mol_type = other RNA
gattgtgactcaagggccag

SEQ ID NO: 6380 - RNA, 20 nt, synthetic construct
  misc_feature 1..20: note = C9Orf72 TTCN PAM targeting sequence
  source 1..20: mol_type = other RNA
accaagcagtggttttcaga

SEQ ID NO: 6381 - RNA, 20 nt, synthetic construct
  misc_feature 1..20: note = C9Orf72 TTCN PAM targeting sequence
  source 1..20: mol_type = other RNA
atggagatctttctaccaag

SEQ ID NO: 6382 - RNA, 20 nt, synthetic construct
  misc_feature 1..20: note = C9Orf72 TTCN PAM targeting sequence
  source 1..20: mol_type = other RNA
cggtagcgttactccttaga

SEQ ID NO: 6383 - RNA, 20 nt, synthetic construct
  misc_feature 1..20: note = C9Orf72 TTCN PAM targeting sequence
  source 1..20: mol_type = other RNA
caccttgcagatctcggaga

SEQ ID NO: 6384 - RNA, 20 nt, synthetic construct
  misc_feature 1..20: note = C9Orf72 TTCN PAM targeting sequence
  source 1..20: mol_type = other RNA
ctccgagatctgcaaggtgt

SEQ ID NO: 6385 - RNA, 20 nt, synthetic construct
  misc_feature 1..20: note = C9Orf72 TTCN PAM targeting sequence
  source 1..20: mol_type = other RNA
tcggtatcagtaaaaatctg

SEQ ID NO: 6386 - RNA, 20 nt, synthetic construct
  misc_feature 1..20: note = C9Orf72 TTCN PAM targeting sequence
  source 1..20: mol_type = other RNA
tcctcggtatcagtaaaaat

SEQ ID NO: 6387 - RNA, 20 nt, synthetic construct
  misc_feature 1..20: note = C9Orf72 TTCN PAM targeting sequence
  source 1..20: mol_type = other RNA
aattgtattgtacatttgca

SEQ ID NO: 6388 - RNA, 20 nt, synthetic construct
  misc_feature 1..20: note = C9Orf72 TTCN PAM targeting sequence
  source 1..20: mol_type = other RNA
aagagggagatacttcttcc

SEQ ID NO: 6389 - RNA, 20 nt, synthetic construct
  misc_feature 1..20: note = C9Orf72 TTCN PAM targeting sequence
  source 1..20: mol_type = other RNA
tctaaataaagtcaaacagg

SEQ ID NO: 6390 - RNA, 20 nt, synthetic construct
  misc_feature 1..20: note = C9Orf72 TTCN PAM targeting sequence
  source 1..20: mol_type = other RNA
agagttattaaagtttgcaa

SEQ ID NO: 6391 - RNA, 20 nt, synthetic construct
  misc_feature 1..20: note = C9Orf72 TTCN PAM targeting sequence
  source 1..20: mol_type = other RNA
cccttgcccccacctcctcc

SEQ ID NO: 6392 - RNA, 20 nt, synthetic construct
  misc_feature 1..20: note = C9Orf72 TTCN PAM targeting sequence
  source 1..20: mol_type = other RNA
cccaactgtacaaagaggat

SEQ ID NO: 6393 - RNA, 20 nt, synthetic construct
  misc_feature 1..20: note = C9Orf72 TTCN PAM targeting sequence
  source 1..20: mol_type = other RNA
gggttcccccaactgtacaa

SEQ ID NO: 6394 - RNA, 20 nt, synthetic construct
  misc_feature 1..20: note = C9Orf72 TTCN PAM targeting sequence
  source 1..20: mol_type = other RNA
ttctgggttcccccaactgt

SEQ ID NO: 6395 - RNA, 20 nt, synthetic construct
  misc_feature 1..20: note = C9Orf72 TTCN PAM targeting sequence
  source 1..20: mol_type = other RNA
aattgttctttctgggttcc

SEQ ID NO: 6396 - RNA, 20 nt, synthetic construct
  misc_feature 1..20: note = C9Orf72 TTCN PAM targeting sequence
  source 1..20: mol_type = other RNA
ctttggctctgcaaagcccc

SEQ ID NO: 6397 - RNA, 20 nt, synthetic construct
  misc_feature 1..20: note = C9Orf72 TTCN PAM targeting sequence
  source 1..20: mol_type = other RNA
gaaatgaacctgagatagga

SEQ ID NO: 6398 - RNA, 20 nt, synthetic construct
  misc_feature 1..20: note = C9Orf72 TTCN PAM targeting sequence
  source 1..20: mol_type = other RNA
gaagggtcactgttcccttt

SEQ ID NO: 6399 - RNA, 20 nt, synthetic construct
  misc_feature 1..20: note = C9Orf72 TTCN PAM targeting sequence
  source 1..20: mol_type = other RNA
tttcagaagggtcactgttc

SEQ ID NO: 6400 - RNA, 20 nt, synthetic construct
  misc_feature 1..20: note = C9Orf72 TTCN PAM targeting sequence
  source 1..20: mol_type = other RNA
tatctcaggttcatttcaga

SEQ ID NO: 6401 - RNA, 20 nt, synthetic construct
  misc_feature 1..20: note = C9Orf72 TTCN PAM targeting sequence
  source 1..20: mol_type = other RNA
ccagacaaacagaatctgag

SEQ ID NO: 6402 - RNA, 20 nt, synthetic construct
  misc_feature 1..20: note = C9Orf72 TTCN PAM targeting sequence
  source 1..20: mol_type = other RNA
gtttgtctggagaagatccc

SEQ ID NO: 6403 - RNA, 20 nt, synthetic construct
  misc_feature 1..20: note = C9Orf72 TTCN PAM targeting sequence
  source 1..20: mol_type = other RNA
ctcagattctgtttgtctgg

SEQ ID NO: 6404 - RNA, 20 nt, synthetic construct
  misc_feature 1..20: note = C9Orf72 TTCN PAM targeting sequence
  source 1..20: mol_type = other RNA
acctgacatagaggggttaa

SEQ ID NO: 6405 - RNA, 20 nt, synthetic construct
  misc_feature 1..20: note = C9Orf72 TTCN PAM targeting sequence
  source 1..20: mol_type = other RNA
tgctcagtgctgccttaacc

SEQ ID NO: 6406 - RNA, 20 nt, synthetic construct
  misc_feature 1..20: note = C9Orf72 TTCN PAM targeting sequence
  source 1..20: mol_type = other RNA
cgggatcttacatgcaaatg

SEQ ID NO: 6407 - RNA, 20 nt, synthetic construct
  misc_feature 1..20: note = C9Orf72 TTCN PAM targeting sequence
  source 1..20: mol_type = other RNA
acttaccttcgcgggatctt

SEQ ID NO: 6408 - RNA, 20 nt, synthetic construct
  misc_feature 1..20: note = C9Orf72 TTCN PAM targeting sequence
  source 1..20: mol_type = other RNA
ctatcccttcaacttacctt

SEQ ID NO: 6409 - RNA, 20 nt, synthetic construct
  misc_feature 1..20: note = C9Orf72 TTCN PAM targeting sequence
  source 1..20: mol_type = other RNA
tccctatcccttcaacttac

SEQ ID NO: 6410 - RNA, 20 nt, synthetic construct
  misc_feature 1..20: note = C9Orf72 TTCN PAM targeting sequence
  source 1..20: mol_type = other RNA
ggtttcttccctatcccttc

SEQ ID NO: 6411 - RNA, 20 nt, synthetic construct
  misc_feature 1..20: note = C9Orf72 TTCN PAM targeting sequence
  source 1..20: mol_type = other RNA
tgaactaattcaagtaaatt

SEQ ID NO: 6412 - RNA, 20 nt, synthetic construct
  misc_feature 1..20: note = C9Orf72 TTCN PAM targeting sequence
  source 1..20: mol_type = other RNA
tgaatttagcttgactttga

SEQ ID NO: 6413 - RNA, 20 nt, synthetic construct
  misc_feature 1..20: note = C9Orf72 TTCN PAM targeting sequence
  source 1..20: mol_type = other RNA
agtaaattatttacttgaat

SEQ ID NO: 6414 - RNA, 20 nt, synthetic construct
  misc_feature 1..20: note = C9Orf72 TTCN PAM targeting sequence
  source 1..20: mol_type = other RNA
agtaaataatttacttgaat

SEQ ID NO: 6415 - RNA, 20 nt, synthetic construct
  misc_feature 1..20: note = C9Orf72 TTCN PAM targeting sequence
  source 1..20: mol_type = other RNA
catgccttcagggattacaa

SEQ ID NO: 6416 - RNA, 20 nt, synthetic construct
  misc_feature 1..20: note = C9Orf72 TTCN PAM targeting sequence
  source 1..20: mol_type = other RNA
gggattacaaaggaacatga

SEQ ID NO: 6417 - RNA, 20 nt, synthetic construct
  misc_feature 1..20: note = C9Orf72 TTCN PAM targeting sequence
  source 1..20: mol_type = other RNA
tttgtaatccctgaaggcat

SEQ ID NO: 6418 - RNA, 20 nt, synthetic construct
  misc_feature 1..20: note = C9Orf72 TTCN PAM targeting sequence
  source 1..20: mol_type = other RNA
tgttcctttgtaatccctga

SEQ ID NO: 6419 - RNA, 20 nt, synthetic construct
  misc_feature 1..20: note = C9Orf72 TTCN PAM targeting sequence
  source 1..20: mol_type = other RNA
tgcataatacactctccagg

SEQ ID NO: 6420 - RNA, 20 nt, synthetic construct
  misc_feature 1..20: note = C9Orf72 TTCN PAM targeting sequence
  source 1..20: mol_type = other RNA
tttcctgcataatacactct

SEQ ID NO: 6421 - RNA, 20 nt, synthetic construct
  misc_feature 1..20: note = C9Orf72 TTCN PAM targeting sequence
  source 1..20: mol_type = other RNA
tgctggccaacaatcagcta

SEQ ID NO: 6422 - RNA, 20 nt, synthetic construct
  misc_feature 1..20: note = C9Orf72 TTCN PAM targeting sequence
  source 1..20: mol_type = other RNA
gttttttttcaagataatcc

SEQ ID NO: 6423 - RNA, 20 nt, synthetic construct
  misc_feature 1..20: note = C9Orf72 TTCN PAM targeting sequence
  source 1..20: mol_type = other RNA
agataatccagaaatctaga

SEQ ID NO: 6424 - RNA, 20 nt, synthetic construct
  misc_feature 1..20: note = C9Orf72 TTCN PAM targeting sequence
  source 1..20: mol_type = other RNA
ggattatcttgaaaaaaaac

SEQ ID NO: 6425 - RNA, 20 nt, synthetic construct
  misc_feature 1..20: note = C9Orf72 TTCN PAM targeting sequence
  source 1..20: mol_type = other RNA
tacatgaaacctccccgtgg

SEQ ID NO: 6426 - RNA, 20 nt, synthetic construct
  misc_feature 1..20: note = C9Orf72 TTCN PAM targeting sequence
  source 1..20: mol_type = other RNA
tgtaagaatctagatttctg

SEQ ID NO: 6427 - RNA, 20 nt, synthetic construct
  misc_feature 1..20: note = C9Orf72 TTCN PAM targeting sequence
  source 1..20: mol_type = other RNA
aggacactaaaaaattttca

SEQ ID NO: 6428 - RNA, 20 nt, synthetic construct
  misc_feature 1..20: note = C9Orf72 TTCN PAM targeting sequence
  source 1..20: mol_type = other RNA
aacgttttatttattaacat

SEQ ID NO: 6429 - RNA, 20 nt, synthetic construct
  misc_feature 1..20: note = C9Orf72 TTCN PAM targeting sequence
  source 1..20: mol_type = other RNA
aggctgagtgagctatataa

SEQ ID NO: 6430 - RNA, 20 nt, synthetic construct
  misc_feature 1..20: note = C9Orf72 TTCN PAM targeting sequence
  source 1..20: mol_type = other RNA
aatttaaaaattaaaaaaga

SEQ ID NO: 6431 - RNA, 20 nt, synthetic construct
  misc_feature 1..20: note = C9Orf72 TTCN PAM targeting sequence
  source 1..20: mol_type = other RNA
tttttaatttttaaatttga

SEQ ID NO: 6432 - RNA, 20 nt, synthetic construct
  misc_feature 1..20: note = C9Orf72 TTCN PAM targeting sequence
  source 1..20: mol_type = other RNA
ttcttttttaatttttaaat

SEQ ID NO: 6433 - RNA, 20 nt, synthetic construct
  misc_feature 1..20: note = C9Orf72 TTCN PAM targeting sequence
  source 1..20: mol_type = other RNA
ttccttcttttttaattttt

SEQ ID NO: 6434 - RNA, 20 nt, synthetic construct
  misc_feature 1..20: note = C9Orf72 TTCN PAM targeting sequence
  source 1..20: mol_type = other RNA
tgtgctcagtgctacgagag

SEQ ID NO: 6435 - RNA, 20 nt, synthetic construct
  misc_feature 1..20: note = C9Orf72 TTCN PAM targeting sequence
  source 1..20: mol_type = other RNA
aacatcattttttaaataaa

SEQ ID NO: 6436 - RNA, 20 nt, synthetic construct
  misc_feature 1..20: note = C9Orf72 TTCN PAM targeting sequence
  source 1..20: mol_type = other RNA
tttatttaaaaaatgatgtt

SEQ ID NO: 6437 - RNA, 20 nt, synthetic construct
  misc_feature 1..20: note = C9Orf72 TTCN PAM targeting sequence
  source 1..20: mol_type = other RNA
ccaaggggccctgattcctt

SEQ ID NO: 6438 - RNA, 20 nt, synthetic construct
  misc_feature 1..20: note = C9Orf72 TTCN PAM targeting sequence
  source 1..20: mol_type = other RNA
aggactgaggcaggaaatat

SEQ ID NO: 6439 - RNA, 20 nt, synthetic construct
  misc_feature 1..20: note = C9Orf72 TTCN PAM targeting sequence
  source 1..20: mol_type = other RNA
tgcctcagtcctagaatcag

SEQ ID NO: 6440 - RNA, 20 nt, synthetic construct
  misc_feature 1..20: note = C9Orf72 TTCN PAM targeting sequence
  source 1..20: mol_type = other RNA
gacactaaggtgtcccaggc

SEQ ID NO: 6441 - RNA, 20 nt, synthetic construct
  misc_feature 1..20: note = C9Orf72 TTCN PAM targeting sequence
  source 1..20: mol_type = other RNA
ttctgacactaaggtgtccc

SEQ ID NO: 6442 - RNA, 20 nt, synthetic construct
  misc_feature 1..20: note = C9Orf72 TTCN PAM targeting sequence
  source 1..20: mol_type = other RNA
tttctttctgacactaaggt

SEQ ID NO: 6443 - RNA, 20 nt, synthetic construct
  misc_feature 1..20: note = C9Orf72 TTCN PAM targeting sequence
  source 1..20: mol_type = other RNA
ggttggctcctacgcccctg

SEQ ID NO: 6444 - RNA, 20 nt, synthetic construct
  misc_feature 1..20: note = C9Orf72 TTCN PAM targeting sequence
  source 1..20: mol_type = other RNA
ggagctctttcaggttggct

SEQ ID NO: 6445 - RNA, 20 nt, synthetic construct
  misc_feature 1..20: note = C9Orf72 TTCN PAM targeting sequence
  source 1..20: mol_type = other RNA
agtttgggccattccggagc

SEQ ID NO: 6446 - RNA, 20 nt, synthetic construct
  misc_feature 1..20: note = C9Orf72 TTCN PAM targeting sequence
  source 1..20: mol_type = other RNA
actttaggttataatgcaaa

SEQ ID NO: 6447 - RNA, 20 nt, synthetic construct
  misc_feature 1..20: note = C9Orf72 TTCN PAM targeting sequence
  source 1..20: mol_type = other RNA
cactgatataaataaatggt

SEQ ID NO: 6448 - RNA, 20 nt, synthetic construct
  misc_feature 1..20: note = C9Orf72 TTCN PAM targeting sequence
  source 1..20: mol_type = other RNA
ctatttactatccaaccatt

SEQ ID NO: 6449 - RNA, 20 nt, synthetic construct
  misc_feature 1..20: note = C9Orf72 TTCN PAM targeting sequence
  source 1..20: mol_type = other RNA
tttccctatttactatccaa

SEQ ID NO: 6450 - RNA, 20 nt, synthetic construct
  misc_feature 1..20: note = C9Orf72 TTCN PAM targeting sequence
  source 1..20: mol_type = other RNA
aaatatgtaaatactccctg

SEQ ID NO: 6451 - RNA, 20 nt, synthetic construct
  misc_feature 1..20: note = C9Orf72 TTCN PAM targeting sequence
  source 1..20: mol_type = other RNA
aggagatgaatgaagctctt

SEQ ID NO: 6452 - RNA, 20 nt, synthetic construct
  misc_feature 1..20: note = C9Orf72 TTCN PAM targeting sequence
  source 1..20: mol_type = other RNA
tctccttgaacagggagtat

SEQ ID NO: 6453 - RNA, 20 nt, synthetic construct
  misc_feature 1..20: note = C9Orf72 TTCN PAM targeting sequence
  source 1..20: mol_type = other RNA
ttcatctccttgaacaggga

SEQ ID NO: 6454 - RNA, 20 nt, synthetic construct
  misc_feature 1..20: note = C9Orf72 TTCN PAM targeting sequence
  source 1..20: mol_type = other RNA
aaagagtacagtataggtgg

SEQ ID NO: 6455 - RNA, 20 nt, synthetic construct
  misc_feature 1..20: note = C9Orf72 TTCN PAM targeting sequence
  source 1..20: mol_type = other RNA
tgactataaagccacctata

SEQ ID NO: 6456 - RNA, 20 nt, synthetic construct
  misc_feature 1..20: note = C9Orf72 TTCN PAM targeting sequence
  source 1..20: mol_type = other RNA
tagaatatggctttgatacg

SEQ ID NO: 6457 - RNA, 20 nt, synthetic construct
  misc_feature 1..20: note = C9Orf72 TTCN PAM targeting sequence
  source 1..20: mol_type = other RNA
atgaacacgattgatcactg

SEQ ID NO: 6458 - RNA, 20 nt, synthetic construct
  misc_feature 1..20: note = C9Orf72 TTCN PAM targeting sequence
  source 1..20: mol_type = other RNA
cttctgtggtctccctcccc

SEQ ID NO: 6459 - RNA, 20 nt, synthetic construct
  misc_feature 1..20: note = C9Orf72 TTCN PAM targeting sequence
  source 1..20: mol_type = other RNA
gtggtctccctccccataac

SEQ ID NO: 6460 - RNA, 20 nt, synthetic construct
  misc_feature 1..20: note = C9Orf72 TTCN PAM targeting sequence
  source 1..20: mol_type = other RNA
gtgttggtttgtctgatttt

SEQ ID NO: 6461 - RNA, 20 nt, synthetic construct
  misc_feature 1..20: note = C9Orf72 TTCN PAM targeting sequence
  source 1..20: mol_type = other RNA
tcagtgttggtttgtctgat

SEQ ID NO: 6462 - RNA, 20 nt, synthetic construct
  misc_feature 1..20: note = C9Orf72 TTCN PAM targeting sequence
  source 1..20: mol_type = other RNA
acaaaacatctgactggtag

SEQ ID NO: 6463 - RNA, 20 nt, synthetic construct
  misc_feature 1..20: note = C9Orf72 TTCN PAM targeting sequence
  source 1..20: mol_type = other RNA
tcaaaacaaggaaagtctga

SEQ ID NO: 6464 - RNA, 20 nt, synthetic construct
  misc_feature 1..20: note = C9Orf72 TTCN PAM targeting sequence
  source 1..20: mol_type = other RNA
ttgttttgatgaacttgaca

SEQ ID NO: 6465 - RNA, 20 nt, synthetic construct
  misc_feature 1..20: note = C9Orf72 TTCN PAM targeting sequence
  source 1..20: mol_type = other RNA
gactttccttgttttgatga

SEQ ID NO: 6466 - RNA, 20 nt, synthetic construct
  misc_feature 1..20: note = C9Orf72 TTCN PAM targeting sequence
  source 1..20: mol_type = other RNA
atccaggataccacattaca

SEQ ID NO: 6467 - RNA, 20 nt, synthetic construct
  misc_feature 1..20: note = C9Orf72 TTCN PAM targeting sequence
  source 1..20: mol_type = other RNA
tggattccatccaggatacc

SEQ ID NO: 6468 - RNA, 20 nt, synthetic construct
  misc_feature 1..20: note = C9Orf72 TTCN PAM targeting sequence
  source 1..20: mol_type = other RNA
gttcctggattccatccagg

SEQ ID NO: 6469 - RNA, 20 nt, synthetic construct
  misc_feature 1..20: note = C9Orf72 TTCN PAM targeting sequence
  source 1..20: mol_type = other RNA
ctaatgccctttttctgttc

SEQ ID NO: 6470 - RNA, 20 nt, synthetic construct
  misc_feature 1..20: note = C9Orf72 TTCN PAM targeting sequence
  source 1..20: mol_type = other RNA
gtttttccctaatgcccttt

SEQ ID NO: 6471 - RNA, 20 nt, synthetic construct
  misc_feature 1..20: note = C9Orf72 TTCN PAM targeting sequence
  source 1..20: mol_type = other RNA
tgtgttagttcctcagctgt

SEQ ID NO: 6472 - RNA, 20 nt, synthetic construct
  misc_feature 1..20: note = C9Orf72 TTCN PAM targeting sequence
  source 1..20: mol_type = other RNA
tcagctgtgacaaatgtttt

SEQ ID NO: 6473 - RNA, 20 nt, synthetic construct
  misc_feature 1..20: note = C9Orf72 TTCN PAM targeting sequence
  source 1..20: mol_type = other RNA
agtatcgctaacatctcaca

SEQ ID NO: 6474 - RNA, 20 nt, synthetic construct
  misc_feature 1..20: note = C9Orf72 TTCN PAM targeting sequence
  source 1..20: mol_type = other RNA
catatatccctcacccagtt

SEQ ID NO: 6475 - RNA, 20 nt, synthetic construct
  misc_feature 1..20: note = C9Orf72 TTCN PAM targeting sequence
  source 1..20: mol_type = other RNA
aaagaaaatgtttatattaa

SEQ ID NO: 6476 - RNA, 20 nt, synthetic construct
  misc_feature 1..20: note = C9Orf72 TTCN PAM targeting sequence
  source 1..20: mol_type = other RNA
ttagaatagttggtttatta

SEQ ID NO: 6477 - RNA, 20 nt, synthetic construct
  misc_feature 1..20: note = C9Orf72 TTCN PAM targeting sequence
  source 1..20: mol_type = other RNA
gtctttactgttatgctctg

SEQ ID NO: 6478 - RNA, 20 nt, synthetic construct
  misc_feature 1..20: note = C9Orf72 TTCN PAM targeting sequence
  source 1..20: mol_type = other RNA
aaacaaggggctctgcaaat

SEQ ID NO: 6479 - RNA, 20 nt, synthetic construct
  misc_feature 1..20: note = C9Orf72 TTCN PAM targeting sequence
  source 1..20: mol_type = other RNA
agatggcaacagcagagtct

SEQ ID NO: 6480 - RNA, 20 nt, synthetic construct
  misc_feature 1..20: note = C9Orf72 TTCN PAM targeting sequence
  source 1..20: mol_type = other RNA
gagtgcaggtttcatgactg

SEQ ID NO: 6481 - RNA, 20 nt, synthetic construct
  misc_feature 1..20: note = C9Orf72 TTCN PAM targeting sequence
  source 1..20: mol_type = other RNA
tgactgtgaagctggccctg

SEQ ID NO: 6482 - RNA, 20 nt, synthetic construct
  misc_feature 1..20: note = C9Orf72 TTCN PAM targeting sequence
  source 1..20: mol_type = other RNA
cagtcatgaaacctgcactc

SEQ ID NO: 6483 - RNA, 20 nt, synthetic construct
  misc_feature 1..20: note = C9Orf72 TTCN PAM targeting sequence
  source 1..20: mol_type = other RNA
gatcatatcacatgtcagag

SEQ ID NO: 6484 - RNA, 20 nt, synthetic construct
  misc_feature 1..20: note = C9Orf72 TTCN PAM targeting sequence
  source 1..20: mol_type = other RNA
ttaactaatttaatagctaa

SEQ ID NO: 6485 - RNA, 20 nt, synthetic construct
  misc_feature 1..20: note = C9Orf72 TTCN PAM targeting sequence
  source 1..20: mol_type = other RNA
gcaataagcgaaagagttaa

SEQ ID NO: 6486 - RNA, 20 nt, synthetic construct
  misc_feature 1..20: note = C9Orf72 TTCN PAM targeting sequence
  source 1..20: mol_type = other RNA
cttattgctgaatccctagt

SEQ ID NO: 6487 - RNA, 20 nt, synthetic construct
  misc_feature 1..20: note = C9Orf72 TTCN PAM targeting sequence
  source 1..20: mol_type = other RNA
atttaactctttcgcttatt

SEQ ID NO: 6488 - RNA, 20 nt, synthetic construct
  misc_feature 1..20: note = C9Orf72 TTCN PAM targeting sequence
  source 1..20: mol_type = other RNA
agcactggaagttgacctaa

SEQ ID NO: 6489 - RNA, 20 nt, synthetic construct
  misc_feature 1..20: note = C9Orf72 TTCN PAM targeting sequence
  source 1..20: mol_type = other RNA
agtgctggaaacttaggtat

SEQ ID NO: 6490 - RNA, 20 nt, synthetic construct
  misc_feature 1..20: note = C9Orf72 TTCN PAM targeting sequence
  source 1..20: mol_type = other RNA
aacgatcctcctgtctcagc

SEQ ID NO: 6491 - RNA, 20 nt, synthetic construct
  misc_feature 1..20: note = C9Orf72 TTCN PAM targeting sequence
  source 1..20: mol_type = other RNA
aagtaccagggaccgtaggt

SEQ ID NO: 6492 - RNA, 20 nt, synthetic construct
  misc_feature 1..20: note = C9Orf72 TTCN PAM targeting sequence
  source 1..20: mol_type = other RNA
agaccagcctaggcaacaaa

SEQ ID NO: 6493 - RNA, 20 nt, synthetic construct
  misc_feature 1..20: note = C9Orf72 TTCN PAM targeting sequence
  source 1..20: mol_type = other RNA
agagactggtatcaggccag

SEQ ID NO: 6494 - RNA, 20 nt, synthetic construct
  misc_feature 1..20: note = C9Orf72 TTCN PAM targeting sequence
  source 1..20: mol_type = other RNA
agttcaagagactggtatca

SEQ ID NO: 6495 - RNA, 20 nt, synthetic construct
  misc_feature 1..20: note = C9Orf72 TTCN PAM targeting sequence
  source 1..20: mol_type = other RNA
ttgtctgtaaaatggagata

SEQ ID NO: 6496 - RNA, 20 nt, synthetic construct
  misc_feature 1..20: note = C9Orf72 TTCN PAM targeting sequence
  source 1..20: mol_type = other RNA
aatttgtaaatgattctgac

SEQ ID NO: 6497 - RNA, 20 nt, synthetic construct
  misc_feature 1..20: note = C9Orf72 TTCN PAM targeting sequence
  source 1..20: mol_type = other RNA
gacatggtcagacatgaggc

SEQ ID NO: 6498 - RNA, 20 nt, synthetic construct
  misc_feature 1..20: note = C9Orf72 TTCN PAM targeting sequence
  source 1..20: mol_type = other RNA
aaagtttgacctaaagagac

SEQ ID NO: 6499 - RNA, 20 nt, synthetic construct
  misc_feature 1..20: note = C9Orf72 TTCN PAM targeting sequence
  source 1..20: mol_type = other RNA
ttttagattcaaaagtttga

SEQ ID NO: 6500 - RNA, 20 nt, synthetic construct
  misc_feature 1..20: note = C9Orf72 TTCN PAM targeting sequence
  source 1..20: mol_type = other RNA
taagaagaaataggttgatc

SEQ ID NO: 6501 - RNA, 20 nt, synthetic construct
  misc_feature 1..20: note = C9Orf72 TTCN PAM targeting sequence
  source 1..20: mol_type = other RNA
taagaaagcttcattttaga

SEQ ID NO: 6502 - RNA, 20 nt, synthetic construct
  misc_feature 1..20: note = C9Orf72 TTCN PAM targeting sequence
  source 1..20: mol_type = other RNA
tcttaagaaagcttcatttt

SEQ ID NO: 6503 - RNA, 20 nt, synthetic construct
  misc_feature 1..20: note = C9Orf72 TTCN PAM targeting sequence
  source 1..20: mol_type = other RNA
gtggcatgatacatctgtta

SEQ ID NO: 6504 - RNA, 20 nt, synthetic construct
  misc_feature 1..20: note = C9Orf72 TTCN PAM targeting sequence
  source 1..20: mol_type = other RNA
gtcgttcagtggcatgatac

SEQ ID NO: 6505 - RNA, 20 nt, synthetic construct
  misc_feature 1..20: note = C9Orf72 TTCN PAM targeting sequence
  source 1..20: mol_type = other RNA
tgagtgtgagatgccatatt

SEQ ID NO: 6506 - RNA, 20 nt, synthetic construct
  misc_feature 1..20: note = C9Orf72 TTCN PAM targeting sequence
  source 1..20: mol_type = other RNA
aaactctcaggtacctgcgc

SEQ ID NO: 6507 - RNA, 20 nt, synthetic construct
  misc_feature 1..20: note = C9Orf72 TTCN PAM targeting sequence
  source 1..20: mol_type = other RNA
ctttttaatttcaaaactct

SEQ ID NO: 6508 - RNA, 20 nt, synthetic construct
  misc_feature 1..20: note = C9Orf72 TTCN PAM targeting sequence
  source 1..20: mol_type = other RNA
cagcccagagcccccttggg

SEQ ID NO: 6509 - RNA, 20 nt, synthetic construct
  misc_feature 1..20: note = C9Orf72 TTCN PAM targeting sequence
  source 1..20: mol_type = other RNA
aactatttgattagcccaca

SEQ ID NO: 6510 - RNA, 20 nt, synthetic construct
  misc_feature 1..20: note = C9Orf72 TTCN PAM targeting sequence
  source 1..20: mol_type = other RNA
cattggctaagcactgttct

SEQ ID NO: 6511 - RNA, 20 nt, synthetic construct
  misc_feature 1..20: note = C9Orf72 TTCN PAM targeting sequence
  source 1..20: mol_type = other RNA
gattaggctggtctaacagt

SEQ ID NO: 6512 - RNA, 20 nt, synthetic construct
  misc_feature 1..20: note = C9Orf72 TTCN PAM targeting sequence
  source 1..20: mol_type = other RNA
gtaccacctgggagactgtt

SEQ ID NO: 6513 - RNA, 20 nt, synthetic construct
  misc_feature 1..20: note = C9Orf72 TTCN PAM targeting sequence
  source 1..20: mol_type = other RNA
aacaagatcacttagttaga

SEQ ID NO: 6514 - RNA, 20 nt, synthetic construct
  misc_feature 1..20: note = C9Orf72 TTCN PAM targeting sequence
  source 1..20: mol_type = other RNA
ccccaaacctggtagatcta

SEQ ID NO: 6515 - RNA, 20 nt, synthetic construct
  misc_feature 1..20: note = C9Orf72 TTCN PAM targeting sequence
  source 1..20: mol_type = other RNA
cagatcatatacttttgaga

SEQ ID NO: 6516 - RNA, 20 nt, synthetic construct
  misc_feature 1..20: note = C9Orf72 TTCN PAM targeting sequence
  source 1..20: mol_type = other RNA
tttactcagccaggcaggca

SEQ ID NO: 6517 - RNA, 20 nt, synthetic construct
  misc_feature 1..20: note = C9Orf72 TTCN PAM targeting sequence
  source 1..20: mol_type = other RNA
ttcctttactcagccaggca

SEQ ID NO: 6518 - RNA, 20 nt, synthetic construct
  misc_feature 1..20: note = C9Orf72 TTCN PAM targeting sequence
  source 1..20: mol_type = other RNA
atttattgttttgtcaacag

SEQ ID NO: 6519 - RNA, 20 nt, synthetic construct
  misc_feature 1..20: note = C9Orf72 TTCN PAM targeting sequence
  source 1..20: mol_type = other RNA
taaacagtcttcagttgagt

SEQ ID NO: 6520 - RNA, 20 nt, synthetic construct
  misc_feature 1..20: note = C9Orf72 TTCN PAM targeting sequence
  source 1..20: mol_type = other RNA
gttgagtgtgggtatgttcg

SEQ ID NO: 6521 - RNA, 20 nt, synthetic construct
  misc_feature 1..20: note = C9Orf72 TTCN PAM targeting sequence
  source 1..20: mol_type = other RNA
agaaaaaaaaatgagagata

SEQ ID NO: 6522 - RNA, 20 nt, synthetic construct
  misc_feature 1..20: note = C9Orf72 TTCN PAM targeting sequence
  source 1..20: mol_type = other RNA
cgaacatacccacactcaac

SEQ ID NO: 6523 - RNA, 20 nt, synthetic construct
  misc_feature 1..20: note = C9Orf72 TTCN PAM targeting sequence
  source 1..20: mol_type = other RNA
aaacagtatctctcattttt

SEQ ID NO: 6524 - RNA, 20 nt, synthetic construct
  misc_feature 1..20: note = C9Orf72 TTCN PAM targeting sequence
  source 1..20: mol_type = other RNA
ctggagacctcctaggtgct

SEQ ID NO: 6525 - RNA, 20 nt, synthetic construct
  misc_feature 1..20: note = C9Orf72 TTCN PAM targeting sequence
  source 1..20: mol_type = other RNA
taaatgccaggtagagggca

SEQ ID NO: 6526 - RNA, 20 nt, synthetic construct
  misc_feature 1..20: note = C9Orf72 TTCN PAM targeting sequence
  source 1..20: mol_type = other RNA
gcttgaggccgcaatagcag

SEQ ID NO: 6527 - RNA, 20 nt, synthetic construct
  misc_feature 1..20: note = C9Orf72 TTCN PAM targeting sequence
  source 1..20: mol_type = other RNA
ttggctgaataaactgtagc

SEQ ID NO: 6528 - RNA, 20 nt, synthetic construct
  misc_feature 1..20: note = C9Orf72 TTCN PAM targeting sequence
  source 1..20: mol_type = other RNA
gccaaagaaacctttctgct

SEQ ID NO: 6529 - RNA, 20 nt, synthetic construct
  misc_feature 1..20: note = C9Orf72 TTCN PAM targeting sequence
  source 1..20: mol_type = other RNA
gtcctgtttcagtctccaaa

SEQ ID NO: 6530 - RNA, 20 nt, synthetic construct
  misc_feature 1..20: note = C9Orf72 TTCN PAM targeting sequence
  source 1..20: mol_type = other RNA
gtctccaaaaaaaaaaaaaa

SEQ ID NO: 6531 - RNA, 20 nt, synthetic construct
  misc_feature 1..20: note = C9Orf72 TTCN PAM targeting sequence
  source 1..20: mol_type = other RNA
ttctaagtagaaatggaaag

SEQ ID NO: 6532 - RNA, 20 nt, synthetic construct
  misc_feature 1..20: note = C9Orf72 TTCN PAM targeting sequence
  source 1..20: mol_type = other RNA
aagtagaaatggaaagtaaa

SEQ ID NO: 6533 - RNA, 20 nt, synthetic construct
  misc_feature 1..20: note = C9Orf72 TTCN PAM targeting sequence
  source 1..20: mol_type = other RNA
acttagaaggaaaactttat

SEQ ID NO: 6534 - RNA, 20 nt, synthetic construct
  misc_feature 1..20: note = C9Orf72 TTCN PAM targeting sequence
  source 1..20: mol_type = other RNA
atttctacttagaaggaaaa

SEQ ID NO: 6535 - RNA, 20 nt, synthetic construct
  misc_feature 1..20: note = C9Orf72 TTCN PAM targeting sequence
  source 1..20: mol_type = other RNA
atgtcatgaactgcacccat

SEQ ID NO: 6536 - RNA, 20 nt, synthetic construct
  misc_feature 1..20: note = C9Orf72 TTCN PAM targeting sequence
  source 1..20: mol_type = other RNA
tgacatagaatttactttcc

SEQ ID NO: 6537 - RNA, 20 nt, synthetic construct
  misc_feature 1..20: note = C9Orf72 TTCN PAM targeting sequence
  source 1..20: mol_type = other RNA
ggttgttaataaatatttga

SEQ ID NO: 6538 - RNA, 20 nt, synthetic construct
  misc_feature 1..20: note = C9Orf72 TTCN PAM targeting sequence
  source 1..20: mol_type = other RNA
aatatttattaacaaccaga

SEQ ID NO: 6539 - RNA, 20 nt, synthetic construct
  misc_feature 1..20: note = C9Orf72 TTCN PAM targeting sequence
  source 1..20: mol_type = other RNA
tttgatcaataaacatttac

SEQ ID NO: 6540 - RNA, 20 nt, synthetic construct
  misc_feature 1..20: note = C9Orf72 TTCN PAM targeting sequence
  source 1..20: mol_type = other RNA
taaaaatgtggtccctgtct

SEQ ID NO: 6541 - RNA, 20 nt, synthetic construct
  misc_feature 1..20: note = C9Orf72 TTCN PAM targeting sequence
  source 1..20: mol_type = other RNA
tagacagggaccacattttt

SEQ ID NO: 6542 - RNA, 20 nt, synthetic construct
  misc_feature 1..20: note = C9Orf72 TTCN PAM targeting sequence
  source 1..20: mol_type = other RNA
tcatagacagggaccacatt

SEQ ID NO: 6543 - RNA, 20 nt, synthetic construct
  misc_feature 1..20: note = C9Orf72 TTCN PAM targeting sequence
  source 1..20: mol_type = other RNA
caatttggtatgtagttttg

SEQ ID NO: 6544 - RNA, 20 nt, synthetic construct
  misc_feature 1..20: note = C9Orf72 TTCN PAM targeting sequence
  source 1..20: mol_type = other RNA
atgcaccaacatgcatactg

SEQ ID NO: 6545 - RNA, 20 nt, synthetic construct
  misc_feature 1..20: note = C9Orf72 TTCN PAM targeting sequence
  source 1..20: mol_type = other RNA
gagtattacttaggtcaggg

SEQ ID NO: 6546 - RNA, 20 nt, synthetic construct
  misc_feature 1..20: note = C9Orf72 TTCN PAM targeting sequence
  source 1..20: mol_type = other RNA
tccctgacctaagtaatact

SEQ ID NO: 6547 - RNA, 20 nt, synthetic construct
  misc_feature 1..20: note = C9Orf72 TTCN PAM targeting sequence
  source 1..20: mol_type = other RNA
aaagacctcaccctttattg

SEQ ID NO: 6548 - RNA, 20 nt, synthetic construct
  misc_feature 1..20: note = C9Orf72 TTCN PAM targeting sequence
  source 1..20: mol_type = other RNA
ctttccaaagacctcaccct

SEQ ID NO: 6549 - RNA, 20 nt, synthetic construct
  misc_feature 1..20: note = C9Orf72 TTCN PAM targeting sequence
  source 1..20: mol_type = other RNA
gtttttctctttccaaagac

SEQ ID NO: 6550 - RNA, 20 nt, synthetic construct
  misc_feature 1..20: note = C9Orf72 TTCN PAM targeting sequence
  source 1..20: mol_type = other RNA
gtcagttttgtgctatttat

SEQ ID NO: 6551 - RNA, 20 nt, synthetic construct
  misc_feature 1..20: note = C9Orf72 TTCN PAM targeting sequence
  source 1..20: mol_type = other RNA
atgtgctctccatattttct

SEQ ID NO: 6552 - RNA, 20 nt, synthetic construct
  misc_feature 1..20: note = C9Orf72 TTCN PAM targeting sequence
  source 1..20: mol_type = other RNA
gcctaatagatcaattataa

SEQ ID NO: 6553 - RNA, 20 nt, synthetic construct
  misc_feature 1..20: note = C9Orf72 TTCN PAM targeting sequence
  source 1..20: mol_type = other RNA
ctctgcatgtttttatagtg

SEQ ID NO: 6554 - RNA, 20 nt, synthetic construct
  misc_feature 1..20: note = C9Orf72 TTCN PAM targeting sequence
  source 1..20: mol_type = other RNA
gctgggctgcaagggaatgt

SEQ ID NO: 6555 - RNA, 20 nt, synthetic construct
  misc_feature 1..20: note = C9Orf72 TTCN PAM targeting sequence
  source 1..20: mol_type = other RNA
cttgcagcccagccgaattc

SEQ ID NO: 6556 - RNA, 20 nt, synthetic construct
  misc_feature 1..20: note = C9Orf72 TTCN PAM targeting sequence
  source 1..20: mol_type = other RNA
ttgccagtgcgttgcttagc

SEQ ID NO: 6557 - RNA, 20 nt, synthetic construct
  misc_feature 1..20: note = C9Orf72 TTCN PAM targeting sequence
  source 1..20: mol_type = other RNA
aatttttcttttcctattga

SEQ ID NO: 6558 - RNA, 20 nt, synthetic construct
  misc_feature 1..20: note = C9Orf72 TTCN PAM targeting sequence
  source 1..20: mol_type = other RNA
tttcctattgatgtcttttg

SEQ ID NO: 6559 - RNA, 20 nt, synthetic construct
  misc_feature 1..20: note = C9Orf72 TTCN PAM targeting sequence
  source 1..20: mol_type = other RNA
tattgatgtcttttgcctca

SEQ ID NO: 6560 - RNA, 20 nt, synthetic construct
  misc_feature 1..20: note = C9Orf72 TTCN PAM targeting sequence
  source 1..20: mol_type = other RNA
caactaatgaggcaaaagac

SEQ ID NO: 6561 - RNA, 20 nt, synthetic construct
  misc_feature 1..20: note = C9Orf72 TTCN PAM targeting sequence
  source 1..20: mol_type = other RNA
ttatccctggcaaggactct

SEQ ID NO: 6562 - RNA, 20 nt, synthetic construct
  misc_feature 1..20: note = C9Orf72 TTCN PAM targeting sequence
  source 1..20: mol_type = other RNA
tccttatccctggcaaggac

SEQ ID NO: 6563 - RNA, 20 nt, synthetic construct
  misc_feature 1..20: note = C9Orf72 TTCN PAM targeting sequence
  source 1..20: mol_type = other RNA
ctagccaggcccacctctaa

SEQ ID NO: 6564 - RNA, 20 nt, synthetic construct
  misc_feature 1..20: note = C9Orf72 TTCN PAM targeting sequence
  source 1..20: mol_type = other RNA
gtaccaccaaggtctcttag

SEQ ID NO: 6565 - RNA, 20 nt, synthetic construct
  misc_feature 1..20: note = C9Orf72 TTCN PAM targeting sequence
  source 1..20: mol_type = other RNA
taaccccctcacccttcagt

SEQ ID NO: 6566 - RNA, 20 nt, synthetic construct
  misc_feature 1..20: note = C9Orf72 TTCN PAM targeting sequence
  source 1..20: mol_type = other RNA
gtccctctcctttcctaacc

SEQ ID NO: 6567 - RNA, 20 nt, synthetic construct
  misc_feature 1..20: note = C9Orf72 TTCN PAM targeting sequence
  source 1..20: mol_type = other RNA
tgcaactggtatcagcttca

SEQ ID NO: 6568 - RNA, 20 nt, synthetic construct
  misc_feature 1..20: note = C9Orf72 TTCN PAM targeting sequence
  source 1..20: mol_type = other RNA
atatcttatctgtgaggtgg

SEQ ID NO: 6569 - RNA, 20 nt, synthetic construct
  misc_feature 1..20: note = C9Orf72 TTCN PAM targeting sequence
  source 1..20: mol_type = other RNA
tttcctataggaaggccata

SEQ ID NO: 6570 - RNA, 20 nt, synthetic construct
  misc_feature 1..20: note = C9Orf72 TTCN PAM targeting sequence
  source 1..20: mol_type = other RNA
tataggaaggccataagaga

SEQ ID NO: 6571 - RNA, 20 nt, synthetic construct
  misc_feature 1..20: note = C9Orf72 TTCN PAM targeting sequence
  source 1..20: mol_type = other RNA
tataggaaatgaatcatcct

SEQ ID NO: 6572 - RNA, 20 nt, synthetic construct
  misc_feature 1..20: note = C9Orf72 TTCN PAM targeting sequence
  source 1..20: mol_type = other RNA
cttatggccttcctatagga

SEQ ID NO: 6573 - RNA, 20 nt, synthetic construct
  misc_feature 1..20: note = C9Orf72 TTCN PAM targeting sequence
  source 1..20: mol_type = other RNA
ggggcatttctcttatggcc

SEQ ID NO: 6574 - RNA, 20 nt, synthetic construct
  misc_feature 1..20: note = C9Orf72 TTCN PAM targeting sequence
  source 1..20: mol_type = other RNA
tgcggggtgtttctggggca

SEQ ID NO: 6575 - RNA, 20 nt, synthetic construct
  misc_feature 1..20: note = C9Orf72 TTCN PAM targeting sequence
  source 1..20: mol_type = other RNA
ttgccaggcacagagctgac

SEQ ID NO: 6576 - RNA, 20 nt, synthetic construct
  misc_feature 1..20: note = C9Orf72 TTCN PAM targeting sequence
  source 1..20: mol_type = other RNA
gttaagtcagctctgtgcct

SEQ ID NO: 6577 - RNA, 20 nt, synthetic construct
  misc_feature 1..20: note = C9Orf72 TTCN PAM targeting sequence
  source 1..20: mol_type = other RNA
gcaaacattcagttaagtca

SEQ ID NO: 6578 - RNA, 20 nt, synthetic construct
  misc_feature 1..20: note = C9Orf72 TTCN PAM targeting sequence
  source 1..20: mol_type = other RNA
ttcagcaaacattcagttaa

SEQ ID NO: 6579 - RNA, 20 nt, synthetic construct
  misc_feature 1..20: note = C9Orf72 TTCN PAM targeting sequence
  source 1..20: mol_type = other RNA
ctgtcatttactcattcatt

SEQ ID NO: 6580 - RNA, 20 nt, synthetic construct
  misc_feature 1..20: note = C9Orf72 TTCN PAM targeting sequence
  source 1..20: mol_type = other RNA
taattcactgtcatttactc

SEQ ID NO: 6581 - RNA, 20 nt, synthetic construct
  misc_feature 1..20: note = C9Orf72 TTCN PAM targeting sequence
  source 1..20: mol_type = other RNA
ctgtgatgtaaaatgttcgt

SEQ ID NO: 6582 - RNA, 20 nt, synthetic construct
  misc_feature 1..20: note = C9Orf72 TTCN PAM targeting sequence
  source 1..20: mol_type = other RNA
tcttttgtggtttcactgtg

SEQ ID NO: 6583 - RNA, 20 nt, synthetic construct
  misc_feature 1..20: note = C9Orf72 TTCN PAM targeting sequence
  source 1..20: mol_type = other RNA
gttatttggggactctatgt

SEQ ID NO: 6584 - RNA, 20 nt, synthetic construct
  misc_feature 1..20: note = C9Orf72 TTCN PAM targeting sequence
  source 1..20: mol_type = other RNA
gggtatcccagcggcctcag

SEQ ID NO: 6585 - RNA, 20 nt, synthetic construct
  misc_feature 1..20: note = C9Orf72 TTCN PAM targeting sequence
  source 1..20: mol_type = other RNA
ggaggcagacttgttacttc

SEQ ID NO: 6586 - RNA, 20 nt, synthetic construct
  misc_feature 1..20: note = C9Orf72 TTCN PAM targeting sequence
  source 1..20: mol_type = other RNA
gctcaacttttctttcaaat

SEQ ID NO: 6587 - RNA, 20 nt, synthetic construct
  misc_feature 1..20: note = C9Orf72 TTCN PAM targeting sequence
  source 1..20: mol_type = other RNA
ttcaaatgagctgctccatt

SEQ ID NO: 6588 - RNA, 20 nt, synthetic construct
  misc_feature 1..20: note = C9Orf72 TTCN PAM targeting sequence
  source 1..20: mol_type = other RNA
aatgagctgctccattcctc

SEQ ID NO: 6589 - RNA, 20 nt, synthetic construct
  misc_feature 1..20: note = C9Orf72 TTCN PAM targeting sequence
  source 1..20: mol_type = other RNA
tctgtgttatctgaaattcc

SEQ ID NO: 6590 - RNA, 20 nt, synthetic construct
  misc_feature 1..20: note = C9Orf72 TTCN PAM targeting sequence
  source 1..20: mol_type = other RNA
gataacacagaggaatggag

SEQ ID NO: 6591 - RNA, 20 nt, synthetic construct
  misc_feature 1..20: note = C9Orf72 TTCN PAM targeting sequence
  source 1..20: mol_type = other RNA
acctcttcagaatcaaagaa

SEQ ID NO: 6592 - RNA, 20 nt, synthetic construct
  misc_feature 1..20: note = C9Orf72 TTCN PAM targeting sequence
  source 1..20: mol_type = other RNA
gaatcaaagaatgaccagtc

SEQ ID NO: 6593 - RNA, 20 nt, synthetic construct
  misc_feature 1..20: note = C9Orf72 TTCN PAM targeting sequence
  source 1..20: mol_type = other RNA
gaagaggtggaatttcagat

SEQ ID NO: 6594 - RNA, 20 nt, synthetic construct
  misc_feature 1..20: note = C9Orf72 TTCN PAM targeting sequence
  source 1..20: mol_type = other RNA
ttgattctgaagaggtggaa

SEQ ID NO: 6595 - RNA, 20 nt, synthetic construct
  misc_feature 1..20: note = C9Orf72 TTCN PAM targeting sequence
  source 1..20: mol_type = other RNA
cattttcccactatattgtt

SEQ ID NO: 6596 - RNA, 20 nt, synthetic construct
  misc_feature 1..20: note = C9Orf72 TTCN PAM targeting sequence
  source 1..20: mol_type = other RNA
cactatattgttctctttat

SEQ ID NO: 6597 - RNA, 20 nt, synthetic construct
  misc_feature 1..20: note = C9Orf72 TTCN PAM targeting sequence
  source 1..20: mol_type = other RNA
ctttatagctggaatagtcc

SEQ ID NO: 6598 - RNA, 20 nt, synthetic construct
  misc_feature 1..20: note = C9Orf72 TTCN PAM targeting sequence
  source 1..20: mol_type = other RNA
agctataaagagaacaatat

SEQ ID NO: 6599 - RNA, 20 nt, synthetic construct
  misc_feature 1..20: note = C9Orf72 TTCN PAM targeting sequence
  source 1..20: mol_type = other RNA
aaggactattccagctataa

SEQ ID NO: 6600 - RNA, 20 nt, synthetic construct
  misc_feature 1..20: note = C9Orf72 TTCN PAM targeting sequence
  source 1..20: mol_type = other RNA
caaatattgaattaaagtag

SEQ ID NO: 6601 - RNA, 20 nt, synthetic construct
  misc_feature 1..20: note = C9Orf72 TTCN PAM targeting sequence
  source 1..20: mol_type = other RNA
atatttgggaagtgggagga

SEQ ID NO: 6602 - RNA, 20 nt, synthetic construct
  misc_feature 1..20: note = C9Orf72 TTCN PAM targeting sequence
  source 1..20: mol_type = other RNA
ttttatgatacacacataca

SEQ ID NO: 6603 - RNA, 20 nt, synthetic construct
  misc_feature 1..20: note = C9Orf72 TTCN PAM targeting sequence
  source 1..20: mol_type = other RNA
aggatccaataaaggatgtg

SEQ ID NO: 6604 - RNA, 20 nt, synthetic construct
  misc_feature 1..20: note = C9Orf72 TTCN PAM targeting sequence
  source 1..20: mol_type = other RNA
atcagcccttatgcactgtt

SEQ ID NO: 6605 - RNA, 20 nt, synthetic construct
  misc_feature 1..20: note = C9Orf72 TTCN PAM targeting sequence
  source 1..20: mol_type = other RNA
ggggttgtcctgtgggcaaa

SEQ ID NO: 6606 - RNA, 20 nt, synthetic construct
  misc_feature 1..20: note = C9Orf72 TTCN PAM targeting sequence
  source 1..20: mol_type = other RNA
attctggggttgtcctgtgg

SEQ ID NO: 6607 - RNA, 20 nt, synthetic construct
  misc_feature 1..20: note = C9Orf72 TTCN PAM targeting sequence
  source 1..20: mol_type = other RNA
tgcctgagaagcagctttgc

SEQ ID NO: 6608 - RNA, 20 nt, synthetic construct
  misc_feature 1..20: note = C9Orf72 TTCN PAM targeting sequence
  source 1..20: mol_type = other RNA
caggcaggaatctcttccat

SEQ ID NO: 6609 - RNA, 20 nt, synthetic construct
  misc_feature 1..20: note = C9Orf72 TTCN PAM targeting sequence
  source 1..20: mol_type = other RNA
ccaacgaattcaactcctca

SEQ ID NO: 6610 - RNA, 20 nt, synthetic construct
  misc_feature 1..20: note = C9Orf72 TTCN PAM targeting sequence
  source 1..20: mol_type = other RNA
ttggggaaaaaaatagcaaa

SEQ ID NO: 6611 - RNA, 20 nt, synthetic construct
  misc_feature 1..20: note = C9Orf72 TTCN PAM targeting sequence
  source 1..20: mol_type = other RNA
actcctcaactttgagctgt

SEQ ID NO: 6612 - RNA, 20 nt, synthetic construct
  misc_feature 1..20: note = C9Orf72 TTCN PAM targeting sequence
  source 1..20: mol_type = other RNA
cccaactaatgtaacaaaat

SEQ ID NO: 6613 - RNA, 20 nt, synthetic construct
  misc_feature 1..20: note = C9Orf72 TTCN PAM targeting sequence
  source 1..20: mol_type = other RNA
aagatatgcatggtttcaga

SEQ ID NO: 6614 - RNA, 20 nt, synthetic construct
  misc_feature 1..20: note = C9Orf72 TTCN PAM targeting sequence
  source 1..20: mol_type = other RNA
gagcttagaatgctcacatt

SEQ ID NO: 6615 - RNA, 20 nt, synthetic construct
  misc_feature 1..20: note = C9Orf72 TTCN PAM targeting sequence
  source 1..20: mol_type = other RNA
aagctctgaaaccatgcata

SEQ ID NO: 6616 - RNA, 20 nt, synthetic construct
  misc_feature 1..20: note = C9Orf72 TTCN PAM targeting sequence
  source 1..20: mol_type = other RNA
gaacacagatgaagttagta

SEQ ID NO: 6617 - RNA, 20 nt, synthetic construct
  misc_feature 1..20: note = C9Orf72 TTCN PAM targeting sequence
  source 1..20: mol_type = other RNA
gaaataatgtgagcattcta

SEQ ID NO: 6618 - RNA, 20 nt, synthetic construct
  misc_feature 1..20: note = C9Orf72 TTCN PAM targeting sequence
  source 1..20: mol_type = other RNA
tctgtgttcagaaataatgt

SEQ ID NO: 6619 - RNA, 20 nt, synthetic construct
  misc_feature 1..20: note = C9Orf72 TTCN PAM targeting sequence
  source 1..20: mol_type = other RNA
gtacggttacacctatttgt

SEQ ID NO: 6620 - RNA, 20 nt, synthetic construct
  misc_feature 1..20: note = C9Orf72 TTCN PAM targeting sequence
  source 1..20: mol_type = other RNA
gctcatcttctagctcttca

SEQ ID NO: 6621 - RNA, 20 nt, synthetic construct
  misc_feature 1..20: note = C9Orf72 TTCN PAM targeting sequence
  source 1..20: mol_type = other RNA
agctcttcaatggtcgtttg

SEQ ID NO: 6622 - RNA, 20 nt, synthetic construct
  misc_feature 1..20: note = C9Orf72 TTCN PAM targeting sequence
  source 1..20: mol_type = other RNA
atggtcgtttgaattgcatt

SEQ ID NO: 6623 - RNA, 20 nt, synthetic construct
  misc_feature 1..20: note = C9Orf72 TTCN PAM targeting sequence
  source 1..20: mol_type = other RNA
aacgaccattgaagagctag

SEQ ID NO: 6624 - RNA, 20 nt, synthetic construct
  misc_feature 1..20: note = C9Orf72 TTCN PAM targeting sequence
  source 1..20: mol_type = other RNA
tgctgtttcacaggcttatt

SEQ ID NO: 6625 - RNA, 20 nt, synthetic construct
  misc_feature 1..20: note = C9Orf72 TTCN PAM targeting sequence
  source 1..20: mol_type = other RNA
caggcttattgttttggtca

SEQ ID NO: 6626 - RNA, 20 nt, synthetic construct
  misc_feature 1..20: note = C9Orf72 TTCN PAM targeting sequence
  source 1..20: mol_type = other RNA
agcatcaaatgtgtaagtaa

SEQ ID NO: 6627 - RNA, 20 nt, synthetic construct
  misc_feature 1..20: note = C9Orf72 TTCN PAM targeting sequence
  source 1..20: mol_type = other RNA
ttttggcactatttacttac

SEQ ID NO: 6628 - RNA, 20 nt, synthetic construct
  misc_feature 1..20: note = C9Orf72 TTCN PAM targeting sequence
  source 1..20: mol_type = other RNA
tctattgtagctgttgctgc

SEQ ID NO: 6629 - RNA, 20 nt, synthetic construct
  misc_feature 1..20: note = C9Orf72 TTCN PAM targeting sequence
  source 1..20: mol_type = other RNA
gcaaaaacctataatgattc

SEQ ID NO: 6630 - RNA, 20 nt, synthetic construct
  misc_feature 1..20: note = C9Orf72 TTCN PAM targeting sequence
  source 1..20: mol_type = other RNA
tcatcattcagaagaggaca

SEQ ID NO: 6631 - RNA, 20 nt, synthetic construct
  misc_feature 1..20: note = C9Orf72 TTCN PAM targeting sequence
  source 1..20: mol_type = other RNA
gaagaggacacttagtggtg

SEQ ID NO: 6632 - RNA, 20 nt, synthetic construct
  misc_feature 1..20: note = C9Orf72 TTCN PAM targeting sequence
  source 1..20: mol_type = other RNA
gaatgatgatgaatcattat

SEQ ID NO: 6633 - RNA, 20 nt, synthetic construct
  misc_feature 1..20: note = C9Orf72 TTCN PAM targeting sequence
  source 1..20: mol_type = other RNA
caccactaagtgtcctcttc

SEQ ID NO: 6634 - RNA, 20 nt, synthetic construct
  misc_feature 1..20: note = C9Orf72 TTCN PAM targeting sequence
  source 1..20: mol_type = other RNA
ttctcaccactaagtgtcct

SEQ ID NO: 6635 - RNA, 20 nt, synthetic construct
  misc_feature 1..20: note = C9Orf72 TTCN PAM targeting sequence
  source 1..20: mol_type = other RNA
attctttctcaccactaagt

SEQ ID NO: 6636 - RNA, 20 nt, synthetic construct
  misc_feature 1..20: note = C9Orf72 TTCN PAM targeting sequence
  source 1..20: mol_type = other RNA
tttactctttccattctttc

SEQ ID NO: 6637 - RNA, 20 nt, synthetic construct
  misc_feature 1..20: note = C9Orf72 TTCN PAM targeting sequence
  source 1..20: mol_type = other RNA
aaccataccaaacaaatccc

SEQ ID NO: 6638 - RNA, 20 nt, synthetic construct
  misc_feature 1..20: note = C9Orf72 TTCN PAM targeting sequence
  source 1..20: mol_type = other RNA
atggactgtcagtaggtaat

SEQ ID NO: 6639 - RNA, 20 nt, synthetic construct
  misc_feature 1..20: note = C9Orf72 TTCN PAM targeting sequence
  source 1..20: mol_type = other RNA
gaaataaagagaataatgtt

SEQ ID NO: 6640 - RNA, 20 nt, synthetic construct
  misc_feature 1..20: note = C9Orf72 TTCN PAM targeting sequence
  source 1..20: mol_type = other RNA
gaaaacattttttaaaactc

SEQ ID NO: 6641 - RNA, 20 nt, synthetic construct
  misc_feature 1..20: note = C9Orf72 TTCN PAM targeting sequence
  source 1..20: mol_type = other RNA
ctttatttcagaaaacattt

SEQ ID NO: 6642 - RNA, 20 nt, synthetic construct
  misc_feature 1..20: note = C9Orf72 TTCN PAM targeting sequence
  source 1..20: mol_type = other RNA
ttctggacaccagtaccaac

SEQ ID NO: 6643 - RNA, 20 nt, synthetic construct
  misc_feature 1..20: note = C9Orf72 TTCN PAM targeting sequence
  source 1..20: mol_type = other RNA
ggacaccagtaccaactagc

SEQ ID NO: 6644 - RNA, 20 nt, synthetic construct
  misc_feature 1..20: note = C9Orf72 TTCN PAM targeting sequence
  source 1..20: mol_type = other RNA
caacaatgacaaagatgaag

SEQ ID NO: 6645 - RNA, 20 nt, synthetic construct
  misc_feature 1..20: note = C9Orf72 TTCN PAM targeting sequence
  source 1..20: mol_type = other RNA
tctttgtcattgttgggaat

SEQ ID NO: 6646 - RNA, 20 nt, synthetic construct
  misc_feature 1..20: note = C9Orf72 TTCN PAM targeting sequence
  source 1..20: mol_type = other RNA
tttaaaaaaaatcagtataa

SEQ ID NO: 6647 - RNA, 20 nt, synthetic construct
  misc_feature 1..20: note = C9Orf72 TTCN PAM targeting sequence
  source 1..20: mol_type = other RNA
ctttcttttaaaaaaaatca

SEQ ID NO: 6648 - RNA, 20 nt, synthetic construct
  misc_feature 1..20: note = C9Orf72 TTCN PAM targeting sequence
  source 1..20: mol_type = other RNA
ctaagtcagtgagagatttg

SEQ ID NO: 6649 - RNA, 20 nt, synthetic construct
  misc_feature 1..20: note = C9Orf72 TTCN PAM targeting sequence
  source 1..20: mol_type = other RNA
agatatttagactagctgga

SEQ ID NO: 6650 - RNA, 20 nt, synthetic construct
  misc_feature 1..20: note = C9Orf72 TTCN PAM targeting sequence
  source 1..20: mol_type = other RNA
agctagtctaaatatctgga

SEQ ID NO: 6651 - RNA, 20 nt, synthetic construct
  misc_feature 1..20: note = C9Orf72 TTCN PAM targeting sequence
  source 1..20: mol_type = other RNA
tttttgtggcttaaagaaag

SEQ ID NO: 6652 - RNA, 20 nt, synthetic construct
  misc_feature 1..20: note = C9Orf72 TTCN PAM targeting sequence
  source 1..20: mol_type = other RNA
ttaagccacaaaaatgaata

SEQ ID NO: 6653 - RNA, 20 nt, synthetic construct
  misc_feature 1..20: note = C9Orf72 TTCN PAM targeting sequence
  source 1..20: mol_type = other RNA
cgtgtctttctttaagccac

SEQ ID NO: 6654 - RNA, 20 nt, synthetic construct
  misc_feature 1..20: note = C9Orf72 TTCN PAM targeting sequence
  source 1..20: mol_type = other RNA
attcacgtgtctttctttaa

SEQ ID NO: 6655 - RNA, 20 nt, synthetic construct
  misc_feature 1..20: note = C9Orf72 TTCN PAM targeting sequence
  source 1..20: mol_type = other RNA
accctcacctgacttagata

SEQ ID NO: 6656 - RNA, 20 nt, synthetic construct
  misc_feature 1..20: note = C9Orf72 TTCN PAM targeting sequence
  source 1..20: mol_type = other RNA
tctaccctcacctgacttag

SEQ ID NO: 6657 - RNA, 20 nt, synthetic construct
  misc_feature 1..20: note = C9Orf72 TTCN PAM targeting sequence
  source 1..20: mol_type = other RNA
catcccatcccccattcttc

SEQ ID NO: 6658 - RNA, 20 nt, synthetic construct
  misc_feature 1..20: note = C9Orf72 TTCN PAM targeting sequence
  source 1..20: mol_type = other RNA
gctataacttaagctttatc

SEQ ID NO: 6659 - RNA, 20 nt, synthetic construct
  misc_feature 1..20: note = C9Orf72 TTCN PAM targeting sequence
  source 1..20: mol_type = other RNA
gagtgacatcatatcagctg

SEQ ID NO: 6660 - RNA, 20 nt, synthetic construct
  misc_feature 1..20: note = C9Orf72 TTCN PAM targeting sequence
  source 1..20: mol_type = other RNA
aggttcagagtgacatcata

SEQ ID NO: 6661 - RNA, 20 nt, synthetic construct
  misc_feature 1..20: note = C9Orf72 TTCN PAM targeting sequence
  source 1..20: mol_type = other RNA
gagtgatatcatatcagctg

SEQ ID NO: 6662 - RNA, 20 nt, synthetic construct
  misc_feature 1..20: note = C9Orf72 TTCN PAM targeting sequence
  source 1..20: mol_type = other RNA
gtggatactgggataaaggt

SEQ ID NO: 6663 - RNA, 20 nt, synthetic construct
  misc_feature 1..20: note = C9Orf72 TTCN PAM targeting sequence
  source 1..20: mol_type = other RNA
ttttctttgaaacagcgtat

SEQ ID NO: 6664 - RNA, 20 nt, synthetic construct
  misc_feature 1..20: note = C9Orf72 TTCN PAM targeting sequence
  source 1..20: mol_type = other RNA
ttgaaacagcgtatgtcaat

SEQ ID NO: 6665 - RNA, 20 nt, synthetic construct
  misc_feature 1..20: note = C9Orf72 TTCN PAM targeting sequence
  source 1..20: mol_type = other RNA
aagaaaaagaaagggtaact

SEQ ID NO: 6666 - RNA, 20 nt, synthetic construct
  misc_feature 1..20: note = C9Orf72 TTCN PAM targeting sequence
  source 1..20: mol_type = other RNA
tggaaaagtcttaaaggaaa

SEQ ID NO: 6667 - RNA, 20 nt, synthetic construct
  misc_feature 1..20: note = C9Orf72 TTCN PAM targeting sequence
  source 1..20: mol_type = other RNA
aagaaaggattgacatacgc

SEQ ID NO: 6668 - RNA, 20 nt, synthetic construct
  misc_feature 1..20: note = C9Orf72 TTCN PAM targeting sequence
  source 1..20: mol_type = other RNA
tttaagacttttccaagaaa

SEQ ID NO: 6669 - RNA, 20 nt, synthetic construct
  misc_feature 1..20: note = C9Orf72 TTCN PAM targeting sequence
  source 1..20: mol_type = other RNA
aattcaaggaagttggatcc

SEQ ID NO: 6670 - RNA, 20 nt, synthetic construct
  misc_feature 1..20: note = C9Orf72 TTCN PAM targeting sequence
  source 1..20: mol_type = other RNA
aggaagttggatcctgtaac

SEQ ID NO: 6671 - RNA, 20 nt, synthetic construct
  misc_feature 1..20: note = C9Orf72 TTCN PAM targeting sequence
  source 1..20: mol_type = other RNA
ttgaatttgaacctttttcc

SEQ ID NO: 6672 - RNA, 20 nt, synthetic construct
  misc_feature 1..20: note = C9Orf72 TTCN PAM targeting sequence
  source 1..20: mol_type = other RNA
cttagtggctaagagtaaac

SEQ ID NO: 6673 - RNA, 20 nt, synthetic construct
  misc_feature 1..20: note = C9Orf72 TTCN PAM targeting sequence
  source 1..20: mol_type = other RNA
gactttgagactcaagttca

SEQ ID NO: 6674 - RNA, 20 nt, synthetic construct
  misc_feature 1..20: note = C9Orf72 TTCN PAM targeting sequence
  source 1..20: mol_type = other RNA
agccctagcaccatgagaac

SEQ ID NO: 6675 - RNA, 20 nt, synthetic construct
  misc_feature 1..20: note = C9Orf72 TTCN PAM targeting sequence
  source 1..20: mol_type = other RNA
catggtgctagggctagaaa

SEQ ID NO: 6676 - RNA, 20 nt, synthetic construct
  misc_feature 1..20: note = C9Orf72 TTCN PAM targeting sequence
  source 1..20: mol_type = other RNA
agatgtcatacataagttct

SEQ ID NO: 6677 - RNA, 20 nt, synthetic construct
  misc_feature 1..20: note = C9Orf72 TTCN PAM targeting sequence
  source 1..20: mol_type = other RNA
tgcaaagatcttttgcaatg

SEQ ID NO: 6678 - RNA, 20 nt, synthetic construct
  misc_feature 1..20: note = C9Orf72 TTCN PAM targeting sequence
  source 1..20: mol_type = other RNA
ccaccttcctgcaaagatct

SEQ ID NO: 6679 - RNA, 20 nt, synthetic construct
  misc_feature 1..20: note = C9Orf72 TTCN PAM targeting sequence
  source 1..20: mol_type = other RNA
tgcccattttgtgttctcca

SEQ ID NO: 6680 - RNA, 20 nt, synthetic construct
  misc_feature 1..20: note = C9Orf72 TTCN PAM targeting sequence
  source 1..20: mol_type = other RNA
agtcttcttgcccattttgt

SEQ ID NO: 6681 - RNA, 20 nt, synthetic construct
  misc_feature 1..20: note = C9Orf72 TTCN PAM targeting sequence
  source 1..20: mol_type = other RNA
aaaatacagtttgaattttc

SEQ ID NO: 6682 - RNA, 20 nt, synthetic construct
  misc_feature 1..20: note = C9Orf72 TTCN PAM targeting sequence
  source 1..20: mol_type = other RNA
aatttccagtcttcttgccc

SEQ ID NO: 6683 - RNA, 20 nt, synthetic construct
  misc_feature 1..20: note = C9Orf72 TTCN PAM targeting sequence
  source 1..20: mol_type = other RNA
aactgtattttcgaatttcc

SEQ ID NO: 6684 - RNA, 20 nt, synthetic construct
  misc_feature 1..20: note = C9Orf72 TTCN PAM targeting sequence
  source 1..20: mol_type = other RNA
aaagatcataagtttaagtt

SEQ ID NO: 6685 - RNA, 20 nt, synthetic construct
  misc_feature 1..20: note = C9Orf72 TTCN PAM targeting sequence
  source 1..20: mol_type = other RNA
tgcagcaaccctgcaaaagc

SEQ ID NO: 6686 - RNA, 20 nt, synthetic construct
  misc_feature 1..20: note = C9Orf72 TTCN PAM targeting sequence
  source 1..20: mol_type = other RNA
aacagtttacgtaaaacact

SEQ ID NO: 6687 - RNA, 20 nt, synthetic construct
  misc_feature 1..20: note = C9Orf72 TTCN PAM targeting sequence
  source 1..20: mol_type = other RNA
gtacttgctaatgctaagtg

SEQ ID NO: 6688 - RNA, 20 nt, synthetic construct
  misc_feature 1..20: note = C9Orf72 TTCN PAM targeting sequence
  source 1..20: mol_type = other RNA
tcatttgaatcatattatga

SEQ ID NO: 6689 - RNA, 20 nt, synthetic construct
  misc_feature 1..20: note = C9Orf72 TTCN PAM targeting sequence
  source 1..20: mol_type = other RNA
aatgatgaacatgatgatag

SEQ ID NO: 6690 - RNA, 20 nt, synthetic construct
  misc_feature 1..20: note = C9Orf72 TTCN PAM targeting sequence
  source 1..20: mol_type = other RNA
tgagagaccagtcacctaga

SEQ ID NO: 6691 - RNA, 20 nt, synthetic construct
  misc_feature 1..20: note = C9Orf72 TTCN PAM targeting sequence
  source 1..20: mol_type = other RNA
aggtgactggtctctcaaga

SEQ ID NO: 6692 - RNA, 20 nt, synthetic construct
  misc_feature 1..20: note = C9Orf72 TTCN PAM targeting sequence
  source 1..20: mol_type = other RNA
aattatataatattaacaat

SEQ ID NO: 6693 - RNA, 20 nt, synthetic construct
  misc_feature 1..20: note = C9Orf72 TTCN PAM targeting sequence
  source 1..20: mol_type = other RNA
tatttattttagttttcaca

SEQ ID NO: 6694 - RNA, 20 nt, synthetic construct
  misc_feature 1..20: note = C9Orf72 TTCN PAM targeting sequence
  source 1..20: mol_type = other RNA
caaccttatgaataggtatt

SEQ ID NO: 6695 - RNA, 20 nt, synthetic construct
  misc_feature 1..20: note = C9Orf72 TTCN PAM targeting sequence
  source 1..20: mol_type = other RNA
taaggttgtgaaaactaaaa

SEQ ID NO: 6696 - RNA, 20 nt, synthetic construct
  misc_feature 1..20: note = C9Orf72 TTCN PAM targeting sequence
  source 1..20: mol_type = other RNA
ttaagcgtaaattaggtata

SEQ ID NO: 6697 - RNA, 20 nt, synthetic construct
  misc_feature 1..20: note = C9Orf72 TTCN PAM targeting sequence
  source 1..20: mol_type = other RNA
atctcactgtgtctcagttt

SEQ ID NO: 6698 - RNA, 20 nt, synthetic construct
  misc_feature 1..20: note = C9Orf72 TTCN PAM targeting sequence
  source 1..20: mol_type = other RNA
gtgatcaggatatagcttca

SEQ ID NO: 6699 - RNA, 20 nt, synthetic construct
  misc_feature 1..20: note = C9Orf72 TTCN PAM targeting sequence
  source 1..20: mol_type = other RNA
ttaactacccaactgtctaa

SEQ ID NO: 6700 - RNA, 20 nt, synthetic construct
  misc_feature 1..20: note = C9Orf72 TTCN PAM targeting sequence
  source 1..20: mol_type = other RNA
tctgttttgttttttttctt

SEQ ID NO: 6701 - RNA, 20 nt, synthetic construct
  misc_feature 1..20: note = C9Orf72 TTCN PAM targeting sequence
  source 1..20: mol_type = other RNA
ggggtacacctaagggggtc

SEQ ID NO: 6702 - RNA, 20 nt, synthetic construct
  misc_feature 1..20: note = C9Orf72 TTCN PAM targeting sequence
  source 1..20: mol_type = other RNA
tccctgacccccttaggtgt

SEQ ID NO: 6703 - RNA, 20 nt, synthetic construct
  misc_feature 1..20: note = C9Orf72 TTCN PAM targeting sequence
  source 1..20: mol_type = other RNA
cccatttcctccctgacccc

SEQ ID NO: 6704 - RNA, 20 nt, synthetic construct
  misc_feature 1..20: note = C9Orf72 TTCN PAM targeting sequence
  source 1..20: mol_type = other RNA
ggagtggcacatgacaatgt

SEQ ID NO: 6705 - RNA, 20 nt, synthetic construct
  misc_feature 1..20: note = C9Orf72 TTCN PAM targeting sequence
  source 1..20: mol_type = other RNA
ggaaacttcgcggtctagat

SEQ ID NO: 6706 - RNA, 20 nt, synthetic construct
  misc_feature 1..20: note = C9Orf72 TTCN PAM targeting sequence
  source 1..20: mol_type = other RNA
agaaatagatctcttctgga

SEQ ID NO: 6707 - RNA, 20 nt, synthetic construct
  misc_feature 1..20: note = C9Orf72 TTCN PAM targeting sequence
  source 1..20: mol_type = other RNA
cggtctagattcaaaagacc

SEQ ID NO: 6708 - RNA, 20 nt, synthetic construct
  misc_feature 1..20: note = C9Orf72 TTCN PAM targeting sequence
  source 1..20: mol_type = other RNA
aaagacctggattcaaattc

SEQ ID NO: 6709 - RNA, 20 nt, synthetic construct
  misc_feature 1..20: note = C9Orf72 TTCN PAM targeting sequence
  source 1..20: mol_type = other RNA
aattctggcaatgactttag

SEQ ID NO: 6710 - RNA, 20 nt, synthetic construct
  misc_feature 1..20: note = C9Orf72 TTCN PAM targeting sequence
  source 1..20: mol_type = other RNA
ggcaatgactttagctggct

SEQ ID NO: 6711 - RNA, 20 nt, synthetic construct
  misc_feature 1..20: note = C9Orf72 TTCN PAM targeting sequence
  source 1..20: mol_type = other RNA
aagacatagccagctaaagt

SEQ ID NO: 6712 - RNA, 20 nt, synthetic construct
  misc_feature 1..20: note = C9Orf72 TTCN PAM targeting sequence
  source 1..20: mol_type = other RNA
taaaaagtgtctgttcaaag

SEQ ID NO: 6713 - RNA, 20 nt, synthetic construct
  misc_feature 1..20: note = C9Orf72 TTCN PAM targeting sequence
  source 1..20: mol_type = other RNA
ttaaagatgatggtggctgg

SEQ ID NO: 6714 - RNA, 20 nt, synthetic construct
  misc_feature 1..20: note = C9Orf72 TTCN PAM targeting sequence
  source 1..20: mol_type = other RNA
caaagtgttaggattacaga

SEQ ID NO: 6715 - RNA, 20 nt, synthetic construct
  misc_feature 1..20: note = C9Orf72 TTCN PAM targeting sequence
  source 1..20: mol_type = other RNA
agaccagcctaggcaacatg

SEQ ID NO: 6716 - RNA, 20 nt, synthetic construct
  misc_feature 1..20: note = C9Orf72 TTCN PAM targeting sequence
  source 1..20: mol_type = other RNA
tttttttgagacagggtctc

SEQ ID NO: 6717 - RNA, 20 nt, synthetic construct
  misc_feature 1..20: note = C9Orf72 TTCN PAM targeting sequence
  source 1..20: mol_type = other RNA
tttttcttttttttgagaca

SEQ ID NO: 6718 - RNA, 20 nt, synthetic construct
  misc_feature 1..20: note = C9Orf72 TTCN PAM targeting sequence
  source 1..20: mol_type = other RNA
cagtaaccttacaataaagg

SEQ ID NO: 6719 - RNA, 20 nt, synthetic construct
  misc_feature 1..20: note = C9Orf72 TTCN PAM targeting sequence
  source 1..20: mol_type = other RNA
aattttcacagtaaccttac

SEQ ID NO: 6720 - RNA, 20 nt, synthetic construct
  misc_feature 1..20: note = C9Orf72 TTCN PAM targeting sequence
  source 1..20: mol_type = other RNA
ctggcaatatctcttctaat

SEQ ID NO: 6721 - RNA, 20 nt, synthetic construct
  misc_feature 1..20: note = C9Orf72 TTCN PAM targeting sequence
  source 1..20: mol_type = other RNA
caaatggaaaacaattatat

SEQ ID NO: 6722 - RNA, 20 nt, synthetic construct
  misc_feature 1..20: note = C9Orf72 TTCN PAM targeting sequence
  source 1..20: mol_type = other RNA
atttgtgaagcactttcact

SEQ ID NO: 6723 - RNA, 20 nt, synthetic construct
  misc_feature 1..20: note = C9Orf72 TTCN PAM targeting sequence
  source 1..20: mol_type = other RNA
tttatcagtcactatgtcaa

SEQ ID NO: 6724 - RNA, 20 nt, synthetic construct
  misc_feature 1..20: note = C9Orf72 TTCN PAM targeting sequence
  source 1..20: mol_type = other RNA
tgatattaagtcaaaagtca

SEQ ID NO: 6725 - RNA, 20 nt, synthetic construct
  misc_feature 1..20: note = C9Orf72 TTCN PAM targeting sequence
  source 1..20: mol_type = other RNA
cacatcatttcttgatatta

SEQ ID NO: 6726 - RNA, 20 nt, synthetic construct
  misc_feature 1..20: note = C9Orf72 TTCN PAM targeting sequence
  source 1..20: mol_type = other RNA
gtttctcacatcatttcttg

SEQ ID NO: 6727 - RNA, 20 nt, synthetic construct
  misc_feature 1..20: note = C9Orf72 TTCN PAM targeting sequence
  source 1..20: mol_type = other RNA
gttcaatgcaaatgtgtgtt

SEQ ID NO: 6728 - RNA, 20 nt, synthetic construct
  misc_feature 1..20: note = C9Orf72 TTCN PAM targeting sequence
  source 1..20: mol_type = other RNA
atgcaaatgtgtgtttacga

SEQ ID NO: 6729 - RNA, 20 nt, synthetic construct
  misc_feature 1..20: note = C9Orf72 TTCN PAM targeting sequence
  source 1..20: mol_type = other RNA
taaacacacatttgcattga

SEQ ID NO: 6730 - RNA, 20 nt, synthetic construct
  misc_feature 1..20: note = C9Orf72 TTCN PAM targeting sequence
  source 1..20: mol_type = other RNA
tattcgtaaacacacatttg

SEQ ID NO: 6731 - RNA, 20 nt, synthetic construct
  misc_feature 1..20: note = C9Orf72 TTCN PAM targeting sequence
  source 1..20: mol_type = other RNA
attgccaccgtgccccccac

SEQ ID NO: 6732 - RNA, 20 nt, synthetic construct
  misc_feature 1..20: note = C9Orf72 TTCN PAM targeting sequence
  source 1..20: mol_type = other RNA
tcctatgcagggcttccatt

SEQ ID NO: 6733 - RNA, 20 nt, synthetic construct
  misc_feature 1..20: note = C9Orf72 TTCN PAM targeting sequence
  source 1..20: mol_type = other RNA
ttcctcctatgcagggcttc

SEQ ID NO: 6734 - RNA, 20 nt, synthetic construct
  misc_feature 1..20: note = C9Orf72 TTCN PAM targeting sequence
  source 1..20: mol_type = other RNA
ttctttcctcctatgcaggg

SEQ ID NO: 6735 - RNA, 20 nt, synthetic construct
  misc_feature 1..20: note = C9Orf72 TTCN PAM targeting sequence
  source 1..20: mol_type = other RNA
ttctttctttcctcctatgc

SEQ ID NO: 6736 - RNA, 20 nt, synthetic construct
  misc_feature 1..20: note = C9Orf72 TTCN PAM targeting sequence
  source 1..20: mol_type = other RNA
ttcttgcttaatttgggtgg

SEQ ID NO: 6737 - RNA, 20 nt, synthetic construct
  misc_feature 1..20: note = C9Orf72 TTCN PAM targeting sequence
  source 1..20: mol_type = other RNA
tgcttaatttgggtggactt

SEQ ID NO: 6738 - RNA, 20 nt, synthetic construct
  misc_feature 1..20: note = C9Orf72 TTCN PAM targeting sequence
  source 1..20: mol_type = other RNA
aattctcaggcaaaaagaaa

SEQ ID NO: 6739 - RNA, 20 nt, synthetic construct
  misc_feature 1..20: note = C9Orf72 TTCN PAM targeting sequence
  source 1..20: mol_type = other RNA
caggcaaaaagaaataatat

SEQ ID NO: 6740 - RNA, 20 nt, synthetic construct
  misc_feature 1..20: note = C9Orf72 TTCN PAM targeting sequence
  source 1..20: mol_type = other RNA
ttttgcctgagaattagaag

SEQ ID NO: 6741 - RNA, 20 nt, synthetic construct
  misc_feature 1..20: note = C9Orf72 TTCN PAM targeting sequence
  source 1..20: mol_type = other RNA
ccaacatttataacacactt

SEQ ID NO: 6742 - RNA, 20 nt, synthetic construct
  misc_feature 1..20: note = C9Orf72 TTCN PAM targeting sequence
  source 1..20: mol_type = other RNA
agtatttttttgcatataat

SEQ ID NO: 6743 - RNA, 20 nt, synthetic construct
  misc_feature 1..20: note = C9Orf72 TTCN PAM targeting sequence
  source 1..20: mol_type = other RNA
tgaatttgggcaaattatat

SEQ ID NO: 6744 - RNA, 20 nt, synthetic construct
  misc_feature 1..20: note = C9Orf72 TTCN PAM targeting sequence
  source 1..20: mol_type = other RNA
tgaaataagccatattgcat

SEQ ID NO: 6745 - RNA, 20 nt, synthetic construct
  misc_feature 1..20: note = C9Orf72 TTCN PAM targeting sequence
  source 1..20: mol_type = other RNA
gaatagcatataaatactct

SEQ ID NO: 6746 - RNA, 20 nt, synthetic construct
  misc_feature 1..20: note = C9Orf72 TTCN PAM targeting sequence
  source 1..20: mol_type = other RNA
gaaaagtgtttgagggatta

SEQ ID NO: 6747 - RNA, 20 nt, synthetic construct
  misc_feature 1..20: note = C9Orf72 TTCN PAM targeting sequence
  source 1..20: mol_type = other RNA
tggttataatccagttacaa

SEQ ID NO: 6748 - RNA, 20 nt, synthetic construct
  misc_feature 1..20: note = C9Orf72 TTCN PAM targeting sequence
  source 1..20: mol_type = other RNA
gataacagaaatgactttct

SEQ ID NO: 6749 - RNA, 20 nt, synthetic construct
  misc_feature 1..20: note = C9Orf72 TTCN PAM targeting sequence
  source 1..20: mol_type = other RNA
gttatcagaatacagaggtt

SEQ ID NO: 6750 - RNA, 20 nt, synthetic construct
  misc_feature 1..20: note = C9Orf72 TTCN PAM targeting sequence
  source 1..20: mol_type = other RNA
aaactgtttaaaaagttatt

SEQ ID NO: 6751 - RNA, 20 nt, synthetic construct
  misc_feature 1..20: note = C9Orf72 TTCN PAM targeting sequence
  source 1..20: mol_type = other RNA
tgctgctgataaagacatac

SEQ ID NO: 6752 - RNA, 20 nt, synthetic construct
  misc_feature 1..20: note = C9Orf72 TTCN PAM targeting sequence
  source 1..20: mol_type = other RNA
ggtatgtctttatcagcagc

SEQ ID NO: 6753 - RNA, 20 nt, synthetic construct
  misc_feature 1..20: note = C9Orf72 TTCN PAM targeting sequence
  source 1..20: mol_type = other RNA
cattttcaggtatgtcttta

SEQ ID NO: 6754 - RNA, 20 nt, synthetic construct
  misc_feature 1..20: note = C9Orf72 TTCN PAM targeting sequence
  source 1..20: mol_type = other RNA
acatggctggggaggcctca

SEQ ID NO: 6755 - RNA, 20 nt, synthetic construct
  misc_feature 1..20: note = C9Orf72 TTCN PAM targeting sequence
  source 1..20: mol_type = other RNA
gaggcctccccagccatgtg

SEQ ID NO: 6756 - RNA, 20 nt, synthetic construct
  misc_feature 1..20: note = C9Orf72 TTCN PAM targeting sequence
  source 1..20: mol_type = other RNA
acctcccgccatgattctga

SEQ ID NO: 6757 - RNA, 20 nt, synthetic construct
  misc_feature 1..20: note = C9Orf72 TTCN PAM targeting sequence
  source 1..20: mol_type = other RNA
tacatggcagcagcaagaga

SEQ ID NO: 6758 - RNA, 20 nt, synthetic construct
  misc_feature 1..20: note = C9Orf72 TTCN PAM targeting sequence
  source 1..20: mol_type = other RNA
cttgctgctgccatgtaaga

SEQ ID NO: 6759 - RNA, 20 nt, synthetic construct
  misc_feature 1..20: note = C9Orf72 TTCN PAM targeting sequence
  source 1..20: mol_type = other RNA
tcatttttctcttgctgctg

SEQ ID NO: 6760 - RNA, 20 nt, synthetic construct
  misc_feature 1..20: note = C9Orf72 TTCN PAM targeting sequence
  source 1..20: mol_type = other RNA
tcctcatttttctcttgctg

SEQ ID NO: 6761 - RNA, 20 nt, synthetic construct
  misc_feature 1..20: note = C9Orf72 TTCN PAM targeting sequence
  source 1..20: mol_type = other RNA
ctatcacgagaatagcatgg

SEQ ID NO: 6762 - RNA, 20 nt, synthetic construct
  misc_feature 1..20: note = C9Orf72 TTCN PAM targeting sequence
  source 1..20: mol_type = other RNA
cgtgatagtgaataagtctc

SEQ ID NO: 6763 - RNA, 20 nt, synthetic construct
  misc_feature 1..20: note = C9Orf72 TTCN PAM targeting sequence
  source 1..20: mol_type = other RNA
catgctattctcgtgatagt

SEQ ID NO: 6764 - RNA, 20 nt, synthetic construct
  misc_feature 1..20: note = C9Orf72 TTCN PAM targeting sequence
  source 1..20: mol_type = other RNA
attatctccccctgggtccc

SEQ ID NO: 6765 - RNA, 20 nt, synthetic construct
  misc_feature 1..20: note = C9Orf72 TTCN PAM targeting sequence
  source 1..20: mol_type = other RNA
cacatgctatggcagggacc

SEQ ID NO: 6766 - RNA, 20 nt, synthetic construct
  misc_feature 1..20: note = C9Orf72 TTCN PAM targeting sequence
  source 1..20: mol_type = other RNA
agttgagatttgggtgggga

SEQ ID NO: 6767 - RNA, 20 nt, synthetic construct
  misc_feature 1..20: note = C9Orf72 TTCN PAM targeting sequence
  source 1..20: mol_type = other RNA
gcccctggcccctccaaatc

SEQ ID NO: 6768 - RNA, 20 nt, synthetic construct
  misc_feature 1..20: note = C9Orf72 TTCN PAM targeting sequence
  source 1..20: mol_type = other RNA
aaaccaatcatgccttccca

SEQ ID NO: 6769 - RNA, 20 nt, synthetic construct
  misc_feature 1..20: note = C9Orf72 TTCN PAM targeting sequence
  source 1..20: mol_type = other RNA
caacagtcacccaaagtctt

SEQ ID NO: 6770 - RNA, 20 nt, synthetic construct
  misc_feature 1..20: note = C9Orf72 TTCN PAM targeting sequence
  source 1..20: mol_type = other RNA
gcattaacccaaaagtccat

SEQ ID NO: 6771 - RNA, 20 nt, synthetic construct
  misc_feature 1..20: note = C9Orf72 TTCN PAM targeting sequence
  source 1..20: mol_type = other RNA
acctataagcctgcaaagtc

SEQ ID NO: 6772 - RNA, 20 nt, synthetic construct
  misc_feature 1..20: note = C9Orf72 TTCN PAM targeting sequence
  source 1..20: mol_type = other RNA
tagacacaatgtgcgtacag

SEQ ID NO: 6773 - RNA, 20 nt, synthetic construct
  misc_feature 1..20: note = C9Orf72 TTCN PAM targeting sequence
  source 1..20: mol_type = other RNA
aaatgggagaaattggccaa

SEQ ID NO: 6774 - RNA, 20 nt, synthetic construct
  misc_feature 1..20: note = C9Orf72 TTCN PAM targeting sequence
  source 1..20: mol_type = other RNA
cccatttggaacagctgtat

SEQ ID NO: 6775 - RNA, 20 nt, synthetic construct
  misc_feature 1..20: note = C9Orf72 TTCN PAM targeting sequence
  source 1..20: mol_type = other RNA
gacttgcatgggccctgtaa

SEQ ID NO: 6776 - RNA, 20 nt, synthetic construct
  misc_feature 1..20: note = C9Orf72 TTCN PAM targeting sequence
  source 1..20: mol_type = other RNA
tgcagcagcatgacctggat

SEQ ID NO: 6777 - RNA, 20 nt, synthetic construct
  misc_feature 1..20: note = C9Orf72 TTCN PAM targeting sequence
  source 1..20: mol_type = other RNA
cattattttgggaagctcca

SEQ ID NO: 6778 - RNA, 20 nt, synthetic construct
  misc_feature 1..20: note = C9Orf72 TTCN PAM targeting sequence
  source 1..20: mol_type = other RNA
caaaataatgggaacccact

SEQ ID NO: 6779 - RNA, 20 nt, synthetic construct
  misc_feature 1..20: note = C9Orf72 TTCN PAM targeting sequence
  source 1..20: mol_type = other RNA
tgggctggcattaagtgtgt

SEQ ID NO: 6780 - RNA, 20 nt, synthetic construct
  misc_feature 1..20: note = C9Orf72 TTCN PAM targeting sequence
  source 1..20: mol_type = other RNA
aggtgcacagtgcaagctgt

SEQ ID NO: 6781 - RNA, 20 nt, synthetic construct
  misc_feature 1..20: note = C9Orf72 TTCN PAM targeting sequence
  source 1..20: mol_type = other RNA
ggggtctggaagacgatggc

SEQ ID NO: 6782 - RNA, 20 nt, synthetic construct
  misc_feature 1..20: note = C9Orf72 TTCN PAM targeting sequence
  source 1..20: mol_type = other RNA
agaccccagaatggtagatc

SEQ ID NO: 6783 - RNA, 20 nt, synthetic construct
  misc_feature 1..20: note = C9Orf72 TTCN PAM targeting sequence
  source 1..20: mol_type = other RNA
tacagctccaccaagcagtg

SEQ ID NO: 6784 - RNA, 20 nt, synthetic construct
  misc_feature 1..20: note = C9Orf72 TTCN PAM targeting sequence
  source 1..20: mol_type = other RNA
cttctgcactgccctagcgg

SEQ ID NO: 6785 - RNA, 20 nt, synthetic construct
  misc_feature 1..20: note = C9Orf72 TTCN PAM targeting sequence
  source 1..20: mol_type = other RNA
gcactgccctagcggaggtt

SEQ ID NO: 6786 - RNA, 20 nt, synthetic construct
  misc_feature 1..20: note = C9Orf72 TTCN PAM targeting sequence
  source 1..20: mol_type = other RNA
ccatgagggtcccgcccctg

SEQ ID NO: 6787 - RNA, 20 nt, synthetic construct
  misc_feature 1..20: note = C9Orf72 TTCN PAM targeting sequence
  source 1..20: mol_type = other RNA
gaaatctagggggaggtttc

SEQ ID NO: 6788 - RNA, 20 nt, synthetic construct
  misc_feature 1..20: note = C9Orf72 TTCN PAM targeting sequence
  source 1..20: mol_type = other RNA
gaagatgtgtggacatgcct

SEQ ID NO: 6789 - RNA, 20 nt, synthetic construct
  misc_feature 1..20: note = C9Orf72 TTCN PAM targeting sequence
  source 1..20: mol_type = other RNA
aaacctcaattcttgacttc

SEQ ID NO: 6790 - RNA, 20 nt, synthetic construct
  misc_feature 1..20: note = C9Orf72 TTCN PAM targeting sequence
  source 1..20: mol_type = other RNA
tgacttctgtgcacccacag

SEQ ID NO: 6791 - RNA, 20 nt, synthetic construct
  misc_feature 1..20: note = C9Orf72 TTCN PAM targeting sequence
  source 1..20: mol_type = other RNA
gtgcacccacaggctcaaca

SEQ ID NO: 6792 - RNA, 20 nt, synthetic construct
  misc_feature 1..20: note = C9Orf72 TTCN PAM targeting sequence
  source 1..20: mol_type = other RNA
acgtggtgttgagcctgtgg

SEQ ID NO: 6793 - RNA, 20 nt, synthetic construct
  misc_feature 1..20: note = C9Orf72 TTCN PAM targeting sequence
  source 1..20: mol_type = other RNA
accctctgaagccacaccct

SEQ ID NO: 6794 - RNA, 20 nt, synthetic construct
  misc_feature 1..20: note = C9Orf72 TTCN PAM targeting sequence
  source 1..20: mol_type = other RNA
gagggtggaagccccaggcc

SEQ ID NO: 6795 - RNA, 20 nt, synthetic construct
  misc_feature 1..20: note = C9Orf72 TTCN PAM targeting sequence
  source 1..20: mol_type = other RNA
gccacagctggaatggctgg

SEQ ID NO: 6796 - RNA, 20 nt, synthetic construct
  misc_feature 1..20: note = C9Orf72 TTCN PAM targeting sequence
  source 1..20: mol_type = other RNA
agctgtggccgaaagggcca

SEQ ID NO: 6797 - RNA, 20 nt, synthetic construct
  misc_feature 1..20: note = C9Orf72 TTCN PAM targeting sequence
  source 1..20: mol_type = other RNA
taggctgcatacagcacggg

SEQ ID NO: 6798 - RNA, 20 nt, synthetic construct
  misc_feature 1..20: note = C9Orf72 TTCN PAM targeting sequence
  source 1..20: mol_type = other RNA
tgctgggcctctgggcctgt

SEQ ID NO: 6799 - RNA, 20 nt, synthetic construct
  misc_feature 1..20: note = C9Orf72 TTCN PAM targeting sequence
  source 1..20: mol_type = other RNA
tggctgccccacccatcaca

SEQ ID NO: 6800 - RNA, 20 nt, synthetic construct
  misc_feature 1..20: note = C9Orf72 TTCN PAM targeting sequence
  source 1..20: mol_type = other RNA
ccatggtcttagggattaac

SEQ ID NO: 6801 - RNA, 20 nt, synthetic construct
  misc_feature 1..20: note = C9Orf72 TTCN PAM targeting sequence
  source 1..20: mol_type = other RNA
agtcggctgcataaggagca

SEQ ID NO: 6802 - RNA, 20 nt, synthetic construct
  misc_feature 1..20: note = C9Orf72 TTCN PAM targeting sequence
  source 1..20: mol_type = other RNA
cctcaaaaaatgggtttttc

SEQ ID NO: 6803 - RNA, 20 nt, synthetic construct
  misc_feature 1..20: note = C9Orf72 TTCN PAM targeting sequence
  source 1..20: mol_type = other RNA
aagcagcaaagctttcagaa

SEQ ID NO: 6804 - RNA, 20 nt, synthetic construct
  misc_feature 1..20: note = C9Orf72 TTCN PAM targeting sequence
  source 1..20: mol_type = other RNA
tccgccagttaccctaaatc

SEQ ID NO: 6805 - RNA, 20 nt, synthetic construct
  misc_feature 1..20: note = C9Orf72 TTCN PAM targeting sequence
  source 1..20: mol_type = other RNA
gccagttaccctaaatcatc

SEQ ID NO: 6806 - RNA, 20 nt, synthetic construct
  misc_feature 1..20: note = C9Orf72 TTCN PAM targeting sequence
  source 1..20: mol_type = other RNA
aagttccacaaatctctagg

SEQ ID NO: 6807 - RNA, 20 nt, synthetic construct
  misc_feature 1..20: note = C9Orf72 TTCN PAM targeting sequence
  source 1..20: mol_type = other RNA
acaaatctctagggccacca

SEQ ID NO: 6808 - RNA, 20 nt, synthetic construct
  misc_feature 1..20: note = C9Orf72 TTCN PAM targeting sequence
  source 1..20: mol_type = other RNA
caacaagttcctcatctcca

SEQ ID NO: 6809 - RNA, 20 nt, synthetic construct
  misc_feature 1..20: note = C9Orf72 TTCN PAM targeting sequence
  source 1..20: mol_type = other RNA
tcatctccatctgagaccac

SEQ ID NO: 6810 - RNA, 20 nt, synthetic construct
  misc_feature 1..20: note = C9Orf72 TTCN PAM targeting sequence
  source 1..20: mol_type = other RNA
gcctggaccttattgttcac

SEQ ID NO: 6811 - RNA, 20 nt, synthetic construct
  misc_feature 1..20: note = C9Orf72 TTCN PAM targeting sequence
  source 1..20: mol_type = other RNA
catcactatcagcatttttg

SEQ ID NO: 6812 - RNA, 20 nt, synthetic construct
  misc_feature 1..20: note = C9Orf72 TTCN PAM targeting sequence
  source 1..20: mol_type = other RNA
acaagtctttaggaggttcc

SEQ ID NO: 6813 - RNA, 20 nt, synthetic construct
  misc_feature 1..20: note = C9Orf72 TTCN PAM targeting sequence
  source 1..20: mol_type = other RNA
aaactttcccacattttcct

SEQ ID NO: 6814 - RNA, 20 nt, synthetic construct
  misc_feature 1..20: note = C9Orf72 TTCN PAM targeting sequence
  source 1..20: mol_type = other RNA
cacattttcctgtcttctga

SEQ ID NO: 6815 - RNA, 20 nt, synthetic construct
  misc_feature 1..20: note = C9Orf72 TTCN PAM targeting sequence
  source 1..20: mol_type = other RNA
tgtcttctgaacccttcaca

SEQ ID NO: 6816 - RNA, 20 nt, synthetic construct
  misc_feature 1..20: note = C9Orf72 TTCN PAM targeting sequence
  source 1..20: mol_type = other RNA
gaacccttcacattgttcca

SEQ ID NO: 6817 - RNA, 20 nt, synthetic construct
  misc_feature 1..20: note = C9Orf72 TTCN PAM targeting sequence
  source 1..20: mol_type = other RNA
gaagacaggaaaatgtggga

SEQ ID NO: 6818 - RNA, 20 nt, synthetic construct
  misc_feature 1..20: note = C9Orf72 TTCN PAM targeting sequence
  source 1..20: mol_type = other RNA
cattgttccaacctctgcct

SEQ ID NO: 6819 - RNA, 20 nt, synthetic construct
  misc_feature 1..20: note = C9Orf72 TTCN PAM targeting sequence
  source 1..20: mol_type = other RNA
aacctctgcctgttacccag

SEQ ID NO: 6820 - RNA, 20 nt, synthetic construct
  misc_feature 1..20: note = C9Orf72 TTCN PAM targeting sequence
  source 1..20: mol_type = other RNA
aaagtcacttccacattttc

SEQ ID NO: 6821 - RNA, 20 nt, synthetic construct
  misc_feature 1..20: note = C9Orf72 TTCN PAM targeting sequence
  source 1..20: mol_type = other RNA
acattttcgggtatcttttc

SEQ ID NO: 6822 - RNA, 20 nt, synthetic construct
  misc_feature 1..20: note = C9Orf72 TTCN PAM targeting sequence
  source 1..20: mol_type = other RNA
ggtatcttttcagcaacgcc

SEQ ID NO: 6823 - RNA, 20 nt, synthetic construct
  misc_feature 1..20: note = C9Orf72 TTCN PAM targeting sequence
  source 1..20: mol_type = other RNA
gcaacgcctcactctactgg

SEQ ID NO: 6824 - RNA, 20 nt, synthetic construct
  misc_feature 1..20: note = C9Orf72 TTCN PAM targeting sequence
  source 1..20: mol_type = other RNA
tgctgctgataaaaacatac

SEQ ID NO: 6825 - RNA, 20 nt, synthetic construct
  misc_feature 1..20: note = C9Orf72 TTCN PAM targeting sequence
  source 1..20: mol_type = other RNA
cagttttgggtatgttttta

SEQ ID NO: 6826 - RNA, 20 nt, synthetic construct
  misc_feature 1..20: note = C9Orf72 TTCN PAM targeting sequence
  source 1..20: mol_type = other RNA
tcccagttttgggtatgttt

SEQ ID NO: 6827 - RNA, 20 nt, synthetic construct
  misc_feature 1..20: note = C9Orf72 TTCN PAM targeting sequence
  source 1..20: mol_type = other RNA
acatggttggggaggcctca

SEQ ID NO: 6828 - RNA, 20 nt, synthetic construct
  misc_feature 1..20: note = C9Orf72 TTCN PAM targeting sequence
  source 1..20: mol_type = other RNA
gaggcctccccaaccatgtg

SEQ ID NO: 6829 - RNA, 20 nt, synthetic construct
  misc_feature 1..20: note = C9Orf72 TTCN PAM targeting sequence
  source 1..20: mol_type = other RNA
gcctcccactatgattctga

SEQ ID NO: 6830 - RNA, 20 nt, synthetic construct
  misc_feature 1..20: note = C9Orf72 TTCN PAM targeting sequence
  source 1..20: mol_type = other RNA
tatacggcagcagcaagaga

SEQ ID NO: 6831 - RNA, 20 nt, synthetic construct
  misc_feature 1..20: note = C9Orf72 TTCN PAM targeting sequence
  source 1..20: mol_type = other RNA
cttgctgctgccgtataaga

SEQ ID NO: 6832 - RNA, 20 nt, synthetic construct
  misc_feature 1..20: note = C9Orf72 TTCN PAM targeting sequence
  source 1..20: mol_type = other RNA
tcattttctcttgctgctgc

SEQ ID NO: 6833 - RNA, 20 nt, synthetic construct
  misc_feature 1..20: note = C9Orf72 TTCN PAM targeting sequence
  source 1..20: mol_type = other RNA
tcctcattttctcttgctgc

SEQ ID NO: 6834 - RNA, 20 nt, synthetic construct
  misc_feature 1..20: note = C9Orf72 TTCN PAM targeting sequence
  source 1..20: mol_type = other RNA
gcttttgcttcttcctcatt

SEQ ID NO: 6835 - RNA, 20 nt, synthetic construct
  misc_feature 1..20: note = C9Orf72 TTCN PAM targeting sequence
  source 1..20: mol_type = other RNA
ctatcacaagaatagcacgg

SEQ ID NO: 6836 - RNA, 20 nt, synthetic construct
  misc_feature 1..20: note = C9Orf72 TTCN PAM targeting sequence
  source 1..20: mol_type = other RNA
tgtgatagtgaataagtctc

SEQ ID NO: 6837 - RNA, 20 nt, synthetic construct
  misc_feature 1..20: note = C9Orf72 TTCN PAM targeting sequence
  source 1..20: mol_type = other RNA
cgtgctattcttgtgatagt

SEQ ID NO: 6838 - RNA, 20 nt, synthetic construct
  misc_feature 1..20: note = C9Orf72 TTCN PAM targeting sequence
  source 1..20: mol_type = other RNA
attatctccccttgggtccg

SEQ ID NO: 6839 - RNA, 20 nt, synthetic construct
  misc_feature 1..20: note = C9Orf72 TTCN PAM targeting sequence
  source 1..20: mol_type = other RNA
cacatattgtaggacggacc

SEQ ID NO: 6840 - RNA, 20 nt, synthetic construct
  misc_feature 1..20: note = C9Orf72 TTCN PAM targeting sequence
  source 1..20: mol_type = other RNA
agttgagatttgggtgggga

SEQ ID NO: 6841 - RNA, 20 nt, synthetic construct
  misc_feature 1..20: note = C9Orf72 TTCN PAM targeting sequence
  source 1..20: mol_type = other RNA
tgttatcattcctgttatca

SEQ ID NO: 6842 - RNA, 20 nt, synthetic construct
  misc_feature 1..20: note = C9Orf72 TTCN PAM targeting sequence
  source 1..20: mol_type = other RNA
tgttatcagaatccagagat

SEQ ID NO: 6843 - RNA, 20 nt, synthetic construct
  misc_feature 1..20: note = C9Orf72 TTCN PAM targeting sequence
  source 1..20: mol_type = other RNA
gataacaggaatgataacag

SEQ ID NO: 6844 - RNA, 20 nt, synthetic construct
  misc_feature 1..20: note = C9Orf72 TTCN PAM targeting sequence
  source 1..20: mol_type = other RNA
ggcaggatctctggattctg

SEQ ID NO: 6845 - RNA, 20 nt, synthetic construct
  misc_feature 1..20: note = C9Orf72 TTCN PAM targeting sequence
  source 1..20: mol_type = other RNA
agaaactctcaagagagaac

SEQ ID NO: 6846 - RNA, 20 nt, synthetic construct
  misc_feature 1..20: note = C9Orf72 TTCN PAM targeting sequence
  source 1..20: mol_type = other RNA
agaaatgcagacttaatcct

SEQ ID NO: 6847 - RNA, 20 nt, synthetic construct
  misc_feature 1..20: note = C9Orf72 TTCN PAM targeting sequence
  source 1..20: mol_type = other RNA
ctcttgagagtttctagaaa

SEQ ID NO: 6848 - RNA, 20 nt, synthetic construct
  misc_feature 1..20: note = C9Orf72 TTCN PAM targeting sequence
  source 1..20: mol_type = other RNA
catttttctacatgaaaaac

SEQ ID NO: 6849 - RNA, 20 nt, synthetic construct
  misc_feature 1..20: note = C9Orf72 TTCN PAM targeting sequence
  source 1..20: mol_type = other RNA
acatgaaaaacaggtacaca

SEQ ID NO: 6850 - RNA, 20 nt, synthetic construct
  misc_feature 1..20: note = C9Orf72 TTCN PAM targeting sequence
  source 1..20: mol_type = other RNA
tgtagaaaaatgagaaatca

SEQ ID NO: 6851 - RNA, 20 nt, synthetic construct
  misc_feature 1..20: note = C9Orf72 TTCN PAM targeting sequence
  source 1..20: mol_type = other RNA
acccactctattctctcaaa

SEQ ID NO: 6852 - RNA, 20 nt, synthetic construct
  misc_feature 1..20: note = C9Orf72 TTCN PAM targeting sequence
  source 1..20: mol_type = other RNA
ctcaaacatgccaataacaa

SEQ ID NO: 6853 - RNA, 20 nt, synthetic construct
  misc_feature 1..20: note = C9Orf72 TTCN PAM targeting sequence
  source 1..20: mol_type = other RNA
aactttttttttaacttgtt

SEQ ID NO: 6854 - RNA, 20 nt, synthetic construct
  misc_feature 1..20: note = C9Orf72 TTCN PAM targeting sequence
  source 1..20: mol_type = other RNA
tttcaaactttttttttaac

SEQ ID NO: 6855 - RNA, 20 nt, synthetic construct
  misc_feature 1..20: note = C9Orf72 TTCN PAM targeting sequence
  source 1..20: mol_type = other RNA
gtctttgaggaggatacatg

SEQ ID NO: 6856 - RNA, 20 nt, synthetic construct
  misc_feature 1..20: note = C9Orf72 TTCN PAM targeting sequence
  source 1..20: mol_type = other RNA
ggctctaaaggtagacctct

SEQ ID NO: 6857 - RNA, 20 nt, synthetic construct
  misc_feature 1..20: note = C9Orf72 TTCN PAM targeting sequence
  source 1..20: mol_type = other RNA
ctttgtgctttaatttcttt

SEQ ID NO: 6858 - RNA, 20 nt, synthetic construct
  misc_feature 1..20: note = C9Orf72 TTCN PAM targeting sequence
  source 1..20: mol_type = other RNA
ttctttgttgttagggtgct

SEQ ID NO: 6859 - RNA, 20 nt, synthetic construct
  misc_feature 1..20: note = C9Orf72 TTCN PAM targeting sequence
  source 1..20: mol_type = other RNA
ttgttgttagggtgctaata

SEQ ID NO: 6860 - RNA, 20 nt, synthetic construct
  misc_feature 1..20: note = C9Orf72 TTCN PAM targeting sequence
  source 1..20: mol_type = other RNA
cctatgatcagatttcaggt

SEQ ID NO: 6861 - RNA, 20 nt, synthetic construct
  misc_feature 1..20: note = C9Orf72 TTCN PAM targeting sequence
  source 1..20: mol_type = other RNA
ggtggtgtgatgatcaatag

SEQ ID NO: 6862 - RNA, 20 nt, synthetic construct
  misc_feature 1..20: note = C9Orf72 TTCN PAM targeting sequence
  source 1..20: mol_type = other RNA
ttgacttcttccccacaaga

SEQ ID NO: 6863 - RNA, 20 nt, synthetic construct
  misc_feature 1..20: note = C9Orf72 TTCN PAM targeting sequence
  source 1..20: mol_type = other RNA
tccccacaagacctaagcac

SEQ ID NO: 6864 - RNA, 20 nt, synthetic construct
  misc_feature 1..20: note = C9Orf72 TTCN PAM targeting sequence
  source 1..20: mol_type = other RNA
ccacaagacctaagcacatg

SEQ ID NO: 6865 - RNA, 20 nt, synthetic construct
  misc_feature 1..20: note = C9Orf72 TTCN PAM targeting sequence
  source 1..20: mol_type = other RNA
ctctgaggtgcctcaagatt

SEQ ID NO: 6866 - RNA, 20 nt, synthetic construct
  misc_feature 1..20: note = C9Orf72 TTCN PAM targeting sequence
  source 1..20: mol_type = other RNA
ccactcgtggtttggatgag

SEQ ID NO: 6867 - RNA, 20 nt, synthetic construct
  misc_feature 1..20: note = C9Orf72 TTCN PAM targeting sequence
  source 1..20: mol_type = other RNA
tcatccaaaccacgagtggg

SEQ ID NO: 6868 - RNA, 20 nt, synthetic construct
  misc_feature 1..20: note = C9Orf72 TTCN PAM targeting sequence
  source 1..20: mol_type = other RNA
tcctcatccaaaccacgagt

SEQ ID NO: 6869 - RNA, 20 nt, synthetic construct
  misc_feature 1..20: note = C9Orf72 TTCN PAM targeting sequence
  source 1..20: mol_type = other RNA
ctatgcatcctactatcctc

SEQ ID NO: 6870 - RNA, 20 nt, synthetic construct
  misc_feature 1..20: note = C9Orf72 TTCN PAM targeting sequence
  source 1..20: mol_type = other RNA
cttagttggcaaaccgcaca

SEQ ID NO: 6871 - RNA, 20 nt, synthetic construct
  misc_feature 1..20: note = C9Orf72 TTCN PAM targeting sequence
  source 1..20: mol_type = other RNA
tcctgcgaagtgcctgcttt

SEQ ID NO: 6872 - RNA, 20 nt, synthetic construct
  misc_feature 1..20: note = C9Orf72 TTCN PAM targeting sequence
  source 1..20: mol_type = other RNA
caggaggaaaaaaggtcagg

SEQ ID NO: 6873 - RNA, 20 nt, synthetic construct
  misc_feature 1..20: note = C9Orf72 TTCN PAM targeting sequence
  source 1..20: mol_type = other RNA
agtgtgctacctgctgcttc

SEQ ID NO: 6874 - RNA, 20 nt, synthetic construct
  misc_feature 1..20: note = C9Orf72 TTCN PAM targeting sequence
  source 1..20: mol_type = other RNA
ccagctttctgcctttatga

SEQ ID NO: 6875 - RNA, 20 nt, synthetic construct
  misc_feature 1..20: note = C9Orf72 TTCN PAM targeting sequence
  source 1..20: mol_type = other RNA
gcctttatgaatggaattgg

SEQ ID NO: 6876 - RNA, 20 nt, synthetic construct
  misc_feature 1..20: note = C9Orf72 TTCN PAM targeting sequence
  source 1..20: mol_type = other RNA
taaaggcagaaagctgggga

SEQ ID NO: 6877 - RNA, 20 nt, synthetic construct
  misc_feature 1..20: note = C9Orf72 TTCN PAM targeting sequence
  source 1..20: mol_type = other RNA
attcataaaggcagaaagct

SEQ ID NO: 6878 - RNA, 20 nt, synthetic construct
  misc_feature 1..20: note = C9Orf72 TTCN PAM targeting sequence
  source 1..20: mol_type = other RNA
catgtagcactggtgagagc

SEQ ID NO: 6879 - RNA, 20 nt, synthetic construct
  misc_feature 1..20: note = C9Orf72 TTCN PAM targeting sequence
  source 1..20: mol_type = other RNA
ataagaaacaaagttgattt

SEQ ID NO: 6880 - RNA, 20 nt, synthetic construct
  misc_feature 1..20: note = C9Orf72 TTCN PAM targeting sequence
  source 1..20: mol_type = other RNA
tatggaagccagactgttaa

SEQ ID NO: 6881 - RNA, 20 nt, synthetic construct
  misc_feature 1..20: note = C9Orf72 TTCN PAM targeting sequence
  source 1..20: mol_type = other RNA
ttgaagccacatagggaaga

SEQ ID NO: 6882 - RNA, 20 nt, synthetic construct
  misc_feature 1..20: note = C9Orf72 TTCN PAM targeting sequence
  source 1..20: mol_type = other RNA
aagaagttgatagtaacaat

SEQ ID NO: 6883 - RNA, 20 nt, synthetic construct
  misc_feature 1..20: note = C9Orf72 TTCN PAM targeting sequence
  source 1..20: mol_type = other RNA
ctatgtggcttcaaagaagt

SEQ ID NO: 6884 - RNA, 20 nt, synthetic construct
  misc_feature 1..20: note = C9Orf72 TTCN PAM targeting sequence
  source 1..20: mol_type = other RNA
ccaatagagccctaataaac

SEQ ID NO: 6885 - RNA, 20 nt, synthetic construct
  misc_feature 1..20: note = C9Orf72 TTCN PAM targeting sequence
  source 1..20: mol_type = other RNA
tgacattagttcaacaagaa

SEQ ID NO: 6886 - RNA, 20 nt, synthetic construct
  misc_feature 1..20: note = C9Orf72 TTCN PAM targeting sequence
  source 1..20: mol_type = other RNA
acaagaactctgtttaagac

SEQ ID NO: 6887 - RNA, 20 nt, synthetic construct
  misc_feature 1..20: note = C9Orf72 TTCN PAM targeting sequence
  source 1..20: mol_type = other RNA
tgttgaactaatgtcacgaa

SEQ ID NO: 6888 - RNA, 20 nt, synthetic construct
  misc_feature 1..20: note = C9Orf72 TTCN PAM targeting sequence
  source 1..20: mol_type = other RNA
gcagatgagtaagttatgtc

SEQ ID NO: 6889 - RNA, 20 nt, synthetic construct
  misc_feature 1..20: note = C9Orf72 TTCN PAM targeting sequence
  source 1..20: mol_type = other RNA
ggtgtgtagacagactttct

SEQ ID NO: 6890 - RNA, 20 nt, synthetic construct
  misc_feature 1..20: note = C9Orf72 TTCN PAM targeting sequence
  source 1..20: mol_type = other RNA
caagagatttctcagctaag

SEQ ID NO: 6891 - RNA, 20 nt, synthetic construct
  misc_feature 1..20: note = C9Orf72 TTCN PAM targeting sequence
  source 1..20: mol_type = other RNA
cagctaagaaagaaaaccta

SEQ ID NO: 6892 - RNA, 20 nt, synthetic construct
  misc_feature 1..20: note = C9Orf72 TTCN PAM targeting sequence
  source 1..20: mol_type = other RNA
tagctgagaaatctcttgag

SEQ ID NO: 6893 - RNA, 20 nt, synthetic construct
  misc_feature 1..20: note = C9Orf72 TTCN PAM targeting sequence
  source 1..20: mol_type = other RNA
ttcttagctgagaaatctct

SEQ ID NO: 6894 - RNA, 20 nt, synthetic construct
  misc_feature 1..20: note = C9Orf72 TTCN PAM targeting sequence
  source 1..20: mol_type = other RNA
gagcagtctgtctctgtgtg

SEQ ID NO: 6895 - RNA, 20 nt, synthetic construct
  misc_feature 1..20: note = C9Orf72 TTCN PAM targeting sequence
  source 1..20: mol_type = other RNA
tagatgatgggggactctgt

SEQ ID NO: 6896 - RNA, 20 nt, synthetic construct
  misc_feature 1..20: note = C9Orf72 TTCN PAM targeting sequence
  source 1..20: mol_type = other RNA
gaatcctccacaattgacag

SEQ ID NO: 6897 - RNA, 20 nt, synthetic construct
  misc_feature 1..20: note = C9Orf72 TTCN PAM targeting sequence
  source 1..20: mol_type = other RNA
gaagcacttcatagatgatg

SEQ ID NO: 6898 - RNA, 20 nt, synthetic construct
  misc_feature 1..20: note = C9Orf72 TTCN PAM targeting sequence
  source 1..20: mol_type = other RNA
cagacagtagccacatacag

SEQ ID NO: 6899 - RNA, 20 nt, synthetic construct
  misc_feature 1..20: note = C9Orf72 TTCN PAM targeting sequence
  source 1..20: mol_type = other RNA
gataatcatgttcccagaca

SEQ ID NO: 6900 - RNA, 20 nt, synthetic construct
  misc_feature 1..20: note = C9Orf72 TTCN PAM targeting sequence
  source 1..20: mol_type = other RNA
ccagggaactgaaaaacttt

SEQ ID NO: 6901 - RNA, 20 nt, synthetic construct
  misc_feature 1..20: note = C9Orf72 TTCN PAM targeting sequence
  source 1..20: mol_type = other RNA
ctggagaaagcttctgataa

SEQ ID NO: 6902 - RNA, 20 nt, synthetic construct
  misc_feature 1..20: note = C9Orf72 TTCN PAM targeting sequence
  source 1..20: mol_type = other RNA
gttccctggagaaagcttct

SEQ ID NO: 6903 - RNA, 20 nt, synthetic construct
  misc_feature 1..20: note = C9Orf72 TTCN PAM targeting sequence
  source 1..20: mol_type = other RNA
atccactcagataaggcctc

SEQ ID NO: 6904 - RNA, 20 nt, synthetic construct
  misc_feature 1..20: note = C9Orf72 TTCN PAM targeting sequence
  source 1..20: mol_type = other RNA
tcaaacttctctctggctta

SEQ ID NO: 6905 - RNA, 20 nt, synthetic construct
  misc_feature 1..20: note = C9Orf72 TTCN PAM targeting sequence
  source 1..20: mol_type = other RNA
ctctggcttaacttcaactc

SEQ ID NO: 6906 - RNA, 20 nt, synthetic construct
  misc_feature 1..20: note = C9Orf72 TTCN PAM targeting sequence
  source 1..20: mol_type = other RNA
actcctggtaaagcagaggg

SEQ ID NO: 6907 - RNA, 20 nt, synthetic construct
  misc_feature 1..20: note = C9Orf72 TTCN PAM targeting sequence
  source 1..20: mol_type = other RNA
ctctgctttaccaggagttg

SEQ ID NO: 6908 - RNA, 20 nt, synthetic construct
  misc_feature 1..20: note = C9Orf72 TTCN PAM targeting sequence
  source 1..20: mol_type = other RNA
tttggtaccttgttccctct

SEQ ID NO: 6909 - RNA, 20 nt, synthetic construct
  misc_feature 1..20: note = C9Orf72 TTCN PAM targeting sequence
  source 1..20: mol_type = other RNA
tgctccttcttttggtacct

SEQ ID NO: 6910 - RNA, 20 nt, synthetic construct
  misc_feature 1..20: note = C9Orf72 TTCN PAM targeting sequence
  source 1..20: mol_type = other RNA
catcagagatgtgcatgcaa

SEQ ID NO: 6911 - RNA, 20 nt, synthetic construct
  misc_feature 1..20: note = C9Orf72 TTCN PAM targeting sequence
  source 1..20: mol_type = other RNA
ttgctcacatgtctggcccc

SEQ ID NO: 6912 - RNA, 20 nt, synthetic construct
  misc_feature 1..20: note = C9Orf72 TTCN PAM targeting sequence
  source 1..20: mol_type = other RNA
ctgcatccctggtacctaac

SEQ ID NO: 6913 - RNA, 20 nt, synthetic construct
  misc_feature 1..20: note = C9Orf72 TTCN PAM targeting sequence
  source 1..20: mol_type = other RNA
gctgggtcctgtgttaggta

SEQ ID NO: 6914 - RNA, 20 nt, synthetic construct
  misc_feature 1..20: note = C9Orf72 TTCN PAM targeting sequence
  source 1..20: mol_type = other RNA
tgtttctgctgggtcctgtg

SEQ ID NO: 6915 - RNA, 20 nt, synthetic construct
  misc_feature 1..20: note = C9Orf72 TTCN PAM targeting sequence
  source 1..20: mol_type = other RNA
ttctccagttgagaggacta

SEQ ID NO: 6916 - RNA, 20 nt, synthetic construct
  misc_feature 1..20: note = C9Orf72 TTCN PAM targeting sequence
  source 1..20: mol_type = other RNA
ccagttgagaggactaggcc

SEQ ID NO: 6917 - RNA, 20 nt, synthetic construct
  misc_feature 1..20: note = C9Orf72 TTCN PAM targeting sequence
  source 1..20: mol_type = other RNA
ttttgtccattgtctcatta

SEQ ID NO: 6918 - RNA, 20 nt, synthetic construct
  misc_feature 1..20: note = C9Orf72 TTCN PAM targeting sequence
  source 1..20: mol_type = other RNA
gaaaacagaactacttcatg

SEQ ID NO: 6919 - RNA, 20 nt, synthetic construct
  misc_feature 1..20: note = C9Orf72 TTCN PAM targeting sequence
  source 1..20: mol_type = other RNA
gaaaagattccttttgtcca

SEQ ID NO: 6920 - RNA, 20 nt, synthetic construct
  misc_feature 1..20: note = C9Orf72 TTCN PAM targeting sequence
  source 1..20: mol_type = other RNA
gttttctgaaaagattcctt

SEQ ID NO: 6921 - RNA, 20 nt, synthetic construct
  misc_feature 1..20: note = C9Orf72 TTCN PAM targeting sequence
  source 1..20: mol_type = other RNA
tgcaaagatcaacagtggct

SEQ ID NO: 6922 - RNA, 20 nt, synthetic construct
  misc_feature 1..20: note = C9Orf72 TTCN PAM targeting sequence
  source 1..20: mol_type = other RNA
caggccaatctaaacagctc

SEQ ID NO: 6923 - RNA, 20 nt, synthetic construct
  misc_feature 1..20: note = C9Orf72 TTCN PAM targeting sequence
  source 1..20: mol_type = other RNA
ttttctagcattcagtgaaa

SEQ ID NO: 6924 - RNA, 20 nt, synthetic construct
  misc_feature 1..20: note = C9Orf72 TTCN PAM targeting sequence
  source 1..20: mol_type = other RNA
agcattcagtgaaaagtcag

SEQ ID NO: 6925 - RNA, 20 nt, synthetic construct
  misc_feature 1..20: note = C9Orf72 TTCN PAM targeting sequence
  source 1..20: mol_type = other RNA
gtgaaaagtcagctcctttg

SEQ ID NO: 6926 - RNA, 20 nt, synthetic construct
  misc_feature 1..20: note = C9Orf72 TTCN PAM targeting sequence
  source 1..20: mol_type = other RNA
ctgaatgctagaaaatgaaa

SEQ ID NO: 6927 - RNA, 20 nt, synthetic construct
  misc_feature 1..20: note = C9Orf72 TTCN PAM targeting sequence
  source 1..20: mol_type = other RNA
aaaggagctgacttttcact

SEQ ID NO: 6928 - RNA, 20 nt, synthetic construct
  misc_feature 1..20: note = C9Orf72 TTCN PAM targeting sequence
  source 1..20: mol_type = other RNA
accatgactttttaaacatt

SEQ ID NO: 6929 - RNA, 20 nt, synthetic construct
  misc_feature 1..20: note = C9Orf72 TTCN PAM targeting sequence
  source 1..20: mol_type = other RNA
tctgaggtatatttttaaaa

SEQ ID NO: 6930 - RNA, 20 nt, synthetic construct
  misc_feature 1..20: note = C9Orf72 TTCN PAM targeting sequence
  source 1..20: mol_type = other RNA
ccattattttttcctctgag

SEQ ID NO: 6931 - RNA, 20 nt, synthetic construct
  misc_feature 1..20: note = C9Orf72 TTCN PAM targeting sequence
  source 1..20: mol_type = other RNA
caagttgattagcttgctct

SEQ ID NO: 6932 - RNA, 20 nt, synthetic construct
  misc_feature 1..20: note = C9Orf72 TTCN PAM targeting sequence
  source 1..20: mol_type = other RNA
ttttttgtagagatgggggt

SEQ ID NO: 6933 - RNA, 20 nt, synthetic construct
  misc_feature 1..20: note = C9Orf72 TTCN PAM targeting sequence
  source 1..20: mol_type = other RNA
agaccagcctgggcaacatg

SEQ ID NO: 6934 - RNA, 20 nt, synthetic construct
  misc_feature 1..20: note = C9Orf72 TTCN PAM targeting sequence
  source 1..20: mol_type = other RNA
cagccaggcactgtgactca

SEQ ID NO: 6935 - RNA, 20 nt, synthetic construct
  misc_feature 1..20: note = C9Orf72 TTCN PAM targeting sequence
  source 1..20: mol_type = other RNA
aatacgagaaaaaaaatgta

SEQ ID NO: 6936 - RNA, 20 nt, synthetic construct
  misc_feature 1..20: note = C9Orf72 TTCN PAM targeting sequence
  source 1..20: mol_type = other RNA
cgtattagaaaaaaaattcc

SEQ ID NO: 6937 - RNA, 20 nt, synthetic construct
  misc_feature 1..20: note = C9Orf72 TTCN PAM targeting sequence
  source 1..20: mol_type = other RNA
ctaaaggaggtgagatgata

SEQ ID NO: 6938 - RNA, 20 nt, synthetic construct
  misc_feature 1..20: note = C9Orf72 TTCN PAM targeting sequence
  source 1..20: mol_type = other RNA
gtgactttggtgtccatgcc

SEQ ID NO: 6939 - RNA, 20 nt, synthetic construct
  misc_feature 1..20: note = C9Orf72 TTCN PAM targeting sequence
  source 1..20: mol_type = other RNA
gtctctgttgcatccactct

SEQ ID NO: 6940 - RNA, 20 nt, synthetic construct
  misc_feature 1..20: note = C9Orf72 TTCN PAM targeting sequence
  source 1..20: mol_type = other RNA
gtgacagcatcctggcccct

SEQ ID NO: 6941 - RNA, 20 nt, synthetic construct
  misc_feature 1..20: note = C9Orf72 TTCN PAM targeting sequence
  source 1..20: mol_type = other RNA
tcgaactttgatcctgctac

SEQ ID NO: 6942 - RNA, 20 nt, synthetic construct
  misc_feature 1..20: note = C9Orf72 TTCN PAM targeting sequence
  source 1..20: mol_type = other RNA
aggaaaattaatgtcgtggt

SEQ ID NO: 6943 - RNA, 20 nt, synthetic construct
  misc_feature 1..20: note = C9Orf72 TTCN PAM targeting sequence
  source 1..20: mol_type = other RNA
gtgtgcatctgctagggagg

SEQ ID NO: 6944 - RNA, 20 nt, synthetic construct
  misc_feature 1..20: note = C9Orf72 TTCN PAM targeting sequence
  source 1..20: mol_type = other RNA
tgctgtacaatcctgtcagc

SEQ ID NO: 6945 - RNA, 20 nt, synthetic construct
  misc_feature 1..20: note = C9Orf72 TTCN PAM targeting sequence
  source 1..20: mol_type = other RNA
tcctgctgtacaatcctgtc

SEQ ID NO: 6946 - RNA, 20 nt, synthetic construct
  misc_feature 1..20: note = C9Orf72 TTCN PAM targeting sequence
  source 1..20: mol_type = other RNA
gaacatcagttaattcaata

SEQ ID NO: 6947 - RNA, 20 nt, synthetic construct
  misc_feature 1..20: note = C9Orf72 TTCN PAM targeting sequence
  source 1..20: mol_type = other RNA
gaagttcttcctgctgtaca

SEQ ID NO: 6948 - RNA, 20 nt, synthetic construct
  misc_feature 1..20: note = C9Orf72 TTCN PAM targeting sequence
  source 1..20: mol_type = other RNA
atagagcctcttaatttatt

SEQ ID NO: 6949 - RNA, 20 nt, synthetic construct
  misc_feature 1..20: note = C9Orf72 TTCN PAM targeting sequence
  source 1..20: mol_type = other RNA
gggcactagctgtttgtttt

SEQ ID NO: 6950 - RNA, 20 nt, synthetic construct
  misc_feature 1..20: note = C9Orf72 TTCN PAM targeting sequence
  source 1..20: mol_type = other RNA
gttttctgggcactagctgt

SEQ ID NO: 6951 - RNA, 20 nt, synthetic construct
  misc_feature 1..20: note = C9Orf72 TTCN PAM targeting sequence
  source 1..20: mol_type = other RNA
cttcagttttctgggcacta

SEQ ID NO: 6952 - RNA, 20 nt, synthetic construct
  misc_feature 1..20: note = C9Orf72 TTCN PAM targeting sequence
  source 1..20: mol_type = other RNA
cagttaggacagacctgggg

SEQ ID NO: 6953 - RNA, 20 nt, synthetic construct
  misc_feature 1..20: note = C9Orf72 TTCN PAM targeting sequence
  source 1..20: mol_type = other RNA
gccccaggtctgtcctaact

SEQ ID NO: 6954 - RNA, 20 nt, synthetic construct
  misc_feature 1..20: note = C9Orf72 TTCN PAM targeting sequence
  source 1..20: mol_type = other RNA
ttccactaggcaatggatct

SEQ ID NO: 6955 - RNA, 20 nt, synthetic construct
  misc_feature 1..20: note = C9Orf72 TTCN PAM targeting sequence
  source 1..20: mol_type = other RNA
actaggcaatggatctgttt

SEQ ID NO: 6956 - RNA, 20 nt, synthetic construct
  misc_feature 1..20: note = C9Orf72 TTCN PAM targeting sequence
  source 1..20: mol_type = other RNA
gcaagtctgacacttaatgg

SEQ ID NO: 6957 - RNA, 20 nt, synthetic construct
  misc_feature 1..20: note = C9Orf72 TTCN PAM targeting sequence
  source 1..20: mol_type = other RNA
aaacttcccccctccctttt

SEQ ID NO: 6958 - RNA, 20 nt, synthetic construct
  misc_feature 1..20: note = C9Orf72 TTCN PAM targeting sequence
  source 1..20: mol_type = other RNA
cccctcccttttcgtgccag

SEQ ID NO: 6959 - RNA, 20 nt, synthetic construct
  misc_feature 1..20: note = C9Orf72 TTCN PAM targeting sequence
  source 1..20: mol_type = other RNA
tgccaggcgtggtagctgac

SEQ ID NO: 6960 - RNA, 20 nt, synthetic construct
  misc_feature 1..20: note = C9Orf72 TTCN PAM targeting sequence
  source 1..20: mol_type = other RNA
aggtgtcagctaccacgcct

SEQ ID NO: 6961 - RNA, 20 nt, synthetic construct
  misc_feature 1..20: note = C9Orf72 TTCN PAM targeting sequence
  source 1..20: mol_type = other RNA
gcactttgggaagccaaggc

SEQ ID NO: 6962 - RNA, 20 nt, synthetic construct
  misc_feature 1..20: note = C9Orf72 TTCN PAM targeting sequence
  source 1..20: mol_type = other RNA
caaagtgctgaaattctagg

SEQ ID NO: 6963 - RNA, 20 nt, synthetic construct
  misc_feature 1..20: note = C9Orf72 TTCN PAM targeting sequence
  source 1..20: mol_type = other RNA
agcgatcctcctgccttggc

SEQ ID NO: 6964 - RNA, 20 nt, synthetic construct
  misc_feature 1..20: note = C9Orf72 TTCN PAM targeting sequence
  source 1..20: mol_type = other RNA
tggcttcaagcgatcctcct

SEQ ID NO: 6965 - RNA, 20 nt, synthetic construct
  misc_feature 1..20: note = C9Orf72 TTCN PAM targeting sequence
  source 1..20: mol_type = other RNA
ccctcccccagccatctctg

SEQ ID NO: 6966 - RNA, 20 nt, synthetic construct
  misc_feature 1..20: note = C9Orf72 TTCN PAM targeting sequence
  source 1..20: mol_type = other RNA
aggccacaatgaactataat

SEQ ID NO: 6967 - RNA, 20 nt, synthetic construct
  misc_feature 1..20: note = C9Orf72 TTCN PAM targeting sequence
  source 1..20: mol_type = other RNA
ttgtggcctcgaactcctag

SEQ ID NO: 6968 - RNA, 20 nt, synthetic construct
  misc_feature 1..20: note = C9Orf72 TTCN PAM targeting sequence
  source 1..20: mol_type = other RNA
agcatgggcacagagtgaga

SEQ ID NO: 6969 - RNA, 20 nt, synthetic construct
  misc_feature 1..20: note = C9Orf72 TTCN PAM targeting sequence
  source 1..20: mol_type = other RNA
tttaagagacagggtctcac

SEQ ID NO: 6970 - RNA, 20 nt, synthetic construct
  misc_feature 1..20: note = C9Orf72 TTCN PAM targeting sequence
  source 1..20: mol_type = other RNA
tttttttttttttcttttaa

SEQ ID NO: 6971 - RNA, 20 nt, synthetic construct
  misc_feature 1..20: note = C9Orf72 TTCN PAM targeting sequence
  source 1..20: mol_type = other RNA
tttcttttttttttttttct

SEQ ID NO: 6972 - RNA, 20 nt, synthetic construct
  misc_feature 1..20: note = C9Orf72 TTCN PAM targeting sequence
  source 1..20: mol_type = other RNA
tattcctggtgatttttaag

SEQ ID NO: 6973 - RNA, 20 nt, synthetic construct
  misc_feature 1..20: note = C9Orf72 TTCN PAM targeting sequence
  source 1..20: mol_type = other RNA
tggtgatttttaagcctttt

SEQ ID NO: 6974 - RNA, 20 nt, synthetic construct
  misc_feature 1..20: note = C9Orf72 TTCN PAM targeting sequence
  source 1..20: mol_type = other RNA
tccaaatgaagttttatgca

SEQ ID NO: 6975 - RNA, 20 nt, synthetic construct
  misc_feature 1..20: note = C9Orf72 TTCN PAM targeting sequence
  source 1..20: mol_type = other RNA
tttggaggaacaaaggagct

SEQ ID NO: 6976 - RNA, 20 nt, synthetic construct
  misc_feature 1..20: note = C9Orf72 TTCN PAM targeting sequence
  source 1..20: mol_type = other RNA
gcagctgaagcagggtgtct

SEQ ID NO: 6977 - RNA, 20 nt, synthetic construct
  misc_feature 1..20: note = C9Orf72 TTCN PAM targeting sequence
  source 1..20: mol_type = other RNA
gctgcagaagagataaataa

SEQ ID NO: 6978 - RNA, 20 nt, synthetic construct
  misc_feature 1..20: note = C9Orf72 TTCN PAM targeting sequence
  source 1..20: mol_type = other RNA
gtggctgttgagaggagtag

SEQ ID NO: 6979 - RNA, 20 nt, synthetic construct
  misc_feature 1..20: note = C9Orf72 TTCN PAM targeting sequence
  source 1..20: mol_type = other RNA
cagaggtgtttcagtggctg

SEQ ID NO: 6980 - RNA, 20 nt, synthetic construct
  misc_feature 1..20: note = C9Orf72 TTCN PAM targeting sequence
  source 1..20: mol_type = other RNA
ggtttcgcttgatcaatcgg

SEQ ID NO: 6981 - RNA, 20 nt, synthetic construct
  misc_feature 1..20: note = C9Orf72 TTCN PAM targeting sequence
  source 1..20: mol_type = other RNA
cttgatcaatcggacaactc

SEQ ID NO: 6982 - RNA, 20 nt, synthetic construct
  misc_feature 1..20: note = C9Orf72 TTCN PAM targeting sequence
  source 1..20: mol_type = other RNA
tttgccttccgcctgccata

SEQ ID NO: 6983 - RNA, 20 nt, synthetic construct
  misc_feature 1..20: note = C9Orf72 TTCN PAM targeting sequence
  source 1..20: mol_type = other RNA
gcctgccataatcctccagc

SEQ ID NO: 6984 - RNA, 20 nt, synthetic construct
  misc_feature 1..20: note = C9Orf72 TTCN PAM targeting sequence
  source 1..20: mol_type = other RNA
ccctacagtgctgttaggaa

SEQ ID NO: 6985 - RNA, 20 nt, synthetic construct
  misc_feature 1..20: note = C9Orf72 TTCN PAM targeting sequence
  source 1..20: mol_type = other RNA
taacagcactgtagggagaa

SEQ ID NO: 6986 - RNA, 20 nt, synthetic construct
  misc_feature 1..20: note = C9Orf72 TTCN PAM targeting sequence
  source 1..20: mol_type = other RNA
gagctttggagcaaaggaga

SEQ ID NO: 6987 - RNA, 20 nt, synthetic construct
  misc_feature 1..20: note = C9Orf72 TTCN PAM targeting sequence
  source 1..20: mol_type = other RNA
tttgtatctaaacagtccga

SEQ ID NO: 6988 - RNA, 20 nt, synthetic construct
  misc_feature 1..20: note = C9Orf72 TTCN PAM targeting sequence
  source 1..20: mol_type = other RNA
cacagctcacccccaacttc

SEQ ID NO: 6989 - RNA, 20 nt, synthetic construct
  misc_feature 1..20: note = C9Orf72 TTCN PAM targeting sequence
  source 1..20: mol_type = other RNA
ggcccatctataatcagggc

SEQ ID NO: 6990 - RNA, 20 nt, synthetic construct
  misc_feature 1..20: note = C9Orf72 TTCN PAM targeting sequence
  source 1..20: mol_type = other RNA
aacacaagctgccacctctg

SEQ ID NO: 6991 - RNA, 20 nt, synthetic construct
  misc_feature 1..20: note = C9Orf72 TTCN PAM targeting sequence
  source 1..20: mol_type = other RNA
gcctaccccttccccttctc

SEQ ID NO: 6992 - RNA, 20 nt, synthetic construct
  misc_feature 1..20: note = C9Orf72 TTCN PAM targeting sequence
  source 1..20: mol_type = other RNA
ccttctctcctgacccttcc

SEQ ID NO: 6993 - RNA, 20 nt, synthetic construct
  misc_feature 1..20: note = C9Orf72 TTCN PAM targeting sequence
  source 1..20: mol_type = other RNA
ctcctgacccttccctaatc

SEQ ID NO: 6994 - RNA, 20 nt, synthetic construct
  misc_feature 1..20: note = C9Orf72 TTCN PAM targeting sequence
  source 1..20: mol_type = other RNA
ctaatctggctttgtttctg

SEQ ID NO: 6995 - RNA, 20 nt, synthetic construct
  misc_feature 1..20: note = C9Orf72 TTCN PAM targeting sequence
  source 1..20: mol_type = other RNA
gccatccctgccgcactcat

SEQ ID NO: 6996 - RNA, 20 nt, synthetic construct
  misc_feature 1..20: note = C9Orf72 TTCN PAM targeting sequence
  source 1..20: mol_type = other RNA
aaatgagtgcggcagggatg

SEQ ID NO: 6997 - RNA, 20 nt, synthetic construct
  misc_feature 1..20: note = C9Orf72 TTCN PAM targeting sequence
  source 1..20: mol_type = other RNA
cagcaaatatttatgggttt

SEQ ID NO: 6998 - RNA, 20 nt, synthetic construct
  misc_feature 1..20: note = C9Orf72 TTCN PAM targeting sequence
  source 1..20: mol_type = other RNA
tattgagttctatactcttc

SEQ ID NO: 6999 - RNA, 20 nt, synthetic construct
  misc_feature 1..20: note = C9Orf72 TTCN PAM targeting sequence
  source 1..20: mol_type = other RNA
atactcttcccccagcactg

SEQ ID NO: 7000 - RNA, 20 nt, synthetic construct
  misc_feature 1..20: note = C9Orf72 TTCN PAM targeting sequence
  source 1..20: mol_type = other RNA
cccagcactgcctccccctg

SEQ ID NO: 7001 - RNA, 20 nt, synthetic construct
  misc_feature 1..20: note = C9Orf72 TTCN PAM targeting sequence
  source 1..20: mol_type = other RNA
ctttcacttttccccttttg

SEQ ID NO: 7002 - RNA, 20 nt, synthetic construct
  misc_feature 1..20: note = C9Orf72 TTCN PAM targeting sequence
  source 1..20: mol_type = other RNA
cttttccccttttgagctct

SEQ ID NO: 7003 - RNA, 20 nt, synthetic construct
  misc_feature 1..20: note = C9Orf72 TTCN PAM targeting sequence
  source 1..20: mol_type = other RNA
ccttttgagctctggcggct

SEQ ID NO: 7004 - RNA, 20 nt, synthetic construct
  misc_feature 1..20: note = C9Orf72 TTCN PAM targeting sequence
  source 1..20: mol_type = other RNA
accagagccgccagagctca

SEQ ID NO: 7005 - RNA, 20 nt, synthetic construct
  misc_feature 1..20: note = C9Orf72 TTCN PAM targeting sequence
  source 1..20: mol_type = other RNA
gcagccaccaccttctacca

SEQ ID NO: 7006 - RNA, 20 nt, synthetic construct
  misc_feature 1..20: note = C9Orf72 TTCN PAM targeting sequence
  source 1..20: mol_type = other RNA
ttcagcagccaccaccttct

SEQ ID NO: 7007 - RNA, 20 nt, synthetic construct
  misc_feature 1..20: note = C9Orf72 TTCN PAM targeting sequence
  source 1..20: mol_type = other RNA
caccctgaaccatctgtcca

SEQ ID NO: 7008 - RNA, 20 nt, synthetic construct
  misc_feature 1..20: note = C9Orf72 TTCN PAM targeting sequence
  source 1..20: mol_type = other RNA
gggtgagaaggggttgtatt

SEQ ID NO: 7009 - RNA, 20 nt, synthetic construct
  misc_feature 1..20: note = C9Orf72 TTCN PAM targeting sequence
  source 1..20: mol_type = other RNA
ctctgggtttcctggggaca

SEQ ID NO: 7010 - RNA, 20 nt, synthetic construct
  misc_feature 1..20: note = C9Orf72 TTCN PAM targeting sequence
  source 1..20: mol_type = other RNA
tggggacactcggaaatggc

SEQ ID NO: 7011 - RNA, 20 nt, synthetic construct
  misc_feature 1..20: note = C9Orf72 TTCN PAM targeting sequence
  source 1..20: mol_type = other RNA
gagtgtccccaggaaaccca

SEQ ID NO: 7012 - RNA, 20 nt, synthetic construct
  misc_feature 1..20: note = C9Orf72 TTCN PAM targeting sequence
  source 1..20: mol_type = other RNA
gccatttccgagtgtcccca

SEQ ID NO: 7013 - RNA, 20 nt, synthetic construct
  misc_feature 1..20: note = C9Orf72 TTCN PAM targeting sequence
  source 1..20: mol_type = other RNA
tgaggcgaataggcaggaga

SEQ ID NO: 7014 - RNA, 20 nt, synthetic construct
  misc_feature 1..20: note = C9Orf72 TTCN PAM targeting sequence
  source 1..20: mol_type = other RNA
cctcaggaaatgacttttgg

SEQ ID NO: 7015 - RNA, 20 nt, synthetic construct
  misc_feature 1..20: note = C9Orf72 TTCN PAM targeting sequence
  source 1..20: mol_type = other RNA
gatgaccacttttgtctcct

SEQ ID NO: 7016 - RNA, 20 nt, synthetic construct
  misc_feature 1..20: note = C9Orf72 TTCN PAM targeting sequence
  source 1..20: mol_type = other RNA
agcagtaagaatggcagaaa

SEQ ID NO: 7017 - RNA, 20 nt, synthetic construct
  misc_feature 1..20: note = C9Orf72 TTCN PAM targeting sequence
  source 1..20: mol_type = other RNA
tactgctggaaatacaactc

SEQ ID NO: 7018 - RNA, 20 nt, synthetic construct
  misc_feature 1..20: note = C9Orf72 TTCN PAM targeting sequence
  source 1..20: mol_type = other RNA
gccattcttactgctggaaa

SEQ ID NO: 7019 - RNA, 20 nt, synthetic construct
  misc_feature 1..20: note = C9Orf72 TTCN PAM targeting sequence
  source 1..20: mol_type = other RNA
cccaaggactttttctgcca

SEQ ID NO: 7020 - RNA, 20 nt, synthetic construct
  misc_feature 1..20: note = C9Orf72 TTCN PAM targeting sequence
  source 1..20: mol_type = other RNA
cctttcccccaaggactttt

SEQ ID NO: 7021 - RNA, 20 nt, synthetic construct
  misc_feature 1..20: note = C9Orf72 TTCN PAM targeting sequence
  source 1..20: mol_type = other RNA
ggttaattctcctttccccc

SEQ ID NO: 7022 - RNA, 20 nt, synthetic construct
  misc_feature 1..20: note = C9Orf72 TTCN PAM targeting sequence
  source 1..20: mol_type = other RNA
caataatgattcaggttaat

SEQ ID NO: 7023 - RNA, 20 nt, synthetic construct
  misc_feature 1..20: note = C9Orf72 TTCN PAM targeting sequence
  source 1..20: mol_type = other RNA
atgaaccacccctgcgcttt

SEQ ID NO: 7024 - RNA, 20 nt, synthetic construct
  misc_feature 1..20: note = C9Orf72 TTCN PAM targeting sequence
  source 1..20: mol_type = other RNA
ttgaactagcctctccacag

SEQ ID NO: 7025 - RNA, 20 nt, synthetic construct
  misc_feature 1..20: note = C9Orf72 TTCN PAM targeting sequence
  source 1..20: mol_type = other RNA
agagtgtgggctctggagct

SEQ ID NO: 7026 - RNA, 20 nt, synthetic construct
  misc_feature 1..20: note = C9Orf72 TTCN PAM targeting sequence
  source 1..20: mol_type = other RNA
tcttcttccatttctgtaaa

SEQ ID NO: 7027 - RNA, 20 nt, synthetic construct
  misc_feature 1..20: note = C9Orf72 TTCN PAM targeting sequence
  source 1..20: mol_type = other RNA
tccatttctgtaaaatggag

SEQ ID NO: 7028 - RNA, 20 nt, synthetic construct
  misc_feature 1..20: note = C9Orf72 TTCN PAM targeting sequence
  source 1..20: mol_type = other RNA
atttctgtaaaatggagata

SEQ ID NO: 7029 - RNA, 20 nt, synthetic construct
  misc_feature 1..20: note = C9Orf72 TTCN PAM targeting sequence
  source 1..20: mol_type = other RNA
gtaaaatggagataaaatat

SEQ ID NO: 7030 - RNA, 20 nt, synthetic construct
  misc_feature 1..20: note = C9Orf72 TTCN PAM targeting sequence
  source 1..20: mol_type = other RNA
tatcactaacatcatgcttt

SEQ ID NO: 7031 - RNA, 20 nt, synthetic construct
  misc_feature 1..20: note = C9Orf72 TTCN PAM targeting sequence
  source 1..20: mol_type = other RNA
tgaacttactcatatacata

SEQ ID NO: 7032 - RNA, 20 nt, synthetic construct
  misc_feature 1..20: note = C9Orf72 TTCN PAM targeting sequence
  source 1..20: mol_type = other RNA
agaaagcatgatgttagtga

SEQ ID NO: 7033 - RNA, 20 nt, synthetic construct
  misc_feature 1..20: note = C9Orf72 TTCN PAM targeting sequence
  source 1..20: mol_type = other RNA
ggatagggaactcctgaaaa

SEQ ID NO: 7034 - RNA, 20 nt, synthetic construct
  misc_feature 1..20: note = C9Orf72 TTCN PAM targeting sequence
  source 1..20: mol_type = other RNA
ctatccagaaggagggagac

SEQ ID NO: 7035 - RNA, 20 nt, synthetic construct
  misc_feature 1..20: note = C9Orf72 TTCN PAM targeting sequence
  source 1..20: mol_type = other RNA
ggagttccctatccagaagg

SEQ ID NO: 7036 - RNA, 20 nt, synthetic construct
  misc_feature 1..20: note = C9Orf72 TTCN PAM targeting sequence
  source 1..20: mol_type = other RNA
ctctctcctaaaacactctt

SEQ ID NO: 7037 - RNA, 20 nt, synthetic construct
  misc_feature 1..20: note = C9Orf72 TTCN PAM targeting sequence
  source 1..20: mol_type = other RNA
cctactgtcttagttgatca

SEQ ID NO: 7038 - RNA, 20 nt, synthetic construct
  misc_feature 1..20: note = C9Orf72 TTCN PAM targeting sequence
  source 1..20: mol_type = other RNA
ggcctacagtgtgccagacc

SEQ ID NO: 7039 - RNA, 20 nt, synthetic construct
  misc_feature 1..20: note = C9Orf72 TTCN PAM targeting sequence
  source 1..20: mol_type = other RNA
ttctggcctacagtgtgcca

SEQ ID NO: 7040 - RNA, 20 nt, synthetic construct
  misc_feature 1..20: note = C9Orf72 TTCN PAM targeting sequence
  source 1..20: mol_type = other RNA
atttttaacatttttgacaa

SEQ ID NO: 7041 - RNA, 20 nt, synthetic construct
  misc_feature 1..20: note = C9Orf72 TTCN PAM targeting sequence
  source 1..20: mol_type = other RNA
tctatttttaacatttttga

SEQ ID NO: 7042 - RNA, 20 nt, synthetic construct
  misc_feature 1..20: note = C9Orf72 TTCN PAM targeting sequence
  source 1..20: mol_type = other RNA
ctttgatttttggtttcttc

SEQ ID NO: 7043 - RNA, 20 nt, synthetic construct
  misc_feature 1..20: note = C9Orf72 TTCN PAM targeting sequence
  source 1..20: mol_type = other RNA
catagtttctaatccaactt

SEQ ID NO: 7044 - RNA, 20 nt, synthetic construct
  misc_feature 1..20: note = C9Orf72 TTCN PAM targeting sequence
  source 1..20: mol_type = other RNA
aatccaacttgcatggaaat

SEQ ID NO: 7045 - RNA, 20 nt, synthetic construct
  misc_feature 1..20: note = C9Orf72 TTCN PAM targeting sequence
  source 1..20: mol_type = other RNA
atgcaagttggattagaaac

SEQ ID NO: 7046 - RNA, 20 nt, synthetic construct
  misc_feature 1..20: note = C9Orf72 TTCN PAM targeting sequence
  source 1..20: mol_type = other RNA
ctcttttgcaagataactat

SEQ ID NO: 7047 - RNA, 20 nt, synthetic construct
  misc_feature 1..20: note = C9Orf72 TTCN PAM targeting sequence
  source 1..20: mol_type = other RNA
ttcatttaggggagttgttt

SEQ ID NO: 7048 - RNA, 20 nt, synthetic construct
  misc_feature 1..20: note = C9Orf72 TTCN PAM targeting sequence
  source 1..20: mol_type = other RNA
tttaggggagttgttttggt

SEQ ID NO: 7049 - RNA, 20 nt, synthetic construct
  misc_feature 1..20: note = C9Orf72 TTCN PAM targeting sequence
  source 1..20: mol_type = other RNA
tgttttattctttgggtagt

SEQ ID NO: 7050 - RNA, 20 nt, synthetic construct
  misc_feature 1..20: note = C9Orf72 TTCN PAM targeting sequence
  source 1..20: mol_type = other RNA
ttgggtagtttatttgtttt

SEQ ID NO: 7051 - RNA, 20 nt, synthetic construct
  misc_feature 1..20: note = C9Orf72 TTCN PAM targeting sequence
  source 1..20: mol_type = other RNA
cacactattttttttttaat

SEQ ID NO: 7052 - RNA, 20 nt, synthetic construct
  misc_feature 1..20: note = C9Orf72 TTCN PAM targeting sequence
  source 1..20: mol_type = other RNA
taaaaacaataaaagctaca

SEQ ID NO: 7053 - RNA, 20 nt, synthetic construct
  misc_feature 1..20: note = C9Orf72 TTCN PAM targeting sequence
  source 1..20: mol_type = other RNA
gtagcttttattgtttttaa

SEQ ID NO: 7054 - RNA, 20 nt, synthetic construct
  misc_feature 1..20: note = C9Orf72 TTCN PAM targeting sequence
  source 1..20: mol_type = other RNA
tgaggcctttggagactttt

SEQ ID NO: 7055 - RNA, 20 nt, synthetic construct
  misc_feature 1..20: note = C9Orf72 TTCN PAM targeting sequence
  source 1..20: mol_type = other RNA
ctgggcaaaagttcctgagg

SEQ ID NO: 7056 - RNA, 20 nt, synthetic construct
  misc_feature 1..20: note = C9Orf72 TTCN PAM targeting sequence
  source 1..20: mol_type = other RNA
atggctttgcttgaggagta

SEQ ID NO: 7057 - RNA, 20 nt, synthetic construct
  misc_feature 1..20: note = C9Orf72 TTCN PAM targeting sequence
  source 1..20: mol_type = other RNA
tgtactgtcagcttggacca

SEQ ID NO: 7058 - RNA, 20 nt, synthetic construct
  misc_feature 1..20: note = C9Orf72 TTCN PAM targeting sequence
  source 1..20: mol_type = other RNA
ttttcatttaagattctaca

SEQ ID NO: 7059 - RNA, 20 nt, synthetic construct
  misc_feature 1..20: note = C9Orf72 TTCN PAM targeting sequence
  source 1..20: mol_type = other RNA
tttaagattctacattcatc

SEQ ID NO: 7060 - RNA, 20 nt, synthetic construct
  misc_feature 1..20: note = C9Orf72 TTCN PAM targeting sequence
  source 1..20: mol_type = other RNA
acattcatcaatacgtcttg

SEQ ID NO: 7061 - RNA, 20 nt, synthetic construct
  misc_feature 1..20: note = C9Orf72 TTCN PAM targeting sequence
  source 1..20: mol_type = other RNA
tcaatacgtcttgttaggta

SEQ ID NO: 7062 - RNA, 20 nt, synthetic construct
  misc_feature 1..20: note = C9Orf72 TTCN PAM targeting sequence
  source 1..20: mol_type = other RNA
tctatttggtctaagaaatc

SEQ ID NO: 7063 - RNA, 20 nt, synthetic construct
  misc_feature 1..20: note = C9Orf72 TTCN PAM targeting sequence
  source 1..20: mol_type = other RNA
tagaccaaatagaggaaatc

SEQ ID NO: 7064 - RNA, 20 nt, synthetic construct
  misc_feature 1..20: note = C9Orf72 TTCN PAM targeting sequence
  source 1..20: mol_type = other RNA
gatttcttagaccaaataga

SEQ ID NO: 7065 - RNA, 20 nt, synthetic construct
  misc_feature 1..20: note = C9Orf72 TTCN PAM targeting sequence
  source 1..20: mol_type = other RNA
tcttcagatttcttagacca

SEQ ID NO: 7066 - RNA, 20 nt, synthetic construct
  misc_feature 1..20: note = C9Orf72 TTCN PAM targeting sequence
  source 1..20: mol_type = other RNA
gtttttcctcttcagatttc

SEQ ID NO: 7067 - RNA, 20 nt, synthetic construct
  misc_feature 1..20: note = C9Orf72 TTCN PAM targeting sequence
  source 1..20: mol_type = other RNA
taggaaaatagtatcagccc

SEQ ID NO: 7068 - RNA, 20 nt, synthetic construct
  misc_feature 1..20: note = C9Orf72 TTCN PAM targeting sequence
  source 1..20: mol_type = other RNA
taggaatggtgactgtgtgt

SEQ ID NO: 7069 - RNA, 20 nt, synthetic construct
  misc_feature 1..20: note = C9Orf72 TTCN PAM targeting sequence
  source 1..20: mol_type = other RNA
ctttaaactgcactttattc

SEQ ID NO: 7070 - RNA, 20 nt, synthetic construct
  misc_feature 1..20: note = C9Orf72 TTCN PAM targeting sequence
  source 1..20: mol_type = other RNA
aaaaaaaaaaaaaaaaaaaa

SEQ ID NO: 7071 - RNA, 20 nt, synthetic construct
  misc_feature 1..20: note = C9Orf72 TTCN PAM targeting sequence
  source 1..20: mol_type = other RNA
aattccttttggaaaaaggt

SEQ ID NO: 7072 - RNA, 20 nt, synthetic construct
  misc_feature 1..20: note = C9Orf72 TTCN PAM targeting sequence
  source 1..20: mol_type = other RNA
ttttggaaaaaggtggtgga

SEQ ID NO: 7073 - RNA, 20 nt, synthetic construct
  misc_feature 1..20: note = C9Orf72 TTCN PAM targeting sequence
  source 1..20: mol_type = other RNA
aaaaggaattagaatcatct

SEQ ID NO: 7074 - RNA, 20 nt, synthetic construct
  misc_feature 1..20: note = C9Orf72 TTCN PAM targeting sequence
  source 1..20: mol_type = other RNA
ataaaaactctgataatcat

SEQ ID NO: 7075 - RNA, 20 nt, synthetic construct
  misc_feature 1..20: note = C9Orf72 TTCN PAM targeting sequence
  source 1..20: mol_type = other RNA
tctaccaactttagtcaaca

SEQ ID NO: 7076 - RNA, 20 nt, synthetic construct
  misc_feature 1..20: note = C9Orf72 TTCN PAM targeting sequence
  source 1..20: mol_type = other RNA
accaactttagtcaacaaaa

SEQ ID NO: 7077 - RNA, 20 nt, synthetic construct
  misc_feature 1..20: note = C9Orf72 TTCN PAM targeting sequence
  source 1..20: mol_type = other RNA
atttttttgttgactaaagt

SEQ ID NO: 7078 - RNA, 20 nt, synthetic construct
  misc_feature 1..20: note = C9Orf72 TTCN PAM targeting sequence
  source 1..20: mol_type = other RNA
cctacgttaagcctttcaat

SEQ ID NO: 7079 - RNA, 20 nt, synthetic construct
  misc_feature 1..20: note = C9Orf72 TTCN PAM targeting sequence
  source 1..20: mol_type = other RNA
gttttcacctacgttaagcc

SEQ ID NO: 7080 - RNA, 20 nt, synthetic construct
  misc_feature 1..20: note = C9Orf72 TTCN PAM targeting sequence
  source 1..20: mol_type = other RNA
gcaaacacaagttaagactg

SEQ ID NO: 7081 - RNA, 20 nt, synthetic construct
  misc_feature 1..20: note = C9Orf72 TTCN PAM targeting sequence
  source 1..20: mol_type = other RNA
ttttaaaaatgacagtctta

SEQ ID NO: 7082 - RNA, 20 nt, synthetic construct
  misc_feature 1..20: note = C9Orf72 TTCN PAM targeting sequence
  source 1..20: mol_type = other RNA
aactcagagattttaagtga

SEQ ID NO: 7083 - RNA, 20 nt, synthetic construct
  misc_feature 1..20: note = C9Orf72 TTCN PAM targeting sequence
  source 1..20: mol_type = other RNA
ttgtgtaatcacttaaaatc

SEQ ID NO: 7084 - RNA, 20 nt, synthetic construct
  misc_feature 1..20: note = C9Orf72 TTCN PAM targeting sequence
  source 1..20: mol_type = other RNA
ctaaccttgcatggcttcta

SEQ ID NO: 7085 - RNA, 20 nt, synthetic construct
  misc_feature 1..20: note = C9Orf72 TTCN PAM targeting sequence
  source 1..20: mol_type = other RNA
agaaaaagacaaaaactgac

SEQ ID NO: 7086 - RNA, 20 nt, synthetic construct
  misc_feature 1..20: note = C9Orf72 TTCN PAM targeting sequence
  source 1..20: mol_type = other RNA
agaagccatgcaaggttagg

SEQ ID NO: 7087 - RNA, 20 nt, synthetic construct
  misc_feature 1..20: note = C9Orf72 TTCN PAM targeting sequence
  source 1..20: mol_type = other RNA
gctttgaaaggccactacac

SEQ ID NO: 7088 - RNA, 20 nt, synthetic construct
  misc_feature 1..20: note = C9Orf72 TTCN PAM targeting sequence
  source 1..20: mol_type = other RNA
aagctgaaataaatcagggc

SEQ ID NO: 7089 - RNA, 20 nt, synthetic construct
  misc_feature 1..20: note = C9Orf72 TTCN PAM targeting sequence
  source 1..20: mol_type = other RNA
catttctgcaaggaatgcaa

SEQ ID NO: 7090 - RNA, 20 nt, synthetic construct
  misc_feature 1..20: note = C9Orf72 TTCN PAM targeting sequence
  source 1..20: mol_type = other RNA
gcaaggaatgcaatccagag

SEQ ID NO: 7091 - RNA, 20 nt, synthetic construct
  misc_feature 1..20: note = C9Orf72 TTCN PAM targeting sequence
  source 1..20: mol_type = other RNA
ttgcagaaatgagaatccaa

SEQ ID NO: 7092 - RNA, 20 nt, synthetic construct
  misc_feature 1..20: note = C9Orf72 TTCN PAM targeting sequence
  source 1..20: mol_type = other RNA
ggacagcgagctcagctctc

SEQ ID NO: 7093 - RNA, 20 nt, synthetic construct
  misc_feature 1..20: note = C9Orf72 TTCN PAM targeting sequence
  source 1..20: mol_type = other RNA
catctagcggagtaatcttg

SEQ ID NO: 7094 - RNA, 20 nt, synthetic construct
  misc_feature 1..20: note = C9Orf72 TTCN PAM targeting sequence
  source 1..20: mol_type = other RNA
caagattactccgctagatg

SEQ ID NO: 7095 - RNA, 20 nt, synthetic construct
  misc_feature 1..20: note = C9Orf72 TTCN PAM targeting sequence
  source 1..20: mol_type = other RNA
cggtgcccaggaaagagaag

SEQ ID NO: 7096 - RNA, 20 nt, synthetic construct
  misc_feature 1..20: note = C9Orf72 TTCN PAM targeting sequence
  source 1..20: mol_type = other RNA
tgggcaccgtgaaggccagg

SEQ ID NO: 7097 - RNA, 20 nt, synthetic construct
  misc_feature 1..20: note = C9Orf72 TTCN PAM targeting sequence
  source 1..20: mol_type = other RNA
ctttcctgggcaccgtgaag

SEQ ID NO: 7098 - RNA, 20 nt, synthetic construct
  misc_feature 1..20: note = C9Orf72 TTCN PAM targeting sequence
  source 1..20: mol_type = other RNA
attgtcaggtccctgtgttg

SEQ ID NO: 7099 - RNA, 20 nt, synthetic construct
  misc_feature 1..20: note = C9Orf72 TTCN PAM targeting sequence
  source 1..20: mol_type = other RNA
cacactgccccttgctttct

SEQ ID NO: 7100 - RNA, 20 nt, synthetic construct
  misc_feature 1..20: note = C9Orf72 TTCN PAM targeting sequence
  source 1..20: mol_type = other RNA
ttcccacactgccccttgct

SEQ ID NO: 7101 - RNA, 20 nt, synthetic construct
  misc_feature 1..20: note = C9Orf72 TTCN PAM targeting sequence
  source 1..20: mol_type = other RNA
ccaaccaagaggtcagcccc

SEQ ID NO: 7102 - RNA, 20 nt, synthetic construct
  misc_feature 1..20: note = C9Orf72 TTCN PAM targeting sequence
  source 1..20: mol_type = other RNA
ctcagcttcatcagaggtca

SEQ ID NO: 7103 - RNA, 20 nt, synthetic construct
  misc_feature 1..20: note = C9Orf72 TTCN PAM targeting sequence
  source 1..20: mol_type = other RNA
tcagaggtcatgcactctcc

SEQ ID NO: 7104 - RNA, 20 nt, synthetic construct
  misc_feature 1..20: note = C9Orf72 TTCN PAM targeting sequence
  source 1..20: mol_type = other RNA
acacacaccccaccttgctc

SEQ ID NO: 7105 - RNA, 20 nt, synthetic construct
  misc_feature 1..20: note = C9Orf72 TTCN PAM targeting sequence
  source 1..20: mol_type = other RNA
gcttgtgagcaaggtggggt

SEQ ID NO: 7106 - RNA, 20 nt, synthetic construct
  misc_feature 1..20: note = C9Orf72 TTCN PAM targeting sequence
  source 1..20: mol_type = other RNA
ccttctgcttgtgagcaagg

SEQ ID NO: 7107 - RNA, 20 nt, synthetic construct
  misc_feature 1..20: note = C9Orf72 TTCN PAM targeting sequence
  source 1..20: mol_type = other RNA
ttccccttctgcttgtgagc

SEQ ID NO: 7108 - RNA, 20 nt, synthetic construct
  misc_feature 1..20: note = C9Orf72 TTCN PAM targeting sequence
  source 1..20: mol_type = other RNA
tttgggaagctgccaagaca

SEQ ID NO: 7109 - RNA, 20 nt, synthetic construct
  misc_feature 1..20: note = C9Orf72 TTCN PAM targeting sequence
  source 1..20: mol_type = other RNA
caaatgaatgccaaggtgcc

SEQ ID NO: 7110 - RNA, 20 nt, synthetic construct
  misc_feature 1..20: note = C9Orf72 TTCN PAM targeting sequence
  source 1..20: mol_type = other RNA
aatggggcatctaacctgat

SEQ ID NO: 7111 - RNA, 20 nt, synthetic construct
  misc_feature 1..20: note = C9Orf72 TTCN PAM targeting sequence
  source 1..20: mol_type = other RNA
aattctaacctccaatgtga

SEQ ID NO: 7112 - RNA, 20 nt, synthetic construct
  misc_feature 1..20: note = C9Orf72 TTCN PAM targeting sequence
  source 1..20: mol_type = other RNA
aacctccaatgtgatggcat

SEQ ID NO: 7113 - RNA, 20 nt, synthetic construct
  misc_feature 1..20: note = C9Orf72 TTCN PAM targeting sequence
  source 1..20: mol_type = other RNA
aaaggtcccaccttttaatg

SEQ ID NO: 7114 - RNA, 20 nt, synthetic construct
  misc_feature 1..20: note = C9Orf72 TTCN PAM targeting sequence
  source 1..20: mol_type = other RNA
ttagggtagagccctcataa

SEQ ID NO: 7115 - RNA, 20 nt, synthetic construct
  misc_feature 1..20: note = C9Orf72 TTCN PAM targeting sequence
  source 1..20: mol_type = other RNA
ggggtcccttttataatggc

SEQ ID NO: 7116 - RNA, 20 nt, synthetic construct
  misc_feature 1..20: note = C9Orf72 TTCN PAM targeting sequence
  source 1..20: mol_type = other RNA
accctcaagagggcccacac

SEQ ID NO: 7117 - RNA, 20 nt, synthetic construct
  misc_feature 1..20: note = C9Orf72 TTCN PAM targeting sequence
  source 1..20: mol_type = other RNA
ggtgtgggccctcttgaggg

SEQ ID NO: 7118 - RNA, 20 nt, synthetic construct
  misc_feature 1..20: note = C9Orf72 TTCN PAM targeting sequence
  source 1..20: mol_type = other RNA
agcttccagaactatgagaa

SEQ ID NO: 7119 - RNA, 20 nt, synthetic construct
  misc_feature 1..20: note = C9Orf72 TTCN PAM targeting sequence
  source 1..20: mol_type = other RNA
agaactatgagaaatagatt

SEQ ID NO: 7120 - RNA, 20 nt, synthetic construct
  misc_feature 1..20: note = C9Orf72 TTCN PAM targeting sequence
  source 1..20: mol_type = other RNA
ggaagctggaaatccaatat

SEQ ID NO: 7121 - RNA, 20 nt, synthetic construct
  misc_feature 1..20: note = C9Orf72 TTCN PAM targeting sequence
  source 1..20: mol_type = other RNA
catagttctggaagctggaa

SEQ ID NO: 7122 - RNA, 20 nt, synthetic construct
  misc_feature 1..20: note = C9Orf72 TTCN PAM targeting sequence
  source 1..20: mol_type = other RNA
gttgtttataagccacccag

SEQ ID NO: 7123 - RNA, 20 nt, synthetic construct
  misc_feature 1..20: note = C9Orf72 TTCN PAM targeting sequence
  source 1..20: mol_type = other RNA
catacaaggctttataaaat

SEQ ID NO: 7124 - RNA, 20 nt, synthetic construct
  misc_feature 1..20: note = C9Orf72 TTCN PAM targeting sequence
  source 1..20: mol_type = other RNA
tccaaccatatctagtaaac

SEQ ID NO: 7125 - RNA, 20 nt, synthetic construct
  misc_feature 1..20: note = C9Orf72 TTCN PAM targeting sequence
  source 1..20: mol_type = other RNA
ttctgactaataaggaaata

SEQ ID NO: 7126 - RNA, 20 nt, synthetic construct
  misc_feature 1..20: note = C9Orf72 TTCN PAM targeting sequence
  source 1..20: mol_type = other RNA
gactaataaggaaataaatg

SEQ ID NO: 7127 - RNA, 20 nt, synthetic construct
  misc_feature 1..20: note = C9Orf72 TTCN PAM targeting sequence
  source 1..20: mol_type = other RNA
ttattagtcagaaagaaact

SEQ ID NO: 7128 - RNA, 20 nt, synthetic construct
  misc_feature 1..20: note = C9Orf72 TTCN PAM targeting sequence
  source 1..20: mol_type = other RNA
gggaggtcatacagtaatga

SEQ ID NO: 7129 - RNA, 20 nt, synthetic construct
  misc_feature 1..20: note = C9Orf72 TTCN PAM targeting sequence
  source 1..20: mol_type = other RNA
gaggatttagaagaaattat

SEQ ID NO: 7130 - RNA, 20 nt, synthetic construct
  misc_feature 1..20: note = C9Orf72 TTCN PAM targeting sequence
  source 1..20: mol_type = other RNA
aaatcctcagaactcatgag

SEQ ID NO: 7131 - RNA, 20 nt, synthetic construct
  misc_feature 1..20: note = C9Orf72 TTCN PAM targeting sequence
  source 1..20: mol_type = other RNA
tctaaatcctcagaactcat

SEQ ID NO: 7132 - RNA, 20 nt, synthetic construct
  misc_feature 1..20: note = C9Orf72 TTCN PAM targeting sequence
  source 1..20: mol_type = other RNA
agtggaacttccctagacat

SEQ ID NO: 7133 - RNA, 20 nt, synthetic construct
  misc_feature 1..20: note = C9Orf72 TTCN PAM targeting sequence
  source 1..20: mol_type = other RNA
acttgaataatttcttctaa

SEQ ID NO: 7134 - RNA, 20 nt, synthetic construct
  misc_feature 1..20: note = C9Orf72 TTCN PAM targeting sequence
  source 1..20: mol_type = other RNA
ctagacatcatgggcccaaa

SEQ ID NO: 7135 - RNA, 20 nt, synthetic construct
  misc_feature 1..20: note = C9Orf72 TTCN PAM targeting sequence
  source 1..20: mol_type = other RNA
tctcatcaaggctggctgaa

SEQ ID NO: 7136 - RNA, 20 nt, synthetic construct
  misc_feature 1..20: note = C9Orf72 TTCN PAM targeting sequence
  source 1..20: mol_type = other RNA
gccagccttgatgagaggaa

SEQ ID NO: 7137 - RNA, 20 nt, synthetic construct
  misc_feature 1..20: note = C9Orf72 TTCN PAM targeting sequence
  source 1..20: mol_type = other RNA
cttgtgtgctgacatgggta

SEQ ID NO: 7138 - RNA, 20 nt, synthetic construct
  misc_feature 1..20: note = C9Orf72 TTCN PAM targeting sequence
  source 1..20: mol_type = other RNA
agggtatgatgacctggatt

SEQ ID NO: 7139 - RNA, 20 nt, synthetic construct
  misc_feature 1..20: note = C9Orf72 TTCN PAM targeting sequence
  source 1..20: mol_type = other RNA
aatcagcaggcacatgcatc

SEQ ID NO: 7140 - RNA, 20 nt, synthetic construct
  misc_feature 1..20: note = C9Orf72 TTCN PAM targeting sequence
  source 1..20: mol_type = other RNA
tatcattcctgttgcaagac

SEQ ID NO: 7141 - RNA, 20 nt, synthetic construct
  misc_feature 1..20: note = C9Orf72 TTCN PAM targeting sequence
  source 1..20: mol_type = other RNA
tgttgcaagacacatagcta

SEQ ID NO: 7142 - RNA, 20 nt, synthetic construct
  misc_feature 1..20: note = C9Orf72 TTCN PAM targeting sequence
  source 1..20: mol_type = other RNA
tgttctggaagttttggagg

SEQ ID NO: 7143 - RNA, 20 nt, synthetic construct
  misc_feature 1..20: note = C9Orf72 TTCN PAM targeting sequence
  source 1..20: mol_type = other RNA
ggaagttttggaggggtgag

SEQ ID NO: 7144 - RNA, 20 nt, synthetic construct
  misc_feature 1..20: note = C9Orf72 TTCN PAM targeting sequence
  source 1..20: mol_type = other RNA
agaacaggaagtagctatgt

SEQ ID NO: 7145 - RNA, 20 nt, synthetic construct
  misc_feature 1..20: note = C9Orf72 TTCN PAM targeting sequence
  source 1..20: mol_type = other RNA
cacccctccaaaacttccag

SEQ ID NO: 7146 - RNA, 20 nt, synthetic construct
  misc_feature 1..20: note = C9Orf72 TTCN PAM targeting sequence
  source 1..20: mol_type = other RNA
ttttctcacccctccaaaac

SEQ ID NO: 7147 - RNA, 20 nt, synthetic construct
  misc_feature 1..20: note = C9Orf72 TTCN PAM targeting sequence
  source 1..20: mol_type = other RNA
tgcccttctttttctcaccc

SEQ ID NO: 7148 - RNA, 20 nt, synthetic construct
  misc_feature 1..20: note = C9Orf72 TTCN PAM targeting sequence
  source 1..20: mol_type = other RNA
cttcttgcccttctttttct

SEQ ID NO: 7149 - RNA, 20 nt, synthetic construct
  misc_feature 1..20: note = C9Orf72 TTCN PAM targeting sequence
  source 1..20: mol_type = other RNA
tgacaaaatctggaaaggct

SEQ ID NO: 7150 - RNA, 20 nt, synthetic construct
  misc_feature 1..20: note = C9Orf72 TTCN PAM targeting sequence
  source 1..20: mol_type = other RNA
agattttgtcatgaatgtct

SEQ ID NO: 7151 - RNA, 20 nt, synthetic construct
  misc_feature 1..20: note = C9Orf72 TTCN PAM targeting sequence
  source 1..20: mol_type = other RNA
caggcagtagcaaatagtct

SEQ ID NO: 7152 - RNA, 20 nt, synthetic construct
  misc_feature 1..20: note = C9Orf72 TTCN PAM targeting sequence
  source 1..20: mol_type = other RNA
aagtttgttttgatgagact

SEQ ID NO: 7153 - RNA, 20 nt, synthetic construct
  misc_feature 1..20: note = C9Orf72 TTCN PAM targeting sequence
  source 1..20: mol_type = other RNA
agatttcaaagtttgttttg

SEQ ID NO: 7154 - RNA, 20 nt, synthetic construct
  misc_feature 1..20: note = C9Orf72 TTCN PAM targeting sequence
  source 1..20: mol_type = other RNA
ttctagatttcaaagtttgt

SEQ ID NO: 7155 - RNA, 20 nt, synthetic construct
  misc_feature 1..20: note = C9Orf72 TTCN PAM targeting sequence
  source 1..20: mol_type = other RNA
aaatcttcattctagatttc

SEQ ID NO: 7156 - RNA, 20 nt, synthetic construct
  misc_feature 1..20: note = C9Orf72 TTCN PAM targeting sequence
  source 1..20: mol_type = other RNA
tttcaaaatcttcattctag

SEQ ID NO: 7157 - RNA, 20 nt, synthetic construct
  misc_feature 1..20: note = C9Orf72 TTCN PAM targeting sequence
  source 1..20: mol_type = other RNA
tatataacagtggatttctt

SEQ ID NO: 7158 - RNA, 20 nt, synthetic construct
  misc_feature 1..20: note = C9Orf72 TTCN PAM targeting sequence
  source 1..20: mol_type = other RNA
ctcagcaaacccacctttaa

SEQ ID NO: 7159 - RNA, 20 nt, synthetic construct
  misc_feature 1..20: note = C9Orf72 TTCN PAM targeting sequence
  source 1..20: mol_type = other RNA
aaggtggctcctagtgatct

SEQ ID NO: 7160 - RNA, 20 nt, synthetic construct
  misc_feature 1..20: note = C9Orf72 TTCN PAM targeting sequence
  source 1..20: mol_type = other RNA
ctcaatcagagcattataca

SEQ ID NO: 7161 - RNA, 20 nt, synthetic construct
  misc_feature 1..20: note = C9Orf72 TTCN PAM targeting sequence
  source 1..20: mol_type = other RNA
agtgaacagaatacagcaaa

SEQ ID NO: 7162 - RNA, 20 nt, synthetic construct
  misc_feature 1..20: note = C9Orf72 TTCN PAM targeting sequence
  source 1..20: mol_type = other RNA
ctagaagtcagtctctgggt

SEQ ID NO: 7163 - RNA, 20 nt, synthetic construct
  misc_feature 1..20: note = C9Orf72 TTCN PAM targeting sequence
  source 1..20: mol_type = other RNA
gttcactagaagtcagtctc

SEQ ID NO: 7164 - RNA, 20 nt, synthetic construct
  misc_feature 1..20: note = C9Orf72 TTCN PAM targeting sequence
  source 1..20: mol_type = other RNA
gagattagcttataaaacac

SEQ ID NO: 7165 - RNA, 20 nt, synthetic construct
  misc_feature 1..20: note = C9Orf72 TTCN PAM targeting sequence
  source 1..20: mol_type = other RNA
ttgctatgtgggcctctcag

SEQ ID NO: 7166 - RNA, 20 nt, synthetic construct
  misc_feature 1..20: note = C9Orf72 TTCN PAM targeting sequence
  source 1..20: mol_type = other RNA
gttccttgctatgtgggcct

SEQ ID NO: 7167 - RNA, 20 nt, synthetic construct
  misc_feature 1..20: note = C9Orf72 TTCN PAM targeting sequence
  source 1..20: mol_type = other RNA
agctaaaagccagccagtga

SEQ ID NO: 7168 - RNA, 20 nt, synthetic construct
  misc_feature 1..20: note = C9Orf72 TTCN PAM targeting sequence
  source 1..20: mol_type = other RNA
ccaggatctgaatcctgcca

SEQ ID NO: 7169 - RNA, 20 nt, synthetic construct
  misc_feature 1..20: note = C9Orf72 TTCN PAM targeting sequence
  source 1..20: mol_type = other RNA
gatcctggtgaactgttggc

SEQ ID NO: 7170 - RNA, 20 nt, synthetic construct
  misc_feature 1..20: note = C9Orf72 TTCN PAM targeting sequence
  source 1..20: mol_type = other RNA
cagtcaaaccttgatacagc

SEQ ID NO: 7171 - RNA, 20 nt, synthetic construct
  misc_feature 1..20: note = C9Orf72 TTCN PAM targeting sequence
  source 1..20: mol_type = other RNA
ggatctctcccaaggctgag

SEQ ID NO: 7172 - RNA, 20 nt, synthetic construct
  misc_feature 1..20: note = C9Orf72 TTCN PAM targeting sequence
  source 1..20: mol_type = other RNA
ccggttcaggatctctccca

SEQ ID NO: 7173 - RNA, 20 nt, synthetic construct
  misc_feature 1..20: note = C9Orf72 TTCN PAM targeting sequence
  source 1..20: mol_type = other RNA
gttatgaagcaatagataaa

SEQ ID NO: 7174 - RNA, 20 nt, synthetic construct
  misc_feature 1..20: note = C9Orf72 TTCN PAM targeting sequence
  source 1..20: mol_type = other RNA
taacagaatcccctccaatg

SEQ ID NO: 7175 - RNA, 20 nt, synthetic construct
  misc_feature 1..20: note = C9Orf72 TTCN PAM targeting sequence
  source 1..20: mol_type = other RNA
ttttgtatgtgattataaac

SEQ ID NO: 7176 - RNA, 20 nt, synthetic construct
  misc_feature 1..20: note = C9Orf72 TTCN PAM targeting sequence
  source 1..20: mol_type = other RNA
ttgataactagtataatcaa

SEQ ID NO: 7177 - RNA, 20 nt, synthetic construct
  misc_feature 1..20: note = C9Orf72 TTCN PAM targeting sequence
  source 1..20: mol_type = other RNA
tgattatactagttatcaat

SEQ ID NO: 7178 - RNA, 20 nt, synthetic construct
  misc_feature 1..20: note = C9Orf72 TTCN PAM targeting sequence
  source 1..20: mol_type = other RNA
tatgtggatatgccattctt

SEQ ID NO: 7179 - RNA, 20 nt, synthetic construct
  misc_feature 1..20: note = C9Orf72 TTCN PAM targeting sequence
  source 1..20: mol_type = other RNA
tatcaatacagatatattga

SEQ ID NO: 7180 - RNA, 20 nt, synthetic construct
  misc_feature 1..20: note = C9Orf72 TTCN PAM targeting sequence
  source 1..20: mol_type = other RNA
tttcatatcaatacagatat

SEQ ID NO: 7181 - RNA, 20 nt, synthetic construct
  misc_feature 1..20: note = C9Orf72 TTCN PAM targeting sequence
  source 1..20: mol_type = other RNA
tgaaaatcaaaaagcaaatt

SEQ ID NO: 7182 - RNA, 20 nt, synthetic construct
  misc_feature 1..20: note = C9Orf72 TTCN PAM targeting sequence
  source 1..20: mol_type = other RNA
tgaacttcttttcatatcaa

SEQ ID NO: 7183 - RNA, 20 nt, synthetic construct
  misc_feature 1..20: note = C9Orf72 TTCN PAM targeting sequence
  source 1..20: mol_type = other RNA
tgtaaactccagataagctc

SEQ ID NO: 7184 - RNA, 20 nt, synthetic construct
  misc_feature 1..20: note = C9Orf72 TTCN PAM targeting sequence
  source 1..20: mol_type = other RNA
catttcagaaaacaattcta

SEQ ID NO: 7185 - RNA, 20 nt, synthetic construct
  misc_feature 1..20: note = C9Orf72 TTCN PAM targeting sequence
  source 1..20: mol_type = other RNA
gaaaacaattctagtagtct

SEQ ID NO: 7186 - RNA, 20 nt, synthetic construct
  misc_feature 1..20: note = C9Orf72 TTCN PAM targeting sequence
  source 1..20: mol_type = other RNA
gaaatgagaacactgggtga

SEQ ID NO: 7187 - RNA, 20 nt, synthetic construct
  misc_feature 1..20: note = C9Orf72 TTCN PAM targeting sequence
  source 1..20: mol_type = other RNA
agtagtctagttgctctgtc

SEQ ID NO: 7188 - RNA, 20 nt, synthetic construct
  misc_feature 1..20: note = C9Orf72 TTCN PAM targeting sequence
  source 1..20: mol_type = other RNA
aattgattagacagagcaac

SEQ ID NO: 7189 - RNA, 20 nt, synthetic construct
  misc_feature 1..20: note = C9Orf72 TTCN PAM targeting sequence
  source 1..20: mol_type = other RNA
aattgccaacacatcccaaa

SEQ ID NO: 7190 - RNA, 20 nt, synthetic construct
  misc_feature 1..20: note = C9Orf72 TTCN PAM targeting sequence
  source 1..20: mol_type = other RNA
ctctctttacagctgccatt

SEQ ID NO: 7191 - RNA, 20 nt, synthetic construct
  misc_feature 1..20: note = C9Orf72 TTCN PAM targeting sequence
  source 1..20: mol_type = other RNA
gctcctcggcaaactattat

SEQ ID NO: 7192 - RNA, 20 nt, synthetic construct
  misc_feature 1..20: note = C9Orf72 TTCN PAM targeting sequence
  source 1..20: mol_type = other RNA
agacaggagccagagtggta

SEQ ID NO: 7193 - RNA, 20 nt, synthetic construct
  misc_feature 1..20: note = C9Orf72 TTCN PAM targeting sequence
  source 1..20: mol_type = other RNA
cttatatctttaaagtacca

SEQ ID NO: 7194 - RNA, 20 nt, synthetic construct
  misc_feature 1..20: note = C9Orf72 TTCN PAM targeting sequence
  source 1..20: mol_type = other RNA
agccctacaatggcttccca

SEQ ID NO: 7195 - RNA, 20 nt, synthetic construct
  misc_feature 1..20: note = C9Orf72 TTCN PAM targeting sequence
  source 1..20: mol_type = other RNA
catcacactcagaataaaaa

SEQ ID NO: 7196 - RNA, 20 nt, synthetic construct
  misc_feature 1..20: note = C9Orf72 TTCN PAM targeting sequence
  source 1..20: mol_type = other RNA
gagtgtgatgggaagccatt

SEQ ID NO: 7197 - RNA, 20 nt, synthetic construct
  misc_feature 1..20: note = C9Orf72 TTCN PAM targeting sequence
  source 1..20: mol_type = other RNA
cctacgattctctcccttac

SEQ ID NO: 7198 - RNA, 20 nt, synthetic construct
  misc_feature 1..20: note = C9Orf72 TTCN PAM targeting sequence
  source 1..20: mol_type = other RNA
ctcccttacttatctgctct

SEQ ID NO: 7199 - RNA, 20 nt, synthetic construct
  misc_feature 1..20: note = C9Orf72 TTCN PAM targeting sequence
  source 1..20: mol_type = other RNA
acaacatgccaagtcttcta

SEQ ID NO: 7200 - RNA, 20 nt, synthetic construct
  misc_feature 1..20: note = C9Orf72 TTCN PAM targeting sequence
  source 1..20: mol_type = other RNA
atcacttcaaggctgtatta

SEQ ID NO: 7201 - RNA, 20 nt, synthetic construct
  misc_feature 1..20: note = C9Orf72 TTCN PAM targeting sequence
  source 1..20: mol_type = other RNA
aggctgtattagtttgctag

SEQ ID NO: 7202 - RNA, 20 nt, synthetic construct
  misc_feature 1..20: note = C9Orf72 TTCN PAM targeting sequence
  source 1..20: mol_type = other RNA
ttaagccacctagttttgag

SEQ ID NO: 7203 - RNA, 20 nt, synthetic construct
  misc_feature 1..20: note = C9Orf72 TTCN PAM targeting sequence
  source 1..20: mol_type = other RNA
attctttaagccacctagtt

SEQ ID NO: 7204 - RNA, 20 nt, synthetic construct
  misc_feature 1..20: note = C9Orf72 TTCN PAM targeting sequence
  source 1..20: mol_type = other RNA
tgtctccaaaactgagacag

SEQ ID NO: 7205 - RNA, 20 nt, synthetic construct
  misc_feature 1..20: note = C9Orf72 TTCN PAM targeting sequence
  source 1..20: mol_type = other RNA
gatttcttgtctccaaaact

SEQ ID NO: 7206 - RNA, 20 nt, synthetic construct
  misc_feature 1..20: note = C9Orf72 TTCN PAM targeting sequence
  source 1..20: mol_type = other RNA
ctgaaggcactagggagaaa

SEQ ID NO: 7207 - RNA, 20 nt, synthetic construct
  misc_feature 1..20: note = C9Orf72 TTCN PAM targeting sequence
  source 1..20: mol_type = other RNA
gagaaagcattgcccagcca

SEQ ID NO: 7208 - RNA, 20 nt, synthetic construct
  misc_feature 1..20: note = C9Orf72 TTCN PAM targeting sequence
  source 1..20: mol_type = other RNA
ccctagtgccttcagagaaa

SEQ ID NO: 7209 - RNA, 20 nt, synthetic construct
  misc_feature 1..20: note = C9Orf72 TTCN PAM targeting sequence
  source 1..20: mol_type = other RNA
tgtttccgtctttgtttctg

SEQ ID NO: 7210 - RNA, 20 nt, synthetic construct
  misc_feature 1..20: note = C9Orf72 TTCN PAM targeting sequence
  source 1..20: mol_type = other RNA
gtctttgtttctggtggggt

SEQ ID NO: 7211 - RNA, 20 nt, synthetic construct
  misc_feature 1..20: note = C9Orf72 TTCN PAM targeting sequence
  source 1..20: mol_type = other RNA
ggtggggttttttggtatct

SEQ ID NO: 7212 - RNA, 20 nt, synthetic construct
  misc_feature 1..20: note = C9Orf72 TTCN PAM targeting sequence
  source 1..20: mol_type = other RNA
gtgttccttggcttgtagac

SEQ ID NO: 7213 - RNA, 20 nt, synthetic construct
  misc_feature 1..20: note = C9Orf72 TTCN PAM targeting sequence
  source 1..20: mol_type = other RNA
ttggcttgtagactcagcac

SEQ ID NO: 7214 - RNA, 20 nt, synthetic construct
  misc_feature 1..20: note = C9Orf72 TTCN PAM targeting sequence
  source 1..20: mol_type = other RNA
tcttcacaagttatccttcc

SEQ ID NO: 7215 - RNA, 20 nt, synthetic construct
  misc_feature 1..20: note = C9Orf72 TTCN PAM targeting sequence
  source 1..20: mol_type = other RNA
caagttatccttcctgtgtg

SEQ ID NO: 7216 - RNA, 20 nt, synthetic construct
  misc_feature 1..20: note = C9Orf72 TTCN PAM targeting sequence
  source 1..20: mol_type = other RNA
tgtgtgtatgtctatctcca

SEQ ID NO: 7217 - RNA, 20 nt, synthetic construct
  misc_feature 1..20: note = C9Orf72 TTCN PAM targeting sequence
  source 1..20: mol_type = other RNA
ctttttatgaggatagcagt

SEQ ID NO: 7218 - RNA, 20 nt, synthetic construct
  misc_feature 1..20: note = C9Orf72 TTCN PAM targeting sequence
  source 1..20: mol_type = other RNA
gcaataaccctgttttcaaa

SEQ ID NO: 7219 - RNA, 20 nt, synthetic construct
  misc_feature 1..20: note = C9Orf72 TTCN PAM targeting sequence
  source 1..20: mol_type = other RNA
aataaggtcatgttaaaagg

SEQ ID NO: 7220 - RNA, 20 nt, synthetic construct
  misc_feature 1..20: note = C9Orf72 TTCN PAM targeting sequence
  source 1..20: mol_type = other RNA
taacctgcaataccttttaa

SEQ ID NO: 7221 - RNA, 20 nt, synthetic construct
  misc_feature 1..20: note = C9Orf72 TTCN PAM targeting sequence
  source 1..20: mol_type = other RNA
acatatgaatttgggatggg

SEQ ID NO: 7222 - RNA, 20 nt, synthetic construct
  misc_feature 1..20: note = C9Orf72 TTCN PAM targeting sequence
  source 1..20: mol_type = other RNA
tatgtagaattcctaacctg

SEQ ID NO: 7223 - RNA, 20 nt, synthetic construct
  misc_feature 1..20: note = C9Orf72 TTCN PAM targeting sequence
  source 1..20: mol_type = other RNA
ccatcccaaattcatatgta

SEQ ID NO: 7224 - RNA, 20 nt, synthetic construct
  misc_feature 1..20: note = C9Orf72 TTCN PAM targeting sequence
  source 1..20: mol_type = other RNA
accccaaaacaactgccttt

SEQ ID NO: 7225 - RNA, 20 nt, synthetic construct
  misc_feature 1..20: note = C9Orf72 TTCN PAM targeting sequence
  source 1..20: mol_type = other RNA
tgaaaagctctttacccagt

SEQ ID NO: 7226 - RNA, 20 nt, synthetic construct
  misc_feature 1..20: note = C9Orf72 TTCN PAM targeting sequence
  source 1..20: mol_type = other RNA
ggaagaggggacagtgattg

SEQ ID NO: 7227 - RNA, 20 nt, synthetic construct
  misc_feature 1..20: note = C9Orf72 TTCN PAM targeting sequence
  source 1..20: mol_type = other RNA
gagcacagcagctgtaactc

SEQ ID NO: 7228 - RNA, 20 nt, synthetic construct
  misc_feature 1..20: note = C9Orf72 TTCN PAM targeting sequence
  source 1..20: mol_type = other RNA
gcacaaatgcagagatggat

SEQ ID NO: 7229 - RNA, 20 nt, synthetic construct
  misc_feature 1..20: note = C9Orf72 TTCN PAM targeting sequence
  source 1..20: mol_type = other RNA
cacaggctactcctagatag

SEQ ID NO: 7230 - RNA, 20 nt, synthetic construct
  misc_feature 1..20: note = C9Orf72 TTCN PAM targeting sequence
  source 1..20: mol_type = other RNA
tgggagatgaaaacttacct

SEQ ID NO: 7231 - RNA, 20 nt, synthetic construct
  misc_feature 1..20: note = C9Orf72 TTCN PAM targeting sequence
  source 1..20: mol_type = other RNA
tctcccaggaataggtttgc

SEQ ID NO: 7232 - RNA, 20 nt, synthetic construct
  misc_feature 1..20: note = C9Orf72 TTCN PAM targeting sequence
  source 1..20: mol_type = other RNA
agagagcctggatctcttgg

SEQ ID NO: 7233 - RNA, 20 nt, synthetic construct
  misc_feature 1..20: note = C9Orf72 TTCN PAM targeting sequence
  source 1..20: mol_type = other RNA
gctcaccctcctccctcccg

SEQ ID NO: 7234 - RNA, 20 nt, synthetic construct
  misc_feature 1..20: note = C9Orf72 TTCN PAM targeting sequence
  source 1..20: mol_type = other RNA
tcacctggggtcagacctgc

SEQ ID NO: 7235 - RNA, 20 nt, synthetic construct
  misc_feature 1..20: note = C9Orf72 TTCN PAM targeting sequence
  source 1..20: mol_type = other RNA
cctggggtcagacctgcatc

SEQ ID NO: 7236 - RNA, 20 nt, synthetic construct
  misc_feature 1..20: note = C9Orf72 TTCN PAM targeting sequence
  source 1..20: mol_type = other RNA
ctcatagtcagacagggcat

SEQ ID NO: 7237 - RNA, 20 nt, synthetic construct
  misc_feature 1..20: note = C9Orf72 TTCN PAM targeting sequence
  source 1..20: mol_type = other RNA
aaagggctctgtgcttggtt

SEQ ID NO: 7238 - RNA, 20 nt, synthetic construct
  misc_feature 1..20: note = C9Orf72 TTCN PAM targeting sequence
  source 1..20: mol_type = other RNA
accaagcacagagccctttt

SEQ ID NO: 7239 - RNA, 20 nt, synthetic construct
  misc_feature 1..20: note = C9Orf72 TTCN PAM targeting sequence
  source 1..20: mol_type = other RNA
aagatggctgcagaggagta

SEQ ID NO: 7240 - RNA, 20 nt, synthetic construct
  misc_feature 1..20: note = C9Orf72 TTCN PAM targeting sequence
  source 1..20: mol_type = other RNA
taatgttattttgaacaagg

SEQ ID NO: 7241 - RNA, 20 nt, synthetic construct
  misc_feature 1..20: note = C9Orf72 TTCN PAM targeting sequence
  source 1..20: mol_type = other RNA
aaataacattaagaattcca

SEQ ID NO: 7242 - RNA, 20 nt, synthetic construct
  misc_feature 1..20: note = C9Orf72 TTCN PAM targeting sequence
  source 1..20: mol_type = other RNA
ttgtttccttgacctcactc

SEQ ID NO: 7243 - RNA, 20 nt, synthetic construct
  misc_feature 1..20: note = C9Orf72 TTCN PAM targeting sequence
  source 1..20: mol_type = other RNA
ttgacctcactcttgctcac

SEQ ID NO: 7244 - RNA, 20 nt, synthetic construct
  misc_feature 1..20: note = C9Orf72 TTCN PAM targeting sequence
  source 1..20: mol_type = other RNA
tggagaaaacggactcacac

SEQ ID NO: 7245 - RNA, 20 nt, synthetic construct
  misc_feature 1..20: note = C9Orf72 TTCN PAM targeting sequence
  source 1..20: mol_type = other RNA
ccaagaagcattacgccaag

SEQ ID NO: 7246 - RNA, 20 nt, synthetic construct
  misc_feature 1..20: note = C9Orf72 TTCN PAM targeting sequence
  source 1..20: mol_type = other RNA
tcattactgcatgtaagcct

SEQ ID NO: 7247 - RNA, 20 nt, synthetic construct
  misc_feature 1..20: note = C9Orf72 TTCN PAM targeting sequence
  source 1..20: mol_type = other RNA
ttactgcatgtaagcctgtg

SEQ ID NO: 7248 - RNA, 20 nt, synthetic construct
  misc_feature 1..20: note = C9Orf72 TTCN PAM targeting sequence
  source 1..20: mol_type = other RNA
tttgccaccctaataaagca

SEQ ID NO: 7249 - RNA, 20 nt, synthetic construct
  misc_feature 1..20: note = C9Orf72 TTCN PAM targeting sequence
  source 1..20: mol_type = other RNA
cctgctttaattttcttcat

SEQ ID NO: 7250 - RNA, 20 nt, synthetic construct
  misc_feature 1..20: note = C9Orf72 TTCN PAM targeting sequence
  source 1..20: mol_type = other RNA
tcatcgctccagctgatttt

SEQ ID NO: 7251 - RNA, 20 nt, synthetic construct
  misc_feature 1..20: note = C9Orf72 TTCN PAM targeting sequence
  source 1..20: mol_type = other RNA
tcgctccagctgattttact

SEQ ID NO: 7252 - RNA, 20 nt, synthetic construct
  misc_feature 1..20: note = C9Orf72 TTCN PAM targeting sequence
  source 1..20: mol_type = other RNA
catgagaatgtaaactatac

SEQ ID NO: 7253 - RNA, 20 nt, synthetic construct
  misc_feature 1..20: note = C9Orf72 TTCN PAM targeting sequence
  source 1..20: mol_type = other RNA
catgggaaagacaaaacaaa

SEQ ID NO: 7254 - RNA, 20 nt, synthetic construct
  misc_feature 1..20: note = C9Orf72 TTCN PAM targeting sequence
  source 1..20: mol_type = other RNA
tgactttgtcataggtgctg

SEQ ID NO: 7255 - RNA, 20 nt, synthetic construct
  misc_feature 1..20: note = C9Orf72 TTCN PAM targeting sequence
  source 1..20: mol_type = other RNA
ctcacaaaccatttattggc

SEQ ID NO: 7256 - RNA, 20 nt, synthetic construct
  misc_feature 1..20: note = C9Orf72 TTCN PAM targeting sequence
  source 1..20: mol_type = other RNA
gactgacatttttaatgtaa

SEQ ID NO: 7257 - RNA, 20 nt, synthetic construct
  misc_feature 1..20: note = C9Orf72 TTCN PAM targeting sequence
  source 1..20: mol_type = other RNA
gttccaaaatataagccatg

SEQ ID NO: 7258 - RNA, 20 nt, synthetic construct
  misc_feature 1..20: note = C9Orf72 TTCN PAM targeting sequence
  source 1..20: mol_type = other RNA
aaaatataagccatggcagc

SEQ ID NO: 7259 - RNA, 20 nt, synthetic construct
  misc_feature 1..20: note = C9Orf72 TTCN PAM targeting sequence
  source 1..20: mol_type = other RNA
tgtgatggctgccatggctt

SEQ ID NO: 7260 - RNA, 20 nt, synthetic construct
  misc_feature 1..20: note = C9Orf72 TTCN PAM targeting sequence
  source 1..20: mol_type = other RNA
tcttaatgcaggccagaaat

SEQ ID NO: 7261 - RNA, 20 nt, synthetic construct
  misc_feature 1..20: note = C9Orf72 TTCN PAM targeting sequence
  source 1..20: mol_type = other RNA
taatgcaggccagaaatgaa

SEQ ID NO: 7262 - RNA, 20 nt, synthetic construct
  misc_feature 1..20: note = C9Orf72 TTCN PAM targeting sequence
  source 1..20: mol_type = other RNA
ggcctgcattaagaagaaca

SEQ ID NO: 7263 - RNA, 20 nt, synthetic construct
  misc_feature 1..20: note = C9Orf72 TTCN PAM targeting sequence
  source 1..20: mol_type = other RNA
tttctggcctgcattaagaa

SEQ ID NO: 7264 - RNA, 20 nt, synthetic construct
  misc_feature 1..20: note = C9Orf72 TTCN PAM targeting sequence
  source 1..20: mol_type = other RNA
ggcttcatttctggcctgca

SEQ ID NO: 7265 - RNA, 20 nt, synthetic construct
  misc_feature 1..20: note = C9Orf72 TTCN PAM targeting sequence
  source 1..20: mol_type = other RNA
tattggtttagctttggatt

SEQ ID NO: 7266 - RNA, 20 nt, synthetic construct
  misc_feature 1..20: note = C9Orf72 TTCN PAM targeting sequence
  source 1..20: mol_type = other RNA
acacccctctgggtgatagc

SEQ ID NO: 7267 - RNA, 20 nt, synthetic construct
  misc_feature 1..20: note = C9Orf72 TTCN PAM targeting sequence
  source 1..20: mol_type = other RNA
caaatgggcatcccagccct

SEQ ID NO: 7268 - RNA, 20 nt, synthetic construct
  misc_feature 1..20: note = C9Orf72 TTCN PAM targeting sequence
  source 1..20: mol_type = other RNA
agcatcttaccttgcatgag

SEQ ID NO: 7269 - RNA, 20 nt, synthetic construct
  misc_feature 1..20: note = C9Orf72 TTCN PAM targeting sequence
  source 1..20: mol_type = other RNA
gacttgatgcagttatgtca

SEQ ID NO: 7270 - RNA, 20 nt, synthetic construct
  misc_feature 1..20: note = C9Orf72 TTCN PAM targeting sequence
  source 1..20: mol_type = other RNA
tcaaaatatccatttacata

SEQ ID NO: 7271 - RNA, 20 nt, synthetic construct
  misc_feature 1..20: note = C9Orf72 TTCN PAM targeting sequence
  source 1..20: mol_type = other RNA
aaatatccatttacataaaa

SEQ ID NO: 7272 - RNA, 20 nt, synthetic construct
  misc_feature 1..20: note = C9Orf72 TTCN PAM targeting sequence
  source 1..20: mol_type = other RNA
agtcctgtttttatgtaaat

SEQ ID NO: 7273 - RNA, 20 nt, synthetic construct
  misc_feature 1..20: note = C9Orf72 TTCN PAM targeting sequence
  source 1..20: mol_type = other RNA
tctagtcctgtttttatgta

SEQ ID NO: 7274 - RNA, 20 nt, synthetic construct
  misc_feature 1..20: note = C9Orf72 TTCN PAM targeting sequence
  source 1..20: mol_type = other RNA
ctgagctacttggagcagtg

SEQ ID NO: 7275 - RNA, 20 nt, synthetic construct
  misc_feature 1..20: note = C9Orf72 TTCN PAM targeting sequence
  source 1..20: mol_type = other RNA
cccttccctgagctacttgg

SEQ ID NO: 7276 - RNA, 20 nt, synthetic construct
  misc_feature 1..20: note = C9Orf72 TTCN PAM targeting sequence
  source 1..20: mol_type = other RNA
gacttacttcccccttccct

SEQ ID NO: 7277 - RNA, 20 nt, synthetic construct
  misc_feature 1..20: note = C9Orf72 TTCN PAM targeting sequence
  source 1..20: mol_type = other RNA
ccctgatactggagcacaat

SEQ ID NO: 7278 - RNA, 20 nt, synthetic construct
  misc_feature 1..20: note = C9Orf72 TTCN PAM targeting sequence
  source 1..20: mol_type = other RNA
atttagtttttttaatcgga

SEQ ID NO: 7279 - RNA, 20 nt, synthetic construct
  misc_feature 1..20: note = C9Orf72 TTCN PAM targeting sequence
  source 1..20: mol_type = other RNA
agatacttacacagcctaaa

SEQ ID NO: 7280 - RNA, 20 nt, synthetic construct
  misc_feature 1..20: note = C9Orf72 TTCN PAM targeting sequence
  source 1..20: mol_type = other RNA
cagaaccagggaagaagcaa

SEQ ID NO: 7281 - RNA, 20 nt, synthetic construct
  misc_feature 1..20: note = C9Orf72 TTCN PAM targeting sequence
  source 1..20: mol_type = other RNA
gggaacatttttatagtgat

SEQ ID NO: 7282 - RNA, 20 nt, synthetic construct
  misc_feature 1..20: note = C9Orf72 TTCN PAM targeting sequence
  source 1..20: mol_type = other RNA
ctggttctgggaacattttt

SEQ ID NO: 7283 - RNA, 20 nt, synthetic construct
  misc_feature 1..20: note = C9Orf72 TTCN PAM targeting sequence
  source 1..20: mol_type = other RNA
tccctggttctgggaacatt

SEQ ID NO: 7284 - RNA, 20 nt, synthetic construct
  misc_feature 1..20: note = C9Orf72 TTCN PAM targeting sequence
  source 1..20: mol_type = other RNA
gtagaaatattttcataact

SEQ ID NO: 7285 - RNA, 20 nt, synthetic construct
  misc_feature 1..20: note = C9Orf72 TTCN PAM targeting sequence
  source 1..20: mol_type = other RNA
acagaacaatttgagtttgc

SEQ ID NO: 7286 - RNA, 20 nt, synthetic construct
  misc_feature 1..20: note = C9Orf72 TTCN PAM targeting sequence
  source 1..20: mol_type = other RNA
taactcaggacctacaagac

SEQ ID NO: 7287 - RNA, 20 nt, synthetic construct
  misc_feature 1..20: note = C9Orf72 TTCN PAM targeting sequence
  source 1..20: mol_type = other RNA
gagggagtcttgtaggtcct

SEQ ID NO: 7288 - RNA, 20 nt, synthetic construct
  misc_feature 1..20: note = C9Orf72 TTCN PAM targeting sequence
  source 1..20: mol_type = other RNA
tgctgaataaacccacaaag

SEQ ID NO: 7289 - RNA, 20 nt, synthetic construct
  misc_feature 1..20: note = C9Orf72 TTCN PAM targeting sequence
  source 1..20: mol_type = other RNA
gcaggaattgtttattctga

SEQ ID NO: 7290 - RNA, 20 nt, synthetic construct
  misc_feature 1..20: note = C9Orf72 TTCN PAM targeting sequence
  source 1..20: mol_type = other RNA
ttgtgggtttattcagcagg

SEQ ID NO: 7291 - RNA, 20 nt, synthetic construct
  misc_feature 1..20: note = C9Orf72 TTCN PAM targeting sequence
  source 1..20: mol_type = other RNA
ttctttgtgggtttattcag

SEQ ID NO: 7292 - RNA, 20 nt, synthetic construct
  misc_feature 1..20: note = C9Orf72 TTCN PAM targeting sequence
  source 1..20: mol_type = other RNA
gactggcttcattctttgtg

SEQ ID NO: 7293 - RNA, 20 nt, synthetic construct
  misc_feature 1..20: note = C9Orf72 TTCN PAM targeting sequence
  source 1..20: mol_type = other RNA
ccttctgactggcttcattc

SEQ ID NO: 7294 - RNA, 20 nt, synthetic construct
  misc_feature 1..20: note = C9Orf72 TTCN PAM targeting sequence
  source 1..20: mol_type = other RNA
gctcattgtgtacgtggctt

SEQ ID NO: 7295 - RNA, 20 nt, synthetic construct
  misc_feature 1..20: note = C9Orf72 TTCN PAM targeting sequence
  source 1..20: mol_type = other RNA
tctgctcattgtgtacgtgg

SEQ ID NO: 7296 - RNA, 20 nt, synthetic construct
  misc_feature 1..20: note = C9Orf72 TTCN PAM targeting sequence
  source 1..20: mol_type = other RNA
tagaggtgctaattcttctg

SEQ ID NO: 7297 - RNA, 20 nt, synthetic construct
  misc_feature 1..20: note = C9Orf72 TTCN PAM targeting sequence
  source 1..20: mol_type = other RNA
cttactgtaagttcttagag

SEQ ID NO: 7298 - RNA, 20 nt, synthetic construct
  misc_feature 1..20: note = C9Orf72 TTCN PAM targeting sequence
  source 1..20: mol_type = other RNA
tttatgttaaaaaaaacttt

SEQ ID NO: 7299 - RNA, 20 nt, synthetic construct
  misc_feature 1..20: note = C9Orf72 TTCN PAM targeting sequence
  source 1..20: mol_type = other RNA
ttcttttatgttaaaaaaaa

SEQ ID NO: 7300 - RNA, 20 nt, synthetic construct
  misc_feature 1..20: note = C9Orf72 TTCN PAM targeting sequence
  source 1..20: mol_type = other RNA
tttattatggtttttattcc

SEQ ID NO: 7301 - RNA, 20 nt, synthetic construct
  misc_feature 1..20: note = C9Orf72 TTCN PAM targeting sequence
  source 1..20: mol_type = other RNA
taaaggatggttcttttatt

SEQ ID NO: 7302 - RNA, 20 nt, synthetic construct
  misc_feature 1..20: note = C9Orf72 TTCN PAM targeting sequence
  source 1..20: mol_type = other RNA
aagttgccctttgttcataa

SEQ ID NO: 7303 - RNA, 20 nt, synthetic construct
  misc_feature 1..20: note = C9Orf72 TTCN PAM targeting sequence
  source 1..20: mol_type = other RNA
ttttttcaaagttgcccttt

SEQ ID NO: 7304 - RNA, 20 nt, synthetic construct
  misc_feature 1..20: note = C9Orf72 TTCN PAM targeting sequence
  source 1..20: mol_type = other RNA
aattagttctttttttcaaa

SEQ ID NO: 7305 - RNA, 20 nt, synthetic construct
  misc_feature 1..20: note = C9Orf72 TTCN PAM targeting sequence
  source 1..20: mol_type = other RNA
taaagatgagaaaaacatgt

SEQ ID NO: 7306 - RNA, 20 nt, synthetic construct
  misc_feature 1..20: note = C9Orf72 TTCN PAM targeting sequence
  source 1..20: mol_type = other RNA
catctttaagaattcaaatt

SEQ ID NO: 7307 - RNA, 20 nt, synthetic construct
  misc_feature 1..20: note = C9Orf72 TTCN PAM targeting sequence
  source 1..20: mol_type = other RNA
gctgtatctaatatgcaatt

SEQ ID NO: 7308 - RNA, 20 nt, synthetic construct
  misc_feature 1..20: note = C9Orf72 TTCN PAM targeting sequence
  source 1..20: mol_type = other RNA
cttttcagctgtatctaata

SEQ ID NO: 7309 - RNA, 20 nt, synthetic construct
  misc_feature 1..20: note = C9Orf72 TTCN PAM targeting sequence
  source 1..20: mol_type = other RNA
tgatggtaattctcttttca

SEQ ID NO: 7310 - RNA, 20 nt, synthetic construct
  misc_feature 1..20: note = C9Orf72 TTCN PAM targeting sequence
  source 1..20: mol_type = other RNA
ttagacccatctttcatgat

SEQ ID NO: 7311 - RNA, 20 nt, synthetic construct
  misc_feature 1..20: note = C9Orf72 TTCN PAM targeting sequence
  source 1..20: mol_type = other RNA
gaatggagcagagaaagaaa

SEQ ID NO: 7312 - RNA, 20 nt, synthetic construct
  misc_feature 1..20: note = C9Orf72 TTCN PAM targeting sequence
  source 1..20: mol_type = other RNA
gaacacttctttagacccat

SEQ ID NO: 7313 - RNA, 20 nt, synthetic construct
  misc_feature 1..20: note = C9Orf72 TTCN PAM targeting sequence
  source 1..20: mol_type = other RNA
ctgctccattcagaacactt

SEQ ID NO: 7314 - RNA, 20 nt, synthetic construct
  misc_feature 1..20: note = C9Orf72 TTCN PAM targeting sequence
  source 1..20: mol_type = other RNA
ttctctgctccattcagaac

SEQ ID NO: 7315 - RNA, 20 nt, synthetic construct
  misc_feature 1..20: note = C9Orf72 TTCN PAM targeting sequence
  source 1..20: mol_type = other RNA
cattttttgatccctttttt

SEQ ID NO: 7316 - RNA, 20 nt, synthetic construct
  misc_feature 1..20: note = C9Orf72 TTCN PAM targeting sequence
  source 1..20: mol_type = other RNA
ccaatttactctctgtgttt

SEQ ID NO: 7317 - RNA, 20 nt, synthetic construct
  misc_feature 1..20: note = C9Orf72 TTCN PAM targeting sequence
  source 1..20: mol_type = other RNA
attaaatgtgttttatttcc

SEQ ID NO: 7318 - RNA, 20 nt, synthetic construct
  misc_feature 1..20: note = C9Orf72 TTCN PAM targeting sequence
  source 1..20: mol_type = other RNA
ggagaaggagtaggttatgt

SEQ ID NO: 7319 - RNA, 20 nt, synthetic construct
  misc_feature 1..20: note = C9Orf72 TTCN PAM targeting sequence
  source 1..20: mol_type = other RNA
ccagaacttcaattaaatgt

SEQ ID NO: 7320 - RNA, 20 nt, synthetic construct
  misc_feature 1..20: note = C9Orf72 TTCN PAM targeting sequence
  source 1..20: mol_type = other RNA
gtattgccactctcacataa

SEQ ID NO: 7321 - RNA, 20 nt, synthetic construct
  misc_feature 1..20: note = C9Orf72 TTCN PAM targeting sequence
  source 1..20: mol_type = other RNA
cagcttttatcatttcagta

SEQ ID NO: 7322 - RNA, 20 nt, synthetic construct
  misc_feature 1..20: note = C9Orf72 TTCN PAM targeting sequence
  source 1..20: mol_type = other RNA
tgatttagaaaattacaagt

SEQ ID NO: 7323 - RNA, 20 nt, synthetic construct
  misc_feature 1..20: note = C9Orf72 TTCN PAM targeting sequence
  source 1..20: mol_type = other RNA
aaatcaagaacatatgtatt

SEQ ID NO: 7324 - RNA, 20 nt, synthetic construct
  misc_feature 1..20: note = C9Orf72 TTCN PAM targeting sequence
  source 1..20: mol_type = other RNA
gccatttaccgctgtgtgtg

SEQ ID NO: 7325 - RNA, 20 nt, synthetic construct
  misc_feature 1..20: note = C9Orf72 TTCN PAM targeting sequence
  source 1..20: mol_type = other RNA
ctttggtgctagtgttctgc

SEQ ID NO: 7326 - RNA, 20 nt, synthetic construct
  misc_feature 1..20: note = C9Orf72 TTCN PAM targeting sequence
  source 1..20: mol_type = other RNA
ctctggttgcttgtatgact

SEQ ID NO: 7327 - RNA, 20 nt, synthetic construct
  misc_feature 1..20: note = C9Orf72 TTCN PAM targeting sequence
  source 1..20: mol_type = other RNA
tcaataatacagaggccaga

SEQ ID NO: 7328 - RNA, 20 nt, synthetic construct
  misc_feature 1..20: note = C9Orf72 TTCN PAM targeting sequence
  source 1..20: mol_type = other RNA
ttatcatctggcctctgtat

SEQ ID NO: 7329 - RNA, 20 nt, synthetic construct
  misc_feature 1..20: note = C9Orf72 TTCN PAM targeting sequence
  source 1..20: mol_type = other RNA
aagtggtaataaaaaaacct

SEQ ID NO: 7330 - RNA, 20 nt, synthetic construct
  misc_feature 1..20: note = C9Orf72 TTCN PAM targeting sequence
  source 1..20: mol_type = other RNA
atacctaattaagttgctgc

SEQ ID NO: 7331 - RNA, 20 nt, synthetic construct
  misc_feature 1..20: note = C9Orf72 TTCN PAM targeting sequence
  source 1..20: mol_type = other RNA
gttatagcagcgtaaaacag

SEQ ID NO: 7332 - RNA, 20 nt, synthetic construct
  misc_feature 1..20: note = C9Orf72 TTCN PAM targeting sequence
  source 1..20: mol_type = other RNA
gtgtaaattagtctgtgtta

SEQ ID NO: 7333 - RNA, 20 nt, synthetic construct
  misc_feature 1..20: note = C9Orf72 TTCN PAM targeting sequence
  source 1..20: mol_type = other RNA
gttctgtgtaaattagtctg

SEQ ID NO: 7334 - RNA, 20 nt, synthetic construct
  misc_feature 1..20: note = C9Orf72 TTCN PAM targeting sequence
  source 1..20: mol_type = other RNA
tcacaggtctggaggctggg

SEQ ID NO: 7335 - RNA, 20 nt, synthetic construct
  misc_feature 1..20: note = C9Orf72 TTCN PAM targeting sequence
  source 1..20: mol_type = other RNA
cagcctccagacctgtgagg

SEQ ID NO: 7336 - RNA, 20 nt, synthetic construct
  misc_feature 1..20: note = C9Orf72 TTCN PAM targeting sequence
  source 1..20: mol_type = other RNA
gccatgatgtgacagtagtt

SEQ ID NO: 7337 - RNA, 20 nt, synthetic construct
  misc_feature 1..20: note = C9Orf72 TTCN PAM targeting sequence
  source 1..20: mol_type = other RNA
ctctctctctcttgcccata

SEQ ID NO: 7338 - RNA, 20 nt, synthetic construct
  misc_feature 1..20: note = C9Orf72 TTCN PAM targeting sequence
  source 1..20: mol_type = other RNA
tataaaggatgagtttagcc

SEQ ID NO: 7339 - RNA, 20 nt, synthetic construct
  misc_feature 1..20: note = C9Orf72 TTCN PAM targeting sequence
  source 1..20: mol_type = other RNA
tttaataacaaacccactcc

SEQ ID NO: 7340 - RNA, 20 nt, synthetic construct
  misc_feature 1..20: note = C9Orf72 TTCN PAM targeting sequence
  source 1..20: mol_type = other RNA
ttgtagtaggagtgggtttg

SEQ ID NO: 7341 - RNA, 20 nt, synthetic construct
  misc_feature 1..20: note = C9Orf72 TTCN PAM targeting sequence
  source 1..20: mol_type = other RNA
tgagggcagaaccttcagga

SEQ ID NO: 7342 - RNA, 20 nt, synthetic construct
  misc_feature 1..20: note = C9Orf72 TTCN PAM targeting sequence
  source 1..20: mol_type = other RNA
gccctcatgaatggattaat

SEQ ID NO: 7343 - RNA, 20 nt, synthetic construct
  misc_feature 1..20: note = C9Orf72 TTCN PAM targeting sequence
  source 1..20: mol_type = other RNA
ggacctaatcacctcttaaa

SEQ ID NO: 7344 - RNA, 20 nt, synthetic construct
  misc_feature 1..20: note = C9Orf72 TTCN PAM targeting sequence
  source 1..20: mol_type = other RNA
cacctctcaacactgatgca

SEQ ID NO: 7345 - RNA, 20 nt, synthetic construct
  misc_feature 1..20: note = C9Orf72 TTCN PAM targeting sequence
  source 1..20: mol_type = other RNA
agcacatgaattttaggaga

SEQ ID NO: 7346 - RNA, 20 nt, synthetic construct
  misc_feature 1..20: note = C9Orf72 TTCN PAM targeting sequence
  source 1..20: mol_type = other RNA
tgtgctagaaacttaatcct

SEQ ID NO: 7347 - RNA, 20 nt, synthetic construct
  misc_feature 1..20: note = C9Orf72 TTCN PAM targeting sequence
  source 1..20: mol_type = other RNA
aacagagggtgaaataaaaa

SEQ ID NO: 7348 - RNA, 20 nt, synthetic construct
  misc_feature 1..20: note = C9Orf72 TTCN PAM targeting sequence
  source 1..20: mol_type = other RNA
ccctctgtttgaatatgtct

SEQ ID NO: 7349 - RNA, 20 nt, synthetic construct
  misc_feature 1..20: note = C9Orf72 TTCN PAM targeting sequence
  source 1..20: mol_type = other RNA
taccaaaaaagagagactat

SEQ ID NO: 7350 - RNA, 20 nt, synthetic construct
  misc_feature 1..20: note = C9Orf72 TTCN PAM targeting sequence
  source 1..20: mol_type = other RNA
tagacccttgctgaaagaaa

SEQ ID NO: 7351 - RNA, 20 nt, synthetic construct
  misc_feature 1..20: note = C9Orf72 TTCN PAM targeting sequence
  source 1..20: mol_type = other RNA
gcaagggtctatgaattgga

SEQ ID NO: 7352 - RNA, 20 nt, synthetic construct
  misc_feature 1..20: note = C9Orf72 TTCN PAM targeting sequence
  source 1..20: mol_type = other RNA
ttcagcaagggtctatgaat

SEQ ID NO: 7353 - RNA, 20 nt, synthetic construct
  misc_feature 1..20: note = C9Orf72 TTCN PAM targeting sequence
  source 1..20: mol_type = other RNA
ttaatatttctttcagcaag

SEQ ID NO: 7354 - RNA, 20 nt, synthetic construct
  misc_feature 1..20: note = C9Orf72 TTCN PAM targeting sequence
  source 1..20: mol_type = other RNA
atatgaaggaaactaagaaa

SEQ ID NO: 7355 - RNA, 20 nt, synthetic construct
  misc_feature 1..20: note = C9Orf72 TTCN PAM targeting sequence
  source 1..20: mol_type = other RNA
tatcgaagttattattcttt

SEQ ID NO: 7356 - RNA, 20 nt, synthetic construct
  misc_feature 1..20: note = C9Orf72 TTCN PAM targeting sequence
  source 1..20: mol_type = other RNA
ttcatatcgaagttattatt

SEQ ID NO: 7357 - RNA, 20 nt, synthetic construct
  misc_feature 1..20: note = C9Orf72 TTCN PAM targeting sequence
  source 1..20: mol_type = other RNA
tagtttccttcatatcgaag

SEQ ID NO: 7358 - RNA, 20 nt, synthetic construct
  misc_feature 1..20: note = C9Orf72 TTCN PAM targeting sequence
  source 1..20: mol_type = other RNA
ttgcttatcattgcttattt

SEQ ID NO: 7359 - RNA, 20 nt, synthetic construct
  misc_feature 1..20: note = C9Orf72 TTCN PAM targeting sequence
  source 1..20: mol_type = other RNA
ctattaatcttaaaaatttt

SEQ ID NO: 7360 - RNA, 20 nt, synthetic construct
  misc_feature 1..20: note = C9Orf72 TTCN PAM targeting sequence
  source 1..20: mol_type = other RNA
agttgtttataatgcctttc

SEQ ID NO: 7361 - RNA, 20 nt, synthetic construct
  misc_feature 1..20: note = C9Orf72 TTCN PAM targeting sequence
  source 1..20: mol_type = other RNA
tattattgctatctgatgtt

SEQ ID NO: 7362 - RNA, 20 nt, synthetic construct
  misc_feature 1..20: note = C9Orf72 TTCN PAM targeting sequence
  source 1..20: mol_type = other RNA
cctatcacgtaatgcaaggg

SEQ ID NO: 7363 - RNA, 20 nt, synthetic construct
  misc_feature 1..20: note = C9Orf72 TTCN PAM targeting sequence
  source 1..20: mol_type = other RNA
attcccctatcacgtaatgc

SEQ ID NO: 7364 - RNA, 20 nt, synthetic construct
  misc_feature 1..20: note = C9Orf72 TTCN PAM targeting sequence
  source 1..20: mol_type = other RNA
aaatttctattcccctatca

SEQ ID NO: 7365 - RNA, 20 nt, synthetic construct
  misc_feature 1..20: note = C9Orf72 TTCN PAM targeting sequence
  source 1..20: mol_type = other RNA
ggccaggagtttaaggccag

SEQ ID NO: 7366 - RNA, 20 nt, synthetic construct
  misc_feature 1..20: note = C9Orf72 TTCN PAM targeting sequence
  source 1..20: mol_type = other RNA
caagtagctaggactataga

SEQ ID NO: 7367 - RNA, 20 nt, synthetic construct
  misc_feature 1..20: note = C9Orf72 TTCN PAM targeting sequence
  source 1..20: mol_type = other RNA
cctgcctcagcttctcaagt

SEQ ID NO: 7368 - RNA, 20 nt, synthetic construct
  misc_feature 1..20: note = C9Orf72 TTCN PAM targeting sequence
  source 1..20: mol_type = other RNA
tgggctaaagcaattctcct

SEQ ID NO: 7369 - RNA, 20 nt, synthetic construct
  misc_feature 1..20: note = C9Orf72 TTCN PAM targeting sequence
  source 1..20: mol_type = other RNA
aggtaacagtgagctatgac

SEQ ID NO: 7370 - RNA, 20 nt, synthetic construct
  misc_feature 1..20: note = C9Orf72 TTCN PAM targeting sequence
  source 1..20: mol_type = other RNA
gcctgggcaacagagcaaga

SEQ ID NO: 7371 - RNA, 20 nt, synthetic construct
  misc_feature 1..20: note = C9Orf72 TTCN PAM targeting sequence
  source 1..20: mol_type = other RNA
tattattcatataatatttt

SEQ ID NO: 7372 - RNA, 20 nt, synthetic construct
  misc_feature 1..20: note = C9Orf72 TTCN PAM targeting sequence
  source 1..20: mol_type = other RNA
tataatattttcaggggaaa

SEQ ID NO: 7373 - RNA, 20 nt, synthetic construct
  misc_feature 1..20: note = C9Orf72 TTCN PAM targeting sequence
  source 1..20: mol_type = other RNA
ggggaaatgaggaaggaaat

SEQ ID NO: 7374 - RNA, 20 nt, synthetic construct
  misc_feature 1..20: note = C9Orf72 TTCN PAM targeting sequence
  source 1..20: mol_type = other RNA
cctgaaaatattatatgaat

SEQ ID NO: 7375 - RNA, 20 nt, synthetic construct
  misc_feature 1..20: note = C9Orf72 TTCN PAM targeting sequence
  source 1..20: mol_type = other RNA
tcatttcccctgaaaatatt

SEQ ID NO: 7376 - RNA, 20 nt, synthetic construct
  misc_feature 1..20: note = C9Orf72 TTCN PAM targeting sequence
  source 1..20: mol_type = other RNA
ttcctcatttcccctgaaaa

SEQ ID NO: 7377 - RNA, 20 nt, synthetic construct
  misc_feature 1..20: note = C9Orf72 TTCN PAM targeting sequence
  source 1..20: mol_type = other RNA
ctcccatttccttcctcatt

SEQ ID NO: 7378 - RNA, 20 nt, synthetic construct
  misc_feature 1..20: note = C9Orf72 TTCN PAM targeting sequence
  source 1..20: mol_type = other RNA
tctctcccatttccttcctc

SEQ ID NO: 7379 - RNA, 20 nt, synthetic construct
  misc_feature 1..20: note = C9Orf72 TTCN PAM targeting sequence
  source 1..20: mol_type = other RNA
atttcttctctcccatttcc

SEQ ID NO: 7380 - RNA, 20 nt, synthetic construct
  misc_feature 1..20: note = C9Orf72 TTCN PAM targeting sequence
  source 1..20: mol_type = other RNA
ttgagacagagtctcactct

SEQ ID NO: 7381 - RNA, 20 nt, synthetic construct
  misc_feature 1..20: note = C9Orf72 TTCN PAM targeting sequence
  source 1..20: mol_type = other RNA
cgccattctcctgcctcagc

SEQ ID NO: 7382 - RNA, 20 nt, synthetic construct
  misc_feature 1..20: note = C9Orf72 TTCN PAM targeting sequence
  source 1..20: mol_type = other RNA
cctgcctcagcctccggagt

SEQ ID NO: 7383 - RNA, 20 nt, synthetic construct
  misc_feature 1..20: note = C9Orf72 TTCN PAM targeting sequence
  source 1..20: mol_type = other RNA
caatgttagccaggatggtc

SEQ ID NO: 7384 - RNA, 20 nt, synthetic construct
  misc_feature 1..20: note = C9Orf72 TTCN PAM targeting sequence
  source 1..20: mol_type = other RNA
ccatgttggccaggatggtc

SEQ ID NO: 7385 - RNA, 20 nt, synthetic construct
  misc_feature 1..20: note = C9Orf72 TTCN PAM targeting sequence
  source 1..20: mol_type = other RNA
aaagtgctgggattacaggc

SEQ ID NO: 7386 - RNA, 20 nt, synthetic construct
  misc_feature 1..20: note = C9Orf72 TTCN PAM targeting sequence
  source 1..20: mol_type = other RNA
gcctaggcacggtggctcac

SEQ ID NO: 7387 - RNA, 20 nt, synthetic construct
  misc_feature 1..20: note = C9Orf72 TTCN PAM targeting sequence
  source 1..20: mol_type = other RNA
aaagtagtagaagaaaggaa

SEQ ID NO: 7388 - RNA, 20 nt, synthetic construct
  misc_feature 1..20: note = C9Orf72 TTCN PAM targeting sequence
  source 1..20: mol_type = other RNA
actactttagaagttataca

SEQ ID NO: 7389 - RNA, 20 nt, synthetic construct
  misc_feature 1..20: note = C9Orf72 TTCN PAM targeting sequence
  source 1..20: mol_type = other RNA
tctactactttagaagttat

SEQ ID NO: 7390 - RNA, 20 nt, synthetic construct
  misc_feature 1..20: note = C9Orf72 TTCN PAM targeting sequence
  source 1..20: mol_type = other RNA
tttcttctactactttagaa

SEQ ID NO: 7391 - RNA, 20 nt, synthetic construct
  misc_feature 1..20: note = C9Orf72 TTCN PAM targeting sequence
  source 1..20: mol_type = other RNA
ccctttcctttcttctacta

SEQ ID NO: 7392 - RNA, 20 nt, synthetic construct
  misc_feature 1..20: note = C9Orf72 TTCN PAM targeting sequence
  source 1..20: mol_type = other RNA
ttttccccctttcctttctt

SEQ ID NO: 7393 - RNA, 20 nt, synthetic construct
  misc_feature 1..20: note = C9Orf72 TTCN PAM targeting sequence
  source 1..20: mol_type = other RNA
tattttgtctgtatatgtct

SEQ ID NO: 7394 - RNA, 20 nt, synthetic construct
  misc_feature 1..20: note = C9Orf72 TTCN PAM targeting sequence
  source 1..20: mol_type = other RNA
ttttttcatattttgtctgt

SEQ ID NO: 7395 - RNA, 20 nt, synthetic construct
  misc_feature 1..20: note = C9Orf72 TTCN PAM targeting sequence
  source 1..20: mol_type = other RNA
ttctttttttcatattttgt

SEQ ID NO: 7396 - RNA, 20 nt, synthetic construct
  misc_feature 1..20: note = C9Orf72 TTCN PAM targeting sequence
  source 1..20: mol_type = other RNA
tacatccttaaaattccttc

SEQ ID NO: 7397 - RNA, 20 nt, synthetic construct
  misc_feature 1..20: note = C9Orf72 TTCN PAM targeting sequence
  source 1..20: mol_type = other RNA
tatattcttacatccttaaa

SEQ ID NO: 7398 - RNA, 20 nt, synthetic construct
  misc_feature 1..20: note = C9Orf72 TTCN PAM targeting sequence
  source 1..20: mol_type = other RNA
ttcttatattcttacatcct

SEQ ID NO: 7399 - RNA, 20 nt, synthetic construct
  misc_feature 1..20: note = C9Orf72 TTCN PAM targeting sequence
  source 1..20: mol_type = other RNA
cttaattctttcttatattc

SEQ ID NO: 7400 - RNA, 20 nt, synthetic construct
  misc_feature 1..20: note = C9Orf72 TTCN PAM targeting sequence
  source 1..20: mol_type = other RNA
gttctcttaattctttctta

SEQ ID NO: 7401 - RNA, 20 nt, synthetic construct
  misc_feature 1..20: note = C9Orf72 TTCN PAM targeting sequence
  source 1..20: mol_type = other RNA
tttatagagtcagtgcttgt

SEQ ID NO: 7402 - RNA, 20 nt, synthetic construct
  misc_feature 1..20: note = C9Orf72 TTCN PAM targeting sequence
  source 1..20: mol_type = other RNA
tttattcttttatagagtca

SEQ ID NO: 7403 - RNA, 20 nt, synthetic construct
  misc_feature 1..20: note = C9Orf72 TTCN PAM targeting sequence
  source 1..20: mol_type = other RNA
aactccacaaggcatcgttt

SEQ ID NO: 7404 - RNA, 20 nt, synthetic construct
  misc_feature 1..20: note = C9Orf72 TTCN PAM targeting sequence
  source 1..20: mol_type = other RNA
tacactagtcttttgagtat

SEQ ID NO: 7405 - RNA, 20 nt, synthetic construct
  misc_feature 1..20: note = C9Orf72 TTCN PAM targeting sequence
  source 1..20: mol_type = other RNA
tatttatccctccccgcaat

SEQ ID NO: 7406 - RNA, 20 nt, synthetic construct
  misc_feature 1..20: note = C9Orf72 TTCN PAM targeting sequence
  source 1..20: mol_type = other RNA
aaggaaggtaaaactattga

SEQ ID NO: 7407 - RNA, 20 nt, synthetic construct
  misc_feature 1..20: note = C9Orf72 TTCN PAM targeting sequence
  source 1..20: mol_type = other RNA
tttgaataacacccttctta

SEQ ID NO: 7408 - RNA, 20 nt, synthetic construct
  misc_feature 1..20: note = C9Orf72 TTCN PAM targeting sequence
  source 1..20: mol_type = other RNA
aaagtgatcaatagttttac

SEQ ID NO: 7409 - RNA, 20 nt, synthetic construct
  misc_feature 1..20: note = C9Orf72 TTCN PAM targeting sequence
  source 1..20: mol_type = other RNA
gagattagcctagtaattat

SEQ ID NO: 7410 - RNA, 20 nt, synthetic construct
  misc_feature 1..20: note = C9Orf72 TTCN PAM targeting sequence
  source 1..20: mol_type = other RNA
ttcagagattagcctagtaa

SEQ ID NO: 7411 - RNA, 20 nt, synthetic construct
  misc_feature 1..20: note = C9Orf72 TTCN PAM targeting sequence
  source 1..20: mol_type = other RNA
gagtggtgcagaagaaaaaa

SEQ ID NO: 7412 - RNA, 20 nt, synthetic construct
  misc_feature 1..20: note = C9Orf72 TTCN PAM targeting sequence
  source 1..20: mol_type = other RNA
gcaccactctgaaaggcata

SEQ ID NO: 7413 - RNA, 20 nt, synthetic construct
  misc_feature 1..20: note = C9Orf72 TTCN PAM targeting sequence
  source 1..20: mol_type = other RNA
tctgcaccactctgaaaggc

SEQ ID NO: 7414 - RNA, 20 nt, synthetic construct
  misc_feature 1..20: note = C9Orf72 TTCN PAM targeting sequence
  source 1..20: mol_type = other RNA
ttgtctcactctgttttttc

SEQ ID NO: 7415 - RNA, 20 nt, synthetic construct
  misc_feature 1..20: note = C9Orf72 TTCN PAM targeting sequence
  source 1..20: mol_type = other RNA
cgccttttttgtctttttat

SEQ ID NO: 7416 - RNA, 20 nt, synthetic construct
  misc_feature 1..20: note = C9Orf72 TTCN PAM targeting sequence
  source 1..20: mol_type = other RNA
tctcgccttttttgtctttt

SEQ ID NO: 7417 - RNA, 20 nt, synthetic construct
  misc_feature 1..20: note = C9Orf72 TTCN PAM targeting sequence
  source 1..20: mol_type = other RNA
atgtttcttctcgccttttt

SEQ ID NO: 7418 - RNA, 20 nt, synthetic construct
  misc_feature 1..20: note = C9Orf72 TTCN PAM targeting sequence
  source 1..20: mol_type = other RNA
gtttgccatcatcttttagc

SEQ ID NO: 7419 - RNA, 20 nt, synthetic construct
  misc_feature 1..20: note = C9Orf72 TTCN PAM targeting sequence
  source 1..20: mol_type = other RNA
tacacctggctgtttactca

SEQ ID NO: 7420 - RNA, 20 nt, synthetic construct
  misc_feature 1..20: note = C9Orf72 TTCN PAM targeting sequence
  source 1..20: mol_type = other RNA
ttagacaggtacacgcttac

SEQ ID NO: 7421 - RNA, 20 nt, synthetic construct
  misc_feature 1..20: note = C9Orf72 TTCN PAM targeting sequence
  source 1..20: mol_type = other RNA
ctgtgttagccaggatggtc

SEQ ID NO: 7422 - RNA, 20 nt, synthetic construct
  misc_feature 1..20: note = C9Orf72 TTCN PAM targeting sequence
  source 1..20: mol_type = other RNA
ttaggctgggcgcggtggct

SEQ ID NO: 7423 - RNA, 20 nt, synthetic construct
  misc_feature 1..20: note = C9Orf72 TTCN PAM targeting sequence
  source 1..20: mol_type = other RNA
tacagatcgttgccatgtgg

SEQ ID NO: 7424 - RNA, 20 nt, synthetic construct
  misc_feature 1..20: note = C9Orf72 TTCN PAM targeting sequence
  source 1..20: mol_type = other RNA
cacatggcaacgatctgtaa

SEQ ID NO: 7425 - RNA, 20 nt, synthetic construct
  misc_feature 1..20: note = C9Orf72 TTCN PAM targeting sequence
  source 1..20: mol_type = other RNA
aaaacctgggaactcggagt

SEQ ID NO: 7426 - RNA, 20 nt, synthetic construct
  misc_feature 1..20: note = C9Orf72 TTCN PAM targeting sequence
  source 1..20: mol_type = other RNA
caggtttttgaaagttaaca

SEQ ID NO: 7427 - RNA, 20 nt, synthetic construct
  misc_feature 1..20: note = C9Orf72 TTCN PAM targeting sequence
  source 1..20: mol_type = other RNA
cataaaactccgagttccca

SEQ ID NO: 7428 - RNA, 20 nt, synthetic construct
  misc_feature 1..20: note = C9Orf72 TTCN PAM targeting sequence
  source 1..20: mol_type = other RNA
gatttcccataaaactccga

SEQ ID NO: 7429 - RNA, 20 nt, synthetic construct
  misc_feature 1..20: note = C9Orf72 TTCN PAM targeting sequence
  source 1..20: mol_type = other RNA
tggctgatgtttaaaattct

SEQ ID NO: 7430 - RNA, 20 nt, synthetic construct
  misc_feature 1..20: note = C9Orf72 TTCN PAM targeting sequence
  source 1..20: mol_type = other RNA
gtgtttgctttttaaaaaaa

SEQ ID NO: 7431 - RNA, 20 nt, synthetic construct
  misc_feature 1..20: note = C9Orf72 TTCN PAM targeting sequence
  source 1..20: mol_type = other RNA
ttttttcagtgtttgctttt

SEQ ID NO: 7432 - RNA, 20 nt, synthetic construct
  misc_feature 1..20: note = C9Orf72 TTCN PAM targeting sequence
  source 1..20: mol_type = other RNA
ctccactggatcaatagcat

SEQ ID NO: 7433 - RNA, 20 nt, synthetic construct
  misc_feature 1..20: note = C9Orf72 TTCN PAM targeting sequence
  source 1..20: mol_type = other RNA
tccctccactggatcaatag

SEQ ID NO: 7434 - RNA, 20 nt, synthetic construct
  misc_feature 1..20: note = C9Orf72 TTCN PAM targeting sequence
  source 1..20: mol_type = other RNA
tcttatctcttttcttccct

SEQ ID NO: 7435 - RNA, 20 nt, synthetic construct
  misc_feature 1..20: note = C9Orf72 TTCN PAM targeting sequence
  source 1..20: mol_type = other RNA
tttgtttcatcttatctctt

SEQ ID NO: 7436 - RNA, 20 nt, synthetic construct
  misc_feature 1..20: note = C9Orf72 TTCN PAM targeting sequence
  source 1..20: mol_type = other RNA
ttcatttgtttcatcttatc

SEQ ID NO: 7437 - RNA, 20 nt, synthetic construct
  misc_feature 1..20: note = C9Orf72 TTCN PAM targeting sequence
  source 1..20: mol_type = other RNA
acccttttgctttatgtttt

SEQ ID NO: 7438 - RNA, 20 nt, synthetic construct
  misc_feature 1..20: note = C9Orf72 TTCN PAM targeting sequence
  source 1..20: mol_type = other RNA
aaccactgaaacatgaatgg

SEQ ID NO: 7439 - RNA, 20 nt, synthetic construct
  misc_feature 1..20: note = C9Orf72 TTCN PAM targeting sequence
  source 1..20: mol_type = other RNA
gtggtttgaaagagttgttt

SEQ ID NO: 7440 - RNA, 20 nt, synthetic construct
  misc_feature 1..20: note = C9Orf72 TTCN PAM targeting sequence
  source 1..20: mol_type = other RNA
tgtttcagtggtttgaaaga

SEQ ID NO: 7441 - RNA, 20 nt, synthetic construct
  misc_feature 1..20: note = C9Orf72 TTCN PAM targeting sequence
  source 1..20: mol_type = other RNA
attcatgtttcagtggtttg

SEQ ID NO: 7442 - RNA, 20 nt, synthetic construct
  misc_feature 1..20: note = C9Orf72 TTCN PAM targeting sequence
  source 1..20: mol_type = other RNA
cttccattcatgtttcagtg

SEQ ID NO: 7443 - RNA, 20 nt, synthetic construct
  misc_feature 1..20: note = C9Orf72 TTCN PAM targeting sequence
  source 1..20: mol_type = other RNA
gccctgttcaaccttatcat

SEQ ID NO: 7444 - RNA, 20 nt, synthetic construct
  misc_feature 1..20: note = C9Orf72 TTCN PAM targeting sequence
  source 1..20: mol_type = other RNA
accttatcatttggctgaag

SEQ ID NO: 7445 - RNA, 20 nt, synthetic construct
  misc_feature 1..20: note = C9Orf72 TTCN PAM targeting sequence
  source 1..20: mol_type = other RNA
gccaaatgataaggttgaac

SEQ ID NO: 7446 - RNA, 20 nt, synthetic construct
  misc_feature 1..20: note = C9Orf72 TTCN PAM targeting sequence
  source 1..20: mol_type = other RNA
cgtcctttaatgttaggtct

SEQ ID NO: 7447 - RNA, 20 nt, synthetic construct
  misc_feature 1..20: note = C9Orf72 TTCN PAM targeting sequence
  source 1..20: mol_type = other RNA
accaggtctgcttacaccaa

SEQ ID NO: 7448 - RNA, 20 nt, synthetic construct
  misc_feature 1..20: note = C9Orf72 TTCN PAM targeting sequence
  source 1..20: mol_type = other RNA
taatagctagataagcccag

SEQ ID NO: 7449 - RNA, 20 nt, synthetic construct
  misc_feature 1..20: note = C9Orf72 TTCN PAM targeting sequence
  source 1..20: mol_type = other RNA
ttttaacattgccgtttttc

SEQ ID NO: 7450 - RNA, 20 nt, synthetic construct
  misc_feature 1..20: note = C9Orf72 TTCN PAM targeting sequence
  source 1..20: mol_type = other RNA
tttaggcacagagcattcct

SEQ ID NO: 7451 - RNA, 20 nt, synthetic construct
  misc_feature 1..20: note = C9Orf72 TTCN PAM targeting sequence
  source 1..20: mol_type = other RNA
tcctctccattcttttaggc

SEQ ID NO: 7452 - RNA, 20 nt, synthetic construct
  misc_feature 1..20: note = C9Orf72 TTCN PAM targeting sequence
  source 1..20: mol_type = other RNA
tcctcctctccattctttta

SEQ ID NO: 7453 - RNA, 20 nt, synthetic construct
  misc_feature 1..20: note = C9Orf72 TTCN PAM targeting sequence
  source 1..20: mol_type = other RNA
cttcttcctcctctccattc

SEQ ID NO: 7454 - RNA, 20 nt, synthetic construct
  misc_feature 1..20: note = C9Orf72 TTCN PAM targeting sequence
  source 1..20: mol_type = other RNA
tttctcttcttcctcctctc

SEQ ID NO: 7455 - RNA, 20 nt, synthetic construct
  misc_feature 1..20: note = C9Orf72 TTCN PAM targeting sequence
  source 1..20: mol_type = other RNA
tttcctttctcttcttcctc

SEQ ID NO: 7456 - RNA, 20 nt, synthetic construct
  misc_feature 1..20: note = C9Orf72 TTCN PAM targeting sequence
  source 1..20: mol_type = other RNA
ccttaagttactctttgagc

SEQ ID NO: 7457 - RNA, 20 nt, synthetic construct
  misc_feature 1..20: note = C9Orf72 TTCN PAM targeting sequence
  source 1..20: mol_type = other RNA
tggaatgtcagttcttcccc

SEQ ID NO: 7458 - RNA, 20 nt, synthetic construct
  misc_feature 1..20: note = C9Orf72 TTCN PAM targeting sequence
  source 1..20: mol_type = other RNA
aggaactggctcaaagagta

SEQ ID NO: 7459 - RNA, 20 nt, synthetic construct
  misc_feature 1..20: note = C9Orf72 TTCN PAM targeting sequence
  source 1..20: mol_type = other RNA
tccccatagaccttactatg

SEQ ID NO: 7460 - RNA, 20 nt, synthetic construct
  misc_feature 1..20: note = C9Orf72 TTCN PAM targeting sequence
  source 1..20: mol_type = other RNA
ccatagaccttactatgagg

SEQ ID NO: 7461 - RNA, 20 nt, synthetic construct
  misc_feature 1..20: note = C9Orf72 TTCN PAM targeting sequence
  source 1..20: mol_type = other RNA
gtgtggcttccaaggctttt

SEQ ID NO: 7462 - RNA, 20 nt, synthetic construct
  misc_feature 1..20: note = C9Orf72 TTCN PAM targeting sequence
  source 1..20: mol_type = other RNA
aaggcttttcagacctggct

SEQ ID NO: 7463 - RNA, 20 nt, synthetic construct
  misc_feature 1..20: note = C9Orf72 TTCN PAM targeting sequence
  source 1..20: mol_type = other RNA
gacctggctcagttgcatct

SEQ ID NO: 7464 - RNA, 20 nt, synthetic construct
  misc_feature 1..20: note = C9Orf72 TTCN PAM targeting sequence
  source 1..20: mol_type = other RNA
caccaaaccctttccaagtg

SEQ ID NO: 7465 - RNA, 20 nt, synthetic construct
  misc_feature 1..20: note = C9Orf72 TTCN PAM targeting sequence
  source 1..20: mol_type = other RNA
aagtgaagcattctctaaaa

SEQ ID NO: 7466 - RNA, 20 nt, synthetic construct
  misc_feature 1..20: note = C9Orf72 TTCN PAM targeting sequence
  source 1..20: mol_type = other RNA
cttggaaagggtttggtggg

SEQ ID NO: 7467 - RNA, 20 nt, synthetic construct
  misc_feature 1..20: note = C9Orf72 TTCN PAM targeting sequence
  source 1..20: mol_type = other RNA
ctaaaagttgcttgaggttc

SEQ ID NO: 7468 - RNA, 20 nt, synthetic construct
  misc_feature 1..20: note = C9Orf72 TTCN PAM targeting sequence
  source 1..20: mol_type = other RNA
tgacaaaatccctgtataag

SEQ ID NO: 7469 - RNA, 20 nt, synthetic construct
  misc_feature 1..20: note = C9Orf72 TTCN PAM targeting sequence
  source 1..20: mol_type = other RNA
ttatacagggattttgtcag

SEQ ID NO: 7470 - RNA, 20 nt, synthetic construct
  misc_feature 1..20: note = C9Orf72 TTCN PAM targeting sequence
  source 1..20: mol_type = other RNA
ttgtctcattacacaaattt

SEQ ID NO: 7471 - RNA, 20 nt, synthetic construct
  misc_feature 1..20: note = C9Orf72 TTCN PAM targeting sequence
  source 1..20: mol_type = other RNA
tcagaaggcacatggggaaa

SEQ ID NO: 7472 - RNA, 20 nt, synthetic construct
  misc_feature 1..20: note = C9Orf72 TTCN PAM targeting sequence
  source 1..20: mol_type = other RNA
gatgaatacaattttctttg

SEQ ID NO: 7473 - RNA, 20 nt, synthetic construct
  misc_feature 1..20: note = C9Orf72 TTCN PAM targeting sequence
  source 1..20: mol_type = other RNA
ccatgtgccttctgatgaat

SEQ ID NO: 7474 - RNA, 20 nt, synthetic construct
  misc_feature 1..20: note = C9Orf72 TTCN PAM targeting sequence
  source 1..20: mol_type = other RNA
ggagagaaatgaagccagga

SEQ ID NO: 7475 - RNA, 20 nt, synthetic construct
  misc_feature 1..20: note = C9Orf72 TTCN PAM targeting sequence
  source 1..20: mol_type = other RNA
ctccagaagcagccttatca

SEQ ID NO: 7476 - RNA, 20 nt, synthetic construct
  misc_feature 1..20: note = C9Orf72 TTCN PAM targeting sequence
  source 1..20: mol_type = other RNA
tttctctccagaagcagcct

SEQ ID NO: 7477 - RNA, 20 nt, synthetic construct
  misc_feature 1..20: note = C9Orf72 TTCN PAM targeting sequence
  source 1..20: mol_type = other RNA
tagagtatcttgccttgaac

SEQ ID NO: 7478 - RNA, 20 nt, synthetic construct
  misc_feature 1..20: note = C9Orf72 TTCN PAM targeting sequence
  source 1..20: mol_type = other RNA
aggcaagatactctaggaaa

SEQ ID NO: 7479 - RNA, 20 nt, synthetic construct
  misc_feature 1..20: note = C9Orf72 TTCN PAM targeting sequence
  source 1..20: mol_type = other RNA
agtggataagacaggttagc

SEQ ID NO: 7480 - RNA, 20 nt, synthetic construct
  misc_feature 1..20: note = C9Orf72 TTCN PAM targeting sequence
  source 1..20: mol_type = other RNA
aaaatacaaagagataaaca

SEQ ID NO: 7481 - RNA, 20 nt, synthetic construct
  misc_feature 1..20: note = C9Orf72 TTCN PAM targeting sequence
  source 1..20: mol_type = other RNA
cgccattctcccgcctcagc

SEQ ID NO: 7482 - RNA, 20 nt, synthetic construct
  misc_feature 1..20: note = C9Orf72 TTCN PAM targeting sequence
  source 1..20: mol_type = other RNA
cccgcctcagcctcccgagt

SEQ ID NO: 7483 - RNA, 20 nt, synthetic construct
  misc_feature 1..20: note = C9Orf72 TTCN PAM targeting sequence
  source 1..20: mol_type = other RNA
attaaaaatacaaaaaatta

SEQ ID NO: 7484 - RNA, 20 nt, synthetic construct
  misc_feature 1..20: note = C9Orf72 TTCN PAM targeting sequence
  source 1..20: mol_type = other RNA
ccgtgttagccagaatgatc

SEQ ID NO: 7485 - RNA, 20 nt, synthetic construct
  misc_feature 1..20: note = C9Orf72 TTCN PAM targeting sequence
  source 1..20: mol_type = other RNA
ggctaacacggtgaaacccc

SEQ ID NO: 7486 - RNA, 20 nt, synthetic construct
  misc_feature 1..20: note = C9Orf72 TTCN PAM targeting sequence
  source 1..20: mol_type = other RNA
ttcattgttaaatctaacaa

SEQ ID NO: 7487 - RNA, 20 nt, synthetic construct
  misc_feature 1..20: note = C9Orf72 TTCN PAM targeting sequence
  source 1..20: mol_type = other RNA
ttgttaaatctaacaaattt

SEQ ID NO: 7488 - RNA, 20 nt, synthetic construct
  misc_feature 1..20: note = C9Orf72 TTCN PAM targeting sequence
  source 1..20: mol_type = other RNA
ataacattttgtttcaaaat

SEQ ID NO: 7489 - RNA, 20 nt, synthetic construct
  misc_feature 1..20: note = C9Orf72 TTCN PAM targeting sequence
  source 1..20: mol_type = other RNA
aaatattttaaaaatatttt

SEQ ID NO: 7490 - RNA, 20 nt, synthetic construct
  misc_feature 1..20: note = C9Orf72 TTCN PAM targeting sequence
  source 1..20: mol_type = other RNA
tgtgcatgaaaacaattagt

SEQ ID NO: 7491 - RNA, 20 nt, synthetic construct
  misc_feature 1..20: note = C9Orf72 TTCN PAM targeting sequence
  source 1..20: mol_type = other RNA
tgcacaagaaaatattttta

SEQ ID NO: 7492 - RNA, 20 nt, synthetic construct
  misc_feature 1..20: note = C9Orf72 TTCN PAM targeting sequence
  source 1..20: mol_type = other RNA
ttttaagaattcttgactgc

SEQ ID NO: 7493 - RNA, 20 nt, synthetic construct
  misc_feature 1..20: note = C9Orf72 TTCN PAM targeting sequence
  source 1..20: mol_type = other RNA
taaaaagaaagtcagcttaa

SEQ ID NO: 7494 - RNA, 20 nt, synthetic construct
  misc_feature 1..20: note = C9Orf72 TTCN PAM targeting sequence
  source 1..20: mol_type = other RNA
tgactgcatagctcctgaga

SEQ ID NO: 7495 - RNA, 20 nt, synthetic construct
  misc_feature 1..20: note = C9Orf72 TTCN PAM targeting sequence
  source 1..20: mol_type = other RNA
caggagctatgcagtcaaga

SEQ ID NO: 7496 - RNA, 20 nt, synthetic construct
  misc_feature 1..20: note = C9Orf72 TTCN PAM targeting sequence
  source 1..20: mol_type = other RNA
atttatgattagctctgttt

SEQ ID NO: 7497 - RNA, 20 nt, synthetic construct
  misc_feature 1..20: note = C9Orf72 TTCN PAM targeting sequence
  source 1..20: mol_type = other RNA
aaggcccaattataaaggtg

SEQ ID NO: 7498 - RNA, 20 nt, synthetic construct
  misc_feature 1..20: note = C9Orf72 TTCN PAM targeting sequence
  source 1..20: mol_type = other RNA
tcgcttgctgcacagattat

SEQ ID NO: 7499 - RNA, 20 nt, synthetic construct
  misc_feature 1..20: note = C9Orf72 TTCN PAM targeting sequence
  source 1..20: mol_type = other RNA
gcccacgagcataccaaaca

SEQ ID NO: 7500 - RNA, 20 nt, synthetic construct
  misc_feature 1..20: note = C9Orf72 TTCN PAM targeting sequence
  source 1..20: mol_type = other RNA
tcttctgcccacgagcatac

SEQ ID NO: 7501 - RNA, 20 nt, synthetic construct
  misc_feature 1..20: note = C9Orf72 TTCN PAM targeting sequence
  source 1..20: mol_type = other RNA
gaggccttagttcctcttct

SEQ ID NO: 7502 - RNA, 20 nt, synthetic construct
  misc_feature 1..20: note = C9Orf72 TTCN PAM targeting sequence
  source 1..20: mol_type = other RNA
catcctattaataccagctc

SEQ ID NO: 7503 - RNA, 20 nt, synthetic construct
  misc_feature 1..20: note = C9Orf72 TTCN PAM targeting sequence
  source 1..20: mol_type = other RNA
ccctacgtcgcttcacatcc

SEQ ID NO: 7504 - RNA, 20 nt, synthetic construct
  misc_feature 1..20: note = C9Orf72 TTCN PAM targeting sequence
  source 1..20: mol_type = other RNA
tgaatgaaatcttcaaaaaa

SEQ ID NO: 7505 - RNA, 20 nt, synthetic construct
  misc_feature 1..20: note = C9Orf72 TTCN PAM targeting sequence
  source 1..20: mol_type = other RNA
tgaagggcgagcagcagcaa

SEQ ID NO: 7506 - RNA, 20 nt, synthetic construct
  misc_feature 1..20: note = C9Orf72 TTCN PAM targeting sequence
  source 1..20: mol_type = other RNA
ttcatgaagggcgagcagca

SEQ ID NO: 7507 - RNA, 20 nt, synthetic construct
  misc_feature 1..20: note = C9Orf72 TTCN PAM targeting sequence
  source 1..20: mol_type = other RNA
aaaaagctacagactctgga

SEQ ID NO: 7508 - RNA, 20 nt, synthetic construct
  misc_feature 1..20: note = C9Orf72 TTCN PAM targeting sequence
  source 1..20: mol_type = other RNA
agagtctgtagcttttttga

SEQ ID NO: 7509 - RNA, 20 nt, synthetic construct
  misc_feature 1..20: note = C9Orf72 TTCN PAM targeting sequence
  source 1..20: mol_type = other RNA
actggatttcttgtagggga

SEQ ID NO: 7510 - RNA, 20 nt, synthetic construct
  misc_feature 1..20: note = C9Orf72 TTCN PAM targeting sequence
  source 1..20: mol_type = other RNA
tgtaggggataagggtttga

SEQ ID NO: 7511 - RNA, 20 nt, synthetic construct
  misc_feature 1..20: note = C9Orf72 TTCN PAM targeting sequence
  source 1..20: mol_type = other RNA
ggccaagttcttcctgcatc

SEQ ID NO: 7512 - RNA, 20 nt, synthetic construct
  misc_feature 1..20: note = C9Orf72 TTCN PAM targeting sequence
  source 1..20: mol_type = other RNA
tcctgcatctttgaggggca

SEQ ID NO: 7513 - RNA, 20 nt, synthetic construct
  misc_feature 1..20: note = C9Orf72 TTCN PAM targeting sequence
  source 1..20: mol_type = other RNA
tgcatctttgaggggcaggg

SEQ ID NO: 7514 - RNA, 20 nt, synthetic construct
  misc_feature 1..20: note = C9Orf72 TTCN PAM targeting sequence
  source 1..20: mol_type = other RNA
cacttggggcatccctgccc

SEQ ID NO: 7515 - RNA, 20 nt, synthetic construct
  misc_feature 1..20: note = C9Orf72 TTCN PAM targeting sequence
  source 1..20: mol_type = other RNA
taatatatgctcttctcaaa

SEQ ID NO: 7516 - RNA, 20 nt, synthetic construct
  misc_feature 1..20: note = C9Orf72 TTCN PAM targeting sequence
  source 1..20: mol_type = other RNA
caaaatgcaggtcctatcac

SEQ ID NO: 7517 - RNA, 20 nt, synthetic construct
  misc_feature 1..20: note = C9Orf72 TTCN PAM targeting sequence
  source 1..20: mol_type = other RNA
actcaccctcagctccagac

SEQ ID NO: 7518 - RNA, 20 nt, synthetic construct
  misc_feature 1..20: note = C9Orf72 TTCN PAM targeting sequence
  source 1..20: mol_type = other RNA
atgttcaactcaccctcagc

SEQ ID NO: 7519 - RNA, 20 nt, synthetic construct
  misc_feature 1..20: note = C9Orf72 TTCN PAM targeting sequence
  source 1..20: mol_type = other RNA
aagggctcccattcagagga

SEQ ID NO: 7520 - RNA, 20 nt, synthetic construct
  misc_feature 1..20: note = C9Orf72 TTCN PAM targeting sequence
  source 1..20: mol_type = other RNA
gaggatcccattaactcaga

SEQ ID NO: 7521 - RNA, 20 nt, synthetic construct
  misc_feature 1..20: note = C9Orf72 TTCN PAM targeting sequence
  source 1..20: mol_type = other RNA
ctgagttaatgggatcctct

SEQ ID NO: 7522 - RNA, 20 nt, synthetic construct
  misc_feature 1..20: note = C9Orf72 TTCN PAM targeting sequence
  source 1..20: mol_type = other RNA
cgtttttctctgagttaatg

SEQ ID NO: 7523 - RNA, 20 nt, synthetic construct
  misc_feature 1..20: note = C9Orf72 TTCN PAM targeting sequence
  source 1..20: mol_type = other RNA
gtgatggctgtttattatct

SEQ ID NO: 7524 - RNA, 20 nt, synthetic construct
  misc_feature 1..20: note = C9Orf72 TTCN PAM targeting sequence
  source 1..20: mol_type = other RNA
acagcagccccctgtctgcc

SEQ ID NO: 7525 - RNA, 20 nt, synthetic construct
  misc_feature 1..20: note = C9Orf72 TTCN PAM targeting sequence
  source 1..20: mol_type = other RNA
caaccccctacatggcagac

SEQ ID NO: 7526 - RNA, 20 nt, synthetic construct
  misc_feature 1..20: note = C9Orf72 TTCN PAM targeting sequence
  source 1..20: mol_type = other RNA
gttataatgggtctatgcta

SEQ ID NO: 7527 - RNA, 20 nt, synthetic construct
  misc_feature 1..20: note = C9Orf72 TTCN PAM targeting sequence
  source 1..20: mol_type = other RNA
tactcccgcctgagtttttt

SEQ ID NO: 7528 - RNA, 20 nt, synthetic construct
  misc_feature 1..20: note = C9Orf72 TTCN PAM targeting sequence
  source 1..20: mol_type = other RNA
ccctgtgcaaaactgatgag

SEQ ID NO: 7529 - RNA, 20 nt, synthetic construct
  misc_feature 1..20: note = C9Orf72 TTCN PAM targeting sequence
  source 1..20: mol_type = other RNA
tactgcctcccactcatcag

SEQ ID NO: 7530 - RNA, 20 nt, synthetic construct
  misc_feature 1..20: note = C9Orf72 TTCN PAM targeting sequence
  source 1..20: mol_type = other RNA
gtttgctctcttcttactgc

SEQ ID NO: 7531 - RNA, 20 nt, synthetic construct
  misc_feature 1..20: note = C9Orf72 TTCN PAM targeting sequence
  source 1..20: mol_type = other RNA
tttatttttactttaaataa

SEQ ID NO: 7532 - RNA, 20 nt, synthetic construct
  misc_feature 1..20: note = C9Orf72 TTCN PAM targeting sequence
  source 1..20: mol_type = other RNA
ttatgctttttatttaaagt

SEQ ID NO: 7533 - RNA, 20 nt, synthetic construct
  misc_feature 1..20: note = C9Orf72 TTCN PAM targeting sequence
  source 1..20: mol_type = other RNA
aattctttatgctttttatt

SEQ ID NO: 7534 - RNA, 20 nt, synthetic construct
  misc_feature 1..20: note = C9Orf72 TTCN PAM targeting sequence
  source 1..20: mol_type = other RNA
accttcgagtcactttaacc

SEQ ID NO: 7535 - RNA, 20 nt, synthetic construct
  misc_feature 1..20: note = C9Orf72 TTCN PAM targeting sequence
  source 1..20: mol_type = other RNA
agtcactttaacctatccac

SEQ ID NO: 7536 - RNA, 20 nt, synthetic construct
  misc_feature 1..20: note = C9Orf72 TTCN PAM targeting sequence
  source 1..20: mol_type = other RNA
tgaatagcagtcccaggata

SEQ ID NO: 7537 - RNA, 20 nt, synthetic construct
  misc_feature 1..20: note = C9Orf72 TTCN PAM targeting sequence
  source 1..20: mol_type = other RNA
tgaagcctttatggtggccc

SEQ ID NO: 7538 - RNA, 20 nt, synthetic construct
  misc_feature 1..20: note = C9Orf72 TTCN PAM targeting sequence
  source 1..20: mol_type = other RNA
cttctgtttgcttgttcctg

SEQ ID NO: 7539 - RNA, 20 nt, synthetic construct
  misc_feature 1..20: note = C9Orf72 TTCN PAM targeting sequence
  source 1..20: mol_type = other RNA
gtttgcttgttcctgtgcat

SEQ ID NO: 7540 - RNA, 20 nt, synthetic construct
  misc_feature 1..20: note = C9Orf72 TTCN PAM targeting sequence
  source 1..20: mol_type = other RNA
tgtgcatttcatgtctgccc

SEQ ID NO: 7541 - RNA, 20 nt, synthetic construct
  misc_feature 1..20: note = C9Orf72 TTCN PAM targeting sequence
  source 1..20: mol_type = other RNA
tgtctgcccacctcctgagc

SEQ ID NO: 7542 - RNA, 20 nt, synthetic construct
  misc_feature 1..20: note = C9Orf72 TTCN PAM targeting sequence
  source 1..20: mol_type = other RNA
cagggcagggtagaggaggc

SEQ ID NO: 7543 - RNA, 20 nt, synthetic construct
  misc_feature 1..20: note = C9Orf72 TTCN PAM targeting sequence
  source 1..20: mol_type = other RNA
atgcatcctcaggctttttc

SEQ ID NO: 7544 - RNA, 20 nt, synthetic construct
  misc_feature 1..20: note = C9Orf72 TTCN PAM targeting sequence
  source 1..20: mol_type = other RNA
gcaggctgtcaaacccaggc

SEQ ID NO: 7545 - RNA, 20 nt, synthetic construct
  misc_feature 1..20: note = C9Orf72 TTCN PAM targeting sequence
  source 1..20: mol_type = other RNA
aaagtggatacctcaacctg

SEQ ID NO: 7546 - RNA, 20 nt, synthetic construct
  misc_feature 1..20: note = C9Orf72 TTCN PAM targeting sequence
  source 1..20: mol_type = other RNA
attaactgaggtataatggt

SEQ ID NO: 7547 - RNA, 20 nt, synthetic construct
  misc_feature 1..20: note = C9Orf72 TTCN PAM targeting sequence
  source 1..20: mol_type = other RNA
tgtgttgtcagggttaaagg

SEQ ID NO: 7548 - RNA, 20 nt, synthetic construct
  misc_feature 1..20: note = C9Orf72 TTCN PAM targeting sequence
  source 1..20: mol_type = other RNA
ggggtggttcatgtgttgtc

SEQ ID NO: 7549 - RNA, 20 nt, synthetic construct
  misc_feature 1..20: note = C9Orf72 TTCN PAM targeting sequence
  source 1..20: mol_type = other RNA
agacaagtgttttgcgtggc

SEQ ID NO: 7550 - RNA, 20 nt, synthetic construct
  misc_feature 1..20: note = C9Orf72 TTCN PAM targeting sequence
  source 1..20: mol_type = other RNA
gctggatgtctcaagggcat

SEQ ID NO: 7551 - RNA, 20 nt, synthetic construct
  misc_feature 1..20: note = C9Orf72 TTCN PAM targeting sequence
  source 1..20: mol_type = other RNA
atatatcacttattctacaa

SEQ ID NO: 7552 - RNA, 20 nt, synthetic construct
  misc_feature 1..20: note = C9Orf72 TTCN PAM targeting sequence
  source 1..20: mol_type = other RNA
acaatattaactcatttaat

SEQ ID NO: 7553 - RNA, 20 nt, synthetic construct
  misc_feature 1..20: note = C9Orf72 TTCN PAM targeting sequence
  source 1..20: mol_type = other RNA
aggattaaatgagttaatat

SEQ ID NO: 7554 - RNA, 20 nt, synthetic construct
  misc_feature 1..20: note = C9Orf72 TTCN PAM targeting sequence
  source 1..20: mol_type = other RNA
tatcttaacagataaagaag

SEQ ID NO: 7555 - RNA, 20 nt, synthetic construct
  misc_feature 1..20: note = C9Orf72 TTCN PAM targeting sequence
  source 1..20: mol_type = other RNA
ttatctgttaagataggaat

SEQ ID NO: 7556 - RNA, 20 nt, synthetic construct
  misc_feature 1..20: note = C9Orf72 TTCN PAM targeting sequence
  source 1..20: mol_type = other RNA
cagcttctttatctgttaag

SEQ ID NO: 7557 - RNA, 20 nt, synthetic construct
  misc_feature 1..20: note = C9Orf72 TTCN PAM targeting sequence
  source 1..20: mol_type = other RNA
tgtgtaaaatgagctccaca

SEQ ID NO: 7558 - RNA, 20 nt, synthetic construct
  misc_feature 1..20: note = C9Orf72 TTCN PAM targeting sequence
  source 1..20: mol_type = other RNA
ttcctgtgtaaaatgagctc

SEQ ID NO: 7559 - RNA, 20 nt, synthetic construct
  misc_feature 1..20: note = C9Orf72 TTCN PAM targeting sequence
  source 1..20: mol_type = other RNA
ctgaggttaggtgacttgct

SEQ ID NO: 7560 - RNA, 20 nt, synthetic construct
  misc_feature 1..20: note = C9Orf72 TTCN PAM targeting sequence
  source 1..20: mol_type = other RNA
gcaagcaagtcacctaacct

SEQ ID NO: 7561 - RNA, 20 nt, synthetic construct
  misc_feature 1..20: note = C9Orf72 TTCN PAM targeting sequence
  source 1..20: mol_type = other RNA
ggttctgcaagcaagtcacc

SEQ ID NO: 7562 - RNA, 20 nt, synthetic construct
  misc_feature 1..20: note = C9Orf72 TTCN PAM targeting sequence
  source 1..20: mol_type = other RNA
gttctggttctgcaagcaag

SEQ ID NO: 7563 - RNA, 20 nt, synthetic construct
  misc_feature 1..20: note = C9Orf72 TTCN PAM targeting sequence
  source 1..20: mol_type = other RNA
tttctaggactcaaggcctc

SEQ ID NO: 7564 - RNA, 20 nt, synthetic construct
  misc_feature 1..20: note = C9Orf72 TTCN PAM targeting sequence
  source 1..20: mol_type = other RNA
aggactcaaggcctctccaa

SEQ ID NO: 7565 - RNA, 20 nt, synthetic construct
  misc_feature 1..20: note = C9Orf72 TTCN PAM targeting sequence
  source 1..20: mol_type = other RNA
gttaagagctacatctgtct

SEQ ID NO: 7566 - RNA, 20 nt, synthetic construct
  misc_feature 1..20: note = C9Orf72 TTCN PAM targeting sequence
  source 1..20: mol_type = other RNA
gtctctggaatgtctccaat

SEQ ID NO: 7567 - RNA, 20 nt, synthetic construct
  misc_feature 1..20: note = C9Orf72 TTCN PAM targeting sequence
  source 1..20: mol_type = other RNA
agagacagaatcagtgagat

SEQ ID NO: 7568 - RNA, 20 nt, synthetic construct
  misc_feature 1..20: note = C9Orf72 TTCN PAM targeting sequence
  source 1..20: mol_type = other RNA
ttgcactccaatggctcctg

SEQ ID NO: 7569 - RNA, 20 nt, synthetic construct
  misc_feature 1..20: note = C9Orf72 TTCN PAM targeting sequence
  source 1..20: mol_type = other RNA
ctttcatatcgacttttgtg

SEQ ID NO: 7570 - RNA, 20 nt, synthetic construct
  misc_feature 1..20: note = C9Orf72 TTCN PAM targeting sequence
  source 1..20: mol_type = other RNA
tatcgacttttgtgtggacc

SEQ ID NO: 7571 - RNA, 20 nt, synthetic construct
  misc_feature 1..20: note = C9Orf72 TTCN PAM targeting sequence
  source 1..20: mol_type = other RNA
cttccctctctaccctcatg

SEQ ID NO: 7572 - RNA, 20 nt, synthetic construct
  misc_feature 1..20: note = C9Orf72 TTCN PAM targeting sequence
  source 1..20: mol_type = other RNA
ctctctaccctcatggaaaa

SEQ ID NO: 7573 - RNA, 20 nt, synthetic construct
  misc_feature 1..20: note = C9Orf72 TTCN PAM targeting sequence
  source 1..20: mol_type = other RNA
atgagggtagagagggaaga

SEQ ID NO: 7574 - RNA, 20 nt, synthetic construct
  misc_feature 1..20: note = C9Orf72 TTCN PAM targeting sequence
  source 1..20: mol_type = other RNA
ttaaaacacagctctacaaa

SEQ ID NO: 7575 - RNA, 20 nt, synthetic construct
  misc_feature 1..20: note = C9Orf72 TTCN PAM targeting sequence
  source 1..20: mol_type = other RNA
gctgttgacattttgtagag

SEQ ID NO: 7576 - RNA, 20 nt, synthetic construct
  misc_feature 1..20: note = C9Orf72 TTCN PAM targeting sequence
  source 1..20: mol_type = other RNA
cccttgttctcttctgtgtt

SEQ ID NO: 7577 - RNA, 20 nt, synthetic construct
  misc_feature 1..20: note = C9Orf72 TTCN PAM targeting sequence
  source 1..20: mol_type = other RNA
cttctgtgtttattgagtta

SEQ ID NO: 7578 - RNA, 20 nt, synthetic construct
  misc_feature 1..20: note = C9Orf72 TTCN PAM targeting sequence
  source 1..20: mol_type = other RNA
gtgtttattgagttaaaggc

SEQ ID NO: 7579 - RNA, 20 nt, synthetic construct
  misc_feature 1..20: note = C9Orf72 TTCN PAM targeting sequence
  source 1..20: mol_type = other RNA
ttttgtaataggaaaaaaat

SEQ ID NO: 7580 - RNA, 20 nt, synthetic construct
  misc_feature 1..20: note = C9Orf72 TTCN PAM targeting sequence
  source 1..20: mol_type = other RNA
tattacaaaaggaatataat

SEQ ID NO: 7581 - RNA, 20 nt, synthetic construct
  misc_feature 1..20: note = C9Orf72 TTCN PAM targeting sequence
  source 1..20: mol_type = other RNA
gccatttttttcctattaca

SEQ ID NO: 7582 - RNA, 20 nt, synthetic construct
  misc_feature 1..20: note = C9Orf72 TTCN PAM targeting sequence
  source 1..20: mol_type = other RNA
gctcagtgagtttgcactta

SEQ ID NO: 7583 - RNA, 20 nt, synthetic construct
  misc_feature 1..20: note = C9Orf72 TTCN PAM targeting sequence
  source 1..20: mol_type = other RNA
agactttttacaaagagagt

SEQ ID NO: 7584 - RNA, 20 nt, synthetic construct
  misc_feature 1..20: note = C9Orf72 TTCN PAM targeting sequence
  source 1..20: mol_type = other RNA
atcaatatttcttgagcact

SEQ ID NO: 7585 - RNA, 20 nt, synthetic construct
  misc_feature 1..20: note = C9Orf72 TTCN PAM targeting sequence
  source 1..20: mol_type = other RNA
tgagcacttggtacactagg

SEQ ID NO: 7586 - RNA, 20 nt, synthetic construct
  misc_feature 1..20: note = C9Orf72 TTCN PAM targeting sequence
  source 1..20: mol_type = other RNA
gtaatgaatgaaagatataa

SEQ ID NO: 7587 - RNA, 20 nt, synthetic construct
  misc_feature 1..20: note = C9Orf72 TTCN PAM targeting sequence
  source 1..20: mol_type = other RNA
ttacagaaaacccagcctag

SEQ ID NO: 7588 - RNA, 20 nt, synthetic construct
  misc_feature 1..20: note = C9Orf72 TTCN PAM targeting sequence
  source 1..20: mol_type = other RNA
ttcattacagaaaacccagc

SEQ ID NO: 7589 - RNA, 20 nt, synthetic construct
  misc_feature 1..20: note = C9Orf72 TTCN PAM targeting sequence
  source 1..20: mol_type = other RNA
cttagtggagcttacagtct

SEQ ID NO: 7590 - RNA, 20 nt, synthetic construct
  misc_feature 1..20: note = C9Orf72 TTCN PAM targeting sequence
  source 1..20: mol_type = other RNA
cccccaacagactgtaagct

SEQ ID NO: 7591 - RNA, 20 nt, synthetic construct
  misc_feature 1..20: note = C9Orf72 TTCN PAM targeting sequence
  source 1..20: mol_type = other RNA
tggcacacagcacaatttgt

SEQ ID NO: 7592 - RNA, 20 nt, synthetic construct
  misc_feature 1..20: note = C9Orf72 TTCN PAM targeting sequence
  source 1..20: mol_type = other RNA
ttcttggcacacagcacaat

SEQ ID NO: 7593 - RNA, 20 nt, synthetic construct
  misc_feature 1..20: note = C9Orf72 TTCN PAM targeting sequence
  source 1..20: mol_type = other RNA
atggtggaccaggaatgcct

SEQ ID NO: 7594 - RNA, 20 nt, synthetic construct
  misc_feature 1..20: note = C9Orf72 TTCN PAM targeting sequence
  source 1..20: mol_type = other RNA
tggtccaccatcgaaactag

SEQ ID NO: 7595 - RNA, 20 nt, synthetic construct
  misc_feature 1..20: note = C9Orf72 TTCN PAM targeting sequence
  source 1..20: mol_type = other RNA
tcaaagaggcattcctggtc

SEQ ID NO: 7596 - RNA, 20 nt, synthetic construct
  misc_feature 1..20: note = C9Orf72 TTCN PAM targeting sequence
  source 1..20: mol_type = other RNA
agtctctgtgcacaagtatc

SEQ ID NO: 7597 - RNA, 20 nt, synthetic construct
  misc_feature 1..20: note = C9Orf72 TTCN PAM targeting sequence
  source 1..20: mol_type = other RNA
gggtggcagtattagaagca

SEQ ID NO: 7598 - RNA, 20 nt, synthetic construct
  misc_feature 1..20: note = C9Orf72 TTCN PAM targeting sequence
  source 1..20: mol_type = other RNA
aatactgccaccctgaatcc

SEQ ID NO: 7599 - RNA, 20 nt, synthetic construct
  misc_feature 1..20: note = C9Orf72 TTCN PAM targeting sequence
  source 1..20: mol_type = other RNA
tactctttgacttgcttcta

SEQ ID NO: 7600 - RNA, 20 nt, synthetic construct
  misc_feature 1..20: note = C9Orf72 TTCN PAM targeting sequence
  source 1..20: mol_type = other RNA
tcatactctttgacttgctt

SEQ ID NO: 7601 - RNA, 20 nt, synthetic construct
  misc_feature 1..20: note = C9Orf72 TTCN PAM targeting sequence
  source 1..20: mol_type = other RNA
aacgcaggaggaccggtaag

SEQ ID NO: 7602 - RNA, 20 nt, synthetic construct
  misc_feature 1..20: note = C9Orf72 TTCN PAM targeting sequence
  source 1..20: mol_type = other RNA
cacttaccggtcctcctgcg

SEQ ID NO: 7603 - RNA, 20 nt, synthetic construct
  misc_feature 1..20: note = C9Orf72 TTCN PAM targeting sequence
  source 1..20: mol_type = other RNA
tttgatgaaatctattaaga

SEQ ID NO: 7604 - RNA, 20 nt, synthetic construct
  misc_feature 1..20: note = C9Orf72 TTCN PAM targeting sequence
  source 1..20: mol_type = other RNA
tcaaatgaaactttagatag

SEQ ID NO: 7605 - RNA, 20 nt, synthetic construct
  misc_feature 1..20: note = C9Orf72 TTCN PAM targeting sequence
  source 1..20: mol_type = other RNA
taaaagtcttaatagatttc

SEQ ID NO: 7606 - RNA, 20 nt, synthetic construct
  misc_feature 1..20: note = C9Orf72 TTCN PAM targeting sequence
  source 1..20: mol_type = other RNA
tcttaaaagtcttaatagat

SEQ ID NO: 7607 - RNA, 20 nt, synthetic construct
  misc_feature 1..20: note = C9Orf72 TTCN PAM targeting sequence
  source 1..20: mol_type = other RNA
agatcttcttcttaaaagtc

SEQ ID NO: 7608 - RNA, 20 nt, synthetic construct
  misc_feature 1..20: note = C9Orf72 TTCN PAM targeting sequence
  source 1..20: mol_type = other RNA
tgttccagatcttcttctta

SEQ ID NO: 7609 - RNA, 20 nt, synthetic construct
  misc_feature 1..20: note = C9Orf72 TTCN PAM targeting sequence
  source 1..20: mol_type = other RNA
atcctattaattgtttggat

SEQ ID NO: 7610 - RNA, 20 nt, synthetic construct
  misc_feature 1..20: note = C9Orf72 TTCN PAM targeting sequence
  source 1..20: mol_type = other RNA
gcctctggctcaaatttgaa

SEQ ID NO: 7611 - RNA, 20 nt, synthetic construct
  misc_feature 1..20: note = C9Orf72 TTCN PAM targeting sequence
  source 1..20: mol_type = other RNA
aatttgagccagaggcagaa

SEQ ID NO: 7612 - RNA, 20 nt, synthetic construct
  misc_feature 1..20: note = C9Orf72 TTCN PAM targeting sequence
  source 1..20: mol_type = other RNA
aagcattatggaggcaatga

SEQ ID NO: 7613 - RNA, 20 nt, synthetic construct
  misc_feature 1..20: note = C9Orf72 TTCN PAM targeting sequence
  source 1..20: mol_type = other RNA
ttgcctccataatgctttga

SEQ ID NO: 7614 - RNA, 20 nt, synthetic construct
  misc_feature 1..20: note = C9Orf72 TTCN PAM targeting sequence
  source 1..20: mol_type = other RNA
attcattgcctccataatgc

SEQ ID NO: 7615 - RNA, 20 nt, synthetic construct
  misc_feature 1..20: note = C9Orf72 TTCN PAM targeting sequence
  source 1..20: mol_type = other RNA
tgtgtcttgagtaatcacat

SEQ ID NO: 7616 - RNA, 20 nt, synthetic construct
  misc_feature 1..20: note = C9Orf72 TTCN PAM targeting sequence
  source 1..20: mol_type = other RNA
tttgggatgtgattactcaa

SEQ ID NO: 7617 - RNA, 20 nt, synthetic construct
  misc_feature 1..20: note = C9Orf72 TTCN PAM targeting sequence
  source 1..20: mol_type = other RNA
tattcgattaaaactttcac

SEQ ID NO: 7618 - RNA, 20 nt, synthetic construct
  misc_feature 1..20: note = C9Orf72 TTCN PAM targeting sequence
  source 1..20: mol_type = other RNA
attaaaactttcacctggca

SEQ ID NO: 7619 - RNA, 20 nt, synthetic construct
  misc_feature 1..20: note = C9Orf72 TTCN PAM targeting sequence
  source 1..20: mol_type = other RNA
cctggcattcaagggcccgc

SEQ ID NO: 7620 - RNA, 20 nt, synthetic construct
  misc_feature 1..20: note = C9Orf72 TTCN PAM targeting sequence
  source 1..20: mol_type = other RNA
agggcccgcattctgattac

SEQ ID NO: 7621 - RNA, 20 nt, synthetic construct
  misc_feature 1..20: note = C9Orf72 TTCN PAM targeting sequence
  source 1..20: mol_type = other RNA
gattacaatctaattttcca

SEQ ID NO: 7622 - RNA, 20 nt, synthetic construct
  misc_feature 1..20: note = C9Orf72 TTCN PAM targeting sequence
  source 1..20: mol_type = other RNA
agctttatgttagttagctc

SEQ ID NO: 7623 - RNA, 20 nt, synthetic construct
  misc_feature 1..20: note = C9Orf72 TTCN PAM targeting sequence
  source 1..20: mol_type = other RNA
agagatgagaagcagaaatc

SEQ ID NO: 7624 - RNA, 20 nt, synthetic construct
  misc_feature 1..20: note = C9Orf72 TTCN PAM targeting sequence
  source 1..20: mol_type = other RNA
catctctagaaggccagagc

SEQ ID NO: 7625 - RNA, 20 nt, synthetic construct
  misc_feature 1..20: note = C9Orf72 TTCN PAM targeting sequence
  source 1..20: mol_type = other RNA
gcttctcatctctagaaggc

SEQ ID NO: 7626 - RNA, 20 nt, synthetic construct
  misc_feature 1..20: note = C9Orf72 TTCN PAM targeting sequence
  source 1..20: mol_type = other RNA
ccccacagtcacactagcct

SEQ ID NO: 7627 - RNA, 20 nt, synthetic construct
  misc_feature 1..20: note = C9Orf72 TTCN PAM targeting sequence
  source 1..20: mol_type = other RNA
taaagcaccacttctcccca

SEQ ID NO: 7628 - RNA, 20 nt, synthetic construct
  misc_feature 1..20: note = C9Orf72 TTCN PAM targeting sequence
  source 1..20: mol_type = other RNA
cattaaattcttaaagcacc

SEQ ID NO: 7629 - RNA, 20 nt, synthetic construct
  misc_feature 1..20: note = C9Orf72 TTCN PAM targeting sequence
  source 1..20: mol_type = other RNA
ttattcccattaaattctta

SEQ ID NO: 7630 - RNA, 20 nt, synthetic construct
  misc_feature 1..20: note = C9Orf72 TTCN PAM targeting sequence
  source 1..20: mol_type = other RNA
tatgaatctaaacaggagtt

SEQ ID NO: 7631 - RNA, 20 nt, synthetic construct
  misc_feature 1..20: note = C9Orf72 TTCN PAM targeting sequence
  source 1..20: mol_type = other RNA
tatgaacctcatattttctt

SEQ ID NO: 7632 - RNA, 20 nt, synthetic construct
  misc_feature 1..20: note = C9Orf72 TTCN PAM targeting sequence
  source 1..20: mol_type = other RNA
actttatacatggccaagtc

SEQ ID NO: 7633 - RNA, 20 nt, synthetic construct
  misc_feature 1..20: note = C9Orf72 TTCN PAM targeting sequence
  source 1..20: mol_type = other RNA
taagctgccttgagtctttc

SEQ ID NO: 7634 - RNA, 20 nt, synthetic construct
  misc_feature 1..20: note = C9Orf72 TTCN PAM targeting sequence
  source 1..20: mol_type = other RNA
agaccagcctggccaacatg

SEQ ID NO: 7635 - RNA, 20 nt, synthetic construct
  misc_feature 1..20: note = C9Orf72 TTCN PAM targeting sequence
  source 1..20: mol_type = other RNA
ccatgttggccaggctggtc

SEQ ID NO: 7636 - RNA, 20 nt, synthetic construct
  misc_feature 1..20: note = C9Orf72 TTCN PAM targeting sequence
  source 1..20: mol_type = other RNA
agctactcaggaggctgagg

SEQ ID NO: 7637 - RNA, 20 nt, synthetic construct
  misc_feature 1..20: note = C9Orf72 TTCN PAM targeting sequence
  source 1..20: mol_type = other RNA
tcagcctcctgagtagctgg

SEQ ID NO: 7638 - RNA, 20 nt, synthetic construct
  misc_feature 1..20: note = C9Orf72 TTCN PAM targeting sequence
  source 1..20: mol_type = other RNA
cgttcctcagcctcctgagt

SEQ ID NO: 7639 - RNA, 20 nt, synthetic construct
  misc_feature 1..20: note = C9Orf72 TTCN PAM targeting sequence
  source 1..20: mol_type = other RNA
agtgattctcgttcctcagc

SEQ ID NO: 7640 - RNA, 20 nt, synthetic construct
  misc_feature 1..20: note = C9Orf72 TTCN PAM targeting sequence
  source 1..20: mol_type = other RNA
cctcccaggttcaagtgatt

SEQ ID NO: 7641 - RNA, 20 nt, synthetic construct
  misc_feature 1..20: note = C9Orf72 TTCN PAM targeting sequence
  source 1..20: mol_type = other RNA
gtctcaaaaataaataaata

SEQ ID NO: 7642 - RNA, 20 nt, synthetic construct
  misc_feature 1..20: note = C9Orf72 TTCN PAM targeting sequence
  source 1..20: mol_type = other RNA
tagcgttgggaggcaattct

SEQ ID NO: 7643 - RNA, 20 nt, synthetic construct
  misc_feature 1..20: note = C9Orf72 TTCN PAM targeting sequence
  source 1..20: mol_type = other RNA
ccataacgtttctataagtc

SEQ ID NO: 7644 - RNA, 20 nt, synthetic construct
  misc_feature 1..20: note = C9Orf72 TTCN PAM targeting sequence
  source 1..20: mol_type = other RNA
ataagtcatgccagactata

SEQ ID NO: 7645 - RNA, 20 nt, synthetic construct
  misc_feature 1..20: note = C9Orf72 TTCN PAM targeting sequence
  source 1..20: mol_type = other RNA
gggatatttgcatagcaaac

SEQ ID NO: 7646 - RNA, 20 nt, synthetic construct
  misc_feature 1..20: note = C9Orf72 TTCN PAM targeting sequence
  source 1..20: mol_type = other RNA
taggctgtttgctatgcaaa

SEQ ID NO: 7647 - RNA, 20 nt, synthetic construct
  misc_feature 1..20: note = C9Orf72 TTCN PAM targeting sequence
  source 1..20: mol_type = other RNA
cctgcagatcagaaggcaca

SEQ ID NO: 7648 - RNA, 20 nt, synthetic construct
  misc_feature 1..20: note = C9Orf72 TTCN PAM targeting sequence
  source 1..20: mol_type = other RNA
gatctgcaggggaacactat

SEQ ID NO: 7649 - RNA, 20 nt, synthetic construct
  misc_feature 1..20: note = C9Orf72 TTCN PAM targeting sequence
  source 1..20: mol_type = other RNA
tgactagcatagtaaagaca

SEQ ID NO: 7650 - RNA, 20 nt, synthetic construct
  misc_feature 1..20: note = C9Orf72 TTCN PAM targeting sequence
  source 1..20: mol_type = other RNA
ctgtctttactatgctagtc

SEQ ID NO: 7651 - RNA, 20 nt, synthetic construct
  misc_feature 1..20: note = C9Orf72 TTCN PAM targeting sequence
  source 1..20: mol_type = other RNA
agggtaataagctttattac

SEQ ID NO: 7652 - RNA, 20 nt, synthetic construct
  misc_feature 1..20: note = C9Orf72 TTCN PAM targeting sequence
  source 1..20: mol_type = other RNA
agggtaataaagcttattac

SEQ ID NO: 7653 - RNA, 20 nt, synthetic construct
  misc_feature 1..20: note = C9Orf72 TTCN PAM targeting sequence
  source 1..20: mol_type = other RNA
aaagctcagtgttgctcagc

SEQ ID NO: 7654 - RNA, 20 nt, synthetic construct
  misc_feature 1..20: note = C9Orf72 TTCN PAM targeting sequence
  source 1..20: mol_type = other RNA
cagctgagcaacactgagct

SEQ ID NO: 7655 - RNA, 20 nt, synthetic construct
  misc_feature 1..20: note = C9Orf72 TTCN PAM targeting sequence
  source 1..20: mol_type = other RNA
ccctggccccccaggtctca

SEQ ID NO: 7656 - RNA, 20 nt, synthetic construct
  misc_feature 1..20: note = C9Orf72 TTCN PAM targeting sequence
  source 1..20: mol_type = other RNA
ttatttcctttccagctgat

SEQ ID NO: 7657 - RNA, 20 nt, synthetic construct
  misc_feature 1..20: note = C9Orf72 TTCN PAM targeting sequence
  source 1..20: mol_type = other RNA
tttccagctgatctagtagc

SEQ ID NO: 7658 - RNA, 20 nt, synthetic construct
  misc_feature 1..20: note = C9Orf72 TTCN PAM targeting sequence
  source 1..20: mol_type = other RNA
agctgatctagtagctttct

SEQ ID NO: 7659 - RNA, 20 nt, synthetic construct
  misc_feature 1..20: note = C9Orf72 TTCN PAM targeting sequence
  source 1..20: mol_type = other RNA
attctaagctgctccttagg

SEQ ID NO: 7660 - RNA, 20 nt, synthetic construct
  misc_feature 1..20: note = C9Orf72 TTCN PAM targeting sequence
  source 1..20: mol_type = other RNA
aagctgctccttaggggctg

SEQ ID NO: 7661 - RNA, 20 nt, synthetic construct
  misc_feature 1..20: note = C9Orf72 TTCN PAM targeting sequence
  source 1..20: mol_type = other RNA
aagggtcaggtggccaagca

SEQ ID NO: 7662 - RNA, 20 nt, synthetic construct
  misc_feature 1..20: note = C9Orf72 TTCN PAM targeting sequence
  source 1..20: mol_type = other RNA
aagatttttcacttttgcgt

SEQ ID NO: 7663 - RNA, 20 nt, synthetic construct
  misc_feature 1..20: note = C9Orf72 TTCN PAM targeting sequence
  source 1..20: mol_type = other RNA
aactcttgcttctaagggtc

SEQ ID NO: 7664 - RNA, 20 nt, synthetic construct
  misc_feature 1..20: note = C9Orf72 TTCN PAM targeting sequence
  source 1..20: mol_type = other RNA
cttttgcgtatgccattaaa

SEQ ID NO: 7665 - RNA, 20 nt, synthetic construct
  misc_feature 1..20: note = C9Orf72 TTCN PAM targeting sequence
  source 1..20: mol_type = other RNA
atagattcttcatgtacatc

SEQ ID NO: 7666 - RNA, 20 nt, synthetic construct
  misc_feature 1..20: note = C9Orf72 TTCN PAM targeting sequence
  source 1..20: mol_type = other RNA
tcatgtacatctttctcacc

SEQ ID NO: 7667 - RNA, 20 nt, synthetic construct
  misc_feature 1..20: note = C9Orf72 TTCN PAM targeting sequence
  source 1..20: mol_type = other RNA
tgtacatctttctcaccctg

SEQ ID NO: 7668 - RNA, 20 nt, synthetic construct
  misc_feature 1..20: note = C9Orf72 TTCN PAM targeting sequence
  source 1..20: mol_type = other RNA
caccctgatgctatggtctc

SEQ ID NO: 7669 - RNA, 20 nt, synthetic construct
  misc_feature 1..20: note = C9Orf72 TTCN PAM targeting sequence
  source 1..20: mol_type = other RNA
ctgcttattgattctgctat

SEQ ID NO: 7670 - RNA, 20 nt, synthetic construct
  misc_feature 1..20: note = C9Orf72 TTCN PAM targeting sequence
  source 1..20: mol_type = other RNA
gctatgctatcatcatggct

SEQ ID NO: 7671 - RNA, 20 nt, synthetic construct
  misc_feature 1..20: note = C9Orf72 TTCN PAM targeting sequence
  source 1..20: mol_type = other RNA
gccttctcttaacttggtct

SEQ ID NO: 7672 - RNA, 20 nt, synthetic construct
  misc_feature 1..20: note = C9Orf72 TTCN PAM targeting sequence
  source 1..20: mol_type = other RNA
cttaacttggtcttgctcat

SEQ ID NO: 7673 - RNA, 20 nt, synthetic construct
  misc_feature 1..20: note = C9Orf72 TTCN PAM targeting sequence
  source 1..20: mol_type = other RNA
cttctgactgtctgataatc

SEQ ID NO: 7674 - RNA, 20 nt, synthetic construct
  misc_feature 1..20: note = C9Orf72 TTCN PAM targeting sequence
  source 1..20: mol_type = other RNA
gactgtctgataatctttac

SEQ ID NO: 7675 - RNA, 20 nt, synthetic construct
  misc_feature 1..20: note = C9Orf72 TTCN PAM targeting sequence
  source 1..20: mol_type = other RNA
aaaaccaaacttctgagaga

SEQ ID NO: 7676 - RNA, 20 nt, synthetic construct
  misc_feature 1..20: note = C9Orf72 TTCN PAM targeting sequence
  source 1..20: mol_type = other RNA
gagagaaataacctattggg

SEQ ID NO: 7677 - RNA, 20 nt, synthetic construct
  misc_feature 1..20: note = C9Orf72 TTCN PAM targeting sequence
  source 1..20: mol_type = other RNA
ctcagaagtttggttttgga

SEQ ID NO: 7678 - RNA, 20 nt, synthetic construct
  misc_feature 1..20: note = C9Orf72 TTCN PAM targeting sequence
  source 1..20: mol_type = other RNA
gggacacattgtcccaatag

SEQ ID NO: 7679 - RNA, 20 nt, synthetic construct
  misc_feature 1..20: note = C9Orf72 TTCN PAM targeting sequence
  source 1..20: mol_type = other RNA
aggcaggccagtccctaggt

SEQ ID NO: 7680 - RNA, 20 nt, synthetic construct
  misc_feature 1..20: note = C9Orf72 TTCN PAM targeting sequence
  source 1..20: mol_type = other RNA
gcctcaaacctgccctacta

SEQ ID NO: 7681 - RNA, 20 nt, synthetic construct
  misc_feature 1..20: note = C9Orf72 TTCN PAM targeting sequence
  source 1..20: mol_type = other RNA
ctgtgtttcccctgcagctg

SEQ ID NO: 7682 - RNA, 20 nt, synthetic construct
  misc_feature 1..20: note = C9Orf72 TTCN PAM targeting sequence
  source 1..20: mol_type = other RNA
cctgcagctggaagtctgca

SEQ ID NO: 7683 - RNA, 20 nt, synthetic construct
  misc_feature 1..20: note = C9Orf72 TTCN PAM targeting sequence
  source 1..20: mol_type = other RNA
agctgcaggggaaacacaga

SEQ ID NO: 7684 - RNA, 20 nt, synthetic construct
  misc_feature 1..20: note = C9Orf72 TTCN PAM targeting sequence
  source 1..20: mol_type = other RNA
tattatgttgtatccatggg

SEQ ID NO: 7685 - RNA, 20 nt, synthetic construct
  misc_feature 1..20: note = C9Orf72 TTCN PAM targeting sequence
  source 1..20: mol_type = other RNA
gcctgatgctgtccctcctc

SEQ ID NO: 7686 - RNA, 20 nt, synthetic construct
  misc_feature 1..20: note = C9Orf72 TTCN PAM targeting sequence
  source 1..20: mol_type = other RNA
tgcatttagctctaacttgt

SEQ ID NO: 7687 - RNA, 20 nt, synthetic construct
  misc_feature 1..20: note = C9Orf72 TTCN PAM targeting sequence
  source 1..20: mol_type = other RNA
caagttagagctaaatgcaa

SEQ ID NO: 7688 - RNA, 20 nt, synthetic construct
  misc_feature 1..20: note = C9Orf72 TTCN PAM targeting sequence
  source 1..20: mol_type = other RNA
gagttaccgttacccttgct

SEQ ID NO: 7689 - RNA, 20 nt, synthetic construct
  misc_feature 1..20: note = C9Orf72 TTCN PAM targeting sequence
  source 1..20: mol_type = other RNA
ccccagtggatatcaaggta

SEQ ID NO: 7690 - RNA, 20 nt, synthetic construct
  misc_feature 1..20: note = C9Orf72 TTCN PAM targeting sequence
  source 1..20: mol_type = other RNA
aacaattctcctgcctcagc

SEQ ID NO: 7691 - RNA, 20 nt, synthetic construct
  misc_feature 1..20: note = C9Orf72 TTCN PAM targeting sequence
  source 1..20: mol_type = other RNA
cctgcctcagcctcctgagt

SEQ ID NO: 7692 - RNA, 20 nt, synthetic construct
  misc_feature 1..20: note = C9Orf72 TTCN PAM targeting sequence
  source 1..20: mol_type = other RNA
ccacattggccaggctggtc

SEQ ID NO: 7693 - RNA, 20 nt, synthetic construct
  misc_feature 1..20: note = C9Orf72 TTCN PAM targeting sequence
  source 1..20: mol_type = other RNA
agaccagcctggccaatgtg

SEQ ID NO: 7694 - RNA, 20 nt, synthetic construct
  misc_feature 1..20: note = C9Orf72 TTCN PAM targeting sequence
  source 1..20: mol_type = other RNA
agataagcaaaggggcatcc

SEQ ID NO: 7695 - RNA, 20 nt, synthetic construct
  misc_feature 1..20: note = C9Orf72 TTCN PAM targeting sequence
  source 1..20: mol_type = other RNA
atagtgttctagataagcaa

SEQ ID NO: 7696 - RNA, 20 nt, synthetic construct
  misc_feature 1..20: note = C9Orf72 TTCN PAM targeting sequence
  source 1..20: mol_type = other RNA
gtgctgaccacattccatag

SEQ ID NO: 7697 - RNA, 20 nt, synthetic construct
  misc_feature 1..20: note = C9Orf72 TTCN PAM targeting sequence
  source 1..20: mol_type = other RNA
cctttctgtgctgaccacat

SEQ ID NO: 7698 - RNA, 20 nt, synthetic construct
  misc_feature 1..20: note = C9Orf72 TTCN PAM targeting sequence
  source 1..20: mol_type = other RNA
aggctgcctgtattcactta

SEQ ID NO: 7699 - RNA, 20 nt, synthetic construct
  misc_feature 1..20: note = C9Orf72 TTCN PAM targeting sequence
  source 1..20: mol_type = other RNA
cttatgttgtgccagggctg

SEQ ID NO: 7700 - RNA, 20 nt, synthetic construct
  misc_feature 1..20: note = C9Orf72 TTCN PAM targeting sequence
  source 1..20: mol_type = other RNA
gagcccctggcatgtaatgg

SEQ ID NO: 7701 - RNA, 20 nt, synthetic construct
  misc_feature 1..20: note = C9Orf72 TTCN PAM targeting sequence
  source 1..20: mol_type = other RNA
tacttattctggaaggactg

SEQ ID NO: 7702 - RNA, 20 nt, synthetic construct
  misc_feature 1..20: note = C9Orf72 TTCN PAM targeting sequence
  source 1..20: mol_type = other RNA
ggaaggactggtaacttaca

SEQ ID NO: 7703 - RNA, 20 nt, synthetic construct
  misc_feature 1..20: note = C9Orf72 TTCN PAM targeting sequence
  source 1..20: mol_type = other RNA
agaataagtaggaacaattc

SEQ ID NO: 7704 - RNA, 20 nt, synthetic construct
  misc_feature 1..20: note = C9Orf72 TTCN PAM targeting sequence
  source 1..20: mol_type = other RNA
agtgataatatctagcgggg

SEQ ID NO: 7705 - RNA, 20 nt, synthetic construct
  misc_feature 1..20: note = C9Orf72 TTCN PAM targeting sequence
  source 1..20: mol_type = other RNA
aaaactaccgtgggagccat

SEQ ID NO: 7706 - RNA, 20 nt, synthetic construct
  misc_feature 1..20: note = C9Orf72 TTCN PAM targeting sequence
  source 1..20: mol_type = other RNA
tcctagccattttgagtttg

SEQ ID NO: 7707 - RNA, 20 nt, synthetic construct
  misc_feature 1..20: note = C9Orf72 TTCN PAM targeting sequence
  source 1..20: mol_type = other RNA
tagccattttgagtttgctt

SEQ ID NO: 7708 - RNA, 20 nt, synthetic construct
  misc_feature 1..20: note = C9Orf72 TTCN PAM targeting sequence
  source 1..20: mol_type = other RNA
agcttttcgctggtgcttca

SEQ ID NO: 7709 - RNA, 20 nt, synthetic construct
  misc_feature 1..20: note = C9Orf72 TTCN PAM targeting sequence
  source 1..20: mol_type = other RNA
ctggtgcttcatactcactt

SEQ ID NO: 7710 - RNA, 20 nt, synthetic construct
  misc_feature 1..20: note = C9Orf72 TTCN PAM targeting sequence
  source 1..20: mol_type = other RNA
tactcactttttgcactggc

SEQ ID NO: 7711 - RNA, 20 nt, synthetic construct
  misc_feature 1..20: note = C9Orf72 TTCN PAM targeting sequence
  source 1..20: mol_type = other RNA
atttacttctcctagtccgt

SEQ ID NO: 7712 - RNA, 20 nt, synthetic construct
  misc_feature 1..20: note = C9Orf72 TTCN PAM targeting sequence
  source 1..20: mol_type = other RNA
cctagtccgtctttcccttt

SEQ ID NO: 7713 - RNA, 20 nt, synthetic construct
  misc_feature 1..20: note = C9Orf72 TTCN PAM targeting sequence
  source 1..20: mol_type = other RNA
ctttcacttgtggttttctt

SEQ ID NO: 7714 - RNA, 20 nt, synthetic construct
  misc_feature 1..20: note = C9Orf72 TTCN PAM targeting sequence
  source 1..20: mol_type = other RNA
cttgtggttttcttcccttg

SEQ ID NO: 7715 - RNA, 20 nt, synthetic construct
  misc_feature 1..20: note = C9Orf72 TTCN PAM targeting sequence
  source 1..20: mol_type = other RNA
tcccttgtcatttaagcatt

SEQ ID NO: 7716 - RNA, 20 nt, synthetic construct
  misc_feature 1..20: note = C9Orf72 TTCN PAM targeting sequence
  source 1..20: mol_type = other RNA
cttgtcatttaagcattctc

SEQ ID NO: 7717 - RNA, 20 nt, synthetic construct
  misc_feature 1..20: note = C9Orf72 TTCN PAM targeting sequence
  source 1..20: mol_type = other RNA
caactacacatagaaatcca

SEQ ID NO: 7718 - RNA, 20 nt, synthetic construct
  misc_feature 1..20: note = C9Orf72 TTCN PAM targeting sequence
  source 1..20: mol_type = other RNA
atgtgtagttgagaatgctt

SEQ ID NO: 7719 - RNA, 20 nt, synthetic construct
  misc_feature 1..20: note = C9Orf72 TTCN PAM targeting sequence
  source 1..20: mol_type = other RNA
gttggatttctatgtgtagt

SEQ ID NO: 7720 - RNA, 20 nt, synthetic construct
  misc_feature 1..20: note = C9Orf72 TTCN PAM targeting sequence
  source 1..20: mol_type = other RNA
ctcagtcccaggcagtcctg

SEQ ID NO: 7721 - RNA, 20 nt, synthetic construct
  misc_feature 1..20: note = C9Orf72 TTCN PAM targeting sequence
  source 1..20: mol_type = other RNA
ggactgcctgggactgaggg

SEQ ID NO: 7722 - RNA, 20 nt, synthetic construct
  misc_feature 1..20: note = C9Orf72 TTCN PAM targeting sequence
  source 1..20: mol_type = other RNA
gtcagaccttagacttatac

SEQ ID NO: 7723 - RNA, 20 nt, synthetic construct
  misc_feature 1..20: note = C9Orf72 TTCN PAM targeting sequence
  source 1..20: mol_type = other RNA
gtcaaaaacaagtatggtgg

SEQ ID NO: 7724 - RNA, 20 nt, synthetic construct
  misc_feature 1..20: note = C9Orf72 TTCN PAM targeting sequence
  source 1..20: mol_type = other RNA
aggcaagtgtggcttgagct

SEQ ID NO: 7725 - RNA, 20 nt, synthetic construct
  misc_feature 1..20: note = C9Orf72 TTCN PAM targeting sequence
  source 1..20: mol_type = other RNA
aaaaattcactaagctaatt

SEQ ID NO: 7726 - RNA, 20 nt, synthetic construct
  misc_feature 1..20: note = C9Orf72 TTCN PAM targeting sequence
  source 1..20: mol_type = other RNA
ctaagctaatttctctcact

SEQ ID NO: 7727 - RNA, 20 nt, synthetic construct
  misc_feature 1..20: note = C9Orf72 TTCN PAM targeting sequence
  source 1..20: mol_type = other RNA
ctcactatggaaagagagaa

SEQ ID NO: 7728 - RNA, 20 nt, synthetic construct
  misc_feature 1..20: note = C9Orf72 TTCN PAM targeting sequence
  source 1..20: mol_type = other RNA
atagtgagagaaattagctt

SEQ ID NO: 7729 - RNA, 20 nt, synthetic construct
  misc_feature 1..20: note = C9Orf72 TTCN PAM targeting sequence
  source 1..20: mol_type = other RNA
ctctttccatagtgagagaa

SEQ ID NO: 7730 - RNA, 20 nt, synthetic construct
  misc_feature 1..20: note = C9Orf72 TTCN PAM targeting sequence
  source 1..20: mol_type = other RNA
ctaatcggaagataaaggct

SEQ ID NO: 7731 - RNA, 20 nt, synthetic construct
  misc_feature 1..20: note = C9Orf72 TTCN PAM targeting sequence
  source 1..20: mol_type = other RNA
gattagggaaatttatgcct

SEQ ID NO: 7732 - RNA, 20 nt, synthetic construct
  misc_feature 1..20: note = C9Orf72 TTCN PAM targeting sequence
  source 1..20: mol_type = other RNA
agggcactggagctacaagt

SEQ ID NO: 7733 - RNA, 20 nt, synthetic construct
  misc_feature 1..20: note = C9Orf72 TTCN PAM targeting sequence
  source 1..20: mol_type = other RNA
acttgtagctccagtgccct

SEQ ID NO: 7734 - RNA, 20 nt, synthetic construct
  misc_feature 1..20: note = C9Orf72 TTCN PAM targeting sequence
  source 1..20: mol_type = other RNA
tggctggaaacaggccccta

SEQ ID NO: 7735 - RNA, 20 nt, synthetic construct
  misc_feature 1..20: note = C9Orf72 TTCN PAM targeting sequence
  source 1..20: mol_type = other RNA
agccaggaaaatttgtgctt

SEQ ID NO: 7736 - RNA, 20 nt, synthetic construct
  misc_feature 1..20: note = C9Orf72 TTCN PAM targeting sequence
  source 1..20: mol_type = other RNA
ctctaggggcctgtttccag

SEQ ID NO: 7737 - RNA, 20 nt, synthetic construct
  misc_feature 1..20: note = C9Orf72 TTCN PAM targeting sequence
  source 1..20: mol_type = other RNA
ttatctggtgtgatgtttcc

SEQ ID NO: 7738 - RNA, 20 nt, synthetic construct
  misc_feature 1..20: note = C9Orf72 TTCN PAM targeting sequence
  source 1..20: mol_type = other RNA
tgtataggtggacattactt

SEQ ID NO: 7739 - RNA, 20 nt, synthetic construct
  misc_feature 1..20: note = C9Orf72 TTCN PAM targeting sequence
  source 1..20: mol_type = other RNA
tatgttattaacacaaatgt

SEQ ID NO: 7740 - RNA, 20 nt, synthetic construct
  misc_feature 1..20: note = C9Orf72 TTCN PAM targeting sequence
  source 1..20: mol_type = other RNA
ttcacatatatagtaaatat

SEQ ID NO: 7741 - RNA, 20 nt, synthetic construct
  misc_feature 1..20: note = C9Orf72 TTCN PAM targeting sequence
  source 1..20: mol_type = other RNA
catatatagtaaatattctt

SEQ ID NO: 7742 - RNA, 20 nt, synthetic construct
  misc_feature 1..20: note = C9Orf72 TTCN PAM targeting sequence
  source 1..20: mol_type = other RNA
ttaaggtggtgaaacaagat

SEQ ID NO: 7743 - RNA, 20 nt, synthetic construct
  misc_feature 1..20: note = C9Orf72 TTCN PAM targeting sequence
  source 1..20: mol_type = other RNA
ccaccttaaagaatatttac

SEQ ID NO: 7744 - RNA, 20 nt, synthetic construct
  misc_feature 1..20: note = C9Orf72 TTCN PAM targeting sequence
  source 1..20: mol_type = other RNA
aaagagccaatgtgcctctt

SEQ ID NO: 7745 - RNA, 20 nt, synthetic construct
  misc_feature 1..20: note = C9Orf72 TTCN PAM targeting sequence
  source 1..20: mol_type = other RNA
aaacagtgggcaaaagaggc

SEQ ID NO: 7746 - RNA, 20 nt, synthetic construct
  misc_feature 1..20: note = C9Orf72 TTCN PAM targeting sequence
  source 1..20: mol_type = other RNA
atccatcaacacacttcccc

SEQ ID NO: 7747 - RNA, 20 nt, synthetic construct
  misc_feature 1..20: note = C9Orf72 TTCN PAM targeting sequence
  source 1..20: mol_type = other RNA
cctctgcattgcacacacaa

SEQ ID NO: 7748 - RNA, 20 nt, synthetic construct
  misc_feature 1..20: note = C9Orf72 TTCN PAM targeting sequence
  source 1..20: mol_type = other RNA
agctctctgtaaaaacatag

SEQ ID NO: 7749 - RNA, 20 nt, synthetic construct
  misc_feature 1..20: note = C9Orf72 TTCN PAM targeting sequence
  source 1..20: mol_type = other RNA
atgtttttacagagagctcg

SEQ ID NO: 7750 - RNA, 20 nt, synthetic construct
  misc_feature 1..20: note = C9Orf72 TTCN PAM targeting sequence
  source 1..20: mol_type = other RNA
atagcattactttaacagca

SEQ ID NO: 7751 - RNA, 20 nt, synthetic construct
  misc_feature 1..20: note = C9Orf72 TTCN PAM targeting sequence
  source 1..20: mol_type = other RNA
cccatctgtagtagggggat

SEQ ID NO: 7752 - RNA, 20 nt, synthetic construct
  misc_feature 1..20: note = C9Orf72 TTCN PAM targeting sequence
  source 1..20: mol_type = other RNA
gtgagccaacaggtatagag

SEQ ID NO: 7753 - RNA, 20 nt, synthetic construct
  misc_feature 1..20: note = C9Orf72 TTCN PAM targeting sequence
  source 1..20: mol_type = other RNA
cctgatacgtggtaggtcct

SEQ ID NO: 7754 - RNA, 20 nt, synthetic construct
  misc_feature 1..20: note = C9Orf72 TTCN PAM targeting sequence
  source 1..20: mol_type = other RNA
agaccctggggagaaaaaga

SEQ ID NO: 7755 - RNA, 20 nt, synthetic construct
  misc_feature 1..20: note = C9Orf72 TTCN PAM targeting sequence
  source 1..20: mol_type = other RNA
ccccagggtctagaacttcg

SEQ ID NO: 7756 - RNA, 20 nt, synthetic construct
  misc_feature 1..20: note = C9Orf72 TTCN PAM targeting sequence
  source 1..20: mol_type = other RNA
tctttttctccccagggtct

SEQ ID NO: 7757 - RNA, 20 nt, synthetic construct
  misc_feature 1..20: note = C9Orf72 TTCN PAM targeting sequence
  source 1..20: mol_type = other RNA
tgtcctaaaggtgctcatgg

SEQ ID NO: 7758 - RNA, 20 nt, synthetic construct
  misc_feature 1..20: note = C9Orf72 TTCN PAM targeting sequence
  source 1..20: mol_type = other RNA
acaaacacacataataatac

SEQ ID NO: 7759 - RNA, 20 nt, synthetic construct
  misc_feature 1..20: note = C9Orf72 TTCN PAM targeting sequence
  source 1..20: mol_type = other RNA
ttgcagattaagaagcaact

SEQ ID NO: 7760 - RNA, 20 nt, synthetic construct
  misc_feature 1..20: note = C9Orf72 TTCN PAM targeting sequence
  source 1..20: mol_type = other RNA
taatctgcaaggaatctcat

SEQ ID NO: 7761 - RNA, 20 nt, synthetic construct
  misc_feature 1..20: note = C9Orf72 TTCN PAM targeting sequence
  source 1..20: mol_type = other RNA
tgagtccctctctcaaacac

SEQ ID NO: 7762 - RNA, 20 nt, synthetic construct
  misc_feature 1..20: note = C9Orf72 TTCN PAM targeting sequence
  source 1..20: mol_type = other RNA
cacaggagatgagatttgaa

SEQ ID NO: 7763 - RNA, 20 nt, synthetic construct
  misc_feature 1..20: note = C9Orf72 TTCN PAM targeting sequence
  source 1..20: mol_type = other RNA
aatctcatctcctgtgggaa

SEQ ID NO: 7764 - RNA, 20 nt, synthetic construct
  misc_feature 1..20: note = C9Orf72 TTCN PAM targeting sequence
  source 1..20: mol_type = other RNA
tctttaaatggcccacattc

SEQ ID NO: 7765 - RNA, 20 nt, synthetic construct
  misc_feature 1..20: note = C9Orf72 TTCN PAM targeting sequence
  source 1..20: mol_type = other RNA
tattcatctttaaatggccc

SEQ ID NO: 7766 - RNA, 20 nt, synthetic construct
  misc_feature 1..20: note = C9Orf72 TTCN PAM targeting sequence
  source 1..20: mol_type = other RNA
tgtctcctaccagacaaatt

SEQ ID NO: 7767 - RNA, 20 nt, synthetic construct
  misc_feature 1..20: note = C9Orf72 TTCN PAM targeting sequence
  source 1..20: mol_type = other RNA
aatgccctttcttgtctcct

SEQ ID NO: 7768 - RNA, 20 nt, synthetic construct
  misc_feature 1..20: note = C9Orf72 TTCN PAM targeting sequence
  source 1..20: mol_type = other RNA
actgcttcaaatgccctttc

SEQ ID NO: 7769 - RNA, 20 nt, synthetic construct
  misc_feature 1..20: note = C9Orf72 TTCN PAM targeting sequence
  source 1..20: mol_type = other RNA
cactacatgtctttgcacat

SEQ ID NO: 7770 - RNA, 20 nt, synthetic construct
  misc_feature 1..20: note = C9Orf72 TTCN PAM targeting sequence
  source 1..20: mol_type = other RNA
cttggggaggaacctagggt

SEQ ID NO: 7771 - RNA, 20 nt, synthetic construct
  misc_feature 1..20: note = C9Orf72 TTCN PAM targeting sequence
  source 1..20: mol_type = other RNA
tccccaagagaacaggtgct

SEQ ID NO: 7772 - RNA, 20 nt, synthetic construct
  misc_feature 1..20: note = C9Orf72 TTCN PAM targeting sequence
  source 1..20: mol_type = other RNA
ttgacttgccgtaaggtcct

SEQ ID NO: 7773 - RNA, 20 nt, synthetic construct
  misc_feature 1..20: note = C9Orf72 TTCN PAM targeting sequence
  source 1..20: mol_type = other RNA
tgactctcactccagtgctc

SEQ ID NO: 7774 - RNA, 20 nt, synthetic construct
  misc_feature 1..20: note = C9Orf72 TTCN PAM targeting sequence
  source 1..20: mol_type = other RNA
cgtggctacattttattggt

SEQ ID NO: 7775 - RNA, 20 nt, synthetic construct
  misc_feature 1..20: note = C9Orf72 TTCN PAM targeting sequence
  source 1..20: mol_type = other RNA
agtttcacgtggctacattt

SEQ ID NO: 7776 - RNA, 20 nt, synthetic construct
  misc_feature 1..20: note = C9Orf72 TTCN PAM targeting sequence
  source 1..20: mol_type = other RNA
tcagaccctcttttaagcta

SEQ ID NO: 7777 - RNA, 20 nt, synthetic construct
  misc_feature 1..20: note = C9Orf72 TTCN PAM targeting sequence
  source 1..20: mol_type = other RNA
gggctttcctcagaccctct

SEQ ID NO: 7778 - RNA, 20 nt, synthetic construct
  misc_feature 1..20: note = C9Orf72 TTCN PAM targeting sequence
  source 1..20: mol_type = other RNA
aaggagaaatgtaacaacaa

SEQ ID NO: 7779 - RNA, 20 nt, synthetic construct
  misc_feature 1..20: note = C9Orf72 TTCN PAM targeting sequence
  source 1..20: mol_type = other RNA
aatttgcttttctgggcttt

SEQ ID NO: 7780 - RNA, 20 nt, synthetic construct
  misc_feature 1..20: note = C9Orf72 TTCN PAM targeting sequence
  source 1..20: mol_type = other RNA
ccttcgaatttgcttttctg

SEQ ID NO: 7781 - RNA, 20 nt, synthetic construct
  misc_feature 1..20: note = C9Orf72 TTCN PAM targeting sequence
  source 1..20: mol_type = other RNA
ggtaggtgtcattgttgtta

SEQ ID NO: 7782 - RNA, 20 nt, synthetic construct
  misc_feature 1..20: note = C9Orf72 TTCN PAM targeting sequence
  source 1..20: mol_type = other RNA
gaaaataaaggataccagga

SEQ ID NO: 7783 - RNA, 20 nt, synthetic construct
  misc_feature 1..20: note = C9Orf72 TTCN PAM targeting sequence
  source 1..20: mol_type = other RNA
gaattaaaaaaaaaaaaggc

SEQ ID NO: 7784 - RNA, 20 nt, synthetic construct
  misc_feature 1..20: note = C9Orf72 TTCN PAM targeting sequence
  source 1..20: mol_type = other RNA
tctgtcctggtatcctttat

SEQ ID NO: 7785 - RNA, 20 nt, synthetic construct
  misc_feature 1..20: note = C9Orf72 TTCN PAM targeting sequence
  source 1..20: mol_type = other RNA
tcggaacgatgagataatta

SEQ ID NO: 7786 - RNA, 20 nt, synthetic construct
  misc_feature 1..20: note = C9Orf72 TTCN PAM targeting sequence
  source 1..20: mol_type = other RNA
gaacgatgagataattatgt

SEQ ID NO: 7787 - RNA, 20 nt, synthetic construct
  misc_feature 1..20: note = C9Orf72 TTCN PAM targeting sequence
  source 1..20: mol_type = other RNA
gaagaaataatatatacaaa

SEQ ID NO: 7788 - RNA, 20 nt, synthetic construct
  misc_feature 1..20: note = C9Orf72 TTCN PAM targeting sequence
  source 1..20: mol_type = other RNA
ttttagttatggattgcata

SEQ ID NO: 7789 - RNA, 20 nt, synthetic construct
  misc_feature 1..20: note = C9Orf72 TTCN PAM targeting sequence
  source 1..20: mol_type = other RNA
tctttttagttatggattgc

SEQ ID NO: 7790 - RNA, 20 nt, synthetic construct
  misc_feature 1..20: note = C9Orf72 TTCN PAM targeting sequence
  source 1..20: mol_type = other RNA
tttgaagctatcactgttgt

SEQ ID NO: 7791 - RNA, 20 nt, synthetic construct
  misc_feature 1..20: note = C9Orf72 TTCN PAM targeting sequence
  source 1..20: mol_type = other RNA
aatgaacagttgtaaataat

SEQ ID NO: 7792 - RNA, 20 nt, synthetic construct
  misc_feature 1..20: note = C9Orf72 TTCN PAM targeting sequence
  source 1..20: mol_type = other RNA
tgatgaggaatttggcacaa

SEQ ID NO: 7793 - RNA, 20 nt, synthetic construct
  misc_feature 1..20: note = C9Orf72 TTCN PAM targeting sequence
  source 1..20: mol_type = other RNA
tcatcatgaaggcatctgat

SEQ ID NO: 7794 - RNA, 20 nt, synthetic construct
  misc_feature 1..20: note = C9Orf72 TTCN PAM targeting sequence
  source 1..20: mol_type = other RNA
acataagccagaaggttaga

SEQ ID NO: 7795 - RNA, 20 nt, synthetic construct
  misc_feature 1..20: note = C9Orf72 TTCN PAM targeting sequence
  source 1..20: mol_type = other RNA
ggcttatgtggaacttgtgc

SEQ ID NO: 7796 - RNA, 20 nt, synthetic construct
  misc_feature 1..20: note = C9Orf72 TTCN PAM targeting sequence
  source 1..20: mol_type = other RNA
aaccttctggcttatgtgga

SEQ ID NO: 7797 - RNA, 20 nt, synthetic construct
  misc_feature 1..20: note = C9Orf72 TTCN PAM targeting sequence
  source 1..20: mol_type = other RNA
ctttttctaaccttctggct

SEQ ID NO: 7798 - RNA, 20 nt, synthetic construct
  misc_feature 1..20: note = C9Orf72 TTCN PAM targeting sequence
  source 1..20: mol_type = other RNA
tttttctctttttctaacct

SEQ ID NO: 7799 - RNA, 20 nt, synthetic construct
  misc_feature 1..20: note = C9Orf72 TTCN PAM targeting sequence
  source 1..20: mol_type = other RNA
tgctattcactaagaaaaaa

SEQ ID NO: 7800 - RNA, 20 nt, synthetic construct
  misc_feature 1..20: note = C9Orf72 TTCN PAM targeting sequence
  source 1..20: mol_type = other RNA
ctaagaaaaaaaagttttct

SEQ ID NO: 7801 - RNA, 20 nt, synthetic construct
  misc_feature 1..20: note = C9Orf72 TTCN PAM targeting sequence
  source 1..20: mol_type = other RNA
tagtgaatagcatgaataca

SEQ ID NO: 7802 - RNA, 20 nt, synthetic construct
  misc_feature 1..20: note = C9Orf72 TTCN PAM targeting sequence
  source 1..20: mol_type = other RNA
ccacagatgatgggaggctt

SEQ ID NO: 7803 - RNA, 20 nt, synthetic construct
  misc_feature 1..20: note = C9Orf72 TTCN PAM targeting sequence
  source 1..20: mol_type = other RNA
aagcctcccatcatctgtgg

SEQ ID NO: 7804 - RNA, 20 nt, synthetic construct
  misc_feature 1..20: note = C9Orf72 TTCN PAM targeting sequence
  source 1..20: mol_type = other RNA
ccttgtcggtggctgtgctc

SEQ ID NO: 7805 - RNA, 20 nt, synthetic construct
  misc_feature 1..20: note = C9Orf72 TTCN PAM targeting sequence
  source 1..20: mol_type = other RNA
acatgggccccaaaatgctg

SEQ ID NO: 7806 - RNA, 20 nt, synthetic construct
  misc_feature 1..20: note = C9Orf72 TTCN PAM targeting sequence
  source 1..20: mol_type = other RNA
gtccaaaaaatggtcaaact

SEQ ID NO: 7807 - RNA, 20 nt, synthetic construct
  misc_feature 1..20: note = C9Orf72 TTCN PAM targeting sequence
  source 1..20: mol_type = other RNA
gagattaaaaaaagacatat

SEQ ID NO: 7808 - RNA, 20 nt, synthetic construct
  misc_feature 1..20: note = C9Orf72 TTCN PAM targeting sequence
  source 1..20: mol_type = other RNA
ttttccatattctaaattag

SEQ ID NO: 7809 - RNA, 20 nt, synthetic construct
  misc_feature 1..20: note = C9Orf72 TTCN PAM targeting sequence
  source 1..20: mol_type = other RNA
atattctaaattagaaagat

SEQ ID NO: 7810 - RNA, 20 nt, synthetic construct
  misc_feature 1..20: note = C9Orf72 TTCN PAM targeting sequence
  source 1..20: mol_type = other RNA
aaattagaaagataattcct

SEQ ID NO: 7811 - RNA, 20 nt, synthetic construct
  misc_feature 1..20: note = C9Orf72 TTCN PAM targeting sequence
  source 1..20: mol_type = other RNA
aatttagaatatggaaaaag

SEQ ID NO: 7812 - RNA, 20 nt, synthetic construct
  misc_feature 1..20: note = C9Orf72 TTCN PAM targeting sequence
  source 1..20: mol_type = other RNA
ttaaaaatcaatataggtgg

SEQ ID NO: 7813 - RNA, 20 nt, synthetic construct
  misc_feature 1..20: note = C9Orf72 TTCN PAM targeting sequence
  source 1..20: mol_type = other RNA
ccatgttagccaggatggtc

SEQ ID NO: 7814 - RNA, 20 nt, synthetic construct
  misc_feature 1..20: note = C9Orf72 TTCN PAM targeting sequence
  source 1..20: mol_type = other RNA
cctgcctcagcctcccaagt

SEQ ID NO: 7815 - RNA, 20 nt, synthetic construct
  misc_feature 1..20: note = C9Orf72 TTCN PAM targeting sequence
  source 1..20: mol_type = other RNA
cgccattctcctgcctcagc

SEQ ID NO: 7816 - RNA, 20 nt, synthetic construct
  misc_feature 1..20: note = C9Orf72 TTCN PAM targeting sequence
  source 1..20: mol_type = other RNA
tggttcacgccattctcctg

SEQ ID NO: 7817 - RNA, 20 nt, synthetic construct
  misc_feature 1..20: note = C9Orf72 TTCN PAM targeting sequence
  source 1..20: mol_type = other RNA
tatattgatttttgttgttg

SEQ ID NO: 7818 - RNA, 20 nt, synthetic construct
  misc_feature 1..20: note = C9Orf72 TTCN PAM targeting sequence
  source 1..20: mol_type = other RNA
aagcacctttatttgatatc

SEQ ID NO: 7819 - RNA, 20 nt, synthetic construct
  misc_feature 1..20: note = C9Orf72 TTCN PAM targeting sequence
  source 1..20: mol_type = other RNA
atttaggtatctcagacaag

SEQ ID NO: 7820 - RNA, 20 nt, synthetic construct
  misc_feature 1..20: note = C9Orf72 TTCN PAM targeting sequence
  source 1..20: mol_type = other RNA
ctgctcaaattgagaatcct

SEQ ID NO: 7821 - RNA, 20 nt, synthetic construct
  misc_feature 1..20: note = C9Orf72 TTCN PAM targeting sequence
  source 1..20: mol_type = other RNA
caatttgagcagcgaagtga

SEQ ID NO: 7822 - RNA, 20 nt, synthetic construct
  misc_feature 1..20: note = C9Orf72 TTCN PAM targeting sequence
  source 1..20: mol_type = other RNA
ctacaaggattctcaatttg

SEQ ID NO: 7823 - RNA, 20 nt, synthetic construct
  misc_feature 1..20: note = C9Orf72 TTCN PAM targeting sequence
  source 1..20: mol_type = other RNA
tcactacaaggattctcaat

SEQ ID NO: 7824 - RNA, 20 nt, synthetic construct
  misc_feature 1..20: note = C9Orf72 TTCN PAM targeting sequence
  source 1..20: mol_type = other RNA
tcttcactacaaggattctc

SEQ ID NO: 7825 - RNA, 20 nt, synthetic construct
  misc_feature 1..20: note = C9Orf72 TTCN PAM targeting sequence
  source 1..20: mol_type = other RNA
ttcttcttcactacaaggat

SEQ ID NO: 7826 - RNA, 20 nt, synthetic construct
  misc_feature 1..20: note = C9Orf72 TTCN PAM targeting sequence
  source 1..20: mol_type = other RNA
tcatacaaacaggcacaaac

SEQ ID NO: 7827 - RNA, 20 nt, synthetic construct
  misc_feature 1..20: note = C9Orf72 TTCN PAM targeting sequence
  source 1..20: mol_type = other RNA
ccttcctcatacaaacaggc

SEQ ID NO: 7828 - RNA, 20 nt, synthetic construct
  misc_feature 1..20: note = C9Orf72 TTCN PAM targeting sequence
  source 1..20: mol_type = other RNA
acaactttctccttcctcat

SEQ ID NO: 7829 - RNA, 20 nt, synthetic construct
  misc_feature 1..20: note = C9Orf72 TTCN PAM targeting sequence
  source 1..20: mol_type = other RNA
cactgtggggtaaaaatgaa

SEQ ID NO: 7830 - RNA, 20 nt, synthetic construct
  misc_feature 1..20: note = C9Orf72 TTCN PAM targeting sequence
  source 1..20: mol_type = other RNA
tttttaccccacagtgggaa

SEQ ID NO: 7831 - RNA, 20 nt, synthetic construct
  misc_feature 1..20: note = C9Orf72 TTCN PAM targeting sequence
  source 1..20: mol_type = other RNA
gtaatcccccttcattttta

SEQ ID NO: 7832 - RNA, 20 nt, synthetic construct
  misc_feature 1..20: note = C9Orf72 TTCN PAM targeting sequence
  source 1..20: mol_type = other RNA
tcatatatctgcataaggtt

SEQ ID NO: 7833 - RNA, 20 nt, synthetic construct
  misc_feature 1..20: note = C9Orf72 TTCN PAM targeting sequence
  source 1..20: mol_type = other RNA
tatatctgcataaggttcac

SEQ ID NO: 7834 - RNA, 20 nt, synthetic construct
  misc_feature 1..20: note = C9Orf72 TTCN PAM targeting sequence
  source 1..20: mol_type = other RNA
cactcattataatgatcata

SEQ ID NO: 7835 - RNA, 20 nt, synthetic construct
  misc_feature 1..20: note = C9Orf72 TTCN PAM targeting sequence
  source 1..20: mol_type = other RNA
tttaattgaatagaaaagat

SEQ ID NO: 7836 - RNA, 20 nt, synthetic construct
  misc_feature 1..20: note = C9Orf72 TTCN PAM targeting sequence
  source 1..20: mol_type = other RNA
attaaaggaaaattgtgaca

SEQ ID NO: 7837 - RNA, 20 nt, synthetic construct
  misc_feature 1..20: note = C9Orf72 TTCN PAM targeting sequence
  source 1..20: mol_type = other RNA
attcaattaaaggaaaattg

SEQ ID NO: 7838 - RNA, 20 nt, synthetic construct
  misc_feature 1..20: note = C9Orf72 TTCN PAM targeting sequence
  source 1..20: mol_type = other RNA
atttaatcttttctattcaa

SEQ ID NO: 7839 - RNA, 20 nt, synthetic construct
  misc_feature 1..20: note = C9Orf72 TTCN PAM targeting sequence
  source 1..20: mol_type = other RNA
tgtcaagttttttctattta

SEQ ID NO: 7840 - RNA, 20 nt, synthetic construct
  misc_feature 1..20: note = C9Orf72 TTCN PAM targeting sequence
  source 1..20: mol_type = other RNA
tagggtttatttttcttgtc

SEQ ID NO: 7841 - RNA, 20 nt, synthetic construct
  misc_feature 1..20: note = C9Orf72 TTCN PAM targeting sequence
  source 1..20: mol_type = other RNA
ttagtgttttaaaaaatctt

SEQ ID NO: 7842 - RNA, 20 nt, synthetic construct
  misc_feature 1..20: note = C9Orf72 TTCN PAM targeting sequence
  source 1..20: mol_type = other RNA
ctgagcaaaatgtattccac

SEQ ID NO: 7843 - RNA, 20 nt, synthetic construct
  misc_feature 1..20: note = C9Orf72 TTCN PAM targeting sequence
  source 1..20: mol_type = other RNA
acagcaaagaaataggccca

SEQ ID NO: 7844 - RNA, 20 nt, synthetic construct
  misc_feature 1..20: note = C9Orf72 TTCN PAM targeting sequence
  source 1..20: mol_type = other RNA
ttgctgtggaatacattttg

SEQ ID NO: 7845 - RNA, 20 nt, synthetic construct
  misc_feature 1..20: note = C9Orf72 TTCN PAM targeting sequence
  source 1..20: mol_type = other RNA
ctggcagactacctgtttga

SEQ ID NO: 7846 - RNA, 20 nt, synthetic construct
  misc_feature 1..20: note = C9Orf72 TTCN PAM targeting sequence
  source 1..20: mol_type = other RNA
gaaatgaaattcatctagca

SEQ ID NO: 7847 - RNA, 20 nt, synthetic construct
  misc_feature 1..20: note = C9Orf72 TTCN PAM targeting sequence
  source 1..20: mol_type = other RNA
gaaaacctttaggtagacct

SEQ ID NO: 7848 - RNA, 20 nt, synthetic construct
  misc_feature 1..20: note = C9Orf72 TTCN PAM targeting sequence
  source 1..20: mol_type = other RNA
tttctgaaaacctttaggta

SEQ ID NO: 7849 - RNA, 20 nt, synthetic construct
  misc_feature 1..20: note = C9Orf72 TTCN PAM targeting sequence
  source 1..20: mol_type = other RNA
tctagcatctagcaccataa

SEQ ID NO: 7850 - RNA, 20 nt, synthetic construct
  misc_feature 1..20: note = C9Orf72 TTCN PAM targeting sequence
  source 1..20: mol_type = other RNA
cagatgcagttttggtaaat

SEQ ID NO: 7851 - RNA, 20 nt, synthetic construct
  misc_feature 1..20: note = C9Orf72 TTCN PAM targeting sequence
  source 1..20: mol_type = other RNA
gctccagatgcaattagtaa

SEQ ID NO: 7852 - RNA, 20 nt, synthetic construct
  misc_feature 1..20: note = C9Orf72 TTCN PAM targeting sequence
  source 1..20: mol_type = other RNA
gtcatgaagctgacagataa

SEQ ID NO: 7853 - RNA, 20 nt, synthetic construct
  misc_feature 1..20: note = C9Orf72 TTCN PAM targeting sequence
  source 1..20: mol_type = other RNA
tgacagaaagttagtacatt

SEQ ID NO: 7854 - RNA, 20 nt, synthetic construct
  misc_feature 1..20: note = C9Orf72 TTCN PAM targeting sequence
  source 1..20: mol_type = other RNA
ttttatctgtcagcttcatg

SEQ ID NO: 7855 - RNA, 20 nt, synthetic construct
  misc_feature 1..20: note = C9Orf72 TTCN PAM targeting sequence
  source 1..20: mol_type = other RNA
tacttagtttctttttatct

SEQ ID NO: 7856 - RNA, 20 nt, synthetic construct
  misc_feature 1..20: note = C9Orf72 TTCN PAM targeting sequence
  source 1..20: mol_type = other RNA
gggatatgtctccaatgttt

SEQ ID NO: 7857 - RNA, 20 nt, synthetic construct
  misc_feature 1..20: note = C9Orf72 TTCN PAM targeting sequence
  source 1..20: mol_type = other RNA
cctgcagtacccacacagac

SEQ ID NO: 7858 - RNA, 20 nt, synthetic construct
  misc_feature 1..20: note = C9Orf72 TTCN PAM targeting sequence
  source 1..20: mol_type = other RNA
aaagcgttgccctttcccct

SEQ ID NO: 7859 - RNA, 20 nt, synthetic construct
  misc_feature 1..20: note = C9Orf72 TTCN PAM targeting sequence
  source 1..20: mol_type = other RNA
ggttcagctattatttgctg

SEQ ID NO: 7860 - RNA, 20 nt, synthetic construct
  misc_feature 1..20: note = C9Orf72 TTCN PAM targeting sequence
  source 1..20: mol_type = other RNA
gctattatttgctgtgtggc

SEQ ID NO: 7861 - RNA, 20 nt, synthetic construct
  misc_feature 1..20: note = C9Orf72 TTCN PAM targeting sequence
  source 1..20: mol_type = other RNA
atgaacgtctgatttctagg

SEQ ID NO: 7862 - RNA, 20 nt, synthetic construct
  misc_feature 1..20: note = C9Orf72 TTCN PAM targeting sequence
  source 1..20: mol_type = other RNA
tagaagttaagggatatgtc

SEQ ID NO: 7863 - RNA, 20 nt, synthetic construct
  misc_feature 1..20: note = C9Orf72 TTCN PAM targeting sequence
  source 1..20: mol_type = other RNA
agggtgcaaaatggggataa

SEQ ID NO: 7864 - RNA, 20 nt, synthetic construct
  misc_feature 1..20: note = C9Orf72 TTCN PAM targeting sequence
  source 1..20: mol_type = other RNA
tatcttacaggctgtagaag

SEQ ID NO: 7865 - RNA, 20 nt, synthetic construct
  misc_feature 1..20: note = C9Orf72 TTCN PAM targeting sequence
  source 1..20: mol_type = other RNA
acagcctgtaagataggaat

SEQ ID NO: 7866 - RNA, 20 nt, synthetic construct
  misc_feature 1..20: note = C9Orf72 TTCN PAM targeting sequence
  source 1..20: mol_type = other RNA
ttctacagcctgtaagatag

SEQ ID NO: 7867 - RNA, 20 nt, synthetic construct
  misc_feature 1..20: note = C9Orf72 TTCN PAM targeting sequence
  source 1..20: mol_type = other RNA
agtacaccttgatcaagagt

SEQ ID NO: 7868 - RNA, 20 nt, synthetic construct
  misc_feature 1..20: note = C9Orf72 TTCN PAM targeting sequence
  source 1..20: mol_type = other RNA
tacatacattgagcagagtg

SEQ ID NO: 7869 - RNA, 20 nt, synthetic construct
  misc_feature 1..20: note = C9Orf72 TTCN PAM targeting sequence
  source 1..20: mol_type = other RNA
gccggtccctccgtttgggg

SEQ ID NO: 7870 - RNA, 20 nt, synthetic construct
  misc_feature 1..20: note = C9Orf72 TTCN PAM targeting sequence
  source 1..20: mol_type = other RNA
gtcatggcttcagccggtcc

SEQ ID NO: 7871 - RNA, 20 nt, synthetic construct
  misc_feature 1..20: note = C9Orf72 TTCN PAM targeting sequence
  source 1..20: mol_type = other RNA
tctgtcatggcttcagccgg

SEQ ID NO: 7872 - RNA, 20 nt, synthetic construct
  misc_feature 1..20: note = C9Orf72 TTCN PAM targeting sequence
  source 1..20: mol_type = other RNA
caatccacgttcttctgtca

SEQ ID NO: 7873 - RNA, 20 nt, synthetic construct
  misc_feature 1..20: note = C9Orf72 TTCN PAM targeting sequence
  source 1..20: mol_type = other RNA
tggacatttattagttcccc

SEQ ID NO: 7874 - RNA, 20 nt, synthetic construct
  misc_feature 1..20: note = C9Orf72 TTCN PAM targeting sequence
  source 1..20: mol_type = other RNA
ccaaattaatacttttataa

SEQ ID NO: 7875 - RNA, 20 nt, synthetic construct
  misc_feature 1..20: note = C9Orf72 TTCN PAM targeting sequence
  source 1..20: mol_type = other RNA
tatgcctgtctttactgcaa

SEQ ID NO: 7876 - RNA, 20 nt, synthetic construct
  misc_feature 1..20: note = C9Orf72 TTCN PAM targeting sequence
  source 1..20: mol_type = other RNA
ggctggtcgtggtggctcac

SEQ ID NO: 7877 - RNA, 20 nt, synthetic construct
  misc_feature 1..20: note = C9Orf72 TTCN PAM targeting sequence
  source 1..20: mol_type = other RNA
tatgcctgtctttactttaa

SEQ ID NO: 7878 - RNA, 20 nt, synthetic construct
  misc_feature 1..20: note = C9Orf72 TTCN PAM targeting sequence
  source 1..20: mol_type = other RNA
ggcaccattgtcattgataa

SEQ ID NO: 7879 - RNA, 20 nt, synthetic construct
  misc_feature 1..20: note = C9Orf72 TTCN PAM targeting sequence
  source 1..20: mol_type = other RNA
ttagcaattttaatttcacc

SEQ ID NO: 7880 - RNA, 20 nt, synthetic construct
  misc_feature 1..20: note = C9Orf72 TTCN PAM targeting sequence
  source 1..20: mol_type = other RNA
ccctggtcctgtggtcctat

SEQ ID NO: 7881 - RNA, 20 nt, synthetic construct
  misc_feature 1..20: note = C9Orf72 TTCN PAM targeting sequence
  source 1..20: mol_type = other RNA
tggcagggcatggtggctca

SEQ ID NO: 7882 - RNA, 20 nt, synthetic construct
  misc_feature 1..20: note = C9Orf72 TTCN PAM targeting sequence
  source 1..20: mol_type = other RNA
acataagagttgtggtcatg

SEQ ID NO: 7883 - RNA, 20 nt, synthetic construct
  misc_feature 1..20: note = C9Orf72 TTCN PAM targeting sequence
  source 1..20: mol_type = other RNA
agaccagcctgggcaacctg

SEQ ID NO: 7884 - RNA, 20 nt, synthetic construct
  misc_feature 1..20: note = C9Orf72 TTCN PAM targeting sequence
  source 1..20: mol_type = other RNA
tttaattaattaatttattt

SEQ ID NO: 7885 - RNA, 20 nt, synthetic construct
  misc_feature 1..20: note = C9Orf72 TTCN PAM targeting sequence
  source 1..20: mol_type = other RNA
accatagctcgtgccacact

SEQ ID NO: 7886 - RNA, 20 nt, synthetic construct
  misc_feature 1..20: note = C9Orf72 TTCN PAM targeting sequence
  source 1..20: mol_type = other RNA
catgcctgttccactaggct

SEQ ID NO: 7887 - RNA, 20 nt, synthetic construct
  misc_feature 1..20: note = C9Orf72 TTCN PAM targeting sequence
  source 1..20: mol_type = other RNA
actaggctgggagctccttg

SEQ ID NO: 7888 - RNA, 20 nt, synthetic construct
  misc_feature 1..20: note = C9Orf72 TTCN PAM targeting sequence
  source 1..20: mol_type = other RNA
aggagctcccagcctagtgg

SEQ ID NO: 7889 - RNA, 20 nt, synthetic construct
  misc_feature 1..20: note = C9Orf72 TTCN PAM targeting sequence
  source 1..20: mol_type = other RNA
ttgtcttcaaggagctccca

SEQ ID NO: 7890 - RNA, 20 nt, synthetic construct
  misc_feature 1..20: note = C9Orf72 TTCN PAM targeting sequence
  source 1..20: mol_type = other RNA
gcagtcccttggggccatca

SEQ ID NO: 7891 - RNA, 20 nt, synthetic construct
  misc_feature 1..20: note = C9Orf72 TTCN PAM targeting sequence
  source 1..20: mol_type = other RNA
attcagacactcaattcagg

SEQ ID NO: 7892 - RNA, 20 nt, synthetic construct
  misc_feature 1..20: note = C9Orf72 TTCN PAM targeting sequence
  source 1..20: mol_type = other RNA
gacactcaattcaggctatg

SEQ ID NO: 7893 - RNA, 20 nt, synthetic construct
  misc_feature 1..20: note = C9Orf72 TTCN PAM targeting sequence
  source 1..20: mol_type = other RNA
ggctatgtgtaaacaaatga

SEQ ID NO: 7894 - RNA, 20 nt, synthetic construct
  misc_feature 1..20: note = C9Orf72 TTCN PAM targeting sequence
  source 1..20: mol_type = other RNA
tttgtttacacatagcctga

SEQ ID NO: 7895 - RNA, 20 nt, synthetic construct
  misc_feature 1..20: note = C9Orf72 TTCN PAM targeting sequence
  source 1..20: mol_type = other RNA
tcatttgtttacacatagcc

SEQ ID NO: 7896 - RNA, 20 nt, synthetic construct
  misc_feature 1..20: note = C9Orf72 TTCN PAM targeting sequence
  source 1..20: mol_type = other RNA
ttactttcttcatttgttta

SEQ ID NO: 7897 - RNA, 20 nt, synthetic construct
  misc_feature 1..20: note = C9Orf72 TTCN PAM targeting sequence
  source 1..20: mol_type = other RNA
tggattcattactttcttca

SEQ ID NO: 7898 - RNA, 20 nt, synthetic construct
  misc_feature 1..20: note = C9Orf72 TTCN PAM targeting sequence
  source 1..20: mol_type = other RNA
tacattcatggattcattac

SEQ ID NO: 7899 - RNA, 20 nt, synthetic construct
  misc_feature 1..20: note = C9Orf72 TTCN PAM targeting sequence
  source 1..20: mol_type = other RNA
tgtaatgaatgaaattaagg

SEQ ID NO: 7900 - RNA, 20 nt, synthetic construct
  misc_feature 1..20: note = C9Orf72 TTCN PAM targeting sequence
  source 1..20: mol_type = other RNA
ttacatgaatttcatacatt

SEQ ID NO: 7901 - RNA, 20 nt, synthetic construct
  misc_feature 1..20: note = C9Orf72 TTCN PAM targeting sequence
  source 1..20: mol_type = other RNA
ttcattacatgaatttcata

SEQ ID NO: 7902 - RNA, 20 nt, synthetic construct
  misc_feature 1..20: note = C9Orf72 TTCN PAM targeting sequence
  source 1..20: mol_type = other RNA
cttaatttcattcattacat

SEQ ID NO: 7903 - RNA, 20 nt, synthetic construct
  misc_feature 1..20: note = C9Orf72 TTCN PAM targeting sequence
  source 1..20: mol_type = other RNA
aacttcctgtttccgaatta

SEQ ID NO: 7904 - RNA, 20 nt, synthetic construct
  misc_feature 1..20: note = C9Orf72 TTCN PAM targeting sequence
  source 1..20: mol_type = other RNA
tgtttccgaattactggact

SEQ ID NO: 7905 - RNA, 20 nt, synthetic construct
  misc_feature 1..20: note = C9Orf72 TTCN PAM targeting sequence
  source 1..20: mol_type = other RNA
gaattactggactaacttca

SEQ ID NO: 7906 - RNA, 20 nt, synthetic construct
  misc_feature 1..20: note = C9Orf72 TTCN PAM targeting sequence
  source 1..20: mol_type = other RNA
gaaacaggaagtttgaaccc

SEQ ID NO: 7907 - RNA, 20 nt, synthetic construct
  misc_feature 1..20: note = C9Orf72 TTCN PAM targeting sequence
  source 1..20: mol_type = other RNA
tatattaccagtattgagag

SEQ ID NO: 7908 - RNA, 20 nt, synthetic construct
  misc_feature 1..20: note = C9Orf72 TTCN PAM targeting sequence
  source 1..20: mol_type = other RNA
cttgcctggatatcaaacaa

SEQ ID NO: 7909 - RNA, 20 nt, synthetic construct
  misc_feature 1..20: note = C9Orf72 TTCN PAM targeting sequence
  source 1..20: mol_type = other RNA
tgatagttctcttgcctgga

SEQ ID NO: 7910 - RNA, 20 nt, synthetic construct
  misc_feature 1..20: note = C9Orf72 TTCN PAM targeting sequence
  source 1..20: mol_type = other RNA
ctttagaaagataaagtttc

SEQ ID NO: 7911 - RNA, 20 nt, synthetic construct
  misc_feature 1..20: note = C9Orf72 TTCN PAM targeting sequence
  source 1..20: mol_type = other RNA
aaagtgaatgtccaggatta

SEQ ID NO: 7912 - RNA, 20 nt, synthetic construct
  misc_feature 1..20: note = C9Orf72 TTCN PAM targeting sequence
  source 1..20: mol_type = other RNA
agagttccctttactgtaac

SEQ ID NO: 7913 - RNA, 20 nt, synthetic construct
  misc_feature 1..20: note = C9Orf72 TTCN PAM targeting sequence
  source 1..20: mol_type = other RNA
ctttactgtaacacacaaaa

SEQ ID NO: 7914 - RNA, 20 nt, synthetic construct
  misc_feature 1..20: note = C9Orf72 TTCN PAM targeting sequence
  source 1..20: mol_type = other RNA
tttgtgtgttacagtaaagg

SEQ ID NO: 7915 - RNA, 20 nt, synthetic construct
  misc_feature 1..20: note = C9Orf72 TTCN PAM targeting sequence
  source 1..20: mol_type = other RNA
gggtctttcttttgtgtgtt

SEQ ID NO: 7916 - RNA, 20 nt, synthetic construct
  misc_feature 1..20: note = C9Orf72 TTCN PAM targeting sequence
  source 1..20: mol_type = other RNA
caagggacatctcctatcct

SEQ ID NO: 7917 - RNA, 20 nt, synthetic construct
  misc_feature 1..20: note = C9Orf72 TTCN PAM targeting sequence
  source 1..20: mol_type = other RNA
tccaggataggagatgtccc

SEQ ID NO: 7918 - RNA, 20 nt, synthetic construct
  misc_feature 1..20: note = C9Orf72 TTCN PAM targeting sequence
  source 1..20: mol_type = other RNA
cagcatatcactaggacaac

SEQ ID NO: 7919 - RNA, 20 nt, synthetic construct
  misc_feature 1..20: note = C9Orf72 TTCN PAM targeting sequence
  source 1..20: mol_type = other RNA
cttctaaggcacatagaagc

SEQ ID NO: 7920 - RNA, 20 nt, synthetic construct
  misc_feature 1..20: note = C9Orf72 TTCN PAM targeting sequence
  source 1..20: mol_type = other RNA
aaggcacatagaagcgttat

SEQ ID NO: 7921 - RNA, 20 nt, synthetic construct
  misc_feature 1..20: note = C9Orf72 TTCN PAM targeting sequence
  source 1..20: mol_type = other RNA
atgtgccttagaagagaatc

SEQ ID NO: 7922 - RNA, 20 nt, synthetic construct
  misc_feature 1..20: note = C9Orf72 TTCN PAM targeting sequence
  source 1..20: mol_type = other RNA
gtaagcaatatcactaaaaa

SEQ ID NO: 7923 - RNA, 20 nt, synthetic construct
  misc_feature 1..20: note = C9Orf72 TTCN PAM targeting sequence
  source 1..20: mol_type = other RNA
aactgagttgtcacatcagt

SEQ ID NO: 7924 - RNA, 20 nt, synthetic construct
  misc_feature 1..20: note = C9Orf72 TTCN PAM targeting sequence
  source 1..20: mol_type = other RNA
tgcagtaggattaagcatgt

SEQ ID NO: 7925 - RNA, 20 nt, synthetic construct
  misc_feature 1..20: note = C9Orf72 TTCN PAM targeting sequence
  source 1..20: mol_type = other RNA
atctcctggcaataaaacca

SEQ ID NO: 7926 - RNA, 20 nt, synthetic construct
  misc_feature 1..20: note = C9Orf72 TTCN PAM targeting sequence
  source 1..20: mol_type = other RNA
gagtttaacaggtttctatc

SEQ ID NO: 7927 - RNA, 20 nt, synthetic construct
  misc_feature 1..20: note = C9Orf72 TTCN PAM targeting sequence
  source 1..20: mol_type = other RNA
gtggtccttctgagtttaac

SEQ ID NO: 7928 - RNA, 20 nt, synthetic construct
  misc_feature 1..20: note = C9Orf72 TTCN PAM targeting sequence
  source 1..20: mol_type = other RNA
atggacagcaataggaagca

SEQ ID NO: 7929 - RNA, 20 nt, synthetic construct
  misc_feature 1..20: note = C9Orf72 TTCN PAM targeting sequence
  source 1..20: mol_type = other RNA
tattgctgtccattgaaact

SEQ ID NO: 7930 - RNA, 20 nt, synthetic construct
  misc_feature 1..20: note = C9Orf72 TTCN PAM targeting sequence
  source 1..20: mol_type = other RNA
tctgatcagactctcaggtt

SEQ ID NO: 7931 - RNA, 20 nt, synthetic construct
  misc_feature 1..20: note = C9Orf72 TTCN PAM targeting sequence
  source 1..20: mol_type = other RNA
gatcagactctcaggttatt

SEQ ID NO: 7932 - RNA, 20 nt, synthetic construct
  misc_feature 1..20: note = C9Orf72 TTCN PAM targeting sequence
  source 1..20: mol_type = other RNA
attggtcagttcagggcctg

SEQ ID NO: 7933 - RNA, 20 nt, synthetic construct
  misc_feature 1..20: note = C9Orf72 TTCN PAM targeting sequence
  source 1..20: mol_type = other RNA
gggcctgccttcctatggct

SEQ ID NO: 7934 - RNA, 20 nt, synthetic construct
  misc_feature 1..20: note = C9Orf72 TTCN PAM targeting sequence
  source 1..20: mol_type = other RNA
tatggctcttttgttgcaaa

SEQ ID NO: 7935 - RNA, 20 nt, synthetic construct
  misc_feature 1..20: note = C9Orf72 TTCN PAM targeting sequence
  source 1..20: mol_type = other RNA
aaacttctccaggtacatgt

SEQ ID NO: 7936 - RNA, 20 nt, synthetic construct
  misc_feature 1..20: note = C9Orf72 TTCN PAM targeting sequence
  source 1..20: mol_type = other RNA
ccaggtacatgtaaaagttt

SEQ ID NO: 7937 - RNA, 20 nt, synthetic construct
  misc_feature 1..20: note = C9Orf72 TTCN PAM targeting sequence
  source 1..20: mol_type = other RNA
acagcctaaatattaaaaaa

SEQ ID NO: 7938 - RNA, 20 nt, synthetic construct
  misc_feature 1..20: note = C9Orf72 TTCN PAM targeting sequence
  source 1..20: mol_type = other RNA
tctcaatagaataataggac

SEQ ID NO: 7939 - RNA, 20 nt, synthetic construct
  misc_feature 1..20: note = C9Orf72 TTCN PAM targeting sequence
  source 1..20: mol_type = other RNA
attgagatgaaccacggtta

SEQ ID NO: 7940 - RNA, 20 nt, synthetic construct
  misc_feature 1..20: note = C9Orf72 TTCN PAM targeting sequence
  source 1..20: mol_type = other RNA
atttaaaatagggaaactgt

SEQ ID NO: 7941 - RNA, 20 nt, synthetic construct
  misc_feature 1..20: note = C9Orf72 TTCN PAM targeting sequence
  source 1..20: mol_type = other RNA
ctattttaaatggaatgcct

SEQ ID NO: 7942 - RNA, 20 nt, synthetic construct
  misc_feature 1..20: note = C9Orf72 TTCN PAM targeting sequence
  source 1..20: mol_type = other RNA
tttactgacaaagactaata

SEQ ID NO: 7943 - RNA, 20 nt, synthetic construct
  misc_feature 1..20: note = C9Orf72 TTCN PAM targeting sequence
  source 1..20: mol_type = other RNA
gaagaactttaaaattgttc

SEQ ID NO: 7944 - RNA, 20 nt, synthetic construct
  misc_feature 1..20: note = C9Orf72 TTCN PAM targeting sequence
  source 1..20: mol_type = other RNA
gaagcccagggagagtttag

SEQ ID NO: 7945 - RNA, 20 nt, synthetic construct
  misc_feature 1..20: note = C9Orf72 TTCN PAM targeting sequence
  source 1..20: mol_type = other RNA
tcagaagcccagggagagtt

SEQ ID NO: 7946 - RNA, 20 nt, synthetic construct
  misc_feature 1..20: note = C9Orf72 TTCN PAM targeting sequence
  source 1..20: mol_type = other RNA
ttaattaatgctttcagcac

SEQ ID NO: 7947 - RNA, 20 nt, synthetic construct
  misc_feature 1..20: note = C9Orf72 TTCN PAM targeting sequence
  source 1..20: mol_type = other RNA
gcactcctacagcctcatta

SEQ ID NO: 7948 - RNA, 20 nt, synthetic construct
  misc_feature 1..20: note = C9Orf72 TTCN PAM targeting sequence
  source 1..20: mol_type = other RNA
tggtcccaagggttcccaaa

SEQ ID NO: 7949 - RNA, 20 nt, synthetic construct
  misc_feature 1..20: note = C9Orf72 TTCN PAM targeting sequence
  source 1..20: mol_type = other RNA
caaagcaaatacatgttccc

SEQ ID NO: 7950 - RNA, 20 nt, synthetic construct
  misc_feature 1..20: note = C9Orf72 TTCN PAM targeting sequence
  source 1..20: mol_type = other RNA
ccagcagacatttatgtttt

SEQ ID NO: 7951 - RNA, 20 nt, synthetic construct
  misc_feature 1..20: note = C9Orf72 TTCN PAM targeting sequence
  source 1..20: mol_type = other RNA
tccagaagagttggttttcc

SEQ ID NO: 7952 - RNA, 20 nt, synthetic construct
  misc_feature 1..20: note = C9Orf72 TTCN PAM targeting sequence
  source 1..20: mol_type = other RNA
ggaggaaaacataaatgtct

SEQ ID NO: 7953 - RNA, 20 nt, synthetic construct
  misc_feature 1..20: note = C9Orf72 TTCN PAM targeting sequence
  source 1..20: mol_type = other RNA
attcttgatctaaaacaaat

SEQ ID NO: 7954 - RNA, 20 nt, synthetic construct
  misc_feature 1..20: note = C9Orf72 TTCN PAM targeting sequence
  source 1..20: mol_type = other RNA
tgatctaaaacaaatgttaa

SEQ ID NO: 7955 - RNA, 20 nt, synthetic construct
  misc_feature 1..20: note = C9Orf72 TTCN PAM targeting sequence
  source 1..20: mol_type = other RNA
caaacattttcaaagttggc

SEQ ID NO: 7956 - RNA, 20 nt, synthetic construct
  misc_feature 1..20: note = C9Orf72 TTCN PAM targeting sequence
  source 1..20: mol_type = other RNA
aagttggcagcattccattc

SEQ ID NO: 7957 - RNA, 20 nt, synthetic construct
  misc_feature 1..20: note = C9Orf72 TTCN PAM targeting sequence
  source 1..20: mol_type = other RNA
attctcctcttcctatattc

SEQ ID NO: 7958 - RNA, 20 nt, synthetic construct
  misc_feature 1..20: note = C9Orf72 TTCN PAM targeting sequence
  source 1..20: mol_type = other RNA
cctcttcctatattccaaga

SEQ ID NO: 7959 - RNA, 20 nt, synthetic construct
  misc_feature 1..20: note = C9Orf72 TTCN PAM targeting sequence
  source 1..20: mol_type = other RNA
tatattccaagaaactccag

SEQ ID NO: 7960 - RNA, 20 nt, synthetic construct
  misc_feature 1..20: note = C9Orf72 TTCN PAM targeting sequence
  source 1..20: mol_type = other RNA
aagaaactccagcaagtgat

SEQ ID NO: 7961 - RNA, 20 nt, synthetic construct
  misc_feature 1..20: note = C9Orf72 TTCN PAM targeting sequence
  source 1..20: mol_type = other RNA
tggaatataggaagaggaga

SEQ ID NO: 7962 - RNA, 20 nt, synthetic construct
  misc_feature 1..20: note = C9Orf72 TTCN PAM targeting sequence
  source 1..20: mol_type = other RNA
tcatagagtaaaaatatcta

SEQ ID NO: 7963 - RNA, 20 nt, synthetic construct
  misc_feature 1..20: note = C9Orf72 TTCN PAM targeting sequence
  source 1..20: mol_type = other RNA
tagagtaaaaatatctagac

SEQ ID NO: 7964 - RNA, 20 nt, synthetic construct
  misc_feature 1..20: note = C9Orf72 TTCN PAM targeting sequence
  source 1..20: mol_type = other RNA
ttgactgcttttgtctagat

SEQ ID NO: 7965 - RNA, 20 nt, synthetic construct
  misc_feature 1..20: note = C9Orf72 TTCN PAM targeting sequence
  source 1..20: mol_type = other RNA
gagtagcttcccagaaagat

SEQ ID NO: 7966 - RNA, 20 nt, synthetic construct
  misc_feature 1..20: note = C9Orf72 TTCN PAM targeting sequence
  source 1..20: mol_type = other RNA
cagaaagatattcttagaaa

SEQ ID NO: 7967 - RNA, 20 nt, synthetic construct
  misc_feature 1..20: note = C9Orf72 TTCN PAM targeting sequence
  source 1..20: mol_type = other RNA
gggaagctactcagaatatt

SEQ ID NO: 7968 - RNA, 20 nt, synthetic construct
  misc_feature 1..20: note = C9Orf72 TTCN PAM targeting sequence
  source 1..20: mol_type = other RNA
tagaaaagctccctgtttgg

SEQ ID NO: 7969 - RNA, 20 nt, synthetic construct
  misc_feature 1..20: note = C9Orf72 TTCN PAM targeting sequence
  source 1..20: mol_type = other RNA
aagaatatctttctgggaag

SEQ ID NO: 7970 - RNA, 20 nt, synthetic construct
  misc_feature 1..20: note = C9Orf72 TTCN PAM targeting sequence
  source 1..20: mol_type = other RNA
gggaaattttcctaaggaaa

SEQ ID NO: 7971 - RNA, 20 nt, synthetic construct
  misc_feature 1..20: note = C9Orf72 TTCN PAM targeting sequence
  source 1..20: mol_type = other RNA
cagaagtgatttgtgagtca

SEQ ID NO: 7972 - RNA, 20 nt, synthetic construct
  misc_feature 1..20: note = C9Orf72 TTCN PAM targeting sequence
  source 1..20: mol_type = other RNA
taaggaaaaagcatagattt

SEQ ID NO: 7973 - RNA, 20 nt, synthetic construct
  misc_feature 1..20: note = C9Orf72 TTCN PAM targeting sequence
  source 1..20: mol_type = other RNA
ttaggaaaatttcccagaag

SEQ ID NO: 7974 - RNA, 20 nt, synthetic construct
  misc_feature 1..20: note = C9Orf72 TTCN PAM targeting sequence
  source 1..20: mol_type = other RNA
acaaagcttggatgtgaaag

SEQ ID NO: 7975 - RNA, 20 nt, synthetic construct
  misc_feature 1..20: note = C9Orf72 TTCN PAM targeting sequence
  source 1..20: mol_type = other RNA
cattgtcttcttatatttgt

SEQ ID NO: 7976 - RNA, 20 nt, synthetic construct
  misc_feature 1..20: note = C9Orf72 TTCN PAM targeting sequence
  source 1..20: mol_type = other RNA
agaattatcacaatttccta

SEQ ID NO: 7977 - RNA, 20 nt, synthetic construct
  misc_feature 1..20: note = C9Orf72 TTCN PAM targeting sequence
  source 1..20: mol_type = other RNA
agaaattattctcattgtct

SEQ ID NO: 7978 - RNA, 20 nt, synthetic construct
  misc_feature 1..20: note = C9Orf72 TTCN PAM targeting sequence
  source 1..20: mol_type = other RNA
taaaaaatatatatacatat

SEQ ID NO: 7979 - RNA, 20 nt, synthetic construct
  misc_feature 1..20: note = C9Orf72 TTCN PAM targeting sequence
  source 1..20: mol_type = other RNA
ttacagtcaaatatgtatat

SEQ ID NO: 7980 - RNA, 20 nt, synthetic construct
  misc_feature 1..20: note = C9Orf72 TTCN PAM targeting sequence
  source 1..20: mol_type = other RNA
gagtttatttctttacagtc

SEQ ID NO: 7981 - RNA, 20 nt, synthetic construct
  misc_feature 1..20: note = C9Orf72 TTCN PAM targeting sequence
  source 1..20: mol_type = other RNA
ggtgattttaatttcttttc

SEQ ID NO: 7982 - RNA, 20 nt, synthetic construct
  misc_feature 1..20: note = C9Orf72 TTCN PAM targeting sequence
  source 1..20: mol_type = other RNA
tttctgtactttcctaaatt

SEQ ID NO: 7983 - RNA, 20 nt, synthetic construct
  misc_feature 1..20: note = C9Orf72 TTCN PAM targeting sequence
  source 1..20: mol_type = other RNA
gtactttcctaaatttttgt

SEQ ID NO: 7984 - RNA, 20 nt, synthetic construct
  misc_feature 1..20: note = C9Orf72 TTCN PAM targeting sequence
  source 1..20: mol_type = other RNA
taaatttttgtagttttata

SEQ ID NO: 7985 - RNA, 20 nt, synthetic construct
  misc_feature 1..20: note = C9Orf72 TTCN PAM targeting sequence
  source 1..20: mol_type = other RNA
aaattaaatatatattactt

SEQ ID NO: 7986 - RNA, 20 nt, synthetic construct
  misc_feature 1..20: note = C9Orf72 TTCN PAM targeting sequence
  source 1..20: mol_type = other RNA
tttctcttagcaatgtgaat

SEQ ID NO: 7987 - RNA, 20 nt, synthetic construct
  misc_feature 1..20: note = C9Orf72 TTCN PAM targeting sequence
  source 1..20: mol_type = other RNA
cttagcaatgtgaatatagt

SEQ ID NO: 7988 - RNA, 20 nt, synthetic construct
  misc_feature 1..20: note = C9Orf72 TTCN PAM targeting sequence
  source 1..20: mol_type = other RNA
cattgctaagagaaaggaat

SEQ ID NO: 7989 - RNA, 20 nt, synthetic construct
  misc_feature 1..20: note = C9Orf72 TTCN PAM targeting sequence
  source 1..20: mol_type = other RNA
ccatgtaggaagactatatt

SEQ ID NO: 7990 - RNA, 20 nt, synthetic construct
  misc_feature 1..20: note = C9Orf72 TTCN PAM targeting sequence
  source 1..20: mol_type = other RNA
tactaatctagtgattaatt

SEQ ID NO: 7991 - RNA, 20 nt, synthetic construct
  misc_feature 1..20: note = C9Orf72 TTCN PAM targeting sequence
  source 1..20: mol_type = other RNA
ttaatttcctactaatctag

SEQ ID NO: 7992 - RNA, 20 nt, synthetic construct
  misc_feature 1..20: note = C9Orf72 TTCN PAM targeting sequence
  source 1..20: mol_type = other RNA
tccattgttaatttcattaa

SEQ ID NO: 7993 - RNA, 20 nt, synthetic construct
  misc_feature 1..20: note = C9Orf72 TTCN PAM targeting sequence
  source 1..20: mol_type = other RNA
tgtatgtaaataaattcctc

SEQ ID NO: 7994 - RNA, 20 nt, synthetic construct
  misc_feature 1..20: note = C9Orf72 TTCN PAM targeting sequence
  source 1..20: mol_type = other RNA
tcccagtagattctctacca

SEQ ID NO: 7995 - RNA, 20 nt, synthetic construct
  misc_feature 1..20: note = C9Orf72 TTCN PAM targeting sequence
  source 1..20: mol_type = other RNA
ctaccaactacctccagttt

SEQ ID NO: 7996 - RNA, 20 nt, synthetic construct
  misc_feature 1..20: note = C9Orf72 TTCN PAM targeting sequence
  source 1..20: mol_type = other RNA
attagctgatccttgtttag

SEQ ID NO: 7997 - RNA, 20 nt, synthetic construct
  misc_feature 1..20: note = C9Orf72 TTCN PAM targeting sequence
  source 1..20: mol_type = other RNA
aaacaaggatcagctaatag

SEQ ID NO: 7998 - RNA, 20 nt, synthetic construct
  misc_feature 1..20: note = C9Orf72 TTCN PAM targeting sequence
  source 1..20: mol_type = other RNA
ttttgatttactaaaaatca

SEQ ID NO: 7999 - RNA, 20 nt, synthetic construct
  misc_feature 1..20: note = C9Orf72 TTCN PAM targeting sequence
  source 1..20: mol_type = other RNA
tggagtttcattttgattta

SEQ ID NO: 8000 - RNA, 20 nt, synthetic construct
  misc_feature 1..20: note = C9Orf72 TTCN PAM targeting sequence
  source 1..20: mol_type = other RNA
tgtctttcttggagtttcat

SEQ ID NO: 8001 - RNA, 20 nt, synthetic construct
  misc_feature 1..20: note = C9Orf72 TTCN PAM targeting sequence
  source 1..20: mol_type = other RNA
tcttcttgtctttcttggag

SEQ ID NO: 8002 - RNA, 20 nt, synthetic construct
  misc_feature 1..20: note = C9Orf72 TTCN PAM targeting sequence
  source 1..20: mol_type = other RNA
catttcatcttcttgtcttt

SEQ ID NO: 8003 - RNA, 20 nt, synthetic construct
  misc_feature 1..20: note = C9Orf72 TTCN PAM targeting sequence
  source 1..20: mol_type = other RNA
ttttcacatttcatcttctt

SEQ ID NO: 8004 - RNA, 20 nt, synthetic construct
  misc_feature 1..20: note = C9Orf72 TTCN PAM targeting sequence
  source 1..20: mol_type = other RNA
atcactgtgcatagcaccaa

SEQ ID NO: 8005 - RNA, 20 nt, synthetic construct
  misc_feature 1..20: note = C9Orf72 TTCN PAM targeting sequence
  source 1..20: mol_type = other RNA
tggtttccatcactgtgcat

SEQ ID NO: 8006 - RNA, 20 nt, synthetic construct
  misc_feature 1..20: note = C9Orf72 TTCN PAM targeting sequence
  source 1..20: mol_type = other RNA
tattcatggtttccatcact

SEQ ID NO: 8007 - RNA, 20 nt, synthetic construct
  misc_feature 1..20: note = C9Orf72 TTCN PAM targeting sequence
  source 1..20: mol_type = other RNA
gatagcaggataatagaaga

SEQ ID NO: 8008 - RNA, 20 nt, synthetic construct
  misc_feature 1..20: note = C9Orf72 TTCN PAM targeting sequence
  source 1..20: mol_type = other RNA
attatcctgctatccgaatg

SEQ ID NO: 8009 - RNA, 20 nt, synthetic construct
  misc_feature 1..20: note = C9Orf72 TTCN PAM targeting sequence
  source 1..20: mol_type = other RNA
ctcttctattatcctgctat

SEQ ID NO: 8010 - RNA, 20 nt, synthetic construct
  misc_feature 1..20: note = C9Orf72 TTCN PAM targeting sequence
  source 1..20: mol_type = other RNA
tttgacagctgccaactccc

SEQ ID NO: 8011 - RNA, 20 nt, synthetic construct
  misc_feature 1..20: note = C9Orf72 TTCN PAM targeting sequence
  source 1..20: mol_type = other RNA
cggctgcccacccccttctc

SEQ ID NO: 8012 - RNA, 20 nt, synthetic construct
  misc_feature 1..20: note = C9Orf72 TTCN PAM targeting sequence
  source 1..20: mol_type = other RNA
ccaggccttgattcccagcc

SEQ ID NO: 8013 - RNA, 20 nt, synthetic construct
  misc_feature 1..20: note = C9Orf72 TTCN PAM targeting sequence
  source 1..20: mol_type = other RNA
cagcccacagaaacgccgtg

SEQ ID NO: 8014 - RNA, 20 nt, synthetic construct
  misc_feature 1..20: note = C9Orf72 TTCN PAM targeting sequence
  source 1..20: mol_type = other RNA
gtgggctgggaatcaaggcc

SEQ ID NO: 8015 - RNA, 20 nt, synthetic construct
  misc_feature 1..20: note = C9Orf72 TTCN PAM targeting sequence
  source 1..20: mol_type = other RNA
cacactccaaaagcgcagaa

SEQ ID NO: 8016 - RNA, 20 nt, synthetic construct
  misc_feature 1..20: note = C9Orf72 TTCN PAM targeting sequence
  source 1..20: mol_type = other RNA
gcgcttttggagtgtgagaa

SEQ ID NO: 8017 - RNA, 20 nt, synthetic construct
  misc_feature 1..20: note = C9Orf72 TTCN PAM targeting sequence
  source 1..20: mol_type = other RNA
acatagtggccttttatttt

SEQ ID NO: 8018 - RNA, 20 nt, synthetic construct
  misc_feature 1..20: note = C9Orf72 TTCN PAM targeting sequence
  source 1..20: mol_type = other RNA
tatcaatcacagcgttttcc

SEQ ID NO: 8019 - RNA, 20 nt, synthetic construct
  misc_feature 1..20: note = C9Orf72 TTCN PAM targeting sequence
  source 1..20: mol_type = other RNA
aagctactccccaacctact

SEQ ID NO: 8020 - RNA, 20 nt, synthetic construct
  misc_feature 1..20: note = C9Orf72 TTCN PAM targeting sequence
  source 1..20: mol_type = other RNA
accagctcctctaattaaag

SEQ ID NO: 8021 - RNA, 20 nt, synthetic construct
  misc_feature 1..20: note = C9Orf72 TTCN PAM targeting sequence
  source 1..20: mol_type = other RNA
gccatggtctttgtaatccc

SEQ ID NO: 8022 - RNA, 20 nt, synthetic construct
  misc_feature 1..20: note = C9Orf72 TTCN PAM targeting sequence
  source 1..20: mol_type = other RNA
tttaagtttgtccaaaggtg

SEQ ID NO: 8023 - RNA, 20 nt, synthetic construct
  misc_feature 1..20: note = C9Orf72 TTCN PAM targeting sequence
  source 1..20: mol_type = other RNA
tctactttcttttaagtttg

SEQ ID NO: 8024 - RNA, 20 nt, synthetic construct
  misc_feature 1..20: note = C9Orf72 TTCN PAM targeting sequence
  source 1..20: mol_type = other RNA
aactttcctctactttcttt

SEQ ID NO: 8025 - RNA, 20 nt, synthetic construct
  misc_feature 1..20: note = C9Orf72 TTCN PAM targeting sequence
  source 1..20: mol_type = other RNA
tctaactttcctctactttc

SEQ ID NO: 8026 - RNA, 20 nt, synthetic construct
  misc_feature 1..20: note = C9Orf72 TTCN PAM targeting sequence
  source 1..20: mol_type = other RNA
tactaaaagaagttcaaggt

SEQ ID NO: 8027 - RNA, 20 nt, synthetic construct
  misc_feature 1..20: note = C9Orf72 TTCN PAM targeting sequence
  source 1..20: mol_type = other RNA
tttagtaagaagcaagttct

SEQ ID NO: 8028 - RNA, 20 nt, synthetic construct
  misc_feature 1..20: note = C9Orf72 TTCN PAM targeting sequence
  source 1..20: mol_type = other RNA
aggtagcagtaccctaggtt

SEQ ID NO: 8029 - RNA, 20 nt, synthetic construct
  misc_feature 1..20: note = C9Orf72 TTCN PAM targeting sequence
  source 1..20: mol_type = other RNA
tgtgcctaatctctgaattc

SEQ ID NO: 8030 - RNA, 20 nt, synthetic construct
  misc_feature 1..20: note = C9Orf72 TTCN PAM targeting sequence
  source 1..20: mol_type = other RNA
gagattaggcacatgaacaa

SEQ ID NO: 8031 - RNA, 20 nt, synthetic construct
  misc_feature 1..20: note = C9Orf72 TTCN PAM targeting sequence
  source 1..20: mol_type = other RNA
aataccacttaataatgatg

SEQ ID NO: 8032 - RNA, 20 nt, synthetic construct
  misc_feature 1..20: note = C9Orf72 TTCN PAM targeting sequence
  source 1..20: mol_type = other RNA
caatgtcagaatgttctcat

SEQ ID NO: 8033 - RNA, 20 nt, synthetic construct
  misc_feature 1..20: note = C9Orf72 TTCN PAM targeting sequence
  source 1..20: mol_type = other RNA
gacattgagaataaacagtt

SEQ ID NO: 8034 - RNA, 20 nt, synthetic construct
  misc_feature 1..20: note = C9Orf72 TTCN PAM targeting sequence
  source 1..20: mol_type = other RNA
catctaggtcaacagagaaa

SEQ ID NO: 8035 - RNA, 20 nt, synthetic construct
  misc_feature 1..20: note = C9Orf72 TTCN PAM targeting sequence
  source 1..20: mol_type = other RNA
ctgttgacctagatgagaac

SEQ ID NO: 8036 - RNA, 20 nt, synthetic construct
  misc_feature 1..20: note = C9Orf72 TTCN PAM targeting sequence
  source 1..20: mol_type = other RNA
atggtgcatgtgcctcagca

SEQ ID NO: 8037 - RNA, 20 nt, synthetic construct
  misc_feature 1..20: note = C9Orf72 TTCN PAM targeting sequence
  source 1..20: mol_type = other RNA
cctttcaatggtgcatgtgc

SEQ ID NO: 8038 - RNA, 20 nt, synthetic construct
  misc_feature 1..20: note = C9Orf72 TTCN PAM targeting sequence
  source 1..20: mol_type = other RNA
gtactagcagcagttgctat

SEQ ID NO: 8039 - RNA, 20 nt, synthetic construct
  misc_feature 1..20: note = C9Orf72 TTCN PAM targeting sequence
  source 1..20: mol_type = other RNA
ttaagcgtaattggaaatct

SEQ ID NO: 8040 - RNA, 20 nt, synthetic construct
  misc_feature 1..20: note = C9Orf72 TTCN PAM targeting sequence
  source 1..20: mol_type = other RNA
aattacgcttaaagaatcat

SEQ ID NO: 8041 - RNA, 20 nt, synthetic construct
  misc_feature 1..20: note = C9Orf72 TTCN PAM targeting sequence
  source 1..20: mol_type = other RNA
cctaaaaaatagatttccaa

SEQ ID NO: 8042 - RNA, 20 nt, synthetic construct
  misc_feature 1..20: note = C9Orf72 TTCN PAM targeting sequence
  source 1..20: mol_type = other RNA
tttaagttatcaacctataa

SEQ ID NO: 8043 - RNA, 20 nt, synthetic construct
  misc_feature 1..20: note = C9Orf72 TTCN PAM targeting sequence
  source 1..20: mol_type = other RNA
atgagcaaacaaaacatctc

SEQ ID NO: 8044 - RNA, 20 nt, synthetic construct
  misc_feature 1..20: note = C9Orf72 TTCN PAM targeting sequence
  source 1..20: mol_type = other RNA
ggaagaagaggatcttaaca

SEQ ID NO: 8045 - RNA, 20 nt, synthetic construct
  misc_feature 1..20: note = C9Orf72 TTCN PAM targeting sequence
  source 1..20: mol_type = other RNA
tgaatcagaggtccacaggc

SEQ ID NO: 8046 - RNA, 20 nt, synthetic construct
  misc_feature 1..20: note = C9Orf72 TTCN PAM targeting sequence
  source 1..20: mol_type = other RNA
tcctgaatcagaggtccaca

SEQ ID NO: 8047 - RNA, 20 nt, synthetic construct
  misc_feature 1..20: note = C9Orf72 TTCN PAM targeting sequence
  source 1..20: mol_type = other RNA
gtagaaaagaaccatgaatt

SEQ ID NO: 8048 - RNA, 20 nt, synthetic construct
  misc_feature 1..20: note = C9Orf72 TTCN PAM targeting sequence
  source 1..20: mol_type = other RNA
actgaatttattggataata

SEQ ID NO: 8049 - RNA, 20 nt, synthetic construct
  misc_feature 1..20: note = C9Orf72 TTCN PAM targeting sequence
  source 1..20: mol_type = other RNA
tttctactgaatttattgga

SEQ ID NO: 8050 - RNA, 20 nt, synthetic construct
  misc_feature 1..20: note = C9Orf72 TTCN PAM targeting sequence
  source 1..20: mol_type = other RNA
tggttcttttctactgaatt

SEQ ID NO: 8051 - RNA, 20 nt, synthetic construct
  misc_feature 1..20: note = C9Orf72 TTCN PAM targeting sequence
  source 1..20: mol_type = other RNA
aaaccacctgaccaatttat

SEQ ID NO: 8052 - RNA, 20 nt, synthetic construct
  misc_feature 1..20: note = C9Orf72 TTCN PAM targeting sequence
  source 1..20: mol_type = other RNA
gataaattggtcaggtggtt

SEQ ID NO: 8053 - RNA, 20 nt, synthetic construct
  misc_feature 1..20: note = C9Orf72 TTCN PAM targeting sequence
  source 1..20: mol_type = other RNA
tcctttaattaaaataagaa

SEQ ID NO: 8054 - RNA, 20 nt, synthetic construct
  misc_feature 1..20: note = C9Orf72 TTCN PAM targeting sequence
  source 1..20: mol_type = other RNA
tattttaattaaaggaggaa

SEQ ID NO: 8055 - RNA, 20 nt, synthetic construct
  misc_feature 1..20: note = C9Orf72 TTCN PAM targeting sequence
  source 1..20: mol_type = other RNA
tttatgtatgaagagactga

SEQ ID NO: 8056 - RNA, 20 nt, synthetic construct
  misc_feature 1..20: note = C9Orf72 TTCN PAM targeting sequence
  source 1..20: mol_type = other RNA
tacataaaagaaatacatca

SEQ ID NO: 8057 - RNA, 20 nt, synthetic construct
  misc_feature 1..20: note = C9Orf72 TTCN PAM targeting sequence
  source 1..20: mol_type = other RNA
tcagtctcttcatacataaa

SEQ ID NO: 8058 - RNA, 20 nt, synthetic construct
  misc_feature 1..20: note = C9Orf72 TTCN PAM targeting sequence
  source 1..20: mol_type = other RNA
ttgttcctcagtctcttcat

SEQ ID NO: 8059 - RNA, 20 nt, synthetic construct
  misc_feature 1..20: note = C9Orf72 TTCN PAM targeting sequence
  source 1..20: mol_type = other RNA
gtgatttttccttgttcctc

SEQ ID NO: 8060 - RNA, 20 nt, synthetic construct
  misc_feature 1..20: note = C9Orf72 TTCN PAM targeting sequence
  source 1..20: mol_type = other RNA
tcctctggcttttctgtgat

SEQ ID NO: 8061 - RNA, 20 nt, synthetic construct
  misc_feature 1..20: note = C9Orf72 TTCN PAM targeting sequence
  source 1..20: mol_type = other RNA
agcttcatcctctggctttt

SEQ ID NO: 8062 - RNA, 20 nt, synthetic construct
  misc_feature 1..20: note = C9Orf72 TTCN PAM targeting sequence
  source 1..20: mol_type = other RNA
acaatcaaataaaaaccttc

SEQ ID NO: 8063 - RNA, 20 nt, synthetic construct
  misc_feature 1..20: note = C9Orf72 TTCN PAM targeting sequence
  source 1..20: mol_type = other RNA
ctaaaaaatgaccaagaaag

SEQ ID NO: 8064 - RNA, 20 nt, synthetic construct
  misc_feature 1..20: note = C9Orf72 TTCN PAM targeting sequence
  source 1..20: mol_type = other RNA
tggtcattttttagagaagg

SEQ ID NO: 8065 - RNA, 20 nt, synthetic construct
  misc_feature 1..20: note = C9Orf72 TTCN PAM targeting sequence
  source 1..20: mol_type = other RNA
tgaacagagtcatcacgtaa

SEQ ID NO: 8066 - RNA, 20 nt, synthetic construct
  misc_feature 1..20: note = C9Orf72 TTCN PAM targeting sequence
  source 1..20: mol_type = other RNA
tgaacctaataagcttgctt

SEQ ID NO: 8067 - RNA, 20 nt, synthetic construct
  misc_feature 1..20: note = C9Orf72 TTCN PAM targeting sequence
  source 1..20: mol_type = other RNA
ataatagtcccagtaaaatg

SEQ ID NO: 8068 - RNA, 20 nt, synthetic construct
  misc_feature 1..20: note = C9Orf72 TTCN PAM targeting sequence
  source 1..20: mol_type = other RNA
tatttaaaactcatggaaag

SEQ ID NO: 8069 - RNA, 20 nt, synthetic construct
  misc_feature 1..20: note = C9Orf72 TTCN PAM targeting sequence
  source 1..20: mol_type = other RNA
atgagttttaaataagaacc

SEQ ID NO: 8070 - RNA, 20 nt, synthetic construct
  misc_feature 1..20: note = C9Orf72 TTCN PAM targeting sequence
  source 1..20: mol_type = other RNA
tttccatgagttttaaataa

SEQ ID NO: 8071 - RNA, 20 nt, synthetic construct
  misc_feature 1..20: note = C9Orf72 TTCN PAM targeting sequence
  source 1..20: mol_type = other RNA
agttgttaaaaacagataaa

SEQ ID NO: 8072 - RNA, 20 nt, synthetic construct
  misc_feature 1..20: note = C9Orf72 TTCN PAM targeting sequence
  source 1..20: mol_type = other RNA
atgtatatttcaaaatgagt

SEQ ID NO: 8073 - RNA, 20 nt, synthetic construct
  misc_feature 1..20: note = C9Orf72 TTCN PAM targeting sequence
  source 1..20: mol_type = other RNA
aaatgagtaactcacatatt

SEQ ID NO: 8074 - RNA, 20 nt, synthetic construct
  misc_feature 1..20: note = C9Orf72 TTCN PAM targeting sequence
  source 1..20: mol_type = other RNA
cagcactgtccaaattaatg

SEQ ID NO: 8075 - RNA, 20 nt, synthetic construct
  misc_feature 1..20: note = C9Orf72 TTCN PAM targeting sequence
  source 1..20: mol_type = other RNA
ttaatttggacagtgctgtg

SEQ ID NO: 8076 - RNA, 20 nt, synthetic construct
  misc_feature 1..20: note = C9Orf72 TTCN PAM targeting sequence
  source 1..20: mol_type = other RNA
ctttccacactgccatttct

SEQ ID NO: 8077 - RNA, 20 nt, synthetic construct
  misc_feature 1..20: note = C9Orf72 TTCN PAM targeting sequence
  source 1..20: mol_type = other RNA
acactgccatttctcgttag

SEQ ID NO: 8078 - RNA, 20 nt, synthetic construct
  misc_feature 1..20: note = C9Orf72 TTCN PAM targeting sequence
  source 1..20: mol_type = other RNA
cgttagaatggcaacttcta

SEQ ID NO: 8079 - RNA, 20 nt, synthetic construct
  misc_feature 1..20: note = C9Orf72 TTCN PAM targeting sequence
  source 1..20: mol_type = other RNA
aacgagaaatggcagtgtgg

SEQ ID NO: 8080 - RNA, 20 nt, synthetic construct
  misc_feature 1..20: note = C9Orf72 TTCN PAM targeting sequence
  source 1..20: mol_type = other RNA
agtttgtgaaggaaatgagt

SEQ ID NO: 8081 - RNA, 20 nt, synthetic construct
  misc_feature 1..20: note = C9Orf72 TTCN PAM targeting sequence
  source 1..20: mol_type = other RNA
caaactagaagttgccattc

SEQ ID NO: 8082 - RNA, 20 nt, synthetic construct
  misc_feature 1..20: note = C9Orf72 TTCN PAM targeting sequence
  source 1..20: mol_type = other RNA
ttcacaaactagaagttgcc

SEQ ID NO: 8083 - RNA, 20 nt, synthetic construct
  misc_feature 1..20: note = C9Orf72 TTCN PAM targeting sequence
  source 1..20: mol_type = other RNA
atgcaactatcccaccttct

SEQ ID NO: 8084 - RNA, 20 nt, synthetic construct
  misc_feature 1..20: note = C9Orf72 TTCN PAM targeting sequence
  source 1..20: mol_type = other RNA
gaaggacaagtcacagcagg

SEQ ID NO: 8085 - RNA, 20 nt, synthetic construct
  misc_feature 1..20: note = C9Orf72 TTCN PAM targeting sequence
  source 1..20: mol_type = other RNA
gaaggtgggatagttgcatg

SEQ ID NO: 8086 - RNA, 20 nt, synthetic construct
  misc_feature 1..20: note = C9Orf72 TTCN PAM targeting sequence
  source 1..20: mol_type = other RNA
tgctgtgacttgtccttcag

SEQ ID NO: 8087 - RNA, 20 nt, synthetic construct
  misc_feature 1..20: note = C9Orf72 TTCN PAM targeting sequence
  source 1..20: mol_type = other RNA
tttcctgctgtgacttgtcc

SEQ ID NO: 8088 - RNA, 20 nt, synthetic construct
  misc_feature 1..20: note = C9Orf72 TTCN PAM targeting sequence
  source 1..20: mol_type = other RNA
gcactagtacagaaaaacaa

SEQ ID NO: 8089 - RNA, 20 nt, synthetic construct
  misc_feature 1..20: note = C9Orf72 TTCN PAM targeting sequence
  source 1..20: mol_type = other RNA
gtactagtgcagaaaaaaaa

SEQ ID NO: 8090 - RNA, 20 nt, synthetic construct
  misc_feature 1..20: note = C9Orf72 TTCN PAM targeting sequence
  source 1..20: mol_type = other RNA
gtattagatacattgttttt

SEQ ID NO: 8091 - RNA, 20 nt, synthetic construct
  misc_feature 1..20: note = C9Orf72 TTCN PAM targeting sequence
  source 1..20: mol_type = other RNA
gatccttcagtattagatac

SEQ ID NO: 8092 - RNA, 20 nt, synthetic construct
  misc_feature 1..20: note = C9Orf72 TTCN PAM targeting sequence
  source 1..20: mol_type = other RNA
agatattgtttgcaactttc

SEQ ID NO: 8093 - RNA, 20 nt, synthetic construct
  misc_feature 1..20: note = C9Orf72 TTCN PAM targeting sequence
  source 1..20: mol_type = other RNA
gaacattcttataaattaat

SEQ ID NO: 8094 - RNA, 20 nt, synthetic construct
  misc_feature 1..20: note = C9Orf72 TTCN PAM targeting sequence
  source 1..20: mol_type = other RNA
gaaagttgcaaacaatatct

SEQ ID NO: 8095 - RNA, 20 nt, synthetic construct
  misc_feature 1..20: note = C9Orf72 TTCN PAM targeting sequence
  source 1..20: mol_type = other RNA
tataaattaatgtaaattag

SEQ ID NO: 8096 - RNA, 20 nt, synthetic construct
  misc_feature 1..20: note = C9Orf72 TTCN PAM targeting sequence
  source 1..20: mol_type = other RNA
aatttacattaatttataag

SEQ ID NO: 8097 - RNA, 20 nt, synthetic construct
  misc_feature 1..20: note = C9Orf72 TTCN PAM targeting sequence
  source 1..20: mol_type = other RNA
acataacacaatggcaaaat

SEQ ID NO: 8098 - RNA, 20 nt, synthetic construct
  misc_feature 1..20: note = C9Orf72 TTCN PAM targeting sequence
  source 1..20: mol_type = other RNA
tttcaacataacacaatggc

SEQ ID NO: 8099 - RNA, 20 nt, synthetic construct
  misc_feature 1..20: note = C9Orf72 TTCN PAM targeting sequence
  source 1..20: mol_type = other RNA
taaacatttagtgatagctg

SEQ ID NO: 8100 - RNA, 20 nt, synthetic construct
  misc_feature 1..20: note = C9Orf72 TTCN PAM targeting sequence
  source 1..20: mol_type = other RNA
atctacaatcaacctttcaa

SEQ ID NO: 8101 - RNA, 20 nt, synthetic construct
  misc_feature 1..20: note = C9Orf72 TTCN PAM targeting sequence
  source 1..20: mol_type = other RNA
attagtcttatacaaagtcg

SEQ ID NO: 8102 - RNA, 20 nt, synthetic construct
  misc_feature 1..20: note = C9Orf72 TTCN PAM targeting sequence
  source 1..20: mol_type = other RNA
ggtttttacatctaacttaa

SEQ ID NO: 8103 - RNA, 20 nt, synthetic construct
  misc_feature 1..20: note = C9Orf72 TTCN PAM targeting sequence
  source 1..20: mol_type = other RNA
acagcatttaaccacaagat

SEQ ID NO: 8104 - RNA, 20 nt, synthetic construct
  misc_feature 1..20: note = C9Orf72 TTCN PAM targeting sequence
  source 1..20: mol_type = other RNA
gaggtctagtcaaaccttcc

SEQ ID NO: 8105 - RNA, 20 nt, synthetic construct
  misc_feature 1..20: note = C9Orf72 TTCN PAM targeting sequence
  source 1..20: mol_type = other RNA
gctatacacactttaatggt

SEQ ID NO: 8106 - RNA, 20 nt, synthetic construct
  misc_feature 1..20: note = C9Orf72 TTCN PAM targeting sequence
  source 1..20: mol_type = other RNA
aggtttctgctatacacact

SEQ ID NO: 8107 - RNA, 20 nt, synthetic construct
  misc_feature 1..20: note = C9Orf72 TTCN PAM targeting sequence
  source 1..20: mol_type = other RNA
gttctaggtttctgctatac

SEQ ID NO: 8108 - RNA, 20 nt, synthetic construct
  misc_feature 1..20: note = C9Orf72 TTCN PAM targeting sequence
  source 1..20: mol_type = other RNA
cttgaattgagtctggttca

SEQ ID NO: 8109 - RNA, 20 nt, synthetic construct
  misc_feature 1..20: note = C9Orf72 TTCN PAM targeting sequence
  source 1..20: mol_type = other RNA
agtgaatttcagttctaggt

SEQ ID NO: 8110 - RNA, 20 nt, synthetic construct
  misc_feature 1..20: note = C9Orf72 TTCN PAM targeting sequence
  source 1..20: mol_type = other RNA
ccttatttagtttcttcctt

SEQ ID NO: 8111 - RNA, 20 nt, synthetic construct
  misc_feature 1..20: note = C9Orf72 TTCN PAM targeting sequence
  source 1..20: mol_type = other RNA
tccttatttagtttcaaatt

SEQ ID NO: 8112 - RNA, 20 nt, synthetic construct
  misc_feature 1..20: note = C9Orf72 TTCN PAM targeting sequence
  source 1..20: mol_type = other RNA
ttatttagtttcaaattccc

SEQ ID NO: 8113 - RNA, 20 nt, synthetic construct
  misc_feature 1..20: note = C9Orf72 TTCN PAM targeting sequence
  source 1..20: mol_type = other RNA
aattccctgtgctgggttgg

SEQ ID NO: 8114 - RNA, 20 nt, synthetic construct
  misc_feature 1..20: note = C9Orf72 TTCN PAM targeting sequence
  source 1..20: mol_type = other RNA
ctgtgctgggttggggggtg

SEQ ID NO: 8115 - RNA, 20 nt, synthetic construct
  misc_feature 1..20: note = C9Orf72 TTCN PAM targeting sequence
  source 1..20: mol_type = other RNA
ccccaccccccaacccagca

SEQ ID NO: 8116 - RNA, 20 nt, synthetic construct
  misc_feature 1..20: note = C9Orf72 TTCN PAM targeting sequence
  source 1..20: mol_type = other RNA
cacaagacactttatatatc

SEQ ID NO: 8117 - RNA, 20 nt, synthetic construct
  misc_feature 1..20: note = C9Orf72 TTCN PAM targeting sequence
  source 1..20: mol_type = other RNA
ttcgtaaaactaccttatca

SEQ ID NO: 8118 - RNA, 20 nt, synthetic construct
  misc_feature 1..20: note = C9Orf72 TTCN PAM targeting sequence
  source 1..20: mol_type = other RNA
taaaactaccttatcatgct

SEQ ID NO: 8119 - RNA, 20 nt, synthetic construct
  misc_feature 1..20: note = C9Orf72 TTCN PAM targeting sequence
  source 1..20: mol_type = other RNA
ataatttggacagcatgata

SEQ ID NO: 8120 - RNA, 20 nt, synthetic construct
  misc_feature 1..20: note = C9Orf72 TTCN PAM targeting sequence
  source 1..20: mol_type = other RNA
attggtctatatctctgttt

SEQ ID NO: 8121 - RNA, 20 nt, synthetic construct
  misc_feature 1..20: note = C9Orf72 TTCN PAM targeting sequence
  source 1..20: mol_type = other RNA
gttccattggtctatatctc

SEQ ID NO: 8122 - RNA, 20 nt, synthetic construct
  misc_feature 1..20: note = C9Orf72 TTCN PAM targeting sequence
  source 1..20: mol_type = other RNA
gaggcgtctgttctgttcca

SEQ ID NO: 8123 - RNA, 20 nt, synthetic construct
  misc_feature 1..20: note = C9Orf72 TTCN PAM targeting sequence
  source 1..20: mol_type = other RNA
tgtttttgtcaggtttgtca

SEQ ID NO: 8124 - RNA, 20 nt, synthetic construct
  misc_feature 1..20: note = C9Orf72 TTCN PAM targeting sequence
  source 1..20: mol_type = other RNA
ccatttcttgtttttgtcag

SEQ ID NO: 8125 - RNA, 20 nt, synthetic construct
  misc_feature 1..20: note = C9Orf72 TTCN PAM targeting sequence
  source 1..20: mol_type = other RNA
cagtaccatttattaaatag

SEQ ID NO: 8126 - RNA, 20 nt, synthetic construct
  misc_feature 1..20: note = C9Orf72 TTCN PAM targeting sequence
  source 1..20: mol_type = other RNA
acatacggctagcgagtttt

SEQ ID NO: 8127 - RNA, 20 nt, synthetic construct
  misc_feature 1..20: note = C9Orf72 TTCN PAM targeting sequence
  source 1..20: mol_type = other RNA
gctttctacatacggctagc

SEQ ID NO: 8128 - RNA, 20 nt, synthetic construct
  misc_feature 1..20: note = C9Orf72 TTCN PAM targeting sequence
  source 1..20: mol_type = other RNA
gaatattaaccctttgtcag

SEQ ID NO: 8129 - RNA, 20 nt, synthetic construct
  misc_feature 1..20: note = C9Orf72 TTCN PAM targeting sequence
  source 1..20: mol_type = other RNA
ttgtagattctgaatattaa

SEQ ID NO: 8130 - RNA, 20 nt, synthetic construct
  misc_feature 1..20: note = C9Orf72 TTCN PAM targeting sequence
  source 1..20: mol_type = other RNA
tgtaaatttgtttaagttct

SEQ ID NO: 8131 - RNA, 20 nt, synthetic construct
  misc_feature 1..20: note = C9Orf72 TTCN PAM targeting sequence
  source 1..20: mol_type = other RNA
tatcctttgcccactttttg

SEQ ID NO: 8132 - RNA, 20 nt, synthetic construct
  misc_feature 1..20: note = C9Orf72 TTCN PAM targeting sequence
  source 1..20: mol_type = other RNA
caaaagaagacatttatgcg

SEQ ID NO: 8133 - RNA, 20 nt, synthetic construct
  misc_feature 1..20: note = C9Orf72 TTCN PAM targeting sequence
  source 1..20: mol_type = other RNA
tttgagaagtgtctgttcat

SEQ ID NO: 8134 - RNA, 20 nt, synthetic construct
  misc_feature 1..20: note = C9Orf72 TTCN PAM targeting sequence
  source 1..20: mol_type = other RNA
tatgtttgttggtcgcataa

SEQ ID NO: 8135 - RNA, 20 nt, synthetic construct
  misc_feature 1..20: note = C9Orf72 TTCN PAM targeting sequence
  source 1..20: mol_type = other RNA
ctaatgaccagtgatgatga

SEQ ID NO: 8136 - RNA, 20 nt, synthetic construct
  misc_feature 1..20: note = C9Orf72 TTCN PAM targeting sequence
  source 1..20: mol_type = other RNA
aactagtgtgagatggtatc

SEQ ID NO: 8137 - RNA, 20 nt, synthetic construct
  misc_feature 1..20: note = C9Orf72 TTCN PAM targeting sequence
  source 1..20: mol_type = other RNA
tcattctaactagtgtgaga

SEQ ID NO: 8138 - RNA, 20 nt, synthetic construct
  misc_feature 1..20: note = C9Orf72 TTCN PAM targeting sequence
  source 1..20: mol_type = other RNA
tgactttttaatgttcgtca

SEQ ID NO: 8139 - RNA, 20 nt, synthetic construct
  misc_feature 1..20: note = C9Orf72 TTCN PAM targeting sequence
  source 1..20: mol_type = other RNA
ccacatcctctccagcatct

SEQ ID NO: 8140 - RNA, 20 nt, synthetic construct
  misc_feature 1..20: note = C9Orf72 TTCN PAM targeting sequence
  source 1..20: mol_type = other RNA
tatttctccacatcctctcc

SEQ ID NO: 8141 - RNA, 20 nt, synthetic construct
  misc_feature 1..20: note = C9Orf72 TTCN PAM targeting sequence
  source 1..20: mol_type = other RNA
acaattgttgaactagttta

SEQ ID NO: 8142 - RNA, 20 nt, synthetic construct
  misc_feature 1..20: note = C9Orf72 TTCN PAM targeting sequence
  source 1..20: mol_type = other RNA
tcaaggatctagagctagaa

SEQ ID NO: 8143 - RNA, 20 nt, synthetic construct
  misc_feature 1..20: note = C9Orf72 TTCN PAM targeting sequence
  source 1..20: mol_type = other RNA
agctctagatccttgaggaa

SEQ ID NO: 8144 - RNA, 20 nt, synthetic construct
  misc_feature 1..20: note = C9Orf72 TTCN PAM targeting sequence
  source 1..20: mol_type = other RNA
caataacaaagacttggaac

SEQ ID NO: 8145 - RNA, 20 nt, synthetic construct
  misc_feature 1..20: note = C9Orf72 TTCN PAM targeting sequence
  source 1..20: mol_type = other RNA
aagtctttgttattgtgaat

SEQ ID NO: 8146 - RNA, 20 nt, synthetic construct
  misc_feature 1..20: note = C9Orf72 TTCN PAM targeting sequence
  source 1..20: mol_type = other RNA
taatccagtctatcattgat

SEQ ID NO: 8147 - RNA, 20 nt, synthetic construct
  misc_feature 1..20: note = C9Orf72 TTCN PAM targeting sequence
  source 1..20: mol_type = other RNA
atggtatgtatgtgccacat

SEQ ID NO: 8148 - RNA, 20 nt, synthetic construct
  misc_feature 1..20: note = C9Orf72 TTCN PAM targeting sequence
  source 1..20: mol_type = other RNA
tgtcctttgcagggacatgg

SEQ ID NO: 8149 - RNA, 20 nt, synthetic construct
  misc_feature 1..20: note = C9Orf72 TTCN PAM targeting sequence
  source 1..20: mol_type = other RNA
tccatgtccctgcaaaggac

SEQ ID NO: 8150 - RNA, 20 nt, synthetic construct
  misc_feature 1..20: note = C9Orf72 TTCN PAM targeting sequence
  source 1..20: mol_type = other RNA
gagcaaactaccacaaggac

SEQ ID NO: 8151 - RNA, 20 nt, synthetic construct
  misc_feature 1..20: note = C9Orf72 TTCN PAM targeting sequence
  source 1..20: mol_type = other RNA
gtccttgtggtagtttgctc

SEQ ID NO: 8152 - RNA, 20 nt, synthetic construct
  misc_feature 1..20: note = C9Orf72 TTCN PAM targeting sequence
  source 1..20: mol_type = other RNA
cactcatagatgggaactga

SEQ ID NO: 8153 - RNA, 20 nt, synthetic construct
  misc_feature 1..20: note = C9Orf72 TTCN PAM targeting sequence
  source 1..20: mol_type = other RNA
catctatgagtgagaacatg

SEQ ID NO: 8154 - RNA, 20 nt, synthetic construct
  misc_feature 1..20: note = C9Orf72 TTCN PAM targeting sequence
  source 1..20: mol_type = other RNA
gttcccatctatgagtgaga

SEQ ID NO: 8155 - RNA, 20 nt, synthetic construct
  misc_feature 1..20: note = C9Orf72 TTCN PAM targeting sequence
  source 1..20: mol_type = other RNA
ttgttcagttcccatctatg

SEQ ID NO: 8156 - RNA, 20 nt, synthetic construct
  misc_feature 1..20: note = C9Orf72 TTCN PAM targeting sequence
  source 1..20: mol_type = other RNA
tctccctgtgtccaagtgtt

SEQ ID NO: 8157 - RNA, 20 nt, synthetic construct
  misc_feature 1..20: note = C9Orf72 TTCN PAM targeting sequence
  source 1..20: mol_type = other RNA
ccccaccccccaccccatga

SEQ ID NO: 8158 - RNA, 20 nt, synthetic construct
  misc_feature 1..20: note = C9Orf72 TTCN PAM targeting sequence
  source 1..20: mol_type = other RNA
cttgcctcacccatcaaccc

SEQ ID NO: 8159 - RNA, 20 nt, synthetic construct
  misc_feature 1..20: note = C9Orf72 TTCN PAM targeting sequence
  source 1..20: mol_type = other RNA
agtgattcacttgcctcacc

SEQ ID NO: 8160 - RNA, 20 nt, synthetic construct
  misc_feature 1..20: note = C9Orf72 TTCN PAM targeting sequence
  source 1..20: mol_type = other RNA
agcaagggaaagtagggaat

SEQ ID NO: 8161 - RNA, 20 nt, synthetic construct
  misc_feature 1..20: note = C9Orf72 TTCN PAM targeting sequence
  source 1..20: mol_type = other RNA
cttgctggaagtacattaaa

SEQ ID NO: 8162 - RNA, 20 nt, synthetic construct
  misc_feature 1..20: note = C9Orf72 TTCN PAM targeting sequence
  source 1..20: mol_type = other RNA
ctactttcccttgctggaag

SEQ ID NO: 8163 - RNA, 20 nt, synthetic construct
  misc_feature 1..20: note = C9Orf72 TTCN PAM targeting sequence
  source 1..20: mol_type = other RNA
attccctactttcccttgct

SEQ ID NO: 8164 - RNA, 20 nt, synthetic construct
  misc_feature 1..20: note = C9Orf72 TTCN PAM targeting sequence
  source 1..20: mol_type = other RNA
cttttttttgtcaagtaaac

SEQ ID NO: 8165 - RNA, 20 nt, synthetic construct
  misc_feature 1..20: note = C9Orf72 TTCN PAM targeting sequence
  source 1..20: mol_type = other RNA
ttttgcctaataacttctct

SEQ ID NO: 8166 - RNA, 20 nt, synthetic construct
  misc_feature 1..20: note = C9Orf72 TTCN PAM targeting sequence
  source 1..20: mol_type = other RNA
agttttacctgtgtagtcct

SEQ ID NO: 8167 - RNA, 20 nt, synthetic construct
  misc_feature 1..20: note = C9Orf72 TTCN PAM targeting sequence
  source 1..20: mol_type = other RNA
ggaaaaaaacactcactctc

SEQ ID NO: 8168 - RNA, 20 nt, synthetic construct
  misc_feature 1..20: note = C9Orf72 TTCN PAM targeting sequence
  source 1..20: mol_type = other RNA
tgaaagagcatcaaggacta

SEQ ID NO: 8169 - RNA, 20 nt, synthetic construct
  misc_feature 1..20: note = C9Orf72 TTCN PAM targeting sequence
  source 1..20: mol_type = other RNA
agtctttgccctttttgttg

SEQ ID NO: 8170 - RNA, 20 nt, synthetic construct
  misc_feature 1..20: note = C9Orf72 TTCN PAM targeting sequence
  source 1..20: mol_type = other RNA
ctttttttgccatcaatttg

SEQ ID NO: 8171 - RNA, 20 nt, synthetic construct
  misc_feature 1..20: note = C9Orf72 TTCN PAM targeting sequence
  source 1..20: mol_type = other RNA
tccatatatacacgatcctt

SEQ ID NO: 8172 - RNA, 20 nt, synthetic construct
  misc_feature 1..20: note = C9Orf72 TTCN PAM targeting sequence
  source 1..20: mol_type = other RNA
atatatacacgatccttctc

SEQ ID NO: 8173 - RNA, 20 nt, synthetic construct
  misc_feature 1..20: note = C9Orf72 TTCN PAM targeting sequence
  source 1..20: mol_type = other RNA
ccctacaaatgtgacagatc

SEQ ID NO: 8174 - RNA, 20 nt, synthetic construct
  misc_feature 1..20: note = C9Orf72 TTCN PAM targeting sequence
  source 1..20: mol_type = other RNA
agtcatgatttgctaagcat

SEQ ID NO: 8175 - RNA, 20 nt, synthetic construct
  misc_feature 1..20: note = C9Orf72 TTCN PAM targeting sequence
  source 1..20: mol_type = other RNA
ctgcctgttttcagatcaaa

SEQ ID NO: 8176 - RNA, 20 nt, synthetic construct
  misc_feature 1..20: note = C9Orf72 TTCN PAM targeting sequence
  source 1..20: mol_type = other RNA
gatcaaaagagacaatgagc

SEQ ID NO: 8177 - RNA, 20 nt, synthetic construct
  misc_feature 1..20: note = C9Orf72 TTCN PAM targeting sequence
  source 1..20: mol_type = other RNA
ctcattgtctcttttgatct

SEQ ID NO: 8178 - RNA, 20 nt, synthetic construct
  misc_feature 1..20: note = C9Orf72 TTCN PAM targeting sequence
  source 1..20: mol_type = other RNA
ccatttcaaaaccacagcaa

SEQ ID NO: 8179 - RNA, 20 nt, synthetic construct
  misc_feature 1..20: note = C9Orf72 TTCN PAM targeting sequence
  source 1..20: mol_type = other RNA
aaaccacagcaatctttata

SEQ ID NO: 8180 - RNA, 20 nt, synthetic construct
  misc_feature 1..20: note = C9Orf72 TTCN PAM targeting sequence
  source 1..20: mol_type = other RNA
aaatacctcttccctattca

SEQ ID NO: 8181 - RNA, 20 nt, synthetic construct
  misc_feature 1..20: note = C9Orf72 TTCN PAM targeting sequence
  source 1..20: mol_type = other RNA
ctattcatatacttatttta

SEQ ID NO: 8182 - RNA, 20 nt, synthetic construct
  misc_feature 1..20: note = C9Orf72 TTCN PAM targeting sequence
  source 1..20: mol_type = other RNA
tatacttattttaggattta

SEQ ID NO: 8183 - RNA, 20 nt, synthetic construct
  misc_feature 1..20: note = C9Orf72 TTCN PAM targeting sequence
  source 1..20: mol_type = other RNA
ctctttctgtgaagtctagg

SEQ ID NO: 8184 - RNA, 20 nt, synthetic construct
  misc_feature 1..20: note = C9Orf72 TTCN PAM targeting sequence
  source 1..20: mol_type = other RNA
gtgaagtctagggactggac

SEQ ID NO: 8185 - RNA, 20 nt, synthetic construct
  misc_feature 1..20: note = C9Orf72 TTCN PAM targeting sequence
  source 1..20: mol_type = other RNA
cagaaagagtgaaagataaa

SEQ ID NO: 8186 - RNA, 20 nt, synthetic construct
  misc_feature 1..20: note = C9Orf72 TTCN PAM targeting sequence
  source 1..20: mol_type = other RNA
acttgtcatcctgtacttag

SEQ ID NO: 8187 - RNA, 20 nt, synthetic construct
  misc_feature 1..20: note = C9Orf72 TTCN PAM targeting sequence
  source 1..20: mol_type = other RNA
gaggtaaaatgctaagtaca

SEQ ID NO: 8188 - RNA, 20 nt, synthetic construct
  misc_feature 1..20: note = C9Orf72 TTCN PAM targeting sequence
  source 1..20: mol_type = other RNA
cacaacagtcctcagttggc

SEQ ID NO: 8189 - RNA, 20 nt, synthetic construct
  misc_feature 1..20: note = C9Orf72 TTCN PAM targeting sequence
  source 1..20: mol_type = other RNA
tccccaggaacacggccagg

SEQ ID NO: 8190 - RNA, 20 nt, synthetic construct
  misc_feature 1..20: note = C9Orf72 TTCN PAM targeting sequence
  source 1..20: mol_type = other RNA
tggggaggaaagggacacct

SEQ ID NO: 8191 - RNA, 20 nt, synthetic construct
  misc_feature 1..20: note = C9Orf72 TTCN PAM targeting sequence
  source 1..20: mol_type = other RNA
gtctccttagctgatggctg

SEQ ID NO: 8192 - RNA, 20 nt, synthetic construct
  misc_feature 1..20: note = C9Orf72 TTCN PAM targeting sequence
  source 1..20: mol_type = other RNA
ggcttcagaatctttcttaa

SEQ ID NO: 8193 - RNA, 20 nt, synthetic construct
  misc_feature 1..20: note = C9Orf72 TTCN PAM targeting sequence
  source 1..20: mol_type = other RNA
gaatctttcttaacacagcc

SEQ ID NO: 8194 - RNA, 20 nt, synthetic construct
  misc_feature 1..20: note = C9Orf72 TTCN PAM targeting sequence
  source 1..20: mol_type = other RNA
gaagccagaaaagcttctgt

SEQ ID NO: 8195 - RNA, 20 nt, synthetic construct
  misc_feature 1..20: note = C9Orf72 TTCN PAM targeting sequence
  source 1..20: mol_type = other RNA
taacacagcctctccaggca

SEQ ID NO: 8196 - RNA, 20 nt, synthetic construct
  misc_feature 1..20: note = C9Orf72 TTCN PAM targeting sequence
  source 1..20: mol_type = other RNA
gtagtggctgcctggagagg

SEQ ID NO: 8197 - RNA, 20 nt, synthetic construct
  misc_feature 1..20: note = C9Orf72 TTCN PAM targeting sequence
  source 1..20: mol_type = other RNA
tctggaggaccaagtctgac

SEQ ID NO: 8198 - RNA, 20 nt, synthetic construct
  misc_feature 1..20: note = C9Orf72 TTCN PAM targeting sequence
  source 1..20: mol_type = other RNA
tacagatgggagtatcttca

SEQ ID NO: 8199 - RNA, 20 nt, synthetic construct
  misc_feature 1..20: note = C9Orf72 TTCN PAM targeting sequence
  source 1..20: mol_type = other RNA
gtctttctaaagagaatgtc

SEQ ID NO: 8200 - RNA, 20 nt, synthetic construct
  misc_feature 1..20: note = C9Orf72 TTCN PAM targeting sequence
  source 1..20: mol_type = other RNA
aaagagaatgtcacaggaaa

SEQ ID NO: 8201 - RNA, 20 nt, synthetic construct
  misc_feature 1..20: note = C9Orf72 TTCN PAM targeting sequence
  source 1..20: mol_type = other RNA
ctttagaaagactgaagata

SEQ ID NO: 8202 - RNA, 20 nt, synthetic construct
  misc_feature 1..20: note = C9Orf72 TTCN PAM targeting sequence
  source 1..20: mol_type = other RNA
tgtgacattctctttagaaa

SEQ ID NO: 8203 - RNA, 20 nt, synthetic construct
  misc_feature 1..20: note = C9Orf72 TTCN PAM targeting sequence
  source 1..20: mol_type = other RNA
tgcctactttcctgtgacat

SEQ ID NO: 8204 - RNA, 20 nt, synthetic construct
  misc_feature 1..20: note = C9Orf72 TTCN PAM targeting sequence
  source 1..20: mol_type = other RNA
aaaacatggtgtcagccctt

SEQ ID NO: 8205 - RNA, 20 nt, synthetic construct
  misc_feature 1..20: note = C9Orf72 TTCN PAM targeting sequence
  source 1..20: mol_type = other RNA
tctccctgctgaattcttag

SEQ ID NO: 8206 - RNA, 20 nt, synthetic construct
  misc_feature 1..20: note = C9Orf72 TTCN PAM targeting sequence
  source 1..20: mol_type = other RNA
gcagggagatgaacaggata

SEQ ID NO: 8207 - RNA, 20 nt, synthetic construct
  misc_feature 1..20: note = C9Orf72 TTCN PAM targeting sequence
  source 1..20: mol_type = other RNA
tagcaacctctctcagagat

SEQ ID NO: 8208 - RNA, 20 nt, synthetic construct
  misc_feature 1..20: note = C9Orf72 TTCN PAM targeting sequence
  source 1..20: mol_type = other RNA
tgggggaaagaggtagtttc

SEQ ID NO: 8209 - RNA, 20 nt, synthetic construct
  misc_feature 1..20: note = C9Orf72 TTCN PAM targeting sequence
  source 1..20: mol_type = other RNA
cccaagaaaaagggtctgca

SEQ ID NO: 8210 - RNA, 20 nt, synthetic construct
  misc_feature 1..20: note = C9Orf72 TTCN PAM targeting sequence
  source 1..20: mol_type = other RNA
caaagctgtaagtgttagtt

SEQ ID NO: 8211 - RNA, 20 nt, synthetic construct
  misc_feature 1..20: note = C9Orf72 TTCN PAM targeting sequence
  source 1..20: mol_type = other RNA
cgcaaattaataagttacca

SEQ ID NO: 8212 - RNA, 20 nt, synthetic construct
  misc_feature 1..20: note = C9Orf72 TTCN PAM targeting sequence
  source 1..20: mol_type = other RNA
tttatggtaacttattaatt

SEQ ID NO: 8213 - RNA, 20 nt, synthetic construct
  misc_feature 1..20: note = C9Orf72 TTCN PAM targeting sequence
  source 1..20: mol_type = other RNA
ttgggaaggagaggtggcca

SEQ ID NO: 8214 - RNA, 20 nt, synthetic construct
  misc_feature 1..20: note = C9Orf72 TTCN PAM targeting sequence
  source 1..20: mol_type = other RNA
caaagaacagcagccagttg

SEQ ID NO: 8215 - RNA, 20 nt, synthetic construct
  misc_feature 1..20: note = C9Orf72 TTCN PAM targeting sequence
  source 1..20: mol_type = other RNA
aggacagtggccacctctcc

SEQ ID NO: 8216 - RNA, 20 nt, synthetic construct
  misc_feature 1..20: note = C9Orf72 TTCN PAM targeting sequence
  source 1..20: mol_type = other RNA
ccgtcagcagcagcctcagt

SEQ ID NO: 8217 - RNA, 20 nt, synthetic construct
  misc_feature 1..20: note = C9Orf72 TTCN PAM targeting sequence
  source 1..20: mol_type = other RNA
tcctgcatactctgccccag

SEQ ID NO: 8218 - RNA, 20 nt, synthetic construct
  misc_feature 1..20: note = C9Orf72 TTCN PAM targeting sequence
  source 1..20: mol_type = other RNA
tgcatactctgccccagatt

SEQ ID NO: 8219 - RNA, 20 nt, synthetic construct
  misc_feature 1..20: note = C9Orf72 TTCN PAM targeting sequence
  source 1..20: mol_type = other RNA
gacttgaaccttgctaaaat

SEQ ID NO: 8220 - RNA, 20 nt, synthetic construct
  misc_feature 1..20: note = C9Orf72 TTCN PAM targeting sequence
  source 1..20: mol_type = other RNA
agtcagaatctggggcagag

SEQ ID NO: 8221 - RNA, 20 nt, synthetic construct
  misc_feature 1..20: note = C9Orf72 TTCN PAM targeting sequence
  source 1..20: mol_type = other RNA
ggtgccactggacagccaaa

SEQ ID NO: 8222 - RNA, 20 nt, synthetic construct
  misc_feature 1..20: note = C9Orf72 TTCN PAM targeting sequence
  source 1..20: mol_type = other RNA
atgattctggtgccactgga

SEQ ID NO: 8223 - RNA, 20 nt, synthetic construct
  misc_feature 1..20: note = C9Orf72 TTCN PAM targeting sequence
  source 1..20: mol_type = other RNA
tttaggactagggcatttat

SEQ ID NO: 8224 - RNA, 20 nt, synthetic construct
  misc_feature 1..20: note = C9Orf72 TTCN PAM targeting sequence
  source 1..20: mol_type = other RNA
cccagttgggagtgttagag

SEQ ID NO: 8225 - RNA, 20 nt, synthetic construct
  misc_feature 1..20: note = C9Orf72 TTCN PAM targeting sequence
  source 1..20: mol_type = other RNA
gctgagggcctctcaaagaa

SEQ ID NO: 8226 - RNA, 20 nt, synthetic construct
  misc_feature 1..20: note = C9Orf72 TTCN PAM targeting sequence
  source 1..20: mol_type = other RNA
ttgagaggccctcagctgaa

SEQ ID NO: 8227 - RNA, 20 nt, synthetic construct
  misc_feature 1..20: note = C9Orf72 TTCN PAM targeting sequence
  source 1..20: mol_type = other RNA
ccatcagccagtcattggct

SEQ ID NO: 8228 - RNA, 20 nt, synthetic construct
  misc_feature 1..20: note = C9Orf72 TTCN PAM targeting sequence
  source 1..20: mol_type = other RNA
ggctgtcccggctccagagc

SEQ ID NO: 8229 - RNA, 20 nt, synthetic construct
  misc_feature 1..20: note = C9Orf72 TTCN PAM targeting sequence
  source 1..20: mol_type = other RNA
ccctctgttccgttctcctg

SEQ ID NO: 8230 - RNA, 20 nt, synthetic construct
  misc_feature 1..20: note = C9Orf72 TTCN PAM targeting sequence
  source 1..20: mol_type = other RNA
gttctcctgctttcattccc

SEQ ID NO: 8231 - RNA, 20 nt, synthetic construct
  misc_feature 1..20: note = C9Orf72 TTCN PAM targeting sequence
  source 1..20: mol_type = other RNA
cctgctttcattcccctgcc

SEQ ID NO: 8232 - RNA, 20 nt, synthetic construct
  misc_feature 1..20: note = C9Orf72 TTCN PAM targeting sequence
  source 1..20: mol_type = other RNA
ttcccctgccagtccttgtg

SEQ ID NO: 8233 - RNA, 20 nt, synthetic construct
  misc_feature 1..20: note = C9Orf72 TTCN PAM targeting sequence
  source 1..20: mol_type = other RNA
cctgccagtccttgtggcca

SEQ ID NO: 8234 - RNA, 20 nt, synthetic construct
  misc_feature 1..20: note = C9Orf72 TTCN PAM targeting sequence
  source 1..20: mol_type = other RNA
ttagggactgcttatggcca

SEQ ID NO: 8235 - RNA, 20 nt, synthetic construct
  misc_feature 1..20: note = C9Orf72 TTCN PAM targeting sequence
  source 1..20: mol_type = other RNA
tggataactgaactgtgacc

SEQ ID NO: 8236 - RNA, 20 nt, synthetic construct
  misc_feature 1..20: note = C9Orf72 TTCN PAM targeting sequence
  source 1..20: mol_type = other RNA
gttatccaggaatctcactc

SEQ ID NO: 8237 - RNA, 20 nt, synthetic construct
  misc_feature 1..20: note = C9Orf72 TTCN PAM targeting sequence
  source 1..20: mol_type = other RNA
tttatctccccaagccccag

SEQ ID NO: 8238 - RNA, 20 nt, synthetic construct
  misc_feature 1..20: note = C9Orf72 TTCN PAM targeting sequence
  source 1..20: mol_type = other RNA
tgctgtccttcctttatctc

SEQ ID NO: 8239 - RNA, 20 nt, synthetic construct
  misc_feature 1..20: note = C9Orf72 TTCN PAM targeting sequence
  source 1..20: mol_type = other RNA
tttcccacccctactgtaac

SEQ ID NO: 8240 - RNA, 20 nt, synthetic construct
  misc_feature 1..20: note = C9Orf72 TTCN PAM targeting sequence
  source 1..20: mol_type = other RNA
cacccctactgtaacacatt

SEQ ID NO: 8241 - RNA, 20 nt, synthetic construct
  misc_feature 1..20: note = C9Orf72 TTCN PAM targeting sequence
  source 1..20: mol_type = other RNA
aacatcataaggtgatttta

SEQ ID NO: 8242 - RNA, 20 nt, synthetic construct
  misc_feature 1..20: note = C9Orf72 TTCN PAM targeting sequence
  source 1..20: mol_type = other RNA
cctggacaatgtcctgcatt

SEQ ID NO: 8243 - RNA, 20 nt, synthetic construct
  misc_feature 1..20: note = C9Orf72 TTCN PAM targeting sequence
  source 1..20: mol_type = other RNA
gctgctagaatgacagggct

SEQ ID NO: 8244 - RNA, 20 nt, synthetic construct
  misc_feature 1..20: note = C9Orf72 TTCN PAM targeting sequence
  source 1..20: mol_type = other RNA
tctcttgcaccagcccttgg

SEQ ID NO: 8245 - RNA, 20 nt, synthetic construct
  misc_feature 1..20: note = C9Orf72 TTCN PAM targeting sequence
  source 1..20: mol_type = other RNA
cttgcaccagcccttggatg

SEQ ID NO: 8246 - RNA, 20 nt, synthetic construct
  misc_feature 1..20: note = C9Orf72 TTCN PAM targeting sequence
  source 1..20: mol_type = other RNA
gggtttgccaaagtgcatcc

SEQ ID NO: 8247 - RNA, 20 nt, synthetic construct
  misc_feature 1..20: note = C9Orf72 TTCN PAM targeting sequence
  source 1..20: mol_type = other RNA
tatactttgcacgtgtgagt

SEQ ID NO: 8248 - RNA, 20 nt, synthetic construct
  misc_feature 1..20: note = C9Orf72 TTCN PAM targeting sequence
  source 1..20: mol_type = other RNA
tcaggtgtctcagctctgcc

SEQ ID NO: 8249 - RNA, 20 nt, synthetic construct
  misc_feature 1..20: note = C9Orf72 TTCN PAM targeting sequence
  source 1..20: mol_type = other RNA
ggtgtctcagctctgcctgg

SEQ ID NO: 8250 - RNA, 20 nt, synthetic construct
  misc_feature 1..20: note = C9Orf72 TTCN PAM targeting sequence
  source 1..20: mol_type = other RNA
aggcagagctgagacacctg

SEQ ID NO: 8251 - RNA, 20 nt, synthetic construct
  misc_feature 1..20: note = C9Orf72 TTCN PAM targeting sequence
  source 1..20: mol_type = other RNA
cgtagagccattttttcccc

SEQ ID NO: 8252 - RNA, 20 nt, synthetic construct
  misc_feature 1..20: note = C9Orf72 TTCN PAM targeting sequence
  source 1..20: mol_type = other RNA
ccctctctcttccttctctt

SEQ ID NO: 8253 - RNA, 20 nt, synthetic construct
  misc_feature 1..20: note = C9Orf72 TTCN PAM targeting sequence
  source 1..20: mol_type = other RNA
ttctctttgactctggctct

SEQ ID NO: 8254 - RNA, 20 nt, synthetic construct
  misc_feature 1..20: note = C9Orf72 TTCN PAM targeting sequence
  source 1..20: mol_type = other RNA
ctttgactctggctctcaaa

SEQ ID NO: 8255 - RNA, 20 nt, synthetic construct
  misc_feature 1..20: note = C9Orf72 TTCN PAM targeting sequence
  source 1..20: mol_type = other RNA
ccttagttttgagagccaga

SEQ ID NO: 8256 - RNA, 20 nt, synthetic construct
  misc_feature 1..20: note = C9Orf72 TTCN PAM targeting sequence
  source 1..20: mol_type = other RNA
tggtcatttttttcccctta

SEQ ID NO: 8257 - RNA, 20 nt, synthetic construct
  misc_feature 1..20: note = C9Orf72 TTCN PAM targeting sequence
  source 1..20: mol_type = other RNA
ctctcttagctgtcaaatca

SEQ ID NO: 8258 - RNA, 20 nt, synthetic construct
  misc_feature 1..20: note = C9Orf72 TTCN PAM targeting sequence
  source 1..20: mol_type = other RNA
atgtggcaatctgcccaggc

SEQ ID NO: 8259 - RNA, 20 nt, synthetic construct
  misc_feature 1..20: note = C9Orf72 TTCN PAM targeting sequence
  source 1..20: mol_type = other RNA
tttagcaaatgaggtgctgt

SEQ ID NO: 8260 - RNA, 20 nt, synthetic construct
  misc_feature 1..20: note = C9Orf72 TTCN PAM targeting sequence
  source 1..20: mol_type = other RNA
ctgttttgataacagcacct

SEQ ID NO: 8261 - RNA, 20 nt, synthetic construct
  misc_feature 1..20: note = C9Orf72 TTCN PAM targeting sequence
  source 1..20: mol_type = other RNA
aggctgcagctctggatcgc

SEQ ID NO: 8262 - RNA, 20 nt, synthetic construct
  misc_feature 1..20: note = C9Orf72 TTCN PAM targeting sequence
  source 1..20: mol_type = other RNA
tgggaaccactggaagtctt

SEQ ID NO: 8263 - RNA, 20 nt, synthetic construct
  misc_feature 1..20: note = C9Orf72 TTCN PAM targeting sequence
  source 1..20: mol_type = other RNA
caagaaaaacttgtgagtca

SEQ ID NO: 8264 - RNA, 20 nt, synthetic construct
  misc_feature 1..20: note = C9Orf72 TTCN PAM targeting sequence
  source 1..20: mol_type = other RNA
agtggttcccaagaaaaact

SEQ ID NO: 8265 - RNA, 20 nt, synthetic construct
  misc_feature 1..20: note = C9Orf72 TTCN PAM targeting sequence
  source 1..20: mol_type = other RNA
tccaagacttccagtggttc

SEQ ID NO: 8266 - RNA, 20 nt, synthetic construct
  misc_feature 1..20: note = C9Orf72 TTCN PAM targeting sequence
  source 1..20: mol_type = other RNA
gtggttcctccaagacttcc

SEQ ID NO: 8267 - RNA, 20 nt, synthetic construct
  misc_feature 1..20: note = C9Orf72 TTCN PAM targeting sequence
  source 1..20: mol_type = other RNA
gtttgagattctgtggttcc

SEQ ID NO: 8268 - RNA, 20 nt, synthetic construct
  misc_feature 1..20: note = C9Orf72 TTCN PAM targeting sequence
  source 1..20: mol_type = other RNA
ttctgtttgagattctgtgg

SEQ ID NO: 8269 - RNA, 20 nt, synthetic construct
  misc_feature 1..20: note = C9Orf72 TTCN PAM targeting sequence
  source 1..20: mol_type = other RNA
tctggaatcctagactcttt

SEQ ID NO: 8270 - RNA, 20 nt, synthetic construct
  misc_feature 1..20: note = C9Orf72 TTCN PAM targeting sequence
  source 1..20: mol_type = other RNA
ggaatcctagactctttatt

SEQ ID NO: 8271 - RNA, 20 nt, synthetic construct
  misc_feature 1..20: note = C9Orf72 TTCN PAM targeting sequence
  source 1..20: mol_type = other RNA
agaagaaaatttaaatgagt

SEQ ID NO: 8272 - RNA, 20 nt, synthetic construct
  misc_feature 1..20: note = C9Orf72 TTCN PAM targeting sequence
  source 1..20: mol_type = other RNA
tgtttaacatattttacaac

SEQ ID NO: 8273 - RNA, 20 nt, synthetic construct
  misc_feature 1..20: note = C9Orf72 TTCN PAM targeting sequence
  source 1..20: mol_type = other RNA
actactactcacttgaacaa

SEQ ID NO: 8274 - RNA, 20 nt, synthetic construct
  misc_feature 1..20: note = C9Orf72 TTCN PAM targeting sequence
  source 1..20: mol_type = other RNA
agtgagtagtagttgaaaga

SEQ ID NO: 8275 - RNA, 20 nt, synthetic construct
  misc_feature 1..20: note = C9Orf72 TTCN PAM targeting sequence
  source 1..20: mol_type = other RNA
atcctagagaaccaggtaat

SEQ ID NO: 8276 - RNA, 20 nt, synthetic construct
  misc_feature 1..20: note = C9Orf72 TTCN PAM targeting sequence
  source 1..20: mol_type = other RNA
ctaggatggaagttttgttc

SEQ ID NO: 8277 - RNA, 20 nt, synthetic construct
  misc_feature 1..20: note = C9Orf72 TTCN PAM targeting sequence
  source 1..20: mol_type = other RNA
gacacaggcaagaggtacat

SEQ ID NO: 8278 - RNA, 20 nt, synthetic construct
  misc_feature 1..20: note = C9Orf72 TTCN PAM targeting sequence
  source 1..20: mol_type = other RNA
tcttttgctgatatagaaac

SEQ ID NO: 8279 - RNA, 20 nt, synthetic construct
  misc_feature 1..20: note = C9Orf72 TTCN PAM targeting sequence
  source 1..20: mol_type = other RNA
atatcagcaaaagaggaatc

SEQ ID NO: 8280 - RNA, 20 nt, synthetic construct
  misc_feature 1..20: note = C9Orf72 TTCN PAM targeting sequence
  source 1..20: mol_type = other RNA
gtttctatatcagcaaaaga

SEQ ID NO: 8281 - RNA, 20 nt, synthetic construct
  misc_feature 1..20: note = C9Orf72 TTCN PAM targeting sequence
  source 1..20: mol_type = other RNA
atatgatgagaaattcatcc

SEQ ID NO: 8282 - RNA, 20 nt, synthetic construct
  misc_feature 1..20: note = C9Orf72 TTCN PAM targeting sequence
  source 1..20: mol_type = other RNA
catcatatggaagcttctgt

SEQ ID NO: 8283 - RNA, 20 nt, synthetic construct
  misc_feature 1..20: note = C9Orf72 TTCN PAM targeting sequence
  source 1..20: mol_type = other RNA
tccgtggtcatacagctagt

SEQ ID NO: 8284 - RNA, 20 nt, synthetic construct
  misc_feature 1..20: note = C9Orf72 TTCN PAM targeting sequence
  source 1..20: mol_type = other RNA
attcatacttcactcctacc

SEQ ID NO: 8285 - RNA, 20 nt, synthetic construct
  misc_feature 1..20: note = C9Orf72 TTCN PAM targeting sequence
  source 1..20: mol_type = other RNA
tacttcactcctaccttctt

SEQ ID NO: 8286 - RNA, 20 nt, synthetic construct
  misc_feature 1..20: note = C9Orf72 TTCN PAM targeting sequence
  source 1..20: mol_type = other RNA
ctcctaccttcttgttttct

SEQ ID NO: 8287 - RNA, 20 nt, synthetic construct
  misc_feature 1..20: note = C9Orf72 TTCN PAM targeting sequence
  source 1..20: mol_type = other RNA
tgttttctttccagccagtg

SEQ ID NO: 8288 - RNA, 20 nt, synthetic construct
  misc_feature 1..20: note = C9Orf72 TTCN PAM targeting sequence
  source 1..20: mol_type = other RNA
ttccagccagtgggatcctc

SEQ ID NO: 8289 - RNA, 20 nt, synthetic construct
  misc_feature 1..20: note = C9Orf72 TTCN PAM targeting sequence
  source 1..20: mol_type = other RNA
agccagtgggatcctccgtg

SEQ ID NO: 8290 - RNA, 20 nt, synthetic construct
  misc_feature 1..20: note = C9Orf72 TTCN PAM targeting sequence
  source 1..20: mol_type = other RNA
gagatacacggaggatccca

SEQ ID NO: 8291 - RNA, 20 nt, synthetic construct
  misc_feature 1..20: note = C9Orf72 TTCN PAM targeting sequence
  source 1..20: mol_type = other RNA
tagagcacttacttgtcagc

SEQ ID NO: 8292 - RNA, 20 nt, synthetic construct
  misc_feature 1..20: note = C9Orf72 TTCN PAM targeting sequence
  source 1..20: mol_type = other RNA
cctcactggacatctcttac

SEQ ID NO: 8293 - RNA, 20 nt, synthetic construct
  misc_feature 1..20: note = C9Orf72 TTCN PAM targeting sequence
  source 1..20: mol_type = other RNA
attatttttctgttgaaatg

SEQ ID NO: 8294 - RNA, 20 nt, synthetic construct
  misc_feature 1..20: note = C9Orf72 TTCN PAM targeting sequence
  source 1..20: mol_type = other RNA
gttgaaatggatttagcaca

SEQ ID NO: 8295 - RNA, 20 nt, synthetic construct
  misc_feature 1..20: note = C9Orf72 TTCN PAM targeting sequence
  source 1..20: mol_type = other RNA
acagaaaaataatagaatta

SEQ ID NO: 8296 - RNA, 20 nt, synthetic construct
  misc_feature 1..20: note = C9Orf72 TTCN PAM targeting sequence
  source 1..20: mol_type = other RNA
tgaagaaagtattccactga

SEQ ID NO: 8297 - RNA, 20 nt, synthetic construct
  misc_feature 1..20: note = C9Orf72 TTCN PAM targeting sequence
  source 1..20: mol_type = other RNA
ggaacttgtccataggattt

SEQ ID NO: 8298 - RNA, 20 nt, synthetic construct
  misc_feature 1..20: note = C9Orf72 TTCN PAM targeting sequence
  source 1..20: mol_type = other RNA
tcaggaacttgtccatagga

SEQ ID NO: 8299 - RNA, 20 nt, synthetic construct
  misc_feature 1..20: note = C9Orf72 TTCN PAM targeting sequence
  source 1..20: mol_type = other RNA
actgatatgagaataatgcc

SEQ ID NO: 8300 - RNA, 20 nt, synthetic construct
  misc_feature 1..20: note = C9Orf72 TTCN PAM targeting sequence
  source 1..20: mol_type = other RNA
catatcagtggaatactttc

SEQ ID NO: 8301 - RNA, 20 nt, synthetic construct
  misc_feature 1..20: note = C9Orf72 TTCN PAM targeting sequence
  source 1..20: mol_type = other RNA
tgaaatctctgtactaaata

SEQ ID NO: 8302 - RNA, 20 nt, synthetic construct
  misc_feature 1..20: note = C9Orf72 TTCN PAM targeting sequence
  source 1..20: mol_type = other RNA
agaaactcagtcaaaagaca

SEQ ID NO: 8303 - RNA, 20 nt, synthetic construct
  misc_feature 1..20: note = C9Orf72 TTCN PAM targeting sequence
  source 1..20: mol_type = other RNA
tcagcttctggagaagcttc

SEQ ID NO: 8304 - RNA, 20 nt, synthetic construct
  misc_feature 1..20: note = C9Orf72 TTCN PAM targeting sequence
  source 1..20: mol_type = other RNA
agaagtcctggcaggatttg

SEQ ID NO: 8305 - RNA, 20 nt, synthetic construct
  misc_feature 1..20: note = C9Orf72 TTCN PAM targeting sequence
  source 1..20: mol_type = other RNA
tgaatggtccctacacgtgg

SEQ ID NO: 8306 - RNA, 20 nt, synthetic construct
  misc_feature 1..20: note = C9Orf72 TTCN PAM targeting sequence
  source 1..20: mol_type = other RNA
ccaaatcctgccaggacttc

SEQ ID NO: 8307 - RNA, 20 nt, synthetic construct
  misc_feature 1..20: note = C9Orf72 TTCN PAM targeting sequence
  source 1..20: mol_type = other RNA
ctcttctccaaatcctgcca

SEQ ID NO: 8308 - RNA, 20 nt, synthetic construct
  misc_feature 1..20: note = C9Orf72 TTCN PAM targeting sequence
  source 1..20: mol_type = other RNA
ctgggaacatggctgaagca

SEQ ID NO: 8309 - RNA, 20 nt, synthetic construct
  misc_feature 1..20: note = C9Orf72 TTCN PAM targeting sequence
  source 1..20: mol_type = other RNA
ttttgaaggctatttttcta

SEQ ID NO: 8310 - RNA, 20 nt, synthetic construct
  misc_feature 1..20: note = C9Orf72 TTCN PAM targeting sequence
  source 1..20: mol_type = other RNA
aaatgaaaaaaattagtttt

SEQ ID NO: 8311 - RNA, 20 nt, synthetic construct
  misc_feature 1..20: note = C9Orf72 TTCN PAM targeting sequence
  source 1..20: mol_type = other RNA
aaaactaaataaaataaatt

SEQ ID NO: 8312 - RNA, 20 nt, synthetic construct
  misc_feature 1..20: note = C9Orf72 TTCN PAM targeting sequence
  source 1..20: mol_type = other RNA
atttattttatttagtttta

SEQ ID NO: 8313 - RNA, 20 nt, synthetic construct
  misc_feature 1..20: note = C9Orf72 TTCN PAM targeting sequence
  source 1..20: mol_type = other RNA
ctgtctacaaatcgctgtct

SEQ ID NO: 8314 - RNA, 20 nt, synthetic construct
  misc_feature 1..20: note = C9Orf72 TTCN PAM targeting sequence
  source 1..20: mol_type = other RNA
atatttagactgggtgattt

SEQ ID NO: 8315 - RNA, 20 nt, synthetic construct
  misc_feature 1..20: note = C9Orf72 TTCN PAM targeting sequence
  source 1..20: mol_type = other RNA
tcaatatttagactgggtga

SEQ ID NO: 8316 - RNA, 20 nt, synthetic construct
  misc_feature 1..20: note = C9Orf72 TTCN PAM targeting sequence
  source 1..20: mol_type = other RNA
ttagaatagaaccaaggtct

SEQ ID NO: 8317 - RNA, 20 nt, synthetic construct
  misc_feature 1..20: note = C9Orf72 TTCN PAM targeting sequence
  source 1..20: mol_type = other RNA
aatgaagtgtttgaccttgg

SEQ ID NO: 8318 - RNA, 20 nt, synthetic construct
  misc_feature 1..20: note = C9Orf72 TTCN PAM targeting sequence
  source 1..20: mol_type = other RNA
attctaatgaagtgtttgac

SEQ ID NO: 8319 - RNA, 20 nt, synthetic construct
  misc_feature 1..20: note = C9Orf72 TTCN PAM targeting sequence
  source 1..20: mol_type = other RNA
actactcctgggaaagcaaa

SEQ ID NO: 8320 - RNA, 20 nt, synthetic construct
  misc_feature 1..20: note = C9Orf72 TTCN PAM targeting sequence
  source 1..20: mol_type = other RNA
caggagtagtggaaggatta

SEQ ID NO: 8321 - RNA, 20 nt, synthetic construct
  misc_feature 1..20: note = C9Orf72 TTCN PAM targeting sequence
  source 1..20: mol_type = other RNA
acctccgcctcctgggttca

SEQ ID NO: 8322 - RNA, 20 nt, synthetic construct
  misc_feature 1..20: note = C9Orf72 TTCN PAM targeting sequence
  source 1..20: mol_type = other RNA
gttcaatggatttgaacaca

SEQ ID NO: 8323 - RNA, 20 nt, synthetic construct
  misc_feature 1..20: note = C9Orf72 TTCN PAM targeting sequence
  source 1..20: mol_type = other RNA
atggatttgaacacatcttt

SEQ ID NO: 8324 - RNA, 20 nt, synthetic construct
  misc_feature 1..20: note = C9Orf72 TTCN PAM targeting sequence
  source 1..20: mol_type = other RNA
aatccattgaacagaaagtt

SEQ ID NO: 8325 - RNA, 20 nt, synthetic construct
  misc_feature 1..20: note = C9Orf72 TTCN PAM targeting sequence
  source 1..20: mol_type = other RNA
ccagttgttccaactttcag

SEQ ID NO: 8326 - RNA, 20 nt, synthetic construct
  misc_feature 1..20: note = C9Orf72 TTCN PAM targeting sequence
  source 1..20: mol_type = other RNA
aactttcagtgactcatttg

SEQ ID NO: 8327 - RNA, 20 nt, synthetic construct
  misc_feature 1..20: note = C9Orf72 TTCN PAM targeting sequence
  source 1..20: mol_type = other RNA
gtgactcatttgatgaaaat

SEQ ID NO: 8328 - RNA, 20 nt, synthetic construct
  misc_feature 1..20: note = C9Orf72 TTCN PAM targeting sequence
  source 1..20: mol_type = other RNA
tcaaatgagtcactgaaagt

SEQ ID NO: 8329 - RNA, 20 nt, synthetic construct
  misc_feature 1..20: note = C9Orf72 TTCN PAM targeting sequence
  source 1..20: mol_type = other RNA
tgattttcatcaaatgagtc

SEQ ID NO: 8330 - RNA, 20 nt, synthetic construct
  misc_feature 1..20: note = C9Orf72 TTCN PAM targeting sequence
  source 1..20: mol_type = other RNA
attaccacataagcttcttg

SEQ ID NO: 8331 - RNA, 20 nt, synthetic construct
  misc_feature 1..20: note = C9Orf72 TTCN PAM targeting sequence
  source 1..20: mol_type = other RNA
ctttttctattaccacataa

SEQ ID NO: 8332 - RNA, 20 nt, synthetic construct
  misc_feature 1..20: note = C9Orf72 TTCN PAM targeting sequence
  source 1..20: mol_type = other RNA
ccctttctctttttctatta

SEQ ID NO: 8333 - RNA, 20 nt, synthetic construct
  misc_feature 1..20: note = C9Orf72 TTCN PAM targeting sequence
  source 1..20: mol_type = other RNA
tatttctgttttgtttaaaa

SEQ ID NO: 8334 - RNA, 20 nt, synthetic construct
  misc_feature 1..20: note = C9Orf72 TTCN PAM targeting sequence
  source 1..20: mol_type = other RNA
gttttgtttaaaatcagaga

SEQ ID NO: 8335 - RNA, 20 nt, synthetic construct
  misc_feature 1..20: note = C9Orf72 TTCN PAM targeting sequence
  source 1..20: mol_type = other RNA
ctgattttaaacaaaacaga

SEQ ID NO: 8336 - RNA, 20 nt, synthetic construct
  misc_feature 1..20: note = C9Orf72 TTCN PAM targeting sequence
  source 1..20: mol_type = other RNA
gtgttttctctgattttaaa

SEQ ID NO: 8337 - RNA, 20 nt, synthetic construct
  misc_feature 1..20: note = C9Orf72 TTCN PAM targeting sequence
  source 1..20: mol_type = other RNA
tccttttgccacagaagtca

SEQ ID NO: 8338 - RNA, 20 nt, synthetic construct
  misc_feature 1..20: note = C9Orf72 TTCN PAM targeting sequence
  source 1..20: mol_type = other RNA
gtggcaaaaggaggaaaagg

SEQ ID NO: 8339 - RNA, 20 nt, synthetic construct
  misc_feature 1..20: note = C9Orf72 TTCN PAM targeting sequence
  source 1..20: mol_type = other RNA
gacttctgtggcaaaaggag

SEQ ID NO: 8340 - RNA, 20 nt, synthetic construct
  misc_feature 1..20: note = C9Orf72 TTCN PAM targeting sequence
  source 1..20: mol_type = other RNA
tttctgacttctgtggcaaa

SEQ ID NO: 8341 - RNA, 20 nt, synthetic construct
  misc_feature 1..20: note = C9Orf72 TTCN PAM targeting sequence
  source 1..20: mol_type = other RNA
agccacaccctgggatcata

SEQ ID NO: 8342 - RNA, 20 nt, synthetic construct
  misc_feature 1..20: note = C9Orf72 TTCN PAM targeting sequence
  source 1..20: mol_type = other RNA
attaaactgttatttaagta

SEQ ID NO: 8343 - RNA, 20 nt, synthetic construct
  misc_feature 1..20: note = C9Orf72 TTCN PAM targeting sequence
  source 1..20: mol_type = other RNA
gtgtgaactttgccaggtta

SEQ ID NO: 8344 - RNA, 20 nt, synthetic construct
  misc_feature 1..20: note = C9Orf72 TTCN PAM targeting sequence
  source 1..20: mol_type = other RNA
caccgaactaaaggctgcct

SEQ ID NO: 8345 - RNA, 20 nt, synthetic construct
  misc_feature 1..20: note = C9Orf72 TTCN PAM targeting sequence
  source 1..20: mol_type = other RNA
tcagccataaaatggggata

SEQ ID NO: 8346 - RNA, 20 nt, synthetic construct
  misc_feature 1..20: note = C9Orf72 TTCN PAM targeting sequence
  source 1..20: mol_type = other RNA
gccataaaatggggataaaa

SEQ ID NO: 8347 - RNA, 20 nt, synthetic construct
  misc_feature 1..20: note = C9Orf72 TTCN PAM targeting sequence
  source 1..20: mol_type = other RNA
gtcagtgataaagtgaaata

SEQ ID NO: 8348 - RNA, 20 nt, synthetic construct
  misc_feature 1..20: note = C9Orf72 TTCN PAM targeting sequence
  source 1..20: mol_type = other RNA
aaatagatcagagatgggct

SEQ ID NO: 8349 - RNA, 20 nt, synthetic construct
  misc_feature 1..20: note = C9Orf72 TTCN PAM targeting sequence
  source 1..20: mol_type = other RNA
ccaaactattccctctcctt

SEQ ID NO: 8350 - RNA, 20 nt, synthetic construct
  misc_feature 1..20: note = C9Orf72 TTCN PAM targeting sequence
  source 1..20: mol_type = other RNA
ctctccttcctgggcacctg

SEQ ID NO: 8351 - RNA, 20 nt, synthetic construct
  misc_feature 1..20: note = C9Orf72 TTCN PAM targeting sequence
  source 1..20: mol_type = other RNA
agccaatggaatgggactga

SEQ ID NO: 8352 - RNA, 20 nt, synthetic construct
  misc_feature 1..20: note = C9Orf72 TTCN PAM targeting sequence
  source 1..20: mol_type = other RNA
attggctggaacttagtcac

SEQ ID NO: 8353 - RNA, 20 nt, synthetic construct
  misc_feature 1..20: note = C9Orf72 TTCN PAM targeting sequence
  source 1..20: mol_type = other RNA
gacaccagctactgtaaaaa

SEQ ID NO: 8354 - RNA, 20 nt, synthetic construct
  misc_feature 1..20: note = C9Orf72 TTCN PAM targeting sequence
  source 1..20: mol_type = other RNA
agatgcttcagacaccagct

SEQ ID NO: 8355 - RNA, 20 nt, synthetic construct
  misc_feature 1..20: note = C9Orf72 TTCN PAM targeting sequence
  source 1..20: mol_type = other RNA
gcaaaaatctcaggacttcc

SEQ ID NO: 8356 - RNA, 20 nt, synthetic construct
  misc_feature 1..20: note = C9Orf72 TTCN PAM targeting sequence
  source 1..20: mol_type = other RNA
atttattatttttataaata

SEQ ID NO: 8357 - RNA, 20 nt, synthetic construct
  misc_feature 1..20: note = C9Orf72 TTCN PAM targeting sequence
  source 1..20: mol_type = other RNA
actctaagtaaaccatcaga

SEQ ID NO: 8358 - RNA, 20 nt, synthetic construct
  misc_feature 1..20: note = C9Orf72 TTCN PAM targeting sequence
  source 1..20: mol_type = other RNA
tagagtataccctgatgtac

SEQ ID NO: 8359 - RNA, 20 nt, synthetic construct
  misc_feature 1..20: note = C9Orf72 TTCN PAM targeting sequence
  source 1..20: mol_type = other RNA
caggtttggcctgaggctta

SEQ ID NO: 8360 - RNA, 20 nt, synthetic construct
  misc_feature 1..20: note = C9Orf72 TTCN PAM targeting sequence
  source 1..20: mol_type = other RNA
agcctcaacctcaacctaag

SEQ ID NO: 8361 - RNA, 20 nt, synthetic construct
  misc_feature 1..20: note = C9Orf72 TTCN PAM targeting sequence
  source 1..20: mol_type = other RNA
gtaaagatctcataatcaaa

SEQ ID NO: 8362 - RNA, 20 nt, synthetic construct
  misc_feature 1..20: note = C9Orf72 TTCN PAM targeting sequence
  source 1..20: mol_type = other RNA
aacaataacaaaattaccag

SEQ ID NO: 8363 - RNA, 20 nt, synthetic construct
  misc_feature 1..20: note = C9Orf72 TTCN PAM targeting sequence
  source 1..20: mol_type = other RNA
tgtcctcatagtgtgtccca

SEQ ID NO: 8364 - RNA, 20 nt, synthetic construct
  misc_feature 1..20: note = C9Orf72 TTCN PAM targeting sequence
  source 1..20: mol_type = other RNA
ctattcttttttactacctg

SEQ ID NO: 8365 - RNA, 20 nt, synthetic construct
  misc_feature 1..20: note = C9Orf72 TTCN PAM targeting sequence
  source 1..20: mol_type = other RNA
atccatccacccacccacca

SEQ ID NO: 8366 - RNA, 20 nt, synthetic construct
  misc_feature 1..20: note = C9Orf72 TTCN PAM targeting sequence
  source 1..20: mol_type = other RNA
aagaggatagcccagtattt

SEQ ID NO: 8367 - RNA, 20 nt, synthetic construct
  misc_feature 1..20: note = C9Orf72 TTCN PAM targeting sequence
  source 1..20: mol_type = other RNA
taaattggatgtcttaaaat

SEQ ID NO: 8368 - RNA, 20 nt, synthetic construct
  misc_feature 1..20: note = C9Orf72 TTCN PAM targeting sequence
  source 1..20: mol_type = other RNA
tcataaattggatgtcttaa

SEQ ID NO: 8369 - RNA, 20 nt, synthetic construct
  misc_feature 1..20: note = C9Orf72 TTCN PAM targeting sequence
  source 1..20: mol_type = other RNA
gagaaaataaagtcaactca

SEQ ID NO: 8370 - RNA, 20 nt, synthetic construct
  misc_feature 1..20: note = C9Orf72 TTCN PAM targeting sequence
  source 1..20: mol_type = other RNA
ctgaaagagcttcttcataa

SEQ ID NO: 8371 - RNA, 20 nt, synthetic construct
  misc_feature 1..20: note = C9Orf72 TTCN PAM targeting sequence
  source 1..20: mol_type = other RNA
gtcagattgacccagtgtca

SEQ ID NO: 8372 - RNA, 20 nt, synthetic construct
  misc_feature 1..20: note = C9Orf72 TTCN PAM targeting sequence
  source 1..20: mol_type = other RNA
cagttctgactgaattaaag

SEQ ID NO: 8373 - RNA, 20 nt, synthetic construct
  misc_feature 1..20: note = C9Orf72 TTCN PAM targeting sequence
  source 1..20: mol_type = other RNA
gactgaattaaagagagttg

SEQ ID NO: 8374 - RNA, 20 nt, synthetic construct
  misc_feature 1..20: note = C9Orf72 TTCN PAM targeting sequence
  source 1..20: mol_type = other RNA
gtcagaactgggaaaacaaa

SEQ ID NO: 8375 - RNA, 20 nt, synthetic construct
  misc_feature 1..20: note = C9Orf72 TTCN PAM targeting sequence
  source 1..20: mol_type = other RNA
cagaagttcctctgtatata

SEQ ID NO: 8376 - RNA, 20 nt, synthetic construct
  misc_feature 1..20: note = C9Orf72 TTCN PAM targeting sequence
  source 1..20: mol_type = other RNA
gggaaaataatctgtagaca

SEQ ID NO: 8377 - RNA, 20 nt, synthetic construct
  misc_feature 1..20: note = C9Orf72 TTCN PAM targeting sequence
  source 1..20: mol_type = other RNA
tctgtatatataataggaaa

SEQ ID NO: 8378 - RNA, 20 nt, synthetic construct
  misc_feature 1..20: note = C9Orf72 TTCN PAM targeting sequence
  source 1..20: mol_type = other RNA
tattatatatacagaggaac

SEQ ID NO: 8379 - RNA, 20 nt, synthetic construct
  misc_feature 1..20: note = C9Orf72 TTCN PAM targeting sequence
  source 1..20: mol_type = other RNA
acattgaacacccctgagaa

SEQ ID NO: 8380 - RNA, 20 nt, synthetic construct
  misc_feature 1..20: note = C9Orf72 TTCN PAM targeting sequence
  source 1..20: mol_type = other RNA
atgtggaaagactgccctga

SEQ ID NO: 8381 - RNA, 20 nt, synthetic construct
  misc_feature 1..20: note = C9Orf72 TTCN PAM targeting sequence
  source 1..20: mol_type = other RNA
caggggtgttcaatgtggaa

SEQ ID NO: 8382 - RNA, 20 nt, synthetic construct
  misc_feature 1..20: note = C9Orf72 TTCN PAM targeting sequence
  source 1..20: mol_type = other RNA
ccattttgggccatgatgaa

SEQ ID NO: 8383 - RNA, 20 nt, synthetic construct
  misc_feature 1..20: note = C9Orf72 TTCN PAM targeting sequence
  source 1..20: mol_type = other RNA
tcatggcccaaaatggggaa

SEQ ID NO: 8384 - RNA, 20 nt, synthetic construct
  misc_feature 1..20: note = C9Orf72 TTCN PAM targeting sequence
  source 1..20: mol_type = other RNA
tcatcatggcccaaaatggg

SEQ ID NO: 8385 - RNA, 20 nt, synthetic construct
  misc_feature 1..20: note = C9Orf72 TTCN PAM targeting sequence
  source 1..20: mol_type = other RNA
gctgctctgctggcttggga

SEQ ID NO: 8386 - RNA, 20 nt, synthetic construct
  misc_feature 1..20: note = C9Orf72 TTCN PAM targeting sequence
  source 1..20: mol_type = other RNA
gtagctcaacatgagaaaaa

SEQ ID NO: 8387 - RNA, 20 nt, synthetic construct
  misc_feature 1..20: note = C9Orf72 TTCN PAM targeting sequence
  source 1..20: mol_type = other RNA
catgttgagctacagaaaag

SEQ ID NO: 8388 - RNA, 20 nt, synthetic construct
  misc_feature 1..20: note = C9Orf72 TTCN PAM targeting sequence
  source 1..20: mol_type = other RNA
ttggcagacatgctgcagag

SEQ ID NO: 8389 - RNA, 20 nt, synthetic construct
  misc_feature 1..20: note = C9Orf72 TTCN PAM targeting sequence
  source 1..20: mol_type = other RNA
ctctgtgtaggctgctgtct

SEQ ID NO: 8390 - RNA, 20 nt, synthetic construct
  misc_feature 1..20: note = C9Orf72 TTCN PAM targeting sequence
  source 1..20: mol_type = other RNA
tacaacttccctctgtgtag

SEQ ID NO: 8391 - RNA, 20 nt, synthetic construct
  misc_feature 1..20: note = C9Orf72 TTCN PAM targeting sequence
  source 1..20: mol_type = other RNA
atgcatgtgctagtggtaac

SEQ ID NO: 8392 - RNA, 20 nt, synthetic construct
  misc_feature 1..20: note = C9Orf72 TTCN PAM targeting sequence
  source 1..20: mol_type = other RNA
ttacaggagttaccactagc

SEQ ID NO: 8393 - RNA, 20 nt, synthetic construct
  misc_feature 1..20: note = C9Orf72 TTCN PAM targeting sequence
  source 1..20: mol_type = other RNA
ctcaggacatctcacggtgc

SEQ ID NO: 8394 - RNA, 20 nt, synthetic construct
  misc_feature 1..20: note = C9Orf72 TTCN PAM targeting sequence
  source 1..20: mol_type = other RNA
aggagggagcaccgtgagat

SEQ ID NO: 8395 - RNA, 20 nt, synthetic construct
  misc_feature 1..20: note = C9Orf72 TTCN PAM targeting sequence
  source 1..20: mol_type = other RNA
cctgtgggccttcaaggagg

SEQ ID NO: 8396 - RNA, 20 nt, synthetic construct
  misc_feature 1..20: note = C9Orf72 TTCN PAM targeting sequence
  source 1..20: mol_type = other RNA
tcccagaactcagtaccaag

SEQ ID NO: 8397 - RNA, 20 nt, synthetic construct
  misc_feature 1..20: note = C9Orf72 TTCN PAM targeting sequence
  source 1..20: mol_type = other RNA
gggaggaatttctcctgtgg

SEQ ID NO: 8398 - RNA, 20 nt, synthetic construct
  misc_feature 1..20: note = C9Orf72 TTCN PAM targeting sequence
  source 1..20: mol_type = other RNA
cttggtactgagttctggga

SEQ ID NO: 8399 - RNA, 20 nt, synthetic construct
  misc_feature 1..20: note = C9Orf72 TTCN PAM targeting sequence
  source 1..20: mol_type = other RNA
ttctcctgaagacttagttt

SEQ ID NO: 8400 - RNA, 20 nt, synthetic construct
  misc_feature 1..20: note = C9Orf72 TTCN PAM targeting sequence
  source 1..20: mol_type = other RNA
cctgaagacttagttttgtt

SEQ ID NO: 8401 - RNA, 20 nt, synthetic construct
  misc_feature 1..20: note = C9Orf72 TTCN PAM targeting sequence
  source 1..20: mol_type = other RNA
ggagaaggaaagcttctctt

SEQ ID NO: 8402 - RNA, 20 nt, synthetic construct
  misc_feature 1..20: note = C9Orf72 TTCN PAM targeting sequence
  source 1..20: mol_type = other RNA
cagtttccatttcctcctct

SEQ ID NO: 8403 - RNA, 20 nt, synthetic construct
  misc_feature 1..20: note = C9Orf72 TTCN PAM targeting sequence
  source 1..20: mol_type = other RNA
atttcctcctctttaaactg

SEQ ID NO: 8404 - RNA, 20 nt, synthetic construct
  misc_feature 1..20: note = C9Orf72 TTCN PAM targeting sequence
  source 1..20: mol_type = other RNA
tcctctttaaactgaggcta

SEQ ID NO: 8405 - RNA, 20 nt, synthetic construct
  misc_feature 1..20: note = C9Orf72 TTCN PAM targeting sequence
  source 1..20: mol_type = other RNA
cacagttactatgcaatgta

SEQ ID NO: 8406 - RNA, 20 nt, synthetic construct
  misc_feature 1..20: note = C9Orf72 TTCN PAM targeting sequence
  source 1..20: mol_type = other RNA
ctttaattctcacagttact

SEQ ID NO: 8407 - RNA, 20 nt, synthetic construct
  misc_feature 1..20: note = C9Orf72 TTCN PAM targeting sequence
  source 1..20: mol_type = other RNA
ttattattattaatagctat

SEQ ID NO: 8408 - RNA, 20 nt, synthetic construct
  misc_feature 1..20: note = C9Orf72 TTCN PAM targeting sequence
  source 1..20: mol_type = other RNA
ttggtaacaatctgtatagc

SEQ ID NO: 8409 - RNA, 20 nt, synthetic construct
  misc_feature 1..20: note = C9Orf72 TTCN PAM targeting sequence
  source 1..20: mol_type = other RNA
ctctaacaaagacctacagt

SEQ ID NO: 8410 - RNA, 20 nt, synthetic construct
  misc_feature 1..20: note = C9Orf72 TTCN PAM targeting sequence
  source 1..20: mol_type = other RNA
atactagctcaatgtctcca

SEQ ID NO: 8411 - RNA, 20 nt, synthetic construct
  misc_feature 1..20: note = C9Orf72 TTCN PAM targeting sequence
  source 1..20: mol_type = other RNA
ttccaacatgctagatttgt

SEQ ID NO: 8412 - RNA, 20 nt, synthetic construct
  misc_feature 1..20: note = C9Orf72 TTCN PAM targeting sequence
  source 1..20: mol_type = other RNA
aacatgctagatttgttgca

SEQ ID NO: 8413 - RNA, 20 nt, synthetic construct
  misc_feature 1..20: note = C9Orf72 TTCN PAM targeting sequence
  source 1..20: mol_type = other RNA
atccacgacaggggatatgg

SEQ ID NO: 8414 - RNA, 20 nt, synthetic construct
  misc_feature 1..20: note = C9Orf72 TTCN PAM targeting sequence
  source 1..20: mol_type = other RNA
gtatatttttgggggagaca

SEQ ID NO: 8415 - RNA, 20 nt, synthetic construct
  misc_feature 1..20: note = C9Orf72 TTCN PAM targeting sequence
  source 1..20: mol_type = other RNA
aatccccaatacctataatg

SEQ ID NO: 8416 - RNA, 20 nt, synthetic construct
  misc_feature 1..20: note = C9Orf72 TTCN PAM targeting sequence
  source 1..20: mol_type = other RNA
aaataaggccacattatagg

SEQ ID NO: 8417 - RNA, 20 nt, synthetic construct
  misc_feature 1..20: note = C9Orf72 TTCN PAM targeting sequence
  source 1..20: mol_type = other RNA
taatttgattacatttgcaa

SEQ ID NO: 8418 - RNA, 20 nt, synthetic construct
  misc_feature 1..20: note = C9Orf72 TTCN PAM targeting sequence
  source 1..20: mol_type = other RNA
tatcagcacactacttgtta

SEQ ID NO: 8419 - RNA, 20 nt, synthetic construct
  misc_feature 1..20: note = C9Orf72 TTCN PAM targeting sequence
  source 1..20: mol_type = other RNA
atggccttcttatcagcaca

SEQ ID NO: 8420 - RNA, 20 nt, synthetic construct
  misc_feature 1..20: note = C9Orf72 TTCN PAM targeting sequence
  source 1..20: mol_type = other RNA
cgtggcccttcaatggcctt

SEQ ID NO: 8421 - RNA, 20 nt, synthetic construct
  misc_feature 1..20: note = C9Orf72 TTCN PAM targeting sequence
  source 1..20: mol_type = other RNA
tgcatctgtgtgtcccttca

SEQ ID NO: 8422 - RNA, 20 nt, synthetic construct
  misc_feature 1..20: note = C9Orf72 TTCN PAM targeting sequence
  source 1..20: mol_type = other RNA
agatgcatcatctctgcctc

SEQ ID NO: 8423 - RNA, 20 nt, synthetic construct
  misc_feature 1..20: note = C9Orf72 TTCN PAM targeting sequence
  source 1..20: mol_type = other RNA
ttggtttctagatgcatcat

SEQ ID NO: 8424 - RNA, 20 nt, synthetic construct
  misc_feature 1..20: note = C9Orf72 TTCN PAM targeting sequence
  source 1..20: mol_type = other RNA
ggtacttgctggtagtactt

SEQ ID NO: 8425 - RNA, 20 nt, synthetic construct
  misc_feature 1..20: note = C9Orf72 TTCN PAM targeting sequence
  source 1..20: mol_type = other RNA
ttgcctcttttagcttctgg

SEQ ID NO: 8426 - RNA, 20 nt, synthetic construct
  misc_feature 1..20: note = C9Orf72 TTCN PAM targeting sequence
  source 1..20: mol_type = other RNA
tgtttagaggctttggcaga

SEQ ID NO: 8427 - RNA, 20 nt, synthetic construct
  misc_feature 1..20: note = C9Orf72 TTCN PAM targeting sequence
  source 1..20: mol_type = other RNA
gccaaagcctctaaacaaga

SEQ ID NO: 8428 - RNA, 20 nt, synthetic construct
  misc_feature 1..20: note = C9Orf72 TTCN PAM targeting sequence
  source 1..20: mol_type = other RNA
agactctaggactatgagag

SEQ ID NO: 8429 - RNA, 20 nt, synthetic construct
  misc_feature 1..20: note = C9Orf72 TTCN PAM targeting sequence
  source 1..20: mol_type = other RNA
ctcatagtcctagagtctgg

SEQ ID NO: 8430 - RNA, 20 nt, synthetic construct
  misc_feature 1..20: note = C9Orf72 TTCN PAM targeting sequence
  source 1..20: mol_type = other RNA
attgttctaagccacctaag

SEQ ID NO: 8431 - RNA, 20 nt, synthetic construct
  misc_feature 1..20: note = C9Orf72 TTCN PAM targeting sequence
  source 1..20: mol_type = other RNA
aagccacctaagttatggtg

SEQ ID NO: 8432 - RNA, 20 nt, synthetic construct
  misc_feature 1..20: note = C9Orf72 TTCN PAM targeting sequence
  source 1..20: mol_type = other RNA
tagggttgccataacaaatc

SEQ ID NO: 8433 - RNA, 20 nt, synthetic construct
  misc_feature 1..20: note = C9Orf72 TTCN PAM targeting sequence
  source 1..20: mol_type = other RNA
tttcctagggttgccataac

SEQ ID NO: 8434 - RNA, 20 nt, synthetic construct
  misc_feature 1..20: note = C9Orf72 TTCN PAM targeting sequence
  source 1..20: mol_type = other RNA
gccacttggggctgtaggag

SEQ ID NO: 8435 - RNA, 20 nt, synthetic construct
  misc_feature 1..20: note = C9Orf72 TTCN PAM targeting sequence
  source 1..20: mol_type = other RNA
ttacttctgccacttggggc

SEQ ID NO: 8436 - RNA, 20 nt, synthetic construct
  misc_feature 1..20: note = C9Orf72 TTCN PAM targeting sequence
  source 1..20: mol_type = other RNA
tggcagtcatcacttggact

SEQ ID NO: 8437 - RNA, 20 nt, synthetic construct
  misc_feature 1..20: note = C9Orf72 TTCN PAM targeting sequence
  source 1..20: mol_type = other RNA
tgggaggcatatactaaaat

SEQ ID NO: 8438 - RNA, 20 nt, synthetic construct
  misc_feature 1..20: note = C9Orf72 TTCN PAM targeting sequence
  source 1..20: mol_type = other RNA
atgaattaattcttctttct

SEQ ID NO: 8439 - RNA, 20 nt, synthetic construct
  misc_feature 1..20: note = C9Orf72 TTCN PAM targeting sequence
  source 1..20: mol_type = other RNA
ttgaagagtatggtcaaact

SEQ ID NO: 8440 - RNA, 20 nt, synthetic construct
  misc_feature 1..20: note = C9Orf72 TTCN PAM targeting sequence
  source 1..20: mol_type = other RNA
tctttctgagcttaaaagaa

SEQ ID NO: 8441 - RNA, 20 nt, synthetic construct
  misc_feature 1..20: note = C9Orf72 TTCN PAM targeting sequence
  source 1..20: mol_type = other RNA
ttctgagcttaaaagaatca

SEQ ID NO: 8442 - RNA, 20 nt, synthetic construct
  misc_feature 1..20: note = C9Orf72 TTCN PAM targeting sequence
  source 1..20: mol_type = other RNA
gagcttaaaagaatcacatc

SEQ ID NO: 8443 - RNA, 20 nt, synthetic construct
  misc_feature 1..20: note = C9Orf72 TTCN PAM targeting sequence
  source 1..20: mol_type = other RNA
tttaagctcagaaagaagaa

SEQ ID NO: 8444 - RNA, 20 nt, synthetic construct
  misc_feature 1..20: note = C9Orf72 TTCN PAM targeting sequence
  source 1..20: mol_type = other RNA
cagttaagctctatttgcca

SEQ ID NO: 8445 - RNA, 20 nt, synthetic construct
  misc_feature 1..20: note = C9Orf72 TTCN PAM targeting sequence
  source 1..20: mol_type = other RNA
aaattctgtggagtcatctg

SEQ ID NO: 8446 - RNA, 20 nt, synthetic construct
  misc_feature 1..20: note = C9Orf72 TTCN PAM targeting sequence
  source 1..20: mol_type = other RNA
gtggagtcatctgggcaaag

SEQ ID NO: 8447 - RNA, 20 nt, synthetic construct
  misc_feature 1..20: note = C9Orf72 TTCN PAM targeting sequence
  source 1..20: mol_type = other RNA
ttttgtttgtttgtttgttt

SEQ ID NO: 8448 - RNA, 20 nt, synthetic construct
  misc_feature 1..20: note = C9Orf72 TTCN PAM targeting sequence
  source 1..20: mol_type = other RNA
gtttttttcgttttgtttgt

SEQ ID NO: 8449 - RNA, 20 nt, synthetic construct
  misc_feature 1..20: note = C9Orf72 TTCN PAM targeting sequence
  source 1..20: mol_type = other RNA
tcttctgctgcccactgtaa

SEQ ID NO: 8450 - RNA, 20 nt, synthetic construct
  misc_feature 1..20: note = C9Orf72 TTCN PAM targeting sequence
  source 1..20: mol_type = other RNA
gctgcccactgtaacatagc

SEQ ID NO: 8451 - RNA, 20 nt, synthetic construct
  misc_feature 1..20: note = C9Orf72 TTCN PAM targeting sequence
  source 1..20: mol_type = other RNA
tagggttctgacacagaccc

SEQ ID NO: 8452 - RNA, 20 nt, synthetic construct
  misc_feature 1..20: note = C9Orf72 TTCN PAM targeting sequence
  source 1..20: mol_type = other RNA
gacacagacccacttcattc

SEQ ID NO: 8453 - RNA, 20 nt, synthetic construct
  misc_feature 1..20: note = C9Orf72 TTCN PAM targeting sequence
  source 1..20: mol_type = other RNA
ttccattccccatatattct

SEQ ID NO: 8454 - RNA, 20 nt, synthetic construct
  misc_feature 1..20: note = C9Orf72 TTCN PAM targeting sequence
  source 1..20: mol_type = other RNA
attccccatatattctcttt

SEQ ID NO: 8455 - RNA, 20 nt, synthetic construct
  misc_feature 1..20: note = C9Orf72 TTCN PAM targeting sequence
  source 1..20: mol_type = other RNA
ccatatattctctttggaca

SEQ ID NO: 8456 - RNA, 20 nt, synthetic construct
  misc_feature 1..20: note = C9Orf72 TTCN PAM targeting sequence
  source 1..20: mol_type = other RNA
ctttggacagacccactgat

SEQ ID NO: 8457 - RNA, 20 nt, synthetic construct
  misc_feature 1..20: note = C9Orf72 TTCN PAM targeting sequence
  source 1..20: mol_type = other RNA
tatagtcttaccacttacag

SEQ ID NO: 8458 - RNA, 20 nt, synthetic construct
  misc_feature 1..20: note = C9Orf72 TTCN PAM targeting sequence
  source 1..20: mol_type = other RNA
gtggataccttccaatctat

SEQ ID NO: 8459 - RNA, 20 nt, synthetic construct
  misc_feature 1..20: note = C9Orf72 TTCN PAM targeting sequence
  source 1..20: mol_type = other RNA
aatctatctctcctggcagc

SEQ ID NO: 8460 - RNA, 20 nt, synthetic construct
  misc_feature 1..20: note = C9Orf72 TTCN PAM targeting sequence
  source 1..20: mol_type = other RNA
gctcttgtctaggcccatat

SEQ ID NO: 8461 - RNA, 20 nt, synthetic construct
  misc_feature 1..20: note = C9Orf72 TTCN PAM targeting sequence
  source 1..20: mol_type = other RNA
aagcaacttgtctataacag

SEQ ID NO: 8462 - RNA, 20 nt, synthetic construct
  misc_feature 1..20: note = C9Orf72 TTCN PAM targeting sequence
  source 1..20: mol_type = other RNA
gttatagacaagttgctttg

SEQ ID NO: 8463 - RNA, 20 nt, synthetic construct
  misc_feature 1..20: note = C9Orf72 TTCN PAM targeting sequence
  source 1..20: mol_type = other RNA
agctaggtatatgatcgtgc

SEQ ID NO: 8464 - RNA, 20 nt, synthetic construct
  misc_feature 1..20: note = C9Orf72 TTCN PAM targeting sequence
  source 1..20: mol_type = other RNA
ccctagtctatttcctcctt

SEQ ID NO: 8465 - RNA, 20 nt, synthetic construct
  misc_feature 1..20: note = C9Orf72 TTCN PAM targeting sequence
  source 1..20: mol_type = other RNA
tccttctcacccccgcctcc

SEQ ID NO: 8466 - RNA, 20 nt, synthetic construct
  misc_feature 1..20: note = C9Orf72 TTCN PAM targeting sequence
  source 1..20: mol_type = other RNA
cacccccgcctcccattcca

SEQ ID NO: 8467 - RNA, 20 nt, synthetic construct
  misc_feature 1..20: note = C9Orf72 TTCN PAM targeting sequence
  source 1..20: mol_type = other RNA
aaatcaatttccaaaagttg

SEQ ID NO: 8468 - RNA, 20 nt, synthetic construct
  misc_feature 1..20: note = C9Orf72 TTCN PAM targeting sequence
  source 1..20: mol_type = other RNA
aaaagttgccaaccttaact

SEQ ID NO: 8469 - RNA, 20 nt, synthetic construct
  misc_feature 1..20: note = C9Orf72 TTCN PAM targeting sequence
  source 1..20: mol_type = other RNA
aagtaattgtcttcttcttg

SEQ ID NO: 8470 - RNA, 20 nt, synthetic construct
  misc_feature 1..20: note = C9Orf72 TTCN PAM targeting sequence
  source 1..20: mol_type = other RNA
tcttgatacctgctatcact

SEQ ID NO: 8471 - RNA, 20 nt, synthetic construct
  misc_feature 1..20: note = C9Orf72 TTCN PAM targeting sequence
  source 1..20: mol_type = other RNA
tgatacctgctatcactctc

SEQ ID NO: 8472 - RNA, 20 nt, synthetic construct
  misc_feature 1..20: note = C9Orf72 TTCN PAM targeting sequence
  source 1..20: mol_type = other RNA
aactctcatcaactcttgcc

SEQ ID NO: 8473 - RNA, 20 nt, synthetic construct
  misc_feature 1..20: note = C9Orf72 TTCN PAM targeting sequence
  source 1..20: mol_type = other RNA
tggaggcagtgatacccagt

SEQ ID NO: 8474 - RNA, 20 nt, synthetic construct
  misc_feature 1..20: note = C9Orf72 TTCN PAM targeting sequence
  source 1..20: mol_type = other RNA
cttgtattcttggaatttgg

SEQ ID NO: 8475 - RNA, 20 nt, synthetic construct
  misc_feature 1..20: note = C9Orf72 TTCN PAM targeting sequence
  source 1..20: mol_type = other RNA
tggaatttggcattgtgtct

SEQ ID NO: 8476 - RNA, 20 nt, synthetic construct
  misc_feature 1..20: note = C9Orf72 TTCN PAM targeting sequence
  source 1..20: mol_type = other RNA
aagaatacaagggaaaacaa

SEQ ID NO: 8477 - RNA, 20 nt, synthetic construct
  misc_feature 1..20: note = C9Orf72 TTCN PAM targeting sequence
  source 1..20: mol_type = other RNA
acctcttttttttttttttt

SEQ ID NO: 8478 - RNA, 20 nt, synthetic construct
  misc_feature 1..20: note = C9Orf72 TTCN PAM targeting sequence
  source 1..20: mol_type = other RNA
gtaattctacctcttttttt

SEQ ID NO: 8479 - RNA, 20 nt, synthetic construct
  misc_feature 1..20: note = C9Orf72 TTCN PAM targeting sequence
  source 1..20: mol_type = other RNA
atttagattaaaatatactc

SEQ ID NO: 8480 - RNA, 20 nt, synthetic construct
  misc_feature 1..20: note = C9Orf72 TTCN PAM targeting sequence
  source 1..20: mol_type = other RNA
gtattttatcttatgagtat

SEQ ID NO: 8481 - RNA, 20 nt, synthetic construct
  misc_feature 1..20: note = C9Orf72 TTCN PAM targeting sequence
  source 1..20: mol_type = other RNA
ttcaataaatatttattgag

SEQ ID NO: 8482 - RNA, 20 nt, synthetic construct
  misc_feature 1..20: note = C9Orf72 TTCN PAM targeting sequence
  source 1..20: mol_type = other RNA
ataaatatttattgagtgta

SEQ ID NO: 8483 - RNA, 20 nt, synthetic construct
  misc_feature 1..20: note = C9Orf72 TTCN PAM targeting sequence
  source 1..20: mol_type = other RNA
ttgttttccattttatcccc

SEQ ID NO: 8484 - RNA, 20 nt, synthetic construct
  misc_feature 1..20: note = C9Orf72 TTCN PAM targeting sequence
  source 1..20: mol_type = other RNA
gacatgggaaaaagtctagc

SEQ ID NO: 8485 - RNA, 20 nt, synthetic construct
  misc_feature 1..20: note = C9Orf72 TTCN PAM targeting sequence
  source 1..20: mol_type = other RNA
catgtctgaaattaagttat

SEQ ID NO: 8486 - RNA, 20 nt, synthetic construct
  misc_feature 1..20: note = C9Orf72 TTCN PAM targeting sequence
  source 1..20: mol_type = other RNA
tgagagatgctagacttttt

SEQ ID NO: 8487 - RNA, 20 nt, synthetic construct
  misc_feature 1..20: note = C9Orf72 TTCN PAM targeting sequence
  source 1..20: mol_type = other RNA
tcccaattacagccactctt

SEQ ID NO: 8488 - RNA, 20 nt, synthetic construct
  misc_feature 1..20: note = C9Orf72 TTCN PAM targeting sequence
  source 1..20: mol_type = other RNA
caattacagccactcttgga

SEQ ID NO: 8489 - RNA, 20 nt, synthetic construct
  misc_feature 1..20: note = C9Orf72 TTCN PAM targeting sequence
  source 1..20: mol_type = other RNA
tagatcacatccaagagtgg

SEQ ID NO: 8490 - RNA, 20 nt, synthetic construct
  misc_feature 1..20: note = C9Orf72 TTCN PAM targeting sequence
  source 1..20: mol_type = other RNA
ctgagtaaagagaaggatta

SEQ ID NO: 8491 - RNA, 20 nt, synthetic construct
  misc_feature 1..20: note = C9Orf72 TTCN PAM targeting sequence
  source 1..20: mol_type = other RNA
ctttactcagtgaatagatg

SEQ ID NO: 8492 - RNA, 20 nt, synthetic construct
  misc_feature 1..20: note = C9Orf72 TTCN PAM targeting sequence
  source 1..20: mol_type = other RNA
ggtaggtgacatccattttt

SEQ ID NO: 8493 - RNA, 20 nt, synthetic construct
  misc_feature 1..20: note = C9Orf72 TTCN PAM targeting sequence
  source 1..20: mol_type = other RNA
tgcctgccatctgaaattct

SEQ ID NO: 8494 - RNA, 20 nt, synthetic construct
  misc_feature 1..20: note = C9Orf72 TTCN PAM targeting sequence
  source 1..20: mol_type = other RNA
gatggcaggcatgaaaaatg

SEQ ID NO: 8495 - RNA, 20 nt, synthetic construct
  misc_feature 1..20: note = C9Orf72 TTCN PAM targeting sequence
  source 1..20: mol_type = other RNA
tactaacatcctcagaagta

SEQ ID NO: 8496 - RNA, 20 nt, synthetic construct
  misc_feature 1..20: note = C9Orf72 TTCN PAM targeting sequence
  source 1..20: mol_type = other RNA
gaggatgttagtaagaattt

SEQ ID NO: 8497 - RNA, 20 nt, synthetic construct
  misc_feature 1..20: note = C9Orf72 TTCN PAM targeting sequence
  source 1..20: mol_type = other RNA
ggctcaaaaggacccaggga

SEQ ID NO: 8498 - RNA, 20 nt, synthetic construct
  misc_feature 1..20: note = C9Orf72 TTCN PAM targeting sequence
  source 1..20: mol_type = other RNA
ctgggtccttttgagcccga

SEQ ID NO: 8499 - RNA, 20 nt, synthetic construct
  misc_feature 1..20: note = C9Orf72 TTCN PAM targeting sequence
  source 1..20: mol_type = other RNA
gtgttgatttccctgggtcc

SEQ ID NO: 8500 - RNA, 20 nt, synthetic construct
  misc_feature 1..20: note = C9Orf72 TTCN PAM targeting sequence
  source 1..20: mol_type = other RNA
ggtcatcctaaaacagagag

SEQ ID NO: 8501 - RNA, 20 nt, synthetic construct
  misc_feature 1..20: note = C9Orf72 TTCN PAM targeting sequence
  source 1..20: mol_type = other RNA
atcatgctacatttcttttt

SEQ ID NO: 8502 - RNA, 20 nt, synthetic construct
  misc_feature 1..20: note = C9Orf72 TTCN PAM targeting sequence
  source 1..20: mol_type = other RNA
ttttatcagggattcttttc

SEQ ID NO: 8503 - RNA, 20 nt, synthetic construct
  misc_feature 1..20: note = C9Orf72 TTCN PAM targeting sequence
  source 1..20: mol_type = other RNA
tttccaacagctcaaattat

SEQ ID NO: 8504 - RNA, 20 nt, synthetic construct
  misc_feature 1..20: note = C9Orf72 TTCN PAM targeting sequence
  source 1..20: mol_type = other RNA
aacagctcaaattatttctg

SEQ ID NO: 8505 - RNA, 20 nt, synthetic construct
  misc_feature 1..20: note = C9Orf72 TTCN PAM targeting sequence
  source 1..20: mol_type = other RNA
gggtgggaagttactacgtg

SEQ ID NO: 8506 - RNA, 20 nt, synthetic construct
  misc_feature 1..20: note = C9Orf72 TTCN PAM targeting sequence
  source 1..20: mol_type = other RNA
cacccagaaataatttgagc

SEQ ID NO: 8507 - RNA, 20 nt, synthetic construct
  misc_feature 1..20: note = C9Orf72 TTCN PAM targeting sequence
  source 1..20: mol_type = other RNA
gttgggctggaaaagacaac

SEQ ID NO: 8508 - RNA, 20 nt, synthetic construct
  misc_feature 1..20: note = C9Orf72 TTCN PAM targeting sequence
  source 1..20: mol_type = other RNA
agcccaactgaagattatgc

SEQ ID NO: 8509 - RNA, 20 nt, synthetic construct
  misc_feature 1..20: note = C9Orf72 TTCN PAM targeting sequence
  source 1..20: mol_type = other RNA
tctccaccacccccttttgc

SEQ ID NO: 8510 - RNA, 20 nt, synthetic construct
  misc_feature 1..20: note = C9Orf72 TTCN PAM targeting sequence
  source 1..20: mol_type = other RNA
aagaccattcctctccacca

SEQ ID NO: 8511 - RNA, 20 nt, synthetic construct
  misc_feature 1..20: note = C9Orf72 TTCN PAM targeting sequence
  source 1..20: mol_type = other RNA
cagcagttttgcctatacag

SEQ ID NO: 8512 - RNA, 20 nt, synthetic construct
  misc_feature 1..20: note = C9Orf72 TTCN PAM targeting sequence
  source 1..20: mol_type = other RNA
gtaataacctgtataggcaa

SEQ ID NO: 8513 - RNA, 20 nt, synthetic construct
  misc_feature 1..20: note = C9Orf72 TTCN PAM targeting sequence
  source 1..20: mol_type = other RNA
caaatctgattcagtaataa

SEQ ID NO: 8514 - RNA, 20 nt, synthetic construct
  misc_feature 1..20: note = C9Orf72 TTCN PAM targeting sequence
  source 1..20: mol_type = other RNA
tatagttctcaaatctgatt

SEQ ID NO: 8515 - RNA, 20 nt, synthetic construct
  misc_feature 1..20: note = C9Orf72 TTCN PAM targeting sequence
  source 1..20: mol_type = other RNA
tacacagtaaatgttagttt

SEQ ID NO: 8516 - RNA, 20 nt, synthetic construct
  misc_feature 1..20: note = C9Orf72 TTCN PAM targeting sequence
  source 1..20: mol_type = other RNA
tagttttgtatctgtggcac

SEQ ID NO: 8517 - RNA, 20 nt, synthetic construct
  misc_feature 1..20: note = C9Orf72 TTCN PAM targeting sequence
  source 1..20: mol_type = other RNA
tctggaggggaagacatatg

SEQ ID NO: 8518 - RNA, 20 nt, synthetic construct
  misc_feature 1..20: note = C9Orf72 TTCN PAM targeting sequence
  source 1..20: mol_type = other RNA
ggaggggaagacatatgaat

SEQ ID NO: 8519 - RNA, 20 nt, synthetic construct
  misc_feature 1..20: note = C9Orf72 TTCN PAM targeting sequence
  source 1..20: mol_type = other RNA
cctccagaagaaaaatgtgt

SEQ ID NO: 8520 - RNA, 20 nt, synthetic construct
  misc_feature 1..20: note = C9Orf72 TTCN PAM targeting sequence
  source 1..20: mol_type = other RNA
tatgtcttcccctccagaag

SEQ ID NO: 8521 - RNA, 20 nt, synthetic construct
  misc_feature 1..20: note = C9Orf72 TTCN PAM targeting sequence
  source 1..20: mol_type = other RNA
tggttgattcatatgtcttc

SEQ ID NO: 8522 - RNA, 20 nt, synthetic construct
  misc_feature 1..20: note = C9Orf72 TTCN PAM targeting sequence
  source 1..20: mol_type = other RNA
tacctctactctagtgatgt

SEQ ID NO: 8523 - RNA, 20 nt, synthetic construct
  misc_feature 1..20: note = C9Orf72 TTCN PAM targeting sequence
  source 1..20: mol_type = other RNA
ccgaggctggtcagatcatg

SEQ ID NO: 8524 - RNA, 20 nt, synthetic construct
  misc_feature 1..20: note = C9Orf72 TTCN PAM targeting sequence
  source 1..20: mol_type = other RNA
ccttgggattccccgaggct

SEQ ID NO: 8525 - RNA, 20 nt, synthetic construct
  misc_feature 1..20: note = C9Orf72 TTCN PAM targeting sequence
  source 1..20: mol_type = other RNA
ggtgcattctccttgggatt

SEQ ID NO: 8526 - RNA, 20 nt, synthetic construct
  misc_feature 1..20: note = C9Orf72 TTCN PAM targeting sequence
  source 1..20: mol_type = other RNA
cttaattttccccgacatct

SEQ ID NO: 8527 - RNA, 20 nt, synthetic construct
  misc_feature 1..20: note = C9Orf72 TTCN PAM targeting sequence
  source 1..20: mol_type = other RNA
ccgacatctgactttgtcct

SEQ ID NO: 8528 - RNA, 20 nt, synthetic construct
  misc_feature 1..20: note = C9Orf72 TTCN PAM targeting sequence
  source 1..20: mol_type = other RNA
ttttgtgtagggatatggag

SEQ ID NO: 8529 - RNA, 20 nt, synthetic construct
  misc_feature 1..20: note = C9Orf72 TTCN PAM targeting sequence
  source 1..20: mol_type = other RNA
ttatcatcattcagtcaccc

SEQ ID NO: 8530 - RNA, 20 nt, synthetic construct
  misc_feature 1..20: note = C9Orf72 TTCN PAM targeting sequence
  source 1..20: mol_type = other RNA
gtcacccaacaaataattat

SEQ ID NO: 8531 - RNA, 20 nt, synthetic construct
  misc_feature 1..20: note = C9Orf72 TTCN PAM targeting sequence
  source 1..20: mol_type = other RNA
aggattcaacctcaaagcat

SEQ ID NO: 8532 - RNA, 20 nt, synthetic construct
  misc_feature 1..20: note = C9Orf72 TTCN PAM targeting sequence
  source 1..20: mol_type = other RNA
acctcaaagcatatcacaat

SEQ ID NO: 8533 - RNA, 20 nt, synthetic construct
  misc_feature 1..20: note = C9Orf72 TTCN PAM targeting sequence
  source 1..20: mol_type = other RNA
ctatgagcatttaagagaaa

SEQ ID NO: 8534 - RNA, 20 nt, synthetic construct
  misc_feature 1..20: note = C9Orf72 TTCN PAM targeting sequence
  source 1..20: mol_type = other RNA
cttaaatgctcatagggaat

SEQ ID NO: 8535 - RNA, 20 nt, synthetic construct
  misc_feature 1..20: note = C9Orf72 TTCN PAM targeting sequence
  source 1..20: mol_type = other RNA
ctcacagaacttattgctta

SEQ ID NO: 8536 - RNA, 20 nt, synthetic construct
  misc_feature 1..20: note = C9Orf72 TTCN PAM targeting sequence
  source 1..20: mol_type = other RNA
gtgagggaaggtataacaac

SEQ ID NO: 8537 - RNA, 20 nt, synthetic construct
  misc_feature 1..20: note = C9Orf72 TTCN PAM targeting sequence
  source 1..20: mol_type = other RNA
ctctactaagcaataagttc

SEQ ID NO: 8538 - RNA, 20 nt, synthetic construct
  misc_feature 1..20: note = C9Orf72 TTCN PAM targeting sequence
  source 1..20: mol_type = other RNA
cttgccctgaagtgtttgaa

SEQ ID NO: 8539 - RNA, 20 nt, synthetic construct
  misc_feature 1..20: note = C9Orf72 TTCN PAM targeting sequence
  source 1..20: mol_type = other RNA
gggcaagcgaaagctttgct

SEQ ID NO: 8540 - RNA, 20 nt, synthetic construct
  misc_feature 1..20: note = C9Orf72 TTCN PAM targeting sequence
  source 1..20: mol_type = other RNA
aacacttcagggcaagcgaa

SEQ ID NO: 8541 - RNA, 20 nt, synthetic construct
  misc_feature 1..20: note = C9Orf72 TTCN PAM targeting sequence
  source 1..20: mol_type = other RNA
ctgaatagtcattatcagtt

SEQ ID NO: 8542 - RNA, 20 nt, synthetic construct
  misc_feature 1..20: note = C9Orf72 TTCN PAM targeting sequence
  source 1..20: mol_type = other RNA
gggaatactgtggatatgtg

SEQ ID NO: 8543 - RNA, 20 nt, synthetic construct
  misc_feature 1..20: note = C9Orf72 TTCN PAM targeting sequence
  source 1..20: mol_type = other RNA
ctatcagggtcatcattaag

SEQ ID NO: 8544 - RNA, 20 nt, synthetic construct
  misc_feature 1..20: note = C9Orf72 TTCN PAM targeting sequence
  source 1..20: mol_type = other RNA
cttaatgatgaccctgatag

SEQ ID NO: 8545 - RNA, 20 nt, synthetic construct
  misc_feature 1..20: note = C9Orf72 TTCN PAM targeting sequence
  source 1..20: mol_type = other RNA
tggctcttctcttaatgatg

SEQ ID NO: 8546 - RNA, 20 nt, synthetic construct
  misc_feature 1..20: note = C9Orf72 TTCN PAM targeting sequence
  source 1..20: mol_type = other RNA
ggtccctttcttggctcttc

SEQ ID NO: 8547 - RNA, 20 nt, synthetic construct
  misc_feature 1..20: note = C9Orf72 TTCN PAM targeting sequence
  source 1..20: mol_type = other RNA
cactgcctcagcattggggt

SEQ ID NO: 8548 - RNA, 20 nt, synthetic construct
  misc_feature 1..20: note = C9Orf72 TTCN PAM targeting sequence
  source 1..20: mol_type = other RNA
ctcattctcactgcctcagc

SEQ ID NO: 8549 - RNA, 20 nt, synthetic construct
  misc_feature 1..20: note = C9Orf72 TTCN PAM targeting sequence
  source 1..20: mol_type = other RNA
catggggcatgcagaggatg

SEQ ID NO: 8550 - RNA, 20 nt, synthetic construct
  misc_feature 1..20: note = C9Orf72 TTCN PAM targeting sequence
  source 1..20: mol_type = other RNA
ttttcctgggctctctactg

SEQ ID NO: 8551 - RNA, 20 nt, synthetic construct
  misc_feature 1..20: note = C9Orf72 TTCN PAM targeting sequence
  source 1..20: mol_type = other RNA
tgggctctctactgggctca

SEQ ID NO: 8552 - RNA, 20 nt, synthetic construct
  misc_feature 1..20: note = C9Orf72 TTCN PAM targeting sequence
  source 1..20: mol_type = other RNA
atttgtagggtcattaggcg

SEQ ID NO: 8553 - RNA, 20 nt, synthetic construct
  misc_feature 1..20: note = C9Orf72 TTCN PAM targeting sequence
  source 1..20: mol_type = other RNA
agaattgagtaatatggatg

SEQ ID NO: 8554 - RNA, 20 nt, synthetic construct
  misc_feature 1..20: note = C9Orf72 TTCN PAM targeting sequence
  source 1..20: mol_type = other RNA
tgaaagtacattgttccatt

SEQ ID NO: 8555 - RNA, 20 nt, synthetic construct
  misc_feature 1..20: note = C9Orf72 TTCN PAM targeting sequence
  source 1..20: mol_type = other RNA
aaacttgtcttttcatggag

SEQ ID NO: 8556 - RNA, 20 nt, synthetic construct
  misc_feature 1..20: note = C9Orf72 TTCN PAM targeting sequence
  source 1..20: mol_type = other RNA
aatcaggacgagagtaacac

SEQ ID NO: 8557 - RNA, 20 nt, synthetic construct
  misc_feature 1..20: note = C9Orf72 TTCN PAM targeting sequence
  source 1..20: mol_type = other RNA
tggagagcaataaatcttat

SEQ ID NO: 8558 - RNA, 20 nt, synthetic construct
  misc_feature 1..20: note = C9Orf72 TTCN PAM targeting sequence
  source 1..20: mol_type = other RNA
gctgaggggcatttggcatc

SEQ ID NO: 8559 - RNA, 20 nt, synthetic construct
  misc_feature 1..20: note = C9Orf72 TTCN PAM targeting sequence
  source 1..20: mol_type = other RNA
gtctagacgatatagctgtg

SEQ ID NO: 8560 - RNA, 20 nt, synthetic construct
  misc_feature 1..20: note = C9Orf72 TTCN PAM targeting sequence
  source 1..20: mol_type = other RNA
gccttgtccattacagttaa

SEQ ID NO: 8561 - RNA, 20 nt, synthetic construct
  misc_feature 1..20: note = C9Orf72 TTCN PAM targeting sequence
  source 1..20: mol_type = other RNA
ataaacaacagagcagcccc

SEQ ID NO: 8562 - RNA, 20 nt, synthetic construct
  misc_feature 1..20: note = C9Orf72 TTCN PAM targeting sequence
  source 1..20: mol_type = other RNA
tcagagggagggctggttag

SEQ ID NO: 8563 - RNA, 20 nt, synthetic construct
  misc_feature 1..20: note = C9Orf72 TTCN PAM targeting sequence
  source 1..20: mol_type = other RNA
ggctttcctcagagggaggg

SEQ ID NO: 8564 - RNA, 20 nt, synthetic construct
  misc_feature 1..20: note = C9Orf72 TTCN PAM targeting sequence
  source 1..20: mol_type = other RNA
ctggcatggcttgagatcgt

SEQ ID NO: 8565 - RNA, 20 nt, synthetic construct
  misc_feature 1..20: note = C9Orf72 TTCN PAM targeting sequence
  source 1..20: mol_type = other RNA
tatttccctggcatggcttg

SEQ ID NO: 8566 - RNA, 20 nt, synthetic construct
  misc_feature 1..20: note = C9Orf72 TTCN PAM targeting sequence
  source 1..20: mol_type = other RNA
atgatatctgttcttatttc

SEQ ID NO: 8567 - RNA, 20 nt, synthetic construct
  misc_feature 1..20: note = C9Orf72 TTCN PAM targeting sequence
  source 1..20: mol_type = other RNA
tctggcataactgctgagtt

SEQ ID NO: 8568 - RNA, 20 nt, synthetic construct
  misc_feature 1..20: note = C9Orf72 TTCN PAM targeting sequence
  source 1..20: mol_type = other RNA
ttacactgtcattgttttca

SEQ ID NO: 8569 - RNA, 20 nt, synthetic construct
  misc_feature 1..20: note = C9Orf72 TTCN PAM targeting sequence
  source 1..20: mol_type = other RNA
attttctgattatatttttg

SEQ ID NO: 8570 - RNA, 20 nt, synthetic construct
  misc_feature 1..20: note = C9Orf72 TTCN PAM targeting sequence
  source 1..20: mol_type = other RNA
gattatatttttgagataca

SEQ ID NO: 8571 - RNA, 20 nt, synthetic construct
  misc_feature 1..20: note = C9Orf72 TTCN PAM targeting sequence
  source 1..20: mol_type = other RNA
atacctctggctttacagaa

SEQ ID NO: 8572 - RNA, 20 nt, synthetic construct
  misc_feature 1..20: note = C9Orf72 TTCN PAM targeting sequence
  source 1..20: mol_type = other RNA
gtaaagccagaggtattgaa

SEQ ID NO: 8573 - RNA, 20 nt, synthetic construct
  misc_feature 1..20: note = C9Orf72 TTCN PAM targeting sequence
  source 1..20: mol_type = other RNA
ataatgcttctaatcagagt

SEQ ID NO: 8574 - RNA, 20 nt, synthetic construct
  misc_feature 1..20: note = C9Orf72 TTCN PAM targeting sequence
  source 1..20: mol_type = other RNA
aatcagagtgattatatgtg

SEQ ID NO: 8575 - RNA, 20 nt, synthetic construct
  misc_feature 1..20: note = C9Orf72 TTCN PAM targeting sequence
  source 1..20: mol_type = other RNA
ctatgctggctttacatgtg

SEQ ID NO: 8576 - RNA, 20 nt, synthetic construct
  misc_feature 1..20: note = C9Orf72 TTCN PAM targeting sequence
  source 1..20: mol_type = other RNA
tcctcctgcagagttacatt

SEQ ID NO: 8577 - RNA, 20 nt, synthetic construct
  misc_feature 1..20: note = C9Orf72 TTCN PAM targeting sequence
  source 1..20: mol_type = other RNA
tctgctactcttcctcctcc

SEQ ID NO: 8578 - RNA, 20 nt, synthetic construct
  misc_feature 1..20: note = C9Orf72 TTCN PAM targeting sequence
  source 1..20: mol_type = other RNA
gatttaactgggtgtcttta

SEQ ID NO: 8579 - RNA, 20 nt, synthetic construct
  misc_feature 1..20: note = C9Orf72 TTCN PAM targeting sequence
  source 1..20: mol_type = other RNA
gaaaaacaatgaatgacttt

SEQ ID NO: 8580 - RNA, 20 nt, synthetic construct
  misc_feature 1..20: note = C9Orf72 TTCN PAM targeting sequence
  source 1..20: mol_type = other RNA
gaaattcagatttaactggg

SEQ ID NO: 8581 - RNA, 20 nt, synthetic construct
  misc_feature 1..20: note = C9Orf72 TTCN PAM targeting sequence
  source 1..20: mol_type = other RNA
ttgtttttctgaaattcaga

SEQ ID NO: 8582 - RNA, 20 nt, synthetic construct
  misc_feature 1..20: note = C9Orf72 TTCN PAM targeting sequence
  source 1..20: mol_type = other RNA
atatttttatctgctaagac

SEQ ID NO: 8583 - RNA, 20 nt, synthetic construct
  misc_feature 1..20: note = C9Orf72 TTCN PAM targeting sequence
  source 1..20: mol_type = other RNA
cccaccattaggattgcctg

SEQ ID NO: 8584 - RNA, 20 nt, synthetic construct
  misc_feature 1..20: note = C9Orf72 TTCN PAM targeting sequence
  source 1..20: mol_type = other RNA
ttctttgtcatgaatattgt

SEQ ID NO: 8585 - RNA, 20 nt, synthetic construct
  misc_feature 1..20: note = C9Orf72 TTCN PAM targeting sequence
  source 1..20: mol_type = other RNA
ttgtcatgaatattgtcaat

SEQ ID NO: 8586 - RNA, 20 nt, synthetic construct
  misc_feature 1..20: note = C9Orf72 TTCN PAM targeting sequence
  source 1..20: mol_type = other RNA
tgacaaagaaggaaagatgg

SEQ ID NO: 8587 - RNA, 20 nt, synthetic construct
  misc_feature 1..20: note = C9Orf72 TTCN PAM targeting sequence
  source 1..20: mol_type = other RNA
gtaaacgttaatagatgctg

SEQ ID NO: 8588 - RNA, 20 nt, synthetic construct
  misc_feature 1..20: note = C9Orf72 TTCN PAM targeting sequence
  source 1..20: mol_type = other RNA
ccatgttctgtaaacgttaa

SEQ ID NO: 8589 - RNA, 20 nt, synthetic construct
  misc_feature 1..20: note = C9Orf72 TTCN PAM targeting sequence
  source 1..20: mol_type = other RNA
ccaagagcaaggactccatt

SEQ ID NO: 8590 - RNA, 20 nt, synthetic construct
  misc_feature 1..20: note = C9Orf72 TTCN PAM targeting sequence
  source 1..20: mol_type = other RNA
tagggttccccaagagcaag

SEQ ID NO: 8591 - RNA, 20 nt, synthetic construct
  misc_feature 1..20: note = C9Orf72 TTCN PAM targeting sequence
  source 1..20: mol_type = other RNA
gagtgttttaggcaggagga

SEQ ID NO: 8592 - RNA, 20 nt, synthetic construct
  misc_feature 1..20: note = C9Orf72 TTCN PAM targeting sequence
  source 1..20: mol_type = other RNA
tcaaccacagcctcctcgag

SEQ ID NO: 8593 - RNA, 20 nt, synthetic construct
  misc_feature 1..20: note = C9Orf72 TTCN PAM targeting sequence
  source 1..20: mol_type = other RNA
accacagcctcctcgagatc

SEQ ID NO: 8594 - RNA, 20 nt, synthetic construct
  misc_feature 1..20: note = C9Orf72 TTCN PAM targeting sequence
  source 1..20: mol_type = other RNA
tccttcttcaggacctaggc

SEQ ID NO: 8595 - RNA, 20 nt, synthetic construct
  misc_feature 1..20: note = C9Orf72 TTCN PAM targeting sequence
  source 1..20: mol_type = other RNA
tcaggacctaggccagtgac

SEQ ID NO: 8596 - RNA, 20 nt, synthetic construct
  misc_feature 1..20: note = C9Orf72 TTCN PAM targeting sequence
  source 1..20: mol_type = other RNA
ggacctaggccagtgacgga

SEQ ID NO: 8597 - RNA, 20 nt, synthetic construct
  misc_feature 1..20: note = C9Orf72 TTCN PAM targeting sequence
  source 1..20: mol_type = other RNA
tgcagccatgtttatacatg

SEQ ID NO: 8598 - RNA, 20 nt, synthetic construct
  misc_feature 1..20: note = C9Orf72 TTCN PAM targeting sequence
  source 1..20: mol_type = other RNA
cacatactgtgtgttattca

SEQ ID NO: 8599 - RNA, 20 nt, synthetic construct
  misc_feature 1..20: note = C9Orf72 TTCN PAM targeting sequence
  source 1..20: mol_type = other RNA
tatcaactgattggaactga

SEQ ID NO: 8600 - RNA, 20 nt, synthetic construct
  misc_feature 1..20: note = C9Orf72 TTCN PAM targeting sequence
  source 1..20: mol_type = other RNA
aatcagttgatatgaataac

SEQ ID NO: 8601 - RNA, 20 nt, synthetic construct
  misc_feature 1..20: note = C9Orf72 TTCN PAM targeting sequence
  source 1..20: mol_type = other RNA
ccctaaggctcagttccaat

SEQ ID NO: 8602 - RNA, 20 nt, synthetic construct
  misc_feature 1..20: note = C9Orf72 TTCN PAM targeting sequence
  source 1..20: mol_type = other RNA
ttcaaaatactctagagtag

SEQ ID NO: 8603 - RNA, 20 nt, synthetic construct
  misc_feature 1..20: note = C9Orf72 TTCN PAM targeting sequence
  source 1..20: mol_type = other RNA
aaatactctagagtagaaat

SEQ ID NO: 8604 - RNA, 20 nt, synthetic construct
  misc_feature 1..20: note = C9Orf72 TTCN PAM targeting sequence
  source 1..20: mol_type = other RNA
actctagagtattttgaaag

SEQ ID NO: 8605 - RNA, 20 nt, synthetic construct
  misc_feature 1..20: note = C9Orf72 TTCN PAM targeting sequence
  source 1..20: mol_type = other RNA
gatgtataataatttttcct

SEQ ID NO: 8606 - RNA, 20 nt, synthetic construct
  misc_feature 1..20: note = C9Orf72 TTCN PAM targeting sequence
  source 1..20: mol_type = other RNA
cacacataatttttagtgct

SEQ ID NO: 8607 - RNA, 20 nt, synthetic construct
  misc_feature 1..20: note = C9Orf72 TTCN PAM targeting sequence
  source 1..20: mol_type = other RNA
gcaataaatacttagttaag

SEQ ID NO: 8608 - RNA, 20 nt, synthetic construct
  misc_feature 1..20: note = C9Orf72 TTCN PAM targeting sequence
  source 1..20: mol_type = other RNA
attttttgctgtgacaaact

SEQ ID NO: 8609 - RNA, 20 nt, synthetic construct
  misc_feature 1..20: note = C9Orf72 TTCN PAM targeting sequence
  source 1..20: mol_type = other RNA
ttacagctaagtctttaagg

SEQ ID NO: 8610 - RNA, 20 nt, synthetic construct
  misc_feature 1..20: note = C9Orf72 TTCN PAM targeting sequence
  source 1..20: mol_type = other RNA
ggggaatcagttcctagagg

SEQ ID NO: 8611 - RNA, 20 nt, synthetic construct
  misc_feature 1..20: note = C9Orf72 TTCN PAM targeting sequence
  source 1..20: mol_type = other RNA
ccagaaataatgatgatgcc

SEQ ID NO: 8612 - RNA, 20 nt, synthetic construct
  misc_feature 1..20: note = C9Orf72 TTCN PAM targeting sequence
  source 1..20: mol_type = other RNA
tagaggatcaatcgctgagt

SEQ ID NO: 8613 - RNA, 20 nt, synthetic construct
  misc_feature 1..20: note = C9Orf72 TTCN PAM targeting sequence
  source 1..20: mol_type = other RNA
tctctaggaaggttgtgtca

SEQ ID NO: 8614 - RNA, 20 nt, synthetic construct
  misc_feature 1..20: note = C9Orf72 TTCN PAM targeting sequence
  source 1..20: mol_type = other RNA
tagagaggaaagtggtgata

SEQ ID NO: 8615 - RNA, 20 nt, synthetic construct
  misc_feature 1..20: note = C9Orf72 TTCN PAM targeting sequence
  source 1..20: mol_type = other RNA
taatgttttccaaatttggt

SEQ ID NO: 8616 - RNA, 20 nt, synthetic construct
  misc_feature 1..20: note = C9Orf72 TTCN PAM targeting sequence
  source 1..20: mol_type = other RNA
aaatttggtcagcccaagaa

SEQ ID NO: 8617 - RNA, 20 nt, synthetic construct
  misc_feature 1..20: note = C9Orf72 TTCN PAM targeting sequence
  source 1..20: mol_type = other RNA
tgggctgaccaaatttggaa

SEQ ID NO: 8618 - RNA, 20 nt, synthetic construct
  misc_feature 1..20: note = C9Orf72 TTCN PAM targeting sequence
  source 1..20: mol_type = other RNA
tgagaagatataataagcta

SEQ ID NO: 8619 - RNA, 20 nt, synthetic construct
  misc_feature 1..20: note = C9Orf72 TTCN PAM targeting sequence
  source 1..20: mol_type = other RNA
caagaaaaaaaagatataca

SEQ ID NO: 8620 - RNA, 20 nt, synthetic construct
  misc_feature 1..20: note = C9Orf72 TTCN PAM targeting sequence
  source 1..20: mol_type = other RNA
gtaaaggcttttgtttgctc

SEQ ID NO: 8621 - RNA, 20 nt, synthetic construct
  misc_feature 1..20: note = C9Orf72 TTCN PAM targeting sequence
  source 1..20: mol_type = other RNA
ggattctgtaaaggcttttg

SEQ ID NO: 8622 - RNA, 20 nt, synthetic construct
  misc_feature 1..20: note = C9Orf72 TTCN PAM targeting sequence
  source 1..20: mol_type = other RNA
tgcctggtggttctggattc

SEQ ID NO: 8623 - RNA, 20 nt, synthetic construct
  misc_feature 1..20: note = C9Orf72 TTCN PAM targeting sequence
  source 1..20: mol_type = other RNA
atatgcctctgatacctttc

SEQ ID NO: 8624 - RNA, 20 nt, synthetic construct
  misc_feature 1..20: note = C9Orf72 TTCN PAM targeting sequence
  source 1..20: mol_type = other RNA
gttaaatccatcctggactt

SEQ ID NO: 8625 - RNA, 20 nt, synthetic construct
  misc_feature 1..20: note = C9Orf72 TTCN PAM targeting sequence
  source 1..20: mol_type = other RNA
tcagttaaatccatcctgga

SEQ ID NO: 8626 - RNA, 20 nt, synthetic construct
  misc_feature 1..20: note = C9Orf72 TTCN PAM targeting sequence
  source 1..20: mol_type = other RNA
aatgcaacagaaaaccaagc

SEQ ID NO: 8627 - RNA, 20 nt, synthetic construct
  misc_feature 1..20: note = C9Orf72 TTCN PAM targeting sequence
  source 1..20: mol_type = other RNA
gttgcattagaaaatgttga

SEQ ID NO: 8628 - RNA, 20 nt, synthetic construct
  misc_feature 1..20: note = C9Orf72 TTCN PAM targeting sequence
  source 1..20: mol_type = other RNA
ggatctccaaaaagatgaag

SEQ ID NO: 8629 - RNA, 20 nt, synthetic construct
  misc_feature 1..20: note = C9Orf72 TTCN PAM targeting sequence
  source 1..20: mol_type = other RNA
ctttttgatttttctggatc

SEQ ID NO: 8630 - RNA, 20 nt, synthetic construct
  misc_feature 1..20: note = C9Orf72 TTCN PAM targeting sequence
  source 1..20: mol_type = other RNA
atatttggatattttctctt

SEQ ID NO: 8631 - RNA, 20 nt, synthetic construct
  misc_feature 1..20: note = C9Orf72 TTCN PAM targeting sequence
  source 1..20: mol_type = other RNA
aattttgttaaattaagctt

SEQ ID NO: 8632 - RNA, 20 nt, synthetic construct
  misc_feature 1..20: note = C9Orf72 TTCN PAM targeting sequence
  source 1..20: mol_type = other RNA
tgaaggatcactccctctta

SEQ ID NO: 8633 - RNA, 20 nt, synthetic construct
  misc_feature 1..20: note = C9Orf72 TTCN PAM targeting sequence
  source 1..20: mol_type = other RNA
gaaataccctgcatcagtct

SEQ ID NO: 8634 - RNA, 20 nt, synthetic construct
  misc_feature 1..20: note = C9Orf72 TTCN PAM targeting sequence
  source 1..20: mol_type = other RNA
gaaagccaaaagctgtgagt

SEQ ID NO: 8635 - RNA, 20 nt, synthetic construct
  misc_feature 1..20: note = C9Orf72 TTCN PAM targeting sequence
  source 1..20: mol_type = other RNA
ttagtgctgggatggatcat

SEQ ID NO: 8636 - RNA, 20 nt, synthetic construct
  misc_feature 1..20: note = C9Orf72 TTCN PAM targeting sequence
  source 1..20: mol_type = other RNA
ttgctcatttttcagggaaa

SEQ ID NO: 8637 - RNA, 20 nt, synthetic construct
  misc_feature 1..20: note = C9Orf72 TTCN PAM targeting sequence
  source 1..20: mol_type = other RNA
gggaaaaaaaaaagttatca

SEQ ID NO: 8638 - RNA, 20 nt, synthetic construct
  misc_feature 1..20: note = C9Orf72 TTCN PAM targeting sequence
  source 1..20: mol_type = other RNA
ctgaaaaatgagcaaagaat

SEQ ID NO: 8639 - RNA, 20 nt, synthetic construct
  misc_feature 1..20: note = C9Orf72 TTCN PAM targeting sequence
  source 1..20: mol_type = other RNA
aaagtcggcatagtcacccg

SEQ ID NO: 8640 - RNA, 20 nt, synthetic construct
  misc_feature 1..20: note = C9Orf72 TTCN PAM targeting sequence
  source 1..20: mol_type = other RNA
cagttaaccaaggttgcggc

SEQ ID NO: 8641 - RNA, 20 nt, synthetic construct
  misc_feature 1..20: note = C9Orf72 TTCN PAM targeting sequence
  source 1..20: mol_type = other RNA
tcatttcacagttaaccaag

SEQ ID NO: 8642 - RNA, 20 nt, synthetic construct
  misc_feature 1..20: note = C9Orf72 TTCN PAM targeting sequence
  source 1..20: mol_type = other RNA
cattcgtcatttcacagtta

SEQ ID NO: 8643 - RNA, 20 nt, synthetic construct
  misc_feature 1..20: note = C9Orf72 TTCN PAM targeting sequence
  source 1..20: mol_type = other RNA
gcaggaggagttttctcatt

SEQ ID NO: 8644 - RNA, 20 nt, synthetic construct
  misc_feature 1..20: note = C9Orf72 TTCN PAM targeting sequence
  source 1..20: mol_type = other RNA
ggtatataaaggcacatgaa

SEQ ID NO: 8645 - RNA, 20 nt, synthetic construct
  misc_feature 1..20: note = C9Orf72 TTCN PAM targeting sequence
  source 1..20: mol_type = other RNA
tgtgcctttatatacctgaa

SEQ ID NO: 8646 - RNA, 20 nt, synthetic construct
  misc_feature 1..20: note = C9Orf72 TTCN PAM targeting sequence
  source 1..20: mol_type = other RNA
ttcatgtgcctttatatacc

SEQ ID NO: 8647 - RNA, 20 nt, synthetic construct
  misc_feature 1..20: note = C9Orf72 TTCN PAM targeting sequence
  source 1..20: mol_type = other RNA
caggtgaacgttcagtaagt

SEQ ID NO: 8648 - RNA, 20 nt, synthetic construct
  misc_feature 1..20: note = C9Orf72 TTCN PAM targeting sequence
  source 1..20: mol_type = other RNA
tttcctgtagaatgtctacg

SEQ ID NO: 8649 - RNA, 20 nt, synthetic construct
  misc_feature 1..20: note = C9Orf72 TTCN PAM targeting sequence
  source 1..20: mol_type = other RNA
tgtagaatgtctacgagaaa

SEQ ID NO: 8650 - RNA, 20 nt, synthetic construct
  misc_feature 1..20: note = C9Orf72 TTCN PAM targeting sequence
  source 1..20: mol_type = other RNA
acaggaaatgaattgctcat

SEQ ID NO: 8651 - RNA, 20 nt, synthetic construct
  misc_feature 1..20: note = C9Orf72 TTCN PAM targeting sequence
  source 1..20: mol_type = other RNA
cgtagacattctacaggaaa

SEQ ID NO: 8652 - RNA, 20 nt, synthetic construct
  misc_feature 1..20: note = C9Orf72 TTCN PAM targeting sequence
  source 1..20: mol_type = other RNA
gcaatacacccaacctatga

SEQ ID NO: 8653 - RNA, 20 nt, synthetic construct
  misc_feature 1..20: note = C9Orf72 TTCN PAM targeting sequence
  source 1..20: mol_type = other RNA
taggttgggtgtattgcaga

SEQ ID NO: 8654 - RNA, 20 nt, synthetic construct
  misc_feature 1..20: note = C9Orf72 TTCN PAM targeting sequence
  source 1..20: mol_type = other RNA
atgaaatgtccctacaggcc

SEQ ID NO: 8655 - RNA, 20 nt, synthetic construct
  misc_feature 1..20: note = C9Orf72 TTCN PAM targeting sequence
  source 1..20: mol_type = other RNA
tagaaggccttcttgatgtc

SEQ ID NO: 8656 - RNA, 20 nt, synthetic construct
  misc_feature 1..20: note = C9Orf72 TTCN PAM targeting sequence
  source 1..20: mol_type = other RNA
acatcttcagccaacacacc

SEQ ID NO: 8657 - RNA, 20 nt, synthetic construct
  misc_feature 1..20: note = C9Orf72 TTCN PAM targeting sequence
  source 1..20: mol_type = other RNA
gccaacacaccttcaaatat

SEQ ID NO: 8658 - RNA, 20 nt, synthetic construct
  misc_feature 1..20: note = C9Orf72 TTCN PAM targeting sequence
  source 1..20: mol_type = other RNA
aatattggaaagagagacac

SEQ ID NO: 8659 - RNA, 20 nt, synthetic construct
  misc_feature 1..20: note = C9Orf72 TTCN PAM targeting sequence
  source 1..20: mol_type = other RNA
aatatttgaaggtgtgttgg

SEQ ID NO: 8660 - RNA, 20 nt, synthetic construct
  misc_feature 1..20: note = C9Orf72 TTCN PAM targeting sequence
  source 1..20: mol_type = other RNA
ggtactctgcttgctgatca

SEQ ID NO: 8661 - RNA, 20 nt, synthetic construct
  misc_feature 1..20: note = C9Orf72 TTCN PAM targeting sequence
  source 1..20: mol_type = other RNA
tccaagcattggttcaggta

SEQ ID NO: 8662 - RNA, 20 nt, synthetic construct
  misc_feature 1..20: note = C9Orf72 TTCN PAM targeting sequence
  source 1..20: mol_type = other RNA
tgtcttcctccaagcattgg

SEQ ID NO: 8663 - RNA, 20 nt, synthetic construct
  misc_feature 1..20: note = C9Orf72 TTCN PAM targeting sequence
  source 1..20: mol_type = other RNA
ttcttgtcttcctccaagca

SEQ ID NO: 8664 - RNA, 20 nt, synthetic construct
  misc_feature 1..20: note = C9Orf72 TTCN PAM targeting sequence
  source 1..20: mol_type = other RNA
ttttcattcttgtcttcctc

SEQ ID NO: 8665 - RNA, 20 nt, synthetic construct
  misc_feature 1..20: note = C9Orf72 TTCN PAM targeting sequence
  source 1..20: mol_type = other RNA
tgtcttcattttcattcttg

SEQ ID NO: 8666 - RNA, 20 nt, synthetic construct
  misc_feature 1..20: note = C9Orf72 TTCN PAM targeting sequence
  source 1..20: mol_type = other RNA
ttcatgtcttcattttcatt

SEQ ID NO: 8667 - RNA, 20 nt, synthetic construct
  misc_feature 1..20: note = C9Orf72 TTCN PAM targeting sequence
  source 1..20: mol_type = other RNA
tttctttcatgtcttcattt

SEQ ID NO: 8668 - RNA, 20 nt, synthetic construct
  misc_feature 1..20: note = C9Orf72 TTCN PAM targeting sequence
  source 1..20: mol_type = other RNA
aggctgctcagctgggggac

SEQ ID NO: 8669 - RNA, 20 nt, synthetic construct
  misc_feature 1..20: note = C9Orf72 TTCN PAM targeting sequence
  source 1..20: mol_type = other RNA
acaggatagacaatttcctg

SEQ ID NO: 8670 - RNA, 20 nt, synthetic construct
  misc_feature 1..20: note = C9Orf72 TTCN PAM targeting sequence
  source 1..20: mol_type = other RNA
tgaaagaaaagaaatacagt

SEQ ID NO: 8671 - RNA, 20 nt, synthetic construct
  misc_feature 1..20: note = C9Orf72 TTCN PAM targeting sequence
  source 1..20: mol_type = other RNA
ggaaattgtctatcctgtgg

SEQ ID NO: 8672 - RNA, 20 nt, synthetic construct
  misc_feature 1..20: note = C9Orf72 TTCN PAM targeting sequence
  source 1..20: mol_type = other RNA
ttcaggaaattgtctatcct

SEQ ID NO: 8673 - RNA, 20 nt, synthetic construct
  misc_feature 1..20: note = C9Orf72 TTCN PAM targeting sequence
  source 1..20: mol_type = other RNA
tttctttcaggaaattgtct

SEQ ID NO: 8674 - RNA, 20 nt, synthetic construct
  misc_feature 1..20: note = C9Orf72 TTCN PAM targeting sequence
  source 1..20: mol_type = other RNA
actcggacaatctcccaggc

SEQ ID NO: 8675 - RNA, 20 nt, synthetic construct
  misc_feature 1..20: note = C9Orf72 TTCN PAM targeting sequence
  source 1..20: mol_type = other RNA
gatttccactcggacaatct

SEQ ID NO: 8676 - RNA, 20 nt, synthetic construct
  misc_feature 1..20: note = C9Orf72 TTCN PAM targeting sequence
  source 1..20: mol_type = other RNA
ggaggaaataaggtatattt

SEQ ID NO: 8677 - RNA, 20 nt, synthetic construct
  misc_feature 1..20: note = C9Orf72 TTCN PAM targeting sequence
  source 1..20: mol_type = other RNA
gagggaaaaggaattttaat

SEQ ID NO: 8678 - RNA, 20 nt, synthetic construct
  misc_feature 1..20: note = C9Orf72 TTCN PAM targeting sequence
  source 1..20: mol_type = other RNA
ccttctcctcctccaacttc

SEQ ID NO: 8679 - RNA, 20 nt, synthetic construct
  misc_feature 1..20: note = C9Orf72 TTCN PAM targeting sequence
  source 1..20: mol_type = other RNA
cctcctccaacttcttttta

SEQ ID NO: 8680 - RNA, 20 nt, synthetic construct
  misc_feature 1..20: note = C9Orf72 TTCN PAM targeting sequence
  source 1..20: mol_type = other RNA
ttttaaggattgttgtgctg

SEQ ID NO: 8681 - RNA, 20 nt, synthetic construct
  misc_feature 1..20: note = C9Orf72 TTCN PAM targeting sequence
  source 1..20: mol_type = other RNA
gtggccattttgaaagagct

SEQ ID NO: 8682 - RNA, 20 nt, synthetic construct
  misc_feature 1..20: note = C9Orf72 TTCN PAM targeting sequence
  source 1..20: mol_type = other RNA
aaatggccacagaaaagagc

SEQ ID NO: 8683 - RNA, 20 nt, synthetic construct
  misc_feature 1..20: note = C9Orf72 TTCN PAM targeting sequence
  source 1..20: mol_type = other RNA
ccaagacaatggctagagga

SEQ ID NO: 8684 - RNA, 20 nt, synthetic construct
  misc_feature 1..20: note = C9Orf72 TTCN PAM targeting sequence
  source 1..20: mol_type = other RNA
acaagcatcaattcaaacaa

SEQ ID NO: 8685 - RNA, 20 nt, synthetic construct
  misc_feature 1..20: note = C9Orf72 TTCN PAM targeting sequence
  source 1..20: mol_type = other RNA
ttactttaagagtgaagatc

SEQ ID NO: 8686 - RNA, 20 nt, synthetic construct
  misc_feature 1..20: note = C9Orf72 TTCN PAM targeting sequence
  source 1..20: mol_type = other RNA
ctcttaaagtaatgaaatac

SEQ ID NO: 8687 - RNA, 20 nt, synthetic construct
  misc_feature 1..20: note = C9Orf72 TTCN PAM targeting sequence
  source 1..20: mol_type = other RNA
ctatggatcttcactcttaa

SEQ ID NO: 8688 - RNA, 20 nt, synthetic construct
  misc_feature 1..20: note = C9Orf72 TTCN PAM targeting sequence
  source 1..20: mol_type = other RNA
accatccatccaatttcact

SEQ ID NO: 8689 - RNA, 20 nt, synthetic construct
  misc_feature 1..20: note = C9Orf72 TTCN PAM targeting sequence
  source 1..20: mol_type = other RNA
cttcctctcgcacctctatc

SEQ ID NO: 8690 - RNA, 20 nt, synthetic construct
  misc_feature 1..20: note = C9Orf72 TTCN PAM targeting sequence
  source 1..20: mol_type = other RNA
tctcgcacctctatctaccc

SEQ ID NO: 8691 - RNA, 20 nt, synthetic construct
  misc_feature 1..20: note = C9Orf72 TTCN PAM targeting sequence
  source 1..20: mol_type = other RNA
gaatcatctaccttcaagca

SEQ ID NO: 8692 - RNA, 20 nt, synthetic construct
  misc_feature 1..20: note = C9Orf72 TTCN PAM targeting sequence
  source 1..20: mol_type = other RNA
gaaatggggtagatagaggt

SEQ ID NO: 8693 - RNA, 20 nt, synthetic construct
  misc_feature 1..20: note = C9Orf72 TTCN PAM targeting sequence
  source 1..20: mol_type = other RNA
agcaagaattaacagagatt

SEQ ID NO: 8694 - RNA, 20 nt, synthetic construct
  misc_feature 1..20: note = C9Orf72 TTCN PAM targeting sequence
  source 1..20: mol_type = other RNA
tgcttgaaggtagatgattc

SEQ ID NO: 8695 - RNA, 20 nt, synthetic construct
  misc_feature 1..20: note = C9Orf72 TTCN PAM targeting sequence
  source 1..20: mol_type = other RNA
gccaagaagttagaagagat

SEQ ID NO: 8696 - RNA, 20 nt, synthetic construct
  misc_feature 1..20: note = C9Orf72 TTCN PAM targeting sequence
  source 1..20: mol_type = other RNA
tggctgaaatttgcctcact

SEQ ID NO: 8697 - RNA, 20 nt, synthetic construct
  misc_feature 1..20: note = C9Orf72 TTCN PAM targeting sequence
  source 1..20: mol_type = other RNA
aacttcttggctgaaatttg

SEQ ID NO: 8698 - RNA, 20 nt, synthetic construct
  misc_feature 1..20: note = C9Orf72 TTCN PAM targeting sequence
  source 1..20: mol_type = other RNA
tttaaacatctcttctaact

SEQ ID NO: 8699 - RNA, 20 nt, synthetic construct
  misc_feature 1..20: note = C9Orf72 TTCN PAM targeting sequence
  source 1..20: mol_type = other RNA
tgttcttttaaacatctctt

SEQ ID NO: 8700 - RNA, 20 nt, synthetic construct
  misc_feature 1..20: note = C9Orf72 TTCN PAM targeting sequence
  source 1..20: mol_type = other RNA
gctgatagcctgcatatacc

SEQ ID NO: 8701 - RNA, 20 nt, synthetic construct
  misc_feature 1..20: note = C9Orf72 TTCN PAM targeting sequence
  source 1..20: mol_type = other RNA
agattaaaaatagtactaca

SEQ ID NO: 8702 - RNA, 20 nt, synthetic construct
  misc_feature 1..20: note = C9Orf72 TTCN PAM targeting sequence
  source 1..20: mol_type = other RNA
tccaggatagcaaacacttg

SEQ ID NO: 8703 - RNA, 20 nt, synthetic construct
  misc_feature 1..20: note = C9Orf72 TTCN PAM targeting sequence
  source 1..20: mol_type = other RNA
ctttcctccaggatagcaaa

SEQ ID NO: 8704 - RNA, 20 nt, synthetic construct
  misc_feature 1..20: note = C9Orf72 TTCN PAM targeting sequence
  source 1..20: mol_type = other RNA
cagccattctctttcctcca

SEQ ID NO: 8705 - RNA, 20 nt, synthetic construct
  misc_feature 1..20: note = C9Orf72 TTCN PAM targeting sequence
  source 1..20: mol_type = other RNA
gttaatatacattttctgaa

SEQ ID NO: 8706 - RNA, 20 nt, synthetic construct
  misc_feature 1..20: note = C9Orf72 TTCN PAM targeting sequence
  source 1..20: mol_type = other RNA
gaatgtgtggcaggggtaga

SEQ ID NO: 8707 - RNA, 20 nt, synthetic construct
  misc_feature 1..20: note = C9Orf72 TTCN PAM targeting sequence
  source 1..20: mol_type = other RNA
gaaaatgtatattaactgaa

SEQ ID NO: 8708 - RNA, 20 nt, synthetic construct
  misc_feature 1..20: note = C9Orf72 TTCN PAM targeting sequence
  source 1..20: mol_type = other RNA
acccctgccacacattcaga

SEQ ID NO: 8709 - RNA, 20 nt, synthetic construct
  misc_feature 1..20: note = C9Orf72 TTCN PAM targeting sequence
  source 1..20: mol_type = other RNA
gacttctacccctgccacac

SEQ ID NO: 8710 - RNA, 20 nt, synthetic construct
  misc_feature 1..20: note = C9Orf72 TTCN PAM targeting sequence
  source 1..20: mol_type = other RNA
tttgattagatgtgatcttt

SEQ ID NO: 8711 - RNA, 20 nt, synthetic construct
  misc_feature 1..20: note = C9Orf72 TTCN PAM targeting sequence
  source 1..20: mol_type = other RNA
agtggagatgttatcctttt

SEQ ID NO: 8712 - RNA, 20 nt, synthetic construct
  misc_feature 1..20: note = C9Orf72 TTCN PAM targeting sequence
  source 1..20: mol_type = other RNA
tttgtgatgatgtcagtttg

SEQ ID NO: 8713 - RNA, 20 nt, synthetic construct
  misc_feature 1..20: note = C9Orf72 TTCN PAM targeting sequence
  source 1..20: mol_type = other RNA
tcctttgtgatgatgtcagt

SEQ ID NO: 8714 - RNA, 20 nt, synthetic construct
  misc_feature 1..20: note = C9Orf72 TTCN PAM targeting sequence
  source 1..20: mol_type = other RNA
cattgtctgtagtatttctt

SEQ ID NO: 8715 - RNA, 20 nt, synthetic construct
  misc_feature 1..20: note = C9Orf72 TTCN PAM targeting sequence
  source 1..20: mol_type = other RNA
gtcatactgatgggagtatc

SEQ ID NO: 8716 - RNA, 20 nt, synthetic construct
  misc_feature 1..20: note = C9Orf72 TTCN PAM targeting sequence
  source 1..20: mol_type = other RNA
tttctgtcatactgatggga

SEQ ID NO: 8717 - RNA, 20 nt, synthetic construct
  misc_feature 1..20: note = C9Orf72 TTCN PAM targeting sequence
  source 1..20: mol_type = other RNA
ttttcttttctgtcatactg

SEQ ID NO: 8718 - RNA, 20 nt, synthetic construct
  misc_feature 1..20: note = C9Orf72 TTCN PAM targeting sequence
  source 1..20: mol_type = other RNA
tcccagtaatgcacaaaggc

SEQ ID NO: 8719 - RNA, 20 nt, synthetic construct
  misc_feature 1..20: note = C9Orf72 TTCN PAM targeting sequence
  source 1..20: mol_type = other RNA
acagggaaatatggcaatct

SEQ ID NO: 8720 - RNA, 20 nt, synthetic construct
  misc_feature 1..20: note = C9Orf72 TTCN PAM targeting sequence
  source 1..20: mol_type = other RNA
ctgtagaaaacatgtcccag

SEQ ID NO: 8721 - RNA, 20 nt, synthetic construct
  misc_feature 1..20: note = C9Orf72 TTCN PAM targeting sequence
  source 1..20: mol_type = other RNA
atatcctaaagaacgcatca

SEQ ID NO: 8722 - RNA, 20 nt, synthetic construct
  misc_feature 1..20: note = C9Orf72 TTCN PAM targeting sequence
  source 1..20: mol_type = other RNA
ttaggatattgaagattgcc

SEQ ID NO: 8723 - RNA, 20 nt, synthetic construct
  misc_feature 1..20: note = C9Orf72 TTCN PAM targeting sequence
  source 1..20: mol_type = other RNA
gaaatttattccaaggaaat

SEQ ID NO: 8724 - RNA, 20 nt, synthetic construct
  misc_feature 1..20: note = C9Orf72 TTCN PAM targeting sequence
  source 1..20: mol_type = other RNA
gaagacgtgatacctaggtc

SEQ ID NO: 8725 - RNA, 20 nt, synthetic construct
  misc_feature 1..20: note = C9Orf72 TTCN PAM targeting sequence
  source 1..20: mol_type = other RNA
aaggaaataggtttatgata

SEQ ID NO: 8726 - RNA, 20 nt, synthetic construct
  misc_feature 1..20: note = C9Orf72 TTCN PAM targeting sequence
  source 1..20: mol_type = other RNA
ttggaataaatttcggaaga

SEQ ID NO: 8727 - RNA, 20 nt, synthetic construct
  misc_feature 1..20: note = C9Orf72 TTCN PAM targeting sequence
  source 1..20: mol_type = other RNA
ttttcaccattcgatatttt

SEQ ID NO: 8728 - RNA, 20 nt, synthetic construct
  misc_feature 1..20: note = C9Orf72 TTCN PAM targeting sequence
  source 1..20: mol_type = other RNA
ccattcgatattttctattt

SEQ ID NO: 8729 - RNA, 20 nt, synthetic construct
  misc_feature 1..20: note = C9Orf72 TTCN PAM targeting sequence
  source 1..20: mol_type = other RNA
atattttctattttttccta

SEQ ID NO: 8730 - RNA, 20 nt, synthetic construct
  misc_feature 1..20: note = C9Orf72 TTCN PAM targeting sequence
  source 1..20: mol_type = other RNA
attttttcctatagtgattt

SEQ ID NO: 8731 - RNA, 20 nt, synthetic construct
  misc_feature 1..20: note = C9Orf72 TTCN PAM targeting sequence
  source 1..20: mol_type = other RNA
tatagtgatttttttgggaa

SEQ ID NO: 8732 - RNA, 20 nt, synthetic construct
  misc_feature 1..20: note = C9Orf72 TTCN PAM targeting sequence
  source 1..20: mol_type = other RNA
caaaaaaatcactataggaa

SEQ ID NO: 8733 - RNA, 20 nt, synthetic construct
  misc_feature 1..20: note = C9Orf72 TTCN PAM targeting sequence
  source 1..20: mol_type = other RNA
aaaagaaactgtacaagctt

SEQ ID NO: 8734 - RNA, 20 nt, synthetic construct
  misc_feature 1..20: note = C9Orf72 TTCN PAM targeting sequence
  source 1..20: mol_type = other RNA
tttagaattaaaaatcttcc

SEQ ID NO: 8735 - RNA, 20 nt, synthetic construct
  misc_feature 1..20: note = C9Orf72 TTCN PAM targeting sequence
  source 1..20: mol_type = other RNA
actataattaccctgttttc

SEQ ID NO: 8736 - RNA, 20 nt, synthetic construct
  misc_feature 1..20: note = C9Orf72 TTCN PAM targeting sequence
  source 1..20: mol_type = other RNA
ttagcggggtaggccaagac

SEQ ID NO: 8737 - RNA, 20 nt, synthetic construct
  misc_feature 1..20: note = C9Orf72 TTCN PAM targeting sequence
  source 1..20: mol_type = other RNA
tgtcttggcctaccccgcta

SEQ ID NO: 8738 - RNA, 20 nt, synthetic construct
  misc_feature 1..20: note = C9Orf72 TTCN PAM targeting sequence
  source 1..20: mol_type = other RNA
tgagtaactttggtcttttt

SEQ ID NO: 8739 - RNA, 20 nt, synthetic construct
  misc_feature 1..20: note = C9Orf72 TTCN PAM targeting sequence
  source 1..20: mol_type = other RNA
gggttgctgctgctaaattt

SEQ ID NO: 8740 - RNA, 20 nt, synthetic construct
  misc_feature 1..20: note = C9Orf72 TTCN PAM targeting sequence
  source 1..20: mol_type = other RNA
aaggaatccttccttgggga

SEQ ID NO: 8741 - RNA, 20 nt, synthetic construct
  misc_feature 1..20: note = C9Orf72 TTCN PAM targeting sequence
  source 1..20: mol_type = other RNA
tttgaaatttagcagcagca

SEQ ID NO: 8742 - RNA, 20 nt, synthetic construct
  misc_feature 1..20: note = C9Orf72 TTCN PAM targeting sequence
  source 1..20: mol_type = other RNA
ttggggatcattttcataat

SEQ ID NO: 8743 - RNA, 20 nt, synthetic construct
  misc_feature 1..20: note = C9Orf72 TTCN PAM targeting sequence
  source 1..20: mol_type = other RNA
taatgaaatgtttgtaaagt

SEQ ID NO: 8744 - RNA, 20 nt, synthetic construct
  misc_feature 1..20: note = C9Orf72 TTCN PAM targeting sequence
  source 1..20: mol_type = other RNA
ttatgaaaatgatccccaag

SEQ ID NO: 8745 - RNA, 20 nt, synthetic construct
  misc_feature 1..20: note = C9Orf72 TTCN PAM targeting sequence
  source 1..20: mol_type = other RNA
aagatgttgcttttttttct

SEQ ID NO: 8746 - RNA, 20 nt, synthetic construct
  misc_feature 1..20: note = C9Orf72 TTCN PAM targeting sequence
  source 1..20: mol_type = other RNA
tttcctggttccaccgttgg

SEQ ID NO: 8747 - RNA, 20 nt, synthetic construct
  misc_feature 1..20: note = C9Orf72 TTCN PAM targeting sequence
  source 1..20: mol_type = other RNA
tggttccaccgttgggaagg

SEQ ID NO: 8748 - RNA, 20 nt, synthetic construct
  misc_feature 1..20: note = C9Orf72 TTCN PAM targeting sequence
  source 1..20: mol_type = other RNA
accgttgggaaggtaaagag

SEQ ID NO: 8749 - RNA, 20 nt, synthetic construct
  misc_feature 1..20: note = C9Orf72 TTCN PAM targeting sequence
  source 1..20: mol_type = other RNA
caacggtggaaccaggaaaa

SEQ ID NO: 8750 - RNA, 20 nt, synthetic construct
  misc_feature 1..20: note = C9Orf72 TTCN PAM targeting sequence
  source 1..20: mol_type = other RNA
gggtattatatctctttacc

SEQ ID NO: 8751 - RNA, 20 nt, synthetic construct
  misc_feature 1..20: note = C9Orf72 TTCN PAM targeting sequence
  source 1..20: mol_type = other RNA
ctagtgatttctgggtatta

SEQ ID NO: 8752 - RNA, 20 nt, synthetic construct
  misc_feature 1..20: note = C9Orf72 TTCN PAM targeting sequence
  source 1..20: mol_type = other RNA
tggcttagcagtctcacttc

SEQ ID NO: 8753 - RNA, 20 nt, synthetic construct
  misc_feature 1..20: note = C9Orf72 TTCN PAM targeting sequence
  source 1..20: mol_type = other RNA
tttatgttaaatggaaactc

SEQ ID NO: 8754 - RNA, 20 nt, synthetic construct
  misc_feature 1..20: note = C9Orf72 TTCN PAM targeting sequence
  source 1..20: mol_type = other RNA
atttaacataaaagaagtga

SEQ ID NO: 8755 - RNA, 20 nt, synthetic construct
  misc_feature 1..20: note = C9Orf72 TTCN PAM targeting sequence
  source 1..20: mol_type = other RNA
gttgagttcgcaaagggaaa

SEQ ID NO: 8756 - RNA, 20 nt, synthetic construct
  misc_feature 1..20: note = C9Orf72 TTCN PAM targeting sequence
  source 1..20: mol_type = other RNA
caaagggaaaactctcagag

SEQ ID NO: 8757 - RNA, 20 nt, synthetic construct
  misc_feature 1..20: note = C9Orf72 TTCN PAM targeting sequence
  source 1..20: mol_type = other RNA
ctttgcgaactcaacagaac

SEQ ID NO: 8758 - RNA, 20 nt, synthetic construct
  misc_feature 1..20: note = C9Orf72 TTCN PAM targeting sequence
  source 1..20: mol_type = other RNA
ggtatccactgacaatgtct

SEQ ID NO: 8759 - RNA, 20 nt, synthetic construct
  misc_feature 1..20: note = C9Orf72 TTCN PAM targeting sequence
  source 1..20: mol_type = other RNA
tacagaagcctctttcttcc

SEQ ID NO: 8760 - RNA, 20 nt, synthetic construct
  misc_feature 1..20: note = C9Orf72 TTCN PAM targeting sequence
  source 1..20: mol_type = other RNA
gtaggaacattatgatctat

SEQ ID NO: 8761 - RNA, 20 nt, synthetic construct
  misc_feature 1..20: note = C9Orf72 TTCN PAM targeting sequence
  source 1..20: mol_type = other RNA
tcccctgggttgaggaggaa

SEQ ID NO: 8762 - RNA, 20 nt, synthetic construct
  misc_feature 1..20: note = C9Orf72 TTCN PAM targeting sequence
  source 1..20: mol_type = other RNA
cctgggttgaggaggaatca

SEQ ID NO: 8763 - RNA, 20 nt, synthetic construct
  misc_feature 1..20: note = C9Orf72 TTCN PAM targeting sequence
  source 1..20: mol_type = other RNA
tcctcaacccaggggaagaa

SEQ ID NO: 8764 - RNA, 20 nt, synthetic construct
  misc_feature 1..20: note = C9Orf72 TTCN PAM targeting sequence
  source 1..20: mol_type = other RNA
ttggaagagggactcattgg

SEQ ID NO: 8765 - RNA, 20 nt, synthetic construct
  misc_feature 1..20: note = C9Orf72 TTCN PAM targeting sequence
  source 1..20: mol_type = other RNA
aaggaagctcaattacactt

SEQ ID NO: 8766 - RNA, 20 nt, synthetic construct
  misc_feature 1..20: note = C9Orf72 TTCN PAM targeting sequence
  source 1..20: mol_type = other RNA
tgtgggatccccaatgagtc

SEQ ID NO: 8767 - RNA, 20 nt, synthetic construct
  misc_feature 1..20: note = C9Orf72 TTCN PAM targeting sequence
  source 1..20: mol_type = other RNA
aacaggtgcacagtctcagt

SEQ ID NO: 8768 - RNA, 20 nt, synthetic construct
  misc_feature 1..20: note = C9Orf72 TTCN PAM targeting sequence
  source 1..20: mol_type = other RNA
cagagtagctactttgcttt

SEQ ID NO: 8769 - RNA, 20 nt, synthetic construct
  misc_feature 1..20: note = C9Orf72 TTCN PAM targeting sequence
  source 1..20: mol_type = other RNA
ttaatcaataatccacacta

SEQ ID NO: 8770 - RNA, 20 nt, synthetic construct
  misc_feature 1..20: note = C9Orf72 TTCN PAM targeting sequence
  source 1..20: mol_type = other RNA
tagtgtggattattgattaa

SEQ ID NO: 8771 - RNA, 20 nt, synthetic construct
  misc_feature 1..20: note = C9Orf72 TTCN PAM targeting sequence
  source 1..20: mol_type = other RNA
ttcttagtgtggattattga

SEQ ID NO: 8772 - RNA, 20 nt, synthetic construct
  misc_feature 1..20: note = C9Orf72 TTCN PAM targeting sequence
  source 1..20: mol_type = other RNA
ctgcacaagtcagatgctta

SEQ ID NO: 8773 - RNA, 20 nt, synthetic construct
  misc_feature 1..20: note = C9Orf72 TTCN PAM targeting sequence
  source 1..20: mol_type = other RNA
cctgtgggtgcgcttgttgg

SEQ ID NO: 8774 - RNA, 20 nt, synthetic construct
  misc_feature 1..20: note = C9Orf72 TTCN PAM targeting sequence
  source 1..20: mol_type = other RNA
ctgggacgtggaagcaggaa

SEQ ID NO: 8775 - RNA, 20 nt, synthetic construct
  misc_feature 1..20: note = C9Orf72 TTCN PAM targeting sequence
  source 1..20: mol_type = other RNA
acgtcccagagaacaagtgg

SEQ ID NO: 8776 - RNA, 20 nt, synthetic construct
  misc_feature 1..20: note = C9Orf72 TTCN PAM targeting sequence
  source 1..20: mol_type = other RNA
tgcttccacgtcccagagaa

SEQ ID NO: 8777 - RNA, 20 nt, synthetic construct
  misc_feature 1..20: note = C9Orf72 TTCN PAM targeting sequence
  source 1..20: mol_type = other RNA
acaatgaagaaaggggactt

SEQ ID NO: 8778 - RNA, 20 nt, synthetic construct
  misc_feature 1..20: note = C9Orf72 TTCN PAM targeting sequence
  source 1..20: mol_type = other RNA
ttgtagaaaaagaggactca

SEQ ID NO: 8779 - RNA, 20 nt, synthetic construct
  misc_feature 1..20: note = C9Orf72 TTCN PAM targeting sequence
  source 1..20: mol_type = other RNA
tcattgtagaaaaagaggac

SEQ ID NO: 8780 - RNA, 20 nt, synthetic construct
  misc_feature 1..20: note = C9Orf72 TTCN PAM targeting sequence
  source 1..20: mol_type = other RNA
ggctttgagtaccgctccaa

SEQ ID NO: 8781 - RNA, 20 nt, synthetic construct
  misc_feature 1..20: note = C9Orf72 TTCN PAM targeting sequence
  source 1..20: mol_type = other RNA
ttccggagtgaaccaccaca

SEQ ID NO: 8782 - RNA, 20 nt, synthetic construct
  misc_feature 1..20: note = C9Orf72 TTCN PAM targeting sequence
  source 1..20: mol_type = other RNA
ggagtgaaccaccacactac

SEQ ID NO: 8783 - RNA, 20 nt, synthetic construct
  misc_feature 1..20: note = C9Orf72 TTCN PAM targeting sequence
  source 1..20: mol_type = other RNA
ctccggaatgaacgtggagt

SEQ ID NO: 8784 - RNA, 20 nt, synthetic construct
  misc_feature 1..20: note = C9Orf72 TTCN PAM targeting sequence
  source 1..20: mol_type = other RNA
aggcaacgtcataaggcttc

SEQ ID NO: 8785 - RNA, 20 nt, synthetic construct
  misc_feature 1..20: note = C9Orf72 TTCN PAM targeting sequence
  source 1..20: mol_type = other RNA
tcgttatttgcatcttcgtt

SEQ ID NO: 8786 - RNA, 20 nt, synthetic construct
  misc_feature 1..20: note = C9Orf72 TTCN PAM targeting sequence
  source 1..20: mol_type = other RNA
ttctctttttggcgactagc

SEQ ID NO: 8787 - RNA, 20 nt, synthetic construct
  misc_feature 1..20: note = C9Orf72 TTCN PAM targeting sequence
  source 1..20: mol_type = other RNA
ctttttggcgactagcctgc

SEQ ID NO: 8788 - RNA, 20 nt, synthetic construct
  misc_feature 1..20: note = C9Orf72 TTCN PAM targeting sequence
  source 1..20: mol_type = other RNA
aagggcgggagggcaggcta

SEQ ID NO: 8789 - RNA, 20 nt, synthetic construct
  misc_feature 1..20: note = C9Orf72 TTCN PAM targeting sequence
  source 1..20: mol_type = other RNA
ggggtccacaagtttccaag

SEQ ID NO: 8790 - RNA, 20 nt, synthetic construct
  misc_feature 1..20: note = C9Orf72 TTCN PAM targeting sequence
  source 1..20: mol_type = other RNA
gcctaccaaaggtgccccga

SEQ ID NO: 8791 - RNA, 20 nt, synthetic construct
  misc_feature 1..20: note = C9Orf72 TTCN PAM targeting sequence
  source 1..20: mol_type = other RNA
atctctagccaaaggcgttg

SEQ ID NO: 8792 - RNA, 20 nt, synthetic construct
  misc_feature 1..20: note = C9Orf72 TTCN PAM targeting sequence
  source 1..20: mol_type = other RNA
agaggatttcaatctctagc

SEQ ID NO: 8793 - RNA, 20 nt, synthetic construct
  misc_feature 1..20: note = C9Orf72 TTCN PAM targeting sequence
  source 1..20: mol_type = other RNA
gccccaatccagagcgtcca

SEQ ID NO: 8794 - RNA, 20 nt, synthetic construct
  misc_feature 1..20: note = C9Orf72 TTCN PAM targeting sequence
  source 1..20: mol_type = other RNA
actgtctcgaaagcagcacc

SEQ ID NO: 8795 - RNA, 20 nt, synthetic construct
  misc_feature 1..20: note = C9Orf72 TTCN PAM targeting sequence
  source 1..20: mol_type = other RNA
agacagtggaagcgcgttcc

SEQ ID NO: 8796 - RNA, 20 nt, synthetic construct
  misc_feature 1..20: note = C9Orf72 TTCN PAM targeting sequence
  source 1..20: mol_type = other RNA
cggatttgagcctttgcggc

SEQ ID NO: 8797 - RNA, 20 nt, synthetic construct
  misc_feature 1..20: note = C9Orf72 TTCN PAM targeting sequence
  source 1..20: mol_type = other RNA
cagatctcagcccaggcgcg

SEQ ID NO: 8798 - RNA, 20 nt, synthetic construct
  misc_feature 1..20: note = C9Orf72 TTCN PAM targeting sequence
  source 1..20: mol_type = other RNA
ccgcctccgctgctgcctgt

SEQ ID NO: 8799 - RNA, 20 nt, synthetic construct
  misc_feature 1..20: note = C9Orf72 TTCN PAM targeting sequence
  source 1..20: mol_type = other RNA
ttccccgcctccgctgctgc

SEQ ID NO: 8800 - RNA, 20 nt, synthetic construct
  misc_feature 1..20: note = C9Orf72 TTCN PAM targeting sequence
  source 1..20: mol_type = other RNA
ctccgccctctaaccacaag

SEQ ID NO: 8801 - RNA, 20 nt, synthetic construct
  misc_feature 1..20: note = C9Orf72 TTCN PAM targeting sequence
  source 1..20: mol_type = other RNA
cagctgggatcccctgccgg

SEQ ID NO: 8802 - RNA, 20 nt, synthetic construct
  misc_feature 1..20: note = C9Orf72 TTCN PAM targeting sequence
  source 1..20: mol_type = other RNA
ttctctccccaagccccgcc

SEQ ID NO: 8803 - RNA, 20 nt, synthetic construct
  misc_feature 1..20: note = C9Orf72 TTCN PAM targeting sequence
  source 1..20: mol_type = other RNA
ctccccaagccccgccagat

SEQ ID NO: 8804 - RNA, 20 nt, synthetic construct
  misc_feature 1..20: note = C9Orf72 TTCN PAM targeting sequence
  source 1..20: mol_type = other RNA
aacatctggcggggcttggg

SEQ ID NO: 8805 - RNA, 20 nt, synthetic construct
  misc_feature 1..20: note = C9Orf72 TTCN PAM targeting sequence
  source 1..20: mol_type = other RNA
cctattgtttgcctttccaa

SEQ ID NO: 8806 - RNA, 20 nt, synthetic construct
  misc_feature 1..20: note = C9Orf72 TTCN PAM targeting sequence
  source 1..20: mol_type = other RNA
ccgcgtttcccctattgttt

SEQ ID NO: 8807 - RNA, 20 nt, synthetic construct
  misc_feature 1..20: note = C9Orf72 TTCN PAM targeting sequence
  source 1..20: mol_type = other RNA
ccacgatctcagtcggctgc

SEQ ID NO: 8808 - RNA, 20 nt, synthetic construct
  misc_feature 1..20: note = C9Orf72 TTCN PAM targeting sequence
  source 1..20: mol_type = other RNA
tgaccctctcccctaaccct

SEQ ID NO: 8809 - RNA, 20 nt, synthetic construct
  misc_feature 1..20: note = C9Orf72 TTCN PAM targeting sequence
  source 1..20: mol_type = other RNA
gacccctgctgggagggtaa

SEQ ID NO: 8810 - RNA, 20 nt, synthetic construct
  misc_feature 1..20: note = C9Orf72 TTCN PAM targeting sequence
  source 1..20: mol_type = other RNA
caccttcagacccctgctgg

SEQ ID NO: 8811 - RNA, 20 nt, synthetic construct
  misc_feature 1..20: note = C9Orf72 TTCN PAM targeting sequence
  source 1..20: mol_type = other RNA
ttgattgccccttcccacct

SEQ ID NO: 8812 - RNA, 20 nt, synthetic construct
  misc_feature 1..20: note = C9Orf72 TTCN PAM targeting sequence
  source 1..20: mol_type = other RNA
agttttctttgattgcccct

SEQ ID NO: 8813 - RNA, 20 nt, synthetic construct
  misc_feature 1..20: note = C9Orf72 TTCN PAM targeting sequence
  source 1..20: mol_type = other RNA
ccttcttccccagttcaggg

SEQ ID NO: 8814 - RNA, 20 nt, synthetic construct
  misc_feature 1..20: note = C9Orf72 TTCN PAM targeting sequence
  source 1..20: mol_type = other RNA
tccccagttcagggaaaggg

SEQ ID NO: 8815 - RNA, 20 nt, synthetic construct
  misc_feature 1..20: note = C9Orf72 TTCN PAM targeting sequence
  source 1..20: mol_type = other RNA
ccagttcagggaaagggagg

SEQ ID NO: 8816 - RNA, 20 nt, synthetic construct
  misc_feature 1..20: note = C9Orf72 TTCN PAM targeting sequence
  source 1..20: mol_type = other RNA
gggaaagggaggggctggga

SEQ ID NO: 8817 - RNA, 20 nt, synthetic construct
  misc_feature 1..20: note = C9Orf72 TTCN PAM targeting sequence
  source 1..20: mol_type = other RNA
ctgaactggggaagaaggtg

SEQ ID NO: 8818 - RNA, 20 nt, synthetic construct
  misc_feature 1..20: note = C9Orf72 TTCN PAM targeting sequence
  source 1..20: mol_type = other RNA
agatgtttgacagttgttgg

SEQ ID NO: 8819 - RNA, 20 nt, synthetic construct
  misc_feature 1..20: note = C9Orf72 TTCN PAM targeting sequence
  source 1..20: mol_type = other RNA
cctacgctgccccaagccga

SEQ ID NO: 8820 - RNA, 20 nt, synthetic construct
  misc_feature 1..20: note = C9Orf72 TTCN PAM targeting sequence
  source 1..20: mol_type = other RNA
cgccacccacagcccaacac

SEQ ID NO: 8821 - RNA, 20 nt, synthetic construct
  misc_feature 1..20: note = C9Orf72 TTCN PAM targeting sequence
  source 1..20: mol_type = other RNA
gggtgcaagactccgagccc

SEQ ID NO: 8822 - RNA, 20 nt, synthetic construct
  misc_feature 1..20: note = C9Orf72 TTCN PAM targeting sequence
  source 1..20: mol_type = other RNA
ttcggggtgcaagactccga

SEQ ID NO: 8823 - RNA, 20 nt, synthetic construct
  misc_feature 1..20: note = C9Orf72 TTCN PAM targeting sequence
  source 1..20: mol_type = other RNA
aatcaaggacaaatcaagat

SEQ ID NO: 8824 - RNA, 20 nt, synthetic construct
  misc_feature 1..20: note = C9Orf72 TTCN PAM targeting sequence
  source 1..20: mol_type = other RNA
accccgggatcttgatttgt

SEQ ID NO: 8825 - RNA, 20 nt, synthetic construct
  misc_feature 1..20: note = C9Orf72 TTCN PAM targeting sequence
  source 1..20: mol_type = other RNA
tgccgggaagtgcacacgag

SEQ ID NO: 8826 - RNA, 20 nt, synthetic construct
  misc_feature 1..20: note = C9Orf72 TTCN PAM targeting sequence
  source 1..20: mol_type = other RNA
cggcaggaacaagggtcgcc

SEQ ID NO: 8827 - RNA, 20 nt, synthetic construct
  misc_feature 1..20: note = C9Orf72 TTCN PAM targeting sequence
  source 1..20: mol_type = other RNA
ggccggctcctcgtgtgcac

SEQ ID NO: 8828 - RNA, 20 nt, synthetic construct
  misc_feature 1..20: note = C9Orf72 TTCN PAM targeting sequence
  source 1..20: mol_type = other RNA
gacccctgccggcgcctggg

SEQ ID NO: 8829 - RNA, 20 nt, synthetic construct
  misc_feature 1..20: note = C9Orf72 TTCN PAM targeting sequence
  source 1..20: mol_type = other RNA
ggggctggagtcctcttcag

SEQ ID NO: 8830 - RNA, 20 nt, synthetic construct
  misc_feature 1..20: note = C9Orf72 TTCN PAM targeting sequence
  source 1..20: mol_type = other RNA
gcccgccggccacgggcttc

SEQ ID NO: 8831 - RNA, 20 nt, synthetic construct
  misc_feature 1..20: note = C9Orf72 TTCN PAM targeting sequence
  source 1..20: mol_type = other RNA
tgcacccgcgcccaggtgcg

SEQ ID NO: 8832 - RNA, 20 nt, synthetic construct
  misc_feature 1..20: note = C9Orf72 TTCN PAM targeting sequence
  source 1..20: mol_type = other RNA
tactcaccgtggggttttac

SEQ ID NO: 8833 - RNA, 20 nt, synthetic construct
  misc_feature 1..20: note = C9Orf72 TTCN PAM targeting sequence
  source 1..20: mol_type = other RNA
ccgggtcagctgcagccagc

SEQ ID NO: 8834 - RNA, 20 nt, synthetic construct
  misc_feature 1..20: note = C9Orf72 TTCN PAM targeting sequence
  source 1..20: mol_type = other RNA
cgctggctgcagctgacccg

SEQ ID NO: 8835 - RNA, 20 nt, synthetic construct
  misc_feature 1..20: note = C9Orf72 TTCN PAM targeting sequence
  source 1..20: mol_type = other RNA
ttcgcgctggctgcagctga

SEQ ID NO: 8836 - RNA, 20 nt, synthetic construct
  misc_feature 1..20: note = C9Orf72 TTCN PAM targeting sequence
  source 1..20: mol_type = other RNA
ctccacggtgctgccatacc

SEQ ID NO: 8837 - RNA, 20 nt, synthetic construct
  misc_feature 1..20: note = C9Orf72 TTCN PAM targeting sequence
  source 1..20: mol_type = other RNA
ctccggaaagagatgggaca

SEQ ID NO: 8838 - RNA, 20 nt, synthetic construct
  misc_feature 1..20: note = C9Orf72 TTCN PAM targeting sequence
  source 1..20: mol_type = other RNA
ggagggaagatgatcccaaa

SEQ ID NO: 8839 - RNA, 20 nt, synthetic construct
  misc_feature 1..20: note = C9Orf72 TTCN PAM targeting sequence
  source 1..20: mol_type = other RNA
agccttgcagaaaagacact

SEQ ID NO: 8840 - RNA, 20 nt, synthetic construct
  misc_feature 1..20: note = C9Orf72 TTCN PAM targeting sequence
  source 1..20: mol_type = other RNA
gcaaggctggaagccccctt

SEQ ID NO: 8841 - RNA, 20 nt, synthetic construct
  misc_feature 1..20: note = C9Orf72 TTCN PAM targeting sequence
  source 1..20: mol_type = other RNA
ctgccctggcccagtgtctt

SEQ ID NO: 8842 - RNA, 20 nt, synthetic construct
  misc_feature 1..20: note = C9Orf72 TTCN PAM targeting sequence
  source 1..20: mol_type = other RNA
tcactgccctggcccagtgt

SEQ ID NO: 8843 - RNA, 20 nt, synthetic construct
  misc_feature 1..20: note = C9Orf72 TTCN PAM targeting sequence
  source 1..20: mol_type = other RNA
gatctgacaccttcttcact

SEQ ID NO: 8844 - RNA, 20 nt, synthetic construct
  misc_feature 1..20: note = C9Orf72 TTCN PAM targeting sequence
  source 1..20: mol_type = other RNA
aaggcacctagagaggggga

SEQ ID NO: 8845 - RNA, 20 nt, synthetic construct
  misc_feature 1..20: note = C9Orf72 TTCN PAM targeting sequence
  source 1..20: mol_type = other RNA
ccctctctaggtgccttgga

SEQ ID NO: 8846 - RNA, 20 nt, synthetic construct
  misc_feature 1..20: note = C9Orf72 TTCN PAM targeting sequence
  source 1..20: mol_type = other RNA
ccaggattttctgattgttg

SEQ ID NO: 8847 - RNA, 20 nt, synthetic construct
  misc_feature 1..20: note = C9Orf72 TTCN PAM targeting sequence
  source 1..20: mol_type = other RNA
gattgttgaaaaataccatg

SEQ ID NO: 8848 - RNA, 20 nt, synthetic construct
  misc_feature 1..20: note = C9Orf72 TTCN PAM targeting sequence
  source 1..20: mol_type = other RNA
acaatcagaaaatcctgggg

SEQ ID NO: 8849 - RNA, 20 nt, synthetic construct
  misc_feature 1..20: note = C9Orf72 TTCN PAM targeting sequence
  source 1..20: mol_type = other RNA
tggtatttttcaacaatcag

SEQ ID NO: 8850 - RNA, 20 nt, synthetic construct
  misc_feature 1..20: note = C9Orf72 TTCN PAM targeting sequence
  source 1..20: mol_type = other RNA
aatgatttatgctccgctct

SEQ ID NO: 8851 - RNA, 20 nt, synthetic construct
  misc_feature 1..20: note = C9Orf72 TTCN PAM targeting sequence
  source 1..20: mol_type = other RNA
agtggatttactagaacaca

SEQ ID NO: 8852 - RNA, 20 nt, synthetic construct
  misc_feature 1..20: note = C9Orf72 TTCN PAM targeting sequence
  source 1..20: mol_type = other RNA
agtaaatccactagaatctg

SEQ ID NO: 8853 - RNA, 20 nt, synthetic construct
  misc_feature 1..20: note = C9Orf72 TTCN PAM targeting sequence
  source 1..20: mol_type = other RNA
tccatgactcccagtgtgtt

SEQ ID NO: 8854 - RNA, 20 nt, synthetic construct
  misc_feature 1..20: note = C9Orf72 TTCN PAM targeting sequence
  source 1..20: mol_type = other RNA
cctccgtaaattggcgggga

SEQ ID NO: 8855 - RNA, 20 nt, synthetic construct
  misc_feature 1..20: note = C9Orf72 TTCN PAM targeting sequence
  source 1..20: mol_type = other RNA
aatgtagtttacccgtaacc

SEQ ID NO: 8856 - RNA, 20 nt, synthetic construct
  misc_feature 1..20: note = C9Orf72 TTCN PAM targeting sequence
  source 1..20: mol_type = other RNA
gttactataaactataaaaa

SEQ ID NO: 8857 - RNA, 20 nt, synthetic construct
  misc_feature 1..20: note = C9Orf72 TTCN PAM targeting sequence
  source 1..20: mol_type = other RNA
tgccttctggagaaaaagaa

SEQ ID NO: 8858 - RNA, 20 nt, synthetic construct
  misc_feature 1..20: note = C9Orf72 TTCN PAM targeting sequence
  source 1..20: mol_type = other RNA
ggagaaaaagaattggatct

SEQ ID NO: 8859 - RNA, 20 nt, synthetic construct
  misc_feature 1..20: note = C9Orf72 TTCN PAM targeting sequence
  source 1..20: mol_type = other RNA
ccagaaggcaggaagctcat

SEQ ID NO: 8860 - RNA, 20 nt, synthetic construct
  misc_feature 1..20: note = C9Orf72 TTCN PAM targeting sequence
  source 1..20: mol_type = other RNA
ttttctccagaaggcaggaa

SEQ ID NO: 8861 - RNA, 20 nt, synthetic construct
  misc_feature 1..20: note = C9Orf72 TTCN PAM targeting sequence
  source 1..20: mol_type = other RNA
catttttctattacccatat

SEQ ID NO: 8862 - RNA, 20 nt, synthetic construct
  misc_feature 1..20: note = C9Orf72 TTCN PAM targeting sequence
  source 1..20: mol_type = other RNA
attacccatatgatcacatc

SEQ ID NO: 8863 - RNA, 20 nt, synthetic construct
  misc_feature 1..20: note = C9Orf72 TTCN PAM targeting sequence
  source 1..20: mol_type = other RNA
atcaatatgcattaagatgt

SEQ ID NO: 8864 - RNA, 20 nt, synthetic construct
  misc_feature 1..20: note = C9Orf72 TTCN PAM targeting sequence
  source 1..20: mol_type = other RNA
tcatttggtacagttcaatc

SEQ ID NO: 8865 - RNA, 20 nt, synthetic construct
  misc_feature 1..20: note = C9Orf72 TTCN PAM targeting sequence
  source 1..20: mol_type = other RNA
tactacacacttcaaagagg

SEQ ID NO: 8866 - RNA, 20 nt, synthetic construct
  misc_feature 1..20: note = C9Orf72 TTCN PAM targeting sequence
  source 1..20: mol_type = other RNA
aagaggtgtggaaatatatt

SEQ ID NO: 8867 - RNA, 20 nt, synthetic construct
  misc_feature 1..20: note = C9Orf72 TTCN PAM targeting sequence
  source 1..20: mol_type = other RNA
acacctctttgaagtgtgta

SEQ ID NO: 8868 - RNA, 20 nt, synthetic construct
  misc_feature 1..20: note = C9Orf72 TTCN PAM targeting sequence
  source 1..20: mol_type = other RNA
acttaatatatttccacacc

SEQ ID NO: 8869 - RNA, 20 nt, synthetic construct
  misc_feature 1..20: note = C9Orf72 TTCN PAM targeting sequence
  source 1..20: mol_type = other RNA
ctatatatcctaatttctac

SEQ ID NO: 8870 - RNA, 20 nt, synthetic construct
  misc_feature 1..20: note = C9Orf72 TTCN PAM targeting sequence
  source 1..20: mol_type = other RNA
gcaactaactacgaagtgag

SEQ ID NO: 8871 - RNA, 20 nt, synthetic construct
  misc_feature 1..20: note = C9Orf72 TTCN PAM targeting sequence
  source 1..20: mol_type = other RNA
tagttagttgcagaaacctc

SEQ ID NO: 8872 - RNA, 20 nt, synthetic construct
  misc_feature 1..20: note = C9Orf72 TTCN PAM targeting sequence
  source 1..20: mol_type = other RNA
cacttcgtagttagttgcag

SEQ ID NO: 8873 - RNA, 20 nt, synthetic construct
  misc_feature 1..20: note = C9Orf72 TTCN PAM targeting sequence
  source 1..20: mol_type = other RNA
aaaatcacttacatcttttg

SEQ ID NO: 8874 - RNA, 20 nt, synthetic construct
  misc_feature 1..20: note = C9Orf72 TTCN PAM targeting sequence
  source 1..20: mol_type = other RNA
tacaatatctgagatgatat

SEQ ID NO: 8875 - RNA, 20 nt, synthetic construct
  misc_feature 1..20: note = C9Orf72 TTCN PAM targeting sequence
  source 1..20: mol_type = other RNA
gtgtcacttttgtgtaatgt

SEQ ID NO: 8876 - RNA, 20 nt, synthetic construct
  misc_feature 1..20: note = C9Orf72 TTCN PAM targeting sequence
  source 1..20: mol_type = other RNA
caatcggtatctttacatta

SEQ ID NO: 8877 - RNA, 20 nt, synthetic construct
  misc_feature 1..20: note = C9Orf72 TTCN PAM targeting sequence
  source 1..20: mol_type = other RNA
catatttgagtcttatattc

SEQ ID NO: 8878 - RNA, 20 nt, synthetic construct
  misc_feature 1..20: note = C9Orf72 TTCN PAM targeting sequence
  source 1..20: mol_type = other RNA
gttcatcaccgaggaatctc

SEQ ID NO: 8879 - RNA, 20 nt, synthetic construct
  misc_feature 1..20: note = C9Orf72 TTCN PAM targeting sequence
  source 1..20: mol_type = other RNA
tcaccgaggaatctcatttc

SEQ ID NO: 8880 - RNA, 20 nt, synthetic construct
  misc_feature 1..20: note = C9Orf72 TTCN PAM targeting sequence
  source 1..20: mol_type = other RNA
tcggtgatgaacagaaatat

SEQ ID NO: 8881 - RNA, 20 nt, synthetic construct
  misc_feature 1..20: note = C9Orf72 TTCN PAM targeting sequence
  source 1..20: mol_type = other RNA
aaagtgccccagtttttaag

SEQ ID NO: 8882 - RNA, 20 nt, synthetic construct
  misc_feature 1..20: note = C9Orf72 TTCN PAM targeting sequence
  source 1..20: mol_type = other RNA
tcttaaaaactggggcactt

SEQ ID NO: 8883 - RNA, 20 nt, synthetic construct
  misc_feature 1..20: note = C9Orf72 TTCN PAM targeting sequence
  source 1..20: mol_type = other RNA
tcctcttaaaaactggggca

SEQ ID NO: 8884 - RNA, 20 nt, synthetic construct
  misc_feature 1..20: note = C9Orf72 TTCN PAM targeting sequence
  source 1..20: mol_type = other RNA
gaagctctgttacctcatct

SEQ ID NO: 8885 - RNA, 20 nt, synthetic construct
  misc_feature 1..20: note = C9Orf72 TTCN PAM targeting sequence
  source 1..20: mol_type = other RNA
gaaaggttagactcagctgc

SEQ ID NO: 8886 - RNA, 20 nt, synthetic construct
  misc_feature 1..20: note = C9Orf72 TTCN PAM targeting sequence
  source 1..20: mol_type = other RNA
atgaaggaatgcatacaaca

SEQ ID NO: 8887 - RNA, 20 nt, synthetic construct
  misc_feature 1..20: note = C9Orf72 TTCN PAM targeting sequence
  source 1..20: mol_type = other RNA
ttgaatgacagctacctata

SEQ ID NO: 8888 - RNA, 20 nt, synthetic construct
  misc_feature 1..20: note = C9Orf72 TTCN PAM targeting sequence
  source 1..20: mol_type = other RNA
ttcattgaatgacagctacc

SEQ ID NO: 8889 - RNA, 20 nt, synthetic construct
  misc_feature 1..20: note = C9Orf72 TTCN PAM targeting sequence
  source 1..20: mol_type = other RNA
agcatacagttatcacccca

SEQ ID NO: 8890 - RNA, 20 nt, synthetic construct
  misc_feature 1..20: note = C9Orf72 TTCN PAM targeting sequence
  source 1..20: mol_type = other RNA
actcacacacgcacaagctt

SEQ ID NO: 8891 - RNA, 20 nt, synthetic construct
  misc_feature 1..20: note = C9Orf72 TTCN PAM targeting sequence
  source 1..20: mol_type = other RNA
gtgtcccttaagatgttatc

SEQ ID NO: 8892 - RNA, 20 nt, synthetic construct
  misc_feature 1..20: note = C9Orf72 TTCN PAM targeting sequence
  source 1..20: mol_type = other RNA
aggagataacatcttaaggg

SEQ ID NO: 8893 - RNA, 20 nt, synthetic construct
  misc_feature 1..20: note = C9Orf72 TTCN PAM targeting sequence
  source 1..20: mol_type = other RNA
tactttccaggagataacat

SEQ ID NO: 8894 - RNA, 20 nt, synthetic construct
  misc_feature 1..20: note = C9Orf72 TTCN PAM targeting sequence
  source 1..20: mol_type = other RNA
gttcctactttccaggagat

SEQ ID NO: 8895 - RNA, 20 nt, synthetic construct
  misc_feature 1..20: note = C9Orf72 TTCN PAM targeting sequence
  source 1..20: mol_type = other RNA
ctttctgttcctactttcca

SEQ ID NO: 8896 - RNA, 20 nt, synthetic construct
  misc_feature 1..20: note = C9Orf72 TTCN PAM targeting sequence
  source 1..20: mol_type = other RNA
ggtagtttggaacagaatga

SEQ ID NO: 8897 - RNA, 20 nt, synthetic construct
  misc_feature 1..20: note = C9Orf72 TTCN PAM targeting sequence
  source 1..20: mol_type = other RNA
aaactacctgaaaatattct

SEQ ID NO: 8898 - RNA, 20 nt, synthetic construct
  misc_feature 1..20: note = C9Orf72 TTCN PAM targeting sequence
  source 1..20: mol_type = other RNA
gttccaaactacctgaaaat

SEQ ID NO: 8899 - RNA, 20 nt, synthetic construct
  misc_feature 1..20: note = C9Orf72 TTCN PAM targeting sequence
  source 1..20: mol_type = other RNA
ttctgttccaaactacctga

SEQ ID NO: 8900 - RNA, 20 nt, synthetic construct
  misc_feature 1..20: note = C9Orf72 TTCN PAM targeting sequence
  source 1..20: mol_type = other RNA
cattccttgcccaagtcagt

SEQ ID NO: 8901 - RNA, 20 nt, synthetic construct
  misc_feature 1..20: note = C9Orf72 TTCN PAM targeting sequence
  source 1..20: mol_type = other RNA
ttgcccaagtcagtacagat

SEQ ID NO: 8902 - RNA, 20 nt, synthetic construct
  misc_feature 1..20: note = C9Orf72 TTCN PAM targeting sequence
  source 1..20: mol_type = other RNA
atcatttccaactcatactt

SEQ ID NO: 8903 - RNA, 20 nt, synthetic construct
  misc_feature 1..20: note = C9Orf72 TTCN PAM targeting sequence
  source 1..20: mol_type = other RNA
aactcatactttatacattt

SEQ ID NO: 8904 - RNA, 20 nt, synthetic construct
  misc_feature 1..20: note = C9Orf72 TTCN PAM targeting sequence
  source 1..20: mol_type = other RNA
cataagaggaaaatcatgct

SEQ ID NO: 8905 - RNA, 20 nt, synthetic construct
  misc_feature 1..20: note = C9Orf72 TTCN PAM targeting sequence
  source 1..20: mol_type = other RNA
tcttatgggaaatgtataaa

SEQ ID NO: 8906 - RNA, 20 nt, synthetic construct
  misc_feature 1..20: note = C9Orf72 TTCN PAM targeting sequence
  source 1..20: mol_type = other RNA
gtagcatatgaaaaaaaaaa

SEQ ID NO: 8907 - RNA, 20 nt, synthetic construct
  misc_feature 1..20: note = C9Orf72 TTCN PAM targeting sequence
  source 1..20: mol_type = other RNA
tatgctactgaaaaccagca

SEQ ID NO: 8908 - RNA, 20 nt, synthetic construct
  misc_feature 1..20: note = C9Orf72 TTCN PAM targeting sequence
  source 1..20: mol_type = other RNA
aagaggattcttttgccaag

SEQ ID NO: 8909 - RNA, 20 nt, synthetic construct
  misc_feature 1..20: note = C9Orf72 TTCN PAM targeting sequence
  source 1..20: mol_type = other RNA
tttgccaagccacttcatta

SEQ ID NO: 8910 - RNA, 20 nt, synthetic construct
  misc_feature 1..20: note = C9Orf72 TTCN PAM targeting sequence
  source 1..20: mol_type = other RNA
ttacagcttccccttagagg

SEQ ID NO: 8911 - RNA, 20 nt, synthetic construct
  misc_feature 1..20: note = C9Orf72 TTCN PAM targeting sequence
  source 1..20: mol_type = other RNA
ccttagaggataccaaagaa

SEQ ID NO: 8912 - RNA, 20 nt, synthetic construct
  misc_feature 1..20: note = C9Orf72 TTCN PAM targeting sequence
  source 1..20: mol_type = other RNA
ttggtatcctctaaggggaa

SEQ ID NO: 8913 - RNA, 20 nt, synthetic construct
  misc_feature 1..20: note = C9Orf72 TTCN PAM targeting sequence
  source 1..20: mol_type = other RNA
aatatccctgtgcttctttg

SEQ ID NO: 8914 - RNA, 20 nt, synthetic construct
  misc_feature 1..20: note = C9Orf72 TTCN PAM targeting sequence
  source 1..20: mol_type = other RNA
cttttactctattgtcatct

SEQ ID NO: 8915 - RNA, 20 nt, synthetic construct
  misc_feature 1..20: note = C9Orf72 TTCN PAM targeting sequence
  source 1..20: mol_type = other RNA
tcgcttttactctattgtca

SEQ ID NO: 8916 - RNA, 20 nt, synthetic construct
  misc_feature 1..20: note = C9Orf72 TTCN PAM targeting sequence
  source 1..20: mol_type = other RNA
attcattttggctgagtctg

SEQ ID NO: 8917 - RNA, 20 nt, synthetic construct
  misc_feature 1..20: note = C9Orf72 TTCN PAM targeting sequence
  source 1..20: mol_type = other RNA
ttttggctgagtctgactac

SEQ ID NO: 8918 - RNA, 20 nt, synthetic construct
  misc_feature 1..20: note = C9Orf72 TTCN PAM targeting sequence
  source 1..20: mol_type = other RNA
ttgtgctcatgtgtgtgcta

SEQ ID NO: 8919 - RNA, 20 nt, synthetic construct
  misc_feature 1..20: note = C9Orf72 TTCN PAM targeting sequence
  source 1..20: mol_type = other RNA
ctaacaaacagcagacatcc

SEQ ID NO: 8920 - RNA, 20 nt, synthetic construct
  misc_feature 1..20: note = C9Orf72 TTCN PAM targeting sequence
  source 1..20: mol_type = other RNA
tcctaagcaatgtgagttca

SEQ ID NO: 8921 - RNA, 20 nt, synthetic construct
  misc_feature 1..20: note = C9Orf72 TTCN PAM targeting sequence
  source 1..20: mol_type = other RNA
caaatctaaatgtgtaccta

SEQ ID NO: 8922 - RNA, 20 nt, synthetic construct
  misc_feature 1..20: note = C9Orf72 TTCN PAM targeting sequence
  source 1..20: mol_type = other RNA
atagtaaagcgtacttcctc

SEQ ID NO: 8923 - RNA, 20 nt, synthetic construct
  misc_feature 1..20: note = C9Orf72 TTCN PAM targeting sequence
  source 1..20: mol_type = other RNA
tccttacctgcttctgtttt

SEQ ID NO: 8924 - RNA, 20 nt, synthetic construct
  misc_feature 1..20: note = C9Orf72 TTCN PAM targeting sequence
  source 1..20: mol_type = other RNA
gttttgttttcaaaacctta

SEQ ID NO: 8925 - RNA, 20 nt, synthetic construct
  misc_feature 1..20: note = C9Orf72 TTCN PAM targeting sequence
  source 1..20: mol_type = other RNA
aaaccttaaatagtcacagg

SEQ ID NO: 8926 - RNA, 20 nt, synthetic construct
  misc_feature 1..20: note = C9Orf72 TTCN PAM targeting sequence
  source 1..20: mol_type = other RNA
ctatacctgtgactatttaa

SEQ ID NO: 8927 - RNA, 20 nt, synthetic construct
  misc_feature 1..20: note = C9Orf72 TTCN PAM targeting sequence
  source 1..20: mol_type = other RNA
gtgataacttatgttaatta

SEQ ID NO: 8928 - RNA, 20 nt, synthetic construct
  misc_feature 1..20: note = C9Orf72 TTCN PAM targeting sequence
  source 1..20: mol_type = other RNA
gtacccagagttaattaaca

SEQ ID NO: 8929 - RNA, 20 nt, synthetic construct
  misc_feature 1..20: note = C9Orf72 TTCN PAM targeting sequence
  source 1..20: mol_type = other RNA
tttcagtacccagagttaat

SEQ ID NO: 8930 - RNA, 20 nt, synthetic construct
  misc_feature 1..20: note = C9Orf72 TTCN PAM targeting sequence
  source 1..20: mol_type = other RNA
cctaagcactgaggtaatgg

SEQ ID NO: 8931 - RNA, 20 nt, synthetic construct
  misc_feature 1..20: note = C9Orf72 TTCN PAM targeting sequence
  source 1..20: mol_type = other RNA
aataacagcaaatttatata

SEQ ID NO: 8932 - RNA, 20 nt, synthetic construct
  misc_feature 1..20: note = C9Orf72 TTCN PAM targeting sequence
  source 1..20: mol_type = other RNA
tatatatctatatgtgatat

SEQ ID NO: 8933 - RNA, 20 nt, synthetic construct
  misc_feature 1..20: note = C9Orf72 TTCN PAM targeting sequence
  source 1..20: mol_type = other RNA
aaccatacaagaatccatat

SEQ ID NO: 8934 - RNA, 20 nt, synthetic construct
  misc_feature 1..20: note = C9Orf72 TTCN PAM targeting sequence
  source 1..20: mol_type = other RNA
tgtatggtttgaaattgctt

SEQ ID NO: 8935 - RNA, 20 nt, synthetic construct
  misc_feature 1..20: note = C9Orf72 TTCN PAM targeting sequence
  source 1..20: mol_type = other RNA
gccagcatacttctcaacat

SEQ ID NO: 8936 - RNA, 20 nt, synthetic construct
  misc_feature 1..20: note = C9Orf72 TTCN PAM targeting sequence
  source 1..20: mol_type = other RNA
caacatttataatgacacta

SEQ ID NO: 8937 - RNA, 20 nt, synthetic construct
  misc_feature 1..20: note = C9Orf72 TTCN PAM targeting sequence
  source 1..20: mol_type = other RNA
tctgaaatgcacattacatc

SEQ ID NO: 8938 - RNA, 20 nt, synthetic construct
  misc_feature 1..20: note = C9Orf72 TTCN PAM targeting sequence
  source 1..20: mol_type = other RNA
gaggaaacgactatagacat

SEQ ID NO: 8939 - RNA, 20 nt, synthetic construct
  misc_feature 1..20: note = C9Orf72 TTCN PAM targeting sequence
  source 1..20: mol_type = other RNA
caaaaagggattgatgtaat

SEQ ID NO: 8940 - RNA, 20 nt, synthetic construct
  misc_feature 1..20: note = C9Orf72 TTCN PAM targeting sequence
  source 1..20: mol_type = other RNA
actttcacaaaaagggattg

SEQ ID NO: 8941 - RNA, 20 nt, synthetic construct
  misc_feature 1..20: note = C9Orf72 TTCN PAM targeting sequence
  source 1..20: mol_type = other RNA
ggagctgggaagaacatatg

SEQ ID NO: 8942 - RNA, 20 nt, synthetic construct
  misc_feature 1..20: note = C9Orf72 TTCN PAM targeting sequence
  source 1..20: mol_type = other RNA
cagctcctgaactctgacct

SEQ ID NO: 8943 - RNA, 20 nt, synthetic construct
  misc_feature 1..20: note = C9Orf72 TTCN PAM targeting sequence
  source 1..20: mol_type = other RNA
tcccagctcctgaactctga

SEQ ID NO: 8944 - RNA, 20 nt, synthetic construct
  misc_feature 1..20: note = C9Orf72 TTCN PAM targeting sequence
  source 1..20: mol_type = other RNA
aagttgtttcagtgacagct

SEQ ID NO: 8945 - RNA, 20 nt, synthetic construct
  misc_feature 1..20: note = C9Orf72 TTCN PAM targeting sequence
  source 1..20: mol_type = other RNA
gtgacagctgaacaagatag

SEQ ID NO: 8946 - RNA, 20 nt, synthetic construct
  misc_feature 1..20: note = C9Orf72 TTCN PAM targeting sequence
  source 1..20: mol_type = other RNA
gctgtcactgaaacaacttt

SEQ ID NO: 8947 - RNA, 20 nt, synthetic construct
  misc_feature 1..20: note = C9Orf72 TTCN PAM targeting sequence
  source 1..20: mol_type = other RNA
acatgacactatcttgttca

SEQ ID NO: 8948 - RNA, 20 nt, synthetic construct
  misc_feature 1..20: note = C9Orf72 TTCN PAM targeting sequence
  source 1..20: mol_type = other RNA
ggtctataggaatagagtga

SEQ ID NO: 8949 - RNA, 20 nt, synthetic construct
  misc_feature 1..20: note = C9Orf72 TTCN PAM targeting sequence
  source 1..20: mol_type = other RNA
tatagaccagaaagcagata

SEQ ID NO: 8950 - RNA, 20 nt, synthetic construct
  misc_feature 1..20: note = C9Orf72 TTCN PAM targeting sequence
  source 1..20: mol_type = other RNA
ttcccaagtttaaaaaaaaa

SEQ ID NO: 8951 - RNA, 20 nt, synthetic construct
  misc_feature 1..20: note = C9Orf72 TTCN PAM targeting sequence
  source 1..20: mol_type = other RNA
caagtttaaaaaaaaattat

SEQ ID NO: 8952 - RNA, 20 nt, synthetic construct
  misc_feature 1..20: note = C9Orf72 TTCN PAM targeting sequence
  source 1..20: mol_type = other RNA
ataatttttttttaaacttg

SEQ ID NO: 8953 - RNA, 20 nt, synthetic construct
  misc_feature 1..20: note = C9Orf72 TTCN PAM targeting sequence
  source 1..20: mol_type = other RNA
tcctgctcttagaatctgtt

SEQ ID NO: 8954 - RNA, 20 nt, synthetic construct
  misc_feature 1..20: note = C9Orf72 TTCN PAM targeting sequence
  source 1..20: mol_type = other RNA
tgctcttagaatctgttttg

SEQ ID NO: 8955 - RNA, 20 nt, synthetic construct
  misc_feature 1..20: note = C9Orf72 TTCN PAM targeting sequence
  source 1..20: mol_type = other RNA
aagagcaggaagaaagagta

SEQ ID NO: 8956 - RNA, 20 nt, synthetic construct
  misc_feature 1..20: note = C9Orf72 TTCN PAM targeting sequence
  source 1..20: mol_type = other RNA
tatctatcagatggtatttt

SEQ ID NO: 8957 - RNA, 20 nt, synthetic construct
  misc_feature 1..20: note = C9Orf72 TTCN PAM targeting sequence
  source 1..20: mol_type = other RNA
tatttaaaaatacccatgtg

SEQ ID NO: 8958 - RNA, 20 nt, synthetic construct
  misc_feature 1..20: note = C9Orf72 TTCN PAM targeting sequence
  source 1..20: mol_type = other RNA
tctcaagagatgagcctgat

SEQ ID NO: 8959 - RNA, 20 nt, synthetic construct
  misc_feature 1..20: note = C9Orf72 TTCN PAM targeting sequence
  source 1..20: mol_type = other RNA
caagagatgagcctgatgtt

SEQ ID NO: 8960 - RNA, 20 nt, synthetic construct
  misc_feature 1..20: note = C9Orf72 TTCN PAM targeting sequence
  source 1..20: mol_type = other RNA
gtctggcttaacattagcca

SEQ ID NO: 8961 - RNA, 20 nt, synthetic construct
  misc_feature 1..20: note = C9Orf72 TTCN PAM targeting sequence
  source 1..20: mol_type = other RNA
gagtaatggagaggagttct

SEQ ID NO: 8962 - RNA, 20 nt, synthetic construct
  misc_feature 1..20: note = C9Orf72 TTCN PAM targeting sequence
  source 1..20: mol_type = other RNA
ctcactgtgaaacaggtcaa

SEQ ID NO: 8963 - RNA, 20 nt, synthetic construct
  misc_feature 1..20: note = C9Orf72 TTCN PAM targeting sequence
  source 1..20: mol_type = other RNA
cagtgagagaactcctctcc

SEQ ID NO: 8964 - RNA, 20 nt, synthetic construct
  misc_feature 1..20: note = C9Orf72 TTCN PAM targeting sequence
  source 1..20: mol_type = other RNA
cctggcaactaacccttttt

SEQ ID NO: 8965 - RNA, 20 nt, synthetic construct
  misc_feature 1..20: note = C9Orf72 TTCN PAM targeting sequence
  source 1..20: mol_type = other RNA
caagtggagaaatcagacca

SEQ ID NO: 8966 - RNA, 20 nt, synthetic construct
  misc_feature 1..20: note = C9Orf72 TTCN PAM targeting sequence
  source 1..20: mol_type = other RNA
ccacttgtgaaaggtgctaa

SEQ ID NO: 8967 - RNA, 20 nt, synthetic construct
  misc_feature 1..20: note = C9Orf72 TTCN PAM targeting sequence
  source 1..20: mol_type = other RNA
aaacccattgagcacacagt

SEQ ID NO: 8968 - RNA, 20 nt, synthetic construct
  misc_feature 1..20: note = C9Orf72 TTCN PAM targeting sequence
  source 1..20: mol_type = other RNA
aagtaattaatacagaaagg

SEQ ID NO: 8969 - RNA, 20 nt, synthetic construct
  misc_feature 1..20: note = C9Orf72 TTCN PAM targeting sequence
  source 1..20: mol_type = other RNA
gtattaattactttgaaagc

SEQ ID NO: 8970 - RNA, 20 nt, synthetic construct
  misc_feature 1..20: note = C9Orf72 TTCN PAM targeting sequence
  source 1..20: mol_type = other RNA
atgcctttctgtattaatta

SEQ ID NO: 8971 - RNA, 20 nt, synthetic construct
  misc_feature 1..20: note = C9Orf72 TTCN PAM targeting sequence
  source 1..20: mol_type = other RNA
ctatctttctatgcctttct

SEQ ID NO: 8972 - RNA, 20 nt, synthetic construct
  misc_feature 1..20: note = C9Orf72 TTCN PAM targeting sequence
  source 1..20: mol_type = other RNA
aacgtgatataacgcccctt

SEQ ID NO: 8973 - RNA, 20 nt, synthetic construct
  misc_feature 1..20: note = C9Orf72 TTCN PAM targeting sequence
  source 1..20: mol_type = other RNA
cttctaaatagtaaaataat

SEQ ID NO: 8974 - RNA, 20 nt, synthetic construct
  misc_feature 1..20: note = C9Orf72 TTCN PAM targeting sequence
  source 1..20: mol_type = other RNA
aaatagtaaaataatgaaga

SEQ ID NO: 8975 - RNA, 20 nt, synthetic construct
  misc_feature 1..20: note = C9Orf72 TTCN PAM targeting sequence
  source 1..20: mol_type = other RNA
ttattttactatttagaaga

SEQ ID NO: 8976 - RNA, 20 nt, synthetic construct
  misc_feature 1..20: note = C9Orf72 TTCN PAM targeting sequence
  source 1..20: mol_type = other RNA
ctctttgagaaacacagctt

SEQ ID NO: 8977 - RNA, 20 nt, synthetic construct
  misc_feature 1..20: note = C9Orf72 TTCN PAM targeting sequence
  source 1..20: mol_type = other RNA
caaagagagaaagtctcttt

SEQ ID NO: 8978 - RNA, 20 nt, synthetic construct
  misc_feature 1..20: note = C9Orf72 TTCN PAM targeting sequence
  source 1..20: mol_type = other RNA
caactgccttgcattgcaaa

SEQ ID NO: 8979 - RNA, 20 nt, synthetic construct
  misc_feature 1..20: note = C9Orf72 TTCN PAM targeting sequence
  source 1..20: mol_type = other RNA
atatttgcaatgcaaggcag

SEQ ID NO: 8980 - RNA, 20 nt, synthetic construct
  misc_feature 1..20: note = C9Orf72 TTCN PAM targeting sequence
  source 1..20: mol_type = other RNA
aagagagctaaggagatcca

SEQ ID NO: 8981 - RNA, 20 nt, synthetic construct
  misc_feature 1..20: note = C9Orf72 TTCN PAM targeting sequence
  source 1..20: mol_type = other RNA
tatagacattcaaagagagc

SEQ ID NO: 8982 - RNA, 20 nt, synthetic construct
  misc_feature 1..20: note = C9Orf72 TTCN PAM targeting sequence
  source 1..20: mol_type = other RNA
ttcctatagacattcaaaga

SEQ ID NO: 8983 - RNA, 20 nt, synthetic construct
  misc_feature 1..20: note = C9Orf72 TTCN PAM targeting sequence
  source 1..20: mol_type = other RNA
tttctttcctatagacattc

SEQ ID NO: 8984 - RNA, 20 nt, synthetic construct
  misc_feature 1..20: note = C9Orf72 TTCN PAM targeting sequence
  source 1..20: mol_type = other RNA
ttcatttctttcctatagac

SEQ ID NO: 8985 - RNA, 20 nt, synthetic construct
  misc_feature 1..20: note = C9Orf72 TTCN PAM targeting sequence
  source 1..20: mol_type = other RNA
actgccagactgaaggtaga

SEQ ID NO: 8986 - RNA, 20 nt, synthetic construct
  misc_feature 1..20: note = C9Orf72 TTCN PAM targeting sequence
  source 1..20: mol_type = other RNA
gtctggcagtagaaaagttt

SEQ ID NO: 8987 - RNA, 20 nt, synthetic construct
  misc_feature 1..20: note = C9Orf72 TTCN PAM targeting sequence
  source 1..20: mol_type = other RNA
aagtttatcaaaatctacct

SEQ ID NO: 8988 - RNA, 20 nt, synthetic construct
  misc_feature 1..20: note = C9Orf72 TTCN PAM targeting sequence
  source 1..20: mol_type = other RNA
atgccaggagggtagagggt

SEQ ID NO: 8989 - RNA, 20 nt, synthetic construct
  misc_feature 1..20: note = C9Orf72 TTCN PAM targeting sequence
  source 1..20: mol_type = other RNA
ctttacatcataattaagga

SEQ ID NO: 8990 - RNA, 20 nt, synthetic construct
  misc_feature 1..20: note = C9Orf72 TTCN PAM targeting sequence
  source 1..20: mol_type = other RNA
ttaattatgatgtaaaggga

SEQ ID NO: 8991 - RNA, 20 nt, synthetic construct
  misc_feature 1..20: note = C9Orf72 TTCN PAM targeting sequence
  source 1..20: mol_type = other RNA
tttttgtctctttccttaat

SEQ ID NO: 8992 - RNA, 20 nt, synthetic construct
  misc_feature 1..20: note = C9Orf72 TTCN PAM targeting sequence
  source 1..20: mol_type = other RNA
ttagcctctagctgttctaa

SEQ ID NO: 8993 - RNA, 20 nt, synthetic construct
  misc_feature 1..20: note = C9Orf72 TTCN PAM targeting sequence
  source 1..20: mol_type = other RNA
aacgacacagaactattttc

SEQ ID NO: 8994 - RNA, 20 nt, synthetic construct
  misc_feature 1..20: note = C9Orf72 TTCN PAM targeting sequence
  source 1..20: mol_type = other RNA
gtgtcgttagaacagctaga

SEQ ID NO: 8995 - RNA, 20 nt, synthetic construct
  misc_feature 1..20: note = C9Orf72 TTCN PAM targeting sequence
  source 1..20: mol_type = other RNA
caagattccaattaggtttg

SEQ ID NO: 8996 - RNA, 20 nt, synthetic construct
  misc_feature 1..20: note = C9Orf72 TTCN PAM targeting sequence
  source 1..20: mol_type = other RNA
aattaggtttgctatactgc

SEQ ID NO: 8997 - RNA, 20 nt, synthetic construct
  misc_feature 1..20: note = C9Orf72 TTCN PAM targeting sequence
  source 1..20: mol_type = other RNA
tcttaagaagctacttcacc

SEQ ID NO: 8998 - RNA, 20 nt, synthetic construct
  misc_feature 1..20: note = C9Orf72 TTCN PAM targeting sequence
  source 1..20: mol_type = other RNA
taagaggaaattaatattga

SEQ ID NO: 8999 - RNA, 20 nt, synthetic construct
  misc_feature 1..20: note = C9Orf72 TTCN PAM targeting sequence
  source 1..20: mol_type = other RNA
ccatttggaaagccccttgg

SEQ ID NO: 9000 - RNA, 20 nt, synthetic construct
  misc_feature 1..20: note = C9Orf72 TTCN PAM targeting sequence
  source 1..20: mol_type = other RNA
aaatggtgaagtagcttctt

SEQ ID NO: 9001 - RNA, 20 nt, synthetic construct
  misc_feature 1..20: note = C9Orf72 TTCN PAM targeting sequence
  source 1..20: mol_type = other RNA
acccaaggggctttccaaat

SEQ ID NO: 9002 - RNA, 20 nt, synthetic construct
  misc_feature 1..20: note = C9Orf72 TTCN PAM targeting sequence
  source 1..20: mol_type = other RNA
ataattattcaacccaaggg

SEQ ID NO: 9003 - RNA, 20 nt, synthetic construct
  misc_feature 1..20: note = C9Orf72 TTCN PAM targeting sequence
  source 1..20: mol_type = other RNA
aaatggcctctggctagcct

SEQ ID NO: 9004 - RNA, 20 nt, synthetic construct
  misc_feature 1..20: note = C9Orf72 TTCN PAM targeting sequence
  source 1..20: mol_type = other RNA
tgtacagtaagtaatatgaa

SEQ ID NO: 9005 - RNA, 20 nt, synthetic construct
  misc_feature 1..20: note = C9Orf72 TTCN PAM targeting sequence
  source 1..20: mol_type = other RNA
tattacttactgtacatgaa

SEQ ID NO: 9006 - RNA, 20 nt, synthetic construct
  misc_feature 1..20: note = C9Orf72 TTCN PAM targeting sequence
  source 1..20: mol_type = other RNA
atacccaaggcaagcctctt

SEQ ID NO: 9007 - RNA, 20 nt, synthetic construct
  misc_feature 1..20: note = C9Orf72 TTCN PAM targeting sequence
  source 1..20: mol_type = other RNA
gagggaaaaaatccctctga

SEQ ID NO: 9008 - RNA, 20 nt, synthetic construct
  misc_feature 1..20: note = C9Orf72 TTCN PAM targeting sequence
  source 1..20: mol_type = other RNA
ctctgaaaagcatcattaga

SEQ ID NO: 9009 - RNA, 20 nt, synthetic construct
  misc_feature 1..20: note = C9Orf72 TTCN PAM targeting sequence
  source 1..20: mol_type = other RNA
gagggattttttccctctga

SEQ ID NO: 9010 - RNA, 20 nt, synthetic construct
  misc_feature 1..20: note = C9Orf72 TTCN PAM targeting sequence
  source 1..20: mol_type = other RNA
aaaaatcttttcagagggat

SEQ ID NO: 9011 - RNA, 20 nt, synthetic construct
  misc_feature 1..20: note = C9Orf72 TTCN PAM targeting sequence
  source 1..20: mol_type = other RNA
gttaaatttttcccaagtct

SEQ ID NO: 9012 - RNA, 20 nt, synthetic construct
  misc_feature 1..20: note = C9Orf72 TTCN PAM targeting sequence
  source 1..20: mol_type = other RNA
caagtcttcttgtctactgc

SEQ ID NO: 9013 - RNA, 20 nt, synthetic construct
  misc_feature 1..20: note = C9Orf72 TTCN PAM targeting sequence
  source 1..20: mol_type = other RNA
tgtctactgctcagcagagt

SEQ ID NO: 9014 - RNA, 20 nt, synthetic construct
  misc_feature 1..20: note = C9Orf72 TTCN PAM targeting sequence
  source 1..20: mol_type = other RNA
acagagactctgctgagcag

SEQ ID NO: 9015 - RNA, 20 nt, synthetic construct
  misc_feature 1..20: note = C9Orf72 TTCN PAM targeting sequence
  source 1..20: mol_type = other RNA
tttctacagagactctgctg

SEQ ID NO: 9016 - RNA, 20 nt, synthetic construct
  misc_feature 1..20: note = C9Orf72 TTCN PAM targeting sequence
  source 1..20: mol_type = other RNA
ttccttcatttttcccttcc

SEQ ID NO: 9017 - RNA, 20 nt, synthetic construct
  misc_feature 1..20: note = C9Orf72 TTCN PAM targeting sequence
  source 1..20: mol_type = other RNA
ttcatttttcccttcctttt

SEQ ID NO: 9018 - RNA, 20 nt, synthetic construct
  misc_feature 1..20: note = C9Orf72 TTCN PAM targeting sequence
  source 1..20: mol_type = other RNA
tttttcccttccttttttct

SEQ ID NO: 9019 - RNA, 20 nt, synthetic construct
  misc_feature 1..20: note = C9Orf72 TTCN PAM targeting sequence
  source 1..20: mol_type = other RNA
cttccttttttctttctttt

SEQ ID NO: 9020 - RNA, 20 nt, synthetic construct
  misc_feature 1..20: note = C9Orf72 TTCN PAM targeting sequence
  source 1..20: mol_type = other RNA
ttttttctttcttttatcct

SEQ ID NO: 9021 - RNA, 20 nt, synthetic construct
  misc_feature 1..20: note = C9Orf72 TTCN PAM targeting sequence
  source 1..20: mol_type = other RNA
ttcttttatcctgccctctt

SEQ ID NO: 9022 - RNA, 20 nt, synthetic construct
  misc_feature 1..20: note = C9Orf72 TTCN PAM targeting sequence
  source 1..20: mol_type = other RNA
tttatcctgccctcttccgt

SEQ ID NO: 9023 - RNA, 20 nt, synthetic construct
  misc_feature 1..20: note = C9Orf72 TTCN PAM targeting sequence
  source 1..20: mol_type = other RNA
gtctttgtttctttctcttc

SEQ ID NO: 9024 - RNA, 20 nt, synthetic construct
  misc_feature 1..20: note = C9Orf72 TTCN PAM targeting sequence
  source 1..20: mol_type = other RNA
ttctcttctcttctctgtta

SEQ ID NO: 9025 - RNA, 20 nt, synthetic construct
  misc_feature 1..20: note = C9Orf72 TTCN PAM targeting sequence
  source 1..20: mol_type = other RNA
cttctcttctctgttagagg

SEQ ID NO: 9026 - RNA, 20 nt, synthetic construct
  misc_feature 1..20: note = C9Orf72 TTCN PAM targeting sequence
  source 1..20: mol_type = other RNA
cttctctgttagaggattta

SEQ ID NO: 9027 - RNA, 20 nt, synthetic construct
  misc_feature 1..20: note = C9Orf72 TTCN PAM targeting sequence
  source 1..20: mol_type = other RNA
ctgttagaggatttatgata

SEQ ID NO: 9028 - RNA, 20 nt, synthetic construct
  misc_feature 1..20: note = C9Orf72 TTCN PAM targeting sequence
  source 1..20: mol_type = other RNA
atccagtgtcccagaagaat

SEQ ID NO: 9029 - RNA, 20 nt, synthetic construct
  misc_feature 1..20: note = C9Orf72 TTCN PAM targeting sequence
  source 1..20: mol_type = other RNA
gggacactggatagaaacct

SEQ ID NO: 9030 - RNA, 20 nt, synthetic construct
  misc_feature 1..20: note = C9Orf72 TTCN PAM targeting sequence
  source 1..20: mol_type = other RNA
tctgggacactggatagaaa

SEQ ID NO: 9031 - RNA, 20 nt, synthetic construct
  misc_feature 1..20: note = C9Orf72 TTCN PAM targeting sequence
  source 1..20: mol_type = other RNA
tctttttaataaaatgaatt

SEQ ID NO: 9032 - RNA, 20 nt, synthetic construct
  misc_feature 1..20: note = C9Orf72 TTCN PAM targeting sequence
  source 1..20: mol_type = other RNA
ttttaataaaatgaattaca

SEQ ID NO: 9033 - RNA, 20 nt, synthetic construct
  misc_feature 1..20: note = C9Orf72 TTCN PAM targeting sequence
  source 1..20: mol_type = other RNA
ttttattaaaaagaagaatt

SEQ ID NO: 9034 - RNA, 20 nt, synthetic construct
  misc_feature 1..20: note = C9Orf72 TTCN PAM targeting sequence
  source 1..20: mol_type = other RNA
ttccctttccttgtcttttt

SEQ ID NO: 9035 - RNA, 20 nt, synthetic construct
  misc_feature 1..20: note = C9Orf72 TTCN PAM targeting sequence
  source 1..20: mol_type = other RNA
ctttccttgtctttttgttt

SEQ ID NO: 9036 - RNA, 20 nt, synthetic construct
  misc_feature 1..20: note = C9Orf72 TTCN PAM targeting sequence
  source 1..20: mol_type = other RNA
ttgtctttttgttttcctgt

SEQ ID NO: 9037 - RNA, 20 nt, synthetic construct
  misc_feature 1..20: note = C9Orf72 TTCN PAM targeting sequence
  source 1..20: mol_type = other RNA
tgtgttctttttggtttctt

SEQ ID NO: 9038 - RNA, 20 nt, synthetic construct
  misc_feature 1..20: note = C9Orf72 TTCN PAM targeting sequence
  source 1..20: mol_type = other RNA
ttttggtttctttcagcaga

SEQ ID NO: 9039 - RNA, 20 nt, synthetic construct
  misc_feature 1..20: note = C9Orf72 TTCN PAM targeting sequence
  source 1..20: mol_type = other RNA
ttcagcagatgataaacgat

SEQ ID NO: 9040 - RNA, 20 nt, synthetic construct
  misc_feature 1..20: note = C9Orf72 TTCN PAM targeting sequence
  source 1..20: mol_type = other RNA
gcagatgataaacgatgttt

SEQ ID NO: 9041 - RNA, 20 nt, synthetic construct
  misc_feature 1..20: note = C9Orf72 TTCN PAM targeting sequence
  source 1..20: mol_type = other RNA
tttgaaattgcttctcactc

SEQ ID NO: 9042 - RNA, 20 nt, synthetic construct
  misc_feature 1..20: note = C9Orf72 TTCN PAM targeting sequence
  source 1..20: mol_type = other RNA
aaggaaaacatcgtttatca

SEQ ID NO: 9043 - RNA, 20 nt, synthetic construct
  misc_feature 1..20: note = C9Orf72 TTCN PAM targeting sequence
  source 1..20: mol_type = other RNA
cactcctgctcagacggtca

SEQ ID NO: 9044 - RNA, 20 nt, synthetic construct
  misc_feature 1..20: note = C9Orf72 TTCN PAM targeting sequence
  source 1..20: mol_type = other RNA
catgctgaccgtctgagcag

SEQ ID NO: 9045 - RNA, 20 nt, synthetic construct
  misc_feature 1..20: note = C9Orf72 TTCN PAM targeting sequence
  source 1..20: mol_type = other RNA
ttttgacttctcatgctgac

SEQ ID NO: 9046 - RNA, 20 nt, synthetic construct
  misc_feature 1..20: note = C9Orf72 TTCN PAM targeting sequence
  source 1..20: mol_type = other RNA
cttactagtgtgtatgcttt

SEQ ID NO: 9047 - RNA, 20 nt, synthetic construct
  misc_feature 1..20: note = C9Orf72 TTCN PAM targeting sequence
  source 1..20: mol_type = other RNA
acgccctgattctcttacta

SEQ ID NO: 9048 - RNA, 20 nt, synthetic construct
  misc_feature 1..20: note = C9Orf72 TTCN PAM targeting sequence
  source 1..20: mol_type = other RNA
tgggggttggggtcttagag

SEQ ID NO: 9049 - RNA, 20 nt, synthetic construct
  misc_feature 1..20: note = C9Orf72 TTCN PAM targeting sequence
  source 1..20: mol_type = other RNA
aacaagctgtgctcctcaaa

SEQ ID NO: 9050 - RNA, 20 nt, synthetic construct
  misc_feature 1..20: note = C9Orf72 TTCN PAM targeting sequence
  source 1..20: mol_type = other RNA
ggattaaaagccatgagatc

SEQ ID NO: 9051 - RNA, 20 nt, synthetic construct
  misc_feature 1..20: note = C9Orf72 TTCN PAM targeting sequence
  source 1..20: mol_type = other RNA
ttgtttgggagttgtttttc

SEQ ID NO: 9052 - RNA, 20 nt, synthetic construct
  misc_feature 1..20: note = C9Orf72 TTCN PAM targeting sequence
  source 1..20: mol_type = other RNA
ttgttgctgttggccagtaa

SEQ ID NO: 9053 - RNA, 20 nt, synthetic construct
  misc_feature 1..20: note = C9Orf72 TTCN PAM targeting sequence
  source 1..20: mol_type = other RNA
caagagtaccgtaattactg

SEQ ID NO: 9054 - RNA, 20 nt, synthetic construct
  misc_feature 1..20: note = C9Orf72 TTCN PAM targeting sequence
  source 1..20: mol_type = other RNA
aaataactgacctataaaac

SEQ ID NO: 9055 - RNA, 20 nt, synthetic construct
  misc_feature 1..20: note = C9Orf72 TTCN PAM targeting sequence
  source 1..20: mol_type = other RNA
gtttgtttggtactgaataa

SEQ ID NO: 9056 - RNA, 20 nt, synthetic construct
  misc_feature 1..20: note = C9Orf72 TTCN PAM targeting sequence
  source 1..20: mol_type = other RNA
gtaccaaacaaacggaaaac

SEQ ID NO: 9057 - RNA, 20 nt, synthetic construct
  misc_feature 1..20: note = C9Orf72 TTCN PAM targeting sequence
  source 1..20: mol_type = other RNA
tttggcaatgtcctgagctc

SEQ ID NO: 9058 - RNA, 20 nt, synthetic construct
  misc_feature 1..20: note = C9Orf72 TTCN PAM targeting sequence
  source 1..20: mol_type = other RNA
tttagaaacaatggtttgcc

SEQ ID NO: 9059 - RNA, 20 nt, synthetic construct
  misc_feature 1..20: note = C9Orf72 TTCN PAM targeting sequence
  source 1..20: mol_type = other RNA
aaaagaagggactgagagat

SEQ ID NO: 9060 - RNA, 20 nt, synthetic construct
  misc_feature 1..20: note = C9Orf72 TTCN PAM targeting sequence
  source 1..20: mol_type = other RNA
cagggccctgctcctgttat

SEQ ID NO: 9061 - RNA, 20 nt, synthetic construct
  misc_feature 1..20: note = C9Orf72 TTCN PAM targeting sequence
  source 1..20: mol_type = other RNA
ctgtcaacctttttacacta

SEQ ID NO: 9062 - RNA, 20 nt, synthetic construct
  misc_feature 1..20: note = C9Orf72 TTCN PAM targeting sequence
  source 1..20: mol_type = other RNA
gtcactctgggcgtatgtag

SEQ ID NO: 9063 - RNA, 20 nt, synthetic construct
  misc_feature 1..20: note = C9Orf72 TTCN PAM targeting sequence
  source 1..20: mol_type = other RNA
cccttttttctgtcactctg

SEQ ID NO: 9064 - RNA, 20 nt, synthetic construct
  misc_feature 1..20: note = C9Orf72 TTCN PAM targeting sequence
  source 1..20: mol_type = other RNA
cttctcccttttttctgtca

SEQ ID NO: 9065 - RNA, 20 nt, synthetic construct
  misc_feature 1..20: note = C9Orf72 TTCN PAM targeting sequence
  source 1..20: mol_type = other RNA
ttctcttctcccttttttct

SEQ ID NO: 9066 - RNA, 20 nt, synthetic construct
  misc_feature 1..20: note = C9Orf72 TTCN PAM targeting sequence
  source 1..20: mol_type = other RNA
ttttgctttctttctcttct

SEQ ID NO: 9067 - RNA, 20 nt, synthetic construct
  misc_feature 1..20: note = C9Orf72 TTCN PAM targeting sequence
  source 1..20: mol_type = other RNA
cgtttccttttgctttcttt

SEQ ID NO: 9068 - RNA, 20 nt, synthetic construct
  misc_feature 1..20: note = C9Orf72 TTCN PAM targeting sequence
  source 1..20: mol_type = other RNA
ttttctcgtttccttttgct

SEQ ID NO: 9069 - RNA, 20 nt, synthetic construct
  misc_feature 1..20: note = C9Orf72 TTCN PAM targeting sequence
  source 1..20: mol_type = other RNA
acttccttttctcgtttcct

SEQ ID NO: 9070 - RNA, 20 nt, synthetic construct
  misc_feature 1..20: note = C9Orf72 TTCN PAM targeting sequence
  source 1..20: mol_type = other RNA
tcttttgctttcaacttcct

SEQ ID NO: 9071 - RNA, 20 nt, synthetic construct
  misc_feature 1..20: note = C9Orf72 TTCN PAM targeting sequence
  source 1..20: mol_type = other RNA
ttcctcttttgctttcaact

SEQ ID NO: 9072 - RNA, 20 nt, synthetic construct
  misc_feature 1..20: note = C9Orf72 TTCN PAM targeting sequence
  source 1..20: mol_type = other RNA
ttctttcctcttttgctttc

SEQ ID NO: 9073 - RNA, 20 nt, synthetic construct
  misc_feature 1..20: note = C9Orf72 TTCN PAM targeting sequence
  source 1..20: mol_type = other RNA
ttccttctttcctcttttgc

SEQ ID NO: 9074 - RNA, 20 nt, synthetic construct
  misc_feature 1..20: note = C9Orf72 TTCN PAM targeting sequence
  source 1..20: mol_type = other RNA
tcccaccctcccttccttcc

SEQ ID NO: 9075 - RNA, 20 nt, synthetic construct
  misc_feature 1..20: note = C9Orf72 TTCN PAM targeting sequence
  source 1..20: mol_type = other RNA
ttcctcccaccctcccttcc

SEQ ID NO: 9076 - RNA, 20 nt, synthetic construct
  misc_feature 1..20: note = C9Orf72 TTCN PAM targeting sequence
  source 1..20: mol_type = other RNA
tcccttccttcctcccaccc

SEQ ID NO: 9077 - RNA, 20 nt, synthetic construct
  misc_feature 1..20: note = C9Orf72 TTCN PAM targeting sequence
  source 1..20: mol_type = other RNA
acatctctccctcccttcct

SEQ ID NO: 9078 - RNA, 20 nt, synthetic construct
  misc_feature 1..20: note = C9Orf72 TTCN PAM targeting sequence
  source 1..20: mol_type = other RNA
tgtataagtcactggtgatc

SEQ ID NO: 9079 - RNA, 20 nt, synthetic construct
  misc_feature 1..20: note = C9Orf72 TTCN PAM targeting sequence
  source 1..20: mol_type = other RNA
ctaataacagacatgactgc

SEQ ID NO: 9080 - RNA, 20 nt, synthetic construct
  misc_feature 1..20: note = C9Orf72 TTCN PAM targeting sequence
  source 1..20: mol_type = other RNA
tcacttttggattccctaat

SEQ ID NO: 9081 - RNA, 20 nt, synthetic construct
  misc_feature 1..20: note = C9Orf72 TTCN PAM targeting sequence
  source 1..20: mol_type = other RNA
ttctcctctgctctccccac

SEQ ID NO: 9082 - RNA, 20 nt, synthetic construct
  misc_feature 1..20: note = C9Orf72 TTCN PAM targeting sequence
  source 1..20: mol_type = other RNA
cctctgctctccccactcct

SEQ ID NO: 9083 - RNA, 20 nt, synthetic construct
  misc_feature 1..20: note = C9Orf72 TTCN PAM targeting sequence
  source 1..20: mol_type = other RNA
ctgcatctacttggatgatg

SEQ ID NO: 9084 - RNA, 20 nt, synthetic construct
  misc_feature 1..20: note = C9Orf72 TTCN PAM targeting sequence
  source 1..20: mol_type = other RNA
ttaaaatttgtctgcctttt

SEQ ID NO: 9085 - RNA, 20 nt, synthetic construct
  misc_feature 1..20: note = C9Orf72 TTCN PAM targeting sequence
  source 1..20: mol_type = other RNA
tcattccttgttttattttt

SEQ ID NO: 9086 - RNA, 20 nt, synthetic construct
  misc_feature 1..20: note = C9Orf72 TTCN PAM targeting sequence
  source 1..20: mol_type = other RNA
ttgttttatttttagaagaa

SEQ ID NO: 9087 - RNA, 20 nt, synthetic construct
  misc_feature 1..20: note = C9Orf72 TTCN PAM targeting sequence
  source 1..20: mol_type = other RNA
aaaaataaaacaaggaatga

SEQ ID NO: 9088 - RNA, 20 nt, synthetic construct
  misc_feature 1..20: note = C9Orf72 TTCN PAM targeting sequence
  source 1..20: mol_type = other RNA
tctaaaaataaaacaaggaa

SEQ ID NO: 9089 - RNA, 20 nt, synthetic construct
  misc_feature 1..20: note = C9Orf72 TTCN PAM targeting sequence
  source 1..20: mol_type = other RNA
tttttacaagtagtctagtt

SEQ ID NO: 9090 - RNA, 20 nt, synthetic construct
  misc_feature 1..20: note = C9Orf72 TTCN PAM targeting sequence
  source 1..20: mol_type = other RNA
actagactacttgtaaaaaa

SEQ ID NO: 9091 - RNA, 20 nt, synthetic construct
  misc_feature 1..20: note = C9Orf72 TTCN PAM targeting sequence
  source 1..20: mol_type = other RNA
gccgataggggtcaaggtca

SEQ ID NO: 9092 - RNA, 20 nt, synthetic construct
  misc_feature 1..20: note = C9Orf72 TTCN PAM targeting sequence
  source 1..20: mol_type = other RNA
caagagtcaatgggtcagct

SEQ ID NO: 9093 - RNA, 20 nt, synthetic construct
  misc_feature 1..20: note = C9Orf72 TTCN PAM targeting sequence
  source 1..20: mol_type = other RNA
tcaagatcaccacattatct

SEQ ID NO: 9094 - RNA, 20 nt, synthetic construct
  misc_feature 1..20: note = C9Orf72 TTCN PAM targeting sequence
  source 1..20: mol_type = other RNA
agtccaacatttattgagtg

SEQ ID NO: 9095 - RNA, 20 nt, synthetic construct
  misc_feature 1..20: note = C9Orf72 TTCN PAM targeting sequence
  source 1..20: mol_type = other RNA
ttccagtccaacatttattg

SEQ ID NO: 9096 - RNA, 20 nt, synthetic construct
  misc_feature 1..20: note = C9Orf72 TTCN PAM targeting sequence
  source 1..20: mol_type = other RNA
tcaataggggcttaattaaa

SEQ ID NO: 9097 - RNA, 20 nt, synthetic construct
  misc_feature 1..20: note = C9Orf72 TTCN PAM targeting sequence
  source 1..20: mol_type = other RNA
attgttaggctatgtcacaa

SEQ ID NO: 9098 - RNA, 20 nt, synthetic construct
  misc_feature 1..20: note = C9Orf72 TTCN PAM targeting sequence
  source 1..20: mol_type = other RNA
ttgtttttaatacctgcatt

SEQ ID NO: 9099 - RNA, 20 nt, synthetic construct
  misc_feature 1..20: note = C9Orf72 TTCN PAM targeting sequence
  source 1..20: mol_type = other RNA
atgagttgatggcttaggat

SEQ ID NO: 9100 - RNA, 20 nt, synthetic construct
  misc_feature 1..20: note = C9Orf72 TTCN PAM targeting sequence
  source 1..20: mol_type = other RNA
ttactgatatgtaatataat

SEQ ID NO: 9101 - RNA, 20 nt, synthetic construct
  misc_feature 1..20: note = C9Orf72 TTCN PAM targeting sequence
  source 1..20: mol_type = other RNA
taggaaagtatctggaagta

SEQ ID NO: 9102 - RNA, 20 nt, synthetic construct
  misc_feature 1..20: note = C9Orf72 TTCN PAM targeting sequence
  source 1..20: mol_type = other RNA
tatgaatatatacattgtag

SEQ ID NO: 9103 - RNA, 20 nt, synthetic construct
  misc_feature 1..20: note = C9Orf72 TTCN PAM targeting sequence
  source 1..20: mol_type = other RNA
agatactttcctatgaatat

SEQ ID NO: 9104 - RNA, 20 nt, synthetic construct
  misc_feature 1..20: note = C9Orf72 TTCN PAM targeting sequence
  source 1..20: mol_type = other RNA
ctaggtagaatcataacagg

SEQ ID NO: 9105 - RNA, 20 nt, synthetic construct
  misc_feature 1..20: note = C9Orf72 TTCN PAM targeting sequence
  source 1..20: mol_type = other RNA
acctagagaaccattgtcaa

SEQ ID NO: 9106 - RNA, 20 nt, synthetic construct
  misc_feature 1..20: note = C9Orf72 TTCN PAM targeting sequence
  source 1..20: mol_type = other RNA
atacttctttattttatttg

SEQ ID NO: 9107 - RNA, 20 nt, synthetic construct
  misc_feature 1..20: note = C9Orf72 TTCN PAM targeting sequence
  source 1..20: mol_type = other RNA
ttattttatttgaagacgtt

SEQ ID NO: 9108 - RNA, 20 nt, synthetic construct
  misc_feature 1..20: note = C9Orf72 TTCN PAM targeting sequence
  source 1..20: mol_type = other RNA
aataaaataaagaagtatag

SEQ ID NO: 9109 - RNA, 20 nt, synthetic construct
  misc_feature 1..20: note = C9Orf72 TTCN PAM targeting sequence
  source 1..20: mol_type = other RNA
actttattttttataataac

SEQ ID NO: 9110 - RNA, 20 nt, synthetic construct
  misc_feature 1..20: note = C9Orf72 TTCN PAM targeting sequence
  source 1..20: mol_type = other RNA
tgagtccaggacacatgggg

SEQ ID NO: 9111 - RNA, 20 nt, synthetic construct
  misc_feature 1..20: note = C9Orf72 TTCN PAM targeting sequence
  source 1..20: mol_type = other RNA
ctttctctccccaaagcaca

SEQ ID NO: 9112 - RNA, 20 nt, synthetic construct
  misc_feature 1..20: note = C9Orf72 TTCN PAM targeting sequence
  source 1..20: mol_type = other RNA
ctccccaaagcacaatgaag

SEQ ID NO: 9113 - RNA, 20 nt, synthetic construct
  misc_feature 1..20: note = C9Orf72 TTCN PAM targeting sequence
  source 1..20: mol_type = other RNA
ttgtgctttggggagagaaa

SEQ ID NO: 9114 - RNA, 20 nt, synthetic construct
  misc_feature 1..20: note = C9Orf72 TTCN PAM targeting sequence
  source 1..20: mol_type = other RNA
agatcttcattgtgctttgg

SEQ ID NO: 9115 - RNA, 20 nt, synthetic construct
  misc_feature 1..20: note = C9Orf72 TTCN PAM targeting sequence
  source 1..20: mol_type = other RNA
ctctctctgtgtgcccttca

SEQ ID NO: 9116 - RNA, 20 nt, synthetic construct
  misc_feature 1..20: note = C9Orf72 TTCN PAM targeting sequence
  source 1..20: mol_type = other RNA
tttggtgtccaacaaagcct

SEQ ID NO: 9117 - RNA, 20 nt, synthetic construct
  misc_feature 1..20: note = C9Orf72 TTCN PAM targeting sequence
  source 1..20: mol_type = other RNA
aagacagctctgtattttaa

SEQ ID NO: 9118 - RNA, 20 nt, synthetic construct
  misc_feature 1..20: note = C9Orf72 TTCN PAM targeting sequence
  source 1..20: mol_type = other RNA
acctctggatgaaatatgtg

SEQ ID NO: 9119 - RNA, 20 nt, synthetic construct
  misc_feature 1..20: note = C9Orf72 TTCN PAM targeting sequence
  source 1..20: mol_type = other RNA
tccagaggttgaatttggcc

SEQ ID NO: 9120 - RNA, 20 nt, synthetic construct
  misc_feature 1..20: note = C9Orf72 TTCN PAM targeting sequence
  source 1..20: mol_type = other RNA
tgtggcattgtcagaagtgg

SEQ ID NO: 9121 - RNA, 20 nt, synthetic construct
  misc_feature 1..20: note = C9Orf72 TTCN PAM targeting sequence
  source 1..20: mol_type = other RNA
gacaatgccacaagaatcac

SEQ ID NO: 9122 - RNA, 20 nt, synthetic construct
  misc_feature 1..20: note = C9Orf72 TTCN PAM targeting sequence
  source 1..20: mol_type = other RNA
ctcctcctaaatgtggtgtg

SEQ ID NO: 9123 - RNA, 20 nt, synthetic construct
  misc_feature 1..20: note = C9Orf72 TTCN PAM targeting sequence
  source 1..20: mol_type = other RNA
gtatcactgcctcaatcatg

SEQ ID NO: 9124 - RNA, 20 nt, synthetic construct
  misc_feature 1..20: note = C9Orf72 TTCN PAM targeting sequence
  source 1..20: mol_type = other RNA
ccaagacaaggcaagaggag

SEQ ID NO: 9125 - RNA, 20 nt, synthetic construct
  misc_feature 1..20: note = C9Orf72 TTCN PAM targeting sequence
  source 1..20: mol_type = other RNA
ggccctagcgccttgctcca

SEQ ID NO: 9126 - RNA, 20 nt, synthetic construct
  misc_feature 1..20: note = C9Orf72 TTCN PAM targeting sequence
  source 1..20: mol_type = other RNA
agcaagctccacttcaaggg

SEQ ID NO: 9127 - RNA, 20 nt, synthetic construct
  misc_feature 1..20: note = C9Orf72 TTCN PAM targeting sequence
  source 1..20: mol_type = other RNA
aggggcccaccctccagggc

SEQ ID NO: 9128 - RNA, 20 nt, synthetic construct
  misc_feature 1..20: note = C9Orf72 TTCN PAM targeting sequence
  source 1..20: mol_type = other RNA
aagcatcaccaaccagaggg

SEQ ID NO: 9129 - RNA, 20 nt, synthetic construct
  misc_feature 1..20: note = C9Orf72 TTCN PAM targeting sequence
  source 1..20: mol_type = other RNA
tctctgagaatttatacatg

SEQ ID NO: 9130 - RNA, 20 nt, synthetic construct
  misc_feature 1..20: note = C9Orf72 TTCN PAM targeting sequence
  source 1..20: mol_type = other RNA
ctgagaatttatacatggac

SEQ ID NO: 9131 - RNA, 20 nt, synthetic construct
  misc_feature 1..20: note = C9Orf72 TTCN PAM targeting sequence
  source 1..20: mol_type = other RNA
cagagaagaagccctctggt

SEQ ID NO: 9132 - RNA, 20 nt, synthetic construct
  misc_feature 1..20: note = C9Orf72 TTCN PAM targeting sequence
  source 1..20: mol_type = other RNA
ctgcagccatccccttttca

SEQ ID NO: 9133 - RNA, 20 nt, synthetic construct
  misc_feature 1..20: note = C9Orf72 TTCN PAM targeting sequence
  source 1..20: mol_type = other RNA
cctctctcagttacggatga

SEQ ID NO: 9134 - RNA, 20 nt, synthetic construct
  misc_feature 1..20: note = C9Orf72 TTCN PAM targeting sequence
  source 1..20: mol_type = other RNA
tccgtaactgagagaggtga

SEQ ID NO: 9135 - RNA, 20 nt, synthetic construct
  misc_feature 1..20: note = C9Orf72 TTCN PAM targeting sequence
  source 1..20: mol_type = other RNA
cattttacagataagttcat

SEQ ID NO: 9136 - RNA, 20 nt, synthetic construct
  misc_feature 1..20: note = C9Orf72 TTCN PAM targeting sequence
  source 1..20: mol_type = other RNA
ttttcccattttacagataa

SEQ ID NO: 9137 - RNA, 20 nt, synthetic construct
  misc_feature 1..20: note = C9Orf72 TTCN PAM targeting sequence
  source 1..20: mol_type = other RNA
cttgtcgtttctttttccca

SEQ ID NO: 9138 - RNA, 20 nt, synthetic construct
  misc_feature 1..20: note = C9Orf72 TTCN PAM targeting sequence
  source 1..20: mol_type = other RNA
ctcagctgtgcttctcttgt

SEQ ID NO: 9139 - RNA, 20 nt, synthetic construct
  misc_feature 1..20: note = C9Orf72 TTCN PAM targeting sequence
  source 1..20: mol_type = other RNA
tttggtgtttctctcagctg

SEQ ID NO: 9140 - RNA, 20 nt, synthetic construct
  misc_feature 1..20: note = C9Orf72 TTCN PAM targeting sequence
  source 1..20: mol_type = other RNA
actctttcttttggtgtttc

SEQ ID NO: 9141 - RNA, 20 nt, synthetic construct
  misc_feature 1..20: note = C9Orf72 TTCN PAM targeting sequence
  source 1..20: mol_type = other RNA
aacaatgtcttcaactcttt

SEQ ID NO: 9142 - RNA, 20 nt, synthetic construct
  misc_feature 1..20: note = C9Orf72 TTCN PAM targeting sequence
  source 1..20: mol_type = other RNA
tgcatccagtagtgcccaaa

SEQ ID NO: 9143 - RNA, 20 nt, synthetic construct
  misc_feature 1..20: note = C9Orf72 TTCN PAM targeting sequence
  source 1..20: mol_type = other RNA
agggttggcactggctttgg

SEQ ID NO: 9144 - RNA, 20 nt, synthetic construct
  misc_feature 1..20: note = C9Orf72 TTCN PAM targeting sequence
  source 1..20: mol_type = other RNA
tagctacaagagccaatgaa

SEQ ID NO: 9145 - RNA, 20 nt, synthetic construct
  misc_feature 1..20: note = C9Orf72 TTCN PAM targeting sequence
  source 1..20: mol_type = other RNA
ttggctcttgtagctaggaa

SEQ ID NO: 9146 - RNA, 20 nt, synthetic construct
  misc_feature 1..20: note = C9Orf72 TTCN PAM targeting sequence
  source 1..20: mol_type = other RNA
gtggcaagtgacaggagccc

SEQ ID NO: 9147 - RNA, 20 nt, synthetic construct
  misc_feature 1..20: note = C9Orf72 TTCN PAM targeting sequence
  source 1..20: mol_type = other RNA
cctagtttctgtggcaagtg

SEQ ID NO: 9148 - RNA, 20 nt, synthetic construct
  misc_feature 1..20: note = C9Orf72 TTCN PAM targeting sequence
  source 1..20: mol_type = other RNA
ttggctctcgtgctttattg

SEQ ID NO: 9149 - RNA, 20 nt, synthetic construct
  misc_feature 1..20: note = C9Orf72 TTCN PAM targeting sequence
  source 1..20: mol_type = other RNA
ttacatttcttagagagcca

SEQ ID NO: 9150 - RNA, 20 nt, synthetic construct
  misc_feature 1..20: note = C9Orf72 TTCN PAM targeting sequence
  source 1..20: mol_type = other RNA
tagagagccaagcaaaattt

SEQ ID NO: 9151 - RNA, 20 nt, synthetic construct
  misc_feature 1..20: note = C9Orf72 TTCN PAM targeting sequence
  source 1..20: mol_type = other RNA
ggcaactggggctaaatttt

SEQ ID NO: 9152 - RNA, 20 nt, synthetic construct
  misc_feature 1..20: note = C9Orf72 TTCN PAM targeting sequence
  source 1..20: mol_type = other RNA
ttattaataataatatatat

SEQ ID NO: 9153 - RNA, 20 nt, synthetic construct
  misc_feature 1..20: note = C9Orf72 TTCN PAM targeting sequence
  source 1..20: mol_type = other RNA
gagctgcctacaggttattg

SEQ ID NO: 9154 - RNA, 20 nt, synthetic construct
  misc_feature 1..20: note = C9Orf72 TTCN PAM targeting sequence
  source 1..20: mol_type = other RNA
ctgccctccacgttgtgtgt

SEQ ID NO: 9155 - RNA, 20 nt, synthetic construct
  misc_feature 1..20: note = C9Orf72 TTCN PAM targeting sequence
  source 1..20: mol_type = other RNA
catacattagttcatctatt

SEQ ID NO: 9156 - RNA, 20 nt, synthetic construct
  misc_feature 1..20: note = C9Orf72 TTCN PAM targeting sequence
  source 1..20: mol_type = other RNA
tctattcctcccgaagatct

SEQ ID NO: 9157 - RNA, 20 nt, synthetic construct
  misc_feature 1..20: note = C9Orf72 TTCN PAM targeting sequence
  source 1..20: mol_type = other RNA
tcccgaagatcttggatggt

SEQ ID NO: 9158 - RNA, 20 nt, synthetic construct
  misc_feature 1..20: note = C9Orf72 TTCN PAM targeting sequence
  source 1..20: mol_type = other RNA
ggaggaatagatgaactaat

SEQ ID NO: 9159 - RNA, 20 nt, synthetic construct
  misc_feature 1..20: note = C9Orf72 TTCN PAM targeting sequence
  source 1..20: mol_type = other RNA
ttttggagattaggaaactt

SEQ ID NO: 9160 - RNA, 20 nt, synthetic construct
  misc_feature 1..20: note = C9Orf72 TTCN PAM targeting sequence
  source 1..20: mol_type = other RNA
taatctccaaaatgaaggta

SEQ ID NO: 9161 - RNA, 20 nt, synthetic construct
  misc_feature 1..20: note = C9Orf72 TTCN PAM targeting sequence
  source 1..20: mol_type = other RNA
tacagagcttcttcggtgct

SEQ ID NO: 9162 - RNA, 20 nt, synthetic construct
  misc_feature 1..20: note = C9Orf72 TTCN PAM targeting sequence
  source 1..20: mol_type = other RNA
tcggtgctctcaatcatgac

SEQ ID NO: 9163 - RNA, 20 nt, synthetic construct
  misc_feature 1..20: note = C9Orf72 TTCN PAM targeting sequence
  source 1..20: mol_type = other RNA
gtgctctcaatcatgactgt

SEQ ID NO: 9164 - RNA, 20 nt, synthetic construct
  misc_feature 1..20: note = C9Orf72 TTCN PAM targeting sequence
  source 1..20: mol_type = other RNA
cttgcatccatcccctctgt

SEQ ID NO: 9165 - RNA, 20 nt, synthetic construct
  misc_feature 1..20: note = C9Orf72 TTCN PAM targeting sequence
  source 1..20: mol_type = other RNA
tacagaggggatggatgcaa

SEQ ID NO: 9166 - RNA, 20 nt, synthetic construct
  misc_feature 1..20: note = C9Orf72 TTCN PAM targeting sequence
  source 1..20: mol_type = other RNA
gtgcacttatgatgtggcct

SEQ ID NO: 9167 - RNA, 20 nt, synthetic construct
  misc_feature 1..20: note = C9Orf72 TTCN PAM targeting sequence
  source 1..20: mol_type = other RNA
cagatctcaagcacgcagca

SEQ ID NO: 9168 - RNA, 20 nt, synthetic construct
  misc_feature 1..20: note = C9Orf72 TTCN PAM targeting sequence
  source 1..20: mol_type = other RNA
ctatctgccccgggacggtt

SEQ ID NO: 9169 - RNA, 20 nt, synthetic construct
  misc_feature 1..20: note = C9Orf72 TTCN PAM targeting sequence
  source 1..20: mol_type = other RNA
acagatgcaggagcttgctc

SEQ ID NO: 9170 - RNA, 20 nt, synthetic construct
  misc_feature 1..20: note = C9Orf72 TTCN PAM targeting sequence
  source 1..20: mol_type = other RNA
cctaggctgagcaagctcct

SEQ ID NO: 9171 - RNA, 20 nt, synthetic construct
  misc_feature 1..20: note = C9Orf72 TTCN PAM targeting sequence
  source 1..20: mol_type = other RNA
catggacaaccaatggagca

SEQ ID NO: 9172 - RNA, 20 nt, synthetic construct
  misc_feature 1..20: note = C9Orf72 TTCN PAM targeting sequence
  source 1..20: mol_type = other RNA
ttggctctcatgctccattg

SEQ ID NO: 9173 - RNA, 20 nt, synthetic construct
  misc_feature 1..20: note = C9Orf72 TTCN PAM targeting sequence
  source 1..20: mol_type = other RNA
ttacatttcttagagagcca

SEQ ID NO: 9174 - RNA, 20 nt, synthetic construct
  misc_feature 1..20: note = C9Orf72 TTCN PAM targeting sequence
  source 1..20: mol_type = other RNA
tagagagccaagcaaaattt

SEQ ID NO: 9175 - RNA, 20 nt, synthetic construct
  misc_feature 1..20: note = C9Orf72 TTCN PAM targeting sequence
  source 1..20: mol_type = other RNA
tgcaactggggctaaatttt

SEQ ID NO: 9176 - RNA, 20 nt, synthetic construct
  misc_feature 1..20: note = C9Orf72 TTCN PAM targeting sequence
  source 1..20: mol_type = other RNA
tccttatattgacttttcct

SEQ ID NO: 9177 - RNA, 20 nt, synthetic construct
  misc_feature 1..20: note = C9Orf72 TTCN PAM targeting sequence
  source 1..20: mol_type = other RNA
tccttcgtgttgcaggctga

SEQ ID NO: 9178 - RNA, 20 nt, synthetic construct
  misc_feature 1..20: note = C9Orf72 TTCN PAM targeting sequence
  source 1..20: mol_type = other RNA
tgttgcaggctgactgatct

SEQ ID NO: 9179 - RNA, 20 nt, synthetic construct
  misc_feature 1..20: note = C9Orf72 TTCN PAM targeting sequence
  source 1..20: mol_type = other RNA
cacttcctggaatcacctcc

SEQ ID NO: 9180 - RNA, 20 nt, synthetic construct
  misc_feature 1..20: note = C9Orf72 TTCN PAM targeting sequence
  source 1..20: mol_type = other RNA
tggaatcacctcccaaacaa

SEQ ID NO: 9181 - RNA, 20 nt, synthetic construct
  misc_feature 1..20: note = C9Orf72 TTCN PAM targeting sequence
  source 1..20: mol_type = other RNA
aggaagtgggaatgagagat

SEQ ID NO: 9182 - RNA, 20 nt, synthetic construct
  misc_feature 1..20: note = C9Orf72 TTCN PAM targeting sequence
  source 1..20: mol_type = other RNA
aaactggaaatgaagaccat

SEQ ID NO: 9183 - RNA, 20 nt, synthetic construct
  misc_feature 1..20: note = C9Orf72 TTCN PAM targeting sequence
  source 1..20: mol_type = other RNA
agtttggaatcccacactat

SEQ ID NO: 9184 - RNA, 20 nt, synthetic construct
  misc_feature 1..20: note = C9Orf72 TTCN PAM targeting sequence
  source 1..20: mol_type = other RNA
tttccagtttggaatcccac

SEQ ID NO: 9185 - RNA, 20 nt, synthetic construct
  misc_feature 1..20: note = C9Orf72 TTCN PAM targeting sequence
  source 1..20: mol_type = other RNA
ctagtcagtacacaagatgg

SEQ ID NO: 9186 - RNA, 20 nt, synthetic construct
  misc_feature 1..20: note = C9Orf72 TTCN PAM targeting sequence
  source 1..20: mol_type = other RNA
ttcactagtcagtacacaag

SEQ ID NO: 9187 - RNA, 20 nt, synthetic construct
  misc_feature 1..20: note = C9Orf72 TTCN PAM targeting sequence
  source 1..20: mol_type = other RNA
caacaataacgttttccttc

SEQ ID NO: 9188 - RNA, 20 nt, synthetic construct
  misc_feature 1..20: note = C9Orf72 TTCN PAM targeting sequence
  source 1..20: mol_type = other RNA
aagctaggaactatattaag

SEQ ID NO: 9189 - RNA, 20 nt, synthetic construct
  misc_feature 1..20: note = C9Orf72 TTCN PAM targeting sequence
  source 1..20: mol_type = other RNA
tagcttggaattgctcttgc

SEQ ID NO: 9190 - RNA, 20 nt, synthetic construct
  misc_feature 1..20: note = C9Orf72 TTCN PAM targeting sequence
  source 1..20: mol_type = other RNA
taatatagttcctagcttgg

SEQ ID NO: 9191 - RNA, 20 nt, synthetic construct
  misc_feature 1..20: note = C9Orf72 TTCN PAM targeting sequence
  source 1..20: mol_type = other RNA
atgtaagagactatttctta

SEQ ID NO: 9192 - RNA, 20 nt, synthetic construct
  misc_feature 1..20: note = C9Orf72 TTCN PAM targeting sequence
  source 1..20: mol_type = other RNA
caaagggggttctatgtaag

SEQ ID NO: 9193 - RNA, 20 nt, synthetic construct
  misc_feature 1..20: note = C9Orf72 TTCN PAM targeting sequence
  source 1..20: mol_type = other RNA
aggcatgtttaagttataga

SEQ ID NO: 9194 - RNA, 20 nt, synthetic construct
  misc_feature 1..20: note = C9Orf72 TTCN PAM targeting sequence
  source 1..20: mol_type = other RNA
ttccaggcatgtttaagtta

SEQ ID NO: 9195 - RNA, 20 nt, synthetic construct
  misc_feature 1..20: note = C9Orf72 TTCN PAM targeting sequence
  source 1..20: mol_type = other RNA
atatatcatattattatatt

SEQ ID NO: 9196 - RNA, 20 nt, synthetic construct
  misc_feature 1..20: note = C9Orf72 TTCN PAM targeting sequence
  source 1..20: mol_type = other RNA
tctcttctgagtaaattttc

SEQ ID NO: 9197 - RNA, 20 nt, synthetic construct
  misc_feature 1..20: note = C9Orf72 TTCN PAM targeting sequence
  source 1..20: mol_type = other RNA
cttctgagtaaattttcaat

SEQ ID NO: 9198 - RNA, 20 nt, synthetic construct
  misc_feature 1..20: note = C9Orf72 TTCN PAM targeting sequence
  source 1..20: mol_type = other RNA
gagtaaattttcaatggaca

SEQ ID NO: 9199 - RNA, 20 nt, synthetic construct
  misc_feature 1..20: note = C9Orf72 TTCN PAM targeting sequence
  source 1..20: mol_type = other RNA
atggacattccccagatgtt

SEQ ID NO: 9200 - RNA, 20 nt, synthetic construct
  misc_feature 1..20: note = C9Orf72 TTCN PAM targeting sequence
  source 1..20: mol_type = other RNA
ccagatgttcctcacttctc

SEQ ID NO: 9201 - RNA, 20 nt, synthetic construct
  misc_feature 1..20: note = C9Orf72 TTCN PAM targeting sequence
  source 1..20: mol_type = other RNA
tcacttctcttatctatcag

SEQ ID NO: 9202 - RNA, 20 nt, synthetic construct
  misc_feature 1..20: note = C9Orf72 TTCN PAM targeting sequence
  source 1..20: mol_type = other RNA
cttatctatcagtcttgatc

SEQ ID NO: 9203 - RNA, 20 nt, synthetic construct
  misc_feature 1..20: note = C9Orf72 TTCN PAM targeting sequence
  source 1..20: mol_type = other RNA
ccagggggcagatcaagact

SEQ ID NO: 9204 - RNA, 20 nt, synthetic construct
  misc_feature 1..20: note = C9Orf72 TTCN PAM targeting sequence
  source 1..20: mol_type = other RNA
tgtcactgcagttaataacc

SEQ ID NO: 9205 - RNA, 20 nt, synthetic construct
  misc_feature 1..20: note = C9Orf72 TTCN PAM targeting sequence
  source 1..20: mol_type = other RNA
gtgactcaaattaggtagaa

SEQ ID NO: 9206 - RNA, 20 nt, synthetic construct
  misc_feature 1..20: note = C9Orf72 TTCN PAM targeting sequence
  source 1..20: mol_type = other RNA
acctaatttgagtcacagaa

SEQ ID NO: 9207 - RNA, 20 nt, synthetic construct
  misc_feature 1..20: note = C9Orf72 TTCN PAM targeting sequence
  source 1..20: mol_type = other RNA
ccacttggaaggcagcacag

SEQ ID NO: 9208 - RNA, 20 nt, synthetic construct
  misc_feature 1..20: note = C9Orf72 TTCN PAM targeting sequence
  source 1..20: mol_type = other RNA
aagtggagaatgatggctaa

SEQ ID NO: 9209 - RNA, 20 nt, synthetic construct
  misc_feature 1..20: note = C9Orf72 TTCN PAM targeting sequence
  source 1..20: mol_type = other RNA
gagtatggtgtgggcaacaa

SEQ ID NO: 9210 - RNA, 20 nt, synthetic construct
  misc_feature 1..20: note = C9Orf72 TTCN PAM targeting sequence
  source 1..20: mol_type = other RNA
tttgttgcccacaccatact

SEQ ID NO: 9211 - RNA, 20 nt, synthetic construct
  misc_feature 1..20: note = C9Orf72 TTCN PAM targeting sequence
  source 1..20: mol_type = other RNA
agtcatctgggtcacttggt

SEQ ID NO: 9212 - RNA, 20 nt, synthetic construct
  misc_feature 1..20: note = C9Orf72 TTCN PAM targeting sequence
  source 1..20: mol_type = other RNA
acagcaaaacctgggtgaca

SEQ ID NO: 9213 - RNA, 20 nt, synthetic construct
  misc_feature 1..20: note = C9Orf72 TTCN PAM targeting sequence
  source 1..20: mol_type = other RNA
ggatgtgtctgtgaagatgt

SEQ ID NO: 9214 - RNA, 20 nt, synthetic construct
  misc_feature 1..20: note = C9Orf72 TTCN PAM targeting sequence
  source 1..20: mol_type = other RNA
cagacacatccagaaataat

SEQ ID NO: 9215 - RNA, 20 nt, synthetic construct
  misc_feature 1..20: note = C9Orf72 TTCN PAM targeting sequence
  source 1..20: mol_type = other RNA
ggaagaaattagcagactga

SEQ ID NO: 9216 - RNA, 20 nt, synthetic construct
  misc_feature 1..20: note = C9Orf72 TTCN PAM targeting sequence
  source 1..20: mol_type = other RNA
agaaacatcttcacagacac

SEQ ID NO: 9217 - RNA, 20 nt, synthetic construct
  misc_feature 1..20: note = C9Orf72 TTCN PAM targeting sequence
  source 1..20: mol_type = other RNA
tccagaaacatcttcacaga

SEQ ID NO: 9218 - RNA, 20 nt, synthetic construct
  misc_feature 1..20: note = C9Orf72 TTCN PAM targeting sequence
  source 1..20: mol_type = other RNA
atactcagtctgctaatttc

SEQ ID NO: 9219 - RNA, 20 nt, synthetic construct
  misc_feature 1..20: note = C9Orf72 TTCN PAM targeting sequence
  source 1..20: mol_type = other RNA
gcctttttgtcctctctggg

SEQ ID NO: 9220 - RNA, 20 nt, synthetic construct
  misc_feature 1..20: note = C9Orf72 TTCN PAM targeting sequence
  source 1..20: mol_type = other RNA
tctgcctttttgtcctctct

SEQ ID NO: 9221 - RNA, 20 nt, synthetic construct
  misc_feature 1..20: note = C9Orf72 TTCN PAM targeting sequence
  source 1..20: mol_type = other RNA
cttttcttctgcctttttgt

SEQ ID NO: 9222 - RNA, 20 nt, synthetic construct
  misc_feature 1..20: note = C9Orf72 TTCN PAM targeting sequence
  source 1..20: mol_type = other RNA
ggtgctgaaacatccacctt

SEQ ID NO: 9223 - RNA, 20 nt, synthetic construct
  misc_feature 1..20: note = C9Orf72 TTCN PAM targeting sequence
  source 1..20: mol_type = other RNA
gcaccagaagagagagcaaa

SEQ ID NO: 9224 - RNA, 20 nt, synthetic construct
  misc_feature 1..20: note = C9Orf72 TTCN PAM targeting sequence
  source 1..20: mol_type = other RNA
ggctggcctttgaacttcag

SEQ ID NO: 9225 - RNA, 20 nt, synthetic construct
  misc_feature 1..20: note = C9Orf72 TTCN PAM targeting sequence
  source 1..20: mol_type = other RNA
aaggccagccagaaggtgga

SEQ ID NO: 9226 - RNA, 20 nt, synthetic construct
  misc_feature 1..20: note = C9Orf72 TTCN PAM targeting sequence
  source 1..20: mol_type = other RNA
ggacttatcctaccctagca

SEQ ID NO: 9227 - RNA, 20 nt, synthetic construct
  misc_feature 1..20: note = C9Orf72 TTCN PAM targeting sequence
  source 1..20: mol_type = other RNA
cccatcccatttctcaggcc

SEQ ID NO: 9228 - RNA, 20 nt, synthetic construct
  misc_feature 1..20: note = C9Orf72 TTCN PAM targeting sequence
  source 1..20: mol_type = other RNA
caggccttcaggcttgggct

SEQ ID NO: 9229 - RNA, 20 nt, synthetic construct
  misc_feature 1..20: note = C9Orf72 TTCN PAM targeting sequence
  source 1..20: mol_type = other RNA
ggcttgggctgaattatacc

SEQ ID NO: 9230 - RNA, 20 nt, synthetic construct
  misc_feature 1..20: note = C9Orf72 TTCN PAM targeting sequence
  source 1..20: mol_type = other RNA
gcccaagcctgaaggcctga

SEQ ID NO: 9231 - RNA, 20 nt, synthetic construct
  misc_feature 1..20: note = C9Orf72 TTCN PAM targeting sequence
  source 1..20: mol_type = other RNA
ccagctcaaaaacagcagac

SEQ ID NO: 9232 - RNA, 20 nt, synthetic construct
  misc_feature 1..20: note = C9Orf72 TTCN PAM targeting sequence
  source 1..20: mol_type = other RNA
ataatcatgtaagccaattc

SEQ ID NO: 9233 - RNA, 20 nt, synthetic construct
  misc_feature 1..20: note = C9Orf72 TTCN PAM targeting sequence
  source 1..20: mol_type = other RNA
cataatgaataccactcccc

SEQ ID NO: 9234 - RNA, 20 nt, synthetic construct
  misc_feature 1..20: note = C9Orf72 TTCN PAM targeting sequence
  source 1..20: mol_type = other RNA
ttatgggaattggcttacat

SEQ ID NO: 9235 - RNA, 20 nt, synthetic construct
  misc_feature 1..20: note = C9Orf72 TTCN PAM targeting sequence
  source 1..20: mol_type = other RNA
cttgagaaccatgattaatg

SEQ ID NO: 9236 - RNA, 20 nt, synthetic construct
  misc_feature 1..20: note = C9Orf72 TTCN PAM targeting sequence
  source 1..20: mol_type = other RNA
caagagaaacagagtggggg

SEQ ID NO: 9237 - RNA, 20 nt, synthetic construct
  misc_feature 1..20: note = C9Orf72 TTCN PAM targeting sequence
  source 1..20: mol_type = other RNA
cacccccatcaagatgtgca

SEQ ID NO: 9238 - RNA, 20 nt, synthetic construct
  misc_feature 1..20: note = C9Orf72 TTCN PAM targeting sequence
  source 1..20: mol_type = other RNA
agatagtggcgctctgcagg

SEQ ID NO: 9239 - RNA, 20 nt, synthetic construct
  misc_feature 1..20: note = C9Orf72 TTCN PAM targeting sequence
  source 1..20: mol_type = other RNA
ctctgccacagtggccacta

SEQ ID NO: 9240 - RNA, 20 nt, synthetic construct
  misc_feature 1..20: note = C9Orf72 TTCN PAM targeting sequence
  source 1..20: mol_type = other RNA
atctgaaagtgataaacgct

SEQ ID NO: 9241 - RNA, 20 nt, synthetic construct
  misc_feature 1..20: note = C9Orf72 TTCN PAM targeting sequence
  source 1..20: mol_type = other RNA
gatggaaggctttgcatgag

SEQ ID NO: 9242 - RNA, 20 nt, synthetic construct
  misc_feature 1..20: note = C9Orf72 TTCN PAM targeting sequence
  source 1..20: mol_type = other RNA
tgtttcattggccaaagaga

SEQ ID NO: 9243 - RNA, 20 nt, synthetic construct
  misc_feature 1..20: note = C9Orf72 TTCN PAM targeting sequence
  source 1..20: mol_type = other RNA
ttggccaaagagagtcatgt

SEQ ID NO: 9244 - RNA, 20 nt, synthetic construct
  misc_feature 1..20: note = C9Orf72 TTCN PAM targeting sequence
  source 1..20: mol_type = other RNA
ctgaaagggaaagggcaatc

SEQ ID NO: 9245 - RNA, 20 nt, synthetic construct
  misc_feature 1..20: note = C9Orf72 TTCN PAM targeting sequence
  source 1..20: mol_type = other RNA
gtgaaacttgtgcatgacca

SEQ ID NO: 9246 - RNA, 20 nt, synthetic construct
  misc_feature 1..20: note = C9Orf72 TTCN PAM targeting sequence
  source 1..20: mol_type = other RNA
ctttcagtgaaacttgtgca

SEQ ID NO: 9247 - RNA, 20 nt, synthetic construct
  misc_feature 1..20: note = C9Orf72 TTCN PAM targeting sequence
  source 1..20: mol_type = other RNA
tatctgcaaggcagattgcc

SEQ ID NO: 9248 - RNA, 20 nt, synthetic construct
  misc_feature 1..20: note = C9Orf72 TTCN PAM targeting sequence
  source 1..20: mol_type = other RNA
cctttcttatctgcaaggca

SEQ ID NO: 9249 - RNA, 20 nt, synthetic construct
  misc_feature 1..20: note = C9Orf72 TTCN PAM targeting sequence
  source 1..20: mol_type = other RNA
aaatctccccctttttttct

SEQ ID NO: 9250 - RNA, 20 nt, synthetic construct
  misc_feature 1..20: note = C9Orf72 TTCN PAM targeting sequence
  source 1..20: mol_type = other RNA
gtgttctcatcatgtactga

SEQ ID NO: 9251 - RNA, 20 nt, synthetic construct
  misc_feature 1..20: note = C9Orf72 TTCN PAM targeting sequence
  source 1..20: mol_type = other RNA
catcatgtactgaggggata

SEQ ID NO: 9252 - RNA, 20 nt, synthetic construct
  misc_feature 1..20: note = C9Orf72 TTCN PAM targeting sequence
  source 1..20: mol_type = other RNA
catttaaccctcataataac

SEQ ID NO: 9253 - RNA, 20 nt, synthetic construct
  misc_feature 1..20: note = C9Orf72 TTCN PAM targeting sequence
  source 1..20: mol_type = other RNA
ggtaaacaaaggatcactgt

SEQ ID NO: 9254 - RNA, 20 nt, synthetic construct
  misc_feature 1..20: note = C9Orf72 TTCN PAM targeting sequence
  source 1..20: mol_type = other RNA
tacatctctgggagtaaaaa

SEQ ID NO: 9255 - RNA, 20 nt, synthetic construct
  misc_feature 1..20: note = C9Orf72 TTCN PAM targeting sequence
  source 1..20: mol_type = other RNA
agagttttttactcccagag

SEQ ID NO: 9256 - RNA, 20 nt, synthetic construct
  misc_feature 1..20: note = C9Orf72 TTCN PAM targeting sequence
  source 1..20: mol_type = other RNA
ggaggttgcattttctagtc

SEQ ID NO: 9257 - RNA, 20 nt, synthetic construct
  misc_feature 1..20: note = C9Orf72 TTCN PAM targeting sequence
  source 1..20: mol_type = other RNA
agtctttaaaaatgagtcca

SEQ ID NO: 9258 - RNA, 20 nt, synthetic construct
  misc_feature 1..20: note = C9Orf72 TTCN PAM targeting sequence
  source 1..20: mol_type = other RNA
ctgaatttctccaaattctg

SEQ ID NO: 9259 - RNA, 20 nt, synthetic construct
  misc_feature 1..20: note = C9Orf72 TTCN PAM targeting sequence
  source 1..20: mol_type = other RNA
gggaaaaggcactggactca

SEQ ID NO: 9260 - RNA, 20 nt, synthetic construct
  misc_feature 1..20: note = C9Orf72 TTCN PAM targeting sequence
  source 1..20: mol_type = other RNA
ccaaattctgaccattctaa

SEQ ID NO: 9261 - RNA, 20 nt, synthetic construct
  misc_feature 1..20: note = C9Orf72 TTCN PAM targeting sequence
  source 1..20: mol_type = other RNA
gaccattctaagatatgggt

SEQ ID NO: 9262 - RNA, 20 nt, synthetic construct
  misc_feature 1..20: note = C9Orf72 TTCN PAM targeting sequence
  source 1..20: mol_type = other RNA
aagatatgggttctagctca

SEQ ID NO: 9263 - RNA, 20 nt, synthetic construct
  misc_feature 1..20: note = C9Orf72 TTCN PAM targeting sequence
  source 1..20: mol_type = other RNA
agctcagtgctcctcacaca

SEQ ID NO: 9264 - RNA, 20 nt, synthetic construct
  misc_feature 1..20: note = C9Orf72 TTCN PAM targeting sequence
  source 1..20: mol_type = other RNA
gtgtgaggagcactgagcta

SEQ ID NO: 9265 - RNA, 20 nt, synthetic construct
  misc_feature 1..20: note = C9Orf72 TTCN PAM targeting sequence
  source 1..20: mol_type = other RNA
agtaaggaatgagaaaatac

SEQ ID NO: 9266 - RNA, 20 nt, synthetic construct
  misc_feature 1..20: note = C9Orf72 TTCN PAM targeting sequence
  source 1..20: mol_type = other RNA
ttactagaacctttctgtgt

SEQ ID NO: 9267 - RNA, 20 nt, synthetic construct
  misc_feature 1..20: note = C9Orf72 TTCN PAM targeting sequence
  source 1..20: mol_type = other RNA
cattccttactagaaccttt

SEQ ID NO: 9268 - RNA, 20 nt, synthetic construct
  misc_feature 1..20: note = C9Orf72 TTCN PAM targeting sequence
  source 1..20: mol_type = other RNA
gctttaaagaagagctacgc

SEQ ID NO: 9269 - RNA, 20 nt, synthetic construct
  misc_feature 1..20: note = C9Orf72 TTCN PAM targeting sequence
  source 1..20: mol_type = other RNA
ttaaagcagaaagtattttc

SEQ ID NO: 9270 - RNA, 20 nt, synthetic construct
  misc_feature 1..20: note = C9Orf72 TTCN PAM targeting sequence
  source 1..20: mol_type = other RNA
catttaatatttgcgtagct

SEQ ID NO: 9271 - RNA, 20 nt, synthetic construct
  misc_feature 1..20: note = C9Orf72 TTCN PAM targeting sequence
  source 1..20: mol_type = other RNA
ccataaataatagatataat

SEQ ID NO: 9272 - RNA, 20 nt, synthetic construct
  misc_feature 1..20: note = C9Orf72 TTCN PAM targeting sequence
  source 1..20: mol_type = other RNA
agtactcagaaaaactcagc

SEQ ID NO: 9273 - RNA, 20 nt, synthetic construct
  misc_feature 1..20: note = C9Orf72 TTCN PAM targeting sequence
  source 1..20: mol_type = other RNA
gagtactagaataatattcg

SEQ ID NO: 9274 - RNA, 20 nt, synthetic construct
  misc_feature 1..20: note = C9Orf72 TTCN PAM targeting sequence
  source 1..20: mol_type = other RNA
ttagaacagtatgggccaca

SEQ ID NO: 9275 - RNA, 20 nt, synthetic construct
  misc_feature 1..20: note = C9Orf72 TTCN PAM targeting sequence
  source 1..20: mol_type = other RNA
aatgaacttatgctgagttt

SEQ ID NO: 9276 - RNA, 20 nt, synthetic construct
  misc_feature 1..20: note = C9Orf72 TTCN PAM targeting sequence
  source 1..20: mol_type = other RNA
aatgtggcccatactgttct

SEQ ID NO: 9277 - RNA, 20 nt, synthetic construct
  misc_feature 1..20: note = C9Orf72 TTCN PAM targeting sequence
  source 1..20: mol_type = other RNA
ttctaatgtggcccatactg

SEQ ID NO: 9278 - RNA, 20 nt, synthetic construct
  misc_feature 1..20: note = C9Orf72 TTCN PAM targeting sequence
  source 1..20: mol_type = other RNA
aacataatgataatatgttc

SEQ ID NO: 9279 - RNA, 20 nt, synthetic construct
  misc_feature 1..20: note = C9Orf72 TTCN PAM targeting sequence
  source 1..20: mol_type = other RNA
atggaaccatcatcttgtca

SEQ ID NO: 9280 - RNA, 20 nt, synthetic construct
  misc_feature 1..20: note = C9Orf72 TTCN PAM targeting sequence
  source 1..20: mol_type = other RNA
attgaaactgtaataacata

SEQ ID NO: 9281 - RNA, 20 nt, synthetic construct
  misc_feature 1..20: note = C9Orf72 TTCN PAM targeting sequence
  source 1..20: mol_type = other RNA
gttgacaagatgatggttcc

SEQ ID NO: 9282 - RNA, 20 nt, synthetic construct
  misc_feature 1..20: note = C9Orf72 TTCN PAM targeting sequence
  source 1..20: mol_type = other RNA
ctgtgtgttctgttgacaag

SEQ ID NO: 9283 - RNA, 20 nt, synthetic construct
  misc_feature 1..20: note = C9Orf72 TTCN PAM targeting sequence
  source 1..20: mol_type = other RNA
tctggcttcatgacagtgag

SEQ ID NO: 9284 - RNA, 20 nt, synthetic construct
  misc_feature 1..20: note = C9Orf72 TTCN PAM targeting sequence
  source 1..20: mol_type = other RNA
tgacagtgagtagactctcg

SEQ ID NO: 9285 - RNA, 20 nt, synthetic construct
  misc_feature 1..20: note = C9Orf72 TTCN PAM targeting sequence
  source 1..20: mol_type = other RNA
ctagggaaggcaggggcctg

SEQ ID NO: 9286 - RNA, 20 nt, synthetic construct
  misc_feature 1..20: note = C9Orf72 TTCN PAM targeting sequence
  source 1..20: mol_type = other RNA
ctagggaaagcgagagtcta

SEQ ID NO: 9287 - RNA, 20 nt, synthetic construct
  misc_feature 1..20: note = C9Orf72 TTCN PAM targeting sequence
  source 1..20: mol_type = other RNA
ccctccactcatgccagttt

SEQ ID NO: 9288 - RNA, 20 nt, synthetic construct
  misc_feature 1..20: note = C9Orf72 TTCN PAM targeting sequence
  source 1..20: mol_type = other RNA
aaaccaaaaactggcatgag

SEQ ID NO: 9289 - RNA, 20 nt, synthetic construct
  misc_feature 1..20: note = C9Orf72 TTCN PAM targeting sequence
  source 1..20: mol_type = other RNA
aaatgctggctttctaaacc

SEQ ID NO: 9290 - RNA, 20 nt, synthetic construct
  misc_feature 1..20: note = C9Orf72 TTCN PAM targeting sequence
  source 1..20: mol_type = other RNA
cattgtcctcagggtgggtt

SEQ ID NO: 9291 - RNA, 20 nt, synthetic construct
  misc_feature 1..20: note = C9Orf72 TTCN PAM targeting sequence
  source 1..20: mol_type = other RNA
catatgaaggtcattgaccc

SEQ ID NO: 9292 - RNA, 20 nt, synthetic construct
  misc_feature 1..20: note = C9Orf72 TTCN PAM targeting sequence
  source 1..20: mol_type = other RNA
tatgggaacaaggagggtgt

SEQ ID NO: 9293 - RNA, 20 nt, synthetic construct
  misc_feature 1..20: note = C9Orf72 TTCN PAM targeting sequence
  source 1..20: mol_type = other RNA
tgcagaatttggaccaggga

SEQ ID NO: 9294 - RNA, 20 nt, synthetic construct
  misc_feature 1..20: note = C9Orf72 TTCN PAM targeting sequence
  source 1..20: mol_type = other RNA
gcaagaataaacaccttaca

SEQ ID NO: 9295 - RNA, 20 nt, synthetic construct
  misc_feature 1..20: note = C9Orf72 TTCN PAM targeting sequence
  source 1..20: mol_type = other RNA
gttcagcaaatgattcagtg

SEQ ID NO: 9296 - RNA, 20 nt, synthetic construct
  misc_feature 1..20: note = C9Orf72 TTCN PAM targeting sequence
  source 1..20: mol_type = other RNA
gcaaatgattcagtgcatgt

SEQ ID NO: 9297 - RNA, 20 nt, synthetic construct
  misc_feature 1..20: note = C9Orf72 TTCN PAM targeting sequence
  source 1..20: mol_type = other RNA
gtgcatgtagaccctgaggt

SEQ ID NO: 9298 - RNA, 20 nt, synthetic construct
  misc_feature 1..20: note = C9Orf72 TTCN PAM targeting sequence
  source 1..20: mol_type = other RNA
ggaactgctattgcgaaact

SEQ ID NO: 9299 - RNA, 20 nt, synthetic construct
  misc_feature 1..20: note = C9Orf72 TTCN PAM targeting sequence
  source 1..20: mol_type = other RNA
tgaaaatgtaaacaacctca

SEQ ID NO: 9300 - RNA, 20 nt, synthetic construct
  misc_feature 1..20: note = C9Orf72 TTCN PAM targeting sequence
  source 1..20: mol_type = other RNA
caatagcagttcctgaaaat

SEQ ID NO: 9301 - RNA, 20 nt, synthetic construct
  misc_feature 1..20: note = C9Orf72 TTCN PAM targeting sequence
  source 1..20: mol_type = other RNA
tctggcaaaagcaaccccac

SEQ ID NO: 9302 - RNA, 20 nt, synthetic construct
  misc_feature 1..20: note = C9Orf72 TTCN PAM targeting sequence
  source 1..20: mol_type = other RNA
tttgctcaagttatttttaa

SEQ ID NO: 9303 - RNA, 20 nt, synthetic construct
  misc_feature 1..20: note = C9Orf72 TTCN PAM targeting sequence
  source 1..20: mol_type = other RNA
cttagctccttagagaagct

SEQ ID NO: 9304 - RNA, 20 nt, synthetic construct
  misc_feature 1..20: note = C9Orf72 TTCN PAM targeting sequence
  source 1..20: mol_type = other RNA
ctaaggagctaagggaaagc

SEQ ID NO: 9305 - RNA, 20 nt, synthetic construct
  misc_feature 1..20: note = C9Orf72 TTCN PAM targeting sequence
  source 1..20: mol_type = other RNA
ggcctagacccacacaggca

SEQ ID NO: 9306 - RNA, 20 nt, synthetic construct
  misc_feature 1..20: note = C9Orf72 TTCN PAM targeting sequence
  source 1..20: mol_type = other RNA
attaatagcctcaacatttt

SEQ ID NO: 9307 - RNA, 20 nt, synthetic construct
  misc_feature 1..20: note = C9Orf72 TTCN PAM targeting sequence
  source 1..20: mol_type = other RNA
ctggcttccattaatagcct

SEQ ID NO: 9308 - RNA, 20 nt, synthetic construct
  misc_feature 1..20: note = C9Orf72 TTCN PAM targeting sequence
  source 1..20: mol_type = other RNA
ttgatccaccttggccagac

SEQ ID NO: 9309 - RNA, 20 nt, synthetic construct
  misc_feature 1..20: note = C9Orf72 TTCN PAM targeting sequence
  source 1..20: mol_type = other RNA
cagttttgaccccaaatttt

SEQ ID NO: 9310 - RNA, 20 nt, synthetic construct
  misc_feature 1..20: note = C9Orf72 TTCN PAM targeting sequence
  source 1..20: mol_type = other RNA
gaatgccgggctagcatact

SEQ ID NO: 9311 - RNA, 20 nt, synthetic construct
  misc_feature 1..20: note = C9Orf72 TTCN PAM targeting sequence
  source 1..20: mol_type = other RNA
gaaagttaaaatttggggtc

SEQ ID NO: 9312 - RNA, 20 nt, synthetic construct
  misc_feature 1..20: note = C9Orf72 TTCN PAM targeting sequence
  source 1..20: mol_type = other RNA
aggcacatgagtcatttaag

SEQ ID NO: 9313 - RNA, 20 nt, synthetic construct
  misc_feature 1..20: note = C9Orf72 TTCN PAM targeting sequence
  source 1..20: mol_type = other RNA
tggttctaggcacatgagtc

SEQ ID NO: 9314 - RNA, 20 nt, synthetic construct
  misc_feature 1..20: note = C9Orf72 TTCN PAM targeting sequence
  source 1..20: mol_type = other RNA
aactgctcctacaggtatgt

SEQ ID NO: 9315 - RNA, 20 nt, synthetic construct
  misc_feature 1..20: note = C9Orf72 TTCN PAM targeting sequence
  source 1..20: mol_type = other RNA
acacatacctgtaggagcag

SEQ ID NO: 9316 - RNA, 20 nt, synthetic construct
  misc_feature 1..20: note = C9Orf72 TTCN PAM targeting sequence
  source 1..20: mol_type = other RNA
gtcataggggtcccccttcc

SEQ ID NO: 9317 - RNA, 20 nt, synthetic construct
  misc_feature 1..20: note = C9Orf72 TTCN PAM targeting sequence
  source 1..20: mol_type = other RNA
tccagaagaaacttgccctg

SEQ ID NO: 9318 - RNA, 20 nt, synthetic construct
  misc_feature 1..20: note = C9Orf72 TTCN PAM targeting sequence
  source 1..20: mol_type = other RNA
ggatgaatattctgtcatag

SEQ ID NO: 9319 - RNA, 20 nt, synthetic construct
  misc_feature 1..20: note = C9Orf72 TTCN PAM targeting sequence
  source 1..20: mol_type = other RNA
tctggatgaatattctgtca

SEQ ID NO: 9320 - RNA, 20 nt, synthetic construct
  misc_feature 1..20: note = C9Orf72 TTCN PAM targeting sequence
  source 1..20: mol_type = other RNA
aattggcagcagggcaagtt

SEQ ID NO: 9321 - RNA, 20 nt, synthetic construct
  misc_feature 1..20: note = C9Orf72 TTCN PAM targeting sequence
  source 1..20: mol_type = other RNA
agcagtctcactgctgctgg

SEQ ID NO: 9322 - RNA, 20 nt, synthetic construct
  misc_feature 1..20: note = C9Orf72 TTCN PAM targeting sequence
  source 1..20: mol_type = other RNA
ggccacttgaccccgatgag

SEQ ID NO: 9323 - RNA, 20 nt, synthetic construct
  misc_feature 1..20: note = C9Orf72 TTCN PAM targeting sequence
  source 1..20: mol_type = other RNA
tcaggctgctttgcaaacat

SEQ ID NO: 9324 - RNA, 20 nt, synthetic construct
  misc_feature 1..20: note = C9Orf72 TTCN PAM targeting sequence
  source 1..20: mol_type = other RNA
aaatatcaattgttaaataa

SEQ ID NO: 9325 - RNA, 20 nt, synthetic construct
  misc_feature 1..20: note = C9Orf72 TTCN PAM targeting sequence
  source 1..20: mol_type = other RNA
tatcttttgggggaatcaga

SEQ ID NO: 9326 - RNA, 20 nt, synthetic construct
  misc_feature 1..20: note = C9Orf72 TTCN PAM targeting sequence
  source 1..20: mol_type = other RNA
cccaaaagataagaaactgt

SEQ ID NO: 9327 - RNA, 20 nt, synthetic construct
  misc_feature 1..20: note = C9Orf72 TTCN PAM targeting sequence
  source 1..20: mol_type = other RNA
caaaggggtctctgattccc

SEQ ID NO: 9328 - RNA, 20 nt, synthetic construct
  misc_feature 1..20: note = C9Orf72 TTCN PAM targeting sequence
  source 1..20: mol_type = other RNA
tcagattctcaaaggggtct

SEQ ID NO: 9329 - RNA, 20 nt, synthetic construct
  misc_feature 1..20: note = C9Orf72 TTCN PAM targeting sequence
  source 1..20: mol_type = other RNA
ccatagccttcctcagattc

SEQ ID NO: 9330 - RNA, 20 nt, synthetic construct
  misc_feature 1..20: note = C9Orf72 TTCN PAM targeting sequence
  source 1..20: mol_type = other RNA
tcagatatttctccatagcc

SEQ ID NO: 9331 - RNA, 20 nt, synthetic construct
  misc_feature 1..20: note = C9Orf72 TTCN PAM targeting sequence
  source 1..20: mol_type = other RNA
cacaggcttcatcagatatt

SEQ ID NO: 9332 - RNA, 20 nt, synthetic construct
  misc_feature 1..20: note = C9Orf72 TTCN PAM targeting sequence
  source 1..20: mol_type = other RNA
ggatggcagttttttttccc

SEQ ID NO: 9333 - RNA, 20 nt, synthetic construct
  misc_feature 1..20: note = C9Orf72 TTCN PAM targeting sequence
  source 1..20: mol_type = other RNA
ctgacaatttttggatgtca

SEQ ID NO: 9334 - RNA, 20 nt, synthetic construct
  misc_feature 1..20: note = C9Orf72 TTCN PAM targeting sequence
  source 1..20: mol_type = other RNA
gaatttggggaaactttaaa

SEQ ID NO: 9335 - RNA, 20 nt, synthetic construct
  misc_feature 1..20: note = C9Orf72 TTCN PAM targeting sequence
  source 1..20: mol_type = other RNA
gaagcaaggggatttacgga

SEQ ID NO: 9336 - RNA, 20 nt, synthetic construct
  misc_feature 1..20: note = C9Orf72 TTCN PAM targeting sequence
  source 1..20: mol_type = other RNA
ccaaattctgaagcaagggg

SEQ ID NO: 9337 - RNA, 20 nt, synthetic construct
  misc_feature 1..20: note = C9Orf72 TTCN PAM targeting sequence
  source 1..20: mol_type = other RNA
ttcattcagagcttactgac

SEQ ID NO: 9338 - RNA, 20 nt, synthetic construct
  misc_feature 1..20: note = C9Orf72 TTCN PAM targeting sequence
  source 1..20: mol_type = other RNA
ttcagagcttactgacttcc

SEQ ID NO: 9339 - RNA, 20 nt, synthetic construct
  misc_feature 1..20: note = C9Orf72 TTCN PAM targeting sequence
  source 1..20: mol_type = other RNA
gagcttactgacttcctgtg

SEQ ID NO: 9340 - RNA, 20 nt, synthetic construct
  misc_feature 1..20: note = C9Orf72 TTCN PAM targeting sequence
  source 1..20: mol_type = other RNA
tgtgtcatggcaagcactat

SEQ ID NO: 9341 - RNA, 20 nt, synthetic construct
  misc_feature 1..20: note = C9Orf72 TTCN PAM targeting sequence
  source 1..20: mol_type = other RNA
aacatagtgcttgccatgac

SEQ ID NO: 9342 - RNA, 20 nt, synthetic construct
  misc_feature 1..20: note = C9Orf72 TTCN PAM targeting sequence
  source 1..20: mol_type = other RNA
agcttccaacatagtgcttg

SEQ ID NO: 9343 - RNA, 20 nt, synthetic construct
  misc_feature 1..20: note = C9Orf72 TTCN PAM targeting sequence
  source 1..20: mol_type = other RNA
agcatagcacttaactcatt

SEQ ID NO: 9344 - RNA, 20 nt, synthetic construct
  misc_feature 1..20: note = C9Orf72 TTCN PAM targeting sequence
  source 1..20: mol_type = other RNA
acacttacagttctagcata

SEQ ID NO: 9345 - RNA, 20 nt, synthetic construct
  misc_feature 1..20: note = C9Orf72 TTCN PAM targeting sequence
  source 1..20: mol_type = other RNA
atatatatttaataaatgca

SEQ ID NO: 9346 - RNA, 20 nt, synthetic construct
  misc_feature 1..20: note = C9Orf72 TTCN PAM targeting sequence
  source 1..20: mol_type = other RNA
caactgcctggcacgtaatg

SEQ ID NO: 9347 - RNA, 20 nt, synthetic construct
  misc_feature 1..20: note = C9Orf72 TTCN PAM targeting sequence
  source 1..20: mol_type = other RNA
agacttaaggctccatggga

SEQ ID NO: 9348 - RNA, 20 nt, synthetic construct
  misc_feature 1..20: note = C9Orf72 TTCN PAM targeting sequence
  source 1..20: mol_type = other RNA
aggcccctcctctaactttt

SEQ ID NO: 9349 - RNA, 20 nt, synthetic construct
  misc_feature 1..20: note = C9Orf72 TTCN PAM targeting sequence
  source 1..20: mol_type = other RNA
tccaggcccctcctctaact

SEQ ID NO: 9350 - RNA, 20 nt, synthetic construct
  misc_feature 1..20: note = C9Orf72 TTCN PAM targeting sequence
  source 1..20: mol_type = other RNA
ccttaggtgggcatcatgtt

SEQ ID NO: 9351 - RNA, 20 nt, synthetic construct
  misc_feature 1..20: note = C9Orf72 TTCN PAM targeting sequence
  source 1..20: mol_type = other RNA
cccaggtgaagtgggtaagc

SEQ ID NO: 9352 - RNA, 20 nt, synthetic construct
  misc_feature 1..20: note = C9Orf72 TTCN PAM targeting sequence
  source 1..20: mol_type = other RNA
cctgggtgaactttacttag

SEQ ID NO: 9353 - RNA, 20 nt, synthetic construct
  misc_feature 1..20: note = C9Orf72 TTCN PAM targeting sequence
  source 1..20: mol_type = other RNA
cctgactcaccttgctgtta

SEQ ID NO: 9354 - RNA, 20 nt, synthetic construct
  misc_feature 1..20: note = C9Orf72 TTCN PAM targeting sequence
  source 1..20: mol_type = other RNA
tcagggctctccatgaaggc

SEQ ID NO: 9355 - RNA, 20 nt, synthetic construct
  misc_feature 1..20: note = C9Orf72 TTCN PAM targeting sequence
  source 1..20: mol_type = other RNA
tggagagccctgatgaacta

SEQ ID NO: 9356 - RNA, 20 nt, synthetic construct
  misc_feature 1..20: note = C9Orf72 TTCN PAM targeting sequence
  source 1..20: mol_type = other RNA
ccatggattgtgggttgaag

SEQ ID NO: 9357 - RNA, 20 nt, synthetic construct
  misc_feature 1..20: note = C9Orf72 TTCN PAM targeting sequence
  source 1..20: mol_type = other RNA
acccacaatccatggtgaag

SEQ ID NO: 9358 - RNA, 20 nt, synthetic construct
  misc_feature 1..20: note = C9Orf72 TTCN PAM targeting sequence
  source 1..20: mol_type = other RNA
cgccattctcctgcctcagc

SEQ ID NO: 9359 - RNA, 20 nt, synthetic construct
  misc_feature 1..20: note = C9Orf72 TTCN PAM targeting sequence
  source 1..20: mol_type = other RNA
cctgcctcagcctcccaagt

SEQ ID NO: 9360 - RNA, 20 nt, synthetic construct
  misc_feature 1..20: note = C9Orf72 TTCN PAM targeting sequence
  source 1..20: mol_type = other RNA
tgtatttttagtacagatgg

SEQ ID NO: 9361 - RNA, 20 nt, synthetic construct
  misc_feature 1..20: note = C9Orf72 TTCN PAM targeting sequence
  source 1..20: mol_type = other RNA
ctgtgttagtcacgatggtc

SEQ ID NO: 9362 - RNA, 20 nt, synthetic construct
  misc_feature 1..20: note = C9Orf72 TTCN PAM targeting sequence
  source 1..20: mol_type = other RNA
tattagaaagatcactctac

SEQ ID NO: 9363 - RNA, 20 nt, synthetic construct
  misc_feature 1..20: note = C9Orf72 TTCN PAM targeting sequence
  source 1..20: mol_type = other RNA
aataggaaactcctgacttg

SEQ ID NO: 9364 - RNA, 20 nt, synthetic construct
  misc_feature 1..20: note = C9Orf72 TTCN PAM targeting sequence
  source 1..20: mol_type = other RNA
ccatttatggtagagtgatc

SEQ ID NO: 9365 - RNA, 20 nt, synthetic construct
  misc_feature 1..20: note = C9Orf72 TTCN PAM targeting sequence
  source 1..20: mol_type = other RNA
cccactagccatcccctccc

SEQ ID NO: 9366 - RNA, 20 nt, synthetic construct
  misc_feature 1..20: note = C9Orf72 TTCN PAM targeting sequence
  source 1..20: mol_type = other RNA
agtctccatgatttcaccca

SEQ ID NO: 9367 - RNA, 20 nt, synthetic construct
  misc_feature 1..20: note = C9Orf72 TTCN PAM targeting sequence
  source 1..20: mol_type = other RNA
ttctagtctccatgatttca

SEQ ID NO: 9368 - RNA, 20 nt, synthetic construct
  misc_feature 1..20: note = C9Orf72 TTCN PAM targeting sequence
  source 1..20: mol_type = other RNA
ttccttctagtctccatgat

SEQ ID NO: 9369 - RNA, 20 nt, synthetic construct
  misc_feature 1..20: note = C9Orf72 TTCN PAM targeting sequence
  source 1..20: mol_type = other RNA
acagcttccttccttctagt

SEQ ID NO: 9370 - RNA, 20 nt, synthetic construct
  misc_feature 1..20: note = C9Orf72 TTCN PAM targeting sequence
  source 1..20: mol_type = other RNA
tgtctagattaattcaacag

SEQ ID NO: 9371 - RNA, 20 nt, synthetic construct
  misc_feature 1..20: note = C9Orf72 TTCN PAM targeting sequence
  source 1..20: mol_type = other RNA
catcgtccactttactccat

SEQ ID NO: 9372 - RNA, 20 nt, synthetic construct
  misc_feature 1..20: note = C9Orf72 TTCN PAM targeting sequence
  source 1..20: mol_type = other RNA
ttccctacaatgacatttgc

SEQ ID NO: 9373 - RNA, 20 nt, synthetic construct
  misc_feature 1..20: note = C9Orf72 TTCN PAM targeting sequence
  source 1..20: mol_type = other RNA
ctacaatgacatttgcctac

SEQ ID NO: 9374 - RNA, 20 nt, synthetic construct
  misc_feature 1..20: note = C9Orf72 TTCN PAM targeting sequence
  source 1..20: mol_type = other RNA
ttagcttgagccagtcacta

SEQ ID NO: 9375 - RNA, 20 nt, synthetic construct
  misc_feature 1..20: note = C9Orf72 TTCN PAM targeting sequence
  source 1..20: mol_type = other RNA
cggtgataccacgtcagtaa

SEQ ID NO: 9376 - RNA, 20 nt, synthetic construct
  misc_feature 1..20: note = C9Orf72 TTCN PAM targeting sequence
  source 1..20: mol_type = other RNA
taatcaaattttggaactct

SEQ ID NO: 9377 - RNA, 20 nt, synthetic construct
  misc_feature 1..20: note = C9Orf72 TTCN PAM targeting sequence
  source 1..20: mol_type = other RNA
aaaatttgattatgaaacta

SEQ ID NO: 9378 - RNA, 20 nt, synthetic construct
  misc_feature 1..20: note = C9Orf72 TTCN PAM targeting sequence
  source 1..20: mol_type = other RNA
tgtcataatcatcatcacca

SEQ ID NO: 9379 - RNA, 20 nt, synthetic construct
  misc_feature 1..20: note = C9Orf72 TTCN PAM targeting sequence
  source 1..20: mol_type = other RNA
gtgctagttactgttccaag

SEQ ID NO: 9380 - RNA, 20 nt, synthetic construct
  misc_feature 1..20: note = C9Orf72 TTCN PAM targeting sequence
  source 1..20: mol_type = other RNA
aagcattctgaatttactaa

SEQ ID NO: 9381 - RNA, 20 nt, synthetic construct
  misc_feature 1..20: note = C9Orf72 TTCN PAM targeting sequence
  source 1..20: mol_type = other RNA
gaatttactaacccacttaa

SEQ ID NO: 9382 - RNA, 20 nt, synthetic construct
  misc_feature 1..20: note = C9Orf72 TTCN PAM targeting sequence
  source 1..20: mol_type = other RNA
gaatgcttggaacagtaact

SEQ ID NO: 9383 - RNA, 20 nt, synthetic construct
  misc_feature 1..20: note = C9Orf72 TTCN PAM targeting sequence
  source 1..20: mol_type = other RNA
agtgactctatcgggtaggt

SEQ ID NO: 9384 - RNA, 20 nt, synthetic construct
  misc_feature 1..20: note = C9Orf72 TTCN PAM targeting sequence
  source 1..20: mol_type = other RNA
attcttactcttaaagaata

SEQ ID NO: 9385 - RNA, 20 nt, synthetic construct
  misc_feature 1..20: note = C9Orf72 TTCN PAM targeting sequence
  source 1..20: mol_type = other RNA
tactcttaaagaatagatga

SEQ ID NO: 9386 - RNA, 20 nt, synthetic construct
  misc_feature 1..20: note = C9Orf72 TTCN PAM targeting sequence
  source 1..20: mol_type = other RNA
ttaagagtaagaatagaacc

SEQ ID NO: 9387 - RNA, 20 nt, synthetic construct
  misc_feature 1..20: note = C9Orf72 TTCN PAM targeting sequence
  source 1..20: mol_type = other RNA
tagctgtgtgaccttagaca

SEQ ID NO: 9388 - RNA, 20 nt, synthetic construct
  misc_feature 1..20: note = C9Orf72 TTCN PAM targeting sequence
  source 1..20: mol_type = other RNA
cacttcctagctgtgtgacc

SEQ ID NO: 9389 - RNA, 20 nt, synthetic construct
  misc_feature 1..20: note = C9Orf72 TTCN PAM targeting sequence
  source 1..20: mol_type = other RNA
aaggctcagatccttatttt

SEQ ID NO: 9390 - RNA, 20 nt, synthetic construct
  misc_feature 1..20: note = C9Orf72 TTCN PAM targeting sequence
  source 1..20: mol_type = other RNA
aggacgcaaacttccaaaaa

SEQ ID NO: 9391 - RNA, 20 nt, synthetic construct
  misc_feature 1..20: note = C9Orf72 TTCN PAM targeting sequence
  source 1..20: mol_type = other RNA
aaaaattctcctatcaattt

SEQ ID NO: 9392 - RNA, 20 nt, synthetic construct
  misc_feature 1..20: note = C9Orf72 TTCN PAM targeting sequence
  source 1..20: mol_type = other RNA
cctatcaatttacaatgaca

SEQ ID NO: 9393 - RNA, 20 nt, synthetic construct
  misc_feature 1..20: note = C9Orf72 TTCN PAM targeting sequence
  source 1..20: mol_type = other RNA
ccataaaactcaatttgagc

SEQ ID NO: 9394 - RNA, 20 nt, synthetic construct
  misc_feature 1..20: note = C9Orf72 TTCN PAM targeting sequence
  source 1..20: mol_type = other RNA
taacaaatggtaaaaagtca

SEQ ID NO: 9395 - RNA, 20 nt, synthetic construct
  misc_feature 1..20: note = C9Orf72 TTCN PAM targeting sequence
  source 1..20: mol_type = other RNA
gaacaatcacaataaaaagt

SEQ ID NO: 9396 - RNA, 20 nt, synthetic construct
  misc_feature 1..20: note = C9Orf72 TTCN PAM targeting sequence
  source 1..20: mol_type = other RNA
gaatgttcataacaaatggt

SEQ ID NO: 9397 - RNA, 20 nt, synthetic construct
  misc_feature 1..20: note = C9Orf72 TTCN PAM targeting sequence
  source 1..20: mol_type = other RNA
agtctctaaaaacatcttag

SEQ ID NO: 9398 - RNA, 20 nt, synthetic construct
  misc_feature 1..20: note = C9Orf72 TTCN PAM targeting sequence
  source 1..20: mol_type = other RNA
tgtaccactcctaagatgtt

SEQ ID NO: 9399 - RNA, 20 nt, synthetic construct
  misc_feature 1..20: note = C9Orf72 TTCN PAM targeting sequence
  source 1..20: mol_type = other RNA
ggctccaaagaacaaaaaag

SEQ ID NO: 9400 - RNA, 20 nt, synthetic construct
  misc_feature 1..20: note = C9Orf72 TTCN PAM targeting sequence
  source 1..20: mol_type = other RNA
ttggagcctgaatctgcaaa

SEQ ID NO: 9401 - RNA, 20 nt, synthetic construct
  misc_feature 1..20: note = C9Orf72 TTCN PAM targeting sequence
  source 1..20: mol_type = other RNA
gcttttttgttctttggagc

SEQ ID NO: 9402 - RNA, 20 nt, synthetic construct
  misc_feature 1..20: note = C9Orf72 TTCN PAM targeting sequence
  source 1..20: mol_type = other RNA
ttgtttaaaaacaccattgt

SEQ ID NO: 9403 - RNA, 20 nt, synthetic construct
  misc_feature 1..20: note = C9Orf72 TTCN PAM targeting sequence
  source 1..20: mol_type = other RNA
tttagccataagggaatttt

SEQ ID NO: 9404 - RNA, 20 nt, synthetic construct
  misc_feature 1..20: note = C9Orf72 TTCN PAM targeting sequence
  source 1..20: mol_type = other RNA
cttatggctaaaggaaaaca

SEQ ID NO: 9405 - RNA, 20 nt, synthetic construct
  misc_feature 1..20: note = C9Orf72 TTCN PAM targeting sequence
  source 1..20: mol_type = other RNA
gctttcaaagcattccacat

SEQ ID NO: 9406 - RNA, 20 nt, synthetic construct
  misc_feature 1..20: note = C9Orf72 TTCN PAM targeting sequence
  source 1..20: mol_type = other RNA
aagcattccacattccccac

SEQ ID NO: 9407 - RNA, 20 nt, synthetic construct
  misc_feature 1..20: note = C9Orf72 TTCN PAM targeting sequence
  source 1..20: mol_type = other RNA
acattccccacccacaagca

SEQ ID NO: 9408 - RNA, 20 nt, synthetic construct
  misc_feature 1..20: note = C9Orf72 TTCN PAM targeting sequence
  source 1..20: mol_type = other RNA
ccacccacaagcaaatgcca

SEQ ID NO: 9409 - RNA, 20 nt, synthetic construct
  misc_feature 1..20: note = C9Orf72 TTCN PAM targeting sequence
  source 1..20: mol_type = other RNA
ggcatttgcttgtgggtggg

SEQ ID NO: 9410 - RNA, 20 nt, synthetic construct
  misc_feature 1..20: note = C9Orf72 TTCN PAM targeting sequence
  source 1..20: mol_type = other RNA
tgagctgagttggctcaaac

SEQ ID NO: 9411 - RNA, 20 nt, synthetic construct
  misc_feature 1..20: note = C9Orf72 TTCN PAM targeting sequence
  source 1..20: mol_type = other RNA
aaatactggatcagatttct

SEQ ID NO: 9412 - RNA, 20 nt, synthetic construct
  misc_feature 1..20: note = C9Orf72 TTCN PAM targeting sequence
  source 1..20: mol_type = other RNA
tgaatgtccgcgctccacag

SEQ ID NO: 9413 - RNA, 20 nt, synthetic construct
  misc_feature 1..20: note = C9Orf72 TTCN PAM targeting sequence
  source 1..20: mol_type = other RNA
agaaatctgatccagtattt

SEQ ID NO: 9414 - RNA, 20 nt, synthetic construct
  misc_feature 1..20: note = C9Orf72 TTCN PAM targeting sequence
  source 1..20: mol_type = other RNA
tcagaccaattaggacaata

SEQ ID NO: 9415 - RNA, 20 nt, synthetic construct
  misc_feature 1..20: note = C9Orf72 TTCN PAM targeting sequence
  source 1..20: mol_type = other RNA
gcaagagatgagatggtgtg

SEQ ID NO: 9416 - RNA, 20 nt, synthetic construct
  misc_feature 1..20: note = C9Orf72 TTCN PAM targeting sequence
  source 1..20: mol_type = other RNA
gcatttgtgccacaccatct

SEQ ID NO: 9417 - RNA, 20 nt, synthetic construct
  misc_feature 1..20: note = C9Orf72 TTCN PAM targeting sequence
  source 1..20: mol_type = other RNA
gtttctgcatttgtgccaca

SEQ ID NO: 9418 - RNA, 20 nt, synthetic construct
  misc_feature 1..20: note = C9Orf72 TTCN PAM targeting sequence
  source 1..20: mol_type = other RNA
aatttctgtttctgcatttg

SEQ ID NO: 9419 - RNA, 20 nt, synthetic construct
  misc_feature 1..20: note = C9Orf72 TTCN PAM targeting sequence
  source 1..20: mol_type = other RNA
aatgtattacttcaaaaaga

SEQ ID NO: 9420 - RNA, 20 nt, synthetic construct
  misc_feature 1..20: note = C9Orf72 TTCN PAM targeting sequence
  source 1..20: mol_type = other RNA
aaaagattgaaaaattgctg

SEQ ID NO: 9421 - RNA, 20 nt, synthetic construct
  misc_feature 1..20: note = C9Orf72 TTCN PAM targeting sequence
  source 1..20: mol_type = other RNA
atctttttgaagtaatacat

SEQ ID NO: 9422 - RNA, 20 nt, synthetic construct
  misc_feature 1..20: note = C9Orf72 TTCN PAM targeting sequence
  source 1..20: mol_type = other RNA
aagattttaggcagcaattt

SEQ ID NO: 9423 - RNA, 20 nt, synthetic construct
  misc_feature 1..20: note = C9Orf72 TTCN PAM targeting sequence
  source 1..20: mol_type = other RNA
ttaaaaattaagcctatgca

SEQ ID NO: 9424 - RNA, 20 nt, synthetic construct
  misc_feature 1..20: note = C9Orf72 TTCN PAM targeting sequence
  source 1..20: mol_type = other RNA
tcattaaaaattaagcctat

SEQ ID NO: 9425 - RNA, 20 nt, synthetic construct
  misc_feature 1..20: note = C9Orf72 TTCN PAM targeting sequence
  source 1..20: mol_type = other RNA
gggaaaataagtttttgatt

SEQ ID NO: 9426 - RNA, 20 nt, synthetic construct
  misc_feature 1..20: note = C9Orf72 TTCN PAM targeting sequence
  source 1..20: mol_type = other RNA
cagaagattcttcattaaaa

SEQ ID NO: 9427 - RNA, 20 nt, synthetic construct
  misc_feature 1..20: note = C9Orf72 TTCN PAM targeting sequence
  source 1..20: mol_type = other RNA
ttatataatcaaaaacttat

SEQ ID NO: 9428 - RNA, 20 nt, synthetic construct
  misc_feature 1..20: note = C9Orf72 TTCN PAM targeting sequence
  source 1..20: mol_type = other RNA
ttgatttgcaggaaataatt

SEQ ID NO: 9429 - RNA, 20 nt, synthetic construct
  misc_feature 1..20: note = C9Orf72 TTCN PAM targeting sequence
  source 1..20: mol_type = other RNA
tgcaaatcaaggaaattgct

SEQ ID NO: 9430 - RNA, 20 nt, synthetic construct
  misc_feature 1..20: note = C9Orf72 TTCN PAM targeting sequence
  source 1..20: mol_type = other RNA
ttttggggaaaaacaaataa

SEQ ID NO: 9431 - RNA, 20 nt, synthetic construct
  misc_feature 1..20: note = C9Orf72 TTCN PAM targeting sequence
  source 1..20: mol_type = other RNA
ccaaaaagaattatttcctg

SEQ ID NO: 9432 - RNA, 20 nt, synthetic construct
  misc_feature 1..20: note = C9Orf72 TTCN PAM targeting sequence
  source 1..20: mol_type = other RNA
agtaaatgttagctggatgg

SEQ ID NO: 9433 - RNA, 20 nt, synthetic construct
  misc_feature 1..20: note = C9Orf72 TTCN PAM targeting sequence
  source 1..20: mol_type = other RNA
tttttgtgtctcagtgccta

SEQ ID NO: 9434 - RNA, 20 nt, synthetic construct
  misc_feature 1..20: note = C9Orf72 TTCN PAM targeting sequence
  source 1..20: mol_type = other RNA
tgtctttttcatttttgtgt

SEQ ID NO: 9435 - RNA, 20 nt, synthetic construct
  misc_feature 1..20: note = C9Orf72 TTCN PAM targeting sequence
  source 1..20: mol_type = other RNA
ttagcctaggtggggagata

SEQ ID NO: 9436 - RNA, 20 nt, synthetic construct
  misc_feature 1..20: note = C9Orf72 TTCN PAM targeting sequence
  source 1..20: mol_type = other RNA
tttgcttatctatctcccca

SEQ ID NO: 9437 - RNA, 20 nt, synthetic construct
  misc_feature 1..20: note = C9Orf72 TTCN PAM targeting sequence
  source 1..20: mol_type = other RNA
tttattgcatttattacact

SEQ ID NO: 9438 - RNA, 20 nt, synthetic construct
  misc_feature 1..20: note = C9Orf72 TTCN PAM targeting sequence
  source 1..20: mol_type = other RNA
cacaggtctagctagtacgt

SEQ ID NO: 9439 - RNA, 20 nt, synthetic construct
  misc_feature 1..20: note = C9Orf72 TTCN PAM targeting sequence
  source 1..20: mol_type = other RNA
tcccacaggtctagctagta

SEQ ID NO: 9440 - RNA, 20 nt, synthetic construct
  misc_feature 1..20: note = C9Orf72 TTCN PAM targeting sequence
  source 1..20: mol_type = other RNA
aacctttcttcccacaggtc

SEQ ID NO: 9441 - RNA, 20 nt, synthetic construct
  misc_feature 1..20: note = C9Orf72 TTCN PAM targeting sequence
  source 1..20: mol_type = other RNA
tctttctaacctttcttccc

SEQ ID NO: 9442 - RNA, 20 nt, synthetic construct
  misc_feature 1..20: note = C9Orf72 TTCN PAM targeting sequence
  source 1..20: mol_type = other RNA
gttcatctttctaacctttc

SEQ ID NO: 9443 - RNA, 20 nt, synthetic construct
  misc_feature 1..20: note = C9Orf72 TTCN PAM targeting sequence
  source 1..20: mol_type = other RNA
agcacagtttctgttcatct

SEQ ID NO: 9444 - RNA, 20 nt, synthetic construct
  misc_feature 1..20: note = C9Orf72 TTCN PAM targeting sequence
  source 1..20: mol_type = other RNA
gtaagtgttggagagccatt

SEQ ID NO: 9445 - RNA, 20 nt, synthetic construct
  misc_feature 1..20: note = C9Orf72 TTCN PAM targeting sequence
  source 1..20: mol_type = other RNA
gcttaatggctctccaacac

SEQ ID NO: 9446 - RNA, 20 nt, synthetic construct
  misc_feature 1..20: note = C9Orf72 TTCN PAM targeting sequence
  source 1..20: mol_type = other RNA
aaaattaaatctaacgatca

SEQ ID NO: 9447 - RNA, 20 nt, synthetic construct
  misc_feature 1..20: note = C9Orf72 TTCN PAM targeting sequence
  source 1..20: mol_type = other RNA
cattgataacagcatgatcc

SEQ ID NO: 9448 - RNA, 20 nt, synthetic construct
  misc_feature 1..20: note = C9Orf72 TTCN PAM targeting sequence
  source 1..20: mol_type = other RNA
tcacattgataacagcatga

SEQ ID NO: 9449 - RNA, 20 nt, synthetic construct
  misc_feature 1..20: note = C9Orf72 TTCN PAM targeting sequence
  source 1..20: mol_type = other RNA
ccactacagcccattcttca

SEQ ID NO: 9450 - RNA, 20 nt, synthetic construct
  misc_feature 1..20: note = C9Orf72 TTCN PAM targeting sequence
  source 1..20: mol_type = other RNA
gttccactcttcataaaaat

SEQ ID NO: 9451 - RNA, 20 nt, synthetic construct
  misc_feature 1..20: note = C9Orf72 TTCN PAM targeting sequence
  source 1..20: mol_type = other RNA
actcttcataaaaatcgtac

SEQ ID NO: 9452 - RNA, 20 nt, synthetic construct
  misc_feature 1..20: note = C9Orf72 TTCN PAM targeting sequence
  source 1..20: mol_type = other RNA
taaaaatcgtaccacagcac

SEQ ID NO: 9453 - RNA, 20 nt, synthetic construct
  misc_feature 1..20: note = C9Orf72 TTCN PAM targeting sequence
  source 1..20: mol_type = other RNA
cttttccccccaacacagat

SEQ ID NO: 9454 - RNA, 20 nt, synthetic construct
  misc_feature 1..20: note = C9Orf72 TTCN PAM targeting sequence
  source 1..20: mol_type = other RNA
ccccaacacagataatttag

SEQ ID NO: 9455 - RNA, 20 nt, synthetic construct
  misc_feature 1..20: note = C9Orf72 TTCN PAM targeting sequence
  source 1..20: mol_type = other RNA
aaattatctgtgttgggggg

SEQ ID NO: 9456 - RNA, 20 nt, synthetic construct
  misc_feature 1..20: note = C9Orf72 TTCN PAM targeting sequence
  source 1..20: mol_type = other RNA
cagatatttgttattggtta

SEQ ID NO: 9457 - RNA, 20 nt, synthetic construct
  misc_feature 1..20: note = C9Orf72 TTCN PAM targeting sequence
  source 1..20: mol_type = other RNA
attgtggtcagagaacatat

SEQ ID NO: 9458 - RNA, 20 nt, synthetic construct
  misc_feature 1..20: note = C9Orf72 TTCN PAM targeting sequence
  source 1..20: mol_type = other RNA
ctgaccacaatggaattaaa

SEQ ID NO: 9459 - RNA, 20 nt, synthetic construct
  misc_feature 1..20: note = C9Orf72 TTCN PAM targeting sequence
  source 1..20: mol_type = other RNA
atgacttgaatccttttaaa

SEQ ID NO: 9460 - RNA, 20 nt, synthetic construct
  misc_feature 1..20: note = C9Orf72 TTCN PAM targeting sequence
  source 1..20: mol_type = other RNA
agtcatagaaaatatgttct

SEQ ID NO: 9461 - RNA, 20 nt, synthetic construct
  misc_feature 1..20: note = C9Orf72 TTCN PAM targeting sequence
  source 1..20: mol_type = other RNA
tggctcaaaatacggtctat

SEQ ID NO: 9462 - RNA, 20 nt, synthetic construct
  misc_feature 1..20: note = C9Orf72 TTCN PAM targeting sequence
  source 1..20: mol_type = other RNA
tgtactcttggaaagaatgt

SEQ ID NO: 9463 - RNA, 20 nt, synthetic construct
  misc_feature 1..20: note = C9Orf72 TTCN PAM targeting sequence
  source 1..20: mol_type = other RNA
aagagtacatgaaacatgta

SEQ ID NO: 9464 - RNA, 20 nt, synthetic construct
  misc_feature 1..20: note = C9Orf72 TTCN PAM targeting sequence
  source 1..20: mol_type = other RNA
ttccaagagtacatgaaaca

SEQ ID NO: 9465 - RNA, 20 nt, synthetic construct
  misc_feature 1..20: note = C9Orf72 TTCN PAM targeting sequence
  source 1..20: mol_type = other RNA
aatcttctatatccttactg

SEQ ID NO: 9466 - RNA, 20 nt, synthetic construct
  misc_feature 1..20: note = C9Orf72 TTCN PAM targeting sequence
  source 1..20: mol_type = other RNA
atatccttactgattttgtg

SEQ ID NO: 9467 - RNA, 20 nt, synthetic construct
  misc_feature 1..20: note = C9Orf72 TTCN PAM targeting sequence
  source 1..20: mol_type = other RNA
tgttctactaaacattgaaa

SEQ ID NO: 9468 - RNA, 20 nt, synthetic construct
  misc_feature 1..20: note = C9Orf72 TTCN PAM targeting sequence
  source 1..20: mol_type = other RNA
actaaacattgaaaggatat

SEQ ID NO: 9469 - RNA, 20 nt, synthetic construct
  misc_feature 1..20: note = C9Orf72 TTCN PAM targeting sequence
  source 1..20: mol_type = other RNA
atgtttagtagaacaagaat

SEQ ID NO: 9470 - RNA, 20 nt, synthetic construct
  misc_feature 1..20: note = C9Orf72 TTCN PAM targeting sequence
  source 1..20: mol_type = other RNA
ccgtgttagccaggatggtc

SEQ ID NO: 9471 - RNA, 20 nt, synthetic construct
  misc_feature 1..20: note = C9Orf72 TTCN PAM targeting sequence
  source 1..20: mol_type = other RNA
gcctccccagtagctgggac

SEQ ID NO: 9472 - RNA, 20 nt, synthetic construct
  misc_feature 1..20: note = C9Orf72 TTCN PAM targeting sequence
  source 1..20: mol_type = other RNA
cctgcttcagcctccccagt

SEQ ID NO: 9473 - RNA, 20 nt, synthetic construct
  misc_feature 1..20: note = C9Orf72 TTCN PAM targeting sequence
  source 1..20: mol_type = other RNA
cgccattctcctgcttcagc

SEQ ID NO: 9474 - RNA, 20 nt, synthetic construct
  misc_feature 1..20: note = C9Orf72 TTCN PAM targeting sequence
  source 1..20: mol_type = other RNA
tacagttctatcagtttttg

SEQ ID NO: 9475 - RNA, 20 nt, synthetic construct
  misc_feature 1..20: note = C9Orf72 TTCN PAM targeting sequence
  source 1..20: mol_type = other RNA
atcagtttttgcttcatcta

SEQ ID NO: 9476 - RNA, 20 nt, synthetic construct
  misc_feature 1..20: note = C9Orf72 TTCN PAM targeting sequence
  source 1..20: mol_type = other RNA
tctattttgacacagctatg

SEQ ID NO: 9477 - RNA, 20 nt, synthetic construct
  misc_feature 1..20: note = C9Orf72 TTCN PAM targeting sequence
  source 1..20: mol_type = other RNA
cctcatagctgtgtcaaaat

SEQ ID NO: 9478 - RNA, 20 nt, synthetic construct
  misc_feature 1..20: note = C9Orf72 TTCN PAM targeting sequence
  source 1..20: mol_type = other RNA
gcaaaaggatataacagtcc

SEQ ID NO: 9479 - RNA, 20 nt, synthetic construct
  misc_feature 1..20: note = C9Orf72 TTCN PAM targeting sequence
  source 1..20: mol_type = other RNA
ttgctctgaaatctattttg

SEQ ID NO: 9480 - RNA, 20 nt, synthetic construct
  misc_feature 1..20: note = C9Orf72 TTCN PAM targeting sequence
  source 1..20: mol_type = other RNA
gagcaaagaatattaccagg

SEQ ID NO: 9481 - RNA, 20 nt, synthetic construct
  misc_feature 1..20: note = C9Orf72 TTCN PAM targeting sequence
  source 1..20: mol_type = other RNA
tattgtcactccagttttct

SEQ ID NO: 9482 - RNA, 20 nt, synthetic construct
  misc_feature 1..20: note = C9Orf72 TTCN PAM targeting sequence
  source 1..20: mol_type = other RNA
tctaattaccaatatgatgt

SEQ ID NO: 9483 - RNA, 20 nt, synthetic construct
  misc_feature 1..20: note = C9Orf72 TTCN PAM targeting sequence
  source 1..20: mol_type = other RNA
aattaccaatatgatgtatc

SEQ ID NO: 9484 - RNA, 20 nt, synthetic construct
  misc_feature 1..20: note = C9Orf72 TTCN PAM targeting sequence
  source 1..20: mol_type = other RNA
ccatccttttacttttaatc

SEQ ID NO: 9485 - RNA, 20 nt, synthetic construct
  misc_feature 1..20: note = C9Orf72 TTCN PAM targeting sequence
  source 1..20: mol_type = other RNA
tcctttatttttaaggtgtg

SEQ ID NO: 9486 - RNA, 20 nt, synthetic construct
  misc_feature 1..20: note = C9Orf72 TTCN PAM targeting sequence
  source 1..20: mol_type = other RNA
tgttggcagcatatagttgg

SEQ ID NO: 9487 - RNA, 20 nt, synthetic construct
  misc_feature 1..20: note = C9Orf72 TTCN PAM targeting sequence
  source 1..20: mol_type = other RNA
gatcagataaaaaagcaaga

SEQ ID NO: 9488 - RNA, 20 nt, synthetic construct
  misc_feature 1..20: note = C9Orf72 TTCN PAM targeting sequence
  source 1..20: mol_type = other RNA
aaaattgaaaaataaaagtt

SEQ ID NO: 9489 - RNA, 20 nt, synthetic construct
  misc_feature 1..20: note = C9Orf72 TTCN PAM targeting sequence
  source 1..20: mol_type = other RNA
attttagaaatgtccttaaa

SEQ ID NO: 9490 - RNA, 20 nt, synthetic construct
  misc_feature 1..20: note = C9Orf72 TTCN PAM targeting sequence
  source 1..20: mol_type = other RNA
aaacatcatattgtatgcta

SEQ ID NO: 9491 - RNA, 20 nt, synthetic construct
  misc_feature 1..20: note = C9Orf72 TTCN PAM targeting sequence
  source 1..20: mol_type = other RNA
caatgtatacttatttcaaa

SEQ ID NO: 9492 - RNA, 20 nt, synthetic construct
  misc_feature 1..20: note = C9Orf72 TTCN PAM targeting sequence
  source 1..20: mol_type = other RNA
ctctacaaataaatatgtga

SEQ ID NO: 9493 - RNA, 20 nt, synthetic construct
  misc_feature 1..20: note = C9Orf72 TTCN PAM targeting sequence
  source 1..20: mol_type = other RNA
agtgtacaatatatgttgtt

SEQ ID NO: 9494 - RNA, 20 nt, synthetic construct
  misc_feature 1..20: note = C9Orf72 TTCN PAM targeting sequence
  source 1..20: mol_type = other RNA
tcctatctaactgaataagt

SEQ ID NO: 9495 - RNA, 20 nt, synthetic construct
  misc_feature 1..20: note = C9Orf72 TTCN PAM targeting sequence
  source 1..20: mol_type = other RNA
gttagataggaggaataagc

SEQ ID NO: 9496 - RNA, 20 nt, synthetic construct
  misc_feature 1..20: note = C9Orf72 TTCN PAM targeting sequence
  source 1..20: mol_type = other RNA
agagatctattgtacaactt

SEQ ID NO: 9497 - RNA, 20 nt, synthetic construct
  misc_feature 1..20: note = C9Orf72 TTCN PAM targeting sequence
  source 1..20: mol_type = other RNA
tcctgtctaactttgaccaa

SEQ ID NO: 9498 - RNA, 20 nt, synthetic construct
  misc_feature 1..20: note = C9Orf72 TTCN PAM targeting sequence
  source 1..20: mol_type = other RNA
atgagttccaagtttttcaa

SEQ ID NO: 9499 - RNA, 20 nt, synthetic construct
  misc_feature 1..20: note = C9Orf72 TTCN PAM targeting sequence
  source 1..20: mol_type = other RNA
aagtttttcaattctgtgtg

SEQ ID NO: 9500 - RNA, 20 nt, synthetic construct
  misc_feature 1..20: note = C9Orf72 TTCN PAM targeting sequence
  source 1..20: mol_type = other RNA
attctgtgtgtaagtgagat

SEQ ID NO: 9501 - RNA, 20 nt, synthetic construct
  misc_feature 1..20: note = C9Orf72 TTCN PAM targeting sequence
  source 1..20: mol_type = other RNA
gtgtgtaagtgagatcatgt

SEQ ID NO: 9502 - RNA, 20 nt, synthetic construct
  misc_feature 1..20: note = C9Orf72 TTCN PAM targeting sequence
  source 1..20: mol_type = other RNA
aaacaccccaattaaaagtc

SEQ ID NO: 9503 - RNA, 20 nt, synthetic construct
  misc_feature 1..20: note = C9Orf72 TTCN PAM targeting sequence
  source 1..20: mol_type = other RNA
acaaacattataaactccac

SEQ ID NO: 9504 - RNA, 20 nt, synthetic construct
  misc_feature 1..20: note = C9Orf72 TTCN PAM targeting sequence
  source 1..20: mol_type = other RNA
taagctatatgtcaagtagt

SEQ ID NO: 9505 - RNA, 20 nt, synthetic construct
  misc_feature 1..20: note = C9Orf72 TTCN PAM targeting sequence
  source 1..20: mol_type = other RNA
aatttaccagtttataacca

SEQ ID NO: 9506 - RNA, 20 nt, synthetic construct
  misc_feature 1..20: note = C9Orf72 TTCN PAM targeting sequence
  source 1..20: mol_type = other RNA
attgtcttattaactatact

SEQ ID NO: 9507 - RNA, 20 nt, synthetic construct
  misc_feature 1..20: note = C9Orf72 TTCN PAM targeting sequence
  source 1..20: mol_type = other RNA
actatgtcttttctattgtc

SEQ ID NO: 9508 - RNA, 20 nt, synthetic construct
  misc_feature 1..20: note = C9Orf72 TTCN PAM targeting sequence
  source 1..20: mol_type = other RNA
ccttacttttggattttttt

SEQ ID NO: 9509 - RNA, 20 nt, synthetic construct
  misc_feature 1..20: note = C9Orf72 TTCN PAM targeting sequence
  source 1..20: mol_type = other RNA
ttttgttttctccttacttt

SEQ ID NO: 9510 - RNA, 20 nt, synthetic construct
  misc_feature 1..20: note = C9Orf72 TTCN PAM targeting sequence
  source 1..20: mol_type = other RNA
atttgttctttttgttttct

SEQ ID NO: 9511 - RNA, 20 nt, synthetic construct
  misc_feature 1..20: note = C9Orf72 TTCN PAM targeting sequence
  source 1..20: mol_type = other RNA
aaatgccccaattacaagct

SEQ ID NO: 9512 - RNA, 20 nt, synthetic construct
  misc_feature 1..20: note = C9Orf72 TTCN PAM targeting sequence
  source 1..20: mol_type = other RNA
tccaatctgacaatctccag

SEQ ID NO: 9513 - RNA, 20 nt, synthetic construct
  misc_feature 1..20: note = C9Orf72 TTCN PAM targeting sequence
  source 1..20: mol_type = other RNA
taaatgctttttcatccaat

SEQ ID NO: 9514 - RNA, 20 nt, synthetic construct
  misc_feature 1..20: note = C9Orf72 TTCN PAM targeting sequence
  source 1..20: mol_type = other RNA
gtacctgactagtgcttcat

SEQ ID NO: 9515 - RNA, 20 nt, synthetic construct
  misc_feature 1..20: note = C9Orf72 TTCN PAM targeting sequence
  source 1..20: mol_type = other RNA
ccagaggatttaatgagacc

SEQ ID NO: 9516 - RNA, 20 nt, synthetic construct
  misc_feature 1..20: note = C9Orf72 TTCN PAM targeting sequence
  source 1..20: mol_type = other RNA
aatatttacaaaatgaacct

SEQ ID NO: 9517 - RNA, 20 nt, synthetic construct
  misc_feature 1..20: note = C9Orf72 TTCN PAM targeting sequence
  source 1..20: mol_type = other RNA
ttttgtaaatattggaaatg

SEQ ID NO: 9518 - RNA, 20 nt, synthetic construct
  misc_feature 1..20: note = C9Orf72 TTCN PAM targeting sequence
  source 1..20: mol_type = other RNA
ccaagcagcacagcagggat

SEQ ID NO: 9519 - RNA, 20 nt, synthetic construct
  misc_feature 1..20: note = C9Orf72 TTCN PAM targeting sequence
  source 1..20: mol_type = other RNA
cactcgggctctgaatagtg

SEQ ID NO: 9520 - RNA, 20 nt, synthetic construct
  misc_feature 1..20: note = C9Orf72 TTCN PAM targeting sequence
  source 1..20: mol_type = other RNA
gagcccgagtgtgaatccct

SEQ ID NO: 9521 - RNA, 20 nt, synthetic construct
  misc_feature 1..20: note = C9Orf72 TTCN PAM targeting sequence
  source 1..20: mol_type = other RNA
ttactctcctttcaattcag

SEQ ID NO: 9522 - RNA, 20 nt, synthetic construct
  misc_feature 1..20: note = C9Orf72 TTCN PAM targeting sequence
  source 1..20: mol_type = other RNA
attcagctacactgagtacc

SEQ ID NO: 9523 - RNA, 20 nt, synthetic construct
  misc_feature 1..20: note = C9Orf72 TTCN PAM targeting sequence
  source 1..20: mol_type = other RNA
gctacactgagtaccagtta

SEQ ID NO: 9524 - RNA, 20 nt, synthetic construct
  misc_feature 1..20: note = C9Orf72 TTCN PAM targeting sequence
  source 1..20: mol_type = other RNA
tcccagacagttacagtcat

SEQ ID NO: 9525 - RNA, 20 nt, synthetic construct
  misc_feature 1..20: note = C9Orf72 TTCN PAM targeting sequence
  source 1..20: mol_type = other RNA
tcatttgtaaaatggaagta

SEQ ID NO: 9526 - RNA, 20 nt, synthetic construct
  misc_feature 1..20: note = C9Orf72 TTCN PAM targeting sequence
  source 1..20: mol_type = other RNA
attttacaaatgaggaaact

SEQ ID NO: 9527 - RNA, 20 nt, synthetic construct
  misc_feature 1..20: note = C9Orf72 TTCN PAM targeting sequence
  source 1..20: mol_type = other RNA
cctatgatctgcagggtata

SEQ ID NO: 9528 - RNA, 20 nt, synthetic construct
  misc_feature 1..20: note = C9Orf72 TTCN PAM targeting sequence
  source 1..20: mol_type = other RNA
acatcaaaatcaaaatagta

SEQ ID NO: 9529 - RNA, 20 nt, synthetic construct
  misc_feature 1..20: note = C9Orf72 TTCN PAM targeting sequence
  source 1..20: mol_type = other RNA
ataatgctacagtttaaaca

SEQ ID NO: 9530 - RNA, 20 nt, synthetic construct
  misc_feature 1..20: note = C9Orf72 TTCN PAM targeting sequence
  source 1..20: mol_type = other RNA
atagtatatttctataatgc

SEQ ID NO: 9531 - RNA, 20 nt, synthetic construct
  misc_feature 1..20: note = C9Orf72 TTCN PAM targeting sequence
  source 1..20: mol_type = other RNA
ttctatagtatatttctata

SEQ ID NO: 9532 - RNA, 20 nt, synthetic construct
  misc_feature 1..20: note = C9Orf72 TTCN PAM targeting sequence
  source 1..20: mol_type = other RNA
tataatactataaagtaaat

SEQ ID NO: 9533 - RNA, 20 nt, synthetic construct
  misc_feature 1..20: note = C9Orf72 TTCN PAM targeting sequence
  source 1..20: mol_type = other RNA
tctttgagaatcatagtaat

SEQ ID NO: 9534 - RNA, 20 nt, synthetic construct
  misc_feature 1..20: note = C9Orf72 TTCN PAM targeting sequence
  source 1..20: mol_type = other RNA
ttgagaatcatagtaatgtg

SEQ ID NO: 9535 - RNA, 20 nt, synthetic construct
  misc_feature 1..20: note = C9Orf72 TTCN PAM targeting sequence
  source 1..20: mol_type = other RNA
caaagaagaaaccaaaactt

SEQ ID NO: 9536 - RNA, 20 nt, synthetic construct
  misc_feature 1..20: note = C9Orf72 TTCN PAM targeting sequence
  source 1..20: mol_type = other RNA
tttaaagaaacctctcatcc

SEQ ID NO: 9537 - RNA, 20 nt, synthetic construct
  misc_feature 1..20: note = C9Orf72 TTCN PAM targeting sequence
  source 1..20: mol_type = other RNA
ttaaaagaagactaactgat

SEQ ID NO: 9538 - RNA, 20 nt, synthetic construct
  misc_feature 1..20: note = C9Orf72 TTCN PAM targeting sequence
  source 1..20: mol_type = other RNA
attttcaaaaaaaaactttt

SEQ ID NO: 9539 - RNA, 20 nt, synthetic construct
  misc_feature 1..20: note = C9Orf72 TTCN PAM targeting sequence
  source 1..20: mol_type = other RNA
aaaaaaaactttttcttgga

SEQ ID NO: 9540 - RNA, 20 nt, synthetic construct
  misc_feature 1..20: note = C9Orf72 TTCN PAM targeting sequence
  source 1..20: mol_type = other RNA
tggagtgaaaatgtcaaacc

SEQ ID NO: 9541 - RNA, 20 nt, synthetic construct
  misc_feature 1..20: note = C9Orf72 TTCN PAM targeting sequence
  source 1..20: mol_type = other RNA
ctccaagaaaaagttttttt

SEQ ID NO: 9542 - RNA, 20 nt, synthetic construct
  misc_feature 1..20: note = C9Orf72 TTCN PAM targeting sequence
  source 1..20: mol_type = other RNA
tagctttgcagatgaaagtg

SEQ ID NO: 9543 - RNA, 20 nt, synthetic construct
  misc_feature 1..20: note = C9Orf72 TTCN PAM targeting sequence
  source 1..20: mol_type = other RNA
tctgcaaagctaggaatagg

SEQ ID NO: 9544 - RNA, 20 nt, synthetic construct
  misc_feature 1..20: note = C9Orf72 TTCN PAM targeting sequence
  source 1..20: mol_type = other RNA
gattccttggatttttactt

SEQ ID NO: 9545 - RNA, 20 nt, synthetic construct
  misc_feature 1..20: note = C9Orf72 TTCN PAM targeting sequence
  source 1..20: mol_type = other RNA
ttggatttttactttggata

SEQ ID NO: 9546 - RNA, 20 nt, synthetic construct
  misc_feature 1..20: note = C9Orf72 TTCN PAM targeting sequence
  source 1..20: mol_type = other RNA
tcccaggtatctaatacatg

SEQ ID NO: 9547 - RNA, 20 nt, synthetic construct
  misc_feature 1..20: note = C9Orf72 TTCN PAM targeting sequence
  source 1..20: mol_type = other RNA
gtttaggttatattaatatt

SEQ ID NO: 9548 - RNA, 20 nt, synthetic construct
  misc_feature 1..20: note = C9Orf72 TTCN PAM targeting sequence
  source 1..20: mol_type = other RNA
tattattataatattaatat

SEQ ID NO: 9549 - RNA, 20 nt, synthetic construct
  misc_feature 1..20: note = C9Orf72 TTCN PAM targeting sequence
  source 1..20: mol_type = other RNA
aatgtaaaatactatttaga

SEQ ID NO: 9550 - RNA, 20 nt, synthetic construct
  misc_feature 1..20: note = C9Orf72 TTCN PAM targeting sequence
  source 1..20: mol_type = other RNA
aattatatattaatatttca

SEQ ID NO: 9551 - RNA, 20 nt, synthetic construct
  misc_feature 1..20: note = C9Orf72 TTCN PAM targeting sequence
  source 1..20: mol_type = other RNA
ttttgatttttcaaattata

SEQ ID NO: 9552 - RNA, 20 nt, synthetic construct
  misc_feature 1..20: note = C9Orf72 TTCN PAM targeting sequence
  source 1..20: mol_type = other RNA
gcttaactctctggatttca

SEQ ID NO: 9553 - RNA, 20 nt, synthetic construct
  misc_feature 1..20: note = C9Orf72 TTCN PAM targeting sequence
  source 1..20: mol_type = other RNA
ttaaatattttttctttgaa

SEQ ID NO: 9554 - RNA, 20 nt, synthetic construct
  misc_feature 1..20: note = C9Orf72 TTCN PAM targeting sequence
  source 1..20: mol_type = other RNA
ttgaaaagacaaaattaatt

SEQ ID NO: 9555 - RNA, 20 nt, synthetic construct
  misc_feature 1..20: note = C9Orf72 TTCN PAM targeting sequence
  source 1..20: mol_type = other RNA
aagaaaaaatatttaaagaa

SEQ ID NO: 9556 - RNA, 20 nt, synthetic construct
  misc_feature 1..20: note = C9Orf72 TTCN PAM targeting sequence
  source 1..20: mol_type = other RNA
gctgacagtcatgctggatc

SEQ ID NO: 9557 - RNA, 20 nt, synthetic construct
  misc_feature 1..20: note = C9Orf72 TTCN PAM targeting sequence
  source 1..20: mol_type = other RNA
gttcagctgacagtcatgct

SEQ ID NO: 9558 - RNA, 20 nt, synthetic construct
  misc_feature 1..20: note = C9Orf72 TTCN PAM targeting sequence
  source 1..20: mol_type = other RNA
aatatcatagtatttttttc

SEQ ID NO: 9559 - RNA, 20 nt, synthetic construct
  misc_feature 1..20: note = C9Orf72 TTCN PAM targeting sequence
  source 1..20: mol_type = other RNA
gaatgaacaactgaaagagg

SEQ ID NO: 9560 - RNA, 20 nt, synthetic construct
  misc_feature 1..20: note = C9Orf72 TTCN PAM targeting sequence
  source 1..20: mol_type = other RNA
gaaaaaaatactatgatatt

SEQ ID NO: 9561 - RNA, 20 nt, synthetic construct
  misc_feature 1..20: note = C9Orf72 TTCN PAM targeting sequence
  source 1..20: mol_type = other RNA
ttcagaaaaaaatactatga

SEQ ID NO: 9562 - RNA, 20 nt, synthetic construct
  misc_feature 1..20: note = C9Orf72 TTCN PAM targeting sequence
  source 1..20: mol_type = other RNA
gttgttcattcagaaaaaaa

SEQ ID NO: 9563 - RNA, 20 nt, synthetic construct
  misc_feature 1..20: note = C9Orf72 TTCN PAM targeting sequence
  source 1..20: mol_type = other RNA
aatatattttattcaaaatt

SEQ ID NO: 9564 - RNA, 20 nt, synthetic construct
  misc_feature 1..20: note = C9Orf72 TTCN PAM targeting sequence
  source 1..20: mol_type = other RNA
aaattctccatttaggagaa

SEQ ID NO: 9565 - RNA, 20 nt, synthetic construct
  misc_feature 1..20: note = C9Orf72 TTCN PAM targeting sequence
  source 1..20: mol_type = other RNA
ccatttaggagaaaagatat

SEQ ID NO: 9566 - RNA, 20 nt, synthetic construct
  misc_feature 1..20: note = C9Orf72 TTCN PAM targeting sequence
  source 1..20: mol_type = other RNA
cctaaatggagaattttgaa

SEQ ID NO: 9567 - RNA, 20 nt, synthetic construct
  misc_feature 1..20: note = C9Orf72 TTCN PAM targeting sequence
  source 1..20: mol_type = other RNA
ctgtacaacttacattctgt

SEQ ID NO: 9568 - RNA, 20 nt, synthetic construct
  misc_feature 1..20: note = C9Orf72 TTCN PAM targeting sequence
  source 1..20: mol_type = other RNA
gtataacagtacaataaacc

SEQ ID NO: 9569 - RNA, 20 nt, synthetic construct
  misc_feature 1..20: note = C9Orf72 TTCN PAM targeting sequence
  source 1..20: mol_type = other RNA
ttggctggtttattgtactg

SEQ ID NO: 9570 - RNA, 20 nt, synthetic construct
  misc_feature 1..20: note = C9Orf72 TTCN PAM targeting sequence
  source 1..20: mol_type = other RNA
tatttaagtgctaactggtt

SEQ ID NO: 9571 - RNA, 20 nt, synthetic construct
  misc_feature 1..20: note = C9Orf72 TTCN PAM targeting sequence
  source 1..20: mol_type = other RNA
gtggttgtctaaaacatcaa

SEQ ID NO: 9572 - RNA, 20 nt, synthetic construct
  misc_feature 1..20: note = C9Orf72 TTCN PAM targeting sequence
  source 1..20: mol_type = other RNA
gattcatgatgggaaagcta

SEQ ID NO: 9573 - RNA, 20 nt, synthetic construct
  misc_feature 1..20: note = C9Orf72 TTCN PAM targeting sequence
  source 1..20: mol_type = other RNA
tgatgggaaagctattatga

SEQ ID NO: 9574 - RNA, 20 nt, synthetic construct
  misc_feature 1..20: note = C9Orf72 TTCN PAM targeting sequence
  source 1..20: mol_type = other RNA
catcatgaatcagaaagatg

SEQ ID NO: 9575 - RNA, 20 nt, synthetic construct
  misc_feature 1..20: note = C9Orf72 TTCN PAM targeting sequence
  source 1..20: mol_type = other RNA
cattcgaacatgtcattttg

SEQ ID NO: 9576 - RNA, 20 nt, synthetic construct
  misc_feature 1..20: note = C9Orf72 TTCN PAM targeting sequence
  source 1..20: mol_type = other RNA
aacatgtcattttgttgtgt

SEQ ID NO: 9577 - RNA, 20 nt, synthetic construct
  misc_feature 1..20: note = C9Orf72 TTCN PAM targeting sequence
  source 1..20: mol_type = other RNA
aatgtgaaaggtcataatag

SEQ ID NO: 9578 - RNA, 20 nt, synthetic construct
  misc_feature 1..20: note = C9Orf72 TTCN PAM targeting sequence
  source 1..20: mol_type = other RNA
gccccccacccaccaaattt

SEQ ID NO: 9579 - RNA, 20 nt, synthetic construct
  misc_feature 1..20: note = C9Orf72 TTCN PAM targeting sequence
  source 1..20: mol_type = other RNA
tataaatatattttcccttt

SEQ ID NO: 9580 - RNA, 20 nt, synthetic construct
  misc_feature 1..20: note = C9Orf72 TTCN PAM targeting sequence
  source 1..20: mol_type = other RNA
cttttatattacttccagaa

SEQ ID NO: 9581 - RNA, 20 nt, synthetic construct
  misc_feature 1..20: note = C9Orf72 TTCN PAM targeting sequence
  source 1..20: mol_type = other RNA
agaattttaaataaaatatt

SEQ ID NO: 9582 - RNA, 20 nt, synthetic construct
  misc_feature 1..20: note = C9Orf72 TTCN PAM targeting sequence
  source 1..20: mol_type = other RNA
ggaagtaatataaaagggaa

SEQ ID NO: 9583 - RNA, 20 nt, synthetic construct
  misc_feature 1..20: note = C9Orf72 TTCN PAM targeting sequence
  source 1..20: mol_type = other RNA
aacacaatgttgacattgta

SEQ ID NO: 9584 - RNA, 20 nt, synthetic construct
  misc_feature 1..20: note = C9Orf72 TTCN PAM targeting sequence
  source 1..20: mol_type = other RNA
taatgcgtttggaccatttt

SEQ ID NO: 9585 - RNA, 20 nt, synthetic construct
  misc_feature 1..20: note = C9Orf72 TTCN PAM targeting sequence
  source 1..20: mol_type = other RNA
taggtgctactttggcagag

SEQ ID NO: 9586 - RNA, 20 nt, synthetic construct
  misc_feature 1..20: note = C9Orf72 TTCN PAM targeting sequence
  source 1..20: mol_type = other RNA
gtaaaatttctcctgctatt

SEQ ID NO: 9587 - RNA, 20 nt, synthetic construct
  misc_feature 1..20: note = C9Orf72 TTCN PAM targeting sequence
  source 1..20: mol_type = other RNA
cctgctattccttatagcct

SEQ ID NO: 9588 - RNA, 20 nt, synthetic construct
  misc_feature 1..20: note = C9Orf72 TTCN PAM targeting sequence
  source 1..20: mol_type = other RNA
ttatagcctattgcaggcaa

SEQ ID NO: 9589 - RNA, 20 nt, synthetic construct
  misc_feature 1..20: note = C9Orf72 TTCN PAM targeting sequence
  source 1..20: mol_type = other RNA
aaaacataggcagaaatgca

SEQ ID NO: 9590 - RNA, 20 nt, synthetic construct
  misc_feature 1..20: note = C9Orf72 TTCN PAM targeting sequence
  source 1..20: mol_type = other RNA
gcctatgtttttgaagttgt

SEQ ID NO: 9591 - RNA, 20 nt, synthetic construct
  misc_feature 1..20: note = C9Orf72 TTCN PAM targeting sequence
  source 1..20: mol_type = other RNA
tgcatttctgcctatgtttt

SEQ ID NO: 9592 - RNA, 20 nt, synthetic construct
  misc_feature 1..20: note = C9Orf72 TTCN PAM targeting sequence
  source 1..20: mol_type = other RNA
ttcttgcatttctgcctatg

SEQ ID NO: 9593 - RNA, 20 nt, synthetic construct
  misc_feature 1..20: note = C9Orf72 TTCN PAM targeting sequence
  source 1..20: mol_type = other RNA
ttgagtacttccttcttgca

SEQ ID NO: 9594 - RNA, 20 nt, synthetic construct
  misc_feature 1..20: note = C9Orf72 TTCN PAM targeting sequence
  source 1..20: mol_type = other RNA
gtttctgaaaaaaagatctt

SEQ ID NO: 9595 - RNA, 20 nt, synthetic construct
  misc_feature 1..20: note = C9Orf72 TTCN PAM targeting sequence
  source 1..20: mol_type = other RNA
gaaaaaaagatcttattagt

SEQ ID NO: 9596 - RNA, 20 nt, synthetic construct
  misc_feature 1..20: note = C9Orf72 TTCN PAM targeting sequence
  source 1..20: mol_type = other RNA
gaaacagaaaatagttcctt

SEQ ID NO: 9597 - RNA, 20 nt, synthetic construct
  misc_feature 1..20: note = C9Orf72 TTCN PAM targeting sequence
  source 1..20: mol_type = other RNA
ctaaggcattttataatctc

SEQ ID NO: 9598 - RNA, 20 nt, synthetic construct
  misc_feature 1..20: note = C9Orf72 TTCN PAM targeting sequence
  source 1..20: mol_type = other RNA
tgctaagtcttaccatgtac

SEQ ID NO: 9599 - RNA, 20 nt, synthetic construct
  misc_feature 1..20: note = C9Orf72 TTCN PAM targeting sequence
  source 1..20: mol_type = other RNA
tcttgctaagtcttaccatg

SEQ ID NO: 9600 - RNA, 20 nt, synthetic construct
  misc_feature 1..20: note = C9Orf72 TTCN PAM targeting sequence
  source 1..20: mol_type = other RNA
tcttgttttcttcttgctaa

SEQ ID NO: 9601 - RNA, 20 nt, synthetic construct
  misc_feature 1..20: note = C9Orf72 TTCN PAM targeting sequence
  source 1..20: mol_type = other RNA
ctggtcagtcattttcatct

SEQ ID NO: 9602 - RNA, 20 nt, synthetic construct
  misc_feature 1..20: note = C9Orf72 TTCN PAM targeting sequence
  source 1..20: mol_type = other RNA
gatttcactggtcagtcatt

SEQ ID NO: 9603 - RNA, 20 nt, synthetic construct
  misc_feature 1..20: note = C9Orf72 TTCN PAM targeting sequence
  source 1..20: mol_type = other RNA
aagtaattagattttctaag

SEQ ID NO: 9604 - RNA, 20 nt, synthetic construct
  misc_feature 1..20: note = C9Orf72 TTCN PAM targeting sequence
  source 1..20: mol_type = other RNA
aaggagaaaaaaggcacagg

SEQ ID NO: 9605 - RNA, 20 nt, synthetic construct
  misc_feature 1..20: note = C9Orf72 TTCN PAM targeting sequence
  source 1..20: mol_type = other RNA
ccttagaaaatctaattact

SEQ ID NO: 9606 - RNA, 20 nt, synthetic construct
  misc_feature 1..20: note = C9Orf72 TTCN PAM targeting sequence
  source 1..20: mol_type = other RNA
atttggctcaaaaataatga

SEQ ID NO: 9607 - RNA, 20 nt, synthetic construct
  misc_feature 1..20: note = C9Orf72 TTCN PAM targeting sequence
  source 1..20: mol_type = other RNA
ttatttttgagccaaattga

SEQ ID NO: 9608 - RNA, 20 nt, synthetic construct
  misc_feature 1..20: note = C9Orf72 TTCN PAM targeting sequence
  source 1..20: mol_type = other RNA
ttttacagagctcaactaca

SEQ ID NO: 9609 - RNA, 20 nt, synthetic construct
  misc_feature 1..20: note = C9Orf72 TTCN PAM targeting sequence
  source 1..20: mol_type = other RNA
atgtagttgagctctgtaaa

SEQ ID NO: 9610 - RNA, 20 nt, synthetic construct
  misc_feature 1..20: note = C9Orf72 TTCN PAM targeting sequence
  source 1..20: mol_type = other RNA
tgctattgttgatattctat

SEQ ID NO: 9611 - RNA, 20 nt, synthetic construct
  misc_feature 1..20: note = C9Orf72 TTCN PAM targeting sequence
  source 1..20: mol_type = other RNA
ccaggaacaaggactataga

SEQ ID NO: 9612 - RNA, 20 nt, synthetic construct
  misc_feature 1..20: note = C9Orf72 TTCN PAM targeting sequence
  source 1..20: mol_type = other RNA
tggtgaaccacagttagggt

SEQ ID NO: 9613 - RNA, 20 nt, synthetic construct
  misc_feature 1..20: note = C9Orf72 TTCN PAM targeting sequence
  source 1..20: mol_type = other RNA
ctatagtccttgttcctggt

SEQ ID NO: 9614 - RNA, 20 nt, synthetic construct
  misc_feature 1..20: note = C9Orf72 TTCN PAM targeting sequence
  source 1..20: mol_type = other RNA
acagactgaatcccagggac

SEQ ID NO: 9615 - RNA, 20 nt, synthetic construct
  misc_feature 1..20: note = C9Orf72 TTCN PAM targeting sequence
  source 1..20: mol_type = other RNA
gtctgtagaaatgtctaata

SEQ ID NO: 9616 - RNA, 20 nt, synthetic construct
  misc_feature 1..20: note = C9Orf72 TTCN PAM targeting sequence
  source 1..20: mol_type = other RNA
aattaaacatctgcttgatc

SEQ ID NO: 9617 - RNA, 20 nt, synthetic construct
  misc_feature 1..20: note = C9Orf72 TTCN PAM targeting sequence
  source 1..20: mol_type = other RNA
ttctaaagctcatcctatgt

SEQ ID NO: 9618 - RNA, 20 nt, synthetic construct
  misc_feature 1..20: note = C9Orf72 TTCN PAM targeting sequence
  source 1..20: mol_type = other RNA
aaagctcatcctatgttcaa

SEQ ID NO: 9619 - RNA, 20 nt, synthetic construct
  misc_feature 1..20: note = C9Orf72 TTCN PAM targeting sequence
  source 1..20: mol_type = other RNA
agctcactttctttctgtgg

SEQ ID NO: 9620 - RNA, 20 nt, synthetic construct
  misc_feature 1..20: note = C9Orf72 TTCN PAM targeting sequence
  source 1..20: mol_type = other RNA
ttctgtggaattgaaatcat

SEQ ID NO: 9621 - RNA, 20 nt, synthetic construct
  misc_feature 1..20: note = C9Orf72 TTCN PAM targeting sequence
  source 1..20: mol_type = other RNA
gtggaattgaaatcatttaa

SEQ ID NO: 9622 - RNA, 20 nt, synthetic construct
  misc_feature 1..20: note = C9Orf72 TTCN PAM targeting sequence
  source 1..20: mol_type = other RNA
acagaaagaaagtgagcttg

SEQ ID NO: 9623 - RNA, 20 nt, synthetic construct
  misc_feature 1..20: note = C9Orf72 TTCN PAM targeting sequence
  source 1..20: mol_type = other RNA
attccacagaaagaaagtga

SEQ ID NO: 9624 - RNA, 20 nt, synthetic construct
  misc_feature 1..20: note = C9Orf72 TTCN PAM targeting sequence
  source 1..20: mol_type = other RNA
gttgattgcagaagtattac

SEQ ID NO: 9625 - RNA, 20 nt, synthetic construct
  misc_feature 1..20: note = C9Orf72 TTCN PAM targeting sequence
  source 1..20: mol_type = other RNA
gcaatcaactgaaaactaga

SEQ ID NO: 9626 - RNA, 20 nt, synthetic construct
  misc_feature 1..20: note = C9Orf72 TTCN PAM targeting sequence
  source 1..20: mol_type = other RNA
acacaccaaagaatgccaaa

SEQ ID NO: 9627 - RNA, 20 nt, synthetic construct
  misc_feature 1..20: note = C9Orf72 TTCN PAM targeting sequence
  source 1..20: mol_type = other RNA
ttggtgtgtagaattactgt

SEQ ID NO: 9628 - RNA, 20 nt, synthetic construct
  misc_feature 1..20: note = C9Orf72 TTCN PAM targeting sequence
  source 1..20: mol_type = other RNA
atcttttggcattctttggt

SEQ ID NO: 9629 - RNA, 20 nt, synthetic construct
  misc_feature 1..20: note = C9Orf72 TTCN PAM targeting sequence
  source 1..20: mol_type = other RNA
ccttgacacatgtaaaccat

SEQ ID NO: 9630 - RNA, 20 nt, synthetic construct
  misc_feature 1..20: note = C9Orf72 TTCN PAM targeting sequence
  source 1..20: mol_type = other RNA
tggtttacatgtgtcaaggt

SEQ ID NO: 9631 - RNA, 20 nt, synthetic construct
  misc_feature 1..20: note = C9Orf72 TTCN PAM targeting sequence
  source 1..20: mol_type = other RNA
aaaaaacagtagttgtggtc

SEQ ID NO: 9632 - RNA, 20 nt, synthetic construct
  misc_feature 1..20: note = C9Orf72 TTCN PAM targeting sequence
  source 1..20: mol_type = other RNA
tagatttatgcttttgggat

SEQ ID NO: 9633 - RNA, 20 nt, synthetic construct
  misc_feature 1..20: note = C9Orf72 TTCN PAM targeting sequence
  source 1..20: mol_type = other RNA
cacaagagcctgtgagggga

SEQ ID NO: 9634 - RNA, 20 nt, synthetic construct
  misc_feature 1..20: note = C9Orf72 TTCN PAM targeting sequence
  source 1..20: mol_type = other RNA
gctctcagcaattgcagtta

SEQ ID NO: 9635 - RNA, 20 nt, synthetic construct
  misc_feature 1..20: note = C9Orf72 TTCN PAM targeting sequence
  source 1..20: mol_type = other RNA
ggagtatgatccaggggaac

SEQ ID NO: 9636 - RNA, 20 nt, synthetic construct
  misc_feature 1..20: note = C9Orf72 TTCN PAM targeting sequence
  source 1..20: mol_type = other RNA
cctggatcatactccagaat

SEQ ID NO: 9637 - RNA, 20 nt, synthetic construct
  misc_feature 1..20: note = C9Orf72 TTCN PAM targeting sequence
  source 1..20: mol_type = other RNA
ccacaccactgagctacttt

SEQ ID NO: 9638 - RNA, 20 nt, synthetic construct
  misc_feature 1..20: note = C9Orf72 TTCN PAM targeting sequence
  source 1..20: mol_type = other RNA
atcacaatcatgatcgctgg

SEQ ID NO: 9639 - RNA, 20 nt, synthetic construct
  misc_feature 1..20: note = C9Orf72 TTCN PAM targeting sequence
  source 1..20: mol_type = other RNA
aatgactttttaaatgtgta

SEQ ID NO: 9640 - RNA, 20 nt, synthetic construct
  misc_feature 1..20: note = C9Orf72 TTCN PAM targeting sequence
  source 1..20: mol_type = other RNA
tgcacactagtgtagaaagg

SEQ ID NO: 9641 - RNA, 20 nt, synthetic construct
  misc_feature 1..20: note = C9Orf72 TTCN PAM targeting sequence
  source 1..20: mol_type = other RNA
acactagtgtgcaagaacga

SEQ ID NO: 9642 - RNA, 20 nt, synthetic construct
  misc_feature 1..20: note = C9Orf72 TTCN PAM targeting sequence
  source 1..20: mol_type = other RNA
aaagataaaagagtgtaggc

SEQ ID NO: 9643 - RNA, 20 nt, synthetic construct
  misc_feature 1..20: note = C9Orf72 TTCN PAM targeting sequence
  source 1..20: mol_type = other RNA
cagccagagccattattatg

SEQ ID NO: 9644 - RNA, 20 nt, synthetic construct
  misc_feature 1..20: note = C9Orf72 TTCN PAM targeting sequence
  source 1..20: mol_type = other RNA
ggttccgaagagatttaaag

SEQ ID NO: 9645 - RNA, 20 nt, synthetic construct
  misc_feature 1..20: note = C9Orf72 TTCN PAM targeting sequence
  source 1..20: mol_type = other RNA
gaagagatttaaagggcttt

SEQ ID NO: 9646 - RNA, 20 nt, synthetic construct
  misc_feature 1..20: note = C9Orf72 TTCN PAM targeting sequence
  source 1..20: mol_type = other RNA
gaacctgaagatagaccttg

SEQ ID NO: 9647 - RNA, 20 nt, synthetic construct
  misc_feature 1..20: note = C9Orf72 TTCN PAM targeting sequence
  source 1..20: mol_type = other RNA
cttctgcctaaaaataatgg

SEQ ID NO: 9648 - RNA, 20 nt, synthetic construct
  misc_feature 1..20: note = C9Orf72 TTCN PAM targeting sequence
  source 1..20: mol_type = other RNA
gcctaaaaataatggaaaaa

SEQ ID NO: 9649 - RNA, 20 nt, synthetic construct
  misc_feature 1..20: note = C9Orf72 TTCN PAM targeting sequence
  source 1..20: mol_type = other RNA
attatttttaggcagaaggg

SEQ ID NO: 9650 - RNA, 20 nt, synthetic construct
  misc_feature 1..20: note = C9Orf72 TTCN PAM targeting sequence
  source 1..20: mol_type = other RNA
tttttttttttttttttttt

SEQ ID NO: 9651 - RNA, 20 nt, synthetic construct
  misc_feature 1..20: note = C9Orf72 TTCN PAM targeting sequence
  source 1..20: mol_type = other RNA
atatcataatttttgcgctt

SEQ ID NO: 9652 - RNA, 20 nt, synthetic construct
  misc_feature 1..20: note = C9Orf72 TTCN PAM targeting sequence
  source 1..20: mol_type = other RNA
tttgtacattttctatatca

SEQ ID NO: 9653 - RNA, 20 nt, synthetic construct
  misc_feature 1..20: note = C9Orf72 TTCN PAM targeting sequence
  source 1..20: mol_type = other RNA
tccgtgtaggagttttactc

SEQ ID NO: 9654 - RNA, 20 nt, synthetic construct
  misc_feature 1..20: note = C9Orf72 TTCN PAM targeting sequence
  source 1..20: mol_type = other RNA
gtgtaggagttttactcacg

SEQ ID NO: 9655 - RNA, 20 nt, synthetic construct
  misc_feature 1..20: note = C9Orf72 TTCN PAM targeting sequence
  source 1..20: mol_type = other RNA
atatattttattagtgtcaa

SEQ ID NO: 9656 - RNA, 20 nt, synthetic construct
  misc_feature 1..20: note = C9Orf72 TTCN PAM targeting sequence
  source 1..20: mol_type = other RNA
gtgaaggacaagtagaaact

SEQ ID NO: 9657 - RNA, 20 nt, synthetic construct
  misc_feature 1..20: note = C9Orf72 TTCN PAM targeting sequence
  source 1..20: mol_type = other RNA
cagaaaagccttgacactaa

SEQ ID NO: 9658 - RNA, 20 nt, synthetic construct
  misc_feature 1..20: note = C9Orf72 TTCN PAM targeting sequence
  source 1..20: mol_type = other RNA
acttgtccttcacagaaaag

SEQ ID NO: 9659 - RNA, 20 nt, synthetic construct
  misc_feature 1..20: note = C9Orf72 TTCN PAM targeting sequence
  source 1..20: mol_type = other RNA
ttgcacagtttctacttgtc

SEQ ID NO: 9660 - RNA, 20 nt, synthetic construct
  misc_feature 1..20: note = C9Orf72 TTCN PAM targeting sequence
  source 1..20: mol_type = other RNA
gagagataagccaggtttca

SEQ ID NO: 9661 - RNA, 20 nt, synthetic construct
  misc_feature 1..20: note = C9Orf72 TTCN PAM targeting sequence
  source 1..20: mol_type = other RNA
gctgaaagacctgcagggag

SEQ ID NO: 9662 - RNA, 20 nt, synthetic construct
  misc_feature 1..20: note = C9Orf72 TTCN PAM targeting sequence
  source 1..20: mol_type = other RNA
gctgaaacctggcttatctc

SEQ ID NO: 9663 - RNA, 20 nt, synthetic construct
  misc_feature 1..20: note = C9Orf72 TTCN PAM targeting sequence
  source 1..20: mol_type = other RNA
tctccctgcaggtctttcag

SEQ ID NO: 9664 - RNA, 20 nt, synthetic construct
  misc_feature 1..20: note = C9Orf72 TTCN PAM targeting sequence
  source 1..20: mol_type = other RNA
acacataatttgctcacatt

SEQ ID NO: 9665 - RNA, 20 nt, synthetic construct
  misc_feature 1..20: note = C9Orf72 TTCN PAM targeting sequence
  source 1..20: mol_type = other RNA
actcgtacagaagtttctat

SEQ ID NO: 9666 - RNA, 20 nt, synthetic construct
  misc_feature 1..20: note = C9Orf72 TTCN PAM targeting sequence
  source 1..20: mol_type = other RNA
gtacgagtagaatgtgagca

SEQ ID NO: 9667 - RNA, 20 nt, synthetic construct
  misc_feature 1..20: note = C9Orf72 TTCN PAM targeting sequence
  source 1..20: mol_type = other RNA
atgacagtgttgacagtgct

SEQ ID NO: 9668 - RNA, 20 nt, synthetic construct
  misc_feature 1..20: note = C9Orf72 TTCN PAM targeting sequence
  source 1..20: mol_type = other RNA
actgatgccccctaacagga

SEQ ID NO: 9669 - RNA, 20 nt, synthetic construct
  misc_feature 1..20: note = C9Orf72 TTCN PAM targeting sequence
  source 1..20: mol_type = other RNA
ataccacactcctgttaggg

SEQ ID NO: 9670 - RNA, 20 nt, synthetic construct
  misc_feature 1..20: note = C9Orf72 TTCN PAM targeting sequence
  source 1..20: mol_type = other RNA
tacacctagtgcttctatac

SEQ ID NO: 9671 - RNA, 20 nt, synthetic construct
  misc_feature 1..20: note = C9Orf72 TTCN PAM targeting sequence
  source 1..20: mol_type = other RNA
agcgattctcctgcctcagc

SEQ ID NO: 9672 - RNA, 20 nt, synthetic construct
  misc_feature 1..20: note = C9Orf72 TTCN PAM targeting sequence
  source 1..20: mol_type = other RNA
cctgcctcagcctcccaggt

SEQ ID NO: 9673 - RNA, 20 nt, synthetic construct
  misc_feature 1..20: note = C9Orf72 TTCN PAM targeting sequence
  source 1..20: mol_type = other RNA
ccatgttggcaggatggtct

SEQ ID NO: 9674 - RNA, 20 nt, synthetic construct
  misc_feature 1..20: note = C9Orf72 TTCN PAM targeting sequence
  source 1..20: mol_type = other RNA
aaaaactgtcagattgtctg

SEQ ID NO: 9675 - RNA, 20 nt, synthetic construct
  misc_feature 1..20: note = C9Orf72 TTCN PAM targeting sequence
  source 1..20: mol_type = other RNA
aatttatctttaaaaatgca

SEQ ID NO: 9676 - RNA, 20 nt, synthetic construct
  misc_feature 1..20: note = C9Orf72 TTCN PAM targeting sequence
  source 1..20: mol_type = other RNA
aattttgcattctacttcag

SEQ ID NO: 9677 - RNA, 20 nt, synthetic construct
  misc_feature 1..20: note = C9Orf72 TTCN PAM targeting sequence
  source 1..20: mol_type = other RNA
acttcagaatacatccatgt

SEQ ID NO: 9678 - RNA, 20 nt, synthetic construct
  misc_feature 1..20: note = C9Orf72 TTCN PAM targeting sequence
  source 1..20: mol_type = other RNA
gaatacatccatgtttactt

SEQ ID NO: 9679 - RNA, 20 nt, synthetic construct
  misc_feature 1..20: note = C9Orf72 TTCN PAM targeting sequence
  source 1..20: mol_type = other RNA
gaagtagaatgcaaaatttg

SEQ ID NO: 9680 - RNA, 20 nt, synthetic construct
  misc_feature 1..20: note = C9Orf72 TTCN PAM targeting sequence
  source 1..20: mol_type = other RNA
cttttaaaactcatacataa

SEQ ID NO: 9681 - RNA, 20 nt, synthetic construct
  misc_feature 1..20: note = C9Orf72 TTCN PAM targeting sequence
  source 1..20: mol_type = other RNA
tattacttaattttttctgc

SEQ ID NO: 9682 - RNA, 20 nt, synthetic construct
  misc_feature 1..20: note = C9Orf72 TTCN PAM targeting sequence
  source 1..20: mol_type = other RNA
gcccaaatcttcaaataaca

SEQ ID NO: 9683 - RNA, 20 nt, synthetic construct
  misc_feature 1..20: note = C9Orf72 TTCN PAM targeting sequence
  source 1..20: mol_type = other RNA
aataacattgaagctcctag

SEQ ID NO: 9684 - RNA, 20 nt, synthetic construct
  misc_feature 1..20: note = C9Orf72 TTCN PAM targeting sequence
  source 1..20: mol_type = other RNA
atgttatttgaagatttggg

SEQ ID NO: 9685 - RNA, 20 nt, synthetic construct
  misc_feature 1..20: note = C9Orf72 TTCN PAM targeting sequence
  source 1..20: mol_type = other RNA
aggagcttcaatgttatttg

SEQ ID NO: 9686 - RNA, 20 nt, synthetic construct
  misc_feature 1..20: note = C9Orf72 TTCN PAM targeting sequence
  source 1..20: mol_type = other RNA
tatacctgtacttttgcagg

SEQ ID NO: 9687 - RNA, 20 nt, synthetic construct
  misc_feature 1..20: note = C9Orf72 TTCN PAM targeting sequence
  source 1..20: mol_type = other RNA
actcctacccacccactcca

SEQ ID NO: 9688 - RNA, 20 nt, synthetic construct
  misc_feature 1..20: note = C9Orf72 TTCN PAM targeting sequence
  source 1..20: mol_type = other RNA
caagctgacataaaatccct

SEQ ID NO: 9689 - RNA, 20 nt, synthetic construct
  misc_feature 1..20: note = C9Orf72 TTCN PAM targeting sequence
  source 1..20: mol_type = other RNA
tgcttctcaagctgacataa

SEQ ID NO: 9690 - RNA, 20 nt, synthetic construct
  misc_feature 1..20: note = C9Orf72 TTCN PAM targeting sequence
  source 1..20: mol_type = other RNA
aggcctacgaattttccttg

SEQ ID NO: 9691 - RNA, 20 nt, synthetic construct
  misc_feature 1..20: note = C9Orf72 TTCN PAM targeting sequence
  source 1..20: mol_type = other RNA
taggcctggaatttcatgct

SEQ ID NO: 9692 - RNA, 20 nt, synthetic construct
  misc_feature 1..20: note = C9Orf72 TTCN PAM targeting sequence
  source 1..20: mol_type = other RNA
ttgaacttcgcaatatgtca

SEQ ID NO: 9693 - RNA, 20 nt, synthetic construct
  misc_feature 1..20: note = C9Orf72 TTCN PAM targeting sequence
  source 1..20: mol_type = other RNA
aggaaaattcgtaggcctgg

SEQ ID NO: 9694 - RNA, 20 nt, synthetic construct
  misc_feature 1..20: note = C9Orf72 TTCN PAM targeting sequence
  source 1..20: mol_type = other RNA
caatatgtcacagacctcat

SEQ ID NO: 9695 - RNA, 20 nt, synthetic construct
  misc_feature 1..20: note = C9Orf72 TTCN PAM targeting sequence
  source 1..20: mol_type = other RNA
agtaaacataaggatctcat

SEQ ID NO: 9696 - RNA, 20 nt, synthetic construct
  misc_feature 1..20: note = C9Orf72 TTCN PAM targeting sequence
  source 1..20: mol_type = other RNA
aagctttatctatgacacag

SEQ ID NO: 9697 - RNA, 20 nt, synthetic construct
  misc_feature 1..20: note = C9Orf72 TTCN PAM targeting sequence
  source 1..20: mol_type = other RNA
tggcctgatccccagaatgt

SEQ ID NO: 9698 - RNA, 20 nt, synthetic construct
  misc_feature 1..20: note = C9Orf72 TTCN PAM targeting sequence
  source 1..20: mol_type = other RNA
ggggatcaggccaggaaact

SEQ ID NO: 9699 - RNA, 20 nt, synthetic construct
  misc_feature 1..20: note = C9Orf72 TTCN PAM targeting sequence
  source 1..20: mol_type = other RNA
taatatattacagtttgtta

SEQ ID NO: 9700 - RNA, 20 nt, synthetic construct
  misc_feature 1..20: note = C9Orf72 TTCN PAM targeting sequence
  source 1..20: mol_type = other RNA
atataatctacgatttcctt

SEQ ID NO: 9701 - RNA, 20 nt, synthetic construct
  misc_feature 1..20: note = C9Orf72 TTCN PAM targeting sequence
  source 1..20: mol_type = other RNA
ttcaactgtgtaattaagta

SEQ ID NO: 9702 - RNA, 20 nt, synthetic construct
  misc_feature 1..20: note = C9Orf72 TTCN PAM targeting sequence
  source 1..20: mol_type = other RNA
actgtgtaattaagtagata

SEQ ID NO: 9703 - RNA, 20 nt, synthetic construct
  misc_feature 1..20: note = C9Orf72 TTCN PAM targeting sequence
  source 1..20: mol_type = other RNA
tttaaaaaatatctacttaa

SEQ ID NO: 9704 - RNA, 20 nt, synthetic construct
  misc_feature 1..20: note = C9Orf72 TTCN PAM targeting sequence
  source 1..20: mol_type = other RNA
ttcttttaaaaaatatctac

SEQ ID NO: 9705 - RNA, 20 nt, synthetic construct
  misc_feature 1..20: note = C9Orf72 TTCN PAM targeting sequence
  source 1..20: mol_type = other RNA
aaaatatttttgagtcattt

SEQ ID NO: 9706 - RNA, 20 nt, synthetic construct
  misc_feature 1..20: note = C9Orf72 TTCN PAM targeting sequence
  source 1..20: mol_type = other RNA
ggcaaataaacaacctccct

SEQ ID NO: 9707 - RNA, 20 nt, synthetic construct
  misc_feature 1..20: note = C9Orf72 TTCN PAM targeting sequence
  source 1..20: mol_type = other RNA
caaaaaaaaaaaaaaaactt

SEQ ID NO: 9708 - RNA, 20 nt, synthetic construct
  misc_feature 1..20: note = C9Orf72 TTCN PAM targeting sequence
  source 1..20: mol_type = other RNA
agcattaacctataacaagt

SEQ ID NO: 9709 - RNA, 20 nt, synthetic construct
  misc_feature 1..20: note = C9Orf72 TTCN PAM targeting sequence
  source 1..20: mol_type = other RNA
atacgtcaaacaacaaacat

SEQ ID NO: 9710 - RNA, 20 nt, synthetic construct
  misc_feature 1..20: note = C9Orf72 TTCN PAM targeting sequence
  source 1..20: mol_type = other RNA
ccattaataagtcaaaagga

SEQ ID NO: 9711 - RNA, 20 nt, synthetic construct
  misc_feature 1..20: note = C9Orf72 TTCN PAM targeting sequence
  source 1..20: mol_type = other RNA
ttttgacttattaatgggga

SEQ ID NO: 9712 - RNA, 20 nt, synthetic construct
  misc_feature 1..20: note = C9Orf72 TTCN PAM targeting sequence
  source 1..20: mol_type = other RNA
aaagtgtctaaatgattttt

SEQ ID NO: 9713 - RNA, 20 nt, synthetic construct
  misc_feature 1..20: note = C9Orf72 TTCN PAM targeting sequence
  source 1..20: mol_type = other RNA
taattctatcattttataaa

SEQ ID NO: 9714 - RNA, 20 nt, synthetic construct
  misc_feature 1..20: note = C9Orf72 TTCN PAM targeting sequence
  source 1..20: mol_type = other RNA
atcattttataaatgttaaa

SEQ ID NO: 9715 - RNA, 20 nt, synthetic construct
  misc_feature 1..20: note = C9Orf72 TTCN PAM targeting sequence
  source 1..20: mol_type = other RNA
ctttgatacatgtaaaccag

SEQ ID NO: 9716 - RNA, 20 nt, synthetic construct
  misc_feature 1..20: note = C9Orf72 TTCN PAM targeting sequence
  source 1..20: mol_type = other RNA
tggtttacatgtatcaaagt

SEQ ID NO: 9717 - RNA, 20 nt, synthetic construct
  misc_feature 1..20: note = C9Orf72 TTCN PAM targeting sequence
  source 1..20: mol_type = other RNA
atgtttcaaaaaacagtagt

SEQ ID NO: 9718 - RNA, 20 nt, synthetic construct
  misc_feature 1..20: note = C9Orf72 TTCN PAM targeting sequence
  source 1..20: mol_type = other RNA
aaaaacagtagttgtggtca

SEQ ID NO: 9719 - RNA, 20 nt, synthetic construct
  misc_feature 1..20: note = C9Orf72 TTCN PAM targeting sequence
  source 1..20: mol_type = other RNA
gacctttgtttacaatataa

SEQ ID NO: 9720 - RNA, 20 nt, synthetic construct
  misc_feature 1..20: note = C9Orf72 TTCN PAM targeting sequence
  source 1..20: mol_type = other RNA
cgaagcataaatctaggaca

SEQ ID NO: 9721 - RNA, 20 nt, synthetic construct
  misc_feature 1..20: note = C9Orf72 TTCN PAM targeting sequence
  source 1..20: mol_type = other RNA
ggaattcagacctttgttta

SEQ ID NO: 9722 - RNA, 20 nt, synthetic construct
  misc_feature 1..20: note = C9Orf72 TTCN PAM targeting sequence
  source 1..20: mol_type = other RNA
gagaactgtagtgtaactaa

SEQ ID NO: 9723 - RNA, 20 nt, synthetic construct
  misc_feature 1..20: note = C9Orf72 TTCN PAM targeting sequence
  source 1..20: mol_type = other RNA
cagaagagtctgtgagggca

SEQ ID NO: 9724 - RNA, 20 nt, synthetic construct
  misc_feature 1..20: note = C9Orf72 TTCN PAM targeting sequence
  source 1..20: mol_type = other RNA
gctcagcaattgcagttaag

SEQ ID NO: 9725 - RNA, 20 nt, synthetic construct
  misc_feature 1..20: note = C9Orf72 TTCN PAM targeting sequence
  source 1..20: mol_type = other RNA
cctggatcatgccccagagt

SEQ ID NO: 9726 - RNA, 20 nt, synthetic construct
  misc_feature 1..20: note = C9Orf72 TTCN PAM targeting sequence
  source 1..20: mol_type = other RNA
atatatttatattcccctgg

SEQ ID NO: 9727 - RNA, 20 nt, synthetic construct
  misc_feature 1..20: note = C9Orf72 TTCN PAM targeting sequence
  source 1..20: mol_type = other RNA
tttttaatatatcctacaat

SEQ ID NO: 9728 - RNA, 20 nt, synthetic construct
  misc_feature 1..20: note = C9Orf72 TTCN PAM targeting sequence
  source 1..20: mol_type = other RNA
ctctgacaatctcaagttca

SEQ ID NO: 9729 - RNA, 20 nt, synthetic construct
  misc_feature 1..20: note = C9Orf72 TTCN PAM targeting sequence
  source 1..20: mol_type = other RNA
acatttacctgatccaggaa

SEQ ID NO: 9730 - RNA, 20 nt, synthetic construct
  misc_feature 1..20: note = C9Orf72 TTCN PAM targeting sequence
  source 1..20: mol_type = other RNA
tggatcaggtaaatgttgaa

SEQ ID NO: 9731 - RNA, 20 nt, synthetic construct
  misc_feature 1..20: note = C9Orf72 TTCN PAM targeting sequence
  source 1..20: mol_type = other RNA
ctagagtgtctctgtgtaag

SEQ ID NO: 9732 - RNA, 20 nt, synthetic construct
  misc_feature 1..20: note = C9Orf72 TTCN PAM targeting sequence
  source 1..20: mol_type = other RNA
agatgtcttacacagagaca

SEQ ID NO: 9733 - RNA, 20 nt, synthetic construct
  misc_feature 1..20: note = C9Orf72 TTCN PAM targeting sequence
  source 1..20: mol_type = other RNA
tgaagaaaagaagaaaatga

SEQ ID NO: 9734 - RNA, 20 nt, synthetic construct
  misc_feature 1..20: note = C9Orf72 TTCN PAM targeting sequence
  source 1..20: mol_type = other RNA
ggaatatttttcaagatgtc

SEQ ID NO: 9735 - RNA, 20 nt, synthetic construct
  misc_feature 1..20: note = C9Orf72 TTCN PAM targeting sequence
  source 1..20: mol_type = other RNA
tcaggaatatttttcaagat

SEQ ID NO: 9736 - RNA, 20 nt, synthetic construct
  misc_feature 1..20: note = C9Orf72 TTCN PAM targeting sequence
  source 1..20: mol_type = other RNA
tttcttcaggaatatttttc

SEQ ID NO: 9737 - RNA, 20 nt, synthetic construct
  misc_feature 1..20: note = C9Orf72 TTCN PAM targeting sequence
  source 1..20: mol_type = other RNA
tcttttcttcaggaatattt

SEQ ID NO: 9738 - RNA, 20 nt, synthetic construct
  misc_feature 1..20: note = C9Orf72 TTCN PAM targeting sequence
  source 1..20: mol_type = other RNA
ttttcttcttttcttcagga

SEQ ID NO: 9739 - RNA, 20 nt, synthetic construct
  misc_feature 1..20: note = C9Orf72 TTCN PAM targeting sequence
  source 1..20: mol_type = other RNA
tcattttcttcttttcttca

SEQ ID NO: 9740 - RNA, 20 nt, synthetic construct
  misc_feature 1..20: note = C9Orf72 TTCN PAM targeting sequence
  source 1..20: mol_type = other RNA
tttcttcattttcttctttt

SEQ ID NO: 9741 - RNA, 20 nt, synthetic construct
  misc_feature 1..20: note = C9Orf72 TTCN PAM targeting sequence
  source 1..20: mol_type = other RNA
aatgttgaaatggccatata

SEQ ID NO: 9742 - RNA, 20 nt, synthetic construct
  misc_feature 1..20: note = C9Orf72 TTCN PAM targeting sequence
  source 1..20: mol_type = other RNA
acatttgaacttttttcttt

SEQ ID NO: 9743 - RNA, 20 nt, synthetic construct
  misc_feature 1..20: note = C9Orf72 TTCN PAM targeting sequence
  source 1..20: mol_type = other RNA
acaatccctcacttgagcca

SEQ ID NO: 9744 - RNA, 20 nt, synthetic construct
  misc_feature 1..20: note = C9Orf72 TTCN PAM targeting sequence
  source 1..20: mol_type = other RNA
tataaattgatattacatat

SEQ ID NO: 9745 - RNA, 20 nt, synthetic construct
  misc_feature 1..20: note = C9Orf72 TTCN PAM targeting sequence
  source 1..20: mol_type = other RNA
tacaaatgtgtttatatgta

SEQ ID NO: 9746 - RNA, 20 nt, synthetic construct
  misc_feature 1..20: note = C9Orf72 TTCN PAM targeting sequence
  source 1..20: mol_type = other RNA
tttatttactcaaggatata

SEQ ID NO: 9747 - RNA, 20 nt, synthetic construct
  misc_feature 1..20: note = C9Orf72 TTCN PAM targeting sequence
  source 1..20: mol_type = other RNA
ctaaagaatataagcagtcc

SEQ ID NO: 9748 - RNA, 20 nt, synthetic construct
  misc_feature 1..20: note = C9Orf72 TTCN PAM targeting sequence
  source 1..20: mol_type = other RNA
ttagagaaaaaattacatat

SEQ ID NO: 9749 - RNA, 20 nt, synthetic construct
  misc_feature 1..20: note = C9Orf72 TTCN PAM targeting sequence
  source 1..20: mol_type = other RNA
tgccatctcaaaaaaaaaca

SEQ ID NO: 9750 - RNA, 20 nt, synthetic construct
  misc_feature 1..20: note = C9Orf72 TTCN PAM targeting sequence
  source 1..20: mol_type = other RNA
cattttttggtttgttttgg

SEQ ID NO: 9751 - RNA, 20 nt, synthetic construct
  misc_feature 1..20: note = C9Orf72 TTCN PAM targeting sequence
  source 1..20: mol_type = other RNA
tcacattttttggtttgttt

SEQ ID NO: 9752 - RNA, 20 nt, synthetic construct
  misc_feature 1..20: note = C9Orf72 TTCN PAM targeting sequence
  source 1..20: mol_type = other RNA
ctaatctcactcaaattttt

SEQ ID NO: 9753 - RNA, 20 nt, synthetic construct
  misc_feature 1..20: note = C9Orf72 TTCN PAM targeting sequence
  source 1..20: mol_type = other RNA
tgttacttacagatggtggg

SEQ ID NO: 9754 - RNA, 20 nt, synthetic construct
  misc_feature 1..20: note = C9Orf72 TTCN PAM targeting sequence
  source 1..20: mol_type = other RNA
tggatagttggttcatgtta

SEQ ID NO: 9755 - RNA, 20 nt, synthetic construct
  misc_feature 1..20: note = C9Orf72 TTCN PAM targeting sequence
  source 1..20: mol_type = other RNA
cttcccaggccccacctccc

SEQ ID NO: 9756 - RNA, 20 nt, synthetic construct
  misc_feature 1..20: note = C9Orf72 TTCN PAM targeting sequence
  source 1..20: mol_type = other RNA
caggccccacctccctttca

SEQ ID NO: 9757 - RNA, 20 nt, synthetic construct
  misc_feature 1..20: note = C9Orf72 TTCN PAM targeting sequence
  source 1..20: mol_type = other RNA
tctttttctcttccattttc

SEQ ID NO: 9758 - RNA, 20 nt, synthetic construct
  misc_feature 1..20: note = C9Orf72 TTCN PAM targeting sequence
  source 1..20: mol_type = other RNA
cttccattttccctaggttc

SEQ ID NO: 9759 - RNA, 20 nt, synthetic construct
  misc_feature 1..20: note = C9Orf72 TTCN PAM targeting sequence
  source 1..20: mol_type = other RNA
attttccctaggttctactc

SEQ ID NO: 9760 - RNA, 20 nt, synthetic construct
  misc_feature 1..20: note = C9Orf72 TTCN PAM targeting sequence
  source 1..20: mol_type = other RNA
ctaggttctactcaggccag

SEQ ID NO: 9761 - RNA, 20 nt, synthetic construct
  misc_feature 1..20: note = C9Orf72 TTCN PAM targeting sequence
  source 1..20: mol_type = other RNA
actcaggccagagggtaaga

SEQ ID NO: 9762 - RNA, 20 nt, synthetic construct
  misc_feature 1..20: note = C9Orf72 TTCN PAM targeting sequence
  source 1..20: mol_type = other RNA
cttaccctctggcctgagta

SEQ ID NO: 9763 - RNA, 20 nt, synthetic construct
  misc_feature 1..20: note = C9Orf72 TTCN PAM targeting sequence
  source 1..20: mol_type = other RNA
gttaaaaactcctcctctta

SEQ ID NO: 9764 - RNA, 20 nt, synthetic construct
  misc_feature 1..20: note = C9Orf72 TTCN PAM targeting sequence
  source 1..20: mol_type = other RNA
ctttttttgccactctggtc

SEQ ID NO: 9765 - RNA, 20 nt, synthetic construct
  misc_feature 1..20: note = C9Orf72 TTCN PAM targeting sequence
  source 1..20: mol_type = other RNA
acacatacccattctctttt

SEQ ID NO: 9766 - RNA, 20 nt, synthetic construct
  misc_feature 1..20: note = C9Orf72 TTCN PAM targeting sequence
  source 1..20: mol_type = other RNA
tgtttgcttctacacatacc

SEQ ID NO: 9767 - RNA, 20 nt, synthetic construct
  misc_feature 1..20: note = C9Orf72 TTCN PAM targeting sequence
  source 1..20: mol_type = other RNA
agtttccttatcttaagaaa

SEQ ID NO: 9768 - RNA, 20 nt, synthetic construct
  misc_feature 1..20: note = C9Orf72 TTCN PAM targeting sequence
  source 1..20: mol_type = other RNA
ttatcttaagaaacgagtgt

SEQ ID NO: 9769 - RNA, 20 nt, synthetic construct
  misc_feature 1..20: note = C9Orf72 TTCN PAM targeting sequence
  source 1..20: mol_type = other RNA
taagataaggaaacttgaac

SEQ ID NO: 9770 - RNA, 20 nt, synthetic construct
  misc_feature 1..20: note = C9Orf72 TTCN PAM targeting sequence
  source 1..20: mol_type = other RNA
gtagtgtggtacactcgttt

SEQ ID NO: 9771 - RNA, 20 nt, synthetic construct
  misc_feature 1..20: note = C9Orf72 TTCN PAM targeting sequence
  source 1..20: mol_type = other RNA
tctgtagtgtggtacactcg

SEQ ID NO: 9772 - RNA, 20 nt, synthetic construct
  misc_feature 1..20: note = C9Orf72 TTCN PAM targeting sequence
  source 1..20: mol_type = other RNA
ttcttctgtagtgtggtaca

SEQ ID NO: 9773 - RNA, 20 nt, synthetic construct
  misc_feature 1..20: note = C9Orf72 TTCN PAM targeting sequence
  source 1..20: mol_type = other RNA
cctttacggtttctttcttc

SEQ ID NO: 9774 - RNA, 20 nt, synthetic construct
  misc_feature 1..20: note = C9Orf72 TTCN PAM targeting sequence
  source 1..20: mol_type = other RNA
tcattattgactgggcactg

SEQ ID NO: 9775 - RNA, 20 nt, synthetic construct
  misc_feature 1..20: note = C9Orf72 TTCN PAM targeting sequence
  source 1..20: mol_type = other RNA
tgggctctggaaagagaata

SEQ ID NO: 9776 - RNA, 20 nt, synthetic construct
  misc_feature 1..20: note = C9Orf72 TTCN PAM targeting sequence
  source 1..20: mol_type = other RNA
agagcccaagaaggggcact

SEQ ID NO: 9777 - RNA, 20 nt, synthetic construct
  misc_feature 1..20: note = C9Orf72 TTCN PAM targeting sequence
  source 1..20: mol_type = other RNA
ctttccagagcccaagaagg

SEQ ID NO: 9778 - RNA, 20 nt, synthetic construct
  misc_feature 1..20: note = C9Orf72 TTCN PAM targeting sequence
  source 1..20: mol_type = other RNA
actgaatgagtatcttcatc

SEQ ID NO: 9779 - RNA, 20 nt, synthetic construct
  misc_feature 1..20: note = C9Orf72 TTCN PAM targeting sequence
  source 1..20: mol_type = other RNA
gtggaacaggtataataagt

SEQ ID NO: 9780 - RNA, 20 nt, synthetic construct
  misc_feature 1..20: note = C9Orf72 TTCN PAM targeting sequence
  source 1..20: mol_type = other RNA
tcataagtgaattagataaa

SEQ ID NO: 9781 - RNA, 20 nt, synthetic construct
  misc_feature 1..20: note = C9Orf72 TTCN PAM targeting sequence
  source 1..20: mol_type = other RNA
cttatgatgaagatactcat

SEQ ID NO: 9782 - RNA, 20 nt, synthetic construct
  misc_feature 1..20: note = C9Orf72 TTCN PAM targeting sequence
  source 1..20: mol_type = other RNA
tttttaacaccttgctttat

SEQ ID NO: 9783 - RNA, 20 nt, synthetic construct
  misc_feature 1..20: note = C9Orf72 TTCN PAM targeting sequence
  source 1..20: mol_type = other RNA
atttgtttgtgtcatctctg

SEQ ID NO: 9784 - RNA, 20 nt, synthetic construct
  misc_feature 1..20: note = C9Orf72 TTCN PAM targeting sequence
  source 1..20: mol_type = other RNA
ttcagcagtgttttgtaatt

SEQ ID NO: 9785 - RNA, 20 nt, synthetic construct
  misc_feature 1..20: note = C9Orf72 TTCN PAM targeting sequence
  source 1..20: mol_type = other RNA
gcagtgttttgtaattctca

SEQ ID NO: 9786 - RNA, 20 nt, synthetic construct
  misc_feature 1..20: note = C9Orf72 TTCN PAM targeting sequence
  source 1..20: mol_type = other RNA
catagagatctttcacctcc

SEQ ID NO: 9787 - RNA, 20 nt, synthetic construct
  misc_feature 1..20: note = C9Orf72 TTCN PAM targeting sequence
  source 1..20: mol_type = other RNA
cctccctggttagctggatt

SEQ ID NO: 9788 - RNA, 20 nt, synthetic construct
  misc_feature 1..20: note = C9Orf72 TTCN PAM targeting sequence
  source 1..20: mol_type = other RNA
taggtattttattcgttttg

SEQ ID NO: 9789 - RNA, 20 nt, synthetic construct
  misc_feature 1..20: note = C9Orf72 TTCN PAM targeting sequence
  source 1..20: mol_type = other RNA
ttttgcggctattgtgaatg

SEQ ID NO: 9790 - RNA, 20 nt, synthetic construct
  misc_feature 1..20: note = C9Orf72 TTCN PAM targeting sequence
  source 1..20: mol_type = other RNA
caatagccgcaaaacgaata

SEQ ID NO: 9791 - RNA, 20 nt, synthetic construct
  misc_feature 1..20: note = C9Orf72 TTCN PAM targeting sequence
  source 1..20: mol_type = other RNA
tgattttgctctcactttgg

SEQ ID NO: 9792 - RNA, 20 nt, synthetic construct
  misc_feature 1..20: note = C9Orf72 TTCN PAM targeting sequence
  source 1..20: mol_type = other RNA
aaagtgagagcaaaatcaag

SEQ ID NO: 9793 - RNA, 20 nt, synthetic construct
  misc_feature 1..20: note = C9Orf72 TTCN PAM targeting sequence
  source 1..20: mol_type = other RNA
ctatactccaacaccttcca

SEQ ID NO: 9794 - RNA, 20 nt, synthetic construct
  misc_feature 1..20: note = C9Orf72 TTCN PAM targeting sequence
  source 1..20: mol_type = other RNA
gcaaagttttggcattctct

SEQ ID NO: 9795 - RNA, 20 nt, synthetic construct
  misc_feature 1..20: note = C9Orf72 TTCN PAM targeting sequence
  source 1..20: mol_type = other RNA
gggcagagactatgagattt

SEQ ID NO: 9796 - RNA, 20 nt, synthetic construct
  misc_feature 1..20: note = C9Orf72 TTCN PAM targeting sequence
  source 1..20: mol_type = other RNA
aggtacagaattatactgcc

SEQ ID NO: 9797 - RNA, 20 nt, synthetic construct
  misc_feature 1..20: note = C9Orf72 TTCN PAM targeting sequence
  source 1..20: mol_type = other RNA
gtacctagaaaatctcatag

SEQ ID NO: 9798 - RNA, 20 nt, synthetic construct
  misc_feature 1..20: note = C9Orf72 TTCN PAM targeting sequence
  source 1..20: mol_type = other RNA
gtttgcaggcagtataattc

SEQ ID NO: 9799 - RNA, 20 nt, synthetic construct
  misc_feature 1..20: note = C9Orf72 TTCN PAM targeting sequence
  source 1..20: mol_type = other RNA
tctcttcctatctgaatgtc

SEQ ID NO: 9800 - RNA, 20 nt, synthetic construct
  misc_feature 1..20: note = C9Orf72 TTCN PAM targeting sequence
  source 1..20: mol_type = other RNA
cttcctatctgaatgtcttt

SEQ ID NO: 9801 - RNA, 20 nt, synthetic construct
  misc_feature 1..20: note = C9Orf72 TTCN PAM targeting sequence
  source 1..20: mol_type = other RNA
tatctgaatgtctttctttc

SEQ ID NO: 9802 - RNA, 20 nt, synthetic construct
  misc_feature 1..20: note = C9Orf72 TTCN PAM targeting sequence
  source 1..20: mol_type = other RNA
gataggaagagaagaagtca

SEQ ID NO: 9803 - RNA, 20 nt, synthetic construct
  misc_feature 1..20: note = C9Orf72 TTCN PAM targeting sequence
  source 1..20: mol_type = other RNA
ttctttctctttcctgattg

SEQ ID NO: 9804 - RNA, 20 nt, synthetic construct
  misc_feature 1..20: note = C9Orf72 TTCN PAM targeting sequence
  source 1..20: mol_type = other RNA
ttctctttcctgattgctct

SEQ ID NO: 9805 - RNA, 20 nt, synthetic construct
  misc_feature 1..20: note = C9Orf72 TTCN PAM targeting sequence
  source 1..20: mol_type = other RNA
ctttcctgattgctctggct

SEQ ID NO: 9806 - RNA, 20 nt, synthetic construct
  misc_feature 1..20: note = C9Orf72 TTCN PAM targeting sequence
  source 1..20: mol_type = other RNA
tgattgctctggctaggact

SEQ ID NO: 9807 - RNA, 20 nt, synthetic construct
  misc_feature 1..20: note = C9Orf72 TTCN PAM targeting sequence
  source 1..20: mol_type = other RNA
agaactatgctgaaaaggag

SEQ ID NO: 9808 - RNA, 20 nt, synthetic construct
  misc_feature 1..20: note = C9Orf72 TTCN PAM targeting sequence
  source 1..20: mol_type = other RNA
ggaagtcctagccagagcaa

SEQ ID NO: 9809 - RNA, 20 nt, synthetic construct
  misc_feature 1..20: note = C9Orf72 TTCN PAM targeting sequence
  source 1..20: mol_type = other RNA
gcatagttctggaagtccta

SEQ ID NO: 9810 - RNA, 20 nt, synthetic construct
  misc_feature 1..20: note = C9Orf72 TTCN PAM targeting sequence
  source 1..20: mol_type = other RNA
caaggagaatacttccagct

SEQ ID NO: 9811 - RNA, 20 nt, synthetic construct
  misc_feature 1..20: note = C9Orf72 TTCN PAM targeting sequence
  source 1..20: mol_type = other RNA
ccttgagaaccgtaacaaga

SEQ ID NO: 9812 - RNA, 20 nt, synthetic construct
  misc_feature 1..20: note = C9Orf72 TTCN PAM targeting sequence
  source 1..20: mol_type = other RNA
agcttttgcccatttggtaa

SEQ ID NO: 9813 - RNA, 20 nt, synthetic construct
  misc_feature 1..20: note = C9Orf72 TTCN PAM targeting sequence
  source 1..20: mol_type = other RNA
tatttttttgaggcatgttc

SEQ ID NO: 9814 - RNA, 20 nt, synthetic construct
  misc_feature 1..20: note = C9Orf72 TTCN PAM targeting sequence
  source 1..20: mol_type = other RNA
ttcaatgcctagtttgttta

SEQ ID NO: 9815 - RNA, 20 nt, synthetic construct
  misc_feature 1..20: note = C9Orf72 TTCN PAM targeting sequence
  source 1..20: mol_type = other RNA
atgcctagtttgtttaggat

SEQ ID NO: 9816 - RNA, 20 nt, synthetic construct
  misc_feature 1..20: note = C9Orf72 TTCN PAM targeting sequence
  source 1..20: mol_type = other RNA
tttttgagacagggtctcac

SEQ ID NO: 9817 - RNA, 20 nt, synthetic construct
  misc_feature 1..20: note = C9Orf72 TTCN PAM targeting sequence
  source 1..20: mol_type = other RNA
ggaggttgaggtgggaggat

SEQ ID NO: 9818 - RNA, 20 nt, synthetic construct
  misc_feature 1..20: note = C9Orf72 TTCN PAM targeting sequence
  source 1..20: mol_type = other RNA
ccatgctgcctaggctcgtc

SEQ ID NO: 9819 - RNA, 20 nt, synthetic construct
  misc_feature 1..20: note = C9Orf72 TTCN PAM targeting sequence
  source 1..20: mol_type = other RNA
agacgagcctaggcagcatg

SEQ ID NO: 9820 - RNA, 20 nt, synthetic construct
  misc_feature 1..20: note = C9Orf72 TTCN PAM targeting sequence
  source 1..20: mol_type = other RNA
gtaggtcaggtgtagtgact

SEQ ID NO: 9821 - RNA, 20 nt, synthetic construct
  misc_feature 1..20: note = C9Orf72 TTCN PAM targeting sequence
  source 1..20: mol_type = other RNA
ctacctattgagataatctt

SEQ ID NO: 9822 - RNA, 20 nt, synthetic construct
  misc_feature 1..20: note = C9Orf72 TTCN PAM targeting sequence
  source 1..20: mol_type = other RNA
tcacataaacagagctaaaa

SEQ ID NO: 9823 - RNA, 20 nt, synthetic construct
  misc_feature 1..20: note = C9Orf72 TTCN PAM targeting sequence
  source 1..20: mol_type = other RNA
acatacacaaatcaataagt

SEQ ID NO: 9824 - RNA, 20 nt, synthetic construct
  misc_feature 1..20: note = C9Orf72 TTCN PAM targeting sequence
  source 1..20: mol_type = other RNA
tcaaggatattggcctgaag

SEQ ID NO: 9825 - RNA, 20 nt, synthetic construct
  misc_feature 1..20: note = C9Orf72 TTCN PAM targeting sequence
  source 1..20: mol_type = other RNA
ggccaatatccttgatgaat

SEQ ID NO: 9826 - RNA, 20 nt, synthetic construct
  misc_feature 1..20: note = C9Orf72 TTCN PAM targeting sequence
  source 1..20: mol_type = other RNA
tttttctgttgtgtctctgc

SEQ ID NO: 9827 - RNA, 20 nt, synthetic construct
  misc_feature 1..20: note = C9Orf72 TTCN PAM targeting sequence
  source 1..20: mol_type = other RNA
gttgtgtctctgccaggttt

SEQ ID NO: 9828 - RNA, 20 nt, synthetic construct
  misc_feature 1..20: note = C9Orf72 TTCN PAM targeting sequence
  source 1..20: mol_type = other RNA
gataccaaaacctggcagag

SEQ ID NO: 9829 - RNA, 20 nt, synthetic construct
  misc_feature 1..20: note = C9Orf72 TTCN PAM targeting sequence
  source 1..20: mol_type = other RNA
ctaatgaggccagcatcatt

SEQ ID NO: 9830 - RNA, 20 nt, synthetic construct
  misc_feature 1..20: note = C9Orf72 TTCN PAM targeting sequence
  source 1..20: mol_type = other RNA
tcctcctcaattttttggaa

SEQ ID NO: 9831 - RNA, 20 nt, synthetic construct
  misc_feature 1..20: note = C9Orf72 TTCN PAM targeting sequence
  source 1..20: mol_type = other RNA
aaaaaattgaggaggaggaa

SEQ ID NO: 9832 - RNA, 20 nt, synthetic construct
  misc_feature 1..20: note = C9Orf72 TTCN PAM targeting sequence
  source 1..20: mol_type = other RNA
tactcaatctgttccaaaaa

SEQ ID NO: 9833 - RNA, 20 nt, synthetic construct
  misc_feature 1..20: note = C9Orf72 TTCN PAM targeting sequence
  source 1..20: mol_type = other RNA
ttatacatcaggtataaaga

SEQ ID NO: 9834 - RNA, 20 nt, synthetic construct
  misc_feature 1..20: note = C9Orf72 TTCN PAM targeting sequence
  source 1..20: mol_type = other RNA
atgtgtttgtgtcatctctt

SEQ ID NO: 9835 - RNA, 20 nt, synthetic construct
  misc_feature 1..20: note = C9Orf72 TTCN PAM targeting sequence
  source 1..20: mol_type = other RNA
atattcatagataggaagaa

SEQ ID NO: 9836 - RNA, 20 nt, synthetic construct
  misc_feature 1..20: note = C9Orf72 TTCN PAM targeting sequence
  source 1..20: mol_type = other RNA
tagataggaagaattaatat

SEQ ID NO: 9837 - RNA, 20 nt, synthetic construct
  misc_feature 1..20: note = C9Orf72 TTCN PAM targeting sequence
  source 1..20: mol_type = other RNA
tatctatgaatatggaatgt

SEQ ID NO: 9838 - RNA, 20 nt, synthetic construct
  misc_feature 1..20: note = C9Orf72 TTCN PAM targeting sequence
  source 1..20: mol_type = other RNA
tcctatctatgaatatggaa

SEQ ID NO: 9839 - RNA, 20 nt, synthetic construct
  misc_feature 1..20: note = C9Orf72 TTCN PAM targeting sequence
  source 1..20: mol_type = other RNA
atgctattcctataaactac

SEQ ID NO: 9840 - RNA, 20 nt, synthetic construct
  misc_feature 1..20: note = C9Orf72 TTCN PAM targeting sequence
  source 1..20: mol_type = other RNA
tataaactaccaatgatatc

SEQ ID NO: 9841 - RNA, 20 nt, synthetic construct
  misc_feature 1..20: note = C9Orf72 TTCN PAM targeting sequence
  source 1..20: mol_type = other RNA
caaaaccagaaaaaactgtt

SEQ ID NO: 9842 - RNA, 20 nt, synthetic construct
  misc_feature 1..20: note = C9Orf72 TTCN PAM targeting sequence
  source 1..20: mol_type = other RNA
ggttttgtgaaggatatcat

SEQ ID NO: 9843 - RNA, 20 nt, synthetic construct
  misc_feature 1..20: note = C9Orf72 TTCN PAM targeting sequence
  source 1..20: mol_type = other RNA
ttttgcttaggattgctttg

SEQ ID NO: 9844 - RNA, 20 nt, synthetic construct
  misc_feature 1..20: note = C9Orf72 TTCN PAM targeting sequence
  source 1..20: mol_type = other RNA
tatagccttttagtataaaa

SEQ ID NO: 9845 - RNA, 20 nt, synthetic construct
  misc_feature 1..20: note = C9Orf72 TTCN PAM targeting sequence
  source 1..20: mol_type = other RNA
ggttcctatagccttttagt

SEQ ID NO: 9846 - RNA, 20 nt, synthetic construct
  misc_feature 1..20: note = C9Orf72 TTCN PAM targeting sequence
  source 1..20: mol_type = other RNA
ccattggtctatgtgtctgt

SEQ ID NO: 9847 - RNA, 20 nt, synthetic construct
  misc_feature 1..20: note = C9Orf72 TTCN PAM targeting sequence
  source 1..20: mol_type = other RNA
tggctctctattctccattg

SEQ ID NO: 9848 - RNA, 20 nt, synthetic construct
  misc_feature 1..20: note = C9Orf72 TTCN PAM targeting sequence
  source 1..20: mol_type = other RNA
acaaagttgacaaaaaacaa

SEQ ID NO: 9849 - RNA, 20 nt, synthetic construct
  misc_feature 1..20: note = C9Orf72 TTCN PAM targeting sequence
  source 1..20: mol_type = other RNA
ccattgcttgttttttgtca

SEQ ID NO: 9850 - RNA, 20 nt, synthetic construct
  misc_feature 1..20: note = C9Orf72 TTCN PAM targeting sequence
  source 1..20: mol_type = other RNA
ataaatggtgctgggataat

SEQ ID NO: 9851 - RNA, 20 nt, synthetic construct
  misc_feature 1..20: note = C9Orf72 TTCN PAM targeting sequence
  source 1..20: mol_type = other RNA
tatggctagcaattatccca

SEQ ID NO: 9852 - RNA, 20 nt, synthetic construct
  misc_feature 1..20: note = C9Orf72 TTCN PAM targeting sequence
  source 1..20: mol_type = other RNA
ctccaattcctatggctagc

SEQ ID NO: 9853 - RNA, 20 nt, synthetic construct
  misc_feature 1..20: note = C9Orf72 TTCN PAM targeting sequence
  source 1..20: mol_type = other RNA
ttgtgccatatacaaaaatc

SEQ ID NO: 9854 - RNA, 20 nt, synthetic construct
  misc_feature 1..20: note = C9Orf72 TTCN PAM targeting sequence
  source 1..20: mol_type = other RNA
agggtttttacaattttaga

SEQ ID NO: 9855 - RNA, 20 nt, synthetic construct
  misc_feature 1..20: note = C9Orf72 TTCN PAM targeting sequence
  source 1..20: mol_type = other RNA
taggttgtcttccagggttt

SEQ ID NO: 9856 - RNA, 20 nt, synthetic construct
  misc_feature 1..20: note = C9Orf72 TTCN PAM targeting sequence
  source 1..20: mol_type = other RNA
ggacataggccctggcacag

SEQ ID NO: 9857 - RNA, 20 nt, synthetic construct
  misc_feature 1..20: note = C9Orf72 TTCN PAM targeting sequence
  source 1..20: mol_type = other RNA
tcataaaatctgtgccaggg

SEQ ID NO: 9858 - RNA, 20 nt, synthetic construct
  misc_feature 1..20: note = C9Orf72 TTCN PAM targeting sequence
  source 1..20: mol_type = other RNA
tttgccatgcaggagctcgt

SEQ ID NO: 9859 - RNA, 20 nt, synthetic construct
  misc_feature 1..20: note = C9Orf72 TTCN PAM targeting sequence
  source 1..20: mol_type = other RNA
cccattgtgtaggttgtctt

SEQ ID NO: 9860 - RNA, 20 nt, synthetic construct
  misc_feature 1..20: note = C9Orf72 TTCN PAM targeting sequence
  source 1..20: mol_type = other RNA
gcatatccctttgttggata

SEQ ID NO: 9861 - RNA, 20 nt, synthetic construct
  misc_feature 1..20: note = C9Orf72 TTCN PAM targeting sequence
  source 1..20: mol_type = other RNA
agattctgcatatccctttg

SEQ ID NO: 9862 - RNA, 20 nt, synthetic construct
  misc_feature 1..20: note = C9Orf72 TTCN PAM targeting sequence
  source 1..20: mol_type = other RNA
ttccagattctgcatatccc

SEQ ID NO: 9863 - RNA, 20 nt, synthetic construct
  misc_feature 1..20: note = C9Orf72 TTCN PAM targeting sequence
  source 1..20: mol_type = other RNA
tgtcctttgcccagtttgta

SEQ ID NO: 9864 - RNA, 20 nt, synthetic construct
  misc_feature 1..20: note = C9Orf72 TTCN PAM targeting sequence
  source 1..20: mol_type = other RNA
gaagaatatatacagacagc

SEQ ID NO: 9865 - RNA, 20 nt, synthetic construct
  misc_feature 1..20: note = C9Orf72 TTCN PAM targeting sequence
  source 1..20: mol_type = other RNA
gaaaaattttcatgtccttt

SEQ ID NO: 9866 - RNA, 20 nt, synthetic construct
  misc_feature 1..20: note = C9Orf72 TTCN PAM targeting sequence
  source 1..20: mol_type = other RNA
tctgaaaaattttcatgtcc

SEQ ID NO: 9867 - RNA, 20 nt, synthetic construct
  misc_feature 1..20: note = C9Orf72 TTCN PAM targeting sequence
  source 1..20: mol_type = other RNA
tatgctttttagctgtctgt

SEQ ID NO: 9868 - RNA, 20 nt, synthetic construct
  misc_feature 1..20: note = C9Orf72 TTCN PAM targeting sequence
  source 1..20: mol_type = other RNA
ctattagtgatattaagcat

SEQ ID NO: 9869 - RNA, 20 nt, synthetic construct
  misc_feature 1..20: note = C9Orf72 TTCN PAM targeting sequence
  source 1..20: mol_type = other RNA
ctaggaatggctattattaa

SEQ ID NO: 9870 - RNA, 20 nt, synthetic construct
  misc_feature 1..20: note = C9Orf72 TTCN PAM targeting sequence
  source 1..20: mol_type = other RNA
tagagaattgatttgcaatt

SEQ ID NO: 9871 - RNA, 20 nt, synthetic construct
  misc_feature 1..20: note = C9Orf72 TTCN PAM targeting sequence
  source 1..20: mol_type = other RNA
ccacaaccttgccaacatct

SEQ ID NO: 9872 - RNA, 20 nt, synthetic construct
  misc_feature 1..20: note = C9Orf72 TTCN PAM targeting sequence
  source 1..20: mol_type = other RNA
cttttctccacaaccttgcc

SEQ ID NO: 9873 - RNA, 20 nt, synthetic construct
  misc_feature 1..20: note = C9Orf72 TTCN PAM targeting sequence
  source 1..20: mol_type = other RNA
taatagctaaactaatttac

SEQ ID NO: 9874 - RNA, 20 nt, synthetic construct
  misc_feature 1..20: note = C9Orf72 TTCN PAM targeting sequence
  source 1..20: mol_type = other RNA
aactgcttttcataatagct

SEQ ID NO: 9875 - RNA, 20 nt, synthetic construct
  misc_feature 1..20: note = C9Orf72 TTCN PAM targeting sequence
  source 1..20: mol_type = other RNA
caaataactgaaaatagaac

SEQ ID NO: 9876 - RNA, 20 nt, synthetic construct
  misc_feature 1..20: note = C9Orf72 TTCN PAM targeting sequence
  source 1..20: mol_type = other RNA
gttatttgagaaatcttcaa

SEQ ID NO: 9877 - RNA, 20 nt, synthetic construct
  misc_feature 1..20: note = C9Orf72 TTCN PAM targeting sequence
  source 1..20: mol_type = other RNA
attttcagttatttgagaaa

SEQ ID NO: 9878 - RNA, 20 nt, synthetic construct
  misc_feature 1..20: note = C9Orf72 TTCN PAM targeting sequence
  source 1..20: mol_type = other RNA
ccctagcaaccccattattc

SEQ ID NO: 9879 - RNA, 20 nt, synthetic construct
  misc_feature 1..20: note = C9Orf72 TTCN PAM targeting sequence
  source 1..20: mol_type = other RNA
atatgtacctaaaggaatac

SEQ ID NO: 9880 - RNA, 20 nt, synthetic construct
  misc_feature 1..20: note = C9Orf72 TTCN PAM targeting sequence
  source 1..20: mol_type = other RNA
tttaggtacatatagaataa

SEQ ID NO: 9881 - RNA, 20 nt, synthetic construct
  misc_feature 1..20: note = C9Orf72 TTCN PAM targeting sequence
  source 1..20: mol_type = other RNA
accataaagacacatgcatg

SEQ ID NO: 9882 - RNA, 20 nt, synthetic construct
  misc_feature 1..20: note = C9Orf72 TTCN PAM targeting sequence
  source 1..20: mol_type = other RNA
tcacagcactattcatgata

SEQ ID NO: 9883 - RNA, 20 nt, synthetic construct
  misc_feature 1..20: note = C9Orf72 TTCN PAM targeting sequence
  source 1..20: mol_type = other RNA
tgataacaaagacagggaat

SEQ ID NO: 9884 - RNA, 20 nt, synthetic construct
  misc_feature 1..20: note = C9Orf72 TTCN PAM targeting sequence
  source 1..20: mol_type = other RNA
ctgtctttgttatcatgaat

SEQ ID NO: 9885 - RNA, 20 nt, synthetic construct
  misc_feature 1..20: note = C9Orf72 TTCN PAM targeting sequence
  source 1..20: mol_type = other RNA
ttatccagtctaccattgat

SEQ ID NO: 9886 - RNA, 20 nt, synthetic construct
  misc_feature 1..20: note = C9Orf72 TTCN PAM targeting sequence
  source 1..20: mol_type = other RNA
atggtgtatatgtatcacat

SEQ ID NO: 9887 - RNA, 20 nt, synthetic construct
  misc_feature 1..20: note = C9Orf72 TTCN PAM targeting sequence
  source 1..20: mol_type = other RNA
cttaggataatgacctctag

SEQ ID NO: 9888 - RNA, 20 nt, synthetic construct
  misc_feature 1..20: note = C9Orf72 TTCN PAM targeting sequence
  source 1..20: mol_type = other RNA
tggattagttcacttaggat

SEQ ID NO: 9889 - RNA, 20 nt, synthetic construct
  misc_feature 1..20: note = C9Orf72 TTCN PAM targeting sequence
  source 1..20: mol_type = other RNA
gttcctggattagttcactt

SEQ ID NO: 9890 - RNA, 20 nt, synthetic construct
  misc_feature 1..20: note = C9Orf72 TTCN PAM targeting sequence
  source 1..20: mol_type = other RNA
cacttctaagtgggagctaa

SEQ ID NO: 9891 - RNA, 20 nt, synthetic construct
  misc_feature 1..20: note = C9Orf72 TTCN PAM targeting sequence
  source 1..20: mol_type = other RNA
aagtgggagctaaacactga

SEQ ID NO: 9892 - RNA, 20 nt, synthetic construct
  misc_feature 1..20: note = C9Orf72 TTCN PAM targeting sequence
  source 1..20: mol_type = other RNA
ttgtgtccatgtatactcag

SEQ ID NO: 9893 - RNA, 20 nt, synthetic construct
  misc_feature 1..20: note = C9Orf72 TTCN PAM targeting sequence
  source 1..20: mol_type = other RNA
ttctttgtgtccatgtatac

SEQ ID NO: 9894 - RNA, 20 nt, synthetic construct
  misc_feature 1..20: note = C9Orf72 TTCN PAM targeting sequence
  source 1..20: mol_type = other RNA
cccaccctcaagtaggccct

SEQ ID NO: 9895 - RNA, 20 nt, synthetic construct
  misc_feature 1..20: note = C9Orf72 TTCN PAM targeting sequence
  source 1..20: mol_type = other RNA
ttacccaggtaataagcata

SEQ ID NO: 9896 - RNA, 20 nt, synthetic construct
  misc_feature 1..20: note = C9Orf72 TTCN PAM targeting sequence
  source 1..20: mol_type = other RNA
tgtgtacatgtgcaggtgtg

SEQ ID NO: 9897 - RNA, 20 nt, synthetic construct
  misc_feature 1..20: note = C9Orf72 TTCN PAM targeting sequence
  source 1..20: mol_type = other RNA
agtgaccaatttttcatgta

SEQ ID NO: 9898 - RNA, 20 nt, synthetic construct
  misc_feature 1..20: note = C9Orf72 TTCN PAM targeting sequence
  source 1..20: mol_type = other RNA
tgtattggcagtgactggaa

SEQ ID NO: 9899 - RNA, 20 nt, synthetic construct
  misc_feature 1..20: note = C9Orf72 TTCN PAM targeting sequence
  source 1..20: mol_type = other RNA
agtcactgccaatacatgaa

SEQ ID NO: 9900 - RNA, 20 nt, synthetic construct
  misc_feature 1..20: note = C9Orf72 TTCN PAM targeting sequence
  source 1..20: mol_type = other RNA
gccactagattgtgtgttaa

SEQ ID NO: 9901 - RNA, 20 nt, synthetic construct
  misc_feature 1..20: note = C9Orf72 TTCN PAM targeting sequence
  source 1..20: mol_type = other RNA
aaacataaaattgtccaaaa

SEQ ID NO: 9902 - RNA, 20 nt, synthetic construct
  misc_feature 1..20: note = C9Orf72 TTCN PAM targeting sequence
  source 1..20: mol_type = other RNA
ggatattattttgtcatgat

SEQ ID NO: 9903 - RNA, 20 nt, synthetic construct
  misc_feature 1..20: note = C9Orf72 TTCN PAM targeting sequence
  source 1..20: mol_type = other RNA
cattttgctgatcatgacaa

SEQ ID NO: 9904 - RNA, 20 nt, synthetic construct
  misc_feature 1..20: note = C9Orf72 TTCN PAM targeting sequence
  source 1..20: mol_type = other RNA
taatcatttttagccagcta

SEQ ID NO: 9905 - RNA, 20 nt, synthetic construct
  misc_feature 1..20: note = C9Orf72 TTCN PAM targeting sequence
  source 1..20: mol_type = other RNA
gcagttcactaaatttcctc

SEQ ID NO: 9906 - RNA, 20 nt, synthetic construct
  misc_feature 1..20: note = C9Orf72 TTCN PAM targeting sequence
  source 1..20: mol_type = other RNA
ctaaatttcctcaaaaaagc

SEQ ID NO: 9907 - RNA, 20 nt, synthetic construct
  misc_feature 1..20: note = C9Orf72 TTCN PAM targeting sequence
  source 1..20: mol_type = other RNA
tcaaaaaagctcccaagtaa

SEQ ID NO: 9908 - RNA, 20 nt, synthetic construct
  misc_feature 1..20: note = C9Orf72 TTCN PAM targeting sequence
  source 1..20: mol_type = other RNA
gttttttgattggttacttg

SEQ ID NO: 9909 - RNA, 20 nt, synthetic construct
  misc_feature 1..20: note = C9Orf72 TTCN PAM targeting sequence
  source 1..20: mol_type = other RNA
taaagtgcttagtatttttt

SEQ ID NO: 9910 - RNA, 20 nt, synthetic construct
  misc_feature 1..20: note = C9Orf72 TTCN PAM targeting sequence
  source 1..20: mol_type = other RNA
tttttcctaaagtgcttagt

SEQ ID NO: 9911 - RNA, 20 nt, synthetic construct
  misc_feature 1..20: note = C9Orf72 TTCN PAM targeting sequence
  source 1..20: mol_type = other RNA
aggcacagattaattagaaa

SEQ ID NO: 9912 - RNA, 20 nt, synthetic construct
  misc_feature 1..20: note = C9Orf72 TTCN PAM targeting sequence
  source 1..20: mol_type = other RNA
aattaatctgtgccttgaaa

SEQ ID NO: 9913 - RNA, 20 nt, synthetic construct
  misc_feature 1..20: note = C9Orf72 TTCN PAM targeting sequence
  source 1..20: mol_type = other RNA
acatgtctactaaaatttac

SEQ ID NO: 9914 - RNA, 20 nt, synthetic construct
  misc_feature 1..20: note = C9Orf72 TTCN PAM targeting sequence
  source 1..20: mol_type = other RNA
gttggaccaattcattttct

SEQ ID NO: 9915 - RNA, 20 nt, synthetic construct
  misc_feature 1..20: note = C9Orf72 TTCN PAM targeting sequence
  source 1..20: mol_type = other RNA
ttttctaaaacattccccta

SEQ ID NO: 9916 - RNA, 20 nt, synthetic construct
  misc_feature 1..20: note = C9Orf72 TTCN PAM targeting sequence
  source 1..20: mol_type = other RNA
aaaacattcccctactactt

SEQ ID NO: 9917 - RNA, 20 nt, synthetic construct
  misc_feature 1..20: note = C9Orf72 TTCN PAM targeting sequence
  source 1..20: mol_type = other RNA
cctactactttctcaagaac

SEQ ID NO: 9918 - RNA, 20 nt, synthetic construct
  misc_feature 1..20: note = C9Orf72 TTCN PAM targeting sequence
  source 1..20: mol_type = other RNA
caagaaccaataaaaactct

SEQ ID NO: 9919 - RNA, 20 nt, synthetic construct
  misc_feature 1..20: note = C9Orf72 TTCN PAM targeting sequence
  source 1..20: mol_type = other RNA
tgagaaagtagtaggggaat

SEQ ID NO: 9920 - RNA, 20 nt, synthetic construct
  misc_feature 1..20: note = C9Orf72 TTCN PAM targeting sequence
  source 1..20: mol_type = other RNA
ccagagtttttattggttct

SEQ ID NO: 9921 - RNA, 20 nt, synthetic construct
  misc_feature 1..20: note = C9Orf72 TTCN PAM targeting sequence
  source 1..20: mol_type = other RNA
tagttctccagagtttttat

SEQ ID NO: 9922 - RNA, 20 nt, synthetic construct
  misc_feature 1..20: note = C9Orf72 TTCN PAM targeting sequence
  source 1..20: mol_type = other RNA
gcaccttgagatgtataagg

SEQ ID NO: 9923 - RNA, 20 nt, synthetic construct
  misc_feature 1..20: note = C9Orf72 TTCN PAM targeting sequence
  source 1..20: mol_type = other RNA
agggacccccagccttatac

SEQ ID NO: 9924 - RNA, 20 nt, synthetic construct
  misc_feature 1..20: note = C9Orf72 TTCN PAM targeting sequence
  source 1..20: mol_type = other RNA
tattctatgcttttggttaa

SEQ ID NO: 9925 - RNA, 20 nt, synthetic construct
  misc_feature 1..20: note = C9Orf72 TTCN PAM targeting sequence
  source 1..20: mol_type = other RNA
atgcttttggttaacactta

SEQ ID NO: 9926 - RNA, 20 nt, synthetic construct
  misc_feature 1..20: note = C9Orf72 TTCN PAM targeting sequence
  source 1..20: mol_type = other RNA
gtagatacataggtcaggct

SEQ ID NO: 9927 - RNA, 20 nt, synthetic construct
  misc_feature 1..20: note = C9Orf72 TTCN PAM targeting sequence
  source 1..20: mol_type = other RNA
attgccttacacacttagac

SEQ ID NO: 9928 - RNA, 20 nt, synthetic construct
  misc_feature 1..20: note = C9Orf72 TTCN PAM targeting sequence
  source 1..20: mol_type = other RNA
atgtgccaggcattattgca

SEQ ID NO: 9929 - RNA, 20 nt, synthetic construct
  misc_feature 1..20: note = C9Orf72 TTCN PAM targeting sequence
  source 1..20: mol_type = other RNA
ccaggctggagtacactggc

SEQ ID NO: 9930 - RNA, 20 nt, synthetic construct
  misc_feature 1..20: note = C9Orf72 TTCN PAM targeting sequence
  source 1..20: mol_type = other RNA
gaatagctaggattacaggc

SEQ ID NO: 9931 - RNA, 20 nt, synthetic construct
  misc_feature 1..20: note = C9Orf72 TTCN PAM targeting sequence
  source 1..20: mol_type = other RNA
gaaagctgaggcaggaggat

SEQ ID NO: 9932 - RNA, 20 nt, synthetic construct
  misc_feature 1..20: note = C9Orf72 TTCN PAM targeting sequence
  source 1..20: mol_type = other RNA
gtgtgcctgtaatcctagct

SEQ ID NO: 9933 - RNA, 20 nt, synthetic construct
  misc_feature 1..20: note = C9Orf72 TTCN PAM targeting sequence
  source 1..20: mol_type = other RNA
aataattcttttttattttt

SEQ ID NO: 9934 - RNA, 20 nt, synthetic construct
  misc_feature 1..20: note = C9Orf72 TTCN PAM targeting sequence
  source 1..20: mol_type = other RNA
tttttattttttgtagagat

SEQ ID NO: 9935 - RNA, 20 nt, synthetic construct
  misc_feature 1..20: note = C9Orf72 TTCN PAM targeting sequence
  source 1..20: mol_type = other RNA
ctatgttgcccaggctggtc

SEQ ID NO: 9936 - RNA, 20 nt, synthetic construct
  misc_feature 1..20: note = C9Orf72 TTCN PAM targeting sequence
  source 1..20: mol_type = other RNA
agaccagcctgggcaacata

SEQ ID NO: 9937 - RNA, 20 nt, synthetic construct
  misc_feature 1..20: note = C9Orf72 TTCN PAM targeting sequence
  source 1..20: mol_type = other RNA
tacaggcatgagctactgtg

SEQ ID NO: 9938 - RNA, 20 nt, synthetic construct
  misc_feature 1..20: note = C9Orf72 TTCN PAM targeting sequence
  source 1..20: mol_type = other RNA
actgataaaagagaaacaca

SEQ ID NO: 9939 - RNA, 20 nt, synthetic construct
  misc_feature 1..20: note = C9Orf72 TTCN PAM targeting sequence
  source 1..20: mol_type = other RNA
cttttatcagttgaaaaaag

SEQ ID NO: 9940 - RNA, 20 nt, synthetic construct
  misc_feature 1..20: note = C9Orf72 TTCN PAM targeting sequence
  source 1..20: mol_type = other RNA
tttcctgatttcagaacatc

SEQ ID NO: 9941 - RNA, 20 nt, synthetic construct
  misc_feature 1..20: note = C9Orf72 TTCN PAM targeting sequence
  source 1..20: mol_type = other RNA
tgatttcagaacatctttta

SEQ ID NO: 9942 - RNA, 20 nt, synthetic construct
  misc_feature 1..20: note = C9Orf72 TTCN PAM targeting sequence
  source 1..20: mol_type = other RNA
gaacatcttttaagtgttta

SEQ ID NO: 9943 - RNA, 20 nt, synthetic construct
  misc_feature 1..20: note = C9Orf72 TTCN PAM targeting sequence
  source 1..20: mol_type = other RNA
gaaatcaggaaaagaattat

SEQ ID NO: 9944 - RNA, 20 nt, synthetic construct
  misc_feature 1..20: note = C9Orf72 TTCN PAM targeting sequence
  source 1..20: mol_type = other RNA
agttgggtccatgctcaaca

SEQ ID NO: 9945 - RNA, 20 nt, synthetic construct
  misc_feature 1..20: note = C9Orf72 TTCN PAM targeting sequence
  source 1..20: mol_type = other RNA
ttttgaatttactgttcagg

SEQ ID NO: 9946 - RNA, 20 nt, synthetic construct
  misc_feature 1..20: note = C9Orf72 TTCN PAM targeting sequence
  source 1..20: mol_type = other RNA
aaaggaaaagtaatgataat

SEQ ID NO: 9947 - RNA, 20 nt, synthetic construct
  misc_feature 1..20: note = C9Orf72 TTCN PAM targeting sequence
  source 1..20: mol_type = other RNA
ggcttttttttttaaaaaaa

SEQ ID NO: 9948 - RNA, 20 nt, synthetic construct
  misc_feature 1..20: note = C9Orf72 TTCN PAM targeting sequence
  source 1..20: mol_type = other RNA
tatttttttttaaaaaaaaa

SEQ ID NO: 9949 - RNA, 20 nt, synthetic construct
  misc_feature 1..20: note = C9Orf72 TTCN PAM targeting sequence
  source 1..20: mol_type = other RNA
cttcttatttttttttaaaa

SEQ ID NO: 9950 - RNA, 20 nt, synthetic construct
  misc_feature 1..20: note = C9Orf72 TTCN PAM targeting sequence
  source 1..20: mol_type = other RNA
attaatatattttaacagtt

SEQ ID NO: 9951 - RNA, 20 nt, synthetic construct
  misc_feature 1..20: note = C9Orf72 TTCN PAM targeting sequence
  source 1..20: mol_type = other RNA
tatgtcaagaaaaaaaagac

SEQ ID NO: 9952 - RNA, 20 nt, synthetic construct
  misc_feature 1..20: note = C9Orf72 TTCN PAM targeting sequence
  source 1..20: mol_type = other RNA
tgacatatgaatataaaata

SEQ ID NO: 9953 - RNA, 20 nt, synthetic construct
  misc_feature 1..20: note = C9Orf72 TTCN PAM targeting sequence
  source 1..20: mol_type = other RNA
aagtcttttttttcttgaca

SEQ ID NO: 9954 - RNA, 20 nt, synthetic construct
  misc_feature 1..20: note = C9Orf72 TTCN PAM targeting sequence
  source 1..20: mol_type = other RNA
ttggttttgttaataagtcc

SEQ ID NO: 9955 - RNA, 20 nt, synthetic construct
  misc_feature 1..20: note = C9Orf72 TTCN PAM targeting sequence
  source 1..20: mol_type = other RNA
ataactgttacataatagac

SEQ ID NO: 9956 - RNA, 20 nt, synthetic construct
  misc_feature 1..20: note = C9Orf72 TTCN PAM targeting sequence
  source 1..20: mol_type = other RNA
aggtaccgggcttaatagtg

SEQ ID NO: 9957 - RNA, 20 nt, synthetic construct
  misc_feature 1..20: note = C9Orf72 TTCN PAM targeting sequence
  source 1..20: mol_type = other RNA
atacaattgtgtttacccta

SEQ ID NO: 9958 - RNA, 20 nt, synthetic construct
  misc_feature 1..20: note = C9Orf72 TTCN PAM targeting sequence
  source 1..20: mol_type = other RNA
ttttccatacaattgtgttt

SEQ ID NO: 9959 - RNA, 20 nt, synthetic construct
  misc_feature 1..20: note = C9Orf72 TTCN PAM targeting sequence
  source 1..20: mol_type = other RNA
tctttttccatacaattgtg

SEQ ID NO: 9960 - RNA, 20 nt, synthetic construct
  misc_feature 1..20: note = C9Orf72 TTCN PAM targeting sequence
  source 1..20: mol_type = other RNA
taaatgttcttctttttcca

SEQ ID NO: 9961 - RNA, 20 nt, synthetic construct
  misc_feature 1..20: note = C9Orf72 TTCN PAM targeting sequence
  source 1..20: mol_type = other RNA
tcaagcataattctgctggt

SEQ ID NO: 9962 - RNA, 20 nt, synthetic construct
  misc_feature 1..20: note = C9Orf72 TTCN PAM targeting sequence
  source 1..20: mol_type = other RNA
agcataattctgctggtaat

SEQ ID NO: 9963 - RNA, 20 nt, synthetic construct
  misc_feature 1..20: note = C9Orf72 TTCN PAM targeting sequence
  source 1..20: mol_type = other RNA
gctggtaatatttctttctt

SEQ ID NO: 9964 - RNA, 20 nt, synthetic construct
  misc_feature 1..20: note = C9Orf72 TTCN PAM targeting sequence
  source 1..20: mol_type = other RNA
ttctttttaaatgcaacttc

SEQ ID NO: 9965 - RNA, 20 nt, synthetic construct
  misc_feature 1..20: note = C9Orf72 TTCN PAM targeting sequence
  source 1..20: mol_type = other RNA
ttttaaatgcaacttctgtt

SEQ ID NO: 9966 - RNA, 20 nt, synthetic construct
  misc_feature 1..20: note = C9Orf72 TTCN PAM targeting sequence
  source 1..20: mol_type = other RNA
gttttgtttttattcgtaaa

SEQ ID NO: 9967 - RNA, 20 nt, synthetic construct
  misc_feature 1..20: note = C9Orf72 TTCN PAM targeting sequence
  source 1..20: mol_type = other RNA
taaaagacacaatttcatat

SEQ ID NO: 9968 - RNA, 20 nt, synthetic construct
  misc_feature 1..20: note = C9Orf72 TTCN PAM targeting sequence
  source 1..20: mol_type = other RNA
tattgcttgactacagtacc

SEQ ID NO: 9969 - RNA, 20 nt, synthetic construct
  misc_feature 1..20: note = C9Orf72 TTCN PAM targeting sequence
  source 1..20: mol_type = other RNA
tcagtgtagatgatcgtatc

SEQ ID NO: 9970 - RNA, 20 nt, synthetic construct
  misc_feature 1..20: note = C9Orf72 TTCN PAM targeting sequence
  source 1..20: mol_type = other RNA
tctgaagtggctctccagaa

SEQ ID NO: 9971 - RNA, 20 nt, synthetic construct
  misc_feature 1..20: note = C9Orf72 TTCN PAM targeting sequence
  source 1..20: mol_type = other RNA
gaagtggctctccagaaggc

SEQ ID NO: 9972 - RNA, 20 nt, synthetic construct
  misc_feature 1..20: note = C9Orf72 TTCN PAM targeting sequence
  source 1..20: mol_type = other RNA
gaagaagacatggctcagga

SEQ ID NO: 9973 - RNA, 20 nt, synthetic construct
  misc_feature 1..20: note = C9Orf72 TTCN PAM targeting sequence
  source 1..20: mol_type = other RNA
ggagagccacttcagaagaa

SEQ ID NO: 9974 - RNA, 20 nt, synthetic construct
  misc_feature 1..20: note = C9Orf72 TTCN PAM targeting sequence
  source 1..20: mol_type = other RNA
tgacagggtggcatctgctt

SEQ ID NO: 9975 - RNA, 20 nt, synthetic construct
  misc_feature 1..20: note = C9Orf72 TTCN PAM targeting sequence
  source 1..20: mol_type = other RNA
cagtattgacatccacatct

SEQ ID NO: 9976 - RNA, 20 nt, synthetic construct
  misc_feature 1..20: note = C9Orf72 TTCN PAM targeting sequence
  source 1..20: mol_type = other RNA
ggcaagtcatgtatgctcca

SEQ ID NO: 9977 - RNA, 20 nt, synthetic construct
  misc_feature 1..20: note = C9Orf72 TTCN PAM targeting sequence
  source 1..20: mol_type = other RNA
agttgaatcctgtcaaaata

SEQ ID NO: 9978 - RNA, 20 nt, synthetic construct
  misc_feature 1..20: note = C9Orf72 TTCN PAM targeting sequence
  source 1..20: mol_type = other RNA
actggaagctttgtgctgcc

SEQ ID NO: 9979 - RNA, 20 nt, synthetic construct
  misc_feature 1..20: note = C9Orf72 TTCN PAM targeting sequence
  source 1..20: mol_type = other RNA
ttttattttgacaggattca

SEQ ID NO: 9980 - RNA, 20 nt, synthetic construct
  misc_feature 1..20: note = C9Orf72 TTCN PAM targeting sequence
  source 1..20: mol_type = other RNA
tatcgtttggcatgtaagac

SEQ ID NO: 9981 - RNA, 20 nt, synthetic construct
  misc_feature 1..20: note = C9Orf72 TTCN PAM targeting sequence
  source 1..20: mol_type = other RNA
taggataaatttttagagat

SEQ ID NO: 9982 - RNA, 20 nt, synthetic construct
  misc_feature 1..20: note = C9Orf72 TTCN PAM targeting sequence
  source 1..20: mol_type = other RNA
tgagtgtgtgcaaagtttta

SEQ ID NO: 9983 - RNA, 20 nt, synthetic construct
  misc_feature 1..20: note = C9Orf72 TTCN PAM targeting sequence
  source 1..20: mol_type = other RNA
gtcactaaaactttgcacac

SEQ ID NO: 9984 - RNA, 20 nt, synthetic construct
  misc_feature 1..20: note = C9Orf72 TTCN PAM targeting sequence
  source 1..20: mol_type = other RNA
gtatagcattggtttcaata

SEQ ID NO: 9985 - RNA, 20 nt, synthetic construct
  misc_feature 1..20: note = C9Orf72 TTCN PAM targeting sequence
  source 1..20: mol_type = other RNA
atagcaaaacatcagaatga

SEQ ID NO: 9986 - RNA, 20 nt, synthetic construct
  misc_feature 1..20: note = C9Orf72 TTCN PAM targeting sequence
  source 1..20: mol_type = other RNA
gatgttttgctattgaaacc

SEQ ID NO: 9987 - RNA, 20 nt, synthetic construct
  misc_feature 1..20: note = C9Orf72 TTCN PAM targeting sequence
  source 1..20: mol_type = other RNA
tttggatgcttaggtcattc

SEQ ID NO: 9988 - RNA, 20 nt, synthetic construct
  misc_feature 1..20: note = C9Orf72 TTCN PAM targeting sequence
  source 1..20: mol_type = other RNA
tttttatttacttaaccact

SEQ ID NO: 9989 - RNA, 20 nt, synthetic construct
  misc_feature 1..20: note = C9Orf72 TTCN PAM targeting sequence
  source 1..20: mol_type = other RNA
tctatagatgccaaataata

SEQ ID NO: 9990 - RNA, 20 nt, synthetic construct
  misc_feature 1..20: note = C9Orf72 TTCN PAM targeting sequence
  source 1..20: mol_type = other RNA
acaacttcatctatagatgc

SEQ ID NO: 9991 - RNA, 20 nt, synthetic construct
  misc_feature 1..20: note = C9Orf72 TTCN PAM targeting sequence
  source 1..20: mol_type = other RNA
aagaggcttagaatctgctg

SEQ ID NO: 9992 - RNA, 20 nt, synthetic construct
  misc_feature 1..20: note = C9Orf72 TTCN PAM targeting sequence
  source 1..20: mol_type = other RNA
aagcctctttgaatatcaac

SEQ ID NO: 9993 - RNA, 20 nt, synthetic construct
  misc_feature 1..20: note = C9Orf72 TTCN PAM targeting sequence
  source 1..20: mol_type = other RNA
cagcagattctaagcctctt

SEQ ID NO: 9994 - RNA, 20 nt, synthetic construct
  misc_feature 1..20: note = C9Orf72 TTCN PAM targeting sequence
  source 1..20: mol_type = other RNA
aatctgcttttttcacagca

SEQ ID NO: 9995 - RNA, 20 nt, synthetic construct
  misc_feature 1..20: note = C9Orf72 TTCN PAM targeting sequence
  source 1..20: mol_type = other RNA
ttaagactcccacccccact

SEQ ID NO: 9996 - RNA, 20 nt, synthetic construct
  misc_feature 1..20: note = C9Orf72 TTCN PAM targeting sequence
  source 1..20: mol_type = other RNA
cttttgcatgtattttcttt

SEQ ID NO: 9997 - RNA, 20 nt, synthetic construct
  misc_feature 1..20: note = C9Orf72 TTCN PAM targeting sequence
  source 1..20: mol_type = other RNA
agtctttttttcccttttgc

SEQ ID NO: 9998 - RNA, 20 nt, synthetic construct
  misc_feature 1..20: note = C9Orf72 TTCN PAM targeting sequence
  source 1..20: mol_type = other RNA
ctggattcaaaattacaagt

SEQ ID NO: 9999 - RNA, 20 nt, synthetic construct
  misc_feature 1..20: note = C9Orf72 TTCN PAM targeting sequence
  source 1..20: mol_type = other RNA
aaattacaagtgtcttttaa

SEQ ID NO: 10000 - RNA, 20 nt, synthetic construct
  misc_feature 1..20: note = C9Orf72 TTCN PAM targeting sequence
  source 1..20: mol_type = other RNA
taattattctatgcacctca

SEQ ID NO: 10001 - RNA, 20 nt, synthetic construct
  misc_feature 1..20: note = C9Orf72 TTCN PAM targeting sequence
  source 1..20: mol_type = other RNA
atgcacctcaatgagtatgt

SEQ ID NO: 10002 - RNA, 20 nt, synthetic construct
  misc_feature 1..20: note = C9Orf72 TTCN PAM targeting sequence
  source 1..20: mol_type = other RNA
ttcctaatcagttggggtag

SEQ ID NO: 10003 - RNA, 20 nt, synthetic construct
  misc_feature 1..20: note = C9Orf72 TTCN PAM targeting sequence
  source 1..20: mol_type = other RNA
taatcagttggggtagccag

SEQ ID NO: 10004 - RNA, 20 nt, synthetic construct
  misc_feature 1..20: note = C9Orf72 TTCN PAM targeting sequence
  source 1..20: mol_type = other RNA
tagcacagtgcctcatacgc

SEQ ID NO: 10005 - RNA, 20 nt, synthetic construct
  misc_feature 1..20: note = C9Orf72 TTCN PAM targeting sequence
  source 1..20: mol_type = other RNA
gttcatagcacagtgcctca

SEQ ID NO: 10006 - RNA, 20 nt, synthetic construct
  misc_feature 1..20: note = C9Orf72 TTCN PAM targeting sequence
  source 1..20: mol_type = other RNA
gttctgttcatagcacagtg

SEQ ID NO: 10007 - RNA, 20 nt, synthetic construct
  misc_feature 1..20: note = C9Orf72 TTCN PAM targeting sequence
  source 1..20: mol_type = other RNA
tctgttctgttcatagcaca

SEQ ID NO: 10008 - RNA, 20 nt, synthetic construct
  misc_feature 1..20: note = C9Orf72 TTCN PAM targeting sequence
  source 1..20: mol_type = other RNA
atttttttactattataatg

SEQ ID NO: 10009 - RNA, 20 nt, synthetic construct
  misc_feature 1..20: note = C9Orf72 TTCN PAM targeting sequence
  source 1..20: mol_type = other RNA
ggaaaactatatgatttgta

SEQ ID NO: 10010 - RNA, 20 nt, synthetic construct
  misc_feature 1..20: note = C9Orf72 TTCN PAM targeting sequence
  source 1..20: mol_type = other RNA
agaaaatacctttgacatta

SEQ ID NO: 10011 - RNA, 20 nt, synthetic construct
  misc_feature 1..20: note = C9Orf72 TTCN PAM targeting sequence
  source 1..20: mol_type = other RNA
ccatgcaaatacaaatcata

SEQ ID NO: 10012 - RNA, 20 nt, synthetic construct
  misc_feature 1..20: note = C9Orf72 TTCN PAM targeting sequence
  source 1..20: mol_type = other RNA
ttagatcatagttttgaaat

SEQ ID NO: 10013 - RNA, 20 nt, synthetic construct
  misc_feature 1..20: note = C9Orf72 TTCN PAM targeting sequence
  source 1..20: mol_type = other RNA
aaactatgatctaatgaaaa

SEQ ID NO: 10014 - RNA, 20 nt, synthetic construct
  misc_feature 1..20: note = C9Orf72 TTCN PAM targeting sequence
  source 1..20: mol_type = other RNA
tctaggcatctggtataggt

SEQ ID NO: 10015 - RNA, 20 nt, synthetic construct
  misc_feature 1..20: note = C9Orf72 TTCN PAM targeting sequence
  source 1..20: mol_type = other RNA
gaactaaaattatataatta

SEQ ID NO: 10016 - RNA, 20 nt, synthetic construct
  misc_feature 1..20: note = C9Orf72 TTCN PAM targeting sequence
  source 1..20: mol_type = other RNA
gaaagggacctataccagat

SEQ ID NO: 10017 - RNA, 20 nt, synthetic construct
  misc_feature 1..20: note = C9Orf72 TTCN PAM targeting sequence
  source 1..20: mol_type = other RNA
tcagcaccctctcatttaat

SEQ ID NO: 10018 - RNA, 20 nt, synthetic construct
  misc_feature 1..20: note = C9Orf72 TTCN PAM targeting sequence
  source 1..20: mol_type = other RNA
cctgttaaaggcataataaa

SEQ ID NO: 10019 - RNA, 20 nt, synthetic construct
  misc_feature 1..20: note = C9Orf72 TTCN PAM targeting sequence
  source 1..20: mol_type = other RNA
aatttacagatatgtataac

SEQ ID NO: 10020 - RNA, 20 nt, synthetic construct
  misc_feature 1..20: note = C9Orf72 TTCN PAM targeting sequence
  source 1..20: mol_type = other RNA
atttgagttatacatatctg

SEQ ID NO: 10021 - RNA, 20 nt, synthetic construct
  misc_feature 1..20: note = C9Orf72 TTCN PAM targeting sequence
  source 1..20: mol_type = other RNA
tttaactagtttctatattt

SEQ ID NO: 10022 - RNA, 20 nt, synthetic construct
  misc_feature 1..20: note = C9Orf72 TTCN PAM targeting sequence
  source 1..20: mol_type = other RNA
atatttaaatactatcattc

SEQ ID NO: 10023 - RNA, 20 nt, synthetic construct
  misc_feature 1..20: note = C9Orf72 TTCN PAM targeting sequence
  source 1..20: mol_type = other RNA
gagttcatagcagcacatta

SEQ ID NO: 10024 - RNA, 20 nt, synthetic construct
  misc_feature 1..20: note = C9Orf72 TTCN PAM targeting sequence
  source 1..20: mol_type = other RNA
tagcagcacattattgaaaa

SEQ ID NO: 10025 - RNA, 20 nt, synthetic construct
  misc_feature 1..20: note = C9Orf72 TTCN PAM targeting sequence
  source 1..20: mol_type = other RNA
ataatgtgctgctatgaact

SEQ ID NO: 10026 - RNA, 20 nt, synthetic construct
  misc_feature 1..20: note = C9Orf72 TTCN PAM targeting sequence
  source 1..20: mol_type = other RNA
ttttgccgtggctacatcct

SEQ ID NO: 10027 - RNA, 20 nt, synthetic construct
  misc_feature 1..20: note = C9Orf72 TTCN PAM targeting sequence
  source 1..20: mol_type = other RNA
tgaggatgtagccacggcaa

SEQ ID NO: 10028 - RNA, 20 nt, synthetic construct
  misc_feature 1..20: note = C9Orf72 TTCN PAM targeting sequence
  source 1..20: mol_type = other RNA
taatggttatgtgattgtct

SEQ ID NO: 10029 - RNA, 20 nt, synthetic construct
  misc_feature 1..20: note = C9Orf72 TTCN PAM targeting sequence
  source 1..20: mol_type = other RNA
tcacgtcttgggactataat

SEQ ID NO: 10030 - RNA, 20 nt, synthetic construct
  misc_feature 1..20: note = C9Orf72 TTCN PAM targeting sequence
  source 1..20: mol_type = other RNA
cgtcttgggactataattga

SEQ ID NO: 10031 - RNA, 20 nt, synthetic construct
  misc_feature 1..20: note = C9Orf72 TTCN PAM targeting sequence
  source 1..20: mol_type = other RNA
attatagtcccaagacgtga

SEQ ID NO: 10032 - RNA, 20 nt, synthetic construct
  misc_feature 1..20: note = C9Orf72 TTCN PAM targeting sequence
  source 1..20: mol_type = other RNA
acaaggtgaacaactttctt

SEQ ID NO: 10033 - RNA, 20 nt, synthetic construct
  misc_feature 1..20: note = C9Orf72 TTCN PAM targeting sequence
  source 1..20: mol_type = other RNA
ccttgttgaatctattattg

SEQ ID NO: 10034 - RNA, 20 nt, synthetic construct
  misc_feature 1..20: note = C9Orf72 TTCN PAM targeting sequence
  source 1..20: mol_type = other RNA
tccctttaagtattataaat

SEQ ID NO: 10035 - RNA, 20 nt, synthetic construct
  misc_feature 1..20: note = C9Orf72 TTCN PAM targeting sequence
  source 1..20: mol_type = other RNA
ctttaagtattataaataat

SEQ ID NO: 10036 - RNA, 20 nt, synthetic construct
  misc_feature 1..20: note = C9Orf72 TTCN PAM targeting sequence
  source 1..20: mol_type = other RNA
ctgttttgctccttgacagt

SEQ ID NO: 10037 - RNA, 20 nt, synthetic construct
  misc_feature 1..20: note = C9Orf72 TTCN PAM targeting sequence
  source 1..20: mol_type = other RNA
tttatttgagtctactgtca

SEQ ID NO: 10038 - RNA, 20 nt, synthetic construct
  misc_feature 1..20: note = C9Orf72 TTCN PAM targeting sequence
  source 1..20: mol_type = other RNA
aatatatattatatatagaa

SEQ ID NO: 10039 - RNA, 20 nt, synthetic construct
  misc_feature 1..20: note = C9Orf72 TTCN PAM targeting sequence
  source 1..20: mol_type = other RNA
atatataatatatattagaa

SEQ ID NO: 10040 - RNA, 20 nt, synthetic construct
  misc_feature 1..20: note = C9Orf72 TTCN PAM targeting sequence
  source 1..20: mol_type = other RNA
tatgtatgtgtactaaaata

SEQ ID NO: 10041 - RNA, 20 nt, synthetic construct
  misc_feature 1..20: note = C9Orf72 TTCN PAM targeting sequence
  source 1..20: mol_type = other RNA
taaagatgtttaaaattttt

SEQ ID NO: 10042 - RNA, 20 nt, synthetic construct
  misc_feature 1..20: note = C9Orf72 TTCN PAM targeting sequence
  source 1..20: mol_type = other RNA
ataaaattcaaatctattta

SEQ ID NO: 10043 - RNA, 20 nt, synthetic construct
  misc_feature 1..20: note = C9Orf72 TTCN PAM targeting sequence
  source 1..20: mol_type = other RNA
aatctatttagttaaaaaga

SEQ ID NO: 10044 - RNA, 20 nt, synthetic construct
  misc_feature 1..20: note = C9Orf72 TTCN PAM targeting sequence
  source 1..20: mol_type = other RNA
ttttaactaaatagatttga

SEQ ID NO: 10045 - RNA, 20 nt, synthetic construct
  misc_feature 1..20: note = C9Orf72 TTCN PAM targeting sequence
  source 1..20: mol_type = other RNA
tacatgtctagcctcaggac

SEQ ID NO: 10046 - RNA, 20 nt, synthetic construct
  misc_feature 1..20: note = C9Orf72 TTCN PAM targeting sequence
  source 1..20: mol_type = other RNA
aggtgggtccctgttcctac

SEQ ID NO: 10047 - RNA, 20 nt, synthetic construct
  misc_feature 1..20: note = C9Orf72 TTCN PAM targeting sequence
  source 1..20: mol_type = other RNA
atggtgtttcactgatgata

SEQ ID NO: 10048 - RNA, 20 nt, synthetic construct
  misc_feature 1..20: note = C9Orf72 TTCN PAM targeting sequence
  source 1..20: mol_type = other RNA
ctgatgatactaactataaa

SEQ ID NO: 10049 - RNA, 20 nt, synthetic construct
  misc_feature 1..20: note = C9Orf72 TTCN PAM targeting sequence
  source 1..20: mol_type = other RNA
gcacatagactatatgtctt

SEQ ID NO: 10050 - RNA, 20 nt, synthetic construct
  misc_feature 1..20: note = C9Orf72 TTCN PAM targeting sequence
  source 1..20: mol_type = other RNA
tttacacagttctgcacata

SEQ ID NO: 10051 - RNA, 20 nt, synthetic construct
  misc_feature 1..20: note = C9Orf72 TTCN PAM targeting sequence
  source 1..20: mol_type = other RNA
aaaatcatttttgagactct

SEQ ID NO: 10052 - RNA, 20 nt, synthetic construct
  misc_feature 1..20: note = C9Orf72 TTCN PAM targeting sequence
  source 1..20: mol_type = other RNA
cttgtgataactagaaacta

SEQ ID NO: 10053 - RNA, 20 nt, synthetic construct
  misc_feature 1..20: note = C9Orf72 TTCN PAM targeting sequence
  source 1..20: mol_type = other RNA
agttatcacaagtgaaacca

SEQ ID NO: 10054 - RNA, 20 nt, synthetic construct
  misc_feature 1..20: note = C9Orf72 TTCN PAM targeting sequence
  source 1..20: mol_type = other RNA
gcttcacataacctggagca

SEQ ID NO: 10055 - RNA, 20 nt, synthetic construct
  misc_feature 1..20: note = C9Orf72 TTCN PAM targeting sequence
  source 1..20: mol_type = other RNA
cataacctggagcattttct

SEQ ID NO: 10056 - RNA, 20 nt, synthetic construct
  misc_feature 1..20: note = C9Orf72 TTCN PAM targeting sequence
  source 1..20: mol_type = other RNA
ctctgctggagtcagaaaaa

SEQ ID NO: 10057 - RNA, 20 nt, synthetic construct
  misc_feature 1..20: note = C9Orf72 TTCN PAM targeting sequence
  source 1..20: mol_type = other RNA
gactccagcagagagaaaat

SEQ ID NO: 10058 - RNA, 20 nt, synthetic construct
  misc_feature 1..20: note = C9Orf72 TTCN PAM targeting sequence
  source 1..20: mol_type = other RNA
gactatctataaaagaaaat

SEQ ID NO: 10059 - RNA, 20 nt, synthetic construct
  misc_feature 1..20: note = C9Orf72 TTCN PAM targeting sequence
  source 1..20: mol_type = other RNA
tttatagatagtcagaacat

SEQ ID NO: 10060 - RNA, 20 nt, synthetic construct
  misc_feature 1..20: note = C9Orf72 TTCN PAM targeting sequence
  source 1..20: mol_type = other RNA
tgttttaatgctaaaatatt

SEQ ID NO: 10061 - RNA, 20 nt, synthetic construct
  misc_feature 1..20: note = C9Orf72 TTCN PAM targeting sequence
  source 1..20: mol_type = other RNA
taagcaaatcagtggtcttt

SEQ ID NO: 10062 - RNA, 20 nt, synthetic construct
  misc_feature 1..20: note = C9Orf72 TTCN PAM targeting sequence
  source 1..20: mol_type = other RNA
gatatctttcataagcaaat

SEQ ID NO: 10063 - RNA, 20 nt, synthetic construct
  misc_feature 1..20: note = C9Orf72 TTCN PAM targeting sequence
  source 1..20: mol_type = other RNA
taggatatgttttattgata

SEQ ID NO: 10064 - RNA, 20 nt, synthetic construct
  misc_feature 1..20: note = C9Orf72 TTCN PAM targeting sequence
  source 1..20: mol_type = other RNA
ttagtcacctggaatccatg

SEQ ID NO: 10065 - RNA, 20 nt, synthetic construct
  misc_feature 1..20: note = C9Orf72 TTCN PAM targeting sequence
  source 1..20: mol_type = other RNA
aggtgactaaagaatactta

SEQ ID NO: 10066 - RNA, 20 nt, synthetic construct
  misc_feature 1..20: note = C9Orf72 TTCN PAM targeting sequence
  source 1..20: mol_type = other RNA
gtggtcaaataaatttagaa

SEQ ID NO: 10067 - RNA, 20 nt, synthetic construct
  misc_feature 1..20: note = C9Orf72 TTCN PAM targeting sequence
  source 1..20: mol_type = other RNA
aaatttatttgaccacagaa

SEQ ID NO: 10068 - RNA, 20 nt, synthetic construct
  misc_feature 1..20: note = C9Orf72 TTCN PAM targeting sequence
  source 1..20: mol_type = other RNA
ggtgaattatatcatctgca

SEQ ID NO: 10069 - RNA, 20 nt, synthetic construct
  misc_feature 1..20: note = C9Orf72 TTCN PAM targeting sequence
  source 1..20: mol_type = other RNA
cctgaagagtcacagtatgt

SEQ ID NO: 10070 - RNA, 20 nt, synthetic construct
  misc_feature 1..20: note = C9Orf72 TTCN PAM targeting sequence
  source 1..20: mol_type = other RNA
cagacttatttgaccatgca

SEQ ID NO: 10071 - RNA, 20 nt, synthetic construct
  misc_feature 1..20: note = C9Orf72 TTCN PAM targeting sequence
  source 1..20: mol_type = other RNA
gtttagtgggtctacacatg

SEQ ID NO: 10072 - RNA, 20 nt, synthetic construct
  misc_feature 1..20: note = C9Orf72 TTCN PAM targeting sequence
  source 1..20: mol_type = other RNA
tgtgtagacccactaaacag

SEQ ID NO: 10073 - RNA, 20 nt, synthetic construct
  misc_feature 1..20: note = C9Orf72 TTCN PAM targeting sequence
  source 1..20: mol_type = other RNA
ttgtaagaaatatcaaagaa

SEQ ID NO: 10074 - RNA, 20 nt, synthetic construct
  misc_feature 1..20: note = C9Orf72 TTCN PAM targeting sequence
  source 1..20: mol_type = other RNA
tacaacgaatttcatgtgta

SEQ ID NO: 10075 - RNA, 20 nt, synthetic construct
  misc_feature 1..20: note = C9Orf72 TTCN PAM targeting sequence
  source 1..20: mol_type = other RNA
ttgatatttcttacaacgaa

SEQ ID NO: 10076 - RNA, 20 nt, synthetic construct
  misc_feature 1..20: note = C9Orf72 TTCN PAM targeting sequence
  source 1..20: mol_type = other RNA
ttttggaggatctggacatt

SEQ ID NO: 10077 - RNA, 20 nt, synthetic construct
  misc_feature 1..20: note = C9Orf72 TTCN PAM targeting sequence
  source 1..20: mol_type = other RNA
cttctttttggaggatctgg

SEQ ID NO: 10078 - RNA, 20 nt, synthetic construct
  misc_feature 1..20: note = C9Orf72 TTCN PAM targeting sequence
  source 1..20: mol_type = other RNA
ataattaattctcttctttt

SEQ ID NO: 10079 - RNA, 20 nt, synthetic construct
  misc_feature 1..20: note = C9Orf72 TTCN PAM targeting sequence
  source 1..20: mol_type = other RNA
aaatcccacccaatgacctg

SEQ ID NO: 10080 - RNA, 20 nt, synthetic construct
  misc_feature 1..20: note = C9Orf72 TTCN PAM targeting sequence
  source 1..20: mol_type = other RNA
aataatatttgacctacagc

SEQ ID NO: 10081 - RNA, 20 nt, synthetic construct
  misc_feature 1..20: note = C9Orf72 TTCN PAM targeting sequence
  source 1..20: mol_type = other RNA
taatagagctgtaggtcaaa

SEQ ID NO: 10082 - RNA, 20 nt, synthetic construct
  misc_feature 1..20: note = C9Orf72 TTCN PAM targeting sequence
  source 1..20: mol_type = other RNA
agatagttacatgccttttt

SEQ ID NO: 10083 - RNA, 20 nt, synthetic construct
  misc_feature 1..20: note = C9Orf72 TTCN PAM targeting sequence
  source 1..20: mol_type = other RNA
aaccatatccacagttatta

SEQ ID NO: 10084 - RNA, 20 nt, synthetic construct
  misc_feature 1..20: note = C9Orf72 TTCN PAM targeting sequence
  source 1..20: mol_type = other RNA
acctagagtggtggcaactt

SEQ ID NO: 10085 - RNA, 20 nt, synthetic construct
  misc_feature 1..20: note = C9Orf72 TTCN PAM targeting sequence
  source 1..20: mol_type = other RNA
ttctcaaattaaaacaagat

SEQ ID NO: 10086 - RNA, 20 nt, synthetic construct
  misc_feature 1..20: note = C9Orf72 TTCN PAM targeting sequence
  source 1..20: mol_type = other RNA
caaattaaaacaagataaaa

SEQ ID NO: 10087 - RNA, 20 nt, synthetic construct
  misc_feature 1..20: note = C9Orf72 TTCN PAM targeting sequence
  source 1..20: mol_type = other RNA
ccctcaagaggatggaggat

SEQ ID NO: 10088 - RNA, 20 nt, synthetic construct
  misc_feature 1..20: note = C9Orf72 TTCN PAM targeting sequence
  source 1..20: mol_type = other RNA
catcctccatcctcttgagg

SEQ ID NO: 10089 - RNA, 20 nt, synthetic construct
  misc_feature 1..20: note = C9Orf72 TTCN PAM targeting sequence
  source 1..20: mol_type = other RNA
cccttcataaagcagctcgg

SEQ ID NO: 10090 - RNA, 20 nt, synthetic construct
  misc_feature 1..20: note = C9Orf72 TTCN PAM targeting sequence
  source 1..20: mol_type = other RNA
taaagcagctcggcagtcac

SEQ ID NO: 10091 - RNA, 20 nt, synthetic construct
  misc_feature 1..20: note = C9Orf72 TTCN PAM targeting sequence
  source 1..20: mol_type = other RNA
atctgtgatctccaaagcct

SEQ ID NO: 10092 - RNA, 20 nt, synthetic construct
  misc_feature 1..20: note = C9Orf72 TTCN PAM targeting sequence
  source 1..20: mol_type = other RNA
gttacctcaaacaggtggct

SEQ ID NO: 10093 - RNA, 20 nt, synthetic construct
  misc_feature 1..20: note = C9Orf72 TTCN PAM targeting sequence
  source 1..20: mol_type = other RNA
ttctgttacctcaaacaggt

SEQ ID NO: 10094 - RNA, 20 nt, synthetic construct
  misc_feature 1..20: note = C9Orf72 TTCN PAM targeting sequence
  source 1..20: mol_type = other RNA
tagatgcaatataatgacac

SEQ ID NO: 10095 - RNA, 20 nt, synthetic construct
  misc_feature 1..20: note = C9Orf72 TTCN PAM targeting sequence
  source 1..20: mol_type = other RNA
catataaccatttatgagag

SEQ ID NO: 10096 - RNA, 20 nt, synthetic construct
  misc_feature 1..20: note = C9Orf72 TTCN PAM targeting sequence
  source 1..20: mol_type = other RNA
taatttttttttgtaatcag

SEQ ID NO: 10097 - RNA, 20 nt, synthetic construct
  misc_feature 1..20: note = C9Orf72 TTCN PAM targeting sequence
  source 1..20: mol_type = other RNA
aacatatttcctatgtaaaa

SEQ ID NO: 10098 - RNA, 20 nt, synthetic construct
  misc_feature 1..20: note = C9Orf72 TTCN PAM targeting sequence
  source 1..20: mol_type = other RNA
tatgtaaaactttttttaaa

SEQ ID NO: 10099 - RNA, 20 nt, synthetic construct
  misc_feature 1..20: note = C9Orf72 TTCN PAM targeting sequence
  source 1..20: mol_type = other RNA
gcaaacctaattttttaaaa

SEQ ID NO: 10100 - RNA, 20 nt, synthetic construct
  misc_feature 1..20: note = C9Orf72 TTCN PAM targeting sequence
  source 1..20: mol_type = other RNA
atttcagcaaacctaatttt

SEQ ID NO: 10101 - RNA, 20 nt, synthetic construct
  misc_feature 1..20: note = C9Orf72 TTCN PAM targeting sequence
  source 1..20: mol_type = other RNA
gagataagtatgtgtatctt

SEQ ID NO: 10102 - RNA, 20 nt, synthetic construct
  misc_feature 1..20: note = C9Orf72 TTCN PAM targeting sequence
  source 1..20: mol_type = other RNA
aactaatggtcagtgaagaa

SEQ ID NO: 10103 - RNA, 20 nt, synthetic construct
  misc_feature 1..20: note = C9Orf72 TTCN PAM targeting sequence
  source 1..20: mol_type = other RNA
ctgaccattagttagaaaga

SEQ ID NO: 10104 - RNA, 20 nt, synthetic construct
  misc_feature 1..20: note = C9Orf72 TTCN PAM targeting sequence
  source 1..20: mol_type = other RNA
tcactgaccattagttagaa

SEQ ID NO: 10105 - RNA, 20 nt, synthetic construct
  misc_feature 1..20: note = C9Orf72 TTCN PAM targeting sequence
  source 1..20: mol_type = other RNA
aagcattagctaataaacta

SEQ ID NO: 10106 - RNA, 20 nt, synthetic construct
  misc_feature 1..20: note = C9Orf72 TTCN PAM targeting sequence
  source 1..20: mol_type = other RNA
ttaatccttaattaactcaa

SEQ ID NO: 10107 - RNA, 20 nt, synthetic construct
  misc_feature 1..20: note = C9Orf72 TTCN PAM targeting sequence
  source 1..20: mol_type = other RNA
gtgctacttgagttaattaa

SEQ ID NO: 10108 - RNA, 20 nt, synthetic construct
  misc_feature 1..20: note = C9Orf72 TTCN PAM targeting sequence
  source 1..20: mol_type = other RNA
ttcagtgctacttgagttaa

SEQ ID NO: 10109 - RNA, 20 nt, synthetic construct
  misc_feature 1..20: note = C9Orf72 TTCN PAM targeting sequence
  source 1..20: mol_type = other RNA
gaccctttccttcagtgcta

SEQ ID NO: 10110 - RNA, 20 nt, synthetic construct
  misc_feature 1..20: note = C9Orf72 TTCN PAM targeting sequence
  source 1..20: mol_type = other RNA
gtaatgtttctgaccctttc

SEQ ID NO: 10111 - RNA, 20 nt, synthetic construct
  misc_feature 1..20: note = C9Orf72 TTCN PAM targeting sequence
  source 1..20: mol_type = other RNA
agggagctattgggattaag

SEQ ID NO: 10112 - RNA, 20 nt, synthetic construct
  misc_feature 1..20: note = C9Orf72 TTCN PAM targeting sequence
  source 1..20: mol_type = other RNA
aaatctgtcccttctaggga

SEQ ID NO: 10113 - RNA, 20 nt, synthetic construct
  misc_feature 1..20: note = C9Orf72 TTCN PAM targeting sequence
  source 1..20: mol_type = other RNA
ttctaaatctgtcccttcta

SEQ ID NO: 10114 - RNA, 20 nt, synthetic construct
  misc_feature 1..20: note = C9Orf72 TTCN PAM targeting sequence
  source 1..20: mol_type = other RNA
ctttccttctaaatctgtcc

SEQ ID NO: 10115 - RNA, 20 nt, synthetic construct
  misc_feature 1..20: note = C9Orf72 TTCN PAM targeting sequence
  source 1..20: mol_type = other RNA
ttgtcttcgctttccttcta

SEQ ID NO: 10116 - RNA, 20 nt, synthetic construct
  misc_feature 1..20: note = C9Orf72 TTCN PAM targeting sequence
  source 1..20: mol_type = other RNA
tcttgatttcattgtcttcg

SEQ ID NO: 10117 - RNA, 20 nt, synthetic construct
  misc_feature 1..20: note = C9Orf72 TTCN PAM targeting sequence
  source 1..20: mol_type = other RNA
ttggaactactaccaaaagt

SEQ ID NO: 10118 - RNA, 20 nt, synthetic construct
  misc_feature 1..20: note = C9Orf72 TTCN PAM targeting sequence
  source 1..20: mol_type = other RNA
aaagaaatgttatttgttta

SEQ ID NO: 10119 - RNA, 20 nt, synthetic construct
  misc_feature 1..20: note = C9Orf72 TTCN PAM targeting sequence
  source 1..20: mol_type = other RNA
gatttgttaaagataacatt

SEQ ID NO: 10120 - RNA, 20 nt, synthetic construct
  misc_feature 1..20: note = C9Orf72 TTCN PAM targeting sequence
  source 1..20: mol_type = other RNA
caatgttatctttaacaaat

SEQ ID NO: 10121 - RNA, 20 nt, synthetic construct
  misc_feature 1..20: note = C9Orf72 TTCN PAM targeting sequence
  source 1..20: mol_type = other RNA
atttcccaatgttatcttta

SEQ ID NO: 10122 - RNA, 20 nt, synthetic construct
  misc_feature 1..20: note = C9Orf72 TTCN PAM targeting sequence
  source 1..20: mol_type = other RNA
caaaaccatttatacactac

SEQ ID NO: 10123 - RNA, 20 nt, synthetic construct
  misc_feature 1..20: note = C9Orf72 TTCN PAM targeting sequence
  source 1..20: mol_type = other RNA
gagctatcaaaataaactga

SEQ ID NO: 10124 - RNA, 20 nt, synthetic construct
  misc_feature 1..20: note = C9Orf72 TTCN PAM targeting sequence
  source 1..20: mol_type = other RNA
tactcagtttatttcaaact

SEQ ID NO: 10125 - RNA, 20 nt, synthetic construct
  misc_feature 1..20: note = C9Orf72 TTCN PAM targeting sequence
  source 1..20: mol_type = other RNA
aactcactgttgccacaagg

SEQ ID NO: 10126 - RNA, 20 nt, synthetic construct
  misc_feature 1..20: note = C9Orf72 TTCN PAM targeting sequence
  source 1..20: mol_type = other RNA
ctgcactgctacctactaca

SEQ ID NO: 10127 - RNA, 20 nt, synthetic construct
  misc_feature 1..20: note = C9Orf72 TTCN PAM targeting sequence
  source 1..20: mol_type = other RNA
gttgtagtaggtagcagtgc

SEQ ID NO: 10128 - RNA, 20 nt, synthetic construct
  misc_feature 1..20: note = C9Orf72 TTCN PAM targeting sequence
  source 1..20: mol_type = other RNA
ttaacttacagtgccatcag

SEQ ID NO: 10129 - RNA, 20 nt, synthetic construct
  misc_feature 1..20: note = C9Orf72 TTCN PAM targeting sequence
  source 1..20: mol_type = other RNA
aataactcagaatagcttta

SEQ ID NO: 10130 - RNA, 20 nt, synthetic construct
  misc_feature 1..20: note = C9Orf72 TTCN PAM targeting sequence
  source 1..20: mol_type = other RNA
gagttatttgaagagctcac

SEQ ID NO: 10131 - RNA, 20 nt, synthetic construct
  misc_feature 1..20: note = C9Orf72 TTCN PAM targeting sequence
  source 1..20: mol_type = other RNA
gtgtttatcatataaagcta

SEQ ID NO: 10132 - RNA, 20 nt, synthetic construct
  misc_feature 1..20: note = C9Orf72 TTCN PAM targeting sequence
  source 1..20: mol_type = other RNA
tatacaaataaaagataaca

SEQ ID NO: 10133 - RNA, 20 nt, synthetic construct
  misc_feature 1..20: note = C9Orf72 TTCN PAM targeting sequence
  source 1..20: mol_type = other RNA
agagacctttcacagaaatt

SEQ ID NO: 10134 - RNA, 20 nt, synthetic construct
  misc_feature 1..20: note = C9Orf72 TTCN PAM targeting sequence
  source 1..20: mol_type = other RNA
cagaaattttcttattgagc

SEQ ID NO: 10135 - RNA, 20 nt, synthetic construct
  misc_feature 1..20: note = C9Orf72 TTCN PAM targeting sequence
  source 1..20: mol_type = other RNA
gtgaaaggtctctagaaaat

SEQ ID NO: 10136 - RNA, 20 nt, synthetic construct
  misc_feature 1..20: note = C9Orf72 TTCN PAM targeting sequence
  source 1..20: mol_type = other RNA
tattgagccttaaaacagcc

SEQ ID NO: 10137 - RNA, 20 nt, synthetic construct
  misc_feature 1..20: note = C9Orf72 TTCN PAM targeting sequence
  source 1..20: mol_type = other RNA
ataaataaatacattaatta

SEQ ID NO: 10138 - RNA, 20 nt, synthetic construct
  misc_feature 1..20: note = C9Orf72 TTCN PAM targeting sequence
  source 1..20: mol_type = other RNA
gctataaaatgatggtattt

SEQ ID NO: 10139 - RNA, 20 nt, synthetic construct
  misc_feature 1..20: note = C9Orf72 TTCN PAM targeting sequence
  source 1..20: mol_type = other RNA
tcagctataaaatgatggta

SEQ ID NO: 10140 - RNA, 20 nt, synthetic construct
  misc_feature 1..20: note = C9Orf72 TTCN PAM targeting sequence
  source 1..20: mol_type = other RNA
tacatcattttaaatcccat

SEQ ID NO: 10141 - RNA, 20 nt, synthetic construct
  misc_feature 1..20: note = C9Orf72 TTCN PAM targeting sequence
  source 1..20: mol_type = other RNA
gtgtcagcctttcatacatc

SEQ ID NO: 10142 - RNA, 20 nt, synthetic construct
  misc_feature 1..20: note = C9Orf72 TTCN PAM targeting sequence
  source 1..20: mol_type = other RNA
gattcaagccattaaggctc

SEQ ID NO: 10143 - RNA, 20 nt, synthetic construct
  misc_feature 1..20: note = C9Orf72 TTCN PAM targeting sequence
  source 1..20: mol_type = other RNA
agccattaaggctcttaggt

SEQ ID NO: 10144 - RNA, 20 nt, synthetic construct
  misc_feature 1..20: note = C9Orf72 TTCN PAM targeting sequence
  source 1..20: mol_type = other RNA
tttaggctcatgatggagta

SEQ ID NO: 10145 - RNA, 20 nt, synthetic construct
  misc_feature 1..20: note = C9Orf72 TTCN PAM targeting sequence
  source 1..20: mol_type = other RNA
cagtcttttcctttaggctc

SEQ ID NO: 10146 - RNA, 20 nt, synthetic construct
  misc_feature 1..20: note = C9Orf72 TTCN PAM targeting sequence
  source 1..20: mol_type = other RNA
cttttatgttcacagtcttt

SEQ ID NO: 10147 - RNA, 20 nt, synthetic construct
  misc_feature 1..20: note = C9Orf72 TTCN PAM targeting sequence
  source 1..20: mol_type = other RNA
cttttattaaaagtaaaatt

SEQ ID NO: 10148 - RNA, 20 nt, synthetic construct
  misc_feature 1..20: note = C9Orf72 TTCN PAM targeting sequence
  source 1..20: mol_type = other RNA
tgaaaatctgtaactgtgaa

SEQ ID NO: 10149 - RNA, 20 nt, synthetic construct
  misc_feature 1..20: note = C9Orf72 TTCN PAM targeting sequence
  source 1..20: mol_type = other RNA
tgaaattttacttttaataa

SEQ ID NO: 10150 - RNA, 20 nt, synthetic construct
  misc_feature 1..20: note = C9Orf72 TTCN PAM targeting sequence
  source 1..20: mol_type = other RNA
cagttacagattttcatgaa

SEQ ID NO: 10151 - RNA, 20 nt, synthetic construct
  misc_feature 1..20: note = C9Orf72 TTCN PAM targeting sequence
  source 1..20: mol_type = other RNA
tcacagttacagattttcat

SEQ ID NO: 10152 - RNA, 20 nt, synthetic construct
  misc_feature 1..20: note = C9Orf72 TTCN PAM targeting sequence
  source 1..20: mol_type = other RNA
gttttaaagtttcttcacag

SEQ ID NO: 10153 - RNA, 20 nt, synthetic construct
  misc_feature 1..20: note = C9Orf72 TTCN PAM targeting sequence
  source 1..20: mol_type = other RNA
tttactagttgctttacatg

SEQ ID NO: 10154 - RNA, 20 nt, synthetic construct
  misc_feature 1..20: note = C9Orf72 TTCN PAM targeting sequence
  source 1..20: mol_type = other RNA
agaagaaatgtaaataggaa

SEQ ID NO: 10155 - RNA, 20 nt, synthetic construct
  misc_feature 1..20: note = C9Orf72 TTCN PAM targeting sequence
  source 1..20: mol_type = other RNA
agaaatagccagtatttgtt

SEQ ID NO: 10156 - RNA, 20 nt, synthetic construct
  misc_feature 1..20: note = C9Orf72 TTCN PAM targeting sequence
  source 1..20: mol_type = other RNA
tctagaaatagccagtattt

SEQ ID NO: 10157 - RNA, 20 nt, synthetic construct
  misc_feature 1..20: note = C9Orf72 TTCN PAM targeting sequence
  source 1..20: mol_type = other RNA
tatttacatttcttctagaa

SEQ ID NO: 10158 - RNA, 20 nt, synthetic construct
  misc_feature 1..20: note = C9Orf72 TTCN PAM targeting sequence
  source 1..20: mol_type = other RNA
aggcactgttctaagtgctt

SEQ ID NO: 10159 - RNA, 20 nt, synthetic construct
  misc_feature 1..20: note = C9Orf72 TTCN PAM targeting sequence
  source 1..20: mol_type = other RNA
aagtgctttatattatttat

SEQ ID NO: 10160 - RNA, 20 nt, synthetic construct
  misc_feature 1..20: note = C9Orf72 TTCN PAM targeting sequence
  source 1..20: mol_type = other RNA
tcatctgtaaaatggcaata

SEQ ID NO: 10161 - RNA, 20 nt, synthetic construct
  misc_feature 1..20: note = C9Orf72 TTCN PAM targeting sequence
  source 1..20: mol_type = other RNA
ctatacacctatttcctcat

SEQ ID NO: 10162 - RNA, 20 nt, synthetic construct
  misc_feature 1..20: note = C9Orf72 TTCN PAM targeting sequence
  source 1..20: mol_type = other RNA
ggcaccttgcccacgggtac

SEQ ID NO: 10163 - RNA, 20 nt, synthetic construct
  misc_feature 1..20: note = C9Orf72 TTCN PAM targeting sequence
  source 1..20: mol_type = other RNA
atccagcagtggagtttagt

SEQ ID NO: 10164 - RNA, 20 nt, synthetic construct
  misc_feature 1..20: note = C9Orf72 TTCN PAM targeting sequence
  source 1..20: mol_type = other RNA
tatttatactgatctttttc

SEQ ID NO: 10165 - RNA, 20 nt, synthetic construct
  misc_feature 1..20: note = C9Orf72 TTCN PAM targeting sequence
  source 1..20: mol_type = other RNA
acgcctaaataacttaagtt

SEQ ID NO: 10166 - RNA, 20 nt, synthetic construct
  misc_feature 1..20: note = C9Orf72 TTCN PAM targeting sequence
  source 1..20: mol_type = other RNA
tctacagtacaacttaatat

SEQ ID NO: 10167 - RNA, 20 nt, synthetic construct
  misc_feature 1..20: note = C9Orf72 TTCN PAM targeting sequence
  source 1..20: mol_type = other RNA
tattaagttgtactgtagat

SEQ ID NO: 10168 - RNA, 20 nt, synthetic construct
  misc_feature 1..20: note = C9Orf72 TTCN PAM targeting sequence
  source 1..20: mol_type = other RNA
gttagctttaatgagaagta

SEQ ID NO: 10169 - RNA, 20 nt, synthetic construct
  misc_feature 1..20: note = C9Orf72 TTCN PAM targeting sequence
  source 1..20: mol_type = other RNA
cattaaagctaacagaatcc

SEQ ID NO: 10170 - RNA, 20 nt, synthetic construct
  misc_feature 1..20: note = C9Orf72 TTCN PAM targeting sequence
  source 1..20: mol_type = other RNA
tgttttacttctcattaaag

SEQ ID NO: 10171 - RNA, 20 nt, synthetic construct
  misc_feature 1..20: note = C9Orf72 TTCN PAM targeting sequence
  source 1..20: mol_type = other RNA
ggtttcttgttttacttctc

SEQ ID NO: 10172 - RNA, 20 nt, synthetic construct
  misc_feature 1..20: note = C9Orf72 TTCN PAM targeting sequence
  source 1..20: mol_type = other RNA
tgtctgggatggaaactcgg

SEQ ID NO: 10173 - RNA, 20 nt, synthetic construct
  misc_feature 1..20: note = C9Orf72 TTCN PAM targeting sequence
  source 1..20: mol_type = other RNA
atcccagacaagaaatcatg

SEQ ID NO: 10174 - RNA, 20 nt, synthetic construct
  misc_feature 1..20: note = C9Orf72 TTCN PAM targeting sequence
  source 1..20: mol_type = other RNA
ttaaatagcaaatggaataa

SEQ ID NO: 10175 - RNA, 20 nt, synthetic construct
  misc_feature 1..20: note = C9Orf72 TTCN PAM targeting sequence
  source 1..20: mol_type = other RNA
atttgctatttaaagaaacc

SEQ ID NO: 10176 - RNA, 20 nt, synthetic construct
  misc_feature 1..20: note = C9Orf72 TTCN PAM targeting sequence
  source 1..20: mol_type = other RNA
atatatatttggtgttattc

SEQ ID NO: 10177 - RNA, 20 nt, synthetic construct
  misc_feature 1..20: note = C9Orf72 TTCN PAM targeting sequence
  source 1..20: mol_type = other RNA
ctcattatatttctatatat

SEQ ID NO: 10178 - RNA, 20 nt, synthetic construct
  misc_feature 1..20: note = C9Orf72 TTCN PAM targeting sequence
  source 1..20: mol_type = other RNA
aatacgtaatgtccctagaa

SEQ ID NO: 10179 - RNA, 20 nt, synthetic construct
  misc_feature 1..20: note = C9Orf72 TTCN PAM targeting sequence
  source 1..20: mol_type = other RNA
agggacattacgtatttgaa

SEQ ID NO: 10180 - RNA, 20 nt, synthetic construct
  misc_feature 1..20: note = C9Orf72 TTCN PAM targeting sequence
  source 1..20: mol_type = other RNA
ttcttccaaatcttgtcata

SEQ ID NO: 10181 - RNA, 20 nt, synthetic construct
  misc_feature 1..20: note = C9Orf72 TTCN PAM targeting sequence
  source 1..20: mol_type = other RNA
tccaaatcttgtcataggtg

SEQ ID NO: 10182 - RNA, 20 nt, synthetic construct
  misc_feature 1..20: note = C9Orf72 TTCN PAM targeting sequence
  source 1..20: mol_type = other RNA
aaatcttgtcataggtgagc

SEQ ID NO: 10183 - RNA, 20 nt, synthetic construct
  misc_feature 1..20: note = C9Orf72 TTCN PAM targeting sequence
  source 1..20: mol_type = other RNA
tccagcttttatgaaaagaa

SEQ ID NO: 10184 - RNA, 20 nt, synthetic construct
  misc_feature 1..20: note = C9Orf72 TTCN PAM targeting sequence
  source 1..20: mol_type = other RNA
taaaagctggatgaagcaga

SEQ ID NO: 10185 - RNA, 20 nt, synthetic construct
  misc_feature 1..20: note = C9Orf72 TTCN PAM targeting sequence
  source 1..20: mol_type = other RNA
tttcataaaagctggatgaa

SEQ ID NO: 10186 - RNA, 20 nt, synthetic construct
  misc_feature 1..20: note = C9Orf72 TTCN PAM targeting sequence
  source 1..20: mol_type = other RNA
tacttgagaagaaagccttc

SEQ ID NO: 10187 - RNA, 20 nt, synthetic construct
  misc_feature 1..20: note = C9Orf72 TTCN PAM targeting sequence
  source 1..20: mol_type = other RNA
caagtaagaatttttctttt

SEQ ID NO: 10188 - RNA, 20 nt, synthetic construct
  misc_feature 1..20: note = C9Orf72 TTCN PAM targeting sequence
  source 1..20: mol_type = other RNA
tctcaagtaagaatttttct

SEQ ID NO: 10189 - RNA, 20 nt, synthetic construct
  misc_feature 1..20: note = C9Orf72 TTCN PAM targeting sequence
  source 1..20: mol_type = other RNA
tgacagctgtcaccaatatc

SEQ ID NO: 10190 - RNA, 20 nt, synthetic construct
  misc_feature 1..20: note = C9Orf72 TTCN PAM targeting sequence
  source 1..20: mol_type = other RNA
acactatgttacagccagac

SEQ ID NO: 10191 - RNA, 20 nt, synthetic construct
  misc_feature 1..20: note = C9Orf72 TTCN PAM targeting sequence
  source 1..20: mol_type = other RNA
gaagtctggattcaatataa

SEQ ID NO: 10192 - RNA, 20 nt, synthetic construct
  misc_feature 1..20: note = C9Orf72 TTCN PAM targeting sequence
  source 1..20: mol_type = other RNA
gaaaacttgtatattaaaag

SEQ ID NO: 10193 - RNA, 20 nt, synthetic construct
  misc_feature 1..20: note = C9Orf72 TTCN PAM targeting sequence
  source 1..20: mol_type = other RNA
atataacacactgccttcat

SEQ ID NO: 10194 - RNA, 20 nt, synthetic construct
  misc_feature 1..20: note = C9Orf72 TTCN PAM targeting sequence
  source 1..20: mol_type = other RNA
tttccgagaatcaagactcc

SEQ ID NO: 10195 - RNA, 20 nt, synthetic construct
  misc_feature 1..20: note = C9Orf72 TTCN PAM targeting sequence
  source 1..20: mol_type = other RNA
gagaatcaagactccccaaa

SEQ ID NO: 10196 - RNA, 20 nt, synthetic construct
  misc_feature 1..20: note = C9Orf72 TTCN PAM targeting sequence
  source 1..20: mol_type = other RNA
cggaaatgaaggcagtgtgt

SEQ ID NO: 10197 - RNA, 20 nt, synthetic construct
  misc_feature 1..20: note = C9Orf72 TTCN PAM targeting sequence
  source 1..20: mol_type = other RNA
gaagaacaaatgtgaaagct

SEQ ID NO: 10198 - RNA, 20 nt, synthetic construct
  misc_feature 1..20: note = C9Orf72 TTCN PAM targeting sequence
  source 1..20: mol_type = other RNA
gaagtttatggtagtgcaca

SEQ ID NO: 10199 - RNA, 20 nt, synthetic construct
  misc_feature 1..20: note = C9Orf72 TTCN PAM targeting sequence
  source 1..20: mol_type = other RNA
tctgaagtttatggtagtgc

SEQ ID NO: 10200 - RNA, 20 nt, synthetic construct
  misc_feature 1..20: note = C9Orf72 TTCN PAM targeting sequence
  source 1..20: mol_type = other RNA
catttgttcttctgaagttt

SEQ ID NO: 10201 - RNA, 20 nt, synthetic construct
  misc_feature 1..20: note = C9Orf72 TTCN PAM targeting sequence
  source 1..20: mol_type = other RNA
tgtaaaaattgtttaacctg

SEQ ID NO: 10202 - RNA, 20 nt, synthetic construct
  misc_feature 1..20: note = C9Orf72 TTCN PAM targeting sequence
  source 1..20: mol_type = other RNA
tcttctgagctgtcagaatc

SEQ ID NO: 10203 - RNA, 20 nt, synthetic construct
  misc_feature 1..20: note = C9Orf72 TTCN PAM targeting sequence
  source 1..20: mol_type = other RNA
gagctgtcagaatcaggaga

SEQ ID NO: 10204 - RNA, 20 nt, synthetic construct
  misc_feature 1..20: note = C9Orf72 TTCN PAM targeting sequence
  source 1..20: mol_type = other RNA
gacagctcagaagaggaagt

SEQ ID NO: 10205 - RNA, 20 nt, synthetic construct
  misc_feature 1..20: note = C9Orf72 TTCN PAM targeting sequence
  source 1..20: mol_type = other RNA
gattttgtcatttaggttag

SEQ ID NO: 10206 - RNA, 20 nt, synthetic construct
  misc_feature 1..20: note = C9Orf72 TTCN PAM targeting sequence
  source 1..20: mol_type = other RNA
tgttgttttctgattttgtc

SEQ ID NO: 10207 - RNA, 20 nt, synthetic construct
  misc_feature 1..20: note = C9Orf72 TTCN PAM targeting sequence
  source 1..20: mol_type = other RNA
taaaggtatctcttaacact

SEQ ID NO: 10208 - RNA, 20 nt, synthetic construct
  misc_feature 1..20: note = C9Orf72 TTCN PAM targeting sequence
  source 1..20: mol_type = other RNA
aaacgtcctcaacaaatgat

SEQ ID NO: 10209 - RNA, 20 nt, synthetic construct
  misc_feature 1..20: note = C9Orf72 TTCN PAM targeting sequence
  source 1..20: mol_type = other RNA
ttaatcatttgttgaggacg

SEQ ID NO: 10210 - RNA, 20 nt, synthetic construct
  misc_feature 1..20: note = C9Orf72 TTCN PAM targeting sequence
  source 1..20: mol_type = other RNA
attaatggttactactttgg

SEQ ID NO: 10211 - RNA, 20 nt, synthetic construct
  misc_feature 1..20: note = C9Orf72 TTCN PAM targeting sequence
  source 1..20: mol_type = other RNA
aaagacactacattaaatat

SEQ ID NO: 10212 - RNA, 20 nt, synthetic construct
  misc_feature 1..20: note = C9Orf72 TTCN PAM targeting sequence
  source 1..20: mol_type = other RNA
taaaagtgggaggatcccag

SEQ ID NO: 10213 - RNA, 20 nt, synthetic construct
  misc_feature 1..20: note = C9Orf72 TTCN PAM targeting sequence
  source 1..20: mol_type = other RNA
ttacttttataattcctaaa

SEQ ID NO: 10214 - RNA, 20 nt, synthetic construct
  misc_feature 1..20: note = C9Orf72 TTCN PAM targeting sequence
  source 1..20: mol_type = other RNA
ttttgtttatttcattactt

SEQ ID NO: 10215 - RNA, 20 nt, synthetic construct
  misc_feature 1..20: note = C9Orf72 TTCN PAM targeting sequence
  source 1..20: mol_type = other RNA
catacagtattagccacttt

SEQ ID NO: 10216 - RNA, 20 nt, synthetic construct
  misc_feature 1..20: note = C9Orf72 TTCN PAM targeting sequence
  source 1..20: mol_type = other RNA
aattttaatagtaaggactt

SEQ ID NO: 10217 - RNA, 20 nt, synthetic construct
  misc_feature 1..20: note = C9Orf72 TTCN PAM targeting sequence
  source 1..20: mol_type = other RNA
tcaggaacactgtgtgattt

SEQ ID NO: 10218 - RNA, 20 nt, synthetic construct
  misc_feature 1..20: note = C9Orf72 TTCN PAM targeting sequence
  source 1..20: mol_type = other RNA
ggaacactgtgtgatttcat

SEQ ID NO: 10219 - RNA, 20 nt, synthetic construct
  misc_feature 1..20: note = C9Orf72 TTCN PAM targeting sequence
  source 1..20: mol_type = other RNA
tgaagaaatagatgtaagtt

SEQ ID NO: 10220 - RNA, 20 nt, synthetic construct
  misc_feature 1..20: note = C9Orf72 TTCN PAM targeting sequence
  source 1..20: mol_type = other RNA
tagatgaaagcagttccatt

SEQ ID NO: 10221 - RNA, 20 nt, synthetic construct
  misc_feature 1..20: note = C9Orf72 TTCN PAM targeting sequence
  source 1..20: mol_type = other RNA
tctatgaaatcacacagtgt

SEQ ID NO: 10222 - RNA, 20 nt, synthetic construct
  misc_feature 1..20: note = C9Orf72 TTCN PAM targeting sequence
  source 1..20: mol_type = other RNA
attacaggaatcacttctcc

SEQ ID NO: 10223 - RNA, 20 nt, synthetic construct
  misc_feature 1..20: note = C9Orf72 TTCN PAM targeting sequence
  source 1..20: mol_type = other RNA
tgtaatggaactgctttcat

SEQ ID NO: 10224 - RNA, 20 nt, synthetic construct
  misc_feature 1..20: note = C9Orf72 TTCN PAM targeting sequence
  source 1..20: mol_type = other RNA
ccagtaagcattggaataat

SEQ ID NO: 10225 - RNA, 20 nt, synthetic construct
  misc_feature 1..20: note = C9Orf72 TTCN PAM targeting sequence
  source 1..20: mol_type = other RNA
aatgcttactggagaagtga

SEQ ID NO: 10226 - RNA, 20 nt, synthetic construct
  misc_feature 1..20: note = C9Orf72 TTCN PAM targeting sequence
  source 1..20: mol_type = other RNA
tgtcactttattgtgcaggg

SEQ ID NO: 10227 - RNA, 20 nt, synthetic construct
  misc_feature 1..20: note = C9Orf72 TTCN PAM targeting sequence
  source 1..20: mol_type = other RNA
cttcatgtcactttattgtg

SEQ ID NO: 10228 - RNA, 20 nt, synthetic construct
  misc_feature 1..20: note = C9Orf72 TTCN PAM targeting sequence
  source 1..20: mol_type = other RNA
tcacttcatgtcactttatt

SEQ ID NO: 10229 - RNA, 20 nt, synthetic construct
  misc_feature 1..20: note = C9Orf72 TTCN PAM targeting sequence
  source 1..20: mol_type = other RNA
ctcatattacgtgattttct

SEQ ID NO: 10230 - RNA, 20 nt, synthetic construct
  misc_feature 1..20: note = C9Orf72 TTCN PAM targeting sequence
  source 1..20: mol_type = other RNA
ttgatgaaaatacttcgtaa

SEQ ID NO: 10231 - RNA, 20 nt, synthetic construct
  misc_feature 1..20: note = C9Orf72 TTCN PAM targeting sequence
  source 1..20: mol_type = other RNA
tcaaagaatgttattgtttg

SEQ ID NO: 10232 - RNA, 20 nt, synthetic construct
  misc_feature 1..20: note = C9Orf72 TTCN PAM targeting sequence
  source 1..20: mol_type = other RNA
taatttgttcaaacacagta

SEQ ID NO: 10233 - RNA, 20 nt, synthetic construct
  misc_feature 1..20: note = C9Orf72 TTCN PAM targeting sequence
  source 1..20: mol_type = other RNA
aacacagtatcaaacaagtc

SEQ ID NO: 10234 - RNA, 20 nt, synthetic construct
  misc_feature 1..20: note = C9Orf72 TTCN PAM targeting sequence
  source 1..20: mol_type = other RNA
ttcttttctttttttttttt

SEQ ID NO: 10235 - RNA, 20 nt, synthetic construct
  misc_feature 1..20: note = C9Orf72 TTCN PAM targeting sequence
  source 1..20: mol_type = other RNA
tttctttttttttttttgag

SEQ ID NO: 10236 - RNA, 20 nt, synthetic construct
  misc_feature 1..20: note = C9Orf72 TTCN PAM targeting sequence
  source 1..20: mol_type = other RNA
ttttttttttttgagatgga

SEQ ID NO: 10237 - RNA, 20 nt, synthetic construct
  misc_feature 1..20: note = C9Orf72 TTCN PAM targeting sequence
  source 1..20: mol_type = other RNA
ttgctcaggctggagtgcaa

SEQ ID NO: 10238 - RNA, 20 nt, synthetic construct
  misc_feature 1..20: note = C9Orf72 TTCN PAM targeting sequence
  source 1..20: mol_type = other RNA
agtgactctcctgtctcatc

SEQ ID NO: 10239 - RNA, 20 nt, synthetic construct
  misc_feature 1..20: note = C9Orf72 TTCN PAM targeting sequence
  source 1..20: mol_type = other RNA
ccatgttggccaggttggtg

SEQ ID NO: 10240 - RNA, 20 nt, synthetic construct
  misc_feature 1..20: note = C9Orf72 TTCN PAM targeting sequence
  source 1..20: mol_type = other RNA
gaccatgcccggccctaaag

SEQ ID NO: 10241 - RNA, 20 nt, synthetic construct
  misc_feature 1..20: note = C9Orf72 TTCN PAM targeting sequence
  source 1..20: mol_type = other RNA
ttagagagtatggaatcatt

SEQ ID NO: 10242 - RNA, 20 nt, synthetic construct
  misc_feature 1..20: note = C9Orf72 TTCN PAM targeting sequence
  source 1..20: mol_type = other RNA
atactctctaaagaataaaa

SEQ ID NO: 10243 - RNA, 20 nt, synthetic construct
  misc_feature 1..20: note = C9Orf72 TTCN PAM targeting sequence
  source 1..20: mol_type = other RNA
aaaagaggcatgatgactta

SEQ ID NO: 10244 - RNA, 20 nt, synthetic construct
  misc_feature 1..20: note = C9Orf72 TTCN PAM targeting sequence
  source 1..20: mol_type = other RNA
tatttaaaaatgaggaaaac

SEQ ID NO: 10245 - RNA, 20 nt, synthetic construct
  misc_feature 1..20: note = C9Orf72 TTCN PAM targeting sequence
  source 1..20: mol_type = other RNA
tcatttttaaatatgaaata

SEQ ID NO: 10246 - RNA, 20 nt, synthetic construct
  misc_feature 1..20: note = C9Orf72 TTCN PAM targeting sequence
  source 1..20: mol_type = other RNA
aagtctttttgtgcttggtt

SEQ ID NO: 10247 - RNA, 20 nt, synthetic construct
  misc_feature 1..20: note = C9Orf72 TTCN PAM targeting sequence
  source 1..20: mol_type = other RNA
ttacctatttggtaaggatt

SEQ ID NO: 10248 - RNA, 20 nt, synthetic construct
  misc_feature 1..20: note = C9Orf72 TTCN PAM targeting sequence
  source 1..20: mol_type = other RNA
agttttccttacctatttgg

SEQ ID NO: 10249 - RNA, 20 nt, synthetic construct
  misc_feature 1..20: note = C9Orf72 TTCN PAM targeting sequence
  source 1..20: mol_type = other RNA
taaaatatatgtgctgattt

SEQ ID NO: 10250 - RNA, 20 nt, synthetic construct
  misc_feature 1..20: note = C9Orf72 TTCN PAM targeting sequence
  source 1..20: mol_type = other RNA
gttttattgattcttaaaat

SEQ ID NO: 10251 - RNA, 20 nt, synthetic construct
  misc_feature 1..20: note = C9Orf72 TTCN PAM targeting sequence
  source 1..20: mol_type = other RNA
ctttagagctatttcaagat

SEQ ID NO: 10252 - RNA, 20 nt, synthetic construct
  misc_feature 1..20: note = C9Orf72 TTCN PAM targeting sequence
  source 1..20: mol_type = other RNA
agatattactacttattaca

SEQ ID NO: 10253 - RNA, 20 nt, synthetic construct
  misc_feature 1..20: note = C9Orf72 TTCN PAM targeting sequence
  source 1..20: mol_type = other RNA
agatgtaataagtagtaata

SEQ ID NO: 10254 - RNA, 20 nt, synthetic construct
  misc_feature 1..20: note = C9Orf72 TTCN PAM targeting sequence
  source 1..20: mol_type = other RNA
aaattacaatttcaagatgt

SEQ ID NO: 10255 - RNA, 20 nt, synthetic construct
  misc_feature 1..20: note = C9Orf72 TTCN PAM targeting sequence
  source 1..20: mol_type = other RNA
atagactacaaatttcaaaa

SEQ ID NO: 10256 - RNA, 20 nt, synthetic construct
  misc_feature 1..20: note = C9Orf72 TTCN PAM targeting sequence
  source 1..20: mol_type = other RNA
gtttgattctatagactaca

SEQ ID NO: 10257 - RNA, 20 nt, synthetic construct
  misc_feature 1..20: note = C9Orf72 TTCN PAM targeting sequence
  source 1..20: mol_type = other RNA
gtataacacatcacaaatgt

SEQ ID NO: 10258 - RNA, 20 nt, synthetic construct
  misc_feature 1..20: note = C9Orf72 TTCN PAM targeting sequence
  source 1..20: mol_type = other RNA
ctaccaccaccagtctcatc

SEQ ID NO: 10259 - RNA, 20 nt, synthetic construct
  misc_feature 1..20: note = C9Orf72 TTCN PAM targeting sequence
  source 1..20: mol_type = other RNA
tttatatctcaaaaaattta

SEQ ID NO: 10260 - RNA, 20 nt, synthetic construct
  misc_feature 1..20: note = C9Orf72 TTCN PAM targeting sequence
  source 1..20: mol_type = other RNA
tcttaaataatgtatgattt

SEQ ID NO: 10261 - RNA, 20 nt, synthetic construct
  misc_feature 1..20: note = C9Orf72 TTCN PAM targeting sequence
  source 1..20: mol_type = other RNA
tcacttattttatgaaatga

SEQ ID NO: 10262 - RNA, 20 nt, synthetic construct
  misc_feature 1..20: note = C9Orf72 TTCN PAM targeting sequence
  source 1..20: mol_type = other RNA
taaaataagtgaggaaaaac

SEQ ID NO: 10263 - RNA, 20 nt, synthetic construct
  misc_feature 1..20: note = C9Orf72 TTCN PAM targeting sequence
  source 1..20: mol_type = other RNA
taagcatctttaagttagaa

SEQ ID NO: 10264 - RNA, 20 nt, synthetic construct
  misc_feature 1..20: note = C9Orf72 TTCN PAM targeting sequence
  source 1..20: mol_type = other RNA
aacttaaagatgcttatgaa

SEQ ID NO: 10265 - RNA, 20 nt, synthetic construct
  misc_feature 1..20: note = C9Orf72 TTCN PAM targeting sequence
  source 1..20: mol_type = other RNA
gagccccatattattaagtt

SEQ ID NO: 10266 - RNA, 20 nt, synthetic construct
  misc_feature 1..20: note = C9Orf72 TTCN PAM targeting sequence
  source 1..20: mol_type = other RNA
caagcaacttaataatatgg

SEQ ID NO: 10267 - RNA, 20 nt, synthetic construct
  misc_feature 1..20: note = C9Orf72 TTCN PAM targeting sequence
  source 1..20: mol_type = other RNA
ggaagttttatcctaagcca

SEQ ID NO: 10268 - RNA, 20 nt, synthetic construct
  misc_feature 1..20: note = C9Orf72 TTCN PAM targeting sequence
  source 1..20: mol_type = other RNA
agaagtagcatcacatttaa

SEQ ID NO: 10269 - RNA, 20 nt, synthetic construct
  misc_feature 1..20: note = C9Orf72 TTCN PAM targeting sequence
  source 1..20: mol_type = other RNA
gcattatgcaaatgggcata

SEQ ID NO: 10270 - RNA, 20 nt, synthetic construct
  misc_feature 1..20: note = C9Orf72 TTCN PAM targeting sequence
  source 1..20: mol_type = other RNA
ctgtttttagtttttaaagt

SEQ ID NO: 10271 - RNA, 20 nt, synthetic construct
  misc_feature 1..20: note = C9Orf72 TTCN PAM targeting sequence
  source 1..20: mol_type = other RNA
cacattcaatctaacaagaa

SEQ ID NO: 10272 - RNA, 20 nt, synthetic construct
  misc_feature 1..20: note = C9Orf72 TTCN PAM targeting sequence
  source 1..20: mol_type = other RNA
atctaacaagaataatgact

SEQ ID NO: 10273 - RNA, 20 nt, synthetic construct
  misc_feature 1..20: note = C9Orf72 TTCN PAM targeting sequence
  source 1..20: mol_type = other RNA
tgttagattgaatgtgtgaa

SEQ ID NO: 10274 - RNA, 20 nt, synthetic construct
  misc_feature 1..20: note = C9Orf72 TTCN PAM targeting sequence
  source 1..20: mol_type = other RNA
ttccctgtgaagcaatttta

SEQ ID NO: 10275 - RNA, 20 nt, synthetic construct
  misc_feature 1..20: note = C9Orf72 TTCN PAM targeting sequence
  source 1..20: mol_type = other RNA
ctgtgaagcaattttatcag

SEQ ID NO: 10276 - RNA, 20 nt, synthetic construct
  misc_feature 1..20: note = C9Orf72 TTCN PAM targeting sequence
  source 1..20: mol_type = other RNA
cagggaaggaaatttaacac

SEQ ID NO: 10277 - RNA, 20 nt, synthetic construct
  misc_feature 1..20: note = C9Orf72 TTCN PAM targeting sequence
  source 1..20: mol_type = other RNA
gttgtagctgtcatctgata

SEQ ID NO: 10278 - RNA, 20 nt, synthetic construct
  misc_feature 1..20: note = C9Orf72 TTCN PAM targeting sequence
  source 1..20: mol_type = other RNA
aactaatgcatcatccccaa

SEQ ID NO: 10279 - RNA, 20 nt, synthetic construct
  misc_feature 1..20: note = C9Orf72 TTCN PAM targeting sequence
  source 1..20: mol_type = other RNA
aaataaagtcgttgtgagat

SEQ ID NO: 10280 - RNA, 20 nt, synthetic construct
  misc_feature 1..20: note = C9Orf72 TTCN PAM targeting sequence
  source 1..20: mol_type = other RNA
tgcaaatctcacaacgactt

SEQ ID NO: 10281 - RNA, 20 nt, synthetic construct
  misc_feature 1..20: note = C9Orf72 TTCN PAM targeting sequence
  source 1..20: mol_type = other RNA
ggaagaataattttgggaaa

SEQ ID NO: 10282 - RNA, 20 nt, synthetic construct
  misc_feature 1..20: note = C9Orf72 TTCN PAM targeting sequence
  source 1..20: mol_type = other RNA
cgaaaaggaggagttgcctt

SEQ ID NO: 10283 - RNA, 20 nt, synthetic construct
  misc_feature 1..20: note = C9Orf72 TTCN PAM targeting sequence
  source 1..20: mol_type = other RNA
tcccgaaaaggaggagttgc

SEQ ID NO: 10284 - RNA, 20 nt, synthetic construct
  misc_feature 1..20: note = C9Orf72 TTCN PAM targeting sequence
  source 1..20: mol_type = other RNA
caaaattattcttcccgaaa

SEQ ID NO: 10285 - RNA, 20 nt, synthetic construct
  misc_feature 1..20: note = C9Orf72 TTCN PAM targeting sequence
  source 1..20: mol_type = other RNA
tcttaggtttaagcatacat

SEQ ID NO: 10286 - RNA, 20 nt, synthetic construct
  misc_feature 1..20: note = C9Orf72 TTCN PAM targeting sequence
  source 1..20: mol_type = other RNA
ttcacagtatctcagacatt

SEQ ID NO: 10287 - RNA, 20 nt, synthetic construct
  misc_feature 1..20: note = C9Orf72 TTCN PAM targeting sequence
  source 1..20: mol_type = other RNA
cagtatctcagacattatca

SEQ ID NO: 10288 - RNA, 20 nt, synthetic construct
  misc_feature 1..20: note = C9Orf72 TTCN PAM targeting sequence
  source 1..20: mol_type = other RNA
cttatactgataatgtctga

SEQ ID NO: 10289 - RNA, 20 nt, synthetic construct
  misc_feature 1..20: note = C9Orf72 TTCN PAM targeting sequence
  source 1..20: mol_type = other RNA
ttcacttatactgataatgt

SEQ ID NO: 10290 - RNA, 20 nt, synthetic construct
  misc_feature 1..20: note = C9Orf72 TTCN PAM targeting sequence
  source 1..20: mol_type = other RNA
gtgaggctattcattcactt

SEQ ID NO: 10291 - RNA, 20 nt, synthetic construct
  misc_feature 1..20: note = C9Orf72 TTCN PAM targeting sequence
  source 1..20: mol_type = other RNA
gtatttagccctgtaggatt

SEQ ID NO: 10292 - RNA, 20 nt, synthetic construct
  misc_feature 1..20: note = C9Orf72 TTCN PAM targeting sequence
  source 1..20: mol_type = other RNA
tttagagcctcttctgtatt

SEQ ID NO: 10293 - RNA, 20 nt, synthetic construct
  misc_feature 1..20: note = C9Orf72 TTCN PAM targeting sequence
  source 1..20: mol_type = other RNA
attcctccttgtacttccca

SEQ ID NO: 10294 - RNA, 20 nt, synthetic construct
  misc_feature 1..20: note = C9Orf72 TTCN PAM targeting sequence
  source 1..20: mol_type = other RNA
tccttgtacttcccaaactt

SEQ ID NO: 10295 - RNA, 20 nt, synthetic construct
  misc_feature 1..20: note = C9Orf72 TTCN PAM targeting sequence
  source 1..20: mol_type = other RNA
caaacttgaacttctcagca

SEQ ID NO: 10296 - RNA, 20 nt, synthetic construct
  misc_feature 1..20: note = C9Orf72 TTCN PAM targeting sequence
  source 1..20: mol_type = other RNA
agtttgggaagtacaaggag

SEQ ID NO: 10297 - RNA, 20 nt, synthetic construct
  misc_feature 1..20: note = C9Orf72 TTCN PAM targeting sequence
  source 1..20: mol_type = other RNA
cagcagtaagataacatttt

SEQ ID NO: 10298 - RNA, 20 nt, synthetic construct
  misc_feature 1..20: note = C9Orf72 TTCN PAM targeting sequence
  source 1..20: mol_type = other RNA
taaaaatgttatcttactgc

SEQ ID NO: 10299 - RNA, 20 nt, synthetic construct
  misc_feature 1..20: note = C9Orf72 TTCN PAM targeting sequence
  source 1..20: mol_type = other RNA
ttaatagtagtcaacttaag

SEQ ID NO: 10300 - RNA, 20 nt, synthetic construct
  misc_feature 1..20: note = C9Orf72 TTCN PAM targeting sequence
  source 1..20: mol_type = other RNA
ggtttgaaaaaacaaaatcc

SEQ ID NO: 10301 - RNA, 20 nt, synthetic construct
  misc_feature 1..20: note = C9Orf72 TTCN PAM targeting sequence
  source 1..20: mol_type = other RNA
aaccagaaacctttacttaa

SEQ ID NO: 10302 - RNA, 20 nt, synthetic construct
  misc_feature 1..20: note = C9Orf72 TTCN PAM targeting sequence
  source 1..20: mol_type = other RNA
gcttttactgggattttgtt

SEQ ID NO: 10303 - RNA, 20 nt, synthetic construct
  misc_feature 1..20: note = C9Orf72 TTCN PAM targeting sequence
  source 1..20: mol_type = other RNA
aagtttcctcaacttgcgat

SEQ ID NO: 10304 - RNA, 20 nt, synthetic construct
  misc_feature 1..20: note = C9Orf72 TTCN PAM targeting sequence
  source 1..20: mol_type = other RNA
tcaacttgcgataagtttac

SEQ ID NO: 10305 - RNA, 20 nt, synthetic construct
  misc_feature 1..20: note = C9Orf72 TTCN PAM targeting sequence
  source 1..20: mol_type = other RNA
gcaccctctaacccactagt

SEQ ID NO: 10306 - RNA, 20 nt, synthetic construct
  misc_feature 1..20: note = C9Orf72 TTCN PAM targeting sequence
  source 1..20: mol_type = other RNA
tggggaccctgcttattgac

SEQ ID NO: 10307 - RNA, 20 nt, synthetic construct
  misc_feature 1..20: note = C9Orf72 TTCN PAM targeting sequence
  source 1..20: mol_type = other RNA
ttgggtaaagggaaatcttt

SEQ ID NO: 10308 - RNA, 20 nt, synthetic construct
  misc_feature 1..20: note = C9Orf72 TTCN PAM targeting sequence
  source 1..20: mol_type = other RNA
ctttacccaaagaatcccag

SEQ ID NO: 10309 - RNA, 20 nt, synthetic construct
  misc_feature 1..20: note = C9Orf72 TTCN PAM targeting sequence
  source 1..20: mol_type = other RNA
tgttaagtcagacctttaca

SEQ ID NO: 10310 - RNA, 20 nt, synthetic construct
  misc_feature 1..20: note = C9Orf72 TTCN PAM targeting sequence
  source 1..20: mol_type = other RNA
gtgtaaaggtctgacttaac

SEQ ID NO: 10311 - RNA, 20 nt, synthetic construct
  misc_feature 1..20: note = C9Orf72 TTCN PAM targeting sequence
  source 1..20: mol_type = other RNA
gagacagttattctgtgtaa

SEQ ID NO: 10312 - RNA, 20 nt, synthetic construct
  misc_feature 1..20: note = C9Orf72 TTCN PAM targeting sequence
  source 1..20: mol_type = other RNA
aattcagagacagttattct

SEQ ID NO: 10313 - RNA, 20 nt, synthetic construct
  misc_feature 1..20: note = C9Orf72 TTCN PAM targeting sequence
  source 1..20: mol_type = other RNA
gtattatggccatgtatttt

SEQ ID NO: 10314 - RNA, 20 nt, synthetic construct
  misc_feature 1..20: note = C9Orf72 TTCN PAM targeting sequence
  source 1..20: mol_type = other RNA
caagtttttttttttaatta

SEQ ID NO: 10315 - RNA, 20 nt, synthetic construct
  misc_feature 1..20: note = C9Orf72 TTCN PAM targeting sequence
  source 1..20: mol_type = other RNA
tgctaaaaagaagcaaagaa

SEQ ID NO: 10316 - RNA, 20 nt, synthetic construct
  misc_feature 1..20: note = C9Orf72 TTCN PAM targeting sequence
  source 1..20: mol_type = other RNA
ttttagcatgaatgagacag

SEQ ID NO: 10317 - RNA, 20 nt, synthetic construct
  misc_feature 1..20: note = C9Orf72 TTCN PAM targeting sequence
  source 1..20: mol_type = other RNA
ttgcttctttttagcatgaa

SEQ ID NO: 10318 - RNA, 20 nt, synthetic construct
  misc_feature 1..20: note = C9Orf72 TTCN PAM targeting sequence
  source 1..20: mol_type = other RNA
tcttgtgggtgaccctcaat

SEQ ID NO: 10319 - RNA, 20 nt, synthetic construct
  misc_feature 1..20: note = C9Orf72 TTCN PAM targeting sequence
  source 1..20: mol_type = other RNA
atttcctcttgtgggtgacc

SEQ ID NO: 10320 - RNA, 20 nt, synthetic construct
  misc_feature 1..20: note = C9Orf72 TTCN PAM targeting sequence
  source 1..20: mol_type = other RNA
cttttacttccatttcctct

SEQ ID NO: 10321 - RNA, 20 nt, synthetic construct
  misc_feature 1..20: note = C9Orf72 TTCN PAM targeting sequence
  source 1..20: mol_type = other RNA
tcacttttacttccatttcc

SEQ ID NO: 10322 - RNA, 20 nt, synthetic construct
  misc_feature 1..20: note = C9Orf72 TTCN PAM targeting sequence
  source 1..20: mol_type = other RNA
tcactggagattctccttca

SEQ ID NO: 10323 - RNA, 20 nt, synthetic construct
  misc_feature 1..20: note = C9Orf72 TTCN PAM targeting sequence
  source 1..20: mol_type = other RNA
ctggagattctccttcaaaa

SEQ ID NO: 10324 - RNA, 20 nt, synthetic construct
  misc_feature 1..20: note = C9Orf72 TTCN PAM targeting sequence
  source 1..20: mol_type = other RNA
ccttcaaaagaacttctctg

SEQ ID NO: 10325 - RNA, 20 nt, synthetic construct
  misc_feature 1..20: note = C9Orf72 TTCN PAM targeting sequence
  source 1..20: mol_type = other RNA
aaagaacttctctgctttac

SEQ ID NO: 10326 - RNA, 20 nt, synthetic construct
  misc_feature 1..20: note = C9Orf72 TTCN PAM targeting sequence
  source 1..20: mol_type = other RNA
tttgaaggagaatctccagt

SEQ ID NO: 10327 - RNA, 20 nt, synthetic construct
  misc_feature 1..20: note = C9Orf72 TTCN PAM targeting sequence
  source 1..20: mol_type = other RNA
ctgctttacagtgaaatagt

SEQ ID NO: 10328 - RNA, 20 nt, synthetic construct
  misc_feature 1..20: note = C9Orf72 TTCN PAM targeting sequence
  source 1..20: mol_type = other RNA
ctgtaaagcagagaagttct

SEQ ID NO: 10329 - RNA, 20 nt, synthetic construct
  misc_feature 1..20: note = C9Orf72 TTCN PAM targeting sequence
  source 1..20: mol_type = other RNA
gcaggggaagccacaccctt

SEQ ID NO: 10330 - RNA, 20 nt, synthetic construct
  misc_feature 1..20: note = C9Orf72 TTCN PAM targeting sequence
  source 1..20: mol_type = other RNA
cctgcggaaactaagtacag

SEQ ID NO: 10331 - RNA, 20 nt, synthetic construct
  misc_feature 1..20: note = C9Orf72 TTCN PAM targeting sequence
  source 1..20: mol_type = other RNA
caaactcttagtgtctgttc

SEQ ID NO: 10332 - RNA, 20 nt, synthetic construct
  misc_feature 1..20: note = C9Orf72 TTCN PAM targeting sequence
  source 1..20: mol_type = other RNA
tgaggggcattcaaagccaa

SEQ ID NO: 10333 - RNA, 20 nt, synthetic construct
  misc_feature 1..20: note = C9Orf72 TTCN PAM targeting sequence
  source 1..20: mol_type = other RNA
aagccaagggataaacatgg

SEQ ID NO: 10334 - RNA, 20 nt, synthetic construct
  misc_feature 1..20: note = C9Orf72 TTCN PAM targeting sequence
  source 1..20: mol_type = other RNA
tagaggagagggtaagaaat

SEQ ID NO: 10335 - RNA, 20 nt, synthetic construct
  misc_feature 1..20: note = C9Orf72 TTCN PAM targeting sequence
  source 1..20: mol_type = other RNA
taccctctcctctaggaaaa

SEQ ID NO: 10336 - RNA, 20 nt, synthetic construct
  misc_feature 1..20: note = C9Orf72 TTCN PAM targeting sequence
  source 1..20: mol_type = other RNA
ataactattttagtattaaa

SEQ ID NO: 10337 - RNA, 20 nt, synthetic construct
  misc_feature 1..20: note = C9Orf72 TTCN PAM targeting sequence
  source 1..20: mol_type = other RNA
aagtcttatgttgtatcgtt

SEQ ID NO: 10338 - RNA, 20 nt, synthetic construct
  misc_feature 1..20: note = C9Orf72 TTCN PAM targeting sequence
  source 1..20: mol_type = other RNA
tctaagtcttatgttgtatc

SEQ ID NO: 10339 - RNA, 20 nt, synthetic construct
  misc_feature 1..20: note = C9Orf72 TTCN PAM targeting sequence
  source 1..20: mol_type = other RNA
gttacagctacttctaggga

SEQ ID NO: 10340 - RNA, 20 nt, synthetic construct
  misc_feature 1..20: note = C9Orf72 TTCN PAM targeting sequence
  source 1..20: mol_type = other RNA
agggaaaggttcgagaagta

SEQ ID NO: 10341 - RNA, 20 nt, synthetic construct
  misc_feature 1..20: note = C9Orf72 TTCN PAM targeting sequence
  source 1..20: mol_type = other RNA
ctagaagtagctgtaacaga

SEQ ID NO: 10342 - RNA, 20 nt, synthetic construct
  misc_feature 1..20: note = C9Orf72 TTCN PAM targeting sequence
  source 1..20: mol_type = other RNA
agaagtagtaccttaaagaa

SEQ ID NO: 10343 - RNA, 20 nt, synthetic construct
  misc_feature 1..20: note = C9Orf72 TTCN PAM targeting sequence
  source 1..20: mol_type = other RNA
cgaacctttccctagaagta

SEQ ID NO: 10344 - RNA, 20 nt, synthetic construct
  misc_feature 1..20: note = C9Orf72 TTCN PAM targeting sequence
  source 1..20: mol_type = other RNA
ttaaggtactacttctcgaa

SEQ ID NO: 10345 - RNA, 20 nt, synthetic construct
  misc_feature 1..20: note = C9Orf72 TTCN PAM targeting sequence
  source 1..20: mol_type = other RNA
tagtaaaaataaaaaaaatt

SEQ ID NO: 10346 - RNA, 20 nt, synthetic construct
  misc_feature 1..20: note = C9Orf72 TTCN PAM targeting sequence
  source 1..20: mol_type = other RNA
gggcaaacagaaaaaaaaag

SEQ ID NO: 10347 - RNA, 20 nt, synthetic construct
  misc_feature 1..20: note = C9Orf72 TTCN PAM targeting sequence
  source 1..20: mol_type = other RNA
gtttgcccagaataaatttt

SEQ ID NO: 10348 - RNA, 20 nt, synthetic construct
  misc_feature 1..20: note = C9Orf72 TTCN PAM targeting sequence
  source 1..20: mol_type = other RNA
tttgtttactgatttaactc

SEQ ID NO: 10349 - RNA, 20 nt, synthetic construct
  misc_feature 1..20: note = C9Orf72 TTCN PAM targeting sequence
  source 1..20: mol_type = other RNA
atatcttaaacccaaagagt

SEQ ID NO: 10350 - RNA, 20 nt, synthetic construct
  misc_feature 1..20: note = C9Orf72 TTCN PAM targeting sequence
  source 1..20: mol_type = other RNA
tccagtttattctgtacacc

SEQ ID NO: 10351 - RNA, 20 nt, synthetic construct
  misc_feature 1..20: note = C9Orf72 TTCN PAM targeting sequence
  source 1..20: mol_type = other RNA
gtacacctccataaaagctc

SEQ ID NO: 10352 - RNA, 20 nt, synthetic construct
  misc_feature 1..20: note = C9Orf72 TTCN PAM targeting sequence
  source 1..20: mol_type = other RNA
tatgtctccaaggccttgac

SEQ ID NO: 10353 - RNA, 20 nt, synthetic construct
  misc_feature 1..20: note = C9Orf72 TTCN PAM targeting sequence
  source 1..20: mol_type = other RNA
cacagcatgtatctgtataa

SEQ ID NO: 10354 - RNA, 20 nt, synthetic construct
  misc_feature 1..20: note = C9Orf72 TTCN PAM targeting sequence
  source 1..20: mol_type = other RNA
attctctctgtgccttctaa

SEQ ID NO: 10355 - RNA, 20 nt, synthetic construct
  misc_feature 1..20: note = C9Orf72 TTCN PAM targeting sequence
  source 1..20: mol_type = other RNA
ctctgtgccttctaagataa

SEQ ID NO: 10356 - RNA, 20 nt, synthetic construct
  misc_feature 1..20: note = C9Orf72 TTCN PAM targeting sequence
  source 1..20: mol_type = other RNA
aagataatcttctggacatt

SEQ ID NO: 10357 - RNA, 20 nt, synthetic construct
  misc_feature 1..20: note = C9Orf72 TTCN PAM targeting sequence
  source 1..20: mol_type = other RNA
ggacattttcttgtctttcc

SEQ ID NO: 10358 - RNA, 20 nt, synthetic construct
  misc_feature 1..20: note = C9Orf72 TTCN PAM targeting sequence
  source 1..20: mol_type = other RNA
tgtctttcctgagcaagaga

SEQ ID NO: 10359 - RNA, 20 nt, synthetic construct
  misc_feature 1..20: note = C9Orf72 TTCN PAM targeting sequence
  source 1..20: mol_type = other RNA
tgagcaagagaaaatttatt

SEQ ID NO: 10360 - RNA, 20 nt, synthetic construct
  misc_feature 1..20: note = C9Orf72 TTCN PAM targeting sequence
  source 1..20: mol_type = other RNA
cttgctcaggaaagacaaga

SEQ ID NO: 10361 - RNA, 20 nt, synthetic construct
  misc_feature 1..20: note = C9Orf72 TTCN PAM targeting sequence
  source 1..20: mol_type = other RNA
atagacatgttcttgtgtag

SEQ ID NO: 10362 - RNA, 20 nt, synthetic construct
  misc_feature 1..20: note = C9Orf72 TTCN PAM targeting sequence
  source 1..20: mol_type = other RNA
tgtgtagtaatttagttcac

SEQ ID NO: 10363 - RNA, 20 nt, synthetic construct
  misc_feature 1..20: note = C9Orf72 TTCN PAM targeting sequence
  source 1..20: mol_type = other RNA
caagaaaaatactttctact

SEQ ID NO: 10364 - RNA, 20 nt, synthetic construct
  misc_feature 1..20: note = C9Orf72 TTCN PAM targeting sequence
  source 1..20: mol_type = other RNA
tgtgaactaaattactacac

SEQ ID NO: 10365 - RNA, 20 nt, synthetic construct
  misc_feature 1..20: note = C9Orf72 TTCN PAM targeting sequence
  source 1..20: mol_type = other RNA
actttagggaaaaaatgggg

SEQ ID NO: 10366 - RNA, 20 nt, synthetic construct
  misc_feature 1..20: note = C9Orf72 TTCN PAM targeting sequence
  source 1..20: mol_type = other RNA
ctaaagtagaaagtattttt

SEQ ID NO: 10367 - RNA, 20 nt, synthetic construct
  misc_feature 1..20: note = C9Orf72 TTCN PAM targeting sequence
  source 1..20: mol_type = other RNA
tacccctgcccccatttttt

SEQ ID NO: 10368 - RNA, 20 nt, synthetic construct
  misc_feature 1..20: note = C9Orf72 TTCN PAM targeting sequence
  source 1..20: mol_type = other RNA
cataaacaatacaaaataaa

SEQ ID NO: 10369 - RNA, 20 nt, synthetic construct
  misc_feature 1..20: note = C9Orf72 TTCN PAM targeting sequence
  source 1..20: mol_type = other RNA
gcagtgaaaaaaagataact

SEQ ID NO: 10370 - RNA, 20 nt, synthetic construct
  misc_feature 1..20: note = C9Orf72 TTCN PAM targeting sequence
  source 1..20: mol_type = other RNA
ctgcagaataaaggttgttt

SEQ ID NO: 10371 - RNA, 20 nt, synthetic construct
  misc_feature 1..20: note = C9Orf72 TTCN PAM targeting sequence
  source 1..20: mol_type = other RNA
cagaaaacagtcaatgtaac

SEQ ID NO: 10372 - RNA, 20 nt, synthetic construct
  misc_feature 1..20: note = C9Orf72 TTCN PAM targeting sequence
  source 1..20: mol_type = other RNA
gtgaagttatctttttttca

SEQ ID NO: 10373 - RNA, 20 nt, synthetic construct
  misc_feature 1..20: note = C9Orf72 TTCN PAM targeting sequence
  source 1..20: mol_type = other RNA
aaaaggaaaagaatgacttg

SEQ ID NO: 10374 - RNA, 20 nt, synthetic construct
  misc_feature 1..20: note = C9Orf72 TTCN PAM targeting sequence
  source 1..20: mol_type = other RNA
tttttgaaactatgcagatg

SEQ ID NO: 10375 - RNA, 20 nt, synthetic construct
  misc_feature 1..20: note = C9Orf72 TTCN PAM targeting sequence
  source 1..20: mol_type = other RNA
tttcctttttgaaactatgc

SEQ ID NO: 10376 - RNA, 20 nt, synthetic construct
  misc_feature 1..20: note = C9Orf72 TTCN PAM targeting sequence
  source 1..20: mol_type = other RNA
aattaaacattatgatgttg

SEQ ID NO: 10377 - RNA, 20 nt, synthetic construct
  misc_feature 1..20: note = C9Orf72 TTCN PAM targeting sequence
  source 1..20: mol_type = other RNA
cctgattttaagagtttcat

SEQ ID NO: 10378 - RNA, 20 nt, synthetic construct
  misc_feature 1..20: note = C9Orf72 TTCN PAM targeting sequence
  source 1..20: mol_type = other RNA
taatgtgagaaaaaaggaag

SEQ ID NO: 10379 - RNA, 20 nt, synthetic construct
  misc_feature 1..20: note = C9Orf72 TTCN PAM targeting sequence
  source 1..20: mol_type = other RNA
cacattatgaaactcttaaa

SEQ ID NO: 10380 - RNA, 20 nt, synthetic construct
  misc_feature 1..20: note = C9Orf72 TTCN PAM targeting sequence
  source 1..20: mol_type = other RNA
ttttttctcacattatgaaa

SEQ ID NO: 10381 - RNA, 20 nt, synthetic construct
  misc_feature 1..20: note = C9Orf72 TTCN PAM targeting sequence
  source 1..20: mol_type = other RNA
tttaaaagatattatttttc

SEQ ID NO: 10382 - RNA, 20 nt, synthetic construct
  misc_feature 1..20: note = C9Orf72 TTCN PAM targeting sequence
  source 1..20: mol_type = other RNA
ttactattgggcaaaagcct

SEQ ID NO: 10383 - RNA, 20 nt, synthetic construct
  misc_feature 1..20: note = C9Orf72 TTCN PAM targeting sequence
  source 1..20: mol_type = other RNA
ggttagtatcaaactggaac

SEQ ID NO: 10384 - RNA, 20 nt, synthetic construct
  misc_feature 1..20: note = C9Orf72 TTCN PAM targeting sequence
  source 1..20: mol_type = other RNA
agtttgatactaacctgaaa

SEQ ID NO: 10385 - RNA, 20 nt, synthetic construct
  misc_feature 1..20: note = C9Orf72 TTCN PAM targeting sequence
  source 1..20: mol_type = other RNA
tgtgttccagtttgatacta

SEQ ID NO: 10386 - RNA, 20 nt, synthetic construct
  misc_feature 1..20: note = C9Orf72 TTCN PAM targeting sequence
  source 1..20: mol_type = other RNA
ccttcctgtgttccagtttg

SEQ ID NO: 10387 - RNA, 20 nt, synthetic construct
  misc_feature 1..20: note = C9Orf72 TTCN PAM targeting sequence
  source 1..20: mol_type = other RNA
atgtgttctttagatacatc

SEQ ID NO: 10388 - RNA, 20 nt, synthetic construct
  misc_feature 1..20: note = C9Orf72 TTCN PAM targeting sequence
  source 1..20: mol_type = other RNA
ttagatacatcaaaactata

SEQ ID NO: 10389 - RNA, 20 nt, synthetic construct
  misc_feature 1..20: note = C9Orf72 TTCN PAM targeting sequence
  source 1..20: mol_type = other RNA
gtatagttttgatgtatcta

SEQ ID NO: 10390 - RNA, 20 nt, synthetic construct
  misc_feature 1..20: note = C9Orf72 TTCN PAM targeting sequence
  source 1..20: mol_type = other RNA
actacaggatttaggaaaac

SEQ ID NO: 10391 - RNA, 20 nt, synthetic construct
  misc_feature 1..20: note = C9Orf72 TTCN PAM targeting sequence
  source 1..20: mol_type = other RNA
taaatcctgtagttgaatat

SEQ ID NO: 10392 - RNA, 20 nt, synthetic construct
  misc_feature 1..20: note = C9Orf72 TTCN PAM targeting sequence
  source 1..20: mol_type = other RNA
gtaagattaaaaggaattct

SEQ ID NO: 10393 - RNA, 20 nt, synthetic construct
  misc_feature 1..20: note = C9Orf72 TTCN PAM targeting sequence
  source 1..20: mol_type = other RNA
ttttaatcttacagaaatta

SEQ ID NO: 10394 - RNA, 20 nt, synthetic construct
  misc_feature 1..20: note = C9Orf72 TTCN PAM targeting sequence
  source 1..20: mol_type = other RNA
cttgggaaccattccattca

SEQ ID NO: 10395 - RNA, 20 nt, synthetic construct
  misc_feature 1..20: note = C9Orf72 TTCN PAM targeting sequence
  source 1..20: mol_type = other RNA
caagagaattccttttaatc

SEQ ID NO: 10396 - RNA, 20 nt, synthetic construct
  misc_feature 1..20: note = C9Orf72 TTCN PAM targeting sequence
  source 1..20: mol_type = other RNA
attcaacctcctcattttat

SEQ ID NO: 10397 - RNA, 20 nt, synthetic construct
  misc_feature 1..20: note = C9Orf72 TTCN PAM targeting sequence
  source 1..20: mol_type = other RNA
acctcctcattttatgaacc

SEQ ID NO: 10398 - RNA, 20 nt, synthetic construct
  misc_feature 1..20: note = C9Orf72 TTCN PAM targeting sequence
  source 1..20: mol_type = other RNA
taaaatgaggaggttgaatg

SEQ ID NO: 10399 - RNA, 20 nt, synthetic construct
  misc_feature 1..20: note = C9Orf72 TTCN PAM targeting sequence
  source 1..20: mol_type = other RNA
caggttcataaaatgaggag

SEQ ID NO: 10400 - RNA, 20 nt, synthetic construct
  misc_feature 1..20: note = C9Orf72 TTCN PAM targeting sequence
  source 1..20: mol_type = other RNA
taagctgttggtcatgtagc

SEQ ID NO: 10401 - RNA, 20 nt, synthetic construct
  misc_feature 1..20: note = C9Orf72 TTCN PAM targeting sequence
  source 1..20: mol_type = other RNA
aagtaatagtttcataagct

SEQ ID NO: 10402 - RNA, 20 nt, synthetic construct
  misc_feature 1..20: note = C9Orf72 TTCN PAM targeting sequence
  source 1..20: mol_type = other RNA
gtcttttgcttactactatg

SEQ ID NO: 10403 - RNA, 20 nt, synthetic construct
  misc_feature 1..20: note = C9Orf72 TTCN PAM targeting sequence
  source 1..20: mol_type = other RNA
ttgcacaattctgtcttttg

SEQ ID NO: 10404 - RNA, 20 nt, synthetic construct
  misc_feature 1..20: note = C9Orf72 TTCN PAM targeting sequence
  source 1..20: mol_type = other RNA
ctttcattgcacaattctgt

SEQ ID NO: 10405 - RNA, 20 nt, synthetic construct
  misc_feature 1..20: note = C9Orf72 TTCN PAM targeting sequence
  source 1..20: mol_type = other RNA
tgggagcctttgactctaat

SEQ ID NO: 10406 - RNA, 20 nt, synthetic construct
  misc_feature 1..20: note = C9Orf72 TTCN PAM targeting sequence
  source 1..20: mol_type = other RNA
tcttgggagcctttgactct

SEQ ID NO: 10407 - RNA, 20 nt, synthetic construct
  misc_feature 1..20: note = C9Orf72 TTCN PAM targeting sequence
  source 1..20: mol_type = other RNA
ttatttgtctaagctttagc

SEQ ID NO: 10408 - RNA, 20 nt, synthetic construct
  misc_feature 1..20: note = C9Orf72 TTCN PAM targeting sequence
  source 1..20: mol_type = other RNA
tctataatgtggagctacca

SEQ ID NO: 10409 - RNA, 20 nt, synthetic construct
  misc_feature 1..20: note = C9Orf72 TTCN PAM targeting sequence
  source 1..20: mol_type = other RNA
taccttccacagttaatatg

SEQ ID NO: 10410 - RNA, 20 nt, synthetic construct
  misc_feature 1..20: note = C9Orf72 TTCN PAM targeting sequence
  source 1..20: mol_type = other RNA
acagttaatatgaagatgac

SEQ ID NO: 10411 - RNA, 20 nt, synthetic construct
  misc_feature 1..20: note = C9Orf72 TTCN PAM targeting sequence
  source 1..20: mol_type = other RNA
tattaactgtggaaggtacg

SEQ ID NO: 10412 - RNA, 20 nt, synthetic construct
  misc_feature 1..20: note = C9Orf72 TTCN PAM targeting sequence
  source 1..20: mol_type = other RNA
ctgcatataattaaaaaaat

SEQ ID NO: 10413 - RNA, 20 nt, synthetic construct
  misc_feature 1..20: note = C9Orf72 TTCN PAM targeting sequence
  source 1..20: mol_type = other RNA
ggtacatataaatcttattt

SEQ ID NO: 10414 - RNA, 20 nt, synthetic construct
  misc_feature 1..20: note = C9Orf72 TTCN PAM targeting sequence
  source 1..20: mol_type = other RNA
acagataggttaacatgatt

SEQ ID NO: 10415 - RNA, 20 nt, synthetic construct
  misc_feature 1..20: note = C9Orf72 TTCN PAM targeting sequence
  source 1..20: mol_type = other RNA
gcttattaatcatgttaacc

SEQ ID NO: 10416 - RNA, 20 nt, synthetic construct
  misc_feature 1..20: note = C9Orf72 TTCN PAM targeting sequence
  source 1..20: mol_type = other RNA
tcctttccggattatatgtg

SEQ ID NO: 10417 - RNA, 20 nt, synthetic construct
  misc_feature 1..20: note = C9Orf72 TTCN PAM targeting sequence
  source 1..20: mol_type = other RNA
tttccggattatatgtgtta

SEQ ID NO: 10418 - RNA, 20 nt, synthetic construct
  misc_feature 1..20: note = C9Orf72 TTCN PAM targeting sequence
  source 1..20: mol_type = other RNA
ggattatatgtgttaatcta

SEQ ID NO: 10419 - RNA, 20 nt, synthetic construct
  misc_feature 1..20: note = C9Orf72 TTCN PAM targeting sequence
  source 1..20: mol_type = other RNA
tagagtgtgtgttgatagat

SEQ ID NO: 10420 - RNA, 20 nt, synthetic construct
  misc_feature 1..20: note = C9Orf72 TTCN PAM targeting sequence
  source 1..20: mol_type = other RNA
acctcccacttcatagagtg

SEQ ID NO: 10421 - RNA, 20 nt, synthetic construct
  misc_feature 1..20: note = C9Orf72 TTCN PAM targeting sequence
  source 1..20: mol_type = other RNA
gtctgtggaagtataattga

SEQ ID NO: 10422 - RNA, 20 nt, synthetic construct
  misc_feature 1..20: note = C9Orf72 TTCN PAM targeting sequence
  source 1..20: mol_type = other RNA
acagacagaacttagtttct

SEQ ID NO: 10423 - RNA, 20 nt, synthetic construct
  misc_feature 1..20: note = C9Orf72 TTCN PAM targeting sequence
  source 1..20: mol_type = other RNA
agtttccatcaaagattaat

SEQ ID NO: 10424 - RNA, 20 nt, synthetic construct
  misc_feature 1..20: note = C9Orf72 TTCN PAM targeting sequence
  source 1..20: mol_type = other RNA
atcaaagattaatgaaacaa

SEQ ID NO: 10425 - RNA, 20 nt, synthetic construct
  misc_feature 1..20: note = C9Orf72 TTCN PAM targeting sequence
  source 1..20: mol_type = other RNA
ttaatctttgatggaaactg

SEQ ID NO: 10426 - RNA, 20 nt, synthetic construct
  misc_feature 1..20: note = C9Orf72 TTCN PAM targeting sequence
  source 1..20: mol_type = other RNA
gacaagacaaaaaactttac

SEQ ID NO: 10427 - RNA, 20 nt, synthetic construct
  misc_feature 1..20: note = C9Orf72 TTCN PAM targeting sequence
  source 1..20: mol_type = other RNA
aaggatttctccatttagag

SEQ ID NO: 10428 - RNA, 20 nt, synthetic construct
  misc_feature 1..20: note = C9Orf72 TTCN PAM targeting sequence
  source 1..20: mol_type = other RNA
aaatgcagagagtggtgcta

SEQ ID NO: 10429 - RNA, 20 nt, synthetic construct
  misc_feature 1..20: note = C9Orf72 TTCN PAM targeting sequence
  source 1..20: mol_type = other RNA
ccatttagagtgtggttggc

SEQ ID NO: 10430 - RNA, 20 nt, synthetic construct
  misc_feature 1..20: note = C9Orf72 TTCN PAM targeting sequence
  source 1..20: mol_type = other RNA
tgccaaccacactctaaatg

SEQ ID NO: 10431 - RNA, 20 nt, synthetic construct
  misc_feature 1..20: note = C9Orf72 TTCN PAM targeting sequence
  source 1..20: mol_type = other RNA
ccatcactgagaagtacctg

SEQ ID NO: 10432 - RNA, 20 nt, synthetic construct
  misc_feature 1..20: note = C9Orf72 TTCN PAM targeting sequence
  source 1..20: mol_type = other RNA
cagtgatggagaaataactt

SEQ ID NO: 10433 - RNA, 20 nt, synthetic construct
  misc_feature 1..20: note = C9Orf72 TTCN PAM targeting sequence
  source 1..20: mol_type = other RNA
gtctttggagcccaaatgtg

SEQ ID NO: 10434 - RNA, 20 nt, synthetic construct
  misc_feature 1..20: note = C9Orf72 TTCN PAM targeting sequence
  source 1..20: mol_type = other RNA
tggtcctagagtaaggcaca

SEQ ID NO: 10435 - RNA, 20 nt, synthetic construct
  misc_feature 1..20: note = C9Orf72 TTCN PAM targeting sequence
  source 1..20: mol_type = other RNA
aactgtcacattatccaaat

SEQ ID NO: 10436 - RNA, 20 nt, synthetic construct
  misc_feature 1..20: note = C9Orf72 TTCN PAM targeting sequence
  source 1..20: mol_type = other RNA
tatgtcattgtttagatatc

SEQ ID NO: 10437 - RNA, 20 nt, synthetic construct
  misc_feature 1..20: note = C9Orf72 TTCN PAM targeting sequence
  source 1..20: mol_type = other RNA
gcaatttaaagatatccatc

SEQ ID NO: 10438 - RNA, 20 nt, synthetic construct
  misc_feature 1..20: note = C9Orf72 TTCN PAM targeting sequence
  source 1..20: mol_type = other RNA
acatctttgacttaagagga

SEQ ID NO: 10439 - RNA, 20 nt, synthetic construct
  misc_feature 1..20: note = C9Orf72 TTCN PAM targeting sequence
  source 1..20: mol_type = other RNA
actagcacagtaggtgcaca

SEQ ID NO: 10440 - RNA, 20 nt, synthetic construct
  misc_feature 1..20: note = C9Orf72 TTCN PAM targeting sequence
  source 1..20: mol_type = other RNA
gggcatacatttagaaattc

SEQ ID NO: 10441 - RNA, 20 nt, synthetic construct
  misc_feature 1..20: note = C9Orf72 TTCN PAM targeting sequence
  source 1..20: mol_type = other RNA
aaatgtatgccctgaatata

SEQ ID NO: 10442 - RNA, 20 nt, synthetic construct
  misc_feature 1..20: note = C9Orf72 TTCN PAM targeting sequence
  source 1..20: mol_type = other RNA
aagaaataacttaaaaaagg

SEQ ID NO: 10443 - RNA, 20 nt, synthetic construct
  misc_feature 1..20: note = C9Orf72 TTCN PAM targeting sequence
  source 1..20: mol_type = other RNA
ttgaatttctaaatgtatgc

SEQ ID NO: 10444 - RNA, 20 nt, synthetic construct
  misc_feature 1..20: note = C9Orf72 TTCN PAM targeting sequence
  source 1..20: mol_type = other RNA
ttacactgatattaaatgtt

SEQ ID NO: 10445 - RNA, 20 nt, synthetic construct
  misc_feature 1..20: note = C9Orf72 TTCN PAM targeting sequence
  source 1..20: mol_type = other RNA
atgagctttagtatgtaaca

SEQ ID NO: 10446 - RNA, 20 nt, synthetic construct
  misc_feature 1..20: note = C9Orf72 TTCN PAM targeting sequence
  source 1..20: mol_type = other RNA
caaatatccagtccatgtgc

SEQ ID NO: 10447 - RNA, 20 nt, synthetic construct
  misc_feature 1..20: note = C9Orf72 TTCN PAM targeting sequence
  source 1..20: mol_type = other RNA
agtatgactggagatttggc

SEQ ID NO: 10448 - RNA, 20 nt, synthetic construct
  misc_feature 1..20: note = C9Orf72 TTCN PAM targeting sequence
  source 1..20: mol_type = other RNA
cctttttagttgctatgggt

SEQ ID NO: 10449 - RNA, 20 nt, synthetic construct
  misc_feature 1..20: note = C9Orf72 TTCN PAM targeting sequence
  source 1..20: mol_type = other RNA
tgtttttctcctttttagtt

SEQ ID NO: 10450 - RNA, 20 nt, synthetic construct
  misc_feature 1..20: note = C9Orf72 TTCN PAM targeting sequence
  source 1..20: mol_type = other RNA
cttcctgtttttctcctttt

SEQ ID NO: 10451 - RNA, 20 nt, synthetic construct
  misc_feature 1..20: note = C9Orf72 TTCN PAM targeting sequence
  source 1..20: mol_type = other RNA
acccacaagtgtcagtctct

SEQ ID NO: 10452 - RNA, 20 nt, synthetic construct
  misc_feature 1..20: note = C9Orf72 TTCN PAM targeting sequence
  source 1..20: mol_type = other RNA
attcctaacccttggtgtac

SEQ ID NO: 10453 - RNA, 20 nt, synthetic construct
  misc_feature 1..20: note = C9Orf72 TTCN PAM targeting sequence
  source 1..20: mol_type = other RNA
taacccttggtgtacgtgaa

SEQ ID NO: 10454 - RNA, 20 nt, synthetic construct
  misc_feature 1..20: note = C9Orf72 TTCN PAM targeting sequence
  source 1..20: mol_type = other RNA
cgtacaccaagggttaggaa

SEQ ID NO: 10455 - RNA, 20 nt, synthetic construct
  misc_feature 1..20: note = C9Orf72 TTCN PAM targeting sequence
  source 1..20: mol_type = other RNA
agataaggtcacattcacgt

SEQ ID NO: 10456 - RNA, 20 nt, synthetic construct
  misc_feature 1..20: note = C9Orf72 TTCN PAM targeting sequence
  source 1..20: mol_type = other RNA
catggctgtctaccatttgt

SEQ ID NO: 10457 - RNA, 20 nt, synthetic construct
  misc_feature 1..20: note = C9Orf72 TTCN PAM targeting sequence
  source 1..20: mol_type = other RNA
acaatccagtatctgccttt

SEQ ID NO: 10458 - RNA, 20 nt, synthetic construct
  misc_feature 1..20: note = C9Orf72 TTCN PAM targeting sequence
  source 1..20: mol_type = other RNA
tgccttgtagtttcaacaat

SEQ ID NO: 10459 - RNA, 20 nt, synthetic construct
  misc_feature 1..20: note = C9Orf72 TTCN PAM targeting sequence
  source 1..20: mol_type = other RNA
tttcttgccttgtagtttca

SEQ ID NO: 10460 - RNA, 20 nt, synthetic construct
  misc_feature 1..20: note = C9Orf72 TTCN PAM targeting sequence
  source 1..20: mol_type = other RNA
ggtggttaccagcaatcctg

SEQ ID NO: 10461 - RNA, 20 nt, synthetic construct
  misc_feature 1..20: note = C9Orf72 TTCN PAM targeting sequence
  source 1..20: mol_type = other RNA
tggcttctggtggttaccag

SEQ ID NO: 10462 - RNA, 20 nt, synthetic construct
  misc_feature 1..20: note = C9Orf72 TTCN PAM targeting sequence
  source 1..20: mol_type = other RNA
ttgcctcttcctggcttctg

SEQ ID NO: 10463 - RNA, 20 nt, synthetic construct
  misc_feature 1..20: note = C9Orf72 TTCN PAM targeting sequence
  source 1..20: mol_type = other RNA
ctcttgaagatcatgcccct

SEQ ID NO: 10464 - RNA, 20 nt, synthetic construct
  misc_feature 1..20: note = C9Orf72 TTCN PAM targeting sequence
  source 1..20: mol_type = other RNA
agagagaagactctttcctt

SEQ ID NO: 10465 - RNA, 20 nt, synthetic construct
  misc_feature 1..20: note = C9Orf72 TTCN PAM targeting sequence
  source 1..20: mol_type = other RNA
gacttctagcttctagaatt

SEQ ID NO: 10466 - RNA, 20 nt, synthetic construct
  misc_feature 1..20: note = C9Orf72 TTCN PAM targeting sequence
  source 1..20: mol_type = other RNA
agcttctagaattgtgagag

SEQ ID NO: 10467 - RNA, 20 nt, synthetic construct
  misc_feature 1..20: note = C9Orf72 TTCN PAM targeting sequence
  source 1..20: mol_type = other RNA
agaattgtgagagaataaat

SEQ ID NO: 10468 - RNA, 20 nt, synthetic construct
  misc_feature 1..20: note = C9Orf72 TTCN PAM targeting sequence
  source 1..20: mol_type = other RNA
agaagctagaagtccgaaat

SEQ ID NO: 10469 - RNA, 20 nt, synthetic construct
  misc_feature 1..20: note = C9Orf72 TTCN PAM targeting sequence
  source 1..20: mol_type = other RNA
ctcacaattctagaagctag

SEQ ID NO: 10470 - RNA, 20 nt, synthetic construct
  misc_feature 1..20: note = C9Orf72 TTCN PAM targeting sequence
  source 1..20: mol_type = other RNA
aagattacttaacaaagcac

SEQ ID NO: 10471 - RNA, 20 nt, synthetic construct
  misc_feature 1..20: note = C9Orf72 TTCN PAM targeting sequence
  source 1..20: mol_type = other RNA
gttgttaggtgttgtattac

SEQ ID NO: 10472 - RNA, 20 nt, synthetic construct
  misc_feature 1..20: note = C9Orf72 TTCN PAM targeting sequence
  source 1..20: mol_type = other RNA
atgtcttttttttttttttt

SEQ ID NO: 10473 - RNA, 20 nt, synthetic construct
  misc_feature 1..20: note = C9Orf72 TTCN PAM targeting sequence
  source 1..20: mol_type = other RNA
ctgaggatacaggactgttt

SEQ ID NO: 10474 - RNA, 20 nt, synthetic construct
  misc_feature 1..20: note = C9Orf72 TTCN PAM targeting sequence
  source 1..20: mol_type = other RNA
cataaccagagagttcactg

SEQ ID NO: 10475 - RNA, 20 nt, synthetic construct
  misc_feature 1..20: note = C9Orf72 TTCN PAM targeting sequence
  source 1..20: mol_type = other RNA
gtattctcataaccagagag

SEQ ID NO: 10476 - RNA, 20 nt, synthetic construct
  misc_feature 1..20: note = C9Orf72 TTCN PAM targeting sequence
  source 1..20: mol_type = other RNA
atgtcgttttaaacatcagg

SEQ ID NO: 10477 - RNA, 20 nt, synthetic construct
  misc_feature 1..20: note = C9Orf72 TTCN PAM targeting sequence
  source 1..20: mol_type = other RNA
tggctagcatattaaatatt

SEQ ID NO: 10478 - RNA, 20 nt, synthetic construct
  misc_feature 1..20: note = C9Orf72 TTCN PAM targeting sequence
  source 1..20: mol_type = other RNA
tcactgcaaagagagttcta

SEQ ID NO: 10479 - RNA, 20 nt, synthetic construct
  misc_feature 1..20: note = C9Orf72 TTCN PAM targeting sequence
  source 1..20: mol_type = other RNA
acactaaatggctagaattt

SEQ ID NO: 10480 - RNA, 20 nt, synthetic construct
  misc_feature 1..20: note = C9Orf72 TTCN PAM targeting sequence
  source 1..20: mol_type = other RNA
agccatttagtgtagaactc

SEQ ID NO: 10481 - RNA, 20 nt, synthetic construct
  misc_feature 1..20: note = C9Orf72 TTCN PAM targeting sequence
  source 1..20: mol_type = other RNA
aaataactaaagcttttaaa

SEQ ID NO: 10482 - RNA, 20 nt, synthetic construct
  misc_feature 1..20: note = C9Orf72 TTCN PAM targeting sequence
  source 1..20: mol_type = other RNA
acgtgttctaaataactaaa

SEQ ID NO: 10483 - RNA, 20 nt, synthetic construct
  misc_feature 1..20: note = C9Orf72 TTCN PAM targeting sequence
  source 1..20: mol_type = other RNA
gttttctacgtgttctaaat

SEQ ID NO: 10484 - RNA, 20 nt, synthetic construct
  misc_feature 1..20: note = C9Orf72 TTCN PAM targeting sequence
  source 1..20: mol_type = other RNA
agcctttgaatttaatgaga

SEQ ID NO: 10485 - RNA, 20 nt, synthetic construct
  misc_feature 1..20: note = C9Orf72 TTCN PAM targeting sequence
  source 1..20: mol_type = other RNA
aaggcttgaacgggccctat

SEQ ID NO: 10486 - RNA, 20 nt, synthetic construct
  misc_feature 1..20: note = C9Orf72 TTCN PAM targeting sequence
  source 1..20: mol_type = other RNA
cattaaattcaaaggcttga

SEQ ID NO: 10487 - RNA, 20 nt, synthetic construct
  misc_feature 1..20: note = C9Orf72 TTCN PAM targeting sequence
  source 1..20: mol_type = other RNA
cctcatgtctgttttctcat

SEQ ID NO: 10488 - RNA, 20 nt, synthetic construct
  misc_feature 1..20: note = C9Orf72 TTCN PAM targeting sequence
  source 1..20: mol_type = other RNA
tctcctcatgtctgttttct

SEQ ID NO: 10489 - RNA, 20 nt, synthetic construct
  misc_feature 1..20: note = C9Orf72 TTCN PAM targeting sequence
  source 1..20: mol_type = other RNA
gtcttggatgtgagcgttta

SEQ ID NO: 10490 - RNA, 20 nt, synthetic construct
  misc_feature 1..20: note = C9Orf72 TTCN PAM targeting sequence
  source 1..20: mol_type = other RNA
tgcaaatacagttatgtgcc

SEQ ID NO: 10491 - RNA, 20 nt, synthetic construct
  misc_feature 1..20: note = C9Orf72 TTCN PAM targeting sequence
  source 1..20: mol_type = other RNA
gtcaatggtagactgcatat

SEQ ID NO: 10492 - RNA, 20 nt, synthetic construct
  misc_feature 1..20: note = C9Orf72 TTCN PAM targeting sequence
  source 1..20: mol_type = other RNA
ggtccattgtaatctaatgg

SEQ ID NO: 10493 - RNA, 20 nt, synthetic construct
  misc_feature 1..20: note = C9Orf72 TTCN PAM targeting sequence
  source 1..20: mol_type = other RNA
ctatactatgccttttattg

SEQ ID NO: 10494 - RNA, 20 nt, synthetic construct
  misc_feature 1..20: note = C9Orf72 TTCN PAM targeting sequence
  source 1..20: mol_type = other RNA
actttttttttttttaagtt

SEQ ID NO: 10495 - RNA, 20 nt, synthetic construct
  misc_feature 1..20: note = C9Orf72 TTCN PAM targeting sequence
  source 1..20: mol_type = other RNA
ggaggtattcaacagaaagc

SEQ ID NO: 10496 - RNA, 20 nt, synthetic construct
  misc_feature 1..20: note = C9Orf72 TTCN PAM targeting sequence
  source 1..20: mol_type = other RNA
acagaaagcactgttatcat

SEQ ID NO: 10497 - RNA, 20 nt, synthetic construct
  misc_feature 1..20: note = C9Orf72 TTCN PAM targeting sequence
  source 1..20: mol_type = other RNA
gttgaatacctcctgaagga

SEQ ID NO: 10498 - RNA, 20 nt, synthetic construct
  misc_feature 1..20: note = C9Orf72 TTCN PAM targeting sequence
  source 1..20: mol_type = other RNA
agtgggacaagatgtggagg

SEQ ID NO: 10499 - RNA, 20 nt, synthetic construct
  misc_feature 1..20: note = C9Orf72 TTCN PAM targeting sequence
  source 1..20: mol_type = other RNA
acctccacatcttgtcccac

SEQ ID NO: 10500 - RNA, 20 nt, synthetic construct
  misc_feature 1..20: note = C9Orf72 TTCN PAM targeting sequence
  source 1..20: mol_type = other RNA
acctcactgccttccacctc

SEQ ID NO: 10501 - RNA, 20 nt, synthetic construct
  misc_feature 1..20: note = C9Orf72 TTCN PAM targeting sequence
  source 1..20: mol_type = other RNA
cctaggcatagacaggatta

SEQ ID NO: 10502 - RNA, 20 nt, synthetic construct
  misc_feature 1..20: note = C9Orf72 TTCN PAM targeting sequence
  source 1..20: mol_type = other RNA
attttaaattttttttttta

SEQ ID NO: 10503 - RNA, 20 nt, synthetic construct
  misc_feature 1..20: note = C9Orf72 TTCN PAM targeting sequence
  source 1..20: mol_type = other RNA
attttctattttaaattttt

SEQ ID NO: 10504 - RNA, 20 nt, synthetic construct
  misc_feature 1..20: note = C9Orf72 TTCN PAM targeting sequence
  source 1..20: mol_type = other RNA
agaataaggatacaaagaaa

SEQ ID NO: 10505 - RNA, 20 nt, synthetic construct
  misc_feature 1..20: note = C9Orf72 TTCN PAM targeting sequence
  source 1..20: mol_type = other RNA
agaagcttttttctattttc

SEQ ID NO: 10506 - RNA, 20 nt, synthetic construct
  misc_feature 1..20: note = C9Orf72 TTCN PAM targeting sequence
  source 1..20: mol_type = other RNA
ttgtatccttattctagaag

SEQ ID NO: 10507 - RNA, 20 nt, synthetic construct
  misc_feature 1..20: note = C9Orf72 TTCN PAM targeting sequence
  source 1..20: mol_type = other RNA
agctaagtattttaaaagtt

SEQ ID NO: 10508 - RNA, 20 nt, synthetic construct
  misc_feature 1..20: note = C9Orf72 TTCN PAM targeting sequence
  source 1..20: mol_type = other RNA
ataaaaaattataacttttt

SEQ ID NO: 10509 - RNA, 20 nt, synthetic construct
  misc_feature 1..20: note = C9Orf72 TTCN PAM targeting sequence
  source 1..20: mol_type = other RNA
tcaataaaaaattataactt

SEQ ID NO: 10510 - RNA, 20 nt, synthetic construct
  misc_feature 1..20: note = C9Orf72 TTCN PAM targeting sequence
  source 1..20: mol_type = other RNA
gcgtactgtgtttatagtct

SEQ ID NO: 10511 - RNA, 20 nt, synthetic construct
  misc_feature 1..20: note = C9Orf72 TTCN PAM targeting sequence
  source 1..20: mol_type = other RNA
aggccttcacattaattcac

SEQ ID NO: 10512 - RNA, 20 nt, synthetic construct
  misc_feature 1..20: note = C9Orf72 TTCN PAM targeting sequence
  source 1..20: mol_type = other RNA
cattaattcaccactcactc

SEQ ID NO: 10513 - RNA, 20 nt, synthetic construct
  misc_feature 1..20: note = C9Orf72 TTCN PAM targeting sequence
  source 1..20: mol_type = other RNA
ccactcactcactgactcac

SEQ ID NO: 10514 - RNA, 20 nt, synthetic construct
  misc_feature 1..20: note = C9Orf72 TTCN PAM targeting sequence
  source 1..20: mol_type = other RNA
agtcctgcaagctccattcg

SEQ ID NO: 10515 - RNA, 20 nt, synthetic construct
  misc_feature 1..20: note = C9Orf72 TTCN PAM targeting sequence
  source 1..20: mol_type = other RNA
tggtaagtggcctacacagg

SEQ ID NO: 10516 - RNA, 20 nt, synthetic construct
  misc_feature 1..20: note = C9Orf72 TTCN PAM targeting sequence
  source 1..20: mol_type = other RNA
ctgtttgcatatatttagat

SEQ ID NO: 10517 - RNA, 20 nt, synthetic construct
  misc_feature 1..20: note = C9Orf72 TTCN PAM targeting sequence
  source 1..20: mol_type = other RNA
gtacagtaacagttgtacag

SEQ ID NO: 10518 - RNA, 20 nt, synthetic construct
  misc_feature 1..20: note = C9Orf72 TTCN PAM targeting sequence
  source 1..20: mol_type = other RNA
taagcaatgtgtgattgtac

SEQ ID NO: 10519 - RNA, 20 nt, synthetic construct
  misc_feature 1..20: note = C9Orf72 TTCN PAM targeting sequence
  source 1..20: mol_type = other RNA
attatagtacaatcacacat

SEQ ID NO: 10520 - RNA, 20 nt, synthetic construct
  misc_feature 1..20: note = C9Orf72 TTCN PAM targeting sequence
  source 1..20: mol_type = other RNA
gtcttagataacaagtcttc

SEQ ID NO: 10521 - RNA, 20 nt, synthetic construct
  misc_feature 1..20: note = C9Orf72 TTCN PAM targeting sequence
  source 1..20: mol_type = other RNA
ttttactttcagtcttagat

SEQ ID NO: 10522 - RNA, 20 nt, synthetic construct
  misc_feature 1..20: note = C9Orf72 TTCN PAM targeting sequence
  source 1..20: mol_type = other RNA
cctaagcaagtctaaaactg

SEQ ID NO: 10523 - RNA, 20 nt, synthetic construct
  misc_feature 1..20: note = C9Orf72 TTCN PAM targeting sequence
  source 1..20: mol_type = other RNA
cagttttagacttgcttagg

SEQ ID NO: 10524 - RNA, 20 nt, synthetic construct
  misc_feature 1..20: note = C9Orf72 TTCN PAM targeting sequence
  source 1..20: mol_type = other RNA
ttaagtaaaattgtttactt

SEQ ID NO: 10525 - RNA, 20 nt, synthetic construct
  misc_feature 1..20: note = C9Orf72 TTCN PAM targeting sequence
  source 1..20: mol_type = other RNA
tccacatcttgtcaagagag

SEQ ID NO: 10526 - RNA, 20 nt, synthetic construct
  misc_feature 1..20: note = C9Orf72 TTCN PAM targeting sequence
  source 1..20: mol_type = other RNA
gtctgatggaaagcactgac

SEQ ID NO: 10527 - RNA, 20 nt, synthetic construct
  misc_feature 1..20: note = C9Orf72 TTCN PAM targeting sequence
  source 1..20: mol_type = other RNA
atcagactgaactctcttga

SEQ ID NO: 10528 - RNA, 20 nt, synthetic construct
  misc_feature 1..20: note = C9Orf72 TTCN PAM targeting sequence
  source 1..20: mol_type = other RNA
atttacagagcattagatga

SEQ ID NO: 10529 - RNA, 20 nt, synthetic construct
  misc_feature 1..20: note = C9Orf72 TTCN PAM targeting sequence
  source 1..20: mol_type = other RNA
gtacatacttagagttaact

SEQ ID NO: 10530 - RNA, 20 nt, synthetic construct
  misc_feature 1..20: note = C9Orf72 TTCN PAM targeting sequence
  source 1..20: mol_type = other RNA
accatttctgtacatactta

SEQ ID NO: 10531 - RNA, 20 nt, synthetic construct
  misc_feature 1..20: note = C9Orf72 TTCN PAM targeting sequence
  source 1..20: mol_type = other RNA
aaaattcatttaggtaatat

SEQ ID NO: 10532 - RNA, 20 nt, synthetic construct
  misc_feature 1..20: note = C9Orf72 TTCN PAM targeting sequence
  source 1..20: mol_type = other RNA
tttaggtaatatttactttt

SEQ ID NO: 10533 - RNA, 20 nt, synthetic construct
  misc_feature 1..20: note = C9Orf72 TTCN PAM targeting sequence
  source 1..20: mol_type = other RNA
ttaaaatatccactgttttt

SEQ ID NO: 10534 - RNA, 20 nt, synthetic construct
  misc_feature 1..20: note = C9Orf72 TTCN PAM targeting sequence
  source 1..20: mol_type = other RNA
tatatttgatcattgtaaac

SEQ ID NO: 10535 - RNA, 20 nt, synthetic construct
  misc_feature 1..20: note = C9Orf72 TTCN PAM targeting sequence
  source 1..20: mol_type = other RNA
gattacattcctatatttga

SEQ ID NO: 10536 - RNA, 20 nt, synthetic construct
  misc_feature 1..20: note = C9Orf72 TTCN PAM targeting sequence
  source 1..20: mol_type = other RNA
attcagattacattcctata

SEQ ID NO: 10537 - RNA, 20 nt, synthetic construct
  misc_feature 1..20: note = C9Orf72 TTCN PAM targeting sequence
  source 1..20: mol_type = other RNA
ttatgttggcctccagtttg

SEQ ID NO: 10538 - RNA, 20 nt, synthetic construct
  misc_feature 1..20: note = C9Orf72 TTCN PAM targeting sequence
  source 1..20: mol_type = other RNA
ttcattcttttaggttaaaa

SEQ ID NO: 10539 - RNA, 20 nt, synthetic construct
  misc_feature 1..20: note = C9Orf72 TTCN PAM targeting sequence
  source 1..20: mol_type = other RNA
ttcttttaggttaaaaaggt

SEQ ID NO: 10540 - RNA, 20 nt, synthetic construct
  misc_feature 1..20: note = C9Orf72 TTCN PAM targeting sequence
  source 1..20: mol_type = other RNA
tttaggttaaaaaggtggat

SEQ ID NO: 10541 - RNA, 20 nt, synthetic construct
  misc_feature 1..20: note = C9Orf72 TTCN PAM targeting sequence
  source 1..20: mol_type = other RNA
tcattaaactgaaaataaaa

SEQ ID NO: 10542 - RNA, 20 nt, synthetic construct
  misc_feature 1..20: note = C9Orf72 TTCN PAM targeting sequence
  source 1..20: mol_type = other RNA
gtttaatgatgaaatattag

SEQ ID NO: 10543 - RNA, 20 nt, synthetic construct
  misc_feature 1..20: note = C9Orf72 TTCN PAM targeting sequence
  source 1..20: mol_type = other RNA
taaaacagaactgaaccctg

SEQ ID NO: 10544 - RNA, 20 nt, synthetic construct
  misc_feature 1..20: note = C9Orf72 TTCN PAM targeting sequence
  source 1..20: mol_type = other RNA
gttttaggaaatacttttat

SEQ ID NO: 10545 - RNA, 20 nt, synthetic construct
  misc_feature 1..20: note = C9Orf72 TTCN PAM targeting sequence
  source 1..20: mol_type = other RNA
gttctgttttaggaaatact

SEQ ID NO: 10546 - RNA, 20 nt, synthetic construct
  misc_feature 1..20: note = C9Orf72 TTCN PAM targeting sequence
  source 1..20: mol_type = other RNA
atcagattttgctccagggt

SEQ ID NO: 10547 - RNA, 20 nt, synthetic construct
  misc_feature 1..20: note = C9Orf72 TTCN PAM targeting sequence
  source 1..20: mol_type = other RNA
ctataattcaatcagatttt

SEQ ID NO: 10548 - RNA, 20 nt, synthetic construct
  misc_feature 1..20: note = C9Orf72 TTCN PAM targeting sequence
  source 1..20: mol_type = other RNA
caacgtggtaaaagtttccc

SEQ ID NO: 10549 - RNA, 20 nt, synthetic construct
  misc_feature 1..20: note = C9Orf72 TTCN PAM targeting sequence
  source 1..20: mol_type = other RNA
attttcacaacgtggtaaaa

SEQ ID NO: 10550 - RNA, 20 nt, synthetic construct
  misc_feature 1..20: note = C9Orf72 TTCN PAM targeting sequence
  source 1..20: mol_type = other RNA
gttaggagtgagagtgtaac

SEQ ID NO: 10551 - RNA, 20 nt, synthetic construct
  misc_feature 1..20: note = C9Orf72 TTCN PAM targeting sequence
  source 1..20: mol_type = other RNA
tattctgttaggagtgagag

SEQ ID NO: 10552 - RNA, 20 nt, synthetic construct
  misc_feature 1..20: note = C9Orf72 TTCN PAM targeting sequence
  source 1..20: mol_type = other RNA
ccatgttggccaggctggtc

SEQ ID NO: 10553 - RNA, 20 nt, synthetic construct
  misc_feature 1..20: note = C9Orf72 TTCN PAM targeting sequence
  source 1..20: mol_type = other RNA
cctgcctcagcctcccgagt

SEQ ID NO: 10554 - RNA, 20 nt, synthetic construct
  misc_feature 1..20: note = C9Orf72 TTCN PAM targeting sequence
  source 1..20: mol_type = other RNA
agagattctcctgcctcagc

SEQ ID NO: 10555 - RNA, 20 nt, synthetic construct
  misc_feature 1..20: note = C9Orf72 TTCN PAM targeting sequence
  source 1..20: mol_type = other RNA
tgaggcagagtctctctctg

SEQ ID NO: 10556 - RNA, 20 nt, synthetic construct
  misc_feature 1..20: note = C9Orf72 TTCN PAM targeting sequence
  source 1..20: mol_type = other RNA
ttttgtttgtttgtttgttt

SEQ ID NO: 10557 - RNA, 20 nt, synthetic construct
  misc_feature 1..20: note = C9Orf72 TTCN PAM targeting sequence
  source 1..20: mol_type = other RNA
tattctttttgtttgtttgt

SEQ ID NO: 10558 - RNA, 20 nt, synthetic construct
  misc_feature 1..20: note = C9Orf72 TTCN PAM targeting sequence
  source 1..20: mol_type = other RNA
ttcttattctttttgtttgt

SEQ ID NO: 10559 - RNA, 20 nt, synthetic construct
  misc_feature 1..20: note = C9Orf72 TTCN PAM targeting sequence
  source 1..20: mol_type = other RNA
ttttctttcttattcttttt

SEQ ID NO: 10560 - RNA, 20 nt, synthetic construct
  misc_feature 1..20: note = C9Orf72 TTCN PAM targeting sequence
  source 1..20: mol_type = other RNA
gtatgatctttgtccttcat

SEQ ID NO: 10561 - RNA, 20 nt, synthetic construct
  misc_feature 1..20: note = C9Orf72 TTCN PAM targeting sequence
  source 1..20: mol_type = other RNA
tttggtaggatttaaaacta

SEQ ID NO: 10562 - RNA, 20 nt, synthetic construct
  misc_feature 1..20: note = C9Orf72 TTCN PAM targeting sequence
  source 1..20: mol_type = other RNA
caggctatttcttttggtag

SEQ ID NO: 10563 - RNA, 20 nt, synthetic construct
  misc_feature 1..20: note = C9Orf72 TTCN PAM targeting sequence
  source 1..20: mol_type = other RNA
tttcccaggctatttctttt

SEQ ID NO: 10564 - RNA, 20 nt, synthetic construct
  misc_feature 1..20: note = C9Orf72 TTCN PAM targeting sequence
  source 1..20: mol_type = other RNA
ctgtgacatttcatttccca

SEQ ID NO: 10565 - RNA, 20 nt, synthetic construct
  misc_feature 1..20: note = C9Orf72 TTCN PAM targeting sequence
  source 1..20: mol_type = other RNA
agtattagtaaaataattgt

SEQ ID NO: 10566 - RNA, 20 nt, synthetic construct
  misc_feature 1..20: note = C9Orf72 TTCN PAM targeting sequence
  source 1..20: mol_type = other RNA
caccaaagacgatgacttca

SEQ ID NO: 10567 - RNA, 20 nt, synthetic construct
  misc_feature 1..20: note = C9Orf72 TTCN PAM targeting sequence
  source 1..20: mol_type = other RNA
gctgcatttgcatgtatgga

SEQ ID NO: 10568 - RNA, 20 nt, synthetic construct
  misc_feature 1..20: note = C9Orf72 TTCN PAM targeting sequence
  source 1..20: mol_type = other RNA
ctcaaaagactggctaatgt

SEQ ID NO: 10569 - RNA, 20 nt, synthetic construct
  misc_feature 1..20: note = C9Orf72 TTCN PAM targeting sequence
  source 1..20: mol_type = other RNA
aattgagtgagacggtggct

SEQ ID NO: 10570 - RNA, 20 nt, synthetic construct
  misc_feature 1..20: note = C9Orf72 TTCN PAM targeting sequence
  source 1..20: mol_type = other RNA
tgagaggtttcccaatacac

SEQ ID NO: 10571 - RNA, 20 nt, synthetic construct
  misc_feature 1..20: note = C9Orf72 TTCN PAM targeting sequence
  source 1..20: mol_type = other RNA
caatacactttctggaaata

SEQ ID NO: 10572 - RNA, 20 nt, synthetic construct
  misc_feature 1..20: note = C9Orf72 TTCN PAM targeting sequence
  source 1..20: mol_type = other RNA
ggaaataatcccatacatgc

SEQ ID NO: 10573 - RNA, 20 nt, synthetic construct
  misc_feature 1..20: note = C9Orf72 TTCN PAM targeting sequence
  source 1..20: mol_type = other RNA
agaaagtgtattgggaaacc

SEQ ID NO: 10574 - RNA, 20 nt, synthetic construct
  misc_feature 1..20: note = C9Orf72 TTCN PAM targeting sequence
  source 1..20: mol_type = other RNA
ttaaacgtctgttaaaaaat

SEQ ID NO: 10575 - RNA, 20 nt, synthetic construct
  misc_feature 1..20: note = C9Orf72 TTCN PAM targeting sequence
  source 1..20: mol_type = other RNA
ctgattggtatttagaaagg

SEQ ID NO: 10576 - RNA, 20 nt, synthetic construct
  misc_feature 1..20: note = C9Orf72 TTCN PAM targeting sequence
  source 1..20: mol_type = other RNA
aaataccaatcagggaagag

SEQ ID NO: 10577 - RNA, 20 nt, synthetic construct
  misc_feature 1..20: note = C9Orf72 TTCN PAM targeting sequence
  source 1..20: mol_type = other RNA
ctacaatagcagtggaccaa

SEQ ID NO: 10578 - RNA, 20 nt, synthetic construct
  misc_feature 1..20: note = C9Orf72 TTCN PAM targeting sequence
  source 1..20: mol_type = other RNA
acaatcataaagccctcact

SEQ ID NO: 10579 - RNA, 20 nt, synthetic construct
  misc_feature 1..20: note = C9Orf72 TTCN PAM targeting sequence
  source 1..20: mol_type = other RNA
tgttttttagagacagggtc

SEQ ID NO: 10580 - RNA, 20 nt, synthetic construct
  misc_feature 1..20: note = C9Orf72 TTCN PAM targeting sequence
  source 1..20: mol_type = other RNA
agcctggatgacaaaacgag

SEQ ID NO: 10581 - RNA, 20 nt, synthetic construct
  misc_feature 1..20: note = C9Orf72 TTCN PAM targeting sequence
  source 1..20: mol_type = other RNA
aactcttgggctcaaatgac

SEQ ID NO: 10582 - RNA, 20 nt, synthetic construct
  misc_feature 1..20: note = C9Orf72 TTCN PAM targeting sequence
  source 1..20: mol_type = other RNA
agctcaacctgggcaacgta

SEQ ID NO: 10583 - RNA, 20 nt, synthetic construct
  misc_feature 1..20: note = C9Orf72 TTCN PAM targeting sequence
  source 1..20: mol_type = other RNA
agtgatcctcttgcctccgc

SEQ ID NO: 10584 - RNA, 20 nt, synthetic construct
  misc_feature 1..20: note = C9Orf72 TTCN PAM targeting sequence
  source 1..20: mol_type = other RNA
ccaacctggctctcaatact

SEQ ID NO: 10585 - RNA, 20 nt, synthetic construct
  misc_feature 1..20: note = C9Orf72 TTCN PAM targeting sequence
  source 1..20: mol_type = other RNA
cccagcccaaagagaagcag

SEQ ID NO: 10586 - RNA, 20 nt, synthetic construct
  misc_feature 1..20: note = C9Orf72 TTCN PAM targeting sequence
  source 1..20: mol_type = other RNA
ctttgggctgggagaaaata

SEQ ID NO: 10587 - RNA, 20 nt, synthetic construct
  misc_feature 1..20: note = C9Orf72 TTCN PAM targeting sequence
  source 1..20: mol_type = other RNA
acaacaggagctgcccagga

SEQ ID NO: 10588 - RNA, 20 nt, synthetic construct
  misc_feature 1..20: note = C9Orf72 TTCN PAM targeting sequence
  source 1..20: mol_type = other RNA
aggacagtgaactgtttaca

SEQ ID NO: 10589 - RNA, 20 nt, synthetic construct
  misc_feature 1..20: note = C9Orf72 TTCN PAM targeting sequence
  source 1..20: mol_type = other RNA
ctgtccttgaagtggtcctg

SEQ ID NO: 10590 - RNA, 20 nt, synthetic construct
  misc_feature 1..20: note = C9Orf72 TTCN PAM targeting sequence
  source 1..20: mol_type = other RNA
ggtactgtaaacagttcact

SEQ ID NO: 10591 - RNA, 20 nt, synthetic construct
  misc_feature 1..20: note = C9Orf72 TTCN PAM targeting sequence
  source 1..20: mol_type = other RNA
caacactttctcaatcttca

SEQ ID NO: 10592 - RNA, 20 nt, synthetic construct
  misc_feature 1..20: note = C9Orf72 TTCN PAM targeting sequence
  source 1..20: mol_type = other RNA
caatcttcaacatcagggaa

SEQ ID NO: 10593 - RNA, 20 nt, synthetic construct
  misc_feature 1..20: note = C9Orf72 TTCN PAM targeting sequence
  source 1..20: mol_type = other RNA
acatcagggaagactggaag

SEQ ID NO: 10594 - RNA, 20 nt, synthetic construct
  misc_feature 1..20: note = C9Orf72 TTCN PAM targeting sequence
  source 1..20: mol_type = other RNA
ctgatgttgaagattgagaa

SEQ ID NO: 10595 - RNA, 20 nt, synthetic construct
  misc_feature 1..20: note = C9Orf72 TTCN PAM targeting sequence
  source 1..20: mol_type = other RNA
agtcttccctgatgttgaag

SEQ ID NO: 10596 - RNA, 20 nt, synthetic construct
  misc_feature 1..20: note = C9Orf72 TTCN PAM targeting sequence
  source 1..20: mol_type = other RNA
ccttccagtcttccctgatg

SEQ ID NO: 10597 - RNA, 20 nt, synthetic construct
  misc_feature 1..20: note = C9Orf72 TTCN PAM targeting sequence
  source 1..20: mol_type = other RNA
tatcactatctggccatttc

SEQ ID NO: 10598 - RNA, 20 nt, synthetic construct
  misc_feature 1..20: note = C9Orf72 TTCN PAM targeting sequence
  source 1..20: mol_type = other RNA
cacagttccaagtttctcag

SEQ ID NO: 10599 - RNA, 20 nt, synthetic construct
  misc_feature 1..20: note = C9Orf72 TTCN PAM targeting sequence
  source 1..20: mol_type = other RNA
aagtttctcagacaataggt

SEQ ID NO: 10600 - RNA, 20 nt, synthetic construct
  misc_feature 1..20: note = C9Orf72 TTCN PAM targeting sequence
  source 1..20: mol_type = other RNA
cagacaataggtaggctaac

SEQ ID NO: 10601 - RNA, 20 nt, synthetic construct
  misc_feature 1..20: note = C9Orf72 TTCN PAM targeting sequence
  source 1..20: mol_type = other RNA
caggaggactaggttagcct

SEQ ID NO: 10602 - RNA, 20 nt, synthetic construct
  misc_feature 1..20: note = C9Orf72 TTCN PAM targeting sequence
  source 1..20: mol_type = other RNA
acgttaattagatagttccc

SEQ ID NO: 10603 - RNA, 20 nt, synthetic construct
  misc_feature 1..20: note = C9Orf72 TTCN PAM targeting sequence
  source 1..20: mol_type = other RNA
attctacgttaattagatag

SEQ ID NO: 10604 - RNA, 20 nt, synthetic construct
  misc_feature 1..20: note = C9Orf72 TTCN PAM targeting sequence
  source 1..20: mol_type = other RNA
agtctgccctcgggttctat

SEQ ID NO: 10605 - RNA, 20 nt, synthetic construct
  misc_feature 1..20: note = C9Orf72 TTCN PAM targeting sequence
  source 1..20: mol_type = other RNA
gtttttcaagtctgccctcg

SEQ ID NO: 10606 - RNA, 20 nt, synthetic construct
  misc_feature 1..20: note = C9Orf72 TTCN PAM targeting sequence
  source 1..20: mol_type = other RNA
ctgaaagcaaattgtggagt

SEQ ID NO: 10607 - RNA, 20 nt, synthetic construct
  misc_feature 1..20: note = C9Orf72 TTCN PAM targeting sequence
  source 1..20: mol_type = other RNA
gagaaacaaagtaaaccaag

SEQ ID NO: 10608 - RNA, 20 nt, synthetic construct
  misc_feature 1..20: note = C9Orf72 TTCN PAM targeting sequence
  source 1..20: mol_type = other RNA
taaggtgcttgtaatttttt

SEQ ID NO: 10609 - RNA, 20 nt, synthetic construct
  misc_feature 1..20: note = C9Orf72 TTCN PAM targeting sequence
  source 1..20: mol_type = other RNA
tggagcaggtaaatgctggc

SEQ ID NO: 10610 - RNA, 20 nt, synthetic construct
  misc_feature 1..20: note = C9Orf72 TTCN PAM targeting sequence
  source 1..20: mol_type = other RNA
ctaagccagcatttacctgc

SEQ ID NO: 10611 - RNA, 20 nt, synthetic construct
  misc_feature 1..20: note = C9Orf72 TTCN PAM targeting sequence
  source 1..20: mol_type = other RNA
agattgttcactaagccagc

SEQ ID NO: 10612 - RNA, 20 nt, synthetic construct
  misc_feature 1..20: note = C9Orf72 TTCN PAM targeting sequence
  source 1..20: mol_type = other RNA
tgtttcagatgtactatcag

SEQ ID NO: 10613 - RNA, 20 nt, synthetic construct
  misc_feature 1..20: note = C9Orf72 TTCN PAM targeting sequence
  source 1..20: mol_type = other RNA
gatgtactatcagcatgtag

SEQ ID NO: 10614 - RNA, 20 nt, synthetic construct
  misc_feature 1..20: note = C9Orf72 TTCN PAM targeting sequence
  source 1..20: mol_type = other RNA
aactgattcagggttttcct

SEQ ID NO: 10615 - RNA, 20 nt, synthetic construct
  misc_feature 1..20: note = C9Orf72 TTCN PAM targeting sequence
  source 1..20: mol_type = other RNA
gggttttcctaaagtggcag

SEQ ID NO: 10616 - RNA, 20 nt, synthetic construct
  misc_feature 1..20: note = C9Orf72 TTCN PAM targeting sequence
  source 1..20: mol_type = other RNA
taaagtggcaggccttggca

SEQ ID NO: 10617 - RNA, 20 nt, synthetic construct
  misc_feature 1..20: note = C9Orf72 TTCN PAM targeting sequence
  source 1..20: mol_type = other RNA
agtattctgactccaggtta

SEQ ID NO: 10618 - RNA, 20 nt, synthetic construct
  misc_feature 1..20: note = C9Orf72 TTCN PAM targeting sequence
  source 1..20: mol_type = other RNA
gactccaggttattaatatc

SEQ ID NO: 10619 - RNA, 20 nt, synthetic construct
  misc_feature 1..20: note = C9Orf72 TTCN PAM targeting sequence
  source 1..20: mol_type = other RNA
gtgatattcacagattatgt

SEQ ID NO: 10620 - RNA, 20 nt, synthetic construct
  misc_feature 1..20: note = C9Orf72 TTCN PAM targeting sequence
  source 1..20: mol_type = other RNA
cagattatgttaaaagtttc

SEQ ID NO: 10621 - RNA, 20 nt, synthetic construct
  misc_feature 1..20: note = C9Orf72 TTCN PAM targeting sequence
  source 1..20: mol_type = other RNA
caaagtctgagaaaaatcat

SEQ ID NO: 10622 - RNA, 20 nt, synthetic construct
  misc_feature 1..20: note = C9Orf72 TTCN PAM targeting sequence
  source 1..20: mol_type = other RNA
cagactttgggaaactttta

SEQ ID NO: 10623 - RNA, 20 nt, synthetic construct
  misc_feature 1..20: note = C9Orf72 TTCN PAM targeting sequence
  source 1..20: mol_type = other RNA
acttttgtacaaaggatcaa

SEQ ID NO: 10624 - RNA, 20 nt, synthetic construct
  misc_feature 1..20: note = C9Orf72 TTCN PAM targeting sequence
  source 1..20: mol_type = other RNA
caacaagggtacgtaatctg

SEQ ID NO: 10625 - RNA, 20 nt, synthetic construct
  misc_feature 1..20: note = C9Orf72 TTCN PAM targeting sequence
  source 1..20: mol_type = other RNA
aacagttgccatgcaccagt

SEQ ID NO: 10626 - RNA, 20 nt, synthetic construct
  misc_feature 1..20: note = C9Orf72 TTCN PAM targeting sequence
  source 1..20: mol_type = other RNA
attcaaacagttgccatgca

SEQ ID NO: 10627 - RNA, 20 nt, synthetic construct
  misc_feature 1..20: note = C9Orf72 TTCN PAM targeting sequence
  source 1..20: mol_type = other RNA
gatgcaatcgagattgttag

SEQ ID NO: 10628 - RNA, 20 nt, synthetic construct
  misc_feature 1..20: note = C9Orf72 TTCN PAM targeting sequence
  source 1..20: mol_type = other RNA
caggaggggtggccctttca

SEQ ID NO: 10629 - RNA, 20 nt, synthetic construct
  misc_feature 1..20: note = C9Orf72 TTCN PAM targeting sequence
  source 1..20: mol_type = other RNA
gaatacaaagcctggtggtg

SEQ ID NO: 10630 - RNA, 20 nt, synthetic construct
  misc_feature 1..20: note = C9Orf72 TTCN PAM targeting sequence
  source 1..20: mol_type = other RNA
gaaacaggagggaggtcctg

SEQ ID NO: 10631 - RNA, 20 nt, synthetic construct
  misc_feature 1..20: note = C9Orf72 TTCN PAM targeting sequence
  source 1..20: mol_type = other RNA
acgcggccagatagacccaa

SEQ ID NO: 10632 - RNA, 20 nt, synthetic construct
  misc_feature 1..20: note = C9Orf72 TTCN PAM targeting sequence
  source 1..20: mol_type = other RNA
ttagacaactgattaccatc

SEQ ID NO: 10633 - RNA, 20 nt, synthetic construct
  misc_feature 1..20: note = C9Orf72 TTCN PAM targeting sequence
  source 1..20: mol_type = other RNA
tttaagcaagtctgtgtcat

SEQ ID NO: 10634 - RNA, 20 nt, synthetic construct
  misc_feature 1..20: note = C9Orf72 TTCN PAM targeting sequence
  source 1..20: mol_type = other RNA
cagctccgagatgacacaga

SEQ ID NO: 10635 - RNA, 20 nt, synthetic construct
  misc_feature 1..20: note = C9Orf72 TTCN PAM targeting sequence
  source 1..20: mol_type = other RNA
gtgggacatgacctggttgc

SEQ ID NO: 10636 - RNA, 20 nt, synthetic construct
  misc_feature 1..20: note = C9Orf72 TTCN PAM targeting sequence
  source 1..20: mol_type = other RNA
agagagtggtgatgacttgc

SEQ ID NO: 10637 - RNA, 20 nt, synthetic construct
  misc_feature 1..20: note = C9Orf72 TTCN PAM targeting sequence
  source 1..20: mol_type = other RNA
gcccaagcttctagagagtg

SEQ ID NO: 10638 - RNA, 20 nt, synthetic construct
  misc_feature 1..20: note = C9Orf72 TTCN PAM targeting sequence
  source 1..20: mol_type = other RNA
tagcgaaccccgacttggtc

SEQ ID NO: 10639 - RNA, 20 nt, synthetic construct
  misc_feature 1..20: note = C9Orf72 TTCN PAM targeting sequence
  source 1..20: mol_type = other RNA
ctaggaacccgagacggtcc

SEQ ID NO: 10640 - RNA, 20 nt, synthetic construct
  misc_feature 1..20: note = C9Orf72 TTCN PAM targeting sequence
  source 1..20: mol_type = other RNA
gcggaccaagtcggggttcg

SEQ ID NO: 10641 - RNA, 20 nt, synthetic construct
  misc_feature 1..20: note = C9Orf72 TTCN PAM targeting sequence
  source 1..20: mol_type = other RNA
cccaggcgaggcctctcagt

SEQ ID NO: 10642 - RNA, 20 nt, synthetic construct
  misc_feature 1..20: note = C9Orf72 TTCN PAM targeting sequence
  source 1..20: mol_type = other RNA
cgagcccgcagcggcagcgc

SEQ ID NO: 10643 - RNA, 20 nt, synthetic construct
  misc_feature 1..20: note = C9Orf72 TTCN PAM targeting sequence
  source 1..20: mol_type = other RNA
cggggacccgctgggagcgc

SEQ ID NO: 10644 - RNA, 20 nt, synthetic construct
  misc_feature 1..20: note = C9Orf72 TTCN PAM targeting sequence
  source 1..20: mol_type = other RNA
cgccctcagtacccgagctg

SEQ ID NO: 10645 - RNA, 20 nt, synthetic construct
  misc_feature 1..20: note = C9Orf72 TTCN PAM targeting sequence
  source 1..20: mol_type = other RNA
ttgctttcccgccctcagta

SEQ ID NO: 10646 - RNA, 20 nt, synthetic construct
  misc_feature 1..20: note = C9Orf72 TTCN PAM targeting sequence
  source 1..20: mol_type = other RNA
cggcggcggcggcggcggcg

SEQ ID NO: 10647 - RNA, 20 nt, synthetic construct
  misc_feature 1..20: note = C9Orf72 TTCN PAM targeting sequence
  source 1..20: mol_type = other RNA
accagtcgctagaggcgaaa

SEQ ID NO: 10648 - RNA, 20 nt, synthetic construct
  misc_feature 1..20: note = C9Orf72 TTCN PAM targeting sequence
  source 1..20: mol_type = other RNA
cctctagcgactggtggaat

SEQ ID NO: 10649 - RNA, 20 nt, synthetic construct
  misc_feature 1..20: note = C9Orf72 TTCN PAM targeting sequence
  source 1..20: mol_type = other RNA
gtcagagaaatgagagggaa

SEQ ID NO: 10650 - RNA, 20 nt, synthetic construct
  misc_feature 1..20: note = C9Orf72 TTCN PAM targeting sequence
  source 1..20: mol_type = other RNA
ctgaccgaagctgggtgtcg

SEQ ID NO: 10651 - RNA, 20 nt, synthetic construct
  misc_feature 1..20: note = C9Orf72 TTCN PAM targeting sequence
  source 1..20: mol_type = other RNA
ctctcatttctctgaccgaa

SEQ ID NO: 10652 - RNA, 20 nt, synthetic construct
  misc_feature 1..20: note = C9Orf72 TTCN PAM targeting sequence
  source 1..20: mol_type = other RNA
acccgcgcctcttcccggca

SEQ ID NO: 10653 - RNA, 20 nt, synthetic construct
  misc_feature 1..20: note = C9Orf72 TTCN PAM targeting sequence
  source 1..20: mol_type = other RNA
cggcagccgaaccccaaaca

SEQ ID NO: 10654 - RNA, 20 nt, synthetic construct
  misc_feature 1..20: note = C9Orf72 TTCN PAM targeting sequence
  source 1..20: mol_type = other RNA
gctgccgggaagaggcgcgg

SEQ ID NO: 10655 - RNA, 20 nt, synthetic construct
  misc_feature 1..20: note = C9Orf72 TTCN PAM targeting sequence
  source 1..20: mol_type = other RNA
agagcttgctacaggctgcg

SEQ ID NO: 10656 - RNA, 20 nt, synthetic construct
  misc_feature 1..20: note = C9Orf72 TTCN PAM targeting sequence
  source 1..20: mol_type = other RNA
ctccttgttttcttctggtt

SEQ ID NO: 10657 - RNA, 20 nt, synthetic construct
  misc_feature 1..20: note = C9Orf72 TTCN PAM targeting sequence
  source 1..20: mol_type = other RNA
tctggttaatctttatcagg

SEQ ID NO: 10658 - RNA, 20 nt, synthetic construct
  misc_feature 1..20: note = C9Orf72 TTCN PAM targeting sequence
  source 1..20: mol_type = other RNA
ggttaatctttatcaggtct

SEQ ID NO: 10659 - RNA, 20 nt, synthetic construct
  misc_feature 1..20: note = C9Orf72 TTCN PAM targeting sequence
  source 1..20: mol_type = other RNA
tgttcaccctcagcgagtac

SEQ ID NO: 10660 - RNA, 20 nt, synthetic construct
  misc_feature 1..20: note = C9Orf72 TTCN PAM targeting sequence
  source 1..20: mol_type = other RNA
ccctcagcgagtactgtgag

SEQ ID NO: 10661 - RNA, 20 nt, synthetic construct
  misc_feature 1..20: note = C9Orf72 TTCN PAM targeting sequence
  source 1..20: mol_type = other RNA
caccctctctccccactact

SEQ ID NO: 10662 - RNA, 20 nt, synthetic construct
  misc_feature 1..20: note = C9Orf72 TTCN PAM targeting sequence
  source 1..20: mol_type = other RNA
cttttgggggcggggtctag

SEQ ID NO: 10663 - RNA, 20 nt, synthetic construct
  misc_feature 1..20: note = C9Orf72 TTCN PAM targeting sequence
  source 1..20: mol_type = other RNA
gcccacgtaaaagatgacgc

SEQ ID NO: 10664 - RNA, 20 nt, synthetic construct
  misc_feature 1..20: note = C9Orf72 TTCN PAM targeting sequence
  source 1..20: mol_type = other RNA
tagcgggacaccgtaggtta

SEQ ID NO: 10665 - RNA, 20 nt, synthetic construct
  misc_feature 1..20: note = C9Orf72 TTCN PAM targeting sequence
  source 1..20: mol_type = other RNA
atgtgcgatgacgttttctc

SEQ ID NO: 10666 - RNA, 20 nt, synthetic construct
  misc_feature 1..20: note = C9Orf72 TTCN PAM targeting sequence
  source 1..20: mol_type = other RNA
cacgaggctagcgaaatggg

SEQ ID NO: 10667 - RNA, 20 nt, synthetic construct
  misc_feature 1..20: note = C9Orf72 TTCN PAM targeting sequence
  source 1..20: mol_type = other RNA
ctagcctcgtgagaaaacgt

SEQ ID NO: 10668 - RNA, 20 nt, synthetic construct
  misc_feature 1..20: note = C9Orf72 TTCN PAM targeting sequence
  source 1..20: mol_type = other RNA
tttatcttaagacccgctct

SEQ ID NO: 10669 - RNA, 20 nt, synthetic construct
  misc_feature 1..20: note = C9Orf72 TTCN PAM targeting sequence
  source 1..20: mol_type = other RNA
cacacgctattgcgccaacg

SEQ ID NO: 10670 - RNA, 20 nt, synthetic construct
  misc_feature 1..20: note = C9Orf72 TTCN PAM targeting sequence
  source 1..20: mol_type = other RNA
ccagatccagcagcctcccc

SEQ ID NO: 10671 - RNA, 20 nt, synthetic construct
  misc_feature 1..20: note = C9Orf72 TTCN PAM targeting sequence
  source 1..20: mol_type = other RNA
ctttctccagatccagcagc

SEQ ID NO: 10672 - RNA, 20 nt, synthetic construct
  misc_feature 1..20: note = C9Orf72 TTCN PAM targeting sequence
  source 1..20: mol_type = other RNA
tggttttgaatggttttgtt

SEQ ID NO: 10673 - RNA, 20 nt, synthetic construct
  misc_feature 1..20: note = C9Orf72 TTCN PAM targeting sequence
  source 1..20: mol_type = other RNA
aaaccacgaaatcgtcttca

SEQ ID NO: 10674 - RNA, 20 nt, synthetic construct
  misc_feature 1..20: note = C9Orf72 TTCN PAM targeting sequence
  source 1..20: mol_type = other RNA
tccaccaattatgtgttgag

SEQ ID NO: 10675 - RNA, 20 nt, synthetic construct
  misc_feature 1..20: note = C9Orf72 TTCN PAM targeting sequence
  source 1..20: mol_type = other RNA
aaactccactgcaaaccctg

SEQ ID NO: 10676 - RNA, 20 nt, synthetic construct
  misc_feature 1..20: note = C9Orf72 TTCN PAM targeting sequence
  source 1..20: mol_type = other RNA
cgcccgcagtgccggagctg

SEQ ID NO: 10677 - RNA, 20 nt, synthetic construct
  misc_feature 1..20: note = C9Orf72 TTCN PAM targeting sequence
  source 1..20: mol_type = other RNA
tacatgtaaaggcaaaattg

SEQ ID NO: 10678 - RNA, 20 nt, synthetic construct
  misc_feature 1..20: note = C9Orf72 TTCN PAM targeting sequence
  source 1..20: mol_type = other RNA
ctcaagcatgattttcacac

SEQ ID NO: 10679 - RNA, 20 nt, synthetic construct
  misc_feature 1..20: note = C9Orf72 TTCN PAM targeting sequence
  source 1..20: mol_type = other RNA
cactggggaatgtcattttt

SEQ ID NO: 10680 - RNA, 20 nt, synthetic construct
  misc_feature 1..20: note = C9Orf72 TTCN PAM targeting sequence
  source 1..20: mol_type = other RNA
ccagtgtgaaaatcatgctt

SEQ ID NO: 10681 - RNA, 20 nt, synthetic construct
  misc_feature 1..20: note = C9Orf72 TTCN PAM targeting sequence
  source 1..20: mol_type = other RNA
aaagttaaaaaaaaacaact

SEQ ID NO: 10682 - RNA, 20 nt, synthetic construct
  misc_feature 1..20: note = C9Orf72 TTCN PAM targeting sequence
  source 1..20: mol_type = other RNA
gtttgatgtgtaaaaaacac

SEQ ID NO: 10683 - RNA, 20 nt, synthetic construct
  misc_feature 1..20: note = C9Orf72 TTCN PAM targeting sequence
  source 1..20: mol_type = other RNA
aaaatctttgtgttttttac

SEQ ID NO: 10684 - RNA, 20 nt, synthetic construct
  misc_feature 1..20: note = C9Orf72 TTCN PAM targeting sequence
  source 1..20: mol_type = other RNA
acttactacagatgagtagc

SEQ ID NO: 10685 - RNA, 20 nt, synthetic construct
  misc_feature 1..20: note = C9Orf72 TTCN PAM targeting sequence
  source 1..20: mol_type = other RNA
tcactaaaaatcacacagaa

SEQ ID NO: 10686 - RNA, 20 nt, synthetic construct
  misc_feature 1..20: note = C9Orf72 TTCN PAM targeting sequence
  source 1..20: mol_type = other RNA
gtgtgatttttagtgatgaa

SEQ ID NO: 10687 - RNA, 20 nt, synthetic construct
  misc_feature 1..20: note = C9Orf72 TTCN PAM targeting sequence
  source 1..20: mol_type = other RNA
ccgaggaagaaagggaggaa

SEQ ID NO: 10688 - RNA, 20 nt, synthetic construct
  misc_feature 1..20: note = C9Orf72 TTCN PAM targeting sequence
  source 1..20: mol_type = other RNA
tcggtgaatgattaaaacgt

SEQ ID NO: 10689 - RNA, 20 nt, synthetic construct
  misc_feature 1..20: note = C9Orf72 TTCN PAM targeting sequence
  source 1..20: mol_type = other RNA
tcctcggtgaatgattaaaa

SEQ ID NO: 10690 - RNA, 20 nt, synthetic construct
  misc_feature 1..20: note = C9Orf72 TTCN PAM targeting sequence
  source 1..20: mol_type = other RNA
tccctttcttcctcggtgaa

SEQ ID NO: 10691 - RNA, 20 nt, synthetic construct
  misc_feature 1..20: note = C9Orf72 TTCN PAM targeting sequence
  source 1..20: mol_type = other RNA
gcagaaacagacccttttcc

SEQ ID NO: 10692 - RNA, 20 nt, synthetic construct
  misc_feature 1..20: note = C9Orf72 TTCN PAM targeting sequence
  source 1..20: mol_type = other RNA
gcagaaggtgtagacgttga

SEQ ID NO: 10693 - RNA, 20 nt, synthetic construct
  misc_feature 1..20: note = C9Orf72 TTCN PAM targeting sequence
  source 1..20: mol_type = other RNA
tactgttctatgctttgtga

SEQ ID NO: 10694 - RNA, 20 nt, synthetic construct
  misc_feature 1..20: note = C9Orf72 TTCN PAM targeting sequence
  source 1..20: mol_type = other RNA
atgctttgtgaaagttgatc

SEQ ID NO: 10695 - RNA, 20 nt, synthetic construct
  misc_feature 1..20: note = C9Orf72 TTCN PAM targeting sequence
  source 1..20: mol_type = other RNA
caaagcatagaacagtagga

SEQ ID NO: 10696 - RNA, 20 nt, synthetic construct
  misc_feature 1..20: note = C9Orf72 TTCN PAM targeting sequence
  source 1..20: mol_type = other RNA
ttttatacccaactaaaata

SEQ ID NO: 10697 - RNA, 20 nt, synthetic construct
  misc_feature 1..20: note = C9Orf72 TTCN PAM targeting sequence
  source 1..20: mol_type = other RNA
accccctacccccactattt

SEQ ID NO: 10698 - RNA, 20 nt, synthetic construct
  misc_feature 1..20: note = C9Orf72 TTCN PAM targeting sequence
  source 1..20: mol_type = other RNA
ctccaagtccagctgctgca

SEQ ID NO: 10699 - RNA, 20 nt, synthetic construct
  misc_feature 1..20: note = C9Orf72 TTCN PAM targeting sequence
  source 1..20: mol_type = other RNA
actggtgagtgatggtggta

SEQ ID NO: 10700 - RNA, 20 nt, synthetic construct
  misc_feature 1..20: note = C9Orf72 TTCN PAM targeting sequence
  source 1..20: mol_type = other RNA
ttggcactattaaggatctg

SEQ ID NO: 10701 - RNA, 20 nt, synthetic construct
  misc_feature 1..20: note = C9Orf72 TTCN PAM targeting sequence
  source 1..20: mol_type = other RNA
caaagagcactatgtaacat

SEQ ID NO: 10702 - RNA, 20 nt, synthetic construct
  misc_feature 1..20: note = C9Orf72 TTCN PAM targeting sequence
  source 1..20: mol_type = other RNA
cttttttaacaaaacctccc

SEQ ID NO: 10703 - RNA, 20 nt, synthetic construct
  misc_feature 1..20: note = C9Orf72 TTCN PAM targeting sequence
  source 1..20: mol_type = other RNA
ttgttgtgtggatataccga

SEQ ID NO: 10704 - RNA, 20 nt, synthetic construct
  misc_feature 1..20: note = C9Orf72 TTCN PAM targeting sequence
  source 1..20: mol_type = other RNA
gtatatccacacaacaaaga

SEQ ID NO: 10705 - RNA, 20 nt, synthetic construct
  misc_feature 1..20: note = C9Orf72 TTCN PAM targeting sequence
  source 1..20: mol_type = other RNA
ttcttcccaaataaatcact

SEQ ID NO: 10706 - RNA, 20 nt, synthetic construct
  misc_feature 1..20: note = C9Orf72 TTCN PAM targeting sequence
  source 1..20: mol_type = other RNA
tcccaaataaatcacttaat

SEQ ID NO: 10707 - RNA, 20 nt, synthetic construct
  misc_feature 1..20: note = C9Orf72 TTCN PAM targeting sequence
  source 1..20: mol_type = other RNA
caaataaatcacttaattta

SEQ ID NO: 10708 - RNA, 20 nt, synthetic construct
  misc_feature 1..20: note = C9Orf72 TTCN PAM targeting sequence
  source 1..20: mol_type = other RNA
tctctgtatttttattttga

SEQ ID NO: 10709 - RNA, 20 nt, synthetic construct
  misc_feature 1..20: note = C9Orf72 TTCN PAM targeting sequence
  source 1..20: mol_type = other RNA
acactgagttgtacttcact

SEQ ID NO: 10710 - RNA, 20 nt, synthetic construct
  misc_feature 1..20: note = C9Orf72 TTCN PAM targeting sequence
  source 1..20: mol_type = other RNA
cttatacgtggaattaaaaa

SEQ ID NO: 10711 - RNA, 20 nt, synthetic construct
  misc_feature 1..20: note = C9Orf72 TTCN PAM targeting sequence
  source 1..20: mol_type = other RNA
acgtataagtgaagtacaac

SEQ ID NO: 10712 - RNA, 20 nt, synthetic construct
  misc_feature 1..20: note = C9Orf72 TTCN PAM targeting sequence
  source 1..20: mol_type = other RNA
gttgttttttaattccacgt

SEQ ID NO: 10713 - RNA, 20 nt, synthetic construct
  misc_feature 1..20: note = C9Orf72 TTCN PAM targeting sequence
  source 1..20: mol_type = other RNA
ataaattcagttgtttttta

SEQ ID NO: 10714 - RNA, 20 nt, synthetic construct
  misc_feature 1..20: note = C9Orf72 TTCN PAM targeting sequence
  source 1..20: mol_type = other RNA
ccccaagccccccaaccaag

SEQ ID NO: 10715 - RNA, 20 nt, synthetic construct
  misc_feature 1..20: note = C9Orf72 TTCN PAM targeting sequence
  source 1..20: mol_type = other RNA
ttccccccaagccccccaac

SEQ ID NO: 10716 - RNA, 20 nt, synthetic construct
  misc_feature 1..20: note = C9Orf72 TTCN PAM targeting sequence
  source 1..20: mol_type = other RNA
tacactgctataaagaaata

SEQ ID NO: 10717 - RNA, 20 nt, synthetic construct
  misc_feature 1..20: note = C9Orf72 TTCN PAM targeting sequence
  source 1..20: mol_type = other RNA
ttatagcagtgtaagaatgg

SEQ ID NO: 10718 - RNA, 20 nt, synthetic construct
  misc_feature 1..20: note = C9Orf72 TTCN PAM targeting sequence
  source 1..20: mol_type = other RNA
gttatttctttatagcagtg

SEQ ID NO: 10719 - RNA, 20 nt, synthetic construct
  misc_feature 1..20: note = C9Orf72 TTCN PAM targeting sequence
  source 1..20: mol_type = other RNA
ttataaattacccagtttca

SEQ ID NO: 10720 - RNA, 20 nt, synthetic construct
  misc_feature 1..20: note = C9Orf72 TTCN PAM targeting sequence
  source 1..20: mol_type = other RNA
gcaggctgtacaagaagcat

SEQ ID NO: 10721 - RNA, 20 nt, synthetic construct
  misc_feature 1..20: note = C9Orf72 TTCN PAM targeting sequence
  source 1..20: mol_type = other RNA
tgtacagcctgcagaactgt

SEQ ID NO: 10722 - RNA, 20 nt, synthetic construct
  misc_feature 1..20: note = C9Orf72 TTCN PAM targeting sequence
  source 1..20: mol_type = other RNA
gggcaggccatagggaactt

SEQ ID NO: 10723 - RNA, 20 nt, synthetic construct
  misc_feature 1..20: note = C9Orf72 TTCN PAM targeting sequence
  source 1..20: mol_type = other RNA
ctatggcctgcccagaagct

SEQ ID NO: 10724 - RNA, 20 nt, synthetic construct
  misc_feature 1..20: note = C9Orf72 TTCN PAM targeting sequence
  source 1..20: mol_type = other RNA
atcatgattttaagttccct

SEQ ID NO: 10725 - RNA, 20 nt, synthetic construct
  misc_feature 1..20: note = C9Orf72 TTCN PAM targeting sequence
  source 1..20: mol_type = other RNA
catggcaggaactgggggaa

SEQ ID NO: 10726 - RNA, 20 nt, synthetic construct
  misc_feature 1..20: note = C9Orf72 TTCN PAM targeting sequence
  source 1..20: mol_type = other RNA
tgccatgtgaagtctggggt

SEQ ID NO: 10727 - RNA, 20 nt, synthetic construct
  misc_feature 1..20: note = C9Orf72 TTCN PAM targeting sequence
  source 1..20: mol_type = other RNA
cccagttcctgccatgtgaa

SEQ ID NO: 10728 - RNA, 20 nt, synthetic construct
  misc_feature 1..20: note = C9Orf72 TTCN PAM targeting sequence
  source 1..20: mol_type = other RNA
ctcttcccccagttcctgcc

SEQ ID NO: 10729 - RNA, 20 nt, synthetic construct
  misc_feature 1..20: note = C9Orf72 TTCN PAM targeting sequence
  source 1..20: mol_type = other RNA
gacaagatctagttgtttaa

SEQ ID NO: 10730 - RNA, 20 nt, synthetic construct
  misc_feature 1..20: note = C9Orf72 TTCN PAM targeting sequence
  source 1..20: mol_type = other RNA
aatggttttgtacagtcccc

SEQ ID NO: 10731 - RNA, 20 nt, synthetic construct
  misc_feature 1..20: note = C9Orf72 TTCN PAM targeting sequence
  source 1..20: mol_type = other RNA
actgtaatccccagtgttgg

SEQ ID NO: 10732 - RNA, 20 nt, synthetic construct
  misc_feature 1..20: note = C9Orf72 TTCN PAM targeting sequence
  source 1..20: mol_type = other RNA
aactctggcccctcccaaat

SEQ ID NO: 10733 - RNA, 20 nt, synthetic construct
  misc_feature 1..20: note = C9Orf72 TTCN PAM targeting sequence
  source 1..20: mol_type = other RNA
catattgcaaaatactgtcg

SEQ ID NO: 10734 - RNA, 20 nt, synthetic construct
  misc_feature 1..20: note = C9Orf72 TTCN PAM targeting sequence
  source 1..20: mol_type = other RNA
ccaaagtcttaactcgatcc

SEQ ID NO: 10735 - RNA, 20 nt, synthetic construct
  misc_feature 1..20: note = C9Orf72 TTCN PAM targeting sequence
  source 1..20: mol_type = other RNA
ttcaaaagtccaaagtccca

SEQ ID NO: 10736 - RNA, 20 nt, synthetic construct
  misc_feature 1..20: note = C9Orf72 TTCN PAM targeting sequence
  source 1..20: mol_type = other RNA
aaagtccaaagtcccaagtc

SEQ ID NO: 10737 - RNA, 20 nt, synthetic construct
  misc_feature 1..20: note = C9Orf72 TTCN PAM targeting sequence
  source 1..20: mol_type = other RNA
tctcaggtgagacttgggac

SEQ ID NO: 10738 - RNA, 20 nt, synthetic construct
  misc_feature 1..20: note = C9Orf72 TTCN PAM targeting sequence
  source 1..20: mol_type = other RNA
acctatgaacctgtaaaatc

SEQ ID NO: 10739 - RNA, 20 nt, synthetic construct
  misc_feature 1..20: note = C9Orf72 TTCN PAM targeting sequence
  source 1..20: mol_type = other RNA
taggtagaagggactagctt

SEQ ID NO: 10740 - RNA, 20 nt, synthetic construct
  misc_feature 1..20: note = C9Orf72 TTCN PAM targeting sequence
  source 1..20: mol_type = other RNA
aagatacaatgggggtatag

SEQ ID NO: 10741 - RNA, 20 nt, synthetic construct
  misc_feature 1..20: note = C9Orf72 TTCN PAM targeting sequence
  source 1..20: mol_type = other RNA
gaaagggagaaatctgccaa

SEQ ID NO: 10742 - RNA, 20 nt, synthetic construct
  misc_feature 1..20: note = C9Orf72 TTCN PAM targeting sequence
  source 1..20: mol_type = other RNA
gaatggcagtatctgcccaa

SEQ ID NO: 10743 - RNA, 20 nt, synthetic construct
  misc_feature 1..20: note = C9Orf72 TTCN PAM targeting sequence
  source 1..20: mol_type = other RNA
ccctttcggaatggcagtat

SEQ ID NO: 10744 - RNA, 20 nt, synthetic construct
  misc_feature 1..20: note = C9Orf72 TTCN PAM targeting sequence
  source 1..20: mol_type = other RNA
tttggcagatttctcccttt

SEQ ID NO: 10745 - RNA, 20 nt, synthetic construct
  misc_feature 1..20: note = C9Orf72 TTCN PAM targeting sequence
  source 1..20: mol_type = other RNA
gacttgcaatggggccctat

SEQ ID NO: 10746 - RNA, 20 nt, synthetic construct
  misc_feature 1..20: note = C9Orf72 TTCN PAM targeting sequence
  source 1..20: mol_type = other RNA
gagctttaacatttaatgac

SEQ ID NO: 10747 - RNA, 20 nt, synthetic construct
  misc_feature 1..20: note = C9Orf72 TTCN PAM targeting sequence
  source 1..20: mol_type = other RNA
ctgggtgtgagtcaaaggag

SEQ ID NO: 10748 - RNA, 20 nt, synthetic construct
  misc_feature 1..20: note = C9Orf72 TTCN PAM targeting sequence
  source 1..20: mol_type = other RNA
gcccaaggttttgggagccc

SEQ ID NO: 10749 - RNA, 20 nt, synthetic construct
  misc_feature 1..20: note = C9Orf72 TTCN PAM targeting sequence
  source 1..20: mol_type = other RNA
agggttcatctcccacagct

SEQ ID NO: 10750 - RNA, 20 nt, synthetic construct
  misc_feature 1..20: note = C9Orf72 TTCN PAM targeting sequence
  source 1..20: mol_type = other RNA
tctcccacagctgctctcat

SEQ ID NO: 10751 - RNA, 20 nt, synthetic construct
  misc_feature 1..20: note = C9Orf72 TTCN PAM targeting sequence
  source 1..20: mol_type = other RNA
aggctgcagggtgcaagttg

SEQ ID NO: 10752 - RNA, 20 nt, synthetic construct
  misc_feature 1..20: note = C9Orf72 TTCN PAM targeting sequence
  source 1..20: mol_type = other RNA
ggggtctggaggacggtggc

SEQ ID NO: 10753 - RNA, 20 nt, synthetic construct
  misc_feature 1..20: note = C9Orf72 TTCN PAM targeting sequence
  source 1..20: mol_type = other RNA
tctccttgcttccctagtag

SEQ ID NO: 10754 - RNA, 20 nt, synthetic construct
  misc_feature 1..20: note = C9Orf72 TTCN PAM targeting sequence
  source 1..20: mol_type = other RNA
ccttgcttccctagtagatg

SEQ ID NO: 10755 - RNA, 20 nt, synthetic construct
  misc_feature 1..20: note = C9Orf72 TTCN PAM targeting sequence
  source 1..20: mol_type = other RNA
ctagtagatgttctccatga

SEQ ID NO: 10756 - RNA, 20 nt, synthetic construct
  misc_feature 1..20: note = C9Orf72 TTCN PAM targeting sequence
  source 1..20: mol_type = other RNA
ccatgaggattccaccccag

SEQ ID NO: 10757 - RNA, 20 nt, synthetic construct
  misc_feature 1..20: note = C9Orf72 TTCN PAM targeting sequence
  source 1..20: mol_type = other RNA
accccagtaacaggcttctg

SEQ ID NO: 10758 - RNA, 20 nt, synthetic construct
  misc_feature 1..20: note = C9Orf72 TTCN PAM targeting sequence
  source 1..20: mol_type = other RNA
gtctggacatccaggctttt

SEQ ID NO: 10759 - RNA, 20 nt, synthetic construct
  misc_feature 1..20: note = C9Orf72 TTCN PAM targeting sequence
  source 1..20: mol_type = other RNA
tacatcctctaaaatctagg

SEQ ID NO: 10760 - RNA, 20 nt, synthetic construct
  misc_feature 1..20: note = C9Orf72 TTCN PAM targeting sequence
  source 1..20: mol_type = other RNA
taagcctcaactcttgcatt

SEQ ID NO: 10761 - RNA, 20 nt, synthetic construct
  misc_feature 1..20: note = C9Orf72 TTCN PAM targeting sequence
  source 1..20: mol_type = other RNA
cagcttatggaagccaccaa

SEQ ID NO: 10762 - RNA, 20 nt, synthetic construct
  misc_feature 1..20: note = C9Orf72 TTCN PAM targeting sequence
  source 1..20: mol_type = other RNA
ataagctgtgaagccggcgg

SEQ ID NO: 10763 - RNA, 20 nt, synthetic construct
  misc_feature 1..20: note = C9Orf72 TTCN PAM targeting sequence
  source 1..20: mol_type = other RNA
cagggtgccaggcataagcc

SEQ ID NO: 10764 - RNA, 20 nt, synthetic construct
  misc_feature 1..20: note = C9Orf72 TTCN PAM targeting sequence
  source 1..20: mol_type = other RNA
ggctgctgcttcacagggtg

SEQ ID NO: 10765 - RNA, 20 nt, synthetic construct
  misc_feature 1..20: note = C9Orf72 TTCN PAM targeting sequence
  source 1..20: mol_type = other RNA
tactggtgaaagttatctga

SEQ ID NO: 10766 - RNA, 20 nt, synthetic construct
  misc_feature 1..20: note = C9Orf72 TTCN PAM targeting sequence
  source 1..20: mol_type = other RNA
ccagtaagaatacagttcag

SEQ ID NO: 10767 - RNA, 20 nt, synthetic construct
  misc_feature 1..20: note = C9Orf72 TTCN PAM targeting sequence
  source 1..20: mol_type = other RNA
tgcctcctcagaagaaagaa

SEQ ID NO: 10768 - RNA, 20 nt, synthetic construct
  misc_feature 1..20: note = C9Orf72 TTCN PAM targeting sequence
  source 1..20: mol_type = other RNA
gaggaggcaagaattgaggt

SEQ ID NO: 10769 - RNA, 20 nt, synthetic construct
  misc_feature 1..20: note = C9Orf72 TTCN PAM targeting sequence
  source 1..20: mol_type = other RNA
tctgaggaggcaagaattga

SEQ ID NO: 10770 - RNA, 20 nt, synthetic construct
  misc_feature 1..20: note = C9Orf72 TTCN PAM targeting sequence
  source 1..20: mol_type = other RNA
ttcttctgaggaggcaagaa

SEQ ID NO: 10771 - RNA, 20 nt, synthetic construct
  misc_feature 1..20: note = C9Orf72 TTCN PAM targeting sequence
  source 1..20: mol_type = other RNA
gccttatgcctcttggtcaa

SEQ ID NO: 10772 - RNA, 20 nt, synthetic construct
  misc_feature 1..20: note = C9Orf72 TTCN PAM targeting sequence
  source 1..20: mol_type = other RNA
gagcaggagtaaaagtttat

SEQ ID NO: 10773 - RNA, 20 nt, synthetic construct
  misc_feature 1..20: note = C9Orf72 TTCN PAM targeting sequence
  source 1..20: mol_type = other RNA
aaagctttttaataaacttt

SEQ ID NO: 10774 - RNA, 20 nt, synthetic construct
  misc_feature 1..20: note = C9Orf72 TTCN PAM targeting sequence
  source 1..20: mol_type = other RNA
tgttctaaagctttttaata

SEQ ID NO: 10775 - RNA, 20 nt, synthetic construct
  misc_feature 1..20: note = C9Orf72 TTCN PAM targeting sequence
  source 1..20: mol_type = other RNA
ttcctgttctaaagcttttt

SEQ ID NO: 10776 - RNA, 20 nt, synthetic construct
  misc_feature 1..20: note = C9Orf72 TTCN PAM targeting sequence
  source 1..20: mol_type = other RNA
tttcattcctgttctaaagc

SEQ ID NO: 10777 - RNA, 20 nt, synthetic construct
  misc_feature 1..20: note = C9Orf72 TTCN PAM targeting sequence
  source 1..20: mol_type = other RNA
aaatgtactttcctttcatt

SEQ ID NO: 10778 - RNA, 20 nt, synthetic construct
  misc_feature 1..20: note = C9Orf72 TTCN PAM targeting sequence
  source 1..20: mol_type = other RNA
aggtcaaacagggcacttga

SEQ ID NO: 10779 - RNA, 20 nt, synthetic construct
  misc_feature 1..20: note = C9Orf72 TTCN PAM targeting sequence
  source 1..20: mol_type = other RNA
gacatcttgtgcccctttcc

SEQ ID NO: 10780 - RNA, 20 nt, synthetic construct
  misc_feature 1..20: note = C9Orf72 TTCN PAM targeting sequence
  source 1..20: mol_type = other RNA
cttggtccttccctaagggt

SEQ ID NO: 10781 - RNA, 20 nt, synthetic construct
  misc_feature 1..20: note = C9Orf72 TTCN PAM targeting sequence
  source 1..20: mol_type = other RNA
ctaagggtgagcttgccgca

SEQ ID NO: 10782 - RNA, 20 nt, synthetic construct
  misc_feature 1..20: note = C9Orf72 TTCN PAM targeting sequence
  source 1..20: mol_type = other RNA
aagtgcaagcagggcaccat

SEQ ID NO: 10783 - RNA, 20 nt, synthetic construct
  misc_feature 1..20: note = C9Orf72 TTCN PAM targeting sequence
  source 1..20: mol_type = other RNA
tcccttttccggtggaatgc

SEQ ID NO: 10784 - RNA, 20 nt, synthetic construct
  misc_feature 1..20: note = C9Orf72 TTCN PAM targeting sequence
  source 1..20: mol_type = other RNA
cttttccggtggaatgcccc

SEQ ID NO: 10785 - RNA, 20 nt, synthetic construct
  misc_feature 1..20: note = C9Orf72 TTCN PAM targeting sequence
  source 1..20: mol_type = other RNA
ggtggaatgcccccaaaggt

SEQ ID NO: 10786 - RNA, 20 nt, synthetic construct
  misc_feature 1..20: note = C9Orf72 TTCN PAM targeting sequence
  source 1..20: mol_type = other RNA
accggaaaagggaagaaagc

SEQ ID NO: 10787 - RNA, 20 nt, synthetic construct
  misc_feature 1..20: note = C9Orf72 TTCN PAM targeting sequence
  source 1..20: mol_type = other RNA
ccattttgcctcttaatgtg

SEQ ID NO: 10788 - RNA, 20 nt, synthetic construct
  misc_feature 1..20: note = C9Orf72 TTCN PAM targeting sequence
  source 1..20: mol_type = other RNA
tgagatcttattggaagcgc

SEQ ID NO: 10789 - RNA, 20 nt, synthetic construct
  misc_feature 1..20: note = C9Orf72 TTCN PAM targeting sequence
  source 1..20: mol_type = other RNA
aataagatctcaggaactga

SEQ ID NO: 10790 - RNA, 20 nt, synthetic construct
  misc_feature 1..20: note = C9Orf72 TTCN PAM targeting sequence
  source 1..20: mol_type = other RNA
ggtgtttctatctattgaga

SEQ ID NO: 10791 - RNA, 20 nt, synthetic construct
  misc_feature 1..20: note = C9Orf72 TTCN PAM targeting sequence
  source 1..20: mol_type = other RNA
atctattgagaagttgcctc

SEQ ID NO: 10792 - RNA, 20 nt, synthetic construct
  misc_feature 1..20: note = C9Orf72 TTCN PAM targeting sequence
  source 1..20: mol_type = other RNA
caatagatagaaacacctga

SEQ ID NO: 10793 - RNA, 20 nt, synthetic construct
  misc_feature 1..20: note = C9Orf72 TTCN PAM targeting sequence
  source 1..20: mol_type = other RNA
tggtgggtggtggggacttc

SEQ ID NO: 10794 - RNA, 20 nt, synthetic construct
  misc_feature 1..20: note = C9Orf72 TTCN PAM targeting sequence
  source 1..20: mol_type = other RNA
ctcttaccccactcatgcct

SEQ ID NO: 10795 - RNA, 20 nt, synthetic construct
  misc_feature 1..20: note = C9Orf72 TTCN PAM targeting sequence
  source 1..20: mol_type = other RNA
gggagcagagtcccaaggct

SEQ ID NO: 10796 - RNA, 20 nt, synthetic construct
  misc_feature 1..20: note = C9Orf72 TTCN PAM targeting sequence
  source 1..20: mol_type = other RNA
tgggccaggcctagggcccc

SEQ ID NO: 10797 - RNA, 20 nt, synthetic construct
  misc_feature 1..20: note = C9Orf72 TTCN PAM targeting sequence
  source 1..20: mol_type = other RNA
gtcctcctaggcctcggggc

SEQ ID NO: 10798 - RNA, 20 nt, synthetic construct
  misc_feature 1..20: note = C9Orf72 TTCN PAM targeting sequence
  source 1..20: mol_type = other RNA
tggtggtccctctcatcaca

SEQ ID NO: 10799 - RNA, 20 nt, synthetic construct
  misc_feature 1..20: note = C9Orf72 TTCN PAM targeting sequence
  source 1..20: mol_type = other RNA
taataggcattttaggcttt

SEQ ID NO: 10800 - RNA, 20 nt, synthetic construct
  misc_feature 1..20: note = C9Orf72 TTCN PAM targeting sequence
  source 1..20: mol_type = other RNA
accattgtggaagtcagtgt

SEQ ID NO: 10801 - RNA, 20 nt, synthetic construct
  misc_feature 1..20: note = C9Orf72 TTCN PAM targeting sequence
  source 1..20: mol_type = other RNA
acaatggttgaactagttta

SEQ ID NO: 10802 - RNA, 20 nt, synthetic construct
  misc_feature 1..20: note = C9Orf72 TTCN PAM targeting sequence
  source 1..20: mol_type = other RNA
tcagggatctagaactagaa

SEQ ID NO: 10803 - RNA, 20 nt, synthetic construct
  misc_feature 1..20: note = C9Orf72 TTCN PAM targeting sequence
  source 1..20: mol_type = other RNA
agatccctgaggaatcgcca

SEQ ID NO: 10804 - RNA, 20 nt, synthetic construct
  misc_feature 1..20: note = C9Orf72 TTCN PAM targeting sequence
  source 1..20: mol_type = other RNA
agttctagatccctgaggaa

SEQ ID NO: 10805 - RNA, 20 nt, synthetic construct
  misc_feature 1..20: note = C9Orf72 TTCN PAM targeting sequence
  source 1..20: mol_type = other RNA
caatagcaaagacttggaac

SEQ ID NO: 10806 - RNA, 20 nt, synthetic construct
  misc_feature 1..20: note = C9Orf72 TTCN PAM targeting sequence
  source 1..20: mol_type = other RNA
aagtctttgctattgtgaat

SEQ ID NO: 10807 - RNA, 20 nt, synthetic construct
  misc_feature 1..20: note = C9Orf72 TTCN PAM targeting sequence
  source 1..20: mol_type = other RNA
taatccagtctatcactgtt

SEQ ID NO: 10808 - RNA, 20 nt, synthetic construct
  misc_feature 1..20: note = C9Orf72 TTCN PAM targeting sequence
  source 1..20: mol_type = other RNA
atggtgtatatgtgccacat

SEQ ID NO: 10809 - RNA, 20 nt, synthetic construct
  misc_feature 1..20: note = C9Orf72 TTCN PAM targeting sequence
  source 1..20: mol_type = other RNA
tgtcctttgtagggacatgg

SEQ ID NO: 10810 - RNA, 20 nt, synthetic construct
  misc_feature 1..20: note = C9Orf72 TTCN PAM targeting sequence
  source 1..20: mol_type = other RNA
tccatgtccctacaaaggac

SEQ ID NO: 10811 - RNA, 20 nt, synthetic construct
  misc_feature 1..20: note = C9Orf72 TTCN PAM targeting sequence
  source 1..20: mol_type = other RNA
aatttcatccatgtccctac

SEQ ID NO: 10812 - RNA, 20 nt, synthetic construct
  misc_feature 1..20: note = C9Orf72 TTCN PAM targeting sequence
  source 1..20: mol_type = other RNA
cagtaaactattgcaaggtc

SEQ ID NO: 10813 - RNA, 20 nt, synthetic construct
  misc_feature 1..20: note = C9Orf72 TTCN PAM targeting sequence
  source 1..20: mol_type = other RNA
cactcataggtgggaattga

SEQ ID NO: 10814 - RNA, 20 nt, synthetic construct
  misc_feature 1..20: note = C9Orf72 TTCN PAM targeting sequence
  source 1..20: mol_type = other RNA
cacctatgagtgagaacatg

SEQ ID NO: 10815 - RNA, 20 nt, synthetic construct
  misc_feature 1..20: note = C9Orf72 TTCN PAM targeting sequence
  source 1..20: mol_type = other RNA
attcccacctatgagtgaga

SEQ ID NO: 10816 - RNA, 20 nt, synthetic construct
  misc_feature 1..20: note = C9Orf72 TTCN PAM targeting sequence
  source 1..20: mol_type = other RNA
cattgttcaattcccaccta

SEQ ID NO: 10817 - RNA, 20 nt, synthetic construct
  misc_feature 1..20: note = C9Orf72 TTCN PAM targeting sequence
  source 1..20: mol_type = other RNA
tgtgtccatgtgttctcatt

SEQ ID NO: 10818 - RNA, 20 nt, synthetic construct
  misc_feature 1..20: note = C9Orf72 TTCN PAM targeting sequence
  source 1..20: mol_type = other RNA
ccttcctgtgtccatgtgtt

SEQ ID NO: 10819 - RNA, 20 nt, synthetic construct
  misc_feature 1..20: note = C9Orf72 TTCN PAM targeting sequence
  source 1..20: mol_type = other RNA
ccccattgttttggttatca

SEQ ID NO: 10820 - RNA, 20 nt, synthetic construct
  misc_feature 1..20: note = C9Orf72 TTCN PAM targeting sequence
  source 1..20: mol_type = other RNA
ttttagttatgcaaatttat

SEQ ID NO: 10821 - RNA, 20 nt, synthetic construct
  misc_feature 1..20: note = C9Orf72 TTCN PAM targeting sequence
  source 1..20: mol_type = other RNA
tctcctgagaacgagctttt

SEQ ID NO: 10822 - RNA, 20 nt, synthetic construct
  misc_feature 1..20: note = C9Orf72 TTCN PAM targeting sequence
  source 1..20: mol_type = other RNA
caggagaggaagtcaagcag

SEQ ID NO: 10823 - RNA, 20 nt, synthetic construct
  misc_feature 1..20: note = C9Orf72 TTCN PAM targeting sequence
  source 1..20: mol_type = other RNA
ttactaccacatggccaggc

SEQ ID NO: 10824 - RNA, 20 nt, synthetic construct
  misc_feature 1..20: note = C9Orf72 TTCN PAM targeting sequence
  source 1..20: mol_type = other RNA
cttttaagtgtaagttccaa

SEQ ID NO: 10825 - RNA, 20 nt, synthetic construct
  misc_feature 1..20: note = C9Orf72 TTCN PAM targeting sequence
  source 1..20: mol_type = other RNA
aatttcaggtcatttctgtg

SEQ ID NO: 10826 - RNA, 20 nt, synthetic construct
  misc_feature 1..20: note = C9Orf72 TTCN PAM targeting sequence
  source 1..20: mol_type = other RNA
ggtcatttctgtgctcatgc

SEQ ID NO: 10827 - RNA, 20 nt, synthetic construct
  misc_feature 1..20: note = C9Orf72 TTCN PAM targeting sequence
  source 1..20: mol_type = other RNA
gtgctcatgcctatgagcat

SEQ ID NO: 10828 - RNA, 20 nt, synthetic construct
  misc_feature 1..20: note = C9Orf72 TTCN PAM targeting sequence
  source 1..20: mol_type = other RNA
aatagcctatgctcataggc

SEQ ID NO: 10829 - RNA, 20 nt, synthetic construct
  misc_feature 1..20: note = C9Orf72 TTCN PAM targeting sequence
  source 1..20: mol_type = other RNA
tgaacactctgctgcttaga

SEQ ID NO: 10830 - RNA, 20 nt, synthetic construct
  misc_feature 1..20: note = C9Orf72 TTCN PAM targeting sequence
  source 1..20: mol_type = other RNA
agaagtaacctagctgcttc

SEQ ID NO: 10831 - RNA, 20 nt, synthetic construct
  misc_feature 1..20: note = C9Orf72 TTCN PAM targeting sequence
  source 1..20: mol_type = other RNA
aagcagcagagtgttcaaga

SEQ ID NO: 10832 - RNA, 20 nt, synthetic construct
  misc_feature 1..20: note = C9Orf72 TTCN PAM targeting sequence
  source 1..20: mol_type = other RNA
tctgccagataccctaaatc

SEQ ID NO: 10833 - RNA, 20 nt, synthetic construct
  misc_feature 1..20: note = C9Orf72 TTCN PAM targeting sequence
  source 1..20: mol_type = other RNA
gccagataccctaaatcatc

SEQ ID NO: 10834 - RNA, 20 nt, synthetic construct
  misc_feature 1..20: note = C9Orf72 TTCN PAM targeting sequence
  source 1..20: mol_type = other RNA
taagtctaagatttcacaga

SEQ ID NO: 10835 - RNA, 20 nt, synthetic construct
  misc_feature 1..20: note = C9Orf72 TTCN PAM targeting sequence
  source 1..20: mol_type = other RNA
cagatccctagaacagagga

SEQ ID NO: 10836 - RNA, 20 nt, synthetic construct
  misc_feature 1..20: note = C9Orf72 TTCN PAM targeting sequence
  source 1..20: mol_type = other RNA
agggatctgtgaaatcttag

SEQ ID NO: 10837 - RNA, 20 nt, synthetic construct
  misc_feature 1..20: note = C9Orf72 TTCN PAM targeting sequence
  source 1..20: mol_type = other RNA
tctgttctagggatctgtga

SEQ ID NO: 10838 - RNA, 20 nt, synthetic construct
  misc_feature 1..20: note = C9Orf72 TTCN PAM targeting sequence
  source 1..20: mol_type = other RNA
caataaatttctcatttcca

SEQ ID NO: 10839 - RNA, 20 nt, synthetic construct
  misc_feature 1..20: note = C9Orf72 TTCN PAM targeting sequence
  source 1..20: mol_type = other RNA
catttccatctgagacctcc

SEQ ID NO: 10840 - RNA, 20 nt, synthetic construct
  misc_feature 1..20: note = C9Orf72 TTCN PAM targeting sequence
  source 1..20: mol_type = other RNA
atctgagacctcctcagcct

SEQ ID NO: 10841 - RNA, 20 nt, synthetic construct
  misc_feature 1..20: note = C9Orf72 TTCN PAM targeting sequence
  source 1..20: mol_type = other RNA
ctgtctatatcactatcagt

SEQ ID NO: 10842 - RNA, 20 nt, synthetic construct
  misc_feature 1..20: note = C9Orf72 TTCN PAM targeting sequence
  source 1..20: mol_type = other RNA
tagcgagttccaaactttct

SEQ ID NO: 10843 - RNA, 20 nt, synthetic construct
  misc_feature 1..20: note = C9Orf72 TTCN PAM targeting sequence
  source 1..20: mol_type = other RNA
aaactttctctcatctttct

SEQ ID NO: 10844 - RNA, 20 nt, synthetic construct
  misc_feature 1..20: note = C9Orf72 TTCN PAM targeting sequence
  source 1..20: mol_type = other RNA
ctcatctttctgtcttcttc

SEQ ID NO: 10845 - RNA, 20 nt, synthetic construct
  misc_feature 1..20: note = C9Orf72 TTCN PAM targeting sequence
  source 1..20: mol_type = other RNA
gtcttcttctgagccctcta

SEQ ID NO: 10846 - RNA, 20 nt, synthetic construct
  misc_feature 1..20: note = C9Orf72 TTCN PAM targeting sequence
  source 1..20: mol_type = other RNA
tctgagccctctaaaatgtt

SEQ ID NO: 10847 - RNA, 20 nt, synthetic construct
  misc_feature 1..20: note = C9Orf72 TTCN PAM targeting sequence
  source 1..20: mol_type = other RNA
gagccctctaaaatgtttca

SEQ ID NO: 10848 - RNA, 20 nt, synthetic construct
  misc_feature 1..20: note = C9Orf72 TTCN PAM targeting sequence
  source 1..20: mol_type = other RNA
acttctgcctgttagccggt

SEQ ID NO: 10849 - RNA, 20 nt, synthetic construct
  misc_feature 1..20: note = C9Orf72 TTCN PAM targeting sequence
  source 1..20: mol_type = other RNA
gcctgttagccggttccaaa

SEQ ID NO: 10850 - RNA, 20 nt, synthetic construct
  misc_feature 1..20: note = C9Orf72 TTCN PAM targeting sequence
  source 1..20: mol_type = other RNA
aaagtcacttctacattttc

SEQ ID NO: 10851 - RNA, 20 nt, synthetic construct
  misc_feature 1..20: note = C9Orf72 TTCN PAM targeting sequence
  source 1..20: mol_type = other RNA
acattttcaggtatctttat

SEQ ID NO: 10852 - RNA, 20 nt, synthetic construct
  misc_feature 1..20: note = C9Orf72 TTCN PAM targeting sequence
  source 1..20: mol_type = other RNA
ggtatctttatagcaatgcc

SEQ ID NO: 10853 - RNA, 20 nt, synthetic construct
  misc_feature 1..20: note = C9Orf72 TTCN PAM targeting sequence
  source 1..20: mol_type = other RNA
tctcagtaacaattttctgt

SEQ ID NO: 10854 - RNA, 20 nt, synthetic construct
  misc_feature 1..20: note = C9Orf72 TTCN PAM targeting sequence
  source 1..20: mol_type = other RNA
cagtaacaattttctgtatt

SEQ ID NO: 10855 - RNA, 20 nt, synthetic construct
  misc_feature 1..20: note = C9Orf72 TTCN PAM targeting sequence
  source 1..20: mol_type = other RNA
gtattagtccattcttgcat

SEQ ID NO: 10856 - RNA, 20 nt, synthetic construct
  misc_feature 1..20: note = C9Orf72 TTCN PAM targeting sequence
  source 1..20: mol_type = other RNA
tgcattgctataaagaaata

SEQ ID NO: 10857 - RNA, 20 nt, synthetic construct
  misc_feature 1..20: note = C9Orf72 TTCN PAM targeting sequence
  source 1..20: mol_type = other RNA
ttatagcaatgcaagaatgg

SEQ ID NO: 10858 - RNA, 20 nt, synthetic construct
  misc_feature 1..20: note = C9Orf72 TTCN PAM targeting sequence
  source 1..20: mol_type = other RNA
ttgtaaattacccagtctca

SEQ ID NO: 10859 - RNA, 20 nt, synthetic construct
  misc_feature 1..20: note = C9Orf72 TTCN PAM targeting sequence
  source 1..20: mol_type = other RNA
gcaggctgtataggaagcat

SEQ ID NO: 10860 - RNA, 20 nt, synthetic construct
  misc_feature 1..20: note = C9Orf72 TTCN PAM targeting sequence
  source 1..20: mol_type = other RNA
tatacagcctgcagaaccat

SEQ ID NO: 10861 - RNA, 20 nt, synthetic construct
  misc_feature 1..20: note = C9Orf72 TTCN PAM targeting sequence
  source 1..20: mol_type = other RNA
ggggatgcctcagagaactt

SEQ ID NO: 10862 - RNA, 20 nt, synthetic construct
  misc_feature 1..20: note = C9Orf72 TTCN PAM targeting sequence
  source 1..20: mol_type = other RNA
ctgaggcatccccagaagct

SEQ ID NO: 10863 - RNA, 20 nt, synthetic construct
  misc_feature 1..20: note = C9Orf72 TTCN PAM targeting sequence
  source 1..20: mol_type = other RNA
gccatgattgtaagttctct

SEQ ID NO: 10864 - RNA, 20 nt, synthetic construct
  misc_feature 1..20: note = C9Orf72 TTCN PAM targeting sequence
  source 1..20: mol_type = other RNA
catagcgggagcaggaggaa

SEQ ID NO: 10865 - RNA, 20 nt, synthetic construct
  misc_feature 1..20: note = C9Orf72 TTCN PAM targeting sequence
  source 1..20: mol_type = other RNA
tcctgctcccgctatgtgaa

SEQ ID NO: 10866 - RNA, 20 nt, synthetic construct
  misc_feature 1..20: note = C9Orf72 TTCN PAM targeting sequence
  source 1..20: mol_type = other RNA
ctctctctgttcctcctgct

SEQ ID NO: 10867 - RNA, 20 nt, synthetic construct
  misc_feature 1..20: note = C9Orf72 TTCN PAM targeting sequence
  source 1..20: mol_type = other RNA
cacgagatctggttgtttaa

SEQ ID NO: 10868 - RNA, 20 nt, synthetic construct
  misc_feature 1..20: note = C9Orf72 TTCN PAM targeting sequence
  source 1..20: mol_type = other RNA
tggtactgtatagtgagtaa

SEQ ID NO: 10869 - RNA, 20 nt, synthetic construct
  misc_feature 1..20: note = C9Orf72 TTCN PAM targeting sequence
  source 1..20: mol_type = other RNA
gcaccatcctttcttggtac

SEQ ID NO: 10870 - RNA, 20 nt, synthetic construct
  misc_feature 1..20: note = C9Orf72 TTCN PAM targeting sequence
  source 1..20: mol_type = other RNA
aatggttcagcaccatcctt

SEQ ID NO: 10871 - RNA, 20 nt, synthetic construct
  misc_feature 1..20: note = C9Orf72 TTCN PAM targeting sequence
  source 1..20: mol_type = other RNA
gttgcaatccccaacgttgg

SEQ ID NO: 10872 - RNA, 20 nt, synthetic construct
  misc_feature 1..20: note = C9Orf72 TTCN PAM targeting sequence
  source 1..20: mol_type = other RNA
agtatacaatattgatatgg

SEQ ID NO: 10873 - RNA, 20 nt, synthetic construct
  misc_feature 1..20: note = C9Orf72 TTCN PAM targeting sequence
  source 1..20: mol_type = other RNA
cttaccaaatttccagtata

SEQ ID NO: 10874 - RNA, 20 nt, synthetic construct
  misc_feature 1..20: note = C9Orf72 TTCN PAM targeting sequence
  source 1..20: mol_type = other RNA
tagctaccttttatgtatgt

SEQ ID NO: 10875 - RNA, 20 nt, synthetic construct
  misc_feature 1..20: note = C9Orf72 TTCN PAM targeting sequence
  source 1..20: mol_type = other RNA
agctctcagaggtccagtta

SEQ ID NO: 10876 - RNA, 20 nt, synthetic construct
  misc_feature 1..20: note = C9Orf72 TTCN PAM targeting sequence
  source 1..20: mol_type = other RNA
tgcaattctagagctcactg

SEQ ID NO: 10877 - RNA, 20 nt, synthetic construct
  misc_feature 1..20: note = C9Orf72 TTCN PAM targeting sequence
  source 1..20: mol_type = other RNA
agagctcactgagtccagag

SEQ ID NO: 10878 - RNA, 20 nt, synthetic construct
  misc_feature 1..20: note = C9Orf72 TTCN PAM targeting sequence
  source 1..20: mol_type = other RNA
aaactggggatgctagtatt

SEQ ID NO: 10879 - RNA, 20 nt, synthetic construct
  misc_feature 1..20: note = C9Orf72 TTCN PAM targeting sequence
  source 1..20: mol_type = other RNA
agtcttattctaaactgggg

SEQ ID NO: 10880 - RNA, 20 nt, synthetic construct
  misc_feature 1..20: note = C9Orf72 TTCN PAM targeting sequence
  source 1..20: mol_type = other RNA
cctcccaggcacttaatcca

SEQ ID NO: 10881 - RNA, 20 nt, synthetic construct
  misc_feature 1..20: note = C9Orf72 TTCN PAM targeting sequence
  source 1..20: mol_type = other RNA
tacttcaaaatttggcctac

SEQ ID NO: 10882 - RNA, 20 nt, synthetic construct
  misc_feature 1..20: note = C9Orf72 TTCN PAM targeting sequence
  source 1..20: mol_type = other RNA
aaatttggcctacagacaaa

SEQ ID NO: 10883 - RNA, 20 nt, synthetic construct
  misc_feature 1..20: note = C9Orf72 TTCN PAM targeting sequence
  source 1..20: mol_type = other RNA
ttttctcgaataggtttttc

SEQ ID NO: 10884 - RNA, 20 nt, synthetic construct
  misc_feature 1..20: note = C9Orf72 TTCN PAM targeting sequence
  source 1..20: mol_type = other RNA
cgaataggtttttctgtttt

SEQ ID NO: 10885 - RNA, 20 nt, synthetic construct
  misc_feature 1..20: note = C9Orf72 TTCN PAM targeting sequence
  source 1..20: mol_type = other RNA
agaaaaggaaaattatttgt

SEQ ID NO: 10886 - RNA, 20 nt, synthetic construct
  misc_feature 1..20: note = C9Orf72 TTCN PAM targeting sequence
  source 1..20: mol_type = other RNA
gtttttttgtgatatcaacc

SEQ ID NO: 10887 - RNA, 20 nt, synthetic construct
  misc_feature 1..20: note = C9Orf72 TTCN PAM targeting sequence
  source 1..20: mol_type = other RNA
gggttgatatcacaaaaaaa

SEQ ID NO: 10888 - RNA, 20 nt, synthetic construct
  misc_feature 1..20: note = C9Orf72 TTCN PAM targeting sequence
  source 1..20: mol_type = other RNA
taagagagaaataatcaaca

SEQ ID NO: 10889 - RNA, 20 nt, synthetic construct
  misc_feature 1..20: note = C9Orf72 TTCN PAM targeting sequence
  source 1..20: mol_type = other RNA
ctcttaggaaacatagttgt

SEQ ID NO: 10890 - RNA, 20 nt, synthetic construct
  misc_feature 1..20: note = C9Orf72 TTCN PAM targeting sequence
  source 1..20: mol_type = other RNA
acatgatcatgagaaataaa

SEQ ID NO: 10891 - RNA, 20 nt, synthetic construct
  misc_feature 1..20: note = C9Orf72 TTCN PAM targeting sequence
  source 1..20: mol_type = other RNA
catgatcatgtagaatttag

SEQ ID NO: 10892 - RNA, 20 nt, synthetic construct
  misc_feature 1..20: note = C9Orf72 TTCN PAM targeting sequence
  source 1..20: mol_type = other RNA
ccatatattttatttctcat

SEQ ID NO: 10893 - RNA, 20 nt, synthetic construct
  misc_feature 1..20: note = C9Orf72 TTCN PAM targeting sequence
  source 1..20: mol_type = other RNA
agccagtgactgtgtatctt

SEQ ID NO: 10894 - RNA, 20 nt, synthetic construct
  misc_feature 1..20: note = C9Orf72 TTCN PAM targeting sequence
  source 1..20: mol_type = other RNA
ccccacctaatccaacaggt

SEQ ID NO: 10895 - RNA, 20 nt, synthetic construct
  misc_feature 1..20: note = C9Orf72 TTCN PAM targeting sequence
  source 1..20: mol_type = other RNA
ttagattggagcaaaaaaat

SEQ ID NO: 10896 - RNA, 20 nt, synthetic construct
  misc_feature 1..20: note = C9Orf72 TTCN PAM targeting sequence
  source 1..20: mol_type = other RNA
ctcctgatttttttgctcca

SEQ ID NO: 10897 - RNA, 20 nt, synthetic construct
  misc_feature 1..20: note = C9Orf72 TTCN PAM targeting sequence
  source 1..20: mol_type = other RNA
ggcaataaagtattttggac

SEQ ID NO: 10898 - RNA, 20 nt, synthetic construct
  misc_feature 1..20: note = C9Orf72 TTCN PAM targeting sequence
  source 1..20: mol_type = other RNA
agcatatatgcagtcttctg

SEQ ID NO: 10899 - RNA, 20 nt, synthetic construct
  misc_feature 1..20: note = C9Orf72 TTCN PAM targeting sequence
  source 1..20: mol_type = other RNA
gggaaccaaagagaaaatga

SEQ ID NO: 10900 - RNA, 20 nt, synthetic construct
  misc_feature 1..20: note = C9Orf72 TTCN PAM targeting sequence
  source 1..20: mol_type = other RNA
cagaagactgcatatatgct

SEQ ID NO: 10901 - RNA, 20 nt, synthetic construct
  misc_feature 1..20: note = C9Orf72 TTCN PAM targeting sequence
  source 1..20: mol_type = other RNA
ctttggttcccagaagactg

SEQ ID NO: 10902 - RNA, 20 nt, synthetic construct
  misc_feature 1..20: note = C9Orf72 TTCN PAM targeting sequence
  source 1..20: mol_type = other RNA
tattagcagcatgaaagatg

SEQ ID NO: 10903 - RNA, 20 nt, synthetic construct
  misc_feature 1..20: note = C9Orf72 TTCN PAM targeting sequence
  source 1..20: mol_type = other RNA
tgctgctaatatgaatcaca

SEQ ID NO: 10904 - RNA, 20 nt, synthetic construct
  misc_feature 1..20: note = C9Orf72 TTCN PAM targeting sequence
  source 1..20: mol_type = other RNA
tactctgttaactggtttat

SEQ ID NO: 10905 - RNA, 20 nt, synthetic construct
  misc_feature 1..20: note = C9Orf72 TTCN PAM targeting sequence
  source 1..20: mol_type = other RNA
tttagatgctacagttactt

SEQ ID NO: 10906 - RNA, 20 nt, synthetic construct
  misc_feature 1..20: note = C9Orf72 TTCN PAM targeting sequence
  source 1..20: mol_type = other RNA
acagaaatatgtcttcaagt

SEQ ID NO: 10907 - RNA, 20 nt, synthetic construct
  misc_feature 1..20: note = C9Orf72 TTCN PAM targeting sequence
  source 1..20: mol_type = other RNA
gtagaaaaacctattttcat

SEQ ID NO: 10908 - RNA, 20 nt, synthetic construct
  misc_feature 1..20: note = C9Orf72 TTCN PAM targeting sequence
  source 1..20: mol_type = other RNA
agtgagaagcctagtcctcc

SEQ ID NO: 10909 - RNA, 20 nt, synthetic construct
  misc_feature 1..20: note = C9Orf72 TTCN PAM targeting sequence
  source 1..20: mol_type = other RNA
cacttgaagacatatttctg

SEQ ID NO: 10910 - RNA, 20 nt, synthetic construct
  misc_feature 1..20: note = C9Orf72 TTCN PAM targeting sequence
  source 1..20: mol_type = other RNA
accagaatgacacccttaaa

SEQ ID NO: 10911 - RNA, 20 nt, synthetic construct
  misc_feature 1..20: note = C9Orf72 TTCN PAM targeting sequence
  source 1..20: mol_type = other RNA
ggttgaaaatggaggactag

SEQ ID NO: 10912 - RNA, 20 nt, synthetic construct
  misc_feature 1..20: note = C9Orf72 TTCN PAM targeting sequence
  source 1..20: mol_type = other RNA
atataaggtcttttaagggt

SEQ ID NO: 10913 - RNA, 20 nt, synthetic construct
  misc_feature 1..20: note = C9Orf72 TTCN PAM targeting sequence
  source 1..20: mol_type = other RNA
aaaatttctatataaggtct

SEQ ID NO: 10914 - RNA, 20 nt, synthetic construct
  misc_feature 1..20: note = C9Orf72 TTCN PAM targeting sequence
  source 1..20: mol_type = other RNA
catataattaatgcagtcat

SEQ ID NO: 10915 - RNA, 20 nt, synthetic construct
  misc_feature 1..20: note = C9Orf72 TTCN PAM targeting sequence
  source 1..20: mol_type = other RNA
ctagttgtagagtctttttg

SEQ ID NO: 10916 - RNA, 20 nt, synthetic construct
  misc_feature 1..20: note = C9Orf72 TTCN PAM targeting sequence
  source 1..20: mol_type = other RNA
gcttccctagttgtagagtc

SEQ ID NO: 10917 - RNA, 20 nt, synthetic construct
  misc_feature 1..20: note = C9Orf72 TTCN PAM targeting sequence
  source 1..20: mol_type = other RNA
agagcccactctcttaacca

SEQ ID NO: 10918 - RNA, 20 nt, synthetic construct
  misc_feature 1..20: note = C9Orf72 TTCN PAM targeting sequence
  source 1..20: mol_type = other RNA
ctgtgcctcagtttccccag

SEQ ID NO: 10919 - RNA, 20 nt, synthetic construct
  misc_feature 1..20: note = C9Orf72 TTCN PAM targeting sequence
  source 1..20: mol_type = other RNA
ccagctacaaaatggcatgc

SEQ ID NO: 10920 - RNA, 20 nt, synthetic construct
  misc_feature 1..20: note = C9Orf72 TTCN PAM targeting sequence
  source 1..20: mol_type = other RNA
gcatgccattttgtagctgg

SEQ ID NO: 10921 - RNA, 20 nt, synthetic construct
  misc_feature 1..20: note = C9Orf72 TTCN PAM targeting sequence
  source 1..20: mol_type = other RNA
cctaggatcattgtgagggt

SEQ ID NO: 10922 - RNA, 20 nt, synthetic construct
  misc_feature 1..20: note = C9Orf72 TTCN PAM targeting sequence
  source 1..20: mol_type = other RNA
aaatccttagcttgcttgat

SEQ ID NO: 10923 - RNA, 20 nt, synthetic construct
  misc_feature 1..20: note = C9Orf72 TTCN PAM targeting sequence
  source 1..20: mol_type = other RNA
agaagtggttctaatctcaa

SEQ ID NO: 10924 - RNA, 20 nt, synthetic construct
  misc_feature 1..20: note = C9Orf72 TTCN PAM targeting sequence
  source 1..20: mol_type = other RNA
cgaatgtactgttctaaatc

SEQ ID NO: 10925 - RNA, 20 nt, synthetic construct
  misc_feature 1..20: note = C9Orf72 TTCN PAM targeting sequence
  source 1..20: mol_type = other RNA
aatctcaattttactaacta

SEQ ID NO: 10926 - RNA, 20 nt, synthetic construct
  misc_feature 1..20: note = C9Orf72 TTCN PAM targeting sequence
  source 1..20: mol_type = other RNA
aataactattatatcagaat

SEQ ID NO: 10927 - RNA, 20 nt, synthetic construct
  misc_feature 1..20: note = C9Orf72 TTCN PAM targeting sequence
  source 1..20: mol_type = other RNA
gatataatagttattggaat

SEQ ID NO: 10928 - RNA, 20 nt, synthetic construct
  misc_feature 1..20: note = C9Orf72 TTCN PAM targeting sequence
  source 1..20: mol_type = other RNA
tgctgtgtcaaaaatgccag

SEQ ID NO: 10929 - RNA, 20 nt, synthetic construct
  misc_feature 1..20: note = C9Orf72 TTCN PAM targeting sequence
  source 1..20: mol_type = other RNA
tgacaacaactggcattttt

SEQ ID NO: 10930 - RNA, 20 nt, synthetic construct
  misc_feature 1..20: note = C9Orf72 TTCN PAM targeting sequence
  source 1..20: mol_type = other RNA
tgctattagtgtatttcaaa

SEQ ID NO: 10931 - RNA, 20 nt, synthetic construct
  misc_feature 1..20: note = C9Orf72 TTCN PAM targeting sequence
  source 1..20: mol_type = other RNA
aaaatgcaatatctgctgct

SEQ ID NO: 10932 - RNA, 20 nt, synthetic construct
  misc_feature 1..20: note = C9Orf72 TTCN PAM targeting sequence
  source 1..20: mol_type = other RNA
gagctagagctgagagcttg

SEQ ID NO: 10933 - RNA, 20 nt, synthetic construct
  misc_feature 1..20: note = C9Orf72 TTCN PAM targeting sequence
  source 1..20: mol_type = other RNA
catgccagtcacagttaaat

SEQ ID NO: 10934 - RNA, 20 nt, synthetic construct
  misc_feature 1..20: note = C9Orf72 TTCN PAM targeting sequence
  source 1..20: mol_type = other RNA
tcctccatgtcctacataag

SEQ ID NO: 10935 - RNA, 20 nt, synthetic construct
  misc_feature 1..20: note = C9Orf72 TTCN PAM targeting sequence
  source 1..20: mol_type = other RNA
ttttctttttttcttttttg

SEQ ID NO: 10936 - RNA, 20 nt, synthetic construct
  misc_feature 1..20: note = C9Orf72 TTCN PAM targeting sequence
  source 1..20: mol_type = other RNA
ttttttcttttttgagacag

SEQ ID NO: 10937 - RNA, 20 nt, synthetic construct
  misc_feature 1..20: note = C9Orf72 TTCN PAM targeting sequence
  source 1..20: mol_type = other RNA
tttttgagacagagtttcac

SEQ ID NO: 10938 - RNA, 20 nt, synthetic construct
  misc_feature 1..20: note = C9Orf72 TTCN PAM targeting sequence
  source 1..20: mol_type = other RNA
ctcttgttgtccaggctgga

SEQ ID NO: 10939 - RNA, 20 nt, synthetic construct
  misc_feature 1..20: note = C9Orf72 TTCN PAM targeting sequence
  source 1..20: mol_type = other RNA
agtgattctcctgcctcagc

SEQ ID NO: 10940 - RNA, 20 nt, synthetic construct
  misc_feature 1..20: note = C9Orf72 TTCN PAM targeting sequence
  source 1..20: mol_type = other RNA
cctgcctcagcctcctgagt

SEQ ID NO: 10941 - RNA, 20 nt, synthetic construct
  misc_feature 1..20: note = C9Orf72 TTCN PAM targeting sequence
  source 1..20: mol_type = other RNA
ccatgttgatcaggctggtc

SEQ ID NO: 10942 - RNA, 20 nt, synthetic construct
  misc_feature 1..20: note = C9Orf72 TTCN PAM targeting sequence
  source 1..20: mol_type = other RNA
ggaggccaaggagggcagat

SEQ ID NO: 10943 - RNA, 20 nt, synthetic construct
  misc_feature 1..20: note = C9Orf72 TTCN PAM targeting sequence
  source 1..20: mol_type = other RNA
tttaaataatgagattttat

SEQ ID NO: 10944 - RNA, 20 nt, synthetic construct
  misc_feature 1..20: note = C9Orf72 TTCN PAM targeting sequence
  source 1..20: mol_type = other RNA
aaccaaaagataatgtacca

SEQ ID NO: 10945 - RNA, 20 nt, synthetic construct
  misc_feature 1..20: note = C9Orf72 TTCN PAM targeting sequence
  source 1..20: mol_type = other RNA
cattccaaccaaaagataat

SEQ ID NO: 10946 - RNA, 20 nt, synthetic construct
  misc_feature 1..20: note = C9Orf72 TTCN PAM targeting sequence
  source 1..20: mol_type = other RNA
ttcacattccaaccaaaaga

SEQ ID NO: 10947 - RNA, 20 nt, synthetic construct
  misc_feature 1..20: note = C9Orf72 TTCN PAM targeting sequence
  source 1..20: mol_type = other RNA
aggtgaaatcttgattcttg

SEQ ID NO: 10948 - RNA, 20 nt, synthetic construct
  misc_feature 1..20: note = C9Orf72 TTCN PAM targeting sequence
  source 1..20: mol_type = other RNA
cctagaagtacctcaggtag

SEQ ID NO: 10949 - RNA, 20 nt, synthetic construct
  misc_feature 1..20: note = C9Orf72 TTCN PAM targeting sequence
  source 1..20: mol_type = other RNA
tgagtatataaagttacttc

SEQ ID NO: 10950 - RNA, 20 nt, synthetic construct
  misc_feature 1..20: note = C9Orf72 TTCN PAM targeting sequence
  source 1..20: mol_type = other RNA
ggttgccagtgtgatataaa

SEQ ID NO: 10951 - RNA, 20 nt, synthetic construct
  misc_feature 1..20: note = C9Orf72 TTCN PAM targeting sequence
  source 1..20: mol_type = other RNA
gtgcctggagccaacactct

SEQ ID NO: 10952 - RNA, 20 nt, synthetic construct
  misc_feature 1..20: note = C9Orf72 TTCN PAM targeting sequence
  source 1..20: mol_type = other RNA
gatgatagacaatgtaaaca

SEQ ID NO: 10953 - RNA, 20 nt, synthetic construct
  misc_feature 1..20: note = C9Orf72 TTCN PAM targeting sequence
  source 1..20: mol_type = other RNA
cttgcaagggcattgtttac

SEQ ID NO: 10954 - RNA, 20 nt, synthetic construct
  misc_feature 1..20: note = C9Orf72 TTCN PAM targeting sequence
  source 1..20: mol_type = other RNA
acaccagcctgactaacatg

SEQ ID NO: 10955 - RNA, 20 nt, synthetic construct
  misc_feature 1..20: note = C9Orf72 TTCN PAM targeting sequence
  source 1..20: mol_type = other RNA
ccatgttagtcaggctggtg

SEQ ID NO: 10956 - RNA, 20 nt, synthetic construct
  misc_feature 1..20: note = C9Orf72 TTCN PAM targeting sequence
  source 1..20: mol_type = other RNA
aagtagatgggattacaggc

SEQ ID NO: 10957 - RNA, 20 nt, synthetic construct
  misc_feature 1..20: note = C9Orf72 TTCN PAM targeting sequence
  source 1..20: mol_type = other RNA
agggactctcctgcctcagc

SEQ ID NO: 10958 - RNA, 20 nt, synthetic construct
  misc_feature 1..20: note = C9Orf72 TTCN PAM targeting sequence
  source 1..20: mol_type = other RNA
cccactccattgcccaggct

SEQ ID NO: 10959 - RNA, 20 nt, synthetic construct
  misc_feature 1..20: note = C9Orf72 TTCN PAM targeting sequence
  source 1..20: mol_type = other RNA
tttcccccactccattgccc

SEQ ID NO: 10960 - RNA, 20 nt, synthetic construct
  misc_feature 1..20: note = C9Orf72 TTCN PAM targeting sequence
  source 1..20: mol_type = other RNA
tttttcttttcccccactcc

SEQ ID NO: 10961 - RNA, 20 nt, synthetic construct
  misc_feature 1..20: note = C9Orf72 TTCN PAM targeting sequence
  source 1..20: mol_type = other RNA
ctttttttcttttttctttt

SEQ ID NO: 10962 - RNA, 20 nt, synthetic construct
  misc_feature 1..20: note = C9Orf72 TTCN PAM targeting sequence
  source 1..20: mol_type = other RNA
ttttggtttttcctgggact

SEQ ID NO: 10963 - RNA, 20 nt, synthetic construct
  misc_feature 1..20: note = C9Orf72 TTCN PAM targeting sequence
  source 1..20: mol_type = other RNA
tgggacttatgattctataa

SEQ ID NO: 10964 - RNA, 20 nt, synthetic construct
  misc_feature 1..20: note = C9Orf72 TTCN PAM targeting sequence
  source 1..20: mol_type = other RNA
ataaataataagctaatgaa

SEQ ID NO: 10965 - RNA, 20 nt, synthetic construct
  misc_feature 1..20: note = C9Orf72 TTCN PAM targeting sequence
  source 1..20: mol_type = other RNA
ttagcttattatttatagaa

SEQ ID NO: 10966 - RNA, 20 nt, synthetic construct
  misc_feature 1..20: note = C9Orf72 TTCN PAM targeting sequence
  source 1..20: mol_type = other RNA
acaagagaatcacatctttg

SEQ ID NO: 10967 - RNA, 20 nt, synthetic construct
  misc_feature 1..20: note = C9Orf72 TTCN PAM targeting sequence
  source 1..20: mol_type = other RNA
cttgttgaaaagttcattag

SEQ ID NO: 10968 - RNA, 20 nt, synthetic construct
  misc_feature 1..20: note = C9Orf72 TTCN PAM targeting sequence
  source 1..20: mol_type = other RNA
ttctctgttgattctctgca

SEQ ID NO: 10969 - RNA, 20 nt, synthetic construct
  misc_feature 1..20: note = C9Orf72 TTCN PAM targeting sequence
  source 1..20: mol_type = other RNA
ctgttgattctctgcacttt

SEQ ID NO: 10970 - RNA, 20 nt, synthetic construct
  misc_feature 1..20: note = C9Orf72 TTCN PAM targeting sequence
  source 1..20: mol_type = other RNA
ctgcactttataagcaacag

SEQ ID NO: 10971 - RNA, 20 nt, synthetic construct
  misc_feature 1..20: note = C9Orf72 TTCN PAM targeting sequence
  source 1..20: mol_type = other RNA
aggccttagatcactcaaaa

SEQ ID NO: 10972 - RNA, 20 nt, synthetic construct
  misc_feature 1..20: note = C9Orf72 TTCN PAM targeting sequence
  source 1..20: mol_type = other RNA
ggggagaggaagttcctagt

SEQ ID NO: 10973 - RNA, 20 nt, synthetic construct
  misc_feature 1..20: note = C9Orf72 TTCN PAM targeting sequence
  source 1..20: mol_type = other RNA
tctccccagaactctgtatt

SEQ ID NO: 10974 - RNA, 20 nt, synthetic construct
  misc_feature 1..20: note = C9Orf72 TTCN PAM targeting sequence
  source 1..20: mol_type = other RNA
tagttcattgcagcctcaga

SEQ ID NO: 10975 - RNA, 20 nt, synthetic construct
  misc_feature 1..20: note = C9Orf72 TTCN PAM targeting sequence
  source 1..20: mol_type = other RNA
ttgcagcctcagaaaacaca

SEQ ID NO: 10976 - RNA, 20 nt, synthetic construct
  misc_feature 1..20: note = C9Orf72 TTCN PAM targeting sequence
  source 1..20: mol_type = other RNA
gaggctgcaatgaactagga

SEQ ID NO: 10977 - RNA, 20 nt, synthetic construct
  misc_feature 1..20: note = C9Orf72 TTCN PAM targeting sequence
  source 1..20: mol_type = other RNA
gtgttttctgaggctgcaat

SEQ ID NO: 10978 - RNA, 20 nt, synthetic construct
  misc_feature 1..20: note = C9Orf72 TTCN PAM targeting sequence
  source 1..20: mol_type = other RNA
tctgtgttttctgaggctgc

SEQ ID NO: 10979 - RNA, 20 nt, synthetic construct
  misc_feature 1..20: note = C9Orf72 TTCN PAM targeting sequence
  source 1..20: mol_type = other RNA
ctttcttctgtgttttctga

SEQ ID NO: 10980 - RNA, 20 nt, synthetic construct
  misc_feature 1..20: note = C9Orf72 TTCN PAM targeting sequence
  source 1..20: mol_type = other RNA
tgttctctttcttctgtgtt

SEQ ID NO: 10981 - RNA, 20 nt, synthetic construct
  misc_feature 1..20: note = C9Orf72 TTCN PAM targeting sequence
  source 1..20: mol_type = other RNA
tacttcttgttctctttctt

SEQ ID NO: 10982 - RNA, 20 nt, synthetic construct
  misc_feature 1..20: note = C9Orf72 TTCN PAM targeting sequence
  source 1..20: mol_type = other RNA
taaattttagagaagaccac

SEQ ID NO: 10983 - RNA, 20 nt, synthetic construct
  misc_feature 1..20: note = C9Orf72 TTCN PAM targeting sequence
  source 1..20: mol_type = other RNA
ctaaaatttaagaagatcgt

SEQ ID NO: 10984 - RNA, 20 nt, synthetic construct
  misc_feature 1..20: note = C9Orf72 TTCN PAM targeting sequence
  source 1..20: mol_type = other RNA
tctataagctagtggtcttc

SEQ ID NO: 10985 - RNA, 20 nt, synthetic construct
  misc_feature 1..20: note = C9Orf72 TTCN PAM targeting sequence
  source 1..20: mol_type = other RNA
ctcttcctctataagctagt

SEQ ID NO: 10986 - RNA, 20 nt, synthetic construct
  misc_feature 1..20: note = C9Orf72 TTCN PAM targeting sequence
  source 1..20: mol_type = other RNA
aattctctcttcctctataa

SEQ ID NO: 10987 - RNA, 20 nt, synthetic construct
  misc_feature 1..20: note = C9Orf72 TTCN PAM targeting sequence
  source 1..20: mol_type = other RNA
atcaaattatgaccaaccta

SEQ ID NO: 10988 - RNA, 20 nt, synthetic construct
  misc_feature 1..20: note = C9Orf72 TTCN PAM targeting sequence
  source 1..20: mol_type = other RNA
atctaaattccatcaaatta

SEQ ID NO: 10989 - RNA, 20 nt, synthetic construct
  misc_feature 1..20: note = C9Orf72 TTCN PAM targeting sequence
  source 1..20: mol_type = other RNA
ttccatctaaattccatcaa

SEQ ID NO: 10990 - RNA, 20 nt, synthetic construct
  misc_feature 1..20: note = C9Orf72 TTCN PAM targeting sequence
  source 1..20: mol_type = other RNA
agacatacttcccaaatcca

SEQ ID NO: 10991 - RNA, 20 nt, synthetic construct
  misc_feature 1..20: note = C9Orf72 TTCN PAM targeting sequence
  source 1..20: mol_type = other RNA
caaatccacttcagaatggt

SEQ ID NO: 10992 - RNA, 20 nt, synthetic construct
  misc_feature 1..20: note = C9Orf72 TTCN PAM targeting sequence
  source 1..20: mol_type = other RNA
gaatggttccctgagcaact

SEQ ID NO: 10993 - RNA, 20 nt, synthetic construct
  misc_feature 1..20: note = C9Orf72 TTCN PAM targeting sequence
  source 1..20: mol_type = other RNA
gaagtggatttgggaagtat

SEQ ID NO: 10994 - RNA, 20 nt, synthetic construct
  misc_feature 1..20: note = C9Orf72 TTCN PAM targeting sequence
  source 1..20: mol_type = other RNA
ctgagcaactggcctagctt

SEQ ID NO: 10995 - RNA, 20 nt, synthetic construct
  misc_feature 1..20: note = C9Orf72 TTCN PAM targeting sequence
  source 1..20: mol_type = other RNA
gcattattttgcatgtatag

SEQ ID NO: 10996 - RNA, 20 nt, synthetic construct
  misc_feature 1..20: note = C9Orf72 TTCN PAM targeting sequence
  source 1..20: mol_type = other RNA
ttagttatttcatgtatgat

SEQ ID NO: 10997 - RNA, 20 nt, synthetic construct
  misc_feature 1..20: note = C9Orf72 TTCN PAM targeting sequence
  source 1..20: mol_type = other RNA
tgtatgatatggaaaactgc

SEQ ID NO: 10998 - RNA, 20 nt, synthetic construct
  misc_feature 1..20: note = C9Orf72 TTCN PAM targeting sequence
  source 1..20: mol_type = other RNA
atatcatacatgaaataact

SEQ ID NO: 10999 - RNA, 20 nt, synthetic construct
  misc_feature 1..20: note = C9Orf72 TTCN PAM targeting sequence
  source 1..20: mol_type = other RNA
caactatgtcacatgctatt

SEQ ID NO: 11000 - RNA, 20 nt, synthetic construct
  misc_feature 1..20: note = C9Orf72 TTCN PAM targeting sequence
  source 1..20: mol_type = other RNA
atcagctacgtggcatttgc

SEQ ID NO: 11001 - RNA, 20 nt, synthetic construct
  misc_feature 1..20: note = C9Orf72 TTCN PAM targeting sequence
  source 1..20: mol_type = other RNA
ctccaactacccagaattat

SEQ ID NO: 11002 - RNA, 20 nt, synthetic construct
  misc_feature 1..20: note = C9Orf72 TTCN PAM targeting sequence
  source 1..20: mol_type = other RNA
gggtagttggagtgaagttt

SEQ ID NO: 11003 - RNA, 20 nt, synthetic construct
  misc_feature 1..20: note = C9Orf72 TTCN PAM targeting sequence
  source 1..20: mol_type = other RNA
tgatgtatttggaaacctta

SEQ ID NO: 11004 - RNA, 20 nt, synthetic construct
  misc_feature 1..20: note = C9Orf72 TTCN PAM targeting sequence
  source 1..20: mol_type = other RNA
aaatacatcatgaatatata

SEQ ID NO: 11005 - RNA, 20 nt, synthetic construct
  misc_feature 1..20: note = C9Orf72 TTCN PAM targeting sequence
  source 1..20: mol_type = other RNA
tattggttgtaaatttaaaa

SEQ ID NO: 11006 - RNA, 20 nt, synthetic construct
  misc_feature 1..20: note = C9Orf72 TTCN PAM targeting sequence
  source 1..20: mol_type = other RNA
tgttttgttttgtttgtggt

SEQ ID NO: 11007 - RNA, 20 nt, synthetic construct
  misc_feature 1..20: note = C9Orf72 TTCN PAM targeting sequence
  source 1..20: mol_type = other RNA
tttgtgttttggttgctttc

SEQ ID NO: 11008 - RNA, 20 nt, synthetic construct
  misc_feature 1..20: note = C9Orf72 TTCN PAM targeting sequence
  source 1..20: mol_type = other RNA
ctctcatgttcttcaccttt

SEQ ID NO: 11009 - RNA, 20 nt, synthetic construct
  misc_feature 1..20: note = C9Orf72 TTCN PAM targeting sequence
  source 1..20: mol_type = other RNA
tcacctttcaggggcttccc

SEQ ID NO: 11010 - RNA, 20 nt, synthetic construct
  misc_feature 1..20: note = C9Orf72 TTCN PAM targeting sequence
  source 1..20: mol_type = other RNA
cctttcaggggcttcccatt

SEQ ID NO: 11011 - RNA, 20 nt, synthetic construct
  misc_feature 1..20: note = C9Orf72 TTCN PAM targeting sequence
  source 1..20: mol_type = other RNA
ggggcttcccattttctata

SEQ ID NO: 11012 - RNA, 20 nt, synthetic construct
  misc_feature 1..20: note = C9Orf72 TTCN PAM targeting sequence
  source 1..20: mol_type = other RNA
cattttctatatgtcaaggt

SEQ ID NO: 11013 - RNA, 20 nt, synthetic construct
  misc_feature 1..20: note = C9Orf72 TTCN PAM targeting sequence
  source 1..20: mol_type = other RNA
atatgtcaaggtccttggca

SEQ ID NO: 11014 - RNA, 20 nt, synthetic construct
  misc_feature 1..20: note = C9Orf72 TTCN PAM targeting sequence
  source 1..20: mol_type = other RNA
acaatctggctccacttgac

SEQ ID NO: 11015 - RNA, 20 nt, synthetic construct
  misc_feature 1..20: note = C9Orf72 TTCN PAM targeting sequence
  source 1..20: mol_type = other RNA
agcttctctcttaccgccct

SEQ ID NO: 11016 - RNA, 20 nt, synthetic construct
  misc_feature 1..20: note = C9Orf72 TTCN PAM targeting sequence
  source 1..20: mol_type = other RNA
ctcttaccgccctttccctt

SEQ ID NO: 11017 - RNA, 20 nt, synthetic construct
  misc_feature 1..20: note = C9Orf72 TTCN PAM targeting sequence
  source 1..20: mol_type = other RNA
ctttgatcttgcagacgcat

SEQ ID NO: 11018 - RNA, 20 nt, synthetic construct
  misc_feature 1..20: note = C9Orf72 TTCN PAM targeting sequence
  source 1..20: mol_type = other RNA
ctctgcctgaaatgtcctca

SEQ ID NO: 11019 - RNA, 20 nt, synthetic construct
  misc_feature 1..20: note = C9Orf72 TTCN PAM targeting sequence
  source 1..20: mol_type = other RNA
ggcagagagaattatatgag

SEQ ID NO: 11020 - RNA, 20 nt, synthetic construct
  misc_feature 1..20: note = C9Orf72 TTCN PAM targeting sequence
  source 1..20: mol_type = other RNA
tggaggaggcagcatatggc

SEQ ID NO: 11021 - RNA, 20 nt, synthetic construct
  misc_feature 1..20: note = C9Orf72 TTCN PAM targeting sequence
  source 1..20: mol_type = other RNA
tggattttcccagtttgaat

SEQ ID NO: 11022 - RNA, 20 nt, synthetic construct
  misc_feature 1..20: note = C9Orf72 TTCN PAM targeting sequence
  source 1..20: mol_type = other RNA
cagtttgaataattccattg

SEQ ID NO: 11023 - RNA, 20 nt, synthetic construct
  misc_feature 1..20: note = C9Orf72 TTCN PAM targeting sequence
  source 1..20: mol_type = other RNA
aactgggaaaatccaggaag

SEQ ID NO: 11024 - RNA, 20 nt, synthetic construct
  misc_feature 1..20: note = C9Orf72 TTCN PAM targeting sequence
  source 1..20: mol_type = other RNA
attgtgcacctttaacctcc

SEQ ID NO: 11025 - RNA, 20 nt, synthetic construct
  misc_feature 1..20: note = C9Orf72 TTCN PAM targeting sequence
  source 1..20: mol_type = other RNA
attaatattatattaccatt

SEQ ID NO: 11026 - RNA, 20 nt, synthetic construct
  misc_feature 1..20: note = C9Orf72 TTCN PAM targeting sequence
  source 1..20: mol_type = other RNA
aattattagttctattaata

SEQ ID NO: 11027 - RNA, 20 nt, synthetic construct
  misc_feature 1..20: note = C9Orf72 TTCN PAM targeting sequence
  source 1..20: mol_type = other RNA
agactaggttggtttgactc

SEQ ID NO: 11028 - RNA, 20 nt, synthetic construct
  misc_feature 1..20: note = C9Orf72 TTCN PAM targeting sequence
  source 1..20: mol_type = other RNA
ggctcaatcactttgcatcc

SEQ ID NO: 11029 - RNA, 20 nt, synthetic construct
  misc_feature 1..20: note = C9Orf72 TTCN PAM targeting sequence
  source 1..20: mol_type = other RNA
tcctcttgaaaatggaattg

SEQ ID NO: 11030 - RNA, 20 nt, synthetic construct
  misc_feature 1..20: note = C9Orf72 TTCN PAM targeting sequence
  source 1..20: mol_type = other RNA
agaggaggaaattgaggctc

SEQ ID NO: 11031 - RNA, 20 nt, synthetic construct
  misc_feature 1..20: note = C9Orf72 TTCN PAM targeting sequence
  source 1..20: mol_type = other RNA
attttcaagaggaggaaatt

SEQ ID NO: 11032 - RNA, 20 nt, synthetic construct
  misc_feature 1..20: note = C9Orf72 TTCN PAM targeting sequence
  source 1..20: mol_type = other RNA
caacccctagtttatagatg

SEQ ID NO: 11033 - RNA, 20 nt, synthetic construct
  misc_feature 1..20: note = C9Orf72 TTCN PAM targeting sequence
  source 1..20: mol_type = other RNA
tctataaactaggggttggg

SEQ ID NO: 11034 - RNA, 20 nt, synthetic construct
  misc_feature 1..20: note = C9Orf72 TTCN PAM targeting sequence
  source 1..20: mol_type = other RNA
atctcttcatctataaacta

SEQ ID NO: 11035 - RNA, 20 nt, synthetic construct
  misc_feature 1..20: note = C9Orf72 TTCN PAM targeting sequence
  source 1..20: mol_type = other RNA
ctttcaatctcttcatctat

SEQ ID NO: 11036 - RNA, 20 nt, synthetic construct
  misc_feature 1..20: note = C9Orf72 TTCN PAM targeting sequence
  source 1..20: mol_type = other RNA
ctttccctttcaatctcttc

SEQ ID NO: 11037 - RNA, 20 nt, synthetic construct
  misc_feature 1..20: note = C9Orf72 TTCN PAM targeting sequence
  source 1..20: mol_type = other RNA
tatgccagcaaccaggtaag

SEQ ID NO: 11038 - RNA, 20 nt, synthetic construct
  misc_feature 1..20: note = C9Orf72 TTCN PAM targeting sequence
  source 1..20: mol_type = other RNA
catcactagactgaaagctt

SEQ ID NO: 11039 - RNA, 20 nt, synthetic construct
  misc_feature 1..20: note = C9Orf72 TTCN PAM targeting sequence
  source 1..20: mol_type = other RNA
gtctagtgatgagaaagacg

SEQ ID NO: 11040 - RNA, 20 nt, synthetic construct
  misc_feature 1..20: note = C9Orf72 TTCN PAM targeting sequence
  source 1..20: mol_type = other RNA
ggagggcagggaacttgtct

SEQ ID NO: 11041 - RNA, 20 nt, synthetic construct
  misc_feature 1..20: note = C9Orf72 TTCN PAM targeting sequence
  source 1..20: mol_type = other RNA
ctgccctccggaagctttca

SEQ ID NO: 11042 - RNA, 20 nt, synthetic construct
  misc_feature 1..20: note = C9Orf72 TTCN PAM targeting sequence
  source 1..20: mol_type = other RNA
ctttcgtctgcgcttttcct

SEQ ID NO: 11043 - RNA, 20 nt, synthetic construct
  misc_feature 1..20: note = C9Orf72 TTCN PAM targeting sequence
  source 1..20: mol_type = other RNA
tctgcgcttttcctctaagc

SEQ ID NO: 11044 - RNA, 20 nt, synthetic construct
  misc_feature 1..20: note = C9Orf72 TTCN PAM targeting sequence
  source 1..20: mol_type = other RNA
tctaagcacagtaattgcct

SEQ ID NO: 11045 - RNA, 20 nt, synthetic construct
  misc_feature 1..20: note = C9Orf72 TTCN PAM targeting sequence
  source 1..20: mol_type = other RNA
taaattaaattacatccaac

SEQ ID NO: 11046 - RNA, 20 nt, synthetic construct
  misc_feature 1..20: note = C9Orf72 TTCN PAM targeting sequence
  source 1..20: mol_type = other RNA
cattagaaacaaagaaagtt

SEQ ID NO: 11047 - RNA, 20 nt, synthetic construct
  misc_feature 1..20: note = C9Orf72 TTCN PAM targeting sequence
  source 1..20: mol_type = other RNA
aatgggaactttcttaaatt

SEQ ID NO: 11048 - RNA, 20 nt, synthetic construct
  misc_feature 1..20: note = C9Orf72 TTCN PAM targeting sequence
  source 1..20: mol_type = other RNA
ttgtttctaatgggaacttt

SEQ ID NO: 11049 - RNA, 20 nt, synthetic construct
  misc_feature 1..20: note = C9Orf72 TTCN PAM targeting sequence
  source 1..20: mol_type = other RNA
cattagaaacaagaataaat

SEQ ID NO: 11050 - RNA, 20 nt, synthetic construct
  misc_feature 1..20: note = C9Orf72 TTCN PAM targeting sequence
  source 1..20: mol_type = other RNA
aatgggaactttctttgttt

SEQ ID NO: 11051 - RNA, 20 nt, synthetic construct
  misc_feature 1..20: note = C9Orf72 TTCN PAM targeting sequence
  source 1..20: mol_type = other RNA
tgtttctaatgggaactttc

SEQ ID NO: 11052 - RNA, 20 nt, synthetic construct
  misc_feature 1..20: note = C9Orf72 TTCN PAM targeting sequence
  source 1..20: mol_type = other RNA
ctaagctctaaatatggcac

SEQ ID NO: 11053 - RNA, 20 nt, synthetic construct
  misc_feature 1..20: note = C9Orf72 TTCN PAM targeting sequence
  source 1..20: mol_type = other RNA
ttattaacatcacttgattg

SEQ ID NO: 11054 - RNA, 20 nt, synthetic construct
  misc_feature 1..20: note = C9Orf72 TTCN PAM targeting sequence
  source 1..20: mol_type = other RNA
aattaagcttttctttatta

SEQ ID NO: 11055 - RNA, 20 nt, synthetic construct
  misc_feature 1..20: note = C9Orf72 TTCN PAM targeting sequence
  source 1..20: mol_type = other RNA
tcatcaagatttctagaaag

SEQ ID NO: 11056 - RNA, 20 nt, synthetic construct
  misc_feature 1..20: note = C9Orf72 TTCN PAM targeting sequence
  source 1..20: mol_type = other RNA
agaaagagcagttatttcat

SEQ ID NO: 11057 - RNA, 20 nt, synthetic construct
  misc_feature 1..20: note = C9Orf72 TTCN PAM targeting sequence
  source 1..20: mol_type = other RNA
agaaatcttgatgatgaagt

SEQ ID NO: 11058 - RNA, 20 nt, synthetic construct
  misc_feature 1..20: note = C9Orf72 TTCN PAM targeting sequence
  source 1..20: mol_type = other RNA
tacattgccaagcaaaaaga

SEQ ID NO: 11059 - RNA, 20 nt, synthetic construct
  misc_feature 1..20: note = C9Orf72 TTCN PAM targeting sequence
  source 1..20: mol_type = other RNA
ttttgcttggcaatgtatga

SEQ ID NO: 11060 - RNA, 20 nt, synthetic construct
  misc_feature 1..20: note = C9Orf72 TTCN PAM targeting sequence
  source 1..20: mol_type = other RNA
aacacatatttttaacctgc

SEQ ID NO: 11061 - RNA, 20 nt, synthetic construct
  misc_feature 1..20: note = C9Orf72 TTCN PAM targeting sequence
  source 1..20: mol_type = other RNA
aattttaaactgatgttaaa

SEQ ID NO: 11062 - RNA, 20 nt, synthetic construct
  misc_feature 1..20: note = C9Orf72 TTCN PAM targeting sequence
  source 1..20: mol_type = other RNA
gtaaaggcaatactttatat

SEQ ID NO: 11063 - RNA, 20 nt, synthetic construct
  misc_feature 1..20: note = C9Orf72 TTCN PAM targeting sequence
  source 1..20: mol_type = other RNA
attacttctgtaaaggcaat

SEQ ID NO: 11064 - RNA, 20 nt, synthetic construct
  misc_feature 1..20: note = C9Orf72 TTCN PAM targeting sequence
  source 1..20: mol_type = other RNA
cgataataacttgtcaaatt

SEQ ID NO: 11065 - RNA, 20 nt, synthetic construct
  misc_feature 1..20: note = C9Orf72 TTCN PAM targeting sequence
  source 1..20: mol_type = other RNA
cacagggtactaattaatcc

SEQ ID NO: 11066 - RNA, 20 nt, synthetic construct
  misc_feature 1..20: note = C9Orf72 TTCN PAM targeting sequence
  source 1..20: mol_type = other RNA
taggtttttgtaagcagact

SEQ ID NO: 11067 - RNA, 20 nt, synthetic construct
  misc_feature 1..20: note = C9Orf72 TTCN PAM targeting sequence
  source 1..20: mol_type = other RNA
tctcaaatatgtagagagat

SEQ ID NO: 11068 - RNA, 20 nt, synthetic construct
  misc_feature 1..20: note = C9Orf72 TTCN PAM targeting sequence
  source 1..20: mol_type = other RNA
caggcaagctatttaaggtg

SEQ ID NO: 11069 - RNA, 20 nt, synthetic construct
  misc_feature 1..20: note = C9Orf72 TTCN PAM targeting sequence
  source 1..20: mol_type = other RNA
gtaatttcccaggcaagcta

SEQ ID NO: 11070 - RNA, 20 nt, synthetic construct
  misc_feature 1..20: note = C9Orf72 TTCN PAM targeting sequence
  source 1..20: mol_type = other RNA
cataaattatagacacagag

SEQ ID NO: 11071 - RNA, 20 nt, synthetic construct
  misc_feature 1..20: note = C9Orf72 TTCN PAM targeting sequence
  source 1..20: mol_type = other RNA
gtactaaattatttgtgcat

SEQ ID NO: 11072 - RNA, 20 nt, synthetic construct
  misc_feature 1..20: note = C9Orf72 TTCN PAM targeting sequence
  source 1..20: mol_type = other RNA
aattatagtattaactccct

SEQ ID NO: 11073 - RNA, 20 nt, synthetic construct
  misc_feature 1..20: note = C9Orf72 TTCN PAM targeting sequence
  source 1..20: mol_type = other RNA
tacttggaaatgatttgttt

SEQ ID NO: 11074 - RNA, 20 nt, synthetic construct
  misc_feature 1..20: note = C9Orf72 TTCN PAM targeting sequence
  source 1..20: mol_type = other RNA
aagtaagaaaataaattttg

SEQ ID NO: 11075 - RNA, 20 nt, synthetic construct
  misc_feature 1..20: note = C9Orf72 TTCN PAM targeting sequence
  source 1..20: mol_type = other RNA
atgtgcaggatataaaaagg

SEQ ID NO: 11076 - RNA, 20 nt, synthetic construct
  misc_feature 1..20: note = C9Orf72 TTCN PAM targeting sequence
  source 1..20: mol_type = other RNA
tttttatatcctgcacatgg

SEQ ID NO: 11077 - RNA, 20 nt, synthetic construct
  misc_feature 1..20: note = C9Orf72 TTCN PAM targeting sequence
  source 1..20: mol_type = other RNA
aaagcactatttggtaaaaa

SEQ ID NO: 11078 - RNA, 20 nt, synthetic construct
  misc_feature 1..20: note = C9Orf72 TTCN PAM targeting sequence
  source 1..20: mol_type = other RNA
tttctaaagcactatttggt

SEQ ID NO: 11079 - RNA, 20 nt, synthetic construct
  misc_feature 1..20: note = C9Orf72 TTCN PAM targeting sequence
  source 1..20: mol_type = other RNA
ttcttttctaaagcactatt

SEQ ID NO: 11080 - RNA, 20 nt, synthetic construct
  misc_feature 1..20: note = C9Orf72 TTCN PAM targeting sequence
  source 1..20: mol_type = other RNA
catgcagcatcttcattctt

SEQ ID NO: 11081 - RNA, 20 nt, synthetic construct
  misc_feature 1..20: note = C9Orf72 TTCN PAM targeting sequence
  source 1..20: mol_type = other RNA
caagcactttctccattaat

SEQ ID NO: 11082 - RNA, 20 nt, synthetic construct
  misc_feature 1..20: note = C9Orf72 TTCN PAM targeting sequence
  source 1..20: mol_type = other RNA
ccattaatgaactatacatt

SEQ ID NO: 11083 - RNA, 20 nt, synthetic construct
  misc_feature 1..20: note = C9Orf72 TTCN PAM targeting sequence
  source 1..20: mol_type = other RNA
ttaatggagaaagtgcttga

SEQ ID NO: 11084 - RNA, 20 nt, synthetic construct
  misc_feature 1..20: note = C9Orf72 TTCN PAM targeting sequence
  source 1..20: mol_type = other RNA
gaacacagggcaaaaaagaa

SEQ ID NO: 11085 - RNA, 20 nt, synthetic construct
  misc_feature 1..20: note = C9Orf72 TTCN PAM targeting sequence
  source 1..20: mol_type = other RNA
gaaaacaaatgtgcgtgtct

SEQ ID NO: 11086 - RNA, 20 nt, synthetic construct
  misc_feature 1..20: note = C9Orf72 TTCN PAM targeting sequence
  source 1..20: mol_type = other RNA
tttttgccctgtgttcagaa

SEQ ID NO: 11087 - RNA, 20 nt, synthetic construct
  misc_feature 1..20: note = C9Orf72 TTCN PAM targeting sequence
  source 1..20: mol_type = other RNA
tttcttttttgccctgtgtt

SEQ ID NO: 11088 - RNA, 20 nt, synthetic construct
  misc_feature 1..20: note = C9Orf72 TTCN PAM targeting sequence
  source 1..20: mol_type = other RNA
agttttgctacacaaagatc

SEQ ID NO: 11089 - RNA, 20 nt, synthetic construct
  misc_feature 1..20: note = C9Orf72 TTCN PAM targeting sequence
  source 1..20: mol_type = other RNA
cgagtttttacaaactgcct

SEQ ID NO: 11090 - RNA, 20 nt, synthetic construct
  misc_feature 1..20: note = C9Orf72 TTCN PAM targeting sequence
  source 1..20: mol_type = other RNA
ggaataattttttttaaaaa

SEQ ID NO: 11091 - RNA, 20 nt, synthetic construct
  misc_feature 1..20: note = C9Orf72 TTCN PAM targeting sequence
  source 1..20: mol_type = other RNA
tgaataaagaggcagtttgt

SEQ ID NO: 11092 - RNA, 20 nt, synthetic construct
  misc_feature 1..20: note = C9Orf72 TTCN PAM targeting sequence
  source 1..20: mol_type = other RNA
tttttttttaatttgacttt

SEQ ID NO: 11093 - RNA, 20 nt, synthetic construct
  misc_feature 1..20: note = C9Orf72 TTCN PAM targeting sequence
  source 1..20: mol_type = other RNA
gataactttaaatgcctaaa

SEQ ID NO: 11094 - RNA, 20 nt, synthetic construct
  misc_feature 1..20: note = C9Orf72 TTCN PAM targeting sequence
  source 1..20: mol_type = other RNA
acaatgacattatttaggca

SEQ ID NO: 11095 - RNA, 20 nt, synthetic construct
  misc_feature 1..20: note = C9Orf72 TTCN PAM targeting sequence
  source 1..20: mol_type = other RNA
aattcatgcttagtctaggg

SEQ ID NO: 11096 - RNA, 20 nt, synthetic construct
  misc_feature 1..20: note = C9Orf72 TTCN PAM targeting sequence
  source 1..20: mol_type = other RNA
tgcttagtctagggtagctt

SEQ ID NO: 11097 - RNA, 20 nt, synthetic construct
  misc_feature 1..20: note = C9Orf72 TTCN PAM targeting sequence
  source 1..20: mol_type = other RNA
ctctctaagtagaactccca

SEQ ID NO: 11098 - RNA, 20 nt, synthetic construct
  misc_feature 1..20: note = C9Orf72 TTCN PAM targeting sequence
  source 1..20: mol_type = other RNA
acttagagagtgaaagctgc

SEQ ID NO: 11099 - RNA, 20 nt, synthetic construct
  misc_feature 1..20: note = C9Orf72 TTCN PAM targeting sequence
  source 1..20: mol_type = other RNA
gggagttctacttagagagt

SEQ ID NO: 11100 - RNA, 20 nt, synthetic construct
  misc_feature 1..20: note = C9Orf72 TTCN PAM targeting sequence
  source 1..20: mol_type = other RNA
ccactccaagcatattttct

SEQ ID NO: 11101 - RNA, 20 nt, synthetic construct
  misc_feature 1..20: note = C9Orf72 TTCN PAM targeting sequence
  source 1..20: mol_type = other RNA
taacccaatctgcatttctc

SEQ ID NO: 11102 - RNA, 20 nt, synthetic construct
  misc_feature 1..20: note = C9Orf72 TTCN PAM targeting sequence
  source 1..20: mol_type = other RNA
cattacttcatgttggagaa

SEQ ID NO: 11103 - RNA, 20 nt, synthetic construct
  misc_feature 1..20: note = C9Orf72 TTCN PAM targeting sequence
  source 1..20: mol_type = other RNA
tgttggagaagattcattat

SEQ ID NO: 11104 - RNA, 20 nt, synthetic construct
  misc_feature 1..20: note = C9Orf72 TTCN PAM targeting sequence
  source 1..20: mol_type = other RNA
ccaacatgaagtaatgtgaa

SEQ ID NO: 11105 - RNA, 20 nt, synthetic construct
  misc_feature 1..20: note = C9Orf72 TTCN PAM targeting sequence
  source 1..20: mol_type = other RNA
ttattatttataaagcagaa

SEQ ID NO: 11106 - RNA, 20 nt, synthetic construct
  misc_feature 1..20: note = C9Orf72 TTCN PAM targeting sequence
  source 1..20: mol_type = other RNA
gctttataaataataatgaa

SEQ ID NO: 11107 - RNA, 20 nt, synthetic construct
  misc_feature 1..20: note = C9Orf72 TTCN PAM targeting sequence
  source 1..20: mol_type = other RNA
agtctcactgtcactttctg

SEQ ID NO: 11108 - RNA, 20 nt, synthetic construct
  misc_feature 1..20: note = C9Orf72 TTCN PAM targeting sequence
  source 1..20: mol_type = other RNA
gcattacaaacaccactaaa

SEQ ID NO: 11109 - RNA, 20 nt, synthetic construct
  misc_feature 1..20: note = C9Orf72 TTCN PAM targeting sequence
  source 1..20: mol_type = other RNA
aaatgagtaggctaattctt

SEQ ID NO: 11110 - RNA, 20 nt, synthetic construct
  misc_feature 1..20: note = C9Orf72 TTCN PAM targeting sequence
  source 1..20: mol_type = other RNA
ttccttacagagccaaaaac

SEQ ID NO: 11111 - RNA, 20 nt, synthetic construct
  misc_feature 1..20: note = C9Orf72 TTCN PAM targeting sequence
  source 1..20: mol_type = other RNA
ttacagagccaaaaaccttg

SEQ ID NO: 11112 - RNA, 20 nt, synthetic construct
  misc_feature 1..20: note = C9Orf72 TTCN PAM targeting sequence
  source 1..20: mol_type = other RNA
aaataattcttttttttttt

SEQ ID NO: 11113 - RNA, 20 nt, synthetic construct
  misc_feature 1..20: note = C9Orf72 TTCN PAM targeting sequence
  source 1..20: mol_type = other RNA
ttttttttttttccgagaaa

SEQ ID NO: 11114 - RNA, 20 nt, synthetic construct
  misc_feature 1..20: note = C9Orf72 TTCN PAM targeting sequence
  source 1..20: mol_type = other RNA
gagaaagagtctcactctca

SEQ ID NO: 11115 - RNA, 20 nt, synthetic construct
  misc_feature 1..20: note = C9Orf72 TTCN PAM targeting sequence
  source 1..20: mol_type = other RNA
cggaaaaaaaaaaaaagaat

SEQ ID NO: 11116 - RNA, 20 nt, synthetic construct
  misc_feature 1..20: note = C9Orf72 TTCN PAM targeting sequence
  source 1..20: mol_type = other RNA
agtgattctcccacctcagt

SEQ ID NO: 11117 - RNA, 20 nt, synthetic construct
  misc_feature 1..20: note = C9Orf72 TTCN PAM targeting sequence
  source 1..20: mol_type = other RNA
cccacctcagtctcccgagt

SEQ ID NO: 11118 - RNA, 20 nt, synthetic construct
  misc_feature 1..20: note = C9Orf72 TTCN PAM targeting sequence
  source 1..20: mol_type = other RNA
ccacgttggccacgctggtc

SEQ ID NO: 11119 - RNA, 20 nt, synthetic construct
  misc_feature 1..20: note = C9Orf72 TTCN PAM targeting sequence
  source 1..20: mol_type = other RNA
agaccagcgtggccaacgtg

SEQ ID NO: 11120 - RNA, 20 nt, synthetic construct
  misc_feature 1..20: note = C9Orf72 TTCN PAM targeting sequence
  source 1..20: mol_type = other RNA
tattaagcattcaaacacct

SEQ ID NO: 11121 - RNA, 20 nt, synthetic construct
  misc_feature 1..20: note = C9Orf72 TTCN PAM targeting sequence
  source 1..20: mol_type = other RNA
aacaccttatttcaatgtgg

SEQ ID NO: 11122 - RNA, 20 nt, synthetic construct
  misc_feature 1..20: note = C9Orf72 TTCN PAM targeting sequence
  source 1..20: mol_type = other RNA
atgtggccagaactctgggg

SEQ ID NO: 11123 - RNA, 20 nt, synthetic construct
  misc_feature 1..20: note = C9Orf72 TTCN PAM targeting sequence
  source 1..20: mol_type = other RNA
ggccacattgaaataaggtg

SEQ ID NO: 11124 - RNA, 20 nt, synthetic construct
  misc_feature 1..20: note = C9Orf72 TTCN PAM targeting sequence
  source 1..20: mol_type = other RNA
cccagagttctggccacatt

SEQ ID NO: 11125 - RNA, 20 nt, synthetic construct
  misc_feature 1..20: note = C9Orf72 TTCN PAM targeting sequence
  source 1..20: mol_type = other RNA
tttcccccagagttctggcc

SEQ ID NO: 11126 - RNA, 20 nt, synthetic construct
  misc_feature 1..20: note = C9Orf72 TTCN PAM targeting sequence
  source 1..20: mol_type = other RNA
ttgggcaccttggtccttta

SEQ ID NO: 11127 - RNA, 20 nt, synthetic construct
  misc_feature 1..20: note = C9Orf72 TTCN PAM targeting sequence
  source 1..20: mol_type = other RNA
gtggcctcattattaaagga

SEQ ID NO: 11128 - RNA, 20 nt, synthetic construct
  misc_feature 1..20: note = C9Orf72 TTCN PAM targeting sequence
  source 1..20: mol_type = other RNA
aagcctgcactataaagtat

SEQ ID NO: 11129 - RNA, 20 nt, synthetic construct
  misc_feature 1..20: note = C9Orf72 TTCN PAM targeting sequence
  source 1..20: mol_type = other RNA
aaataggatattatatccta

SEQ ID NO: 11130 - RNA, 20 nt, synthetic construct
  misc_feature 1..20: note = C9Orf72 TTCN PAM targeting sequence
  source 1..20: mol_type = other RNA
atacattttgcatttaaaat

SEQ ID NO: 11131 - RNA, 20 nt, synthetic construct
  misc_feature 1..20: note = C9Orf72 TTCN PAM targeting sequence
  source 1..20: mol_type = other RNA
ttagaatcaaataacaataa

SEQ ID NO: 11132 - RNA, 20 nt, synthetic construct
  misc_feature 1..20: note = C9Orf72 TTCN PAM targeting sequence
  source 1..20: mol_type = other RNA
aaagaaacttctatacattt

SEQ ID NO: 11133 - RNA, 20 nt, synthetic construct
  misc_feature 1..20: note = C9Orf72 TTCN PAM targeting sequence
  source 1..20: mol_type = other RNA
aaactaatgtaaggcagggt

SEQ ID NO: 11134 - RNA, 20 nt, synthetic construct
  misc_feature 1..20: note = C9Orf72 TTCN PAM targeting sequence
  source 1..20: mol_type = other RNA
tctcaaattgggttaaagca

SEQ ID NO: 11135 - RNA, 20 nt, synthetic construct
  misc_feature 1..20: note = C9Orf72 TTCN PAM targeting sequence
  source 1..20: mol_type = other RNA
ttcatctcaaattgggttaa

SEQ ID NO: 11136 - RNA, 20 nt, synthetic construct
  misc_feature 1..20: note = C9Orf72 TTCN PAM targeting sequence
  source 1..20: mol_type = other RNA
gagactggtagtagtcagtg

SEQ ID NO: 11137 - RNA, 20 nt, synthetic construct
  misc_feature 1..20: note = C9Orf72 TTCN PAM targeting sequence
  source 1..20: mol_type = other RNA
acacactgactactaccagt

SEQ ID NO: 11138 - RNA, 20 nt, synthetic construct
  misc_feature 1..20: note = C9Orf72 TTCN PAM targeting sequence
  source 1..20: mol_type = other RNA
atcaccagataaaaacttct

SEQ ID NO: 11139 - RNA, 20 nt, synthetic construct
  misc_feature 1..20: note = C9Orf72 TTCN PAM targeting sequence
  source 1..20: mol_type = other RNA
cacagagttgcatcgatgta

SEQ ID NO: 11140 - RNA, 20 nt, synthetic construct
  misc_feature 1..20: note = C9Orf72 TTCN PAM targeting sequence
  source 1..20: mol_type = other RNA
tagcttggaacacctttcaa

SEQ ID NO: 11141 - RNA, 20 nt, synthetic construct
  misc_feature 1..20: note = C9Orf72 TTCN PAM targeting sequence
  source 1..20: mol_type = other RNA
aagctaggaactcactacca

SEQ ID NO: 11142 - RNA, 20 nt, synthetic construct
  misc_feature 1..20: note = C9Orf72 TTCN PAM targeting sequence
  source 1..20: mol_type = other RNA
agggtggcctatctgtgcca

SEQ ID NO: 11143 - RNA, 20 nt, synthetic construct
  misc_feature 1..20: note = C9Orf72 TTCN PAM targeting sequence
  source 1..20: mol_type = other RNA
ggtattccatgttccagtcc

SEQ ID NO: 11144 - RNA, 20 nt, synthetic construct
  misc_feature 1..20: note = C9Orf72 TTCN PAM targeting sequence
  source 1..20: mol_type = other RNA
atgttccagtcctgagagtc

SEQ ID NO: 11145 - RNA, 20 nt, synthetic construct
  misc_feature 1..20: note = C9Orf72 TTCN PAM targeting sequence
  source 1..20: mol_type = other RNA
agtcctgagagtcatgatgg

SEQ ID NO: 11146 - RNA, 20 nt, synthetic construct
  misc_feature 1..20: note = C9Orf72 TTCN PAM targeting sequence
  source 1..20: mol_type = other RNA
atcatgactctcaggactgg

SEQ ID NO: 11147 - RNA, 20 nt, synthetic construct
  misc_feature 1..20: note = C9Orf72 TTCN PAM targeting sequence
  source 1..20: mol_type = other RNA
tggctgcttggttcctgcca

SEQ ID NO: 11148 - RNA, 20 nt, synthetic construct
  misc_feature 1..20: note = C9Orf72 TTCN PAM targeting sequence
  source 1..20: mol_type = other RNA
tgccatccaaagagcattta

SEQ ID NO: 11149 - RNA, 20 nt, synthetic construct
  misc_feature 1..20: note = C9Orf72 TTCN PAM targeting sequence
  source 1..20: mol_type = other RNA
ctttgtaaatgctctttgga

SEQ ID NO: 11150 - RNA, 20 nt, synthetic construct
  misc_feature 1..20: note = C9Orf72 TTCN PAM targeting sequence
  source 1..20: mol_type = other RNA
tgtcctacagttacaaagcg

SEQ ID NO: 11151 - RNA, 20 nt, synthetic construct
  misc_feature 1..20: note = C9Orf72 TTCN PAM targeting sequence
  source 1..20: mol_type = other RNA
gttcttgtcctacagttaca

SEQ ID NO: 11152 - RNA, 20 nt, synthetic construct
  misc_feature 1..20: note = C9Orf72 TTCN PAM targeting sequence
  source 1..20: mol_type = other RNA
gattctggccaacccatgca

SEQ ID NO: 11153 - RNA, 20 nt, synthetic construct
  misc_feature 1..20: note = C9Orf72 TTCN PAM targeting sequence
  source 1..20: mol_type = other RNA
ggccaacccatgcagaagaa

SEQ ID NO: 11154 - RNA, 20 nt, synthetic construct
  misc_feature 1..20: note = C9Orf72 TTCN PAM targeting sequence
  source 1..20: mol_type = other RNA
gcatgggttggccagaatca

SEQ ID NO: 11155 - RNA, 20 nt, synthetic construct
  misc_feature 1..20: note = C9Orf72 TTCN PAM targeting sequence
  source 1..20: mol_type = other RNA
tctgcatgggttggccagaa

SEQ ID NO: 11156 - RNA, 20 nt, synthetic construct
  misc_feature 1..20: note = C9Orf72 TTCN PAM targeting sequence
  source 1..20: mol_type = other RNA
tagacatttcttctgcatgg

SEQ ID NO: 11157 - RNA, 20 nt, synthetic construct
  misc_feature 1..20: note = C9Orf72 TTCN PAM targeting sequence
  source 1..20: mol_type = other RNA
ctttgaccgctttcatagac

SEQ ID NO: 11158 - RNA, 20 nt, synthetic construct
  misc_feature 1..20: note = C9Orf72 TTCN PAM targeting sequence
  source 1..20: mol_type = other RNA
tcagatgatgtaacatttta

SEQ ID NO: 11159 - RNA, 20 nt, synthetic construct
  misc_feature 1..20: note = C9Orf72 TTCN PAM targeting sequence
  source 1..20: mol_type = other RNA
aatttaaaatgttacatcat

SEQ ID NO: 11160 - RNA, 20 nt, synthetic construct
  misc_feature 1..20: note = C9Orf72 TTCN PAM targeting sequence
  source 1..20: mol_type = other RNA
tttccaatttaaaatgttac

SEQ ID NO: 11161 - RNA, 20 nt, synthetic construct
  misc_feature 1..20: note = C9Orf72 TTCN PAM targeting sequence
  source 1..20: mol_type = other RNA
cttttttaaggaagtaccaa

SEQ ID NO: 11162 - RNA, 20 nt, synthetic construct
  misc_feature 1..20: note = C9Orf72 TTCN PAM targeting sequence
  source 1..20: mol_type = other RNA
ttaaaaaagagaaaagtagt

SEQ ID NO: 11163 - RNA, 20 nt, synthetic construct
  misc_feature 1..20: note = C9Orf72 TTCN PAM targeting sequence
  source 1..20: mol_type = other RNA
tggtcatctttggtacttcc

SEQ ID NO: 11164 - RNA, 20 nt, synthetic construct
  misc_feature 1..20: note = C9Orf72 TTCN PAM targeting sequence
  source 1..20: mol_type = other RNA
tctttgcatattttaagttc

SEQ ID NO: 11165 - RNA, 20 nt, synthetic construct
  misc_feature 1..20: note = C9Orf72 TTCN PAM targeting sequence
  source 1..20: mol_type = other RNA
gcttaaaggtttcttcttcg

SEQ ID NO: 11166 - RNA, 20 nt, synthetic construct
  misc_feature 1..20: note = C9Orf72 TTCN PAM targeting sequence
  source 1..20: mol_type = other RNA
tcttcgtgtatagtgaactg

SEQ ID NO: 11167 - RNA, 20 nt, synthetic construct
  misc_feature 1..20: note = C9Orf72 TTCN PAM targeting sequence
  source 1..20: mol_type = other RNA
tcgtgtatagtgaactgtaa

SEQ ID NO: 11168 - RNA, 20 nt, synthetic construct
  misc_feature 1..20: note = C9Orf72 TTCN PAM targeting sequence
  source 1..20: mol_type = other RNA
tgtatagtgaactgtaaact

SEQ ID NO: 11169 - RNA, 20 nt, synthetic construct
  misc_feature 1..20: note = C9Orf72 TTCN PAM targeting sequence
  source 1..20: mol_type = other RNA
ctatacacgaagaagaaacc

SEQ ID NO: 11170 - RNA, 20 nt, synthetic construct
  misc_feature 1..20: note = C9Orf72 TTCN PAM targeting sequence
  source 1..20: mol_type = other RNA
gattatgttcaaataacgca

SEQ ID NO: 11171 - RNA, 20 nt, synthetic construct
  misc_feature 1..20: note = C9Orf72 TTCN PAM targeting sequence
  source 1..20: mol_type = other RNA
aataacgcaaatggcaagct

SEQ ID NO: 11172 - RNA, 20 nt, synthetic construct
  misc_feature 1..20: note = C9Orf72 TTCN PAM targeting sequence
  source 1..20: mol_type = other RNA
attttctgtatctctctttc

SEQ ID NO: 11173 - RNA, 20 nt, synthetic construct
  misc_feature 1..20: note = C9Orf72 TTCN PAM targeting sequence
  source 1..20: mol_type = other RNA
gtatctctctttcccttttc

SEQ ID NO: 11174 - RNA, 20 nt, synthetic construct
  misc_feature 1..20: note = C9Orf72 TTCN PAM targeting sequence
  source 1..20: mol_type = other RNA
cttttctgcccataaatcct

SEQ ID NO: 11175 - RNA, 20 nt, synthetic construct
  misc_feature 1..20: note = C9Orf72 TTCN PAM targeting sequence
  source 1..20: mol_type = other RNA
gcccataaatcctctccaac

SEQ ID NO: 11176 - RNA, 20 nt, synthetic construct
  misc_feature 1..20: note = C9Orf72 TTCN PAM targeting sequence
  source 1..20: mol_type = other RNA
aagcaactcagtgctgtcac

SEQ ID NO: 11177 - RNA, 20 nt, synthetic construct
  misc_feature 1..20: note = C9Orf72 TTCN PAM targeting sequence
  source 1..20: mol_type = other RNA
gtttctgggggttgcctgat

SEQ ID NO: 11178 - RNA, 20 nt, synthetic construct
  misc_feature 1..20: note = C9Orf72 TTCN PAM targeting sequence
  source 1..20: mol_type = other RNA
gggggttgcctgatcctcaa

SEQ ID NO: 11179 - RNA, 20 nt, synthetic construct
  misc_feature 1..20: note = C9Orf72 TTCN PAM targeting sequence
  source 1..20: mol_type = other RNA
ttgcccaattaaactctgtt

SEQ ID NO: 11180 - RNA, 20 nt, synthetic construct
  misc_feature 1..20: note = C9Orf72 TTCN PAM targeting sequence
  source 1..20: mol_type = other RNA
taaaaaatttaatgggtaca

SEQ ID NO: 11181 - RNA, 20 nt, synthetic construct
  misc_feature 1..20: note = C9Orf72 TTCN PAM targeting sequence
  source 1..20: mol_type = other RNA
ttgtgttacagacattccaa

SEQ ID NO: 11182 - RNA, 20 nt, synthetic construct
  misc_feature 1..20: note = C9Orf72 TTCN PAM targeting sequence
  source 1..20: mol_type = other RNA
aattatactcttagttattt

SEQ ID NO: 11183 - RNA, 20 nt, synthetic construct
  misc_feature 1..20: note = C9Orf72 TTCN PAM targeting sequence
  source 1..20: mol_type = other RNA
aaataactaagagtataatt

SEQ ID NO: 11184 - RNA, 20 nt, synthetic construct
  misc_feature 1..20: note = C9Orf72 TTCN PAM targeting sequence
  source 1..20: mol_type = other RNA
cccccaccaccattacccct

SEQ ID NO: 11185 - RNA, 20 nt, synthetic construct
  misc_feature 1..20: note = C9Orf72 TTCN PAM targeting sequence
  source 1..20: mol_type = other RNA
gaggattaccagaggctcag

SEQ ID NO: 11186 - RNA, 20 nt, synthetic construct
  misc_feature 1..20: note = C9Orf72 TTCN PAM targeting sequence
  source 1..20: mol_type = other RNA
cccattctgaggattaccag

SEQ ID NO: 11187 - RNA, 20 nt, synthetic construct
  misc_feature 1..20: note = C9Orf72 TTCN PAM targeting sequence
  source 1..20: mol_type = other RNA
tctgacaagggattaataac

SEQ ID NO: 11188 - RNA, 20 nt, synthetic construct
  misc_feature 1..20: note = C9Orf72 TTCN PAM targeting sequence
  source 1..20: mol_type = other RNA
ggttattaatcccttgtcag

SEQ ID NO: 11189 - RNA, 20 nt, synthetic construct
  misc_feature 1..20: note = C9Orf72 TTCN PAM targeting sequence
  source 1..20: mol_type = other RNA
ttatatattctggttattaa

SEQ ID NO: 11190 - RNA, 20 nt, synthetic construct
  misc_feature 1..20: note = C9Orf72 TTCN PAM targeting sequence
  source 1..20: mol_type = other RNA
tattgagttgtttgagttct

SEQ ID NO: 11191 - RNA, 20 nt, synthetic construct
  misc_feature 1..20: note = C9Orf72 TTCN PAM targeting sequence
  source 1..20: mol_type = other RNA
gatctttgcccatttttaaa

SEQ ID NO: 11192 - RNA, 20 nt, synthetic construct
  misc_feature 1..20: note = C9Orf72 TTCN PAM targeting sequence
  source 1..20: mol_type = other RNA
agagaagacatacaaatggc

SEQ ID NO: 11193 - RNA, 20 nt, synthetic construct
  misc_feature 1..20: note = C9Orf72 TTCN PAM targeting sequence
  source 1..20: mol_type = other RNA
cttgaaaaatgtctattcag

SEQ ID NO: 11194 - RNA, 20 nt, synthetic construct
  misc_feature 1..20: note = C9Orf72 TTCN PAM targeting sequence
  source 1..20: mol_type = other RNA
ctcatgatcggtgatgttga

SEQ ID NO: 11195 - RNA, 20 nt, synthetic construct
  misc_feature 1..20: note = C9Orf72 TTCN PAM targeting sequence
  source 1..20: mol_type = other RNA
ttgtagttttgatttgcatt

SEQ ID NO: 11196 - RNA, 20 nt, synthetic construct
  misc_feature 1..20: note = C9Orf72 TTCN PAM targeting sequence
  source 1..20: mol_type = other RNA
ctctagtgataatggcattt

SEQ ID NO: 11197 - RNA, 20 nt, synthetic construct
  misc_feature 1..20: note = C9Orf72 TTCN PAM targeting sequence
  source 1..20: mol_type = other RNA
aaagacaggcaataaggaat

SEQ ID NO: 11198 - RNA, 20 nt, synthetic construct
  misc_feature 1..20: note = C9Orf72 TTCN PAM targeting sequence
  source 1..20: mol_type = other RNA
ttattgcctgtcttttgaac

SEQ ID NO: 11199 - RNA, 20 nt, synthetic construct
  misc_feature 1..20: note = C9Orf72 TTCN PAM targeting sequence
  source 1..20: mol_type = other RNA
tgccaatattccttattgcc

SEQ ID NO: 11200 - RNA, 20 nt, synthetic construct
  misc_feature 1..20: note = C9Orf72 TTCN PAM targeting sequence
  source 1..20: mol_type = other RNA
taacaggtggaagtgatgag

SEQ ID NO: 11201 - RNA, 20 nt, synthetic construct
  misc_feature 1..20: note = C9Orf72 TTCN PAM targeting sequence
  source 1..20: mol_type = other RNA
acctgttaagaaaaacttta

SEQ ID NO: 11202 - RNA, 20 nt, synthetic construct
  misc_feature 1..20: note = C9Orf72 TTCN PAM targeting sequence
  source 1..20: mol_type = other RNA
tacctcttcctgaatttttc

SEQ ID NO: 11203 - RNA, 20 nt, synthetic construct
  misc_feature 1..20: note = C9Orf72 TTCN PAM targeting sequence
  source 1..20: mol_type = other RNA
tgaatttttccttcagtatt

SEQ ID NO: 11204 - RNA, 20 nt, synthetic construct
  misc_feature 1..20: note = C9Orf72 TTCN PAM targeting sequence
  source 1..20: mol_type = other RNA
ggaagaggtaggaaggatat

SEQ ID NO: 11205 - RNA, 20 nt, synthetic construct
  misc_feature 1..20: note = C9Orf72 TTCN PAM targeting sequence
  source 1..20: mol_type = other RNA
ttcagtatttatttagctac

SEQ ID NO: 11206 - RNA, 20 nt, synthetic construct
  misc_feature 1..20: note = C9Orf72 TTCN PAM targeting sequence
  source 1..20: mol_type = other RNA
gtatttatttagctactatt

SEQ ID NO: 11207 - RNA, 20 nt, synthetic construct
  misc_feature 1..20: note = C9Orf72 TTCN PAM targeting sequence
  source 1..20: mol_type = other RNA
gcctcccctaaggtcatatt

SEQ ID NO: 11208 - RNA, 20 nt, synthetic construct
  misc_feature 1..20: note = C9Orf72 TTCN PAM targeting sequence
  source 1..20: mol_type = other RNA
gacctagcataaatatgacc

SEQ ID NO: 11209 - RNA, 20 nt, synthetic construct
  misc_feature 1..20: note = C9Orf72 TTCN PAM targeting sequence
  source 1..20: mol_type = other RNA
ctttgcacctctctccttca

SEQ ID NO: 11210 - RNA, 20 nt, synthetic construct
  misc_feature 1..20: note = C9Orf72 TTCN PAM targeting sequence
  source 1..20: mol_type = other RNA
actcctatgtaagccatggt

SEQ ID NO: 11211 - RNA, 20 nt, synthetic construct
  misc_feature 1..20: note = C9Orf72 TTCN PAM targeting sequence
  source 1..20: mol_type = other RNA
tttcctcctctacccccacc

SEQ ID NO: 11212 - RNA, 20 nt, synthetic construct
  misc_feature 1..20: note = C9Orf72 TTCN PAM targeting sequence
  source 1..20: mol_type = other RNA
tcctctacccccaccaacca

SEQ ID NO: 11213 - RNA, 20 nt, synthetic construct
  misc_feature 1..20: note = C9Orf72 TTCN PAM targeting sequence
  source 1..20: mol_type = other RNA
gctttggttggtgggggtag

SEQ ID NO: 11214 - RNA, 20 nt, synthetic construct
  misc_feature 1..20: note = C9Orf72 TTCN PAM targeting sequence
  source 1..20: mol_type = other RNA
aaccagctacaattagtatt

SEQ ID NO: 11215 - RNA, 20 nt, synthetic construct
  misc_feature 1..20: note = C9Orf72 TTCN PAM targeting sequence
  source 1..20: mol_type = other RNA
gtaccacagtaatactttca

SEQ ID NO: 11216 - RNA, 20 nt, synthetic construct
  misc_feature 1..20: note = C9Orf72 TTCN PAM targeting sequence
  source 1..20: mol_type = other RNA
acatatctagtaatcaaaaa

SEQ ID NO: 11217 - RNA, 20 nt, synthetic construct
  misc_feature 1..20: note = C9Orf72 TTCN PAM targeting sequence
  source 1..20: mol_type = other RNA
taaaattaaacttgatacat

SEQ ID NO: 11218 - RNA, 20 nt, synthetic construct
  misc_feature 1..20: note = C9Orf72 TTCN PAM targeting sequence
  source 1..20: mol_type = other RNA
ttcataaaattaaacttgat

SEQ ID NO: 11219 - RNA, 20 nt, synthetic construct
  misc_feature 1..20: note = C9Orf72 TTCN PAM targeting sequence
  source 1..20: mol_type = other RNA
taacataaatatattattcc

SEQ ID NO: 11220 - RNA, 20 nt, synthetic construct
  misc_feature 1..20: note = C9Orf72 TTCN PAM targeting sequence
  source 1..20: mol_type = other RNA
ttttatatatgtactaattt

SEQ ID NO: 11221 - RNA, 20 nt, synthetic construct
  misc_feature 1..20: note = C9Orf72 TTCN PAM targeting sequence
  source 1..20: mol_type = other RNA
ttttaatatatgtattcatt

SEQ ID NO: 11222 - RNA, 20 nt, synthetic construct
  misc_feature 1..20: note = C9Orf72 TTCN PAM targeting sequence
  source 1..20: mol_type = other RNA
cagtgtattcattttaatat

SEQ ID NO: 11223 - RNA, 20 nt, synthetic construct
  misc_feature 1..20: note = C9Orf72 TTCN PAM targeting sequence
  source 1..20: mol_type = other RNA
tccactcaattactcttacc

SEQ ID NO: 11224 - RNA, 20 nt, synthetic construct
  misc_feature 1..20: note = C9Orf72 TTCN PAM targeting sequence
  source 1..20: mol_type = other RNA
tataaagggtaagagtaatt

SEQ ID NO: 11225 - RNA, 20 nt, synthetic construct
  misc_feature 1..20: note = C9Orf72 TTCN PAM targeting sequence
  source 1..20: mol_type = other RNA
agccaatttgtgtaccttta

SEQ ID NO: 11226 - RNA, 20 nt, synthetic construct
  misc_feature 1..20: note = C9Orf72 TTCN PAM targeting sequence
  source 1..20: mol_type = other RNA
atttatattaagagataata

SEQ ID NO: 11227 - RNA, 20 nt, synthetic construct
  misc_feature 1..20: note = C9Orf72 TTCN PAM targeting sequence
  source 1..20: mol_type = other RNA
tccatttatattaagagata

SEQ ID NO: 11228 - RNA, 20 nt, synthetic construct
  misc_feature 1..20: note = C9Orf72 TTCN PAM targeting sequence
  source 1..20: mol_type = other RNA
tttttagacaaaaagtctta

SEQ ID NO: 11229 - RNA, 20 nt, synthetic construct
  misc_feature 1..20: note = C9Orf72 TTCN PAM targeting sequence
  source 1..20: mol_type = other RNA
ttcaaccatctgtcttcctt

SEQ ID NO: 11230 - RNA, 20 nt, synthetic construct
  misc_feature 1..20: note = C9Orf72 TTCN PAM targeting sequence
  source 1..20: mol_type = other RNA
accatctgtcttccttccat

SEQ ID NO: 11231 - RNA, 20 nt, synthetic construct
  misc_feature 1..20: note = C9Orf72 TTCN PAM targeting sequence
  source 1..20: mol_type = other RNA
ttccatgtcagcgcatagag

SEQ ID NO: 11232 - RNA, 20 nt, synthetic construct
  misc_feature 1..20: note = C9Orf72 TTCN PAM targeting sequence
  source 1..20: mol_type = other RNA
atgtcagcgcatagagaact

SEQ ID NO: 11233 - RNA, 20 nt, synthetic construct
  misc_feature 1..20: note = C9Orf72 TTCN PAM targeting sequence
  source 1..20: mol_type = other RNA
ctatgcgctgacatggaagg

SEQ ID NO: 11234 - RNA, 20 nt, synthetic construct
  misc_feature 1..20: note = C9Orf72 TTCN PAM targeting sequence
  source 1..20: mol_type = other RNA
tctttttttttttttttgac

SEQ ID NO: 11235 - RNA, 20 nt, synthetic construct
  misc_feature 1..20: note = C9Orf72 TTCN PAM targeting sequence
  source 1..20: mol_type = other RNA
tgccattctccggcctcagc

SEQ ID NO: 11236 - RNA, 20 nt, synthetic construct
  misc_feature 1..20: note = C9Orf72 TTCN PAM targeting sequence
  source 1..20: mol_type = other RNA
ccggcctcagcctcccgaat

SEQ ID NO: 11237 - RNA, 20 nt, synthetic construct
  misc_feature 1..20: note = C9Orf72 TTCN PAM targeting sequence
  source 1..20: mol_type = other RNA
ggaggctgaggccggagaat

SEQ ID NO: 11238 - RNA, 20 nt, synthetic construct
  misc_feature 1..20: note = C9Orf72 TTCN PAM targeting sequence
  source 1..20: mol_type = other RNA
ccgtgttagccaggatggtc

SEQ ID NO: 11239 - RNA, 20 nt, synthetic construct
  misc_feature 1..20: note = C9Orf72 TTCN PAM targeting sequence
  source 1..20: mol_type = other RNA
tcattctttctaagggctgc

SEQ ID NO: 11240 - RNA, 20 nt, synthetic construct
  misc_feature 1..20: note = C9Orf72 TTCN PAM targeting sequence
  source 1..20: mol_type = other RNA
ttctaagggctgcagagtat

SEQ ID NO: 11241 - RNA, 20 nt, synthetic construct
  misc_feature 1..20: note = C9Orf72 TTCN PAM targeting sequence
  source 1..20: mol_type = other RNA
aagggctgcagagtattcat

SEQ ID NO: 11242 - RNA, 20 nt, synthetic construct
  misc_feature 1..20: note = C9Orf72 TTCN PAM targeting sequence
  source 1..20: mol_type = other RNA
tgaaccgtagtcatgaaacc

SEQ ID NO: 11243 - RNA, 20 nt, synthetic construct
  misc_feature 1..20: note = C9Orf72 TTCN PAM targeting sequence
  source 1..20: mol_type = other RNA
tgaatactctgcagccctta

SEQ ID NO: 11244 - RNA, 20 nt, synthetic construct
  misc_feature 1..20: note = C9Orf72 TTCN PAM targeting sequence
  source 1..20: mol_type = other RNA
tgactacggttcatgaatac

SEQ ID NO: 11245 - RNA, 20 nt, synthetic construct
  misc_feature 1..20: note = C9Orf72 TTCN PAM targeting sequence
  source 1..20: mol_type = other RNA
ggttgttgctattacaaaca

SEQ ID NO: 11246 - RNA, 20 nt, synthetic construct
  misc_feature 1..20: note = C9Orf72 TTCN PAM targeting sequence
  source 1..20: mol_type = other RNA
gtaatgaatgactgcataca

SEQ ID NO: 11247 - RNA, 20 nt, synthetic construct
  misc_feature 1..20: note = C9Orf72 TTCN PAM targeting sequence
  source 1..20: mol_type = other RNA
ttacagaattgtttgtaata

SEQ ID NO: 11248 - RNA, 20 nt, synthetic construct
  misc_feature 1..20: note = C9Orf72 TTCN PAM targeting sequence
  source 1..20: mol_type = other RNA
taagtgtgcaggtgtaccct

SEQ ID NO: 11249 - RNA, 20 nt, synthetic construct
  misc_feature 1..20: note = C9Orf72 TTCN PAM targeting sequence
  source 1..20: mol_type = other RNA
tagaattgctaggataaatg

SEQ ID NO: 11250 - RNA, 20 nt, synthetic construct
  misc_feature 1..20: note = C9Orf72 TTCN PAM targeting sequence
  source 1..20: mol_type = other RNA
atgaatggggatttatctta

SEQ ID NO: 11251 - RNA, 20 nt, synthetic construct
  misc_feature 1..20: note = C9Orf72 TTCN PAM targeting sequence
  source 1..20: mol_type = other RNA
cctcccccccaaaaatcccc

SEQ ID NO: 11252 - RNA, 20 nt, synthetic construct
  misc_feature 1..20: note = C9Orf72 TTCN PAM targeting sequence
  source 1..20: mol_type = other RNA
tccataagtgttgcatcatt

SEQ ID NO: 11253 - RNA, 20 nt, synthetic construct
  misc_feature 1..20: note = C9Orf72 TTCN PAM targeting sequence
  source 1..20: mol_type = other RNA
ataagtgttgcatcattttc

SEQ ID NO: 11254 - RNA, 20 nt, synthetic construct
  misc_feature 1..20: note = C9Orf72 TTCN PAM targeting sequence
  source 1..20: mol_type = other RNA
ttttctccagtaattcacaa

SEQ ID NO: 11255 - RNA, 20 nt, synthetic construct
  misc_feature 1..20: note = C9Orf72 TTCN PAM targeting sequence
  source 1..20: mol_type = other RNA
ccagtaattcacaaggaatt

SEQ ID NO: 11256 - RNA, 20 nt, synthetic construct
  misc_feature 1..20: note = C9Orf72 TTCN PAM targeting sequence
  source 1..20: mol_type = other RNA
caaggaattcatgttttccc

SEQ ID NO: 11257 - RNA, 20 nt, synthetic construct
  misc_feature 1..20: note = C9Orf72 TTCN PAM targeting sequence
  source 1..20: mol_type = other RNA
ttgtgaattactggagaaaa

SEQ ID NO: 11258 - RNA, 20 nt, synthetic construct
  misc_feature 1..20: note = C9Orf72 TTCN PAM targeting sequence
  source 1..20: mol_type = other RNA
tgttttcccacagatctacc

SEQ ID NO: 11259 - RNA, 20 nt, synthetic construct
  misc_feature 1..20: note = C9Orf72 TTCN PAM targeting sequence
  source 1..20: mol_type = other RNA
cacagatctaccaaacaaat

SEQ ID NO: 11260 - RNA, 20 nt, synthetic construct
  misc_feature 1..20: note = C9Orf72 TTCN PAM targeting sequence
  source 1..20: mol_type = other RNA
aaaacatccaaatgattaac

SEQ ID NO: 11261 - RNA, 20 nt, synthetic construct
  misc_feature 1..20: note = C9Orf72 TTCN PAM targeting sequence
  source 1..20: mol_type = other RNA
ataggtgagaagttgtaact

SEQ ID NO: 11262 - RNA, 20 nt, synthetic construct
  misc_feature 1..20: note = C9Orf72 TTCN PAM targeting sequence
  source 1..20: mol_type = other RNA
cacctatagaattcaaaaac

SEQ ID NO: 11263 - RNA, 20 nt, synthetic construct
  misc_feature 1..20: note = C9Orf72 TTCN PAM targeting sequence
  source 1..20: mol_type = other RNA
ttaactgtgattgcagttga

SEQ ID NO: 11264 - RNA, 20 nt, synthetic construct
  misc_feature 1..20: note = C9Orf72 TTCN PAM targeting sequence
  source 1..20: mol_type = other RNA
actgcaatcacagttaaaga

SEQ ID NO: 11265 - RNA, 20 nt, synthetic construct
  misc_feature 1..20: note = C9Orf72 TTCN PAM targeting sequence
  source 1..20: mol_type = other RNA
gatgggaagaattcaagatg

SEQ ID NO: 11266 - RNA, 20 nt, synthetic construct
  misc_feature 1..20: note = C9Orf72 TTCN PAM targeting sequence
  source 1..20: mol_type = other RNA
catctgaaaaagtttcaact

SEQ ID NO: 11267 - RNA, 20 nt, synthetic construct
  misc_feature 1..20: note = C9Orf72 TTCN PAM targeting sequence
  source 1..20: mol_type = other RNA
tcccatctgaaaaagtttca

SEQ ID NO: 11268 - RNA, 20 nt, synthetic construct
  misc_feature 1..20: note = C9Orf72 TTCN PAM targeting sequence
  source 1..20: mol_type = other RNA
agatgctagatgagtagcag

SEQ ID NO: 11269 - RNA, 20 nt, synthetic construct
  misc_feature 1..20: note = C9Orf72 TTCN PAM targeting sequence
  source 1..20: mol_type = other RNA
ctctgtgagagtagcacaca

SEQ ID NO: 11270 - RNA, 20 nt, synthetic construct
  misc_feature 1..20: note = C9Orf72 TTCN PAM targeting sequence
  source 1..20: mol_type = other RNA
ttaggtgatctacttgcaga

SEQ ID NO: 11271 - RNA, 20 nt, synthetic construct
  misc_feature 1..20: note = C9Orf72 TTCN PAM targeting sequence
  source 1..20: mol_type = other RNA
ctgtgtcccctcactccctt

SEQ ID NO: 11272 - RNA, 20 nt, synthetic construct
  misc_feature 1..20: note = C9Orf72 TTCN PAM targeting sequence
  source 1..20: mol_type = other RNA
ctgttctctgtgtcccctca

SEQ ID NO: 11273 - RNA, 20 nt, synthetic construct
  misc_feature 1..20: note = C9Orf72 TTCN PAM targeting sequence
  source 1..20: mol_type = other RNA
ctcttccctgttctctgtgt

SEQ ID NO: 11274 - RNA, 20 nt, synthetic construct
  misc_feature 1..20: note = C9Orf72 TTCN PAM targeting sequence
  source 1..20: mol_type = other RNA
cctggctccatgcccatctt

SEQ ID NO: 11275 - RNA, 20 nt, synthetic construct
  misc_feature 1..20: note = C9Orf72 TTCN PAM targeting sequence
  source 1..20: mol_type = other RNA
ctatgttggggagcttcccc

SEQ ID NO: 11276 - RNA, 20 nt, synthetic construct
  misc_feature 1..20: note = C9Orf72 TTCN PAM targeting sequence
  source 1..20: mol_type = other RNA
acagggacctgtgaaatcct

SEQ ID NO: 11277 - RNA, 20 nt, synthetic construct
  misc_feature 1..20: note = C9Orf72 TTCN PAM targeting sequence
  source 1..20: mol_type = other RNA
caggtccctgtggaaagtga

SEQ ID NO: 11278 - RNA, 20 nt, synthetic construct
  misc_feature 1..20: note = C9Orf72 TTCN PAM targeting sequence
  source 1..20: mol_type = other RNA
caggatttcacaggtccctg

SEQ ID NO: 11279 - RNA, 20 nt, synthetic construct
  misc_feature 1..20: note = C9Orf72 TTCN PAM targeting sequence
  source 1..20: mol_type = other RNA
ccagttcccaggatttcaca

SEQ ID NO: 11280 - RNA, 20 nt, synthetic construct
  misc_feature 1..20: note = C9Orf72 TTCN PAM targeting sequence
  source 1..20: mol_type = other RNA
tcccaatacctgatccgtgt

SEQ ID NO: 11281 - RNA, 20 nt, synthetic construct
  misc_feature 1..20: note = C9Orf72 TTCN PAM targeting sequence
  source 1..20: mol_type = other RNA
tgtggacttgagttttgcct

SEQ ID NO: 11282 - RNA, 20 nt, synthetic construct
  misc_feature 1..20: note = C9Orf72 TTCN PAM targeting sequence
  source 1..20: mol_type = other RNA
ctcagggctatggcagctgg

SEQ ID NO: 11283 - RNA, 20 nt, synthetic construct
  misc_feature 1..20: note = C9Orf72 TTCN PAM targeting sequence
  source 1..20: mol_type = other RNA
ctccccatcatcagacaagg

SEQ ID NO: 11284 - RNA, 20 nt, synthetic construct
  misc_feature 1..20: note = C9Orf72 TTCN PAM targeting sequence
  source 1..20: mol_type = other RNA
agcacaatggcctggcctct

SEQ ID NO: 11285 - RNA, 20 nt, synthetic construct
  misc_feature 1..20: note = C9Orf72 TTCN PAM targeting sequence
  source 1..20: mol_type = other RNA
ggcagaggccaggccattgt

SEQ ID NO: 11286 - RNA, 20 nt, synthetic construct
  misc_feature 1..20: note = C9Orf72 TTCN PAM targeting sequence
  source 1..20: mol_type = other RNA
agggtaacagagagctgtgc

SEQ ID NO: 11287 - RNA, 20 nt, synthetic construct
  misc_feature 1..20: note = C9Orf72 TTCN PAM targeting sequence
  source 1..20: mol_type = other RNA
gagagtaggggatcccccac

SEQ ID NO: 11288 - RNA, 20 nt, synthetic construct
  misc_feature 1..20: note = C9Orf72 TTCN PAM targeting sequence
  source 1..20: mol_type = other RNA
tggactggctcaggaacagg

SEQ ID NO: 11289 - RNA, 20 nt, synthetic construct
  misc_feature 1..20: note = C9Orf72 TTCN PAM targeting sequence
  source 1..20: mol_type = other RNA
tgagccagtccatgaaccca

SEQ ID NO: 11290 - RNA, 20 nt, synthetic construct
  misc_feature 1..20: note = C9Orf72 TTCN PAM targeting sequence
  source 1..20: mol_type = other RNA
ctggctggccctgcacaagg

SEQ ID NO: 11291 - RNA, 20 nt, synthetic construct
  misc_feature 1..20: note = C9Orf72 TTCN PAM targeting sequence
  source 1..20: mol_type = other RNA
agccgcagcctctgcctgag

SEQ ID NO: 11292 - RNA, 20 nt, synthetic construct
  misc_feature 1..20: note = C9Orf72 TTCN PAM targeting sequence
  source 1..20: mol_type = other RNA
tttattaggtgtcctgggct

SEQ ID NO: 11293 - RNA, 20 nt, synthetic construct
  misc_feature 1..20: note = C9Orf72 TTCN PAM targeting sequence
  source 1..20: mol_type = other RNA
tgggccttgggggagccctc

SEQ ID NO: 11294 - RNA, 20 nt, synthetic construct
  misc_feature 1..20: note = C9Orf72 TTCN PAM targeting sequence
  source 1..20: mol_type = other RNA
aatatacagcacctgtgaaa

SEQ ID NO: 11295 - RNA, 20 nt, synthetic construct
  misc_feature 1..20: note = C9Orf72 TTCN PAM targeting sequence
  source 1..20: mol_type = other RNA
caggtgctgtatattggaaa

SEQ ID NO: 11296 - RNA, 20 nt, synthetic construct
  misc_feature 1..20: note = C9Orf72 TTCN PAM targeting sequence
  source 1..20: mol_type = other RNA
aagggccaaagctctgtaca

SEQ ID NO: 11297 - RNA, 20 nt, synthetic construct
  misc_feature 1..20: note = C9Orf72 TTCN PAM targeting sequence
  source 1..20: mol_type = other RNA
gagtgctttcaaagggccaa

SEQ ID NO: 11298 - RNA, 20 nt, synthetic construct
  misc_feature 1..20: note = C9Orf72 TTCN PAM targeting sequence
  source 1..20: mol_type = other RNA
ttctgagtgctttcaaaggg

SEQ ID NO: 11299 - RNA, 20 nt, synthetic construct
  misc_feature 1..20: note = C9Orf72 TTCN PAM targeting sequence
  source 1..20: mol_type = other RNA
attaacaatagtgtacattg

SEQ ID NO: 11300 - RNA, 20 nt, synthetic construct
  misc_feature 1..20: note = C9Orf72 TTCN PAM targeting sequence
  source 1..20: mol_type = other RNA
tgagatgactctttaacata

SEQ ID NO: 11301 - RNA, 20 nt, synthetic construct
  misc_feature 1..20: note = C9Orf72 TTCN PAM targeting sequence
  source 1..20: mol_type = other RNA
aaaaagctggtgtctcctta

SEQ ID NO: 11302 - RNA, 20 nt, synthetic construct
  misc_feature 1..20: note = C9Orf72 TTCN PAM targeting sequence
  source 1..20: mol_type = other RNA
atgtatgtcatttgagtcat

SEQ ID NO: 11303 - RNA, 20 nt, synthetic construct
  misc_feature 1..20: note = C9Orf72 TTCN PAM targeting sequence
  source 1..20: mol_type = other RNA
gaatctggatggcaaggaag

SEQ ID NO: 11304 - RNA, 20 nt, synthetic construct
  misc_feature 1..20: note = C9Orf72 TTCN PAM targeting sequence
  source 1..20: mol_type = other RNA
gaattctatgtatgtcattt

SEQ ID NO: 11305 - RNA, 20 nt, synthetic construct
  misc_feature 1..20: note = C9Orf72 TTCN PAM targeting sequence
  source 1..20: mol_type = other RNA
ttgccatccagattctgaat

SEQ ID NO: 11306 - RNA, 20 nt, synthetic construct
  misc_feature 1..20: note = C9Orf72 TTCN PAM targeting sequence
  source 1..20: mol_type = other RNA
atgatctcctggatcttgat

SEQ ID NO: 11307 - RNA, 20 nt, synthetic construct
  misc_feature 1..20: note = C9Orf72 TTCN PAM targeting sequence
  source 1..20: mol_type = other RNA
ttgtattgggtttcaatgat

SEQ ID NO: 11308 - RNA, 20 nt, synthetic construct
  misc_feature 1..20: note = C9Orf72 TTCN PAM targeting sequence
  source 1..20: mol_type = other RNA
ttgagttccttgtattgggt

SEQ ID NO: 11309 - RNA, 20 nt, synthetic construct
  misc_feature 1..20: note = C9Orf72 TTCN PAM targeting sequence
  source 1..20: mol_type = other RNA
ggattccttgagttccttgt

SEQ ID NO: 11310 - RNA, 20 nt, synthetic construct
  misc_feature 1..20: note = C9Orf72 TTCN PAM targeting sequence
  source 1..20: mol_type = other RNA
tctttaagctctttgatcat

SEQ ID NO: 11311 - RNA, 20 nt, synthetic construct
  misc_feature 1..20: note = C9Orf72 TTCN PAM targeting sequence
  source 1..20: mol_type = other RNA
taaaatagctatttcatctt

SEQ ID NO: 11312 - RNA, 20 nt, synthetic construct
  misc_feature 1..20: note = C9Orf72 TTCN PAM targeting sequence
  source 1..20: mol_type = other RNA
ttcttaaaatagctatttca

SEQ ID NO: 11313 - RNA, 20 nt, synthetic construct
  misc_feature 1..20: note = C9Orf72 TTCN PAM targeting sequence
  source 1..20: mol_type = other RNA
gttttgttctttcttaaaat

SEQ ID NO: 11314 - RNA, 20 nt, synthetic construct
  misc_feature 1..20: note = C9Orf72 TTCN PAM targeting sequence
  source 1..20: mol_type = other RNA
gaaattgagggatcaacttc

SEQ ID NO: 11315 - RNA, 20 nt, synthetic construct
  misc_feature 1..20: note = C9Orf72 TTCN PAM targeting sequence
  source 1..20: mol_type = other RNA
gaagttcagttttgttcttt

SEQ ID NO: 11316 - RNA, 20 nt, synthetic construct
  misc_feature 1..20: note = C9Orf72 TTCN PAM targeting sequence
  source 1..20: mol_type = other RNA
aaaatttcataatatagtca

SEQ ID NO: 11317 - RNA, 20 nt, synthetic construct
  misc_feature 1..20: note = C9Orf72 TTCN PAM targeting sequence
  source 1..20: mol_type = other RNA
taatatagtcagaggcatta

SEQ ID NO: 11318 - RNA, 20 nt, synthetic construct
  misc_feature 1..20: note = C9Orf72 TTCN PAM targeting sequence
  source 1..20: mol_type = other RNA
gctgttaatgcctctgacta

SEQ ID NO: 11319 - RNA, 20 nt, synthetic construct
  misc_feature 1..20: note = C9Orf72 TTCN PAM targeting sequence
  source 1..20: mol_type = other RNA
tcagcttggtctgttctgct

SEQ ID NO: 11320 - RNA, 20 nt, synthetic construct
  misc_feature 1..20: note = C9Orf72 TTCN PAM targeting sequence
  source 1..20: mol_type = other RNA
ttcctcagcttggtctgttc

SEQ ID NO: 11321 - RNA, 20 nt, synthetic construct
  misc_feature 1..20: note = C9Orf72 TTCN PAM targeting sequence
  source 1..20: mol_type = other RNA
aactctgagattctttcctc

SEQ ID NO: 11322 - RNA, 20 nt, synthetic construct
  misc_feature 1..20: note = C9Orf72 TTCN PAM targeting sequence
  source 1..20: mol_type = other RNA
aataactggtcttcaaactc

SEQ ID NO: 11323 - RNA, 20 nt, synthetic construct
  misc_feature 1..20: note = C9Orf72 TTCN PAM targeting sequence
  source 1..20: mol_type = other RNA
ttatttttgtccaaccaagt

SEQ ID NO: 11324 - RNA, 20 nt, synthetic construct
  misc_feature 1..20: note = C9Orf72 TTCN PAM targeting sequence
  source 1..20: mol_type = other RNA
tttttctttatttttgtcca

SEQ ID NO: 11325 - RNA, 20 nt, synthetic construct
  misc_feature 1..20: note = C9Orf72 TTCN PAM targeting sequence
  source 1..20: mol_type = other RNA
tgttttaaattcttttttct

SEQ ID NO: 11326 - RNA, 20 nt, synthetic construct
  misc_feature 1..20: note = C9Orf72 TTCN PAM targeting sequence
  source 1..20: mol_type = other RNA
agatttatgaggttatgtaa

SEQ ID NO: 11327 - RNA, 20 nt, synthetic construct
  misc_feature 1..20: note = C9Orf72 TTCN PAM targeting sequence
  source 1..20: mol_type = other RNA
tgagaaagagagtaagcaac

SEQ ID NO: 11328 - RNA, 20 nt, synthetic construct
  misc_feature 1..20: note = C9Orf72 TTCN PAM targeting sequence
  source 1..20: mol_type = other RNA
caggaatgactgtgagtcat

SEQ ID NO: 11329 - RNA, 20 nt, synthetic construct
  misc_feature 1..20: note = C9Orf72 TTCN PAM targeting sequence
  source 1..20: mol_type = other RNA
aagttgcttactctctttct

SEQ ID NO: 11330 - RNA, 20 nt, synthetic construct
  misc_feature 1..20: note = C9Orf72 TTCN PAM targeting sequence
  source 1..20: mol_type = other RNA
tggactgcatcctcagatgt

SEQ ID NO: 11331 - RNA, 20 nt, synthetic construct
  misc_feature 1..20: note = C9Orf72 TTCN PAM targeting sequence
  source 1..20: mol_type = other RNA
cctatctcaccagagaggtg

SEQ ID NO: 11332 - RNA, 20 nt, synthetic construct
  misc_feature 1..20: note = C9Orf72 TTCN PAM targeting sequence
  source 1..20: mol_type = other RNA
agaaatacagagaactcctg

SEQ ID NO: 11333 - RNA, 20 nt, synthetic construct
  misc_feature 1..20: note = C9Orf72 TTCN PAM targeting sequence
  source 1..20: mol_type = other RNA
tgaatttgtatgcccacctc

SEQ ID NO: 11334 - RNA, 20 nt, synthetic construct
  misc_feature 1..20: note = C9Orf72 TTCN PAM targeting sequence
  source 1..20: mol_type = other RNA
ctgtatttcttgaatttgta

SEQ ID NO: 11335 - RNA, 20 nt, synthetic construct
  misc_feature 1..20: note = C9Orf72 TTCN PAM targeting sequence
  source 1..20: mol_type = other RNA
ccaaggtcaatgcaaaagaa

SEQ ID NO: 11336 - RNA, 20 nt, synthetic construct
  misc_feature 1..20: note = C9Orf72 TTCN PAM targeting sequence
  source 1..20: mol_type = other RNA
tttgcattgaccttggtgaa

SEQ ID NO: 11337 - RNA, 20 nt, synthetic construct
  misc_feature 1..20: note = C9Orf72 TTCN PAM targeting sequence
  source 1..20: mol_type = other RNA
cactagctgccttaacaatt

SEQ ID NO: 11338 - RNA, 20 nt, synthetic construct
  misc_feature 1..20: note = C9Orf72 TTCN PAM targeting sequence
  source 1..20: mol_type = other RNA
ttttgtaggtgacctgacct

SEQ ID NO: 11339 - RNA, 20 nt, synthetic construct
  misc_feature 1..20: note = C9Orf72 TTCN PAM targeting sequence
  source 1..20: mol_type = other RNA
gtcagcagaaaccttacaag

SEQ ID NO: 11340 - RNA, 20 nt, synthetic construct
  misc_feature 1..20: note = C9Orf72 TTCN PAM targeting sequence
  source 1..20: mol_type = other RNA
gctgacagaactgttgctgg

SEQ ID NO: 11341 - RNA, 20 nt, synthetic construct
  misc_feature 1..20: note = C9Orf72 TTCN PAM targeting sequence
  source 1..20: mol_type = other RNA
ggcttgtaaggtttctgctg

SEQ ID NO: 11342 - RNA, 20 nt, synthetic construct
  misc_feature 1..20: note = C9Orf72 TTCN PAM targeting sequence
  source 1..20: mol_type = other RNA
gcattattaaagaaaataaa

SEQ ID NO: 11343 - RNA, 20 nt, synthetic construct
  misc_feature 1..20: note = C9Orf72 TTCN PAM targeting sequence
  source 1..20: mol_type = other RNA
ttaataatgctgaaaatata

SEQ ID NO: 11344 - RNA, 20 nt, synthetic construct
  misc_feature 1..20: note = C9Orf72 TTCN PAM targeting sequence
  source 1..20: mol_type = other RNA
accaagaactcatatcccac

SEQ ID NO: 11345 - RNA, 20 nt, synthetic construct
  misc_feature 1..20: note = C9Orf72 TTCN PAM targeting sequence
  source 1..20: mol_type = other RNA
tggttgaaatttattttctt

SEQ ID NO: 11346 - RNA, 20 nt, synthetic construct
  misc_feature 1..20: note = C9Orf72 TTCN PAM targeting sequence
  source 1..20: mol_type = other RNA
taagtgaaggagaaatacaa

SEQ ID NO: 11347 - RNA, 20 nt, synthetic construct
  misc_feature 1..20: note = C9Orf72 TTCN PAM targeting sequence
  source 1..20: mol_type = other RNA
cttatgaaactcagtttggt

SEQ ID NO: 11348 - RNA, 20 nt, synthetic construct
  misc_feature 1..20: note = C9Orf72 TTCN PAM targeting sequence
  source 1..20: mol_type = other RNA
ccttcacttatgaaactcag

SEQ ID NO: 11349 - RNA, 20 nt, synthetic construct
  misc_feature 1..20: note = C9Orf72 TTCN PAM targeting sequence
  source 1..20: mol_type = other RNA
cagacaagcaagcaccaagg

SEQ ID NO: 11350 - RNA, 20 nt, synthetic construct
  misc_feature 1..20: note = C9Orf72 TTCN PAM targeting sequence
  source 1..20: mol_type = other RNA
ttaccaccagatgattctta

SEQ ID NO: 11351 - RNA, 20 nt, synthetic construct
  misc_feature 1..20: note = C9Orf72 TTCN PAM targeting sequence
  source 1..20: mol_type = other RNA
tacaggaaatccgtaagtga

SEQ ID NO: 11352 - RNA, 20 nt, synthetic construct
  misc_feature 1..20: note = C9Orf72 TTCN PAM targeting sequence
  source 1..20: mol_type = other RNA
tgtaagaatcatctggtggt

SEQ ID NO: 11353 - RNA, 20 nt, synthetic construct
  misc_feature 1..20: note = C9Orf72 TTCN PAM targeting sequence
  source 1..20: mol_type = other RNA
atgtttagcaatcacttacg

SEQ ID NO: 11354 - RNA, 20 nt, synthetic construct
  misc_feature 1..20: note = C9Orf72 TTCN PAM targeting sequence
  source 1..20: mol_type = other RNA
tttccatgtttagcaatcac

SEQ ID NO: 11355 - RNA, 20 nt, synthetic construct
  misc_feature 1..20: note = C9Orf72 TTCN PAM targeting sequence
  source 1..20: mol_type = other RNA
tctttcatttccatgtttag

SEQ ID NO: 11356 - RNA, 20 nt, synthetic construct
  misc_feature 1..20: note = C9Orf72 TTCN PAM targeting sequence
  source 1..20: mol_type = other RNA
ttgtgtaataagtgtatttt

SEQ ID NO: 11357 - RNA, 20 nt, synthetic construct
  misc_feature 1..20: note = C9Orf72 TTCN PAM targeting sequence
  source 1..20: mol_type = other RNA
gaagatgcatcctacatgaa

SEQ ID NO: 11358 - RNA, 20 nt, synthetic construct
  misc_feature 1..20: note = C9Orf72 TTCN PAM targeting sequence
  source 1..20: mol_type = other RNA
gaaaacagcagacagttgtg

SEQ ID NO: 11359 - RNA, 20 nt, synthetic construct
  misc_feature 1..20: note = C9Orf72 TTCN PAM targeting sequence
  source 1..20: mol_type = other RNA
tgtaggatgcatcttctgaa

SEQ ID NO: 11360 - RNA, 20 nt, synthetic construct
  misc_feature 1..20: note = C9Orf72 TTCN PAM targeting sequence
  source 1..20: mol_type = other RNA
ctttgagcctgtgagtgtca

SEQ ID NO: 11361 - RNA, 20 nt, synthetic construct
  misc_feature 1..20: note = C9Orf72 TTCN PAM targeting sequence
  source 1..20: mol_type = other RNA
ttcactttgagcctgtgagt

SEQ ID NO: 11362 - RNA, 20 nt, synthetic construct
  misc_feature 1..20: note = C9Orf72 TTCN PAM targeting sequence
  source 1..20: mol_type = other RNA
ttctttcactttgagcctgt

SEQ ID NO: 11363 - RNA, 20 nt, synthetic construct
  misc_feature 1..20: note = C9Orf72 TTCN PAM targeting sequence
  source 1..20: mol_type = other RNA
tcattctttcactttgagcc

SEQ ID NO: 11364 - RNA, 20 nt, synthetic construct
  misc_feature 1..20: note = C9Orf72 TTCN PAM targeting sequence
  source 1..20: mol_type = other RNA
tttgcatggtagatctttct

SEQ ID NO: 11365 - RNA, 20 nt, synthetic construct
  misc_feature 1..20: note = C9Orf72 TTCN PAM targeting sequence
  source 1..20: mol_type = other RNA
tgattgttgttggtttaaag

SEQ ID NO: 11366 - RNA, 20 nt, synthetic construct
  misc_feature 1..20: note = C9Orf72 TTCN PAM targeting sequence
  source 1..20: mol_type = other RNA
ttgtccttcctgattgttgt

SEQ ID NO: 11367 - RNA, 20 nt, synthetic construct
  misc_feature 1..20: note = C9Orf72 TTCN PAM targeting sequence
  source 1..20: mol_type = other RNA
attgaacaaaaagacttaac

SEQ ID NO: 11368 - RNA, 20 nt, synthetic construct
  misc_feature 1..20: note = C9Orf72 TTCN PAM targeting sequence
  source 1..20: mol_type = other RNA
attgaaccttttatcatttt

SEQ ID NO: 11369 - RNA, 20 nt, synthetic construct
  misc_feature 1..20: note = C9Orf72 TTCN PAM targeting sequence
  source 1..20: mol_type = other RNA
aaacatatatgcacccaaca

SEQ ID NO: 11370 - RNA, 20 nt, synthetic construct
  misc_feature 1..20: note = C9Orf72 TTCN PAM targeting sequence
  source 1..20: mol_type = other RNA
taaaacaaattattggccta

SEQ ID NO: 11371 - RNA, 20 nt, synthetic construct
  misc_feature 1..20: note = C9Orf72 TTCN PAM targeting sequence
  source 1..20: mol_type = other RNA
gcctcagtgatctgtctaat

SEQ ID NO: 11372 - RNA, 20 nt, synthetic construct
  misc_feature 1..20: note = C9Orf72 TTCN PAM targeting sequence
  source 1..20: mol_type = other RNA
tcagttttctgcctcagtga

SEQ ID NO: 11373 - RNA, 20 nt, synthetic construct
  misc_feature 1..20: note = C9Orf72 TTCN PAM targeting sequence
  source 1..20: mol_type = other RNA
ttcgtcagttttctgcctca

SEQ ID NO: 11374 - RNA, 20 nt, synthetic construct
  misc_feature 1..20: note = C9Orf72 TTCN PAM targeting sequence
  source 1..20: mol_type = other RNA
ggaattaaacttgacacttg

SEQ ID NO: 11375 - RNA, 20 nt, synthetic construct
  misc_feature 1..20: note = C9Orf72 TTCN PAM targeting sequence
  source 1..20: mol_type = other RNA
agaattccttcgtcagtttt

SEQ ID NO: 11376 - RNA, 20 nt, synthetic construct
  misc_feature 1..20: note = C9Orf72 TTCN PAM targeting sequence
  source 1..20: mol_type = other RNA
gtcattgttggcttgagtat

SEQ ID NO: 11377 - RNA, 20 nt, synthetic construct
  misc_feature 1..20: note = C9Orf72 TTCN PAM targeting sequence
  source 1..20: mol_type = other RNA
tctcatatgcacatggaacg

SEQ ID NO: 11378 - RNA, 20 nt, synthetic construct
  misc_feature 1..20: note = C9Orf72 TTCN PAM targeting sequence
  source 1..20: mol_type = other RNA
catatgcacatggaacgtat

SEQ ID NO: 11379 - RNA, 20 nt, synthetic construct
  misc_feature 1..20: note = C9Orf72 TTCN PAM targeting sequence
  source 1..20: mol_type = other RNA
atgtgcatatgagaagaatg

SEQ ID NO: 11380 - RNA, 20 nt, synthetic construct
  misc_feature 1..20: note = C9Orf72 TTCN PAM targeting sequence
  source 1..20: mol_type = other RNA
aagattgccccacatgctca

SEQ ID NO: 11381 - RNA, 20 nt, synthetic construct
  misc_feature 1..20: note = C9Orf72 TTCN PAM targeting sequence
  source 1..20: mol_type = other RNA
ctatgatttgagagtggcct

SEQ ID NO: 11382 - RNA, 20 nt, synthetic construct
  misc_feature 1..20: note = C9Orf72 TTCN PAM targeting sequence
  source 1..20: mol_type = other RNA
attgttatttcactatgatt

SEQ ID NO: 11383 - RNA, 20 nt, synthetic construct
  misc_feature 1..20: note = C9Orf72 TTCN PAM targeting sequence
  source 1..20: mol_type = other RNA
tggtattgatttctattgtt

SEQ ID NO: 11384 - RNA, 20 nt, synthetic construct
  misc_feature 1..20: note = C9Orf72 TTCN PAM targeting sequence
  source 1..20: mol_type = other RNA
atgcttttgtgtagttttga

SEQ ID NO: 11385 - RNA, 20 nt, synthetic construct
  misc_feature 1..20: note = C9Orf72 TTCN PAM targeting sequence
  source 1..20: mol_type = other RNA
ggagcatgtggcttaatttc

SEQ ID NO: 11386 - RNA, 20 nt, synthetic construct
  misc_feature 1..20: note = C9Orf72 TTCN PAM targeting sequence
  source 1..20: mol_type = other RNA
cccaacagttattcgggagc

SEQ ID NO: 11387 - RNA, 20 nt, synthetic construct
  misc_feature 1..20: note = C9Orf72 TTCN PAM targeting sequence
  source 1..20: mol_type = other RNA
ttgttcacccaacagttatt

SEQ ID NO: 11388 - RNA, 20 nt, synthetic construct
  misc_feature 1..20: note = C9Orf72 TTCN PAM targeting sequence
  source 1..20: mol_type = other RNA
gccttaatttcattgttcac

SEQ ID NO: 11389 - RNA, 20 nt, synthetic construct
  misc_feature 1..20: note = C9Orf72 TTCN PAM targeting sequence
  source 1..20: mol_type = other RNA
aataattttttgatttctgc

SEQ ID NO: 11390 - RNA, 20 nt, synthetic construct
  misc_feature 1..20: note = C9Orf72 TTCN PAM targeting sequence
  source 1..20: mol_type = other RNA
ttaatttcaaataatttttt

SEQ ID NO: 11391 - RNA, 20 nt, synthetic construct
  misc_feature 1..20: note = C9Orf72 TTCN PAM targeting sequence
  source 1..20: mol_type = other RNA
aaaatctttgggatgtagca

SEQ ID NO: 11392 - RNA, 20 nt, synthetic construct
  misc_feature 1..20: note = C9Orf72 TTCN PAM targeting sequence
  source 1..20: mol_type = other RNA
tcttaacactgcttttgcta

SEQ ID NO: 11393 - RNA, 20 nt, synthetic construct
  misc_feature 1..20: note = C9Orf72 TTCN PAM targeting sequence
  source 1..20: mol_type = other RNA
tcaagaggttagaaagatct

SEQ ID NO: 11394 - RNA, 20 nt, synthetic construct
  misc_feature 1..20: note = C9Orf72 TTCN PAM targeting sequence
  source 1..20: mol_type = other RNA
aacctcttgatgaaggcatt

SEQ ID NO: 11395 - RNA, 20 nt, synthetic construct
  misc_feature 1..20: note = C9Orf72 TTCN PAM targeting sequence
  source 1..20: mol_type = other RNA
tctagtgttatgttagattg

SEQ ID NO: 11396 - RNA, 20 nt, synthetic construct
  misc_feature 1..20: note = C9Orf72 TTCN PAM targeting sequence
  source 1..20: mol_type = other RNA
agttcctctagtgttatgtt

SEQ ID NO: 11397 - RNA, 20 nt, synthetic construct
  misc_feature 1..20: note = C9Orf72 TTCN PAM targeting sequence
  source 1..20: mol_type = other RNA
atctcacagctagcagagga

SEQ ID NO: 11398 - RNA, 20 nt, synthetic construct
  misc_feature 1..20: note = C9Orf72 TTCN PAM targeting sequence
  source 1..20: mol_type = other RNA
tctgctagctgtgagattga

SEQ ID NO: 11399 - RNA, 20 nt, synthetic construct
  misc_feature 1..20: note = C9Orf72 TTCN PAM targeting sequence
  source 1..20: mol_type = other RNA
ctaacattttatggactttt

SEQ ID NO: 11400 - RNA, 20 nt, synthetic construct
  misc_feature 1..20: note = C9Orf72 TTCN PAM targeting sequence
  source 1..20: mol_type = other RNA
taagaataaacaagactaat

SEQ ID NO: 11401 - RNA, 20 nt, synthetic construct
  misc_feature 1..20: note = C9Orf72 TTCN PAM targeting sequence
  source 1..20: mol_type = other RNA
tatgaaaaaccaactctttg

SEQ ID NO: 11402 - RNA, 20 nt, synthetic construct
  misc_feature 1..20: note = C9Orf72 TTCN PAM targeting sequence
  source 1..20: mol_type = other RNA
agctagcagtctattagtct

SEQ ID NO: 11403 - RNA, 20 nt, synthetic construct
  misc_feature 1..20: note = C9Orf72 TTCN PAM targeting sequence
  source 1..20: mol_type = other RNA
tcgtttttctagctagcagt

SEQ ID NO: 11404 - RNA, 20 nt, synthetic construct
  misc_feature 1..20: note = C9Orf72 TTCN PAM targeting sequence
  source 1..20: mol_type = other RNA
gtctgtttttcctcgttttt

SEQ ID NO: 11405 - RNA, 20 nt, synthetic construct
  misc_feature 1..20: note = C9Orf72 TTCN PAM targeting sequence
  source 1..20: mol_type = other RNA
aaaaagcacaagaaatgaca

SEQ ID NO: 11406 - RNA, 20 nt, synthetic construct
  misc_feature 1..20: note = C9Orf72 TTCN PAM targeting sequence
  source 1..20: mol_type = other RNA
tgtgctttttggaacttctg

SEQ ID NO: 11407 - RNA, 20 nt, synthetic construct
  misc_feature 1..20: note = C9Orf72 TTCN PAM targeting sequence
  source 1..20: mol_type = other RNA
gtgggattggtcgtaatgtc

SEQ ID NO: 11408 - RNA, 20 nt, synthetic construct
  misc_feature 1..20: note = C9Orf72 TTCN PAM targeting sequence
  source 1..20: mol_type = other RNA
gagaccgttatgaacacctc

SEQ ID NO: 11409 - RNA, 20 nt, synthetic construct
  misc_feature 1..20: note = C9Orf72 TTCN PAM targeting sequence
  source 1..20: mol_type = other RNA
taacggtctctgaaaatctt

SEQ ID NO: 11410 - RNA, 20 nt, synthetic construct
  misc_feature 1..20: note = C9Orf72 TTCN PAM targeting sequence
  source 1..20: mol_type = other RNA
tactttgtgtgcatagaggt

SEQ ID NO: 11411 - RNA, 20 nt, synthetic construct
  misc_feature 1..20: note = C9Orf72 TTCN PAM targeting sequence
  source 1..20: mol_type = other RNA
tctagatttcctactttgtg

SEQ ID NO: 11412 - RNA, 20 nt, synthetic construct
  misc_feature 1..20: note = C9Orf72 TTCN PAM targeting sequence
  source 1..20: mol_type = other RNA
tggaaacatacaacctccca

SEQ ID NO: 11413 - RNA, 20 nt, synthetic construct
  misc_feature 1..20: note = C9Orf72 TTCN PAM targeting sequence
  source 1..20: mol_type = other RNA
aggaatttatccatttcctc

SEQ ID NO: 11414 - RNA, 20 nt, synthetic construct
  misc_feature 1..20: note = C9Orf72 TTCN PAM targeting sequence
  source 1..20: mol_type = other RNA
atcttgggaggttgtatgtt

SEQ ID NO: 11415 - RNA, 20 nt, synthetic construct
  misc_feature 1..20: note = C9Orf72 TTCN PAM targeting sequence
  source 1..20: mol_type = other RNA
gtcctggttcaatcttggga

SEQ ID NO: 11416 - RNA, 20 nt, synthetic construct
  misc_feature 1..20: note = C9Orf72 TTCN PAM targeting sequence
  source 1..20: mol_type = other RNA
cttccgtcctggttcaatct

SEQ ID NO: 11417 - RNA, 20 nt, synthetic construct
  misc_feature 1..20: note = C9Orf72 TTCN PAM targeting sequence
  source 1..20: mol_type = other RNA
agttttcacttccgtcctgg

SEQ ID NO: 11418 - RNA, 20 nt, synthetic construct
  misc_feature 1..20: note = C9Orf72 TTCN PAM targeting sequence
  source 1..20: mol_type = other RNA
aaaattgaatcagtaataaa

SEQ ID NO: 11419 - RNA, 20 nt, synthetic construct
  misc_feature 1..20: note = C9Orf72 TTCN PAM targeting sequence
  source 1..20: mol_type = other RNA
attttggaacttgttatagg

SEQ ID NO: 11420 - RNA, 20 nt, synthetic construct
  misc_feature 1..20: note = C9Orf72 TTCN PAM targeting sequence
  source 1..20: mol_type = other RNA
caactgaattctaccaagca

SEQ ID NO: 11421 - RNA, 20 nt, synthetic construct
  misc_feature 1..20: note = C9Orf72 TTCN PAM targeting sequence
  source 1..20: mol_type = other RNA
gttgtgaatccatctggtcc

SEQ ID NO: 11422 - RNA, 20 nt, synthetic construct
  misc_feature 1..20: note = C9Orf72 TTCN PAM targeting sequence
  source 1..20: mol_type = other RNA
accaagcatacaaagaagaa

SEQ ID NO: 11423 - RNA, 20 nt, synthetic construct
  misc_feature 1..20: note = C9Orf72 TTCN PAM targeting sequence
  source 1..20: mol_type = other RNA
ttgtatgcttggtagaattc

SEQ ID NO: 11424 - RNA, 20 nt, synthetic construct
  misc_feature 1..20: note = C9Orf72 TTCN PAM targeting sequence
  source 1..20: mol_type = other RNA
tctttgtatgcttggtagaa

SEQ ID NO: 11425 - RNA, 20 nt, synthetic construct
  misc_feature 1..20: note = C9Orf72 TTCN PAM targeting sequence
  source 1..20: mol_type = other RNA
gtaagattactatcagttct

SEQ ID NO: 11426 - RNA, 20 nt, synthetic construct
  misc_feature 1..20: note = C9Orf72 TTCN PAM targeting sequence
  source 1..20: mol_type = other RNA
ataatattaaggagaggggc

SEQ ID NO: 11427 - RNA, 20 nt, synthetic construct
  misc_feature 1..20: note = C9Orf72 TTCN PAM targeting sequence
  source 1..20: mol_type = other RNA
acaatgccagcatcatcctg

SEQ ID NO: 11428 - RNA, 20 nt, synthetic construct
  misc_feature 1..20: note = C9Orf72 TTCN PAM targeting sequence
  source 1..20: mol_type = other RNA
ttgtgtctctggcagatttt

SEQ ID NO: 11429 - RNA, 20 nt, synthetic construct
  misc_feature 1..20: note = C9Orf72 TTCN PAM targeting sequence
  source 1..20: mol_type = other RNA
tttttcattgtgtctctggc

SEQ ID NO: 11430 - RNA, 20 nt, synthetic construct
  misc_feature 1..20: note = C9Orf72 TTCN PAM targeting sequence
  source 1..20: mol_type = other RNA
ggacaatatctctgattaac

SEQ ID NO: 11431 - RNA, 20 nt, synthetic construct
  misc_feature 1..20: note = C9Orf72 TTCN PAM targeting sequence
  source 1..20: mol_type = other RNA
tgtttatgttaatcagagat

SEQ ID NO: 11432 - RNA, 20 nt, synthetic construct
  misc_feature 1..20: note = C9Orf72 TTCN PAM targeting sequence
  source 1..20: mol_type = other RNA
tgatttagtttgctcatatt

SEQ ID NO: 11433 - RNA, 20 nt, synthetic construct
  misc_feature 1..20: note = C9Orf72 TTCN PAM targeting sequence
  source 1..20: mol_type = other RNA
caacaatcaagtaggcttta

SEQ ID NO: 11434 - RNA, 20 nt, synthetic construct
  misc_feature 1..20: note = C9Orf72 TTCN PAM targeting sequence
  source 1..20: mol_type = other RNA
tgggatgcaaggctggttca

SEQ ID NO: 11435 - RNA, 20 nt, synthetic construct
  misc_feature 1..20: note = C9Orf72 TTCN PAM targeting sequence
  source 1..20: mol_type = other RNA
acataacaaatcaataagtg

SEQ ID NO: 11436 - RNA, 20 nt, synthetic construct
  misc_feature 1..20: note = C9Orf72 TTCN PAM targeting sequence
  source 1..20: mol_type = other RNA
ccacataaacagaatgaaaa

SEQ ID NO: 11437 - RNA, 20 nt, synthetic construct
  misc_feature 1..20: note = C9Orf72 TTCN PAM targeting sequence
  source 1..20: mol_type = other RNA
gtttatgtggtgaatcacac

SEQ ID NO: 11438 - RNA, 20 nt, synthetic construct
  misc_feature 1..20: note = C9Orf72 TTCN PAM targeting sequence
  source 1..20: mol_type = other RNA
ttctgtttatgtggtgaatc

SEQ ID NO: 11439 - RNA, 20 nt, synthetic construct
  misc_feature 1..20: note = C9Orf72 TTCN PAM targeting sequence
  source 1..20: mol_type = other RNA
gaaaaaaccttcaataaaat

SEQ ID NO: 11440 - RNA, 20 nt, synthetic construct
  misc_feature 1..20: note = C9Orf72 TTCN PAM targeting sequence
  source 1..20: mol_type = other RNA
gaaactattgagatgatcat

SEQ ID NO: 11441 - RNA, 20 nt, synthetic construct
  misc_feature 1..20: note = C9Orf72 TTCN PAM targeting sequence
  source 1..20: mol_type = other RNA
ataaaattcaatatccattc

SEQ ID NO: 11442 - RNA, 20 nt, synthetic construct
  misc_feature 1..20: note = C9Orf72 TTCN PAM targeting sequence
  source 1..20: mol_type = other RNA
atatccattcatgattaaaa

SEQ ID NO: 11443 - RNA, 20 nt, synthetic construct
  misc_feature 1..20: note = C9Orf72 TTCN PAM targeting sequence
  source 1..20: mol_type = other RNA
tgattaaaaaccctcgacag

SEQ ID NO: 11444 - RNA, 20 nt, synthetic construct
  misc_feature 1..20: note = C9Orf72 TTCN PAM targeting sequence
  source 1..20: mol_type = other RNA
tttgatgcctagcctgtcga

SEQ ID NO: 11445 - RNA, 20 nt, synthetic construct
  misc_feature 1..20: note = C9Orf72 TTCN PAM targeting sequence
  source 1..20: mol_type = other RNA
aaggtatattcctttgatgc

SEQ ID NO: 11446 - RNA, 20 nt, synthetic construct
  misc_feature 1..20: note = C9Orf72 TTCN PAM targeting sequence
  source 1..20: mol_type = other RNA
agcatttacctgtttagtat

SEQ ID NO: 11447 - RNA, 20 nt, synthetic construct
  misc_feature 1..20: note = C9Orf72 TTCN PAM targeting sequence
  source 1..20: mol_type = other RNA
cttgagtactggaacaagac

SEQ ID NO: 11448 - RNA, 20 nt, synthetic construct
  misc_feature 1..20: note = C9Orf72 TTCN PAM targeting sequence
  source 1..20: mol_type = other RNA
agtactcaagagaaatgctt

SEQ ID NO: 11449 - RNA, 20 nt, synthetic construct
  misc_feature 1..20: note = C9Orf72 TTCN PAM targeting sequence
  source 1..20: mol_type = other RNA
gcattgccctggaagtccta

SEQ ID NO: 11450 - RNA, 20 nt, synthetic construct
  misc_feature 1..20: note = C9Orf72 TTCN PAM targeting sequence
  source 1..20: mol_type = other RNA
agggcaatgctgaataggag

SEQ ID NO: 11451 - RNA, 20 nt, synthetic construct
  misc_feature 1..20: note = C9Orf72 TTCN PAM targeting sequence
  source 1..20: mol_type = other RNA
cttgcctagttgctctgact

SEQ ID NO: 11452 - RNA, 20 nt, synthetic construct
  misc_feature 1..20: note = C9Orf72 TTCN PAM targeting sequence
  source 1..20: mol_type = other RNA
ttctcttgcctagttgctct

SEQ ID NO: 11453 - RNA, 20 nt, synthetic construct
  misc_feature 1..20: note = C9Orf72 TTCN PAM targeting sequence
  source 1..20: mol_type = other RNA
ttttggatgccatttatttc

SEQ ID NO: 11454 - RNA, 20 nt, synthetic construct
  misc_feature 1..20: note = C9Orf72 TTCN PAM targeting sequence
  source 1..20: mol_type = other RNA
tctttttggatgccatttat

SEQ ID NO: 11455 - RNA, 20 nt, synthetic construct
  misc_feature 1..20: note = C9Orf72 TTCN PAM targeting sequence
  source 1..20: mol_type = other RNA
tcttctttttggatgccatt

SEQ ID NO: 11456 - RNA, 20 nt, synthetic construct
  misc_feature 1..20: note = C9Orf72 TTCN PAM targeting sequence
  source 1..20: mol_type = other RNA
tacatagaaaaccctaaaga

SEQ ID NO: 11457 - RNA, 20 nt, synthetic construct
  misc_feature 1..20: note = C9Orf72 TTCN PAM targeting sequence
  source 1..20: mol_type = other RNA
atgtatgaaatcatatcatc

SEQ ID NO: 11458 - RNA, 20 nt, synthetic construct
  misc_feature 1..20: note = C9Orf72 TTCN PAM targeting sequence
  source 1..20: mol_type = other RNA
ccaaaagtctcctagaactg

SEQ ID NO: 11459 - RNA, 20 nt, synthetic construct
  misc_feature 1..20: note = C9Orf72 TTCN PAM targeting sequence
  source 1..20: mol_type = other RNA
aggagacttttggagaagtc

SEQ ID NO: 11460 - RNA, 20 nt, synthetic construct
  misc_feature 1..20: note = C9Orf72 TTCN PAM targeting sequence
  source 1..20: mol_type = other RNA
gtaaagtttaaggatacaaa

SEQ ID NO: 11461 - RNA, 20 nt, synthetic construct
  misc_feature 1..20: note = C9Orf72 TTCN PAM targeting sequence
  source 1..20: mol_type = other RNA
atacaccaataacattctag

SEQ ID NO: 11462 - RNA, 20 nt, synthetic construct
  misc_feature 1..20: note = C9Orf72 TTCN PAM targeting sequence
  source 1..20: mol_type = other RNA
agtttagggccaaataaaaa

SEQ ID NO: 11463 - RNA, 20 nt, synthetic construct
  misc_feature 1..20: note = C9Orf72 TTCN PAM targeting sequence
  source 1..20: mol_type = other RNA
tattttgtggctattgtaaa

SEQ ID NO: 11464 - RNA, 20 nt, synthetic construct
  misc_feature 1..20: note = C9Orf72 TTCN PAM targeting sequence
  source 1..20: mol_type = other RNA
atggttagatgtattcctat

SEQ ID NO: 11465 - RNA, 20 nt, synthetic construct
  misc_feature 1..20: note = C9Orf72 TTCN PAM targeting sequence
  source 1..20: mol_type = other RNA
cttccatggttagatgtatt

SEQ ID NO: 11466 - RNA, 20 nt, synthetic construct
  misc_feature 1..20: note = C9Orf72 TTCN PAM targeting sequence
  source 1..20: mol_type = other RNA
acagggtgaactacaaaaca

SEQ ID NO: 11467 - RNA, 20 nt, synthetic construct
  misc_feature 1..20: note = C9Orf72 TTCN PAM targeting sequence
  source 1..20: mol_type = other RNA
ccctgtagaacatttcactt

SEQ ID NO: 11468 - RNA, 20 nt, synthetic construct
  misc_feature 1..20: note = C9Orf72 TTCN PAM targeting sequence
  source 1..20: mol_type = other RNA
gcagtgttttgtagttcacc

SEQ ID NO: 11469 - RNA, 20 nt, synthetic construct
  misc_feature 1..20: note = C9Orf72 TTCN PAM targeting sequence
  source 1..20: mol_type = other RNA
ttcagcagtgttttgtagtt

SEQ ID NO: 11470 - RNA, 20 nt, synthetic construct
  misc_feature 1..20: note = C9Orf72 TTCN PAM targeting sequence
  source 1..20: mol_type = other RNA
gtcatcttgatttctttcag

SEQ ID NO: 11471 - RNA, 20 nt, synthetic construct
  misc_feature 1..20: note = C9Orf72 TTCN PAM targeting sequence
  source 1..20: mol_type = other RNA
aatccatgagcatggagtat

SEQ ID NO: 11472 - RNA, 20 nt, synthetic construct
  misc_feature 1..20: note = C9Orf72 TTCN PAM targeting sequence
  source 1..20: mol_type = other RNA
cagaatcagaaaaatattct

SEQ ID NO: 11473 - RNA, 20 nt, synthetic construct
  misc_feature 1..20: note = C9Orf72 TTCN PAM targeting sequence
  source 1..20: mol_type = other RNA
gtgaaaaatgacttgatatt

SEQ ID NO: 11474 - RNA, 20 nt, synthetic construct
  misc_feature 1..20: note = C9Orf72 TTCN PAM targeting sequence
  source 1..20: mol_type = other RNA
gattctgtgaaaaatgactt

SEQ ID NO: 11475 - RNA, 20 nt, synthetic construct
  misc_feature 1..20: note = C9Orf72 TTCN PAM targeting sequence
  source 1..20: mol_type = other RNA
aaaattcatatggaaccaaa

SEQ ID NO: 11476 - RNA, 20 nt, synthetic construct
  misc_feature 1..20: note = C9Orf72 TTCN PAM targeting sequence
  source 1..20: mol_type = other RNA
tatggaaccaaaaaggagcc

SEQ ID NO: 11477 - RNA, 20 nt, synthetic construct
  misc_feature 1..20: note = C9Orf72 TTCN PAM targeting sequence
  source 1..20: mol_type = other RNA
atatgaattttagaatattt

SEQ ID NO: 11478 - RNA, 20 nt, synthetic construct
  misc_feature 1..20: note = C9Orf72 TTCN PAM targeting sequence
  source 1..20: mol_type = other RNA
ggctcctttttggttccata

SEQ ID NO: 11479 - RNA, 20 nt, synthetic construct
  misc_feature 1..20: note = C9Orf72 TTCN PAM targeting sequence
  source 1..20: mol_type = other RNA
ttttgcttaggattgctttg

SEQ ID NO: 11480 - RNA, 20 nt, synthetic construct
  misc_feature 1..20: note = C9Orf72 TTCN PAM targeting sequence
  source 1..20: mol_type = other RNA
ttctttttgcttaggattgc

SEQ ID NO: 11481 - RNA, 20 nt, synthetic construct
  misc_feature 1..20: note = C9Orf72 TTCN PAM targeting sequence
  source 1..20: mol_type = other RNA
aactatactaaaaggctaca

SEQ ID NO: 11482 - RNA, 20 nt, synthetic construct
  misc_feature 1..20: note = C9Orf72 TTCN PAM targeting sequence
  source 1..20: mol_type = other RNA
ggtacaaaaacagacacaga

SEQ ID NO: 11483 - RNA, 20 nt, synthetic construct
  misc_feature 1..20: note = C9Orf72 TTCN PAM targeting sequence
  source 1..20: mol_type = other RNA
atttgtctctgtgtctgttt

SEQ ID NO: 11484 - RNA, 20 nt, synthetic construct
  misc_feature 1..20: note = C9Orf72 TTCN PAM targeting sequence
  source 1..20: mol_type = other RNA
gttctatttgtctctgtgtc

SEQ ID NO: 11485 - RNA, 20 nt, synthetic construct
  misc_feature 1..20: note = C9Orf72 TTCN PAM targeting sequence
  source 1..20: mol_type = other RNA
attctgttctatttgtctct

SEQ ID NO: 11486 - RNA, 20 nt, synthetic construct
  misc_feature 1..20: note = C9Orf72 TTCN PAM targeting sequence
  source 1..20: mol_type = other RNA
gggttttctattctgttcta

SEQ ID NO: 11487 - RNA, 20 nt, synthetic construct
  misc_feature 1..20: note = C9Orf72 TTCN PAM targeting sequence
  source 1..20: mol_type = other RNA
acaaaattgacagaaataag

SEQ ID NO: 11488 - RNA, 20 nt, synthetic construct
  misc_feature 1..20: note = C9Orf72 TTCN PAM targeting sequence
  source 1..20: mol_type = other RNA
gtcaattttgttgaatatca

SEQ ID NO: 11489 - RNA, 20 nt, synthetic construct
  misc_feature 1..20: note = C9Orf72 TTCN PAM targeting sequence
  source 1..20: mol_type = other RNA
aggattttatagtttaagtt

SEQ ID NO: 11490 - RNA, 20 nt, synthetic construct
  misc_feature 1..20: note = C9Orf72 TTCN PAM targeting sequence
  source 1..20: mol_type = other RNA
tctaggattttatagtttaa

SEQ ID NO: 11491 - RNA, 20 nt, synthetic construct
  misc_feature 1..20: note = C9Orf72 TTCN PAM targeting sequence
  source 1..20: mol_type = other RNA
aggttttcttctaggatttt

SEQ ID NO: 11492 - RNA, 20 nt, synthetic construct
  misc_feature 1..20: note = C9Orf72 TTCN PAM targeting sequence
  source 1..20: mol_type = other RNA
ccacgttggctttggcaaac

SEQ ID NO: 11493 - RNA, 20 nt, synthetic construct
  misc_feature 1..20: note = C9Orf72 TTCN PAM targeting sequence
  source 1..20: mol_type = other RNA
gtacagcaaaagaaattacc

SEQ ID NO: 11494 - RNA, 20 nt, synthetic construct
  misc_feature 1..20: note = C9Orf72 TTCN PAM targeting sequence
  source 1..20: mol_type = other RNA
tttgctgtacagaaactctt

SEQ ID NO: 11495 - RNA, 20 nt, synthetic construct
  misc_feature 1..20: note = C9Orf72 TTCN PAM targeting sequence
  source 1..20: mol_type = other RNA
gtagcctgtttactctgttg

SEQ ID NO: 11496 - RNA, 20 nt, synthetic construct
  misc_feature 1..20: note = C9Orf72 TTCN PAM targeting sequence
  source 1..20: mol_type = other RNA
cccattctgtagcctgttta

SEQ ID NO: 11497 - RNA, 20 nt, synthetic construct
  misc_feature 1..20: note = C9Orf72 TTCN PAM targeting sequence
  source 1..20: mol_type = other RNA
agaatatacaaagaacttaa

SEQ ID NO: 11498 - RNA, 20 nt, synthetic construct
  misc_feature 1..20: note = C9Orf72 TTCN PAM targeting sequence
  source 1..20: mol_type = other RNA
ggaaattagatctttgtcag

SEQ ID NO: 11499 - RNA, 20 nt, synthetic construct
  misc_feature 1..20: note = C9Orf72 TTCN PAM targeting sequence
  source 1..20: mol_type = other RNA
ttgtatattctggaaattag

SEQ ID NO: 11500 - RNA, 20 nt, synthetic construct
  misc_feature 1..20: note = C9Orf72 TTCN PAM targeting sequence
  source 1..20: mol_type = other RNA
attaaaatatttgttttttg

SEQ ID NO: 11501 - RNA, 20 nt, synthetic construct
  misc_feature 1..20: note = C9Orf72 TTCN PAM targeting sequence
  source 1..20: mol_type = other RNA
tgtcctttacacattttcaa

SEQ ID NO: 11502 - RNA, 20 nt, synthetic construct
  misc_feature 1..20: note = C9Orf72 TTCN PAM targeting sequence
  source 1..20: mol_type = other RNA
ctaatgattagtgaatgttg

SEQ ID NO: 11503 - RNA, 20 nt, synthetic construct
  misc_feature 1..20: note = C9Orf72 TTCN PAM targeting sequence
  source 1..20: mol_type = other RNA
atttctctaatgattagtga

SEQ ID NO: 11504 - RNA, 20 nt, synthetic construct
  misc_feature 1..20: note = C9Orf72 TTCN PAM targeting sequence
  source 1..20: mol_type = other RNA
cagtcatcaaaaggctatta

SEQ ID NO: 11505 - RNA, 20 nt, synthetic construct
  misc_feature 1..20: note = C9Orf72 TTCN PAM targeting sequence
  source 1..20: mol_type = other RNA
ccagcatctgttatgttttg

SEQ ID NO: 11506 - RNA, 20 nt, synthetic construct
  misc_feature 1..20: note = C9Orf72 TTCN PAM targeting sequence
  source 1..20: mol_type = other RNA
ccacaatcttttcaccagca

SEQ ID NO: 11507 - RNA, 20 nt, synthetic construct
  misc_feature 1..20: note = C9Orf72 TTCN PAM targeting sequence
  source 1..20: mol_type = other RNA
cttttctccacaatcttttc

SEQ ID NO: 11508 - RNA, 20 nt, synthetic construct
  misc_feature 1..20: note = C9Orf72 TTCN PAM targeting sequence
  source 1..20: mol_type = other RNA
ctccagtctctttggaggca

SEQ ID NO: 11509 - RNA, 20 nt, synthetic construct
  misc_feature 1..20: note = C9Orf72 TTCN PAM targeting sequence
  source 1..20: mol_type = other RNA
ggacagaaaagcaacacccc

SEQ ID NO: 11510 - RNA, 20 nt, synthetic construct
  misc_feature 1..20: note = C9Orf72 TTCN PAM targeting sequence
  source 1..20: mol_type = other RNA
gtccagaaacctctgtggcg

SEQ ID NO: 11511 - RNA, 20 nt, synthetic construct
  misc_feature 1..20: note = C9Orf72 TTCN PAM targeting sequence
  source 1..20: mol_type = other RNA
gtcaggaggaaattgcctac

SEQ ID NO: 11512 - RNA, 20 nt, synthetic construct
  misc_feature 1..20: note = C9Orf72 TTCN PAM targeting sequence
  source 1..20: mol_type = other RNA
tcctgactgaaaaatactga

SEQ ID NO: 11513 - RNA, 20 nt, synthetic construct
  misc_feature 1..20: note = C9Orf72 TTCN PAM targeting sequence
  source 1..20: mol_type = other RNA
tgttgagcagtgttgctaag

SEQ ID NO: 11514 - RNA, 20 nt, synthetic construct
  misc_feature 1..20: note = C9Orf72 TTCN PAM targeting sequence
  source 1..20: mol_type = other RNA
aacatgatggtttagggata

SEQ ID NO: 11515 - RNA, 20 nt, synthetic construct
  misc_feature 1..20: note = C9Orf72 TTCN PAM targeting sequence
  source 1..20: mol_type = other RNA
ttactgaagcaagtcattca

SEQ ID NO: 11516 - RNA, 20 nt, synthetic construct
  misc_feature 1..20: note = C9Orf72 TTCN PAM targeting sequence
  source 1..20: mol_type = other RNA
gtaaggaatttccaacatga

SEQ ID NO: 11517 - RNA, 20 nt, synthetic construct
  misc_feature 1..20: note = C9Orf72 TTCN PAM targeting sequence
  source 1..20: mol_type = other RNA
cagttgtgtcttccaaacag

SEQ ID NO: 11518 - RNA, 20 nt, synthetic construct
  misc_feature 1..20: note = C9Orf72 TTCN PAM targeting sequence
  source 1..20: mol_type = other RNA
aaacagtgcaatttcatttg

SEQ ID NO: 11519 - RNA, 20 nt, synthetic construct
  misc_feature 1..20: note = C9Orf72 TTCN PAM targeting sequence
  source 1..20: mol_type = other RNA
tttgtgtgttaggacagcaa

SEQ ID NO: 11520 - RNA, 20 nt, synthetic construct
  misc_feature 1..20: note = C9Orf72 TTCN PAM targeting sequence
  source 1..20: mol_type = other RNA
agtagagttgctgtcctaac

SEQ ID NO: 11521 - RNA, 20 nt, synthetic construct
  misc_feature 1..20: note = C9Orf72 TTCN PAM targeting sequence
  source 1..20: mol_type = other RNA
catcaatagaaacatcatta

SEQ ID NO: 11522 - RNA, 20 nt, synthetic construct
  misc_feature 1..20: note = C9Orf72 TTCN PAM targeting sequence
  source 1..20: mol_type = other RNA
attgatgtgaagtagtttct

SEQ ID NO: 11523 - RNA, 20 nt, synthetic construct
  misc_feature 1..20: note = C9Orf72 TTCN PAM targeting sequence
  source 1..20: mol_type = other RNA
gattttcatgcttagtgtta

SEQ ID NO: 11524 - RNA, 20 nt, synthetic construct
  misc_feature 1..20: note = C9Orf72 TTCN PAM targeting sequence
  source 1..20: mol_type = other RNA
tgcttagtgttattttttga

SEQ ID NO: 11525 - RNA, 20 nt, synthetic construct
  misc_feature 1..20: note = C9Orf72 TTCN PAM targeting sequence
  source 1..20: mol_type = other RNA
caaaaaataacactaagcat

SEQ ID NO: 11526 - RNA, 20 nt, synthetic construct
  misc_feature 1..20: note = C9Orf72 TTCN PAM targeting sequence
  source 1..20: mol_type = other RNA
ggtcattctcaaaaaataac

SEQ ID NO: 11527 - RNA, 20 nt, synthetic construct
  misc_feature 1..20: note = C9Orf72 TTCN PAM targeting sequence
  source 1..20: mol_type = other RNA
tttatatagagatatactct

SEQ ID NO: 11528 - RNA, 20 nt, synthetic construct
  misc_feature 1..20: note = C9Orf72 TTCN PAM targeting sequence
  source 1..20: mol_type = other RNA
gataatcagaaagaacagat

SEQ ID NO: 11529 - RNA, 20 nt, synthetic construct
  misc_feature 1..20: note = C9Orf72 TTCN PAM targeting sequence
  source 1..20: mol_type = other RNA
gattatcagaatagagtata

SEQ ID NO: 11530 - RNA, 20 nt, synthetic construct
  misc_feature 1..20: note = C9Orf72 TTCN PAM targeting sequence
  source 1..20: mol_type = other RNA
ttctgattatcagaatagag

SEQ ID NO: 11531 - RNA, 20 nt, synthetic construct
  misc_feature 1..20: note = C9Orf72 TTCN PAM targeting sequence
  source 1..20: mol_type = other RNA
ccaaagtcattatctgttct

SEQ ID NO: 11532 - RNA, 20 nt, synthetic construct
  misc_feature 1..20: note = C9Orf72 TTCN PAM targeting sequence
  source 1..20: mol_type = other RNA
taaggtaaacatttactccc

SEQ ID NO: 11533 - RNA, 20 nt, synthetic construct
  misc_feature 1..20: note = C9Orf72 TTCN PAM targeting sequence
  source 1..20: mol_type = other RNA
ggtaaaacgtactagtggtt

SEQ ID NO: 11534 - RNA, 20 nt, synthetic construct
  misc_feature 1..20: note = C9Orf72 TTCN PAM targeting sequence
  source 1..20: mol_type = other RNA
ttcaggtaaaacgtactagt

SEQ ID NO: 11535 - RNA, 20 nt, synthetic construct
  misc_feature 1..20: note = C9Orf72 TTCN PAM targeting sequence
  source 1..20: mol_type = other RNA
tttttctttcaggtaaaacg

SEQ ID NO: 11536 - RNA, 20 nt, synthetic construct
  misc_feature 1..20: note = C9Orf72 TTCN PAM targeting sequence
  source 1..20: mol_type = other RNA
tatattactcgttgaccaaa

SEQ ID NO: 11537 - RNA, 20 nt, synthetic construct
  misc_feature 1..20: note = C9Orf72 TTCN PAM targeting sequence
  source 1..20: mol_type = other RNA
ttttaagtataagaatacag

SEQ ID NO: 11538 - RNA, 20 nt, synthetic construct
  misc_feature 1..20: note = C9Orf72 TTCN PAM targeting sequence
  source 1..20: mol_type = other RNA
tatacttaaaaagaagttta

SEQ ID NO: 11539 - RNA, 20 nt, synthetic construct
  misc_feature 1..20: note = C9Orf72 TTCN PAM targeting sequence
  source 1..20: mol_type = other RNA
aaagcaggcaaaattaatcc

SEQ ID NO: 11540 - RNA, 20 nt, synthetic construct
  misc_feature 1..20: note = C9Orf72 TTCN PAM targeting sequence
  source 1..20: mol_type = other RNA
ttaagcttttaaaagtcaaa

SEQ ID NO: 11541 - RNA, 20 nt, synthetic construct
  misc_feature 1..20: note = C9Orf72 TTCN PAM targeting sequence
  source 1..20: mol_type = other RNA
agatattttgacttttaaaa

SEQ ID NO: 11542 - RNA, 20 nt, synthetic construct
  misc_feature 1..20: note = C9Orf72 TTCN PAM targeting sequence
  source 1..20: mol_type = other RNA
tgatatttcatctcagaggt

SEQ ID NO: 11543 - RNA, 20 nt, synthetic construct
  misc_feature 1..20: note = C9Orf72 TTCN PAM targeting sequence
  source 1..20: mol_type = other RNA
tctcagaggtagaataatta

SEQ ID NO: 11544 - RNA, 20 nt, synthetic construct
  misc_feature 1..20: note = C9Orf72 TTCN PAM targeting sequence
  source 1..20: mol_type = other RNA
acctctgagatgaaatatca

SEQ ID NO: 11545 - RNA, 20 nt, synthetic construct
  misc_feature 1..20: note = C9Orf72 TTCN PAM targeting sequence
  source 1..20: mol_type = other RNA
ttgtaggtaactctctgtcg

SEQ ID NO: 11546 - RNA, 20 nt, synthetic construct
  misc_feature 1..20: note = C9Orf72 TTCN PAM targeting sequence
  source 1..20: mol_type = other RNA
gacagagagttacctacaaa

SEQ ID NO: 11547 - RNA, 20 nt, synthetic construct
  misc_feature 1..20: note = C9Orf72 TTCN PAM targeting sequence
  source 1..20: mol_type = other RNA
tctttccgacagagagttac

SEQ ID NO: 11548 - RNA, 20 nt, synthetic construct
  misc_feature 1..20: note = C9Orf72 TTCN PAM targeting sequence
  source 1..20: mol_type = other RNA
catgtaaattataaataagt

SEQ ID NO: 11549 - RNA, 20 nt, synthetic construct
  misc_feature 1..20: note = C9Orf72 TTCN PAM targeting sequence
  source 1..20: mol_type = other RNA
tactgacttctcatgtaaat

SEQ ID NO: 11550 - RNA, 20 nt, synthetic construct
  misc_feature 1..20: note = C9Orf72 TTCN PAM targeting sequence
  source 1..20: mol_type = other RNA
atttgtgtgattgtgttgac

SEQ ID NO: 11551 - RNA, 20 nt, synthetic construct
  misc_feature 1..20: note = C9Orf72 TTCN PAM targeting sequence
  source 1..20: mol_type = other RNA
tttatctttatttttaataa

SEQ ID NO: 11552 - RNA, 20 nt, synthetic construct
  misc_feature 1..20: note = C9Orf72 TTCN PAM targeting sequence
  source 1..20: mol_type = other RNA
atggttcatttatctttatt

SEQ ID NO: 11553 - RNA, 20 nt, synthetic construct
  misc_feature 1..20: note = C9Orf72 TTCN PAM targeting sequence
  source 1..20: mol_type = other RNA
attcgtaatttacctggttc

SEQ ID NO: 11554 - RNA, 20 nt, synthetic construct
  misc_feature 1..20: note = C9Orf72 TTCN PAM targeting sequence
  source 1..20: mol_type = other RNA
taatttacctggttctctct

SEQ ID NO: 11555 - RNA, 20 nt, synthetic construct
  misc_feature 1..20: note = C9Orf72 TTCN PAM targeting sequence
  source 1..20: mol_type = other RNA
ctctgttcctgtccttctct

SEQ ID NO: 11556 - RNA, 20 nt, synthetic construct
  misc_feature 1..20: note = C9Orf72 TTCN PAM targeting sequence
  source 1..20: mol_type = other RNA
tgtccttctctcttgatagt

SEQ ID NO: 11557 - RNA, 20 nt, synthetic construct
  misc_feature 1..20: note = C9Orf72 TTCN PAM targeting sequence
  source 1..20: mol_type = other RNA
ctcttgatagtaaggtgact

SEQ ID NO: 11558 - RNA, 20 nt, synthetic construct
  misc_feature 1..20: note = C9Orf72 TTCN PAM targeting sequence
  source 1..20: mol_type = other RNA
cttgattattaaaagttttt

SEQ ID NO: 11559 - RNA, 20 nt, synthetic construct
  misc_feature 1..20: note = C9Orf72 TTCN PAM targeting sequence
  source 1..20: mol_type = other RNA
ctctacctgcttggtctctt

SEQ ID NO: 11560 - RNA, 20 nt, synthetic construct
  misc_feature 1..20: note = C9Orf72 TTCN PAM targeting sequence
  source 1..20: mol_type = other RNA
tatgcaatttttctcaacaa

SEQ ID NO: 11561 - RNA, 20 nt, synthetic construct
  misc_feature 1..20: note = C9Orf72 TTCN PAM targeting sequence
  source 1..20: mol_type = other RNA
caacaaaaagtgttattgtt

SEQ ID NO: 11562 - RNA, 20 nt, synthetic construct
  misc_feature 1..20: note = C9Orf72 TTCN PAM targeting sequence
  source 1..20: mol_type = other RNA
ttttttaactactaaacaat

SEQ ID NO: 11563 - RNA, 20 nt, synthetic construct
  misc_feature 1..20: note = C9Orf72 TTCN PAM targeting sequence
  source 1..20: mol_type = other RNA
aagtcaacaatatgtagaaa

SEQ ID NO: 11564 - RNA, 20 nt, synthetic construct
  misc_feature 1..20: note = C9Orf72 TTCN PAM targeting sequence
  source 1..20: mol_type = other RNA
acatattgttgactttgaag

SEQ ID NO: 11565 - RNA, 20 nt, synthetic construct
  misc_feature 1..20: note = C9Orf72 TTCN PAM targeting sequence
  source 1..20: mol_type = other RNA
aaaattatgagtgacctcaa

SEQ ID NO: 11566 - RNA, 20 nt, synthetic construct
  misc_feature 1..20: note = C9Orf72 TTCN PAM targeting sequence
  source 1..20: mol_type = other RNA
tattaacacatgtaagcatt

SEQ ID NO: 11567 - RNA, 20 nt, synthetic construct
  misc_feature 1..20: note = C9Orf72 TTCN PAM targeting sequence
  source 1..20: mol_type = other RNA
caaatgttgaaatgtgaagg

SEQ ID NO: 11568 - RNA, 20 nt, synthetic construct
  misc_feature 1..20: note = C9Orf72 TTCN PAM targeting sequence
  source 1..20: mol_type = other RNA
acatttgtgaaactcgattg

SEQ ID NO: 11569 - RNA, 20 nt, synthetic construct
  misc_feature 1..20: note = C9Orf72 TTCN PAM targeting sequence
  source 1..20: mol_type = other RNA
catttcaacatttgtgaaac

SEQ ID NO: 11570 - RNA, 20 nt, synthetic construct
  misc_feature 1..20: note = C9Orf72 TTCN PAM targeting sequence
  source 1..20: mol_type = other RNA
cttcacatttcaacatttgt

SEQ ID NO: 11571 - RNA, 20 nt, synthetic construct
  misc_feature 1..20: note = C9Orf72 TTCN PAM targeting sequence
  source 1..20: mol_type = other RNA
tctaaaaatacaaaaaataa

SEQ ID NO: 11572 - RNA, 20 nt, synthetic construct
  misc_feature 1..20: note = C9Orf72 TTCN PAM targeting sequence
  source 1..20: mol_type = other RNA
ggaagtcatttagaaattta

SEQ ID NO: 11573 - RNA, 20 nt, synthetic construct
  misc_feature 1..20: note = C9Orf72 TTCN PAM targeting sequence
  source 1..20: mol_type = other RNA
tgaactttttatttttattt

SEQ ID NO: 11574 - RNA, 20 nt, synthetic construct
  misc_feature 1..20: note = C9Orf72 TTCN PAM targeting sequence
  source 1..20: mol_type = other RNA
agcgaagaatcccatctttt

SEQ ID NO: 11575 - RNA, 20 nt, synthetic construct
  misc_feature 1..20: note = C9Orf72 TTCN PAM targeting sequence
  source 1..20: mol_type = other RNA
cttgaacccaggaggtggag

SEQ ID NO: 11576 - RNA, 20 nt, synthetic construct
  misc_feature 1..20: note = C9Orf72 TTCN PAM targeting sequence
  source 1..20: mol_type = other RNA
tcgcttgaacccaggaggtg

SEQ ID NO: 11577 - RNA, 20 nt, synthetic construct
  misc_feature 1..20: note = C9Orf72 TTCN PAM targeting sequence
  source 1..20: mol_type = other RNA
aaagatgggattcttcgctt

SEQ ID NO: 11578 - RNA, 20 nt, synthetic construct
  misc_feature 1..20: note = C9Orf72 TTCN PAM targeting sequence
  source 1..20: mol_type = other RNA
aaggactaattcaaaagatg

SEQ ID NO: 11579 - RNA, 20 nt, synthetic construct
  misc_feature 1..20: note = C9Orf72 TTCN PAM targeting sequence
  source 1..20: mol_type = other RNA
agacatcttgtacaaatagt

SEQ ID NO: 11580 - RNA, 20 nt, synthetic construct
  misc_feature 1..20: note = C9Orf72 TTCN PAM targeting sequence
  source 1..20: mol_type = other RNA
ggagccagttgccttttcca

SEQ ID NO: 11581 - RNA, 20 nt, synthetic construct
  misc_feature 1..20: note = C9Orf72 TTCN PAM targeting sequence
  source 1..20: mol_type = other RNA
cctctagctttctcttactt

SEQ ID NO: 11582 - RNA, 20 nt, synthetic construct
  misc_feature 1..20: note = C9Orf72 TTCN PAM targeting sequence
  source 1..20: mol_type = other RNA
cttacttcatttgcatggct

SEQ ID NO: 11583 - RNA, 20 nt, synthetic construct
  misc_feature 1..20: note = C9Orf72 TTCN PAM targeting sequence
  source 1..20: mol_type = other RNA
tttgcatggcttaattgtat

SEQ ID NO: 11584 - RNA, 20 nt, synthetic construct
  misc_feature 1..20: note = C9Orf72 TTCN PAM targeting sequence
  source 1..20: mol_type = other RNA
cttaaggtcaggatctgtgc

SEQ ID NO: 11585 - RNA, 20 nt, synthetic construct
  misc_feature 1..20: note = C9Orf72 TTCN PAM targeting sequence
  source 1..20: mol_type = other RNA
ttcccttaaggtcaggatct

SEQ ID NO: 11586 - RNA, 20 nt, synthetic construct
  misc_feature 1..20: note = C9Orf72 TTCN PAM targeting sequence
  source 1..20: mol_type = other RNA
gcaactgcaatctcagttta

SEQ ID NO: 11587 - RNA, 20 nt, synthetic construct
  misc_feature 1..20: note = C9Orf72 TTCN PAM targeting sequence
  source 1..20: mol_type = other RNA
cagtaaactgagattgcagt

SEQ ID NO: 11588 - RNA, 20 nt, synthetic construct
  misc_feature 1..20: note = C9Orf72 TTCN PAM targeting sequence
  source 1..20: mol_type = other RNA
attctcagtaaactgagatt

SEQ ID NO: 11589 - RNA, 20 nt, synthetic construct
  misc_feature 1..20: note = C9Orf72 TTCN PAM targeting sequence
  source 1..20: mol_type = other RNA
caggccttggagggagtttt

SEQ ID NO: 11590 - RNA, 20 nt, synthetic construct
  misc_feature 1..20: note = C9Orf72 TTCN PAM targeting sequence
  source 1..20: mol_type = other RNA
tggttaacacggagggcatt

SEQ ID NO: 11591 - RNA, 20 nt, synthetic construct
  misc_feature 1..20: note = C9Orf72 TTCN PAM targeting sequence
  source 1..20: mol_type = other RNA
caagagtgtagaagaggaag

SEQ ID NO: 11592 - RNA, 20 nt, synthetic construct
  misc_feature 1..20: note = C9Orf72 TTCN PAM targeting sequence
  source 1..20: mol_type = other RNA
acactcttgggaaatgccct

SEQ ID NO: 11593 - RNA, 20 nt, synthetic construct
  misc_feature 1..20: note = C9Orf72 TTCN PAM targeting sequence
  source 1..20: mol_type = other RNA
tcttctacactcttgggaaa

SEQ ID NO: 11594 - RNA, 20 nt, synthetic construct
  misc_feature 1..20: note = C9Orf72 TTCN PAM targeting sequence
  source 1..20: mol_type = other RNA
tcaccttgtatatttaagtt

SEQ ID NO: 11595 - RNA, 20 nt, synthetic construct
  misc_feature 1..20: note = C9Orf72 TTCN PAM targeting sequence
  source 1..20: mol_type = other RNA
ccttgtatatttaagttaga

SEQ ID NO: 11596 - RNA, 20 nt, synthetic construct
  misc_feature 1..20: note = C9Orf72 TTCN PAM targeting sequence
  source 1..20: mol_type = other RNA
cacaaaagaggtagtactct

SEQ ID NO: 11597 - RNA, 20 nt, synthetic construct
  misc_feature 1..20: note = C9Orf72 TTCN PAM targeting sequence
  source 1..20: mol_type = other RNA
aattgtttcactttggcttg

SEQ ID NO: 11598 - RNA, 20 nt, synthetic construct
  misc_feature 1..20: note = C9Orf72 TTCN PAM targeting sequence
  source 1..20: mol_type = other RNA
ctttggcttgctggaaagta

SEQ ID NO: 11599 - RNA, 20 nt, synthetic construct
  misc_feature 1..20: note = C9Orf72 TTCN PAM targeting sequence
  source 1..20: mol_type = other RNA
agcaagccaaagtgaaacaa

SEQ ID NO: 11600 - RNA, 20 nt, synthetic construct
  misc_feature 1..20: note = C9Orf72 TTCN PAM targeting sequence
  source 1..20: mol_type = other RNA
tgattattttctttaaatta

SEQ ID NO: 11601 - RNA, 20 nt, synthetic construct
  misc_feature 1..20: note = C9Orf72 TTCN PAM targeting sequence
  source 1..20: mol_type = other RNA
ttaaattaagcttacttttt

SEQ ID NO: 11602 - RNA, 20 nt, synthetic construct
  misc_feature 1..20: note = C9Orf72 TTCN PAM targeting sequence
  source 1..20: mol_type = other RNA
aaaagtaagcttaatttaaa

SEQ ID NO: 11603 - RNA, 20 nt, synthetic construct
  misc_feature 1..20: note = C9Orf72 TTCN PAM targeting sequence
  source 1..20: mol_type = other RNA
ctaaatagaataccactatc

SEQ ID NO: 11604 - RNA, 20 nt, synthetic construct
  misc_feature 1..20: note = C9Orf72 TTCN PAM targeting sequence
  source 1..20: mol_type = other RNA
atttagagaacttatataaa

SEQ ID NO: 11605 - RNA, 20 nt, synthetic construct
  misc_feature 1..20: note = C9Orf72 TTCN PAM targeting sequence
  source 1..20: mol_type = other RNA
cataaatagaagataaaccc

SEQ ID NO: 11606 - RNA, 20 nt, synthetic construct
  misc_feature 1..20: note = C9Orf72 TTCN PAM targeting sequence
  source 1..20: mol_type = other RNA
atttatgggaagtgatagtg

SEQ ID NO: 11607 - RNA, 20 nt, synthetic construct
  misc_feature 1..20: note = C9Orf72 TTCN PAM targeting sequence
  source 1..20: mol_type = other RNA
cgttttgggaaatcgcttag

SEQ ID NO: 11608 - RNA, 20 nt, synthetic construct
  misc_feature 1..20: note = C9Orf72 TTCN PAM targeting sequence
  source 1..20: mol_type = other RNA
caaaacgggaaatgggttta

SEQ ID NO: 11609 - RNA, 20 nt, synthetic construct
  misc_feature 1..20: note = C9Orf72 TTCN PAM targeting sequence
  source 1..20: mol_type = other RNA
aagcgatttcccaaaacggg

SEQ ID NO: 11610 - RNA, 20 nt, synthetic construct
  misc_feature 1..20: note = C9Orf72 TTCN PAM targeting sequence
  source 1..20: mol_type = other RNA
tctaagcgatttcccaaaac

SEQ ID NO: 11611 - RNA, 20 nt, synthetic construct
  misc_feature 1..20: note = C9Orf72 TTCN PAM targeting sequence
  source 1..20: mol_type = other RNA
ttcttctaagcgatttccca

SEQ ID NO: 11612 - RNA, 20 nt, synthetic construct
  misc_feature 1..20: note = C9Orf72 TTCN PAM targeting sequence
  source 1..20: mol_type = other RNA
aaattcattcttctaagcga

SEQ ID NO: 11613 - RNA, 20 nt, synthetic construct
  misc_feature 1..20: note = C9Orf72 TTCN PAM targeting sequence
  source 1..20: mol_type = other RNA
aaattccaaattcattcttc

SEQ ID NO: 11614 - RNA, 20 nt, synthetic construct
  misc_feature 1..20: note = C9Orf72 TTCN PAM targeting sequence
  source 1..20: mol_type = other RNA
gattccaaattccaaattca

SEQ ID NO: 11615 - RNA, 20 nt, synthetic construct
  misc_feature 1..20: note = C9Orf72 TTCN PAM targeting sequence
  source 1..20: mol_type = other RNA
gtgttttctggttctgggaa

SEQ ID NO: 11616 - RNA, 20 nt, synthetic construct
  misc_feature 1..20: note = C9Orf72 TTCN PAM targeting sequence
  source 1..20: mol_type = other RNA
ggttctgggaaaatcacttg

SEQ ID NO: 11617 - RNA, 20 nt, synthetic construct
  misc_feature 1..20: note = C9Orf72 TTCN PAM targeting sequence
  source 1..20: mol_type = other RNA
gggaaaatcacttgacttct

SEQ ID NO: 11618 - RNA, 20 nt, synthetic construct
  misc_feature 1..20: note = C9Orf72 TTCN PAM targeting sequence
  source 1..20: mol_type = other RNA
cagaaccagaaaacacagaa

SEQ ID NO: 11619 - RNA, 20 nt, synthetic construct
  misc_feature 1..20: note = C9Orf72 TTCN PAM targeting sequence
  source 1..20: mol_type = other RNA
ctgagtcccagtctcttcat

SEQ ID NO: 11620 - RNA, 20 nt, synthetic construct
  misc_feature 1..20: note = C9Orf72 TTCN PAM targeting sequence
  source 1..20: mol_type = other RNA
taaaaaaaaaaaaaaaaaaa

SEQ ID NO: 11621 - RNA, 20 nt, synthetic construct
  misc_feature 1..20: note = C9Orf72 TTCN PAM targeting sequence
  source 1..20: mol_type = other RNA
ttctttctcaaaatgacatt

SEQ ID NO: 11622 - RNA, 20 nt, synthetic construct
  misc_feature 1..20: note = C9Orf72 TTCN PAM targeting sequence
  source 1..20: mol_type = other RNA
ttctcaaaatgacattaact

SEQ ID NO: 11623 - RNA, 20 nt, synthetic construct
  misc_feature 1..20: note = C9Orf72 TTCN PAM targeting sequence
  source 1..20: mol_type = other RNA
caaaatgacattaactaaat

SEQ ID NO: 11624 - RNA, 20 nt, synthetic construct
  misc_feature 1..20: note = C9Orf72 TTCN PAM targeting sequence
  source 1..20: mol_type = other RNA
ctttgcagcttgatttagtt

SEQ ID NO: 11625 - RNA, 20 nt, synthetic construct
  misc_feature 1..20: note = C9Orf72 TTCN PAM targeting sequence
  source 1..20: mol_type = other RNA
ttttatttgtaagcttaaag

SEQ ID NO: 11626 - RNA, 20 nt, synthetic construct
  misc_feature 1..20: note = C9Orf72 TTCN PAM targeting sequence
  source 1..20: mol_type = other RNA
cctgaagtgcaaatgcccat

SEQ ID NO: 11627 - RNA, 20 nt, synthetic construct
  misc_feature 1..20: note = C9Orf72 TTCN PAM targeting sequence
  source 1..20: mol_type = other RNA
ggtgaaacccatttgtcata

SEQ ID NO: 11628 - RNA, 20 nt, synthetic construct
  misc_feature 1..20: note = C9Orf72 TTCN PAM targeting sequence
  source 1..20: mol_type = other RNA
tagtggttcctggacccctt

SEQ ID NO: 11629 - RNA, 20 nt, synthetic construct
  misc_feature 1..20: note = C9Orf72 TTCN PAM targeting sequence
  source 1..20: mol_type = other RNA
tggacccctttattgagaag

SEQ ID NO: 11630 - RNA, 20 nt, synthetic construct
  misc_feature 1..20: note = C9Orf72 TTCN PAM targeting sequence
  source 1..20: mol_type = other RNA
aattctgtcaccactttctc

SEQ ID NO: 11631 - RNA, 20 nt, synthetic construct
  misc_feature 1..20: note = C9Orf72 TTCN PAM targeting sequence
  source 1..20: mol_type = other RNA
gtcaccactttctcactcct

SEQ ID NO: 11632 - RNA, 20 nt, synthetic construct
  misc_feature 1..20: note = C9Orf72 TTCN PAM targeting sequence
  source 1..20: mol_type = other RNA
cactcctccaaaataaactg

SEQ ID NO: 11633 - RNA, 20 nt, synthetic construct
  misc_feature 1..20: note = C9Orf72 TTCN PAM targeting sequence
  source 1..20: mol_type = other RNA
gtccaaggaattctttagag

SEQ ID NO: 11634 - RNA, 20 nt, synthetic construct
  misc_feature 1..20: note = C9Orf72 TTCN PAM targeting sequence
  source 1..20: mol_type = other RNA
ttggactgaaaagcagttta

SEQ ID NO: 11635 - RNA, 20 nt, synthetic construct
  misc_feature 1..20: note = C9Orf72 TTCN PAM targeting sequence
  source 1..20: mol_type = other RNA
ttagagagagaagaagaaac

SEQ ID NO: 11636 - RNA, 20 nt, synthetic construct
  misc_feature 1..20: note = C9Orf72 TTCN PAM targeting sequence
  source 1..20: mol_type = other RNA
ctctctaaagaattccttgg

SEQ ID NO: 11637 - RNA, 20 nt, synthetic construct
  misc_feature 1..20: note = C9Orf72 TTCN PAM targeting sequence
  source 1..20: mol_type = other RNA
tctctctctaaagaattcct

SEQ ID NO: 11638 - RNA, 20 nt, synthetic construct
  misc_feature 1..20: note = C9Orf72 TTCN PAM targeting sequence
  source 1..20: mol_type = other RNA
tcttctctctctaaagaatt

SEQ ID NO: 11639 - RNA, 20 nt, synthetic construct
  misc_feature 1..20: note = C9Orf72 TTCN PAM targeting sequence
  source 1..20: mol_type = other RNA
atcactttctttgcttcatt

SEQ ID NO: 11640 - RNA, 20 nt, synthetic construct
  misc_feature 1..20: note = C9Orf72 TTCN PAM targeting sequence
  source 1..20: mol_type = other RNA
ttgcttcattatgtgtcaca

SEQ ID NO: 11641 - RNA, 20 nt, synthetic construct
  misc_feature 1..20: note = C9Orf72 TTCN PAM targeting sequence
  source 1..20: mol_type = other RNA
ttatgtgtcacagaggttta

SEQ ID NO: 11642 - RNA, 20 nt, synthetic construct
  misc_feature 1..20: note = C9Orf72 TTCN PAM targeting sequence
  source 1..20: mol_type = other RNA
tccaccccagcctcctctgg

SEQ ID NO: 11643 - RNA, 20 nt, synthetic construct
  misc_feature 1..20: note = C9Orf72 TTCN PAM targeting sequence
  source 1..20: mol_type = other RNA
acagtaactaggccacaggc

SEQ ID NO: 11644 - RNA, 20 nt, synthetic construct
  misc_feature 1..20: note = C9Orf72 TTCN PAM targeting sequence
  source 1..20: mol_type = other RNA
tagcagcttgcttaatgcta

SEQ ID NO: 11645 - RNA, 20 nt, synthetic construct
  misc_feature 1..20: note = C9Orf72 TTCN PAM targeting sequence
  source 1..20: mol_type = other RNA
taggctttgcaaatagatcc

SEQ ID NO: 11646 - RNA, 20 nt, synthetic construct
  misc_feature 1..20: note = C9Orf72 TTCN PAM targeting sequence
  source 1..20: mol_type = other RNA
actgcaggatctatttgcaa

SEQ ID NO: 11647 - RNA, 20 nt, synthetic construct
  misc_feature 1..20: note = C9Orf72 TTCN PAM targeting sequence
  source 1..20: mol_type = other RNA
actacgtcactattggtagc

SEQ ID NO: 11648 - RNA, 20 nt, synthetic construct
  misc_feature 1..20: note = C9Orf72 TTCN PAM targeting sequence
  source 1..20: mol_type = other RNA
ccctttttccagctcacact

SEQ ID NO: 11649 - RNA, 20 nt, synthetic construct
  misc_feature 1..20: note = C9Orf72 TTCN PAM targeting sequence
  source 1..20: mol_type = other RNA
agctcacactctggaatgaa

SEQ ID NO: 11650 - RNA, 20 nt, synthetic construct
  misc_feature 1..20: note = C9Orf72 TTCN PAM targeting sequence
  source 1..20: mol_type = other RNA
agagtgtgagctggaaaaag

SEQ ID NO: 11651 - RNA, 20 nt, synthetic construct
  misc_feature 1..20: note = C9Orf72 TTCN PAM targeting sequence
  source 1..20: mol_type = other RNA
ttccagagtgtgagctggaa

SEQ ID NO: 11652 - RNA, 20 nt, synthetic construct
  misc_feature 1..20: note = C9Orf72 TTCN PAM targeting sequence
  source 1..20: mol_type = other RNA
tctagggcttaaggctctgt

SEQ ID NO: 11653 - RNA, 20 nt, synthetic construct
  misc_feature 1..20: note = C9Orf72 TTCN PAM targeting sequence
  source 1..20: mol_type = other RNA
agggcttaaggctctgtcct

SEQ ID NO: 11654 - RNA, 20 nt, synthetic construct
  misc_feature 1..20: note = C9Orf72 TTCN PAM targeting sequence
  source 1..20: mol_type = other RNA
tactaggacagagccttaag

SEQ ID NO: 11655 - RNA, 20 nt, synthetic construct
  misc_feature 1..20: note = C9Orf72 TTCN PAM targeting sequence
  source 1..20: mol_type = other RNA
tttcctactaggacagagcc

SEQ ID NO: 11656 - RNA, 20 nt, synthetic construct
  misc_feature 1..20: note = C9Orf72 TTCN PAM targeting sequence
  source 1..20: mol_type = other RNA
acagtattcttttcctacta

SEQ ID NO: 11657 - RNA, 20 nt, synthetic construct
  misc_feature 1..20: note = C9Orf72 TTCN PAM targeting sequence
  source 1..20: mol_type = other RNA
ttctacagtattcttttcct

SEQ ID NO: 11658 - RNA, 20 nt, synthetic construct
  misc_feature 1..20: note = C9Orf72 TTCN PAM targeting sequence
  source 1..20: mol_type = other RNA
ctgtcaagtttccttctaca

SEQ ID NO: 11659 - RNA, 20 nt, synthetic construct
  misc_feature 1..20: note = C9Orf72 TTCN PAM targeting sequence
  source 1..20: mol_type = other RNA
gagaacttaagtgatgtttt

SEQ ID NO: 11660 - RNA, 20 nt, synthetic construct
  misc_feature 1..20: note = C9Orf72 TTCN PAM targeting sequence
  source 1..20: mol_type = other RNA
ccgaagtattctctgtcaag

SEQ ID NO: 11661 - RNA, 20 nt, synthetic construct
  misc_feature 1..20: note = C9Orf72 TTCN PAM targeting sequence
  source 1..20: mol_type = other RNA
gaaagctgacatcaacattt

SEQ ID NO: 11662 - RNA, 20 nt, synthetic construct
  misc_feature 1..20: note = C9Orf72 TTCN PAM targeting sequence
  source 1..20: mol_type = other RNA
gaatctgtgggcatcaaaac

SEQ ID NO: 11663 - RNA, 20 nt, synthetic construct
  misc_feature 1..20: note = C9Orf72 TTCN PAM targeting sequence
  source 1..20: mol_type = other RNA
aatatttgtccattactgtt

SEQ ID NO: 11664 - RNA, 20 nt, synthetic construct
  misc_feature 1..20: note = C9Orf72 TTCN PAM targeting sequence
  source 1..20: mol_type = other RNA
gggagcttggaattgttcac

SEQ ID NO: 11665 - RNA, 20 nt, synthetic construct
  misc_feature 1..20: note = C9Orf72 TTCN PAM targeting sequence
  source 1..20: mol_type = other RNA
aagctccctgaagcaacact

SEQ ID NO: 11666 - RNA, 20 nt, synthetic construct
  misc_feature 1..20: note = C9Orf72 TTCN PAM targeting sequence
  source 1..20: mol_type = other RNA
cttccaagaagtgaggagga

SEQ ID NO: 11667 - RNA, 20 nt, synthetic construct
  misc_feature 1..20: note = C9Orf72 TTCN PAM targeting sequence
  source 1..20: mol_type = other RNA
aagaagtgaggaggatgctt

SEQ ID NO: 11668 - RNA, 20 nt, synthetic construct
  misc_feature 1..20: note = C9Orf72 TTCN PAM targeting sequence
  source 1..20: mol_type = other RNA
tggaagtgaacaattccaag

SEQ ID NO: 11669 - RNA, 20 nt, synthetic construct
  misc_feature 1..20: note = C9Orf72 TTCN PAM targeting sequence
  source 1..20: mol_type = other RNA
ctttagaatttgcattgctt

SEQ ID NO: 11670 - RNA, 20 nt, synthetic construct
  misc_feature 1..20: note = C9Orf72 TTCN PAM targeting sequence
  source 1..20: mol_type = other RNA
aaagagaagtcataagagca

SEQ ID NO: 11671 - RNA, 20 nt, synthetic construct
  misc_feature 1..20: note = C9Orf72 TTCN PAM targeting sequence
  source 1..20: mol_type = other RNA
cttgaaatagagggtattgt

SEQ ID NO: 11672 - RNA, 20 nt, synthetic construct
  misc_feature 1..20: note = C9Orf72 TTCN PAM targeting sequence
  source 1..20: mol_type = other RNA
agagaaaccaatcaggttat

SEQ ID NO: 11673 - RNA, 20 nt, synthetic construct
  misc_feature 1..20: note = C9Orf72 TTCN PAM targeting sequence
  source 1..20: mol_type = other RNA
caataccctctatttcaaga

SEQ ID NO: 11674 - RNA, 20 nt, synthetic construct
  misc_feature 1..20: note = C9Orf72 TTCN PAM targeting sequence
  source 1..20: mol_type = other RNA
ttttaattgatcccatcagc

SEQ ID NO: 11675 - RNA, 20 nt, synthetic construct
  misc_feature 1..20: note = C9Orf72 TTCN PAM targeting sequence
  source 1..20: mol_type = other RNA
tggactacaattcattttaa

SEQ ID NO: 11676 - RNA, 20 nt, synthetic construct
  misc_feature 1..20: note = C9Orf72 TTCN PAM targeting sequence
  source 1..20: mol_type = other RNA
caaagcaccttttcctggac

SEQ ID NO: 11677 - RNA, 20 nt, synthetic construct
  misc_feature 1..20: note = C9Orf72 TTCN PAM targeting sequence
  source 1..20: mol_type = other RNA
aaactcatctttgtcactcg

SEQ ID NO: 11678 - RNA, 20 nt, synthetic construct
  misc_feature 1..20: note = C9Orf72 TTCN PAM targeting sequence
  source 1..20: mol_type = other RNA
tagtcttgctcacccagata

SEQ ID NO: 11679 - RNA, 20 nt, synthetic construct
  misc_feature 1..20: note = C9Orf72 TTCN PAM targeting sequence
  source 1..20: mol_type = other RNA
ggacctacataaagggtgag

SEQ ID NO: 11680 - RNA, 20 nt, synthetic construct
  misc_feature 1..20: note = C9Orf72 TTCN PAM targeting sequence
  source 1..20: mol_type = other RNA
tgtagctcaccctttatgta

SEQ ID NO: 11681 - RNA, 20 nt, synthetic construct
  misc_feature 1..20: note = C9Orf72 TTCN PAM targeting sequence
  source 1..20: mol_type = other RNA
aatcgtaatgtttgcaagtt

SEQ ID NO: 11682 - RNA, 20 nt, synthetic construct
  misc_feature 1..20: note = C9Orf72 TTCN PAM targeting sequence
  source 1..20: mol_type = other RNA
aagcactttcaagaaaaagc

SEQ ID NO: 11683 - RNA, 20 nt, synthetic construct
  misc_feature 1..20: note = C9Orf72 TTCN PAM targeting sequence
  source 1..20: mol_type = other RNA
agaaaaagcatcctctttcc

SEQ ID NO: 11684 - RNA, 20 nt, synthetic construct
  misc_feature 1..20: note = C9Orf72 TTCN PAM targeting sequence
  source 1..20: mol_type = other RNA
tgaaagtgctttgaaatgat

SEQ ID NO: 11685 - RNA, 20 nt, synthetic construct
  misc_feature 1..20: note = C9Orf72 TTCN PAM targeting sequence
  source 1..20: mol_type = other RNA
tagacaactaaagagggctg

SEQ ID NO: 11686 - RNA, 20 nt, synthetic construct
  misc_feature 1..20: note = C9Orf72 TTCN PAM targeting sequence
  source 1..20: mol_type = other RNA
gatggaatcatctgaaagct

SEQ ID NO: 11687 - RNA, 20 nt, synthetic construct
  misc_feature 1..20: note = C9Orf72 TTCN PAM targeting sequence
  source 1..20: mol_type = other RNA
atctgaattaacagccctct

SEQ ID NO: 11688 - RNA, 20 nt, synthetic construct
  misc_feature 1..20: note = C9Orf72 TTCN PAM targeting sequence
  source 1..20: mol_type = other RNA
gatgattccatctgaattaa

SEQ ID NO: 11689 - RNA, 20 nt, synthetic construct
  misc_feature 1..20: note = C9Orf72 TTCN PAM targeting sequence
  source 1..20: mol_type = other RNA
tatcaccaacttacttattt

SEQ ID NO: 11690 - RNA, 20 nt, synthetic construct
  misc_feature 1..20: note = C9Orf72 TTCN PAM targeting sequence
  source 1..20: mol_type = other RNA
tgtggcattatttcaggatc

SEQ ID NO: 11691 - RNA, 20 nt, synthetic construct
  misc_feature 1..20: note = C9Orf72 TTCN PAM targeting sequence
  source 1..20: mol_type = other RNA
ggatctgaatttagtgatta

SEQ ID NO: 11692 - RNA, 20 nt, synthetic construct
  misc_feature 1..20: note = C9Orf72 TTCN PAM targeting sequence
  source 1..20: mol_type = other RNA
gatcctgaaataatgccaca

SEQ ID NO: 11693 - RNA, 20 nt, synthetic construct
  misc_feature 1..20: note = C9Orf72 TTCN PAM targeting sequence
  source 1..20: mol_type = other RNA
tatgtaatcactaaattcag

SEQ ID NO: 11694 - RNA, 20 nt, synthetic construct
  misc_feature 1..20: note = C9Orf72 TTCN PAM targeting sequence
  source 1..20: mol_type = other RNA
aatgcgctaaagcgtttaat

SEQ ID NO: 11695 - RNA, 20 nt, synthetic construct
  misc_feature 1..20: note = C9Orf72 TTCN PAM targeting sequence
  source 1..20: mol_type = other RNA
ctctctgcctctccaagtca

SEQ ID NO: 11696 - RNA, 20 nt, synthetic construct
  misc_feature 1..20: note = C9Orf72 TTCN PAM targeting sequence
  source 1..20: mol_type = other RNA
aggtccatttcttccaggga

SEQ ID NO: 11697 - RNA, 20 nt, synthetic construct
  misc_feature 1..20: note = C9Orf72 TTCN PAM targeting sequence
  source 1..20: mol_type = other RNA
tccagggatccggattagtc

SEQ ID NO: 11698 - RNA, 20 nt, synthetic construct
  misc_feature 1..20: note = C9Orf72 TTCN PAM targeting sequence
  source 1..20: mol_type = other RNA
agggatccggattagtccat

SEQ ID NO: 11699 - RNA, 20 nt, synthetic construct
  misc_feature 1..20: note = C9Orf72 TTCN PAM targeting sequence
  source 1..20: mol_type = other RNA
actggataacatggctttaa

SEQ ID NO: 11700 - RNA, 20 nt, synthetic construct
  misc_feature 1..20: note = C9Orf72 TTCN PAM targeting sequence
  source 1..20: mol_type = other RNA
acagtataacaaacttactt

SEQ ID NO: 11701 - RNA, 20 nt, synthetic construct
  misc_feature 1..20: note = C9Orf72 TTCN PAM targeting sequence
  source 1..20: mol_type = other RNA
attttttttgaagtcttaga

SEQ ID NO: 11702 - RNA, 20 nt, synthetic construct
  misc_feature 1..20: note = C9Orf72 TTCN PAM targeting sequence
  source 1..20: mol_type = other RNA
aaaaaaatggaaatatctca

SEQ ID NO: 11703 - RNA, 20 nt, synthetic construct
  misc_feature 1..20: note = C9Orf72 TTCN PAM targeting sequence
  source 1..20: mol_type = other RNA
aagacttcaaaaaaaatgga

SEQ ID NO: 11704 - RNA, 20 nt, synthetic construct
  misc_feature 1..20: note = C9Orf72 TTCN PAM targeting sequence
  source 1..20: mol_type = other RNA
atgtagtaagctctagccac

SEQ ID NO: 11705 - RNA, 20 nt, synthetic construct
  misc_feature 1..20: note = C9Orf72 TTCN PAM targeting sequence
  source 1..20: mol_type = other RNA
gagcctgtgccacattctct

SEQ ID NO: 11706 - RNA, 20 nt, synthetic construct
  misc_feature 1..20: note = C9Orf72 TTCN PAM targeting sequence
  source 1..20: mol_type = other RNA
ctagctctcaatcatgtact

SEQ ID NO: 11707 - RNA, 20 nt, synthetic construct
  misc_feature 1..20: note = C9Orf72 TTCN PAM targeting sequence
  source 1..20: mol_type = other RNA
ttatttcatagctttctacc

SEQ ID NO: 11708 - RNA, 20 nt, synthetic construct
  misc_feature 1..20: note = C9Orf72 TTCN PAM targeting sequence
  source 1..20: mol_type = other RNA
tagctttctaccagaccaaa

SEQ ID NO: 11709 - RNA, 20 nt, synthetic construct
  misc_feature 1..20: note = C9Orf72 TTCN PAM targeting sequence
  source 1..20: mol_type = other RNA
accagaccaaattgcaaaca

SEQ ID NO: 11710 - RNA, 20 nt, synthetic construct
  misc_feature 1..20: note = C9Orf72 TTCN PAM targeting sequence
  source 1..20: mol_type = other RNA
tctgtcttcacattttattc

SEQ ID NO: 11711 - RNA, 20 nt, synthetic construct
  misc_feature 1..20: note = C9Orf72 TTCN PAM targeting sequence
  source 1..20: mol_type = other RNA
cattttattcctgtgtgtgt

SEQ ID NO: 11712 - RNA, 20 nt, synthetic construct
  misc_feature 1..20: note = C9Orf72 TTCN PAM targeting sequence
  source 1..20: mol_type = other RNA
tgtgtgtgtagtaagctatt

SEQ ID NO: 11713 - RNA, 20 nt, synthetic construct
  misc_feature 1..20: note = C9Orf72 TTCN PAM targeting sequence
  source 1..20: mol_type = other RNA
tcaggcttgaaatttccctc

SEQ ID NO: 11714 - RNA, 20 nt, synthetic construct
  misc_feature 1..20: note = C9Orf72 TTCN PAM targeting sequence
  source 1..20: mol_type = other RNA
agcctgaggaaactgtagta

SEQ ID NO: 11715 - RNA, 20 nt, synthetic construct
  misc_feature 1..20: note = C9Orf72 TTCN PAM targeting sequence
  source 1..20: mol_type = other RNA
ctcctcttccccatatttat

SEQ ID NO: 11716 - RNA, 20 nt, synthetic construct
  misc_feature 1..20: note = C9Orf72 TTCN PAM targeting sequence
  source 1..20: mol_type = other RNA
ccatatttatattatgattc

SEQ ID NO: 11717 - RNA, 20 nt, synthetic construct
  misc_feature 1..20: note = C9Orf72 TTCN PAM targeting sequence
  source 1..20: mol_type = other RNA
ataaccaaatcacctctgtt

SEQ ID NO: 11718 - RNA, 20 nt, synthetic construct
  misc_feature 1..20: note = C9Orf72 TTCN PAM targeting sequence
  source 1..20: mol_type = other RNA
gatctaacaaaacagaggtg

SEQ ID NO: 11719 - RNA, 20 nt, synthetic construct
  misc_feature 1..20: note = C9Orf72 TTCN PAM targeting sequence
  source 1..20: mol_type = other RNA
tataatctcatccaacatac

SEQ ID NO: 11720 - RNA, 20 nt, synthetic construct
  misc_feature 1..20: note = C9Orf72 TTCN PAM targeting sequence
  source 1..20: mol_type = other RNA
attgcactagagagcagcat

SEQ ID NO: 11721 - RNA, 20 nt, synthetic construct
  misc_feature 1..20: note = C9Orf72 TTCN PAM targeting sequence
  source 1..20: mol_type = other RNA
cagaatactcatcgttcaga

SEQ ID NO: 11722 - RNA, 20 nt, synthetic construct
  misc_feature 1..20: note = C9Orf72 TTCN PAM targeting sequence
  source 1..20: mol_type = other RNA
gtgaaaatgctgctctctag

SEQ ID NO: 11723 - RNA, 20 nt, synthetic construct
  misc_feature 1..20: note = C9Orf72 TTCN PAM targeting sequence
  source 1..20: mol_type = other RNA
gacaattcaggcaaaatagg

SEQ ID NO: 11724 - RNA, 20 nt, synthetic construct
  misc_feature 1..20: note = C9Orf72 TTCN PAM targeting sequence
  source 1..20: mol_type = other RNA
ggcaaaataggatttatagc

SEQ ID NO: 11725 - RNA, 20 nt, synthetic construct
  misc_feature 1..20: note = C9Orf72 TTCN PAM targeting sequence
  source 1..20: mol_type = other RNA
gctataaatcctattttgcc

SEQ ID NO: 11726 - RNA, 20 nt, synthetic construct
  misc_feature 1..20: note = C9Orf72 TTCN PAM targeting sequence
  source 1..20: mol_type = other RNA
tttttgctttcctaacagag

SEQ ID NO: 11727 - RNA, 20 nt, synthetic construct
  misc_feature 1..20: note = C9Orf72 TTCN PAM targeting sequence
  source 1..20: mol_type = other RNA
gtgaccaggagactcttacg

SEQ ID NO: 11728 - RNA, 20 nt, synthetic construct
  misc_feature 1..20: note = C9Orf72 TTCN PAM targeting sequence
  source 1..20: mol_type = other RNA
tggttggattctgtgaccag

SEQ ID NO: 11729 - RNA, 20 nt, synthetic construct
  misc_feature 1..20: note = C9Orf72 TTCN PAM targeting sequence
  source 1..20: mol_type = other RNA
atttgattacaatggcaaag

SEQ ID NO: 11730 - RNA, 20 nt, synthetic construct
  misc_feature 1..20: note = C9Orf72 TTCN PAM targeting sequence
  source 1..20: mol_type = other RNA
gcttataaaactgtgtcttt

SEQ ID NO: 11731 - RNA, 20 nt, synthetic construct
  misc_feature 1..20: note = C9Orf72 TTCN PAM targeting sequence
  source 1..20: mol_type = other RNA
tatcccagtgatttagtttc

SEQ ID NO: 11732 - RNA, 20 nt, synthetic construct
  misc_feature 1..20: note = C9Orf72 TTCN PAM targeting sequence
  source 1..20: mol_type = other RNA
tgcttgagaaattccagagg

SEQ ID NO: 11733 - RNA, 20 nt, synthetic construct
  misc_feature 1..20: note = C9Orf72 TTCN PAM targeting sequence
  source 1..20: mol_type = other RNA
caagcaagaacataattaaa

SEQ ID NO: 11734 - RNA, 20 nt, synthetic construct
  misc_feature 1..20: note = C9Orf72 TTCN PAM targeting sequence
  source 1..20: mol_type = other RNA
agaggccaatcttgaaacaa

SEQ ID NO: 11735 - RNA, 20 nt, synthetic construct
  misc_feature 1..20: note = C9Orf72 TTCN PAM targeting sequence
  source 1..20: mol_type = other RNA
agattggcctctggaatttc

SEQ ID NO: 11736 - RNA, 20 nt, synthetic construct
  misc_feature 1..20: note = C9Orf72 TTCN PAM targeting sequence
  source 1..20: mol_type = other RNA
cttgaagtaaatgataacag

SEQ ID NO: 11737 - RNA, 20 nt, synthetic construct
  misc_feature 1..20: note = C9Orf72 TTCN PAM targeting sequence
  source 1..20: mol_type = other RNA
ccaaaacagaatgatggaat

SEQ ID NO: 11738 - RNA, 20 nt, synthetic construct
  misc_feature 1..20: note = C9Orf72 TTCN PAM targeting sequence
  source 1..20: mol_type = other RNA
gttttggggaagtttccctt

SEQ ID NO: 11739 - RNA, 20 nt, synthetic construct
  misc_feature 1..20: note = C9Orf72 TTCN PAM targeting sequence
  source 1..20: mol_type = other RNA
atcattctgttttggggaag

SEQ ID NO: 11740 - RNA, 20 nt, synthetic construct
  misc_feature 1..20: note = C9Orf72 TTCN PAM targeting sequence
  source 1..20: mol_type = other RNA
agaactctgccaataaacaa

SEQ ID NO: 11741 - RNA, 20 nt, synthetic construct
  misc_feature 1..20: note = C9Orf72 TTCN PAM targeting sequence
  source 1..20: mol_type = other RNA
agaattacaattccatcatt

SEQ ID NO: 11742 - RNA, 20 nt, synthetic construct
  misc_feature 1..20: note = C9Orf72 TTCN PAM targeting sequence
  source 1..20: mol_type = other RNA
ttgatttttctcatcatata

SEQ ID NO: 11743 - RNA, 20 nt, synthetic construct
  misc_feature 1..20: note = C9Orf72 TTCN PAM targeting sequence
  source 1..20: mol_type = other RNA
catcatataaattgtcaaag

SEQ ID NO: 11744 - RNA, 20 nt, synthetic construct
  misc_feature 1..20: note = C9Orf72 TTCN PAM targeting sequence
  source 1..20: mol_type = other RNA
tattaaataaataattcatt

SEQ ID NO: 11745 - RNA, 20 nt, synthetic construct
  misc_feature 1..20: note = C9Orf72 TTCN PAM targeting sequence
  source 1..20: mol_type = other RNA
tttatttaattttaaagtct

SEQ ID NO: 11746 - RNA, 20 nt, synthetic construct
  misc_feature 1..20: note = C9Orf72 TTCN PAM targeting sequence
  source 1..20: mol_type = other RNA
gtttcttatcagtaacatca

SEQ ID NO: 11747 - RNA, 20 nt, synthetic construct
  misc_feature 1..20: note = C9Orf72 TTCN PAM targeting sequence
  source 1..20: mol_type = other RNA
tatcagtaacatcaatctta

SEQ ID NO: 11748 - RNA, 20 nt, synthetic construct
  misc_feature 1..20: note = C9Orf72 TTCN PAM targeting sequence
  source 1..20: mol_type = other RNA
attattaagcaatagcagat

SEQ ID NO: 11749 - RNA, 20 nt, synthetic construct
  misc_feature 1..20: note = C9Orf72 TTCN PAM targeting sequence
  source 1..20: mol_type = other RNA
catgctagtggaattttgac

SEQ ID NO: 11750 - RNA, 20 nt, synthetic construct
  misc_feature 1..20: note = C9Orf72 TTCN PAM targeting sequence
  source 1..20: mol_type = other RNA
actagcatgtgaaggcacca

SEQ ID NO: 11751 - RNA, 20 nt, synthetic construct
  misc_feature 1..20: note = C9Orf72 TTCN PAM targeting sequence
  source 1..20: mol_type = other RNA
gtcaaaattccactagcatg

SEQ ID NO: 11752 - RNA, 20 nt, synthetic construct
  misc_feature 1..20: note = C9Orf72 TTCN PAM targeting sequence
  source 1..20: mol_type = other RNA
tctgtcaaaattccactagc

SEQ ID NO: 11753 - RNA, 20 nt, synthetic construct
  misc_feature 1..20: note = C9Orf72 TTCN PAM targeting sequence
  source 1..20: mol_type = other RNA
gatgaagggcttgagaattt

SEQ ID NO: 11754 - RNA, 20 nt, synthetic construct
  misc_feature 1..20: note = C9Orf72 TTCN PAM targeting sequence
  source 1..20: mol_type = other RNA
tcagaagccactgtggggcc

SEQ ID NO: 11755 - RNA, 20 nt, synthetic construct
  misc_feature 1..20: note = C9Orf72 TTCN PAM targeting sequence
  source 1..20: mol_type = other RNA
tgctgactactgagaggctg

SEQ ID NO: 11756 - RNA, 20 nt, synthetic construct
  misc_feature 1..20: note = C9Orf72 TTCN PAM targeting sequence
  source 1..20: mol_type = other RNA
atcttatgtttgctttaatt

SEQ ID NO: 11757 - RNA, 20 nt, synthetic construct
  misc_feature 1..20: note = C9Orf72 TTCN PAM targeting sequence
  source 1..20: mol_type = other RNA
tacagttaataataaaaaaa

SEQ ID NO: 11758 - RNA, 20 nt, synthetic construct
  misc_feature 1..20: note = C9Orf72 TTCN PAM targeting sequence
  source 1..20: mol_type = other RNA
aatttttttattattaactg

SEQ ID NO: 11759 - RNA, 20 nt, synthetic construct
  misc_feature 1..20: note = C9Orf72 TTCN PAM targeting sequence
  source 1..20: mol_type = other RNA
agaaatactaattttattcc

SEQ ID NO: 11760 - RNA, 20 nt, synthetic construct
  misc_feature 1..20: note = C9Orf72 TTCN PAM targeting sequence
  source 1..20: mol_type = other RNA
cgaactatctgtgacagcag

SEQ ID NO: 11761 - RNA, 20 nt, synthetic construct
  misc_feature 1..20: note = C9Orf72 TTCN PAM targeting sequence
  source 1..20: mol_type = other RNA
ttgctgtatggagtaggcaa

SEQ ID NO: 11762 - RNA, 20 nt, synthetic construct
  misc_feature 1..20: note = C9Orf72 TTCN PAM targeting sequence
  source 1..20: mol_type = other RNA
aaggttggaggttgggggta

SEQ ID NO: 11763 - RNA, 20 nt, synthetic construct
  misc_feature 1..20: note = C9Orf72 TTCN PAM targeting sequence
  source 1..20: mol_type = other RNA
cctatcaaaatccattctaa

SEQ ID NO: 11764 - RNA, 20 nt, synthetic construct
  misc_feature 1..20: note = C9Orf72 TTCN PAM targeting sequence
  source 1..20: mol_type = other RNA
tttctcctatcaaaatccat

SEQ ID NO: 11765 - RNA, 20 nt, synthetic construct
  misc_feature 1..20: note = C9Orf72 TTCN PAM targeting sequence
  source 1..20: mol_type = other RNA
ggggctctgtgtttcctttc

SEQ ID NO: 11766 - RNA, 20 nt, synthetic construct
  misc_feature 1..20: note = C9Orf72 TTCN PAM targeting sequence
  source 1..20: mol_type = other RNA
tctggggctctgtgtttcct

SEQ ID NO: 11767 - RNA, 20 nt, synthetic construct
  misc_feature 1..20: note = C9Orf72 TTCN PAM targeting sequence
  source 1..20: mol_type = other RNA
ccctattttatttcttctgg

SEQ ID NO: 11768 - RNA, 20 nt, synthetic construct
  misc_feature 1..20: note = C9Orf72 TTCN PAM targeting sequence
  source 1..20: mol_type = other RNA
gtgaaaaacattgctgccct

SEQ ID NO: 11769 - RNA, 20 nt, synthetic construct
  misc_feature 1..20: note = C9Orf72 TTCN PAM targeting sequence
  source 1..20: mol_type = other RNA
ctgaaaccattattccccct

SEQ ID NO: 11770 - RNA, 20 nt, synthetic construct
  misc_feature 1..20: note = C9Orf72 TTCN PAM targeting sequence
  source 1..20: mol_type = other RNA
attaaagcttgtagaaagat

SEQ ID NO: 11771 - RNA, 20 nt, synthetic construct
  misc_feature 1..20: note = C9Orf72 TTCN PAM targeting sequence
  source 1..20: mol_type = other RNA
atgtttaaggcattgtcttt

SEQ ID NO: 11772 - RNA, 20 nt, synthetic construct
  misc_feature 1..20: note = C9Orf72 TTCN PAM targeting sequence
  source 1..20: mol_type = other RNA
acaacaaagacaatgcctta

SEQ ID NO: 11773 - RNA, 20 nt, synthetic construct
  misc_feature 1..20: note = C9Orf72 TTCN PAM targeting sequence
  source 1..20: mol_type = other RNA
tcttgtccagtggttctcag

SEQ ID NO: 11774 - RNA, 20 nt, synthetic construct
  misc_feature 1..20: note = C9Orf72 TTCN PAM targeting sequence
  source 1..20: mol_type = other RNA
tgtccagtggttctcagatt

SEQ ID NO: 11775 - RNA, 20 nt, synthetic construct
  misc_feature 1..20: note = C9Orf72 TTCN PAM targeting sequence
  source 1..20: mol_type = other RNA
cagatttgcctgctgtatat

SEQ ID NO: 11776 - RNA, 20 nt, synthetic construct
  misc_feature 1..20: note = C9Orf72 TTCN PAM targeting sequence
  source 1..20: mol_type = other RNA
gatatacagcaggcaaatct

SEQ ID NO: 11777 - RNA, 20 nt, synthetic construct
  misc_feature 1..20: note = C9Orf72 TTCN PAM targeting sequence
  source 1..20: mol_type = other RNA
caagttattctgatatacag

SEQ ID NO: 11778 - RNA, 20 nt, synthetic construct
  misc_feature 1..20: note = C9Orf72 TTCN PAM targeting sequence
  source 1..20: mol_type = other RNA
agggttccatttgaaaaccc

SEQ ID NO: 11779 - RNA, 20 nt, synthetic construct
  misc_feature 1..20: note = C9Orf72 TTCN PAM targeting sequence
  source 1..20: mol_type = other RNA
ttgtcccctttcatctaatt

SEQ ID NO: 11780 - RNA, 20 nt, synthetic construct
  misc_feature 1..20: note = C9Orf72 TTCN PAM targeting sequence
  source 1..20: mol_type = other RNA
cgagtgactgggaaggaaaa

SEQ ID NO: 11781 - RNA, 20 nt, synthetic construct
  misc_feature 1..20: note = C9Orf72 TTCN PAM targeting sequence
  source 1..20: mol_type = other RNA
cagtcactcgggaagaggtc

SEQ ID NO: 11782 - RNA, 20 nt, synthetic construct
  misc_feature 1..20: note = C9Orf72 TTCN PAM targeting sequence
  source 1..20: mol_type = other RNA
ttcccagtcactcgggaaga

SEQ ID NO: 11783 - RNA, 20 nt, synthetic construct
  misc_feature 1..20: note = C9Orf72 TTCN PAM targeting sequence
  source 1..20: mol_type = other RNA
tttccttcccagtcactcgg

SEQ ID NO: 11784 - RNA, 20 nt, synthetic construct
  misc_feature 1..20: note = C9Orf72 TTCN PAM targeting sequence
  source 1..20: mol_type = other RNA
ccaaaccacttcttttcctt

SEQ ID NO: 11785 - RNA, 20 nt, synthetic construct
  misc_feature 1..20: note = C9Orf72 TTCN PAM targeting sequence
  source 1..20: mol_type = other RNA
ctgccacagatatgtaaaat

SEQ ID NO: 11786 - RNA, 20 nt, synthetic construct
  misc_feature 1..20: note = C9Orf72 TTCN PAM targeting sequence
  source 1..20: mol_type = other RNA
ggtctacctcgtactatctt

SEQ ID NO: 11787 - RNA, 20 nt, synthetic construct
  misc_feature 1..20: note = C9Orf72 TTCN PAM targeting sequence
  source 1..20: mol_type = other RNA
ttaatacacaaaaggagaag

SEQ ID NO: 11788 - RNA, 20 nt, synthetic construct
  misc_feature 1..20: note = C9Orf72 TTCN PAM targeting sequence
  source 1..20: mol_type = other RNA
ccttttgtgtattaaggaat

SEQ ID NO: 11789 - RNA, 20 nt, synthetic construct
  misc_feature 1..20: note = C9Orf72 TTCN PAM targeting sequence
  source 1..20: mol_type = other RNA
ctaacaatactgcttctcct

SEQ ID NO: 11790 - RNA, 20 nt, synthetic construct
  misc_feature 1..20: note = C9Orf72 TTCN PAM targeting sequence
  source 1..20: mol_type = other RNA
aactctctaaaatctgacta

SEQ ID NO: 11791 - RNA, 20 nt, synthetic construct
  misc_feature 1..20: note = C9Orf72 TTCN PAM targeting sequence
  source 1..20: mol_type = other RNA
caaatcttaactcatgaatt

SEQ ID NO: 11792 - RNA, 20 nt, synthetic construct
  misc_feature 1..20: note = C9Orf72 TTCN PAM targeting sequence
  source 1..20: mol_type = other RNA
tgagttaagatttgagaata

SEQ ID NO: 11793 - RNA, 20 nt, synthetic construct
  misc_feature 1..20: note = C9Orf72 TTCN PAM targeting sequence
  source 1..20: mol_type = other RNA
ggagatgaatcatccacttt

SEQ ID NO: 11794 - RNA, 20 nt, synthetic construct
  misc_feature 1..20: note = C9Orf72 TTCN PAM targeting sequence
  source 1..20: mol_type = other RNA
tctcccgaagagactgcaaa

SEQ ID NO: 11795 - RNA, 20 nt, synthetic construct
  misc_feature 1..20: note = C9Orf72 TTCN PAM targeting sequence
  source 1..20: mol_type = other RNA
aaagtggatgattcatctcc

SEQ ID NO: 11796 - RNA, 20 nt, synthetic construct
  misc_feature 1..20: note = C9Orf72 TTCN PAM targeting sequence
  source 1..20: mol_type = other RNA
ttagaatttgaatatcttcc

SEQ ID NO: 11797 - RNA, 20 nt, synthetic construct
  misc_feature 1..20: note = C9Orf72 TTCN PAM targeting sequence
  source 1..20: mol_type = other RNA
aatgaatgtactggcagtat

SEQ ID NO: 11798 - RNA, 20 nt, synthetic construct
  misc_feature 1..20: note = C9Orf72 TTCN PAM targeting sequence
  source 1..20: mol_type = other RNA
aattctaatgaatgtactgg

SEQ ID NO: 11799 - RNA, 20 nt, synthetic construct
  misc_feature 1..20: note = C9Orf72 TTCN PAM targeting sequence
  source 1..20: mol_type = other RNA
acttttttagtttccaggat

SEQ ID NO: 11800 - RNA, 20 nt, synthetic construct
  misc_feature 1..20: note = C9Orf72 TTCN PAM targeting sequence
  source 1..20: mol_type = other RNA
aggatgctctgtattttaag

SEQ ID NO: 11801 - RNA, 20 nt, synthetic construct
  misc_feature 1..20: note = C9Orf72 TTCN PAM targeting sequence
  source 1..20: mol_type = other RNA
agggcaccatgctctaagac

SEQ ID NO: 11802 - RNA, 20 nt, synthetic construct
  misc_feature 1..20: note = C9Orf72 TTCN PAM targeting sequence
  source 1..20: mol_type = other RNA
gtgtaaatattagacttttg

SEQ ID NO: 11803 - RNA, 20 nt, synthetic construct
  misc_feature 1..20: note = C9Orf72 TTCN PAM targeting sequence
  source 1..20: mol_type = other RNA
aaagtctaatatttacaccg

SEQ ID NO: 11804 - RNA, 20 nt, synthetic construct
  misc_feature 1..20: note = C9Orf72 TTCN PAM targeting sequence
  source 1..20: mol_type = other RNA
ttaacattaattttcctcag

SEQ ID NO: 11805 - RNA, 20 nt, synthetic construct
  misc_feature 1..20: note = C9Orf72 TTCN PAM targeting sequence
  source 1..20: mol_type = other RNA
tcagacttagataacataaa

SEQ ID NO: 11806 - RNA, 20 nt, synthetic construct
  misc_feature 1..20: note = C9Orf72 TTCN PAM targeting sequence
  source 1..20: mol_type = other RNA
cagtaatgctccatgatttt

SEQ ID NO: 11807 - RNA, 20 nt, synthetic construct
  misc_feature 1..20: note = C9Orf72 TTCN PAM targeting sequence
  source 1..20: mol_type = other RNA
taatggttcctgggagttgt

SEQ ID NO: 11808 - RNA, 20 nt, synthetic construct
  misc_feature 1..20: note = C9Orf72 TTCN PAM targeting sequence
  source 1..20: mol_type = other RNA
tgggagttgtcatttacttt

SEQ ID NO: 11809 - RNA, 20 nt, synthetic construct
  misc_feature 1..20: note = C9Orf72 TTCN PAM targeting sequence
  source 1..20: mol_type = other RNA
gtgaggatcccaatttgggg

SEQ ID NO: 11810 - RNA, 20 nt, synthetic construct
  misc_feature 1..20: note = C9Orf72 TTCN PAM targeting sequence
  source 1..20: mol_type = other RNA
gtatggttcagtgaggatcc

SEQ ID NO: 11811 - RNA, 20 nt, synthetic construct
  misc_feature 1..20: note = C9Orf72 TTCN PAM targeting sequence
  source 1..20: mol_type = other RNA
ggcttagcccttaatagctt

SEQ ID NO: 11812 - RNA, 20 nt, synthetic construct
  misc_feature 1..20: note = C9Orf72 TTCN PAM targeting sequence
  source 1..20: mol_type = other RNA
agccattaaaaagtcgagta

SEQ ID NO: 11813 - RNA, 20 nt, synthetic construct
  misc_feature 1..20: note = C9Orf72 TTCN PAM targeting sequence
  source 1..20: mol_type = other RNA
gtggtcataccttcacctaa

SEQ ID NO: 11814 - RNA, 20 nt, synthetic construct
  misc_feature 1..20: note = C9Orf72 TTCN PAM targeting sequence
  source 1..20: mol_type = other RNA
aattgtttttttcttattag

SEQ ID NO: 11815 - RNA, 20 nt, synthetic construct
  misc_feature 1..20: note = C9Orf72 TTCN PAM targeting sequence
  source 1..20: mol_type = other RNA
tattaggtttatgtgctgag

SEQ ID NO: 11816 - RNA, 20 nt, synthetic construct
  misc_feature 1..20: note = C9Orf72 TTCN PAM targeting sequence
  source 1..20: mol_type = other RNA
gagctggatccttaggaaat

SEQ ID NO: 11817 - RNA, 20 nt, synthetic construct
  misc_feature 1..20: note = C9Orf72 TTCN PAM targeting sequence
  source 1..20: mol_type = other RNA
taaggatccagctcagaaac

SEQ ID NO: 11818 - RNA, 20 nt, synthetic construct
  misc_feature 1..20: note = C9Orf72 TTCN PAM targeting sequence
  source 1..20: mol_type = other RNA
ctgaaccatgattcaaaaat

SEQ ID NO: 11819 - RNA, 20 nt, synthetic construct
  misc_feature 1..20: note = C9Orf72 TTCN PAM targeting sequence
  source 1..20: mol_type = other RNA
gtgaacaattttggacacat

SEQ ID NO: 11820 - RNA, 20 nt, synthetic construct
  misc_feature 1..20: note = C9Orf72 TTCN PAM targeting sequence
  source 1..20: mol_type = other RNA
aaaataacaacactttttaa

SEQ ID NO: 11821 - RNA, 20 nt, synthetic construct
  misc_feature 1..20: note = C9Orf72 TTCN PAM targeting sequence
  source 1..20: mol_type = other RNA
gtaagagagaatggttaaac

SEQ ID NO: 11822 - RNA, 20 nt, synthetic construct
  misc_feature 1..20: note = C9Orf72 TTCN PAM targeting sequence
  source 1..20: mol_type = other RNA
ttttttaaaaaaaaatcaac

SEQ ID NO: 11823 - RNA, 20 nt, synthetic construct
  misc_feature 1..20: note = C9Orf72 TTCN PAM targeting sequence
  source 1..20: mol_type = other RNA
ttaaataaattttagttgat

SEQ ID NO: 11824 - RNA, 20 nt, synthetic construct
  misc_feature 1..20: note = C9Orf72 TTCN PAM targeting sequence
  source 1..20: mol_type = other RNA
catttgtctacaaccacagt

SEQ ID NO: 11825 - RNA, 20 nt, synthetic construct
  misc_feature 1..20: note = C9Orf72 TTCN PAM targeting sequence
  source 1..20: mol_type = other RNA
tggcataaagacacaacctt

SEQ ID NO: 11826 - RNA, 20 nt, synthetic construct
  misc_feature 1..20: note = C9Orf72 TTCN PAM targeting sequence
  source 1..20: mol_type = other RNA
ggatagtataactattttaa

SEQ ID NO: 11827 - RNA, 20 nt, synthetic construct
  misc_feature 1..20: note = C9Orf72 TTCN PAM targeting sequence
  source 1..20: mol_type = other RNA
attttatgttattctggata

SEQ ID NO: 11828 - RNA, 20 nt, synthetic construct
  misc_feature 1..20: note = C9Orf72 TTCN PAM targeting sequence
  source 1..20: mol_type = other RNA
tatttaaatcatctttattt

SEQ ID NO: 11829 - RNA, 20 nt, synthetic construct
  misc_feature 1..20: note = C9Orf72 TTCN PAM targeting sequence
  source 1..20: mol_type = other RNA
aaataaagatgatttaaata

SEQ ID NO: 11830 - RNA, 20 nt, synthetic construct
  misc_feature 1..20: note = C9Orf72 TTCN PAM targeting sequence
  source 1..20: mol_type = other RNA
caggatagtgttttctaaat

SEQ ID NO: 11831 - RNA, 20 nt, synthetic construct
  misc_feature 1..20: note = C9Orf72 TTCN PAM targeting sequence
  source 1..20: mol_type = other RNA
attaagcttcagtgggagca

SEQ ID NO: 11832 - RNA, 20 nt, synthetic construct
  misc_feature 1..20: note = C9Orf72 TTCN PAM targeting sequence
  source 1..20: mol_type = other RNA
gtgggagcaaaagtgtaatc

SEQ ID NO: 11833 - RNA, 20 nt, synthetic construct
  misc_feature 1..20: note = C9Orf72 TTCN PAM targeting sequence
  source 1..20: mol_type = other RNA
gtttaagtaactgctgttac

SEQ ID NO: 11834 - RNA, 20 nt, synthetic construct
  misc_feature 1..20: note = C9Orf72 TTCN PAM targeting sequence
  source 1..20: mol_type = other RNA
aaagtaattttgactgatct

SEQ ID NO: 11835 - RNA, 20 nt, synthetic construct
  misc_feature 1..20: note = C9Orf72 TTCN PAM targeting sequence
  source 1..20: mol_type = other RNA
tgctgtggttctggatgttc

SEQ ID NO: 11836 - RNA, 20 nt, synthetic construct
  misc_feature 1..20: note = C9Orf72 TTCN PAM targeting sequence
  source 1..20: mol_type = other RNA
ggatgttcagtagcaggctc

SEQ ID NO: 11837 - RNA, 20 nt, synthetic construct
  misc_feature 1..20: note = C9Orf72 TTCN PAM targeting sequence
  source 1..20: mol_type = other RNA
gtagcaggctcatttgaagg

SEQ ID NO: 11838 - RNA, 20 nt, synthetic construct
  misc_feature 1..20: note = C9Orf72 TTCN PAM targeting sequence
  source 1..20: mol_type = other RNA
aatgagcctgctactgaaca

SEQ ID NO: 11839 - RNA, 20 nt, synthetic construct
  misc_feature 1..20: note = C9Orf72 TTCN PAM targeting sequence
  source 1..20: mol_type = other RNA
gccttcaaatgagcctgcta

SEQ ID NO: 11840 - RNA, 20 nt, synthetic construct
  misc_feature 1..20: note = C9Orf72 TTCN PAM targeting sequence
  source 1..20: mol_type = other RNA
ctgcagggctgattctgcct

SEQ ID NO: 11841 - RNA, 20 nt, synthetic construct
  misc_feature 1..20: note = C9Orf72 TTCN PAM targeting sequence
  source 1..20: mol_type = other RNA
accttcagaatgtggggttt

SEQ ID NO: 11842 - RNA, 20 nt, synthetic construct
  misc_feature 1..20: note = C9Orf72 TTCN PAM targeting sequence
  source 1..20: mol_type = other RNA
gaatgtggggtttatgggga

SEQ ID NO: 11843 - RNA, 20 nt, synthetic construct
  misc_feature 1..20: note = C9Orf72 TTCN PAM targeting sequence
  source 1..20: mol_type = other RNA
gaaggtagaagtgagttccc

SEQ ID NO: 11844 - RNA, 20 nt, synthetic construct
  misc_feature 1..20: note = C9Orf72 TTCN PAM targeting sequence
  source 1..20: mol_type = other RNA
ccataaaccccacattctga

SEQ ID NO: 11845 - RNA, 20 nt, synthetic construct
  misc_feature 1..20: note = C9Orf72 TTCN PAM targeting sequence
  source 1..20: mol_type = other RNA
cccaaaacctggatttttcc

SEQ ID NO: 11846 - RNA, 20 nt, synthetic construct
  misc_feature 1..20: note = C9Orf72 TTCN PAM targeting sequence
  source 1..20: mol_type = other RNA
tccttaccttcccccaaaac

SEQ ID NO: 11847 - RNA, 20 nt, synthetic construct
  misc_feature 1..20: note = C9Orf72 TTCN PAM targeting sequence
  source 1..20: mol_type = other RNA
cattgcaaatggagcatgtg

SEQ ID NO: 11848 - RNA, 20 nt, synthetic construct
  misc_feature 1..20: note = C9Orf72 TTCN PAM targeting sequence
  source 1..20: mol_type = other RNA
cagatccaccacatgctcca

SEQ ID NO: 11849 - RNA, 20 nt, synthetic construct
  misc_feature 1..20: note = C9Orf72 TTCN PAM targeting sequence
  source 1..20: mol_type = other RNA
accaagggatttcccagatc

SEQ ID NO: 11850 - RNA, 20 nt, synthetic construct
  misc_feature 1..20: note = C9Orf72 TTCN PAM targeting sequence
  source 1..20: mol_type = other RNA
caagattattttccaccaag

SEQ ID NO: 11851 - RNA, 20 nt, synthetic construct
  misc_feature 1..20: note = C9Orf72 TTCN PAM targeting sequence
  source 1..20: mol_type = other RNA
tggaggaggtggggggaaag

SEQ ID NO: 11852 - RNA, 20 nt, synthetic construct
  misc_feature 1..20: note = C9Orf72 TTCN PAM targeting sequence
  source 1..20: mol_type = other RNA
ccccacctcctccaggaacc

SEQ ID NO: 11853 - RNA, 20 nt, synthetic construct
  misc_feature 1..20: note = C9Orf72 TTCN PAM targeting sequence
  source 1..20: mol_type = other RNA
catgaacaggctccttgtat

SEQ ID NO: 11854 - RNA, 20 nt, synthetic construct
  misc_feature 1..20: note = C9Orf72 TTCN PAM targeting sequence
  source 1..20: mol_type = other RNA
tgagaagaggacctcctttc

SEQ ID NO: 11855 - RNA, 20 nt, synthetic construct
  misc_feature 1..20: note = C9Orf72 TTCN PAM targeting sequence
  source 1..20: mol_type = other RNA
gggggatacaaggagcctgt

SEQ ID NO: 11856 - RNA, 20 nt, synthetic construct
  misc_feature 1..20: note = C9Orf72 TTCN PAM targeting sequence
  source 1..20: mol_type = other RNA
cctccacctcttgctccaat

SEQ ID NO: 11857 - RNA, 20 nt, synthetic construct
  misc_feature 1..20: note = C9Orf72 TTCN PAM targeting sequence
  source 1..20: mol_type = other RNA
ttttcagcagggagagatga

SEQ ID NO: 11858 - RNA, 20 nt, synthetic construct
  misc_feature 1..20: note = C9Orf72 TTCN PAM targeting sequence
  source 1..20: mol_type = other RNA
gcagggagagatgaatcagg

SEQ ID NO: 11859 - RNA, 20 nt, synthetic construct
  misc_feature 1..20: note = C9Orf72 TTCN PAM targeting sequence
  source 1..20: mol_type = other RNA
tctctccctgctgaaaatga

SEQ ID NO: 11860 - RNA, 20 nt, synthetic construct
  misc_feature 1..20: note = C9Orf72 TTCN PAM targeting sequence
  source 1..20: mol_type = other RNA
gctggattccatttctgaaa

SEQ ID NO: 11861 - RNA, 20 nt, synthetic construct
  misc_feature 1..20: note = C9Orf72 TTCN PAM targeting sequence
  source 1..20: mol_type = other RNA
atttctgaaagcattgaccc

SEQ ID NO: 11862 - RNA, 20 nt, synthetic construct
  misc_feature 1..20: note = C9Orf72 TTCN PAM targeting sequence
  source 1..20: mol_type = other RNA
gaaagcattgacccatccac

SEQ ID NO: 11863 - RNA, 20 nt, synthetic construct
  misc_feature 1..20: note = C9Orf72 TTCN PAM targeting sequence
  source 1..20: mol_type = other RNA
gaaatggaatccagcagaaa

SEQ ID NO: 11864 - RNA, 20 nt, synthetic construct
  misc_feature 1..20: note = C9Orf72 TTCN PAM targeting sequence
  source 1..20: mol_type = other RNA
ttggataaagtggatgggtc

SEQ ID NO: 11865 - RNA, 20 nt, synthetic construct
  misc_feature 1..20: note = C9Orf72 TTCN PAM targeting sequence
  source 1..20: mol_type = other RNA
gagttctgctggtccagaca

SEQ ID NO: 11866 - RNA, 20 nt, synthetic construct
  misc_feature 1..20: note = C9Orf72 TTCN PAM targeting sequence
  source 1..20: mol_type = other RNA
gctggtccagacagtgtgcc

SEQ ID NO: 11867 - RNA, 20 nt, synthetic construct
  misc_feature 1..20: note = C9Orf72 TTCN PAM targeting sequence
  source 1..20: mol_type = other RNA
ggcacactgtctggaccagc

SEQ ID NO: 11868 - RNA, 20 nt, synthetic construct
  misc_feature 1..20: note = C9Orf72 TTCN PAM targeting sequence
  source 1..20: mol_type = other RNA
aattctggcacactgtctgg

SEQ ID NO: 11869 - RNA, 20 nt, synthetic construct
  misc_feature 1..20: note = C9Orf72 TTCN PAM targeting sequence
  source 1..20: mol_type = other RNA
tccacaaaggcaagacagat

SEQ ID NO: 11870 - RNA, 20 nt, synthetic construct
  misc_feature 1..20: note = C9Orf72 TTCN PAM targeting sequence
  source 1..20: mol_type = other RNA
gctcttcctccacaaaggca

SEQ ID NO: 11871 - RNA, 20 nt, synthetic construct
  misc_feature 1..20: note = C9Orf72 TTCN PAM targeting sequence
  source 1..20: mol_type = other RNA
accaggacaatcatatcctg

SEQ ID NO: 11872 - RNA, 20 nt, synthetic construct
  misc_feature 1..20: note = C9Orf72 TTCN PAM targeting sequence
  source 1..20: mol_type = other RNA
tccaccaggacaatcatatc

SEQ ID NO: 11873 - RNA, 20 nt, synthetic construct
  misc_feature 1..20: note = C9Orf72 TTCN PAM targeting sequence
  source 1..20: mol_type = other RNA
catggaggtgacagggaccc

SEQ ID NO: 11874 - RNA, 20 nt, synthetic construct
  misc_feature 1..20: note = C9Orf72 TTCN PAM targeting sequence
  source 1..20: mol_type = other RNA
ctgacactgggtccctgtca

SEQ ID NO: 11875 - RNA, 20 nt, synthetic construct
  misc_feature 1..20: note = C9Orf72 TTCN PAM targeting sequence
  source 1..20: mol_type = other RNA
cctctttcattggtaatctg

SEQ ID NO: 11876 - RNA, 20 nt, synthetic construct
  misc_feature 1..20: note = C9Orf72 TTCN PAM targeting sequence
  source 1..20: mol_type = other RNA
ttggtaatctgatggtccag

SEQ ID NO: 11877 - RNA, 20 nt, synthetic construct
  misc_feature 1..20: note = C9Orf72 TTCN PAM targeting sequence
  source 1..20: mol_type = other RNA
ctggacctcttgagcctctt

SEQ ID NO: 11878 - RNA, 20 nt, synthetic construct
  misc_feature 1..20: note = C9Orf72 TTCN PAM targeting sequence
  source 1..20: mol_type = other RNA
tcctcctcctgttagcaaag

SEQ ID NO: 11879 - RNA, 20 nt, synthetic construct
  misc_feature 1..20: note = C9Orf72 TTCN PAM targeting sequence
  source 1..20: mol_type = other RNA
ctgagggcccactgagactc

SEQ ID NO: 11880 - RNA, 20 nt, synthetic construct
  misc_feature 1..20: note = C9Orf72 TTCN PAM targeting sequence
  source 1..20: mol_type = other RNA
tcctaaacaagagcttttct

SEQ ID NO: 11881 - RNA, 20 nt, synthetic construct
  misc_feature 1..20: note = C9Orf72 TTCN PAM targeting sequence
  source 1..20: mol_type = other RNA
ccatatggtccctcaccact

SEQ ID NO: 11882 - RNA, 20 nt, synthetic construct
  misc_feature 1..20: note = C9Orf72 TTCN PAM targeting sequence
  source 1..20: mol_type = other RNA
aaatacagcatttggcagag

SEQ ID NO: 11883 - RNA, 20 nt, synthetic construct
  misc_feature 1..20: note = C9Orf72 TTCN PAM targeting sequence
  source 1..20: mol_type = other RNA
tgttccaaatacagcatttg

SEQ ID NO: 11884 - RNA, 20 nt, synthetic construct
  misc_feature 1..20: note = C9Orf72 TTCN PAM targeting sequence
  source 1..20: mol_type = other RNA
aaaagttcaaatttaaactc

SEQ ID NO: 11885 - RNA, 20 nt, synthetic construct
  misc_feature 1..20: note = C9Orf72 TTCN PAM targeting sequence
  source 1..20: mol_type = other RNA
aatttaaactctgcttcagt

SEQ ID NO: 11886 - RNA, 20 nt, synthetic construct
  misc_feature 1..20: note = C9Orf72 TTCN PAM targeting sequence
  source 1..20: mol_type = other RNA
gttaatttttgtctgttgtg

SEQ ID NO: 11887 - RNA, 20 nt, synthetic construct
  misc_feature 1..20: note = C9Orf72 TTCN PAM targeting sequence
  source 1..20: mol_type = other RNA
ttccttaaaccattgaggtt

SEQ ID NO: 11888 - RNA, 20 nt, synthetic construct
  misc_feature 1..20: note = C9Orf72 TTCN PAM targeting sequence
  source 1..20: mol_type = other RNA
ttaaaccattgaggtttctt

SEQ ID NO: 11889 - RNA, 20 nt, synthetic construct
  misc_feature 1..20: note = C9Orf72 TTCN PAM targeting sequence
  source 1..20: mol_type = other RNA
ttcagcagtccaagctgcca

SEQ ID NO: 11890 - RNA, 20 nt, synthetic construct
  misc_feature 1..20: note = C9Orf72 TTCN PAM targeting sequence
  source 1..20: mol_type = other RNA
gcagtccaagctgccaacca

SEQ ID NO: 11891 - RNA, 20 nt, synthetic construct
  misc_feature 1..20: note = C9Orf72 TTCN PAM targeting sequence
  source 1..20: mol_type = other RNA
cgtgggaaataatccatcct

SEQ ID NO: 11892 - RNA, 20 nt, synthetic construct
  misc_feature 1..20: note = C9Orf72 TTCN PAM targeting sequence
  source 1..20: mol_type = other RNA
cacgagaaaaaagcacataa

SEQ ID NO: 11893 - RNA, 20 nt, synthetic construct
  misc_feature 1..20: note = C9Orf72 TTCN PAM targeting sequence
  source 1..20: mol_type = other RNA
tatcaaggatggattatttc

SEQ ID NO: 11894 - RNA, 20 nt, synthetic construct
  misc_feature 1..20: note = C9Orf72 TTCN PAM targeting sequence
  source 1..20: mol_type = other RNA
ttcttatcaaggatggatta

SEQ ID NO: 11895 - RNA, 20 nt, synthetic construct
  misc_feature 1..20: note = C9Orf72 TTCN PAM targeting sequence
  source 1..20: mol_type = other RNA
cgccaactcttcttcaagat

SEQ ID NO: 11896 - RNA, 20 nt, synthetic construct
  misc_feature 1..20: note = C9Orf72 TTCN PAM targeting sequence
  source 1..20: mol_type = other RNA
tcaagatctttggctcactt

SEQ ID NO: 11897 - RNA, 20 nt, synthetic construct
  misc_feature 1..20: note = C9Orf72 TTCN PAM targeting sequence
  source 1..20: mol_type = other RNA
agatctttggctcactttct

SEQ ID NO: 11898 - RNA, 20 nt, synthetic construct
  misc_feature 1..20: note = C9Orf72 TTCN PAM targeting sequence
  source 1..20: mol_type = other RNA
ataggtctccaactcttcag

SEQ ID NO: 11899 - RNA, 20 nt, synthetic construct
  misc_feature 1..20: note = C9Orf72 TTCN PAM targeting sequence
  source 1..20: mol_type = other RNA
gtggcacggctgatcttttc

SEQ ID NO: 11900 - RNA, 20 nt, synthetic construct
  misc_feature 1..20: note = C9Orf72 TTCN PAM targeting sequence
  source 1..20: mol_type = other RNA
tgtactttagaaagtttttc

SEQ ID NO: 11901 - RNA, 20 nt, synthetic construct
  misc_feature 1..20: note = C9Orf72 TTCN PAM targeting sequence
  source 1..20: mol_type = other RNA
aaagtacacgaaaagatcag

SEQ ID NO: 11902 - RNA, 20 nt, synthetic construct
  misc_feature 1..20: note = C9Orf72 TTCN PAM targeting sequence
  source 1..20: mol_type = other RNA
tccttttctaaccggtaatt

SEQ ID NO: 11903 - RNA, 20 nt, synthetic construct
  misc_feature 1..20: note = C9Orf72 TTCN PAM targeting sequence
  source 1..20: mol_type = other RNA
ttttctaaccggtaatttca

SEQ ID NO: 11904 - RNA, 20 nt, synthetic construct
  misc_feature 1..20: note = C9Orf72 TTCN PAM targeting sequence
  source 1..20: mol_type = other RNA
aaccggtaatttcatctact

SEQ ID NO: 11905 - RNA, 20 nt, synthetic construct
  misc_feature 1..20: note = C9Orf72 TTCN PAM targeting sequence
  source 1..20: mol_type = other RNA
tctactgttaatttcctctg

SEQ ID NO: 11906 - RNA, 20 nt, synthetic construct
  misc_feature 1..20: note = C9Orf72 TTCN PAM targeting sequence
  source 1..20: mol_type = other RNA
tctggagtttcatttcattt

SEQ ID NO: 11907 - RNA, 20 nt, synthetic construct
  misc_feature 1..20: note = C9Orf72 TTCN PAM targeting sequence
  source 1..20: mol_type = other RNA
tttcattttcttgataaaat

SEQ ID NO: 11908 - RNA, 20 nt, synthetic construct
  misc_feature 1..20: note = C9Orf72 TTCN PAM targeting sequence
  source 1..20: mol_type = other RNA
ttttcttgataaaattcaat

SEQ ID NO: 11909 - RNA, 20 nt, synthetic construct
  misc_feature 1..20: note = C9Orf72 TTCN PAM targeting sequence
  source 1..20: mol_type = other RNA
tgataaaattcaatcattac

SEQ ID NO: 11910 - RNA, 20 nt, synthetic construct
  misc_feature 1..20: note = C9Orf72 TTCN PAM targeting sequence
  source 1..20: mol_type = other RNA
atcattactttaagtttttg

SEQ ID NO: 11911 - RNA, 20 nt, synthetic construct
  misc_feature 1..20: note = C9Orf72 TTCN PAM targeting sequence
  source 1..20: mol_type = other RNA
acaaaaacttaaagtaatga

SEQ ID NO: 11912 - RNA, 20 nt, synthetic construct
  misc_feature 1..20: note = C9Orf72 TTCN PAM targeting sequence
  source 1..20: mol_type = other RNA
gattctcactttcaaaatgt

SEQ ID NO: 11913 - RNA, 20 nt, synthetic construct
  misc_feature 1..20: note = C9Orf72 TTCN PAM targeting sequence
  source 1..20: mol_type = other RNA
cactttcaaaatgtgtgttt

SEQ ID NO: 11914 - RNA, 20 nt, synthetic construct
  misc_feature 1..20: note = C9Orf72 TTCN PAM targeting sequence
  source 1..20: mol_type = other RNA
aaatgtgtgttttctgactg

SEQ ID NO: 11915 - RNA, 20 nt, synthetic construct
  misc_feature 1..20: note = C9Orf72 TTCN PAM targeting sequence
  source 1..20: mol_type = other RNA
gactgcaaagatgcttgttc

SEQ ID NO: 11916 - RNA, 20 nt, synthetic construct
  misc_feature 1..20: note = C9Orf72 TTCN PAM targeting sequence
  source 1..20: mol_type = other RNA
gtctgaagatttttaatatg

SEQ ID NO: 11917 - RNA, 20 nt, synthetic construct
  misc_feature 1..20: note = C9Orf72 TTCN PAM targeting sequence
  source 1..20: mol_type = other RNA
gactgaacaagcatctttgc

SEQ ID NO: 11918 - RNA, 20 nt, synthetic construct
  misc_feature 1..20: note = C9Orf72 TTCN PAM targeting sequence
  source 1..20: mol_type = other RNA
tttatcaacttcagataact

SEQ ID NO: 11919 - RNA, 20 nt, synthetic construct
  misc_feature 1..20: note = C9Orf72 TTCN PAM targeting sequence
  source 1..20: mol_type = other RNA
gataactgactataaatttg

SEQ ID NO: 11920 - RNA, 20 nt, synthetic construct
  misc_feature 1..20: note = C9Orf72 TTCN PAM targeting sequence
  source 1..20: mol_type = other RNA
ttctccttgtaaggttttta

SEQ ID NO: 11921 - RNA, 20 nt, synthetic construct
  misc_feature 1..20: note = C9Orf72 TTCN PAM targeting sequence
  source 1..20: mol_type = other RNA
gattcactgttcatttctaa

SEQ ID NO: 11922 - RNA, 20 nt, synthetic construct
  misc_feature 1..20: note = C9Orf72 TTCN PAM targeting sequence
  source 1..20: mol_type = other RNA
ctgttcatttctaattccaa

SEQ ID NO: 11923 - RNA, 20 nt, synthetic construct
  misc_feature 1..20: note = C9Orf72 TTCN PAM targeting sequence
  source 1..20: mol_type = other RNA
tttctaattccaagttacca

SEQ ID NO: 11924 - RNA, 20 nt, synthetic construct
  misc_feature 1..20: note = C9Orf72 TTCN PAM targeting sequence
  source 1..20: mol_type = other RNA
aattccaagttaccatcatc

SEQ ID NO: 11925 - RNA, 20 nt, synthetic construct
  misc_feature 1..20: note = C9Orf72 TTCN PAM targeting sequence
  source 1..20: mol_type = other RNA
aagttaccatcatccgttat

SEQ ID NO: 11926 - RNA, 20 nt, synthetic construct
  misc_feature 1..20: note = C9Orf72 TTCN PAM targeting sequence
  source 1..20: mol_type = other RNA
ccaagcatagcagcctgatc

SEQ ID NO: 11927 - RNA, 20 nt, synthetic construct
  misc_feature 1..20: note = C9Orf72 TTCN PAM targeting sequence
  source 1..20: mol_type = other RNA
tttttagcaagcgttcagag

SEQ ID NO: 11928 - RNA, 20 nt, synthetic construct
  misc_feature 1..20: note = C9Orf72 TTCN PAM targeting sequence
  source 1..20: mol_type = other RNA
gagtcttgatgtgattttct

SEQ ID NO: 11929 - RNA, 20 nt, synthetic construct
  misc_feature 1..20: note = C9Orf72 TTCN PAM targeting sequence
  source 1..20: mol_type = other RNA
ttatcatttagaacttgttc

SEQ ID NO: 11930 - RNA, 20 nt, synthetic construct
  misc_feature 1..20: note = C9Orf72 TTCN PAM targeting sequence
  source 1..20: mol_type = other RNA
aaatgataaagaaaatcaca

SEQ ID NO: 11931 - RNA, 20 nt, synthetic construct
  misc_feature 1..20: note = C9Orf72 TTCN PAM targeting sequence
  source 1..20: mol_type = other RNA
gcatgtactttggagtcttc

SEQ ID NO: 11932 - RNA, 20 nt, synthetic construct
  misc_feature 1..20: note = C9Orf72 TTCN PAM targeting sequence
  source 1..20: mol_type = other RNA
aatgttattttctgtttatt

SEQ ID NO: 11933 - RNA, 20 nt, synthetic construct
  misc_feature 1..20: note = C9Orf72 TTCN PAM targeting sequence
  source 1..20: mol_type = other RNA
gtttattaagttcactcact

SEQ ID NO: 11934 - RNA, 20 nt, synthetic construct
  misc_feature 1..20: note = C9Orf72 TTCN PAM targeting sequence
  source 1..20: mol_type = other RNA
ctcacttgttctttccatac

SEQ ID NO: 11935 - RNA, 20 nt, synthetic construct
  misc_feature 1..20: note = C9Orf72 TTCN PAM targeting sequence
  source 1..20: mol_type = other RNA
ttccatacctcagcttcttg

SEQ ID NO: 11936 - RNA, 20 nt, synthetic construct
  misc_feature 1..20: note = C9Orf72 TTCN PAM targeting sequence
  source 1..20: mol_type = other RNA
atacctcagcttcttgcaaa

SEQ ID NO: 11937 - RNA, 20 nt, synthetic construct
  misc_feature 1..20: note = C9Orf72 TTCN PAM targeting sequence
  source 1..20: mol_type = other RNA
tgcaaaagctgtctctcgtt

SEQ ID NO: 11938 - RNA, 20 nt, synthetic construct
  misc_feature 1..20: note = C9Orf72 TTCN PAM targeting sequence
  source 1..20: mol_type = other RNA
tggagttgagaattttcatt

SEQ ID NO: 11939 - RNA, 20 nt, synthetic construct
  misc_feature 1..20: note = C9Orf72 TTCN PAM targeting sequence
  source 1..20: mol_type = other RNA
caactccaggaaaacgagag

SEQ ID NO: 11940 - RNA, 20 nt, synthetic construct
  misc_feature 1..20: note = C9Orf72 TTCN PAM targeting sequence
  source 1..20: mol_type = other RNA
ttcaaagcatcttttattgc

SEQ ID NO: 11941 - RNA, 20 nt, synthetic construct
  misc_feature 1..20: note = C9Orf72 TTCN PAM targeting sequence
  source 1..20: mol_type = other RNA
aagcatcttttattgctatc

SEQ ID NO: 11942 - RNA, 20 nt, synthetic construct
  misc_feature 1..20: note = C9Orf72 TTCN PAM targeting sequence
  source 1..20: mol_type = other RNA
gtcgttcttcattcatttga

SEQ ID NO: 11943 - RNA, 20 nt, synthetic construct
  misc_feature 1..20: note = C9Orf72 TTCN PAM targeting sequence
  source 1..20: mol_type = other RNA
tcattcatttgaaatatcgt

SEQ ID NO: 11944 - RNA, 20 nt, synthetic construct
  misc_feature 1..20: note = C9Orf72 TTCN PAM targeting sequence
  source 1..20: mol_type = other RNA
ttcatttgaaatatcgtcaa

SEQ ID NO: 11945 - RNA, 20 nt, synthetic construct
  misc_feature 1..20: note = C9Orf72 TTCN PAM targeting sequence
  source 1..20: mol_type = other RNA
tttgaaatatcgtcaagttc

SEQ ID NO: 11946 - RNA, 20 nt, synthetic construct
  misc_feature 1..20: note = C9Orf72 TTCN PAM targeting sequence
  source 1..20: mol_type = other RNA
aatgaatgaagaacgactga

SEQ ID NO: 11947 - RNA, 20 nt, synthetic construct
  misc_feature 1..20: note = C9Orf72 TTCN PAM targeting sequence
  source 1..20: mol_type = other RNA
ttttggcttcagctacttgt

SEQ ID NO: 11948 - RNA, 20 nt, synthetic construct
  misc_feature 1..20: note = C9Orf72 TTCN PAM targeting sequence
  source 1..20: mol_type = other RNA
gctacttgtcatttgaggga

SEQ ID NO: 11949 - RNA, 20 nt, synthetic construct
  misc_feature 1..20: note = C9Orf72 TTCN PAM targeting sequence
  source 1..20: mol_type = other RNA
agagactgtatccttttgca

SEQ ID NO: 11950 - RNA, 20 nt, synthetic construct
  misc_feature 1..20: note = C9Orf72 TTCN PAM targeting sequence
  source 1..20: mol_type = other RNA
ccttgttcagaatgtttaga

SEQ ID NO: 11951 - RNA, 20 nt, synthetic construct
  misc_feature 1..20: note = C9Orf72 TTCN PAM targeting sequence
  source 1..20: mol_type = other RNA
gaatgtttagatttctctta

SEQ ID NO: 11952 - RNA, 20 nt, synthetic construct
  misc_feature 1..20: note = C9Orf72 TTCN PAM targeting sequence
  source 1..20: mol_type = other RNA
gaacaaggtgaattgatggt

SEQ ID NO: 11953 - RNA, 20 nt, synthetic construct
  misc_feature 1..20: note = C9Orf72 TTCN PAM targeting sequence
  source 1..20: mol_type = other RNA
cttattttaactctttttct

SEQ ID NO: 11954 - RNA, 20 nt, synthetic construct
  misc_feature 1..20: note = C9Orf72 TTCN PAM targeting sequence
  source 1..20: mol_type = other RNA
agacagagtatttcatcctc

SEQ ID NO: 11955 - RNA, 20 nt, synthetic construct
  misc_feature 1..20: note = C9Orf72 TTCN PAM targeting sequence
  source 1..20: mol_type = other RNA
tcctcaagttcagaattgga

SEQ ID NO: 11956 - RNA, 20 nt, synthetic construct
  misc_feature 1..20: note = C9Orf72 TTCN PAM targeting sequence
  source 1..20: mol_type = other RNA
agtagtttatgcttttcttc

SEQ ID NO: 11957 - RNA, 20 nt, synthetic construct
  misc_feature 1..20: note = C9Orf72 TTCN PAM targeting sequence
  source 1..20: mol_type = other RNA
tcaattagtccagaaagcat

SEQ ID NO: 11958 - RNA, 20 nt, synthetic construct
  misc_feature 1..20: note = C9Orf72 TTCN PAM targeting sequence
  source 1..20: mol_type = other RNA
attagtccagaaagcattac

SEQ ID NO: 11959 - RNA, 20 nt, synthetic construct
  misc_feature 1..20: note = C9Orf72 TTCN PAM targeting sequence
  source 1..20: mol_type = other RNA
ggactaattgaagaaaagca

SEQ ID NO: 11960 - RNA, 20 nt, synthetic construct
  misc_feature 1..20: note = C9Orf72 TTCN PAM targeting sequence
  source 1..20: mol_type = other RNA
cttcccacataaagccgact

SEQ ID NO: 11961 - RNA, 20 nt, synthetic construct
  misc_feature 1..20: note = C9Orf72 TTCN PAM targeting sequence
  source 1..20: mol_type = other RNA
cacataaagccgactcccaa

SEQ ID NO: 11962 - RNA, 20 nt, synthetic construct
  misc_feature 1..20: note = C9Orf72 TTCN PAM targeting sequence
  source 1..20: mol_type = other RNA
ctttttttgtgtggagaagt

SEQ ID NO: 11963 - RNA, 20 nt, synthetic construct
  misc_feature 1..20: note = C9Orf72 TTCN PAM targeting sequence
  source 1..20: mol_type = other RNA
atgggagttggtgatatgtg

SEQ ID NO: 11964 - RNA, 20 nt, synthetic construct
  misc_feature 1..20: note = C9Orf72 TTCN PAM targeting sequence
  source 1..20: mol_type = other RNA
ggcagtgctgccacaaccct

SEQ ID NO: 11965 - RNA, 20 nt, synthetic construct
  misc_feature 1..20: note = C9Orf72 TTCN PAM targeting sequence
  source 1..20: mol_type = other RNA
ccgctgtggaggagcctggg

SEQ ID NO: 11966 - RNA, 20 nt, synthetic construct
  misc_feature 1..20: note = C9Orf72 TTCN PAM targeting sequence
  source 1..20: mol_type = other RNA
ctgccgcccacagcccaagt

SEQ ID NO: 11967 - RNA, 20 nt, synthetic construct
  misc_feature 1..20: note = C9Orf72 TTCN PAM targeting sequence
  source 1..20: mol_type = other RNA
gtctggaacccgaatccgca

SEQ ID NO: 11968 - RNA, 20 nt, synthetic construct
  misc_feature 1..20: note = C9Orf72 TTCN PAM targeting sequence
  source 1..20: mol_type = other RNA
agactgaaggctgcgtgttc

SEQ ID NO: 11969 - RNA, 20 nt, synthetic construct
  misc_feature 1..20: note = C9Orf72 TTCN PAM targeting sequence
  source 1..20: mol_type = other RNA
ggttccagactgaaggctgc

SEQ ID NO: 11970 - RNA, 20 nt, synthetic construct
  misc_feature 1..20: note = C9Orf72 TTCN PAM targeting sequence
  source 1..20: mol_type = other RNA
gggattcaacttcttcctgg

SEQ ID NO: 11971 - RNA, 20 nt, synthetic construct
  misc_feature 1..20: note = C9Orf72 TTCN PAM targeting sequence
  source 1..20: mol_type = other RNA
acttcttcctggtttagact

SEQ ID NO: 11972 - RNA, 20 nt, synthetic construct
  misc_feature 1..20: note = C9Orf72 TTCN PAM targeting sequence
  source 1..20: mol_type = other RNA
tcctggtttagacttgggag

SEQ ID NO: 11973 - RNA, 20 nt, synthetic construct
  misc_feature 1..20: note = C9Orf72 TTCN PAM targeting sequence
  source 1..20: mol_type = other RNA
tggtttagacttgggagggt

SEQ ID NO: 11974 - RNA, 20 nt, synthetic construct
  misc_feature 1..20: note = C9Orf72 TTCN PAM targeting sequence
  source 1..20: mol_type = other RNA
tggacacatacaccctccca

SEQ ID NO: 11975 - RNA, 20 nt, synthetic construct
  misc_feature 1..20: note = C9Orf72 TTCN PAM targeting sequence
  source 1..20: mol_type = other RNA
tctagattttctagtttatt

SEQ ID NO: 11976 - RNA, 20 nt, synthetic construct
  misc_feature 1..20: note = C9Orf72 TTCN PAM targeting sequence
  source 1..20: mol_type = other RNA
agattttctagtttatttgt

SEQ ID NO: 11977 - RNA, 20 nt, synthetic construct
  misc_feature 1..20: note = C9Orf72 TTCN PAM targeting sequence
  source 1..20: mol_type = other RNA
agtttatttgtgtagttgtt

SEQ ID NO: 11978 - RNA, 20 nt, synthetic construct
  misc_feature 1..20: note = C9Orf72 TTCN PAM targeting sequence
  source 1..20: mol_type = other RNA
ctctgatggtagtttgtatt

SEQ ID NO: 11979 - RNA, 20 nt, synthetic construct
  misc_feature 1..20: note = C9Orf72 TTCN PAM targeting sequence
  source 1..20: mol_type = other RNA
gtgggatcagtggtgatacc

SEQ ID NO: 11980 - RNA, 20 nt, synthetic construct
  misc_feature 1..20: note = C9Orf72 TTCN PAM targeting sequence
  source 1..20: mol_type = other RNA
tagagacctacaaagagact

SEQ ID NO: 11981 - RNA, 20 nt, synthetic construct
  misc_feature 1..20: note = C9Orf72 TTCN PAM targeting sequence
  source 1..20: mol_type = other RNA
taaagcaagttcttagagac

SEQ ID NO: 11982 - RNA, 20 nt, synthetic construct
  misc_feature 1..20: note = C9Orf72 TTCN PAM targeting sequence
  source 1..20: mol_type = other RNA
tgttgcattgatccctttac

SEQ ID NO: 11983 - RNA, 20 nt, synthetic construct
  misc_feature 1..20: note = C9Orf72 TTCN PAM targeting sequence
  source 1..20: mol_type = other RNA
tgtgagatgggtctcctgaa

SEQ ID NO: 11984 - RNA, 20 nt, synthetic construct
  misc_feature 1..20: note = C9Orf72 TTCN PAM targeting sequence
  source 1..20: mol_type = other RNA
ggagacccatctcacatgaa

SEQ ID NO: 11985 - RNA, 20 nt, synthetic construct
  misc_feature 1..20: note = C9Orf72 TTCN PAM targeting sequence
  source 1..20: mol_type = other RNA
tgaatagctggaccccaggc

SEQ ID NO: 11986 - RNA, 20 nt, synthetic construct
  misc_feature 1..20: note = C9Orf72 TTCN PAM targeting sequence
  source 1..20: mol_type = other RNA
ggaagctgaggtgggaggat

SEQ ID NO: 11987 - RNA, 20 nt, synthetic construct
  misc_feature 1..20: note = C9Orf72 TTCN PAM targeting sequence
  source 1..20: mol_type = other RNA
aattgttaaaaataatatta

SEQ ID NO: 11988 - RNA, 20 nt, synthetic construct
  misc_feature 1..20: note = C9Orf72 TTCN PAM targeting sequence
  source 1..20: mol_type = other RNA
agttgctataaagttatcaa

SEQ ID NO: 11989 - RNA, 20 nt, synthetic construct
  misc_feature 1..20: note = C9Orf72 TTCN PAM targeting sequence
  source 1..20: mol_type = other RNA
cattatctcatagattttat

SEQ ID NO: 11990 - RNA, 20 nt, synthetic construct
  misc_feature 1..20: note = C9Orf72 TTCN PAM targeting sequence
  source 1..20: mol_type = other RNA
accagtaaaacaaagattca

SEQ ID NO: 11991 - RNA, 20 nt, synthetic construct
  misc_feature 1..20: note = C9Orf72 TTCN PAM targeting sequence
  source 1..20: mol_type = other RNA
ctaggaaaaggaggagcaga

SEQ ID NO: 11992 - RNA, 20 nt, synthetic construct
  misc_feature 1..20: note = C9Orf72 TTCN PAM targeting sequence
  source 1..20: mol_type = other RNA
tagtgaatctttgttttact

SEQ ID NO: 11993 - RNA, 20 nt, synthetic construct
  misc_feature 1..20: note = C9Orf72 TTCN PAM targeting sequence
  source 1..20: mol_type = other RNA
ctctgctcctccttttccta

SEQ ID NO: 11994 - RNA, 20 nt, synthetic construct
  misc_feature 1..20: note = C9Orf72 TTCN PAM targeting sequence
  source 1..20: mol_type = other RNA
gtgaagcttgaaatatagac

SEQ ID NO: 11995 - RNA, 20 nt, synthetic construct
  misc_feature 1..20: note = C9Orf72 TTCN PAM targeting sequence
  source 1..20: mol_type = other RNA
ctgaagtgatagattttggg

SEQ ID NO: 11996 - RNA, 20 nt, synthetic construct
  misc_feature 1..20: note = C9Orf72 TTCN PAM targeting sequence
  source 1..20: mol_type = other RNA
agcttcactgaagtgataga

SEQ ID NO: 11997 - RNA, 20 nt, synthetic construct
  misc_feature 1..20: note = C9Orf72 TTCN PAM targeting sequence
  source 1..20: mol_type = other RNA
tttgtctatatttcaagctt

SEQ ID NO: 11998 - RNA, 20 nt, synthetic construct
  misc_feature 1..20: note = C9Orf72 TTCN PAM targeting sequence
  source 1..20: mol_type = other RNA
tgcctcttttgcctttcatt

SEQ ID NO: 11999 - RNA, 20 nt, synthetic construct
  misc_feature 1..20: note = C9Orf72 TTCN PAM targeting sequence
  source 1..20: mol_type = other RNA
ttcatcaactttaatgcact

SEQ ID NO: 12000 - RNA, 20 nt, synthetic construct
  misc_feature 1..20: note = C9Orf72 TTCN PAM targeting sequence
  source 1..20: mol_type = other RNA
tcaactttaatgcacttaca

SEQ ID NO: 12001 - RNA, 20 nt, synthetic construct
  misc_feature 1..20: note = C9Orf72 TTCN PAM targeting sequence
  source 1..20: mol_type = other RNA
tcatgagatctacaatgtaa

SEQ ID NO: 12002 - RNA, 20 nt, synthetic construct
  misc_feature 1..20: note = C9Orf72 TTCN PAM targeting sequence
  source 1..20: mol_type = other RNA
ttgagggctttttgtaaact

SEQ ID NO: 12003 - RNA, 20 nt, synthetic construct
  misc_feature 1..20: note = C9Orf72 TTCN PAM targeting sequence
  source 1..20: mol_type = other RNA
gttattaatatattcatatg

SEQ ID NO: 12004 - RNA, 20 nt, synthetic construct
  misc_feature 1..20: note = C9Orf72 TTCN PAM targeting sequence
  source 1..20: mol_type = other RNA
tatgacattaatttctcaac

SEQ ID NO: 12005 - RNA, 20 nt, synthetic construct
  misc_feature 1..20: note = C9Orf72 TTCN PAM targeting sequence
  source 1..20: mol_type = other RNA
caacaagattcaatttatat

SEQ ID NO: 12006 - RNA, 20 nt, synthetic construct
  misc_feature 1..20: note = C9Orf72 TTCN PAM targeting sequence
  source 1..20: mol_type = other RNA
atttatattttaaaataata

SEQ ID NO: 12007 - RNA, 20 nt, synthetic construct
  misc_feature 1..20: note = C9Orf72 TTCN PAM targeting sequence
  source 1..20: mol_type = other RNA
agaacacacatgctgcacat

SEQ ID NO: 12008 - RNA, 20 nt, synthetic construct
  misc_feature 1..20: note = C9Orf72 TTCN PAM targeting sequence
  source 1..20: mol_type = other RNA
agaaagtcctattattttaa

SEQ ID NO: 12009 - RNA, 20 nt, synthetic construct
  misc_feature 1..20: note = C9Orf72 TTCN PAM targeting sequence
  source 1..20: mol_type = other RNA
aatacttggtcactgtatgt

SEQ ID NO: 12010 - RNA, 20 nt, synthetic construct
  misc_feature 1..20: note = C9Orf72 TTCN PAM targeting sequence
  source 1..20: mol_type = other RNA
ctgcccttgaattaatttgt

SEQ ID NO: 12011 - RNA, 20 nt, synthetic construct
  misc_feature 1..20: note = C9Orf72 TTCN PAM targeting sequence
  source 1..20: mol_type = other RNA
agggcagggaacagtcctaa

SEQ ID NO: 12012 - RNA, 20 nt, synthetic construct
  misc_feature 1..20: note = C9Orf72 TTCN PAM targeting sequence
  source 1..20: mol_type = other RNA
gactgttttaaacaaattaa

SEQ ID NO: 12013 - RNA, 20 nt, synthetic construct
  misc_feature 1..20: note = C9Orf72 TTCN PAM targeting sequence
  source 1..20: mol_type = other RNA
ctaatagcaaagcagaggat

SEQ ID NO: 12014 - RNA, 20 nt, synthetic construct
  misc_feature 1..20: note = C9Orf72 TTCN PAM targeting sequence
  source 1..20: mol_type = other RNA
caggagcttaataaatattg

SEQ ID NO: 12015 - RNA, 20 nt, synthetic construct
  misc_feature 1..20: note = C9Orf72 TTCN PAM targeting sequence
  source 1..20: mol_type = other RNA
taacacatattcccaggagc

SEQ ID NO: 12016 - RNA, 20 nt, synthetic construct
  misc_feature 1..20: note = C9Orf72 TTCN PAM targeting sequence
  source 1..20: mol_type = other RNA
gttcttaacacatattccca

SEQ ID NO: 12017 - RNA, 20 nt, synthetic construct
  misc_feature 1..20: note = C9Orf72 TTCN PAM targeting sequence
  source 1..20: mol_type = other RNA
aagtcaagggatgcatcttg

SEQ ID NO: 12018 - RNA, 20 nt, synthetic construct
  misc_feature 1..20: note = C9Orf72 TTCN PAM targeting sequence
  source 1..20: mol_type = other RNA
ctttcaaagtcaagggatgc

SEQ ID NO: 12019 - RNA, 20 nt, synthetic construct
  misc_feature 1..20: note = C9Orf72 TTCN PAM targeting sequence
  source 1..20: mol_type = other RNA
acaaccttgccagttcactt

SEQ ID NO: 12020 - RNA, 20 nt, synthetic construct
  misc_feature 1..20: note = C9Orf72 TTCN PAM targeting sequence
  source 1..20: mol_type = other RNA
gttctacaaccttgccagtt

SEQ ID NO: 12021 - RNA, 20 nt, synthetic construct
  misc_feature 1..20: note = C9Orf72 TTCN PAM targeting sequence
  source 1..20: mol_type = other RNA
caacccgctttggcctttta

SEQ ID NO: 12022 - RNA, 20 nt, synthetic construct
  misc_feature 1..20: note = C9Orf72 TTCN PAM targeting sequence
  source 1..20: mol_type = other RNA
attaccagttttcaagcaga

SEQ ID NO: 12023 - RNA, 20 nt, synthetic construct
  misc_feature 1..20: note = C9Orf72 TTCN PAM targeting sequence
  source 1..20: mol_type = other RNA
agcagaacttcagccaactt

SEQ ID NO: 12024 - RNA, 20 nt, synthetic construct
  misc_feature 1..20: note = C9Orf72 TTCN PAM targeting sequence
  source 1..20: mol_type = other RNA
gcttgaaaactggtaataga

SEQ ID NO: 12025 - RNA, 20 nt, synthetic construct
  misc_feature 1..20: note = C9Orf72 TTCN PAM targeting sequence
  source 1..20: mol_type = other RNA
gccaacttgtcctagaaaaa

SEQ ID NO: 12026 - RNA, 20 nt, synthetic construct
  misc_feature 1..20: note = C9Orf72 TTCN PAM targeting sequence
  source 1..20: mol_type = other RNA
aggacaagttggctgaagtt

SEQ ID NO: 12027 - RNA, 20 nt, synthetic construct
  misc_feature 1..20: note = C9Orf72 TTCN PAM targeting sequence
  source 1..20: mol_type = other RNA
aagaggcatgttgtaatgat

SEQ ID NO: 12028 - RNA, 20 nt, synthetic construct
  misc_feature 1..20: note = C9Orf72 TTCN PAM targeting sequence
  source 1..20: mol_type = other RNA
tcaatatcattacaacatgc

SEQ ID NO: 12029 - RNA, 20 nt, synthetic construct
  misc_feature 1..20: note = C9Orf72 TTCN PAM targeting sequence
  source 1..20: mol_type = other RNA
aatgcaataacactgatatg

SEQ ID NO: 12030 - RNA, 20 nt, synthetic construct
  misc_feature 1..20: note = C9Orf72 TTCN PAM targeting sequence
  source 1..20: mol_type = other RNA
ataactaagcaatgtttttt

SEQ ID NO: 12031 - RNA, 20 nt, synthetic construct
  misc_feature 1..20: note = C9Orf72 TTCN PAM targeting sequence
  source 1..20: mol_type = other RNA
caggatttccgtggtctgtg

SEQ ID NO: 12032 - RNA, 20 nt, synthetic construct
  misc_feature 1..20: note = C9Orf72 TTCN PAM targeting sequence
  source 1..20: mol_type = other RNA
gtggtctgtgtgcagggaca

SEQ ID NO: 12033 - RNA, 20 nt, synthetic construct
  misc_feature 1..20: note = C9Orf72 TTCN PAM targeting sequence
  source 1..20: mol_type = other RNA
cacaggacaccataattaac

SEQ ID NO: 12034 - RNA, 20 nt, synthetic construct
  misc_feature 1..20: note = C9Orf72 TTCN PAM targeting sequence
  source 1..20: mol_type = other RNA
tgttaaataatgagctaaat

SEQ ID NO: 12035 - RNA, 20 nt, synthetic construct
  misc_feature 1..20: note = C9Orf72 TTCN PAM targeting sequence
  source 1..20: mol_type = other RNA
atctagttgtaacatcttag

SEQ ID NO: 12036 - RNA, 20 nt, synthetic construct
  misc_feature 1..20: note = C9Orf72 TTCN PAM targeting sequence
  source 1..20: mol_type = other RNA
aagatgttacaactagattg

SEQ ID NO: 12037 - RNA, 20 nt, synthetic construct
  misc_feature 1..20: note = C9Orf72 TTCN PAM targeting sequence
  source 1..20: mol_type = other RNA
tttatttctttatttaatga

SEQ ID NO: 12038 - RNA, 20 nt, synthetic construct
  misc_feature 1..20: note = C9Orf72 TTCN PAM targeting sequence
  source 1..20: mol_type = other RNA
ttatttaatgaatatttatc

SEQ ID NO: 12039 - RNA, 20 nt, synthetic construct
  misc_feature 1..20: note = C9Orf72 TTCN PAM targeting sequence
  source 1..20: mol_type = other RNA
ttaaataaagaaataaatga

SEQ ID NO: 12040 - RNA, 20 nt, synthetic construct
  misc_feature 1..20: note = C9Orf72 TTCN PAM targeting sequence
  source 1..20: mol_type = other RNA
tgagatgttttatcagagtg

SEQ ID NO: 12041 - RNA, 20 nt, synthetic construct
  misc_feature 1..20: note = C9Orf72 TTCN PAM targeting sequence
  source 1..20: mol_type = other RNA
gagggtgagaagttcactca

SEQ ID NO: 12042 - RNA, 20 nt, synthetic construct
  misc_feature 1..20: note = C9Orf72 TTCN PAM targeting sequence
  source 1..20: mol_type = other RNA
caccctcagaatcacatgag

SEQ ID NO: 12043 - RNA, 20 nt, synthetic construct
  misc_feature 1..20: note = C9Orf72 TTCN PAM targeting sequence
  source 1..20: mol_type = other RNA
ctcatcgttgccgttggaca

SEQ ID NO: 12044 - RNA, 20 nt, synthetic construct
  misc_feature 1..20: note = C9Orf72 TTCN PAM targeting sequence
  source 1..20: mol_type = other RNA
gggtgagtgttgattcaggc

SEQ ID NO: 12045 - RNA, 20 nt, synthetic construct
  misc_feature 1..20: note = C9Orf72 TTCN PAM targeting sequence
  source 1..20: mol_type = other RNA
caaaagactcacatccttgc

SEQ ID NO: 12046 - RNA, 20 nt, synthetic construct
  misc_feature 1..20: note = C9Orf72 TTCN PAM targeting sequence
  source 1..20: mol_type = other RNA
attaaaatttatttcacaaa

SEQ ID NO: 12047 - RNA, 20 nt, synthetic construct
  misc_feature 1..20: note = C9Orf72 TTCN PAM targeting sequence
  source 1..20: mol_type = other RNA
taagatatcatttttcaatt

SEQ ID NO: 12048 - RNA, 20 nt, synthetic construct
  misc_feature 1..20: note = C9Orf72 TTCN PAM targeting sequence
  source 1..20: mol_type = other RNA
actgaaagatactttttagg

SEQ ID NO: 12049 - RNA, 20 nt, synthetic construct
  misc_feature 1..20: note = C9Orf72 TTCN PAM targeting sequence
  source 1..20: mol_type = other RNA
gtagaatgctagtgcttatg

SEQ ID NO: 12050 - RNA, 20 nt, synthetic construct
  misc_feature 1..20: note = C9Orf72 TTCN PAM targeting sequence
  source 1..20: mol_type = other RNA
actatgggaaaaggtcgggg

SEQ ID NO: 12051 - RNA, 20 nt, synthetic construct
  misc_feature 1..20: note = C9Orf72 TTCN PAM targeting sequence
  source 1..20: mol_type = other RNA
catagtagaacagcctaaaa

SEQ ID NO: 12052 - RNA, 20 nt, synthetic construct
  misc_feature 1..20: note = C9Orf72 TTCN PAM targeting sequence
  source 1..20: mol_type = other RNA
cctcaagattcacctttgtt

SEQ ID NO: 12053 - RNA, 20 nt, synthetic construct
  misc_feature 1..20: note = C9Orf72 TTCN PAM targeting sequence
  source 1..20: mol_type = other RNA
cctttgttagtactgtatat

SEQ ID NO: 12054 - RNA, 20 nt, synthetic construct
  misc_feature 1..20: note = C9Orf72 TTCN PAM targeting sequence
  source 1..20: mol_type = other RNA
gatagcaaaatgatatacag

SEQ ID NO: 12055 - RNA, 20 nt, synthetic construct
  misc_feature 1..20: note = C9Orf72 TTCN PAM targeting sequence
  source 1..20: mol_type = other RNA
agactcacttgtataattgg

SEQ ID NO: 12056 - RNA, 20 nt, synthetic construct
  misc_feature 1..20: note = C9Orf72 TTCN PAM targeting sequence
  source 1..20: mol_type = other RNA
ataattctcattgctgtagt

SEQ ID NO: 12057 - RNA, 20 nt, synthetic construct
  misc_feature 1..20: note = C9Orf72 TTCN PAM targeting sequence
  source 1..20: mol_type = other RNA
cattgctgtagtatattata

SEQ ID NO: 12058 - RNA, 20 nt, synthetic construct
  misc_feature 1..20: note = C9Orf72 TTCN PAM targeting sequence
  source 1..20: mol_type = other RNA
catcaacaataagacttgaa

SEQ ID NO: 12059 - RNA, 20 nt, synthetic construct
  misc_feature 1..20: note = C9Orf72 TTCN PAM targeting sequence
  source 1..20: mol_type = other RNA
agtcttattgttgatgggaa

SEQ ID NO: 12060 - RNA, 20 nt, synthetic construct
  misc_feature 1..20: note = C9Orf72 TTCN PAM targeting sequence
  source 1..20: mol_type = other RNA
tactatagaaccacttcata

SEQ ID NO: 12061 - RNA, 20 nt, synthetic construct
  misc_feature 1..20: note = C9Orf72 TTCN PAM targeting sequence
  source 1..20: mol_type = other RNA
atagtaagaataagatgcta

SEQ ID NO: 12062 - RNA, 20 nt, synthetic construct
  misc_feature 1..20: note = C9Orf72 TTCN PAM targeting sequence
  source 1..20: mol_type = other RNA
tacttctggacatggattta

SEQ ID NO: 12063 - RNA, 20 nt, synthetic construct
  misc_feature 1..20: note = C9Orf72 TTCN PAM targeting sequence
  source 1..20: mol_type = other RNA
ggacatggatttatagatgc

SEQ ID NO: 12064 - RNA, 20 nt, synthetic construct
  misc_feature 1..20: note = C9Orf72 TTCN PAM targeting sequence
  source 1..20: mol_type = other RNA
ttgcagtgcatctataaatc

SEQ ID NO: 12065 - RNA, 20 nt, synthetic construct
  misc_feature 1..20: note = C9Orf72 TTCN PAM targeting sequence
  source 1..20: mol_type = other RNA
tgttaggttaggctttgatc

SEQ ID NO: 12066 - RNA, 20 nt, synthetic construct
  misc_feature 1..20: note = C9Orf72 TTCN PAM targeting sequence
  source 1..20: mol_type = other RNA
cttttgagatgcttcattag

SEQ ID NO: 12067 - RNA, 20 nt, synthetic construct
  misc_feature 1..20: note = C9Orf72 TTCN PAM targeting sequence
  source 1..20: mol_type = other RNA
ttagtgtgtatttattattt

SEQ ID NO: 12068 - RNA, 20 nt, synthetic construct
  misc_feature 1..20: note = C9Orf72 TTCN PAM targeting sequence
  source 1..20: mol_type = other RNA
aattacaaagctgtcagtat

SEQ ID NO: 12069 - RNA, 20 nt, synthetic construct
  misc_feature 1..20: note = C9Orf72 TTCN PAM targeting sequence
  source 1..20: mol_type = other RNA
aagtcagactaccacacaac

SEQ ID NO: 12070 - RNA, 20 nt, synthetic construct
  misc_feature 1..20: note = C9Orf72 TTCN PAM targeting sequence
  source 1..20: mol_type = other RNA
tttactaaaataagggttgg

SEQ ID NO: 12071 - RNA, 20 nt, synthetic construct
  misc_feature 1..20: note = C9Orf72 TTCN PAM targeting sequence
  source 1..20: mol_type = other RNA
agcctccaacccttatttta

SEQ ID NO: 12072 - RNA, 20 nt, synthetic construct
  misc_feature 1..20: note = C9Orf72 TTCN PAM targeting sequence
  source 1..20: mol_type = other RNA
ttggaggttctagcctccaa

SEQ ID NO: 12073 - RNA, 20 nt, synthetic construct
  misc_feature 1..20: note = C9Orf72 TTCN PAM targeting sequence
  source 1..20: mol_type = other RNA
tagatctagtgatcctcaaa

SEQ ID NO: 12074 - RNA, 20 nt, synthetic construct
  misc_feature 1..20: note = C9Orf72 TTCN PAM targeting sequence
  source 1..20: mol_type = other RNA
atgctttgaggatcactaga

SEQ ID NO: 12075 - RNA, 20 nt, synthetic construct
  misc_feature 1..20: note = C9Orf72 TTCN PAM targeting sequence
  source 1..20: mol_type = other RNA
ccctgaaaggctgtgaaatg

SEQ ID NO: 12076 - RNA, 20 nt, synthetic construct
  misc_feature 1..20: note = C9Orf72 TTCN PAM targeting sequence
  source 1..20: mol_type = other RNA
gggggaacccattgcccaca

SEQ ID NO: 12077 - RNA, 20 nt, synthetic construct
  misc_feature 1..20: note = C9Orf72 TTCN PAM targeting sequence
  source 1..20: mol_type = other RNA
cagcctttcagggggaaccc

SEQ ID NO: 12078 - RNA, 20 nt, synthetic construct
  misc_feature 1..20: note = C9Orf72 TTCN PAM targeting sequence
  source 1..20: mol_type = other RNA
gtcaaaaaggatcatttcac

SEQ ID NO: 12079 - RNA, 20 nt, synthetic construct
  misc_feature 1..20: note = C9Orf72 TTCN PAM targeting sequence
  source 1..20: mol_type = other RNA
gtagattttaatgtttccta

SEQ ID NO: 12080 - RNA, 20 nt, synthetic construct
  misc_feature 1..20: note = C9Orf72 TTCN PAM targeting sequence
  source 1..20: mol_type = other RNA
tatatgtcactaaaacctac

SEQ ID NO: 12081 - RNA, 20 nt, synthetic construct
  misc_feature 1..20: note = C9Orf72 TTCN PAM targeting sequence
  source 1..20: mol_type = other RNA
aaactttttcccctctgtgg

SEQ ID NO: 12082 - RNA, 20 nt, synthetic construct
  misc_feature 1..20: note = C9Orf72 TTCN PAM targeting sequence
  source 1..20: mol_type = other RNA
gtaaaaatacattcaatttc

SEQ ID NO: 12083 - RNA, 20 nt, synthetic construct
  misc_feature 1..20: note = C9Orf72 TTCN PAM targeting sequence
  source 1..20: mol_type = other RNA
atttcctgcctgtctagtct

SEQ ID NO: 12084 - RNA, 20 nt, synthetic construct
  misc_feature 1..20: note = C9Orf72 TTCN PAM targeting sequence
  source 1..20: mol_type = other RNA
tgcctgtctagtcttggcaa

SEQ ID NO: 12085 - RNA, 20 nt, synthetic construct
  misc_feature 1..20: note = C9Orf72 TTCN PAM targeting sequence
  source 1..20: mol_type = other RNA
tttgtctactttttgccaag

SEQ ID NO: 12086 - RNA, 20 nt, synthetic construct
  misc_feature 1..20: note = C9Orf72 TTCN PAM targeting sequence
  source 1..20: mol_type = other RNA
ttctggcacattttatttca

SEQ ID NO: 12087 - RNA, 20 nt, synthetic construct
  misc_feature 1..20: note = C9Orf72 TTCN PAM targeting sequence
  source 1..20: mol_type = other RNA
ggcacattttatttcatctg

SEQ ID NO: 12088 - RNA, 20 nt, synthetic construct
  misc_feature 1..20: note = C9Orf72 TTCN PAM targeting sequence
  source 1..20: mol_type = other RNA
tctggctactgtctgatgga

SEQ ID NO: 12089 - RNA, 20 nt, synthetic construct
  misc_feature 1..20: note = C9Orf72 TTCN PAM targeting sequence
  source 1..20: mol_type = other RNA
acacctccatcagacagtag

SEQ ID NO: 12090 - RNA, 20 nt, synthetic construct
  misc_feature 1..20: note = C9Orf72 TTCN PAM targeting sequence
  source 1..20: mol_type = other RNA
gctatcaacaatatggcttt

SEQ ID NO: 12091 - RNA, 20 nt, synthetic construct
  misc_feature 1..20: note = C9Orf72 TTCN PAM targeting sequence
  source 1..20: mol_type = other RNA
cttcagctatcaacaatatg

SEQ ID NO: 12092 - RNA, 20 nt, synthetic construct
  misc_feature 1..20: note = C9Orf72 TTCN PAM targeting sequence
  source 1..20: mol_type = other RNA
acttttctcttcagctatca

SEQ ID NO: 12093 - RNA, 20 nt, synthetic construct
  misc_feature 1..20: note = C9Orf72 TTCN PAM targeting sequence
  source 1..20: mol_type = other RNA
attaatggggccctttgctg

SEQ ID NO: 12094 - RNA, 20 nt, synthetic construct
  misc_feature 1..20: note = C9Orf72 TTCN PAM targeting sequence
  source 1..20: mol_type = other RNA
catattgttacttccattaa

SEQ ID NO: 12095 - RNA, 20 nt, synthetic construct
  misc_feature 1..20: note = C9Orf72 TTCN PAM targeting sequence
  source 1..20: mol_type = other RNA
agatgctgagaatagatatt

SEQ ID NO: 12096 - RNA, 20 nt, synthetic construct
  misc_feature 1..20: note = C9Orf72 TTCN PAM targeting sequence
  source 1..20: mol_type = other RNA
cagcatcttgaagccctttc

SEQ ID NO: 12097 - RNA, 20 nt, synthetic construct
  misc_feature 1..20: note = C9Orf72 TTCN PAM targeting sequence
  source 1..20: mol_type = other RNA
acagaatgtgcaaattcaaa

SEQ ID NO: 12098 - RNA, 20 nt, synthetic construct
  misc_feature 1..20: note = C9Orf72 TTCN PAM targeting sequence
  source 1..20: mol_type = other RNA
gtagaataataacagcagta

SEQ ID NO: 12099 - RNA, 20 nt, synthetic construct
  misc_feature 1..20: note = C9Orf72 TTCN PAM targeting sequence
  source 1..20: mol_type = other RNA
aaagcagcaggatgtcactc

SEQ ID NO: 12100 - RNA, 20 nt, synthetic construct
  misc_feature 1..20: note = C9Orf72 TTCN PAM targeting sequence
  source 1..20: mol_type = other RNA
gtctctgcctgtctcccagc

SEQ ID NO: 12101 - RNA, 20 nt, synthetic construct
  misc_feature 1..20: note = C9Orf72 TTCN PAM targeting sequence
  source 1..20: mol_type = other RNA
agaagcctgctactcaaaga

SEQ ID NO: 12102 - RNA, 20 nt, synthetic construct
  misc_feature 1..20: note = C9Orf72 TTCN PAM targeting sequence
  source 1..20: mol_type = other RNA
ggaaggcttgtgtcactaag

SEQ ID NO: 12103 - RNA, 20 nt, synthetic construct
  misc_feature 1..20: note = C9Orf72 TTCN PAM targeting sequence
  source 1..20: mol_type = other RNA
gcccgctttcagattggcta

SEQ ID NO: 12104 - RNA, 20 nt, synthetic construct
  misc_feature 1..20: note = C9Orf72 TTCN PAM targeting sequence
  source 1..20: mol_type = other RNA
gattggctatcactgtgttg

SEQ ID NO: 12105 - RNA, 20 nt, synthetic construct
  misc_feature 1..20: note = C9Orf72 TTCN PAM targeting sequence
  source 1..20: mol_type = other RNA
ttactttatcatctcatctt

SEQ ID NO: 12106 - RNA, 20 nt, synthetic construct
  misc_feature 1..20: note = C9Orf72 TTCN PAM targeting sequence
  source 1..20: mol_type = other RNA
cacggtttccctttggttgt

SEQ ID NO: 12107 - RNA, 20 nt, synthetic construct
  misc_feature 1..20: note = C9Orf72 TTCN PAM targeting sequence
  source 1..20: mol_type = other RNA
ctttggttgtctgccttgat

SEQ ID NO: 12108 - RNA, 20 nt, synthetic construct
  misc_feature 1..20: note = C9Orf72 TTCN PAM targeting sequence
  source 1..20: mol_type = other RNA
aactccttaataattgatca

SEQ ID NO: 12109 - RNA, 20 nt, synthetic construct
  misc_feature 1..20: note = C9Orf72 TTCN PAM targeting sequence
  source 1..20: mol_type = other RNA
tcttttttaggtgttgatca

SEQ ID NO: 12110 - RNA, 20 nt, synthetic construct
  misc_feature 1..20: note = C9Orf72 TTCN PAM targeting sequence
  source 1..20: mol_type = other RNA
aatcactttgtttcatcttt

SEQ ID NO: 12111 - RNA, 20 nt, synthetic construct
  misc_feature 1..20: note = C9Orf72 TTCN PAM targeting sequence
  source 1..20: mol_type = other RNA
ctcagagacctattgggaaa

SEQ ID NO: 12112 - RNA, 20 nt, synthetic construct
  misc_feature 1..20: note = C9Orf72 TTCN PAM targeting sequence
  source 1..20: mol_type = other RNA
caataggtctctgagggaac

SEQ ID NO: 12113 - RNA, 20 nt, synthetic construct
  misc_feature 1..20: note = C9Orf72 TTCN PAM targeting sequence
  source 1..20: mol_type = other RNA
acacatatatttaatttgct

SEQ ID NO: 12114 - RNA, 20 nt, synthetic construct
  misc_feature 1..20: note = C9Orf72 TTCN PAM targeting sequence
  source 1..20: mol_type = other RNA
agaataaatcaacataaaaa

SEQ ID NO: 12115 - RNA, 20 nt, synthetic construct
  misc_feature 1..20: note = C9Orf72 TTCN PAM targeting sequence
  source 1..20: mol_type = other RNA
tgaattgtatacatgttaat

SEQ ID NO: 12116 - RNA, 20 nt, synthetic construct
  misc_feature 1..20: note = C9Orf72 TTCN PAM targeting sequence
  source 1..20: mol_type = other RNA
aaaccaatgcttgtctttta

SEQ ID NO: 12117 - RNA, 20 nt, synthetic construct
  misc_feature 1..20: note = C9Orf72 TTCN PAM targeting sequence
  source 1..20: mol_type = other RNA
tccaaaccaatgcttgtctt

SEQ ID NO: 12118 - RNA, 20 nt, synthetic construct
  misc_feature 1..20: note = C9Orf72 TTCN PAM targeting sequence
  source 1..20: mol_type = other RNA
agatgttaatcatttgtatt

SEQ ID NO: 12119 - RNA, 20 nt, synthetic construct
  misc_feature 1..20: note = C9Orf72 TTCN PAM targeting sequence
  source 1..20: mol_type = other RNA
tattgatttatatgagctct

SEQ ID NO: 12120 - RNA, 20 nt, synthetic construct
  misc_feature 1..20: note = C9Orf72 TTCN PAM targeting sequence
  source 1..20: mol_type = other RNA
gctcttgagctgttatcttt

SEQ ID NO: 12121 - RNA, 20 nt, synthetic construct
  misc_feature 1..20: note = C9Orf72 TTCN PAM targeting sequence
  source 1..20: mol_type = other RNA
catcctctgcttttcagctc

SEQ ID NO: 12122 - RNA, 20 nt, synthetic construct
  misc_feature 1..20: note = C9Orf72 TTCN PAM targeting sequence
  source 1..20: mol_type = other RNA
cagaaggagaaaagccagtg

SEQ ID NO: 12123 - RNA, 20 nt, synthetic construct
  misc_feature 1..20: note = C9Orf72 TTCN PAM targeting sequence
  source 1..20: mol_type = other RNA
gtgaactacctgttcacatc

SEQ ID NO: 12124 - RNA, 20 nt, synthetic construct
  misc_feature 1..20: note = C9Orf72 TTCN PAM targeting sequence
  source 1..20: mol_type = other RNA
ccttctgtgaactacctgtt

SEQ ID NO: 12125 - RNA, 20 nt, synthetic construct
  misc_feature 1..20: note = C9Orf72 TTCN PAM targeting sequence
  source 1..20: mol_type = other RNA
tttattttatggatcactgg

SEQ ID NO: 12126 - RNA, 20 nt, synthetic construct
  misc_feature 1..20: note = C9Orf72 TTCN PAM targeting sequence
  source 1..20: mol_type = other RNA
atctcactagtaattggaaa

SEQ ID NO: 12127 - RNA, 20 nt, synthetic construct
  misc_feature 1..20: note = C9Orf72 TTCN PAM targeting sequence
  source 1..20: mol_type = other RNA
aattactagtgagattgaac

SEQ ID NO: 12128 - RNA, 20 nt, synthetic construct
  misc_feature 1..20: note = C9Orf72 TTCN PAM targeting sequence
  source 1..20: mol_type = other RNA
tcatccataagattgttaat

SEQ ID NO: 12129 - RNA, 20 nt, synthetic construct
  misc_feature 1..20: note = C9Orf72 TTCN PAM targeting sequence
  source 1..20: mol_type = other RNA
tccataagattgttaattaa

SEQ ID NO: 12130 - RNA, 20 nt, synthetic construct
  misc_feature 1..20: note = C9Orf72 TTCN PAM targeting sequence
  source 1..20: mol_type = other RNA
tacactgttgatgtgaatct

SEQ ID NO: 12131 - RNA, 20 nt, synthetic construct
  misc_feature 1..20: note = C9Orf72 TTCN PAM targeting sequence
  source 1..20: mol_type = other RNA
catcaacagtgtaagaacat

SEQ ID NO: 12132 - RNA, 20 nt, synthetic construct
  misc_feature 1..20: note = C9Orf72 TTCN PAM targeting sequence
  source 1..20: mol_type = other RNA
aaataaaaatatttatattc

SEQ ID NO: 12133 - RNA, 20 nt, synthetic construct
  misc_feature 1..20: note = C9Orf72 TTCN PAM targeting sequence
  source 1..20: mol_type = other RNA
tgtgtatctttttgctgtat

SEQ ID NO: 12134 - RNA, 20 nt, synthetic construct
  misc_feature 1..20: note = C9Orf72 TTCN PAM targeting sequence
  source 1..20: mol_type = other RNA
aatttttataatttaaaaat

SEQ ID NO: 12135 - RNA, 20 nt, synthetic construct
  misc_feature 1..20: note = C9Orf72 TTCN PAM targeting sequence
  source 1..20: mol_type = other RNA
cccattgatagacacttagg

SEQ ID NO: 12136 - RNA, 20 nt, synthetic construct
  misc_feature 1..20: note = C9Orf72 TTCN PAM targeting sequence
  source 1..20: mol_type = other RNA
aagacatataatttggttga

SEQ ID NO: 12137 - RNA, 20 nt, synthetic construct
  misc_feature 1..20: note = C9Orf72 TTCN PAM targeting sequence
  source 1..20: mol_type = other RNA
accaaattatatgtcttgga

SEQ ID NO: 12138 - RNA, 20 nt, synthetic construct
  misc_feature 1..20: note = C9Orf72 TTCN PAM targeting sequence
  source 1..20: mol_type = other RNA
atttaagttaaaaaaccata

SEQ ID NO: 12139 - RNA, 20 nt, synthetic construct
  misc_feature 1..20: note = C9Orf72 TTCN PAM targeting sequence
  source 1..20: mol_type = other RNA
cagctttcccgtggtaatta

SEQ ID NO: 12140 - RNA, 20 nt, synthetic construct
  misc_feature 1..20: note = C9Orf72 TTCN PAM targeting sequence
  source 1..20: mol_type = other RNA
tccttgaaccacaatttcct

SEQ ID NO: 12141 - RNA, 20 nt, synthetic construct
  misc_feature 1..20: note = C9Orf72 TTCN PAM targeting sequence
  source 1..20: mol_type = other RNA
aggaggaacttgtctatatg

SEQ ID NO: 12142 - RNA, 20 nt, synthetic construct
  misc_feature 1..20: note = C9Orf72 TTCN PAM targeting sequence
  source 1..20: mol_type = other RNA
tcatttaacagttccccagg

SEQ ID NO: 12143 - RNA, 20 nt, synthetic construct
  misc_feature 1..20: note = C9Orf72 TTCN PAM targeting sequence
  source 1..20: mol_type = other RNA
ccagggtgaagagaatgggg

SEQ ID NO: 12144 - RNA, 20 nt, synthetic construct
  misc_feature 1..20: note = C9Orf72 TTCN PAM targeting sequence
  source 1..20: mol_type = other RNA
ccctggggaactgttaaatg

SEQ ID NO: 12145 - RNA, 20 nt, synthetic construct
  misc_feature 1..20: note = C9Orf72 TTCN PAM targeting sequence
  source 1..20: mol_type = other RNA
cttcaccctggggaactgtt

SEQ ID NO: 12146 - RNA, 20 nt, synthetic construct
  misc_feature 1..20: note = C9Orf72 TTCN PAM targeting sequence
  source 1..20: mol_type = other RNA
gatgatgaataagcacataa

SEQ ID NO: 12147 - RNA, 20 nt, synthetic construct
  misc_feature 1..20: note = C9Orf72 TTCN PAM targeting sequence
  source 1..20: mol_type = other RNA
agaagaaaatatagaaacta

SEQ ID NO: 12148 - RNA, 20 nt, synthetic construct
  misc_feature 1..20: note = C9Orf72 TTCN PAM targeting sequence
  source 1..20: mol_type = other RNA
agaagttttatagtacgatc

SEQ ID NO: 12149 - RNA, 20 nt, synthetic construct
  misc_feature 1..20: note = C9Orf72 TTCN PAM targeting sequence
  source 1..20: mol_type = other RNA
tctagaagttttatagtacg

SEQ ID NO: 12150 - RNA, 20 nt, synthetic construct
  misc_feature 1..20: note = C9Orf72 TTCN PAM targeting sequence
  source 1..20: mol_type = other RNA
atattttcttctagaagttt

SEQ ID NO: 12151 - RNA, 20 nt, synthetic construct
  misc_feature 1..20: note = C9Orf72 TTCN PAM targeting sequence
  source 1..20: mol_type = other RNA
taggacaacacaacccccaa

SEQ ID NO: 12152 - RNA, 20 nt, synthetic construct
  misc_feature 1..20: note = C9Orf72 TTCN PAM targeting sequence
  source 1..20: mol_type = other RNA
cgttctttgaaagatattat

SEQ ID NO: 12153 - RNA, 20 nt, synthetic construct
  misc_feature 1..20: note = C9Orf72 TTCN PAM targeting sequence
  source 1..20: mol_type = other RNA
ttgaaagatattattaaata

SEQ ID NO: 12154 - RNA, 20 nt, synthetic construct
  misc_feature 1..20: note = C9Orf72 TTCN PAM targeting sequence
  source 1..20: mol_type = other RNA
aagaacgggaattttataat

SEQ ID NO: 12155 - RNA, 20 nt, synthetic construct
  misc_feature 1..20: note = C9Orf72 TTCN PAM targeting sequence
  source 1..20: mol_type = other RNA
tttatttaataatatctttc

SEQ ID NO: 12156 - RNA, 20 nt, synthetic construct
  misc_feature 1..20: note = C9Orf72 TTCN PAM targeting sequence
  source 1..20: mol_type = other RNA
aagtttttttatcttttcat

SEQ ID NO: 12157 - RNA, 20 nt, synthetic construct
  misc_feature 1..20: note = C9Orf72 TTCN PAM targeting sequence
  source 1..20: mol_type = other RNA
ttttactgagttgcaaatgc

SEQ ID NO: 12158 - RNA, 20 nt, synthetic construct
  misc_feature 1..20: note = C9Orf72 TTCN PAM targeting sequence
  source 1..20: mol_type = other RNA
gttggattgttttcttttta

SEQ ID NO: 12159 - RNA, 20 nt, synthetic construct
  misc_feature 1..20: note = C9Orf72 TTCN PAM targeting sequence
  source 1..20: mol_type = other RNA
gatcttttgatcattttctg

SEQ ID NO: 12160 - RNA, 20 nt, synthetic construct
  misc_feature 1..20: note = C9Orf72 TTCN PAM targeting sequence
  source 1..20: mol_type = other RNA
gcttttattaatgatgactg

SEQ ID NO: 12161 - RNA, 20 nt, synthetic construct
  misc_feature 1..20: note = C9Orf72 TTCN PAM targeting sequence
  source 1..20: mol_type = other RNA
gtcatcattaataaaagctg

SEQ ID NO: 12162 - RNA, 20 nt, synthetic construct
  misc_feature 1..20: note = C9Orf72 TTCN PAM targeting sequence
  source 1..20: mol_type = other RNA
tctttaatttcagtcatcat

SEQ ID NO: 12163 - RNA, 20 nt, synthetic construct
  misc_feature 1..20: note = C9Orf72 TTCN PAM targeting sequence
  source 1..20: mol_type = other RNA
gggcatttatttagtaaata

SEQ ID NO: 12164 - RNA, 20 nt, synthetic construct
  misc_feature 1..20: note = C9Orf72 TTCN PAM targeting sequence
  source 1..20: mol_type = other RNA
atcaccagtatttactaaat

SEQ ID NO: 12165 - RNA, 20 nt, synthetic construct
  misc_feature 1..20: note = C9Orf72 TTCN PAM targeting sequence
  source 1..20: mol_type = other RNA
atccagatgtggttattttt

SEQ ID NO: 12166 - RNA, 20 nt, synthetic construct
  misc_feature 1..20: note = C9Orf72 TTCN PAM targeting sequence
  source 1..20: mol_type = other RNA
ctggaatgtgtaataaaaag

SEQ ID NO: 12167 - RNA, 20 nt, synthetic construct
  misc_feature 1..20: note = C9Orf72 TTCN PAM targeting sequence
  source 1..20: mol_type = other RNA
agagaataaccataaaagga

SEQ ID NO: 12168 - RNA, 20 nt, synthetic construct
  misc_feature 1..20: note = C9Orf72 TTCN PAM targeting sequence
  source 1..20: mol_type = other RNA
caagcaaatcactttttatt

SEQ ID NO: 12169 - RNA, 20 nt, synthetic construct
  misc_feature 1..20: note = C9Orf72 TTCN PAM targeting sequence
  source 1..20: mol_type = other RNA
ctacaagtaaataattaaca

SEQ ID NO: 12170 - RNA, 20 nt, synthetic construct
  misc_feature 1..20: note = C9Orf72 TTCN PAM targeting sequence
  source 1..20: mol_type = other RNA
actttactaaactcaaggga

SEQ ID NO: 12171 - RNA, 20 nt, synthetic construct
  misc_feature 1..20: note = C9Orf72 TTCN PAM targeting sequence
  source 1..20: mol_type = other RNA
ctttattttggaatagggga

SEQ ID NO: 12172 - RNA, 20 nt, synthetic construct
  misc_feature 1..20: note = C9Orf72 TTCN PAM targeting sequence
  source 1..20: mol_type = other RNA
aaaataaagggaaaaatggt

SEQ ID NO: 12173 - RNA, 20 nt, synthetic construct
  misc_feature 1..20: note = C9Orf72 TTCN PAM targeting sequence
  source 1..20: mol_type = other RNA
ttttcccacatctccttcat

SEQ ID NO: 12174 - RNA, 20 nt, synthetic construct
  misc_feature 1..20: note = C9Orf72 TTCN PAM targeting sequence
  source 1..20: mol_type = other RNA
cacatctccttcatcctatt

SEQ ID NO: 12175 - RNA, 20 nt, synthetic construct
  misc_feature 1..20: note = C9Orf72 TTCN PAM targeting sequence
  source 1..20: mol_type = other RNA
tcctattcaacgatttactc

SEQ ID NO: 12176 - RNA, 20 nt, synthetic construct
  misc_feature 1..20: note = C9Orf72 TTCN PAM targeting sequence
  source 1..20: mol_type = other RNA
acgatttactctctcctcta

SEQ ID NO: 12177 - RNA, 20 nt, synthetic construct
  misc_feature 1..20: note = C9Orf72 TTCN PAM targeting sequence
  source 1..20: mol_type = other RNA
atcacatctgcaaagtcgct

SEQ ID NO: 12178 - RNA, 20 nt, synthetic construct
  misc_feature 1..20: note = C9Orf72 TTCN PAM targeting sequence
  source 1..20: mol_type = other RNA
aaaaaattaagtttagcttt

SEQ ID NO: 12179 - RNA, 20 nt, synthetic construct
  misc_feature 1..20: note = C9Orf72 TTCN PAM targeting sequence
  source 1..20: mol_type = other RNA
atcttagtaaatattttcat

SEQ ID NO: 12180 - RNA, 20 nt, synthetic construct
  misc_feature 1..20: note = C9Orf72 TTCN PAM targeting sequence
  source 1..20: mol_type = other RNA
tggtaataaaagttttagca

SEQ ID NO: 12181 - RNA, 20 nt, synthetic construct
  misc_feature 1..20: note = C9Orf72 TTCN PAM targeting sequence
  source 1..20: mol_type = other RNA
atgttagtcttaaatttgta

SEQ ID NO: 12182 - RNA, 20 nt, synthetic construct
  misc_feature 1..20: note = C9Orf72 TTCN PAM targeting sequence
  source 1..20: mol_type = other RNA
gaagtacctctggaactatg

SEQ ID NO: 12183 - RNA, 20 nt, synthetic construct
  misc_feature 1..20: note = C9Orf72 TTCN PAM targeting sequence
  source 1..20: mol_type = other RNA
gaattaaatcagttttgtaa

SEQ ID NO: 12184 - RNA, 20 nt, synthetic construct
  misc_feature 1..20: note = C9Orf72 TTCN PAM targeting sequence
  source 1..20: mol_type = other RNA
agaggtacttctgaattaaa

SEQ ID NO: 12185 - RNA, 20 nt, synthetic construct
  misc_feature 1..20: note = C9Orf72 TTCN PAM targeting sequence
  source 1..20: mol_type = other RNA
tagttccagaggtacttctg

SEQ ID NO: 12186 - RNA, 20 nt, synthetic construct
  misc_feature 1..20: note = C9Orf72 TTCN PAM targeting sequence
  source 1..20: mol_type = other RNA
aattcatagttccagaggta

SEQ ID NO: 12187 - RNA, 20 nt, synthetic construct
  misc_feature 1..20: note = C9Orf72 TTCN PAM targeting sequence
  source 1..20: mol_type = other RNA
tgttccaattcatagttcca

SEQ ID NO: 12188 - RNA, 20 nt, synthetic construct
  misc_feature 1..20: note = C9Orf72 TTCN PAM targeting sequence
  source 1..20: mol_type = other RNA
cttcatgttccaattcatag

SEQ ID NO: 12189 - RNA, 20 nt, synthetic construct
  misc_feature 1..20: note = C9Orf72 TTCN PAM targeting sequence
  source 1..20: mol_type = other RNA
caggagtaccatgcatctat

SEQ ID NO: 12190 - RNA, 20 nt, synthetic construct
  misc_feature 1..20: note = C9Orf72 TTCN PAM targeting sequence
  source 1..20: mol_type = other RNA
tgcataataagtatagtttc

SEQ ID NO: 12191 - RNA, 20 nt, synthetic construct
  misc_feature 1..20: note = C9Orf72 TTCN PAM targeting sequence
  source 1..20: mol_type = other RNA
tgttatctgagaggaaggat

SEQ ID NO: 12192 - RNA, 20 nt, synthetic construct
  misc_feature 1..20: note = C9Orf72 TTCN PAM targeting sequence
  source 1..20: mol_type = other RNA
tctcagataacatgaatgca

SEQ ID NO: 12193 - RNA, 20 nt, synthetic construct
  misc_feature 1..20: note = C9Orf72 TTCN PAM targeting sequence
  source 1..20: mol_type = other RNA
cttacctaagtgcctctgtc

SEQ ID NO: 12194 - RNA, 20 nt, synthetic construct
  misc_feature 1..20: note = C9Orf72 TTCN PAM targeting sequence
  source 1..20: mol_type = other RNA
ctgatttcagtggtggtgca

SEQ ID NO: 12195 - RNA, 20 nt, synthetic construct
  misc_feature 1..20: note = C9Orf72 TTCN PAM targeting sequence
  source 1..20: mol_type = other RNA
taatacattgatttgtgtga

SEQ ID NO: 12196 - RNA, 20 nt, synthetic construct
  misc_feature 1..20: note = C9Orf72 TTCN PAM targeting sequence
  source 1..20: mol_type = other RNA
tttagcagcataagctagtc

SEQ ID NO: 12197 - RNA, 20 nt, synthetic construct
  misc_feature 1..20: note = C9Orf72 TTCN PAM targeting sequence
  source 1..20: mol_type = other RNA
tcagagtagagttatattac

SEQ ID NO: 12198 - RNA, 20 nt, synthetic construct
  misc_feature 1..20: note = C9Orf72 TTCN PAM targeting sequence
  source 1..20: mol_type = other RNA
gagtagagttatattacaaa

SEQ ID NO: 12199 - RNA, 20 nt, synthetic construct
  misc_feature 1..20: note = C9Orf72 TTCN PAM targeting sequence
  source 1..20: mol_type = other RNA
gtggaccctttgtaatataa

SEQ ID NO: 12200 - RNA, 20 nt, synthetic construct
  misc_feature 1..20: note = C9Orf72 TTCN PAM targeting sequence
  source 1..20: mol_type = other RNA
cccctcccaccccggccttt

SEQ ID NO: 12201 - RNA, 20 nt, synthetic construct
  misc_feature 1..20: note = C9Orf72 TTCN PAM targeting sequence
  source 1..20: mol_type = other RNA
caactcaatgaaaatcagtg

SEQ ID NO: 12202 - RNA, 20 nt, synthetic construct
  misc_feature 1..20: note = C9Orf72 TTCN PAM targeting sequence
  source 1..20: mol_type = other RNA
tgagactctcctgcttctca

SEQ ID NO: 12203 - RNA, 20 nt, synthetic construct
  misc_feature 1..20: note = C9Orf72 TTCN PAM targeting sequence
  source 1..20: mol_type = other RNA
tcataaagttcttacccagt

SEQ ID NO: 12204 - RNA, 20 nt, synthetic construct
  misc_feature 1..20: note = C9Orf72 TTCN PAM targeting sequence
  source 1..20: mol_type = other RNA
tacccagtggtagaactaaa

SEQ ID NO: 12205 - RNA, 20 nt, synthetic construct
  misc_feature 1..20: note = C9Orf72 TTCN PAM targeting sequence
  source 1..20: mol_type = other RNA
accactgggtaagaacttta

SEQ ID NO: 12206 - RNA, 20 nt, synthetic construct
  misc_feature 1..20: note = C9Orf72 TTCN PAM targeting sequence
  source 1..20: mol_type = other RNA
aggtttctacagcagaagcg

SEQ ID NO: 12207 - RNA, 20 nt, synthetic construct
  misc_feature 1..20: note = C9Orf72 TTCN PAM targeting sequence
  source 1..20: mol_type = other RNA
acagcagaagcgaaagcaaa

SEQ ID NO: 12208 - RNA, 20 nt, synthetic construct
  misc_feature 1..20: note = C9Orf72 TTCN PAM targeting sequence
  source 1..20: mol_type = other RNA
gctgtagaaaccttgaacac

SEQ ID NO: 12209 - RNA, 20 nt, synthetic construct
  misc_feature 1..20: note = C9Orf72 TTCN PAM targeting sequence
  source 1..20: mol_type = other RNA
cttctgctgtagaaaccttg

SEQ ID NO: 12210 - RNA, 20 nt, synthetic construct
  misc_feature 1..20: note = C9Orf72 TTCN PAM targeting sequence
  source 1..20: mol_type = other RNA
tgcctatggacaacgctttg

SEQ ID NO: 12211 - RNA, 20 nt, synthetic construct
  misc_feature 1..20: note = C9Orf72 TTCN PAM targeting sequence
  source 1..20: mol_type = other RNA
aaagtcctcatattttatat

SEQ ID NO: 12212 - RNA, 20 nt, synthetic construct
  misc_feature 1..20: note = C9Orf72 TTCN PAM targeting sequence
  source 1..20: mol_type = other RNA
actaagtttatctcatgaga

SEQ ID NO: 12213 - RNA, 20 nt, synthetic construct
  misc_feature 1..20: note = C9Orf72 TTCN PAM targeting sequence
  source 1..20: mol_type = other RNA
tttttttttatttttaaaaa

SEQ ID NO: 12214 - RNA, 20 nt, synthetic construct
  misc_feature 1..20: note = C9Orf72 TTCN PAM targeting sequence
  source 1..20: mol_type = other RNA
tttaaaaaaaaaaaaaaaaa

SEQ ID NO: 12215 - RNA, 20 nt, synthetic construct
  misc_feature 1..20: note = C9Orf72 TTCN PAM targeting sequence
  source 1..20: mol_type = other RNA
cacaaccaaaattgtctcca

SEQ ID NO: 12216 - RNA, 20 nt, synthetic construct
  misc_feature 1..20: note = C9Orf72 TTCN PAM targeting sequence
  source 1..20: mol_type = other RNA
aaaattattttatttttaat

SEQ ID NO: 12217 - RNA, 20 nt, synthetic construct
  misc_feature 1..20: note = C9Orf72 TTCN PAM targeting sequence
  source 1..20: mol_type = other RNA
aatagcatattccagctgtg

SEQ ID NO: 12218 - RNA, 20 nt, synthetic construct
  misc_feature 1..20: note = C9Orf72 TTCN PAM targeting sequence
  source 1..20: mol_type = other RNA
agctgtgatatttggattct

SEQ ID NO: 12219 - RNA, 20 nt, synthetic construct
  misc_feature 1..20: note = C9Orf72 TTCN PAM targeting sequence
  source 1..20: mol_type = other RNA
gtatgagcttcaattcctac

SEQ ID NO: 12220 - RNA, 20 nt, synthetic construct
  misc_feature 1..20: note = C9Orf72 TTCN PAM targeting sequence
  source 1..20: mol_type = other RNA
taccactacttatccctaaa

SEQ ID NO: 12221 - RNA, 20 nt, synthetic construct
  misc_feature 1..20: note = C9Orf72 TTCN PAM targeting sequence
  source 1..20: mol_type = other RNA
aataaatgttaaggtttagg

SEQ ID NO: 12222 - RNA, 20 nt, synthetic construct
  misc_feature 1..20: note = C9Orf72 TTCN PAM targeting sequence
  source 1..20: mol_type = other RNA
tctaataaatgttaaggttt

SEQ ID NO: 12223 - RNA, 20 nt, synthetic construct
  misc_feature 1..20: note = C9Orf72 TTCN PAM targeting sequence
  source 1..20: mol_type = other RNA
ttcttctaataaatgttaag

SEQ ID NO: 12224 - RNA, 20 nt, synthetic construct
  misc_feature 1..20: note = C9Orf72 TTCN PAM targeting sequence
  source 1..20: mol_type = other RNA
ttctgtggttacattattaa

SEQ ID NO: 12225 - RNA, 20 nt, synthetic construct
  misc_feature 1..20: note = C9Orf72 TTCN PAM targeting sequence
  source 1..20: mol_type = other RNA
gtggttacattattaaataa

SEQ ID NO: 12226 - RNA, 20 nt, synthetic construct
  misc_feature 1..20: note = C9Orf72 TTCN PAM targeting sequence
  source 1..20: mol_type = other RNA
gtggctttatttataaatag

SEQ ID NO: 12227 - RNA, 20 nt, synthetic construct
  misc_feature 1..20: note = C9Orf72 TTCN PAM targeting sequence
  source 1..20: mol_type = other RNA
tggaaaaattggcctgcatt

SEQ ID NO: 12228 - RNA, 20 nt, synthetic construct
  misc_feature 1..20: note = C9Orf72 TTCN PAM targeting sequence
  source 1..20: mol_type = other RNA
atgaattttaggtgatctcc

SEQ ID NO: 12229 - RNA, 20 nt, synthetic construct
  misc_feature 1..20: note = C9Orf72 TTCN PAM targeting sequence
  source 1..20: mol_type = other RNA
tgcaaatgcaggccaatttt

SEQ ID NO: 12230 - RNA, 20 nt, synthetic construct
  misc_feature 1..20: note = C9Orf72 TTCN PAM targeting sequence
  source 1..20: mol_type = other RNA
tctgcaacgcaactgtcaat

SEQ ID NO: 12231 - RNA, 20 nt, synthetic construct
  misc_feature 1..20: note = C9Orf72 TTCN PAM targeting sequence
  source 1..20: mol_type = other RNA
gcaacgcaactgtcaataat

SEQ ID NO: 12232 - RNA, 20 nt, synthetic construct
  misc_feature 1..20: note = C9Orf72 TTCN PAM targeting sequence
  source 1..20: mol_type = other RNA
ttattgacagttgcgttgca

SEQ ID NO: 12233 - RNA, 20 nt, synthetic construct
  misc_feature 1..20: note = C9Orf72 TTCN PAM targeting sequence
  source 1..20: mol_type = other RNA
tgctactgtgcattttcatt

SEQ ID NO: 12234 - RNA, 20 nt, synthetic construct
  misc_feature 1..20: note = C9Orf72 TTCN PAM targeting sequence
  source 1..20: mol_type = other RNA
ttgagcagactgtattagaa

SEQ ID NO: 12235 - RNA, 20 nt, synthetic construct
  misc_feature 1..20: note = C9Orf72 TTCN PAM targeting sequence
  source 1..20: mol_type = other RNA
aatacagtctgctcaaagaa

SEQ ID NO: 12236 - RNA, 20 nt, synthetic construct
  misc_feature 1..20: note = C9Orf72 TTCN PAM targeting sequence
  source 1..20: mol_type = other RNA
gtttctaatacagtctgctc

SEQ ID NO: 12237 - RNA, 20 nt, synthetic construct
  misc_feature 1..20: note = C9Orf72 TTCN PAM targeting sequence
  source 1..20: mol_type = other RNA
gacttattctgtttctaata

SEQ ID NO: 12238 - RNA, 20 nt, synthetic construct
  misc_feature 1..20: note = C9Orf72 TTCN PAM targeting sequence
  source 1..20: mol_type = other RNA
aacttattctgacttattct

SEQ ID NO: 12239 - RNA, 20 nt, synthetic construct
  misc_feature 1..20: note = C9Orf72 TTCN PAM targeting sequence
  source 1..20: mol_type = other RNA
tttattctaacttattctga

SEQ ID NO: 12240 - RNA, 20 nt, synthetic construct
  misc_feature 1..20: note = C9Orf72 TTCN PAM targeting sequence
  source 1..20: mol_type = other RNA
caggtattcttttattctaa

SEQ ID NO: 12241 - RNA, 20 nt, synthetic construct
  misc_feature 1..20: note = C9Orf72 TTCN PAM targeting sequence
  source 1..20: mol_type = other RNA
ctttcccaggtattctttta

SEQ ID NO: 12242 - RNA, 20 nt, synthetic construct
  misc_feature 1..20: note = C9Orf72 TTCN PAM targeting sequence
  source 1..20: mol_type = other RNA
tccctttcccaggtattctt

SEQ ID NO: 12243 - RNA, 20 nt, synthetic construct
  misc_feature 1..20: note = C9Orf72 TTCN PAM targeting sequence
  source 1..20: mol_type = other RNA
ttcttccctttcccaggtat

SEQ ID NO: 12244 - RNA, 20 nt, synthetic construct
  misc_feature 1..20: note = C9Orf72 TTCN PAM targeting sequence
  source 1..20: mol_type = other RNA
ttcattcttccctttcccag

SEQ ID NO: 12245 - RNA, 20 nt, synthetic construct
  misc_feature 1..20: note = C9Orf72 TTCN PAM targeting sequence
  source 1..20: mol_type = other RNA
tatatttgtctttgcccatc

SEQ ID NO: 12246 - RNA, 20 nt, synthetic construct
  misc_feature 1..20: note = C9Orf72 TTCN PAM targeting sequence
  source 1..20: mol_type = other RNA
tggaaggatccagccctttg

SEQ ID NO: 12247 - RNA, 20 nt, synthetic construct
  misc_feature 1..20: note = C9Orf72 TTCN PAM targeting sequence
  source 1..20: mol_type = other RNA
aggaagtgatgctacactaa

SEQ ID NO: 12248 - RNA, 20 nt, synthetic construct
  misc_feature 1..20: note = C9Orf72 TTCN PAM targeting sequence
  source 1..20: mol_type = other RNA
gataatccataaatacttcc

SEQ ID NO: 12249 - RNA, 20 nt, synthetic construct
  misc_feature 1..20: note = C9Orf72 TTCN PAM targeting sequence
  source 1..20: mol_type = other RNA
ttaaaagtatatccctaaca

SEQ ID NO: 12250 - RNA, 20 nt, synthetic construct
  misc_feature 1..20: note = C9Orf72 TTCN PAM targeting sequence
  source 1..20: mol_type = other RNA
ataaacaataatttttaata

SEQ ID NO: 12251 - RNA, 20 nt, synthetic construct
  misc_feature 1..20: note = C9Orf72 TTCN PAM targeting sequence
  source 1..20: mol_type = other RNA
ataaacaatttttttgttat

SEQ ID NO: 12252 - RNA, 20 nt, synthetic construct
  misc_feature 1..20: note = C9Orf72 TTCN PAM targeting sequence
  source 1..20: mol_type = other RNA
ttccaggcagaaatgaggag

SEQ ID NO: 12253 - RNA, 20 nt, synthetic construct
  misc_feature 1..20: note = C9Orf72 TTCN PAM targeting sequence
  source 1..20: mol_type = other RNA
aggcagaaatgaggagtaga

SEQ ID NO: 12254 - RNA, 20 nt, synthetic construct
  misc_feature 1..20: note = C9Orf72 TTCN PAM targeting sequence
  source 1..20: mol_type = other RNA
gcctggaaggaaatcccaga

SEQ ID NO: 12255 - RNA, 20 nt, synthetic construct
  misc_feature 1..20: note = C9Orf72 TTCN PAM targeting sequence
  source 1..20: mol_type = other RNA
ccttcatcgcaatgccattt

SEQ ID NO: 12256 - RNA, 20 nt, synthetic construct
  misc_feature 1..20: note = C9Orf72 TTCN PAM targeting sequence
  source 1..20: mol_type = other RNA
tcgcaatgccatttccataa

SEQ ID NO: 12257 - RNA, 20 nt, synthetic construct
  misc_feature 1..20: note = C9Orf72 TTCN PAM targeting sequence
  source 1..20: mol_type = other RNA
ataatgtgggaaacattgca

SEQ ID NO: 12258 - RNA, 20 nt, synthetic construct
  misc_feature 1..20: note = C9Orf72 TTCN PAM targeting sequence
  source 1..20: mol_type = other RNA
cacattatggaaatggcatt

SEQ ID NO: 12259 - RNA, 20 nt, synthetic construct
  misc_feature 1..20: note = C9Orf72 TTCN PAM targeting sequence
  source 1..20: mol_type = other RNA
tggttagccttgcaatgttt

SEQ ID NO: 12260 - RNA, 20 nt, synthetic construct
  misc_feature 1..20: note = C9Orf72 TTCN PAM targeting sequence
  source 1..20: mol_type = other RNA
ttacgtatccattcctggtt

SEQ ID NO: 12261 - RNA, 20 nt, synthetic construct
  misc_feature 1..20: note = C9Orf72 TTCN PAM targeting sequence
  source 1..20: mol_type = other RNA
acttcttaagattcctcttg

SEQ ID NO: 12262 - RNA, 20 nt, synthetic construct
  misc_feature 1..20: note = C9Orf72 TTCN PAM targeting sequence
  source 1..20: mol_type = other RNA
taagattcctcttgtgttct

SEQ ID NO: 12263 - RNA, 20 nt, synthetic construct
  misc_feature 1..20: note = C9Orf72 TTCN PAM targeting sequence
  source 1..20: mol_type = other RNA
tcttgtgttcttggcccttc

SEQ ID NO: 12264 - RNA, 20 nt, synthetic construct
  misc_feature 1..20: note = C9Orf72 TTCN PAM targeting sequence
  source 1..20: mol_type = other RNA
tggcccttcttactctagta

SEQ ID NO: 12265 - RNA, 20 nt, synthetic construct
  misc_feature 1..20: note = C9Orf72 TTCN PAM targeting sequence
  source 1..20: mol_type = other RNA
tactctagtagtcaaaagaa

SEQ ID NO: 12266 - RNA, 20 nt, synthetic construct
  misc_feature 1..20: note = C9Orf72 TTCN PAM targeting sequence
  source 1..20: mol_type = other RNA
tttgactactagagtaagaa

SEQ ID NO: 12267 - RNA, 20 nt, synthetic construct
  misc_feature 1..20: note = C9Orf72 TTCN PAM targeting sequence
  source 1..20: mol_type = other RNA
ctagtcctatttcctttcct

SEQ ID NO: 12268 - RNA, 20 nt, synthetic construct
  misc_feature 1..20: note = C9Orf72 TTCN PAM targeting sequence
  source 1..20: mol_type = other RNA
tttccttgtttgttttctct

SEQ ID NO: 12269 - RNA, 20 nt, synthetic construct
  misc_feature 1..20: note = C9Orf72 TTCN PAM targeting sequence
  source 1..20: mol_type = other RNA
ttgtttgttttctctctgtc

SEQ ID NO: 12270 - RNA, 20 nt, synthetic construct
  misc_feature 1..20: note = C9Orf72 TTCN PAM targeting sequence
  source 1..20: mol_type = other RNA
gtgcagtctctgtcaagtgc

SEQ ID NO: 12271 - RNA, 20 nt, synthetic construct
  misc_feature 1..20: note = C9Orf72 TTCN PAM targeting sequence
  source 1..20: mol_type = other RNA
cttcagtgcagtctctgtca

SEQ ID NO: 12272 - RNA, 20 nt, synthetic construct
  misc_feature 1..20: note = C9Orf72 TTCN PAM targeting sequence
  source 1..20: mol_type = other RNA
tccttctcttcagtgcagtc

SEQ ID NO: 12273 - RNA, 20 nt, synthetic construct
  misc_feature 1..20: note = C9Orf72 TTCN PAM targeting sequence
  source 1..20: mol_type = other RNA
cccagacagcaatatggctt

SEQ ID NO: 12274 - RNA, 20 nt, synthetic construct
  misc_feature 1..20: note = C9Orf72 TTCN PAM targeting sequence
  source 1..20: mol_type = other RNA
tgagctccagcatttgcatt

SEQ ID NO: 12275 - RNA, 20 nt, synthetic construct
  misc_feature 1..20: note = C9Orf72 TTCN PAM targeting sequence
  source 1..20: mol_type = other RNA
aaaaacacattaaaaagctg

SEQ ID NO: 12276 - RNA, 20 nt, synthetic construct
  misc_feature 1..20: note = C9Orf72 TTCN PAM targeting sequence
  source 1..20: mol_type = other RNA
aaaaaatattcaaaaaacac

SEQ ID NO: 12277 - RNA, 20 nt, synthetic construct
  misc_feature 1..20: note = C9Orf72 TTCN PAM targeting sequence
  source 1..20: mol_type = other RNA
gaaccatttgaaagttgcca

SEQ ID NO: 12278 - RNA, 20 nt, synthetic construct
  misc_feature 1..20: note = C9Orf72 TTCN PAM targeting sequence
  source 1..20: mol_type = other RNA
ccacgttggccaggctagtc

SEQ ID NO: 12279 - RNA, 20 nt, synthetic construct
  misc_feature 1..20: note = C9Orf72 TTCN PAM targeting sequence
  source 1..20: mol_type = other RNA
caacctttcatggactttca

SEQ ID NO: 12280 - RNA, 20 nt, synthetic construct
  misc_feature 1..20: note = C9Orf72 TTCN PAM targeting sequence
  source 1..20: mol_type = other RNA
tggactttcatgactacgtt

SEQ ID NO: 12281 - RNA, 20 nt, synthetic construct
  misc_feature 1..20: note = C9Orf72 TTCN PAM targeting sequence
  source 1..20: mol_type = other RNA
tgactacgttagctttctat

SEQ ID NO: 12282 - RNA, 20 nt, synthetic construct
  misc_feature 1..20: note = C9Orf72 TTCN PAM targeting sequence
  source 1..20: mol_type = other RNA
atgctgcataacaaattacc

SEQ ID NO: 12283 - RNA, 20 nt, synthetic construct
  misc_feature 1..20: note = C9Orf72 TTCN PAM targeting sequence
  source 1..20: mol_type = other RNA
ccagaggcttgacgggaaag

SEQ ID NO: 12284 - RNA, 20 nt, synthetic construct
  misc_feature 1..20: note = C9Orf72 TTCN PAM targeting sequence
  source 1..20: mol_type = other RNA
cgtcaagcctctggtgaaac

SEQ ID NO: 12285 - RNA, 20 nt, synthetic construct
  misc_feature 1..20: note = C9Orf72 TTCN PAM targeting sequence
  source 1..20: mol_type = other RNA
aagctcccttaggttgttgg

SEQ ID NO: 12286 - RNA, 20 nt, synthetic construct
  misc_feature 1..20: note = C9Orf72 TTCN PAM targeting sequence
  source 1..20: mol_type = other RNA
catatcttactggttaaaag

SEQ ID NO: 12287 - RNA, 20 nt, synthetic construct
  misc_feature 1..20: note = C9Orf72 TTCN PAM targeting sequence
  source 1..20: mol_type = other RNA
gcatggactcatggtttctt

SEQ ID NO: 12288 - RNA, 20 nt, synthetic construct
  misc_feature 1..20: note = C9Orf72 TTCN PAM targeting sequence
  source 1..20: mol_type = other RNA
ttttaaattcaagattatat

SEQ ID NO: 12289 - RNA, 20 nt, synthetic construct
  misc_feature 1..20: note = C9Orf72 TTCN PAM targeting sequence
  source 1..20: mol_type = other RNA
agattatatgtattaccgta

SEQ ID NO: 12290 - RNA, 20 nt, synthetic construct
  misc_feature 1..20: note = C9Orf72 TTCN PAM targeting sequence
  source 1..20: mol_type = other RNA
aattatccctaatttatcca

SEQ ID NO: 12291 - RNA, 20 nt, synthetic construct
  misc_feature 1..20: note = C9Orf72 TTCN PAM targeting sequence
  source 1..20: mol_type = other RNA
ataattctttgagcacttcc

SEQ ID NO: 12292 - RNA, 20 nt, synthetic construct
  misc_feature 1..20: note = C9Orf72 TTCN PAM targeting sequence
  source 1..20: mol_type = other RNA
ttgagcacttccttacttcc

SEQ ID NO: 12293 - RNA, 20 nt, synthetic construct
  misc_feature 1..20: note = C9Orf72 TTCN PAM targeting sequence
  source 1..20: mol_type = other RNA
ttacttcctggagcaataag

SEQ ID NO: 12294 - RNA, 20 nt, synthetic construct
  misc_feature 1..20: note = C9Orf72 TTCN PAM targeting sequence
  source 1..20: mol_type = other RNA
tggagcaataagattcacca

SEQ ID NO: 12295 - RNA, 20 nt, synthetic construct
  misc_feature 1..20: note = C9Orf72 TTCN PAM targeting sequence
  source 1..20: mol_type = other RNA
ccaggctcacgtactttctc

SEQ ID NO: 12296 - RNA, 20 nt, synthetic construct
  misc_feature 1..20: note = C9Orf72 TTCN PAM targeting sequence
  source 1..20: mol_type = other RNA
ccttgcccaatcctgaaatc

SEQ ID NO: 12297 - RNA, 20 nt, synthetic construct
  misc_feature 1..20: note = C9Orf72 TTCN PAM targeting sequence
  source 1..20: mol_type = other RNA
ttgtgtaaatagctgcccgt

SEQ ID NO: 12298 - RNA, 20 nt, synthetic construct
  misc_feature 1..20: note = C9Orf72 TTCN PAM targeting sequence
  source 1..20: mol_type = other RNA
tataacatcctctgagtatt

SEQ ID NO: 12299 - RNA, 20 nt, synthetic construct
  misc_feature 1..20: note = C9Orf72 TTCN PAM targeting sequence
  source 1..20: mol_type = other RNA
cttatggccttgattttatt

SEQ ID NO: 12300 - RNA, 20 nt, synthetic construct
  misc_feature 1..20: note = C9Orf72 TTCN PAM targeting sequence
  source 1..20: mol_type = other RNA
taatatcaataaacaaatct

SEQ ID NO: 12301 - RNA, 20 nt, synthetic construct
  misc_feature 1..20: note = C9Orf72 TTCN PAM targeting sequence
  source 1..20: mol_type = other RNA
tgaaaatatagggagaagag

SEQ ID NO: 12302 - RNA, 20 nt, synthetic construct
  misc_feature 1..20: note = C9Orf72 TTCN PAM targeting sequence
  source 1..20: mol_type = other RNA
agaatatttcataatatcaa

SEQ ID NO: 12303 - RNA, 20 nt, synthetic construct
  misc_feature 1..20: note = C9Orf72 TTCN PAM targeting sequence
  source 1..20: mol_type = other RNA
ccctatattttcaagaatat

SEQ ID NO: 12304 - RNA, 20 nt, synthetic construct
  misc_feature 1..20: note = C9Orf72 TTCN PAM targeting sequence
  source 1..20: mol_type = other RNA
cttctccctatattttcaag

SEQ ID NO: 12305 - RNA, 20 nt, synthetic construct
  misc_feature 1..20: note = C9Orf72 TTCN PAM targeting sequence
  source 1..20: mol_type = other RNA
ttgcatcttttctttcttgg

SEQ ID NO: 12306 - RNA, 20 nt, synthetic construct
  misc_feature 1..20: note = C9Orf72 TTCN PAM targeting sequence
  source 1..20: mol_type = other RNA
tctcagcgtattccttgcat

SEQ ID NO: 12307 - RNA, 20 nt, synthetic construct
  misc_feature 1..20: note = C9Orf72 TTCN PAM targeting sequence
  source 1..20: mol_type = other RNA
atccaaacttcatctcagcg

SEQ ID NO: 12308 - RNA, 20 nt, synthetic construct
  misc_feature 1..20: note = C9Orf72 TTCN PAM targeting sequence
  source 1..20: mol_type = other RNA
acgtttgtaaaatgataata

SEQ ID NO: 12309 - RNA, 20 nt, synthetic construct
  misc_feature 1..20: note = C9Orf72 TTCN PAM targeting sequence
  source 1..20: mol_type = other RNA
agcaaaaagcatattatcat

SEQ ID NO: 12310 - RNA, 20 nt, synthetic construct
  misc_feature 1..20: note = C9Orf72 TTCN PAM targeting sequence
  source 1..20: mol_type = other RNA
taaagagctttgttgttttc

SEQ ID NO: 12311 - RNA, 20 nt, synthetic construct
  misc_feature 1..20: note = C9Orf72 TTCN PAM targeting sequence
  source 1..20: mol_type = other RNA
gaagtgtgagaactgtgatg

SEQ ID NO: 12312 - RNA, 20 nt, synthetic construct
  misc_feature 1..20: note = C9Orf72 TTCN PAM targeting sequence
  source 1..20: mol_type = other RNA
gaatacttaaagacccccaa

SEQ ID NO: 12313 - RNA, 20 nt, synthetic construct
  misc_feature 1..20: note = C9Orf72 TTCN PAM targeting sequence
  source 1..20: mol_type = other RNA
cacacttctgaatacttaaa

SEQ ID NO: 12314 - RNA, 20 nt, synthetic construct
  misc_feature 1..20: note = C9Orf72 TTCN PAM targeting sequence
  source 1..20: mol_type = other RNA
gcagtatgcatcaccatcaa

SEQ ID NO: 12315 - RNA, 20 nt, synthetic construct
  misc_feature 1..20: note = C9Orf72 TTCN PAM targeting sequence
  source 1..20: mol_type = other RNA
ctgtgggttataaagccaat

SEQ ID NO: 12316 - RNA, 20 nt, synthetic construct
  misc_feature 1..20: note = C9Orf72 TTCN PAM targeting sequence
  source 1..20: mol_type = other RNA
tcaagaggcactgcagctga

SEQ ID NO: 12317 - RNA, 20 nt, synthetic construct
  misc_feature 1..20: note = C9Orf72 TTCN PAM targeting sequence
  source 1..20: mol_type = other RNA
agaggcactgcagctgaagg

SEQ ID NO: 12318 - RNA, 20 nt, synthetic construct
  misc_feature 1..20: note = C9Orf72 TTCN PAM targeting sequence
  source 1..20: mol_type = other RNA
gctgcagtgcctcttgaaga

SEQ ID NO: 12319 - RNA, 20 nt, synthetic construct
  misc_feature 1..20: note = C9Orf72 TTCN PAM targeting sequence
  source 1..20: mol_type = other RNA
cttggcagccttcagctgca

SEQ ID NO: 12320 - RNA, 20 nt, synthetic construct
  misc_feature 1..20: note = C9Orf72 TTCN PAM targeting sequence
  source 1..20: mol_type = other RNA
aaagtgtacaaaaaagtaaa

SEQ ID NO: 12321 - RNA, 20 nt, synthetic construct
  misc_feature 1..20: note = C9Orf72 TTCN PAM targeting sequence
  source 1..20: mol_type = other RNA
taaattttttacttttttgt

SEQ ID NO: 12322 - RNA, 20 nt, synthetic construct
  misc_feature 1..20: note = C9Orf72 TTCN PAM targeting sequence
  source 1..20: mol_type = other RNA
gtagccaagtttcaagagga

SEQ ID NO: 12323 - RNA, 20 nt, synthetic construct
  misc_feature 1..20: note = C9Orf72 TTCN PAM targeting sequence
  source 1..20: mol_type = other RNA
agaggagaaatataaacaaa

SEQ ID NO: 12324 - RNA, 20 nt, synthetic construct
  misc_feature 1..20: note = C9Orf72 TTCN PAM targeting sequence
  source 1..20: mol_type = other RNA
cctcttgaaacttggctaca

SEQ ID NO: 12325 - RNA, 20 nt, synthetic construct
  misc_feature 1..20: note = C9Orf72 TTCN PAM targeting sequence
  source 1..20: mol_type = other RNA
tttgattataaaacatggtg

SEQ ID NO: 12326 - RNA, 20 nt, synthetic construct
  misc_feature 1..20: note = C9Orf72 TTCN PAM targeting sequence
  source 1..20: mol_type = other RNA
tgttggaaaagtattttcag

SEQ ID NO: 12327 - RNA, 20 nt, synthetic construct
  misc_feature 1..20: note = C9Orf72 TTCN PAM targeting sequence
  source 1..20: mol_type = other RNA
aacatgaaatcttaaatttg

SEQ ID NO: 12328 - RNA, 20 nt, synthetic construct
  misc_feature 1..20: note = C9Orf72 TTCN PAM targeting sequence
  source 1..20: mol_type = other RNA
gttgttgtaaggacactttt

SEQ ID NO: 12329 - RNA, 20 nt, synthetic construct
  misc_feature 1..20: note = C9Orf72 TTCN PAM targeting sequence
  source 1..20: mol_type = other RNA
tttcttctccaaattttcta

SEQ ID NO: 12330 - RNA, 20 nt, synthetic construct
  misc_feature 1..20: note = C9Orf72 TTCN PAM targeting sequence
  source 1..20: mol_type = other RNA
tctccaaattttctaacttg

SEQ ID NO: 12331 - RNA, 20 nt, synthetic construct
  misc_feature 1..20: note = C9Orf72 TTCN PAM targeting sequence
  source 1..20: mol_type = other RNA
ccaaattttctaacttgacc

SEQ ID NO: 12332 - RNA, 20 nt, synthetic construct
  misc_feature 1..20: note = C9Orf72 TTCN PAM targeting sequence
  source 1..20: mol_type = other RNA
aacttgaccaaaatatacct

SEQ ID NO: 12333 - RNA, 20 nt, synthetic construct
  misc_feature 1..20: note = C9Orf72 TTCN PAM targeting sequence
  source 1..20: mol_type = other RNA
tatttaaaggtatattttgg

SEQ ID NO: 12334 - RNA, 20 nt, synthetic construct
  misc_feature 1..20: note = C9Orf72 TTCN PAM targeting sequence
  source 1..20: mol_type = other RNA
ccttatcaaaaacaattgca

SEQ ID NO: 12335 - RNA, 20 nt, synthetic construct
  misc_feature 1..20: note = C9Orf72 TTCN PAM targeting sequence
  source 1..20: mol_type = other RNA
gcaattgtttttgataagga

SEQ ID NO: 12336 - RNA, 20 nt, synthetic construct
  misc_feature 1..20: note = C9Orf72 TTCN PAM targeting sequence
  source 1..20: mol_type = other RNA
agttctgcaattgtttttga

SEQ ID NO: 12337 - RNA, 20 nt, synthetic construct
  misc_feature 1..20: note = C9Orf72 TTCN PAM targeting sequence
  source 1..20: mol_type = other RNA
tcagttgtggctgatcctgt

SEQ ID NO: 12338 - RNA, 20 nt, synthetic construct
  misc_feature 1..20: note = C9Orf72 TTCN PAM targeting sequence
  source 1..20: mol_type = other RNA
tttcctcagttgtggctgat

SEQ ID NO: 12339 - RNA, 20 nt, synthetic construct
  misc_feature 1..20: note = C9Orf72 TTCN PAM targeting sequence
  source 1..20: mol_type = other RNA
cagattgtggtccccagaca

SEQ ID NO: 12340 - RNA, 20 nt, synthetic construct
  misc_feature 1..20: note = C9Orf72 TTCN PAM targeting sequence
  source 1..20: mol_type = other RNA
gtttgccatttaggttgaca

SEQ ID NO: 12341 - RNA, 20 nt, synthetic construct
  misc_feature 1..20: note = C9Orf72 TTCN PAM targeting sequence
  source 1..20: mol_type = other RNA
ttatctttctaaacaaataa

SEQ ID NO: 12342 - RNA, 20 nt, synthetic construct
  misc_feature 1..20: note = C9Orf72 TTCN PAM targeting sequence
  source 1..20: mol_type = other RNA
aaacaaataacctatctttt

SEQ ID NO: 12343 - RNA, 20 nt, synthetic construct
  misc_feature 1..20: note = C9Orf72 TTCN PAM targeting sequence
  source 1..20: mol_type = other RNA
ctattgatataaaataaaag

SEQ ID NO: 12344 - RNA, 20 nt, synthetic construct
  misc_feature 1..20: note = C9Orf72 TTCN PAM targeting sequence
  source 1..20: mol_type = other RNA
tgatatttctatattttctc

SEQ ID NO: 12345 - RNA, 20 nt, synthetic construct
  misc_feature 1..20: note = C9Orf72 TTCN PAM targeting sequence
  source 1..20: mol_type = other RNA
cagtgtgtgatctctgacaa

SEQ ID NO: 12346 - RNA, 20 nt, synthetic construct
  misc_feature 1..20: note = C9Orf72 TTCN PAM targeting sequence
  source 1..20: mol_type = other RNA
gtacccatttgcttaagtgt

SEQ ID NO: 12347 - RNA, 20 nt, synthetic construct
  misc_feature 1..20: note = C9Orf72 TTCN PAM targeting sequence
  source 1..20: mol_type = other RNA
ttggttctccacatatagtc

SEQ ID NO: 12348 - RNA, 20 nt, synthetic construct
  misc_feature 1..20: note = C9Orf72 TTCN PAM targeting sequence
  source 1..20: mol_type = other RNA
ttatgttctttggttctcca

SEQ ID NO: 12349 - RNA, 20 nt, synthetic construct
  misc_feature 1..20: note = C9Orf72 TTCN PAM targeting sequence
  source 1..20: mol_type = other RNA
gtggacaaagtgatgaaaga

SEQ ID NO: 12350 - RNA, 20 nt, synthetic construct
  misc_feature 1..20: note = C9Orf72 TTCN PAM targeting sequence
  source 1..20: mol_type = other RNA
tcactttgtccactgaactt

SEQ ID NO: 12351 - RNA, 20 nt, synthetic construct
  misc_feature 1..20: note = C9Orf72 TTCN PAM targeting sequence
  source 1..20: mol_type = other RNA
ttcatcactttgtccactga

SEQ ID NO: 12352 - RNA, 20 nt, synthetic construct
  misc_feature 1..20: note = C9Orf72 TTCN PAM targeting sequence
  source 1..20: mol_type = other RNA
tcattttctttcatcacttt

SEQ ID NO: 12353 - RNA, 20 nt, synthetic construct
  misc_feature 1..20: note = C9Orf72 TTCN PAM targeting sequence
  source 1..20: mol_type = other RNA
gtctcctggcttcagaagca

SEQ ID NO: 12354 - RNA, 20 nt, synthetic construct
  misc_feature 1..20: note = C9Orf72 TTCN PAM targeting sequence
  source 1..20: mol_type = other RNA
gaagcagatactgagcctca

SEQ ID NO: 12355 - RNA, 20 nt, synthetic construct
  misc_feature 1..20: note = C9Orf72 TTCN PAM targeting sequence
  source 1..20: mol_type = other RNA
aatttatgtgaaaagaaatc

SEQ ID NO: 12356 - RNA, 20 nt, synthetic construct
  misc_feature 1..20: note = C9Orf72 TTCN PAM targeting sequence
  source 1..20: mol_type = other RNA
cataaattagaaaactcaag

SEQ ID NO: 12357 - RNA, 20 nt, synthetic construct
  misc_feature 1..20: note = C9Orf72 TTCN PAM targeting sequence
  source 1..20: mol_type = other RNA
tttcacataaattagaaaac

SEQ ID NO: 12358 - RNA, 20 nt, synthetic construct
  misc_feature 1..20: note = C9Orf72 TTCN PAM targeting sequence
  source 1..20: mol_type = other RNA
ccagatttcttttcacataa

SEQ ID NO: 12359 - RNA, 20 nt, synthetic construct
  misc_feature 1..20: note = C9Orf72 TTCN PAM targeting sequence
  source 1..20: mol_type = other RNA
catgcctgttctccagattt

SEQ ID NO: 12360 - RNA, 20 nt, synthetic construct
  misc_feature 1..20: note = C9Orf72 TTCN PAM targeting sequence
  source 1..20: mol_type = other RNA
accattatcccacaccctta

SEQ ID NO: 12361 - RNA, 20 nt, synthetic construct
  misc_feature 1..20: note = C9Orf72 TTCN PAM targeting sequence
  source 1..20: mol_type = other RNA
ttccaccattatcccacacc

SEQ ID NO: 12362 - RNA, 20 nt, synthetic construct
  misc_feature 1..20: note = C9Orf72 TTCN PAM targeting sequence
  source 1..20: mol_type = other RNA
gcctgatccaactctatgtt

SEQ ID NO: 12363 - RNA, 20 nt, synthetic construct
  misc_feature 1..20: note = C9Orf72 TTCN PAM targeting sequence
  source 1..20: mol_type = other RNA
tgctttgggccactaattag

SEQ ID NO: 12364 - RNA, 20 nt, synthetic construct
  misc_feature 1..20: note = C9Orf72 TTCN PAM targeting sequence
  source 1..20: mol_type = other RNA
caatgcatagttaccctggt

SEQ ID NO: 12365 - RNA, 20 nt, synthetic construct
  misc_feature 1..20: note = C9Orf72 TTCN PAM targeting sequence
  source 1..20: mol_type = other RNA
ctttcccaatgcatagttac

SEQ ID NO: 12366 - RNA, 20 nt, synthetic construct
  misc_feature 1..20: note = C9Orf72 TTCN PAM targeting sequence
  source 1..20: mol_type = other RNA
aggggacccaaaacaccatt

SEQ ID NO: 12367 - RNA, 20 nt, synthetic construct
  misc_feature 1..20: note = C9Orf72 TTCN PAM targeting sequence
  source 1..20: mol_type = other RNA
ccagtgccagcatgcataat

SEQ ID NO: 12368 - RNA, 20 nt, synthetic construct
  misc_feature 1..20: note = C9Orf72 TTCN PAM targeting sequence
  source 1..20: mol_type = other RNA
gccagctgctaagtatgtct

SEQ ID NO: 12369 - RNA, 20 nt, synthetic construct
  misc_feature 1..20: note = C9Orf72 TTCN PAM targeting sequence
  source 1..20: mol_type = other RNA
tgactggtagggtgagggct

SEQ ID NO: 12370 - RNA, 20 nt, synthetic construct
  misc_feature 1..20: note = C9Orf72 TTCN PAM targeting sequence
  source 1..20: mol_type = other RNA
ggtccgtggtggtggcacta

SEQ ID NO: 12371 - RNA, 20 nt, synthetic construct
  misc_feature 1..20: note = C9Orf72 TTCN PAM targeting sequence
  source 1..20: mol_type = other RNA
caccacatccccattcaact

SEQ ID NO: 12372 - RNA, 20 nt, synthetic construct
  misc_feature 1..20: note = C9Orf72 TTCN PAM targeting sequence
  source 1..20: mol_type = other RNA
actctcccatttggcctgtg

SEQ ID NO: 12373 - RNA, 20 nt, synthetic construct
  misc_feature 1..20: note = C9Orf72 TTCN PAM targeting sequence
  source 1..20: mol_type = other RNA
gcacaggccaaatgggagag

SEQ ID NO: 12374 - RNA, 20 nt, synthetic construct
  misc_feature 1..20: note = C9Orf72 TTCN PAM targeting sequence
  source 1..20: mol_type = other RNA
cccagacccatctgtcttct

SEQ ID NO: 12375 - RNA, 20 nt, synthetic construct
  misc_feature 1..20: note = C9Orf72 TTCN PAM targeting sequence
  source 1..20: mol_type = other RNA
tgtatagtgcacagccagct

SEQ ID NO: 12376 - RNA, 20 nt, synthetic construct
  misc_feature 1..20: note = C9Orf72 TTCN PAM targeting sequence
  source 1..20: mol_type = other RNA
ccttcatgtatagtgcacag

SEQ ID NO: 12377 - RNA, 20 nt, synthetic construct
  misc_feature 1..20: note = C9Orf72 TTCN PAM targeting sequence
  source 1..20: mol_type = other RNA
tgggctgtagccaatggttt

SEQ ID NO: 12378 - RNA, 20 nt, synthetic construct
  misc_feature 1..20: note = C9Orf72 TTCN PAM targeting sequence
  source 1..20: mol_type = other RNA
aagtctctggccatccagcc

SEQ ID NO: 12379 - RNA, 20 nt, synthetic construct
  misc_feature 1..20: note = C9Orf72 TTCN PAM targeting sequence
  source 1..20: mol_type = other RNA
tccaagtctctggccatcca

SEQ ID NO: 12380 - RNA, 20 nt, synthetic construct
  misc_feature 1..20: note = C9Orf72 TTCN PAM targeting sequence
  source 1..20: mol_type = other RNA
agtcatgcttcttccaagtc

SEQ ID NO: 12381 - RNA, 20 nt, synthetic construct
  misc_feature 1..20: note = C9Orf72 TTCN PAM targeting sequence
  source 1..20: mol_type = other RNA
tgtcaccaattttccagtca

SEQ ID NO: 12382 - RNA, 20 nt, synthetic construct
  misc_feature 1..20: note = C9Orf72 TTCN PAM targeting sequence
  source 1..20: mol_type = other RNA
tcacattttcttgtcaccaa

SEQ ID NO: 12383 - RNA, 20 nt, synthetic construct
  misc_feature 1..20: note = C9Orf72 TTCN PAM targeting sequence
  source 1..20: mol_type = other RNA
cagtttttgaccactcagag

SEQ ID NO: 12384 - RNA, 20 nt, synthetic construct
  misc_feature 1..20: note = C9Orf72 TTCN PAM targeting sequence
  source 1..20: mol_type = other RNA
ttagctgttaagtgagtgtc

SEQ ID NO: 12385 - RNA, 20 nt, synthetic construct
  misc_feature 1..20: note = C9Orf72 TTCN PAM targeting sequence
  source 1..20: mol_type = other RNA
ctggtcttatcatgttcccc

SEQ ID NO: 12386 - RNA, 20 nt, synthetic construct
  misc_feature 1..20: note = C9Orf72 TTCN PAM targeting sequence
  source 1..20: mol_type = other RNA
ccatcaccctgaagcagctg

SEQ ID NO: 12387 - RNA, 20 nt, synthetic construct
  misc_feature 1..20: note = C9Orf72 TTCN PAM targeting sequence
  source 1..20: mol_type = other RNA
gggtgatggggaacatgata

SEQ ID NO: 12388 - RNA, 20 nt, synthetic construct
  misc_feature 1..20: note = C9Orf72 TTCN PAM targeting sequence
  source 1..20: mol_type = other RNA
atcaatcagctgcttcaggg

SEQ ID NO: 12389 - RNA, 20 nt, synthetic construct
  misc_feature 1..20: note = C9Orf72 TTCN PAM targeting sequence
  source 1..20: mol_type = other RNA
accgttctatcaatcagctg

SEQ ID NO: 12390 - RNA, 20 nt, synthetic construct
  misc_feature 1..20: note = C9Orf72 TTCN PAM targeting sequence
  source 1..20: mol_type = other RNA
aaaggccattccaccgttct

SEQ ID NO: 12391 - RNA, 20 nt, synthetic construct
  misc_feature 1..20: note = C9Orf72 TTCN PAM targeting sequence
  source 1..20: mol_type = other RNA
gcagctggtcatgtgatcat

SEQ ID NO: 12392 - RNA, 20 nt, synthetic construct
  misc_feature 1..20: note = C9Orf72 TTCN PAM targeting sequence
  source 1..20: mol_type = other RNA
tccttctgtaaaaacctgtt

SEQ ID NO: 12393 - RNA, 20 nt, synthetic construct
  misc_feature 1..20: note = C9Orf72 TTCN PAM targeting sequence
  source 1..20: mol_type = other RNA
gtaaaaacctgtttgtgcat

SEQ ID NO: 12394 - RNA, 20 nt, synthetic construct
  misc_feature 1..20: note = C9Orf72 TTCN PAM targeting sequence
  source 1..20: mol_type = other RNA
tagtacaaatatatacatgc

SEQ ID NO: 12395 - RNA, 20 nt, synthetic construct
  misc_feature 1..20: note = C9Orf72 TTCN PAM targeting sequence
  source 1..20: mol_type = other RNA
ttttatttcctgtttacttt

SEQ ID NO: 12396 - RNA, 20 nt, synthetic construct
  misc_feature 1..20: note = C9Orf72 TTCN PAM targeting sequence
  source 1..20: mol_type = other RNA
tgtttactttatcatgtgac

SEQ ID NO: 12397 - RNA, 20 nt, synthetic construct
  misc_feature 1..20: note = C9Orf72 TTCN PAM targeting sequence
  source 1..20: mol_type = other RNA
catcagcattcaagtattgt

SEQ ID NO: 12398 - RNA, 20 nt, synthetic construct
  misc_feature 1..20: note = C9Orf72 TTCN PAM targeting sequence
  source 1..20: mol_type = other RNA
agtattgttaactttatgta

SEQ ID NO: 12399 - RNA, 20 nt, synthetic construct
  misc_feature 1..20: note = C9Orf72 TTCN PAM targeting sequence
  source 1..20: mol_type = other RNA
tacaaccataaatgtaccag

SEQ ID NO: 12400 - RNA, 20 nt, synthetic construct
  misc_feature 1..20: note = C9Orf72 TTCN PAM targeting sequence
  source 1..20: mol_type = other RNA
ttcatacaaccataaatgta

SEQ ID NO: 12401 - RNA, 20 nt, synthetic construct
  misc_feature 1..20: note = C9Orf72 TTCN PAM targeting sequence
  source 1..20: mol_type = other RNA
aataaagacaataataaggt

SEQ ID NO: 12402 - RNA, 20 nt, synthetic construct
  misc_feature 1..20: note = C9Orf72 TTCN PAM targeting sequence
  source 1..20: mol_type = other RNA
agttggcgaggggtggactt

SEQ ID NO: 12403 - RNA, 20 nt, synthetic construct
  misc_feature 1..20: note = C9Orf72 TTCN PAM targeting sequence
  source 1..20: mol_type = other RNA
gatggttaatattgagtgtt

SEQ ID NO: 12404 - RNA, 20 nt, synthetic construct
  misc_feature 1..20: note = C9Orf72 TTCN PAM targeting sequence
  source 1..20: mol_type = other RNA
atccaatcaagttaacactc

SEQ ID NO: 12405 - RNA, 20 nt, synthetic construct
  misc_feature 1..20: note = C9Orf72 TTCN PAM targeting sequence
  source 1..20: mol_type = other RNA
cagcccactgactcaaatat

SEQ ID NO: 12406 - RNA, 20 nt, synthetic construct
  misc_feature 1..20: note = C9Orf72 TTCN PAM targeting sequence
  source 1..20: mol_type = other RNA
agtgtggctacaatataagc

SEQ ID NO: 12407 - RNA, 20 nt, synthetic construct
  misc_feature 1..20: note = C9Orf72 TTCN PAM targeting sequence
  source 1..20: mol_type = other RNA
taccattcagacatcacctc

SEQ ID NO: 12408 - RNA, 20 nt, synthetic construct
  misc_feature 1..20: note = C9Orf72 TTCN PAM targeting sequence
  source 1..20: mol_type = other RNA
gacatcacctcaggtagcag

SEQ ID NO: 12409 - RNA, 20 nt, synthetic construct
  misc_feature 1..20: note = C9Orf72 TTCN PAM targeting sequence
  source 1..20: mol_type = other RNA
cccaactgctacctgaggtg

SEQ ID NO: 12410 - RNA, 20 nt, synthetic construct
  misc_feature 1..20: note = C9Orf72 TTCN PAM targeting sequence
  source 1..20: mol_type = other RNA
ttatatagcatatatgtgag

SEQ ID NO: 12411 - RNA, 20 nt, synthetic construct
  misc_feature 1..20: note = C9Orf72 TTCN PAM targeting sequence
  source 1..20: mol_type = other RNA
cctcaagctgtcccattatt

SEQ ID NO: 12412 - RNA, 20 nt, synthetic construct
  misc_feature 1..20: note = C9Orf72 TTCN PAM targeting sequence
  source 1..20: mol_type = other RNA
ttacagtccctcacagtttt

SEQ ID NO: 12413 - RNA, 20 nt, synthetic construct
  misc_feature 1..20: note = C9Orf72 TTCN PAM targeting sequence
  source 1..20: mol_type = other RNA
ctgcaagagcttttatcacc

SEQ ID NO: 12414 - RNA, 20 nt, synthetic construct
  misc_feature 1..20: note = C9Orf72 TTCN PAM targeting sequence
  source 1..20: mol_type = other RNA
agagcacagcataataattg

SEQ ID NO: 12415 - RNA, 20 nt, synthetic construct
  misc_feature 1..20: note = C9Orf72 TTCN PAM targeting sequence
  source 1..20: mol_type = other RNA
tcctggtggttctgaggaat

SEQ ID NO: 12416 - RNA, 20 nt, synthetic construct
  misc_feature 1..20: note = C9Orf72 TTCN PAM targeting sequence
  source 1..20: mol_type = other RNA
gaggaatctgggcagcctag

SEQ ID NO: 12417 - RNA, 20 nt, synthetic construct
  misc_feature 1..20: note = C9Orf72 TTCN PAM targeting sequence
  source 1..20: mol_type = other RNA
tcagaaccaccaggaggaaa

SEQ ID NO: 12418 - RNA, 20 nt, synthetic construct
  misc_feature 1..20: note = C9Orf72 TTCN PAM targeting sequence
  source 1..20: mol_type = other RNA
cctcagggaagcacactccc

SEQ ID NO: 12419 - RNA, 20 nt, synthetic construct
  misc_feature 1..20: note = C9Orf72 TTCN PAM targeting sequence
  source 1..20: mol_type = other RNA
ctgaggggaaacacacttgt

SEQ ID NO: 12420 - RNA, 20 nt, synthetic construct
  misc_feature 1..20: note = C9Orf72 TTCN PAM targeting sequence
  source 1..20: mol_type = other RNA
ccacgccacccaactgggtg

SEQ ID NO: 12421 - RNA, 20 nt, synthetic construct
  misc_feature 1..20: note = C9Orf72 TTCN PAM targeting sequence
  source 1..20: mol_type = other RNA
gcactcttgctggagaggtg

SEQ ID NO: 12422 - RNA, 20 nt, synthetic construct
  misc_feature 1..20: note = C9Orf72 TTCN PAM targeting sequence
  source 1..20: mol_type = other RNA
tccaactcatcctctgtcca

SEQ ID NO: 12423 - RNA, 20 nt, synthetic construct
  misc_feature 1..20: note = C9Orf72 TTCN PAM targeting sequence
  source 1..20: mol_type = other RNA
gtcaattcgtccaactcatc

SEQ ID NO: 12424 - RNA, 20 nt, synthetic construct
  misc_feature 1..20: note = C9Orf72 TTCN PAM targeting sequence
  source 1..20: mol_type = other RNA
gaaaatgggtaataaaaaac

SEQ ID NO: 12425 - RNA, 20 nt, synthetic construct
  misc_feature 1..20: note = C9Orf72 TTCN PAM targeting sequence
  source 1..20: mol_type = other RNA
gaagcctacttctgtcaatt

SEQ ID NO: 12426 - RNA, 20 nt, synthetic construct
  misc_feature 1..20: note = C9Orf72 TTCN PAM targeting sequence
  source 1..20: mol_type = other RNA
gctgttgatacttgtatatg

SEQ ID NO: 12427 - RNA, 20 nt, synthetic construct
  misc_feature 1..20: note = C9Orf72 TTCN PAM targeting sequence
  source 1..20: mol_type = other RNA
aactctgatatcctttattt

SEQ ID NO: 12428 - RNA, 20 nt, synthetic construct
  misc_feature 1..20: note = C9Orf72 TTCN PAM targeting sequence
  source 1..20: mol_type = other RNA
gcaaggtggtcttcaaactc

SEQ ID NO: 12429 - RNA, 20 nt, synthetic construct
  misc_feature 1..20: note = C9Orf72 TTCN PAM targeting sequence
  source 1..20: mol_type = other RNA
ctaatcttgtctgcatgcct

SEQ ID NO: 12430 - RNA, 20 nt, synthetic construct
  misc_feature 1..20: note = C9Orf72 TTCN PAM targeting sequence
  source 1..20: mol_type = other RNA
tttttctctaatcttgtctg

SEQ ID NO: 12431 - RNA, 20 nt, synthetic construct
  misc_feature 1..20: note = C9Orf72 TTCN PAM targeting sequence
  source 1..20: mol_type = other RNA
ttcttttttctctaatcttg

SEQ ID NO: 12432 - RNA, 20 nt, synthetic construct
  misc_feature 1..20: note = C9Orf72 TTCN PAM targeting sequence
  source 1..20: mol_type = other RNA
ttttcattcttttttctcta

SEQ ID NO: 12433 - RNA, 20 nt, synthetic construct
  misc_feature 1..20: note = C9Orf72 TTCN PAM targeting sequence
  source 1..20: mol_type = other RNA
ttccttttcattcttttttc

SEQ ID NO: 12434 - RNA, 20 nt, synthetic construct
  misc_feature 1..20: note = C9Orf72 TTCN PAM targeting sequence
  source 1..20: mol_type = other RNA
tggaggctctgttcattcct

SEQ ID NO: 12435 - RNA, 20 nt, synthetic construct
  misc_feature 1..20: note = C9Orf72 TTCN PAM targeting sequence
  source 1..20: mol_type = other RNA
gtcttgttgatctgtctaat

SEQ ID NO: 12436 - RNA, 20 nt, synthetic construct
  misc_feature 1..20: note = C9Orf72 TTCN PAM targeting sequence
  source 1..20: mol_type = other RNA
ggacttgaactcagttctgg

SEQ ID NO: 12437 - RNA, 20 nt, synthetic construct
  misc_feature 1..20: note = C9Orf72 TTCN PAM targeting sequence
  source 1..20: mol_type = other RNA
agtcctgaatatttttgtta

SEQ ID NO: 12438 - RNA, 20 nt, synthetic construct
  misc_feature 1..20: note = C9Orf72 TTCN PAM targeting sequence
  source 1..20: mol_type = other RNA
ggatcaagtggacctaatag

SEQ ID NO: 12439 - RNA, 20 nt, synthetic construct
  misc_feature 1..20: note = C9Orf72 TTCN PAM targeting sequence
  source 1..20: mol_type = other RNA
gcagatgtctattaggtcca

SEQ ID NO: 12440 - RNA, 20 nt, synthetic construct
  misc_feature 1..20: note = C9Orf72 TTCN PAM targeting sequence
  source 1..20: mol_type = other RNA
gttgatttggggtggagagt

SEQ ID NO: 12441 - RNA, 20 nt, synthetic construct
  misc_feature 1..20: note = C9Orf72 TTCN PAM targeting sequence
  source 1..20: mol_type = other RNA
ttgggatcagtggtgatatc

SEQ ID NO: 12442 - RNA, 20 nt, synthetic construct
  misc_feature 1..20: note = C9Orf72 TTCN PAM targeting sequence
  source 1..20: mol_type = other RNA
ctgatggtagtttatatttc

SEQ ID NO: 12443 - RNA, 20 nt, synthetic construct
  misc_feature 1..20: note = C9Orf72 TTCN PAM targeting sequence
  source 1..20: mol_type = other RNA
atgcaaataaactagaaaat

SEQ ID NO: 12444 - RNA, 20 nt, synthetic construct
  misc_feature 1..20: note = C9Orf72 TTCN PAM targeting sequence
  source 1..20: mol_type = other RNA
agtttatttgcatagaagta

SEQ ID NO: 12445 - RNA, 20 nt, synthetic construct
  misc_feature 1..20: note = C9Orf72 TTCN PAM targeting sequence
  source 1..20: mol_type = other RNA
agattttctagtttatttgc

SEQ ID NO: 12446 - RNA, 20 nt, synthetic construct
  misc_feature 1..20: note = C9Orf72 TTCN PAM targeting sequence
  source 1..20: mol_type = other RNA
tctagattttctagtttatt

SEQ ID NO: 12447 - RNA, 20 nt, synthetic construct
  misc_feature 1..20: note = C9Orf72 TTCN PAM targeting sequence
  source 1..20: mol_type = other RNA
ggacacatacaccctcctaa

SEQ ID NO: 12448 - RNA, 20 nt, synthetic construct
  misc_feature 1..20: note = C9Orf72 TTCN PAM targeting sequence
  source 1..20: mol_type = other RNA
tctctgggatgcaagcctgg

SEQ ID NO: 12449 - RNA, 20 nt, synthetic construct
  misc_feature 1..20: note = C9Orf72 TTCN PAM targeting sequence
  source 1..20: mol_type = other RNA
acatatgcaaatcaataaac

SEQ ID NO: 12450 - RNA, 20 nt, synthetic construct
  misc_feature 1..20: note = C9Orf72 TTCN PAM targeting sequence
  source 1..20: mol_type = other RNA
gtttatgcgatggattatgt

SEQ ID NO: 12451 - RNA, 20 nt, synthetic construct
  misc_feature 1..20: note = C9Orf72 TTCN PAM targeting sequence
  source 1..20: mol_type = other RNA
taaatatagaatcatgtcat

SEQ ID NO: 12452 - RNA, 20 nt, synthetic construct
  misc_feature 1..20: note = C9Orf72 TTCN PAM targeting sequence
  source 1..20: mol_type = other RNA
gcaaagtctcaggatacaaa

SEQ ID NO: 12453 - RNA, 20 nt, synthetic construct
  misc_feature 1..20: note = C9Orf72 TTCN PAM targeting sequence
  source 1..20: mol_type = other RNA
tttacacccacaataaacaa

SEQ ID NO: 12454 - RNA, 20 nt, synthetic construct
  misc_feature 1..20: note = C9Orf72 TTCN PAM targeting sequence
  source 1..20: mol_type = other RNA
tgatttggctctctgcttgt

SEQ ID NO: 12455 - RNA, 20 nt, synthetic construct
  misc_feature 1..20: note = C9Orf72 TTCN PAM targeting sequence
  source 1..20: mol_type = other RNA
caattgctacaaagagaata

SEQ ID NO: 12456 - RNA, 20 nt, synthetic construct
  misc_feature 1..20: note = C9Orf72 TTCN PAM targeting sequence
  source 1..20: mol_type = other RNA
ctttgtagcaattgtgaatg

SEQ ID NO: 12457 - RNA, 20 nt, synthetic construct
  misc_feature 1..20: note = C9Orf72 TTCN PAM targeting sequence
  source 1..20: mol_type = other RNA
ttaagcagtggtttgtagtt

SEQ ID NO: 12458 - RNA, 20 nt, synthetic construct
  misc_feature 1..20: note = C9Orf72 TTCN PAM targeting sequence
  source 1..20: mol_type = other RNA
tatttccttaagcagtggtt

SEQ ID NO: 12459 - RNA, 20 nt, synthetic construct
  misc_feature 1..20: note = C9Orf72 TTCN PAM targeting sequence
  source 1..20: mol_type = other RNA
ttatgtcctttcttatttcc

SEQ ID NO: 12460 - RNA, 20 nt, synthetic construct
  misc_feature 1..20: note = C9Orf72 TTCN PAM targeting sequence
  source 1..20: mol_type = other RNA
atttctttatgtcctttctt

SEQ ID NO: 12461 - RNA, 20 nt, synthetic construct
  misc_feature 1..20: note = C9Orf72 TTCN PAM targeting sequence
  source 1..20: mol_type = other RNA
atcctcatggataggaagaa

SEQ ID NO: 12462 - RNA, 20 nt, synthetic construct
  misc_feature 1..20: note = C9Orf72 TTCN PAM targeting sequence
  source 1..20: mol_type = other RNA
tatccatgaggatggaatgt

SEQ ID NO: 12463 - RNA, 20 nt, synthetic construct
  misc_feature 1..20: note = C9Orf72 TTCN PAM targeting sequence
  source 1..20: mol_type = other RNA
tcctatccatgaggatggaa

SEQ ID NO: 12464 - RNA, 20 nt, synthetic construct
  misc_feature 1..20: note = C9Orf72 TTCN PAM targeting sequence
  source 1..20: mol_type = other RNA
cgatattgattcttcctatc

SEQ ID NO: 12465 - RNA, 20 nt, synthetic construct
  misc_feature 1..20: note = C9Orf72 TTCN PAM targeting sequence
  source 1..20: mol_type = other RNA
tgtggaatcaaagaagaccc

SEQ ID NO: 12466 - RNA, 20 nt, synthetic construct
  misc_feature 1..20: note = C9Orf72 TTCN PAM targeting sequence
  source 1..20: mol_type = other RNA
acatgaaatttaaagtagtt

SEQ ID NO: 12467 - RNA, 20 nt, synthetic construct
  misc_feature 1..20: note = C9Orf72 TTCN PAM targeting sequence
  source 1..20: mol_type = other RNA
ttgattccacatgaaattta

SEQ ID NO: 12468 - RNA, 20 nt, synthetic construct
  misc_feature 1..20: note = C9Orf72 TTCN PAM targeting sequence
  source 1..20: mol_type = other RNA
ttttgcttaggattgtcttg

SEQ ID NO: 12469 - RNA, 20 nt, synthetic construct
  misc_feature 1..20: note = C9Orf72 TTCN PAM targeting sequence
  source 1..20: mol_type = other RNA
gagtatactacaaggctgca

SEQ ID NO: 12470 - RNA, 20 nt, synthetic construct
  misc_feature 1..20: note = C9Orf72 TTCN PAM targeting sequence
  source 1..20: mol_type = other RNA
gctccattggtctatatatc

SEQ ID NO: 12471 - RNA, 20 nt, synthetic construct
  misc_feature 1..20: note = C9Orf72 TTCN PAM targeting sequence
  source 1..20: mol_type = other RNA
gaggtctctgttctgctcca

SEQ ID NO: 12472 - RNA, 20 nt, synthetic construct
  misc_feature 1..20: note = C9Orf72 TTCN PAM targeting sequence
  source 1..20: mol_type = other RNA
ttttttttttaaattttact

SEQ ID NO: 12473 - RNA, 20 nt, synthetic construct
  misc_feature 1..20: note = C9Orf72 TTCN PAM targeting sequence
  source 1..20: mol_type = other RNA
gccatatgagattataagaa

SEQ ID NO: 12474 - RNA, 20 nt, synthetic construct
  misc_feature 1..20: note = C9Orf72 TTCN PAM targeting sequence
  source 1..20: mol_type = other RNA
tataatctcatatggcagaa

SEQ ID NO: 12475 - RNA, 20 nt, synthetic construct
  misc_feature 1..20: note = C9Orf72 TTCN PAM targeting sequence
  source 1..20: mol_type = other RNA
acccttcttataatctcata

SEQ ID NO: 12476 - RNA, 20 nt, synthetic construct
  misc_feature 1..20: note = C9Orf72 TTCN PAM targeting sequence
  source 1..20: mol_type = other RNA
gacggacattttctaccctt

SEQ ID NO: 12477 - RNA, 20 nt, synthetic construct
  misc_feature 1..20: note = C9Orf72 TTCN PAM targeting sequence
  source 1..20: mol_type = other RNA
aggtcaaaagctttgggact

SEQ ID NO: 12478 - RNA, 20 nt, synthetic construct
  misc_feature 1..20: note = C9Orf72 TTCN PAM targeting sequence
  source 1..20: mol_type = other RNA
tccaggtcaaaagctttggg

SEQ ID NO: 12479 - RNA, 20 nt, synthetic construct
  misc_feature 1..20: note = C9Orf72 TTCN PAM targeting sequence
  source 1..20: mol_type = other RNA
tagagcttctttcactggag

SEQ ID NO: 12480 - RNA, 20 nt, synthetic construct
  misc_feature 1..20: note = C9Orf72 TTCN PAM targeting sequence
  source 1..20: mol_type = other RNA
ctggagccactttggggcat

SEQ ID NO: 12481 - RNA, 20 nt, synthetic construct
  misc_feature 1..20: note = C9Orf72 TTCN PAM targeting sequence
  source 1..20: mol_type = other RNA
tcgatgttctaggtggcatg

SEQ ID NO: 12482 - RNA, 20 nt, synthetic construct
  misc_feature 1..20: note = C9Orf72 TTCN PAM targeting sequence
  source 1..20: mol_type = other RNA
aggtggcatgagtgggtggg

SEQ ID NO: 12483 - RNA, 20 nt, synthetic construct
  misc_feature 1..20: note = C9Orf72 TTCN PAM targeting sequence
  source 1..20: mol_type = other RNA
tggaggtttcctggaagtca

SEQ ID NO: 12484 - RNA, 20 nt, synthetic construct
  misc_feature 1..20: note = C9Orf72 TTCN PAM targeting sequence
  source 1..20: mol_type = other RNA
tggaagtcaggaaatagtct

SEQ ID NO: 12485 - RNA, 20 nt, synthetic construct
  misc_feature 1..20: note = C9Orf72 TTCN PAM targeting sequence
  source 1..20: mol_type = other RNA
aggaaacctccaagaaactg

SEQ ID NO: 12486 - RNA, 20 nt, synthetic construct
  misc_feature 1..20: note = C9Orf72 TTCN PAM targeting sequence
  source 1..20: mol_type = other RNA
tgacttccaggaaacctcca

SEQ ID NO: 12487 - RNA, 20 nt, synthetic construct
  misc_feature 1..20: note = C9Orf72 TTCN PAM targeting sequence
  source 1..20: mol_type = other RNA
atcaggagactatttcctga

SEQ ID NO: 12488 - RNA, 20 nt, synthetic construct
  misc_feature 1..20: note = C9Orf72 TTCN PAM targeting sequence
  source 1..20: mol_type = other RNA
atcttccatcaggagactat

SEQ ID NO: 12489 - RNA, 20 nt, synthetic construct
  misc_feature 1..20: note = C9Orf72 TTCN PAM targeting sequence
  source 1..20: mol_type = other RNA
accagtaggtacatcagtga

SEQ ID NO: 12490 - RNA, 20 nt, synthetic construct
  misc_feature 1..20: note = C9Orf72 TTCN PAM targeting sequence
  source 1..20: mol_type = other RNA
gtccctgtaagctatatcag

SEQ ID NO: 12491 - RNA, 20 nt, synthetic construct
  misc_feature 1..20: note = C9Orf72 TTCN PAM targeting sequence
  source 1..20: mol_type = other RNA
ttactttttgaaaatgactt

SEQ ID NO: 12492 - RNA, 20 nt, synthetic construct
  misc_feature 1..20: note = C9Orf72 TTCN PAM targeting sequence
  source 1..20: mol_type = other RNA
aaaagtaaagaacttctgtc

SEQ ID NO: 12493 - RNA, 20 nt, synthetic construct
  misc_feature 1..20: note = C9Orf72 TTCN PAM targeting sequence
  source 1..20: mol_type = other RNA
aatagggataactagactta

SEQ ID NO: 12494 - RNA, 20 nt, synthetic construct
  misc_feature 1..20: note = C9Orf72 TTCN PAM targeting sequence
  source 1..20: mol_type = other RNA
tacatagtactcaggcaaga

SEQ ID NO: 12495 - RNA, 20 nt, synthetic construct
  misc_feature 1..20: note = C9Orf72 TTCN PAM targeting sequence
  source 1..20: mol_type = other RNA
ataaagatgaggatacggcc

SEQ ID NO: 12496 - RNA, 20 nt, synthetic construct
  misc_feature 1..20: note = C9Orf72 TTCN PAM targeting sequence
  source 1..20: mol_type = other RNA
acttataaaaataaagttaa

SEQ ID NO: 12497 - RNA, 20 nt, synthetic construct
  misc_feature 1..20: note = C9Orf72 TTCN PAM targeting sequence
  source 1..20: mol_type = other RNA
aaaagtattccagaagaagg

SEQ ID NO: 12498 - RNA, 20 nt, synthetic construct
  misc_feature 1..20: note = C9Orf72 TTCN PAM targeting sequence
  source 1..20: mol_type = other RNA
gtttttatttttttttactt

SEQ ID NO: 12499 - RNA, 20 nt, synthetic construct
  misc_feature 1..20: note = C9Orf72 TTCN PAM targeting sequence
  source 1..20: mol_type = other RNA
tctgtttttattttttttta

SEQ ID NO: 12500 - RNA, 20 nt, synthetic construct
  misc_feature 1..20: note = C9Orf72 TTCN PAM targeting sequence
  source 1..20: mol_type = other RNA
ataagctttcttctgttttt

SEQ ID NO: 12501 - RNA, 20 nt, synthetic construct
  misc_feature 1..20: note = C9Orf72 TTCN PAM targeting sequence
  source 1..20: mol_type = other RNA
ttatagccttattctataag

SEQ ID NO: 12502 - RNA, 20 nt, synthetic construct
  misc_feature 1..20: note = C9Orf72 TTCN PAM targeting sequence
  source 1..20: mol_type = other RNA
ttctttatagccttattcta

SEQ ID NO: 12503 - RNA, 20 nt, synthetic construct
  misc_feature 1..20: note = C9Orf72 TTCN PAM targeting sequence
  source 1..20: mol_type = other RNA
ataattaattagtcttagct

SEQ ID NO: 12504 - RNA, 20 nt, synthetic construct
  misc_feature 1..20: note = C9Orf72 TTCN PAM targeting sequence
  source 1..20: mol_type = other RNA
ttcaataattaattagtctt

SEQ ID NO: 12505 - RNA, 20 nt, synthetic construct
  misc_feature 1..20: note = C9Orf72 TTCN PAM targeting sequence
  source 1..20: mol_type = other RNA
tccttcaataattaattagt

SEQ ID NO: 12506 - RNA, 20 nt, synthetic construct
  misc_feature 1..20: note = C9Orf72 TTCN PAM targeting sequence
  source 1..20: mol_type = other RNA
tgcagatacattaattttct

SEQ ID NO: 12507 - RNA, 20 nt, synthetic construct
  misc_feature 1..20: note = C9Orf72 TTCN PAM targeting sequence
  source 1..20: mol_type = other RNA
tcatgcagatacattaattt

SEQ ID NO: 12508 - RNA, 20 nt, synthetic construct
  misc_feature 1..20: note = C9Orf72 TTCN PAM targeting sequence
  source 1..20: mol_type = other RNA
gttaccatagattagttttg

SEQ ID NO: 12509 - RNA, 20 nt, synthetic construct
  misc_feature 1..20: note = C9Orf72 TTCN PAM targeting sequence
  source 1..20: mol_type = other RNA
ctagaatttcatataaatgg

SEQ ID NO: 12510 - RNA, 20 nt, synthetic construct
  misc_feature 1..20: note = C9Orf72 TTCN PAM targeting sequence
  source 1..20: mol_type = other RNA
agagaaaagcaaaactaatc

SEQ ID NO: 12511 - RNA, 20 nt, synthetic construct
  misc_feature 1..20: note = C9Orf72 TTCN PAM targeting sequence
  source 1..20: mol_type = other RNA
cttgactaaacaaaggtaga

SEQ ID NO: 12512 - RNA, 20 nt, synthetic construct
  misc_feature 1..20: note = C9Orf72 TTCN PAM targeting sequence
  source 1..20: mol_type = other RNA
acctttgtttagtcaagaga

SEQ ID NO: 12513 - RNA, 20 nt, synthetic construct
  misc_feature 1..20: note = C9Orf72 TTCN PAM targeting sequence
  source 1..20: mol_type = other RNA
cttatgtttgctttatttta

SEQ ID NO: 12514 - RNA, 20 nt, synthetic construct
  misc_feature 1..20: note = C9Orf72 TTCN PAM targeting sequence
  source 1..20: mol_type = other RNA
tctgcagaaaggagccatag

SEQ ID NO: 12515 - RNA, 20 nt, synthetic construct
  misc_feature 1..20: note = C9Orf72 TTCN PAM targeting sequence
  source 1..20: mol_type = other RNA
gcagaaaggagccatagtct

SEQ ID NO: 12516 - RNA, 20 nt, synthetic construct
  misc_feature 1..20: note = C9Orf72 TTCN PAM targeting sequence
  source 1..20: mol_type = other RNA
gcagaagaactttgatcaaa

SEQ ID NO: 12517 - RNA, 20 nt, synthetic construct
  misc_feature 1..20: note = C9Orf72 TTCN PAM targeting sequence
  source 1..20: mol_type = other RNA
ttttatcttagttggtgttt

SEQ ID NO: 12518 - RNA, 20 nt, synthetic construct
  misc_feature 1..20: note = C9Orf72 TTCN PAM targeting sequence
  source 1..20: mol_type = other RNA
tatactctggcagtagtgat

SEQ ID NO: 12519 - RNA, 20 nt, synthetic construct
  misc_feature 1..20: note = C9Orf72 TTCN PAM targeting sequence
  source 1..20: mol_type = other RNA
atatcactactgccagagta

SEQ ID NO: 12520 - RNA, 20 nt, synthetic construct
  misc_feature 1..20: note = C9Orf72 TTCN PAM targeting sequence
  source 1..20: mol_type = other RNA
tgtttcagtactccagatat

SEQ ID NO: 12521 - RNA, 20 nt, synthetic construct
  misc_feature 1..20: note = C9Orf72 TTCN PAM targeting sequence
  source 1..20: mol_type = other RNA
gtactccagatatgctgcaa

SEQ ID NO: 12522 - RNA, 20 nt, synthetic construct
  misc_feature 1..20: note = C9Orf72 TTCN PAM targeting sequence
  source 1..20: mol_type = other RNA
ggaaactgggagcttagttt

SEQ ID NO: 12523 - RNA, 20 nt, synthetic construct
  misc_feature 1..20: note = C9Orf72 TTCN PAM targeting sequence
  source 1..20: mol_type = other RNA
tgaaatataggcaacactac

SEQ ID NO: 12524 - RNA, 20 nt, synthetic construct
  misc_feature 1..20: note = C9Orf72 TTCN PAM targeting sequence
  source 1..20: mol_type = other RNA
atatataaactaagctccca

SEQ ID NO: 12525 - RNA, 20 nt, synthetic construct
  misc_feature 1..20: note = C9Orf72 TTCN PAM targeting sequence
  source 1..20: mol_type = other RNA
tcttgctccatatacctaac

SEQ ID NO: 12526 - RNA, 20 nt, synthetic construct
  misc_feature 1..20: note = C9Orf72 TTCN PAM targeting sequence
  source 1..20: mol_type = other RNA
gtattcatcttgctccatat

SEQ ID NO: 12527 - RNA, 20 nt, synthetic construct
  misc_feature 1..20: note = C9Orf72 TTCN PAM targeting sequence
  source 1..20: mol_type = other RNA
tctgtattcatcttgctcca

SEQ ID NO: 12528 - RNA, 20 nt, synthetic construct
  misc_feature 1..20: note = C9Orf72 TTCN PAM targeting sequence
  source 1..20: mol_type = other RNA
gcctacttcttctgtattca

SEQ ID NO: 12529 - RNA, 20 nt, synthetic construct
  misc_feature 1..20: note = C9Orf72 TTCN PAM targeting sequence
  source 1..20: mol_type = other RNA
ctctggtatttatttaaaag

SEQ ID NO: 12530 - RNA, 20 nt, synthetic construct
  misc_feature 1..20: note = C9Orf72 TTCN PAM targeting sequence
  source 1..20: mol_type = other RNA
cagcatttcactctggtatt

SEQ ID NO: 12531 - RNA, 20 nt, synthetic construct
  misc_feature 1..20: note = C9Orf72 TTCN PAM targeting sequence
  source 1..20: mol_type = other RNA
gttctcagcatttcactctg

SEQ ID NO: 12532 - RNA, 20 nt, synthetic construct
  misc_feature 1..20: note = C9Orf72 TTCN PAM targeting sequence
  source 1..20: mol_type = other RNA
ccttcactgtgtttcctttg

SEQ ID NO: 12533 - RNA, 20 nt, synthetic construct
  misc_feature 1..20: note = C9Orf72 TTCN PAM targeting sequence
  source 1..20: mol_type = other RNA
ctgtgtttcctttgtccaat

SEQ ID NO: 12534 - RNA, 20 nt, synthetic construct
  misc_feature 1..20: note = C9Orf72 TTCN PAM targeting sequence
  source 1..20: mol_type = other RNA
tttgtccaatatgttctttc

SEQ ID NO: 12535 - RNA, 20 nt, synthetic construct
  misc_feature 1..20: note = C9Orf72 TTCN PAM targeting sequence
  source 1..20: mol_type = other RNA
ttcaactctgtcatttcctg

SEQ ID NO: 12536 - RNA, 20 nt, synthetic construct
  misc_feature 1..20: note = C9Orf72 TTCN PAM targeting sequence
  source 1..20: mol_type = other RNA
actctgtcatttcctgaaag

SEQ ID NO: 12537 - RNA, 20 nt, synthetic construct
  misc_feature 1..20: note = C9Orf72 TTCN PAM targeting sequence
  source 1..20: mol_type = other RNA
tgaaagacgtattctttatc

SEQ ID NO: 12538 - RNA, 20 nt, synthetic construct
  misc_feature 1..20: note = C9Orf72 TTCN PAM targeting sequence
  source 1..20: mol_type = other RNA
ggaaatgacagagttgaaag

SEQ ID NO: 12539 - RNA, 20 nt, synthetic construct
  misc_feature 1..20: note = C9Orf72 TTCN PAM targeting sequence
  source 1..20: mol_type = other RNA
ttatcttctttgctggatgg

SEQ ID NO: 12540 - RNA, 20 nt, synthetic construct
  misc_feature 1..20: note = C9Orf72 TTCN PAM targeting sequence
  source 1..20: mol_type = other RNA
atccacatagattgtgtcag

SEQ ID NO: 12541 - RNA, 20 nt, synthetic construct
  misc_feature 1..20: note = C9Orf72 TTCN PAM targeting sequence
  source 1..20: mol_type = other RNA
aattctcaagacagggaatc

SEQ ID NO: 12542 - RNA, 20 nt, synthetic construct
  misc_feature 1..20: note = C9Orf72 TTCN PAM targeting sequence
  source 1..20: mol_type = other RNA
caagacagggaatccaattg

SEQ ID NO: 12543 - RNA, 20 nt, synthetic construct
  misc_feature 1..20: note = C9Orf72 TTCN PAM targeting sequence
  source 1..20: mol_type = other RNA
ctgtcttgagaatttgaact

SEQ ID NO: 12544 - RNA, 20 nt, synthetic construct
  misc_feature 1..20: note = C9Orf72 TTCN PAM targeting sequence
  source 1..20: mol_type = other RNA
actatctgttaccaattgga

SEQ ID NO: 12545 - RNA, 20 nt, synthetic construct
  misc_feature 1..20: note = C9Orf72 TTCN PAM targeting sequence
  source 1..20: mol_type = other RNA
aaatgactgggacacttcaa

SEQ ID NO: 12546 - RNA, 20 nt, synthetic construct
  misc_feature 1..20: note = C9Orf72 TTCN PAM targeting sequence
  source 1..20: mol_type = other RNA
ttcaaaatgactgggacact

SEQ ID NO: 12547 - RNA, 20 nt, synthetic construct
  misc_feature 1..20: note = C9Orf72 TTCN PAM targeting sequence
  source 1..20: mol_type = other RNA
ttcctgaagtctaattaaaa

SEQ ID NO: 12548 - RNA, 20 nt, synthetic construct
  misc_feature 1..20: note = C9Orf72 TTCN PAM targeting sequence
  source 1..20: mol_type = other RNA
tgaagtctaattaaaattgg

SEQ ID NO: 12549 - RNA, 20 nt, synthetic construct
  misc_feature 1..20: note = C9Orf72 TTCN PAM targeting sequence
  source 1..20: mol_type = other RNA
ggaaagaattttctttcaaa

SEQ ID NO: 12550 - RNA, 20 nt, synthetic construct
  misc_feature 1..20: note = C9Orf72 TTCN PAM targeting sequence
  source 1..20: mol_type = other RNA
aatgagtattggatgaaaca

SEQ ID NO: 12551 - RNA, 20 nt, synthetic construct
  misc_feature 1..20: note = C9Orf72 TTCN PAM targeting sequence
  source 1..20: mol_type = other RNA
tccaatactcattagaaaat

SEQ ID NO: 12552 - RNA, 20 nt, synthetic construct
  misc_feature 1..20: note = C9Orf72 TTCN PAM targeting sequence
  source 1..20: mol_type = other RNA
tggcttagatcctaaaatgt

SEQ ID NO: 12553 - RNA, 20 nt, synthetic construct
  misc_feature 1..20: note = C9Orf72 TTCN PAM targeting sequence
  source 1..20: mol_type = other RNA
ggttcatggcttagatccta

SEQ ID NO: 12554 - RNA, 20 nt, synthetic construct
  misc_feature 1..20: note = C9Orf72 TTCN PAM targeting sequence
  source 1..20: mol_type = other RNA
actagtcaaaatacaggctt

SEQ ID NO: 12555 - RNA, 20 nt, synthetic construct
  misc_feature 1..20: note = C9Orf72 TTCN PAM targeting sequence
  source 1..20: mol_type = other RNA
ttaaatccaagtattattac

SEQ ID NO: 12556 - RNA, 20 nt, synthetic construct
  misc_feature 1..20: note = C9Orf72 TTCN PAM targeting sequence
  source 1..20: mol_type = other RNA
aggaaatttttaatctaaat

SEQ ID NO: 12557 - RNA, 20 nt, synthetic construct
  misc_feature 1..20: note = C9Orf72 TTCN PAM targeting sequence
  source 1..20: mol_type = other RNA
ttgaagcccatttacaccct

SEQ ID NO: 12558 - RNA, 20 nt, synthetic construct
  misc_feature 1..20: note = C9Orf72 TTCN PAM targeting sequence
  source 1..20: mol_type = other RNA
ataacagccctagtatgaat

SEQ ID NO: 12559 - RNA, 20 nt, synthetic construct
  misc_feature 1..20: note = C9Orf72 TTCN PAM targeting sequence
  source 1..20: mol_type = other RNA
tactagggctgttatggaaa

SEQ ID NO: 12560 - RNA, 20 nt, synthetic construct
  misc_feature 1..20: note = C9Orf72 TTCN PAM targeting sequence
  source 1..20: mol_type = other RNA
gcacatactcaaattcatac

SEQ ID NO: 12561 - RNA, 20 nt, synthetic construct
  misc_feature 1..20: note = C9Orf72 TTCN PAM targeting sequence
  source 1..20: mol_type = other RNA
aaatattgcttgcatccgat

SEQ ID NO: 12562 - RNA, 20 nt, synthetic construct
  misc_feature 1..20: note = C9Orf72 TTCN PAM targeting sequence
  source 1..20: mol_type = other RNA
tgacattattttcaaaatat

SEQ ID NO: 12563 - RNA, 20 nt, synthetic construct
  misc_feature 1..20: note = C9Orf72 TTCN PAM targeting sequence
  source 1..20: mol_type = other RNA
atgaatttgaatataggtta

SEQ ID NO: 12564 - RNA, 20 nt, synthetic construct
  misc_feature 1..20: note = C9Orf72 TTCN PAM targeting sequence
  source 1..20: mol_type = other RNA
tcgaaagtcatgtatcactt

SEQ ID NO: 12565 - RNA, 20 nt, synthetic construct
  misc_feature 1..20: note = C9Orf72 TTCN PAM targeting sequence
  source 1..20: mol_type = other RNA
aattcatcgaaagtcatgta

SEQ ID NO: 12566 - RNA, 20 nt, synthetic construct
  misc_feature 1..20: note = C9Orf72 TTCN PAM targeting sequence
  source 1..20: mol_type = other RNA
ttgacagcatcttaatataa

SEQ ID NO: 12567 - RNA, 20 nt, synthetic construct
  misc_feature 1..20: note = C9Orf72 TTCN PAM targeting sequence
  source 1..20: mol_type = other RNA
gggaccaacaatacatgaaa

SEQ ID NO: 12568 - RNA, 20 nt, synthetic construct
  misc_feature 1..20: note = C9Orf72 TTCN PAM targeting sequence
  source 1..20: mol_type = other RNA
tgtattgttggtcccagaaa

SEQ ID NO: 12569 - RNA, 20 nt, synthetic construct
  misc_feature 1..20: note = C9Orf72 TTCN PAM targeting sequence
  source 1..20: mol_type = other RNA
acatattatttcatgtattg

SEQ ID NO: 12570 - RNA, 20 nt, synthetic construct
  misc_feature 1..20: note = C9Orf72 TTCN PAM targeting sequence
  source 1..20: mol_type = other RNA
ctgttctacatattatttca

SEQ ID NO: 12571 - RNA, 20 nt, synthetic construct
  misc_feature 1..20: note = C9Orf72 TTCN PAM targeting sequence
  source 1..20: mol_type = other RNA
ttctctgttctacatattat

SEQ ID NO: 12572 - RNA, 20 nt, synthetic construct
  misc_feature 1..20: note = C9Orf72 TTCN PAM targeting sequence
  source 1..20: mol_type = other RNA
ttgtagatgttaaactatgt

SEQ ID NO: 12573 - RNA, 20 nt, synthetic construct
  misc_feature 1..20: note = C9Orf72 TTCN PAM targeting sequence
  source 1..20: mol_type = other RNA
attagagagcttccatttgg

SEQ ID NO: 12574 - RNA, 20 nt, synthetic construct
  misc_feature 1..20: note = C9Orf72 TTCN PAM targeting sequence
  source 1..20: mol_type = other RNA
atttggcagatctcatataa

SEQ ID NO: 12575 - RNA, 20 nt, synthetic construct
  misc_feature 1..20: note = C9Orf72 TTCN PAM targeting sequence
  source 1..20: mol_type = other RNA
gtaaagatactatcagcttt

SEQ ID NO: 12576 - RNA, 20 nt, synthetic construct
  misc_feature 1..20: note = C9Orf72 TTCN PAM targeting sequence
  source 1..20: mol_type = other RNA
ttttctacttagtaaagtga

SEQ ID NO: 12577 - RNA, 20 nt, synthetic construct
  misc_feature 1..20: note = C9Orf72 TTCN PAM targeting sequence
  source 1..20: mol_type = other RNA
acttagtaaagtgacttaaa

SEQ ID NO: 12578 - RNA, 20 nt, synthetic construct
  misc_feature 1..20: note = C9Orf72 TTCN PAM targeting sequence
  source 1..20: mol_type = other RNA
taattttaatcagaatgaaa

SEQ ID NO: 12579 - RNA, 20 nt, synthetic construct
  misc_feature 1..20: note = C9Orf72 TTCN PAM targeting sequence
  source 1..20: mol_type = other RNA
gattaaaattaggaaaaaat

SEQ ID NO: 12580 - RNA, 20 nt, synthetic construct
  misc_feature 1..20: note = C9Orf72 TTCN PAM targeting sequence
  source 1..20: mol_type = other RNA
ttctgattaaaattaggaaa

SEQ ID NO: 12581 - RNA, 20 nt, synthetic construct
  misc_feature 1..20: note = C9Orf72 TTCN PAM targeting sequence
  source 1..20: mol_type = other RNA
ctgtgttacctttttcttaa

SEQ ID NO: 12582 - RNA, 20 nt, synthetic construct
  misc_feature 1..20: note = C9Orf72 TTCN PAM targeting sequence
  source 1..20: mol_type = other RNA
agcggatattaatacaaatt

SEQ ID NO: 12583 - RNA, 20 nt, synthetic construct
  misc_feature 1..20: note = C9Orf72 TTCN PAM targeting sequence
  source 1..20: mol_type = other RNA
gaatcattctaaagttcagt

SEQ ID NO: 12584 - RNA, 20 nt, synthetic construct
  misc_feature 1..20: note = C9Orf72 TTCN PAM targeting sequence
  source 1..20: mol_type = other RNA
gaatacctgtaatttgtatt

SEQ ID NO: 12585 - RNA, 20 nt, synthetic construct
  misc_feature 1..20: note = C9Orf72 TTCN PAM targeting sequence
  source 1..20: mol_type = other RNA
aaagttcagtgagtattagt

SEQ ID NO: 12586 - RNA, 20 nt, synthetic construct
  misc_feature 1..20: note = C9Orf72 TTCN PAM targeting sequence
  source 1..20: mol_type = other RNA
gtgagtattagtctccaaca

SEQ ID NO: 12587 - RNA, 20 nt, synthetic construct
  misc_feature 1..20: note = C9Orf72 TTCN PAM targeting sequence
  source 1..20: mol_type = other RNA
gttccttgtgattggcaact

SEQ ID NO: 12588 - RNA, 20 nt, synthetic construct
  misc_feature 1..20: note = C9Orf72 TTCN PAM targeting sequence
  source 1..20: mol_type = other RNA
attctgttccttgtgattgg

SEQ ID NO: 12589 - RNA, 20 nt, synthetic construct
  misc_feature 1..20: note = C9Orf72 TTCN PAM targeting sequence
  source 1..20: mol_type = other RNA
atgctttccattctgttcct

SEQ ID NO: 12590 - RNA, 20 nt, synthetic construct
  misc_feature 1..20: note = C9Orf72 TTCN PAM targeting sequence
  source 1..20: mol_type = other RNA
gtatctttctatgctttcca

SEQ ID NO: 12591 - RNA, 20 nt, synthetic construct
  misc_feature 1..20: note = C9Orf72 TTCN PAM targeting sequence
  source 1..20: mol_type = other RNA
atttgctaatactttagctt

SEQ ID NO: 12592 - RNA, 20 nt, synthetic construct
  misc_feature 1..20: note = C9Orf72 TTCN PAM targeting sequence
  source 1..20: mol_type = other RNA
tttaagctaaagtattagca

SEQ ID NO: 12593 - RNA, 20 nt, synthetic construct
  misc_feature 1..20: note = C9Orf72 TTCN PAM targeting sequence
  source 1..20: mol_type = other RNA
cagcatactgagttaaagcc

SEQ ID NO: 12594 - RNA, 20 nt, synthetic construct
  misc_feature 1..20: note = C9Orf72 TTCN PAM targeting sequence
  source 1..20: mol_type = other RNA
agagggaaataaatacattt

SEQ ID NO: 12595 - RNA, 20 nt, synthetic construct
  misc_feature 1..20: note = C9Orf72 TTCN PAM targeting sequence
  source 1..20: mol_type = other RNA
ctctggaaataaattcgcag

SEQ ID NO: 12596 - RNA, 20 nt, synthetic construct
  misc_feature 1..20: note = C9Orf72 TTCN PAM targeting sequence
  source 1..20: mol_type = other RNA
aataatttaaaaatgtattt

SEQ ID NO: 12597 - RNA, 20 nt, synthetic construct
  misc_feature 1..20: note = C9Orf72 TTCN PAM targeting sequence
  source 1..20: mol_type = other RNA
ttaaaatacaaatcactatc

SEQ ID NO: 12598 - RNA, 20 nt, synthetic construct
  misc_feature 1..20: note = C9Orf72 TTCN PAM targeting sequence
  source 1..20: mol_type = other RNA
aagggtatttaacattgatc

SEQ ID NO: 12599 - RNA, 20 nt, synthetic construct
  misc_feature 1..20: note = C9Orf72 TTCN PAM targeting sequence
  source 1..20: mol_type = other RNA
ttatttctaagggtatttaa

SEQ ID NO: 12600 - RNA, 20 nt, synthetic construct
  misc_feature 1..20: note = C9Orf72 TTCN PAM targeting sequence
  source 1..20: mol_type = other RNA
acacttatcaatatattaaa

SEQ ID NO: 12601 - RNA, 20 nt, synthetic construct
  misc_feature 1..20: note = C9Orf72 TTCN PAM targeting sequence
  source 1..20: mol_type = other RNA
gtgagttaatatttaaagga

SEQ ID NO: 12602 - RNA, 20 nt, synthetic construct
  misc_feature 1..20: note = C9Orf72 TTCN PAM targeting sequence
  source 1..20: mol_type = other RNA
cactatgaactgactctcac

SEQ ID NO: 12603 - RNA, 20 nt, synthetic construct
  misc_feature 1..20: note = C9Orf72 TTCN PAM targeting sequence
  source 1..20: mol_type = other RNA
tagtgagaaccatccagcac

SEQ ID NO: 12604 - RNA, 20 nt, synthetic construct
  misc_feature 1..20: note = C9Orf72 TTCN PAM targeting sequence
  source 1..20: mol_type = other RNA
cagcaagtttacaattgcgt

SEQ ID NO: 12605 - RNA, 20 nt, synthetic construct
  misc_feature 1..20: note = C9Orf72 TTCN PAM targeting sequence
  source 1..20: mol_type = other RNA
tatgcaataaaatcatttcc

SEQ ID NO: 12606 - RNA, 20 nt, synthetic construct
  misc_feature 1..20: note = C9Orf72 TTCN PAM targeting sequence
  source 1..20: mol_type = other RNA
gtcgcagcagtgaaccatgt

SEQ ID NO: 12607 - RNA, 20 nt, synthetic construct
  misc_feature 1..20: note = C9Orf72 TTCN PAM targeting sequence
  source 1..20: mol_type = other RNA
ctgctgcgacagaattgttg

SEQ ID NO: 12608 - RNA, 20 nt, synthetic construct
  misc_feature 1..20: note = C9Orf72 TTCN PAM targeting sequence
  source 1..20: mol_type = other RNA
accacatcgtgcatatgtgt

SEQ ID NO: 12609 - RNA, 20 nt, synthetic construct
  misc_feature 1..20: note = C9Orf72 TTCN PAM targeting sequence
  source 1..20: mol_type = other RNA
gtttatgtagtcatatatat

SEQ ID NO: 12610 - RNA, 20 nt, synthetic construct
  misc_feature 1..20: note = C9Orf72 TTCN PAM targeting sequence
  source 1..20: mol_type = other RNA
agactatgtaatatctggta

SEQ ID NO: 12611 - RNA, 20 nt, synthetic construct
  misc_feature 1..20: note = C9Orf72 TTCN PAM targeting sequence
  source 1..20: mol_type = other RNA
gatgacattaaaaaaagtaa

SEQ ID NO: 12612 - RNA, 20 nt, synthetic construct
  misc_feature 1..20: note = C9Orf72 TTCN PAM targeting sequence
  source 1..20: mol_type = other RNA
gttgacttgtacattatttt

SEQ ID NO: 12613 - RNA, 20 nt, synthetic construct
  misc_feature 1..20: note = C9Orf72 TTCN PAM targeting sequence
  source 1..20: mol_type = other RNA
ccaaataacataacagcaat

SEQ ID NO: 12614 - RNA, 20 nt, synthetic construct
  misc_feature 1..20: note = C9Orf72 TTCN PAM targeting sequence
  source 1..20: mol_type = other RNA
ccttaataacatctgcaaag

SEQ ID NO: 12615 - RNA, 20 nt, synthetic construct
  misc_feature 1..20: note = C9Orf72 TTCN PAM targeting sequence
  source 1..20: mol_type = other RNA
gcaatggcagtggattccct

SEQ ID NO: 12616 - RNA, 20 nt, synthetic construct
  misc_feature 1..20: note = C9Orf72 TTCN PAM targeting sequence
  source 1..20: mol_type = other RNA
atgtggcccccttcagcaat

SEQ ID NO: 12617 - RNA, 20 nt, synthetic construct
  misc_feature 1..20: note = C9Orf72 TTCN PAM targeting sequence
  source 1..20: mol_type = other RNA
tatgctttccatgtggcccc

SEQ ID NO: 12618 - RNA, 20 nt, synthetic construct
  misc_feature 1..20: note = C9Orf72 TTCN PAM targeting sequence
  source 1..20: mol_type = other RNA
ccactgtgtaatatatccat

SEQ ID NO: 12619 - RNA, 20 nt, synthetic construct
  misc_feature 1..20: note = C9Orf72 TTCN PAM targeting sequence
  source 1..20: mol_type = other RNA
aaaggtcaaaagtctgggtg

SEQ ID NO: 12620 - RNA, 20 nt, synthetic construct
  misc_feature 1..20: note = C9Orf72 TTCN PAM targeting sequence
  source 1..20: mol_type = other RNA
acaagcttagtgccttaaaa

SEQ ID NO: 12621 - RNA, 20 nt, synthetic construct
  misc_feature 1..20: note = C9Orf72 TTCN PAM targeting sequence
  source 1..20: mol_type = other RNA
tattgtgctacaacaaattt

SEQ ID NO: 12622 - RNA, 20 nt, synthetic construct
  misc_feature 1..20: note = C9Orf72 TTCN PAM targeting sequence
  source 1..20: mol_type = other RNA
ccaggctgcttgctacctct

SEQ ID NO: 12623 - RNA, 20 nt, synthetic construct
  misc_feature 1..20: note = C9Orf72 TTCN PAM targeting sequence
  source 1..20: mol_type = other RNA
agagatatgggtgacttaaa

SEQ ID NO: 12624 - RNA, 20 nt, synthetic construct
  misc_feature 1..20: note = C9Orf72 TTCN PAM targeting sequence
  source 1..20: mol_type = other RNA
caccgtcattctttctgtcg

SEQ ID NO: 12625 - RNA, 20 nt, synthetic construct
  misc_feature 1..20: note = C9Orf72 TTCN PAM targeting sequence
  source 1..20: mol_type = other RNA
ttctgtcgacagcctctttc

SEQ ID NO: 12626 - RNA, 20 nt, synthetic construct
  misc_feature 1..20: note = C9Orf72 TTCN PAM targeting sequence
  source 1..20: mol_type = other RNA
gtcgacagcctctttctcct

SEQ ID NO: 12627 - RNA, 20 nt, synthetic construct
  misc_feature 1..20: note = C9Orf72 TTCN PAM targeting sequence
  source 1..20: mol_type = other RNA
ccttaagcaattgattttta

SEQ ID NO: 12628 - RNA, 20 nt, synthetic construct
  misc_feature 1..20: note = C9Orf72 TTCN PAM targeting sequence
  source 1..20: mol_type = other RNA
aaatctaaattgcagactac

SEQ ID NO: 12629 - RNA, 20 nt, synthetic construct
  misc_feature 1..20: note = C9Orf72 TTCN PAM targeting sequence
  source 1..20: mol_type = other RNA
gttttctaaatctaaattgc

SEQ ID NO: 12630 - RNA, 20 nt, synthetic construct
  misc_feature 1..20: note = C9Orf72 TTCN PAM targeting sequence
  source 1..20: mol_type = other RNA
agattgtcattaacagactc

SEQ ID NO: 12631 - RNA, 20 nt, synthetic construct
  misc_feature 1..20: note = C9Orf72 TTCN PAM targeting sequence
  source 1..20: mol_type = other RNA
ctattgagtaagcagtgttg

SEQ ID NO: 12632 - RNA, 20 nt, synthetic construct
  misc_feature 1..20: note = C9Orf72 TTCN PAM targeting sequence
  source 1..20: mol_type = other RNA
cccagagatttgcttctgga

SEQ ID NO: 12633 - RNA, 20 nt, synthetic construct
  misc_feature 1..20: note = C9Orf72 TTCN PAM targeting sequence
  source 1..20: mol_type = other RNA
ggagttagatgggaagaatg

SEQ ID NO: 12634 - RNA, 20 nt, synthetic construct
  misc_feature 1..20: note = C9Orf72 TTCN PAM targeting sequence
  source 1..20: mol_type = other RNA
catctaactccagaagcaaa

SEQ ID NO: 12635 - RNA, 20 nt, synthetic construct
  misc_feature 1..20: note = C9Orf72 TTCN PAM targeting sequence
  source 1..20: mol_type = other RNA
tcccatctaactccagaagc

SEQ ID NO: 12636 - RNA, 20 nt, synthetic construct
  misc_feature 1..20: note = C9Orf72 TTCN PAM targeting sequence
  source 1..20: mol_type = other RNA
attaactgcaggctattgca

SEQ ID NO: 12637 - RNA, 20 nt, synthetic construct
  misc_feature 1..20: note = C9Orf72 TTCN PAM targeting sequence
  source 1..20: mol_type = other RNA
tgcaatagcctgcagttaat

SEQ ID NO: 12638 - RNA, 20 nt, synthetic construct
  misc_feature 1..20: note = C9Orf72 TTCN PAM targeting sequence
  source 1..20: mol_type = other RNA
gtttcctttgccaatttgca

SEQ ID NO: 12639 - RNA, 20 nt, synthetic construct
  misc_feature 1..20: note = C9Orf72 TTCN PAM targeting sequence
  source 1..20: mol_type = other RNA
tttgccaatttgcaaaaaca

SEQ ID NO: 12640 - RNA, 20 nt, synthetic construct
  misc_feature 1..20: note = C9Orf72 TTCN PAM targeting sequence
  source 1..20: mol_type = other RNA
gggtgtttttgcaaattggc

SEQ ID NO: 12641 - RNA, 20 nt, synthetic construct
  misc_feature 1..20: note = C9Orf72 TTCN PAM targeting sequence
  source 1..20: mol_type = other RNA
gaaataaataagcaagatag

SEQ ID NO: 12642 - RNA, 20 nt, synthetic construct
  misc_feature 1..20: note = C9Orf72 TTCN PAM targeting sequence
  source 1..20: mol_type = other RNA
gaatgcaaagttacaattat

SEQ ID NO: 12643 - RNA, 20 nt, synthetic construct
  misc_feature 1..20: note = C9Orf72 TTCN PAM targeting sequence
  source 1..20: mol_type = other RNA
acatttatgaaaagaaaatg

SEQ ID NO: 12644 - RNA, 20 nt, synthetic construct
  misc_feature 1..20: note = C9Orf72 TTCN PAM targeting sequence
  source 1..20: mol_type = other RNA
taaatgtggaaaataatttt

SEQ ID NO: 12645 - RNA, 20 nt, synthetic construct
  misc_feature 1..20: note = C9Orf72 TTCN PAM targeting sequence
  source 1..20: mol_type = other RNA
tttcataaatgtggaaaata

SEQ ID NO: 12646 - RNA, 20 nt, synthetic construct
  misc_feature 1..20: note = C9Orf72 TTCN PAM targeting sequence
  source 1..20: mol_type = other RNA
cattttcttttcataaatgt

SEQ ID NO: 12647 - RNA, 20 nt, synthetic construct
  misc_feature 1..20: note = C9Orf72 TTCN PAM targeting sequence
  source 1..20: mol_type = other RNA
aaaaaatatctagaggacac

SEQ ID NO: 12648 - RNA, 20 nt, synthetic construct
  misc_feature 1..20: note = C9Orf72 TTCN PAM targeting sequence
  source 1..20: mol_type = other RNA
aattcacattttcttttcat

SEQ ID NO: 12649 - RNA, 20 nt, synthetic construct
  misc_feature 1..20: note = C9Orf72 TTCN PAM targeting sequence
  source 1..20: mol_type = other RNA
ccaaaatggttagtgttagg

SEQ ID NO: 12650 - RNA, 20 nt, synthetic construct
  misc_feature 1..20: note = C9Orf72 TTCN PAM targeting sequence
  source 1..20: mol_type = other RNA
ctagaattaggaattgctac

SEQ ID NO: 12651 - RNA, 20 nt, synthetic construct
  misc_feature 1..20: note = C9Orf72 TTCN PAM targeting sequence
  source 1..20: mol_type = other RNA
tcagctttagagtcacagat

SEQ ID NO: 12652 - RNA, 20 nt, synthetic construct
  misc_feature 1..20: note = C9Orf72 TTCN PAM targeting sequence
  source 1..20: mol_type = other RNA
agcccacatctgtgactcta

SEQ ID NO: 12653 - RNA, 20 nt, synthetic construct
  misc_feature 1..20: note = C9Orf72 TTCN PAM targeting sequence
  source 1..20: mol_type = other RNA
atcacttagtggcctgtgtg

SEQ ID NO: 12654 - RNA, 20 nt, synthetic construct
  misc_feature 1..20: note = C9Orf72 TTCN PAM targeting sequence
  source 1..20: mol_type = other RNA
ctaattttccattttctcat

SEQ ID NO: 12655 - RNA, 20 nt, synthetic construct
  misc_feature 1..20: note = C9Orf72 TTCN PAM targeting sequence
  source 1..20: mol_type = other RNA
attttctcatctttaccatg

SEQ ID NO: 12656 - RNA, 20 nt, synthetic construct
  misc_feature 1..20: note = C9Orf72 TTCN PAM targeting sequence
  source 1..20: mol_type = other RNA
catctttaccatggagataa

SEQ ID NO: 12657 - RNA, 20 nt, synthetic construct
  misc_feature 1..20: note = C9Orf72 TTCN PAM targeting sequence
  source 1..20: mol_type = other RNA
ccccctaagcatggttaaga

SEQ ID NO: 12658 - RNA, 20 nt, synthetic construct
  misc_feature 1..20: note = C9Orf72 TTCN PAM targeting sequence
  source 1..20: mol_type = other RNA
ccacctctcaaaaagaataa

SEQ ID NO: 12659 - RNA, 20 nt, synthetic construct
  misc_feature 1..20: note = C9Orf72 TTCN PAM targeting sequence
  source 1..20: mol_type = other RNA
cctttattgcccattttatt

SEQ ID NO: 12660 - RNA, 20 nt, synthetic construct
  misc_feature 1..20: note = C9Orf72 TTCN PAM targeting sequence
  source 1..20: mol_type = other RNA
accatctccatgtttcccct

SEQ ID NO: 12661 - RNA, 20 nt, synthetic construct
  misc_feature 1..20: note = C9Orf72 TTCN PAM targeting sequence
  source 1..20: mol_type = other RNA
atatacattctaccatctcc

SEQ ID NO: 12662 - RNA, 20 nt, synthetic construct
  misc_feature 1..20: note = C9Orf72 TTCN PAM targeting sequence
  source 1..20: mol_type = other RNA
aagggcgtatgtaggacagc

SEQ ID NO: 12663 - RNA, 20 nt, synthetic construct
  misc_feature 1..20: note = C9Orf72 TTCN PAM targeting sequence
  source 1..20: mol_type = other RNA
atagccaagctattttcaaa

SEQ ID NO: 12664 - RNA, 20 nt, synthetic construct
  misc_feature 1..20: note = C9Orf72 TTCN PAM targeting sequence
  source 1..20: mol_type = other RNA
aagatctttaaatataattt

SEQ ID NO: 12665 - RNA, 20 nt, synthetic construct
  misc_feature 1..20: note = C9Orf72 TTCN PAM targeting sequence
  source 1..20: mol_type = other RNA
tacatggtgtctaataaagc

SEQ ID NO: 12666 - RNA, 20 nt, synthetic construct
  misc_feature 1..20: note = C9Orf72 TTCN PAM targeting sequence
  source 1..20: mol_type = other RNA
agtcagttcttagacttgaa

SEQ ID NO: 12667 - RNA, 20 nt, synthetic construct
  misc_feature 1..20: note = C9Orf72 TTCN PAM targeting sequence
  source 1..20: mol_type = other RNA
tagacttgaatttgacgtta

SEQ ID NO: 12668 - RNA, 20 nt, synthetic construct
  misc_feature 1..20: note = C9Orf72 TTCN PAM targeting sequence
  source 1..20: mol_type = other RNA
agtctaagaactgacttgaa

SEQ ID NO: 12669 - RNA, 20 nt, synthetic construct
  misc_feature 1..20: note = C9Orf72 TTCN PAM targeting sequence
  source 1..20: mol_type = other RNA
tgagcaactgagaatagaaa

SEQ ID NO: 12670 - RNA, 20 nt, synthetic construct
  misc_feature 1..20: note = C9Orf72 TTCN PAM targeting sequence
  source 1..20: mol_type = other RNA
cagttgctcaagaaataacg

SEQ ID NO: 12671 - RNA, 20 nt, synthetic construct
  misc_feature 1..20: note = C9Orf72 TTCN PAM targeting sequence
  source 1..20: mol_type = other RNA
attctcagttgctcaagaaa

SEQ ID NO: 12672 - RNA, 20 nt, synthetic construct
  misc_feature 1..20: note = C9Orf72 TTCN PAM targeting sequence
  source 1..20: mol_type = other RNA
atttctattctcagttgctc

SEQ ID NO: 12673 - RNA, 20 nt, synthetic construct
  misc_feature 1..20: note = C9Orf72 TTCN PAM targeting sequence
  source 1..20: mol_type = other RNA
gacctgtcttgacatgccct

SEQ ID NO: 12674 - RNA, 20 nt, synthetic construct
  misc_feature 1..20: note = C9Orf72 TTCN PAM targeting sequence
  source 1..20: mol_type = other RNA
ttttatgttcagacctgtct

SEQ ID NO: 12675 - RNA, 20 nt, synthetic construct
  misc_feature 1..20: note = C9Orf72 TTCN PAM targeting sequence
  source 1..20: mol_type = other RNA
cattttccaaggatcccaga

SEQ ID NO: 12676 - RNA, 20 nt, synthetic construct
  misc_feature 1..20: note = C9Orf72 TTCN PAM targeting sequence
  source 1..20: mol_type = other RNA
aaggatcccagagacagaac

SEQ ID NO: 12677 - RNA, 20 nt, synthetic construct
  misc_feature 1..20: note = C9Orf72 TTCN PAM targeting sequence
  source 1..20: mol_type = other RNA
gtctctgggatccttggaaa

SEQ ID NO: 12678 - RNA, 20 nt, synthetic construct
  misc_feature 1..20: note = C9Orf72 TTCN PAM targeting sequence
  source 1..20: mol_type = other RNA
taaatagagtgctaatattt

SEQ ID NO: 12679 - RNA, 20 nt, synthetic construct
  misc_feature 1..20: note = C9Orf72 TTCN PAM targeting sequence
  source 1..20: mol_type = other RNA
atcaaagtaaaaatattagc

SEQ ID NO: 12680 - RNA, 20 nt, synthetic construct
  misc_feature 1..20: note = C9Orf72 TTCN PAM targeting sequence
  source 1..20: mol_type = other RNA
tacaatttaagtttctatca

SEQ ID NO: 12681 - RNA, 20 nt, synthetic construct
  misc_feature 1..20: note = C9Orf72 TTCN PAM targeting sequence
  source 1..20: mol_type = other RNA
gtttgttaaaatctaccttc

SEQ ID NO: 12682 - RNA, 20 nt, synthetic construct
  misc_feature 1..20: note = C9Orf72 TTCN PAM targeting sequence
  source 1..20: mol_type = other RNA
ttttctgtttagatatcggt

SEQ ID NO: 12683 - RNA, 20 nt, synthetic construct
  misc_feature 1..20: note = C9Orf72 TTCN PAM targeting sequence
  source 1..20: mol_type = other RNA
gtttagatatcggtcttgcc

SEQ ID NO: 12684 - RNA, 20 nt, synthetic construct
  misc_feature 1..20: note = C9Orf72 TTCN PAM targeting sequence
  source 1..20: mol_type = other RNA
acattgccactggcaagacc

SEQ ID NO: 12685 - RNA, 20 nt, synthetic construct
  misc_feature 1..20: note = C9Orf72 TTCN PAM targeting sequence
  source 1..20: mol_type = other RNA
tcatctcagtagaggatatt

SEQ ID NO: 12686 - RNA, 20 nt, synthetic construct
  misc_feature 1..20: note = C9Orf72 TTCN PAM targeting sequence
  source 1..20: mol_type = other RNA
tctcagtagaggatattatg

SEQ ID NO: 12687 - RNA, 20 nt, synthetic construct
  misc_feature 1..20: note = C9Orf72 TTCN PAM targeting sequence
  source 1..20: mol_type = other RNA
taaaatgatcagcataatat

SEQ ID NO: 12688 - RNA, 20 nt, synthetic construct
  misc_feature 1..20: note = C9Orf72 TTCN PAM targeting sequence
  source 1..20: mol_type = other RNA
ttgtcttctaaataatagtt

SEQ ID NO: 12689 - RNA, 20 nt, synthetic construct
  misc_feature 1..20: note = C9Orf72 TTCN PAM targeting sequence
  source 1..20: mol_type = other RNA
aaataatagtttgtcagagg

SEQ ID NO: 12690 - RNA, 20 nt, synthetic construct
  misc_feature 1..20: note = C9Orf72 TTCN PAM targeting sequence
  source 1..20: mol_type = other RNA
ctctgacaaactattattta

SEQ ID NO: 12691 - RNA, 20 nt, synthetic construct
  misc_feature 1..20: note = C9Orf72 TTCN PAM targeting sequence
  source 1..20: mol_type = other RNA
cattttaaagagagtataat

SEQ ID NO: 12692 - RNA, 20 nt, synthetic construct
  misc_feature 1..20: note = C9Orf72 TTCN PAM targeting sequence
  source 1..20: mol_type = other RNA
tagctggcaattaagaaatg

SEQ ID NO: 12693 - RNA, 20 nt, synthetic construct
  misc_feature 1..20: note = C9Orf72 TTCN PAM targeting sequence
  source 1..20: mol_type = other RNA
taattgccagctaagaaaaa

SEQ ID NO: 12694 - RNA, 20 nt, synthetic construct
  misc_feature 1..20: note = C9Orf72 TTCN PAM targeting sequence
  source 1..20: mol_type = other RNA
tattagaagtattgaactga

SEQ ID NO: 12695 - RNA, 20 nt, synthetic construct
  misc_feature 1..20: note = C9Orf72 TTCN PAM targeting sequence
  source 1..20: mol_type = other RNA
aatatgaaaagtttttctac

SEQ ID NO: 12696 - RNA, 20 nt, synthetic construct
  misc_feature 1..20: note = C9Orf72 TTCN PAM targeting sequence
  source 1..20: mol_type = other RNA
atacttctaatatgaaaagt

SEQ ID NO: 12697 - RNA, 20 nt, synthetic construct
  misc_feature 1..20: note = C9Orf72 TTCN PAM targeting sequence
  source 1..20: mol_type = other RNA
tttgactctcagttcaatac

SEQ ID NO: 12698 - RNA, 20 nt, synthetic construct
  misc_feature 1..20: note = C9Orf72 TTCN PAM targeting sequence
  source 1..20: mol_type = other RNA
gggtttcttttgactctcag

SEQ ID NO: 12699 - RNA, 20 nt, synthetic construct
  misc_feature 1..20: note = C9Orf72 TTCN PAM targeting sequence
  source 1..20: mol_type = other RNA
gggtgatttctgggtttctt

SEQ ID NO: 12700 - RNA, 20 nt, synthetic construct
  misc_feature 1..20: note = C9Orf72 TTCN PAM targeting sequence
  source 1..20: mol_type = other RNA
ctgtctccctcacccgaaac

SEQ ID NO: 12701 - RNA, 20 nt, synthetic construct
  misc_feature 1..20: note = C9Orf72 TTCN PAM targeting sequence
  source 1..20: mol_type = other RNA
actctatagttctgttgatg

SEQ ID NO: 12702 - RNA, 20 nt, synthetic construct
  misc_feature 1..20: note = C9Orf72 TTCN PAM targeting sequence
  source 1..20: mol_type = other RNA
gttgatgcgacctatctgaa

SEQ ID NO: 12703 - RNA, 20 nt, synthetic construct
  misc_feature 1..20: note = C9Orf72 TTCN PAM targeting sequence
  source 1..20: mol_type = other RNA
gataggtcgcatcaacagaa

SEQ ID NO: 12704 - RNA, 20 nt, synthetic construct
  misc_feature 1..20: note = C9Orf72 TTCN PAM targeting sequence
  source 1..20: mol_type = other RNA
tttcagataggtcgcatcaa

SEQ ID NO: 12705 - RNA, 20 nt, synthetic construct
  misc_feature 1..20: note = C9Orf72 TTCN PAM targeting sequence
  source 1..20: mol_type = other RNA
tggcttccactgcttggaaa

SEQ ID NO: 12706 - RNA, 20 nt, synthetic construct
  misc_feature 1..20: note = C9Orf72 TTCN PAM targeting sequence
  source 1..20: mol_type = other RNA
cacaatcattcttcacctct

SEQ ID NO: 12707 - RNA, 20 nt, synthetic construct
  misc_feature 1..20: note = C9Orf72 TTCN PAM targeting sequence
  source 1..20: mol_type = other RNA
tcacctctagacttaaccta

SEQ ID NO: 12708 - RNA, 20 nt, synthetic construct
  misc_feature 1..20: note = C9Orf72 TTCN PAM targeting sequence
  source 1..20: mol_type = other RNA
cctctagacttaacctagtt

SEQ ID NO: 12709 - RNA, 20 nt, synthetic construct
  misc_feature 1..20: note = C9Orf72 TTCN PAM targeting sequence
  source 1..20: mol_type = other RNA
ggcccccatccccctcctcc

SEQ ID NO: 12710 - RNA, 20 nt, synthetic construct
  misc_feature 1..20: note = C9Orf72 TTCN PAM targeting sequence
  source 1..20: mol_type = other RNA
ccagaagaacatgccttctg

SEQ ID NO: 12711 - RNA, 20 nt, synthetic construct
  misc_feature 1..20: note = C9Orf72 TTCN PAM targeting sequence
  source 1..20: mol_type = other RNA
ggagaattgaggaggagggg

SEQ ID NO: 12712 - RNA, 20 nt, synthetic construct
  misc_feature 1..20: note = C9Orf72 TTCN PAM targeting sequence
  source 1..20: mol_type = other RNA
tctggagaattgaggaggag

SEQ ID NO: 12713 - RNA, 20 nt, synthetic construct
  misc_feature 1..20: note = C9Orf72 TTCN PAM targeting sequence
  source 1..20: mol_type = other RNA
gatagtttccagaatgtacc

SEQ ID NO: 12714 - RNA, 20 nt, synthetic construct
  misc_feature 1..20: note = C9Orf72 TTCN PAM targeting sequence
  source 1..20: mol_type = other RNA
agaatgtaccaagctgtttt

SEQ ID NO: 12715 - RNA, 20 nt, synthetic construct
  misc_feature 1..20: note = C9Orf72 TTCN PAM targeting sequence
  source 1..20: mol_type = other RNA
ggaaactatcagaaggcatg

SEQ ID NO: 12716 - RNA, 20 nt, synthetic construct
  misc_feature 1..20: note = C9Orf72 TTCN PAM targeting sequence
  source 1..20: mol_type = other RNA
ctctcccctgacatcaccca

SEQ ID NO: 12717 - RNA, 20 nt, synthetic construct
  misc_feature 1..20: note = C9Orf72 TTCN PAM targeting sequence
  source 1..20: mol_type = other RNA
catcaaacaccaccccctca

SEQ ID NO: 12718 - RNA, 20 nt, synthetic construct
  misc_feature 1..20: note = C9Orf72 TTCN PAM targeting sequence
  source 1..20: mol_type = other RNA
attcacatctctctaaagta

SEQ ID NO: 12719 - RNA, 20 nt, synthetic construct
  misc_feature 1..20: note = C9Orf72 TTCN PAM targeting sequence
  source 1..20: mol_type = other RNA
catctctctaaagtaggtct

SEQ ID NO: 12720 - RNA, 20 nt, synthetic construct
  misc_feature 1..20: note = C9Orf72 TTCN PAM targeting sequence
  source 1..20: mol_type = other RNA
aggttccattatgcctgttc

SEQ ID NO: 12721 - RNA, 20 nt, synthetic construct
  misc_feature 1..20: note = C9Orf72 TTCN PAM targeting sequence
  source 1..20: mol_type = other RNA
ttctctgcgaaaatgaatgt

SEQ ID NO: 12722 - RNA, 20 nt, synthetic construct
  misc_feature 1..20: note = C9Orf72 TTCN PAM targeting sequence
  source 1..20: mol_type = other RNA
ctgcgaaaatgaatgtgcag

SEQ ID NO: 12723 - RNA, 20 nt, synthetic construct
  misc_feature 1..20: note = C9Orf72 TTCN PAM targeting sequence
  source 1..20: mol_type = other RNA
cagagaaagaaagttggcac

SEQ ID NO: 12724 - RNA, 20 nt, synthetic construct
  misc_feature 1..20: note = C9Orf72 TTCN PAM targeting sequence
  source 1..20: mol_type = other RNA
ttttcgcagagaaagaaagt

SEQ ID NO: 12725 - RNA, 20 nt, synthetic construct
  misc_feature 1..20: note = C9Orf72 TTCN PAM targeting sequence
  source 1..20: mol_type = other RNA
tatcaagctgcacattcatt

SEQ ID NO: 12726 - RNA, 20 nt, synthetic construct
  misc_feature 1..20: note = C9Orf72 TTCN PAM targeting sequence
  source 1..20: mol_type = other RNA
gagtgtagaatctcagcctg

SEQ ID NO: 12727 - RNA, 20 nt, synthetic construct
  misc_feature 1..20: note = C9Orf72 TTCN PAM targeting sequence
  source 1..20: mol_type = other RNA
acactcagaaaatgagtaac

SEQ ID NO: 12728 - RNA, 20 nt, synthetic construct
  misc_feature 1..20: note = C9Orf72 TTCN PAM targeting sequence
  source 1..20: mol_type = other RNA
tgccggactggtcacccagg

SEQ ID NO: 12729 - RNA, 20 nt, synthetic construct
  misc_feature 1..20: note = C9Orf72 TTCN PAM targeting sequence
  source 1..20: mol_type = other RNA
ctttcattgacggatgcagg

SEQ ID NO: 12730 - RNA, 20 nt, synthetic construct
  misc_feature 1..20: note = C9Orf72 TTCN PAM targeting sequence
  source 1..20: mol_type = other RNA
ttgacggatgcaggtagttt

SEQ ID NO: 12731 - RNA, 20 nt, synthetic construct
  misc_feature 1..20: note = C9Orf72 TTCN PAM targeting sequence
  source 1..20: mol_type = other RNA
ggcaagatctgtggctagcc

SEQ ID NO: 12732 - RNA, 20 nt, synthetic construct
  misc_feature 1..20: note = C9Orf72 TTCN PAM targeting sequence
  source 1..20: mol_type = other RNA
tatttctaacattttcctat

SEQ ID NO: 12733 - RNA, 20 nt, synthetic construct
  misc_feature 1..20: note = C9Orf72 TTCN PAM targeting sequence
  source 1..20: mol_type = other RNA
aacattttcctatgtttctt

SEQ ID NO: 12734 - RNA, 20 nt, synthetic construct
  misc_feature 1..20: note = C9Orf72 TTCN PAM targeting sequence
  source 1..20: mol_type = other RNA
tatgtttcttaattggaatt

SEQ ID NO: 12735 - RNA, 20 nt, synthetic construct
  misc_feature 1..20: note = C9Orf72 TTCN PAM targeting sequence
  source 1..20: mol_type = other RNA
taattggaatttatctaaag

SEQ ID NO: 12736 - RNA, 20 nt, synthetic construct
  misc_feature 1..20: note = C9Orf72 TTCN PAM targeting sequence
  source 1..20: mol_type = other RNA
atgggttatgacacaatgct

SEQ ID NO: 12737 - RNA, 20 nt, synthetic construct
  misc_feature 1..20: note = C9Orf72 TTCN PAM targeting sequence
  source 1..20: mol_type = other RNA
cttttggccattgtgagctc

SEQ ID NO: 12738 - RNA, 20 nt, synthetic construct
  misc_feature 1..20: note = C9Orf72 TTCN PAM targeting sequence
  source 1..20: mol_type = other RNA
ggtaggctcctgtgcccttt

SEQ ID NO: 12739 - RNA, 20 nt, synthetic construct
  misc_feature 1..20: note = C9Orf72 TTCN PAM targeting sequence
  source 1..20: mol_type = other RNA
accttagtataaacataaac

SEQ ID NO: 12740 - RNA, 20 nt, synthetic construct
  misc_feature 1..20: note = C9Orf72 TTCN PAM targeting sequence
  source 1..20: mol_type = other RNA
aaaaccagtttatgtttata

SEQ ID NO: 12741 - RNA, 20 nt, synthetic construct
  misc_feature 1..20: note = C9Orf72 TTCN PAM targeting sequence
  source 1..20: mol_type = other RNA
aacccatacctccaagagaa

SEQ ID NO: 12742 - RNA, 20 nt, synthetic construct
  misc_feature 1..20: note = C9Orf72 TTCN PAM targeting sequence
  source 1..20: mol_type = other RNA
cttggaggtatgggttagaa

SEQ ID NO: 12743 - RNA, 20 nt, synthetic construct
  misc_feature 1..20: note = C9Orf72 TTCN PAM targeting sequence
  source 1..20: mol_type = other RNA
cacttaatagagtatagtac

SEQ ID NO: 12744 - RNA, 20 nt, synthetic construct
  misc_feature 1..20: note = C9Orf72 TTCN PAM targeting sequence
  source 1..20: mol_type = other RNA
atgagttgtaatccttctgc

SEQ ID NO: 12745 - RNA, 20 nt, synthetic construct
  misc_feature 1..20: note = C9Orf72 TTCN PAM targeting sequence
  source 1..20: mol_type = other RNA
tccaaagttggagtgaatcc

SEQ ID NO: 12746 - RNA, 20 nt, synthetic construct
  misc_feature 1..20: note = C9Orf72 TTCN PAM targeting sequence
  source 1..20: mol_type = other RNA
aaagttggagtgaatccttt

SEQ ID NO: 12747 - RNA, 20 nt, synthetic construct
  misc_feature 1..20: note = C9Orf72 TTCN PAM targeting sequence
  source 1..20: mol_type = other RNA
ctccaactttggaagaagat

SEQ ID NO: 12748 - RNA, 20 nt, synthetic construct
  misc_feature 1..20: note = C9Orf72 TTCN PAM targeting sequence
  source 1..20: mol_type = other RNA
aatcctgccactgctttagc

SEQ ID NO: 12749 - RNA, 20 nt, synthetic construct
  misc_feature 1..20: note = C9Orf72 TTCN PAM targeting sequence
  source 1..20: mol_type = other RNA
ataatgttcatagcatcttc

SEQ ID NO: 12750 - RNA, 20 nt, synthetic construct
  misc_feature 1..20: note = C9Orf72 TTCN PAM targeting sequence
  source 1..20: mol_type = other RNA
tagcatcttcacaaggagta

SEQ ID NO: 12751 - RNA, 20 nt, synthetic construct
  misc_feature 1..20: note = C9Orf72 TTCN PAM targeting sequence
  source 1..20: mol_type = other RNA
atctcaagaaaccactttct

SEQ ID NO: 12752 - RNA, 20 nt, synthetic construct
  misc_feature 1..20: note = C9Orf72 TTCN PAM targeting sequence
  source 1..20: mol_type = other RNA
tgagatggaatctactcctt

SEQ ID NO: 12753 - RNA, 20 nt, synthetic construct
  misc_feature 1..20: note = C9Orf72 TTCN PAM targeting sequence
  source 1..20: mol_type = other RNA
ttgctcattcataagaagca

SEQ ID NO: 12754 - RNA, 20 nt, synthetic construct
  misc_feature 1..20: note = C9Orf72 TTCN PAM targeting sequence
  source 1..20: mol_type = other RNA
taagaagcagctcctcatca

SEQ ID NO: 12755 - RNA, 20 nt, synthetic construct
  misc_feature 1..20: note = C9Orf72 TTCN PAM targeting sequence
  source 1..20: mol_type = other RNA
tatgaatgagcaaagaaagt

SEQ ID NO: 12756 - RNA, 20 nt, synthetic construct
  misc_feature 1..20: note = C9Orf72 TTCN PAM targeting sequence
  source 1..20: mol_type = other RNA
tgataaaaaccttaattgat

SEQ ID NO: 12757 - RNA, 20 nt, synthetic construct
  misc_feature 1..20: note = C9Orf72 TTCN PAM targeting sequence
  source 1..20: mol_type = other RNA
gtcacatcttcaggctccag

SEQ ID NO: 12758 - RNA, 20 nt, synthetic construct
  misc_feature 1..20: note = C9Orf72 TTCN PAM targeting sequence
  source 1..20: mol_type = other RNA
ggctccagtaaatcatgaat

SEQ ID NO: 12759 - RNA, 20 nt, synthetic construct
  misc_feature 1..20: note = C9Orf72 TTCN PAM targeting sequence
  source 1..20: mol_type = other RNA
tgatttactggagcctgaag

SEQ ID NO: 12760 - RNA, 20 nt, synthetic construct
  misc_feature 1..20: note = C9Orf72 TTCN PAM targeting sequence
  source 1..20: mol_type = other RNA
agataacttcctgcagcttc

SEQ ID NO: 12761 - RNA, 20 nt, synthetic construct
  misc_feature 1..20: note = C9Orf72 TTCN PAM targeting sequence
  source 1..20: mol_type = other RNA
tgcagcttctacatcagcac

SEQ ID NO: 12762 - RNA, 20 nt, synthetic construct
  misc_feature 1..20: note = C9Orf72 TTCN PAM targeting sequence
  source 1..20: mol_type = other RNA
acatcagcacctgctccttc

SEQ ID NO: 12763 - RNA, 20 nt, synthetic construct
  misc_feature 1..20: note = C9Orf72 TTCN PAM targeting sequence
  source 1..20: mol_type = other RNA
ccttcatttttttttgttat

SEQ ID NO: 12764 - RNA, 20 nt, synthetic construct
  misc_feature 1..20: note = C9Orf72 TTCN PAM targeting sequence
  source 1..20: mol_type = other RNA
tttttttttgttatagagat

SEQ ID NO: 12765 - RNA, 20 nt, synthetic construct
  misc_feature 1..20: note = C9Orf72 TTCN PAM targeting sequence
  source 1..20: mol_type = other RNA
agtgagagacatgcaactct

SEQ ID NO: 12766 - RNA, 20 nt, synthetic construct
  misc_feature 1..20: note = C9Orf72 TTCN PAM targeting sequence
  source 1..20: mol_type = other RNA
cttgaagacaaagtcattgt

SEQ ID NO: 12767 - RNA, 20 nt, synthetic construct
  misc_feature 1..20: note = C9Orf72 TTCN PAM targeting sequence
  source 1..20: mol_type = other RNA
agtgaaagtaagagttgcat

SEQ ID NO: 12768 - RNA, 20 nt, synthetic construct
  misc_feature 1..20: note = C9Orf72 TTCN PAM targeting sequence
  source 1..20: mol_type = other RNA
acattgttgtttctcaggaa

SEQ ID NO: 12769 - RNA, 20 nt, synthetic construct
  misc_feature 1..20: note = C9Orf72 TTCN PAM targeting sequence
  source 1..20: mol_type = other RNA
caggaaataagaaggcctga

SEQ ID NO: 12770 - RNA, 20 nt, synthetic construct
  misc_feature 1..20: note = C9Orf72 TTCN PAM targeting sequence
  source 1..20: mol_type = other RNA
tgagaaacaacaatgttgaa

SEQ ID NO: 12771 - RNA, 20 nt, synthetic construct
  misc_feature 1..20: note = C9Orf72 TTCN PAM targeting sequence
  source 1..20: mol_type = other RNA
ggtgctcagataattagacg

SEQ ID NO: 12772 - RNA, 20 nt, synthetic construct
  misc_feature 1..20: note = C9Orf72 TTCN PAM targeting sequence
  source 1..20: mol_type = other RNA
gctacttacctcgtctaatt

SEQ ID NO: 12773 - RNA, 20 nt, synthetic construct
  misc_feature 1..20: note = C9Orf72 TTCN PAM targeting sequence
  source 1..20: mol_type = other RNA
aaatgatggtcgaacgaggg

SEQ ID NO: 12774 - RNA, 20 nt, synthetic construct
  misc_feature 1..20: note = C9Orf72 TTCN PAM targeting sequence
  source 1..20: mol_type = other RNA
accatcattttgaaagttct

SEQ ID NO: 12775 - RNA, 20 nt, synthetic construct
  misc_feature 1..20: note = C9Orf72 TTCN PAM targeting sequence
  source 1..20: mol_type = other RNA
catttgtgtgtggcatgcac

SEQ ID NO: 12776 - RNA, 20 nt, synthetic construct
  misc_feature 1..20: note = C9Orf72 TTCN PAM targeting sequence
  source 1..20: mol_type = other RNA
tacctacttaacagaagaaa

SEQ ID NO: 12777 - RNA, 20 nt, synthetic construct
  misc_feature 1..20: note = C9Orf72 TTCN PAM targeting sequence
  source 1..20: mol_type = other RNA
gttaagtaggtaagaaaact

SEQ ID NO: 12778 - RNA, 20 nt, synthetic construct
  misc_feature 1..20: note = C9Orf72 TTCN PAM targeting sequence
  source 1..20: mol_type = other RNA
tctgttaagtaggtaagaaa

SEQ ID NO: 12779 - RNA, 20 nt, synthetic construct
  misc_feature 1..20: note = C9Orf72 TTCN PAM targeting sequence
  source 1..20: mol_type = other RNA
tatattttcctctctgtttt

SEQ ID NO: 12780 - RNA, 20 nt, synthetic construct
  misc_feature 1..20: note = C9Orf72 TTCN PAM targeting sequence
  source 1..20: mol_type = other RNA
tctctgttttagctatctaa

SEQ ID NO: 12781 - RNA, 20 nt, synthetic construct
  misc_feature 1..20: note = C9Orf72 TTCN PAM targeting sequence
  source 1..20: mol_type = other RNA
ggatgtttcaaatgtgcttc

SEQ ID NO: 12782 - RNA, 20 nt, synthetic construct
  misc_feature 1..20: note = C9Orf72 TTCN PAM targeting sequence
  source 1..20: mol_type = other RNA
aatgtgcttccaaaggataa

SEQ ID NO: 12783 - RNA, 20 nt, synthetic construct
  misc_feature 1..20: note = C9Orf72 TTCN PAM targeting sequence
  source 1..20: mol_type = other RNA
aaaggataaaaattttccat

SEQ ID NO: 12784 - RNA, 20 nt, synthetic construct
  misc_feature 1..20: note = C9Orf72 TTCN PAM targeting sequence
  source 1..20: mol_type = other RNA
atcccttaaagaatgaacat

SEQ ID NO: 12785 - RNA, 20 nt, synthetic construct
  misc_feature 1..20: note = C9Orf72 TTCN PAM targeting sequence
  source 1..20: mol_type = other RNA
ttaagggatggaaaattttt

SEQ ID NO: 12786 - RNA, 20 nt, synthetic construct
  misc_feature 1..20: note = C9Orf72 TTCN PAM targeting sequence
  source 1..20: mol_type = other RNA
ttctttaagggatggaaaat

SEQ ID NO: 12787 - RNA, 20 nt, synthetic construct
  misc_feature 1..20: note = C9Orf72 TTCN PAM targeting sequence
  source 1..20: mol_type = other RNA
taacatcctcaaatgttcat

SEQ ID NO: 12788 - RNA, 20 nt, synthetic construct
  misc_feature 1..20: note = C9Orf72 TTCN PAM targeting sequence
  source 1..20: mol_type = other RNA
cgggatgatggcaattccaa

SEQ ID NO: 12789 - RNA, 20 nt, synthetic construct
  misc_feature 1..20: note = C9Orf72 TTCN PAM targeting sequence
  source 1..20: mol_type = other RNA
aaagaggactccctgtgccc

SEQ ID NO: 12790 - RNA, 20 nt, synthetic construct
  misc_feature 1..20: note = C9Orf72 TTCN PAM targeting sequence
  source 1..20: mol_type = other RNA
aggatacaccatttatttga

SEQ ID NO: 12791 - RNA, 20 nt, synthetic construct
  misc_feature 1..20: note = C9Orf72 TTCN PAM targeting sequence
  source 1..20: mol_type = other RNA
aaccttgaacatcgaggaaa

SEQ ID NO: 12792 - RNA, 20 nt, synthetic construct
  misc_feature 1..20: note = C9Orf72 TTCN PAM targeting sequence
  source 1..20: mol_type = other RNA
aggtttgaataaaccatgta

SEQ ID NO: 12793 - RNA, 20 nt, synthetic construct
  misc_feature 1..20: note = C9Orf72 TTCN PAM targeting sequence
  source 1..20: mol_type = other RNA
tcgatgttcaaggtttgaat

SEQ ID NO: 12794 - RNA, 20 nt, synthetic construct
  misc_feature 1..20: note = C9Orf72 TTCN PAM targeting sequence
  source 1..20: mol_type = other RNA
cccctctgaggtttcctcga

SEQ ID NO: 12795 - RNA, 20 nt, synthetic construct
  misc_feature 1..20: note = C9Orf72 TTCN PAM targeting sequence
  source 1..20: mol_type = other RNA
tgatcaactcacaaaaacat

SEQ ID NO: 12796 - RNA, 20 nt, synthetic construct
  misc_feature 1..20: note = C9Orf72 TTCN PAM targeting sequence
  source 1..20: mol_type = other RNA
gtattcttgcttcagtttta

SEQ ID NO: 12797 - RNA, 20 nt, synthetic construct
  misc_feature 1..20: note = C9Orf72 TTCN PAM targeting sequence
  source 1..20: mol_type = other RNA
tgcttcagttttatgttaag

SEQ ID NO: 12798 - RNA, 20 nt, synthetic construct
  misc_feature 1..20: note = C9Orf72 TTCN PAM targeting sequence
  source 1..20: mol_type = other RNA
gttttatgttaagagaaatt

SEQ ID NO: 12799 - RNA, 20 nt, synthetic construct
  misc_feature 1..20: note = C9Orf72 TTCN PAM targeting sequence
  source 1..20: mol_type = other RNA
cttaacataaaactgaagca

SEQ ID NO: 12800 - RNA, 20 nt, synthetic construct
  misc_feature 1..20: note = C9Orf72 TTCN PAM targeting sequence
  source 1..20: mol_type = other RNA
ttggagactccaatttctct

SEQ ID NO: 12801 - RNA, 20 nt, synthetic construct
  misc_feature 1..20: note = C9Orf72 TTCN PAM targeting sequence
  source 1..20: mol_type = other RNA
agtaaaaagccagtggtgta

SEQ ID NO: 12802 - RNA, 20 nt, synthetic construct
  misc_feature 1..20: note = C9Orf72 TTCN PAM targeting sequence
  source 1..20: mol_type = other RNA
atcattgccttgccatcaag

SEQ ID NO: 12803 - RNA, 20 nt, synthetic construct
  misc_feature 1..20: note = C9Orf72 TTCN PAM targeting sequence
  source 1..20: mol_type = other RNA
aatctagtaagcatcctacg

SEQ ID NO: 12804 - RNA, 20 nt, synthetic construct
  misc_feature 1..20: note = C9Orf72 TTCN PAM targeting sequence
  source 1..20: mol_type = other RNA
gattccaatctagtaagcat

SEQ ID NO: 12805 - RNA, 20 nt, synthetic construct
  misc_feature 1..20: note = C9Orf72 TTCN PAM targeting sequence
  source 1..20: mol_type = other RNA
tggccaggaatctgggtgtc

SEQ ID NO: 12806 - RNA, 20 nt, synthetic construct
  misc_feature 1..20: note = C9Orf72 TTCN PAM targeting sequence
  source 1..20: mol_type = other RNA
tggccaggaatattctgatt

SEQ ID NO: 12807 - RNA, 20 nt, synthetic construct
  misc_feature 1..20: note = C9Orf72 TTCN PAM targeting sequence
  source 1..20: mol_type = other RNA
aaatttcaaattcaaaatca

SEQ ID NO: 12808 - RNA, 20 nt, synthetic construct
  misc_feature 1..20: note = C9Orf72 TTCN PAM targeting sequence
  source 1..20: mol_type = other RNA
cttttatagctttaacttct

SEQ ID NO: 12809 - RNA, 20 nt, synthetic construct
  misc_feature 1..20: note = C9Orf72 TTCN PAM targeting sequence
  source 1..20: mol_type = other RNA
gtaggccttcacttttatag

SEQ ID NO: 12810 - RNA, 20 nt, synthetic construct
  misc_feature 1..20: note = C9Orf72 TTCN PAM targeting sequence
  source 1..20: mol_type = other RNA
tatcccattattaagctgtg

SEQ ID NO: 12811 - RNA, 20 nt, synthetic construct
  misc_feature 1..20: note = C9Orf72 TTCN PAM targeting sequence
  source 1..20: mol_type = other RNA
ctgtattgggttattaaaag

SEQ ID NO: 12812 - RNA, 20 nt, synthetic construct
  misc_feature 1..20: note = C9Orf72 TTCN PAM targeting sequence
  source 1..20: mol_type = other RNA
caataaaaagagtgtaaaaa

SEQ ID NO: 12813 - RNA, 20 nt, synthetic construct
  misc_feature 1..20: note = C9Orf72 TTCN PAM targeting sequence
  source 1..20: mol_type = other RNA
tcttttttacactcttttta

SEQ ID NO: 12814 - RNA, 20 nt, synthetic construct
  misc_feature 1..20: note = C9Orf72 TTCN PAM targeting sequence
  source 1..20: mol_type = other RNA
ttcatcttttttacactctt

SEQ ID NO: 12815 - RNA, 20 nt, synthetic construct
  misc_feature 1..20: note = C9Orf72 TTCN PAM targeting sequence
  source 1..20: mol_type = other RNA
gccaggtcatgaggtataag

SEQ ID NO: 12816 - RNA, 20 nt, synthetic construct
  misc_feature 1..20: note = C9Orf72 TTCN PAM targeting sequence
  source 1..20: mol_type = other RNA
aaaattacctgcttatacct

SEQ ID NO: 12817 - RNA, 20 nt, synthetic construct
  misc_feature 1..20: note = C9Orf72 TTCN PAM targeting sequence
  source 1..20: mol_type = other RNA
ataactgtactttatagatt

SEQ ID NO: 12818 - RNA, 20 nt, synthetic construct
  misc_feature 1..20: note = C9Orf72 TTCN PAM targeting sequence
  source 1..20: mol_type = other RNA
tgtggcagggtttatttctg

SEQ ID NO: 12819 - RNA, 20 nt, synthetic construct
  misc_feature 1..20: note = C9Orf72 TTCN PAM targeting sequence
  source 1..20: mol_type = other RNA
gaatatagaaatgttcaatt

SEQ ID NO: 12820 - RNA, 20 nt, synthetic construct
  misc_feature 1..20: note = C9Orf72 TTCN PAM targeting sequence
  source 1..20: mol_type = other RNA
gaaataaaccctgccacacg

SEQ ID NO: 12821 - RNA, 20 nt, synthetic construct
  misc_feature 1..20: note = C9Orf72 TTCN PAM targeting sequence
  source 1..20: mol_type = other RNA
atattcagaaataaaccctg

SEQ ID NO: 12822 - RNA, 20 nt, synthetic construct
  misc_feature 1..20: note = C9Orf72 TTCN PAM targeting sequence
  source 1..20: mol_type = other RNA
attcatcatgcaaaaatttt

SEQ ID NO: 12823 - RNA, 20 nt, synthetic construct
  misc_feature 1..20: note = C9Orf72 TTCN PAM targeting sequence
  source 1..20: mol_type = other RNA
tcatgcaaaaatttttacat

SEQ ID NO: 12824 - RNA, 20 nt, synthetic construct
  misc_feature 1..20: note = C9Orf72 TTCN PAM targeting sequence
  source 1..20: mol_type = other RNA
ctatcccaagtttattttat

SEQ ID NO: 12825 - RNA, 20 nt, synthetic construct
  misc_feature 1..20: note = C9Orf72 TTCN PAM targeting sequence
  source 1..20: mol_type = other RNA
taaaatccaaattataaggc

SEQ ID NO: 12826 - RNA, 20 nt, synthetic construct
  misc_feature 1..20: note = C9Orf72 TTCN PAM targeting sequence
  source 1..20: mol_type = other RNA
tccttttgagaaaactgtag

SEQ ID NO: 12827 - RNA, 20 nt, synthetic construct
  misc_feature 1..20: note = C9Orf72 TTCN PAM targeting sequence
  source 1..20: mol_type = other RNA
caaaaggaggaaaataggag

SEQ ID NO: 12828 - RNA, 20 nt, synthetic construct
  misc_feature 1..20: note = C9Orf72 TTCN PAM targeting sequence
  source 1..20: mol_type = other RNA
ctacagttttctcaaaagga

SEQ ID NO: 12829 - RNA, 20 nt, synthetic construct
  misc_feature 1..20: note = C9Orf72 TTCN PAM targeting sequence
  source 1..20: mol_type = other RNA
caaatgtattggcctcatgt

SEQ ID NO: 12830 - RNA, 20 nt, synthetic construct
  misc_feature 1..20: note = C9Orf72 TTCN PAM targeting sequence
  source 1..20: mol_type = other RNA
ttcttcccttgcatgtaaac

SEQ ID NO: 12831 - RNA, 20 nt, synthetic construct
  misc_feature 1..20: note = C9Orf72 TTCN PAM targeting sequence
  source 1..20: mol_type = other RNA
tcccttgcatgtaaaccttg

SEQ ID NO: 12832 - RNA, 20 nt, synthetic construct
  misc_feature 1..20: note = C9Orf72 TTCN PAM targeting sequence
  source 1..20: mol_type = other RNA
cttgcatgtaaaccttgtag

SEQ ID NO: 12833 - RNA, 20 nt, synthetic construct
  misc_feature 1..20: note = C9Orf72 TTCN PAM targeting sequence
  source 1..20: mol_type = other RNA
aatatttgcatgtcaaacac

SEQ ID NO: 12834 - RNA, 20 nt, synthetic construct
  misc_feature 1..20: note = C9Orf72 TTCN PAM targeting sequence
  source 1..20: mol_type = other RNA
cactggcctcttggcttttt

SEQ ID NO: 12835 - RNA, 20 nt, synthetic construct
  misc_feature 1..20: note = C9Orf72 TTCN PAM targeting sequence
  source 1..20: mol_type = other RNA
gggcaaaggccttactaagg

SEQ ID NO: 12836 - RNA, 20 nt, synthetic construct
  misc_feature 1..20: note = C9Orf72 TTCN PAM targeting sequence
  source 1..20: mol_type = other RNA
cagttttcagggcaaaggcc

SEQ ID NO: 12837 - RNA, 20 nt, synthetic construct
  misc_feature 1..20: note = C9Orf72 TTCN PAM targeting sequence
  source 1..20: mol_type = other RNA
cagcatgtttattgtggtcg

SEQ ID NO: 12838 - RNA, 20 nt, synthetic construct
  misc_feature 1..20: note = C9Orf72 TTCN PAM targeting sequence
  source 1..20: mol_type = other RNA
gtactgaaaaaaaacaggtg

SEQ ID NO: 12839 - RNA, 20 nt, synthetic construct
  misc_feature 1..20: note = C9Orf72 TTCN PAM targeting sequence
  source 1..20: mol_type = other RNA
gtacagaaataattgtgctt

SEQ ID NO: 12840 - RNA, 20 nt, synthetic construct
  misc_feature 1..20: note = C9Orf72 TTCN PAM targeting sequence
  source 1..20: mol_type = other RNA
agcattttgccccctcagtg

SEQ ID NO: 12841 - RNA, 20 nt, synthetic construct
  misc_feature 1..20: note = C9Orf72 TTCN PAM targeting sequence
  source 1..20: mol_type = other RNA
atctataagctcatatgtgt

SEQ ID NO: 12842 - RNA, 20 nt, synthetic construct
  misc_feature 1..20: note = C9Orf72 TTCN PAM targeting sequence
  source 1..20: mol_type = other RNA
ctccaatacattttcccctt

SEQ ID NO: 12843 - RNA, 20 nt, synthetic construct
  misc_feature 1..20: note = C9Orf72 TTCN PAM targeting sequence
  source 1..20: mol_type = other RNA
ccttgatgctatgccttctt

SEQ ID NO: 12844 - RNA, 20 nt, synthetic construct
  misc_feature 1..20: note = C9Orf72 TTCN PAM targeting sequence
  source 1..20: mol_type = other RNA
ttttgtttttaaaagcagtc

SEQ ID NO: 12845 - RNA, 20 nt, synthetic construct
  misc_feature 1..20: note = C9Orf72 TTCN PAM targeting sequence
  source 1..20: mol_type = other RNA
cttctcatacttcttcctgt

SEQ ID NO: 12846 - RNA, 20 nt, synthetic construct
  misc_feature 1..20: note = C9Orf72 TTCN PAM targeting sequence
  source 1..20: mol_type = other RNA
catacttcttcctgtgctta

SEQ ID NO: 12847 - RNA, 20 nt, synthetic construct
  misc_feature 1..20: note = C9Orf72 TTCN PAM targeting sequence
  source 1..20: mol_type = other RNA
tcctgtgcttataggcaagg

SEQ ID NO: 12848 - RNA, 20 nt, synthetic construct
  misc_feature 1..20: note = C9Orf72 TTCN PAM targeting sequence
  source 1..20: mol_type = other RNA
tgtgcttataggcaagggac

SEQ ID NO: 12849 - RNA, 20 nt, synthetic construct
  misc_feature 1..20: note = C9Orf72 TTCN PAM targeting sequence
  source 1..20: mol_type = other RNA
ctcagtctcctagtattaat

SEQ ID NO: 12850 - RNA, 20 nt, synthetic construct
  misc_feature 1..20: note = C9Orf72 TTCN PAM targeting sequence
  source 1..20: mol_type = other RNA
cctcagagggtacatctgtc

SEQ ID NO: 12851 - RNA, 20 nt, synthetic construct
  misc_feature 1..20: note = C9Orf72 TTCN PAM targeting sequence
  source 1..20: mol_type = other RNA
tcaattattgacagatgtac

SEQ ID NO: 12852 - RNA, 20 nt, synthetic construct
  misc_feature 1..20: note = C9Orf72 TTCN PAM targeting sequence
  source 1..20: mol_type = other RNA
tgggtaaatgagctgtttct

SEQ ID NO: 12853 - RNA, 20 nt, synthetic construct
  misc_feature 1..20: note = C9Orf72 TTCN PAM targeting sequence
  source 1..20: mol_type = other RNA
tgggacattataaatcatat

SEQ ID NO: 12854 - RNA, 20 nt, synthetic construct
  misc_feature 1..20: note = C9Orf72 TTCN PAM targeting sequence
  source 1..20: mol_type = other RNA
aaatatgatttataatgtcc

SEQ ID NO: 12855 - RNA, 20 nt, synthetic construct
  misc_feature 1..20: note = C9Orf72 TTCN PAM targeting sequence
  source 1..20: mol_type = other RNA
agctgcttttgaagtctcga

SEQ ID NO: 12856 - RNA, 20 nt, synthetic construct
  misc_feature 1..20: note = C9Orf72 TTCN PAM targeting sequence
  source 1..20: mol_type = other RNA
aaagcagcttgaaaataaac

SEQ ID NO: 12857 - RNA, 20 nt, synthetic construct
  misc_feature 1..20: note = C9Orf72 TTCN PAM targeting sequence
  source 1..20: mol_type = other RNA
gttagcacagcatcgagact

SEQ ID NO: 12858 - RNA, 20 nt, synthetic construct
  misc_feature 1..20: note = C9Orf72 TTCN PAM targeting sequence
  source 1..20: mol_type = other RNA
gttcagttagcacagcatcg

SEQ ID NO: 12859 - RNA, 20 nt, synthetic construct
  misc_feature 1..20: note = C9Orf72 TTCN PAM targeting sequence
  source 1..20: mol_type = other RNA
tgttgcctcagagggtataa

SEQ ID NO: 12860 - RNA, 20 nt, synthetic construct
  misc_feature 1..20: note = C9Orf72 TTCN PAM targeting sequence
  source 1..20: mol_type = other RNA
agaaggaaattgcctgagta

SEQ ID NO: 12861 - RNA, 20 nt, synthetic construct
  misc_feature 1..20: note = C9Orf72 TTCN PAM targeting sequence
  source 1..20: mol_type = other RNA
ggaagacccttgccaaactt

SEQ ID NO: 12862 - RNA, 20 nt, synthetic construct
  misc_feature 1..20: note = C9Orf72 TTCN PAM targeting sequence
  source 1..20: mol_type = other RNA
ttctggaagacccttgccaa

SEQ ID NO: 12863 - RNA, 20 nt, synthetic construct
  misc_feature 1..20: note = C9Orf72 TTCN PAM targeting sequence
  source 1..20: mol_type = other RNA
acagatgagggaactgaggc

SEQ ID NO: 12864 - RNA, 20 nt, synthetic construct
  misc_feature 1..20: note = C9Orf72 TTCN PAM targeting sequence
  source 1..20: mol_type = other RNA
ctcatctgtagaaattgtag

SEQ ID NO: 12865 - RNA, 20 nt, synthetic construct
  misc_feature 1..20: note = C9Orf72 TTCN PAM targeting sequence
  source 1..20: mol_type = other RNA
gagcctcagttccctcatct

SEQ ID NO: 12866 - RNA, 20 nt, synthetic construct
  misc_feature 1..20: note = C9Orf72 TTCN PAM targeting sequence
  source 1..20: mol_type = other RNA
atgcactcagagagcaagtg

SEQ ID NO: 12867 - RNA, 20 nt, synthetic construct
  misc_feature 1..20: note = C9Orf72 TTCN PAM targeting sequence
  source 1..20: mol_type = other RNA
ggtgatctctatgtatttgg

SEQ ID NO: 12868 - RNA, 20 nt, synthetic construct
  misc_feature 1..20: note = C9Orf72 TTCN PAM targeting sequence
  source 1..20: mol_type = other RNA
attttttaggaggttgaaaa

SEQ ID NO: 12869 - RNA, 20 nt, synthetic construct
  misc_feature 1..20: note = C9Orf72 TTCN PAM targeting sequence
  source 1..20: mol_type = other RNA
acctcctaaaaaatagaaaa

SEQ ID NO: 12870 - RNA, 20 nt, synthetic construct
  misc_feature 1..20: note = C9Orf72 TTCN PAM targeting sequence
  source 1..20: mol_type = other RNA
gaacattatagttcagattt

SEQ ID NO: 12871 - RNA, 20 nt, synthetic construct
  misc_feature 1..20: note = C9Orf72 TTCN PAM targeting sequence
  source 1..20: mol_type = other RNA
gaaaaattacagtgattttt

SEQ ID NO: 12872 - RNA, 20 nt, synthetic construct
  misc_feature 1..20: note = C9Orf72 TTCN PAM targeting sequence
  source 1..20: mol_type = other RNA
gatttcaaagacaaaatgtt

SEQ ID NO: 12873 - RNA, 20 nt, synthetic construct
  misc_feature 1..20: note = C9Orf72 TTCN PAM targeting sequence
  source 1..20: mol_type = other RNA
aagacaaaatgttaagagtg

SEQ ID NO: 12874 - RNA, 20 nt, synthetic construct
  misc_feature 1..20: note = C9Orf72 TTCN PAM targeting sequence
  source 1..20: mol_type = other RNA
gaataattattttagagata

SEQ ID NO: 12875 - RNA, 20 nt, synthetic construct
  misc_feature 1..20: note = C9Orf72 TTCN PAM targeting sequence
  source 1..20: mol_type = other RNA
gaatgagcttttaaaaatgg

SEQ ID NO: 12876 - RNA, 20 nt, synthetic construct
  misc_feature 1..20: note = C9Orf72 TTCN PAM targeting sequence
  source 1..20: mol_type = other RNA
taatatcagcccttgagttc

SEQ ID NO: 12877 - RNA, 20 nt, synthetic construct
  misc_feature 1..20: note = C9Orf72 TTCN PAM targeting sequence
  source 1..20: mol_type = other RNA
agttattcacaatattggct

SEQ ID NO: 12878 - RNA, 20 nt, synthetic construct
  misc_feature 1..20: note = C9Orf72 TTCN PAM targeting sequence
  source 1..20: mol_type = other RNA
caatattggctgctgctcat

SEQ ID NO: 12879 - RNA, 20 nt, synthetic construct
  misc_feature 1..20: note = C9Orf72 TTCN PAM targeting sequence
  source 1..20: mol_type = other RNA
aaaatgagcagcagccaata

SEQ ID NO: 12880 - RNA, 20 nt, synthetic construct
  misc_feature 1..20: note = C9Orf72 TTCN PAM targeting sequence
  source 1..20: mol_type = other RNA
aatgaaaagatagactatga

SEQ ID NO: 12881 - RNA, 20 nt, synthetic construct
  misc_feature 1..20: note = C9Orf72 TTCN PAM targeting sequence
  source 1..20: mol_type = other RNA
ttagaaagttcaaaaatgag

SEQ ID NO: 12882 - RNA, 20 nt, synthetic construct
  misc_feature 1..20: note = C9Orf72 TTCN PAM targeting sequence
  source 1..20: mol_type = other RNA
tagtctatcttttcattaga

SEQ ID NO: 12883 - RNA, 20 nt, synthetic construct
  misc_feature 1..20: note = C9Orf72 TTCN PAM targeting sequence
  source 1..20: mol_type = other RNA
atctctcctaattgtcaggg

SEQ ID NO: 12884 - RNA, 20 nt, synthetic construct
  misc_feature 1..20: note = C9Orf72 TTCN PAM targeting sequence
  source 1..20: mol_type = other RNA
aatctagtgtatatttgccc

SEQ ID NO: 12885 - RNA, 20 nt, synthetic construct
  misc_feature 1..20: note = C9Orf72 TTCN PAM targeting sequence
  source 1..20: mol_type = other RNA
ttcaaatctagtgtatattt

SEQ ID NO: 12886 - RNA, 20 nt, synthetic construct
  misc_feature 1..20: note = C9Orf72 TTCN PAM targeting sequence
  source 1..20: mol_type = other RNA
ttctttcaaatctagtgtat

SEQ ID NO: 12887 - RNA, 20 nt, synthetic construct
  misc_feature 1..20: note = C9Orf72 TTCN PAM targeting sequence
  source 1..20: mol_type = other RNA
atatatacataaacaaatta

SEQ ID NO: 12888 - RNA, 20 nt, synthetic construct
  misc_feature 1..20: note = C9Orf72 TTCN PAM targeting sequence
  source 1..20: mol_type = other RNA
atgatgtcactcagtcactt

SEQ ID NO: 12889 - RNA, 20 nt, synthetic construct
  misc_feature 1..20: note = C9Orf72 TTCN PAM targeting sequence
  source 1..20: mol_type = other RNA
caatgacattaatctttcca

SEQ ID NO: 12890 - RNA, 20 nt, synthetic construct
  misc_feature 1..20: note = C9Orf72 TTCN PAM targeting sequence
  source 1..20: mol_type = other RNA
tagaaatgaaaggtatggct

SEQ ID NO: 12891 - RNA, 20 nt, synthetic construct
  misc_feature 1..20: note = C9Orf72 TTCN PAM targeting sequence
  source 1..20: mol_type = other RNA
aggaactatgagtaacatta

SEQ ID NO: 12892 - RNA, 20 nt, synthetic construct
  misc_feature 1..20: note = C9Orf72 TTCN PAM targeting sequence
  source 1..20: mol_type = other RNA
tttctaggaactatgagtaa

SEQ ID NO: 12893 - RNA, 20 nt, synthetic construct
  misc_feature 1..20: note = C9Orf72 TTCN PAM targeting sequence
  source 1..20: mol_type = other RNA
tcctgtgaccctgtggcaag

SEQ ID NO: 12894 - RNA, 20 nt, synthetic construct
  misc_feature 1..20: note = C9Orf72 GTCN PAM targeting sequence
  source 1..20: mol_type = other RNA
catagaaagctgcaggtcta

SEQ ID NO: 12895 - RNA, 20 nt, synthetic construct
  misc_feature 1..20: note = C9Orf72 GTCN PAM targeting sequence
  source 1..20: mol_type = other RNA
acggtttaaactcaggtcta

SEQ ID NO: 12896 - RNA, 20 nt, synthetic construct
  misc_feature 1..20: note = C9Orf72 GTCN PAM targeting sequence
  source 1..20: mol_type = other RNA
atctgaccgcaaaggcttgc

SEQ ID NO: 12897 - RNA, 20 nt, synthetic construct
  misc_feature 1..20: note = C9Orf72 GTCN PAM targeting sequence
  source 1..20: mol_type = other RNA
gatagacctgagtttaaacc

SEQ ID NO: 12898 - RNA, 20 nt, synthetic construct
  misc_feature 1..20: note = C9Orf72 GTCN PAM targeting sequence
  source 1..20: mol_type = other RNA
tatgaatatgcaatcggata

SEQ ID NO: 12899 - RNA, 20 nt, synthetic construct
  misc_feature 1..20: note = C9Orf72 GTCN PAM targeting sequence
  source 1..20: mol_type = other RNA
attaatatatgccagtatta

SEQ ID NO: 12900 - RNA, 20 nt, synthetic construct
  misc_feature 1..20: note = C9Orf72 GTCN PAM targeting sequence
  source 1..20: mol_type = other RNA
ttcatgaattttcaaaatgc

SEQ ID NO: 12901 - RNA, 20 nt, synthetic construct
  misc_feature 1..20: note = C9Orf72 GTCN PAM targeting sequence
  source 1..20: mol_type = other RNA
ggataaagaaaaaaatctgg

SEQ ID NO: 12902 - RNA, 20 nt, synthetic construct
  misc_feature 1..20: note = C9Orf72 GTCN PAM targeting sequence
  source 1..20: mol_type = other RNA
atactctctcagtggcataa

SEQ ID NO: 12903 - RNA, 20 nt, synthetic construct
  misc_feature 1..20: note = C9Orf72 GTCN PAM targeting sequence
  source 1..20: mol_type = other RNA
tctctgaaactgttactctg

SEQ ID NO: 12904 - RNA, 20 nt, synthetic construct
  misc_feature 1..20: note = C9Orf72 GTCN PAM targeting sequence
  source 1..20: mol_type = other RNA
ctgagatgcaggataaaaac

SEQ ID NO: 12905 - RNA, 20 nt, synthetic construct
  misc_feature 1..20: note = C9Orf72 GTCN PAM targeting sequence
  source 1..20: mol_type = other RNA
ttcctgatgtttctgatctg

SEQ ID NO: 12906 - RNA, 20 nt, synthetic construct
  misc_feature 1..20: note = C9Orf72 GTCN PAM targeting sequence
  source 1..20: mol_type = other RNA
tgcagagctttgaaggatgg

SEQ ID NO: 12907 - RNA, 20 nt, synthetic construct
  misc_feature 1..20: note = C9Orf72 GTCN PAM targeting sequence
  source 1..20: mol_type = other RNA
ccaggaactttctcagaagc

SEQ ID NO: 12908 - RNA, 20 nt, synthetic construct
  misc_feature 1..20: note = C9Orf72 GTCN PAM targeting sequence
  source 1..20: mol_type = other RNA
ctcggtttcatttgttttaa

SEQ ID NO: 12909 - RNA, 20 nt, synthetic construct
  misc_feature 1..20: note = C9Orf72 GTCN PAM targeting sequence
  source 1..20: mol_type = other RNA
ctggttctccactgtcaaca

SEQ ID NO: 12910 - RNA, 20 nt, synthetic construct
  misc_feature 1..20: note = C9Orf72 GTCN PAM targeting sequence
  source 1..20: mol_type = other RNA
acaaaacaaattccatcctc

SEQ ID NO: 12911 - RNA, 20 nt, synthetic construct
  misc_feature 1..20: note = C9Orf72 GTCN PAM targeting sequence
  source 1..20: mol_type = other RNA
aagaaagaggacccatcgcc

SEQ ID NO: 12912 - RNA, 20 nt, synthetic construct
  misc_feature 1..20: note = C9Orf72 GTCN PAM targeting sequence
  source 1..20: mol_type = other RNA
tctttctttgacaggcttca

SEQ ID NO: 12913 - RNA, 20 nt, synthetic construct
  misc_feature 1..20: note = C9Orf72 GTCN PAM targeting sequence
  source 1..20: mol_type = other RNA
agtttgcctggctggtgtgg

SEQ ID NO: 12914 - RNA, 20 nt, synthetic construct
  misc_feature 1..20: note = C9Orf72 GTCN PAM targeting sequence
  source 1..20: mol_type = other RNA
ccaactggccagtttctagt

SEQ ID NO: 12915 - RNA, 20 nt, synthetic construct
  misc_feature 1..20: note = C9Orf72 GTCN PAM targeting sequence
  source 1..20: mol_type = other RNA
aaatttgccaggcagagaag

SEQ ID NO: 12916 - RNA, 20 nt, synthetic construct
  misc_feature 1..20: note = C9Orf72 GTCN PAM targeting sequence
  source 1..20: mol_type = other RNA
gctcctttcttgggtatctc

SEQ ID NO: 12917 - RNA, 20 nt, synthetic construct
  misc_feature 1..20: note = C9Orf72 GTCN PAM targeting sequence
  source 1..20: mol_type = other RNA
tttcagcaatatcacatttg

SEQ ID NO: 12918 - RNA, 20 nt, synthetic construct
  misc_feature 1..20: note = C9Orf72 GTCN PAM targeting sequence
  source 1..20: mol_type = other RNA
cccggaaaaggccgtcaaag

SEQ ID NO: 12919 - RNA, 20 nt, synthetic construct
  misc_feature 1..20: note = C9Orf72 GTCN PAM targeting sequence
  source 1..20: mol_type = other RNA
aagggtattgcacgtttcac

SEQ ID NO: 12920 - RNA, 20 nt, synthetic construct
  misc_feature 1..20: note = C9Orf72 GTCN PAM targeting sequence
  source 1..20: mol_type = other RNA
cagctaccggccccgtgccc

SEQ ID NO: 12921 - RNA, 20 nt, synthetic construct
  misc_feature 1..20: note = C9Orf72 GTCN PAM targeting sequence
  source 1..20: mol_type = other RNA
gccccatctccactcagatg

SEQ ID NO: 12922 - RNA, 20 nt, synthetic construct
  misc_feature 1..20: note = C9Orf72 GTCN PAM targeting sequence
  source 1..20: mol_type = other RNA
catctgagtggagatggggc

SEQ ID NO: 12923 - RNA, 20 nt, synthetic construct
  misc_feature 1..20: note = C9Orf72 GTCN PAM targeting sequence
  source 1..20: mol_type = other RNA
acccccagcccagccagaaa

SEQ ID NO: 12924 - RNA, 20 nt, synthetic construct
  misc_feature 1..20: note = C9Orf72 GTCN PAM targeting sequence
  source 1..20: mol_type = other RNA
gaaagagggctttctggaag

SEQ ID NO: 12925 - RNA, 20 nt, synthetic construct
  misc_feature 1..20: note = C9Orf72 GTCN PAM targeting sequence
  source 1..20: mol_type = other RNA
cacaaattccacttcttaga

SEQ ID NO: 12926 - RNA, 20 nt, synthetic construct
  misc_feature 1..20: note = C9Orf72 GTCN PAM targeting sequence
  source 1..20: mol_type = other RNA
ctaagaagtggaatttgtga

SEQ ID NO: 12927 - RNA, 20 nt, synthetic construct
  misc_feature 1..20: note = C9Orf72 GTCN PAM targeting sequence
  source 1..20: mol_type = other RNA
gtgttctcaatccacagcca

SEQ ID NO: 12928 - RNA, 20 nt, synthetic construct
  misc_feature 1..20: note = C9Orf72 GTCN PAM targeting sequence
  source 1..20: mol_type = other RNA
atgccaaggtttcacggccc

SEQ ID NO: 12929 - RNA, 20 nt, synthetic construct
  misc_feature 1..20: note = C9Orf72 GTCN PAM targeting sequence
  source 1..20: mol_type = other RNA
tcagctcctgccagcactca

SEQ ID NO: 12930 - RNA, 20 nt, synthetic construct
  misc_feature 1..20: note = C9Orf72 GTCN PAM targeting sequence
  source 1..20: mol_type = other RNA
ctctggactgggtagttttc

SEQ ID NO: 12931 - RNA, 20 nt, synthetic construct
  misc_feature 1..20: note = C9Orf72 GTCN PAM targeting sequence
  source 1..20: mol_type = other RNA
agagggacttgcttttgcta

SEQ ID NO: 12932 - RNA, 20 nt, synthetic construct
  misc_feature 1..20: note = C9Orf72 GTCN PAM targeting sequence
  source 1..20: mol_type = other RNA
catcctcatcactcctccaa

SEQ ID NO: 12933 - RNA, 20 nt, synthetic construct
  misc_feature 1..20: note = C9Orf72 GTCN PAM targeting sequence
  source 1..20: mol_type = other RNA
aagaggatttcaaatgggcc

SEQ ID NO: 12934 - RNA, 20 nt, synthetic construct
  misc_feature 1..20: note = C9Orf72 GTCN PAM targeting sequence
  source 1..20: mol_type = other RNA
acagtccaagaggatttcaa

SEQ ID NO: 12935 - RNA, 20 nt, synthetic construct
  misc_feature 1..20: note = C9Orf72 GTCN PAM targeting sequence
  source 1..20: mol_type = other RNA
ctgtctacagtccaagagga

SEQ ID NO: 12936 - RNA, 20 nt, synthetic construct
  misc_feature 1..20: note = C9Orf72 GTCN PAM targeting sequence
  source 1..20: mol_type = other RNA
tggcgctatgagaggcatgg

SEQ ID NO: 12937 - RNA, 20 nt, synthetic construct
  misc_feature 1..20: note = C9Orf72 GTCN PAM targeting sequence
  source 1..20: mol_type = other RNA
aaagaatcccaaggcaaggg

SEQ ID NO: 12938 - RNA, 20 nt, synthetic construct
  misc_feature 1..20: note = C9Orf72 GTCN PAM targeting sequence
  source 1..20: mol_type = other RNA
agtttgaagggctcagaatt

SEQ ID NO: 12939 - RNA, 20 nt, synthetic construct
  misc_feature 1..20: note = C9Orf72 GTCN PAM targeting sequence
  source 1..20: mol_type = other RNA
tagaggtaacagccacatga

SEQ ID NO: 12940 - RNA, 20 nt, synthetic construct
  misc_feature 1..20: note = C9Orf72 GTCN PAM targeting sequence
  source 1..20: mol_type = other RNA
tcaacagcactggctggaaa

SEQ ID NO: 12941 - RNA, 20 nt, synthetic construct
  misc_feature 1..20: note = C9Orf72 GTCN PAM targeting sequence
  source 1..20: mol_type = other RNA
tcaacttcccatgacttgca

SEQ ID NO: 12942 - RNA, 20 nt, synthetic construct
  misc_feature 1..20: note = C9Orf72 GTCN PAM targeting sequence
  source 1..20: mol_type = other RNA
tgggaagttgaggacttgat

SEQ ID NO: 12943 - RNA, 20 nt, synthetic construct
  misc_feature 1..20: note = C9Orf72 GTCN PAM targeting sequence
  source 1..20: mol_type = other RNA
ttgcaagtcatgggaagttg

SEQ ID NO: 12944 - RNA, 20 nt, synthetic construct
  misc_feature 1..20: note = C9Orf72 GTCN PAM targeting sequence
  source 1..20: mol_type = other RNA
gtggccttgcatacaccttg

SEQ ID NO: 12945 - RNA, 20 nt, synthetic construct
  misc_feature 1..20: note = C9Orf72 GTCN PAM targeting sequence
  source 1..20: mol_type = other RNA
cccacctacgtggcttgtaa

SEQ ID NO: 12946 - RNA, 20 nt, synthetic construct
  misc_feature 1..20: note = C9Orf72 GTCN PAM targeting sequence
  source 1..20: mol_type = other RNA
gaaggagagccagctgccag

SEQ ID NO: 12947 - RNA, 20 nt, synthetic construct
  misc_feature 1..20: note = C9Orf72 GTCN PAM targeting sequence
  source 1..20: mol_type = other RNA
gacttcaaggaagacccatg

SEQ ID NO: 12948 - RNA, 20 nt, synthetic construct
  misc_feature 1..20: note = C9Orf72 GTCN PAM targeting sequence
  source 1..20: mol_type = other RNA
gacactcaccttcaaagcag

SEQ ID NO: 12949 - RNA, 20 nt, synthetic construct
  misc_feature 1..20: note = C9Orf72 GTCN PAM targeting sequence
  source 1..20: mol_type = other RNA
tccttgaagtcagacactca

SEQ ID NO: 12950 - RNA, 20 nt, synthetic construct
  misc_feature 1..20: note = C9Orf72 GTCN PAM targeting sequence
  source 1..20: mol_type = other RNA
atgtggcaaagcgggaaccg

SEQ ID NO: 12951 - RNA, 20 nt, synthetic construct
  misc_feature 1..20: note = C9Orf72 GTCN PAM targeting sequence
  source 1..20: mol_type = other RNA
ctgtcgggaccacagctgtc

SEQ ID NO: 12952 - RNA, 20 nt, synthetic construct
  misc_feature 1..20: note = C9Orf72 GTCN PAM targeting sequence
  source 1..20: mol_type = other RNA
ggaccacagctgtccaaacg

SEQ ID NO: 12953 - RNA, 20 nt, synthetic construct
  misc_feature 1..20: note = C9Orf72 GTCN PAM targeting sequence
  source 1..20: mol_type = other RNA
cgacagcgacacagtggcct

SEQ ID NO: 12954 - RNA, 20 nt, synthetic construct
  misc_feature 1..20: note = C9Orf72 GTCN PAM targeting sequence
  source 1..20: mol_type = other RNA
aaacgaggctggctccccac

SEQ ID NO: 12955 - RNA, 20 nt, synthetic construct
  misc_feature 1..20: note = C9Orf72 GTCN PAM targeting sequence
  source 1..20: mol_type = other RNA
ttcccctggagttgccaagg

SEQ ID NO: 12956 - RNA, 20 nt, synthetic construct
  misc_feature 1..20: note = C9Orf72 GTCN PAM targeting sequence
  source 1..20: mol_type = other RNA
gggtgggaggggtccttccc

SEQ ID NO: 12957 - RNA, 20 nt, synthetic construct
  misc_feature 1..20: note = C9Orf72 GTCN PAM targeting sequence
  source 1..20: mol_type = other RNA
accggagtcggggtgggagg

SEQ ID NO: 12958 - RNA, 20 nt, synthetic construct
  misc_feature 1..20: note = C9Orf72 GTCN PAM targeting sequence
  source 1..20: mol_type = other RNA
tgccccaggaggccccactt

SEQ ID NO: 12959 - RNA, 20 nt, synthetic construct
  misc_feature 1..20: note = C9Orf72 GTCN PAM targeting sequence
  source 1..20: mol_type = other RNA
agggctgcttaatctgcttt

SEQ ID NO: 12960 - RNA, 20 nt, synthetic construct
  misc_feature 1..20: note = C9Orf72 GTCN PAM targeting sequence
  source 1..20: mol_type = other RNA
gggaaagcagattaagcagc

SEQ ID NO: 12961 - RNA, 20 nt, synthetic construct
  misc_feature 1..20: note = C9Orf72 GTCN PAM targeting sequence
  source 1..20: mol_type = other RNA
ccctgccatgcactccccct

SEQ ID NO: 12962 - RNA, 20 nt, synthetic construct
  misc_feature 1..20: note = C9Orf72 GTCN PAM targeting sequence
  source 1..20: mol_type = other RNA
cctgagcctagggggagtgc

SEQ ID NO: 12963 - RNA, 20 nt, synthetic construct
  misc_feature 1..20: note = C9Orf72 GTCN PAM targeting sequence
  source 1..20: mol_type = other RNA
agctggtggagcttcctgcc

SEQ ID NO: 12964 - RNA, 20 nt, synthetic construct
  misc_feature 1..20: note = C9Orf72 GTCN PAM targeting sequence
  source 1..20: mol_type = other RNA
ctttaccctcctctgaaaac

SEQ ID NO: 12965 - RNA, 20 nt, synthetic construct
  misc_feature 1..20: note = C9Orf72 GTCN PAM targeting sequence
  source 1..20: mol_type = other RNA
atggtggaatccttaggcga

SEQ ID NO: 12966 - RNA, 20 nt, synthetic construct
  misc_feature 1..20: note = C9Orf72 GTCN PAM targeting sequence
  source 1..20: mol_type = other RNA
gtttcagagcatctgggaga

SEQ ID NO: 12967 - RNA, 20 nt, synthetic construct
  misc_feature 1..20: note = C9Orf72 GTCN PAM targeting sequence
  source 1..20: mol_type = other RNA
gcccctactggaattctctc

SEQ ID NO: 12968 - RNA, 20 nt, synthetic construct
  misc_feature 1..20: note = C9Orf72 GTCN PAM targeting sequence
  source 1..20: mol_type = other RNA
caagagtcagagtgaacaag

SEQ ID NO: 12969 - RNA, 20 nt, synthetic construct
  misc_feature 1..20: note = C9Orf72 GTCN PAM targeting sequence
  source 1..20: mol_type = other RNA
gagtgaacaagatggggcag

SEQ ID NO: 12970 - RNA, 20 nt, synthetic construct
  misc_feature 1..20: note = C9Orf72 GTCN PAM targeting sequence
  source 1..20: mol_type = other RNA
tgtgttccgaatggagtagt

SEQ ID NO: 12971 - RNA, 20 nt, synthetic construct
  misc_feature 1..20: note = C9Orf72 GTCN PAM targeting sequence
  source 1..20: mol_type = other RNA
agcattgagcacagtgcctg

SEQ ID NO: 12972 - RNA, 20 nt, synthetic construct
  misc_feature 1..20: note = C9Orf72 GTCN PAM targeting sequence
  source 1..20: mol_type = other RNA
tatggggtatgtggtatcat

SEQ ID NO: 12973 - RNA, 20 nt, synthetic construct
  misc_feature 1..20: note = C9Orf72 GTCN PAM targeting sequence
  source 1..20: mol_type = other RNA
actatatcctgagccatcgt

SEQ ID NO: 12974 - RNA, 20 nt, synthetic construct
  misc_feature 1..20: note = C9Orf72 GTCN PAM targeting sequence
  source 1..20: mol_type = other RNA
ctgaatcagcggctgtacca

SEQ ID NO: 12975 - RNA, 20 nt, synthetic construct
  misc_feature 1..20: note = C9Orf72 GTCN PAM targeting sequence
  source 1..20: mol_type = other RNA
ctactcccgtggcccatgct

SEQ ID NO: 12976 - RNA, 20 nt, synthetic construct
  misc_feature 1..20: note = C9Orf72 GTCN PAM targeting sequence
  source 1..20: mol_type = other RNA
tgccagccgagtccctactc

SEQ ID NO: 12977 - RNA, 20 nt, synthetic construct
  misc_feature 1..20: note = C9Orf72 GTCN PAM targeting sequence
  source 1..20: mol_type = other RNA
gaattcttataaagcaggca

SEQ ID NO: 12978 - RNA, 20 nt, synthetic construct
  misc_feature 1..20: note = C9Orf72 GTCN PAM targeting sequence
  source 1..20: mol_type = other RNA
acaaaaatatttttaaaatt

SEQ ID NO: 12979 - RNA, 20 nt, synthetic construct
  misc_feature 1..20: note = C9Orf72 GTCN PAM targeting sequence
  source 1..20: mol_type = other RNA
ggcctgccttgtttctattt

SEQ ID NO: 12980 - RNA, 20 nt, synthetic construct
  misc_feature 1..20: note = C9Orf72 GTCN PAM targeting sequence
  source 1..20: mol_type = other RNA
gtaatgtgggctgttgttta

SEQ ID NO: 12981 - RNA, 20 nt, synthetic construct
  misc_feature 1..20: note = C9Orf72 GTCN PAM targeting sequence
  source 1..20: mol_type = other RNA
ctttatgtaaacatattcag

SEQ ID NO: 12982 - RNA, 20 nt, synthetic construct
  misc_feature 1..20: note = C9Orf72 GTCN PAM targeting sequence
  source 1..20: mol_type = other RNA
ttataagaaacaatgtaaat

SEQ ID NO: 12983 - RNA, 20 nt, synthetic construct
  misc_feature 1..20: note = C9Orf72 GTCN PAM targeting sequence
  source 1..20: mol_type = other RNA
gtaacccatctcctgtggtt

SEQ ID NO: 12984 - RNA, 20 nt, synthetic construct
  misc_feature 1..20: note = C9Orf72 GTCN PAM targeting sequence
  source 1..20: mol_type = other RNA
ctgtatctctgcagatcccc

SEQ ID NO: 12985 - RNA, 20 nt, synthetic construct
  misc_feature 1..20: note = C9Orf72 GTCN PAM targeting sequence
  source 1..20: mol_type = other RNA
tgctctgtggatccacctac

SEQ ID NO: 12986 - RNA, 20 nt, synthetic construct
  misc_feature 1..20: note = C9Orf72 GTCN PAM targeting sequence
  source 1..20: mol_type = other RNA
ttcccacctgtatcaacctg

SEQ ID NO: 12987 - RNA, 20 nt, synthetic construct
  misc_feature 1..20: note = C9Orf72 GTCN PAM targeting sequence
  source 1..20: mol_type = other RNA
catcagtgcatcagccaggt

SEQ ID NO: 12988 - RNA, 20 nt, synthetic construct
  misc_feature 1..20: note = C9Orf72 GTCN PAM targeting sequence
  source 1..20: mol_type = other RNA
gagcagaaatcaggttggat

SEQ ID NO: 12989 - RNA, 20 nt, synthetic construct
  misc_feature 1..20: note = C9Orf72 GTCN PAM targeting sequence
  source 1..20: mol_type = other RNA
ctttgagcagaaatcacagg

SEQ ID NO: 12990 - RNA, 20 nt, synthetic construct
  misc_feature 1..20: note = C9Orf72 GTCN PAM targeting sequence
  source 1..20: mol_type = other RNA
gagatctcagtgtcgctttg

SEQ ID NO: 12991 - RNA, 20 nt, synthetic construct
  misc_feature 1..20: note = C9Orf72 GTCN PAM targeting sequence
  source 1..20: mol_type = other RNA
gcacagttggcaggagtctg

SEQ ID NO: 12992 - RNA, 20 nt, synthetic construct
  misc_feature 1..20: note = C9Orf72 GTCN PAM targeting sequence
  source 1..20: mol_type = other RNA
gcctccctccttctcatacc

SEQ ID NO: 12993 - RNA, 20 nt, synthetic construct
  misc_feature 1..20: note = C9Orf72 GTCN PAM targeting sequence
  source 1..20: mol_type = other RNA
gcgcagctggattggtttct

SEQ ID NO: 12994 - RNA, 20 nt, synthetic construct
  misc_feature 1..20: note = C9Orf72 GTCN PAM targeting sequence
  source 1..20: mol_type = other RNA
ccctttgctcatcccagaac

SEQ ID NO: 12995 - RNA, 20 nt, synthetic construct
  misc_feature 1..20: note = C9Orf72 GTCN PAM targeting sequence
  source 1..20: mol_type = other RNA
tgtggcctttctatcaggag

SEQ ID NO: 12996 - RNA, 20 nt, synthetic construct
  misc_feature 1..20: note = C9Orf72 GTCN PAM targeting sequence
  source 1..20: mol_type = other RNA
gaataaataaaactctggtg

SEQ ID NO: 12997 - RNA, 20 nt, synthetic construct
  misc_feature 1..20: note = C9Orf72 GTCN PAM targeting sequence
  source 1..20: mol_type = other RNA
ttaagagttgcccccattaa

SEQ ID NO: 12998 - RNA, 20 nt, synthetic construct
  misc_feature 1..20: note = C9Orf72 GTCN PAM targeting sequence
  source 1..20: mol_type = other RNA
ttttggagggagtattctga

SEQ ID NO: 12999 - RNA, 20 nt, synthetic construct
  misc_feature 1..20: note = C9Orf72 GTCN PAM targeting sequence
  source 1..20: mol_type = other RNA
ctaaaggaagaatttacctc

SEQ ID NO: 13000 - RNA, 20 nt, synthetic construct
  misc_feature 1..20: note = C9Orf72 GTCN PAM targeting sequence
  source 1..20: mol_type = other RNA
tgtggtgaattcagctaggc

SEQ ID NO: 13001 - RNA, 20 nt, synthetic construct
  misc_feature 1..20: note = C9Orf72 GTCN PAM targeting sequence
  source 1..20: mol_type = other RNA
tattaagcaatggcaagctc

SEQ ID NO: 13002 - RNA, 20 nt, synthetic construct
  misc_feature 1..20: note = C9Orf72 GTCN PAM targeting sequence
  source 1..20: mol_type = other RNA
gatgaaaacatatggggaat

SEQ ID NO: 13003 - RNA, 20 nt, synthetic construct
  misc_feature 1..20: note = C9Orf72 GTCN PAM targeting sequence
  source 1..20: mol_type = other RNA
gtagtttctaagcagtctca

SEQ ID NO: 13004 - RNA, 20 nt, synthetic construct
  misc_feature 1..20: note = C9Orf72 GTCN PAM targeting sequence
  source 1..20: mol_type = other RNA
cactcctttggtaggaacaa

SEQ ID NO: 13005 - RNA, 20 nt, synthetic construct
  misc_feature 1..20: note = C9Orf72 GTCN PAM targeting sequence
  source 1..20: mol_type = other RNA
atttactccatcaaaataac

SEQ ID NO: 13006 - RNA, 20 nt, synthetic construct
  misc_feature 1..20: note = C9Orf72 GTCN PAM targeting sequence
  source 1..20: mol_type = other RNA
aacttctagcaagagatctc

SEQ ID NO: 13007 - RNA, 20 nt, synthetic construct
  misc_feature 1..20: note = C9Orf72 GTCN PAM targeting sequence
  source 1..20: mol_type = other RNA
cgtgagagcctcaggagctg

SEQ ID NO: 13008 - RNA, 20 nt, synthetic construct
  misc_feature 1..20: note = C9Orf72 GTCN PAM targeting sequence
  source 1..20: mol_type = other RNA
ccactttgtgcccgactctg

SEQ ID NO: 13009 - RNA, 20 nt, synthetic construct
  misc_feature 1..20: note = C9Orf72 GTCN PAM targeting sequence
  source 1..20: mol_type = other RNA
ggcacaaagtggtgaccagc

SEQ ID NO: 13010 - RNA, 20 nt, synthetic construct
  misc_feature 1..20: note = C9Orf72 GTCN PAM targeting sequence
  source 1..20: mol_type = other RNA
ctgactctcaggtctatggg

SEQ ID NO: 13011 - RNA, 20 nt, synthetic construct
  misc_feature 1..20: note = C9Orf72 GTCN PAM targeting sequence
  source 1..20: mol_type = other RNA
gtgacagagtcgggcacaaa

SEQ ID NO: 13012 - RNA, 20 nt, synthetic construct
  misc_feature 1..20: note = C9Orf72 GTCN PAM targeting sequence
  source 1..20: mol_type = other RNA
atggggtggccattatgctt

SEQ ID NO: 13013 - RNA, 20 nt, synthetic construct
  misc_feature 1..20: note = C9Orf72 GTCN PAM targeting sequence
  source 1..20: mol_type = other RNA
ctaacctttccaagtttcag

SEQ ID NO: 13014 - RNA, 20 nt, synthetic construct
  misc_feature 1..20: note = C9Orf72 GTCN PAM targeting sequence
  source 1..20: mol_type = other RNA
ctgatatagaaaaaaagata

SEQ ID NO: 13015 - RNA, 20 nt, synthetic construct
  misc_feature 1..20: note = C9Orf72 GTCN PAM targeting sequence
  source 1..20: mol_type = other RNA
ttttctggtccctgatatag

SEQ ID NO: 13016 - RNA, 20 nt, synthetic construct
  misc_feature 1..20: note = C9Orf72 GTCN PAM targeting sequence
  source 1..20: mol_type = other RNA
aatccagtccacacctgttt

SEQ ID NO: 13017 - RNA, 20 nt, synthetic construct
  misc_feature 1..20: note = C9Orf72 GTCN PAM targeting sequence
  source 1..20: mol_type = other RNA
acacctgtttttgtatggcc

SEQ ID NO: 13018 - RNA, 20 nt, synthetic construct
  misc_feature 1..20: note = C9Orf72 GTCN PAM targeting sequence
  source 1..20: mol_type = other RNA
taaaatattctttctttttt

SEQ ID NO: 13019 - RNA, 20 nt, synthetic construct
  misc_feature 1..20: note = C9Orf72 GTCN PAM targeting sequence
  source 1..20: mol_type = other RNA
ataaacaagttttattggag

SEQ ID NO: 13020 - RNA, 20 nt, synthetic construct
  misc_feature 1..20: note = C9Orf72 GTCN PAM targeting sequence
  source 1..20: mol_type = other RNA
ctcagctctgccatggaagt

SEQ ID NO: 13021 - RNA, 20 nt, synthetic construct
  misc_feature 1..20: note = C9Orf72 GTCN PAM targeting sequence
  source 1..20: mol_type = other RNA
cagtcgctcagctctgccat

SEQ ID NO: 13022 - RNA, 20 nt, synthetic construct
  misc_feature 1..20: note = C9Orf72 GTCN PAM targeting sequence
  source 1..20: mol_type = other RNA
tttcagaaaagctggctgac

SEQ ID NO: 13023 - RNA, 20 nt, synthetic construct
  misc_feature 1..20: note = C9Orf72 GTCN PAM targeting sequence
  source 1..20: mol_type = other RNA
gccagcttttctgaaaagac

SEQ ID NO: 13024 - RNA, 20 nt, synthetic construct
  misc_feature 1..20: note = C9Orf72 GTCN PAM targeting sequence
  source 1..20: mol_type = other RNA
caccatgccaataccatgac

SEQ ID NO: 13025 - RNA, 20 nt, synthetic construct
  misc_feature 1..20: note = C9Orf72 GTCN PAM targeting sequence
  source 1..20: mol_type = other RNA
tggtattggcatggtgcgac

SEQ ID NO: 13026 - RNA, 20 nt, synthetic construct
  misc_feature 1..20: note = C9Orf72 GTCN PAM targeting sequence
  source 1..20: mol_type = other RNA
cactggtcatggtattggca

SEQ ID NO: 13027 - RNA, 20 nt, synthetic construct
  misc_feature 1..20: note = C9Orf72 GTCN PAM targeting sequence
  source 1..20: mol_type = other RNA
aaactagagagtctcactgg

SEQ ID NO: 13028 - RNA, 20 nt, synthetic construct
  misc_feature 1..20: note = C9Orf72 GTCN PAM targeting sequence
  source 1..20: mol_type = other RNA
gttttggaaaggcagcttgg

SEQ ID NO: 13029 - RNA, 20 nt, synthetic construct
  misc_feature 1..20: note = C9Orf72 GTCN PAM targeting sequence
  source 1..20: mol_type = other RNA
aatatttatttaatctataa

SEQ ID NO: 13030 - RNA, 20 nt, synthetic construct
  misc_feature 1..20: note = C9Orf72 GTCN PAM targeting sequence
  source 1..20: mol_type = other RNA
agtcttctgtcttgggagaa

SEQ ID NO: 13031 - RNA, 20 nt, synthetic construct
  misc_feature 1..20: note = C9Orf72 GTCN PAM targeting sequence
  source 1..20: mol_type = other RNA
tctgtcttgggagaacaatg

SEQ ID NO: 13032 - RNA, 20 nt, synthetic construct
  misc_feature 1..20: note = C9Orf72 GTCN PAM targeting sequence
  source 1..20: mol_type = other RNA
tgggagaacaatgatgttac

SEQ ID NO: 13033 - RNA, 20 nt, synthetic construct
  misc_feature 1..20: note = C9Orf72 GTCN PAM targeting sequence
  source 1..20: mol_type = other RNA
cttagaactaaacccctctc

SEQ ID NO: 13034 - RNA, 20 nt, synthetic construct
  misc_feature 1..20: note = C9Orf72 GTCN PAM targeting sequence
  source 1..20: mol_type = other RNA
ccctttccctcgtctccctc

SEQ ID NO: 13035 - RNA, 20 nt, synthetic construct
  misc_feature 1..20: note = C9Orf72 GTCN PAM targeting sequence
  source 1..20: mol_type = other RNA
ccctctccctctccccggtc

SEQ ID NO: 13036 - RNA, 20 nt, synthetic construct
  misc_feature 1..20: note = C9Orf72 GTCN PAM targeting sequence
  source 1..20: mol_type = other RNA
ccctctgatgccaccaaagt

SEQ ID NO: 13037 - RNA, 20 nt, synthetic construct
  misc_feature 1..20: note = C9Orf72 GTCN PAM targeting sequence
  source 1..20: mol_type = other RNA
agccttggctttcacaactt

SEQ ID NO: 13038 - RNA, 20 nt, synthetic construct
  misc_feature 1..20: note = C9Orf72 GTCN PAM targeting sequence
  source 1..20: mol_type = other RNA
tcagtgtgagcctgcttcta

SEQ ID NO: 13039 - RNA, 20 nt, synthetic construct
  misc_feature 1..20: note = C9Orf72 GTCN PAM targeting sequence
  source 1..20: mol_type = other RNA
tgggggatggacttctaggg

SEQ ID NO: 13040 - RNA, 20 nt, synthetic construct
  misc_feature 1..20: note = C9Orf72 GTCN PAM targeting sequence
  source 1..20: mol_type = other RNA
atcccccaagactgcacttc

SEQ ID NO: 13041 - RNA, 20 nt, synthetic construct
  misc_feature 1..20: note = C9Orf72 GTCN PAM targeting sequence
  source 1..20: mol_type = other RNA
agccaaggtgttgcgtgtag

SEQ ID NO: 13042 - RNA, 20 nt, synthetic construct
  misc_feature 1..20: note = C9Orf72 GTCN PAM targeting sequence
  source 1..20: mol_type = other RNA
gtaagcttatacttgcttac

SEQ ID NO: 13043 - RNA, 20 nt, synthetic construct
  misc_feature 1..20: note = C9Orf72 GTCN PAM targeting sequence
  source 1..20: mol_type = other RNA
tacaagctccattcatggca

SEQ ID NO: 13044 - RNA, 20 nt, synthetic construct
  misc_feature 1..20: note = C9Orf72 GTCN PAM targeting sequence
  source 1..20: mol_type = other RNA
ttaggcaactttgccataat

SEQ ID NO: 13045 - RNA, 20 nt, synthetic construct
  misc_feature 1..20: note = C9Orf72 GTCN PAM targeting sequence
  source 1..20: mol_type = other RNA
cataatgatgggaatacatt

SEQ ID NO: 13046 - RNA, 20 nt, synthetic construct
  misc_feature 1..20: note = C9Orf72 GTCN PAM targeting sequence
  source 1..20: mol_type = other RNA
tgtgtcacataatgatggga

SEQ ID NO: 13047 - RNA, 20 nt, synthetic construct
  misc_feature 1..20: note = C9Orf72 GTCN PAM targeting sequence
  source 1..20: mol_type = other RNA
ttctacagaagtacagtcat

SEQ ID NO: 13048 - RNA, 20 nt, synthetic construct
  misc_feature 1..20: note = C9Orf72 GTCN PAM targeting sequence
  source 1..20: mol_type = other RNA
agccaactatctacactttc

SEQ ID NO: 13049 - RNA, 20 nt, synthetic construct
  misc_feature 1..20: note = C9Orf72 GTCN PAM targeting sequence
  source 1..20: mol_type = other RNA
gatttcttaagcaatgagca

SEQ ID NO: 13050 - RNA, 20 nt, synthetic construct
  misc_feature 1..20: note = C9Orf72 GTCN PAM targeting sequence
  source 1..20: mol_type = other RNA
gctacctctccaaagtgctc

SEQ ID NO: 13051 - RNA, 20 nt, synthetic construct
  misc_feature 1..20: note = C9Orf72 GTCN PAM targeting sequence
  source 1..20: mol_type = other RNA
aagaaaaacatcaccagttt

SEQ ID NO: 13052 - RNA, 20 nt, synthetic construct
  misc_feature 1..20: note = C9Orf72 GTCN PAM targeting sequence
  source 1..20: mol_type = other RNA
ctgtggtggtttaaaaatat

SEQ ID NO: 13053 - RNA, 20 nt, synthetic construct
  misc_feature 1..20: note = C9Orf72 GTCN PAM targeting sequence
  source 1..20: mol_type = other RNA
ggaactcctgaactcaagtg

SEQ ID NO: 13054 - RNA, 20 nt, synthetic construct
  misc_feature 1..20: note = C9Orf72 GTCN PAM targeting sequence
  source 1..20: mol_type = other RNA
cccacactggagtgcagtgg

SEQ ID NO: 13055 - RNA, 20 nt, synthetic construct
  misc_feature 1..20: note = C9Orf72 GTCN PAM targeting sequence
  source 1..20: mol_type = other RNA
tgctctgtcacccacactgg

SEQ ID NO: 13056 - RNA, 20 nt, synthetic construct
  misc_feature 1..20: note = C9Orf72 GTCN PAM targeting sequence
  source 1..20: mol_type = other RNA
atttctttctttcttttttt

SEQ ID NO: 13057 - RNA, 20 nt, synthetic construct
  misc_feature 1..20: note = C9Orf72 GTCN PAM targeting sequence
  source 1..20: mol_type = other RNA
agcccacactaaaggaaaat

SEQ ID NO: 13058 - RNA, 20 nt, synthetic construct
  misc_feature 1..20: note = C9Orf72 GTCN PAM targeting sequence
  source 1..20: mol_type = other RNA
gaagtgataacccaaccttc

SEQ ID NO: 13059 - RNA, 20 nt, synthetic construct
  misc_feature 1..20: note = C9Orf72 GTCN PAM targeting sequence
  source 1..20: mol_type = other RNA
gtagaagatacatggtgatt

SEQ ID NO: 13060 - RNA, 20 nt, synthetic construct
  misc_feature 1..20: note = C9Orf72 GTCN PAM targeting sequence
  source 1..20: mol_type = other RNA
ctgagaagcggacaattagg

SEQ ID NO: 13061 - RNA, 20 nt, synthetic construct
  misc_feature 1..20: note = C9Orf72 GTCN PAM targeting sequence
  source 1..20: mol_type = other RNA
gcttctcagagacaaacacc

SEQ ID NO: 13062 - RNA, 20 nt, synthetic construct
  misc_feature 1..20: note = C9Orf72 GTCN PAM targeting sequence
  source 1..20: mol_type = other RNA
aggcctaattgtccgcttct

SEQ ID NO: 13063 - RNA, 20 nt, synthetic construct
  misc_feature 1..20: note = C9Orf72 GTCN PAM targeting sequence
  source 1..20: mol_type = other RNA
tgctcatcctgcaagtctag

SEQ ID NO: 13064 - RNA, 20 nt, synthetic construct
  misc_feature 1..20: note = C9Orf72 GTCN PAM targeting sequence
  source 1..20: mol_type = other RNA
tcagcttaagtcctgctcat

SEQ ID NO: 13065 - RNA, 20 nt, synthetic construct
  misc_feature 1..20: note = C9Orf72 GTCN PAM targeting sequence
  source 1..20: mol_type = other RNA
tctcacccccaggccattgt

SEQ ID NO: 13066 - RNA, 20 nt, synthetic construct
  misc_feature 1..20: note = C9Orf72 GTCN PAM targeting sequence
  source 1..20: mol_type = other RNA
attggtccatttacacttag

SEQ ID NO: 13067 - RNA, 20 nt, synthetic construct
  misc_feature 1..20: note = C9Orf72 GTCN PAM targeting sequence
  source 1..20: mol_type = other RNA
atttacacttagatgcacaa

SEQ ID NO: 13068 - RNA, 20 nt, synthetic construct
  misc_feature 1..20: note = C9Orf72 GTCN PAM targeting sequence
  source 1..20: mol_type = other RNA
tattacattgtgcatctaag

SEQ ID NO: 13069 - RNA, 20 nt, synthetic construct
  misc_feature 1..20: note = C9Orf72 GTCN PAM targeting sequence
  source 1..20: mol_type = other RNA
gatatacaaaccaccagcaa

SEQ ID NO: 13070 - RNA, 20 nt, synthetic construct
  misc_feature 1..20: note = C9Orf72 GTCN PAM targeting sequence
  source 1..20: mol_type = other RNA
caggagcacttcctcctatg

SEQ ID NO: 13071 - RNA, 20 nt, synthetic construct
  misc_feature 1..20: note = C9Orf72 GTCN PAM targeting sequence
  source 1..20: mol_type = other RNA
cttgtgtggtctcaggagca

SEQ ID NO: 13072 - RNA, 20 nt, synthetic construct
  misc_feature 1..20: note = C9Orf72 GTCN PAM targeting sequence
  source 1..20: mol_type = other RNA
ctaggctaggtactgcctgt

SEQ ID NO: 13073 - RNA, 20 nt, synthetic construct
  misc_feature 1..20: note = C9Orf72 GTCN PAM targeting sequence
  source 1..20: mol_type = other RNA
caccacaataaaggcatgaa

SEQ ID NO: 13074 - RNA, 20 nt, synthetic construct
  misc_feature 1..20: note = C9Orf72 GTCN PAM targeting sequence
  source 1..20: mol_type = other RNA
agcgagtattaacttggggt

SEQ ID NO: 13075 - RNA, 20 nt, synthetic construct
  misc_feature 1..20: note = C9Orf72 GTCN PAM targeting sequence
  source 1..20: mol_type = other RNA
agaccacacatagcagccaa

SEQ ID NO: 13076 - RNA, 20 nt, synthetic construct
  misc_feature 1..20: note = C9Orf72 GTCN PAM targeting sequence
  source 1..20: mol_type = other RNA
agactagtttaaatttcccg

SEQ ID NO: 13077 - RNA, 20 nt, synthetic construct
  misc_feature 1..20: note = C9Orf72 GTCN PAM targeting sequence
  source 1..20: mol_type = other RNA
gtatggcttgatgcccatat

SEQ ID NO: 13078 - RNA, 20 nt, synthetic construct
  misc_feature 1..20: note = C9Orf72 GTCN PAM targeting sequence
  source 1..20: mol_type = other RNA
tcatgagcatttacatgaaa

SEQ ID NO: 13079 - RNA, 20 nt, synthetic construct
  misc_feature 1..20: note = C9Orf72 GTCN PAM targeting sequence
  source 1..20: mol_type = other RNA
cagcagggattaattcgtct

SEQ ID NO: 13080 - RNA, 20 nt, synthetic construct
  misc_feature 1..20: note = C9Orf72 GTCN PAM targeting sequence
  source 1..20: mol_type = other RNA
gtcacagcagggattaattc

SEQ ID NO: 13081 - RNA, 20 nt, synthetic construct
  misc_feature 1..20: note = C9Orf72 GTCN PAM targeting sequence
  source 1..20: mol_type = other RNA
ctgaccaacagctcccctaa

SEQ ID NO: 13082 - RNA, 20 nt, synthetic construct
  misc_feature 1..20: note = C9Orf72 GTCN PAM targeting sequence
  source 1..20: mol_type = other RNA
gagacaccaaatagtaattg

SEQ ID NO: 13083 - RNA, 20 nt, synthetic construct
  misc_feature 1..20: note = C9Orf72 GTCN PAM targeting sequence
  source 1..20: mol_type = other RNA
ccatgctgccacatgaggca

SEQ ID NO: 13084 - RNA, 20 nt, synthetic construct
  misc_feature 1..20: note = C9Orf72 GTCN PAM targeting sequence
  source 1..20: mol_type = other RNA
gagagaatgtcccacaatga

SEQ ID NO: 13085 - RNA, 20 nt, synthetic construct
  misc_feature 1..20: note = C9Orf72 GTCN PAM targeting sequence
  source 1..20: mol_type = other RNA
cacaatgatgaaaatgttca

SEQ ID NO: 13086 - RNA, 20 nt, synthetic construct
  misc_feature 1..20: note = C9Orf72 GTCN PAM targeting sequence
  source 1..20: mol_type = other RNA
agtggctattgtattggata

SEQ ID NO: 13087 - RNA, 20 nt, synthetic construct
  misc_feature 1..20: note = C9Orf72 GTCN PAM targeting sequence
  source 1..20: mol_type = other RNA
caagtggttggaaaagcctt

SEQ ID NO: 13088 - RNA, 20 nt, synthetic construct
  misc_feature 1..20: note = C9Orf72 GTCN PAM targeting sequence
  source 1..20: mol_type = other RNA
cttttctaatcagaaaaatc

SEQ ID NO: 13089 - RNA, 20 nt, synthetic construct
  misc_feature 1..20: note = C9Orf72 GTCN PAM targeting sequence
  source 1..20: mol_type = other RNA
caaacatgtgtcacttttct

SEQ ID NO: 13090 - RNA, 20 nt, synthetic construct
  misc_feature 1..20: note = C9Orf72 GTCN PAM targeting sequence
  source 1..20: mol_type = other RNA
acagatgataaaggaaatag

SEQ ID NO: 13091 - RNA, 20 nt, synthetic construct
  misc_feature 1..20: note = C9Orf72 GTCN PAM targeting sequence
  source 1..20: mol_type = other RNA
ctcatgggaaaattgctagc

SEQ ID NO: 13092 - RNA, 20 nt, synthetic construct
  misc_feature 1..20: note = C9Orf72 GTCN PAM targeting sequence
  source 1..20: mol_type = other RNA
gatttgtttcagggcctaaa

SEQ ID NO: 13093 - RNA, 20 nt, synthetic construct
  misc_feature 1..20: note = C9Orf72 GTCN PAM targeting sequence
  source 1..20: mol_type = other RNA
gagatgagatgtggtctgat

SEQ ID NO: 13094 - RNA, 20 nt, synthetic construct
  misc_feature 1..20: note = C9Orf72 GTCN PAM targeting sequence
  source 1..20: mol_type = other RNA
agagaacttttgcttctagt

SEQ ID NO: 13095 - RNA, 20 nt, synthetic construct
  misc_feature 1..20: note = C9Orf72 GTCN PAM targeting sequence
  source 1..20: mol_type = other RNA
tatttattcatcccttgttg

SEQ ID NO: 13096 - RNA, 20 nt, synthetic construct
  misc_feature 1..20: note = C9Orf72 GTCN PAM targeting sequence
  source 1..20: mol_type = other RNA
ctgccagtcctatttattca

SEQ ID NO: 13097 - RNA, 20 nt, synthetic construct
  misc_feature 1..20: note = C9Orf72 GTCN PAM targeting sequence
  source 1..20: mol_type = other RNA
attggaaaaatagcaaagaa

SEQ ID NO: 13098 - RNA, 20 nt, synthetic construct
  misc_feature 1..20: note = C9Orf72 GTCN PAM targeting sequence
  source 1..20: mol_type = other RNA
cctaaaatgatatctggcag

SEQ ID NO: 13099 - RNA, 20 nt, synthetic construct
  misc_feature 1..20: note = C9Orf72 GTCN PAM targeting sequence
  source 1..20: mol_type = other RNA
agggtggcatcggctgttgg

SEQ ID NO: 13100 - RNA, 20 nt, synthetic construct
  misc_feature 1..20: note = C9Orf72 GTCN PAM targeting sequence
  source 1..20: mol_type = other RNA
tctgaactggcaaagcccca

SEQ ID NO: 13101 - RNA, 20 nt, synthetic construct
  misc_feature 1..20: note = C9Orf72 GTCN PAM targeting sequence
  source 1..20: mol_type = other RNA
taaaaaaaaaaaaaaaaaaa

SEQ ID NO: 13102 - RNA, 20 nt, synthetic construct
  misc_feature 1..20: note = C9Orf72 GTCN PAM targeting sequence
  source 1..20: mol_type = other RNA
cgctgttgtgccccaggctg

SEQ ID NO: 13103 - RNA, 20 nt, synthetic construct
  misc_feature 1..20: note = C9Orf72 GTCN PAM targeting sequence
  source 1..20: mol_type = other RNA
ggtgcccataatcccagcta

SEQ ID NO: 13104 - RNA, 20 nt, synthetic construct
  misc_feature 1..20: note = C9Orf72 GTCN PAM targeting sequence
  source 1..20: mol_type = other RNA
ggaactcctgacctcaggtg

SEQ ID NO: 13105 - RNA, 20 nt, synthetic construct
  misc_feature 1..20: note = C9Orf72 GTCN PAM targeting sequence
  source 1..20: mol_type = other RNA
ggagttccagaccagcctgg

SEQ ID NO: 13106 - RNA, 20 nt, synthetic construct
  misc_feature 1..20: note = C9Orf72 GTCN PAM targeting sequence
  source 1..20: mol_type = other RNA
tggatgaaagatgacagggc

SEQ ID NO: 13107 - RNA, 20 nt, synthetic construct
  misc_feature 1..20: note = C9Orf72 GTCN PAM targeting sequence
  source 1..20: mol_type = other RNA
tctttcatccaagacaaccg

SEQ ID NO: 13108 - RNA, 20 nt, synthetic construct
  misc_feature 1..20: note = C9Orf72 GTCN PAM targeting sequence
  source 1..20: mol_type = other RNA
gcagccctgtcatctttcat

SEQ ID NO: 13109 - RNA, 20 nt, synthetic construct
  misc_feature 1..20: note = C9Orf72 GTCN PAM targeting sequence
  source 1..20: mol_type = other RNA
gtaatcttagtagtgaccca

SEQ ID NO: 13110 - RNA, 20 nt, synthetic construct
  misc_feature 1..20: note = C9Orf72 GTCN PAM targeting sequence
  source 1..20: mol_type = other RNA
ctactaagattactgaccta

SEQ ID NO: 13111 - RNA, 20 nt, synthetic construct
  misc_feature 1..20: note = C9Orf72 GTCN PAM targeting sequence
  source 1..20: mol_type = other RNA
ggctgggaggattctaggga

SEQ ID NO: 13112 - RNA, 20 nt, synthetic construct
  misc_feature 1..20: note = C9Orf72 GTCN PAM targeting sequence
  source 1..20: mol_type = other RNA
tttacaggtggggaaactga

SEQ ID NO: 13113 - RNA, 20 nt, synthetic construct
  misc_feature 1..20: note = C9Orf72 GTCN PAM targeting sequence
  source 1..20: mol_type = other RNA
gcttcacaggctgcagctct

SEQ ID NO: 13114 - RNA, 20 nt, synthetic construct
  misc_feature 1..20: note = C9Orf72 GTCN PAM targeting sequence
  source 1..20: mol_type = other RNA
acatcaagccttctggctga

SEQ ID NO: 13115 - RNA, 20 nt, synthetic construct
  misc_feature 1..20: note = C9Orf72 GTCN PAM targeting sequence
  source 1..20: mol_type = other RNA
ggcggcttccttggccttca

SEQ ID NO: 13116 - RNA, 20 nt, synthetic construct
  misc_feature 1..20: note = C9Orf72 GTCN PAM targeting sequence
  source 1..20: mol_type = other RNA
tttcaaaagccccacaatgg

SEQ ID NO: 13117 - RNA, 20 nt, synthetic construct
  misc_feature 1..20: note = C9Orf72 GTCN PAM targeting sequence
  source 1..20: mol_type = other RNA
tgacttgatcttaccattgc

SEQ ID NO: 13118 - RNA, 20 nt, synthetic construct
  misc_feature 1..20: note = C9Orf72 GTCN PAM targeting sequence
  source 1..20: mol_type = other RNA
ggactgtgaaaagaagcaga

SEQ ID NO: 13119 - RNA, 20 nt, synthetic construct
  misc_feature 1..20: note = C9Orf72 GTCN PAM targeting sequence
  source 1..20: mol_type = other RNA
gtgtattctggggcctggat

SEQ ID NO: 13120 - RNA, 20 nt, synthetic construct
  misc_feature 1..20: note = C9Orf72 GTCN PAM targeting sequence
  source 1..20: mol_type = other RNA
cataaaggcccagccacaag

SEQ ID NO: 13121 - RNA, 20 nt, synthetic construct
  misc_feature 1..20: note = C9Orf72 GTCN PAM targeting sequence
  source 1..20: mol_type = other RNA
tcaaattgttctaaaaagca

SEQ ID NO: 13122 - RNA, 20 nt, synthetic construct
  misc_feature 1..20: note = C9Orf72 GTCN PAM targeting sequence
  source 1..20: mol_type = other RNA
cacccccagtgtgtaggtgc

SEQ ID NO: 13123 - RNA, 20 nt, synthetic construct
  misc_feature 1..20: note = C9Orf72 GTCN PAM targeting sequence
  source 1..20: mol_type = other RNA
caccaaagtgcatgtcccac

SEQ ID NO: 13124 - RNA, 20 nt, synthetic construct
  misc_feature 1..20: note = C9Orf72 GTCN PAM targeting sequence
  source 1..20: mol_type = other RNA
ggccaggtaccatctgtaat

SEQ ID NO: 13125 - RNA, 20 nt, synthetic construct
  misc_feature 1..20: note = C9Orf72 GTCN PAM targeting sequence
  source 1..20: mol_type = other RNA
aggcagaaggatcacttgag

SEQ ID NO: 13126 - RNA, 20 nt, synthetic construct
  misc_feature 1..20: note = C9Orf72 GTCN PAM targeting sequence
  source 1..20: mol_type = other RNA
ggaactcctgagctcaagtg

SEQ ID NO: 13127 - RNA, 20 nt, synthetic construct
  misc_feature 1..20: note = C9Orf72 GTCN PAM targeting sequence
  source 1..20: mol_type = other RNA
cactacgtttcccaggctgg

SEQ ID NO: 13128 - RNA, 20 nt, synthetic construct
  misc_feature 1..20: note = C9Orf72 GTCN PAM targeting sequence
  source 1..20: mol_type = other RNA
ctacaaaaaatttaaaaatt

SEQ ID NO: 13129 - RNA, 20 nt, synthetic construct
  misc_feature 1..20: note = C9Orf72 GTCN PAM targeting sequence
  source 1..20: mol_type = other RNA
ccacacctggctaattttta

SEQ ID NO: 13130 - RNA, 20 nt, synthetic construct
  misc_feature 1..20: note = C9Orf72 GTCN PAM targeting sequence
  source 1..20: mol_type = other RNA
cccaggctggtgtgatcatg

SEQ ID NO: 13131 - RNA, 20 nt, synthetic construct
  misc_feature 1..20: note = C9Orf72 GTCN PAM targeting sequence
  source 1..20: mol_type = other RNA
cactctgtcacccaggctgg

SEQ ID NO: 13132 - RNA, 20 nt, synthetic construct
  misc_feature 1..20: note = C9Orf72 GTCN PAM targeting sequence
  source 1..20: mol_type = other RNA
caaaaaaaaaaaaaaaaaaa

SEQ ID NO: 13133 - RNA, 20 nt, synthetic construct
  misc_feature 1..20: note = C9Orf72 GTCN PAM targeting sequence
  source 1..20: mol_type = other RNA
agaggaactaacagattatc

SEQ ID NO: 13134 - RNA, 20 nt, synthetic construct
  misc_feature 1..20: note = C9Orf72 GTCN PAM targeting sequence
  source 1..20: mol_type = other RNA
tgcacatggtaagaattcca

SEQ ID NO: 13135 - RNA, 20 nt, synthetic construct
  misc_feature 1..20: note = C9Orf72 GTCN PAM targeting sequence
  source 1..20: mol_type = other RNA
gtcatatgatgatgtgggag

SEQ ID NO: 13136 - RNA, 20 nt, synthetic construct
  misc_feature 1..20: note = C9Orf72 GTCN PAM targeting sequence
  source 1..20: mol_type = other RNA
tatgatgatgtgggaggatg

SEQ ID NO: 13137 - RNA, 20 nt, synthetic construct
  misc_feature 1..20: note = C9Orf72 GTCN PAM targeting sequence
  source 1..20: mol_type = other RNA
ttttcattgttgctcctcat

SEQ ID NO: 13138 - RNA, 20 nt, synthetic construct
  misc_feature 1..20: note = C9Orf72 GTCN PAM targeting sequence
  source 1..20: mol_type = other RNA
ctagatttttctattttcct

SEQ ID NO: 13139 - RNA, 20 nt, synthetic construct
  misc_feature 1..20: note = C9Orf72 GTCN PAM targeting sequence
  source 1..20: mol_type = other RNA
atgagtgatagcaaaagaaa

SEQ ID NO: 13140 - RNA, 20 nt, synthetic construct
  misc_feature 1..20: note = C9Orf72 GTCN PAM targeting sequence
  source 1..20: mol_type = other RNA
agtagccaaatgcagttaaa

SEQ ID NO: 13141 - RNA, 20 nt, synthetic construct
  misc_feature 1..20: note = C9Orf72 GTCN PAM targeting sequence
  source 1..20: mol_type = other RNA
ccacccttgaagatttacag

SEQ ID NO: 13142 - RNA, 20 nt, synthetic construct
  misc_feature 1..20: note = C9Orf72 GTCN PAM targeting sequence
  source 1..20: mol_type = other RNA
aatgagtttacaaaatacta

SEQ ID NO: 13143 - RNA, 20 nt, synthetic construct
  misc_feature 1..20: note = C9Orf72 GTCN PAM targeting sequence
  source 1..20: mol_type = other RNA
gttttcactgaccatcactc

SEQ ID NO: 13144 - RNA, 20 nt, synthetic construct
  misc_feature 1..20: note = C9Orf72 GTCN PAM targeting sequence
  source 1..20: mol_type = other RNA
gtgaaaacagacttccttct

SEQ ID NO: 13145 - RNA, 20 nt, synthetic construct
  misc_feature 1..20: note = C9Orf72 GTCN PAM targeting sequence
  source 1..20: mol_type = other RNA
tgagtgatggtcagtgaaaa

SEQ ID NO: 13146 - RNA, 20 nt, synthetic construct
  misc_feature 1..20: note = C9Orf72 GTCN PAM targeting sequence
  source 1..20: mol_type = other RNA
tctagggtcttttccctcaa

SEQ ID NO: 13147 - RNA, 20 nt, synthetic construct
  misc_feature 1..20: note = C9Orf72 GTCN PAM targeting sequence
  source 1..20: mol_type = other RNA
tttccctcaacgtgtggtct

SEQ ID NO: 13148 - RNA, 20 nt, synthetic construct
  misc_feature 1..20: note = C9Orf72 GTCN PAM targeting sequence
  source 1..20: mol_type = other RNA
gggaaccagcagcatcgata

SEQ ID NO: 13149 - RNA, 20 nt, synthetic construct
  misc_feature 1..20: note = C9Orf72 GTCN PAM targeting sequence
  source 1..20: mol_type = other RNA
cctcctctcagatgtactga

SEQ ID NO: 13150 - RNA, 20 nt, synthetic construct
  misc_feature 1..20: note = C9Orf72 GTCN PAM targeting sequence
  source 1..20: mol_type = other RNA
gcatctcaaactttaatgtg

SEQ ID NO: 13151 - RNA, 20 nt, synthetic construct
  misc_feature 1..20: note = C9Orf72 GTCN PAM targeting sequence
  source 1..20: mol_type = other RNA
acacacacacacgtgcatca

SEQ ID NO: 13152 - RNA, 20 nt, synthetic construct
  misc_feature 1..20: note = C9Orf72 GTCN PAM targeting sequence
  source 1..20: mol_type = other RNA
aagcaccctgctataaggta

SEQ ID NO: 13153 - RNA, 20 nt, synthetic construct
  misc_feature 1..20: note = C9Orf72 GTCN PAM targeting sequence
  source 1..20: mol_type = other RNA
tggaccaaggtcacccaggg

SEQ ID NO: 13154 - RNA, 20 nt, synthetic construct
  misc_feature 1..20: note = C9Orf72 GTCN PAM targeting sequence
  source 1..20: mol_type = other RNA
aggaccttctcattctctct

SEQ ID NO: 13155 - RNA, 20 nt, synthetic construct
  misc_feature 1..20: note = C9Orf72 GTCN PAM targeting sequence
  source 1..20: mol_type = other RNA
cccaggggttagcaggtgca

SEQ ID NO: 13156 - RNA, 20 nt, synthetic construct
  misc_feature 1..20: note = C9Orf72 GTCN PAM targeting sequence
  source 1..20: mol_type = other RNA
cctcctgtctgtcctcccca

SEQ ID NO: 13157 - RNA, 20 nt, synthetic construct
  misc_feature 1..20: note = C9Orf72 GTCN PAM targeting sequence
  source 1..20: mol_type = other RNA
gtcctccccacctcacgaat

SEQ ID NO: 13158 - RNA, 20 nt, synthetic construct
  misc_feature 1..20: note = C9Orf72 GTCN PAM targeting sequence
  source 1..20: mol_type = other RNA
tccccacctcacgaatctct

SEQ ID NO: 13159 - RNA, 20 nt, synthetic construct
  misc_feature 1..20: note = C9Orf72 GTCN PAM targeting sequence
  source 1..20: mol_type = other RNA
tccccctgccctaatcagct

SEQ ID NO: 13160 - RNA, 20 nt, synthetic construct
  misc_feature 1..20: note = C9Orf72 GTCN PAM targeting sequence
  source 1..20: mol_type = other RNA
gcttttgttttcagtgaaag

SEQ ID NO: 13161 - RNA, 20 nt, synthetic construct
  misc_feature 1..20: note = C9Orf72 GTCN PAM targeting sequence
  source 1..20: mol_type = other RNA
gctgactccctggcagccaa

SEQ ID NO: 13162 - RNA, 20 nt, synthetic construct
  misc_feature 1..20: note = C9Orf72 GTCN PAM targeting sequence
  source 1..20: mol_type = other RNA
gctgacacaattaagctaat

SEQ ID NO: 13163 - RNA, 20 nt, synthetic construct
  misc_feature 1..20: note = C9Orf72 GTCN PAM targeting sequence
  source 1..20: mol_type = other RNA
cgtctgtgtctgtgtcagtg

SEQ ID NO: 13164 - RNA, 20 nt, synthetic construct
  misc_feature 1..20: note = C9Orf72 GTCN PAM targeting sequence
  source 1..20: mol_type = other RNA
gtgtctgtgtcagtgtgcca

SEQ ID NO: 13165 - RNA, 20 nt, synthetic construct
  misc_feature 1..20: note = C9Orf72 GTCN PAM targeting sequence
  source 1..20: mol_type = other RNA
gtgtcagtgtgccaggctcc

SEQ ID NO: 13166 - RNA, 20 nt, synthetic construct
  misc_feature 1..20: note = C9Orf72 GTCN PAM targeting sequence
  source 1..20: mol_type = other RNA
gtgtgccaggctccccctcc

SEQ ID NO: 13167 - RNA, 20 nt, synthetic construct
  misc_feature 1..20: note = C9Orf72 GTCN PAM targeting sequence
  source 1..20: mol_type = other RNA
ccagcagggagggggagcct

SEQ ID NO: 13168 - RNA, 20 nt, synthetic construct
  misc_feature 1..20: note = C9Orf72 GTCN PAM targeting sequence
  source 1..20: mol_type = other RNA
caatgggagccatgaggcaa

SEQ ID NO: 13169 - RNA, 20 nt, synthetic construct
  misc_feature 1..20: note = C9Orf72 GTCN PAM targeting sequence
  source 1..20: mol_type = other RNA
tcaccaggctagccagggtg

SEQ ID NO: 13170 - RNA, 20 nt, synthetic construct
  misc_feature 1..20: note = C9Orf72 GTCN PAM targeting sequence
  source 1..20: mol_type = other RNA
ccctggctagcctggtgaag

SEQ ID NO: 13171 - RNA, 20 nt, synthetic construct
  misc_feature 1..20: note = C9Orf72 GTCN PAM targeting sequence
  source 1..20: mol_type = other RNA
ccctatcaggcctctgagtg

SEQ ID NO: 13172 - RNA, 20 nt, synthetic construct
  misc_feature 1..20: note = C9Orf72 GTCN PAM targeting sequence
  source 1..20: mol_type = other RNA
tagtttgacagacaccaaga

SEQ ID NO: 13173 - RNA, 20 nt, synthetic construct
  misc_feature 1..20: note = C9Orf72 GTCN PAM targeting sequence
  source 1..20: mol_type = other RNA
aactaggacggttggtcacc

SEQ ID NO: 13174 - RNA, 20 nt, synthetic construct
  misc_feature 1..20: note = C9Orf72 GTCN PAM targeting sequence
  source 1..20: mol_type = other RNA
gtcaaactaggacggttggt

SEQ ID NO: 13175 - RNA, 20 nt, synthetic construct
  misc_feature 1..20: note = C9Orf72 GTCN PAM targeting sequence
  source 1..20: mol_type = other RNA
taggaaaactcttggtgtct

SEQ ID NO: 13176 - RNA, 20 nt, synthetic construct
  misc_feature 1..20: note = C9Orf72 GTCN PAM targeting sequence
  source 1..20: mol_type = other RNA
ggcaaaggataaccaaccct

SEQ ID NO: 13177 - RNA, 20 nt, synthetic construct
  misc_feature 1..20: note = C9Orf72 GTCN PAM targeting sequence
  source 1..20: mol_type = other RNA
ttctctgttccaaattccag

SEQ ID NO: 13178 - RNA, 20 nt, synthetic construct
  misc_feature 1..20: note = C9Orf72 GTCN PAM targeting sequence
  source 1..20: mol_type = other RNA
ttctctgtgagacctaaagc

SEQ ID NO: 13179 - RNA, 20 nt, synthetic construct
  misc_feature 1..20: note = C9Orf72 GTCN PAM targeting sequence
  source 1..20: mol_type = other RNA
cacagagaaagacgaggcct

SEQ ID NO: 13180 - RNA, 20 nt, synthetic construct
  misc_feature 1..20: note = C9Orf72 GTCN PAM targeting sequence
  source 1..20: mol_type = other RNA
tattttgcttttaatgtcta

SEQ ID NO: 13181 - RNA, 20 nt, synthetic construct
  misc_feature 1..20: note = C9Orf72 GTCN PAM targeting sequence
  source 1..20: mol_type = other RNA
attgctaatctgacaggatg

SEQ ID NO: 13182 - RNA, 20 nt, synthetic construct
  misc_feature 1..20: note = C9Orf72 GTCN PAM targeting sequence
  source 1..20: mol_type = other RNA
gattagcaatagacattaaa

SEQ ID NO: 13183 - RNA, 20 nt, synthetic construct
  misc_feature 1..20: note = C9Orf72 GTCN PAM targeting sequence
  source 1..20: mol_type = other RNA
caacatggaaatgggtaagt

SEQ ID NO: 13184 - RNA, 20 nt, synthetic construct
  misc_feature 1..20: note = C9Orf72 GTCN PAM targeting sequence
  source 1..20: mol_type = other RNA
gcatgcatgttctgagataa

SEQ ID NO: 13185 - RNA, 20 nt, synthetic construct
  misc_feature 1..20: note = C9Orf72 GTCN PAM targeting sequence
  source 1..20: mol_type = other RNA
ctctcttcaatacgcccctt

SEQ ID NO: 13186 - RNA, 20 nt, synthetic construct
  misc_feature 1..20: note = C9Orf72 GTCN PAM targeting sequence
  source 1..20: mol_type = other RNA
tttatattcccagccctcaa

SEQ ID NO: 13187 - RNA, 20 nt, synthetic construct
  misc_feature 1..20: note = C9Orf72 GTCN PAM targeting sequence
  source 1..20: mol_type = other RNA
actctttgagggctgggaat

SEQ ID NO: 13188 - RNA, 20 nt, synthetic construct
  misc_feature 1..20: note = C9Orf72 GTCN PAM targeting sequence
  source 1..20: mol_type = other RNA
ctcccatgggattgtcaact

SEQ ID NO: 13189 - RNA, 20 nt, synthetic construct
  misc_feature 1..20: note = C9Orf72 GTCN PAM targeting sequence
  source 1..20: mol_type = other RNA
acctagggaatcaatcgtta

SEQ ID NO: 13190 - RNA, 20 nt, synthetic construct
  misc_feature 1..20: note = C9Orf72 GTCN PAM targeting sequence
  source 1..20: mol_type = other RNA
taacgattgattccctaggt

SEQ ID NO: 13191 - RNA, 20 nt, synthetic construct
  misc_feature 1..20: note = C9Orf72 GTCN PAM targeting sequence
  source 1..20: mol_type = other RNA
tgggagctagggaagacaga

SEQ ID NO: 13192 - RNA, 20 nt, synthetic construct
  misc_feature 1..20: note = C9Orf72 GTCN PAM targeting sequence
  source 1..20: mol_type = other RNA
tccctagctcccatgacctc

SEQ ID NO: 13193 - RNA, 20 nt, synthetic construct
  misc_feature 1..20: note = C9Orf72 GTCN PAM targeting sequence
  source 1..20: mol_type = other RNA
ttgtctcacttagctaacat

SEQ ID NO: 13194 - RNA, 20 nt, synthetic construct
  misc_feature 1..20: note = C9Orf72 GTCN PAM targeting sequence
  source 1..20: mol_type = other RNA
cacttagctaacatttctta

SEQ ID NO: 13195 - RNA, 20 nt, synthetic construct
  misc_feature 1..20: note = C9Orf72 GTCN PAM targeting sequence
  source 1..20: mol_type = other RNA
cgtggaagtgcttaagaaat

SEQ ID NO: 13196 - RNA, 20 nt, synthetic construct
  misc_feature 1..20: note = C9Orf72 GTCN PAM targeting sequence
  source 1..20: mol_type = other RNA
agggttggaacccacagagt

SEQ ID NO: 13197 - RNA, 20 nt, synthetic construct
  misc_feature 1..20: note = C9Orf72 GTCN PAM targeting sequence
  source 1..20: mol_type = other RNA
aagacttttcttaggcactg

SEQ ID NO: 13198 - RNA, 20 nt, synthetic construct
  misc_feature 1..20: note = C9Orf72 GTCN PAM targeting sequence
  source 1..20: mol_type = other RNA
tagactctgtgggttccaac

SEQ ID NO: 13199 - RNA, 20 nt, synthetic construct
  misc_feature 1..20: note = C9Orf72 GTCN PAM targeting sequence
  source 1..20: mol_type = other RNA
gtatcatacagtgcctaaga

SEQ ID NO: 13200 - RNA, 20 nt, synthetic construct
  misc_feature 1..20: note = C9Orf72 GTCN PAM targeting sequence
  source 1..20: mol_type = other RNA
acgtgagacaaaagcaacaa

SEQ ID NO: 13201 - RNA, 20 nt, synthetic construct
  misc_feature 1..20: note = C9Orf72 GTCN PAM targeting sequence
  source 1..20: mol_type = other RNA
cacgtggactgagtatctac

SEQ ID NO: 13202 - RNA, 20 nt, synthetic construct
  misc_feature 1..20: note = C9Orf72 GTCN PAM targeting sequence
  source 1..20: mol_type = other RNA
cagagttccatactgtggaa

SEQ ID NO: 13203 - RNA, 20 nt, synthetic construct
  misc_feature 1..20: note = C9Orf72 GTCN PAM targeting sequence
  source 1..20: mol_type = other RNA
tgccttgggattccacagta

SEQ ID NO: 13204 - RNA, 20 nt, synthetic construct
  misc_feature 1..20: note = C9Orf72 GTCN PAM targeting sequence
  source 1..20: mol_type = other RNA
caccggtggcgtgggaactc

SEQ ID NO: 13205 - RNA, 20 nt, synthetic construct
  misc_feature 1..20: note = C9Orf72 GTCN PAM targeting sequence
  source 1..20: mol_type = other RNA
agccagtttcccttagaaca

SEQ ID NO: 13206 - RNA, 20 nt, synthetic construct
  misc_feature 1..20: note = C9Orf72 GTCN PAM targeting sequence
  source 1..20: mol_type = other RNA
ggcatttggcttcacattct

SEQ ID NO: 13207 - RNA, 20 nt, synthetic construct
  misc_feature 1..20: note = C9Orf72 GTCN PAM targeting sequence
  source 1..20: mol_type = other RNA
aaaatgggtgacatttatta

SEQ ID NO: 13208 - RNA, 20 nt, synthetic construct
  misc_feature 1..20: note = C9Orf72 GTCN PAM targeting sequence
  source 1..20: mol_type = other RNA
cccatttttgaccctcaaag

SEQ ID NO: 13209 - RNA, 20 nt, synthetic construct
  misc_feature 1..20: note = C9Orf72 GTCN PAM targeting sequence
  source 1..20: mol_type = other RNA
gaaaaatataaaataataaa

SEQ ID NO: 13210 - RNA, 20 nt, synthetic construct
  misc_feature 1..20: note = C9Orf72 GTCN PAM targeting sequence
  source 1..20: mol_type = other RNA
caaaaaaaaaaaaaaagaag

SEQ ID NO: 13211 - RNA, 20 nt, synthetic construct
  misc_feature 1..20: note = C9Orf72 GTCN PAM targeting sequence
  source 1..20: mol_type = other RNA
cgctcttttgcccaggccgg

SEQ ID NO: 13212 - RNA, 20 nt, synthetic construct
  misc_feature 1..20: note = C9Orf72 GTCN PAM targeting sequence
  source 1..20: mol_type = other RNA
ggcctgggcaaaagagcgag

SEQ ID NO: 13213 - RNA, 20 nt, synthetic construct
  misc_feature 1..20: note = C9Orf72 GTCN PAM targeting sequence
  source 1..20: mol_type = other RNA
cagccactcgggaggctgag

SEQ ID NO: 13214 - RNA, 20 nt, synthetic construct
  misc_feature 1..20: note = C9Orf72 GTCN PAM targeting sequence
  source 1..20: mol_type = other RNA
ctacgaaaaatacaaaaaaa

SEQ ID NO: 13215 - RNA, 20 nt, synthetic construct
  misc_feature 1..20: note = C9Orf72 GTCN PAM targeting sequence
  source 1..20: mol_type = other RNA
cgatctcctgacctcgtgat

SEQ ID NO: 13216 - RNA, 20 nt, synthetic construct
  misc_feature 1..20: note = C9Orf72 GTCN PAM targeting sequence
  source 1..20: mol_type = other RNA
ggagatcgagaccatcctgg

SEQ ID NO: 13217 - RNA, 20 nt, synthetic construct
  misc_feature 1..20: note = C9Orf72 GTCN PAM targeting sequence
  source 1..20: mol_type = other RNA
acacatttttatttgatttg

SEQ ID NO: 13218 - RNA, 20 nt, synthetic construct
  misc_feature 1..20: note = C9Orf72 GTCN PAM targeting sequence
  source 1..20: mol_type = other RNA
agtcaacacatttttatttg

SEQ ID NO: 13219 - RNA, 20 nt, synthetic construct
  misc_feature 1..20: note = C9Orf72 GTCN PAM targeting sequence
  source 1..20: mol_type = other RNA
actgttgaaatggtcatttc

SEQ ID NO: 13220 - RNA, 20 nt, synthetic construct
  misc_feature 1..20: note = C9Orf72 GTCN PAM targeting sequence
  source 1..20: mol_type = other RNA
tttcggcaatagcaatccac

SEQ ID NO: 13221 - RNA, 20 nt, synthetic construct
  misc_feature 1..20: note = C9Orf72 GTCN PAM targeting sequence
  source 1..20: mol_type = other RNA
attaagagtagattgtttat

SEQ ID NO: 13222 - RNA, 20 nt, synthetic construct
  misc_feature 1..20: note = C9Orf72 GTCN PAM targeting sequence
  source 1..20: mol_type = other RNA
gaacatatatatttgtttta

SEQ ID NO: 13223 - RNA, 20 nt, synthetic construct
  misc_feature 1..20: note = C9Orf72 GTCN PAM targeting sequence
  source 1..20: mol_type = other RNA
ggttaacctaattttctccc

SEQ ID NO: 13224 - RNA, 20 nt, synthetic construct
  misc_feature 1..20: note = C9Orf72 GTCN PAM targeting sequence
  source 1..20: mol_type = other RNA
aggatattgacatgtttgag

SEQ ID NO: 13225 - RNA, 20 nt, synthetic construct
  misc_feature 1..20: note = C9Orf72 GTCN PAM targeting sequence
  source 1..20: mol_type = other RNA
atatcctagacaagggcctc

SEQ ID NO: 13226 - RNA, 20 nt, synthetic construct
  misc_feature 1..20: note = C9Orf72 GTCN PAM targeting sequence
  source 1..20: mol_type = other RNA
cagaatggcctcaaacatgt

SEQ ID NO: 13227 - RNA, 20 nt, synthetic construct
  misc_feature 1..20: note = C9Orf72 GTCN PAM targeting sequence
  source 1..20: mol_type = other RNA
cagagtcacagaatggcctc

SEQ ID NO: 13228 - RNA, 20 nt, synthetic construct
  misc_feature 1..20: note = C9Orf72 GTCN PAM targeting sequence
  source 1..20: mol_type = other RNA
ttatgctttcaggcataaag

SEQ ID NO: 13229 - RNA, 20 nt, synthetic construct
  misc_feature 1..20: note = C9Orf72 GTCN PAM targeting sequence
  source 1..20: mol_type = other RNA
atttctcctttatgcctgaa

SEQ ID NO: 13230 - RNA, 20 nt, synthetic construct
  misc_feature 1..20: note = C9Orf72 GTCN PAM targeting sequence
  source 1..20: mol_type = other RNA
tggtgtttctgatcccttag

SEQ ID NO: 13231 - RNA, 20 nt, synthetic construct
  misc_feature 1..20: note = C9Orf72 GTCN PAM targeting sequence
  source 1..20: mol_type = other RNA
atggaaaataacttctccaa

SEQ ID NO: 13232 - RNA, 20 nt, synthetic construct
  misc_feature 1..20: note = C9Orf72 GTCN PAM targeting sequence
  source 1..20: mol_type = other RNA
tgttcaggtcaatggaaaat

SEQ ID NO: 13233 - RNA, 20 nt, synthetic construct
  misc_feature 1..20: note = C9Orf72 GTCN PAM targeting sequence
  source 1..20: mol_type = other RNA
tcatttacgtggcccttgtc

SEQ ID NO: 13234 - RNA, 20 nt, synthetic construct
  misc_feature 1..20: note = C9Orf72 GTCN PAM targeting sequence
  source 1..20: mol_type = other RNA
atctttcctctctgtccttg

SEQ ID NO: 13235 - RNA, 20 nt, synthetic construct
  misc_feature 1..20: note = C9Orf72 GTCN PAM targeting sequence
  source 1..20: mol_type = other RNA
ttgacattttctgaaattaa

SEQ ID NO: 13236 - RNA, 20 nt, synthetic construct
  misc_feature 1..20: note = C9Orf72 GTCN PAM targeting sequence
  source 1..20: mol_type = other RNA
aggacagagaggaaagatgg

SEQ ID NO: 13237 - RNA, 20 nt, synthetic construct
  misc_feature 1..20: note = C9Orf72 GTCN PAM targeting sequence
  source 1..20: mol_type = other RNA
taactcccttgagctgtttg

SEQ ID NO: 13238 - RNA, 20 nt, synthetic construct
  misc_feature 1..20: note = C9Orf72 GTCN PAM targeting sequence
  source 1..20: mol_type = other RNA
aactgcattcagagacaact

SEQ ID NO: 13239 - RNA, 20 nt, synthetic construct
  misc_feature 1..20: note = C9Orf72 GTCN PAM targeting sequence
  source 1..20: mol_type = other RNA
ctgaatgcagttggacaaat

SEQ ID NO: 13240 - RNA, 20 nt, synthetic construct
  misc_feature 1..20: note = C9Orf72 GTCN PAM targeting sequence
  source 1..20: mol_type = other RNA
tgctttgttccaggactact

SEQ ID NO: 13241 - RNA, 20 nt, synthetic construct
  misc_feature 1..20: note = C9Orf72 GTCN PAM targeting sequence
  source 1..20: mol_type = other RNA
tggaacaaagcaagactttt

SEQ ID NO: 13242 - RNA, 20 nt, synthetic construct
  misc_feature 1..20: note = C9Orf72 GTCN PAM targeting sequence
  source 1..20: mol_type = other RNA
ctccaggatcaacaaggccc

SEQ ID NO: 13243 - RNA, 20 nt, synthetic construct
  misc_feature 1..20: note = C9Orf72 GTCN PAM targeting sequence
  source 1..20: mol_type = other RNA
cacactaaccaccccaggcc

SEQ ID NO: 13244 - RNA, 20 nt, synthetic construct
  misc_feature 1..20: note = C9Orf72 GTCN PAM targeting sequence
  source 1..20: mol_type = other RNA
ggccctttccttcccatgaa

SEQ ID NO: 13245 - RNA, 20 nt, synthetic construct
  misc_feature 1..20: note = C9Orf72 GTCN PAM targeting sequence
  source 1..20: mol_type = other RNA
ctttgttcagagaacttaca

SEQ ID NO: 13246 - RNA, 20 nt, synthetic construct
  misc_feature 1..20: note = C9Orf72 GTCN PAM targeting sequence
  source 1..20: mol_type = other RNA
tatttagtcaagatgtgaat

SEQ ID NO: 13247 - RNA, 20 nt, synthetic construct
  misc_feature 1..20: note = C9Orf72 GTCN PAM targeting sequence
  source 1..20: mol_type = other RNA
agatgtgaatccatcatctc

SEQ ID NO: 13248 - RNA, 20 nt, synthetic construct
  misc_feature 1..20: note = C9Orf72 GTCN PAM targeting sequence
  source 1..20: mol_type = other RNA
ggcaaaaagctatcctttct

SEQ ID NO: 13249 - RNA, 20 nt, synthetic construct
  misc_feature 1..20: note = C9Orf72 GTCN PAM targeting sequence
  source 1..20: mol_type = other RNA
tggcatggaaggctgcatgt

SEQ ID NO: 13250 - RNA, 20 nt, synthetic construct
  misc_feature 1..20: note = C9Orf72 GTCN PAM targeting sequence
  source 1..20: mol_type = other RNA
ctgtactcagaaagttaatg

SEQ ID NO: 13251 - RNA, 20 nt, synthetic construct
  misc_feature 1..20: note = C9Orf72 GTCN PAM targeting sequence
  source 1..20: mol_type = other RNA
ggcattaactttctgagtac

SEQ ID NO: 13252 - RNA, 20 nt, synthetic construct
  misc_feature 1..20: note = C9Orf72 GTCN PAM targeting sequence
  source 1..20: mol_type = other RNA
taactgaaatagattgtata

SEQ ID NO: 13253 - RNA, 20 nt, synthetic construct
  misc_feature 1..20: note = C9Orf72 GTCN PAM targeting sequence
  source 1..20: mol_type = other RNA
aaatctaactccaaaccctt

SEQ ID NO: 13254 - RNA, 20 nt, synthetic construct
  misc_feature 1..20: note = C9Orf72 GTCN PAM targeting sequence
  source 1..20: mol_type = other RNA
tataataatccagacaaacc

SEQ ID NO: 13255 - RNA, 20 nt, synthetic construct
  misc_feature 1..20: note = C9Orf72 GTCN PAM targeting sequence
  source 1..20: mol_type = other RNA
ggattattataagactagtc

SEQ ID NO: 13256 - RNA, 20 nt, synthetic construct
  misc_feature 1..20: note = C9Orf72 GTCN PAM targeting sequence
  source 1..20: mol_type = other RNA
ggtattattgctgatggttt

SEQ ID NO: 13257 - RNA, 20 nt, synthetic construct
  misc_feature 1..20: note = C9Orf72 GTCN PAM targeting sequence
  source 1..20: mol_type = other RNA
caattattgattgcaaatca

SEQ ID NO: 13258 - RNA, 20 nt, synthetic construct
  misc_feature 1..20: note = C9Orf72 GTCN PAM targeting sequence
  source 1..20: mol_type = other RNA
gaaattttccagcttttaag

SEQ ID NO: 13259 - RNA, 20 nt, synthetic construct
  misc_feature 1..20: note = C9Orf72 GTCN PAM targeting sequence
  source 1..20: mol_type = other RNA
gaacactttctcaatgtggg

SEQ ID NO: 13260 - RNA, 20 nt, synthetic construct
  misc_feature 1..20: note = C9Orf72 GTCN PAM targeting sequence
  source 1..20: mol_type = other RNA
aaggataaccctggacctgg

SEQ ID NO: 13261 - RNA, 20 nt, synthetic construct
  misc_feature 1..20: note = C9Orf72 GTCN PAM targeting sequence
  source 1..20: mol_type = other RNA
agggttatccttggacacct

SEQ ID NO: 13262 - RNA, 20 nt, synthetic construct
  misc_feature 1..20: note = C9Orf72 GTCN PAM targeting sequence
  source 1..20: mol_type = other RNA
tgtgatgtagcttagtttct

SEQ ID NO: 13263 - RNA, 20 nt, synthetic construct
  misc_feature 1..20: note = C9Orf72 GTCN PAM targeting sequence
  source 1..20: mol_type = other RNA
gtttgcagaaactaagctac

SEQ ID NO: 13264 - RNA, 20 nt, synthetic construct
  misc_feature 1..20: note = C9Orf72 GTCN PAM targeting sequence
  source 1..20: mol_type = other RNA
gctcaccagttagactcaaa

SEQ ID NO: 13265 - RNA, 20 nt, synthetic construct
  misc_feature 1..20: note = C9Orf72 GTCN PAM targeting sequence
  source 1..20: mol_type = other RNA
aactggtgagcagactcctg

SEQ ID NO: 13266 - RNA, 20 nt, synthetic construct
  misc_feature 1..20: note = C9Orf72 GTCN PAM targeting sequence
  source 1..20: mol_type = other RNA
tgctttgagtctaactggtg

SEQ ID NO: 13267 - RNA, 20 nt, synthetic construct
  misc_feature 1..20: note = C9Orf72 GTCN PAM targeting sequence
  source 1..20: mol_type = other RNA
ctcttgaaggcctgatgaga

SEQ ID NO: 13268 - RNA, 20 nt, synthetic construct
  misc_feature 1..20: note = C9Orf72 GTCN PAM targeting sequence
  source 1..20: mol_type = other RNA
catcaggccttcaagagaga

SEQ ID NO: 13269 - RNA, 20 nt, synthetic construct
  misc_feature 1..20: note = C9Orf72 GTCN PAM targeting sequence
  source 1..20: mol_type = other RNA
ctgttgctcatgaagccttg

SEQ ID NO: 13270 - RNA, 20 nt, synthetic construct
  misc_feature 1..20: note = C9Orf72 GTCN PAM targeting sequence
  source 1..20: mol_type = other RNA
ggaacccgcatctgacagag

SEQ ID NO: 13271 - RNA, 20 nt, synthetic construct
  misc_feature 1..20: note = C9Orf72 GTCN PAM targeting sequence
  source 1..20: mol_type = other RNA
gatgcgggttcctgactgag

SEQ ID NO: 13272 - RNA, 20 nt, synthetic construct
  misc_feature 1..20: note = C9Orf72 GTCN PAM targeting sequence
  source 1..20: mol_type = other RNA
aaccacaactttctgatctc

SEQ ID NO: 13273 - RNA, 20 nt, synthetic construct
  misc_feature 1..20: note = C9Orf72 GTCN PAM targeting sequence
  source 1..20: mol_type = other RNA
accgaagcatttctgcatat

SEQ ID NO: 13274 - RNA, 20 nt, synthetic construct
  misc_feature 1..20: note = C9Orf72 GTCN PAM targeting sequence
  source 1..20: mol_type = other RNA
aggagactggggggtgggga

SEQ ID NO: 13275 - RNA, 20 nt, synthetic construct
  misc_feature 1..20: note = C9Orf72 GTCN PAM targeting sequence
  source 1..20: mol_type = other RNA
cctggaccttcgtcaaccga

SEQ ID NO: 13276 - RNA, 20 nt, synthetic construct
  misc_feature 1..20: note = C9Orf72 GTCN PAM targeting sequence
  source 1..20: mol_type = other RNA
cattcccaggtgttggcctt

SEQ ID NO: 13277 - RNA, 20 nt, synthetic construct
  misc_feature 1..20: note = C9Orf72 GTCN PAM targeting sequence
  source 1..20: mol_type = other RNA
gaagagtaagaaccaaaagg

SEQ ID NO: 13278 - RNA, 20 nt, synthetic construct
  misc_feature 1..20: note = C9Orf72 GTCN PAM targeting sequence
  source 1..20: mol_type = other RNA
ctggggatactggagaactg

SEQ ID NO: 13279 - RNA, 20 nt, synthetic construct
  misc_feature 1..20: note = C9Orf72 GTCN PAM targeting sequence
  source 1..20: mol_type = other RNA
cccatcatccgcagacccag

SEQ ID NO: 13280 - RNA, 20 nt, synthetic construct
  misc_feature 1..20: note = C9Orf72 GTCN PAM targeting sequence
  source 1..20: mol_type = other RNA
gcggatgatgggagacactg

SEQ ID NO: 13281 - RNA, 20 nt, synthetic construct
  misc_feature 1..20: note = C9Orf72 GTCN PAM targeting sequence
  source 1..20: mol_type = other RNA
ctgcttcaggtctgttacct

SEQ ID NO: 13282 - RNA, 20 nt, synthetic construct
  misc_feature 1..20: note = C9Orf72 GTCN PAM targeting sequence
  source 1..20: mol_type = other RNA
gttacctgctccagactggc

SEQ ID NO: 13283 - RNA, 20 nt, synthetic construct
  misc_feature 1..20: note = C9Orf72 GTCN PAM targeting sequence
  source 1..20: mol_type = other RNA
ggagcaggtaacagacctga

SEQ ID NO: 13284 - RNA, 20 nt, synthetic construct
  misc_feature 1..20: note = C9Orf72 GTCN PAM targeting sequence
  source 1..20: mol_type = other RNA
ctgctctcacagagtggcca

SEQ ID NO: 13285 - RNA, 20 nt, synthetic construct
  misc_feature 1..20: note = C9Orf72 GTCN PAM targeting sequence
  source 1..20: mol_type = other RNA
agcctcctcacaagtgtctc

SEQ ID NO: 13286 - RNA, 20 nt, synthetic construct
  misc_feature 1..20: note = C9Orf72 GTCN PAM targeting sequence
  source 1..20: mol_type = other RNA
ccttagtgacgtctccttag

SEQ ID NO: 13287 - RNA, 20 nt, synthetic construct
  misc_feature 1..20: note = C9Orf72 GTCN PAM targeting sequence
  source 1..20: mol_type = other RNA
ctaaggagacacttgtgagg

SEQ ID NO: 13288 - RNA, 20 nt, synthetic construct
  misc_feature 1..20: note = C9Orf72 GTCN PAM targeting sequence
  source 1..20: mol_type = other RNA
ccttagtggcctggcacctg

SEQ ID NO: 13289 - RNA, 20 nt, synthetic construct
  misc_feature 1..20: note = C9Orf72 GTCN PAM targeting sequence
  source 1..20: mol_type = other RNA
gcaagtatttattccatacc

SEQ ID NO: 13290 - RNA, 20 nt, synthetic construct
  misc_feature 1..20: note = C9Orf72 GTCN PAM targeting sequence
  source 1..20: mol_type = other RNA
cttcacctctttgagctttg

SEQ ID NO: 13291 - RNA, 20 nt, synthetic construct
  misc_feature 1..20: note = C9Orf72 GTCN PAM targeting sequence
  source 1..20: mol_type = other RNA
gtcccttcacctctttgagc

SEQ ID NO: 13292 - RNA, 20 nt, synthetic construct
  misc_feature 1..20: note = C9Orf72 GTCN PAM targeting sequence
  source 1..20: mol_type = other RNA
gtctcagagcctatgctcct

SEQ ID NO: 13293 - RNA, 20 nt, synthetic construct
  misc_feature 1..20: note = C9Orf72 GTCN PAM targeting sequence
  source 1..20: mol_type = other RNA
cagagcctatgctccttcta

SEQ ID NO: 13294 - RNA, 20 nt, synthetic construct
  misc_feature 1..20: note = C9Orf72 GTCN PAM targeting sequence
  source 1..20: mol_type = other RNA
atcgtatttgcatgagatga

SEQ ID NO: 13295 - RNA, 20 nt, synthetic construct
  misc_feature 1..20: note = C9Orf72 GTCN PAM targeting sequence
  source 1..20: mol_type = other RNA
tctaacaagtttcgtttccc

SEQ ID NO: 13296 - RNA, 20 nt, synthetic construct
  misc_feature 1..20: note = C9Orf72 GTCN PAM targeting sequence
  source 1..20: mol_type = other RNA
ctgggggtttaggacactgg

SEQ ID NO: 13297 - RNA, 20 nt, synthetic construct
  misc_feature 1..20: note = C9Orf72 GTCN PAM targeting sequence
  source 1..20: mol_type = other RNA
taaacccccagtgacacata

SEQ ID NO: 13298 - RNA, 20 nt, synthetic construct
  misc_feature 1..20: note = C9Orf72 GTCN PAM targeting sequence
  source 1..20: mol_type = other RNA
cacagctggaatcataaatg

SEQ ID NO: 13299 - RNA, 20 nt, synthetic construct
  misc_feature 1..20: note = C9Orf72 GTCN PAM targeting sequence
  source 1..20: mol_type = other RNA
gaggaatggtgataataata

SEQ ID NO: 13300 - RNA, 20 nt, synthetic construct
  misc_feature 1..20: note = C9Orf72 GTCN PAM targeting sequence
  source 1..20: mol_type = other RNA
catgaagagctaggtattat

SEQ ID NO: 13301 - RNA, 20 nt, synthetic construct
  misc_feature 1..20: note = C9Orf72 GTCN PAM targeting sequence
  source 1..20: mol_type = other RNA
ttgtggtctcatgaagagct

SEQ ID NO: 13302 - RNA, 20 nt, synthetic construct
  misc_feature 1..20: note = C9Orf72 GTCN PAM targeting sequence
  source 1..20: mol_type = other RNA
tcctagcgttggtaacatcg

SEQ ID NO: 13303 - RNA, 20 nt, synthetic construct
  misc_feature 1..20: note = C9Orf72 GTCN PAM targeting sequence
  source 1..20: mol_type = other RNA
tggcattgattcagaagagc

SEQ ID NO: 13304 - RNA, 20 nt, synthetic construct
  misc_feature 1..20: note = C9Orf72 GTCN PAM targeting sequence
  source 1..20: mol_type = other RNA
tgtttcatttgccctcctgc

SEQ ID NO: 13305 - RNA, 20 nt, synthetic construct
  misc_feature 1..20: note = C9Orf72 GTCN PAM targeting sequence
  source 1..20: mol_type = other RNA
tccaagtatactttccaaga

SEQ ID NO: 13306 - RNA, 20 nt, synthetic construct
  misc_feature 1..20: note = C9Orf72 GTCN PAM targeting sequence
  source 1..20: mol_type = other RNA
tatattggaagagcatgtga

SEQ ID NO: 13307 - RNA, 20 nt, synthetic construct
  misc_feature 1..20: note = C9Orf72 GTCN PAM targeting sequence
  source 1..20: mol_type = other RNA
aaggagcttccaaaggacat

SEQ ID NO: 13308 - RNA, 20 nt, synthetic construct
  misc_feature 1..20: note = C9Orf72 GTCN PAM targeting sequence
  source 1..20: mol_type = other RNA
tttggaagctccttggacag

SEQ ID NO: 13309 - RNA, 20 nt, synthetic construct
  misc_feature 1..20: note = C9Orf72 GTCN PAM targeting sequence
  source 1..20: mol_type = other RNA
caaaggattggccaggaaat

SEQ ID NO: 13310 - RNA, 20 nt, synthetic construct
  misc_feature 1..20: note = C9Orf72 GTCN PAM targeting sequence
  source 1..20: mol_type = other RNA
acaacaaccagaagtgccca

SEQ ID NO: 13311 - RNA, 20 nt, synthetic construct
  misc_feature 1..20: note = C9Orf72 GTCN PAM targeting sequence
  source 1..20: mol_type = other RNA
gagggcatttgtgctgtccc

SEQ ID NO: 13312 - RNA, 20 nt, synthetic construct
  misc_feature 1..20: note = C9Orf72 GTCN PAM targeting sequence
  source 1..20: mol_type = other RNA
cttctgtcttcagagtccag

SEQ ID NO: 13313 - RNA, 20 nt, synthetic construct
  misc_feature 1..20: note = C9Orf72 GTCN PAM targeting sequence
  source 1..20: mol_type = other RNA
tcagagtccagtaataagag

SEQ ID NO: 13314 - RNA, 20 nt, synthetic construct
  misc_feature 1..20: note = C9Orf72 GTCN PAM targeting sequence
  source 1..20: mol_type = other RNA
agtaataagagggatgtgaa

SEQ ID NO: 13315 - RNA, 20 nt, synthetic construct
  misc_feature 1..20: note = C9Orf72 GTCN PAM targeting sequence
  source 1..20: mol_type = other RNA
taaaaaccactcattctcaa

SEQ ID NO: 13316 - RNA, 20 nt, synthetic construct
  misc_feature 1..20: note = C9Orf72 GTCN PAM targeting sequence
  source 1..20: mol_type = other RNA
atatatatacatacatatac

SEQ ID NO: 13317 - RNA, 20 nt, synthetic construct
  misc_feature 1..20: note = C9Orf72 GTCN PAM targeting sequence
  source 1..20: mol_type = other RNA
gttcgtcatgccaaggaaaa

SEQ ID NO: 13318 - RNA, 20 nt, synthetic construct
  misc_feature 1..20: note = C9Orf72 GTCN PAM targeting sequence
  source 1..20: mol_type = other RNA
tgccaaggaaaacaatcctg

SEQ ID NO: 13319 - RNA, 20 nt, synthetic construct
  misc_feature 1..20: note = C9Orf72 GTCN PAM targeting sequence
  source 1..20: mol_type = other RNA
tgctacacaggattgttttc

SEQ ID NO: 13320 - RNA, 20 nt, synthetic construct
  misc_feature 1..20: note = C9Orf72 GTCN PAM targeting sequence
  source 1..20: mol_type = other RNA
ccaaacaagctgacagctgc

SEQ ID NO: 13321 - RNA, 20 nt, synthetic construct
  misc_feature 1..20: note = C9Orf72 GTCN PAM targeting sequence
  source 1..20: mol_type = other RNA
gcttgtttggggactttgtt

SEQ ID NO: 13322 - RNA, 20 nt, synthetic construct
  misc_feature 1..20: note = C9Orf72 GTCN PAM targeting sequence
  source 1..20: mol_type = other RNA
tccagtctgttatcatggtg

SEQ ID NO: 13323 - RNA, 20 nt, synthetic construct
  misc_feature 1..20: note = C9Orf72 GTCN PAM targeting sequence
  source 1..20: mol_type = other RNA
gttatcatggtggttgggcc

SEQ ID NO: 13324 - RNA, 20 nt, synthetic construct
  misc_feature 1..20: note = C9Orf72 GTCN PAM targeting sequence
  source 1..20: mol_type = other RNA
ttcttttggcccaaccacca

SEQ ID NO: 13325 - RNA, 20 nt, synthetic construct
  misc_feature 1..20: note = C9Orf72 GTCN PAM targeting sequence
  source 1..20: mol_type = other RNA
taattctttcagacatgcca

SEQ ID NO: 13326 - RNA, 20 nt, synthetic construct
  misc_feature 1..20: note = C9Orf72 GTCN PAM targeting sequence
  source 1..20: mol_type = other RNA
gaaagaattaagactctctt

SEQ ID NO: 13327 - RNA, 20 nt, synthetic construct
  misc_feature 1..20: note = C9Orf72 GTCN PAM targeting sequence
  source 1..20: mol_type = other RNA
agcgtgcctgctcgtcacac

SEQ ID NO: 13328 - RNA, 20 nt, synthetic construct
  misc_feature 1..20: note = C9Orf72 GTCN PAM targeting sequence
  source 1..20: mol_type = other RNA
cacctcctcctacccctgag

SEQ ID NO: 13329 - RNA, 20 nt, synthetic construct
  misc_feature 1..20: note = C9Orf72 GTCN PAM targeting sequence
  source 1..20: mol_type = other RNA
cctgctttcacagcatggat

SEQ ID NO: 13330 - RNA, 20 nt, synthetic construct
  misc_feature 1..20: note = C9Orf72 GTCN PAM targeting sequence
  source 1..20: mol_type = other RNA
ttcttaatctactgctcctt

SEQ ID NO: 13331 - RNA, 20 nt, synthetic construct
  misc_feature 1..20: note = C9Orf72 GTCN PAM targeting sequence
  source 1..20: mol_type = other RNA
atccacagtgaatatctttc

SEQ ID NO: 13332 - RNA, 20 nt, synthetic construct
  misc_feature 1..20: note = C9Orf72 GTCN PAM targeting sequence
  source 1..20: mol_type = other RNA
agggtttgtttctaatggct

SEQ ID NO: 13333 - RNA, 20 nt, synthetic construct
  misc_feature 1..20: note = C9Orf72 GTCN PAM targeting sequence
  source 1..20: mol_type = other RNA
ggtttacacggtctagggtt

SEQ ID NO: 13334 - RNA, 20 nt, synthetic construct
  misc_feature 1..20: note = C9Orf72 GTCN PAM targeting sequence
  source 1..20: mol_type = other RNA
catttgattttcagcaaact

SEQ ID NO: 13335 - RNA, 20 nt, synthetic construct
  misc_feature 1..20: note = C9Orf72 GTCN PAM targeting sequence
  source 1..20: mol_type = other RNA
ggctgaggtaccaggagttt

SEQ ID NO: 13336 - RNA, 20 nt, synthetic construct
  misc_feature 1..20: note = C9Orf72 GTCN PAM targeting sequence
  source 1..20: mol_type = other RNA
aggactaccacaccttctgg

SEQ ID NO: 13337 - RNA, 20 nt, synthetic construct
  misc_feature 1..20: note = C9Orf72 GTCN PAM targeting sequence
  source 1..20: mol_type = other RNA
tagacctatattcctgatca

SEQ ID NO: 13338 - RNA, 20 nt, synthetic construct
  misc_feature 1..20: note = C9Orf72 GTCN PAM targeting sequence
  source 1..20: mol_type = other RNA
tggatgtaatattgtgagta

SEQ ID NO: 13339 - RNA, 20 nt, synthetic construct
  misc_feature 1..20: note = C9Orf72 GTCN PAM targeting sequence
  source 1..20: mol_type = other RNA
ccacataatggaagaaagat

SEQ ID NO: 13340 - RNA, 20 nt, synthetic construct
  misc_feature 1..20: note = C9Orf72 GTCN PAM targeting sequence
  source 1..20: mol_type = other RNA
tgtcttgaacagttgctgat

SEQ ID NO: 13341 - RNA, 20 nt, synthetic construct
  misc_feature 1..20: note = C9Orf72 GTCN PAM targeting sequence
  source 1..20: mol_type = other RNA
tgaacagttgctgatctcta

SEQ ID NO: 13342 - RNA, 20 nt, synthetic construct
  misc_feature 1..20: note = C9Orf72 GTCN PAM targeting sequence
  source 1..20: mol_type = other RNA
cttgtaactaagcttccttt

SEQ ID NO: 13343 - RNA, 20 nt, synthetic construct
  misc_feature 1..20: note = C9Orf72 GTCN PAM targeting sequence
  source 1..20: mol_type = other RNA
ttcacctgccaagtggagat

SEQ ID NO: 13344 - RNA, 20 nt, synthetic construct
  misc_feature 1..20: note = C9Orf72 GTCN PAM targeting sequence
  source 1..20: mol_type = other RNA
tgcctgcatgttaaatagct

SEQ ID NO: 13345 - RNA, 20 nt, synthetic construct
  misc_feature 1..20: note = C9Orf72 GTCN PAM targeting sequence
  source 1..20: mol_type = other RNA
accatcatttctggattctc

SEQ ID NO: 13346 - RNA, 20 nt, synthetic construct
  misc_feature 1..20: note = C9Orf72 GTCN PAM targeting sequence
  source 1..20: mol_type = other RNA
ggcgaaatggagaagctgag

SEQ ID NO: 13347 - RNA, 20 nt, synthetic construct
  misc_feature 1..20: note = C9Orf72 GTCN PAM targeting sequence
  source 1..20: mol_type = other RNA
cttcctctagaacgtcctcc

SEQ ID NO: 13348 - RNA, 20 nt, synthetic construct
  misc_feature 1..20: note = C9Orf72 GTCN PAM targeting sequence
  source 1..20: mol_type = other RNA
tccctggccacctcaccctc

SEQ ID NO: 13349 - RNA, 20 nt, synthetic construct
  misc_feature 1..20: note = C9Orf72 GTCN PAM targeting sequence
  source 1..20: mol_type = other RNA
aggtaggcatatcataacac

SEQ ID NO: 13350 - RNA, 20 nt, synthetic construct
  misc_feature 1..20: note = C9Orf72 GTCN PAM targeting sequence
  source 1..20: mol_type = other RNA
tggaagaagcagcgggtgtt

SEQ ID NO: 13351 - RNA, 20 nt, synthetic construct
  misc_feature 1..20: note = C9Orf72 GTCN PAM targeting sequence
  source 1..20: mol_type = other RNA
tttttttttttttttttttg

SEQ ID NO: 13352 - RNA, 20 nt, synthetic construct
  misc_feature 1..20: note = C9Orf72 GTCN PAM targeting sequence
  source 1..20: mol_type = other RNA
cccaggagactgaaaattgt

SEQ ID NO: 13353 - RNA, 20 nt, synthetic construct
  misc_feature 1..20: note = C9Orf72 GTCN PAM targeting sequence
  source 1..20: mol_type = other RNA
cctgggagacaaaaaaaaaa

SEQ ID NO: 13354 - RNA, 20 nt, synthetic construct
  misc_feature 1..20: note = C9Orf72 GTCN PAM targeting sequence
  source 1..20: mol_type = other RNA
gggatctttcttgttcatag

SEQ ID NO: 13355 - RNA, 20 nt, synthetic construct
  misc_feature 1..20: note = C9Orf72 GTCN PAM targeting sequence
  source 1..20: mol_type = other RNA
tagccctggcatcgaatgca

SEQ ID NO: 13356 - RNA, 20 nt, synthetic construct
  misc_feature 1..20: note = C9Orf72 GTCN PAM targeting sequence
  source 1..20: mol_type = other RNA
tgaaggcagacaccccatga

SEQ ID NO: 13357 - RNA, 20 nt, synthetic construct
  misc_feature 1..20: note = C9Orf72 GTCN PAM targeting sequence
  source 1..20: mol_type = other RNA
gccttcatgacctaatcacc

SEQ ID NO: 13358 - RNA, 20 nt, synthetic construct
  misc_feature 1..20: note = C9Orf72 GTCN PAM targeting sequence
  source 1..20: mol_type = other RNA
tggctgggcgcggtcgctca

SEQ ID NO: 13359 - RNA, 20 nt, synthetic construct
  misc_feature 1..20: note = C9Orf72 GTCN PAM targeting sequence
  source 1..20: mol_type = other RNA
ctcaggcctgtaatcccagc

SEQ ID NO: 13360 - RNA, 20 nt, synthetic construct
  misc_feature 1..20: note = C9Orf72 GTCN PAM targeting sequence
  source 1..20: mol_type = other RNA
ggaattcaagaccggcctga

SEQ ID NO: 13361 - RNA, 20 nt, synthetic construct
  misc_feature 1..20: note = C9Orf72 GTCN PAM targeting sequence
  source 1..20: mol_type = other RNA
tgaattcccgacctcaggtg

SEQ ID NO: 13362 - RNA, 20 nt, synthetic construct
  misc_feature 1..20: note = C9Orf72 GTCN PAM targeting sequence
  source 1..20: mol_type = other RNA
ggccggtcttgaattcccga

SEQ ID NO: 13363 - RNA, 20 nt, synthetic construct
  misc_feature 1..20: note = C9Orf72 GTCN PAM targeting sequence
  source 1..20: mol_type = other RNA
gtactaaaaatacaaaatta

SEQ ID NO: 13364 - RNA, 20 nt, synthetic construct
  misc_feature 1..20: note = C9Orf72 GTCN PAM targeting sequence
  source 1..20: mol_type = other RNA
ggagtgcaatggtacaatat

SEQ ID NO: 13365 - RNA, 20 nt, synthetic construct
  misc_feature 1..20: note = C9Orf72 GTCN PAM targeting sequence
  source 1..20: mol_type = other RNA
tttttctttctccatgtgaa

SEQ ID NO: 13366 - RNA, 20 nt, synthetic construct
  misc_feature 1..20: note = C9Orf72 GTCN PAM targeting sequence
  source 1..20: mol_type = other RNA
ggtgaggccttgcttcctgt

SEQ ID NO: 13367 - RNA, 20 nt, synthetic construct
  misc_feature 1..20: note = C9Orf72 GTCN PAM targeting sequence
  source 1..20: mol_type = other RNA
ggtgggttcagtgtctggtg

SEQ ID NO: 13368 - RNA, 20 nt, synthetic construct
  misc_feature 1..20: note = C9Orf72 GTCN PAM targeting sequence
  source 1..20: mol_type = other RNA
gtgccttgatcttggacttc

SEQ ID NO: 13369 - RNA, 20 nt, synthetic construct
  misc_feature 1..20: note = C9Orf72 GTCN PAM targeting sequence
  source 1..20: mol_type = other RNA
aagatcaaggcactgacaga

SEQ ID NO: 13370 - RNA, 20 nt, synthetic construct
  misc_feature 1..20: note = C9Orf72 GTCN PAM targeting sequence
  source 1..20: mol_type = other RNA
attcaagctgctacaacaaa

SEQ ID NO: 13371 - RNA, 20 nt, synthetic construct
  misc_feature 1..20: note = C9Orf72 GTCN PAM targeting sequence
  source 1..20: mol_type = other RNA
caatctgaaaaccactgctt

SEQ ID NO: 13372 - RNA, 20 nt, synthetic construct
  misc_feature 1..20: note = C9Orf72 GTCN PAM targeting sequence
  source 1..20: mol_type = other RNA
cgtctaaggagtaacgctac

SEQ ID NO: 13373 - RNA, 20 nt, synthetic construct
  misc_feature 1..20: note = C9Orf72 GTCN PAM targeting sequence
  source 1..20: mol_type = other RNA
aaggagtaacgctaccgtga

SEQ ID NO: 13374 - RNA, 20 nt, synthetic construct
  misc_feature 1..20: note = C9Orf72 GTCN PAM targeting sequence
  source 1..20: mol_type = other RNA
aacaggtagttttccagagt

SEQ ID NO: 13375 - RNA, 20 nt, synthetic construct
  misc_feature 1..20: note = C9Orf72 GTCN PAM targeting sequence
  source 1..20: mol_type = other RNA
cagcatgatttgccaaccaa

SEQ ID NO: 13376 - RNA, 20 nt, synthetic construct
  misc_feature 1..20: note = C9Orf72 GTCN PAM targeting sequence
  source 1..20: mol_type = other RNA
ttgatcctctttgtacagtt

SEQ ID NO: 13377 - RNA, 20 nt, synthetic construct
  misc_feature 1..20: note = C9Orf72 GTCN PAM targeting sequence
  source 1..20: mol_type = other RNA
ctgttccctttggctctgca

SEQ ID NO: 13378 - RNA, 20 nt, synthetic construct
  misc_feature 1..20: note = C9Orf72 GTCN PAM targeting sequence
  source 1..20: mol_type = other RNA
ggagaagatcccccaacagt

SEQ ID NO: 13379 - RNA, 20 nt, synthetic construct
  misc_feature 1..20: note = C9Orf72 GTCN PAM targeting sequence
  source 1..20: mol_type = other RNA
ttccctcagattctgtttgt

SEQ ID NO: 13380 - RNA, 20 nt, synthetic construct
  misc_feature 1..20: note = C9Orf72 GTCN PAM targeting sequence
  source 1..20: mol_type = other RNA
tcagcatccactcaccgtct

SEQ ID NO: 13381 - RNA, 20 nt, synthetic construct
  misc_feature 1..20: note = C9Orf72 GTCN PAM targeting sequence
  source 1..20: mol_type = other RNA
ggtggaaaaagtcctcagca

SEQ ID NO: 13382 - RNA, 20 nt, synthetic construct
  misc_feature 1..20: note = C9Orf72 GTCN PAM targeting sequence
  source 1..20: mol_type = other RNA
ttgcatttgcatgtaagatc

SEQ ID NO: 13383 - RNA, 20 nt, synthetic construct
  misc_feature 1..20: note = C9Orf72 GTCN PAM targeting sequence
  source 1..20: mol_type = other RNA
aagtcaagctaaattcatga

SEQ ID NO: 13384 - RNA, 20 nt, synthetic construct
  misc_feature 1..20: note = C9Orf72 GTCN PAM targeting sequence
  source 1..20: mol_type = other RNA
agctaaattcatgaactaat

SEQ ID NO: 13385 - RNA, 20 nt, synthetic construct
  misc_feature 1..20: note = C9Orf72 GTCN PAM targeting sequence
  source 1..20: mol_type = other RNA
taaacaagatatcacatatt

SEQ ID NO: 13386 - RNA, 20 nt, synthetic construct
  misc_feature 1..20: note = C9Orf72 GTCN PAM targeting sequence
  source 1..20: mol_type = other RNA
acgccactcccgatcatatt

SEQ ID NO: 13387 - RNA, 20 nt, synthetic construct
  misc_feature 1..20: note = C9Orf72 GTCN PAM targeting sequence
  source 1..20: mol_type = other RNA
tagatctatattcctgctgg

SEQ ID NO: 13388 - RNA, 20 nt, synthetic construct
  misc_feature 1..20: note = C9Orf72 GTCN PAM targeting sequence
  source 1..20: mol_type = other RNA
ggcagtcctagatctatatt

SEQ ID NO: 13389 - RNA, 20 nt, synthetic construct
  misc_feature 1..20: note = C9Orf72 GTCN PAM targeting sequence
  source 1..20: mol_type = other RNA
ttgaattaactaaaatttaa

SEQ ID NO: 13390 - RNA, 20 nt, synthetic construct
  misc_feature 1..20: note = C9Orf72 GTCN PAM targeting sequence
  source 1..20: mol_type = other RNA
tatatagctcactcagcctg

SEQ ID NO: 13391 - RNA, 20 nt, synthetic construct
  misc_feature 1..20: note = C9Orf72 GTCN PAM targeting sequence
  source 1..20: mol_type = other RNA
acttccaggctgagtgagct

SEQ ID NO: 13392 - RNA, 20 nt, synthetic construct
  misc_feature 1..20: note = C9Orf72 GTCN PAM targeting sequence
  source 1..20: mol_type = other RNA
gcttatagagtcaacttcca

SEQ ID NO: 13393 - RNA, 20 nt, synthetic construct
  misc_feature 1..20: note = C9Orf72 GTCN PAM targeting sequence
  source 1..20: mol_type = other RNA
tagaatcagccattttctcc

SEQ ID NO: 13394 - RNA, 20 nt, synthetic construct
  misc_feature 1..20: note = C9Orf72 GTCN PAM targeting sequence
  source 1..20: mol_type = other RNA
caggccatcttttatatttc

SEQ ID NO: 13395 - RNA, 20 nt, synthetic construct
  misc_feature 1..20: note = C9Orf72 GTCN PAM targeting sequence
  source 1..20: mol_type = other RNA
gaaagaaaggaagtgctaat

SEQ ID NO: 13396 - RNA, 20 nt, synthetic construct
  misc_feature 1..20: note = C9Orf72 GTCN PAM targeting sequence
  source 1..20: mol_type = other RNA
ttgtgtttttattagcactt

SEQ ID NO: 13397 - RNA, 20 nt, synthetic construct
  misc_feature 1..20: note = C9Orf72 GTCN PAM targeting sequence
  source 1..20: mol_type = other RNA
agaaacctggcaaacatgac

SEQ ID NO: 13398 - RNA, 20 nt, synthetic construct
  misc_feature 1..20: note = C9Orf72 GTCN PAM targeting sequence
  source 1..20: mol_type = other RNA
tgtttgccaggtttcttgac

SEQ ID NO: 13399 - RNA, 20 nt, synthetic construct
  misc_feature 1..20: note = C9Orf72 GTCN PAM targeting sequence
  source 1..20: mol_type = other RNA
aggtcatgtttgccaggttt

SEQ ID NO: 13400 - RNA, 20 nt, synthetic construct
  misc_feature 1..20: note = C9Orf72 GTCN PAM targeting sequence
  source 1..20: mol_type = other RNA
cttcacttctgtggtctccc

SEQ ID NO: 13401 - RNA, 20 nt, synthetic construct
  misc_feature 1..20: note = C9Orf72 GTCN PAM targeting sequence
  source 1..20: mol_type = other RNA
ccctccccataacccataag

SEQ ID NO: 13402 - RNA, 20 nt, synthetic construct
  misc_feature 1..20: note = C9Orf72 GTCN PAM targeting sequence
  source 1..20: mol_type = other RNA
gattttttttatggttagat

SEQ ID NO: 13403 - RNA, 20 nt, synthetic construct
  misc_feature 1..20: note = C9Orf72 GTCN PAM targeting sequence
  source 1..20: mol_type = other RNA
gatgttttgtagaacattct

SEQ ID NO: 13404 - RNA, 20 nt, synthetic construct
  misc_feature 1..20: note = C9Orf72 GTCN PAM targeting sequence
  source 1..20: mol_type = other RNA
tcaaaactgtcaagttcatc

SEQ ID NO: 13405 - RNA, 20 nt, synthetic construct
  misc_feature 1..20: note = C9Orf72 GTCN PAM targeting sequence
  source 1..20: mol_type = other RNA
agttcatcaaaacaaggaaa

SEQ ID NO: 13406 - RNA, 20 nt, synthetic construct
  misc_feature 1..20: note = C9Orf72 GTCN PAM targeting sequence
  source 1..20: mol_type = other RNA
gaagagcctaaggagatgtg

SEQ ID NO: 13407 - RNA, 20 nt, synthetic construct
  misc_feature 1..20: note = C9Orf72 GTCN PAM targeting sequence
  source 1..20: mol_type = other RNA
gcacatctccttaggctctt

SEQ ID NO: 13408 - RNA, 20 nt, synthetic construct
  misc_feature 1..20: note = C9Orf72 GTCN PAM targeting sequence
  source 1..20: mol_type = other RNA
cagctgaggaactaacacat

SEQ ID NO: 13409 - RNA, 20 nt, synthetic construct
  misc_feature 1..20: note = C9Orf72 GTCN PAM targeting sequence
  source 1..20: mol_type = other RNA
aaaatatttgattggctcca

SEQ ID NO: 13410 - RNA, 20 nt, synthetic construct
  misc_feature 1..20: note = C9Orf72 GTCN PAM targeting sequence
  source 1..20: mol_type = other RNA
ttactgttatgctctgatca

SEQ ID NO: 13411 - RNA, 20 nt, synthetic construct
  misc_feature 1..20: note = C9Orf72 GTCN PAM targeting sequence
  source 1..20: mol_type = other RNA
tgatcagagcataacagtaa

SEQ ID NO: 13412 - RNA, 20 nt, synthetic construct
  misc_feature 1..20: note = C9Orf72 GTCN PAM targeting sequence
  source 1..20: mol_type = other RNA
taaaccaagcatggggccat

SEQ ID NO: 13413 - RNA, 20 nt, synthetic construct
  misc_feature 1..20: note = C9Orf72 GTCN PAM targeting sequence
  source 1..20: mol_type = other RNA
tgaaacctgcactcagaatg

SEQ ID NO: 13414 - RNA, 20 nt, synthetic construct
  misc_feature 1..20: note = C9Orf72 GTCN PAM targeting sequence
  source 1..20: mol_type = other RNA
ctgacatgtgatatgatctg

SEQ ID NO: 13415 - RNA, 20 nt, synthetic construct
  misc_feature 1..20: note = C9Orf72 GTCN PAM targeting sequence
  source 1..20: mol_type = other RNA
gagacagggccagcttcaca

SEQ ID NO: 13416 - RNA, 20 nt, synthetic construct
  misc_feature 1..20: note = C9Orf72 GTCN PAM targeting sequence
  source 1..20: mol_type = other RNA
ggagtcatccttgccagata

SEQ ID NO: 13417 - RNA, 20 nt, synthetic construct
  misc_feature 1..20: note = C9Orf72 GTCN PAM targeting sequence
  source 1..20: mol_type = other RNA
tccttgccagatacaactcc

SEQ ID NO: 13418 - RNA, 20 nt, synthetic construct
  misc_feature 1..20: note = C9Orf72 GTCN PAM targeting sequence
  source 1..20: mol_type = other RNA
tgttatacctaagtttccag

SEQ ID NO: 13419 - RNA, 20 nt, synthetic construct
  misc_feature 1..20: note = C9Orf72 GTCN PAM targeting sequence
  source 1..20: mol_type = other RNA
acttccagtgctggaaactt

SEQ ID NO: 13420 - RNA, 20 nt, synthetic construct
  misc_feature 1..20: note = C9Orf72 GTCN PAM targeting sequence
  source 1..20: mol_type = other RNA
ttaggtcaacttccagtgct

SEQ ID NO: 13421 - RNA, 20 nt, synthetic construct
  misc_feature 1..20: note = C9Orf72 GTCN PAM targeting sequence
  source 1..20: mol_type = other RNA
gtacctgggggaggtcctta

SEQ ID NO: 13422 - RNA, 20 nt, synthetic construct
  misc_feature 1..20: note = C9Orf72 GTCN PAM targeting sequence
  source 1..20: mol_type = other RNA
aggctgcagtgagccatgat

SEQ ID NO: 13423 - RNA, 20 nt, synthetic construct
  misc_feature 1..20: note = C9Orf72 GTCN PAM targeting sequence
  source 1..20: mol_type = other RNA
cagccttctaagtaccaggg

SEQ ID NO: 13424 - RNA, 20 nt, synthetic construct
  misc_feature 1..20: note = C9Orf72 GTCN PAM targeting sequence
  source 1..20: mol_type = other RNA
ctggtacttagaaggctgag

SEQ ID NO: 13425 - RNA, 20 nt, synthetic construct
  misc_feature 1..20: note = C9Orf72 GTCN PAM targeting sequence
  source 1..20: mol_type = other RNA
ctacaaaatacaagataaaa

SEQ ID NO: 13426 - RNA, 20 nt, synthetic construct
  misc_feature 1..20: note = C9Orf72 GTCN PAM targeting sequence
  source 1..20: mol_type = other RNA
cactttgttgcctaggctgg

SEQ ID NO: 13427 - RNA, 20 nt, synthetic construct
  misc_feature 1..20: note = C9Orf72 GTCN PAM targeting sequence
  source 1..20: mol_type = other RNA
tgaactcctgacctcaagca

SEQ ID NO: 13428 - RNA, 20 nt, synthetic construct
  misc_feature 1..20: note = C9Orf72 GTCN PAM targeting sequence
  source 1..20: mol_type = other RNA
ggagttcaagaccagcctag

SEQ ID NO: 13429 - RNA, 20 nt, synthetic construct
  misc_feature 1..20: note = C9Orf72 GTCN PAM targeting sequence
  source 1..20: mol_type = other RNA
cttgaactggaaggacaggt

SEQ ID NO: 13430 - RNA, 20 nt, synthetic construct
  misc_feature 1..20: note = C9Orf72 GTCN PAM targeting sequence
  source 1..20: mol_type = other RNA
ttccagttcaagagactggt

SEQ ID NO: 13431 - RNA, 20 nt, synthetic construct
  misc_feature 1..20: note = C9Orf72 GTCN PAM targeting sequence
  source 1..20: mol_type = other RNA
gtaaaatggagataatacca

SEQ ID NO: 13432 - RNA, 20 nt, synthetic construct
  misc_feature 1..20: note = C9Orf72 GTCN PAM targeting sequence
  source 1..20: mol_type = other RNA
ctgtttccttgtctgtaaaa

SEQ ID NO: 13433 - RNA, 20 nt, synthetic construct
  misc_feature 1..20: note = C9Orf72 GTCN PAM targeting sequence
  source 1..20: mol_type = other RNA
gaatcatttacaaatttgaa

SEQ ID NO: 13434 - RNA, 20 nt, synthetic construct
  misc_feature 1..20: note = C9Orf72 GTCN PAM targeting sequence
  source 1..20: mol_type = other RNA
gacatgaggctgtctcttta

SEQ ID NO: 13435 - RNA, 20 nt, synthetic construct
  misc_feature 1..20: note = C9Orf72 GTCN PAM targeting sequence
  source 1..20: mol_type = other RNA
gaccatgtcagaatcattta

SEQ ID NO: 13436 - RNA, 20 nt, synthetic construct
  misc_feature 1..20: note = C9Orf72 GTCN PAM targeting sequence
  source 1..20: mol_type = other RNA
ctttaggtcaaacttttgaa

SEQ ID NO: 13437 - RNA, 20 nt, synthetic construct
  misc_feature 1..20: note = C9Orf72 GTCN PAM targeting sequence
  source 1..20: mol_type = other RNA
aacttttgaatctaaaatga

SEQ ID NO: 13438 - RNA, 20 nt, synthetic construct
  misc_feature 1..20: note = C9Orf72 GTCN PAM targeting sequence
  source 1..20: mol_type = other RNA
ttaaacatgggggggggcct

SEQ ID NO: 13439 - RNA, 20 nt, synthetic construct
  misc_feature 1..20: note = C9Orf72 GTCN PAM targeting sequence
  source 1..20: mol_type = other RNA
ttcagtggcatgatacatct

SEQ ID NO: 13440 - RNA, 20 nt, synthetic construct
  misc_feature 1..20: note = C9Orf72 GTCN PAM targeting sequence
  source 1..20: mol_type = other RNA
tttcctgagtgtgagatgcc

SEQ ID NO: 13441 - RNA, 20 nt, synthetic construct
  misc_feature 1..20: note = C9Orf72 GTCN PAM targeting sequence
  source 1..20: mol_type = other RNA
aggtgcatttacagttccct

SEQ ID NO: 13442 - RNA, 20 nt, synthetic construct
  misc_feature 1..20: note = C9Orf72 GTCN PAM targeting sequence
  source 1..20: mol_type = other RNA
caagggggctctgggctggg

SEQ ID NO: 13443 - RNA, 20 nt, synthetic construct
  misc_feature 1..20: note = C9Orf72 GTCN PAM targeting sequence
  source 1..20: mol_type = other RNA
aacagtctcccaggtggtac

SEQ ID NO: 13444 - RNA, 20 nt, synthetic construct
  misc_feature 1..20: note = C9Orf72 GTCN PAM targeting sequence
  source 1..20: mol_type = other RNA
cccaggtggtactgaatcta

SEQ ID NO: 13445 - RNA, 20 nt, synthetic construct
  misc_feature 1..20: note = C9Orf72 GTCN PAM targeting sequence
  source 1..20: mol_type = other RNA
atggatgacactcaaagcat

SEQ ID NO: 13446 - RNA, 20 nt, synthetic construct
  misc_feature 1..20: note = C9Orf72 GTCN PAM targeting sequence
  source 1..20: mol_type = other RNA
tccatggaccagtagattca

SEQ ID NO: 13447 - RNA, 20 nt, synthetic construct
  misc_feature 1..20: note = C9Orf72 GTCN PAM targeting sequence
  source 1..20: mol_type = other RNA
acatttctaacaagatcact

SEQ ID NO: 13448 - RNA, 20 nt, synthetic construct
  misc_feature 1..20: note = C9Orf72 GTCN PAM targeting sequence
  source 1..20: mol_type = other RNA
acagattgtttcataaacag

SEQ ID NO: 13449 - RNA, 20 nt, synthetic construct
  misc_feature 1..20: note = C9Orf72 GTCN PAM targeting sequence
  source 1..20: mol_type = other RNA
tcagttgagtgtgggtatgt

SEQ ID NO: 13450 - RNA, 20 nt, synthetic construct
  misc_feature 1..20: note = C9Orf72 GTCN PAM targeting sequence
  source 1..20: mol_type = other RNA
aggcgattgtattcaaaaca

SEQ ID NO: 13451 - RNA, 20 nt, synthetic construct
  misc_feature 1..20: note = C9Orf72 GTCN PAM targeting sequence
  source 1..20: mol_type = other RNA
ccatctgtcaaggcgattgt

SEQ ID NO: 13452 - RNA, 20 nt, synthetic construct
  misc_feature 1..20: note = C9Orf72 GTCN PAM targeting sequence
  source 1..20: mol_type = other RNA
ttgtcaccatctgtcaaggc

SEQ ID NO: 13453 - RNA, 20 nt, synthetic construct
  misc_feature 1..20: note = C9Orf72 GTCN PAM targeting sequence
  source 1..20: mol_type = other RNA
tttgatctggactgacttgt

SEQ ID NO: 13454 - RNA, 20 nt, synthetic construct
  misc_feature 1..20: note = C9Orf72 GTCN PAM targeting sequence
  source 1..20: mol_type = other RNA
agatcaaaagacctggtcat

SEQ ID NO: 13455 - RNA, 20 nt, synthetic construct
  misc_feature 1..20: note = C9Orf72 GTCN PAM targeting sequence
  source 1..20: mol_type = other RNA
gtccagatcaaaagacctgg

SEQ ID NO: 13456 - RNA, 20 nt, synthetic construct
  misc_feature 1..20: note = C9Orf72 GTCN PAM targeting sequence
  source 1..20: mol_type = other RNA
ccagtgaataccttttcata

SEQ ID NO: 13457 - RNA, 20 nt, synthetic construct
  misc_feature 1..20: note = C9Orf72 GTCN PAM targeting sequence
  source 1..20: mol_type = other RNA
tgtttcagtctccaaaaaaa

SEQ ID NO: 13458 - RNA, 20 nt, synthetic construct
  misc_feature 1..20: note = C9Orf72 GTCN PAM targeting sequence
  source 1..20: mol_type = other RNA
ccaaaaaaaaaaaaaaaaaa

SEQ ID NO: 13459 - RNA, 20 nt, synthetic construct
  misc_feature 1..20: note = C9Orf72 GTCN PAM targeting sequence
  source 1..20: mol_type = other RNA
taaagttttccttctaagta

SEQ ID NO: 13460 - RNA, 20 nt, synthetic construct
  misc_feature 1..20: note = C9Orf72 GTCN PAM targeting sequence
  source 1..20: mol_type = other RNA
tgaactgcacccatgacaat

SEQ ID NO: 13461 - RNA, 20 nt, synthetic construct
  misc_feature 1..20: note = C9Orf72 GTCN PAM targeting sequence
  source 1..20: mol_type = other RNA
tgggtgcagttcatgacata

SEQ ID NO: 13462 - RNA, 20 nt, synthetic construct
  misc_feature 1..20: note = C9Orf72 GTCN PAM targeting sequence
  source 1..20: mol_type = other RNA
gacacagggctaggcactaa

SEQ ID NO: 13463 - RNA, 20 nt, synthetic construct
  misc_feature 1..20: note = C9Orf72 GTCN PAM targeting sequence
  source 1..20: mol_type = other RNA
gacacataaaaagcttttag

SEQ ID NO: 13464 - RNA, 20 nt, synthetic construct
  misc_feature 1..20: note = C9Orf72 GTCN PAM targeting sequence
  source 1..20: mol_type = other RNA
ttagtgcctagccctgtgtc

SEQ ID NO: 13465 - RNA, 20 nt, synthetic construct
  misc_feature 1..20: note = C9Orf72 GTCN PAM targeting sequence
  source 1..20: mol_type = other RNA
ctgtctatgaagaattcaca

SEQ ID NO: 13466 - RNA, 20 nt, synthetic construct
  misc_feature 1..20: note = C9Orf72 GTCN PAM targeting sequence
  source 1..20: mol_type = other RNA
atgaagaattcacaatttgg

SEQ ID NO: 13467 - RNA, 20 nt, synthetic construct
  misc_feature 1..20: note = C9Orf72 GTCN PAM targeting sequence
  source 1..20: mol_type = other RNA
ataactaacctcaaaactac

SEQ ID NO: 13468 - RNA, 20 nt, synthetic construct
  misc_feature 1..20: note = C9Orf72 GTCN PAM targeting sequence
  source 1..20: mol_type = other RNA
catcagtatgcatgttggtg

SEQ ID NO: 13469 - RNA, 20 nt, synthetic construct
  misc_feature 1..20: note = C9Orf72 GTCN PAM targeting sequence
  source 1..20: mol_type = other RNA
gggatgaaacaggacaataa

SEQ ID NO: 13470 - RNA, 20 nt, synthetic construct
  misc_feature 1..20: note = C9Orf72 GTCN PAM targeting sequence
  source 1..20: mol_type = other RNA
tgtttcatccctgacctaag

SEQ ID NO: 13471 - RNA, 20 nt, synthetic construct
  misc_feature 1..20: note = C9Orf72 GTCN PAM targeting sequence
  source 1..20: mol_type = other RNA
ttggaaagagaaaaacagaa

SEQ ID NO: 13472 - RNA, 20 nt, synthetic construct
  misc_feature 1..20: note = C9Orf72 GTCN PAM targeting sequence
  source 1..20: mol_type = other RNA
gttttgtgctatttatttag

SEQ ID NO: 13473 - RNA, 20 nt, synthetic construct
  misc_feature 1..20: note = C9Orf72 GTCN PAM targeting sequence
  source 1..20: mol_type = other RNA
acattcccttgcagcccagc

SEQ ID NO: 13474 - RNA, 20 nt, synthetic construct
  misc_feature 1..20: note = C9Orf72 GTCN PAM targeting sequence
  source 1..20: mol_type = other RNA
tttgcctcattagttgagaa

SEQ ID NO: 13475 - RNA, 20 nt, synthetic construct
  misc_feature 1..20: note = C9Orf72 GTCN PAM targeting sequence
  source 1..20: mol_type = other RNA
ttgccagggataaggaagaa

SEQ ID NO: 13476 - RNA, 20 nt, synthetic construct
  misc_feature 1..20: note = C9Orf72 GTCN PAM targeting sequence
  source 1..20: mol_type = other RNA
ctcctgagagatccatcttc

SEQ ID NO: 13477 - RNA, 20 nt, synthetic construct
  misc_feature 1..20: note = C9Orf72 GTCN PAM targeting sequence
  source 1..20: mol_type = other RNA
cttagaggtgggcctggcta

SEQ ID NO: 13478 - RNA, 20 nt, synthetic construct
  misc_feature 1..20: note = C9Orf72 GTCN PAM targeting sequence
  source 1..20: mol_type = other RNA
ctctcctttcctaaccccct

SEQ ID NO: 13479 - RNA, 20 nt, synthetic construct
  misc_feature 1..20: note = C9Orf72 GTCN PAM targeting sequence
  source 1..20: mol_type = other RNA
tccacctcacagataagata

SEQ ID NO: 13480 - RNA, 20 nt, synthetic construct
  misc_feature 1..20: note = C9Orf72 GTCN PAM targeting sequence
  source 1..20: mol_type = other RNA
tcttcattgccaggcacaga

SEQ ID NO: 13481 - RNA, 20 nt, synthetic construct
  misc_feature 1..20: note = C9Orf72 GTCN PAM targeting sequence
  source 1..20: mol_type = other RNA
gctctgtgcctggcaatgaa

SEQ ID NO: 13482 - RNA, 20 nt, synthetic construct
  misc_feature 1..20: note = C9Orf72 GTCN PAM targeting sequence
  source 1..20: mol_type = other RNA
tttactcattcattcagcaa

SEQ ID NO: 13483 - RNA, 20 nt, synthetic construct
  misc_feature 1..20: note = C9Orf72 GTCN PAM targeting sequence
  source 1..20: mol_type = other RNA
tcagttatttggggactcta

SEQ ID NO: 13484 - RNA, 20 nt, synthetic construct
  misc_feature 1..20: note = C9Orf72 GTCN PAM targeting sequence
  source 1..20: mol_type = other RNA
ccaaataactgaagacagga

SEQ ID NO: 13485 - RNA, 20 nt, synthetic construct
  misc_feature 1..20: note = C9Orf72 GTCN PAM targeting sequence
  source 1..20: mol_type = other RNA
atctgtaagctcactgccaa

SEQ ID NO: 13486 - RNA, 20 nt, synthetic construct
  misc_feature 1..20: note = C9Orf72 GTCN PAM targeting sequence
  source 1..20: mol_type = other RNA
gcctcctgaaaggacaagac

SEQ ID NO: 13487 - RNA, 20 nt, synthetic construct
  misc_feature 1..20: note = C9Orf72 GTCN PAM targeting sequence
  source 1..20: mol_type = other RNA
tttcaggaggcagacttgtt

SEQ ID NO: 13488 - RNA, 20 nt, synthetic construct
  misc_feature 1..20: note = C9Orf72 GTCN PAM targeting sequence
  source 1..20: mol_type = other RNA
tgtcctttcaggaggcagac

SEQ ID NO: 13489 - RNA, 20 nt, synthetic construct
  misc_feature 1..20: note = C9Orf72 GTCN PAM targeting sequence
  source 1..20: mol_type = other RNA
ttctttgattctgaagaggt

SEQ ID NO: 13490 - RNA, 20 nt, synthetic construct
  misc_feature 1..20: note = C9Orf72 GTCN PAM targeting sequence
  source 1..20: mol_type = other RNA
gatttctcattttcccacta

SEQ ID NO: 13491 - RNA, 20 nt, synthetic construct
  misc_feature 1..20: note = C9Orf72 GTCN PAM targeting sequence
  source 1..20: mol_type = other RNA
ttggaatcgtcctcccactt

SEQ ID NO: 13492 - RNA, 20 nt, synthetic construct
  misc_feature 1..20: note = C9Orf72 GTCN PAM targeting sequence
  source 1..20: mol_type = other RNA
tcccacttcccaaatattga

SEQ ID NO: 13493 - RNA, 20 nt, synthetic construct
  misc_feature 1..20: note = C9Orf72 GTCN PAM targeting sequence
  source 1..20: mol_type = other RNA
gacctttccaggatccaata

SEQ ID NO: 13494 - RNA, 20 nt, synthetic construct
  misc_feature 1..20: note = C9Orf72 GTCN PAM targeting sequence
  source 1..20: mol_type = other RNA
gacgatgttcattttatgat

SEQ ID NO: 13495 - RNA, 20 nt, synthetic construct
  misc_feature 1..20: note = C9Orf72 GTCN PAM targeting sequence
  source 1..20: mol_type = other RNA
tgtgggcaaagatggcacct

SEQ ID NO: 13496 - RNA, 20 nt, synthetic construct
  misc_feature 1..20: note = C9Orf72 GTCN PAM targeting sequence
  source 1..20: mol_type = other RNA
tatcactgcattttgttaca

SEQ ID NO: 13497 - RNA, 20 nt, synthetic construct
  misc_feature 1..20: note = C9Orf72 GTCN PAM targeting sequence
  source 1..20: mol_type = other RNA
gtcacaggactattctgctc

SEQ ID NO: 13498 - RNA, 20 nt, synthetic construct
  misc_feature 1..20: note = C9Orf72 GTCN PAM targeting sequence
  source 1..20: mol_type = other RNA
caggactattctgctcatct

SEQ ID NO: 13499 - RNA, 20 nt, synthetic construct
  misc_feature 1..20: note = C9Orf72 GTCN PAM targeting sequence
  source 1..20: mol_type = other RNA
tgtgacagacttctgtacgg

SEQ ID NO: 13500 - RNA, 20 nt, synthetic construct
  misc_feature 1..20: note = C9Orf72 GTCN PAM targeting sequence
  source 1..20: mol_type = other RNA
tttgaattgcattcttgctg

SEQ ID NO: 13501 - RNA, 20 nt, synthetic construct
  misc_feature 1..20: note = C9Orf72 GTCN PAM targeting sequence
  source 1..20: mol_type = other RNA
tcagtgcagacattctagca

SEQ ID NO: 13502 - RNA, 20 nt, synthetic construct
  misc_feature 1..20: note = C9Orf72 GTCN PAM targeting sequence
  source 1..20: mol_type = other RNA
gcactgatgaccaaaacaat

SEQ ID NO: 13503 - RNA, 20 nt, synthetic construct
  misc_feature 1..20: note = C9Orf72 GTCN PAM targeting sequence
  source 1..20: mol_type = other RNA
tcttctgaatgatgatgaat

SEQ ID NO: 13504 - RNA, 20 nt, synthetic construct
  misc_feature 1..20: note = C9Orf72 GTCN PAM targeting sequence
  source 1..20: mol_type = other RNA
gtaggtaatgtttcaaacca

SEQ ID NO: 13505 - RNA, 20 nt, synthetic construct
  misc_feature 1..20: note = C9Orf72 GTCN PAM targeting sequence
  source 1..20: mol_type = other RNA
atggaacaaaagacagagtt

SEQ ID NO: 13506 - RNA, 20 nt, synthetic construct
  misc_feature 1..20: note = C9Orf72 GTCN PAM targeting sequence
  source 1..20: mol_type = other RNA
tttgttccatggactgtcag

SEQ ID NO: 13507 - RNA, 20 nt, synthetic construct
  misc_feature 1..20: note = C9Orf72 GTCN PAM targeting sequence
  source 1..20: mol_type = other RNA
agaaggaacattattctctt

SEQ ID NO: 13508 - RNA, 20 nt, synthetic construct
  misc_feature 1..20: note = C9Orf72 GTCN PAM targeting sequence
  source 1..20: mol_type = other RNA
ttgttgggaatctaagctag

SEQ ID NO: 13509 - RNA, 20 nt, synthetic construct
  misc_feature 1..20: note = C9Orf72 GTCN PAM targeting sequence
  source 1..20: mol_type = other RNA
tcatctttgtcattgttggg

SEQ ID NO: 13510 - RNA, 20 nt, synthetic construct
  misc_feature 1..20: note = C9Orf72 GTCN PAM targeting sequence
  source 1..20: mol_type = other RNA
aaccttgggcagggttgatc

SEQ ID NO: 13511 - RNA, 20 nt, synthetic construct
  misc_feature 1..20: note = C9Orf72 GTCN PAM targeting sequence
  source 1..20: mol_type = other RNA
tctgagcttttatcctgtaa

SEQ ID NO: 13512 - RNA, 20 nt, synthetic construct
  misc_feature 1..20: note = C9Orf72 GTCN PAM targeting sequence
  source 1..20: mol_type = other RNA
ttataagatttataatcttt

SEQ ID NO: 13513 - RNA, 20 nt, synthetic construct
  misc_feature 1..20: note = C9Orf72 GTCN PAM targeting sequence
  source 1..20: mol_type = other RNA
gtgagagatttggtatatta

SEQ ID NO: 13514 - RNA, 20 nt, synthetic construct
  misc_feature 1..20: note = C9Orf72 GTCN PAM targeting sequence
  source 1..20: mol_type = other RNA
aaatatctggaaataatata

SEQ ID NO: 13515 - RNA, 20 nt, synthetic construct
  misc_feature 1..20: note = C9Orf72 GTCN PAM targeting sequence
  source 1..20: mol_type = other RNA
ttctttaagccacaaaaatg

SEQ ID NO: 13516 - RNA, 20 nt, synthetic construct
  misc_feature 1..20: note = C9Orf72 GTCN PAM targeting sequence
  source 1..20: mol_type = other RNA
ggtgagggtagaagaatggg

SEQ ID NO: 13517 - RNA, 20 nt, synthetic construct
  misc_feature 1..20: note = C9Orf72 GTCN PAM targeting sequence
  source 1..20: mol_type = other RNA
ctctgaaccttgaacggata

SEQ ID NO: 13518 - RNA, 20 nt, synthetic construct
  misc_feature 1..20: note = C9Orf72 GTCN PAM targeting sequence
  source 1..20: mol_type = other RNA
ttgtcagttaccctttcttt

SEQ ID NO: 13519 - RNA, 20 nt, synthetic construct
  misc_feature 1..20: note = C9Orf72 GTCN PAM targeting sequence
  source 1..20: mol_type = other RNA
gttaccctttctttttcttt

SEQ ID NO: 13520 - RNA, 20 nt, synthetic construct
  misc_feature 1..20: note = C9Orf72 GTCN PAM targeting sequence
  source 1..20: mol_type = other RNA
atcctttcttggaaaagtct

SEQ ID NO: 13521 - RNA, 20 nt, synthetic construct
  misc_feature 1..20: note = C9Orf72 GTCN PAM targeting sequence
  source 1..20: mol_type = other RNA
taaaggaaaaaggttcaaat

SEQ ID NO: 13522 - RNA, 20 nt, synthetic construct
  misc_feature 1..20: note = C9Orf72 GTCN PAM targeting sequence
  source 1..20: mol_type = other RNA
gttacaggatccaacttcct

SEQ ID NO: 13523 - RNA, 20 nt, synthetic construct
  misc_feature 1..20: note = C9Orf72 GTCN PAM targeting sequence
  source 1..20: mol_type = other RNA
gttgtcagttacaggatcca

SEQ ID NO: 13524 - RNA, 20 nt, synthetic construct
  misc_feature 1..20: note = C9Orf72 GTCN PAM targeting sequence
  source 1..20: mol_type = other RNA
caaagtctgaaaaatttcta

SEQ ID NO: 13525 - RNA, 20 nt, synthetic construct
  misc_feature 1..20: note = C9Orf72 GTCN PAM targeting sequence
  source 1..20: mol_type = other RNA
gaaaaatttctagccctagc

SEQ ID NO: 13526 - RNA, 20 nt, synthetic construct
  misc_feature 1..20: note = C9Orf72 GTCN PAM targeting sequence
  source 1..20: mol_type = other RNA
tacataagttctcatggtgc

SEQ ID NO: 13527 - RNA, 20 nt, synthetic construct
  misc_feature 1..20: note = C9Orf72 GTCN PAM targeting sequence
  source 1..20: mol_type = other RNA
tcttgcccattttgtgttct

SEQ ID NO: 13528 - RNA, 20 nt, synthetic construct
  misc_feature 1..20: note = C9Orf72 GTCN PAM targeting sequence
  source 1..20: mol_type = other RNA
aacttaaacttatgatcttt

SEQ ID NO: 13529 - RNA, 20 nt, synthetic construct
  misc_feature 1..20: note = C9Orf72 GTCN PAM targeting sequence
  source 1..20: mol_type = other RNA
gattcttgagagaccagtca

SEQ ID NO: 13530 - RNA, 20 nt, synthetic construct
  misc_feature 1..20: note = C9Orf72 GTCN PAM targeting sequence
  source 1..20: mol_type = other RNA
ctcaagaatctgactctcta

SEQ ID NO: 13531 - RNA, 20 nt, synthetic construct
  misc_feature 1..20: note = C9Orf72 GTCN PAM targeting sequence
  source 1..20: mol_type = other RNA
cctagaatctatcttaggat

SEQ ID NO: 13532 - RNA, 20 nt, synthetic construct
  misc_feature 1..20: note = C9Orf72 GTCN PAM targeting sequence
  source 1..20: mol_type = other RNA
ttaataaataccattgttaa

SEQ ID NO: 13533 - RNA, 20 nt, synthetic construct
  misc_feature 1..20: note = C9Orf72 GTCN PAM targeting sequence
  source 1..20: mol_type = other RNA
cagtttccttaagcgtaaat

SEQ ID NO: 13534 - RNA, 20 nt, synthetic construct
  misc_feature 1..20: note = C9Orf72 GTCN PAM targeting sequence
  source 1..20: mol_type = other RNA
gcttggctacttactggttc

SEQ ID NO: 13535 - RNA, 20 nt, synthetic construct
  misc_feature 1..20: note = C9Orf72 GTCN PAM targeting sequence
  source 1..20: mol_type = other RNA
aaagaggcacttttaagtag

SEQ ID NO: 13536 - RNA, 20 nt, synthetic construct
  misc_feature 1..20: note = C9Orf72 GTCN PAM targeting sequence
  source 1..20: mol_type = other RNA
gggaggaaatgggagaaaca

SEQ ID NO: 13537 - RNA, 20 nt, synthetic construct
  misc_feature 1..20: note = C9Orf72 GTCN PAM targeting sequence
  source 1..20: mol_type = other RNA
ctgtttctcccatttcctcc

SEQ ID NO: 13538 - RNA, 20 nt, synthetic construct
  misc_feature 1..20: note = C9Orf72 GTCN PAM targeting sequence
  source 1..20: mol_type = other RNA
tgtgccactccagaagagat

SEQ ID NO: 13539 - RNA, 20 nt, synthetic construct
  misc_feature 1..20: note = C9Orf72 GTCN PAM targeting sequence
  source 1..20: mol_type = other RNA
agattcaaaagacctggatt

SEQ ID NO: 13540 - RNA, 20 nt, synthetic construct
  misc_feature 1..20: note = C9Orf72 GTCN PAM targeting sequence
  source 1..20: mol_type = other RNA
tttgaatctagaccgcgaag

SEQ ID NO: 13541 - RNA, 20 nt, synthetic construct
  misc_feature 1..20: note = C9Orf72 GTCN PAM targeting sequence
  source 1..20: mol_type = other RNA
ttgccagaatttgaatccag

SEQ ID NO: 13542 - RNA, 20 nt, synthetic construct
  misc_feature 1..20: note = C9Orf72 GTCN PAM targeting sequence
  source 1..20: mol_type = other RNA
ttgaacagacactttttatg

SEQ ID NO: 13543 - RNA, 20 nt, synthetic construct
  misc_feature 1..20: note = C9Orf72 GTCN PAM targeting sequence
  source 1..20: mol_type = other RNA
gttcaaagacatagccagct

SEQ ID NO: 13544 - RNA, 20 nt, synthetic construct
  misc_feature 1..20: note = C9Orf72 GTCN PAM targeting sequence
  source 1..20: mol_type = other RNA
tctttaaagatgatggtggc

SEQ ID NO: 13545 - RNA, 20 nt, synthetic construct
  misc_feature 1..20: note = C9Orf72 GTCN PAM targeting sequence
  source 1..20: mol_type = other RNA
ctgtgcccagccaccatcat

SEQ ID NO: 13546 - RNA, 20 nt, synthetic construct
  misc_feature 1..20: note = C9Orf72 GTCN PAM targeting sequence
  source 1..20: mol_type = other RNA
gtaatcctaacactttggga

SEQ ID NO: 13547 - RNA, 20 nt, synthetic construct
  misc_feature 1..20: note = C9Orf72 GTCN PAM targeting sequence
  source 1..20: mol_type = other RNA
cgaactcctgggctcaagca

SEQ ID NO: 13548 - RNA, 20 nt, synthetic construct
  misc_feature 1..20: note = C9Orf72 GTCN PAM targeting sequence
  source 1..20: mol_type = other RNA
cactgggctaatttttgtat

SEQ ID NO: 13549 - RNA, 20 nt, synthetic construct
  misc_feature 1..20: note = C9Orf72 GTCN PAM targeting sequence
  source 1..20: mol_type = other RNA
cagctacttgggaggctgag

SEQ ID NO: 13550 - RNA, 20 nt, synthetic construct
  misc_feature 1..20: note = C9Orf72 GTCN PAM targeting sequence
  source 1..20: mol_type = other RNA
agactgcagtgagccatgat

SEQ ID NO: 13551 - RNA, 20 nt, synthetic construct
  misc_feature 1..20: note = C9Orf72 GTCN PAM targeting sequence
  source 1..20: mol_type = other RNA
ggacatccccaggctcaggt

SEQ ID NO: 13552 - RNA, 20 nt, synthetic construct
  misc_feature 1..20: note = C9Orf72 GTCN PAM targeting sequence
  source 1..20: mol_type = other RNA
catgctgctgcccaggctgg

SEQ ID NO: 13553 - RNA, 20 nt, synthetic construct
  misc_feature 1..20: note = C9Orf72 GTCN PAM targeting sequence
  source 1..20: mol_type = other RNA
caaaaaaaagaaaaaagaaa

SEQ ID NO: 13554 - RNA, 20 nt, synthetic construct
  misc_feature 1..20: note = C9Orf72 GTCN PAM targeting sequence
  source 1..20: mol_type = other RNA
ataaccatataattgttttc

SEQ ID NO: 13555 - RNA, 20 nt, synthetic construct
  misc_feature 1..20: note = C9Orf72 GTCN PAM targeting sequence
  source 1..20: mol_type = other RNA
ctatgtcaataaccatataa

SEQ ID NO: 13556 - RNA, 20 nt, synthetic construct
  misc_feature 1..20: note = C9Orf72 GTCN PAM targeting sequence
  source 1..20: mol_type = other RNA
tagtttcttttatcagtcac

SEQ ID NO: 13557 - RNA, 20 nt, synthetic construct
  misc_feature 1..20: note = C9Orf72 GTCN PAM targeting sequence
  source 1..20: mol_type = other RNA
aaagtcatagtttcttttat

SEQ ID NO: 13558 - RNA, 20 nt, synthetic construct
  misc_feature 1..20: note = C9Orf72 GTCN PAM targeting sequence
  source 1..20: mol_type = other RNA
acccaaattaagcaagaatg

SEQ ID NO: 13559 - RNA, 20 nt, synthetic construct
  misc_feature 1..20: note = C9Orf72 GTCN PAM targeting sequence
  source 1..20: mol_type = other RNA
tttctgttatcagaatacag

SEQ ID NO: 13560 - RNA, 20 nt, synthetic construct
  misc_feature 1..20: note = C9Orf72 GTCN PAM targeting sequence
  source 1..20: mol_type = other RNA
ttatcagcagcatgaaaatg

SEQ ID NO: 13561 - RNA, 20 nt, synthetic construct
  misc_feature 1..20: note = C9Orf72 GTCN PAM targeting sequence
  source 1..20: mol_type = other RNA
aattaaacctctttttgttc

SEQ ID NO: 13562 - RNA, 20 nt, synthetic construct
  misc_feature 1..20: note = C9Orf72 GTCN PAM targeting sequence
  source 1..20: mol_type = other RNA
tccacctcccgccatgattc

SEQ ID NO: 13563 - RNA, 20 nt, synthetic construct
  misc_feature 1..20: note = C9Orf72 GTCN PAM targeting sequence
  source 1..20: mol_type = other RNA
ctttttttgcttcttcctca

SEQ ID NO: 13564 - RNA, 20 nt, synthetic construct
  misc_feature 1..20: note = C9Orf72 GTCN PAM targeting sequence
  source 1..20: mol_type = other RNA
cacgagatctgatgggttta

SEQ ID NO: 13565 - RNA, 20 nt, synthetic construct
  misc_feature 1..20: note = C9Orf72 GTCN PAM targeting sequence
  source 1..20: mol_type = other RNA
ttcccatgctattctcgtga

SEQ ID NO: 13566 - RNA, 20 nt, synthetic construct
  misc_feature 1..20: note = C9Orf72 GTCN PAM targeting sequence
  source 1..20: mol_type = other RNA
ctgccatagcatgtgagaac

SEQ ID NO: 13567 - RNA, 20 nt, synthetic construct
  misc_feature 1..20: note = C9Orf72 GTCN PAM targeting sequence
  source 1..20: mol_type = other RNA
ccacccaaatctcaacttga

SEQ ID NO: 13568 - RNA, 20 nt, synthetic construct
  misc_feature 1..20: note = C9Orf72 GTCN PAM targeting sequence
  source 1..20: mol_type = other RNA
tgagatttggaggggccagg

SEQ ID NO: 13569 - RNA, 20 nt, synthetic construct
  misc_feature 1..20: note = C9Orf72 GTCN PAM targeting sequence
  source 1..20: mol_type = other RNA
cccaaagtcttaactcattt

SEQ ID NO: 13570 - RNA, 20 nt, synthetic construct
  misc_feature 1..20: note = C9Orf72 GTCN PAM targeting sequence
  source 1..20: mol_type = other RNA
taactcatttcagcattaac

SEQ ID NO: 13571 - RNA, 20 nt, synthetic construct
  misc_feature 1..20: note = C9Orf72 GTCN PAM targeting sequence
  source 1..20: mol_type = other RNA
atagtccaaagtctcatctg

SEQ ID NO: 13572 - RNA, 20 nt, synthetic construct
  misc_feature 1..20: note = C9Orf72 GTCN PAM targeting sequence
  source 1..20: mol_type = other RNA
aaagtctcatctgagacaag

SEQ ID NO: 13573 - RNA, 20 nt, synthetic construct
  misc_feature 1..20: note = C9Orf72 GTCN PAM targeting sequence
  source 1..20: mol_type = other RNA
catctgagacaaggcaagtc

SEQ ID NO: 13574 - RNA, 20 nt, synthetic construct
  misc_feature 1..20: note = C9Orf72 GTCN PAM targeting sequence
  source 1..20: mol_type = other RNA
cagatgagactttggactat

SEQ ID NO: 13575 - RNA, 20 nt, synthetic construct
  misc_feature 1..20: note = C9Orf72 GTCN PAM targeting sequence
  source 1..20: mol_type = other RNA
cttccacctataagcctgca

SEQ ID NO: 13576 - RNA, 20 nt, synthetic construct
  misc_feature 1..20: note = C9Orf72 GTCN PAM targeting sequence
  source 1..20: mol_type = other RNA
acagcaagctagttaattcc

SEQ ID NO: 13577 - RNA, 20 nt, synthetic construct
  misc_feature 1..20: note = C9Orf72 GTCN PAM targeting sequence
  source 1..20: mol_type = other RNA
aggaattaactagcttgctg

SEQ ID NO: 13578 - RNA, 20 nt, synthetic construct
  misc_feature 1..20: note = C9Orf72 GTCN PAM targeting sequence
  source 1..20: mol_type = other RNA
gaaatccagcagggcagtca

SEQ ID NO: 13579 - RNA, 20 nt, synthetic construct
  misc_feature 1..20: note = C9Orf72 GTCN PAM targeting sequence
  source 1..20: mol_type = other RNA
aattttaaagctccaaaatg

SEQ ID NO: 13580 - RNA, 20 nt, synthetic construct
  misc_feature 1..20: note = C9Orf72 GTCN PAM targeting sequence
  source 1..20: mol_type = other RNA
aaggagatcattttggagct

SEQ ID NO: 13581 - RNA, 20 nt, synthetic construct
  misc_feature 1..20: note = C9Orf72 GTCN PAM targeting sequence
  source 1..20: mol_type = other RNA
gacatccaggtcatgctgct

SEQ ID NO: 13582 - RNA, 20 nt, synthetic construct
  misc_feature 1..20: note = C9Orf72 GTCN PAM targeting sequence
  source 1..20: mol_type = other RNA
gacctggagtcaaaggagat

SEQ ID NO: 13583 - RNA, 20 nt, synthetic construct
  misc_feature 1..20: note = C9Orf72 GTCN PAM targeting sequence
  source 1..20: mol_type = other RNA
tgctgctgcaagaagtgggt

SEQ ID NO: 13584 - RNA, 20 nt, synthetic construct
  misc_feature 1..20: note = C9Orf72 GTCN PAM targeting sequence
  source 1..20: mol_type = other RNA
gtggatctaccattctgggg

SEQ ID NO: 13585 - RNA, 20 nt, synthetic construct
  misc_feature 1..20: note = C9Orf72 GTCN PAM targeting sequence
  source 1..20: mol_type = other RNA
ggaagacgatggccctcttc

SEQ ID NO: 13586 - RNA, 20 nt, synthetic construct
  misc_feature 1..20: note = C9Orf72 GTCN PAM targeting sequence
  source 1..20: mol_type = other RNA
tccagaccccagaatggtag

SEQ ID NO: 13587 - RNA, 20 nt, synthetic construct
  misc_feature 1..20: note = C9Orf72 GTCN PAM targeting sequence
  source 1..20: mol_type = other RNA
ctactggggcactgcttggt

SEQ ID NO: 13588 - RNA, 20 nt, synthetic construct
  misc_feature 1..20: note = C9Orf72 GTCN PAM targeting sequence
  source 1..20: mol_type = other RNA
cgcccctgcagcaaactttt

SEQ ID NO: 13589 - RNA, 20 nt, synthetic construct
  misc_feature 1..20: note = C9Orf72 GTCN PAM targeting sequence
  source 1..20: mol_type = other RNA
acacatcttctgaaatctag

SEQ ID NO: 13590 - RNA, 20 nt, synthetic construct
  misc_feature 1..20: note = C9Orf72 GTCN PAM targeting sequence
  source 1..20: mol_type = other RNA
agaattgaggtttggaaacc

SEQ ID NO: 13591 - RNA, 20 nt, synthetic construct
  misc_feature 1..20: note = C9Orf72 GTCN PAM targeting sequence
  source 1..20: mol_type = other RNA
cagccattccagctgtggcc

SEQ ID NO: 13592 - RNA, 20 nt, synthetic construct
  misc_feature 1..20: note = C9Orf72 GTCN PAM targeting sequence
  source 1..20: mol_type = other RNA
caggatccccgtgctgtatg

SEQ ID NO: 13593 - RNA, 20 nt, synthetic construct
  misc_feature 1..20: note = C9Orf72 GTCN PAM targeting sequence
  source 1..20: mol_type = other RNA
gagatcttcatggctgcccc

SEQ ID NO: 13594 - RNA, 20 nt, synthetic construct
  misc_feature 1..20: note = C9Orf72 GTCN PAM targeting sequence
  source 1..20: mol_type = other RNA
ccaggccatgtcagagatct

SEQ ID NO: 13595 - RNA, 20 nt, synthetic construct
  misc_feature 1..20: note = C9Orf72 GTCN PAM targeting sequence
  source 1..20: mol_type = other RNA
tagggattaacattaggctc

SEQ ID NO: 13596 - RNA, 20 nt, synthetic construct
  misc_feature 1..20: note = C9Orf72 GTCN PAM targeting sequence
  source 1..20: mol_type = other RNA
gctgcataaggagcaaggag

SEQ ID NO: 13597 - RNA, 20 nt, synthetic construct
  misc_feature 1..20: note = C9Orf72 GTCN PAM targeting sequence
  source 1..20: mol_type = other RNA
ctttgctaaaatataacaag

SEQ ID NO: 13598 - RNA, 20 nt, synthetic construct
  misc_feature 1..20: note = C9Orf72 GTCN PAM targeting sequence
  source 1..20: mol_type = other RNA
cctttgctccagttcccaac

SEQ ID NO: 13599 - RNA, 20 nt, synthetic construct
  misc_feature 1..20: note = C9Orf72 GTCN PAM targeting sequence
  source 1..20: mol_type = other RNA
cagatggagatgaggaactt

SEQ ID NO: 13600 - RNA, 20 nt, synthetic construct
  misc_feature 1..20: note = C9Orf72 GTCN PAM targeting sequence
  source 1..20: mol_type = other RNA
aggctgaagtggtctcagat

SEQ ID NO: 13601 - RNA, 20 nt, synthetic construct
  misc_feature 1..20: note = C9Orf72 GTCN PAM targeting sequence
  source 1..20: mol_type = other RNA
aagccattcaacaagtcttt

SEQ ID NO: 13602 - RNA, 20 nt, synthetic construct
  misc_feature 1..20: note = C9Orf72 GTCN PAM targeting sequence
  source 1..20: mol_type = other RNA
ttaggaggttccaaactttc

SEQ ID NO: 13603 - RNA, 20 nt, synthetic construct
  misc_feature 1..20: note = C9Orf72 GTCN PAM targeting sequence
  source 1..20: mol_type = other RNA
tctgaacccttcacattgtt

SEQ ID NO: 13604 - RNA, 20 nt, synthetic construct
  misc_feature 1..20: note = C9Orf72 GTCN PAM targeting sequence
  source 1..20: mol_type = other RNA
cttccacattttcgggtatc

SEQ ID NO: 13605 - RNA, 20 nt, synthetic construct
  misc_feature 1..20: note = C9Orf72 GTCN PAM targeting sequence
  source 1..20: mol_type = other RNA
attttcatgctgctgataaa

SEQ ID NO: 13606 - RNA, 20 nt, synthetic construct
  misc_feature 1..20: note = C9Orf72 GTCN PAM targeting sequence
  source 1..20: mol_type = other RNA
aattaaaccccttttttctt

SEQ ID NO: 13607 - RNA, 20 nt, synthetic construct
  misc_feature 1..20: note = C9Orf72 GTCN PAM targeting sequence
  source 1..20: mol_type = other RNA
cacgagatctgatgggttta

SEQ ID NO: 13608 - RNA, 20 nt, synthetic construct
  misc_feature 1..20: note = C9Orf72 GTCN PAM targeting sequence
  source 1..20: mol_type = other RNA
ttcccgtgctattcttgtga

SEQ ID NO: 13609 - RNA, 20 nt, synthetic construct
  misc_feature 1..20: note = C9Orf72 GTCN PAM targeting sequence
  source 1..20: mol_type = other RNA
gtcctacaatatgtgggaat

SEQ ID NO: 13610 - RNA, 20 nt, synthetic construct
  misc_feature 1..20: note = C9Orf72 GTCN PAM targeting sequence
  source 1..20: mol_type = other RNA
tacaatatgtgggaattttg

SEQ ID NO: 13611 - RNA, 20 nt, synthetic construct
  misc_feature 1..20: note = C9Orf72 GTCN PAM targeting sequence
  source 1..20: mol_type = other RNA
ccacccaaatctcaacttga

SEQ ID NO: 13612 - RNA, 20 nt, synthetic construct
  misc_feature 1..20: note = C9Orf72 GTCN PAM targeting sequence
  source 1..20: mol_type = other RNA
gcatttctagaaactctcaa

SEQ ID NO: 13613 - RNA, 20 nt, synthetic construct
  misc_feature 1..20: note = C9Orf72 GTCN PAM targeting sequence
  source 1..20: mol_type = other RNA
gttctctcttgagagtttct

SEQ ID NO: 13614 - RNA, 20 nt, synthetic construct
  misc_feature 1..20: note = C9Orf72 GTCN PAM targeting sequence
  source 1..20: mol_type = other RNA
caattttatctcagggttac

SEQ ID NO: 13615 - RNA, 20 nt, synthetic construct
  misc_feature 1..20: note = C9Orf72 GTCN PAM targeting sequence
  source 1..20: mol_type = other RNA
gacatgtaattgcaaaccat

SEQ ID NO: 13616 - RNA, 20 nt, synthetic construct
  misc_feature 1..20: note = C9Orf72 GTCN PAM targeting sequence
  source 1..20: mol_type = other RNA
gactcaatttcatttcaaac

SEQ ID NO: 13617 - RNA, 20 nt, synthetic construct
  misc_feature 1..20: note = C9Orf72 GTCN PAM targeting sequence
  source 1..20: mol_type = other RNA
ttgaggaggatacatggttt

SEQ ID NO: 13618 - RNA, 20 nt, synthetic construct
  misc_feature 1..20: note = C9Orf72 GTCN PAM targeting sequence
  source 1..20: mol_type = other RNA
acctttagagccagaaagat

SEQ ID NO: 13619 - RNA, 20 nt, synthetic construct
  misc_feature 1..20: note = C9Orf72 GTCN PAM targeting sequence
  source 1..20: mol_type = other RNA
gagtccagactctgcccctt

SEQ ID NO: 13620 - RNA, 20 nt, synthetic construct
  misc_feature 1..20: note = C9Orf72 GTCN PAM targeting sequence
  source 1..20: mol_type = other RNA
agactctgccccttgaccag

SEQ ID NO: 13621 - RNA, 20 nt, synthetic construct
  misc_feature 1..20: note = C9Orf72 GTCN PAM targeting sequence
  source 1..20: mol_type = other RNA
ggactcagacctgcatcttt

SEQ ID NO: 13622 - RNA, 20 nt, synthetic construct
  misc_feature 1..20: note = C9Orf72 GTCN PAM targeting sequence
  source 1..20: mol_type = other RNA
aggggcagagtctggactca

SEQ ID NO: 13623 - RNA, 20 nt, synthetic construct
  misc_feature 1..20: note = C9Orf72 GTCN PAM targeting sequence
  source 1..20: mol_type = other RNA
agtgttaaatttattaatct

SEQ ID NO: 13624 - RNA, 20 nt, synthetic construct
  misc_feature 1..20: note = C9Orf72 GTCN PAM targeting sequence
  source 1..20: mol_type = other RNA
caaccataatgtgctctttc

SEQ ID NO: 13625 - RNA, 20 nt, synthetic construct
  misc_feature 1..20: note = C9Orf72 GTCN PAM targeting sequence
  source 1..20: mol_type = other RNA
aagaaagagcacattatggt

SEQ ID NO: 13626 - RNA, 20 nt, synthetic construct
  misc_feature 1..20: note = C9Orf72 GTCN PAM targeting sequence
  source 1..20: mol_type = other RNA
tgtggggaagaagtcaaaga

SEQ ID NO: 13627 - RNA, 20 nt, synthetic construct
  misc_feature 1..20: note = C9Orf72 GTCN PAM targeting sequence
  source 1..20: mol_type = other RNA
tgtgcttaggtcttgtgggg

SEQ ID NO: 13628 - RNA, 20 nt, synthetic construct
  misc_feature 1..20: note = C9Orf72 GTCN PAM targeting sequence
  source 1..20: mol_type = other RNA
ttttactaacatcgccccag

SEQ ID NO: 13629 - RNA, 20 nt, synthetic construct
  misc_feature 1..20: note = C9Orf72 GTCN PAM targeting sequence
  source 1..20: mol_type = other RNA
ggctgagccagctgagcatg

SEQ ID NO: 13630 - RNA, 20 nt, synthetic construct
  misc_feature 1..20: note = C9Orf72 GTCN PAM targeting sequence
  source 1..20: mol_type = other RNA
gctctcaccagtgctacatg

SEQ ID NO: 13631 - RNA, 20 nt, synthetic construct
  misc_feature 1..20: note = C9Orf72 GTCN PAM targeting sequence
  source 1..20: mol_type = other RNA
ggcttccataagaaacaaag

SEQ ID NO: 13632 - RNA, 20 nt, synthetic construct
  misc_feature 1..20: note = C9Orf72 GTCN PAM targeting sequence
  source 1..20: mol_type = other RNA
caccactcttccctatgtgg

SEQ ID NO: 13633 - RNA, 20 nt, synthetic construct
  misc_feature 1..20: note = C9Orf72 GTCN PAM targeting sequence
  source 1..20: mol_type = other RNA
ctgctaacaaaaacagctaa

SEQ ID NO: 13634 - RNA, 20 nt, synthetic construct
  misc_feature 1..20: note = C9Orf72 GTCN PAM targeting sequence
  source 1..20: mol_type = other RNA
cgaagagtctctgctaacaa

SEQ ID NO: 13635 - RNA, 20 nt, synthetic construct
  misc_feature 1..20: note = C9Orf72 GTCN PAM targeting sequence
  source 1..20: mol_type = other RNA
taaacagagttcttgttgaa

SEQ ID NO: 13636 - RNA, 20 nt, synthetic construct
  misc_feature 1..20: note = C9Orf72 GTCN PAM targeting sequence
  source 1..20: mol_type = other RNA
gtctacacaccagaaatgca

SEQ ID NO: 13637 - RNA, 20 nt, synthetic construct
  misc_feature 1..20: note = C9Orf72 GTCN PAM targeting sequence
  source 1..20: mol_type = other RNA
acacaccagaaatgcatagc

SEQ ID NO: 13638 - RNA, 20 nt, synthetic construct
  misc_feature 1..20: note = C9Orf72 GTCN PAM targeting sequence
  source 1..20: mol_type = other RNA
tagggtgcatttgtaccagt

SEQ ID NO: 13639 - RNA, 20 nt, synthetic construct
  misc_feature 1..20: note = C9Orf72 GTCN PAM targeting sequence
  source 1..20: mol_type = other RNA
gccactgagcagtaactggt

SEQ ID NO: 13640 - RNA, 20 nt, synthetic construct
  misc_feature 1..20: note = C9Orf72 GTCN PAM targeting sequence
  source 1..20: mol_type = other RNA
ctgtgtgtctgccactgagc

SEQ ID NO: 13641 - RNA, 20 nt, synthetic construct
  misc_feature 1..20: note = C9Orf72 GTCN PAM targeting sequence
  source 1..20: mol_type = other RNA
gtctctgtgtgtctgccact

SEQ ID NO: 13642 - RNA, 20 nt, synthetic construct
  misc_feature 1..20: note = C9Orf72 GTCN PAM targeting sequence
  source 1..20: mol_type = other RNA
cccatcatctatgaagtgct

SEQ ID NO: 13643 - RNA, 20 nt, synthetic construct
  misc_feature 1..20: note = C9Orf72 GTCN PAM targeting sequence
  source 1..20: mol_type = other RNA
attgtggaggattcagaagc

SEQ ID NO: 13644 - RNA, 20 nt, synthetic construct
  misc_feature 1..20: note = C9Orf72 GTCN PAM targeting sequence
  source 1..20: mol_type = other RNA
ggcctaaagctcactgtcaa

SEQ ID NO: 13645 - RNA, 20 nt, synthetic construct
  misc_feature 1..20: note = C9Orf72 GTCN PAM targeting sequence
  source 1..20: mol_type = other RNA
catgcccctgtatgtggcta

SEQ ID NO: 13646 - RNA, 20 nt, synthetic construct
  misc_feature 1..20: note = C9Orf72 GTCN PAM targeting sequence
  source 1..20: mol_type = other RNA
gggaacatgattatcagaag

SEQ ID NO: 13647 - RNA, 20 nt, synthetic construct
  misc_feature 1..20: note = C9Orf72 GTCN PAM targeting sequence
  source 1..20: mol_type = other RNA
ttcttgctccttcttttggt

SEQ ID NO: 13648 - RNA, 20 nt, synthetic construct
  misc_feature 1..20: note = C9Orf72 GTCN PAM targeting sequence
  source 1..20: mol_type = other RNA
tcgtgtgcaccttgcatgca

SEQ ID NO: 13649 - RNA, 20 nt, synthetic construct
  misc_feature 1..20: note = C9Orf72 GTCN PAM targeting sequence
  source 1..20: mol_type = other RNA
tggggcattcgcatcagaga

SEQ ID NO: 13650 - RNA, 20 nt, synthetic construct
  misc_feature 1..20: note = C9Orf72 GTCN PAM targeting sequence
  source 1..20: mol_type = other RNA
ggcccctccatcagtttatg

SEQ ID NO: 13651 - RNA, 20 nt, synthetic construct
  misc_feature 1..20: note = C9Orf72 GTCN PAM targeting sequence
  source 1..20: mol_type = other RNA
agggtgtgctcccaaccctc

SEQ ID NO: 13652 - RNA, 20 nt, synthetic construct
  misc_feature 1..20: note = C9Orf72 GTCN PAM targeting sequence
  source 1..20: mol_type = other RNA
tgtgttaggtaccagggatg

SEQ ID NO: 13653 - RNA, 20 nt, synthetic construct
  misc_feature 1..20: note = C9Orf72 GTCN PAM targeting sequence
  source 1..20: mol_type = other RNA
tctcaactggagaaagaact

SEQ ID NO: 13654 - RNA, 20 nt, synthetic construct
  misc_feature 1..20: note = C9Orf72 GTCN PAM targeting sequence
  source 1..20: mol_type = other RNA
cattatgattatgggggcct

SEQ ID NO: 13655 - RNA, 20 nt, synthetic construct
  misc_feature 1..20: note = C9Orf72 GTCN PAM targeting sequence
  source 1..20: mol_type = other RNA
attgtctcattatgattatg

SEQ ID NO: 13656 - RNA, 20 nt, synthetic construct
  misc_feature 1..20: note = C9Orf72 GTCN PAM targeting sequence
  source 1..20: mol_type = other RNA
agtagccactgttgatcttt

SEQ ID NO: 13657 - RNA, 20 nt, synthetic construct
  misc_feature 1..20: note = C9Orf72 GTCN PAM targeting sequence
  source 1..20: mol_type = other RNA
gctcctttggaagcatgccc

SEQ ID NO: 13658 - RNA, 20 nt, synthetic construct
  misc_feature 1..20: note = C9Orf72 GTCN PAM targeting sequence
  source 1..20: mol_type = other RNA
tggtagaactttgtaaagat

SEQ ID NO: 13659 - RNA, 20 nt, synthetic construct
  misc_feature 1..20: note = C9Orf72 GTCN PAM targeting sequence
  source 1..20: mol_type = other RNA
ttgcgtggtattgcaaagat

SEQ ID NO: 13660 - RNA, 20 nt, synthetic construct
  misc_feature 1..20: note = C9Orf72 GTCN PAM targeting sequence
  source 1..20: mol_type = other RNA
tgccatgttgcccaggctgg

SEQ ID NO: 13661 - RNA, 20 nt, synthetic construct
  misc_feature 1..20: note = C9Orf72 GTCN PAM targeting sequence
  source 1..20: mol_type = other RNA
tgaaatcctgggctcaagca

SEQ ID NO: 13662 - RNA, 20 nt, synthetic construct
  misc_feature 1..20: note = C9Orf72 GTCN PAM targeting sequence
  source 1..20: mol_type = other RNA
tcctgcctcagcctccctag

SEQ ID NO: 13663 - RNA, 20 nt, synthetic construct
  misc_feature 1..20: note = C9Orf72 GTCN PAM targeting sequence
  source 1..20: mol_type = other RNA
cagtgcctggctgggaattt

SEQ ID NO: 13664 - RNA, 20 nt, synthetic construct
  misc_feature 1..20: note = C9Orf72 GTCN PAM targeting sequence
  source 1..20: mol_type = other RNA
cagaagttgagttttcacta

SEQ ID NO: 13665 - RNA, 20 nt, synthetic construct
  misc_feature 1..20: note = C9Orf72 GTCN PAM targeting sequence
  source 1..20: mol_type = other RNA
atgcccaagcttctgtctct

SEQ ID NO: 13666 - RNA, 20 nt, synthetic construct
  misc_feature 1..20: note = C9Orf72 GTCN PAM targeting sequence
  source 1..20: mol_type = other RNA
ctgttgcatccactcttgtt

SEQ ID NO: 13667 - RNA, 20 nt, synthetic construct
  misc_feature 1..20: note = C9Orf72 GTCN PAM targeting sequence
  source 1..20: mol_type = other RNA
ctgaagggtacaaaggcaac

SEQ ID NO: 13668 - RNA, 20 nt, synthetic construct
  misc_feature 1..20: note = C9Orf72 GTCN PAM targeting sequence
  source 1..20: mol_type = other RNA
ccctcaatcatcccacacaa

SEQ ID NO: 13669 - RNA, 20 nt, synthetic construct
  misc_feature 1..20: note = C9Orf72 GTCN PAM targeting sequence
  source 1..20: mol_type = other RNA
tggtgttgtgtgggatgatt

SEQ ID NO: 13670 - RNA, 20 nt, synthetic construct
  misc_feature 1..20: note = C9Orf72 GTCN PAM targeting sequence
  source 1..20: mol_type = other RNA
tggctgacaggattgtacag

SEQ ID NO: 13671 - RNA, 20 nt, synthetic construct
  misc_feature 1..20: note = C9Orf72 GTCN PAM targeting sequence
  source 1..20: mol_type = other RNA
gccatgaccttgctatcagg

SEQ ID NO: 13672 - RNA, 20 nt, synthetic construct
  misc_feature 1..20: note = C9Orf72 GTCN PAM targeting sequence
  source 1..20: mol_type = other RNA
taactgtgaacctttaaata

SEQ ID NO: 13673 - RNA, 20 nt, synthetic construct
  misc_feature 1..20: note = C9Orf72 GTCN PAM targeting sequence
  source 1..20: mol_type = other RNA
gtcctaactgtgaaccttta

SEQ ID NO: 13674 - RNA, 20 nt, synthetic construct
  misc_feature 1..20: note = C9Orf72 GTCN PAM targeting sequence
  source 1..20: mol_type = other RNA
gacacttaatggcccttcaa

SEQ ID NO: 13675 - RNA, 20 nt, synthetic construct
  misc_feature 1..20: note = C9Orf72 GTCN PAM targeting sequence
  source 1..20: mol_type = other RNA
gacttgctgaagtattaaac

SEQ ID NO: 13676 - RNA, 20 nt, synthetic construct
  misc_feature 1..20: note = C9Orf72 GTCN PAM targeting sequence
  source 1..20: mol_type = other RNA
gctaccacgcctggcacgaa

SEQ ID NO: 13677 - RNA, 20 nt, synthetic construct
  misc_feature 1..20: note = C9Orf72 GTCN PAM targeting sequence
  source 1..20: mol_type = other RNA
ctaattcctggcttcaagcg

SEQ ID NO: 13678 - RNA, 20 nt, synthetic construct
  misc_feature 1..20: note = C9Orf72 GTCN PAM targeting sequence
  source 1..20: mol_type = other RNA
cagctatctgggaggctgag

SEQ ID NO: 13679 - RNA, 20 nt, synthetic construct
  misc_feature 1..20: note = C9Orf72 GTCN PAM targeting sequence
  source 1..20: mol_type = other RNA
ctgcattccagcatgggcac

SEQ ID NO: 13680 - RNA, 20 nt, synthetic construct
  misc_feature 1..20: note = C9Orf72 GTCN PAM targeting sequence
  source 1..20: mol_type = other RNA
cactctgtgcccatgctgga

SEQ ID NO: 13681 - RNA, 20 nt, synthetic construct
  misc_feature 1..20: note = C9Orf72 GTCN PAM targeting sequence
  source 1..20: mol_type = other RNA
cttaaaagaaaaaaaaaaaa

SEQ ID NO: 13682 - RNA, 20 nt, synthetic construct
  misc_feature 1..20: note = C9Orf72 GTCN PAM targeting sequence
  source 1..20: mol_type = other RNA
ttttagatctatggagagat

SEQ ID NO: 13683 - RNA, 20 nt, synthetic construct
  misc_feature 1..20: note = C9Orf72 GTCN PAM targeting sequence
  source 1..20: mol_type = other RNA
actcctctcaacagccactg

SEQ ID NO: 13684 - RNA, 20 nt, synthetic construct
  misc_feature 1..20: note = C9Orf72 GTCN PAM targeting sequence
  source 1..20: mol_type = other RNA
gattgatcaagcgaaacctg

SEQ ID NO: 13685 - RNA, 20 nt, synthetic construct
  misc_feature 1..20: note = C9Orf72 GTCN PAM targeting sequence
  source 1..20: mol_type = other RNA
ggggagttgtccgattgatc

SEQ ID NO: 13686 - RNA, 20 nt, synthetic construct
  misc_feature 1..20: note = C9Orf72 GTCN PAM targeting sequence
  source 1..20: mol_type = other RNA
gcattaggggtctggggagt

SEQ ID NO: 13687 - RNA, 20 nt, synthetic construct
  misc_feature 1..20: note = C9Orf72 GTCN PAM targeting sequence
  source 1..20: mol_type = other RNA
gtggctaaatccctgcccct

SEQ ID NO: 13688 - RNA, 20 nt, synthetic construct
  misc_feature 1..20: note = C9Orf72 GTCN PAM targeting sequence
  source 1..20: mol_type = other RNA
cctggaggctggaggattat

SEQ ID NO: 13689 - RNA, 20 nt, synthetic construct
  misc_feature 1..20: note = C9Orf72 GTCN PAM targeting sequence
  source 1..20: mol_type = other RNA
cttcctaacagcactgtagg

SEQ ID NO: 13690 - RNA, 20 nt, synthetic construct
  misc_feature 1..20: note = C9Orf72 GTCN PAM targeting sequence
  source 1..20: mol_type = other RNA
ctcctttgctccaaagctct

SEQ ID NO: 13691 - RNA, 20 nt, synthetic construct
  misc_feature 1..20: note = C9Orf72 GTCN PAM targeting sequence
  source 1..20: mol_type = other RNA
gatttgttggttattctcac

SEQ ID NO: 13692 - RNA, 20 nt, synthetic construct
  misc_feature 1..20: note = C9Orf72 GTCN PAM targeting sequence
  source 1..20: mol_type = other RNA
ggagagaaggggaaggggta

SEQ ID NO: 13693 - RNA, 20 nt, synthetic construct
  misc_feature 1..20: note = C9Orf72 GTCN PAM targeting sequence
  source 1..20: mol_type = other RNA
aacccataaatatttgctga

SEQ ID NO: 13694 - RNA, 20 nt, synthetic construct
  misc_feature 1..20: note = C9Orf72 GTCN PAM targeting sequence
  source 1..20: mol_type = other RNA
acggactaactagtaagttc

SEQ ID NO: 13695 - RNA, 20 nt, synthetic construct
  misc_feature 1..20: note = C9Orf72 GTCN PAM targeting sequence
  source 1..20: mol_type = other RNA
gtggacagatggttcagggt

SEQ ID NO: 13696 - RNA, 20 nt, synthetic construct
  misc_feature 1..20: note = C9Orf72 GTCN PAM targeting sequence
  source 1..20: mol_type = other RNA
ccaggaaacccagagggaac

SEQ ID NO: 13697 - RNA, 20 nt, synthetic construct
  misc_feature 1..20: note = C9Orf72 GTCN PAM targeting sequence
  source 1..20: mol_type = other RNA
ttctgccatttccgagtgtc

SEQ ID NO: 13698 - RNA, 20 nt, synthetic construct
  misc_feature 1..20: note = C9Orf72 GTCN PAM targeting sequence
  source 1..20: mol_type = other RNA
gcattttaaacttgcacccc

SEQ ID NO: 13699 - RNA, 20 nt, synthetic construct
  misc_feature 1..20: note = C9Orf72 GTCN PAM targeting sequence
  source 1..20: mol_type = other RNA
acacatccactggtgagggg

SEQ ID NO: 13700 - RNA, 20 nt, synthetic construct
  misc_feature 1..20: note = C9Orf72 GTCN PAM targeting sequence
  source 1..20: mol_type = other RNA
gacatgcctggcctggcata

SEQ ID NO: 13701 - RNA, 20 nt, synthetic construct
  misc_feature 1..20: note = C9Orf72 GTCN PAM targeting sequence
  source 1..20: mol_type = other RNA
gactccctggctcagggagc

SEQ ID NO: 13702 - RNA, 20 nt, synthetic construct
  misc_feature 1..20: note = C9Orf72 GTCN PAM targeting sequence
  source 1..20: mol_type = other RNA
atgggccaaaagtcatttcc

SEQ ID NO: 13703 - RNA, 20 nt, synthetic construct
  misc_feature 1..20: note = C9Orf72 GTCN PAM targeting sequence
  source 1..20: mol_type = other RNA
tttcctgaggcgaataggca

SEQ ID NO: 13704 - RNA, 20 nt, synthetic construct
  misc_feature 1..20: note = C9Orf72 GTCN PAM targeting sequence
  source 1..20: mol_type = other RNA
cctgcctattcgcctcagga

SEQ ID NO: 13705 - RNA, 20 nt, synthetic construct
  misc_feature 1..20: note = C9Orf72 GTCN PAM targeting sequence
  source 1..20: mol_type = other RNA
tctgaagagttgtatttcca

SEQ ID NO: 13706 - RNA, 20 nt, synthetic construct
  misc_feature 1..20: note = C9Orf72 GTCN PAM targeting sequence
  source 1..20: mol_type = other RNA
ttgggggaaaggagaattaa

SEQ ID NO: 13707 - RNA, 20 nt, synthetic construct
  misc_feature 1..20: note = C9Orf72 GTCN PAM targeting sequence
  source 1..20: mol_type = other RNA
acaccacctgtggagaggct

SEQ ID NO: 13708 - RNA, 20 nt, synthetic construct
  misc_feature 1..20: note = C9Orf72 GTCN PAM targeting sequence
  source 1..20: mol_type = other RNA
ctgtgttgtatagactggtc

SEQ ID NO: 13709 - RNA, 20 nt, synthetic construct
  misc_feature 1..20: note = C9Orf72 GTCN PAM targeting sequence
  source 1..20: mol_type = other RNA
atacaacacagtgaccaaga

SEQ ID NO: 13710 - RNA, 20 nt, synthetic construct
  misc_feature 1..20: note = C9Orf72 GTCN PAM targeting sequence
  source 1..20: mol_type = other RNA
ttaagtaaatggatctgaga

SEQ ID NO: 13711 - RNA, 20 nt, synthetic construct
  misc_feature 1..20: note = C9Orf72 GTCN PAM targeting sequence
  source 1..20: mol_type = other RNA
gatctcagatccatttactt

SEQ ID NO: 13712 - RNA, 20 nt, synthetic construct
  misc_feature 1..20: note = C9Orf72 GTCN PAM targeting sequence
  source 1..20: mol_type = other RNA
aaatcgggcagtctgatctc

SEQ ID NO: 13713 - RNA, 20 nt, synthetic construct
  misc_feature 1..20: note = C9Orf72 GTCN PAM targeting sequence
  source 1..20: mol_type = other RNA
ccctccttctggatagggaa

SEQ ID NO: 13714 - RNA, 20 nt, synthetic construct
  misc_feature 1..20: note = C9Orf72 GTCN PAM targeting sequence
  source 1..20: mol_type = other RNA
tagttgatcaccacaatcct

SEQ ID NO: 13715 - RNA, 20 nt, synthetic construct
  misc_feature 1..20: note = C9Orf72 GTCN PAM targeting sequence
  source 1..20: mol_type = other RNA
ggcacactgtaggccagaaa

SEQ ID NO: 13716 - RNA, 20 nt, synthetic construct
  misc_feature 1..20: note = C9Orf72 GTCN PAM targeting sequence
  source 1..20: mol_type = other RNA
aagggtgctttttaaatacc

SEQ ID NO: 13717 - RNA, 20 nt, synthetic construct
  misc_feature 1..20: note = C9Orf72 GTCN PAM targeting sequence
  source 1..20: mol_type = other RNA
acacattgtggttacataaa

SEQ ID NO: 13718 - RNA, 20 nt, synthetic construct
  misc_feature 1..20: note = C9Orf72 GTCN PAM targeting sequence
  source 1..20: mol_type = other RNA
aaaatgttaaaaatagaaga

SEQ ID NO: 13719 - RNA, 20 nt, synthetic construct
  misc_feature 1..20: note = C9Orf72 GTCN PAM targeting sequence
  source 1..20: mol_type = other RNA
ttaaaaaaaaaatagtgtgg

SEQ ID NO: 13720 - RNA, 20 nt, synthetic construct
  misc_feature 1..20: note = C9Orf72 GTCN PAM targeting sequence
  source 1..20: mol_type = other RNA
cccttacttgtcattaaaaa

SEQ ID NO: 13721 - RNA, 20 nt, synthetic construct
  misc_feature 1..20: note = C9Orf72 GTCN PAM targeting sequence
  source 1..20: mol_type = other RNA
ccaaaggcctcaggaacttt

SEQ ID NO: 13722 - RNA, 20 nt, synthetic construct
  misc_feature 1..20: note = C9Orf72 GTCN PAM targeting sequence
  source 1..20: mol_type = other RNA
aagctgacagtacaggaagc

SEQ ID NO: 13723 - RNA, 20 nt, synthetic construct
  misc_feature 1..20: note = C9Orf72 GTCN PAM targeting sequence
  source 1..20: mol_type = other RNA
gcttggaccaaaaataaagc

SEQ ID NO: 13724 - RNA, 20 nt, synthetic construct
  misc_feature 1..20: note = C9Orf72 GTCN PAM targeting sequence
  source 1..20: mol_type = other RNA
gtggatgtggcttcctgtac

SEQ ID NO: 13725 - RNA, 20 nt, synthetic construct
  misc_feature 1..20: note = C9Orf72 GTCN PAM targeting sequence
  source 1..20: mol_type = other RNA
tgttaggtaagcctccagtg

SEQ ID NO: 13726 - RNA, 20 nt, synthetic construct
  misc_feature 1..20: note = C9Orf72 GTCN PAM targeting sequence
  source 1..20: mol_type = other RNA
aagaaatctgaagaggaaaa

SEQ ID NO: 13727 - RNA, 20 nt, synthetic construct
  misc_feature 1..20: note = C9Orf72 GTCN PAM targeting sequence
  source 1..20: mol_type = other RNA
ccattcctaggaaaatagta

SEQ ID NO: 13728 - RNA, 20 nt, synthetic construct
  misc_feature 1..20: note = C9Orf72 GTCN PAM targeting sequence
  source 1..20: mol_type = other RNA
cttgctgggctgatactatt

SEQ ID NO: 13729 - RNA, 20 nt, synthetic construct
  misc_feature 1..20: note = C9Orf72 GTCN PAM targeting sequence
  source 1..20: mol_type = other RNA
acaaaaaaattgaaaggctt

SEQ ID NO: 13730 - RNA, 20 nt, synthetic construct
  misc_feature 1..20: note = C9Orf72 GTCN PAM targeting sequence
  source 1..20: mol_type = other RNA
taacttgtgtttgcggaact

SEQ ID NO: 13731 - RNA, 20 nt, synthetic construct
  misc_feature 1..20: note = C9Orf72 GTCN PAM targeting sequence
  source 1..20: mol_type = other RNA
tttttaaaaagaagcatcta

SEQ ID NO: 13732 - RNA, 20 nt, synthetic construct
  misc_feature 1..20: note = C9Orf72 GTCN PAM targeting sequence
  source 1..20: mol_type = other RNA
ctttggtgcatctcaaatgc

SEQ ID NO: 13733 - RNA, 20 nt, synthetic construct
  misc_feature 1..20: note = C9Orf72 GTCN PAM targeting sequence
  source 1..20: mol_type = other RNA
ttacataactgatcaagata

SEQ ID NO: 13734 - RNA, 20 nt, synthetic construct
  misc_feature 1..20: note = C9Orf72 GTCN PAM targeting sequence
  source 1..20: mol_type = other RNA
tcatttgctctcccttaatt

SEQ ID NO: 13735 - RNA, 20 nt, synthetic construct
  misc_feature 1..20: note = C9Orf72 GTCN PAM targeting sequence
  source 1..20: mol_type = other RNA
ttttctagaagccatgcaag

SEQ ID NO: 13736 - RNA, 20 nt, synthetic construct
  misc_feature 1..20: note = C9Orf72 GTCN PAM targeting sequence
  source 1..20: mol_type = other RNA
gtttttgtctttttctagaa

SEQ ID NO: 13737 - RNA, 20 nt, synthetic construct
  misc_feature 1..20: note = C9Orf72 GTCN PAM targeting sequence
  source 1..20: mol_type = other RNA
gtcagtttttgtctttttct

SEQ ID NO: 13738 - RNA, 20 nt, synthetic construct
  misc_feature 1..20: note = C9Orf72 GTCN PAM targeting sequence
  source 1..20: mol_type = other RNA
tgaataaagtacacgttttt

SEQ ID NO: 13739 - RNA, 20 nt, synthetic construct
  misc_feature 1..20: note = C9Orf72 GTCN PAM targeting sequence
  source 1..20: mol_type = other RNA
gagggaggcaaagggggagg

SEQ ID NO: 13740 - RNA, 20 nt, synthetic construct
  misc_feature 1..20: note = C9Orf72 GTCN PAM targeting sequence
  source 1..20: mol_type = other RNA
tgctgggacacagaggagtc

SEQ ID NO: 13741 - RNA, 20 nt, synthetic construct
  misc_feature 1..20: note = C9Orf72 GTCN PAM targeting sequence
  source 1..20: mol_type = other RNA
cagcacgaccccaccctccc

SEQ ID NO: 13742 - RNA, 20 nt, synthetic construct
  misc_feature 1..20: note = C9Orf72 GTCN PAM targeting sequence
  source 1..20: mol_type = other RNA
ctccctgtttggagagccac

SEQ ID NO: 13743 - RNA, 20 nt, synthetic construct
  misc_feature 1..20: note = C9Orf72 GTCN PAM targeting sequence
  source 1..20: mol_type = other RNA
aagctggacaagcagagagg

SEQ ID NO: 13744 - RNA, 20 nt, synthetic construct
  misc_feature 1..20: note = C9Orf72 GTCN PAM targeting sequence
  source 1..20: mol_type = other RNA
agcttggacagcttctcttt

SEQ ID NO: 13745 - RNA, 20 nt, synthetic construct
  misc_feature 1..20: note = C9Orf72 GTCN PAM targeting sequence
  source 1..20: mol_type = other RNA
ctctctgcttgtccagcttg

SEQ ID NO: 13746 - RNA, 20 nt, synthetic construct
  misc_feature 1..20: note = C9Orf72 GTCN PAM targeting sequence
  source 1..20: mol_type = other RNA
ctaaactaatccacatcaag

SEQ ID NO: 13747 - RNA, 20 nt, synthetic construct
  misc_feature 1..20: note = C9Orf72 GTCN PAM targeting sequence
  source 1..20: mol_type = other RNA
ctgtgttgccccagaggccc

SEQ ID NO: 13748 - RNA, 20 nt, synthetic construct
  misc_feature 1..20: note = C9Orf72 GTCN PAM targeting sequence
  source 1..20: mol_type = other RNA
ggtccctgtgttgccccaga

SEQ ID NO: 13749 - RNA, 20 nt, synthetic construct
  misc_feature 1..20: note = C9Orf72 GTCN PAM targeting sequence
  source 1..20: mol_type = other RNA
gccccaaacaggggatgttg

SEQ ID NO: 13750 - RNA, 20 nt, synthetic construct
  misc_feature 1..20: note = C9Orf72 GTCN PAM targeting sequence
  source 1..20: mol_type = other RNA
atcaccaacatcccctgttt

SEQ ID NO: 13751 - RNA, 20 nt, synthetic construct
  misc_feature 1..20: note = C9Orf72 GTCN PAM targeting sequence
  source 1..20: mol_type = other RNA
tgatggggtccatcaccaac

SEQ ID NO: 13752 - RNA, 20 nt, synthetic construct
  misc_feature 1..20: note = C9Orf72 GTCN PAM targeting sequence
  source 1..20: mol_type = other RNA
tgcactctccccagttccac

SEQ ID NO: 13753 - RNA, 20 nt, synthetic construct
  misc_feature 1..20: note = C9Orf72 GTCN PAM targeting sequence
  source 1..20: mol_type = other RNA
tggcagcttcccaaatgaat

SEQ ID NO: 13754 - RNA, 20 nt, synthetic construct
  misc_feature 1..20: note = C9Orf72 GTCN PAM targeting sequence
  source 1..20: mol_type = other RNA
aatctttcaaatggggcatc

SEQ ID NO: 13755 - RNA, 20 nt, synthetic construct
  misc_feature 1..20: note = C9Orf72 GTCN PAM targeting sequence
  source 1..20: mol_type = other RNA
attgcactgtggctgctatc

SEQ ID NO: 13756 - RNA, 20 nt, synthetic construct
  misc_feature 1..20: note = C9Orf72 GTCN PAM targeting sequence
  source 1..20: mol_type = other RNA
caccttttaatgccatcaca

SEQ ID NO: 13757 - RNA, 20 nt, synthetic construct
  misc_feature 1..20: note = C9Orf72 GTCN PAM targeting sequence
  source 1..20: mol_type = other RNA
cttttataatggctaatctc

SEQ ID NO: 13758 - RNA, 20 nt, synthetic construct
  misc_feature 1..20: note = C9Orf72 GTCN PAM targeting sequence
  source 1..20: mol_type = other RNA
aaggtatcttgttacaggta

SEQ ID NO: 13759 - RNA, 20 nt, synthetic construct
  misc_feature 1..20: note = C9Orf72 GTCN PAM targeting sequence
  source 1..20: mol_type = other RNA
tacaggctacctgtaacaag

SEQ ID NO: 13760 - RNA, 20 nt, synthetic construct
  misc_feature 1..20: note = C9Orf72 GTCN PAM targeting sequence
  source 1..20: mol_type = other RNA
aggtttacaatgcatttaat

SEQ ID NO: 13761 - RNA, 20 nt, synthetic construct
  misc_feature 1..20: note = C9Orf72 GTCN PAM targeting sequence
  source 1..20: mol_type = other RNA
ttttaagtaaagtttctttc

SEQ ID NO: 13762 - RNA, 20 nt, synthetic construct
  misc_feature 1..20: note = C9Orf72 GTCN PAM targeting sequence
  source 1..20: mol_type = other RNA
gaaagaaactttacttaaaa

SEQ ID NO: 13763 - RNA, 20 nt, synthetic construct
  misc_feature 1..20: note = C9Orf72 GTCN PAM targeting sequence
  source 1..20: mol_type = other RNA
tacagtaatgaggtatacat

SEQ ID NO: 13764 - RNA, 20 nt, synthetic construct
  misc_feature 1..20: note = C9Orf72 GTCN PAM targeting sequence
  source 1..20: mol_type = other RNA
agggaagttccacttgaata

SEQ ID NO: 13765 - RNA, 20 nt, synthetic construct
  misc_feature 1..20: note = C9Orf72 GTCN PAM targeting sequence
  source 1..20: mol_type = other RNA
gtttgggcccatgatgtcta

SEQ ID NO: 13766 - RNA, 20 nt, synthetic construct
  misc_feature 1..20: note = C9Orf72 GTCN PAM targeting sequence
  source 1..20: mol_type = other RNA
gcacacaagtgaaggcaatg

SEQ ID NO: 13767 - RNA, 20 nt, synthetic construct
  misc_feature 1..20: note = C9Orf72 GTCN PAM targeting sequence
  source 1..20: mol_type = other RNA
ttgccttcacttgtgtgctg

SEQ ID NO: 13768 - RNA, 20 nt, synthetic construct
  misc_feature 1..20: note = C9Orf72 GTCN PAM targeting sequence
  source 1..20: mol_type = other RNA
tcataccctagaatagtcac

SEQ ID NO: 13769 - RNA, 20 nt, synthetic construct
  misc_feature 1..20: note = C9Orf72 GTCN PAM targeting sequence
  source 1..20: mol_type = other RNA
ccatgatgcatgtgcctgct

SEQ ID NO: 13770 - RNA, 20 nt, synthetic construct
  misc_feature 1..20: note = C9Orf72 GTCN PAM targeting sequence
  source 1..20: mol_type = other RNA
tgcaacaggaatgatacgaa

SEQ ID NO: 13771 - RNA, 20 nt, synthetic construct
  misc_feature 1..20: note = C9Orf72 GTCN PAM targeting sequence
  source 1..20: mol_type = other RNA
cttcccttcttgcccttctt

SEQ ID NO: 13772 - RNA, 20 nt, synthetic construct
  misc_feature 1..20: note = C9Orf72 GTCN PAM targeting sequence
  source 1..20: mol_type = other RNA
tgaatgtctcttcccttctt

SEQ ID NO: 13773 - RNA, 20 nt, synthetic construct
  misc_feature 1..20: note = C9Orf72 GTCN PAM targeting sequence
  source 1..20: mol_type = other RNA
catcaaaacaaactttgaaa

SEQ ID NO: 13774 - RNA, 20 nt, synthetic construct
  misc_feature 1..20: note = C9Orf72 GTCN PAM targeting sequence
  source 1..20: mol_type = other RNA
cctggcatccatgcttttgt

SEQ ID NO: 13775 - RNA, 20 nt, synthetic construct
  misc_feature 1..20: note = C9Orf72 GTCN PAM targeting sequence
  source 1..20: mol_type = other RNA
agccttcactcaatcagagc

SEQ ID NO: 13776 - RNA, 20 nt, synthetic construct
  misc_feature 1..20: note = C9Orf72 GTCN PAM targeting sequence
  source 1..20: mol_type = other RNA
ctgggtccagccttcactca

SEQ ID NO: 13777 - RNA, 20 nt, synthetic construct
  misc_feature 1..20: note = C9Orf72 GTCN PAM targeting sequence
  source 1..20: mol_type = other RNA
gtctctgggtccagccttca

SEQ ID NO: 13778 - RNA, 20 nt, synthetic construct
  misc_feature 1..20: note = C9Orf72 GTCN PAM targeting sequence
  source 1..20: mol_type = other RNA
cagtgttttataagctaatc

SEQ ID NO: 13779 - RNA, 20 nt, synthetic construct
  misc_feature 1..20: note = C9Orf72 GTCN PAM targeting sequence
  source 1..20: mol_type = other RNA
ttggcaggattcagatcctg

SEQ ID NO: 13780 - RNA, 20 nt, synthetic construct
  misc_feature 1..20: note = C9Orf72 GTCN PAM targeting sequence
  source 1..20: mol_type = other RNA
aaccttgatacagctgcagc

SEQ ID NO: 13781 - RNA, 20 nt, synthetic construct
  misc_feature 1..20: note = C9Orf72 GTCN PAM targeting sequence
  source 1..20: mol_type = other RNA
gcaggcagagtacagcgtag

SEQ ID NO: 13782 - RNA, 20 nt, synthetic construct
  misc_feature 1..20: note = C9Orf72 GTCN PAM targeting sequence
  source 1..20: mol_type = other RNA
attcattgataactagtata

SEQ ID NO: 13783 - RNA, 20 nt, synthetic construct
  misc_feature 1..20: note = C9Orf72 GTCN PAM targeting sequence
  source 1..20: mol_type = other RNA
atatatctgtattgatatga

SEQ ID NO: 13784 - RNA, 20 nt, synthetic construct
  misc_feature 1..20: note = C9Orf72 GTCN PAM targeting sequence
  source 1..20: mol_type = other RNA
catgttgttttgcaatttgc

SEQ ID NO: 13785 - RNA, 20 nt, synthetic construct
  misc_feature 1..20: note = C9Orf72 GTCN PAM targeting sequence
  source 1..20: mol_type = other RNA
atatctgccattttttaaaa

SEQ ID NO: 13786 - RNA, 20 nt, synthetic construct
  misc_feature 1..20: note = C9Orf72 GTCN PAM targeting sequence
  source 1..20: mol_type = other RNA
agttgctctgtctaatcaat

SEQ ID NO: 13787 - RNA, 20 nt, synthetic construct
  misc_feature 1..20: note = C9Orf72 GTCN PAM targeting sequence
  source 1..20: mol_type = other RNA
aatcaatttgaaagtatatc

SEQ ID NO: 13788 - RNA, 20 nt, synthetic construct
  misc_feature 1..20: note = C9Orf72 GTCN PAM targeting sequence
  source 1..20: mol_type = other RNA
acaccaccagattctctctc

SEQ ID NO: 13789 - RNA, 20 nt, synthetic construct
  misc_feature 1..20: note = C9Orf72 GTCN PAM targeting sequence
  source 1..20: mol_type = other RNA
atggcagctgtaaagagaga

SEQ ID NO: 13790 - RNA, 20 nt, synthetic construct
  misc_feature 1..20: note = C9Orf72 GTCN PAM targeting sequence
  source 1..20: mol_type = other RNA
ggaaataatagtttgccgag

SEQ ID NO: 13791 - RNA, 20 nt, synthetic construct
  misc_feature 1..20: note = C9Orf72 GTCN PAM targeting sequence
  source 1..20: mol_type = other RNA
tgatctacagatctggcccc

SEQ ID NO: 13792 - RNA, 20 nt, synthetic construct
  misc_feature 1..20: note = C9Orf72 GTCN PAM targeting sequence
  source 1..20: mol_type = other RNA
tctatcacttcaaggctgta

SEQ ID NO: 13793 - RNA, 20 nt, synthetic construct
  misc_feature 1..20: note = C9Orf72 GTCN PAM targeting sequence
  source 1..20: mol_type = other RNA
cagttttggagacaagaaat

SEQ ID NO: 13794 - RNA, 20 nt, synthetic construct
  misc_feature 1..20: note = C9Orf72 GTCN PAM targeting sequence
  source 1..20: mol_type = other RNA
ccaaaactgagacagtacat

SEQ ID NO: 13795 - RNA, 20 nt, synthetic construct
  misc_feature 1..20: note = C9Orf72 GTCN PAM targeting sequence
  source 1..20: mol_type = other RNA
ttgtttctggtggggttttt

SEQ ID NO: 13796 - RNA, 20 nt, synthetic construct
  misc_feature 1..20: note = C9Orf72 GTCN PAM targeting sequence
  source 1..20: mol_type = other RNA
acaagccaaggaacactgaa

SEQ ID NO: 13797 - RNA, 20 nt, synthetic construct
  misc_feature 1..20: note = C9Orf72 GTCN PAM targeting sequence
  source 1..20: mol_type = other RNA
atctccaaattttccctttt

SEQ ID NO: 13798 - RNA, 20 nt, synthetic construct
  misc_feature 1..20: note = C9Orf72 GTCN PAM targeting sequence
  source 1..20: mol_type = other RNA
ttttagattagaggcccacc

SEQ ID NO: 13799 - RNA, 20 nt, synthetic construct
  misc_feature 1..20: note = C9Orf72 GTCN PAM targeting sequence
  source 1..20: mol_type = other RNA
ggtgggcctctaatctaaaa

SEQ ID NO: 13800 - RNA, 20 nt, synthetic construct
  misc_feature 1..20: note = C9Orf72 GTCN PAM targeting sequence
  source 1..20: mol_type = other RNA
tactggagtcgggtgggcct

SEQ ID NO: 13801 - RNA, 20 nt, synthetic construct
  misc_feature 1..20: note = C9Orf72 GTCN PAM targeting sequence
  source 1..20: mol_type = other RNA
tgttaaaaggtattgcaggt

SEQ ID NO: 13802 - RNA, 20 nt, synthetic construct
  misc_feature 1..20: note = C9Orf72 GTCN PAM targeting sequence
  source 1..20: mol_type = other RNA
cctcttcctgaaaagctctt

SEQ ID NO: 13803 - RNA, 20 nt, synthetic construct
  misc_feature 1..20: note = C9Orf72 GTCN PAM targeting sequence
  source 1..20: mol_type = other RNA
catggcagccacactgggta

SEQ ID NO: 13804 - RNA, 20 nt, synthetic construct
  misc_feature 1..20: note = C9Orf72 GTCN PAM targeting sequence
  source 1..20: mol_type = other RNA
acaaggcatagtctcatggc

SEQ ID NO: 13805 - RNA, 20 nt, synthetic construct
  misc_feature 1..20: note = C9Orf72 GTCN PAM targeting sequence
  source 1..20: mol_type = other RNA
ctatctaggagtagcctgtg

SEQ ID NO: 13806 - RNA, 20 nt, synthetic construct
  misc_feature 1..20: note = C9Orf72 GTCN PAM targeting sequence
  source 1..20: mol_type = other RNA
aagccacctcttaggtaagt

SEQ ID NO: 13807 - RNA, 20 nt, synthetic construct
  misc_feature 1..20: note = C9Orf72 GTCN PAM targeting sequence
  source 1..20: mol_type = other RNA
ttgagtccaagccacctctt

SEQ ID NO: 13808 - RNA, 20 nt, synthetic construct
  misc_feature 1..20: note = C9Orf72 GTCN PAM targeting sequence
  source 1..20: mol_type = other RNA
tcttcacctggggtcagacc

SEQ ID NO: 13809 - RNA, 20 nt, synthetic construct
  misc_feature 1..20: note = C9Orf72 GTCN PAM targeting sequence
  source 1..20: mol_type = other RNA
gacctgcatcacaatcagag

SEQ ID NO: 13810 - RNA, 20 nt, synthetic construct
  misc_feature 1..20: note = C9Orf72 GTCN PAM targeting sequence
  source 1..20: mol_type = other RNA
gaccccaggtgaagaagacg

SEQ ID NO: 13811 - RNA, 20 nt, synthetic construct
  misc_feature 1..20: note = C9Orf72 GTCN PAM targeting sequence
  source 1..20: mol_type = other RNA
cccgagctcccagcagctca

SEQ ID NO: 13812 - RNA, 20 nt, synthetic construct
  misc_feature 1..20: note = C9Orf72 GTCN PAM targeting sequence
  source 1..20: mol_type = other RNA
gacagggcattcaaaagggc

SEQ ID NO: 13813 - RNA, 20 nt, synthetic construct
  misc_feature 1..20: note = C9Orf72 GTCN PAM targeting sequence
  source 1..20: mol_type = other RNA
gactatgagggaaagtagga

SEQ ID NO: 13814 - RNA, 20 nt, synthetic construct
  misc_feature 1..20: note = C9Orf72 GTCN PAM targeting sequence
  source 1..20: mol_type = other RNA
aggaaacaatgaaaatgtgg

SEQ ID NO: 13815 - RNA, 20 nt, synthetic construct
  misc_feature 1..20: note = C9Orf72 GTCN PAM targeting sequence
  source 1..20: mol_type = other RNA
gttttctccaagaagcatta

SEQ ID NO: 13816 - RNA, 20 nt, synthetic construct
  misc_feature 1..20: note = C9Orf72 GTCN PAM targeting sequence
  source 1..20: mol_type = other RNA
ctcctcagagaggtttcctt

SEQ ID NO: 13817 - RNA, 20 nt, synthetic construct
  misc_feature 1..20: note = C9Orf72 GTCN PAM targeting sequence
  source 1..20: mol_type = other RNA
tgtgctttattagggtggca

SEQ ID NO: 13818 - RNA, 20 nt, synthetic construct
  misc_feature 1..20: note = C9Orf72 GTCN PAM targeting sequence
  source 1..20: mol_type = other RNA
ctctctctcccattctcctg

SEQ ID NO: 13819 - RNA, 20 nt, synthetic construct
  misc_feature 1..20: note = C9Orf72 GTCN PAM targeting sequence
  source 1..20: mol_type = other RNA
ttcccatgagaatgtaaact

SEQ ID NO: 13820 - RNA, 20 nt, synthetic construct
  misc_feature 1..20: note = C9Orf72 GTCN PAM targeting sequence
  source 1..20: mol_type = other RNA
ttgctcctgtatagtttaca

SEQ ID NO: 13821 - RNA, 20 nt, synthetic construct
  misc_feature 1..20: note = C9Orf72 GTCN PAM targeting sequence
  source 1..20: mol_type = other RNA
taggtgctggggcacaacaa

SEQ ID NO: 13822 - RNA, 20 nt, synthetic construct
  misc_feature 1..20: note = C9Orf72 GTCN PAM targeting sequence
  source 1..20: mol_type = other RNA
ggaacatgataggtggccaa

SEQ ID NO: 13823 - RNA, 20 nt, synthetic construct
  misc_feature 1..20: note = C9Orf72 GTCN PAM targeting sequence
  source 1..20: mol_type = other RNA
gtctgaatttacccagatcc

SEQ ID NO: 13824 - RNA, 20 nt, synthetic construct
  misc_feature 1..20: note = C9Orf72 GTCN PAM targeting sequence
  source 1..20: mol_type = other RNA
gaatttacccagatcctctt

SEQ ID NO: 13825 - RNA, 20 nt, synthetic construct
  misc_feature 1..20: note = C9Orf72 GTCN PAM targeting sequence
  source 1..20: mol_type = other RNA
tacaggtatatgaggtacat

SEQ ID NO: 13826 - RNA, 20 nt, synthetic construct
  misc_feature 1..20: note = C9Orf72 GTCN PAM targeting sequence
  source 1..20: mol_type = other RNA
cctgttctcaaatgggcatc

SEQ ID NO: 13827 - RNA, 20 nt, synthetic construct
  misc_feature 1..20: note = C9Orf72 GTCN PAM targeting sequence
  source 1..20: mol_type = other RNA
gttccagcatcttaccttgc

SEQ ID NO: 13828 - RNA, 20 nt, synthetic construct
  misc_feature 1..20: note = C9Orf72 GTCN PAM targeting sequence
  source 1..20: mol_type = other RNA
gaattcttcaaaatatccat

SEQ ID NO: 13829 - RNA, 20 nt, synthetic construct
  misc_feature 1..20: note = C9Orf72 GTCN PAM targeting sequence
  source 1..20: mol_type = other RNA
tgtttttatgtaaatggata

SEQ ID NO: 13830 - RNA, 20 nt, synthetic construct
  misc_feature 1..20: note = C9Orf72 GTCN PAM targeting sequence
  source 1..20: mol_type = other RNA
gaattgtgctccagtatcag

SEQ ID NO: 13831 - RNA, 20 nt, synthetic construct
  misc_feature 1..20: note = C9Orf72 GTCN PAM targeting sequence
  source 1..20: mol_type = other RNA
tgcacaagtgtgttgcacaa

SEQ ID NO: 13832 - RNA, 20 nt, synthetic construct
  misc_feature 1..20: note = C9Orf72 GTCN PAM targeting sequence
  source 1..20: mol_type = other RNA
tgagttatgaaaatatttct

SEQ ID NO: 13833 - RNA, 20 nt, synthetic construct
  misc_feature 1..20: note = C9Orf72 GTCN PAM targeting sequence
  source 1..20: mol_type = other RNA
tgtaggtcctgagttatgaa

SEQ ID NO: 13834 - RNA, 20 nt, synthetic construct
  misc_feature 1..20: note = C9Orf72 GTCN PAM targeting sequence
  source 1..20: mol_type = other RNA
gaaggagaagccacgtacac

SEQ ID NO: 13835 - RNA, 20 nt, synthetic construct
  misc_feature 1..20: note = C9Orf72 GTCN PAM targeting sequence
  source 1..20: mol_type = other RNA
gattattctcttactgtaag

SEQ ID NO: 13836 - RNA, 20 nt, synthetic construct
  misc_feature 1..20: note = C9Orf72 GTCN PAM targeting sequence
  source 1..20: mol_type = other RNA
aaagaagtgttctgaatgga

SEQ ID NO: 13837 - RNA, 20 nt, synthetic construct
  misc_feature 1..20: note = C9Orf72 GTCN PAM targeting sequence
  source 1..20: mol_type = other RNA
caagcaggattaaaaagaca

SEQ ID NO: 13838 - RNA, 20 nt, synthetic construct
  misc_feature 1..20: note = C9Orf72 GTCN PAM targeting sequence
  source 1..20: mol_type = other RNA
ttttaatcctgcttgggact

SEQ ID NO: 13839 - RNA, 20 nt, synthetic construct
  misc_feature 1..20: note = C9Orf72 GTCN PAM targeting sequence
  source 1..20: mol_type = other RNA
tacaagcaaccagagagaaa

SEQ ID NO: 13840 - RNA, 20 nt, synthetic construct
  misc_feature 1..20: note = C9Orf72 GTCN PAM targeting sequence
  source 1..20: mol_type = other RNA
accaccaatctaattgccat

SEQ ID NO: 13841 - RNA, 20 nt, synthetic construct
  misc_feature 1..20: note = C9Orf72 GTCN PAM targeting sequence
  source 1..20: mol_type = other RNA
tttcattatcatctggcctc

SEQ ID NO: 13842 - RNA, 20 nt, synthetic construct
  misc_feature 1..20: note = C9Orf72 GTCN PAM targeting sequence
  source 1..20: mol_type = other RNA
aactaatattctatacctaa

SEQ ID NO: 13843 - RNA, 20 nt, synthetic construct
  misc_feature 1..20: note = C9Orf72 GTCN PAM targeting sequence
  source 1..20: mol_type = other RNA
gtgttattctgttatagcag

SEQ ID NO: 13844 - RNA, 20 nt, synthetic construct
  misc_feature 1..20: note = C9Orf72 GTCN PAM targeting sequence
  source 1..20: mol_type = other RNA
ggaggctgggaagtccaaga

SEQ ID NO: 13845 - RNA, 20 nt, synthetic construct
  misc_feature 1..20: note = C9Orf72 GTCN PAM targeting sequence
  source 1..20: mol_type = other RNA
aagagcaaggcaccagcaac

SEQ ID NO: 13846 - RNA, 20 nt, synthetic construct
  misc_feature 1..20: note = C9Orf72 GTCN PAM targeting sequence
  source 1..20: mol_type = other RNA
catcatggcagaaggcatca

SEQ ID NO: 13847 - RNA, 20 nt, synthetic construct
  misc_feature 1..20: note = C9Orf72 GTCN PAM targeting sequence
  source 1..20: mol_type = other RNA
tgaaggttctgccctcatga

SEQ ID NO: 13848 - RNA, 20 nt, synthetic construct
  misc_feature 1..20: note = C9Orf72 GTCN PAM targeting sequence
  source 1..20: mol_type = other RNA
cctaaaattcatgtgctaga

SEQ ID NO: 13849 - RNA, 20 nt, synthetic construct
  misc_feature 1..20: note = C9Orf72 GTCN PAM targeting sequence
  source 1..20: mol_type = other RNA
ctcttttttggtatgaatat

SEQ ID NO: 13850 - RNA, 20 nt, synthetic construct
  misc_feature 1..20: note = C9Orf72 GTCN PAM targeting sequence
  source 1..20: mol_type = other RNA
atgaattggatagtctctct

SEQ ID NO: 13851 - RNA, 20 nt, synthetic construct
  misc_feature 1..20: note = C9Orf72 GTCN PAM targeting sequence
  source 1..20: mol_type = other RNA
tctttgcttatcattgctta

SEQ ID NO: 13852 - RNA, 20 nt, synthetic construct
  misc_feature 1..20: note = C9Orf72 GTCN PAM targeting sequence
  source 1..20: mol_type = other RNA
cactatgttgcccaggctgg

SEQ ID NO: 13853 - RNA, 20 nt, synthetic construct
  misc_feature 1..20: note = C9Orf72 GTCN PAM targeting sequence
  source 1..20: mol_type = other RNA
ctacaaaaagttttaaaaat

SEQ ID NO: 13854 - RNA, 20 nt, synthetic construct
  misc_feature 1..20: note = C9Orf72 GTCN PAM targeting sequence
  source 1..20: mol_type = other RNA
tagctacttgagaagctgag

SEQ ID NO: 13855 - RNA, 20 nt, synthetic construct
  misc_feature 1..20: note = C9Orf72 GTCN PAM targeting sequence
  source 1..20: mol_type = other RNA
tagctcactgttaccttgaa

SEQ ID NO: 13856 - RNA, 20 nt, synthetic construct
  misc_feature 1..20: note = C9Orf72 GTCN PAM targeting sequence
  source 1..20: mol_type = other RNA
ctttaaaaaaaaaaaaaaaa

SEQ ID NO: 13857 - RNA, 20 nt, synthetic construct
  misc_feature 1..20: note = C9Orf72 GTCN PAM targeting sequence
  source 1..20: mol_type = other RNA
caaagaaaaaaaaaagttat

SEQ ID NO: 13858 - RNA, 20 nt, synthetic construct
  misc_feature 1..20: note = C9Orf72 GTCN PAM targeting sequence
  source 1..20: mol_type = other RNA
cactctgttgcccaggctgg

SEQ ID NO: 13859 - RNA, 20 nt, synthetic construct
  misc_feature 1..20: note = C9Orf72 GTCN PAM targeting sequence
  source 1..20: mol_type = other RNA
ctcaagtaactgggactaca

SEQ ID NO: 13860 - RNA, 20 nt, synthetic construct
  misc_feature 1..20: note = C9Orf72 GTCN PAM targeting sequence
  source 1..20: mol_type = other RNA
cagttacttgagagactgag

SEQ ID NO: 13861 - RNA, 20 nt, synthetic construct
  misc_feature 1..20: note = C9Orf72 GTCN PAM targeting sequence
  source 1..20: mol_type = other RNA
caaaaaaaaaaaaaaatagc

SEQ ID NO: 13862 - RNA, 20 nt, synthetic construct
  misc_feature 1..20: note = C9Orf72 GTCN PAM targeting sequence
  source 1..20: mol_type = other RNA
cgctctgtcacccaggctgg

SEQ ID NO: 13863 - RNA, 20 nt, synthetic construct
  misc_feature 1..20: note = C9Orf72 GTCN PAM targeting sequence
  source 1..20: mol_type = other RNA
cccaggctggagtgcagtga

SEQ ID NO: 13864 - RNA, 20 nt, synthetic construct
  misc_feature 1..20: note = C9Orf72 GTCN PAM targeting sequence
  source 1..20: mol_type = other RNA
ctgcactccagcctgggtga

SEQ ID NO: 13865 - RNA, 20 nt, synthetic construct
  misc_feature 1..20: note = C9Orf72 GTCN PAM targeting sequence
  source 1..20: mol_type = other RNA
cagctactccggaggctgag

SEQ ID NO: 13866 - RNA, 20 nt, synthetic construct
  misc_feature 1..20: note = C9Orf72 GTCN PAM targeting sequence
  source 1..20: mol_type = other RNA
ctactaaaaaatgcaaaaaa

SEQ ID NO: 13867 - RNA, 20 nt, synthetic construct
  misc_feature 1..20: note = C9Orf72 GTCN PAM targeting sequence
  source 1..20: mol_type = other RNA
tgatctcctgaccttgtgat

SEQ ID NO: 13868 - RNA, 20 nt, synthetic construct
  misc_feature 1..20: note = C9Orf72 GTCN PAM targeting sequence
  source 1..20: mol_type = other RNA
ggagatcaagaccatcctgg

SEQ ID NO: 13869 - RNA, 20 nt, synthetic construct
  misc_feature 1..20: note = C9Orf72 GTCN PAM targeting sequence
  source 1..20: mol_type = other RNA
gatcacaaggtcaggagatc

SEQ ID NO: 13870 - RNA, 20 nt, synthetic construct
  misc_feature 1..20: note = C9Orf72 GTCN PAM targeting sequence
  source 1..20: mol_type = other RNA
ctactaaaaatacaaaaatt

SEQ ID NO: 13871 - RNA, 20 nt, synthetic construct
  misc_feature 1..20: note = C9Orf72 GTCN PAM targeting sequence
  source 1..20: mol_type = other RNA
tgatctcttgatctgcctgc

SEQ ID NO: 13872 - RNA, 20 nt, synthetic construct
  misc_feature 1..20: note = C9Orf72 GTCN PAM targeting sequence
  source 1..20: mol_type = other RNA
catttgagtattctttttcc

SEQ ID NO: 13873 - RNA, 20 nt, synthetic construct
  misc_feature 1..20: note = C9Orf72 GTCN PAM targeting sequence
  source 1..20: mol_type = other RNA
gtatatgtctcatttgagta

SEQ ID NO: 13874 - RNA, 20 nt, synthetic construct
  misc_feature 1..20: note = C9Orf72 GTCN PAM targeting sequence
  source 1..20: mol_type = other RNA
gtgcttgtattgatttactt

SEQ ID NO: 13875 - RNA, 20 nt, synthetic construct
  misc_feature 1..20: note = C9Orf72 GTCN PAM targeting sequence
  source 1..20: mol_type = other RNA
atataatttttcaaactcca

SEQ ID NO: 13876 - RNA, 20 nt, synthetic construct
  misc_feature 1..20: note = C9Orf72 GTCN PAM targeting sequence
  source 1..20: mol_type = other RNA
tttgagtattttaagtctat

SEQ ID NO: 13877 - RNA, 20 nt, synthetic construct
  misc_feature 1..20: note = C9Orf72 GTCN PAM targeting sequence
  source 1..20: mol_type = other RNA
ttaacttactaaattctaaa

SEQ ID NO: 13878 - RNA, 20 nt, synthetic construct
  misc_feature 1..20: note = C9Orf72 GTCN PAM targeting sequence
  source 1..20: mol_type = other RNA
cactctgttttttcttctgc

SEQ ID NO: 13879 - RNA, 20 nt, synthetic construct
  misc_feature 1..20: note = C9Orf72 GTCN PAM targeting sequence
  source 1..20: mol_type = other RNA
ttttatggatgagcgagttc

SEQ ID NO: 13880 - RNA, 20 nt, synthetic construct
  misc_feature 1..20: note = C9Orf72 GTCN PAM targeting sequence
  source 1..20: mol_type = other RNA
tttgtgctgtttgttgcaca

SEQ ID NO: 13881 - RNA, 20 nt, synthetic construct
  misc_feature 1..20: note = C9Orf72 GTCN PAM targeting sequence
  source 1..20: mol_type = other RNA
atatctgctggagtcttttg

SEQ ID NO: 13882 - RNA, 20 nt, synthetic construct
  misc_feature 1..20: note = C9Orf72 GTCN PAM targeting sequence
  source 1..20: mol_type = other RNA
cataactgagtaaacagcca

SEQ ID NO: 13883 - RNA, 20 nt, synthetic construct
  misc_feature 1..20: note = C9Orf72 GTCN PAM targeting sequence
  source 1..20: mol_type = other RNA
cctcagggtcagggagacaa

SEQ ID NO: 13884 - RNA, 20 nt, synthetic construct
  misc_feature 1..20: note = C9Orf72 GTCN PAM targeting sequence
  source 1..20: mol_type = other RNA
gggagacaatagagtgtggt

SEQ ID NO: 13885 - RNA, 20 nt, synthetic construct
  misc_feature 1..20: note = C9Orf72 GTCN PAM targeting sequence
  source 1..20: mol_type = other RNA
ccctgaccctgaggagacat

SEQ ID NO: 13886 - RNA, 20 nt, synthetic construct
  misc_feature 1..20: note = C9Orf72 GTCN PAM targeting sequence
  source 1..20: mol_type = other RNA
aaggaaggtagttttttttt

SEQ ID NO: 13887 - RNA, 20 nt, synthetic construct
  misc_feature 1..20: note = C9Orf72 GTCN PAM targeting sequence
  source 1..20: mol_type = other RNA
caaaaaaaaaaaaaaacaaa

SEQ ID NO: 13888 - RNA, 20 nt, synthetic construct
  misc_feature 1..20: note = C9Orf72 GTCN PAM targeting sequence
  source 1..20: mol_type = other RNA
agctctgtcgcccaggctgg

SEQ ID NO: 13889 - RNA, 20 nt, synthetic construct
  misc_feature 1..20: note = C9Orf72 GTCN PAM targeting sequence
  source 1..20: mol_type = other RNA
cccaggctggagtgcaggag

SEQ ID NO: 13890 - RNA, 20 nt, synthetic construct
  misc_feature 1..20: note = C9Orf72 GTCN PAM targeting sequence
  source 1..20: mol_type = other RNA
cagctacttgggaggctgag

SEQ ID NO: 13891 - RNA, 20 nt, synthetic construct
  misc_feature 1..20: note = C9Orf72 GTCN PAM targeting sequence
  source 1..20: mol_type = other RNA
cgatctcctgacctcatgat

SEQ ID NO: 13892 - RNA, 20 nt, synthetic construct
  misc_feature 1..20: note = C9Orf72 GTCN PAM targeting sequence
  source 1..20: mol_type = other RNA
ggagatcgagaccatcctgg

SEQ ID NO: 13893 - RNA, 20 nt, synthetic construct
  misc_feature 1..20: note = C9Orf72 GTCN PAM targeting sequence
  source 1..20: mol_type = other RNA
aatgtcacatatgttaactt

SEQ ID NO: 13894 - RNA, 20 nt, synthetic construct
  misc_feature 1..20: note = C9Orf72 GTCN PAM targeting sequence
  source 1..20: mol_type = other RNA
catatgttaactttcaaaaa

SEQ ID NO: 13895 - RNA, 20 nt, synthetic construct
  misc_feature 1..20: note = C9Orf72 GTCN PAM targeting sequence
  source 1..20: mol_type = other RNA
cttcagccaaatgataaggt

SEQ ID NO: 13896 - RNA, 20 nt, synthetic construct
  misc_feature 1..20: note = C9Orf72 GTCN PAM targeting sequence
  source 1..20: mol_type = other RNA
tttaatgttaggtctcttca

SEQ ID NO: 13897 - RNA, 20 nt, synthetic construct
  misc_feature 1..20: note = C9Orf72 GTCN PAM targeting sequence
  source 1..20: mol_type = other RNA
ggatggtctggatgtttgtt

SEQ ID NO: 13898 - RNA, 20 nt, synthetic construct
  misc_feature 1..20: note = C9Orf72 GTCN PAM targeting sequence
  source 1..20: mol_type = other RNA
ggatgtttgttccaccaggt

SEQ ID NO: 13899 - RNA, 20 nt, synthetic construct
  misc_feature 1..20: note = C9Orf72 GTCN PAM targeting sequence
  source 1..20: mol_type = other RNA
gcttacaccaagtctccttt

SEQ ID NO: 13900 - RNA, 20 nt, synthetic construct
  misc_feature 1..20: note = C9Orf72 GTCN PAM targeting sequence
  source 1..20: mol_type = other RNA
cctttgggggcttactggat

SEQ ID NO: 13901 - RNA, 20 nt, synthetic construct
  misc_feature 1..20: note = C9Orf72 GTCN PAM targeting sequence
  source 1..20: mol_type = other RNA
gttcttccccatagacctta

SEQ ID NO: 13902 - RNA, 20 nt, synthetic construct
  misc_feature 1..20: note = C9Orf72 GTCN PAM targeting sequence
  source 1..20: mol_type = other RNA
atggggaagaactgacattc

SEQ ID NO: 13903 - RNA, 20 nt, synthetic construct
  misc_feature 1..20: note = C9Orf72 GTCN PAM targeting sequence
  source 1..20: mol_type = other RNA
caaatgttcagtgtggcttc

SEQ ID NO: 13904 - RNA, 20 nt, synthetic construct
  misc_feature 1..20: note = C9Orf72 GTCN PAM targeting sequence
  source 1..20: mol_type = other RNA
gaaaagccttggaagccaca

SEQ ID NO: 13905 - RNA, 20 nt, synthetic construct
  misc_feature 1..20: note = C9Orf72 GTCN PAM targeting sequence
  source 1..20: mol_type = other RNA
ttatctccccatctgtactt

SEQ ID NO: 13906 - RNA, 20 nt, synthetic construct
  misc_feature 1..20: note = C9Orf72 GTCN PAM targeting sequence
  source 1..20: mol_type = other RNA
ggaacctcaagcaactttta

SEQ ID NO: 13907 - RNA, 20 nt, synthetic construct
  misc_feature 1..20: note = C9Orf72 GTCN PAM targeting sequence
  source 1..20: mol_type = other RNA
cattacacaaatttttgcag

SEQ ID NO: 13908 - RNA, 20 nt, synthetic construct
  misc_feature 1..20: note = C9Orf72 GTCN PAM targeting sequence
  source 1..20: mol_type = other RNA
ttatcctggcttcatttctc

SEQ ID NO: 13909 - RNA, 20 nt, synthetic construct
  misc_feature 1..20: note = C9Orf72 GTCN PAM targeting sequence
  source 1..20: mol_type = other RNA
agtccttatcctggcttcat

SEQ ID NO: 13910 - RNA, 20 nt, synthetic construct
  misc_feature 1..20: note = C9Orf72 GTCN PAM targeting sequence
  source 1..20: mol_type = other RNA
tatccactggaaaacatagc

SEQ ID NO: 13911 - RNA, 20 nt, synthetic construct
  misc_feature 1..20: note = C9Orf72 GTCN PAM targeting sequence
  source 1..20: mol_type = other RNA
tgtttatctctttgtatttt

SEQ ID NO: 13912 - RNA, 20 nt, synthetic construct
  misc_feature 1..20: note = C9Orf72 GTCN PAM targeting sequence
  source 1..20: mol_type = other RNA
acaaatatacggtacttttt

SEQ ID NO: 13913 - RNA, 20 nt, synthetic construct
  misc_feature 1..20: note = C9Orf72 GTCN PAM targeting sequence
  source 1..20: mol_type = other RNA
caaaaaaaaaaaaaaaaaaa

SEQ ID NO: 13914 - RNA, 20 nt, synthetic construct
  misc_feature 1..20: note = C9Orf72 GTCN PAM targeting sequence
  source 1..20: mol_type = other RNA
tgctctgtcgcccaggctgg

SEQ ID NO: 13915 - RNA, 20 nt, synthetic construct
  misc_feature 1..20: note = C9Orf72 GTCN PAM targeting sequence
  source 1..20: mol_type = other RNA
cccaggctggagtgtagtgg

SEQ ID NO: 13916 - RNA, 20 nt, synthetic construct
  misc_feature 1..20: note = C9Orf72 GTCN PAM targeting sequence
  source 1..20: mol_type = other RNA
cagctactcgggaggctgag

SEQ ID NO: 13917 - RNA, 20 nt, synthetic construct
  misc_feature 1..20: note = C9Orf72 GTCN PAM targeting sequence
  source 1..20: mol_type = other RNA
ggagatcaagatcattctgg

SEQ ID NO: 13918 - RNA, 20 nt, synthetic construct
  misc_feature 1..20: note = C9Orf72 GTCN PAM targeting sequence
  source 1..20: mol_type = other RNA
gcttaacttactaattgttt

SEQ ID NO: 13919 - RNA, 20 nt, synthetic construct
  misc_feature 1..20: note = C9Orf72 GTCN PAM targeting sequence
  source 1..20: mol_type = other RNA
agaattcttaaaaagaaagt

SEQ ID NO: 13920 - RNA, 20 nt, synthetic construct
  misc_feature 1..20: note = C9Orf72 GTCN PAM targeting sequence
  source 1..20: mol_type = other RNA
ttcaatttatgattagctct

SEQ ID NO: 13921 - RNA, 20 nt, synthetic construct
  misc_feature 1..20: note = C9Orf72 GTCN PAM targeting sequence
  source 1..20: mol_type = other RNA
aatgatttcaaaggcccaat

SEQ ID NO: 13922 - RNA, 20 nt, synthetic construct
  misc_feature 1..20: note = C9Orf72 GTCN PAM targeting sequence
  source 1..20: mol_type = other RNA
tttaagattttctgaggcct

SEQ ID NO: 13923 - RNA, 20 nt, synthetic construct
  misc_feature 1..20: note = C9Orf72 GTCN PAM targeting sequence
  source 1..20: mol_type = other RNA
catgtacagcaggagggtgc

SEQ ID NO: 13924 - RNA, 20 nt, synthetic construct
  misc_feature 1..20: note = C9Orf72 GTCN PAM targeting sequence
  source 1..20: mol_type = other RNA
cttcacatcctattaatacc

SEQ ID NO: 13925 - RNA, 20 nt, synthetic construct
  misc_feature 1..20: note = C9Orf72 GTCN PAM targeting sequence
  source 1..20: mol_type = other RNA
cagctgagtggtccatttgc

SEQ ID NO: 13926 - RNA, 20 nt, synthetic construct
  misc_feature 1..20: note = C9Orf72 GTCN PAM targeting sequence
  source 1..20: mol_type = other RNA
atttgctgctgctcgccctt

SEQ ID NO: 13927 - RNA, 20 nt, synthetic construct
  misc_feature 1..20: note = C9Orf72 GTCN PAM targeting sequence
  source 1..20: mol_type = other RNA
gtagcttttttgaagatttc

SEQ ID NO: 13928 - RNA, 20 nt, synthetic construct
  misc_feature 1..20: note = C9Orf72 GTCN PAM targeting sequence
  source 1..20: mol_type = other RNA
aggtgacagagccactaagg

SEQ ID NO: 13929 - RNA, 20 nt, synthetic construct
  misc_feature 1..20: note = C9Orf72 GTCN PAM targeting sequence
  source 1..20: mol_type = other RNA
cctggactcaaacccttatc

SEQ ID NO: 13930 - RNA, 20 nt, synthetic construct
  misc_feature 1..20: note = C9Orf72 GTCN PAM targeting sequence
  source 1..20: mol_type = other RNA
tatcacagttgtctggagct

SEQ ID NO: 13931 - RNA, 20 nt, synthetic construct
  misc_feature 1..20: note = C9Orf72 GTCN PAM targeting sequence
  source 1..20: mol_type = other RNA
ggagctgagggtgagttgaa

SEQ ID NO: 13932 - RNA, 20 nt, synthetic construct
  misc_feature 1..20: note = C9Orf72 GTCN PAM targeting sequence
  source 1..20: mol_type = other RNA
ttctaagggctcccattcag

SEQ ID NO: 13933 - RNA, 20 nt, synthetic construct
  misc_feature 1..20: note = C9Orf72 GTCN PAM targeting sequence
  source 1..20: mol_type = other RNA
tctgtgatggctgtttatta

SEQ ID NO: 13934 - RNA, 20 nt, synthetic construct
  misc_feature 1..20: note = C9Orf72 GTCN PAM targeting sequence
  source 1..20: mol_type = other RNA
cccagcatttccacagcagc

SEQ ID NO: 13935 - RNA, 20 nt, synthetic construct
  misc_feature 1..20: note = C9Orf72 GTCN PAM targeting sequence
  source 1..20: mol_type = other RNA
gccatgtagggggttgagaa

SEQ ID NO: 13936 - RNA, 20 nt, synthetic construct
  misc_feature 1..20: note = C9Orf72 GTCN PAM targeting sequence
  source 1..20: mol_type = other RNA
atgctaaaaacaaaacaaaa

SEQ ID NO: 13937 - RNA, 20 nt, synthetic construct
  misc_feature 1..20: note = C9Orf72 GTCN PAM targeting sequence
  source 1..20: mol_type = other RNA
acttgccatggcttcttact

SEQ ID NO: 13938 - RNA, 20 nt, synthetic construct
  misc_feature 1..20: note = C9Orf72 GTCN PAM targeting sequence
  source 1..20: mol_type = other RNA
ctttaacctatccacattaa

SEQ ID NO: 13939 - RNA, 20 nt, synthetic construct
  misc_feature 1..20: note = C9Orf72 GTCN PAM targeting sequence
  source 1..20: mol_type = other RNA
caggataattcccttctgtt

SEQ ID NO: 13940 - RNA, 20 nt, synthetic construct
  misc_feature 1..20: note = C9Orf72 GTCN PAM targeting sequence
  source 1..20: mol_type = other RNA
gcccacctcctgagccttgc

SEQ ID NO: 13941 - RNA, 20 nt, synthetic construct
  misc_feature 1..20: note = C9Orf72 GTCN PAM targeting sequence
  source 1..20: mol_type = other RNA
gggggttgatttgtgcaagc

SEQ ID NO: 13942 - RNA, 20 nt, synthetic construct
  misc_feature 1..20: note = C9Orf72 GTCN PAM targeting sequence
  source 1..20: mol_type = other RNA
aacccaggcatgagctcacc

SEQ ID NO: 13943 - RNA, 20 nt, synthetic construct
  misc_feature 1..20: note = C9Orf72 GTCN PAM targeting sequence
  source 1..20: mol_type = other RNA
ggttgaggtatccactttag

SEQ ID NO: 13944 - RNA, 20 nt, synthetic construct
  misc_feature 1..20: note = C9Orf72 GTCN PAM targeting sequence
  source 1..20: mol_type = other RNA
ccttctaaagtggatacctc

SEQ ID NO: 13945 - RNA, 20 nt, synthetic construct
  misc_feature 1..20: note = C9Orf72 GTCN PAM targeting sequence
  source 1..20: mol_type = other RNA
cagagtccccttctaaagtg

SEQ ID NO: 13946 - RNA, 20 nt, synthetic construct
  misc_feature 1..20: note = C9Orf72 GTCN PAM targeting sequence
  source 1..20: mol_type = other RNA
ctgtactccatgtcccagag

SEQ ID NO: 13947 - RNA, 20 nt, synthetic construct
  misc_feature 1..20: note = C9Orf72 GTCN PAM targeting sequence
  source 1..20: mol_type = other RNA
agtttccattaactgaggta

SEQ ID NO: 13948 - RNA, 20 nt, synthetic construct
  misc_feature 1..20: note = C9Orf72 GTCN PAM targeting sequence
  source 1..20: mol_type = other RNA
gggttaaaggctgggagtca

SEQ ID NO: 13949 - RNA, 20 nt, synthetic construct
  misc_feature 1..20: note = C9Orf72 GTCN PAM targeting sequence
  source 1..20: mol_type = other RNA
gtttaaaaatactggcaagg

SEQ ID NO: 13950 - RNA, 20 nt, synthetic construct
  misc_feature 1..20: note = C9Orf72 GTCN PAM targeting sequence
  source 1..20: mol_type = other RNA
cgaacttggatccgtggtct

SEQ ID NO: 13951 - RNA, 20 nt, synthetic construct
  misc_feature 1..20: note = C9Orf72 GTCN PAM targeting sequence
  source 1..20: mol_type = other RNA
atctggccacgcaaaacact

SEQ ID NO: 13952 - RNA, 20 nt, synthetic construct
  misc_feature 1..20: note = C9Orf72 GTCN PAM targeting sequence
  source 1..20: mol_type = other RNA
caagggcatccagtccatat

SEQ ID NO: 13953 - RNA, 20 nt, synthetic construct
  misc_feature 1..20: note = C9Orf72 GTCN PAM targeting sequence
  source 1..20: mol_type = other RNA
atatattgataatatatcaa

SEQ ID NO: 13954 - RNA, 20 nt, synthetic construct
  misc_feature 1..20: note = C9Orf72 GTCN PAM targeting sequence
  source 1..20: mol_type = other RNA
ctaccttgccaggttgttgt

SEQ ID NO: 13955 - RNA, 20 nt, synthetic construct
  misc_feature 1..20: note = C9Orf72 GTCN PAM targeting sequence
  source 1..20: mol_type = other RNA
cctaacctcagtgaacccat

SEQ ID NO: 13956 - RNA, 20 nt, synthetic construct
  misc_feature 1..20: note = C9Orf72 GTCN PAM targeting sequence
  source 1..20: mol_type = other RNA
tagaaaggaaataggcttta

SEQ ID NO: 13957 - RNA, 20 nt, synthetic construct
  misc_feature 1..20: note = C9Orf72 GTCN PAM targeting sequence
  source 1..20: mol_type = other RNA
cccaatcacaaagccccaaa

SEQ ID NO: 13958 - RNA, 20 nt, synthetic construct
  misc_feature 1..20: note = C9Orf72 GTCN PAM targeting sequence
  source 1..20: mol_type = other RNA
gcattgccttgggcaaatct

SEQ ID NO: 13959 - RNA, 20 nt, synthetic construct
  misc_feature 1..20: note = C9Orf72 GTCN PAM targeting sequence
  source 1..20: mol_type = other RNA
ctggaatgtctccaatatta

SEQ ID NO: 13960 - RNA, 20 nt, synthetic construct
  misc_feature 1..20: note = C9Orf72 GTCN PAM targeting sequence
  source 1..20: mol_type = other RNA
ccaatattagcccctttctt

SEQ ID NO: 13961 - RNA, 20 nt, synthetic construct
  misc_feature 1..20: note = C9Orf72 GTCN PAM targeting sequence
  source 1..20: mol_type = other RNA
atatgaaagtgaaatgtaaa

SEQ ID NO: 13962 - RNA, 20 nt, synthetic construct
  misc_feature 1..20: note = C9Orf72 GTCN PAM targeting sequence
  source 1..20: mol_type = other RNA
acacaaaagtcgatatgaaa

SEQ ID NO: 13963 - RNA, 20 nt, synthetic construct
  misc_feature 1..20: note = C9Orf72 GTCN PAM targeting sequence
  source 1..20: mol_type = other RNA
acagcagaattaccatgata

SEQ ID NO: 13964 - RNA, 20 nt, synthetic construct
  misc_feature 1..20: note = C9Orf72 GTCN PAM targeting sequence
  source 1..20: mol_type = other RNA
tgtatgtataaaactcacca

SEQ ID NO: 13965 - RNA, 20 nt, synthetic construct
  misc_feature 1..20: note = C9Orf72 GTCN PAM targeting sequence
  source 1..20: mol_type = other RNA
tgaatagttcagctcagtga

SEQ ID NO: 13966 - RNA, 20 nt, synthetic construct
  misc_feature 1..20: note = C9Orf72 GTCN PAM targeting sequence
  source 1..20: mol_type = other RNA
aaaatctataatttgttcaa

SEQ ID NO: 13967 - RNA, 20 nt, synthetic construct
  misc_feature 1..20: note = C9Orf72 GTCN PAM targeting sequence
  source 1..20: mol_type = other RNA
gttgggggagaagccattaa

SEQ ID NO: 13968 - RNA, 20 nt, synthetic construct
  misc_feature 1..20: note = C9Orf72 GTCN PAM targeting sequence
  source 1..20: mol_type = other RNA
tgtggcacttgctcttttca

SEQ ID NO: 13969 - RNA, 20 nt, synthetic construct
  misc_feature 1..20: note = C9Orf72 GTCN PAM targeting sequence
  source 1..20: mol_type = other RNA
tgtcttgtggcacttgctct

SEQ ID NO: 13970 - RNA, 20 nt, synthetic construct
  misc_feature 1..20: note = C9Orf72 GTCN PAM targeting sequence
  source 1..20: mol_type = other RNA
accatcgaaactagctcttg

SEQ ID NO: 13971 - RNA, 20 nt, synthetic construct
  misc_feature 1..20: note = C9Orf72 GTCN PAM targeting sequence
  source 1..20: mol_type = other RNA
ctgtgcacaagtatcttcat

SEQ ID NO: 13972 - RNA, 20 nt, synthetic construct
  misc_feature 1..20: note = C9Orf72 GTCN PAM targeting sequence
  source 1..20: mol_type = other RNA
aagagtatgaagaacttcca

SEQ ID NO: 13973 - RNA, 20 nt, synthetic construct
  misc_feature 1..20: note = C9Orf72 GTCN PAM targeting sequence
  source 1..20: mol_type = other RNA
tcctgcgttggaagttcttc

SEQ ID NO: 13974 - RNA, 20 nt, synthetic construct
  misc_feature 1..20: note = C9Orf72 GTCN PAM targeting sequence
  source 1..20: mol_type = other RNA
tctcacttaccggtcctcct

SEQ ID NO: 13975 - RNA, 20 nt, synthetic construct
  misc_feature 1..20: note = C9Orf72 GTCN PAM targeting sequence
  source 1..20: mol_type = other RNA
taatagatttcatcaaatga

SEQ ID NO: 13976 - RNA, 20 nt, synthetic construct
  misc_feature 1..20: note = C9Orf72 GTCN PAM targeting sequence
  source 1..20: mol_type = other RNA
tgagtaatcacatcccaaat

SEQ ID NO: 13977 - RNA, 20 nt, synthetic construct
  misc_feature 1..20: note = C9Orf72 GTCN PAM targeting sequence
  source 1..20: mol_type = other RNA
gttcatttgggatgtgatta

SEQ ID NO: 13978 - RNA, 20 nt, synthetic construct
  misc_feature 1..20: note = C9Orf72 GTCN PAM targeting sequence
  source 1..20: mol_type = other RNA
tgtggcatccaagtgtcagg

SEQ ID NO: 13979 - RNA, 20 nt, synthetic construct
  misc_feature 1..20: note = C9Orf72 GTCN PAM targeting sequence
  source 1..20: mol_type = other RNA
gggtttcatattcgattaaa

SEQ ID NO: 13980 - RNA, 20 nt, synthetic construct
  misc_feature 1..20: note = C9Orf72 GTCN PAM targeting sequence
  source 1..20: mol_type = other RNA
cactagcctgggtggatttc

SEQ ID NO: 13981 - RNA, 20 nt, synthetic construct
  misc_feature 1..20: note = C9Orf72 GTCN PAM targeting sequence
  source 1..20: mol_type = other RNA
tgttttaactcctgtttaga

SEQ ID NO: 13982 - RNA, 20 nt, synthetic construct
  misc_feature 1..20: note = C9Orf72 GTCN PAM targeting sequence
  source 1..20: mol_type = other RNA
ttccactttatacatggcca

SEQ ID NO: 13983 - RNA, 20 nt, synthetic construct
  misc_feature 1..20: note = C9Orf72 GTCN PAM targeting sequence
  source 1..20: mol_type = other RNA
tgaacccctggcctcaagtg

SEQ ID NO: 13984 - RNA, 20 nt, synthetic construct
  misc_feature 1..20: note = C9Orf72 GTCN PAM targeting sequence
  source 1..20: mol_type = other RNA
catgtctgtaattccagcta

SEQ ID NO: 13985 - RNA, 20 nt, synthetic construct
  misc_feature 1..20: note = C9Orf72 GTCN PAM targeting sequence
  source 1..20: mol_type = other RNA
gtaattccagctactcagga

SEQ ID NO: 13986 - RNA, 20 nt, synthetic construct
  misc_feature 1..20: note = C9Orf72 GTCN PAM targeting sequence
  source 1..20: mol_type = other RNA
caccattgcactccagcctg

SEQ ID NO: 13987 - RNA, 20 nt, synthetic construct
  misc_feature 1..20: note = C9Orf72 GTCN PAM targeting sequence
  source 1..20: mol_type = other RNA
caaaaataaataaataaata

SEQ ID NO: 13988 - RNA, 20 nt, synthetic construct
  misc_feature 1..20: note = C9Orf72 GTCN PAM targeting sequence
  source 1..20: mol_type = other RNA
tgccagactatattttctgg

SEQ ID NO: 13989 - RNA, 20 nt, synthetic construct
  misc_feature 1..20: note = C9Orf72 GTCN PAM targeting sequence
  source 1..20: mol_type = other RNA
ggcatgacttatagaaacgt

SEQ ID NO: 13990 - RNA, 20 nt, synthetic construct
  misc_feature 1..20: note = C9Orf72 GTCN PAM targeting sequence
  source 1..20: mol_type = other RNA
ggaaacacatgtgccttctg

SEQ ID NO: 13991 - RNA, 20 nt, synthetic construct
  misc_feature 1..20: note = C9Orf72 GTCN PAM targeting sequence
  source 1..20: mol_type = other RNA
ttactatgctagtcaggaaa

SEQ ID NO: 13992 - RNA, 20 nt, synthetic construct
  misc_feature 1..20: note = C9Orf72 GTCN PAM targeting sequence
  source 1..20: mol_type = other RNA
ctggaggggaggataggcat

SEQ ID NO: 13993 - RNA, 20 nt, synthetic construct
  misc_feature 1..20: note = C9Orf72 GTCN PAM targeting sequence
  source 1..20: mol_type = other RNA
ccttataaaattggggtttt

SEQ ID NO: 13994 - RNA, 20 nt, synthetic construct
  misc_feature 1..20: note = C9Orf72 GTCN PAM targeting sequence
  source 1..20: mol_type = other RNA
gtttcacagctgagcaacac

SEQ ID NO: 13995 - RNA, 20 nt, synthetic construct
  misc_feature 1..20: note = C9Orf72 GTCN PAM targeting sequence
  source 1..20: mol_type = other RNA
catggaggtgatggggatgt

SEQ ID NO: 13996 - RNA, 20 nt, synthetic construct
  misc_feature 1..20: note = C9Orf72 GTCN PAM targeting sequence
  source 1..20: mol_type = other RNA
gcatcatcagttctccctgg

SEQ ID NO: 13997 - RNA, 20 nt, synthetic construct
  misc_feature 1..20: note = C9Orf72 GTCN PAM targeting sequence
  source 1..20: mol_type = other RNA
ggtggccaagcagcccctaa

SEQ ID NO: 13998 - RNA, 20 nt, synthetic construct
  misc_feature 1..20: note = C9Orf72 GTCN PAM targeting sequence
  source 1..20: mol_type = other RNA
ttttaatggcatacgcaaaa

SEQ ID NO: 13999 - RNA, 20 nt, synthetic construct
  misc_feature 1..20: note = C9Orf72 GTCN PAM targeting sequence
  source 1..20: mol_type = other RNA
cttctctgcttattgattct

SEQ ID NO: 14000 - RNA, 20 nt, synthetic construct
  misc_feature 1..20: note = C9Orf72 GTCN PAM targeting sequence
  source 1..20: mol_type = other RNA
tgctcatggtcttttgtgtg

SEQ ID NO: 14001 - RNA, 20 nt, synthetic construct
  misc_feature 1..20: note = C9Orf72 GTCN PAM targeting sequence
  source 1..20: mol_type = other RNA
tttgtgtgcatccttgtaga

SEQ ID NO: 14002 - RNA, 20 nt, synthetic construct
  misc_feature 1..20: note = C9Orf72 GTCN PAM targeting sequence
  source 1..20: mol_type = other RNA
gaagtgaaatctacaaggat

SEQ ID NO: 14003 - RNA, 20 nt, synthetic construct
  misc_feature 1..20: note = C9Orf72 GTCN PAM targeting sequence
  source 1..20: mol_type = other RNA
gataatctttacttccaaaa

SEQ ID NO: 14004 - RNA, 20 nt, synthetic construct
  misc_feature 1..20: note = C9Orf72 GTCN PAM targeting sequence
  source 1..20: mol_type = other RNA
caataggttatttctctcag

SEQ ID NO: 14005 - RNA, 20 nt, synthetic construct
  misc_feature 1..20: note = C9Orf72 GTCN PAM targeting sequence
  source 1..20: mol_type = other RNA
ctgaatggacagggattttc

SEQ ID NO: 14006 - RNA, 20 nt, synthetic construct
  misc_feature 1..20: note = C9Orf72 GTCN PAM targeting sequence
  source 1..20: mol_type = other RNA
attcagggacacattgtccc

SEQ ID NO: 14007 - RNA, 20 nt, synthetic construct
  misc_feature 1..20: note = C9Orf72 GTCN PAM targeting sequence
  source 1..20: mol_type = other RNA
ctaggtctgccagtatgcag

SEQ ID NO: 14008 - RNA, 20 nt, synthetic construct
  misc_feature 1..20: note = C9Orf72 GTCN PAM targeting sequence
  source 1..20: mol_type = other RNA
gccagtatgcagactggctc

SEQ ID NO: 14009 - RNA, 20 nt, synthetic construct
  misc_feature 1..20: note = C9Orf72 GTCN PAM targeting sequence
  source 1..20: mol_type = other RNA
gcatactggcagacctaggg

SEQ ID NO: 14010 - RNA, 20 nt, synthetic construct
  misc_feature 1..20: note = C9Orf72 GTCN PAM targeting sequence
  source 1..20: mol_type = other RNA
ggtgaccatcatgatgatta

SEQ ID NO: 14011 - RNA, 20 nt, synthetic construct
  misc_feature 1..20: note = C9Orf72 GTCN PAM targeting sequence
  source 1..20: mol_type = other RNA
cctgactcaaggggagccag

SEQ ID NO: 14012 - RNA, 20 nt, synthetic construct
  misc_feature 1..20: note = C9Orf72 GTCN PAM targeting sequence
  source 1..20: mol_type = other RNA
gcaaacaactagctgtttcc

SEQ ID NO: 14013 - RNA, 20 nt, synthetic construct
  misc_feature 1..20: note = C9Orf72 GTCN PAM targeting sequence
  source 1..20: mol_type = other RNA
ctcctctgcctcccatggat

SEQ ID NO: 14014 - RNA, 20 nt, synthetic construct
  misc_feature 1..20: note = C9Orf72 GTCN PAM targeting sequence
  source 1..20: mol_type = other RNA
ctctgtattctgcctgatgc

SEQ ID NO: 14015 - RNA, 20 nt, synthetic construct
  misc_feature 1..20: note = C9Orf72 GTCN PAM targeting sequence
  source 1..20: mol_type = other RNA
cgctctgttgcccaggctgg

SEQ ID NO: 14016 - RNA, 20 nt, synthetic construct
  misc_feature 1..20: note = C9Orf72 GTCN PAM targeting sequence
  source 1..20: mol_type = other RNA
ctactaaaaatacaaaagtt

SEQ ID NO: 14017 - RNA, 20 nt, synthetic construct
  misc_feature 1..20: note = C9Orf72 GTCN PAM targeting sequence
  source 1..20: mol_type = other RNA
cgaactcctgaccttacgtg

SEQ ID NO: 14018 - RNA, 20 nt, synthetic construct
  misc_feature 1..20: note = C9Orf72 GTCN PAM targeting sequence
  source 1..20: mol_type = other RNA
ggagttcgagaccagcctgg

SEQ ID NO: 14019 - RNA, 20 nt, synthetic construct
  misc_feature 1..20: note = C9Orf72 GTCN PAM targeting sequence
  source 1..20: mol_type = other RNA
acccatctccgcctgccaaa

SEQ ID NO: 14020 - RNA, 20 nt, synthetic construct
  misc_feature 1..20: note = C9Orf72 GTCN PAM targeting sequence
  source 1..20: mol_type = other RNA
catctctaaaggggtcatgg

SEQ ID NO: 14021 - RNA, 20 nt, synthetic construct
  misc_feature 1..20: note = C9Orf72 GTCN PAM targeting sequence
  source 1..20: mol_type = other RNA
tggcatacccatcgagtagc

SEQ ID NO: 14022 - RNA, 20 nt, synthetic construct
  misc_feature 1..20: note = C9Orf72 GTCN PAM targeting sequence
  source 1..20: mol_type = other RNA
gtgctactcgatgggtatgc

SEQ ID NO: 14023 - RNA, 20 nt, synthetic construct
  misc_feature 1..20: note = C9Orf72 GTCN PAM targeting sequence
  source 1..20: mol_type = other RNA
gcacagaaaggagaaagtgc

SEQ ID NO: 14024 - RNA, 20 nt, synthetic construct
  misc_feature 1..20: note = C9Orf72 GTCN PAM targeting sequence
  source 1..20: mol_type = other RNA
gccctggcacaacataagtg

SEQ ID NO: 14025 - RNA, 20 nt, synthetic construct
  misc_feature 1..20: note = C9Orf72 GTCN PAM targeting sequence
  source 1..20: mol_type = other RNA
atttgtcagccctggcacaa

SEQ ID NO: 14026 - RNA, 20 nt, synthetic construct
  misc_feature 1..20: note = C9Orf72 GTCN PAM targeting sequence
  source 1..20: mol_type = other RNA
ttccagaataagtaggaaca

SEQ ID NO: 14027 - RNA, 20 nt, synthetic construct
  misc_feature 1..20: note = C9Orf72 GTCN PAM targeting sequence
  source 1..20: mol_type = other RNA
gtgtaagttaccagtccttc

SEQ ID NO: 14028 - RNA, 20 nt, synthetic construct
  misc_feature 1..20: note = C9Orf72 GTCN PAM targeting sequence
  source 1..20: mol_type = other RNA
cactcttttagtctgtgtaa

SEQ ID NO: 14029 - RNA, 20 nt, synthetic construct
  misc_feature 1..20: note = C9Orf72 GTCN PAM targeting sequence
  source 1..20: mol_type = other RNA
tcttcctagccattttgagt

SEQ ID NO: 14030 - RNA, 20 nt, synthetic construct
  misc_feature 1..20: note = C9Orf72 GTCN PAM targeting sequence
  source 1..20: mol_type = other RNA
accgtatttccatttacttc

SEQ ID NO: 14031 - RNA, 20 nt, synthetic construct
  misc_feature 1..20: note = C9Orf72 GTCN PAM targeting sequence
  source 1..20: mol_type = other RNA
gtctttccctttcacttgtg

SEQ ID NO: 14032 - RNA, 20 nt, synthetic construct
  misc_feature 1..20: note = C9Orf72 GTCN PAM targeting sequence
  source 1..20: mol_type = other RNA
ttccctttcacttgtggttt

SEQ ID NO: 14033 - RNA, 20 nt, synthetic construct
  misc_feature 1..20: note = C9Orf72 GTCN PAM targeting sequence
  source 1..20: mol_type = other RNA
tttaagcattctcaactaca

SEQ ID NO: 14034 - RNA, 20 nt, synthetic construct
  misc_feature 1..20: note = C9Orf72 GTCN PAM targeting sequence
  source 1..20: mol_type = other RNA
caggcagtcctgaaagcagc

SEQ ID NO: 14035 - RNA, 20 nt, synthetic construct
  misc_feature 1..20: note = C9Orf72 GTCN PAM targeting sequence
  source 1..20: mol_type = other RNA
tgaaagcagcaggtgtctct

SEQ ID NO: 14036 - RNA, 20 nt, synthetic construct
  misc_feature 1..20: note = C9Orf72 GTCN PAM targeting sequence
  source 1..20: mol_type = other RNA
ctgcaaaggcttctgtcaga

SEQ ID NO: 14037 - RNA, 20 nt, synthetic construct
  misc_feature 1..20: note = C9Orf72 GTCN PAM targeting sequence
  source 1..20: mol_type = other RNA
gaccttagacttatacccag

SEQ ID NO: 14038 - RNA, 20 nt, synthetic construct
  misc_feature 1..20: note = C9Orf72 GTCN PAM targeting sequence
  source 1..20: mol_type = other RNA
gacagaagcctttgcagaga

SEQ ID NO: 14039 - RNA, 20 nt, synthetic construct
  misc_feature 1..20: note = C9Orf72 GTCN PAM targeting sequence
  source 1..20: mol_type = other RNA
aaggtctgacagaagccttt

SEQ ID NO: 14040 - RNA, 20 nt, synthetic construct
  misc_feature 1..20: note = C9Orf72 GTCN PAM targeting sequence
  source 1..20: mol_type = other RNA
attttactgctttttaagag

SEQ ID NO: 14041 - RNA, 20 nt, synthetic construct
  misc_feature 1..20: note = C9Orf72 GTCN PAM targeting sequence
  source 1..20: mol_type = other RNA
aaaacaagtatggtgggagt

SEQ ID NO: 14042 - RNA, 20 nt, synthetic construct
  misc_feature 1..20: note = C9Orf72 GTCN PAM targeting sequence
  source 1..20: mol_type = other RNA
aacagggcactaaggctcat

SEQ ID NO: 14043 - RNA, 20 nt, synthetic construct
  misc_feature 1..20: note = C9Orf72 GTCN PAM targeting sequence
  source 1..20: mol_type = other RNA
acctatacaagaatacacaa

SEQ ID NO: 14044 - RNA, 20 nt, synthetic construct
  misc_feature 1..20: note = C9Orf72 GTCN PAM targeting sequence
  source 1..20: mol_type = other RNA
cataagctaaaaaacaaaac

SEQ ID NO: 14045 - RNA, 20 nt, synthetic construct
  misc_feature 1..20: note = C9Orf72 GTCN PAM targeting sequence
  source 1..20: mol_type = other RNA
agtttaatagttgttttgtt

SEQ ID NO: 14046 - RNA, 20 nt, synthetic construct
  misc_feature 1..20: note = C9Orf72 GTCN PAM targeting sequence
  source 1..20: mol_type = other RNA
taatatcttgtttcaccacc

SEQ ID NO: 14047 - RNA, 20 nt, synthetic construct
  misc_feature 1..20: note = C9Orf72 GTCN PAM targeting sequence
  source 1..20: mol_type = other RNA
aatccccctactacagatgg

SEQ ID NO: 14048 - RNA, 20 nt, synthetic construct
  misc_feature 1..20: note = C9Orf72 GTCN PAM targeting sequence
  source 1..20: mol_type = other RNA
tctatacctgttggctcact

SEQ ID NO: 14049 - RNA, 20 nt, synthetic construct
  misc_feature 1..20: note = C9Orf72 GTCN PAM targeting sequence
  source 1..20: mol_type = other RNA
agaacttcgcctgatacgtg

SEQ ID NO: 14050 - RNA, 20 nt, synthetic construct
  misc_feature 1..20: note = C9Orf72 GTCN PAM targeting sequence
  source 1..20: mol_type = other RNA
cattcatctttttctcccca

SEQ ID NO: 14051 - RNA, 20 nt, synthetic construct
  misc_feature 1..20: note = C9Orf72 GTCN PAM targeting sequence
  source 1..20: mol_type = other RNA
taaaggtgctcatggtttag

SEQ ID NO: 14052 - RNA, 20 nt, synthetic construct
  misc_feature 1..20: note = C9Orf72 GTCN PAM targeting sequence
  source 1..20: mol_type = other RNA
aatctctctcactaaaccat

SEQ ID NO: 14053 - RNA, 20 nt, synthetic construct
  misc_feature 1..20: note = C9Orf72 GTCN PAM targeting sequence
  source 1..20: mol_type = other RNA
gtgtctaatctctctcacta

SEQ ID NO: 14054 - RNA, 20 nt, synthetic construct
  misc_feature 1..20: note = C9Orf72 GTCN PAM targeting sequence
  source 1..20: mol_type = other RNA
ctctctcaaacactattagt

SEQ ID NO: 14055 - RNA, 20 nt, synthetic construct
  misc_feature 1..20: note = C9Orf72 GTCN PAM targeting sequence
  source 1..20: mol_type = other RNA
ggtaggagacaagaaagggc

SEQ ID NO: 14056 - RNA, 20 nt, synthetic construct
  misc_feature 1..20: note = C9Orf72 GTCN PAM targeting sequence
  source 1..20: mol_type = other RNA
cctaccagacaaattcctat

SEQ ID NO: 14057 - RNA, 20 nt, synthetic construct
  misc_feature 1..20: note = C9Orf72 GTCN PAM targeting sequence
  source 1..20: mol_type = other RNA
ttgcacatgctgtttccact

SEQ ID NO: 14058 - RNA, 20 nt, synthetic construct
  misc_feature 1..20: note = C9Orf72 GTCN PAM targeting sequence
  source 1..20: mol_type = other RNA
agatgggttccttgacttgc

SEQ ID NO: 14059 - RNA, 20 nt, synthetic construct
  misc_feature 1..20: note = C9Orf72 GTCN PAM targeting sequence
  source 1..20: mol_type = other RNA
aggaacccatctggacctcc

SEQ ID NO: 14060 - RNA, 20 nt, synthetic construct
  misc_feature 1..20: note = C9Orf72 GTCN PAM targeting sequence
  source 1..20: mol_type = other RNA
tacagcaaaacaactccaaa

SEQ ID NO: 14061 - RNA, 20 nt, synthetic construct
  misc_feature 1..20: note = C9Orf72 GTCN PAM targeting sequence
  source 1..20: mol_type = other RNA
agaaacctaattaggtgggc

SEQ ID NO: 14062 - RNA, 20 nt, synthetic construct
  misc_feature 1..20: note = C9Orf72 GTCN PAM targeting sequence
  source 1..20: mol_type = other RNA
agtgtaaagagcactggagt

SEQ ID NO: 14063 - RNA, 20 nt, synthetic construct
  misc_feature 1..20: note = C9Orf72 GTCN PAM targeting sequence
  source 1..20: mol_type = other RNA
gaggaaagcccagaaaagca

SEQ ID NO: 14064 - RNA, 20 nt, synthetic construct
  misc_feature 1..20: note = C9Orf72 GTCN PAM targeting sequence
  source 1..20: mol_type = other RNA
ttgttgttacatttctcctt

SEQ ID NO: 14065 - RNA, 20 nt, synthetic construct
  misc_feature 1..20: note = C9Orf72 GTCN PAM targeting sequence
  source 1..20: mol_type = other RNA
tggtatcctttattttctga

SEQ ID NO: 14066 - RNA, 20 nt, synthetic construct
  misc_feature 1..20: note = C9Orf72 GTCN PAM targeting sequence
  source 1..20: mol_type = other RNA
tagtgtctcatactttaaaa

SEQ ID NO: 14067 - RNA, 20 nt, synthetic construct
  misc_feature 1..20: note = C9Orf72 GTCN PAM targeting sequence
  source 1..20: mol_type = other RNA
catactttaaaaaaatcctc

SEQ ID NO: 14068 - RNA, 20 nt, synthetic construct
  misc_feature 1..20: note = C9Orf72 GTCN PAM targeting sequence
  source 1..20: mol_type = other RNA
tcttctttttagttatggat

SEQ ID NO: 14069 - RNA, 20 nt, synthetic construct
  misc_feature 1..20: note = C9Orf72 GTCN PAM targeting sequence
  source 1..20: mol_type = other RNA
aaatataaatcagatgcctt

SEQ ID NO: 14070 - RNA, 20 nt, synthetic construct
  misc_feature 1..20: note = C9Orf72 GTCN PAM targeting sequence
  source 1..20: mol_type = other RNA
gtggctgtgctctcttgcac

SEQ ID NO: 14071 - RNA, 20 nt, synthetic construct
  misc_feature 1..20: note = C9Orf72 GTCN PAM targeting sequence
  source 1..20: mol_type = other RNA
attttctgtccaaaaaatgg

SEQ ID NO: 14072 - RNA, 20 nt, synthetic construct
  misc_feature 1..20: note = C9Orf72 GTCN PAM targeting sequence
  source 1..20: mol_type = other RNA
aaaaaatggtcaaacttttt

SEQ ID NO: 14073 - RNA, 20 nt, synthetic construct
  misc_feature 1..20: note = C9Orf72 GTCN PAM targeting sequence
  source 1..20: mol_type = other RNA
aactttttattttcagagat

SEQ ID NO: 14074 - RNA, 20 nt, synthetic construct
  misc_feature 1..20: note = C9Orf72 GTCN PAM targeting sequence
  source 1..20: mol_type = other RNA
ttttttaatctctgaaaata

SEQ ID NO: 14075 - RNA, 20 nt, synthetic construct
  misc_feature 1..20: note = C9Orf72 GTCN PAM targeting sequence
  source 1..20: mol_type = other RNA
ggagattgagaccatcctgg

SEQ ID NO: 14076 - RNA, 20 nt, synthetic construct
  misc_feature 1..20: note = C9Orf72 GTCN PAM targeting sequence
  source 1..20: mol_type = other RNA
caatctcctgaccttgtgat

SEQ ID NO: 14077 - RNA, 20 nt, synthetic construct
  misc_feature 1..20: note = C9Orf72 GTCN PAM targeting sequence
  source 1..20: mol_type = other RNA
cagctacttgggaggctgag

SEQ ID NO: 14078 - RNA, 20 nt, synthetic construct
  misc_feature 1..20: note = C9Orf72 GTCN PAM targeting sequence
  source 1..20: mol_type = other RNA
cccaggctggagtgcagtgg

SEQ ID NO: 14079 - RNA, 20 nt, synthetic construct
  misc_feature 1..20: note = C9Orf72 GTCN PAM targeting sequence
  source 1..20: mol_type = other RNA
tgctctgtcgcccaggctgg

SEQ ID NO: 14080 - RNA, 20 nt, synthetic construct
  misc_feature 1..20: note = C9Orf72 GTCN PAM targeting sequence
  source 1..20: mol_type = other RNA
caacaacaacaacaacaaaa

SEQ ID NO: 14081 - RNA, 20 nt, synthetic construct
  misc_feature 1..20: note = C9Orf72 GTCN PAM targeting sequence
  source 1..20: mol_type = other RNA
tgtctgagatacctaaatgg

SEQ ID NO: 14082 - RNA, 20 nt, synthetic construct
  misc_feature 1..20: note = C9Orf72 GTCN PAM targeting sequence
  source 1..20: mol_type = other RNA
gagatacctaaatggaaagt

SEQ ID NO: 14083 - RNA, 20 nt, synthetic construct
  misc_feature 1..20: note = C9Orf72 GTCN PAM targeting sequence
  source 1..20: mol_type = other RNA
atgacatcttaagagcaaat

SEQ ID NO: 14084 - RNA, 20 nt, synthetic construct
  misc_feature 1..20: note = C9Orf72 GTCN PAM targeting sequence
  source 1..20: mol_type = other RNA
tggacatccctctctactct

SEQ ID NO: 14085 - RNA, 20 nt, synthetic construct
  misc_feature 1..20: note = C9Orf72 GTCN PAM targeting sequence
  source 1..20: mol_type = other RNA
caattttcctttaattgaat

SEQ ID NO: 14086 - RNA, 20 nt, synthetic construct
  misc_feature 1..20: note = C9Orf72 GTCN PAM targeting sequence
  source 1..20: mol_type = other RNA
agttttttctatttaatctt

SEQ ID NO: 14087 - RNA, 20 nt, synthetic construct
  misc_feature 1..20: note = C9Orf72 GTCN PAM targeting sequence
  source 1..20: mol_type = other RNA
gccagcgaaatgctgcccaa

SEQ ID NO: 14088 - RNA, 20 nt, synthetic construct
  misc_feature 1..20: note = C9Orf72 GTCN PAM targeting sequence
  source 1..20: mol_type = other RNA
cttgggcagcatttcgctgg

SEQ ID NO: 14089 - RNA, 20 nt, synthetic construct
  misc_feature 1..20: note = C9Orf72 GTCN PAM targeting sequence
  source 1..20: mol_type = other RNA
acctaaaggttttcagaaat

SEQ ID NO: 14090 - RNA, 20 nt, synthetic construct
  misc_feature 1..20: note = C9Orf72 GTCN PAM targeting sequence
  source 1..20: mol_type = other RNA
gctaatttatggtgctagat

SEQ ID NO: 14091 - RNA, 20 nt, synthetic construct
  misc_feature 1..20: note = C9Orf72 GTCN PAM targeting sequence
  source 1..20: mol_type = other RNA
tgaagctgacagataaaaag

SEQ ID NO: 14092 - RNA, 20 nt, synthetic construct
  misc_feature 1..20: note = C9Orf72 GTCN PAM targeting sequence
  source 1..20: mol_type = other RNA
gcttcatgacagaaagttag

SEQ ID NO: 14093 - RNA, 20 nt, synthetic construct
  misc_feature 1..20: note = C9Orf72 GTCN PAM targeting sequence
  source 1..20: mol_type = other RNA
ccaatgtttgggagtctgtg

SEQ ID NO: 14094 - RNA, 20 nt, synthetic construct
  misc_feature 1..20: note = C9Orf72 GTCN PAM targeting sequence
  source 1..20: mol_type = other RNA
gtgtgggtactgcaggggaa

SEQ ID NO: 14095 - RNA, 20 nt, synthetic construct
  misc_feature 1..20: note = C9Orf72 GTCN PAM targeting sequence
  source 1..20: mol_type = other RNA
aggccacacagcaaataata

SEQ ID NO: 14096 - RNA, 20 nt, synthetic construct
  misc_feature 1..20: note = C9Orf72 GTCN PAM targeting sequence
  source 1..20: mol_type = other RNA
gatttctagggtgcaaaatg

SEQ ID NO: 14097 - RNA, 20 nt, synthetic construct
  misc_feature 1..20: note = C9Orf72 GTCN PAM targeting sequence
  source 1..20: mol_type = other RNA
ctccgtttggggtccctgac

SEQ ID NO: 14098 - RNA, 20 nt, synthetic construct
  misc_feature 1..20: note = C9Orf72 GTCN PAM targeting sequence
  source 1..20: mol_type = other RNA
tggcttcagccggtccctcc

SEQ ID NO: 14099 - RNA, 20 nt, synthetic construct
  misc_feature 1..20: note = C9Orf72 GTCN PAM targeting sequence
  source 1..20: mol_type = other RNA
atgaaatcttcacaatccac

SEQ ID NO: 14100 - RNA, 20 nt, synthetic construct
  misc_feature 1..20: note = C9Orf72 GTCN PAM targeting sequence
  source 1..20: mol_type = other RNA
ttactgcaatctctaaacat

SEQ ID NO: 14101 - RNA, 20 nt, synthetic construct
  misc_feature 1..20: note = C9Orf72 GTCN PAM targeting sequence
  source 1..20: mol_type = other RNA
ttactttaatctcttaatcc

SEQ ID NO: 14102 - RNA, 20 nt, synthetic construct
  misc_feature 1..20: note = C9Orf72 GTCN PAM targeting sequence
  source 1..20: mol_type = other RNA
gccgaggaggatgtatatcg

SEQ ID NO: 14103 - RNA, 20 nt, synthetic construct
  misc_feature 1..20: note = C9Orf72 GTCN PAM targeting sequence
  source 1..20: mol_type = other RNA
tgaggcgatatacatcctcc

SEQ ID NO: 14104 - RNA, 20 nt, synthetic construct
  misc_feature 1..20: note = C9Orf72 GTCN PAM targeting sequence
  source 1..20: mol_type = other RNA
gaccggttgatctcaaaacc

SEQ ID NO: 14105 - RNA, 20 nt, synthetic construct
  misc_feature 1..20: note = C9Orf72 GTCN PAM targeting sequence
  source 1..20: mol_type = other RNA
gaccaaaatttattaggcag

SEQ ID NO: 14106 - RNA, 20 nt, synthetic construct
  misc_feature 1..20: note = C9Orf72 GTCN PAM targeting sequence
  source 1..20: mol_type = other RNA
cctgataagatgttatcaat

SEQ ID NO: 14107 - RNA, 20 nt, synthetic construct
  misc_feature 1..20: note = C9Orf72 GTCN PAM targeting sequence
  source 1..20: mol_type = other RNA
ttgataacatcttatcagga

SEQ ID NO: 14108 - RNA, 20 nt, synthetic construct
  misc_feature 1..20: note = C9Orf72 GTCN PAM targeting sequence
  source 1..20: mol_type = other RNA
tgtggtcctatgatctcgcc

SEQ ID NO: 14109 - RNA, 20 nt, synthetic construct
  misc_feature 1..20: note = C9Orf72 GTCN PAM targeting sequence
  source 1..20: mol_type = other RNA
tatgatctcgccctgcctcc

SEQ ID NO: 14110 - RNA, 20 nt, synthetic construct
  misc_feature 1..20: note = C9Orf72 GTCN PAM targeting sequence
  source 1..20: mol_type = other RNA
tgaactcctgggctcaagtg

SEQ ID NO: 14111 - RNA, 20 nt, synthetic construct
  misc_feature 1..20: note = C9Orf72 GTCN PAM targeting sequence
  source 1..20: mol_type = other RNA
caccaggttgcccaggctgg

SEQ ID NO: 14112 - RNA, 20 nt, synthetic construct
  misc_feature 1..20: note = C9Orf72 GTCN PAM targeting sequence
  source 1..20: mol_type = other RNA
ctacaagtgatttttaaaaa

SEQ ID NO: 14113 - RNA, 20 nt, synthetic construct
  misc_feature 1..20: note = C9Orf72 GTCN PAM targeting sequence
  source 1..20: mol_type = other RNA
ggagggaccgtgaggcaggg

SEQ ID NO: 14114 - RNA, 20 nt, synthetic construct
  misc_feature 1..20: note = C9Orf72 GTCN PAM targeting sequence
  source 1..20: mol_type = other RNA
ctcaggcatgcaggaacagg

SEQ ID NO: 14115 - RNA, 20 nt, synthetic construct
  misc_feature 1..20: note = C9Orf72 GTCN PAM targeting sequence
  source 1..20: mol_type = other RNA
tcaaggagctcccagcctag

SEQ ID NO: 14116 - RNA, 20 nt, synthetic construct
  misc_feature 1..20: note = C9Orf72 GTCN PAM targeting sequence
  source 1..20: mol_type = other RNA
cttggggccatcaggatggg

SEQ ID NO: 14117 - RNA, 20 nt, synthetic construct
  misc_feature 1..20: note = C9Orf72 GTCN PAM targeting sequence
  source 1..20: mol_type = other RNA
gaattgaattcagcagtccc

SEQ ID NO: 14118 - RNA, 20 nt, synthetic construct
  misc_feature 1..20: note = C9Orf72 GTCN PAM targeting sequence
  source 1..20: mol_type = other RNA
tttcccttaatttcattcat

SEQ ID NO: 14119 - RNA, 20 nt, synthetic construct
  misc_feature 1..20: note = C9Orf72 GTCN PAM targeting sequence
  source 1..20: mol_type = other RNA
aaatgggttcaaacttcctg

SEQ ID NO: 14120 - RNA, 20 nt, synthetic construct
  misc_feature 1..20: note = C9Orf72 GTCN PAM targeting sequence
  source 1..20: mol_type = other RNA
agtaattcggaaacaggaag

SEQ ID NO: 14121 - RNA, 20 nt, synthetic construct
  misc_feature 1..20: note = C9Orf72 GTCN PAM targeting sequence
  source 1..20: mol_type = other RNA
aggattaatctttcctgata

SEQ ID NO: 14122 - RNA, 20 nt, synthetic construct
  misc_feature 1..20: note = C9Orf72 GTCN PAM targeting sequence
  source 1..20: mol_type = other RNA
ttcttttgtgtgttacagta

SEQ ID NO: 14123 - RNA, 20 nt, synthetic construct
  misc_feature 1..20: note = C9Orf72 GTCN PAM targeting sequence
  source 1..20: mol_type = other RNA
cttgagaaaagggagttctg

SEQ ID NO: 14124 - RNA, 20 nt, synthetic construct
  misc_feature 1..20: note = C9Orf72 GTCN PAM targeting sequence
  source 1..20: mol_type = other RNA
tagtgatatgctgggaactg

SEQ ID NO: 14125 - RNA, 20 nt, synthetic construct
  misc_feature 1..20: note = C9Orf72 GTCN PAM targeting sequence
  source 1..20: mol_type = other RNA
tacaagtaatgagagttttt

SEQ ID NO: 14126 - RNA, 20 nt, synthetic construct
  misc_feature 1..20: note = C9Orf72 GTCN PAM targeting sequence
  source 1..20: mol_type = other RNA
catcagtgtccatttttaca

SEQ ID NO: 14127 - RNA, 20 nt, synthetic construct
  misc_feature 1..20: note = C9Orf72 GTCN PAM targeting sequence
  source 1..20: mol_type = other RNA
atttttacaattaactcatg

SEQ ID NO: 14128 - RNA, 20 nt, synthetic construct
  misc_feature 1..20: note = C9Orf72 GTCN PAM targeting sequence
  source 1..20: mol_type = other RNA
ggttttattgccaggagata

SEQ ID NO: 14129 - RNA, 20 nt, synthetic construct
  misc_feature 1..20: note = C9Orf72 GTCN PAM targeting sequence
  source 1..20: mol_type = other RNA
ttctgagtttaacaggtttc

SEQ ID NO: 14130 - RNA, 20 nt, synthetic construct
  misc_feature 1..20: note = C9Orf72 GTCN PAM targeting sequence
  source 1..20: mol_type = other RNA
attgaaacttaacactttca

SEQ ID NO: 14131 - RNA, 20 nt, synthetic construct
  misc_feature 1..20: note = C9Orf72 GTCN PAM targeting sequence
  source 1..20: mol_type = other RNA
gatcagaagaatgcatgcta

SEQ ID NO: 14132 - RNA, 20 nt, synthetic construct
  misc_feature 1..20: note = C9Orf72 GTCN PAM targeting sequence
  source 1..20: mol_type = other RNA
gttcagggcctgccttccta

SEQ ID NO: 14133 - RNA, 20 nt, synthetic construct
  misc_feature 1..20: note = C9Orf72 GTCN PAM targeting sequence
  source 1..20: mol_type = other RNA
cactttgcaacaaaagagcc

SEQ ID NO: 14134 - RNA, 20 nt, synthetic construct
  misc_feature 1..20: note = C9Orf72 GTCN PAM targeting sequence
  source 1..20: mol_type = other RNA
catgtaaggacagtataatg

SEQ ID NO: 14135 - RNA, 20 nt, synthetic construct
  misc_feature 1..20: note = C9Orf72 GTCN PAM targeting sequence
  source 1..20: mol_type = other RNA
ttacatgtgacgtcccactt

SEQ ID NO: 14136 - RNA, 20 nt, synthetic construct
  misc_feature 1..20: note = C9Orf72 GTCN PAM targeting sequence
  source 1..20: mol_type = other RNA
acttctaaacttctccaggt

SEQ ID NO: 14137 - RNA, 20 nt, synthetic construct
  misc_feature 1..20: note = C9Orf72 GTCN PAM targeting sequence
  source 1..20: mol_type = other RNA
tattattctattgagatgaa

SEQ ID NO: 14138 - RNA, 20 nt, synthetic construct
  misc_feature 1..20: note = C9Orf72 GTCN PAM targeting sequence
  source 1..20: mol_type = other RNA
gcctaagcagtccaacatat

SEQ ID NO: 14139 - RNA, 20 nt, synthetic construct
  misc_feature 1..20: note = C9Orf72 GTCN PAM targeting sequence
  source 1..20: mol_type = other RNA
aacatattagtctttgtcag

SEQ ID NO: 14140 - RNA, 20 nt, synthetic construct
  misc_feature 1..20: note = C9Orf72 GTCN PAM targeting sequence
  source 1..20: mol_type = other RNA
ttgtcagtaaaggaatccat

SEQ ID NO: 14141 - RNA, 20 nt, synthetic construct
  misc_feature 1..20: note = C9Orf72 GTCN PAM targeting sequence
  source 1..20: mol_type = other RNA
gtaaaggaatccatccactc

SEQ ID NO: 14142 - RNA, 20 nt, synthetic construct
  misc_feature 1..20: note = C9Orf72 GTCN PAM targeting sequence
  source 1..20: mol_type = other RNA
caagggttcccaaagcaaat

SEQ ID NO: 14143 - RNA, 20 nt, synthetic construct
  misc_feature 1..20: note = C9Orf72 GTCN PAM targeting sequence
  source 1..20: mol_type = other RNA
gctggggaacatgtatttgc

SEQ ID NO: 14144 - RNA, 20 nt, synthetic construct
  misc_feature 1..20: note = C9Orf72 GTCN PAM targeting sequence
  source 1..20: mol_type = other RNA
tcttcatagagtaaaaatat

SEQ ID NO: 14145 - RNA, 20 nt, synthetic construct
  misc_feature 1..20: note = C9Orf72 GTCN PAM targeting sequence
  source 1..20: mol_type = other RNA
agatatttttactctatgaa

SEQ ID NO: 14146 - RNA, 20 nt, synthetic construct
  misc_feature 1..20: note = C9Orf72 GTCN PAM targeting sequence
  source 1..20: mol_type = other RNA
aagaatattctgagtagctt

SEQ ID NO: 14147 - RNA, 20 nt, synthetic construct
  misc_feature 1..20: note = C9Orf72 GTCN PAM targeting sequence
  source 1..20: mol_type = other RNA
aaaggtagttggcctttaaa

SEQ ID NO: 14148 - RNA, 20 nt, synthetic construct
  misc_feature 1..20: note = C9Orf72 GTCN PAM targeting sequence
  source 1..20: mol_type = other RNA
tcttatatttgtataatact

SEQ ID NO: 14149 - RNA, 20 nt, synthetic construct
  misc_feature 1..20: note = C9Orf72 GTCN PAM targeting sequence
  source 1..20: mol_type = other RNA
aatatgtatatatatttttt

SEQ ID NO: 14150 - RNA, 20 nt, synthetic construct
  misc_feature 1..20: note = C9Orf72 GTCN PAM targeting sequence
  source 1..20: mol_type = other RNA
agtttcaggtgattttaatt

SEQ ID NO: 14151 - RNA, 20 nt, synthetic construct
  misc_feature 1..20: note = C9Orf72 GTCN PAM targeting sequence
  source 1..20: mol_type = other RNA
actgatttttagtaaatcaa

SEQ ID NO: 14152 - RNA, 20 nt, synthetic construct
  misc_feature 1..20: note = C9Orf72 GTCN PAM targeting sequence
  source 1..20: mol_type = other RNA
ttcttggagtttcattttga

SEQ ID NO: 14153 - RNA, 20 nt, synthetic construct
  misc_feature 1..20: note = C9Orf72 GTCN PAM targeting sequence
  source 1..20: mol_type = other RNA
aatgaatgcatttccctctt

SEQ ID NO: 14154 - RNA, 20 nt, synthetic construct
  misc_feature 1..20: note = C9Orf72 GTCN PAM targeting sequence
  source 1..20: mol_type = other RNA
cttcccggctgcccaccccc

SEQ ID NO: 14155 - RNA, 20 nt, synthetic construct
  misc_feature 1..20: note = C9Orf72 GTCN PAM targeting sequence
  source 1..20: mol_type = other RNA
tatgagctgtgcgagacctt

SEQ ID NO: 14156 - RNA, 20 nt, synthetic construct
  misc_feature 1..20: note = C9Orf72 GTCN PAM targeting sequence
  source 1..20: mol_type = other RNA
cgcacagctcatacgactcc

SEQ ID NO: 14157 - RNA, 20 nt, synthetic construct
  misc_feature 1..20: note = C9Orf72 GTCN PAM targeting sequence
  source 1..20: mol_type = other RNA
ttgtaatccctttgcaaatg

SEQ ID NO: 14158 - RNA, 20 nt, synthetic construct
  misc_feature 1..20: note = C9Orf72 GTCN PAM targeting sequence
  source 1..20: mol_type = other RNA
aaaggtgcatttgcaaaggg

SEQ ID NO: 14159 - RNA, 20 nt, synthetic construct
  misc_feature 1..20: note = C9Orf72 GTCN PAM targeting sequence
  source 1..20: mol_type = other RNA
gaatgttctcatctaggtca

SEQ ID NO: 14160 - RNA, 20 nt, synthetic construct
  misc_feature 1..20: note = C9Orf72 GTCN PAM targeting sequence
  source 1..20: mol_type = other RNA
acagagaaaaccctgatttg

SEQ ID NO: 14161 - RNA, 20 nt, synthetic construct
  misc_feature 1..20: note = C9Orf72 GTCN PAM targeting sequence
  source 1..20: mol_type = other RNA
catcccagagactgttggtg

SEQ ID NO: 14162 - RNA, 20 nt, synthetic construct
  misc_feature 1..20: note = C9Orf72 GTCN PAM targeting sequence
  source 1..20: mol_type = other RNA
ctgggatgagaccccagtac

SEQ ID NO: 14163 - RNA, 20 nt, synthetic construct
  misc_feature 1..20: note = C9Orf72 GTCN PAM targeting sequence
  source 1..20: mol_type = other RNA
ttatctctacatagcaactg

SEQ ID NO: 14164 - RNA, 20 nt, synthetic construct
  misc_feature 1..20: note = C9Orf72 GTCN PAM targeting sequence
  source 1..20: mol_type = other RNA
ggtctttatctctacatagc

SEQ ID NO: 14165 - RNA, 20 nt, synthetic construct
  misc_feature 1..20: note = C9Orf72 GTCN PAM targeting sequence
  source 1..20: mol_type = other RNA
acaggcctattttggcccac

SEQ ID NO: 14166 - RNA, 20 nt, synthetic construct
  misc_feature 1..20: note = C9Orf72 GTCN PAM targeting sequence
  source 1..20: mol_type = other RNA
ggtggtttagaatttaaatt

SEQ ID NO: 14167 - RNA, 20 nt, synthetic construct
  misc_feature 1..20: note = C9Orf72 GTCN PAM targeting sequence
  source 1..20: mol_type = other RNA
attttcctcctttaattaaa

SEQ ID NO: 14168 - RNA, 20 nt, synthetic construct
  misc_feature 1..20: note = C9Orf72 GTCN PAM targeting sequence
  source 1..20: mol_type = other RNA
atatttaaattgtaaaactt

SEQ ID NO: 14169 - RNA, 20 nt, synthetic construct
  misc_feature 1..20: note = C9Orf72 GTCN PAM targeting sequence
  source 1..20: mol_type = other RNA
cttcatacataaaagaaata

SEQ ID NO: 14170 - RNA, 20 nt, synthetic construct
  misc_feature 1..20: note = C9Orf72 GTCN PAM targeting sequence
  source 1..20: mol_type = other RNA
tgtctctttatgattcaaca

SEQ ID NO: 14171 - RNA, 20 nt, synthetic construct
  misc_feature 1..20: note = C9Orf72 GTCN PAM targeting sequence
  source 1..20: mol_type = other RNA
ctttatgattcaacaatcaa

SEQ ID NO: 14172 - RNA, 20 nt, synthetic construct
  misc_feature 1..20: note = C9Orf72 GTCN PAM targeting sequence
  source 1..20: mol_type = other RNA
ttttttagagaaggttttta

SEQ ID NO: 14173 - RNA, 20 nt, synthetic construct
  misc_feature 1..20: note = C9Orf72 GTCN PAM targeting sequence
  source 1..20: mol_type = other RNA
tcacgtaaacaaattacttc

SEQ ID NO: 14174 - RNA, 20 nt, synthetic construct
  misc_feature 1..20: note = C9Orf72 GTCN PAM targeting sequence
  source 1..20: mol_type = other RNA
cagtaaaatgatctcaggtt

SEQ ID NO: 14175 - RNA, 20 nt, synthetic construct
  misc_feature 1..20: note = C9Orf72 GTCN PAM targeting sequence
  source 1..20: mol_type = other RNA
ggttaagacatctttatctg

SEQ ID NO: 14176 - RNA, 20 nt, synthetic construct
  misc_feature 1..20: note = C9Orf72 GTCN PAM targeting sequence
  source 1..20: mol_type = other RNA
taacctgacatatttccttt

SEQ ID NO: 14177 - RNA, 20 nt, synthetic construct
  misc_feature 1..20: note = C9Orf72 GTCN PAM targeting sequence
  source 1..20: mol_type = other RNA
aaattaatgaacaggtccca

SEQ ID NO: 14178 - RNA, 20 nt, synthetic construct
  misc_feature 1..20: note = C9Orf72 GTCN PAM targeting sequence
  source 1..20: mol_type = other RNA
cattacctaggactcatact

SEQ ID NO: 14179 - RNA, 20 nt, synthetic construct
  misc_feature 1..20: note = C9Orf72 GTCN PAM targeting sequence
  source 1..20: mol_type = other RNA
taggtaatgggacctgttca

SEQ ID NO: 14180 - RNA, 20 nt, synthetic construct
  misc_feature 1..20: note = C9Orf72 GTCN PAM targeting sequence
  source 1..20: mol_type = other RNA
ttccatgcaactatcccacc

SEQ ID NO: 14181 - RNA, 20 nt, synthetic construct
  misc_feature 1..20: note = C9Orf72 GTCN PAM targeting sequence
  source 1..20: mol_type = other RNA
ttcagaaggtgggatagttg

SEQ ID NO: 14182 - RNA, 20 nt, synthetic construct
  misc_feature 1..20: note = C9Orf72 GTCN PAM targeting sequence
  source 1..20: mol_type = other RNA
cagcaggaaatgaatggctt

SEQ ID NO: 14183 - RNA, 20 nt, synthetic construct
  misc_feature 1..20: note = C9Orf72 GTCN PAM targeting sequence
  source 1..20: mol_type = other RNA
caaagttcagatccttcagt

SEQ ID NO: 14184 - RNA, 20 nt, synthetic construct
  misc_feature 1..20: note = C9Orf72 GTCN PAM targeting sequence
  source 1..20: mol_type = other RNA
tatacaaagtcggtctcaag

SEQ ID NO: 14185 - RNA, 20 nt, synthetic construct
  misc_feature 1..20: note = C9Orf72 GTCN PAM targeting sequence
  source 1..20: mol_type = other RNA
gtctcaagttagatttctgg

SEQ ID NO: 14186 - RNA, 20 nt, synthetic construct
  misc_feature 1..20: note = C9Orf72 GTCN PAM targeting sequence
  source 1..20: mol_type = other RNA
caagttagatttctggtttt

SEQ ID NO: 14187 - RNA, 20 nt, synthetic construct
  misc_feature 1..20: note = C9Orf72 GTCN PAM targeting sequence
  source 1..20: mol_type = other RNA
aaccttccacagcatttaac

SEQ ID NO: 14188 - RNA, 20 nt, synthetic construct
  misc_feature 1..20: note = C9Orf72 GTCN PAM targeting sequence
  source 1..20: mol_type = other RNA
agtcaaaccttccacagcat

SEQ ID NO: 14189 - RNA, 20 nt, synthetic construct
  misc_feature 1..20: note = C9Orf72 GTCN PAM targeting sequence
  source 1..20: mol_type = other RNA
ggttcaccttatttagtttc

SEQ ID NO: 14190 - RNA, 20 nt, synthetic construct
  misc_feature 1..20: note = C9Orf72 GTCN PAM targeting sequence
  source 1..20: mol_type = other RNA
cagggttctccccacccccc

SEQ ID NO: 14191 - RNA, 20 nt, synthetic construct
  misc_feature 1..20: note = C9Orf72 GTCN PAM targeting sequence
  source 1..20: mol_type = other RNA
tgtgagaaatgcaaaattcc

SEQ ID NO: 14192 - RNA, 20 nt, synthetic construct
  misc_feature 1..20: note = C9Orf72 GTCN PAM targeting sequence
  source 1..20: mol_type = other RNA
aaattatagaaagcacaaac

SEQ ID NO: 14193 - RNA, 20 nt, synthetic construct
  misc_feature 1..20: note = C9Orf72 GTCN PAM targeting sequence
  source 1..20: mol_type = other RNA
tcacttagacaaaaggctac

SEQ ID NO: 14194 - RNA, 20 nt, synthetic construct
  misc_feature 1..20: note = C9Orf72 GTCN PAM targeting sequence
  source 1..20: mol_type = other RNA
aagtgaggacacttgtttgt

SEQ ID NO: 14195 - RNA, 20 nt, synthetic construct
  misc_feature 1..20: note = C9Orf72 GTCN PAM targeting sequence
  source 1..20: mol_type = other RNA
atatctctgttttggtatca

SEQ ID NO: 14196 - RNA, 20 nt, synthetic construct
  misc_feature 1..20: note = C9Orf72 GTCN PAM targeting sequence
  source 1..20: mol_type = other RNA
gttctgttccattggtctat

SEQ ID NO: 14197 - RNA, 20 nt, synthetic construct
  misc_feature 1..20: note = C9Orf72 GTCN PAM targeting sequence
  source 1..20: mol_type = other RNA
aagatcagatggttgtagat

SEQ ID NO: 14198 - RNA, 20 nt, synthetic construct
  misc_feature 1..20: note = C9Orf72 GTCN PAM targeting sequence
  source 1..20: mol_type = other RNA
ggtttgtcaaagatcagatg

SEQ ID NO: 14199 - RNA, 20 nt, synthetic construct
  misc_feature 1..20: note = C9Orf72 GTCN PAM targeting sequence
  source 1..20: mol_type = other RNA
gttcatatcctttgcccact

SEQ ID NO: 14200 - RNA, 20 nt, synthetic construct
  misc_feature 1..20: note = C9Orf72 GTCN PAM targeting sequence
  source 1..20: mol_type = other RNA
tcttttgagaagtgtctgtt

SEQ ID NO: 14201 - RNA, 20 nt, synthetic construct
  misc_feature 1..20: note = C9Orf72 GTCN PAM targeting sequence
  source 1..20: mol_type = other RNA
cataaatgtcttcttttgag

SEQ ID NO: 14202 - RNA, 20 nt, synthetic construct
  misc_feature 1..20: note = C9Orf72 GTCN PAM targeting sequence
  source 1..20: mol_type = other RNA
ttagagaactgcaaatcaaa

SEQ ID NO: 14203 - RNA, 20 nt, synthetic construct
  misc_feature 1..20: note = C9Orf72 GTCN PAM targeting sequence
  source 1..20: mol_type = other RNA
ttctaactagtgtgagatgg

SEQ ID NO: 14204 - RNA, 20 nt, synthetic construct
  misc_feature 1..20: note = C9Orf72 GTCN PAM targeting sequence
  source 1..20: mol_type = other RNA
ggaaacaacagatgctggag

SEQ ID NO: 14205 - RNA, 20 nt, synthetic construct
  misc_feature 1..20: note = C9Orf72 GTCN PAM targeting sequence
  source 1..20: mol_type = other RNA
tccacaattgttgaactagt

SEQ ID NO: 14206 - RNA, 20 nt, synthetic construct
  misc_feature 1..20: note = C9Orf72 GTCN PAM targeting sequence
  source 1..20: mol_type = other RNA
ttatagtagcatgatttatt

SEQ ID NO: 14207 - RNA, 20 nt, synthetic construct
  misc_feature 1..20: note = C9Orf72 GTCN PAM targeting sequence
  source 1..20: mol_type = other RNA
ttgttattgtgaatagtgcc

SEQ ID NO: 14208 - RNA, 20 nt, synthetic construct
  misc_feature 1..20: note = C9Orf72 GTCN PAM targeting sequence
  source 1..20: mol_type = other RNA
atcattgatgggcatttgag

SEQ ID NO: 14209 - RNA, 20 nt, synthetic construct
  misc_feature 1..20: note = C9Orf72 GTCN PAM targeting sequence
  source 1..20: mol_type = other RNA
tttgcagggacatggaggaa

SEQ ID NO: 14210 - RNA, 20 nt, synthetic construct
  misc_feature 1..20: note = C9Orf72 GTCN PAM targeting sequence
  source 1..20: mol_type = other RNA
ctgcaaaggacatgaactca

SEQ ID NO: 14211 - RNA, 20 nt, synthetic construct
  misc_feature 1..20: note = C9Orf72 GTCN PAM targeting sequence
  source 1..20: mol_type = other RNA
ttgtggtagtttgctcagaa

SEQ ID NO: 14212 - RNA, 20 nt, synthetic construct
  misc_feature 1..20: note = C9Orf72 GTCN PAM targeting sequence
  source 1..20: mol_type = other RNA
aagtgttttcattgttcagt

SEQ ID NO: 14213 - RNA, 20 nt, synthetic construct
  misc_feature 1..20: note = C9Orf72 GTCN PAM targeting sequence
  source 1..20: mol_type = other RNA
tggggtggggggtgggggga

SEQ ID NO: 14214 - RNA, 20 nt, synthetic construct
  misc_feature 1..20: note = C9Orf72 GTCN PAM targeting sequence
  source 1..20: mol_type = other RNA
gggcgacagagtgagactct

SEQ ID NO: 14215 - RNA, 20 nt, synthetic construct
  misc_feature 1..20: note = C9Orf72 GTCN PAM targeting sequence
  source 1..20: mol_type = other RNA
cccagactacggtgcagtgg

SEQ ID NO: 14216 - RNA, 20 nt, synthetic construct
  misc_feature 1..20: note = C9Orf72 GTCN PAM targeting sequence
  source 1..20: mol_type = other RNA
cactctgtcgcccagactac

SEQ ID NO: 14217 - RNA, 20 nt, synthetic construct
  misc_feature 1..20: note = C9Orf72 GTCN PAM targeting sequence
  source 1..20: mol_type = other RNA
caaaaaaaaaaaaaaaagtg

SEQ ID NO: 14218 - RNA, 20 nt, synthetic construct
  misc_feature 1..20: note = C9Orf72 GTCN PAM targeting sequence
  source 1..20: mol_type = other RNA
accctaacagtttcgattcc

SEQ ID NO: 14219 - RNA, 20 nt, synthetic construct
  misc_feature 1..20: note = C9Orf72 GTCN PAM targeting sequence
  source 1..20: mol_type = other RNA
agtaaacaaaagtctaccct

SEQ ID NO: 14220 - RNA, 20 nt, synthetic construct
  misc_feature 1..20: note = C9Orf72 GTCN PAM targeting sequence
  source 1..20: mol_type = other RNA
ttgatgctctttcaggaaaa

SEQ ID NO: 14221 - RNA, 20 nt, synthetic construct
  misc_feature 1..20: note = C9Orf72 GTCN PAM targeting sequence
  source 1..20: mol_type = other RNA
ttgccctttttgttgagagt

SEQ ID NO: 14222 - RNA, 20 nt, synthetic construct
  misc_feature 1..20: note = C9Orf72 GTCN PAM targeting sequence
  source 1..20: mol_type = other RNA
gattctagtctttgcccttt

SEQ ID NO: 14223 - RNA, 20 nt, synthetic construct
  misc_feature 1..20: note = C9Orf72 GTCN PAM targeting sequence
  source 1..20: mol_type = other RNA
ttccctttttttgccatcaa

SEQ ID NO: 14224 - RNA, 20 nt, synthetic construct
  misc_feature 1..20: note = C9Orf72 GTCN PAM targeting sequence
  source 1..20: mol_type = other RNA
catttgtagggagaaggatc

SEQ ID NO: 14225 - RNA, 20 nt, synthetic construct
  misc_feature 1..20: note = C9Orf72 GTCN PAM targeting sequence
  source 1..20: mol_type = other RNA
tgatttgctaagcatagtgc

SEQ ID NO: 14226 - RNA, 20 nt, synthetic construct
  misc_feature 1..20: note = C9Orf72 GTCN PAM targeting sequence
  source 1..20: mol_type = other RNA
cttttgatctgaaaacaggc

SEQ ID NO: 14227 - RNA, 20 nt, synthetic construct
  misc_feature 1..20: note = C9Orf72 GTCN PAM targeting sequence
  source 1..20: mol_type = other RNA
agcactttaggacctggagt

SEQ ID NO: 14228 - RNA, 20 nt, synthetic construct
  misc_feature 1..20: note = C9Orf72 GTCN PAM targeting sequence
  source 1..20: mol_type = other RNA
taaagtgctggacctgagga

SEQ ID NO: 14229 - RNA, 20 nt, synthetic construct
  misc_feature 1..20: note = C9Orf72 GTCN PAM targeting sequence
  source 1..20: mol_type = other RNA
ttgatctaggtctcccacac

SEQ ID NO: 14230 - RNA, 20 nt, synthetic construct
  misc_feature 1..20: note = C9Orf72 GTCN PAM targeting sequence
  source 1..20: mol_type = other RNA
cccacacaatatcaaaccaa

SEQ ID NO: 14231 - RNA, 20 nt, synthetic construct
  misc_feature 1..20: note = C9Orf72 GTCN PAM targeting sequence
  source 1..20: mol_type = other RNA
agggactggacagctacctc

SEQ ID NO: 14232 - RNA, 20 nt, synthetic construct
  misc_feature 1..20: note = C9Orf72 GTCN PAM targeting sequence
  source 1..20: mol_type = other RNA
ctagacttcacagaaagagt

SEQ ID NO: 14233 - RNA, 20 nt, synthetic construct
  misc_feature 1..20: note = C9Orf72 GTCN PAM targeting sequence
  source 1..20: mol_type = other RNA
agtccctagacttcacagaa

SEQ ID NO: 14234 - RNA, 20 nt, synthetic construct
  misc_feature 1..20: note = C9Orf72 GTCN PAM targeting sequence
  source 1..20: mol_type = other RNA
tcctgtacttagcattttac

SEQ ID NO: 14235 - RNA, 20 nt, synthetic construct
  misc_feature 1..20: note = C9Orf72 GTCN PAM targeting sequence
  source 1..20: mol_type = other RNA
tcagttggctgatgggtgtt

SEQ ID NO: 14236 - RNA, 20 nt, synthetic construct
  misc_feature 1..20: note = C9Orf72 GTCN PAM targeting sequence
  source 1..20: mol_type = other RNA
tcacacaacagtcctcagtt

SEQ ID NO: 14237 - RNA, 20 nt, synthetic construct
  misc_feature 1..20: note = C9Orf72 GTCN PAM targeting sequence
  source 1..20: mol_type = other RNA
tgagatggccaagtacacat

SEQ ID NO: 14238 - RNA, 20 nt, synthetic construct
  misc_feature 1..20: note = C9Orf72 GTCN PAM targeting sequence
  source 1..20: mol_type = other RNA
ctttcctccccaggaacacg

SEQ ID NO: 14239 - RNA, 20 nt, synthetic construct
  misc_feature 1..20: note = C9Orf72 GTCN PAM targeting sequence
  source 1..20: mol_type = other RNA
ccttagctgatggctgccct

SEQ ID NO: 14240 - RNA, 20 nt, synthetic construct
  misc_feature 1..20: note = C9Orf72 GTCN PAM targeting sequence
  source 1..20: mol_type = other RNA
gacttggtcctccagatgaa

SEQ ID NO: 14241 - RNA, 20 nt, synthetic construct
  misc_feature 1..20: note = C9Orf72 GTCN PAM targeting sequence
  source 1..20: mol_type = other RNA
gacccttcagtagtggctgc

SEQ ID NO: 14242 - RNA, 20 nt, synthetic construct
  misc_feature 1..20: note = C9Orf72 GTCN PAM targeting sequence
  source 1..20: mol_type = other RNA
tccagatgaaaagcttttgt

SEQ ID NO: 14243 - RNA, 20 nt, synthetic construct
  misc_feature 1..20: note = C9Orf72 GTCN PAM targeting sequence
  source 1..20: mol_type = other RNA
tgtggcctccaagccctcaa

SEQ ID NO: 14244 - RNA, 20 nt, synthetic construct
  misc_feature 1..20: note = C9Orf72 GTCN PAM targeting sequence
  source 1..20: mol_type = other RNA
ttctaaagagaatgtcacag

SEQ ID NO: 14245 - RNA, 20 nt, synthetic construct
  misc_feature 1..20: note = C9Orf72 GTCN PAM targeting sequence
  source 1..20: mol_type = other RNA
caggaaagtaggcaggaatc

SEQ ID NO: 14246 - RNA, 20 nt, synthetic construct
  misc_feature 1..20: note = C9Orf72 GTCN PAM targeting sequence
  source 1..20: mol_type = other RNA
gccctttgtgacaaagtcct

SEQ ID NO: 14247 - RNA, 20 nt, synthetic construct
  misc_feature 1..20: note = C9Orf72 GTCN PAM targeting sequence
  source 1..20: mol_type = other RNA
caaagggctgacaccatgtt

SEQ ID NO: 14248 - RNA, 20 nt, synthetic construct
  misc_feature 1..20: note = C9Orf72 GTCN PAM targeting sequence
  source 1..20: mol_type = other RNA
tctattatcctgttcatctc

SEQ ID NO: 14249 - RNA, 20 nt, synthetic construct
  misc_feature 1..20: note = C9Orf72 GTCN PAM targeting sequence
  source 1..20: mol_type = other RNA
gcagatctctgagagaggtt

SEQ ID NO: 14250 - RNA, 20 nt, synthetic construct
  misc_feature 1..20: note = C9Orf72 GTCN PAM targeting sequence
  source 1..20: mol_type = other RNA
cgttactttatcttatcttg

SEQ ID NO: 14251 - RNA, 20 nt, synthetic construct
  misc_feature 1..20: note = C9Orf72 GTCN PAM targeting sequence
  source 1..20: mol_type = other RNA
tagaaggcggccctgccttc

SEQ ID NO: 14252 - RNA, 20 nt, synthetic construct
  misc_feature 1..20: note = C9Orf72 GTCN PAM targeting sequence
  source 1..20: mol_type = other RNA
gcagcagcctcagtcagctc

SEQ ID NO: 14253 - RNA, 20 nt, synthetic construct
  misc_feature 1..20: note = C9Orf72 GTCN PAM targeting sequence
  source 1..20: mol_type = other RNA
gctctcctgcgctcctgtct

SEQ ID NO: 14254 - RNA, 20 nt, synthetic construct
  misc_feature 1..20: note = C9Orf72 GTCN PAM targeting sequence
  source 1..20: mol_type = other RNA
cttcttcctgcatactctgc

SEQ ID NO: 14255 - RNA, 20 nt, synthetic construct
  misc_feature 1..20: note = C9Orf72 GTCN PAM targeting sequence
  source 1..20: mol_type = other RNA
gaatctggggcagagtatgc

SEQ ID NO: 14256 - RNA, 20 nt, synthetic construct
  misc_feature 1..20: note = C9Orf72 GTCN PAM targeting sequence
  source 1..20: mol_type = other RNA
agtggcaccagaatcataga

SEQ ID NO: 14257 - RNA, 20 nt, synthetic construct
  misc_feature 1..20: note = C9Orf72 GTCN PAM targeting sequence
  source 1..20: mol_type = other RNA
actaccctgattattctatg

SEQ ID NO: 14258 - RNA, 20 nt, synthetic construct
  misc_feature 1..20: note = C9Orf72 GTCN PAM targeting sequence
  source 1..20: mol_type = other RNA
taaaggaatctgatggcaca

SEQ ID NO: 14259 - RNA, 20 nt, synthetic construct
  misc_feature 1..20: note = C9Orf72 GTCN PAM targeting sequence
  source 1..20: mol_type = other RNA
ttggctgtgggttgcccaat

SEQ ID NO: 14260 - RNA, 20 nt, synthetic construct
  misc_feature 1..20: note = C9Orf72 GTCN PAM targeting sequence
  source 1..20: mol_type = other RNA
cgagttaaggcaagggggca

SEQ ID NO: 14261 - RNA, 20 nt, synthetic construct
  misc_feature 1..20: note = C9Orf72 GTCN PAM targeting sequence
  source 1..20: mol_type = other RNA
cggctccagagccccctgtg

SEQ ID NO: 14262 - RNA, 20 nt, synthetic construct
  misc_feature 1..20: note = C9Orf72 GTCN PAM targeting sequence
  source 1..20: mol_type = other RNA
ttgtggccataagcagtccc

SEQ ID NO: 14263 - RNA, 20 nt, synthetic construct
  misc_feature 1..20: note = C9Orf72 GTCN PAM targeting sequence
  source 1..20: mol_type = other RNA
ctaatgaacctcctacttgc

SEQ ID NO: 14264 - RNA, 20 nt, synthetic construct
  misc_feature 1..20: note = C9Orf72 GTCN PAM targeting sequence
  source 1..20: mol_type = other RNA
cagagtgagattcctggata

SEQ ID NO: 14265 - RNA, 20 nt, synthetic construct
  misc_feature 1..20: note = C9Orf72 GTCN PAM targeting sequence
  source 1..20: mol_type = other RNA
cagttcagttatccaggaat

SEQ ID NO: 14266 - RNA, 20 nt, synthetic construct
  misc_feature 1..20: note = C9Orf72 GTCN PAM targeting sequence
  source 1..20: mol_type = other RNA
ttcctttatctccccaagcc

SEQ ID NO: 14267 - RNA, 20 nt, synthetic construct
  misc_feature 1..20: note = C9Orf72 GTCN PAM targeting sequence
  source 1..20: mol_type = other RNA
tccataaccaccctctggct

SEQ ID NO: 14268 - RNA, 20 nt, synthetic construct
  misc_feature 1..20: note = C9Orf72 GTCN PAM targeting sequence
  source 1..20: mol_type = other RNA
ggagtctaaaatgggtggca

SEQ ID NO: 14269 - RNA, 20 nt, synthetic construct
  misc_feature 1..20: note = C9Orf72 GTCN PAM targeting sequence
  source 1..20: mol_type = other RNA
aaaatgggtggcaaggctgt

SEQ ID NO: 14270 - RNA, 20 nt, synthetic construct
  misc_feature 1..20: note = C9Orf72 GTCN PAM targeting sequence
  source 1..20: mol_type = other RNA
tttgcaaaaacatgatgcgg

SEQ ID NO: 14271 - RNA, 20 nt, synthetic construct
  misc_feature 1..20: note = C9Orf72 GTCN PAM targeting sequence
  source 1..20: mol_type = other RNA
aggagaacaccagtcatttg

SEQ ID NO: 14272 - RNA, 20 nt, synthetic construct
  misc_feature 1..20: note = C9Orf72 GTCN PAM targeting sequence
  source 1..20: mol_type = other RNA
tgcattcagctgctagaatg

SEQ ID NO: 14273 - RNA, 20 nt, synthetic construct
  misc_feature 1..20: note = C9Orf72 GTCN PAM targeting sequence
  source 1..20: mol_type = other RNA
ataggcagtttcagggtttg

SEQ ID NO: 14274 - RNA, 20 nt, synthetic construct
  misc_feature 1..20: note = C9Orf72 GTCN PAM targeting sequence
  source 1..20: mol_type = other RNA
cttcatatactttgcacgtg

SEQ ID NO: 14275 - RNA, 20 nt, synthetic construct
  misc_feature 1..20: note = C9Orf72 GTCN PAM targeting sequence
  source 1..20: mol_type = other RNA
cagctctgcctggaaactca

SEQ ID NO: 14276 - RNA, 20 nt, synthetic construct
  misc_feature 1..20: note = C9Orf72 GTCN PAM targeting sequence
  source 1..20: mol_type = other RNA
aagagaaggaagagagaggg

SEQ ID NO: 14277 - RNA, 20 nt, synthetic construct
  misc_feature 1..20: note = C9Orf72 GTCN PAM targeting sequence
  source 1..20: mol_type = other RNA
tttttttccccttagttttg

SEQ ID NO: 14278 - RNA, 20 nt, synthetic construct
  misc_feature 1..20: note = C9Orf72 GTCN PAM targeting sequence
  source 1..20: mol_type = other RNA
ccaattacacgcatgggctt

SEQ ID NO: 14279 - RNA, 20 nt, synthetic construct
  misc_feature 1..20: note = C9Orf72 GTCN PAM targeting sequence
  source 1..20: mol_type = other RNA
aatcaaatgcctgggcagat

SEQ ID NO: 14280 - RNA, 20 nt, synthetic construct
  misc_feature 1..20: note = C9Orf72 GTCN PAM targeting sequence
  source 1..20: mol_type = other RNA
accatcccactgcagtagcg

SEQ ID NO: 14281 - RNA, 20 nt, synthetic construct
  misc_feature 1..20: note = C9Orf72 GTCN PAM targeting sequence
  source 1..20: mol_type = other RNA
tggaggaaccacagaatctc

SEQ ID NO: 14282 - RNA, 20 nt, synthetic construct
  misc_feature 1..20: note = C9Orf72 GTCN PAM targeting sequence
  source 1..20: mol_type = other RNA
aggattccagaagaaaattt

SEQ ID NO: 14283 - RNA, 20 nt, synthetic construct
  misc_feature 1..20: note = C9Orf72 GTCN PAM targeting sequence
  source 1..20: mol_type = other RNA
gaaatgtctcctctcatcta

SEQ ID NO: 14284 - RNA, 20 nt, synthetic construct
  misc_feature 1..20: note = C9Orf72 GTCN PAM targeting sequence
  source 1..20: mol_type = other RNA
cctctcatctacccccattt

SEQ ID NO: 14285 - RNA, 20 nt, synthetic construct
  misc_feature 1..20: note = C9Orf72 GTCN PAM targeting sequence
  source 1..20: mol_type = other RNA
agattaaataagttgggctg

SEQ ID NO: 14286 - RNA, 20 nt, synthetic construct
  misc_feature 1..20: note = C9Orf72 GTCN PAM targeting sequence
  source 1..20: mol_type = other RNA
tatgatgtagtattgctgct

SEQ ID NO: 14287 - RNA, 20 nt, synthetic construct
  misc_feature 1..20: note = C9Orf72 GTCN PAM targeting sequence
  source 1..20: mol_type = other RNA
ataaagcagcaatactacat

SEQ ID NO: 14288 - RNA, 20 nt, synthetic construct
  misc_feature 1..20: note = C9Orf72 GTCN PAM targeting sequence
  source 1..20: mol_type = other RNA
cagtaaaactcagtaaataa

SEQ ID NO: 14289 - RNA, 20 nt, synthetic construct
  misc_feature 1..20: note = C9Orf72 GTCN PAM targeting sequence
  source 1..20: mol_type = other RNA
taaatgtggcacacagcaaa

SEQ ID NO: 14290 - RNA, 20 nt, synthetic construct
  misc_feature 1..20: note = C9Orf72 GTCN PAM targeting sequence
  source 1..20: mol_type = other RNA
atgagtcaatgttatgattc

SEQ ID NO: 14291 - RNA, 20 nt, synthetic construct
  misc_feature 1..20: note = C9Orf72 GTCN PAM targeting sequence
  source 1..20: mol_type = other RNA
atgttatgattcctcttttg

SEQ ID NO: 14292 - RNA, 20 nt, synthetic construct
  misc_feature 1..20: note = C9Orf72 GTCN PAM targeting sequence
  source 1..20: mol_type = other RNA
tacagctagtaagtggcagg

SEQ ID NO: 14293 - RNA, 20 nt, synthetic construct
  misc_feature 1..20: note = C9Orf72 GTCN PAM targeting sequence
  source 1..20: mol_type = other RNA
gcccagtcttgttattgtca

SEQ ID NO: 14294 - RNA, 20 nt, synthetic construct
  misc_feature 1..20: note = C9Orf72 GTCN PAM targeting sequence
  source 1..20: mol_type = other RNA
tgttattgtcatattgtgca

SEQ ID NO: 14295 - RNA, 20 nt, synthetic construct
  misc_feature 1..20: note = C9Orf72 GTCN PAM targeting sequence
  source 1..20: mol_type = other RNA
tattgtgcacagtagctact

SEQ ID NO: 14296 - RNA, 20 nt, synthetic construct
  misc_feature 1..20: note = C9Orf72 GTCN PAM targeting sequence
  source 1..20: mol_type = other RNA
agtgaggagaaagtagctac

SEQ ID NO: 14297 - RNA, 20 nt, synthetic construct
  misc_feature 1..20: note = C9Orf72 GTCN PAM targeting sequence
  source 1..20: mol_type = other RNA
ataggattttgatatcctga

SEQ ID NO: 14298 - RNA, 20 nt, synthetic construct
  misc_feature 1..20: note = C9Orf72 GTCN PAM targeting sequence
  source 1..20: mol_type = other RNA
tttgactgagtttcttgaaa

SEQ ID NO: 14299 - RNA, 20 nt, synthetic construct
  misc_feature 1..20: note = C9Orf72 GTCN PAM targeting sequence
  source 1..20: mol_type = other RNA
aaagacagtatgttttagcc

SEQ ID NO: 14300 - RNA, 20 nt, synthetic construct
  misc_feature 1..20: note = C9Orf72 GTCN PAM targeting sequence
  source 1..20: mol_type = other RNA
ctacacgtggattcctcagc

SEQ ID NO: 14301 - RNA, 20 nt, synthetic construct
  misc_feature 1..20: note = C9Orf72 GTCN PAM targeting sequence
  source 1..20: mol_type = other RNA
tggcaggatttggagaagag

SEQ ID NO: 14302 - RNA, 20 nt, synthetic construct
  misc_feature 1..20: note = C9Orf72 GTCN PAM targeting sequence
  source 1..20: mol_type = other RNA
acaaatcgctgtctggggac

SEQ ID NO: 14303 - RNA, 20 nt, synthetic construct
  misc_feature 1..20: note = C9Orf72 GTCN PAM targeting sequence
  source 1..20: mol_type = other RNA
aaatattgaagaaaataggg

SEQ ID NO: 14304 - RNA, 20 nt, synthetic construct
  misc_feature 1..20: note = C9Orf72 GTCN PAM targeting sequence
  source 1..20: mol_type = other RNA
aacacttcattagaatagaa

SEQ ID NO: 14305 - RNA, 20 nt, synthetic construct
  misc_feature 1..20: note = C9Orf72 GTCN PAM targeting sequence
  source 1..20: mol_type = other RNA
cctaaaatgctaatccttcc

SEQ ID NO: 14306 - RNA, 20 nt, synthetic construct
  misc_feature 1..20: note = C9Orf72 GTCN PAM targeting sequence
  source 1..20: mol_type = other RNA
caagtaaaaataaataaata

SEQ ID NO: 14307 - RNA, 20 nt, synthetic construct
  misc_feature 1..20: note = C9Orf72 GTCN PAM targeting sequence
  source 1..20: mol_type = other RNA
tactctgttgcccaggcttg

SEQ ID NO: 14308 - RNA, 20 nt, synthetic construct
  misc_feature 1..20: note = C9Orf72 GTCN PAM targeting sequence
  source 1..20: mol_type = other RNA
ctgaaagttggaacaactgg

SEQ ID NO: 14309 - RNA, 20 nt, synthetic construct
  misc_feature 1..20: note = C9Orf72 GTCN PAM targeting sequence
  source 1..20: mol_type = other RNA
tccccctttctctttttcta

SEQ ID NO: 14310 - RNA, 20 nt, synthetic construct
  misc_feature 1..20: note = C9Orf72 GTCN PAM targeting sequence
  source 1..20: mol_type = other RNA
tctttatttttgttgtcttc

SEQ ID NO: 14311 - RNA, 20 nt, synthetic construct
  misc_feature 1..20: note = C9Orf72 GTCN PAM targeting sequence
  source 1..20: mol_type = other RNA
gaaatgaattccagccacac

SEQ ID NO: 14312 - RNA, 20 nt, synthetic construct
  misc_feature 1..20: note = C9Orf72 GTCN PAM targeting sequence
  source 1..20: mol_type = other RNA
cataagtcaggtcaagcggc

SEQ ID NO: 14313 - RNA, 20 nt, synthetic construct
  misc_feature 1..20: note = C9Orf72 GTCN PAM targeting sequence
  source 1..20: mol_type = other RNA
ggtcaagcggcagggactca

SEQ ID NO: 14314 - RNA, 20 nt, synthetic construct
  misc_feature 1..20: note = C9Orf72 GTCN PAM targeting sequence
  source 1..20: mol_type = other RNA
agcggcagggactcataaac

SEQ ID NO: 14315 - RNA, 20 nt, synthetic construct
  misc_feature 1..20: note = C9Orf72 GTCN PAM targeting sequence
  source 1..20: mol_type = other RNA
atcctgcagcattccgtcag

SEQ ID NO: 14316 - RNA, 20 nt, synthetic construct
  misc_feature 1..20: note = C9Orf72 GTCN PAM targeting sequence
  source 1..20: mol_type = other RNA
gtgataaagtgaaataatgt

SEQ ID NO: 14317 - RNA, 20 nt, synthetic construct
  misc_feature 1..20: note = C9Orf72 GTCN PAM targeting sequence
  source 1..20: mol_type = other RNA
catggccacagctaagtgcg

SEQ ID NO: 14318 - RNA, 20 nt, synthetic construct
  misc_feature 1..20: note = C9Orf72 GTCN PAM targeting sequence
  source 1..20: mol_type = other RNA
cattccattggctggaactt

SEQ ID NO: 14319 - RNA, 20 nt, synthetic construct
  misc_feature 1..20: note = C9Orf72 GTCN PAM targeting sequence
  source 1..20: mol_type = other RNA
gtcccattccattggctgga

SEQ ID NO: 14320 - RNA, 20 nt, synthetic construct
  misc_feature 1..20: note = C9Orf72 GTCN PAM targeting sequence
  source 1..20: mol_type = other RNA
gaagcatctggaagtcctga

SEQ ID NO: 14321 - RNA, 20 nt, synthetic construct
  misc_feature 1..20: note = C9Orf72 GTCN PAM targeting sequence
  source 1..20: mol_type = other RNA
tgagatttttgcagaacatt

SEQ ID NO: 14322 - RNA, 20 nt, synthetic construct
  misc_feature 1..20: note = C9Orf72 GTCN PAM targeting sequence
  source 1..20: mol_type = other RNA
gagactcaggcactaactca

SEQ ID NO: 14323 - RNA, 20 nt, synthetic construct
  misc_feature 1..20: note = C9Orf72 GTCN PAM targeting sequence
  source 1..20: mol_type = other RNA
cggacttggcacacagtaat

SEQ ID NO: 14324 - RNA, 20 nt, synthetic construct
  misc_feature 1..20: note = C9Orf72 GTCN PAM targeting sequence
  source 1..20: mol_type = other RNA
taggttgaggttgaggcttg

SEQ ID NO: 14325 - RNA, 20 nt, synthetic construct
  misc_feature 1..20: note = C9Orf72 GTCN PAM targeting sequence
  source 1..20: mol_type = other RNA
tcaaacaataacaaaattac

SEQ ID NO: 14326 - RNA, 20 nt, synthetic construct
  misc_feature 1..20: note = C9Orf72 GTCN PAM targeting sequence
  source 1..20: mol_type = other RNA
cagtcttcaaacaataacaa

SEQ ID NO: 14327 - RNA, 20 nt, synthetic construct
  misc_feature 1..20: note = C9Orf72 GTCN PAM targeting sequence
  source 1..20: mol_type = other RNA
tcatagtgtgtcccagtctt

SEQ ID NO: 14328 - RNA, 20 nt, synthetic construct
  misc_feature 1..20: note = C9Orf72 GTCN PAM targeting sequence
  source 1..20: mol_type = other RNA
taaaattaaaaaccaggata

SEQ ID NO: 14329 - RNA, 20 nt, synthetic construct
  misc_feature 1..20: note = C9Orf72 GTCN PAM targeting sequence
  source 1..20: mol_type = other RNA
atctgacagaatagttttgt

SEQ ID NO: 14330 - RNA, 20 nt, synthetic construct
  misc_feature 1..20: note = C9Orf72 GTCN PAM targeting sequence
  source 1..20: mol_type = other RNA
gattgacccagtgtcataaa

SEQ ID NO: 14331 - RNA, 20 nt, synthetic construct
  misc_feature 1..20: note = C9Orf72 GTCN PAM targeting sequence
  source 1..20: mol_type = other RNA
gaactgggaaaacaaaacta

SEQ ID NO: 14332 - RNA, 20 nt, synthetic construct
  misc_feature 1..20: note = C9Orf72 GTCN PAM targeting sequence
  source 1..20: mol_type = other RNA
acagattattttcccagaag

SEQ ID NO: 14333 - RNA, 20 nt, synthetic construct
  misc_feature 1..20: note = C9Orf72 GTCN PAM targeting sequence
  source 1..20: mol_type = other RNA
gggcagtctttccacattga

SEQ ID NO: 14334 - RNA, 20 nt, synthetic construct
  misc_feature 1..20: note = C9Orf72 GTCN PAM targeting sequence
  source 1..20: mol_type = other RNA
ttccacattgaacacccctg

SEQ ID NO: 14335 - RNA, 20 nt, synthetic construct
  misc_feature 1..20: note = C9Orf72 GTCN PAM targeting sequence
  source 1..20: mol_type = other RNA
cacatgttggcattctcagg

SEQ ID NO: 14336 - RNA, 20 nt, synthetic construct
  misc_feature 1..20: note = C9Orf72 GTCN PAM targeting sequence
  source 1..20: mol_type = other RNA
gccaaggaactgcatgcctg

SEQ ID NO: 14337 - RNA, 20 nt, synthetic construct
  misc_feature 1..20: note = C9Orf72 GTCN PAM targeting sequence
  source 1..20: mol_type = other RNA
ccttgccaacaggcatgcag

SEQ ID NO: 14338 - RNA, 20 nt, synthetic construct
  misc_feature 1..20: note = C9Orf72 GTCN PAM targeting sequence
  source 1..20: mol_type = other RNA
tcgctcaggacatctcacgg

SEQ ID NO: 14339 - RNA, 20 nt, synthetic construct
  misc_feature 1..20: note = C9Orf72 GTCN PAM targeting sequence
  source 1..20: mol_type = other RNA
tgagcgaagaccctagtaac

SEQ ID NO: 14340 - RNA, 20 nt, synthetic construct
  misc_feature 1..20: note = C9Orf72 GTCN PAM targeting sequence
  source 1..20: mol_type = other RNA
tcaggagaaggaaagcttct

SEQ ID NO: 14341 - RNA, 20 nt, synthetic construct
  misc_feature 1..20: note = C9Orf72 GTCN PAM targeting sequence
  source 1..20: mol_type = other RNA
ctcaatagttcccagtttcc

SEQ ID NO: 14342 - RNA, 20 nt, synthetic construct
  misc_feature 1..20: note = C9Orf72 GTCN PAM targeting sequence
  source 1..20: mol_type = other RNA
ttaagtattctttggtaaca

SEQ ID NO: 14343 - RNA, 20 nt, synthetic construct
  misc_feature 1..20: note = C9Orf72 GTCN PAM targeting sequence
  source 1..20: mol_type = other RNA
ggcttatcatgttgacaggc

SEQ ID NO: 14344 - RNA, 20 nt, synthetic construct
  misc_feature 1..20: note = C9Orf72 GTCN PAM targeting sequence
  source 1..20: mol_type = other RNA
acatgataagccagacattg

SEQ ID NO: 14345 - RNA, 20 nt, synthetic construct
  misc_feature 1..20: note = C9Orf72 GTCN PAM targeting sequence
  source 1..20: mol_type = other RNA
ttgttagagagaaatgtggt

SEQ ID NO: 14346 - RNA, 20 nt, synthetic construct
  misc_feature 1..20: note = C9Orf72 GTCN PAM targeting sequence
  source 1..20: mol_type = other RNA
ccaagccattctttccaaca

SEQ ID NO: 14347 - RNA, 20 nt, synthetic construct
  misc_feature 1..20: note = C9Orf72 GTCN PAM targeting sequence
  source 1..20: mol_type = other RNA
tggattgaactgtgtctccc

SEQ ID NO: 14348 - RNA, 20 nt, synthetic construct
  misc_feature 1..20: note = C9Orf72 GTCN PAM targeting sequence
  source 1..20: mol_type = other RNA
cccccaaaaatatactgaag

SEQ ID NO: 14349 - RNA, 20 nt, synthetic construct
  misc_feature 1..20: note = C9Orf72 GTCN PAM targeting sequence
  source 1..20: mol_type = other RNA
tttgtttccaaataaggcca

SEQ ID NO: 14350 - RNA, 20 nt, synthetic construct
  misc_feature 1..20: note = C9Orf72 GTCN PAM targeting sequence
  source 1..20: mol_type = other RNA
tactggattagggtaggtac

SEQ ID NO: 14351 - RNA, 20 nt, synthetic construct
  misc_feature 1..20: note = C9Orf72 GTCN PAM targeting sequence
  source 1..20: mol_type = other RNA
cttcacgtggcccttcaatg

SEQ ID NO: 14352 - RNA, 20 nt, synthetic construct
  misc_feature 1..20: note = C9Orf72 GTCN PAM targeting sequence
  source 1..20: mol_type = other RNA
tgtaactatggaggcagaga

SEQ ID NO: 14353 - RNA, 20 nt, synthetic construct
  misc_feature 1..20: note = C9Orf72 GTCN PAM targeting sequence
  source 1..20: mol_type = other RNA
aaaatcagagtgccatcatg

SEQ ID NO: 14354 - RNA, 20 nt, synthetic construct
  misc_feature 1..20: note = C9Orf72 GTCN PAM targeting sequence
  source 1..20: mol_type = other RNA
ggaagtccaaaatcagagtg

SEQ ID NO: 14355 - RNA, 20 nt, synthetic construct
  misc_feature 1..20: note = C9Orf72 GTCN PAM targeting sequence
  source 1..20: mol_type = other RNA
tagagtctggaagtccaaaa

SEQ ID NO: 14356 - RNA, 20 nt, synthetic construct
  misc_feature 1..20: note = C9Orf72 GTCN PAM targeting sequence
  source 1..20: mol_type = other RNA
aagtgatgactgccaagaac

SEQ ID NO: 14357 - RNA, 20 nt, synthetic construct
  misc_feature 1..20: note = C9Orf72 GTCN PAM targeting sequence
  source 1..20: mol_type = other RNA
tcacttggactgcaagtttg

SEQ ID NO: 14358 - RNA, 20 nt, synthetic construct
  misc_feature 1..20: note = C9Orf72 GTCN PAM targeting sequence
  source 1..20: mol_type = other RNA
aactctttgggctattttag

SEQ ID NO: 14359 - RNA, 20 nt, synthetic construct
  misc_feature 1..20: note = C9Orf72 GTCN PAM targeting sequence
  source 1..20: mol_type = other RNA
tctgggcaaagatgcagaga

SEQ ID NO: 14360 - RNA, 20 nt, synthetic construct
  misc_feature 1..20: note = C9Orf72 GTCN PAM targeting sequence
  source 1..20: mol_type = other RNA
ctgcatctttgcccagatga

SEQ ID NO: 14361 - RNA, 20 nt, synthetic construct
  misc_feature 1..20: note = C9Orf72 GTCN PAM targeting sequence
  source 1..20: mol_type = other RNA
caggcataaggataattagt

SEQ ID NO: 14362 - RNA, 20 nt, synthetic construct
  misc_feature 1..20: note = C9Orf72 GTCN PAM targeting sequence
  source 1..20: mol_type = other RNA
gaaccctaagaatatgctat

SEQ ID NO: 14363 - RNA, 20 nt, synthetic construct
  misc_feature 1..20: note = C9Orf72 GTCN PAM targeting sequence
  source 1..20: mol_type = other RNA
gtgtcagaaccctaagaata

SEQ ID NO: 14364 - RNA, 20 nt, synthetic construct
  misc_feature 1..20: note = C9Orf72 GTCN PAM targeting sequence
  source 1..20: mol_type = other RNA
aaagagaatatatggggaat

SEQ ID NO: 14365 - RNA, 20 nt, synthetic construct
  misc_feature 1..20: note = C9Orf72 GTCN PAM targeting sequence
  source 1..20: mol_type = other RNA
gtccaaagagaatatatggg

SEQ ID NO: 14366 - RNA, 20 nt, synthetic construct
  misc_feature 1..20: note = C9Orf72 GTCN PAM targeting sequence
  source 1..20: mol_type = other RNA
taccacttacagcttctgtg

SEQ ID NO: 14367 - RNA, 20 nt, synthetic construct
  misc_feature 1..20: note = C9Orf72 GTCN PAM targeting sequence
  source 1..20: mol_type = other RNA
tctgctcttgtctaggccca

SEQ ID NO: 14368 - RNA, 20 nt, synthetic construct
  misc_feature 1..20: note = C9Orf72 GTCN PAM targeting sequence
  source 1..20: mol_type = other RNA
aggcccatatatccaactgc

SEQ ID NO: 14369 - RNA, 20 nt, synthetic construct
  misc_feature 1..20: note = C9Orf72 GTCN PAM targeting sequence
  source 1..20: mol_type = other RNA
atccagcagttggatatatg

SEQ ID NO: 14370 - RNA, 20 nt, synthetic construct
  misc_feature 1..20: note = C9Orf72 GTCN PAM targeting sequence
  source 1..20: mol_type = other RNA
gagatagctaagtggagatg

SEQ ID NO: 14371 - RNA, 20 nt, synthetic construct
  misc_feature 1..20: note = C9Orf72 GTCN PAM targeting sequence
  source 1..20: mol_type = other RNA
ataacagaactcaccagttg

SEQ ID NO: 14372 - RNA, 20 nt, synthetic construct
  misc_feature 1..20: note = C9Orf72 GTCN PAM targeting sequence
  source 1..20: mol_type = other RNA
atttcctccttctcaccccc

SEQ ID NO: 14373 - RNA, 20 nt, synthetic construct
  misc_feature 1..20: note = C9Orf72 GTCN PAM targeting sequence
  source 1..20: mol_type = other RNA
tcttcttgatacctgctatc

SEQ ID NO: 14374 - RNA, 20 nt, synthetic construct
  misc_feature 1..20: note = C9Orf72 GTCN PAM targeting sequence
  source 1..20: mol_type = other RNA
taatcttaaaaggcaagagt

SEQ ID NO: 14375 - RNA, 20 nt, synthetic construct
  misc_feature 1..20: note = C9Orf72 GTCN PAM targeting sequence
  source 1..20: mol_type = other RNA
cttgcagaggttcctggagg

SEQ ID NO: 14376 - RNA, 20 nt, synthetic construct
  misc_feature 1..20: note = C9Orf72 GTCN PAM targeting sequence
  source 1..20: mol_type = other RNA
tgttttcccttgtattcttg

SEQ ID NO: 14377 - RNA, 20 nt, synthetic construct
  misc_feature 1..20: note = C9Orf72 GTCN PAM targeting sequence
  source 1..20: mol_type = other RNA
aacactgtaggcaacagatg

SEQ ID NO: 14378 - RNA, 20 nt, synthetic construct
  misc_feature 1..20: note = C9Orf72 GTCN PAM targeting sequence
  source 1..20: mol_type = other RNA
gaaattaagttatttatata

SEQ ID NO: 14379 - RNA, 20 nt, synthetic construct
  misc_feature 1..20: note = C9Orf72 GTCN PAM targeting sequence
  source 1..20: mol_type = other RNA
agcatctctcaggaaaccca

SEQ ID NO: 14380 - RNA, 20 nt, synthetic construct
  misc_feature 1..20: note = C9Orf72 GTCN PAM targeting sequence
  source 1..20: mol_type = other RNA
cctaccagaataatccttct

SEQ ID NO: 14381 - RNA, 20 nt, synthetic construct
  misc_feature 1..20: note = C9Orf72 GTCN PAM targeting sequence
  source 1..20: mol_type = other RNA
ttttgagcccgaatggggct

SEQ ID NO: 14382 - RNA, 20 nt, synthetic construct
  misc_feature 1..20: note = C9Orf72 GTCN PAM targeting sequence
  source 1..20: mol_type = other RNA
tcctaaaacagagagtaggt

SEQ ID NO: 14383 - RNA, 20 nt, synthetic construct
  misc_feature 1..20: note = C9Orf72 GTCN PAM targeting sequence
  source 1..20: mol_type = other RNA
tttccagcccaactgaagat

SEQ ID NO: 14384 - RNA, 20 nt, synthetic construct
  misc_feature 1..20: note = C9Orf72 GTCN PAM targeting sequence
  source 1..20: mol_type = other RNA
aaagagcccctctaaggttg

SEQ ID NO: 14385 - RNA, 20 nt, synthetic construct
  misc_feature 1..20: note = C9Orf72 GTCN PAM targeting sequence
  source 1..20: mol_type = other RNA
tttaattttatcaaccttag

SEQ ID NO: 14386 - RNA, 20 nt, synthetic construct
  misc_feature 1..20: note = C9Orf72 GTCN PAM targeting sequence
  source 1..20: mol_type = other RNA
tagaacttctcagcagtttt

SEQ ID NO: 14387 - RNA, 20 nt, synthetic construct
  misc_feature 1..20: note = C9Orf72 GTCN PAM targeting sequence
  source 1..20: mol_type = other RNA
cacggcagtttttgattaaa

SEQ ID NO: 14388 - RNA, 20 nt, synthetic construct
  misc_feature 1..20: note = C9Orf72 GTCN PAM targeting sequence
  source 1..20: mol_type = other RNA
ttcttagttttgtatctgtg

SEQ ID NO: 14389 - RNA, 20 nt, synthetic construct
  misc_feature 1..20: note = C9Orf72 GTCN PAM targeting sequence
  source 1..20: mol_type = other RNA
tcccctccagaagaaaaatg

SEQ ID NO: 14390 - RNA, 20 nt, synthetic construct
  misc_feature 1..20: note = C9Orf72 GTCN PAM targeting sequence
  source 1..20: mol_type = other RNA
cacagttttgtatttcttgg

SEQ ID NO: 14391 - RNA, 20 nt, synthetic construct
  misc_feature 1..20: note = C9Orf72 GTCN PAM targeting sequence
  source 1..20: mol_type = other RNA
gatcatgagcactttcgtac

SEQ ID NO: 14392 - RNA, 20 nt, synthetic construct
  misc_feature 1..20: note = C9Orf72 GTCN PAM targeting sequence
  source 1..20: mol_type = other RNA
tatactacttctggtgcatt

SEQ ID NO: 14393 - RNA, 20 nt, synthetic construct
  misc_feature 1..20: note = C9Orf72 GTCN PAM targeting sequence
  source 1..20: mol_type = other RNA
atttaatgtcctatactact

SEQ ID NO: 14394 - RNA, 20 nt, synthetic construct
  misc_feature 1..20: note = C9Orf72 GTCN PAM targeting sequence
  source 1..20: mol_type = other RNA
gggaaaattaagggaattaa

SEQ ID NO: 14395 - RNA, 20 nt, synthetic construct
  misc_feature 1..20: note = C9Orf72 GTCN PAM targeting sequence
  source 1..20: mol_type = other RNA
gatgtcggggaaaattaagg

SEQ ID NO: 14396 - RNA, 20 nt, synthetic construct
  misc_feature 1..20: note = C9Orf72 GTCN PAM targeting sequence
  source 1..20: mol_type = other RNA
tctccatatccctacacaaa

SEQ ID NO: 14397 - RNA, 20 nt, synthetic construct
  misc_feature 1..20: note = C9Orf72 GTCN PAM targeting sequence
  source 1..20: mol_type = other RNA
ttaagacatggcttcattat

SEQ ID NO: 14398 - RNA, 20 nt, synthetic construct
  misc_feature 1..20: note = C9Orf72 GTCN PAM targeting sequence
  source 1..20: mol_type = other RNA
taatgacagtaaagttattt

SEQ ID NO: 14399 - RNA, 20 nt, synthetic construct
  misc_feature 1..20: note = C9Orf72 GTCN PAM targeting sequence
  source 1..20: mol_type = other RNA
cccaacaaataattattgag

SEQ ID NO: 14400 - RNA, 20 nt, synthetic construct
  misc_feature 1..20: note = C9Orf72 GTCN PAM targeting sequence
  source 1..20: mol_type = other RNA
ggtgagccatttatcctgga

SEQ ID NO: 14401 - RNA, 20 nt, synthetic construct
  misc_feature 1..20: note = C9Orf72 GTCN PAM targeting sequence
  source 1..20: mol_type = other RNA
aggataaatggctcaccaga

SEQ ID NO: 14402 - RNA, 20 nt, synthetic construct
  misc_feature 1..20: note = C9Orf72 GTCN PAM targeting sequence
  source 1..20: mol_type = other RNA
cacagataaacttctaggat

SEQ ID NO: 14403 - RNA, 20 nt, synthetic construct
  misc_feature 1..20: note = C9Orf72 GTCN PAM targeting sequence
  source 1..20: mol_type = other RNA
tcctactgccacccatggat

SEQ ID NO: 14404 - RNA, 20 nt, synthetic construct
  misc_feature 1..20: note = C9Orf72 GTCN PAM targeting sequence
  source 1..20: mol_type = other RNA
ctcctattccctatgagcat

SEQ ID NO: 14405 - RNA, 20 nt, synthetic construct
  misc_feature 1..20: note = C9Orf72 GTCN PAM targeting sequence
  source 1..20: mol_type = other RNA
tgtttgatacctttctctct

SEQ ID NO: 14406 - RNA, 20 nt, synthetic construct
  misc_feature 1..20: note = C9Orf72 GTCN PAM targeting sequence
  source 1..20: mol_type = other RNA
tgctcctctcctcccctgcg

SEQ ID NO: 14407 - RNA, 20 nt, synthetic construct
  misc_feature 1..20: note = C9Orf72 GTCN PAM targeting sequence
  source 1..20: mol_type = other RNA
ttatcagtttctctatcagg

SEQ ID NO: 14408 - RNA, 20 nt, synthetic construct
  misc_feature 1..20: note = C9Orf72 GTCN PAM targeting sequence
  source 1..20: mol_type = other RNA
tcattaagagaagagccaag

SEQ ID NO: 14409 - RNA, 20 nt, synthetic construct
  misc_feature 1..20: note = C9Orf72 GTCN PAM targeting sequence
  source 1..20: mol_type = other RNA
ctttcttggctcttctctta

SEQ ID NO: 14410 - RNA, 20 nt, synthetic construct
  misc_feature 1..20: note = C9Orf72 GTCN PAM targeting sequence
  source 1..20: mol_type = other RNA
tctggtccctttcttggctc

SEQ ID NO: 14411 - RNA, 20 nt, synthetic construct
  misc_feature 1..20: note = C9Orf72 GTCN PAM targeting sequence
  source 1..20: mol_type = other RNA
gcctcatttggggccagctt

SEQ ID NO: 14412 - RNA, 20 nt, synthetic construct
  misc_feature 1..20: note = C9Orf72 GTCN PAM targeting sequence
  source 1..20: mol_type = other RNA
cctctggcaactagatgttt

SEQ ID NO: 14413 - RNA, 20 nt, synthetic construct
  misc_feature 1..20: note = C9Orf72 GTCN PAM targeting sequence
  source 1..20: mol_type = other RNA
gaggataaaatagctgcaca

SEQ ID NO: 14414 - RNA, 20 nt, synthetic construct
  misc_feature 1..20: note = C9Orf72 GTCN PAM targeting sequence
  source 1..20: mol_type = other RNA
tcacaaggttgtgtgcagct

SEQ ID NO: 14415 - RNA, 20 nt, synthetic construct
  misc_feature 1..20: note = C9Orf72 GTCN PAM targeting sequence
  source 1..20: mol_type = other RNA
aggcctagcggtacttccca

SEQ ID NO: 14416 - RNA, 20 nt, synthetic construct
  misc_feature 1..20: note = C9Orf72 GTCN PAM targeting sequence
  source 1..20: mol_type = other RNA
ttaggcgattgagcccagta

SEQ ID NO: 14417 - RNA, 20 nt, synthetic construct
  misc_feature 1..20: note = C9Orf72 GTCN PAM targeting sequence
  source 1..20: mol_type = other RNA
tgattcgaaacttgtctttt

SEQ ID NO: 14418 - RNA, 20 nt, synthetic construct
  misc_feature 1..20: note = C9Orf72 GTCN PAM targeting sequence
  source 1..20: mol_type = other RNA
tttcatggagagcaataaat

SEQ ID NO: 14419 - RNA, 20 nt, synthetic construct
  misc_feature 1..20: note = C9Orf72 GTCN PAM targeting sequence
  source 1..20: mol_type = other RNA
agactgaaatgtctcatctc

SEQ ID NO: 14420 - RNA, 20 nt, synthetic construct
  misc_feature 1..20: note = C9Orf72 GTCN PAM targeting sequence
  source 1..20: mol_type = other RNA
agacgatatagctgtgattc

SEQ ID NO: 14421 - RNA, 20 nt, synthetic construct
  misc_feature 1..20: note = C9Orf72 GTCN PAM targeting sequence
  source 1..20: mol_type = other RNA
catctccattttgccaaatt

SEQ ID NO: 14422 - RNA, 20 nt, synthetic construct
  misc_feature 1..20: note = C9Orf72 GTCN PAM targeting sequence
  source 1..20: mol_type = other RNA
attacagttaatctcataat

SEQ ID NO: 14423 - RNA, 20 nt, synthetic construct
  misc_feature 1..20: note = C9Orf72 GTCN PAM targeting sequence
  source 1..20: mol_type = other RNA
atgtggattatgagattaac

SEQ ID NO: 14424 - RNA, 20 nt, synthetic construct
  misc_feature 1..20: note = C9Orf72 GTCN PAM targeting sequence
  source 1..20: mol_type = other RNA
gtgcatagcctactgatgac

SEQ ID NO: 14425 - RNA, 20 nt, synthetic construct
  misc_feature 1..20: note = C9Orf72 GTCN PAM targeting sequence
  source 1..20: mol_type = other RNA
tcagtaggctatgcactgac

SEQ ID NO: 14426 - RNA, 20 nt, synthetic construct
  misc_feature 1..20: note = C9Orf72 GTCN PAM targeting sequence
  source 1..20: mol_type = other RNA
ggcataactgctgagtttgt

SEQ ID NO: 14427 - RNA, 20 nt, synthetic construct
  misc_feature 1..20: note = C9Orf72 GTCN PAM targeting sequence
  source 1..20: mol_type = other RNA
aaatgtttccttacactgtc

SEQ ID NO: 14428 - RNA, 20 nt, synthetic construct
  misc_feature 1..20: note = C9Orf72 GTCN PAM targeting sequence
  source 1..20: mol_type = other RNA
ttgttttcaattttctgatt

SEQ ID NO: 14429 - RNA, 20 nt, synthetic construct
  misc_feature 1..20: note = C9Orf72 GTCN PAM targeting sequence
  source 1..20: mol_type = other RNA
tacctctgttctgtaaagcc

SEQ ID NO: 14430 - RNA, 20 nt, synthetic construct
  misc_feature 1..20: note = C9Orf72 GTCN PAM targeting sequence
  source 1..20: mol_type = other RNA
ctggtcatacctctgttctg

SEQ ID NO: 14431 - RNA, 20 nt, synthetic construct
  misc_feature 1..20: note = C9Orf72 GTCN PAM targeting sequence
  source 1..20: mol_type = other RNA
gtattattttgttttagtat

SEQ ID NO: 14432 - RNA, 20 nt, synthetic construct
  misc_feature 1..20: note = C9Orf72 GTCN PAM targeting sequence
  source 1..20: mol_type = other RNA
tactaaaacaaaataatact

SEQ ID NO: 14433 - RNA, 20 nt, synthetic construct
  misc_feature 1..20: note = C9Orf72 GTCN PAM targeting sequence
  source 1..20: mol_type = other RNA
cctgtcatactaaaacaaaa

SEQ ID NO: 14434 - RNA, 20 nt, synthetic construct
  misc_feature 1..20: note = C9Orf72 GTCN PAM targeting sequence
  source 1..20: mol_type = other RNA
cgtctgagctctgctgtgag

SEQ ID NO: 14435 - RNA, 20 nt, synthetic construct
  misc_feature 1..20: note = C9Orf72 GTCN PAM targeting sequence
  source 1..20: mol_type = other RNA
gagctctgctgtgagaggtc

SEQ ID NO: 14436 - RNA, 20 nt, synthetic construct
  misc_feature 1..20: note = C9Orf72 GTCN PAM targeting sequence
  source 1..20: mol_type = other RNA
gtgggagcttgcatggtgga

SEQ ID NO: 14437 - RNA, 20 nt, synthetic construct
  misc_feature 1..20: note = C9Orf72 GTCN PAM targeting sequence
  source 1..20: mol_type = other RNA
gataaaataaagacacccag

SEQ ID NO: 14438 - RNA, 20 nt, synthetic construct
  misc_feature 1..20: note = C9Orf72 GTCN PAM targeting sequence
  source 1..20: mol_type = other RNA
ttattttatctgacaaccct

SEQ ID NO: 14439 - RNA, 20 nt, synthetic construct
  misc_feature 1..20: note = C9Orf72 GTCN PAM targeting sequence
  source 1..20: mol_type = other RNA
ttcattgtttttctgaaatt

SEQ ID NO: 14440 - RNA, 20 nt, synthetic construct
  misc_feature 1..20: note = C9Orf72 GTCN PAM targeting sequence
  source 1..20: mol_type = other RNA
caaatattgcatgagtgttc

SEQ ID NO: 14441 - RNA, 20 nt, synthetic construct
  misc_feature 1..20: note = C9Orf72 GTCN PAM targeting sequence
  source 1..20: mol_type = other RNA
tagcagataaaaatatagaa

SEQ ID NO: 14442 - RNA, 20 nt, synthetic construct
  misc_feature 1..20: note = C9Orf72 GTCN PAM targeting sequence
  source 1..20: mol_type = other RNA
ttctcccaccattaggattg

SEQ ID NO: 14443 - RNA, 20 nt, synthetic construct
  misc_feature 1..20: note = C9Orf72 GTCN PAM targeting sequence
  source 1..20: mol_type = other RNA
tgaatattgtcaatatcagc

SEQ ID NO: 14444 - RNA, 20 nt, synthetic construct
  misc_feature 1..20: note = C9Orf72 GTCN PAM targeting sequence
  source 1..20: mol_type = other RNA
atatcagcatctattaacgt

SEQ ID NO: 14445 - RNA, 20 nt, synthetic construct
  misc_feature 1..20: note = C9Orf72 GTCN PAM targeting sequence
  source 1..20: mol_type = other RNA
ttgctcttggggaaccctaa

SEQ ID NO: 14446 - RNA, 20 nt, synthetic construct
  misc_feature 1..20: note = C9Orf72 GTCN PAM targeting sequence
  source 1..20: mol_type = other RNA
tgaagaaggaggaataagtt

SEQ ID NO: 14447 - RNA, 20 nt, synthetic construct
  misc_feature 1..20: note = C9Orf72 GTCN PAM targeting sequence
  source 1..20: mol_type = other RNA
cttggatagatacactttgt

SEQ ID NO: 14448 - RNA, 20 nt, synthetic construct
  misc_feature 1..20: note = C9Orf72 GTCN PAM targeting sequence
  source 1..20: mol_type = other RNA
cagcaaaaaatggaaaacaa

SEQ ID NO: 14449 - RNA, 20 nt, synthetic construct
  misc_feature 1..20: note = C9Orf72 GTCN PAM targeting sequence
  source 1..20: mol_type = other RNA
ttaagggcatcatcattatt

SEQ ID NO: 14450 - RNA, 20 nt, synthetic construct
  misc_feature 1..20: note = C9Orf72 GTCN PAM targeting sequence
  source 1..20: mol_type = other RNA
aatattatgtacatttttaa

SEQ ID NO: 14451 - RNA, 20 nt, synthetic construct
  misc_feature 1..20: note = C9Orf72 GTCN PAM targeting sequence
  source 1..20: mol_type = other RNA
atttataacgctatataaaa

SEQ ID NO: 14452 - RNA, 20 nt, synthetic construct
  misc_feature 1..20: note = C9Orf72 GTCN PAM targeting sequence
  source 1..20: mol_type = other RNA
gcccaagaaatctgcccatg

SEQ ID NO: 14453 - RNA, 20 nt, synthetic construct
  misc_feature 1..20: note = C9Orf72 GTCN PAM targeting sequence
  source 1..20: mol_type = other RNA
ttgtaaaatggtaaatagcc

SEQ ID NO: 14454 - RNA, 20 nt, synthetic construct
  misc_feature 1..20: note = C9Orf72 GTCN PAM targeting sequence
  source 1..20: mol_type = other RNA
aggatggatttaactgaaga

SEQ ID NO: 14455 - RNA, 20 nt, synthetic construct
  misc_feature 1..20: note = C9Orf72 GTCN PAM targeting sequence
  source 1..20: mol_type = other RNA
cctacttagtaagtgccagc

SEQ ID NO: 14456 - RNA, 20 nt, synthetic construct
  misc_feature 1..20: note = C9Orf72 GTCN PAM targeting sequence
  source 1..20: mol_type = other RNA
ccagagcacagtatagttta

SEQ ID NO: 14457 - RNA, 20 nt, synthetic construct
  misc_feature 1..20: note = C9Orf72 GTCN PAM targeting sequence
  source 1..20: mol_type = other RNA
atgtctatgattaactcaat

SEQ ID NO: 14458 - RNA, 20 nt, synthetic construct
  misc_feature 1..20: note = C9Orf72 GTCN PAM targeting sequence
  source 1..20: mol_type = other RNA
atgattaactcaatgagaca

SEQ ID NO: 14459 - RNA, 20 nt, synthetic construct
  misc_feature 1..20: note = C9Orf72 GTCN PAM targeting sequence
  source 1..20: mol_type = other RNA
cattgagttaatcatagaca

SEQ ID NO: 14460 - RNA, 20 nt, synthetic construct
  misc_feature 1..20: note = C9Orf72 GTCN PAM targeting sequence
  source 1..20: mol_type = other RNA
tgttatgatgattccttagt

SEQ ID NO: 14461 - RNA, 20 nt, synthetic construct
  misc_feature 1..20: note = C9Orf72 GTCN PAM targeting sequence
  source 1..20: mol_type = other RNA
tttcacagttaaccaaggtt

SEQ ID NO: 14462 - RNA, 20 nt, synthetic construct
  misc_feature 1..20: note = C9Orf72 GTCN PAM targeting sequence
  source 1..20: mol_type = other RNA
tatacacatcttctggattt

SEQ ID NO: 14463 - RNA, 20 nt, synthetic construct
  misc_feature 1..20: note = C9Orf72 GTCN PAM targeting sequence
  source 1..20: mol_type = other RNA
cctggcaaaatctgagacat

SEQ ID NO: 14464 - RNA, 20 nt, synthetic construct
  misc_feature 1..20: note = C9Orf72 GTCN PAM targeting sequence
  source 1..20: mol_type = other RNA
cagattttgccaggtgactc

SEQ ID NO: 14465 - RNA, 20 nt, synthetic construct
  misc_feature 1..20: note = C9Orf72 GTCN PAM targeting sequence
  source 1..20: mol_type = other RNA
acgagaaaacatagcttttg

SEQ ID NO: 14466 - RNA, 20 nt, synthetic construct
  misc_feature 1..20: note = C9Orf72 GTCN PAM targeting sequence
  source 1..20: mol_type = other RNA
ctacaggccttcaacatctt

SEQ ID NO: 14467 - RNA, 20 nt, synthetic construct
  misc_feature 1..20: note = C9Orf72 GTCN PAM targeting sequence
  source 1..20: mol_type = other RNA
ctctttccaatatttgaagg

SEQ ID NO: 14468 - RNA, 20 nt, synthetic construct
  misc_feature 1..20: note = C9Orf72 GTCN PAM targeting sequence
  source 1..20: mol_type = other RNA
tcctccaagcattggttcag

SEQ ID NO: 14469 - RNA, 20 nt, synthetic construct
  misc_feature 1..20: note = C9Orf72 GTCN PAM targeting sequence
  source 1..20: mol_type = other RNA
tcattttcattcttgtcttc

SEQ ID NO: 14470 - RNA, 20 nt, synthetic construct
  misc_feature 1..20: note = C9Orf72 GTCN PAM targeting sequence
  source 1..20: mol_type = other RNA
cccagctgagcagcctggaa

SEQ ID NO: 14471 - RNA, 20 nt, synthetic construct
  misc_feature 1..20: note = C9Orf72 GTCN PAM targeting sequence
  source 1..20: mol_type = other RNA
atcctgtggaaatatctcct

SEQ ID NO: 14472 - RNA, 20 nt, synthetic construct
  misc_feature 1..20: note = C9Orf72 GTCN PAM targeting sequence
  source 1..20: mol_type = other RNA
ctgtatttcttttctttcag

SEQ ID NO: 14473 - RNA, 20 nt, synthetic construct
  misc_feature 1..20: note = C9Orf72 GTCN PAM targeting sequence
  source 1..20: mol_type = other RNA
gagtggaaatcagaagatgt

SEQ ID NO: 14474 - RNA, 20 nt, synthetic construct
  misc_feature 1..20: note = C9Orf72 GTCN PAM targeting sequence
  source 1..20: mol_type = other RNA
tgtaagcctgtcctcagttg

SEQ ID NO: 14475 - RNA, 20 nt, synthetic construct
  misc_feature 1..20: note = C9Orf72 GTCN PAM targeting sequence
  source 1..20: mol_type = other RNA
tcagttggactggtagcctc

SEQ ID NO: 14476 - RNA, 20 nt, synthetic construct
  misc_feature 1..20: note = C9Orf72 GTCN PAM targeting sequence
  source 1..20: mol_type = other RNA
acaggtggtatatatagcaa

SEQ ID NO: 14477 - RNA, 20 nt, synthetic construct
  misc_feature 1..20: note = C9Orf72 GTCN PAM targeting sequence
  source 1..20: mol_type = other RNA
tggtgaagtccacaggtggt

SEQ ID NO: 14478 - RNA, 20 nt, synthetic construct
  misc_feature 1..20: note = C9Orf72 GTCN PAM targeting sequence
  source 1..20: mol_type = other RNA
aattcaaccatccatccaat

SEQ ID NO: 14479 - RNA, 20 nt, synthetic construct
  misc_feature 1..20: note = C9Orf72 GTCN PAM targeting sequence
  source 1..20: mol_type = other RNA
gatccttctgctgatagcct

SEQ ID NO: 14480 - RNA, 20 nt, synthetic construct
  misc_feature 1..20: note = C9Orf72 GTCN PAM targeting sequence
  source 1..20: mol_type = other RNA
tttatggttgcagtcctgcc

SEQ ID NO: 14481 - RNA, 20 nt, synthetic construct
  misc_feature 1..20: note = C9Orf72 GTCN PAM targeting sequence
  source 1..20: mol_type = other RNA
tgccaagtgtttgctatcct

SEQ ID NO: 14482 - RNA, 20 nt, synthetic construct
  misc_feature 1..20: note = C9Orf72 GTCN PAM targeting sequence
  source 1..20: mol_type = other RNA
gaacagtatgcttttttaaa

SEQ ID NO: 14483 - RNA, 20 nt, synthetic construct
  misc_feature 1..20: note = C9Orf72 GTCN PAM targeting sequence
  source 1..20: mol_type = other RNA
gtttgtgcccttgccttttt

SEQ ID NO: 14484 - RNA, 20 nt, synthetic construct
  misc_feature 1..20: note = C9Orf72 GTCN PAM targeting sequence
  source 1..20: mol_type = other RNA
gtagtatttcttcctttgtg

SEQ ID NO: 14485 - RNA, 20 nt, synthetic construct
  misc_feature 1..20: note = C9Orf72 GTCN PAM targeting sequence
  source 1..20: mol_type = other RNA
tcttattttgcatttaaaaa

SEQ ID NO: 14486 - RNA, 20 nt, synthetic construct
  misc_feature 1..20: note = C9Orf72 GTCN PAM targeting sequence
  source 1..20: mol_type = other RNA
tactgatgggagtatcttgt

SEQ ID NO: 14487 - RNA, 20 nt, synthetic construct
  misc_feature 1..20: note = C9Orf72 GTCN PAM targeting sequence
  source 1..20: mol_type = other RNA
ttctttttcttttctgtcat

SEQ ID NO: 14488 - RNA, 20 nt, synthetic construct
  misc_feature 1..20: note = C9Orf72 GTCN PAM targeting sequence
  source 1..20: mol_type = other RNA
cagtttactttcctcccagt

SEQ ID NO: 14489 - RNA, 20 nt, synthetic construct
  misc_feature 1..20: note = C9Orf72 GTCN PAM targeting sequence
  source 1..20: mol_type = other RNA
caggggctgatgcgttcttt

SEQ ID NO: 14490 - RNA, 20 nt, synthetic construct
  misc_feature 1..20: note = C9Orf72 GTCN PAM targeting sequence
  source 1..20: mol_type = other RNA
tccgaaatttattccaagga

SEQ ID NO: 14491 - RNA, 20 nt, synthetic construct
  misc_feature 1..20: note = C9Orf72 GTCN PAM targeting sequence
  source 1..20: mol_type = other RNA
tggcctaccccgctaaggaa

SEQ ID NO: 14492 - RNA, 20 nt, synthetic construct
  misc_feature 1..20: note = C9Orf72 GTCN PAM targeting sequence
  source 1..20: mol_type = other RNA
tttttgttgcttctgggttg

SEQ ID NO: 14493 - RNA, 20 nt, synthetic construct
  misc_feature 1..20: note = C9Orf72 GTCN PAM targeting sequence
  source 1..20: mol_type = other RNA
cattcctggcttagcagtct

SEQ ID NO: 14494 - RNA, 20 nt, synthetic construct
  misc_feature 1..20: note = C9Orf72 GTCN PAM targeting sequence
  source 1..20: mol_type = other RNA
cacttcttttatgttaaatg

SEQ ID NO: 14495 - RNA, 20 nt, synthetic construct
  misc_feature 1..20: note = C9Orf72 GTCN PAM targeting sequence
  source 1..20: mol_type = other RNA
gtggataccagaagcttggc

SEQ ID NO: 14496 - RNA, 20 nt, synthetic construct
  misc_feature 1..20: note = C9Orf72 GTCN PAM targeting sequence
  source 1..20: mol_type = other RNA
gagtgggtacatagatcata

SEQ ID NO: 14497 - RNA, 20 nt, synthetic construct
  misc_feature 1..20: note = C9Orf72 GTCN PAM targeting sequence
  source 1..20: mol_type = other RNA
ctcttccaaggaagctcaat

SEQ ID NO: 14498 - RNA, 20 nt, synthetic construct
  misc_feature 1..20: note = C9Orf72 GTCN PAM targeting sequence
  source 1..20: mol_type = other RNA
actgcaaggctatggggtag

SEQ ID NO: 14499 - RNA, 20 nt, synthetic construct
  misc_feature 1..20: note = C9Orf72 GTCN PAM targeting sequence
  source 1..20: mol_type = other RNA
cagtcagcctcccctcagag

SEQ ID NO: 14500 - RNA, 20 nt, synthetic construct
  misc_feature 1..20: note = C9Orf72 GTCN PAM targeting sequence
  source 1..20: mol_type = other RNA
gcctcccctcagaggcaaga

SEQ ID NO: 14501 - RNA, 20 nt, synthetic construct
  misc_feature 1..20: note = C9Orf72 GTCN PAM targeting sequence
  source 1..20: mol_type = other RNA
tgcctctgaggggaggctga

SEQ ID NO: 14502 - RNA, 20 nt, synthetic construct
  misc_feature 1..20: note = C9Orf72 GTCN PAM targeting sequence
  source 1..20: mol_type = other RNA
ccagatggtgcccagcgagt

SEQ ID NO: 14503 - RNA, 20 nt, synthetic construct
  misc_feature 1..20: note = C9Orf72 GTCN PAM targeting sequence
  source 1..20: mol_type = other RNA
gggtccccagatggtgccca

SEQ ID NO: 14504 - RNA, 20 nt, synthetic construct
  misc_feature 1..20: note = C9Orf72 GTCN PAM targeting sequence
  source 1..20: mol_type = other RNA
gatgcttacacattgtgttc

SEQ ID NO: 14505 - RNA, 20 nt, synthetic construct
  misc_feature 1..20: note = C9Orf72 GTCN PAM targeting sequence
  source 1..20: mol_type = other RNA
cgagttcccctgtgggtgcg

SEQ ID NO: 14506 - RNA, 20 nt, synthetic construct
  misc_feature 1..20: note = C9Orf72 GTCN PAM targeting sequence
  source 1..20: mol_type = other RNA
cagagaacaagtggcttagg

SEQ ID NO: 14507 - RNA, 20 nt, synthetic construct
  misc_feature 1..20: note = C9Orf72 GTCN PAM targeting sequence
  source 1..20: mol_type = other RNA
tctgagtcctctttttctac

SEQ ID NO: 14508 - RNA, 20 nt, synthetic construct
  misc_feature 1..20: note = C9Orf72 GTCN PAM targeting sequence
  source 1..20: mol_type = other RNA
gagtcctctttttctacaat

SEQ ID NO: 14509 - RNA, 20 nt, synthetic construct
  misc_feature 1..20: note = C9Orf72 GTCN PAM targeting sequence
  source 1..20: mol_type = other RNA
tctttttctacaatgaagaa

SEQ ID NO: 14510 - RNA, 20 nt, synthetic construct
  misc_feature 1..20: note = C9Orf72 GTCN PAM targeting sequence
  source 1..20: mol_type = other RNA
cctttcttcattgtagaaaa

SEQ ID NO: 14511 - RNA, 20 nt, synthetic construct
  misc_feature 1..20: note = C9Orf72 GTCN PAM targeting sequence
  source 1..20: mol_type = other RNA
taaggcttcctcgttatttg

SEQ ID NO: 14512 - RNA, 20 nt, synthetic construct
  misc_feature 1..20: note = C9Orf72 GTCN PAM targeting sequence
  source 1..20: mol_type = other RNA
ccaaaaagagaacgaagatg

SEQ ID NO: 14513 - RNA, 20 nt, synthetic construct
  misc_feature 1..20: note = C9Orf72 GTCN PAM targeting sequence
  source 1..20: mol_type = other RNA
acaagtttccaagggcggga

SEQ ID NO: 14514 - RNA, 20 nt, synthetic construct
  misc_feature 1..20: note = C9Orf72 GTCN PAM targeting sequence
  source 1..20: mol_type = other RNA
agtggttggttccagaggat

SEQ ID NO: 14515 - RNA, 20 nt, synthetic construct
  misc_feature 1..20: note = C9Orf72 GTCN PAM targeting sequence
  source 1..20: mol_type = other RNA
cgaaagcagcaccttctcgg

SEQ ID NO: 14516 - RNA, 20 nt, synthetic construct
  misc_feature 1..20: note = C9Orf72 GTCN PAM targeting sequence
  source 1..20: mol_type = other RNA
ggctcctccactttcccagc

SEQ ID NO: 14517 - RNA, 20 nt, synthetic construct
  misc_feature 1..20: note = C9Orf72 GTCN PAM targeting sequence
  source 1..20: mol_type = other RNA
ccctccccggcccccacgcc

SEQ ID NO: 14518 - RNA, 20 nt, synthetic construct
  misc_feature 1..20: note = C9Orf72 GTCN PAM targeting sequence
  source 1..20: mol_type = other RNA
gctgcgtagagagatctctg

SEQ ID NO: 14519 - RNA, 20 nt, synthetic construct
  misc_feature 1..20: note = C9Orf72 GTCN PAM targeting sequence
  source 1..20: mol_type = other RNA
ggaaagagcgcgaggggggg

SEQ ID NO: 14520 - RNA, 20 nt, synthetic construct
  misc_feature 1..20: note = C9Orf72 GTCN PAM targeting sequence
  source 1..20: mol_type = other RNA
ctggtacttgccaggcacca

SEQ ID NO: 14521 - RNA, 20 nt, synthetic construct
  misc_feature 1..20: note = C9Orf72 GTCN PAM targeting sequence
  source 1..20: mol_type = other RNA
gcgctttaccctcccagcag

SEQ ID NO: 14522 - RNA, 20 nt, synthetic construct
  misc_feature 1..20: note = C9Orf72 GTCN PAM targeting sequence
  source 1..20: mol_type = other RNA
gaaggtgggaaggggcaatc

SEQ ID NO: 14523 - RNA, 20 nt, synthetic construct
  misc_feature 1..20: note = C9Orf72 GTCN PAM targeting sequence
  source 1..20: mol_type = other RNA
aacatctggaatcccagccc

SEQ ID NO: 14524 - RNA, 20 nt, synthetic construct
  misc_feature 1..20: note = C9Orf72 GTCN PAM targeting sequence
  source 1..20: mol_type = other RNA
gccccgggggcgacctggct

SEQ ID NO: 14525 - RNA, 20 nt, synthetic construct
  misc_feature 1..20: note = C9Orf72 GTCN PAM targeting sequence
  source 1..20: mol_type = other RNA
cccccggggctgacgatgcc

SEQ ID NO: 14526 - RNA, 20 nt, synthetic construct
  misc_feature 1..20: note = C9Orf72 GTCN PAM targeting sequence
  source 1..20: mol_type = other RNA
gccaggtcgcccccggggct

SEQ ID NO: 14527 - RNA, 20 nt, synthetic construct
  misc_feature 1..20: note = C9Orf72 GTCN PAM targeting sequence
  source 1..20: mol_type = other RNA
gcaccgtcagccaggtcgcc

SEQ ID NO: 14528 - RNA, 20 nt, synthetic construct
  misc_feature 1..20: note = C9Orf72 GTCN PAM targeting sequence
  source 1..20: mol_type = other RNA
cggcttggggcagcgtaggg

SEQ ID NO: 14529 - RNA, 20 nt, synthetic construct
  misc_feature 1..20: note = C9Orf72 GTCN PAM targeting sequence
  source 1..20: mol_type = other RNA
tgatcctgagggaggagtct

SEQ ID NO: 14530 - RNA, 20 nt, synthetic construct
  misc_feature 1..20: note = C9Orf72 GTCN PAM targeting sequence
  source 1..20: mol_type = other RNA
cccagcccaggcgcactttt

SEQ ID NO: 14531 - RNA, 20 nt, synthetic construct
  misc_feature 1..20: note = C9Orf72 GTCN PAM targeting sequence
  source 1..20: mol_type = other RNA
tcccgccacccacagcccaa

SEQ ID NO: 14532 - RNA, 20 nt, synthetic construct
  misc_feature 1..20: note = C9Orf72 GTCN PAM targeting sequence
  source 1..20: mol_type = other RNA
gcggctggggatgggctcgg

SEQ ID NO: 14533 - RNA, 20 nt, synthetic construct
  misc_feature 1..20: note = C9Orf72 GTCN PAM targeting sequence
  source 1..20: mol_type = other RNA
tgcaccccgaaagaaggacg

SEQ ID NO: 14534 - RNA, 20 nt, synthetic construct
  misc_feature 1..20: note = C9Orf72 GTCN PAM targeting sequence
  source 1..20: mol_type = other RNA
ttctttcggggtgcaagact

SEQ ID NO: 14535 - RNA, 20 nt, synthetic construct
  misc_feature 1..20: note = C9Orf72 GTCN PAM targeting sequence
  source 1..20: mol_type = other RNA
ttgatttgaaaagatataaa

SEQ ID NO: 14536 - RNA, 20 nt, synthetic construct
  misc_feature 1..20: note = C9Orf72 GTCN PAM targeting sequence
  source 1..20: mol_type = other RNA
cccactttccaccccgggat

SEQ ID NO: 14537 - RNA, 20 nt, synthetic construct
  misc_feature 1..20: note = C9Orf72 GTCN PAM targeting sequence
  source 1..20: mol_type = other RNA
gaagaggactccagccccgg

SEQ ID NO: 14538 - RNA, 20 nt, synthetic construct
  misc_feature 1..20: note = C9Orf72 GTCN PAM targeting sequence
  source 1..20: mol_type = other RNA
tcttcagacccctgccggcg

SEQ ID NO: 14539 - RNA, 20 nt, synthetic construct
  misc_feature 1..20: note = C9Orf72 GTCN PAM targeting sequence
  source 1..20: mol_type = other RNA
tctgcccgccggccacgggc

SEQ ID NO: 14540 - RNA, 20 nt, synthetic construct
  misc_feature 1..20: note = C9Orf72 GTCN PAM targeting sequence
  source 1..20: mol_type = other RNA
gccgcctcccgcaccttctt

SEQ ID NO: 14541 - RNA, 20 nt, synthetic construct
  misc_feature 1..20: note = C9Orf72 GTCN PAM targeting sequence
  source 1..20: mol_type = other RNA
gctcccttcgccgggtcagc

SEQ ID NO: 14542 - RNA, 20 nt, synthetic construct
  misc_feature 1..20: note = C9Orf72 GTCN PAM targeting sequence
  source 1..20: mol_type = other RNA
gctgcagccagcgcgaaaga

SEQ ID NO: 14543 - RNA, 20 nt, synthetic construct
  misc_feature 1..20: note = C9Orf72 GTCN PAM targeting sequence
  source 1..20: mol_type = other RNA
cttgccaatccacgcaaggg

SEQ ID NO: 14544 - RNA, 20 nt, synthetic construct
  misc_feature 1..20: note = C9Orf72 GTCN PAM targeting sequence
  source 1..20: mol_type = other RNA
cttgcgtggattggcaagcg

SEQ ID NO: 14545 - RNA, 20 nt, synthetic construct
  misc_feature 1..20: note = C9Orf72 GTCN PAM targeting sequence
  source 1..20: mol_type = other RNA
cggcgagccaaccggcggac

SEQ ID NO: 14546 - RNA, 20 nt, synthetic construct
  misc_feature 1..20: note = C9Orf72 GTCN PAM targeting sequence
  source 1..20: mol_type = other RNA
gccggttggctcgccgggac

SEQ ID NO: 14547 - RNA, 20 nt, synthetic construct
  misc_feature 1..20: note = C9Orf72 GTCN PAM targeting sequence
  source 1..20: mol_type = other RNA
ctccggagcagccccctcat

SEQ ID NO: 14548 - RNA, 20 nt, synthetic construct
  misc_feature 1..20: note = C9Orf72 GTCN PAM targeting sequence
  source 1..20: mol_type = other RNA
agccccggccggctgcgcgg

SEQ ID NO: 14549 - RNA, 20 nt, synthetic construct
  misc_feature 1..20: note = C9Orf72 GTCN PAM targeting sequence
  source 1..20: mol_type = other RNA
cgcggggacgccgagcgggg

SEQ ID NO: 14550 - RNA, 20 nt, synthetic construct
  misc_feature 1..20: note = C9Orf72 GTCN PAM targeting sequence
  source 1..20: mol_type = other RNA
ccgcgagacagtcgagcccc

SEQ ID NO: 14551 - RNA, 20 nt, synthetic construct
  misc_feature 1..20: note = C9Orf72 GTCN PAM targeting sequence
  source 1..20: mol_type = other RNA
ccgctcggcgtccccgcgag

SEQ ID NO: 14552 - RNA, 20 nt, synthetic construct
  misc_feature 1..20: note = C9Orf72 GTCN PAM targeting sequence
  source 1..20: mol_type = other RNA
tctttgggatcatcttccct

SEQ ID NO: 14553 - RNA, 20 nt, synthetic construct
  misc_feature 1..20: note = C9Orf72 GTCN PAM targeting sequence
  source 1..20: mol_type = other RNA
ttgggatcatcttccctccg

SEQ ID NO: 14554 - RNA, 20 nt, synthetic construct
  misc_feature 1..20: note = C9Orf72 GTCN PAM targeting sequence
  source 1..20: mol_type = other RNA
catctctttccggagggaag

SEQ ID NO: 14555 - RNA, 20 nt, synthetic construct
  misc_feature 1..20: note = C9Orf72 GTCN PAM targeting sequence
  source 1..20: mol_type = other RNA
tgtcccatctctttccggag

SEQ ID NO: 14556 - RNA, 20 nt, synthetic construct
  misc_feature 1..20: note = C9Orf72 GTCN PAM targeting sequence
  source 1..20: mol_type = other RNA
aagggggcttccagccttgc

SEQ ID NO: 14557 - RNA, 20 nt, synthetic construct
  misc_feature 1..20: note = C9Orf72 GTCN PAM targeting sequence
  source 1..20: mol_type = other RNA
tttctgcaaggctggaagcc

SEQ ID NO: 14558 - RNA, 20 nt, synthetic construct
  misc_feature 1..20: note = C9Orf72 GTCN PAM targeting sequence
  source 1..20: mol_type = other RNA
gatcagaaaggatgatctct

SEQ ID NO: 14559 - RNA, 20 nt, synthetic construct
  misc_feature 1..20: note = C9Orf72 GTCN PAM targeting sequence
  source 1..20: mol_type = other RNA
acaacggccacttccaaggc

SEQ ID NO: 14560 - RNA, 20 nt, synthetic construct
  misc_feature 1..20: note = C9Orf72 GTCN PAM targeting sequence
  source 1..20: mol_type = other RNA
ggcagttcatggtatttttc

SEQ ID NO: 14561 - RNA, 20 nt, synthetic construct
  misc_feature 1..20: note = C9Orf72 GTCN PAM targeting sequence
  source 1..20: mol_type = other RNA
tggatgaacctggattttaa

SEQ ID NO: 14562 - RNA, 20 nt, synthetic construct
  misc_feature 1..20: note = C9Orf72 GTCN PAM targeting sequence
  source 1..20: mol_type = other RNA
tggtctatctacaaccttaa

SEQ ID NO: 14563 - RNA, 20 nt, synthetic construct
  misc_feature 1..20: note = C9Orf72 GTCN PAM targeting sequence
  source 1..20: mol_type = other RNA
atctacaaccttaaagcctc

SEQ ID NO: 14564 - RNA, 20 nt, synthetic construct
  misc_feature 1..20: note = C9Orf72 GTCN PAM targeting sequence
  source 1..20: mol_type = other RNA
tttggtacagttcaatcaat

SEQ ID NO: 14565 - RNA, 20 nt, synthetic construct
  misc_feature 1..20: note = C9Orf72 GTCN PAM targeting sequence
  source 1..20: mol_type = other RNA
tgacttaatgatatcaaccc

SEQ ID NO: 14566 - RNA, 20 nt, synthetic construct
  misc_feature 1..20: note = C9Orf72 GTCN PAM targeting sequence
  source 1..20: mol_type = other RNA
tgactatttattaaatgttt

SEQ ID NO: 14567 - RNA, 20 nt, synthetic construct
  misc_feature 1..20: note = C9Orf72 GTCN PAM targeting sequence
  source 1..20: mol_type = other RNA
tttaatccagggttgatatc

SEQ ID NO: 14568 - RNA, 20 nt, synthetic construct
  misc_feature 1..20: note = C9Orf72 GTCN PAM targeting sequence
  source 1..20: mol_type = other RNA
cttttgtgtaatgtaaagat

SEQ ID NO: 14569 - RNA, 20 nt, synthetic construct
  misc_feature 1..20: note = C9Orf72 GTCN PAM targeting sequence
  source 1..20: mol_type = other RNA
tatattcacaatcggtatct

SEQ ID NO: 14570 - RNA, 20 nt, synthetic construct
  misc_feature 1..20: note = C9Orf72 GTCN PAM targeting sequence
  source 1..20: mol_type = other RNA
gacagacccatagcagctga

SEQ ID NO: 14571 - RNA, 20 nt, synthetic construct
  misc_feature 1..20: note = C9Orf72 GTCN PAM targeting sequence
  source 1..20: mol_type = other RNA
gactctggtgttcttcctct

SEQ ID NO: 14572 - RNA, 20 nt, synthetic construct
  misc_feature 1..20: note = C9Orf72 GTCN PAM targeting sequence
  source 1..20: mol_type = other RNA
gtctgactctggtgttcttc

SEQ ID NO: 14573 - RNA, 20 nt, synthetic construct
  misc_feature 1..20: note = C9Orf72 GTCN PAM targeting sequence
  source 1..20: mol_type = other RNA
aacctttctgaagctctgtt

SEQ ID NO: 14574 - RNA, 20 nt, synthetic construct
  misc_feature 1..20: note = C9Orf72 GTCN PAM targeting sequence
  source 1..20: mol_type = other RNA
ttcaatgaaggaatgcatac

SEQ ID NO: 14575 - RNA, 20 nt, synthetic construct
  misc_feature 1..20: note = C9Orf72 GTCN PAM targeting sequence
  source 1..20: mol_type = other RNA
catggtaagtgctccagggt

SEQ ID NO: 14576 - RNA, 20 nt, synthetic construct
  misc_feature 1..20: note = C9Orf72 GTCN PAM targeting sequence
  source 1..20: mol_type = other RNA
ccacctatcattgtttccag

SEQ ID NO: 14577 - RNA, 20 nt, synthetic construct
  misc_feature 1..20: note = C9Orf72 GTCN PAM targeting sequence
  source 1..20: mol_type = other RNA
gtggggtgataactgtatgc

SEQ ID NO: 14578 - RNA, 20 nt, synthetic construct
  misc_feature 1..20: note = C9Orf72 GTCN PAM targeting sequence
  source 1..20: mol_type = other RNA
cttaagatgttatctcctgg

SEQ ID NO: 14579 - RNA, 20 nt, synthetic construct
  misc_feature 1..20: note = C9Orf72 GTCN PAM targeting sequence
  source 1..20: mol_type = other RNA
gtacagattaatttccatca

SEQ ID NO: 14580 - RNA, 20 nt, synthetic construct
  misc_feature 1..20: note = C9Orf72 GTCN PAM targeting sequence
  source 1..20: mol_type = other RNA
ccatagcaacattgtaatag

SEQ ID NO: 14581 - RNA, 20 nt, synthetic construct
  misc_feature 1..20: note = C9Orf72 GTCN PAM targeting sequence
  source 1..20: mol_type = other RNA
attacaatgttgctatggtg

SEQ ID NO: 14582 - RNA, 20 nt, synthetic construct
  misc_feature 1..20: note = C9Orf72 GTCN PAM targeting sequence
  source 1..20: mol_type = other RNA
tctgtctattacaatgttgc

SEQ ID NO: 14583 - RNA, 20 nt, synthetic construct
  misc_feature 1..20: note = C9Orf72 GTCN PAM targeting sequence
  source 1..20: mol_type = other RNA
ttgacaaacttggacctaca

SEQ ID NO: 14584 - RNA, 20 nt, synthetic construct
  misc_feature 1..20: note = C9Orf72 GTCN PAM targeting sequence
  source 1..20: mol_type = other RNA
atgactatgcaaatgtgctt

SEQ ID NO: 14585 - RNA, 20 nt, synthetic construct
  misc_feature 1..20: note = C9Orf72 GTCN PAM targeting sequence
  source 1..20: mol_type = other RNA
aagtttgtcaatgactatgc

SEQ ID NO: 14586 - RNA, 20 nt, synthetic construct
  misc_feature 1..20: note = C9Orf72 GTCN PAM targeting sequence
  source 1..20: mol_type = other RNA
tattgctctgggcagcagtg

SEQ ID NO: 14587 - RNA, 20 nt, synthetic construct
  misc_feature 1..20: note = C9Orf72 GTCN PAM targeting sequence
  source 1..20: mol_type = other RNA
aagggctactcaaagtaaat

SEQ ID NO: 14588 - RNA, 20 nt, synthetic construct
  misc_feature 1..20: note = C9Orf72 GTCN PAM targeting sequence
  source 1..20: mol_type = other RNA
gactacccagttcattgtgc

SEQ ID NO: 14589 - RNA, 20 nt, synthetic construct
  misc_feature 1..20: note = C9Orf72 GTCN PAM targeting sequence
  source 1..20: mol_type = other RNA
gactcagccaaaatgaatag

SEQ ID NO: 14590 - RNA, 20 nt, synthetic construct
  misc_feature 1..20: note = C9Orf72 GTCN PAM targeting sequence
  source 1..20: mol_type = other RNA
gctgtttgttagtgaactgc

SEQ ID NO: 14591 - RNA, 20 nt, synthetic construct
  misc_feature 1..20: note = C9Orf72 GTCN PAM targeting sequence
  source 1..20: mol_type = other RNA
ctttcatcctaagcaatgtg

SEQ ID NO: 14592 - RNA, 20 nt, synthetic construct
  misc_feature 1..20: note = C9Orf72 GTCN PAM targeting sequence
  source 1..20: mol_type = other RNA
caggtatagagaaattgtct

SEQ ID NO: 14593 - RNA, 20 nt, synthetic construct
  misc_feature 1..20: note = C9Orf72 GTCN PAM targeting sequence
  source 1..20: mol_type = other RNA
caatgcttatgggagcttct

SEQ ID NO: 14594 - RNA, 20 nt, synthetic construct
  misc_feature 1..20: note = C9Orf72 GTCN PAM targeting sequence
  source 1..20: mol_type = other RNA
tcttatatatctatatgtga

SEQ ID NO: 14595 - RNA, 20 nt, synthetic construct
  misc_feature 1..20: note = C9Orf72 GTCN PAM targeting sequence
  source 1..20: mol_type = other RNA
ttataaatgttgagaagtat

SEQ ID NO: 14596 - RNA, 20 nt, synthetic construct
  misc_feature 1..20: note = C9Orf72 GTCN PAM targeting sequence
  source 1..20: mol_type = other RNA
atagtcgtttcctctgaaat

SEQ ID NO: 14597 - RNA, 20 nt, synthetic construct
  misc_feature 1..20: note = C9Orf72 GTCN PAM targeting sequence
  source 1..20: mol_type = other RNA
tttcctctgaaatgcacatt

SEQ ID NO: 14598 - RNA, 20 nt, synthetic construct
  misc_feature 1..20: note = C9Orf72 GTCN PAM targeting sequence
  source 1..20: mol_type = other RNA
gagttcaggagctgggaaga

SEQ ID NO: 14599 - RNA, 20 nt, synthetic construct
  misc_feature 1..20: note = C9Orf72 GTCN PAM targeting sequence
  source 1..20: mol_type = other RNA
tatgttcttcccagctcctg

SEQ ID NO: 14600 - RNA, 20 nt, synthetic construct
  misc_feature 1..20: note = C9Orf72 GTCN PAM targeting sequence
  source 1..20: mol_type = other RNA
ctgaaacaactttgaacact

SEQ ID NO: 14601 - RNA, 20 nt, synthetic construct
  misc_feature 1..20: note = C9Orf72 GTCN PAM targeting sequence
  source 1..20: mol_type = other RNA
tgtggaatcataatggacaa

SEQ ID NO: 14602 - RNA, 20 nt, synthetic construct
  misc_feature 1..20: note = C9Orf72 GTCN PAM targeting sequence
  source 1..20: mol_type = other RNA
attatgattccacatgacac

SEQ ID NO: 14603 - RNA, 20 nt, synthetic construct
  misc_feature 1..20: note = C9Orf72 GTCN PAM targeting sequence
  source 1..20: mol_type = other RNA
ataggaatagagtgagtgtt

SEQ ID NO: 14604 - RNA, 20 nt, synthetic construct
  misc_feature 1..20: note = C9Orf72 GTCN PAM targeting sequence
  source 1..20: mol_type = other RNA
cttttcaataattttttttt

SEQ ID NO: 14605 - RNA, 20 nt, synthetic construct
  misc_feature 1..20: note = C9Orf72 GTCN PAM targeting sequence
  source 1..20: mol_type = other RNA
ctataaacaaaacagattct

SEQ ID NO: 14606 - RNA, 20 nt, synthetic construct
  misc_feature 1..20: note = C9Orf72 GTCN PAM targeting sequence
  source 1..20: mol_type = other RNA
cattgcccaggttagagtgc

SEQ ID NO: 14607 - RNA, 20 nt, synthetic construct
  misc_feature 1..20: note = C9Orf72 GTCN PAM targeting sequence
  source 1..20: mol_type = other RNA
caaaaaaaaaaaaaaaaaat

SEQ ID NO: 14608 - RNA, 20 nt, synthetic construct
  misc_feature 1..20: note = C9Orf72 GTCN PAM targeting sequence
  source 1..20: mol_type = other RNA
cttattaaggatacaaacta

SEQ ID NO: 14609 - RNA, 20 nt, synthetic construct
  misc_feature 1..20: note = C9Orf72 GTCN PAM targeting sequence
  source 1..20: mol_type = other RNA
ggcttaacattagccaggtg

SEQ ID NO: 14610 - RNA, 20 nt, synthetic construct
  misc_feature 1..20: note = C9Orf72 GTCN PAM targeting sequence
  source 1..20: mol_type = other RNA
acttagatacgatccaaaaa

SEQ ID NO: 14611 - RNA, 20 nt, synthetic construct
  misc_feature 1..20: note = C9Orf72 GTCN PAM targeting sequence
  source 1..20: mol_type = other RNA
aaggtagtcatatctacaag

SEQ ID NO: 14612 - RNA, 20 nt, synthetic construct
  misc_feature 1..20: note = C9Orf72 GTCN PAM targeting sequence
  source 1..20: mol_type = other RNA
tatctacaagcccatagcct

SEQ ID NO: 14613 - RNA, 20 nt, synthetic construct
  misc_feature 1..20: note = C9Orf72 GTCN PAM targeting sequence
  source 1..20: mol_type = other RNA
aggctatgggcttgtagata

SEQ ID NO: 14614 - RNA, 20 nt, synthetic construct
  misc_feature 1..20: note = C9Orf72 GTCN PAM targeting sequence
  source 1..20: mol_type = other RNA
cactgtaggattaatttggg

SEQ ID NO: 14615 - RNA, 20 nt, synthetic construct
  misc_feature 1..20: note = C9Orf72 GTCN PAM targeting sequence
  source 1..20: mol_type = other RNA
gatttctccacttgtgaaag

SEQ ID NO: 14616 - RNA, 20 nt, synthetic construct
  misc_feature 1..20: note = C9Orf72 GTCN PAM targeting sequence
  source 1..20: mol_type = other RNA
cttctctatctttctatgcc

SEQ ID NO: 14617 - RNA, 20 nt, synthetic construct
  misc_feature 1..20: note = C9Orf72 GTCN PAM targeting sequence
  source 1..20: mol_type = other RNA
ctagtctcttctctatcttt

SEQ ID NO: 14618 - RNA, 20 nt, synthetic construct
  misc_feature 1..20: note = C9Orf72 GTCN PAM targeting sequence
  source 1..20: mol_type = other RNA
ctttgagatcttcattattt

SEQ ID NO: 14619 - RNA, 20 nt, synthetic construct
  misc_feature 1..20: note = C9Orf72 GTCN PAM targeting sequence
  source 1..20: mol_type = other RNA
ttaattcccaactgccttgc

SEQ ID NO: 14620 - RNA, 20 nt, synthetic construct
  misc_feature 1..20: note = C9Orf72 GTCN PAM targeting sequence
  source 1..20: mol_type = other RNA
ataggaaagaaatgaaggaa

SEQ ID NO: 14621 - RNA, 20 nt, synthetic construct
  misc_feature 1..20: note = C9Orf72 GTCN PAM targeting sequence
  source 1..20: mol_type = other RNA
ggcagtagaaaagtttactt

SEQ ID NO: 14622 - RNA, 20 nt, synthetic construct
  misc_feature 1..20: note = C9Orf72 GTCN PAM targeting sequence
  source 1..20: mol_type = other RNA
ctttccttaattatgatgta

(The sequence listing continues in the following parts.)

1. A system comprising a CasX variant protein and a guide nucleic acid (gNA), wherein the CasX variant protein comprises a sequence having at least 70% sequence identity to SEQ ID NO: 138 and exhibits one or more improved characteristics relative to a CasX reference protein of any one of SEQ ID NOS: 1-3, wherein the CasX variant protein is capable of forming a ribonuclear protein complex (RNP) with the qNA, and wherein the gNA comprises a targeting sequence complementary to a target nucleic acid sequence comprising a chromosome 9 open reading frame 72 (C9orf72) gene.

2. The system of claim 1, wherein the C9orf72 gene comprises one or more mutations, or wherein the C9orf72 gene mutation comprises more than 30, more than 100, more than 500, more than 700, more than 1000, or more than 1600 copies of a hexanucleotide repeat sequence GGGGCC in a hexanucleotide repeat sequence expansion (HRS).

3-10. (canceled)

11. The system of claim 1, wherein:
(a) the qNA is a single-molecule guide RNA (gRNA) comprising a scaffold sequence and a targeting sequence, and wherein the scaffold sequence comprises a scaffold stem loop sequence of CCAGCGACUAUGUCGUAGUGG (SEQ ID NO: 32) or a sequence with at least 1, 2, 3, 4, or 5 mismatches thereto;
(b) the targeting sequence of the gNA comprises a sequence selected from the group consisting of SEQ ID NOS: 309-343, 363-2100 and 2295-21835, or a sequence having at least about 65%, at least about 75%, at least about 85%, or at least about 95% identity thereto;
(c) the qNA has a scaffold comprising a sequence having at least 70% sequence identity to the sequence of SEQ ID NO: 2238; and/or
(d) wherein the qNA is chemically modified.

12-27. (canceled)

28. The system of claim 1, further comprising a second gNA, wherein the second gNA has a targeting sequence complementary to a different or overlapping portion of the target nucleic acid sequence compared to the targeting sequence of the gNA.

29. The system of claim 28, wherein the qNA is complementary to a sequence that is 5′ to the HRS and the targeting sequence of the second gNA is complementary to a sequence that is 5′ or 3′ to the HRS.

30-40. (canceled)

41. The system of claim 1, wherein the CasX variant protein further comprises one or more nuclear localization signals (NLS), wherein the one or more NLS are selected from the group of sequences consisting of PKKKRKV (SEQ ID NO: 165), KRPAATKKAGQAKKKK (SEQ ID NO: 166), PAAKRVKLD (SEQ ID NO: 167), RQRRNELKRSP (SEQ ID NO: 168), NQSSNFGPMKGGNFGGRSSGPYGGGGQYFAKPRNQGGY (SEQ ID NO: 169), RMRIZFKNKGKDTAELRRRRVEVSVELRKAKKDEQILKRRNV (SEQ ID NO: 170), VSRKRPRP (SEQ ID NO: 171), PPKKARED (SEQ ID NO: 172), PQPKKKPL (SEQ ID NO: 173), SALIKKKKKMAP (SEQ ID NO: 174), DRLRR (SEQ ID NO: 175), PKQKKRK (SEQ ID NO: 176), RKLKKKIKKL (SEQ ID NO: 177), REKKKFLKRR (SEQ ID NO:178) KRKGDEVDGVDEVAKKK SKK (SEQ ID NO: 179), RKCLQAGMNLEARKTKK (SEQ ID NO: 180), PRPRKIPR (SEQ ID NO: 181), PPRKKRTVV (SEQ ID NO: 182), NLSKKKKRKREK (SEQ ID NO: 183), RRPSRPFRKP (SEQ ID NO: 184), KRPRSPSS (SEQ ID NO: 185), KRGINDRNFWRGENERKTR (SEQ ID NO: 186), PRPPKMARYDN (SEQ ID NO: 187), KRSFSKAF (SEQ ID NO: 188), KLKIKRPVK (SEQ ID NO: 189), PKTRRRPRRS QRKRPPT (SEQ ID NO: 191), RRKKRRPRRKKRR (SEQ ID NO: 194), PKKKSRKPKKKSRK (SEQ ID NO: 195), HKKKHPDASVNFSEFSK (SEQ ID NO: 196), QRPGPYDRPQRPGPYDRP (SEQ ID NO: 197), LSPSLSPLLSPSLSPL (SEQ ID NO: 198), RGKGGKGLGKGGAKRHRK (SEQ ID NO: 199), PKRGRGRPKRGRGR (SEQ ID NO: 200), MSRRRKANPTKLSENAKKLAKEVEN (SEQ ID NO: 192), PKKKRKVPPPPAAKRVKLD (SEQ ID NO: 190), PKKKRKVPPPPKKKRKV (SEQ ID NO: 201), PAKRARRGYKC (SEQ ID NO: 202), KLGPRKATGRW (SEQ ID NO: 203), and PRRKREE (SEQ ID NO: 204), and wherein:
(i) the one or more NLS are at or near a C-terminus of the CasX variant protein,
(ii) the one or more NLS are at or near a N-terminus of the CasX variant protein, and/or
(iii) the CasX variant protein comprises at least two NLS that are at or near the N-terminus and the C-terminus of the CasX variant protein.

42-45. (canceled)

46. The system of claim 1, wherein the Cas X variant protein is capable of forming a ribonuclear protein complex (RNP) with the gNA.

47. The system of claim 46, wherein the CasX variant protein and the gNA exhibit at least one or more improved characteristics as compared to the reference CasX protein of any one of SEQ ID NOS: 1-3 and a reference gNA of any one of SEQ ID NOS: 4-16, and
wherein the improved characteristic is selected from the group consisting of improved folding of the CasX variant protein, improved binding affinity to the qNA, improved binding affinity to a target DNA, improved ability to utilize a greater spectrum of one or more protospacer adjacent motif (PAM) sequences including ATC, CTC, GTC or TTC in the editing of target DNA, improved unwinding of the target DNA, increased editing activity, improved editing efficiency, improved editing specificity, increased nuclease activity, increased target strand loading for double strand cleavage, decreased target strand loading for single strand nicking, decreased off-target cleavage, improved binding of non-target DNA strand, improved protein stability, improved protein solubility, improved protein:gNA RNP stability, improved protein:gNA complex solubility, improved protein yield, improved protein expression, and improved fusion characteristics, and
wherein the improved characteristic of the RNP of the CasX variant protein is at least 1.1 to 100,000-fold improved relative to the reference CasX protein of any one of SEQ ID NOS: 1-3 and the reference gRNA comprising any one of SEQ ID NOS: 4-16.

48-51. (canceled)

52. The system of claim 47, wherein;
(a) the RNP comprising the CasX variant protein and the gNA exhibits greater editing efficiency and/or binding of a target sequence in the target DNA when any one of the PAM sequences TTC, ATC, GTC or CTC is located 1 nucleotide 5′ to the non-target strand sequence having identity with the targeting sequence of the gNA in a cellular assay system compared to the editing efficiency and/or binding of an RNP comprising a reference CasX protein and a reference gNA in a comparable assay system, and
(i) the PAM sequence is TTC and the targeting sequence of the qNA comprises a sequence selected from the group consisting of SEQ ID NOs: 5427-12893,
(ii) the PAM sequence is ATC and the targeting sequence of the qNA comprises a sequence selected from the group consisting of SEQ ID NOs: 363-2100 and 2295-5426,
(iii) the PAM sequence is CTC and the targeting sequence of the qNA comprises a sequence selected from the group consisting of SEQ ID NOS: 16203-21835,
(iv) the PAM sequence is GTC and the targeting sequence of the qNA comprises a sequence selected from the group consisting of SEQ ID NOS: 12894-16202; and/or
(b) the RNP has at least a 5%, at least a 10%, at least a 15%, or at least a 20% higher percentage of cleavage-competent RNP compared to an RNP of the reference CasX protein of any one of SEQ ID NOS: 1-3 and the reference qNA comprising any one of SEQ ID NOS: 4-16, or the RNP has at least a 2-fold, at least 5-fold, or at least a 10-fold increased cleavage rate in an in vitro assay compared to a RNP of the reference CasX protein of any one of SEQ ID NOS: 1-3.

53-64. (canceled)

65. The system of claim 1, wherein the CasX variant protein comprises a nuclease domain having double-stranded cleavage activity.

66-78. (canceled)

79. A nucleic acid comprising a sequence encoding:
(a) a gNA comprising a targeting sequence complementary to a target nucleic acid sequence comprising a chromosome 9 open reading frame 72 (C9orf72) gene; and
(b) a CasX variant protein comprising a sequence having at least 70% sequence identity to SEQ ID NO: 138 and exhibits one or more improved characteristics relative to a CasX reference protein of any one of SEQ ID NOS: 1-3, wherein the CasX variant protein is capable of forming a ribonuclear protein complex (RNP) with the gRNA, and wherein the CasX variant protein further comprises one or more nuclear localization signals (NLS).

80. (canceled)

81. A vector comprising the nucleic acid of claim 79, wherein the vector is selected from the group consisting of a retroviral vector, a lentiviral vector, an adenoviral vector, an adeno-associated viral (AAV) vector, a herpes simplex virus (HSV) vector, a virus-like particle (VLP), a plasmid, a minicircle, a nanoplasmid, and an RNA vector.

82-83. (canceled)

84. The vector of claim 81, wherein the vector is an AAV vector selected from the group consisting of AAV1, AAV2, AAV3, AAV4, AAV5, AAV6, AAV7, AAV8, AAV9, AAV10, AAV11, AAV12, AAV44.9, AAV-Rh74, and AAVRh10.

85-92. (canceled)

93. A host cell comprising the vector of claim 81, wherein the host cell is selected from the group consisting of BHK, HEK293, HEK293T, NS0, SP2/0, YO myeloma cells, P3X63 mouse myeloma cells, PER, PER.C6, NIH3T3, COS, HeLa, CHO, and yeast cells.

94. (canceled)

95. A method of modifying a chromosome 9 open reading frame 72 (C9orf72) gene target nucleic acid sequence in a population of cells, the method comprising the steps of,
introducing into the population of cells:
a. the system of claim 1;
b. the nucleic acid of claim 79;
c. the vector of claim 81; or
d. a combination thereof; and
modifying the C9orf72 gene target nucleic acid sequence in the population of cells targeted by the gNA and the CasX variant protein, wherein the modifying comprises:
(i) introducing a double-stranded break in the C9orf72 target nucleic acid sequence; and/or
(ii) introducing an insertion, deletion, substitution, duplication, or inversion of one or more nucleotides in the C9orf72 target nucleic acid sequence.

96-111. (canceled)

112. The method of claim 95, wherein the cell is a eukaryotic cell selected from the group consisting of a rodent cell, a mouse cell, a rat cell, a pig cell, a primate cell, and a non-human primate cell.

113-114. (canceled)

115. The method of claim 112, wherein the population of cells is selected from the group consisting of Purkinje cell, frontal cortex neuron, motor cortex neuron, hippocampus neuron, cerebellum neuron, upper motor neuron, spinal cord neuron, spinal cord motor neuron, glial cell, and astrocytes.

116-146. (canceled)

147. A population of cells modified by:
a. the system of claim 1;
b. the nucleic acid of claim 79;
c. the vector of claim 81; or
d. a combination thereof,
wherein the population of cells once modified include at least one of the following characteristics relative to a population of unmodified cells:
(i) at least 10%, at least about 20%, at least about 30%, at least about 40%, at least about 50%, at least about 60%, at least about 70%, at least about 80%, or at least about 90% do not express a detectable level of dipeptide repeat protein (DPR),
(ii) expression of a functional C9orf72 protein is increased by at least about 10%, at least about 20%, at least about 30%, at least about 40%, at least about 50%, at least about 60%, at least about 70%, at least about 80%, or at least about 90%, and/or
(iii) mutation of the C9orf72 gene is corrected, resulting in expression of a functional C9orf72 protein,
wherein cells of the population of cells are selected from the group consisting of Purkinje cell, frontal cortex neuron, motor cortex neuron, hippocampus neuron, cerebellum neuron, upper motor neuron, spinal cord neuron, spinal cord motor neuron, qlial cell, and astrocytes.

148-192. (canceled)

193. A composition for use in a method of treating a chromosome 9 open reading frame 72 (C9orf721-related disorder in a subject in need thereof, the method comprising the step of:
modifying a C9orf72 gene in cells of the subject by contacting said cells with a therapeutically effective dose of:
a. the system of claim 1;
b. the nucleic acid of claim 79;
c. the vector of claim 81; or
d. combinations thereof,
wherein the C9orf72 gene of the cells targeted by the gNA is modified by the CasX variant protein.
